United States Patent Application Publication US 2005/0244851 A1 - sequence listing, part 110

SEQ ID NO: 4289792 - DNA, 25 bp, Homo sapien
tctgtgtctcaaccagaactggagt

SEQ ID NO: 4289793 - DNA, 25 bp, Homo sapien
ccttctatagaagtaccttgccttg

SEQ ID NO: 4289794 - DNA, 25 bp, Homo sapien
attgctccatctgtaagggcgcacc

SEQ ID NO: 4289795 - DNA, 25 bp, Homo sapien
tctgtaagggcgcacccttctatag

SEQ ID NO: 4289796 - DNA, 25 bp, Homo sapien
gctccatctgtaagggcgcaccctt

SEQ ID NO: 4289797 - DNA, 25 bp, Homo sapien
tctgctcctaaggacaaatgggttg

SEQ ID NO: 4289798 - DNA, 25 bp, Homo sapien
ctctgctcctaaggacaaatgggtt

SEQ ID NO: 4289799 - DNA, 25 bp, Homo sapien
actctgctcctaaggacaaatgggt

SEQ ID NO: 4289800 - DNA, 25 bp, Homo sapien
ttccttcgtcttttggggctgcttc

SEQ ID NO: 4289801 - DNA, 25 bp, Homo sapien
tccttctgctgaggctcatcttctt

SEQ ID NO: 4289802 - DNA, 25 bp, Homo sapien
ctccttctgctgaggctcatcttct

SEQ ID NO: 4289803 - DNA, 25 bp, Homo sapien
tggtcacatatggattgattgtaga

SEQ ID NO: 4289804 - DNA, 25 bp, Homo sapien
cacatatggattgattgtagatggt

SEQ ID NO: 4289805 - DNA, 25 bp, Homo sapien
gatggttcaaatcccctcacatctg

SEQ ID NO: 4289806 - DNA, 25 bp, Homo sapien
tgtagatggttcaaatcccctcaca

SEQ ID NO: 4289807 - DNA, 25 bp, Homo sapien
ccagccatagcataggcaggaaggg

SEQ ID NO: 4289808 - DNA, 25 bp, Homo sapien
ccatagcataggcaggaagggtgga

SEQ ID NO: 4289809 - DNA, 25 bp, Homo sapien
cagccatagcataggcaggaagggt

SEQ ID NO: 4289810 - DNA, 25 bp, Homo sapien
atagcataggcaggaagggtggagg

SEQ ID NO: 4289811 - DNA, 25 bp, Homo sapien
cagaggttctcagtaggccccttga

SEQ ID NO: 4289812 - DNA, 25 bp, Homo sapien
agaggttctcagtaggccccttgaa

SEQ ID NO: 4289813 - DNA, 25 bp, Homo sapien
gaggttctcagtaggccccttgaag

SEQ ID NO: 4289814 - DNA, 25 bp, Homo sapien
aggttctcagtaggccccttgaagg

SEQ ID NO: 4289815 - DNA, 25 bp, Homo sapien
aggacttaaataaggaggataagag

SEQ ID NO: 4289816 - DNA, 25 bp, Homo sapien
aagaggaggcttttaatacaaagag

SEQ ID NO: 4289817 - DNA, 25 bp, Homo sapien
ggcatagcctgggaaggacttaaat

SEQ ID NO: 4289818 - DNA, 25 bp, Homo sapien
aatacaaagagggtggggcatagcc

SEQ ID NO: 4289819 - DNA, 25 bp, Homo sapien
tcaggaaccagcagctgggggtaca

SEQ ID NO: 4289820 - DNA, 25 bp, Homo sapien
ggaaccagcagctgggggtacaggg

SEQ ID NO: 4289821 - DNA, 25 bp, Homo sapien
caggaaccagcagctgggggtacag

SEQ ID NO: 4289822 - DNA, 25 bp, Homo sapien
aaccagcagctgggggtacagggac

SEQ ID NO: 4289823 - DNA, 25 bp, Homo sapien
aattccgagcctctttgattctcca

SEQ ID NO: 4289824 - DNA, 25 bp, Homo sapien
tgcagacagaattccgagcctcttt

SEQ ID NO: 4289825 - DNA, 25 bp, Homo sapien
gagcctctttgattctccaccatcg

SEQ ID NO: 4289826 - DNA, 25 bp, Homo sapien
gacagaattccgagcctctttgatt

SEQ ID NO: 4289827 - DNA, 25 bp, Homo sapien
ccatttccaccgagctgtccagcct

SEQ ID NO: 4289828 - DNA, 25 bp, Homo sapien
acgcagctgagactcggcccagtct

SEQ ID NO: 4289829 - DNA, 25 bp, Homo sapien
gagtgcaagacgcagctgagactcg

SEQ ID NO: 4289830 - DNA, 25 bp, Homo sapien
tccaccccatttccaccgagctgtc

SEQ ID NO: 4289831 - DNA, 25 bp, Homo sapien
ctgaaccctcgagggccacacatac

SEQ ID NO: 4289832 - DNA, 25 bp, Homo sapien
acttgaggctgttgataaaacccac

SEQ ID NO: 4289833 - DNA, 25 bp, Homo sapien
gagaacttgaggctgttgataaaac

SEQ ID NO: 4289834 - DNA, 25 bp, Homo sapien
cagagctggagaacttgaggctgtt

SEQ ID NO: 4289835 - DNA, 25 bp, Homo sapien
gctggagaacttgaggctgttgata

SEQ ID NO: 4289836 - DNA, 25 bp, Homo sapien
caacacggaaagacattagaacgcc

SEQ ID NO: 4289837 - DNA, 25 bp, Homo sapien
ctagcagtgagtttgtgaggatgaa

SEQ ID NO: 4289838 - DNA, 25 bp, Homo sapien
gccttatcaggcctgggttaaatcc

SEQ ID NO: 4289839 - DNA, 25 bp, Homo sapien
gcagtgtacacccagtatggcctga

SEQ ID NO: 4289840 - DNA, 25 bp, Homo sapien
gtgaggtccacaccctctagcctgg

SEQ ID NO: 4289841 - DNA, 25 bp, Homo sapien
agtacagaattcatcacagggccag

SEQ ID NO: 4289842 - DNA, 25 bp, Homo sapien
acagtgaggtccacaccctctagcc

SEQ ID NO: 4289843 - DNA, 25 bp, Homo sapien
cagtacagaattcatcacagggcca

SEQ ID NO: 4289844 - DNA, 25 bp, Homo sapien
gaaggtcaagctgccggaagccttc

SEQ ID NO: 4289845 - DNA, 25 bp, Homo sapien
ctgccaaagccgcacacaggagctg

SEQ ID NO: 4289846 - DNA, 25 bp, Homo sapien
acactgccaaagccgcacacaggag

SEQ ID NO: 4289847 - DNA, 25 bp, Homo sapien
cagagaaggtcaagctgccggaagc

SEQ ID NO: 4289848 - DNA, 25 bp, Homo sapien
caccgacgatatccagaagggctgc

SEQ ID NO: 4289849 - DNA, 25 bp, Homo sapien
agcttcacgctgcagggcaagtggt

SEQ ID NO: 4289850 - DNA, 25 bp, Homo sapien
cttcttggagagaccccacaaggcc

SEQ ID NO: 4289851 - DNA, 25 bp, Homo sapien
aggagggctgccaccgacgatatcc

SEQ ID NO: 4289852 - DNA, 25 bp, Homo sapien
tcgtccgcgccggacaccatgtgct

SEQ ID NO: 4289853 - DNA, 25 bp, Homo sapien
taggtggatgcagtcgatggagccc

SEQ ID NO: 4289854 - DNA, 25 bp, Homo sapien
cattgattaggtggatgcagtcgat

SEQ ID NO: 4289855 - DNA, 25 bp, Homo sapien
ccatgtgctcctcattgattaggtg

SEQ ID NO: 4289856 - DNA, 25 bp, Homo sapien
gaggagcgtggcccaagcccacccc

SEQ ID NO: 4289857 - DNA, 25 bp, Homo sapien
tgaggagcgtggcccaagcccaccc

SEQ ID NO: 4289858 - DNA, 25 bp, Homo sapien
ggagcgtggcccaagcccaccccca

SEQ ID NO: 4289859 - DNA, 25 bp, Homo sapien
ccagcccatgtagcccccactggca

SEQ ID NO: 4289860 - DNA, 25 bp, Homo sapien
gggatcttccacacacgtacagtcc

SEQ ID NO: 4289861 - DNA, 25 bp, Homo sapien
ggtggccatagaagacaagctggga

SEQ ID NO: 4289862 - DNA, 25 bp, Homo sapien
tcccggctcaaggcatccagtgcag

SEQ ID NO: 4289863 - DNA, 25 bp, Homo sapien
agccacagcgtcctggtgtccgaag

SEQ ID NO: 4289864 - DNA, 25 bp, Homo sapien
ctccacgtaggagttctctgccaca

SEQ ID NO: 4289865 - DNA, 25 bp, Homo sapien
ccacgtaggagttctctgccacatt

SEQ ID NO: 4289866 - DNA, 25 bp, Homo sapien
gcgtctccacgtaggagttctctgc

SEQ ID NO: 4289867 - DNA, 25 bp, Homo sapien
gtctccacgtaggagttctctgcca

SEQ ID NO: 4289868 - DNA, 25 bp, Homo sapien
ctggtgggtgcctctgcggaatgcc

SEQ ID NO: 4289869 - DNA, 25 bp, Homo sapien
tgggtgcctctgcggaatgccagac

SEQ ID NO: 4289870 - DNA, 25 bp, Homo sapien
cttcacggagcgatcgtgggatgtg

SEQ ID NO: 4289871 - DNA, 25 bp, Homo sapien
cggagcgatcgtgggatgtgctgta

SEQ ID NO: 4289872 - DNA, 25 bp, Homo sapien
tgtgcccactaaagatccactgaca

SEQ ID NO: 4289873 - DNA, 25 bp, Homo sapien
taaagatccactgacatagacccag

SEQ ID NO: 4289874 - DNA, 25 bp, Homo sapien
ctagcatgtgcccactaaagatcca

SEQ ID NO: 4289875 - DNA, 25 bp, Homo sapien
agatccactgacatagacccagctc

SEQ ID NO: 4289876 - DNA, 25 bp, Homo sapien
aatgagcttgctgcggtcaccagag

SEQ ID NO: 4289877 - DNA, 25 bp, Homo sapien
aggtgtacaagtgctggcagctctg

SEQ ID NO: 4289878 - DNA, 25 bp, Homo sapien
tgaaggtgtacaagtgctggcagct

SEQ ID NO: 4289879 - DNA, 25 bp, Homo sapien
gagaatgagcttgctgcggtcacca

SEQ ID NO: 4289880 - DNA, 25 bp, Homo sapien
tggctcgaggaatcacatgcagctt

SEQ ID NO: 4289881 - DNA, 25 bp, Homo sapien
gccatgcagaggacgtggctgctgt

SEQ ID NO: 4289882 - DNA, 25 bp, Homo sapien
tcggcacccttcttggctcgaggaa

SEQ ID NO: 4289883 - DNA, 25 bp, Homo sapien
tacttgccgtcggaggagatggcca

SEQ ID NO: 4289884 - DNA, 25 bp, Homo sapien
tgcagttgggggtgggggagaagct

SEQ ID NO: 4289885 - DNA, 25 bp, Homo sapien
gcagttgggggtgggggagaagcta

SEQ ID NO: 4289886 - DNA, 25 bp, Homo sapien
ctgcagttgggggtgggggagaagc

SEQ ID NO: 4289887 - DNA, 25 bp, Homo sapien
ctggtgcccccgtaaaacgcgaatg

SEQ ID NO: 4289888 - DNA, 25 bp, Homo sapien
acatgtgatagagagctggtgcccc

SEQ ID NO: 4289889 - DNA, 25 bp, Homo sapien
cccgtaaaacgcgaatgtcagctga

SEQ ID NO: 4289890 - DNA, 25 bp, Homo sapien
gagtcatcgggggtgacgaccaaac

SEQ ID NO: 4289891 - DNA, 25 bp, Homo sapien
ttttgccaccaacttctgcagcctg

SEQ ID NO: 4289892 - DNA, 25 bp, Homo sapien
ctcttttgccaccaacttctgcagc

SEQ ID NO: 4289893 - DNA, 25 bp, Homo sapien
ttctgcagcctgcccctctgctcaa

SEQ ID NO: 4289894 - DNA, 25 bp, Homo sapien
tctgcagcctgcccctctgctcaag

SEQ ID NO: 4289895 - DNA, 25 bp, Homo sapien
tcctcaaatgcacgggcctcagcct

SEQ ID NO: 4289896 - DNA, 25 bp, Homo sapien
ggtcctcctcaaatgcacgggcctc

SEQ ID NO: 4289897 - DNA, 25 bp, Homo sapien
tcctcctcaaatgcacgggcctcag

SEQ ID NO: 4289898 - DNA, 25 bp, Homo sapien
acatcctccttcaggcgccccgcca

SEQ ID NO: 4289899 - DNA, 25 bp, Homo sapien
gagctgctctaggtagagcttggcc

SEQ ID NO: 4289900 - DNA, 25 bp, Homo sapien
ggagctgctctaggtagagcttggc

SEQ ID NO: 4289901 - DNA, 25 bp, Homo sapien
cggagctgctctaggtagagcttgg

SEQ ID NO: 4289902 - DNA, 25 bp, Homo sapien
tagagcttggccaagcgcagcttct

SEQ ID NO: 4289903 - DNA, 25 bp, Homo sapien
ctcctcctcaggcttccttggagct

SEQ ID NO: 4289904 - DNA, 25 bp, Homo sapien
tcctcctcctcaggcttccttggag

SEQ ID NO: 4289905 - DNA, 25 bp, Homo sapien
cctcctcaggcttccttggagctag

SEQ ID NO: 4289906 - DNA, 25 bp, Homo sapien
ctcctcaggcttccttggagctagg

SEQ ID NO: 4289907 - DNA, 25 bp, Homo sapien
gactgtcatcaccacagcaccatcc

SEQ ID NO: 4289908 - DNA, 25 bp, Homo sapien
gtcatcaccacagcaccatccttta

SEQ ID NO: 4289909 - DNA, 25 bp, Homo sapien
caggactgtcatcaccacagcacca

SEQ ID NO: 4289910 - DNA, 25 bp, Homo sapien
tcatcaccacagcaccatcctttac

SEQ ID NO: 4289911 - DNA, 25 bp, Homo sapien
tggcctttactggtgaagttacggc

SEQ ID NO: 4289912 - DNA, 25 bp, Homo sapien
ctgtttggggattggcctttactgg

SEQ ID NO: 4289913 - DNA, 25 bp, Homo sapien
gaacaaggttccaagcgaaccttca

SEQ ID NO: 4289914 - DNA, 25 bp, Homo sapien
tccaagcgaaccttcactgtttggg

SEQ ID NO: 4289915 - DNA, 25 bp, Homo sapien
acactctcttcacccgcctgcctat

SEQ ID NO: 4289916 - DNA, 25 bp, Homo sapien
cccgcctgcctatctctgcacttcc

SEQ ID NO: 4289917 - DNA, 25 bp, Homo sapien
cccagtaattgtgaaattgcaggaa

SEQ ID NO: 4289918 - DNA, 25 bp, Homo sapien
agtgcctggcatgttaagagacggg

SEQ ID NO: 4289919 - DNA, 25 bp, Homo sapien
ctcattcatcttgccgccacccttg

SEQ ID NO: 4289920 - DNA, 25 bp, Homo sapien
attcatcttgccgccacccttggat

SEQ ID NO: 4289921 - DNA, 25 bp, Homo sapien
ttggatttgcccctgtcccccgcag

SEQ ID NO: 4289922 - DNA, 25 bp, Homo sapien
atcttgccgccacccttggatttgc

SEQ ID NO: 4289923 - DNA, 25 bp, Homo sapien
tacgagcagccgctgttgccgacat

SEQ ID NO: 4289924 - DNA, 25 bp, Homo sapien
ggctttccccgcttacgagcagccg

SEQ ID NO: 4289925 - DNA, 25 bp, Homo sapien
cagaggccggctttccccgcttacg

SEQ ID NO: 4289926 - DNA, 25 bp, Homo sapien
cgcttacgagcagccgctgttgccg

SEQ ID NO: 4289927 - DNA, 25 bp, Homo sapien
gcaagaccccgcgtattgataggct

SEQ ID NO: 4289928 - DNA, 25 bp, Homo sapien
cccgcgtattgataggcttccaccg

SEQ ID NO: 4289929 - DNA, 25 bp, Homo sapien
ggccgcagaactcacgtggcagctg

SEQ ID NO: 4289930 - DNA, 25 bp, Homo sapien
tgcccaccaggcgtgtagcagcggc

SEQ ID NO: 4289931 - DNA, 25 bp, Homo sapien
aggatgcacgcttgtagccccgcct

SEQ ID NO: 4289932 - DNA, 25 bp, Homo sapien
ctcctgaagttcctaggctcccgca

SEQ ID NO: 4289933 - DNA, 25 bp, Homo sapien
ccataggatgcacgcttgtagcccc

SEQ ID NO: 4289934 - DNA, 25 bp, Homo sapien
cctcctgaagttcctaggctcccgc

SEQ ID NO: 4289935 - DNA, 25 bp, Homo sapien
gatatgccagatcgagtgtccaccc

SEQ ID NO: 4289936 - DNA, 25 bp, Homo sapien
cactggtggccaaatagccgatgtc

SEQ ID NO: 4289937 - DNA, 25 bp, Homo sapien
ggctcgagtaggaagcccgcatctc

SEQ ID NO: 4289938 - DNA, 25 bp, Homo sapien
acttcgaagtcggagcaagagcctt

SEQ ID NO: 4289939 - DNA, 25 bp, Homo sapien
cagcaagggtgttcttgcaatggaa

SEQ ID NO: 4289940 - DNA, 25 bp, Homo sapien
cctgaatcatgtgagggagcaagcc

SEQ ID NO: 4289941 - DNA, 25 bp, Homo sapien
ggtccctctagagcagagacctgaa

SEQ ID NO: 4289942 - DNA, 25 bp, Homo sapien
caaagaaactggcttgatgggcgga

SEQ ID NO: 4289943 - DNA, 25 bp, Homo sapien
gtttttagcgggatccacttcagcc

SEQ ID NO: 4289944 - DNA, 25 bp, Homo sapien
tcagcccctgtgtagagagtggact

SEQ ID NO: 4289945 - DNA, 25 bp, Homo sapien
tacgtcagttaacaaccagtcagca

SEQ ID NO: 4289946 - DNA, 25 bp, Homo sapien
ccaaagatgagcaacagccggaagt

SEQ ID NO: 4289947 - DNA, 25 bp, Homo sapien
cctacggcggcatcttcgtggtggc

SEQ ID NO: 4289948 - DNA, 25 bp, Homo sapien
tggccgtgggccaatttgcagcctg

SEQ ID NO: 4289949 - DNA, 25 bp, Homo sapien
gactccgctcggactctctggatag

SEQ ID NO: 4289950 - DNA, 25 bp, Homo sapien
ggatagccgcctttccatcttgccg

SEQ ID NO: 4289951 - DNA, 25 bp, Homo sapien
aaaaactgtacagagtgtctgctgc

SEQ ID NO: 4289952 - DNA, 25 bp, Homo sapien
ctgccccatgccactcccccagcta

SEQ ID NO: 4289953 - DNA, 25 bp, Homo sapien
gaaaaaactgtacagagtgtctgct

SEQ ID NO: 4289954 - DNA, 25 bp, Homo sapien
aaactgtacagagtgtctgctgctg

SEQ ID NO: 4289955 - DNA, 25 bp, Homo sapien
tggcagtgccccctctttggggtgc

SEQ ID NO: 4289956 - DNA, 25 bp, Homo sapien
ctggcagtgccccctctttggggtg

SEQ ID NO: 4289957 - DNA, 25 bp, Homo sapien
caaaagggtatcagtggaagcagca

SEQ ID NO: 4289958 - DNA, 25 bp, Homo sapien
ttccagtcaaaagggtatcagtgga

SEQ ID NO: 4289959 - DNA, 25 bp, Homo sapien
cagtcaaaagggtatcagtggaagc

SEQ ID NO: 4289960 - DNA, 25 bp, Homo sapien
cattccagtcaaaagggtatcagtg

SEQ ID NO: 4289961 - DNA, 25 bp, Homo sapien
tctgagagaaagaactcccatagat

SEQ ID NO: 4289962 - DNA, 25 bp, Homo sapien
gggagtgcgtgagtgacacccgcca

SEQ ID NO: 4289963 - DNA, 25 bp, Homo sapien
catccatgcgtctgggcgttagcgg

SEQ ID NO: 4289964 - DNA, 25 bp, Homo sapien
ctcccacaaggatgcagtaggccag

SEQ ID NO: 4289965 - DNA, 25 bp, Homo sapien
ctgccatcttggcagtgtaggccgc

SEQ ID NO: 4289966 - DNA, 25 bp, Homo sapien
agccttcttgctcccattagctgct

SEQ ID NO: 4289967 - DNA, 25 bp, Homo sapien
tcttggcagtgtaggccgccaagcc

SEQ ID NO: 4289968 - DNA, 25 bp, Homo sapien
tcagccttcttgctcccattagctg

SEQ ID NO: 4289969 - DNA, 25 bp, Homo sapien
ggagatggcatagggtgtgcccagc

SEQ ID NO: 4289970 - DNA, 25 bp, Homo sapien
aagggcatgggcttgaggccgatga

SEQ ID NO: 4289971 - DNA, 25 bp, Homo sapien
gaagggcatgggcttgaggccgatg

SEQ ID NO: 4289972 - DNA, 25 bp, Homo sapien
gggcatgggcttgaggccgatgaag

SEQ ID NO: 4289973 - DNA, 25 bp, Homo sapien
caagcagatatagcacgaggtgcag

SEQ ID NO: 4289974 - DNA, 25 bp, Homo sapien
cagagggtgaattaggcaaagacca

SEQ ID NO: 4289975 - DNA, 25 bp, Homo sapien
gacacagcaatggagaatgagaggt

SEQ ID NO: 4289976 - DNA, 25 bp, Homo sapien
tcttgggcacatgagaaccgtgacc

SEQ ID NO: 4289977 - DNA, 25 bp, Homo sapien
cgatggagaccggagagccagtgat

SEQ ID NO: 4289978 - DNA, 25 bp, Homo sapien
ccgatcttgatatgtgcccctgaca

SEQ ID NO: 4289979 - DNA, 25 bp, Homo sapien
gccctctgcttggttcccgatcttg

SEQ ID NO: 4289980 - DNA, 25 bp, Homo sapien
tgacatctgccggatctcgctgatc

SEQ ID NO: 4289981 - DNA, 25 bp, Homo sapien
ctccagccatcccatcccctgctca

SEQ ID NO: 4289982 - DNA, 25 bp, Homo sapien
cctccagccatcccatcccctgctc

SEQ ID NO: 4289983 - DNA, 25 bp, Homo sapien
tccagccatcccatcccctgctcac

SEQ ID NO: 4289984 - DNA, 25 bp, Homo sapien
caagaactcctgtgagctggtctgt

SEQ ID NO: 4289985 - DNA, 25 bp, Homo sapien
ggaaccaagaactcctgtgagctgg

SEQ ID NO: 4289986 - DNA, 25 bp, Homo sapien
tcgttgggaaccaagaactcctgtg

SEQ ID NO: 4289987 - DNA, 25 bp, Homo sapien
gttgggaaccaagaactcctgtgag

SEQ ID NO: 4289988 - DNA, 25 bp, Homo sapien
tgtggcaaaggggaccgcatggctt

SEQ ID NO: 4289989 - DNA, 25 bp, Homo sapien
caaaggggaccgcatggcttgagag

SEQ ID NO: 4289990 - DNA, 25 bp, Homo sapien
accgcatggcttgagagctgctgga

SEQ ID NO: 4289991 - DNA, 25 bp, Homo sapien
ctgggtgtggcaaaggggaccgcat

SEQ ID NO: 4289992 - DNA, 25 bp, Homo sapien
ccccatactgaccctggacagagaa

SEQ ID NO: 4289993 - DNA, 25 bp, Homo sapien
ccatactgaccctggacagagaagc

SEQ ID NO: 4289994 - DNA, 25 bp, Homo sapien
cccatactgaccctggacagagaag

SEQ ID NO: 4289995 - DNA, 25 bp, Homo sapien
gccccatactgaccctggacagaga

SEQ ID NO: 4289996 - DNA, 25 bp, Homo sapien
agagagaagaacagtacctagggag

SEQ ID NO: 4289997 - DNA, 25 bp, Homo sapien
agaacagtacctagggagaggctcg

SEQ ID NO: 4289998 - DNA, 25 bp, Homo sapien
tggtaggggatagtggctcctttgg

SEQ ID NO: 4289999 - DNA, 25 bp, Homo sapien
agaggctcggatggtaggggatagt

SEQ ID NO: 4290000 - DNA, 25 bp, Homo sapien
tccaggataacagcgcagatctggc

SEQ ID NO: 4290001 - DNA, 25 bp, Homo sapien
taacagcgcagatctggcgcacaca

SEQ ID NO: 4290002 - DNA, 25 bp, Homo sapien
cgtaacagctcgctctgtggagttg

SEQ ID NO: 4290003 - DNA, 25 bp, Homo sapien
aggcaccccagataccgtaacagct

SEQ ID NO: 4290004 - DNA, 25 bp, Homo sapien
gccataagcccaacacccctcttac

SEQ ID NO: 4290005 - DNA, 25 bp, Homo sapien
tcccataacccagaaaagggctgcc

SEQ ID NO: 4290006 - DNA, 25 bp, Homo sapien
tggggaggacgccataagcccaaca

SEQ ID NO: 4290007 - DNA, 25 bp, Homo sapien
ccaggctcagagctctctaggtggg

SEQ ID NO: 4290008 - DNA, 25 bp, Homo sapien
cccggattccctgtgggtggtatat

SEQ ID NO: 4290009 - DNA, 25 bp, Homo sapien
ccttgccccggattccctgtgggtg

SEQ ID NO: 4290010 - DNA, 25 bp, Homo sapien
tgtgggtggtatatctcgcccctca

SEQ ID NO: 4290011 - DNA, 25 bp, Homo sapien
ttccctgtgggtggtatatctcgcc

SEQ ID NO: 4290012 - DNA, 25 bp, Homo sapien
cagggatgacaaggcgcagggtcac

SEQ ID NO: 4290013 - DNA, 25 bp, Homo sapien
ggcgcagggtcactggaggcctgga

SEQ ID NO: 4290014 - DNA, 25 bp, Homo sapien
caatcagtgagccacactgactggc

SEQ ID NO: 4290015 - DNA, 25 bp, Homo sapien
cttggtgccagccttcccaatcagt

SEQ ID NO: 4290016 - DNA, 25 bp, Homo sapien
tggtgatgcgttcagggcaggagcc

SEQ ID NO: 4290017 - DNA, 25 bp, Homo sapien
gagccctcggagatggtgatccggg

SEQ ID NO: 4290018 - DNA, 25 bp, Homo sapien
cagtttgaaagcaatcatggagact

SEQ ID NO: 4290019 - DNA, 25 bp, Homo sapien
cagccgctgtagacccggtgatggt

SEQ ID NO: 4290020 - DNA, 25 bp, Homo sapien
agatatagaatgagcgccgggcagc

SEQ ID NO: 4290021 - DNA, 25 bp, Homo sapien
ctgcagatatagaatgagcgccggg

SEQ ID NO: 4290022 - DNA, 25 bp, Homo sapien
gatatagaatgagcgccgggcagcg

SEQ ID NO: 4290023 - DNA, 25 bp, Homo sapien
gcagatatagaatgagcgccgggca

SEQ ID NO: 4290024 - DNA, 25 bp, Homo sapien
tctgggggactcactggtcagccca

SEQ ID NO: 4290025 - DNA, 25 bp, Homo sapien
ccagaaggagtggttcagagagaaa

SEQ ID NO: 4290026 - DNA, 25 bp, Homo sapien
aggctcaaaactgccaccctctggg

SEQ ID NO: 4290027 - DNA, 25 bp, Homo sapien
tgctcccttgccggaacttgtctgc

SEQ ID NO: 4290028 - DNA, 25 bp, Homo sapien
ggattcgctttacagtctcgccctt

SEQ ID NO: 4290029 - DNA, 25 bp, Homo sapien
cggattcgctttacagtctcgccct

SEQ ID NO: 4290030 - DNA, 25 bp, Homo sapien
tcccggattcgctttacagtctcgc

SEQ ID NO: 4290031 - DNA, 25 bp, Homo sapien
ctgctcccggattcgctttacagtc

SEQ ID NO: 4290032 - DNA, 25 bp, Homo sapien
gtacagagcagagctaggcacctac

SEQ ID NO: 4290033 - DNA, 25 bp, Homo sapien
tgtacagagcagagctaggcaccta

SEQ ID NO: 4290034 - DNA, 25 bp, Homo sapien
gctggagggggatgtacagagcaga

SEQ ID NO: 4290035 - DNA, 25 bp, Homo sapien
ggatgtacagagcagagctaggcac

SEQ ID NO: 4290036 - DNA, 25 bp, Homo sapien
catccgcagcgtgagggtgatgctg

SEQ ID NO: 4290037 - DNA, 25 bp, Homo sapien
gcatcagcatccgcagcgtgagggt

SEQ ID NO: 4290038 - DNA, 25 bp, Homo sapien
gcatccgcagcgtgagggtgatgct

SEQ ID NO: 4290039 - DNA, 25 bp, Homo sapien
tcagcatccgcagcgtgagggtgat

SEQ ID NO: 4290040 - DNA, 25 bp, Homo sapien
tgtgtccgcgctgcaacctggccgg

SEQ ID NO: 4290041 - DNA, 25 bp, Homo sapien
agcgacctgcgagtgtgtccgcgct

SEQ ID NO: 4290042 - DNA, 25 bp, Homo sapien
ctgcgagtgtgtccgcgctgcaacc

SEQ ID NO: 4290043 - DNA, 25 bp, Homo sapien
agtgtgtccgcgctgcaacctggcc

SEQ ID NO: 4290044 - DNA, 25 bp, Homo sapien
ccagagctgggctagtcaaactccc

SEQ ID NO: 4290045 - DNA, 25 bp, Homo sapien
gagactgcatggaccttgagcgcca

SEQ ID NO: 4290046 - DNA, 25 bp, Homo sapien
ccagggtgcttatgtgtgtctcacg

SEQ ID NO: 4290047 - DNA, 25 bp, Homo sapien
gtgtctcacgagctgtgtaagcctg

SEQ ID NO: 4290048 - DNA, 25 bp, Homo sapien
aggggggaattgaggcacactccca

SEQ ID NO: 4290049 - DNA, 25 bp, Homo sapien
cactgcctggtaaaggcttgaggca

SEQ ID NO: 4290050 - DNA, 25 bp, Homo sapien
cctcgggtgtggtcaggtcttgcca

SEQ ID NO: 4290051 - DNA, 25 bp, Homo sapien
agaggcactttcgtccagcagccag

SEQ ID NO: 4290052 - DNA, 25 bp, Homo sapien
tctgcacgttggtttccaatctctc

SEQ ID NO: 4290053 - DNA, 25 bp, Homo sapien
ctggcagttctgcacgttggtttcc

SEQ ID NO: 4290054 - DNA, 25 bp, Homo sapien
tgcacgttggtttccaatctctctt

SEQ ID NO: 4290055 - DNA, 25 bp, Homo sapien
cagttctgcacgttggtttccaatc

SEQ ID NO: 4290056 - DNA, 25 bp, Homo sapien
tttgagttctgccacagggactcca

SEQ ID NO: 4290057 - DNA, 25 bp, Homo sapien
tccatttgagttctgccacagggac

SEQ ID NO: 4290058 - DNA, 25 bp, Homo sapien
gatgagcagtggatgcagggactgt

SEQ ID NO: 4290059 - DNA, 25 bp, Homo sapien
ccttccatttgagttctgccacagg

SEQ ID NO: 4290060 - DNA, 25 bp, Homo sapien
gatgcctggagaggatcagtaacct

SEQ ID NO: 4290061 - DNA, 25 bp, Homo sapien
gcattgctagtgtgaggctatccaa

SEQ ID NO: 4290062 - DNA, 25 bp, Homo sapien
gacacagtgggactagcattgctag

SEQ ID NO: 4290063 - DNA, 25 bp, Homo sapien
gctggaactcagctaacatactggt

SEQ ID NO: 4290064 - DNA, 25 bp, Homo sapien
gaatgtctggaccagctagggcctg

SEQ ID NO: 4290065 - DNA, 25 bp, Homo sapien
caggccttcataagaactgccccag

SEQ ID NO: 4290066 - DNA, 25 bp, Homo sapien
gcctcccgggatagccaatcatcta

SEQ ID NO: 4290067 - DNA, 25 bp, Homo sapien
agcacgtctgcatcgagggctccta

SEQ ID NO: 4290068 - DNA, 25 bp, Homo sapien
gaaaggtcttaccaatcacaagagg

SEQ ID NO: 4290069 - DNA, 25 bp, Homo sapien
taggagctccctaggtatgctggtg

SEQ ID NO: 4290070 - DNA, 25 bp, Homo sapien
gccgttttaccaggactaggagctc

SEQ ID NO: 4290071 - DNA, 25 bp, Homo sapien
tacgtttcacagagtcgagttgggc

SEQ ID NO: 4290072 - DNA, 25 bp, Homo sapien
tgctggttcagcacgaacatgagca

SEQ ID NO: 4290073 - DNA, 25 bp, Homo sapien
ggagctcagctcctagggagttcat

SEQ ID NO: 4290074 - DNA, 25 bp, Homo sapien
gctgaagtgagtagcagagcctccc

SEQ ID NO: 4290075 - DNA, 25 bp, Homo sapien
tcctgaggcaatgagggtgacccag

SEQ ID NO: 4290076 - DNA, 25 bp, Homo sapien
tgttcctcgcagtctcacaaacctg

SEQ ID NO: 4290077 - DNA, 25 bp, Homo sapien
gtgcaggcctcagcggtgtgggaca

SEQ ID NO: 4290078 - DNA, 25 bp, Homo sapien
ctgcgaccccaaccgagggatctgg

SEQ ID NO: 4290079 - DNA, 25 bp, Homo sapien
gtgtgggacagagaacgtgttcctc

SEQ ID NO: 4290080 - DNA, 25 bp, Homo sapien
tgtgggtggggaggggaatccaatc

SEQ ID NO: 4290081 - DNA, 25 bp, Homo sapien
tgggtggggaggggaatccaatctc

SEQ ID NO: 4290082 - DNA, 25 bp, Homo sapien
tatgtgtgggtggggaggggaatcc

SEQ ID NO: 4290083 - DNA, 25 bp, Homo sapien
tgtgtgggtggggaggggaatccaa

SEQ ID NO: 4290084 - DNA, 25 bp, Homo sapien
atttcaccgacctccactctggctc

SEQ ID NO: 4290085 - DNA, 25 bp, Homo sapien
tatttcaccgacctccactctggct

SEQ ID NO: 4290086 - DNA, 25 bp, Homo sapien
tttatttcaccgacctccactctgg

SEQ ID NO: 4290087 - DNA, 25 bp, Homo sapien
ttatttcaccgacctccactctggc

SEQ ID NO: 4290088 - DNA, 25 bp, Homo sapien
tccaagtagctttcagggctggcca

SEQ ID NO: 4290089 - DNA, 25 bp, Homo sapien
tatgcagttgccctcaagcgaaggg

SEQ ID NO: 4290090 - DNA, 25 bp, Homo sapien
tagacagacgcacctgttgcatgtg

SEQ ID NO: 4290091 - DNA, 25 bp, Homo sapien
gccagtccagagttagatgtaccta

SEQ ID NO: 4290092 - DNA, 25 bp, Homo sapien
cttcatgatcagcacccggtggttg

SEQ ID NO: 4290093 - DNA, 25 bp, Homo sapien
ggtctccatatacaatcagagctgg

SEQ ID NO: 4290094 - DNA, 25 bp, Homo sapien
ggtgctcaaagctggtctgacccat

SEQ ID NO: 4290095 - DNA, 25 bp, Homo sapien
tcctctggtttgtccaggtaacagg

SEQ ID NO: 4290096 - DNA, 25 bp, Homo sapien
gccactggcacaaagcccgggagct

SEQ ID NO: 4290097 - DNA, 25 bp, Homo sapien
agggcagggagtacatgccactcag

SEQ ID NO: 4290098 - DNA, 25 bp, Homo sapien
gcagcattgattttgtcagtgcaga

SEQ ID NO: 4290099 - DNA, 25 bp, Homo sapien
cagtgatggactgatcacaaccggg

SEQ ID NO: 4290100 - DNA, 25 bp, Homo sapien
cagtgaatggcaaaacaagggagat

SEQ ID NO: 4290101 - DNA, 25 bp, Homo sapien
tctatcttatcgtgccaagcatgag

SEQ ID NO: 4290102 - DNA, 25 bp, Homo sapien
tctgaagcccaagaagtctgggtcc

SEQ ID NO: 4290103 - DNA, 25 bp, Homo sapien
cagcagtaagtgtcctggagagaat

SEQ ID NO: 4290104 - DNA, 25 bp, Homo sapien
tgtccctaatgagacctccccaaac

SEQ ID NO: 4290105 - DNA, 25 bp, Homo sapien
tgcccagaagcctgccccttaagta

SEQ ID NO: 4290106 - DNA, 25 bp, Homo sapien
tacatgttataggaacctggccctg

SEQ ID NO: 4290107 - DNA, 25 bp, Homo sapien
ggccctgtccctaatgagacctccc

SEQ ID NO: 4290108 - DNA, 25 bp, Homo sapien
gaagcgaataccatgcagcagcagt

SEQ ID NO: 4290109 - DNA, 25 bp, Homo sapien
tgcagtgtacccaggttctgccagg

SEQ ID NO: 4290110 - DNA, 25 bp, Homo sapien
gcagtacagagaagcgagcctgccc

SEQ ID NO: 4290111 - DNA, 25 bp, Homo sapien
ccaggtctcggaggagaagcgaata

SEQ ID NO: 4290112 - DNA, 25 bp, Homo sapien
cctgctgctgctgtgctggtgaagg

SEQ ID NO: 4290113 - DNA, 25 bp, Homo sapien
ctgctgctgctgtgctggtgaaggg

SEQ ID NO: 4290114 - DNA, 25 bp, Homo sapien
tgctgctgctgtgctggtgaagggc

SEQ ID NO: 4290115 - DNA, 25 bp, Homo sapien
gcctgctgctgctgtgctggtgaag

SEQ ID NO: 4290116 - DNA, 25 bp, Homo sapien
tcaaaaccacgatgatgaggggcca

SEQ ID NO: 4290117 - DNA, 25 bp, Homo sapien
ctgtggttcaaaaccacgatgatga

SEQ ID NO: 4290118 - DNA, 25 bp, Homo sapien
ttcaaaaccacgatgatgaggggcc

SEQ ID NO: 4290119 - DNA, 25 bp, Homo sapien
tggttcaaaaccacgatgatgaggg

SEQ ID NO: 4290120 - DNA, 25 bp, Homo sapien
cccagggtggcagtcccagaggagc

SEQ ID NO: 4290121 - DNA, 25 bp, Homo sapien
gccatttactttagtgtgtaacctg

SEQ ID NO: 4290122 - DNA, 25 bp, Homo sapien
ggaggacataggtgttatttctgcc

SEQ ID NO: 4290123 - DNA, 25 bp, Homo sapien
aggacataggtgttatttctgcctc

SEQ ID NO: 4290124 - DNA, 25 bp, Homo sapien
gtcaggaggacataggtgttatttc

SEQ ID NO: 4290125 - DNA, 25 bp, Homo sapien
ctgaaatatgggaacaataaagcca

SEQ ID NO: 4290126 - DNA, 25 bp, Homo sapien
acttcaagaattagcaatttaatta

SEQ ID NO: 4290127 - DNA, 25 bp, Homo sapien
tgggaacaataaagccaacttcaag

SEQ ID NO: 4290128 - DNA, 25 bp, Homo sapien
atatgggaacaataaagccaacttc

SEQ ID NO: 4290129 - DNA, 25 bp, Homo sapien
aggcgcgcttccacaccggaaagcc

SEQ ID NO: 4290130 - DNA, 25 bp, Homo sapien
accgaagcgcccagtgggaaaggcg

SEQ ID NO: 4290131 - DNA, 25 bp, Homo sapien
tctagaggcggaaaccgaagcgccc

SEQ ID NO: 4290132 - DNA, 25 bp, Homo sapien
atgcggggtgctcaacgcgctgcca

SEQ ID NO: 4290133 - DNA, 25 bp, Homo sapien
ttgcttccgcggactacggttctgg

SEQ ID NO: 4290134 - DNA, 25 bp, Homo sapien
gcggactacggttctggctcgctag

SEQ ID NO: 4290135 - DNA, 25 bp, Homo sapien
ccaacgcgttgacctcgcggtcagg

SEQ ID NO: 4290136 - DNA, 25 bp, Homo sapien
tgacctcgcggtcaggttgcttccg

SEQ ID NO: 4290137 - DNA, 25 bp, Homo sapien
agggaatggtggcaactcccaagga

SEQ ID NO: 4290138 - DNA, 25 bp, Homo sapien
cccagggatccgagaaaggaagact

SEQ ID NO: 4290139 - DNA, 25 bp, Homo sapien
cagggatccgagaaaggaagacttg

SEQ ID NO: 4290140 - DNA, 25 bp, Homo sapien
aagggagcaccgggagggaatggtg

SEQ ID NO: 4290141 - DNA, 25 bp, Homo sapien
ggaaagttccttcgggatcgcatcc

SEQ ID NO: 4290142 - DNA, 25 bp, Homo sapien
ttggtaacacatcgccaaccagggc

SEQ ID NO: 4290143 - DNA, 25 bp, Homo sapien
gagcctgtttcctgccagtagagcg

SEQ ID NO: 4290144 - DNA, 25 bp, Homo sapien
cagtagagcgggtcagatgttgcca

SEQ ID NO: 4290145 - DNA, 25 bp, Homo sapien
tgtctcaaggatcatgccggtccct

SEQ ID NO: 4290146 - DNA, 25 bp, Homo sapien
tatagtagctaaagcatccttgggc

SEQ ID NO: 4290147 - DNA, 25 bp, Homo sapien
gctactgaggacaattgatgggcca

SEQ ID NO: 4290148 - DNA, 25 bp, Homo sapien
cattcctctactggcggagtgctca

SEQ ID NO: 4290149 - DNA, 25 bp, Homo sapien
ggacgggatccggatctaatcctcc

SEQ ID NO: 4290150 - DNA, 25 bp, Homo sapien
taatctcgctgaggcccgaaccaga

SEQ ID NO: 4290151 - DNA, 25 bp, Homo sapien
cagcccggagctcgcaactcgcggg

SEQ ID NO: 4290152 - DNA, 25 bp, Homo sapien
gatctaatcctccagtaatctcgct

SEQ ID NO: 4290153 - DNA, 25 bp, Homo sapien
tactctatgagctgtccttgaacct

SEQ ID NO: 4290154 - DNA, 25 bp, Homo sapien
tccgtggcttgaaagccgggcaact

SEQ ID NO: 4290155 - DNA, 25 bp, Homo sapien
acagcccagcgcctgaaacagaatg

SEQ ID NO: 4290156 - DNA, 25 bp, Homo sapien
caagtctgggttcaaaccttgctca

SEQ ID NO: 4290157 - DNA, 25 bp, Homo sapien
cactctatgggaaatagggcaagat

SEQ ID NO: 4290158 - DNA, 25 bp, Homo sapien
cccactctatgggaaatagggcaag

SEQ ID NO: 4290159 - DNA, 25 bp, Homo sapien
ctatgggaaatagggcaagatgccc

SEQ ID NO: 4290160 - DNA, 25 bp, Homo sapien
acagcccactctatgggaaataggg

SEQ ID NO: 4290161 - DNA, 25 bp, Homo sapien
cgtggggtggacatatatacatgcc

SEQ ID NO: 4290162 - DNA, 25 bp, Homo sapien
ccgtggggtggacatatatacatgc

SEQ ID NO: 4290163 - DNA, 25 bp, Homo sapien
ctccgtggggtggacatatatacat

SEQ ID NO: 4290164 - DNA, 25 bp, Homo sapien
tccgtggggtggacatatatacatg

SEQ ID NO: 4290165 - DNA, 25 bp, Homo sapien
ttctgtcctcatgttggcagagata

SEQ ID NO: 4290166 - DNA, 25 bp, Homo sapien
tctgtcctcatgttggcagagatat

SEQ ID NO: 4290167 - DNA, 25 bp, Homo sapien
gccccatgcagatggtagcccaggg

SEQ ID NO: 4290168 - DNA, 25 bp, Homo sapien
ccagccccatgcagatggtagccca

SEQ ID NO: 4290169 - DNA, 25 bp, Homo sapien
cctgagctggaactgaagctggggc

SEQ ID NO: 4290170 - DNA, 25 bp, Homo sapien
ctggaactgaagctggggctgcagc

SEQ ID NO: 4290171 - DNA, 25 bp, Homo sapien
gtttgggagcctgagctggaactga

SEQ ID NO: 4290172 - DNA, 25 bp, Homo sapien
gagctggaactgaagctggggctgc

SEQ ID NO: 4290173 - DNA, 25 bp, Homo sapien
tggcaatacgggcacgagcacgctt

SEQ ID NO: 4290174 - DNA, 25 bp, Homo sapien
gccccttggcaatacgggcacgagc

SEQ ID NO: 4290175 - DNA, 25 bp, Homo sapien
ccttggcaatacgggcacgagcacg

SEQ ID NO: 4290176 - DNA, 25 bp, Homo sapien
gcaatacgggcacgagcacgcttcc

SEQ ID NO: 4290177 - DNA, 25 bp, Homo sapien
ttccagagaaagtgtaccaccaccc

SEQ ID NO: 4290178 - DNA, 25 bp, Homo sapien
tgattcactccacggaacagagagc

SEQ ID NO: 4290179 - DNA, 25 bp, Homo sapien
tgtggaaatacccaacctcttgaaa

SEQ ID NO: 4290180 - DNA, 25 bp, Homo sapien
agggagccaatacgccacctgggta

SEQ ID NO: 4290181 - DNA, 25 bp, Homo sapien
accctgaccagagggttacacttca

SEQ ID NO: 4290182 - DNA, 25 bp, Homo sapien
ccctgaccagagggttacacttcag

SEQ ID NO: 4290183 - DNA, 25 bp, Homo sapien
ccctcaggaggcaggttacaccctg

SEQ ID NO: 4290184 - DNA, 25 bp, Homo sapien
tcaggaggcaggttacaccctgacc

SEQ ID NO: 4290185 - DNA, 25 bp, Homo sapien
tacatgagaggccttgactgtgcac

SEQ ID NO: 4290186 - DNA, 25 bp, Homo sapien
acttccatgtgattcagtgcactca

SEQ ID NO: 4290187 - DNA, 25 bp, Homo sapien
gctttattatgggtctggtagggta

SEQ ID NO: 4290188 - DNA, 25 bp, Homo sapien
gaaccaagaaaagacacttccatgt

SEQ ID NO: 4290189 - DNA, 25 bp, Homo sapien
aagagattcgtatctttgtgatcgg

SEQ ID NO: 4290190 - DNA, 25 bp, Homo sapien
ccttaagagattcgtatctttgtga

SEQ ID NO: 4290191 - DNA, 25 bp, Homo sapien
ttgtgatcggggtttcttgatacca

SEQ ID NO: 4290192 - DNA, 25 bp, Homo sapien
ccccttaagagattcgtatctttgt

SEQ ID NO: 4290193 - DNA, 25 bp, Homo sapien
tattactgggtgaaatcaatcagcc

SEQ ID NO: 4290194 - DNA, 25 bp, Homo sapien
tgggaaacccttactactaaatgca

SEQ ID NO: 4290195 - DNA, 25 bp, Homo sapien
gctacacttgagatatgggaaaccc

SEQ ID NO: 4290196 - DNA, 25 bp, Homo sapien
tggcaagtctgggagaaccaacact

SEQ ID NO: 4290197 - DNA, 25 bp, Homo sapien
actggttgtgtgtggtgtggttctt

SEQ ID NO: 4290198 - DNA, 25 bp, Homo sapien
gtgtgtggtgtggttcttggacttg

SEQ ID NO: 4290199 - DNA, 25 bp, Homo sapien
tggtgtggttcttggacttggccat

SEQ ID NO: 4290200 - DNA, 25 bp, Homo sapien
gtgtggtgtggttcttggacttggc

SEQ ID NO: 4290201 - DNA, 25 bp, Homo sapien
cccgcagcttttgctcccgacagac

SEQ ID NO: 4290202 - DNA, 25 bp, Homo sapien
taagtcgcggatggcatcggatgcc

SEQ ID NO: 4290203 - DNA, 25 bp, Homo sapien
gccgccacccgtaagtcgcggatgg

SEQ ID NO: 4290204 - DNA, 25 bp, Homo sapien
ccacccgtaagtcgcggatggcatc

SEQ ID NO: 4290205 - DNA, 25 bp, Homo sapien
ccgtaagtcgcggatggcatcggat

SEQ ID NO: 4290206 - DNA, 25 bp, Homo sapien
caacaacgccggaaagtactactgg

SEQ ID NO: 4290207 - DNA, 25 bp, Homo sapien
tcaacaacgccggaaagtactactg

SEQ ID NO: 4290208 - DNA, 25 bp, Homo sapien
gcacgggaaatagggtcaacaacgc

SEQ ID NO: 4290209 - DNA, 25 bp, Homo sapien
gggctgcggtgcagcacgggaaata

SEQ ID NO: 4290210 - DNA, 25 bp, Homo sapien
tgatgcctgacagcaagtcaggact

SEQ ID NO: 4290211 - DNA, 25 bp, Homo sapien
caaagacaggggctacaggaggtgg

SEQ ID NO: 4290212 - DNA, 25 bp, Homo sapien
tgcaggaataaagtccctgtggggt

SEQ ID NO: 4290213 - DNA, 25 bp, Homo sapien
acaggtagagaacctggtgggcaaa

SEQ ID NO: 4290214 - DNA, 25 bp, Homo sapien
tttaggaaacaagcgctggagcagg

SEQ ID NO: 4290215 - DNA, 25 bp, Homo sapien
tttgctaccgttggcccgaggagtg

SEQ ID NO: 4290216 - DNA, 25 bp, Homo sapien
ttttgttccctgagaggtgcctgcc

SEQ ID NO: 4290217 - DNA, 25 bp, Homo sapien
ggaggaatttactcaagggcacaca

SEQ ID NO: 4290218 - DNA, 25 bp, Homo sapien
tatctgctgtgccagggctactgcc

SEQ ID NO: 4290219 - DNA, 25 bp, Homo sapien
ggctactgccatgatcacttggagc

SEQ ID NO: 4290220 - DNA, 25 bp, Homo sapien
agacacagagctatggacaggtcct

SEQ ID NO: 4290221 - DNA, 25 bp, Homo sapien
cacaagattcccatgaggcggcaga

SEQ ID NO: 4290222 - DNA, 25 bp, Homo sapien
gacatactggtgttggaccaatctg

SEQ ID NO: 4290223 - DNA, 25 bp, Homo sapien
tgtacaagcagttcaagggcaggtc

SEQ ID NO: 4290224 - DNA, 25 bp, Homo sapien
cccttgcatgtgcacggaggcagtg

SEQ ID NO: 4290225 - DNA, 25 bp, Homo sapien
gggacaggatggcagtcccttgcat

SEQ ID NO: 4290226 - DNA, 25 bp, Homo sapien
aggagaaactcaaatatccggtgac

SEQ ID NO: 4290227 - DNA, 25 bp, Homo sapien
gcagcatgggtgaatcctgaaccat

SEQ ID NO: 4290228 - DNA, 25 bp, Homo sapien
agctgcagctccgacagcagcatgg

SEQ ID NO: 4290229 - DNA, 25 bp, Homo sapien
aaatatccggtgacaggcaaattga

SEQ ID NO: 4290230 - DNA, 25 bp, Homo sapien
gatccacggacaagagagttgccca

SEQ ID NO: 4290231 - DNA, 25 bp, Homo sapien
gacatgctgagctatagccccgtgg

SEQ ID NO: 4290232 - DNA, 25 bp, Homo sapien
ccgtgagttgttagctttgacatgc

SEQ ID NO: 4290233 - DNA, 25 bp, Homo sapien
ggaccagtttcctgtccgtgagttg

SEQ ID NO: 4290234 - DNA, 25 bp, Homo sapien
gagggctaccagggcttcgggcatc

SEQ ID NO: 4290235 - DNA, 25 bp, Homo sapien
cctgagggctaccagggcttcgggc

SEQ ID NO: 4290236 - DNA, 25 bp, Homo sapien
ctgagggctaccagggcttcgggca

SEQ ID NO: 4290237 - DNA, 25 bp, Homo sapien
tgagggctaccagggcttcgggcat

SEQ ID NO: 4290238 - DNA, 25 bp, Homo sapien
gatttctaccctcaaggctgtagcc

SEQ ID NO: 4290239 - DNA, 25 bp, Homo sapien
gatcacgctccctctgggttgccga

SEQ ID NO: 4290240 - DNA, 25 bp, Homo sapien
ggttgccgatttctaccctcaaggc

SEQ ID NO: 4290241 - DNA, 25 bp, Homo sapien
caaggctgtagcctcgagggaccag

SEQ ID NO: 4290242 - DNA, 25 bp, Homo sapien
gcctgttcaggcctcatatgtccca

SEQ ID NO: 4290243 - DNA, 25 bp, Homo sapien
ctccaagaggtagccctgcggcctg

SEQ ID NO: 4290244 - DNA, 25 bp, Homo sapien
acctccacggcatgggggcctcagg

SEQ ID NO: 4290245 - DNA, 25 bp, Homo sapien
agaggtagccctgcggcctgttcag

SEQ ID NO: 4290246 - DNA, 25 bp, Homo sapien
ctgtccagggaatcttttccaggcc

SEQ ID NO: 4290247 - DNA, 25 bp, Homo sapien
actgtccagggaatcttttccaggc

SEQ ID NO: 4290248 - DNA, 25 bp, Homo sapien
ccacatggcggccagtggaggagcc

SEQ ID NO: 4290249 - DNA, 25 bp, Homo sapien
cccacatggcggccagtggaggagc

SEQ ID NO: 4290250 - DNA, 25 bp, Homo sapien
gcccacatggcggccagtggaggag

SEQ ID NO: 4290251 - DNA, 25 bp, Homo sapien
ggccagcagattccagacaagagag

SEQ ID NO: 4290252 - DNA, 25 bp, Homo sapien
tagaccccagaagagtgcagacttg

SEQ ID NO: 4290253 - DNA, 25 bp, Homo sapien
tcatggcagatgctctagggtccag

SEQ ID NO: 4290254 - DNA, 25 bp, Homo sapien
gctggaaatcccgacagctgcctgg

SEQ ID NO: 4290255 - DNA, 25 bp, Homo sapien
ggcagccagcggccgtgtcaggggt

SEQ ID NO: 4290256 - DNA, 25 bp, Homo sapien
gggcagccagcggccgtgtcagggg

SEQ ID NO: 4290257 - DNA, 25 bp, Homo sapien
gtggttagcgaggccgtcaacacct

SEQ ID NO: 4290258 - DNA, 25 bp, Homo sapien
ctgtggttagcgaggccgtcaacac

SEQ ID NO: 4290259 - DNA, 25 bp, Homo sapien
tggttagcgaggccgtcaacacctt

SEQ ID NO: 4290260 - DNA, 25 bp, Homo sapien
tgtggttagcgaggccgtcaacacc

SEQ ID NO: 4290261 - DNA, 25 bp, Homo sapien
tcctgccctggcctggagagagaca

SEQ ID NO: 4290262 - DNA, 25 bp, Homo sapien
gccctggcctggagagagacagtct

SEQ ID NO: 4290263 - DNA, 25 bp, Homo sapien
ctgggttgccaaggcagagtggggt

SEQ ID NO: 4290264 - DNA, 25 bp, Homo sapien
taggggtctgggagaggggtcctgc

SEQ ID NO: 4290265 - DNA, 25 bp, Homo sapien
tggcggttattcttcaggatcccca

SEQ ID NO: 4290266 - DNA, 25 bp, Homo sapien
gtccccatgtgcaccctgcgtccca

SEQ ID NO: 4290267 - DNA, 25 bp, Homo sapien
tgctgggcagtagacgcccccacaa

SEQ ID NO: 4290268 - DNA, 25 bp, Homo sapien
atcactgtggcggttattcttcagg

SEQ ID NO: 4290269 - DNA, 25 bp, Homo sapien
ctgttagacaaggagcctggaggta

SEQ ID NO: 4290270 - DNA, 25 bp, Homo sapien
ggaaaagcagcatgacagcggccat

SEQ ID NO: 4290271 - DNA, 25 bp, Homo sapien
tcctgaccagcctggtggacatgga

SEQ ID NO: 4290272 - DNA, 25 bp, Homo sapien
acatggaggacttcccaggggagga

SEQ ID NO: 4290273 - DNA, 25 bp, Homo sapien
taaaatgtaaccatccctgagccag

SEQ ID NO: 4290274 - DNA, 25 bp, Homo sapien
ctgagccagccccaatgtcactggc

SEQ ID NO: 4290275 - DNA, 25 bp, Homo sapien
gctaaccacagcagtagtaacactg

SEQ ID NO: 4290276 - DNA, 25 bp, Homo sapien
caggcagccgggaagctaaccacag

SEQ ID NO: 4290277 - DNA, 25 bp, Homo sapien
tcaggaagaaccatcaatgacagtg

SEQ ID NO: 4290278 - DNA, 25 bp, Homo sapien
ggaagaaccatcaatgacagtgcca

SEQ ID NO: 4290279 - DNA, 25 bp, Homo sapien
gaagaaccatcaatgacagtgccac

SEQ ID NO: 4290280 - DNA, 25 bp, Homo sapien
caggaagaaccatcaatgacagtgc

SEQ ID NO: 4290281 - DNA, 25 bp, Homo sapien
ggagcttctgggtccgctttagcct

SEQ ID NO: 4290282 - DNA, 25 bp, Homo sapien
tctgggtccgctttagcctgggcca

SEQ ID NO: 4290283 - DNA, 25 bp, Homo sapien
ttctgggtccgctttagcctgggcc

SEQ ID NO: 4290284 - DNA, 25 bp, Homo sapien
cttctgggtccgctttagcctgggc

SEQ ID NO: 4290285 - DNA, 25 bp, Homo sapien
aaatgtccatggcaggtctttgcac

SEQ ID NO: 4290286 - DNA, 25 bp, Homo sapien
gcagaatccttaatggtaaatccct

SEQ ID NO: 4290287 - DNA, 25 bp, Homo sapien
cactccttgcaaggggggtctgtga

SEQ ID NO: 4290288 - DNA, 25 bp, Homo sapien
gtctttgcacaggaccccaatgagg

SEQ ID NO: 4290289 - DNA, 25 bp, Homo sapien
gaaaaatagacttgtaagcagcaag

SEQ ID NO: 4290290 - DNA, 25 bp, Homo sapien
tggaaaaatagacttgtaagcagca

SEQ ID NO: 4290291 - DNA, 25 bp, Homo sapien
ctcctgctggaaaaatagacttgta

SEQ ID NO: 4290292 - DNA, 25 bp, Homo sapien
aaaatagacttgtaagcagcaaggg

SEQ ID NO: 4290293 - DNA, 25 bp, Homo sapien
gaagaacagatgaccccccgagggc

SEQ ID NO: 4290294 - DNA, 25 bp, Homo sapien
gaagggctggatcacataccgacca

SEQ ID NO: 4290295 - DNA, 25 bp, Homo sapien
gcccagagaccgaagggctggatca

SEQ ID NO: 4290296 - DNA, 25 bp, Homo sapien
gggctggatcacataccgaccactc

SEQ ID NO: 4290297 - DNA, 25 bp, Homo sapien
gagaccgaagggctggatcacatac

SEQ ID NO: 4290298 - DNA, 25 bp, Homo sapien
acaccgggtgccagtggactgacac

SEQ ID NO: 4290299 - DNA, 25 bp, Homo sapien
cgacaccgggtgccagtggactgac

SEQ ID NO: 4290300 - DNA, 25 bp, Homo sapien
gacaccgggtgccagtggactgaca

SEQ ID NO: 4290301 - DNA, 25 bp, Homo sapien
ctatacagagggaggtgctcaggag

SEQ ID NO: 4290302 - DNA, 25 bp, Homo sapien
aggttcaggggtggagactgctggg

SEQ ID NO: 4290303 - DNA, 25 bp, Homo sapien
gagggaggtgctcaggaggttcagg

SEQ ID NO: 4290304 - DNA, 25 bp, Homo sapien
cagagggaggtgctcaggaggttca

SEQ ID NO: 4290305 - DNA, 25 bp, Homo sapien
ccctaccatgtgctcctggcagcct

SEQ ID NO: 4290306 - DNA, 25 bp, Homo sapien
aggtctccggcatccatgcagccat

SEQ ID NO: 4290307 - DNA, 25 bp, Homo sapien
ccctgcaggtctccggcatccatgc

SEQ ID NO: 4290308 - DNA, 25 bp, Homo sapien
gcaggtctccggcatccatgcagcc

SEQ ID NO: 4290309 - DNA, 25 bp, Homo sapien
ctgcaggtctccggcatccatgcag

SEQ ID NO: 4290310 - DNA, 25 bp, Homo sapien
ctgcccagtacccagggcggtcacc

SEQ ID NO: 4290311 - DNA, 25 bp, Homo sapien
acaggctgcccggatggcttgtgct

SEQ ID NO: 4290312 - DNA, 25 bp, Homo sapien
gcttcattgagcagaaggggcatct

SEQ ID NO: 4290313 - DNA, 25 bp, Homo sapien
cccggatggcttgtgctgtgcagat

SEQ ID NO: 4290314 - DNA, 25 bp, Homo sapien
cttctcaacacaggctgcccggatg

SEQ ID NO: 4290315 - DNA, 25 bp, Homo sapien
cacacagtttgctgaagggatagag

SEQ ID NO: 4290316 - DNA, 25 bp, Homo sapien
gatcacacagtttgctgaagggata

SEQ ID NO: 4290317 - DNA, 25 bp, Homo sapien
tcacacagtttgctgaagggataga

SEQ ID NO: 4290318 - DNA, 25 bp, Homo sapien
cctggatccagctcagtgctgatca

SEQ ID NO: 4290319 - DNA, 25 bp, Homo sapien
ttatttgcaatataaacaaagtccc

SEQ ID NO: 4290320 - DNA, 25 bp, Homo sapien
tatttatttgcaatataaacaaagt

SEQ ID NO: 4290321 - DNA, 25 bp, Homo sapien
atttgcaatataaacaaagtcccgt

SEQ ID NO: 4290322 - DNA, 25 bp, Homo sapien
tgcaatataaacaaagtcccgttgt

SEQ ID NO: 4290323 - DNA, 25 bp, Homo sapien
tcatcacaggcgaatgcagagctaa

SEQ ID NO: 4290324 - DNA, 25 bp, Homo sapien
aatctgctgcgctaaagaatccctg

SEQ ID NO: 4290325 - DNA, 25 bp, Homo sapien
tggtcaaggtcaacatggcgtctgt

SEQ ID NO: 4290326 - DNA, 25 bp, Homo sapien
taaagcaaaactggccaccttctgg

SEQ ID NO: 4290327 - DNA, 25 bp, Homo sapien
ccacacttcttggagcgggcttcgt

SEQ ID NO: 4290328 - DNA, 25 bp, Homo sapien
catcagataggccacagtgaccgtc

SEQ ID NO: 4290329 - DNA, 25 bp, Homo sapien
aaagtagagctgctcactcgacgcg

SEQ ID NO: 4290330 - DNA, 25 bp, Homo sapien
tcttgacaaagtcgtaggcgtcgtt

SEQ ID NO: 4290331 - DNA, 25 bp, Homo sapien
ctgaaacacattggcatgggtcagg

SEQ ID NO: 4290332 - DNA, 25 bp, Homo sapien
gggctctgcacactttagccccaag

SEQ ID NO: 4290333 - DNA, 25 bp, Homo sapien
acttggaatagaggtcaacagcact

SEQ ID NO: 4290334 - DNA, 25 bp, Homo sapien
ctggtcttgcccgacccctgaggga

SEQ ID NO: 4290335 - DNA, 25 bp, Homo sapien
tatacttgatgccatacttgccgag

SEQ ID NO: 4290336 - DNA, 25 bp, Homo sapien
aagagctgtccacgttggtctcgca

SEQ ID NO: 4290337 - DNA, 25 bp, Homo sapien
gatctgcttgtaggtgaactcgccg

SEQ ID NO: 4290338 - DNA, 25 bp, Homo sapien
acttgccgagcacgtccaggttggt

SEQ ID NO: 4290339 - DNA, 25 bp, Homo sapien
tcggccgtggcctcgtcgtagagca

SEQ ID NO: 4290340 - DNA, 25 bp, Homo sapien
tcgtcgcgcagcttctgtaggagca

SEQ ID NO: 4290341 - DNA, 25 bp, Homo sapien
agagcagcacggtggccgccttgca

SEQ ID NO: 4290342 - DNA, 25 bp, Homo sapien
tagtaggcctggcagccgtcgtcgc

SEQ ID NO: 4290343 - DNA, 25 bp, Homo sapien
atgtgcgacgactcgaagagctcgt

SEQ ID NO: 4290344 - DNA, 25 bp, Homo sapien
actcgaagagctcgtgcggccggca

SEQ ID NO: 4290345 - DNA, 25 bp, Homo sapien
agccactcggcgctcttgcagggca

SEQ ID NO: 4290346 - DNA, 25 bp, Homo sapien
gccactcggcgctcttgcagggcat

SEQ ID NO: 4290347 - DNA, 25 bp, Homo sapien
ctggtttttcatggggagcgcgggc

SEQ ID NO: 4290348 - DNA, 25 bp, Homo sapien
cgcgcgggccccagccgcgtctccg

SEQ ID NO: 4290349 - DNA, 25 bp, Homo sapien
aagtcgacatgtgcgcccgcgctgg

SEQ ID NO: 4290350 - DNA, 25 bp, Homo sapien
gccgcccccgaagtcgacatgtgcg

SEQ ID NO: 4290351 - DNA, 25 bp, Homo sapien
gaaaggactcagataaacccaggtg

SEQ ID NO: 4290352 - DNA, 25 bp, Homo sapien
gggatgatctctcgcctgccttaca

SEQ ID NO: 4290353 - DNA, 25 bp, Homo sapien
tcttgggcttaatgggcttgcacac

SEQ ID NO: 4290354 - DNA, 25 bp, Homo sapien
ggaatccttagctgcatgcccacgt

SEQ ID NO: 4290355 - DNA, 25 bp, Homo sapien
cagctgccccggtgggatcagaaac

SEQ ID NO: 4290356 - DNA, 25 bp, Homo sapien
tgcttttcacacacaggtccagctg

SEQ ID NO: 4290357 - DNA, 25 bp, Homo sapien
ggctaagatgtctcaccaggcgccg

SEQ ID NO: 4290358 - DNA, 25 bp, Homo sapien
agctgagggccatcgagttcatcac

SEQ ID NO: 4290359 - DNA, 25 bp, Homo sapien
tgccaccgctgccttagcacgtgtg

SEQ ID NO: 4290360 - DNA, 25 bp, Homo sapien
ttccaggacggcaatgctcacagga

SEQ ID NO: 4290361 - DNA, 25 bp, Homo sapien
ccttagcacgtgtggtttcctcagc

SEQ ID NO: 4290362 - DNA, 25 bp, Homo sapien
cctgttccaggacggcaatgctcac

SEQ ID NO: 4290363 - DNA, 25 bp, Homo sapien
tgaggctagagggacaatgcccaca

SEQ ID NO: 4290364 - DNA, 25 bp, Homo sapien
aattaggagagatgacggctgagcc

SEQ ID NO: 4290365 - DNA, 25 bp, Homo sapien
gagccgagccatttgcatttccaga

SEQ ID NO: 4290366 - DNA, 25 bp, Homo sapien
tgagtcaagcctcgcatgagcaaga

SEQ ID NO: 4290367 - DNA, 25 bp, Homo sapien
ctcgatcctggtgtaaactgaagac

SEQ ID NO: 4290368 - DNA, 25 bp, Homo sapien
tgtcccaggacacgccgatatcata

SEQ ID NO: 4290369 - DNA, 25 bp, Homo sapien
cgtgggcctatccaagcttggcgct

SEQ ID NO: 4290370 - DNA, 25 bp, Homo sapien
tgatggcaacctcggtctggcctga

SEQ ID NO: 4290371 - DNA, 25 bp, Homo sapien
gggccacgtgggaaaagtgcggcag

SEQ ID NO: 4290372 - DNA, 25 bp, Homo sapien
tgccaggctcgtccacacaccggca

SEQ ID NO: 4290373 - DNA, 25 bp, Homo sapien
agcttcttcccatcgacagtgcagg

SEQ ID NO: 4290374 - DNA, 25 bp, Homo sapien
cagcttcttcccatcgacagtgcag

SEQ ID NO: 4290375 - DNA, 25 bp, Homo sapien
gcaatgaagtcaggtttaattttga

SEQ ID NO: 4290376 - DNA, 25 bp, Homo sapien
gaagtcaggtttaattttgagattc

SEQ ID NO: 4290377 - DNA, 25 bp, Homo sapien
aatgaagtcaggtttaattttgaga

SEQ ID NO: 4290378 - DNA, 25 bp, Homo sapien
tgaagtcaggtttaattttgagatt

SEQ ID NO: 4290379 - DNA, 25 bp, Homo sapien
tcacgcaaggaggaagtcacctggc

SEQ ID NO: 4290380 - DNA, 25 bp, Homo sapien
gaacacgtgtggaacagaaatcagg

SEQ ID NO: 4290381 - DNA, 25 bp, Homo sapien
aacctgactcagatgggcccacttt

SEQ ID NO: 4290382 - DNA, 25 bp, Homo sapien
tgggcctttagtcagatttagagaa

SEQ ID NO: 4290383 - DNA, 25 bp, Homo sapien
gaccccgaaggagcagacattttca

SEQ ID NO: 4290384 - DNA, 25 bp, Homo sapien
ggtcctctcattcgggtctgaagca

SEQ ID NO: 4290385 - DNA, 25 bp, Homo sapien
caatttctacaccatggcagaggta

SEQ ID NO: 4290386 - DNA, 25 bp, Homo sapien
gagagcctcctggtgcagatagcaa

SEQ ID NO: 4290387 - DNA, 25 bp, Homo sapien
cacagagttcagtcccctttattta

SEQ ID NO: 4290388 - DNA, 25 bp, Homo sapien
ccacagagttcagtcccctttattt

SEQ ID NO: 4290389 - DNA, 25 bp, Homo sapien
aagtcccatggtacaaatccctggc

SEQ ID NO: 4290390 - DNA, 25 bp, Homo sapien
caagtcccatggtacaaatccctgg

SEQ ID NO: 4290391 - DNA, 25 bp, Homo sapien
ccaagtcccatggtacaaatccctg

SEQ ID NO: 4290392 - DNA, 25 bp, Homo sapien
caaatccaccgagctcctgattcct

SEQ ID NO: 4290393 - DNA, 25 bp, Homo sapien
tggtgttgctctctgcatgattagc

SEQ ID NO: 4290394 - DNA, 25 bp, Homo sapien
gtcttctgtcagtgtcaaccgctgc

SEQ ID NO: 4290395 - DNA, 25 bp, Homo sapien
gttctccagacactgcttcagcttg

SEQ ID NO: 4290396 - DNA, 25 bp, Homo sapien
gctctctgcatgattagctgctggt

SEQ ID NO: 4290397 - DNA, 25 bp, Homo sapien
gtgctgggccaacgtcaatacaagg

SEQ ID NO: 4290398 - DNA, 25 bp, Homo sapien
ttcacagcacagtagacaaacaggc

SEQ ID NO: 4290399 - DNA, 25 bp, Homo sapien
ttgcaaacgtggagatagtgggccc

SEQ ID NO: 4290400 - DNA, 25 bp, Homo sapien
caaacaggcttttatgaggcccaac

SEQ ID NO: 4290401 - DNA, 25 bp, Homo sapien
acaggcaggagggctggcaggccac

SEQ ID NO: 4290402 - DNA, 25 bp, Homo sapien
gcagccaggacaggccatcacagtg

SEQ ID NO: 4290403 - DNA, 25 bp, Homo sapien
accgtgcttccccagctgcacggga

SEQ ID NO: 4290404 - DNA, 25 bp, Homo sapien
ctgcagggagtctgtctgggccaca

SEQ ID NO: 4290405 - DNA, 25 bp, Homo sapien
aggccatcacagtgccaccgtgctt

SEQ ID NO: 4290406 - DNA, 25 bp, Homo sapien
cctggcccaggatgataatacgcag

SEQ ID NO: 4290407 - DNA, 25 bp, Homo sapien
cacagggtgcaccacagttcaacga

SEQ ID NO: 4290408 - DNA, 25 bp, Homo sapien
gataatacgcagactcggctgagcc

SEQ ID NO: 4290409 - DNA, 25 bp, Homo sapien
ttcaacgaggcagatgccacgcagg

SEQ ID NO: 4290410 - DNA, 25 bp, Homo sapien
ggccaagaacacaagacaaggactg

SEQ ID NO: 4290411 - DNA, 25 bp, Homo sapien
ccaagaacacaagacaaggactggc

SEQ ID NO: 4290412 - DNA, 25 bp, Homo sapien
caagaacacaagacaaggactggcc

SEQ ID NO: 4290413 - DNA, 25 bp, Homo sapien
gccaagaacacaagacaaggactgg

SEQ ID NO: 4290414 - DNA, 25 bp, Homo sapien
gcatcacgagagttcagagaggtct

SEQ ID NO: 4290415 - DNA, 25 bp, Homo sapien
gcatctggggcatcacgagagttca

SEQ ID NO: 4290416 - DNA, 25 bp, Homo sapien
gaggtctctgtatgaccctccagct

SEQ ID NO: 4290417 - DNA, 25 bp, Homo sapien
tgggcggtgtgacactcccactggc

SEQ ID NO: 4290418 - DNA, 25 bp, Homo sapien
ccatatccacatcctgctcttagca

SEQ ID NO: 4290419 - DNA, 25 bp, Homo sapien
tccccatatccacatcctgctctta

SEQ ID NO: 4290420 - DNA, 25 bp, Homo sapien
tatccacatcctgctcttagcagag

SEQ ID NO: 4290421 - DNA, 25 bp, Homo sapien
tcctgctcttagcagagccctgggt

SEQ ID NO: 4290422 - DNA, 25 bp, Homo sapien
tccttggtgagtggtactggttctt

SEQ ID NO: 4290423 - DNA, 25 bp, Homo sapien
ccttggtgagtggtactggttctta

SEQ ID NO: 4290424 - DNA, 25 bp, Homo sapien
tggtactggttcttatgggagcgtc

SEQ ID NO: 4290425 - DNA, 25 bp, Homo sapien
ggttcttatgggagcgtcctctgag

SEQ ID NO: 4290426 - DNA, 25 bp, Homo sapien
ggtggttgggccagactgatgggtg

SEQ ID NO: 4290427 - DNA, 25 bp, Homo sapien
agccaacatccaggcatgtgtccca

SEQ ID NO: 4290428 - DNA, 25 bp, Homo sapien
gagccaacatccaggcatgtgtccc

SEQ ID NO: 4290429 - DNA, 25 bp, Homo sapien
ccagactgatgggtgaaggcggagc

SEQ ID NO: 4290430 - DNA, 25 bp, Homo sapien
cctggcggccacactgggttagtcg

SEQ ID NO: 4290431 - DNA, 25 bp, Homo sapien
ggccacactgggttagtcggcgtac

SEQ ID NO: 4290432 - DNA, 25 bp, Homo sapien
ggcggccacactgggttagtcggcg

SEQ ID NO: 4290433 - DNA, 25 bp, Homo sapien
cccctggcggccacactgggttagt

SEQ ID NO: 4290434 - DNA, 25 bp, Homo sapien
gcagccacatcagggctctgccctc

SEQ ID NO: 4290435 - DNA, 25 bp, Homo sapien
caggggcagccacatcagggctctg

SEQ ID NO: 4290436 - DNA, 25 bp, Homo sapien
ctctgccctcgccagactcaggcag

SEQ ID NO: 4290437 - DNA, 25 bp, Homo sapien
cgccagactcaggcaggcaccccat

SEQ ID NO: 4290438 - DNA, 25 bp, Homo sapien
ggttgtggttgatgtgggcgccccc

SEQ ID NO: 4290439 - DNA, 25 bp, Homo sapien
gggttgtggttgatgtgggcgcccc

SEQ ID NO: 4290440 - DNA, 25 bp, Homo sapien
gttgtggttgatgtgggcgccccca

SEQ ID NO: 4290441 - DNA, 25 bp, Homo sapien
ttgtggttgatgtgggcgcccccat

SEQ ID NO: 4290442 - DNA, 25 bp, Homo sapien
caggagccagataactgggccagag

SEQ ID NO: 4290443 - DNA, 25 bp, Homo sapien
aacacaggagccagataactgggcc

SEQ ID NO: 4290444 - DNA, 25 bp, Homo sapien
accaacacaggagccagataactgg

SEQ ID NO: 4290445 - DNA, 25 bp, Homo sapien
ccaccaacacaggagccagataact

SEQ ID NO: 4290446 - DNA, 25 bp, Homo sapien
catccctggctacggcccgctgcat

SEQ ID NO: 4290447 - DNA, 25 bp, Homo sapien
tctcccctagaaggatgttctgcag

SEQ ID NO: 4290448 - DNA, 25 bp, Homo sapien
atggaggcctgaaggacccagaagg

SEQ ID NO: 4290449 - DNA, 25 bp, Homo sapien
gaaaacatccctggctacggcccgc

SEQ ID NO: 4290450 - DNA, 25 bp, Homo sapien
tcaaaggccactctgaagtagactt

SEQ ID NO: 4290451 - DNA, 25 bp, Homo sapien
acgggatgacgggtgaacccacagt

SEQ ID NO: 4290452 - DNA, 25 bp, Homo sapien
aatgcgggaccaagtgcagatgacg

SEQ ID NO: 4290453 - DNA, 25 bp, Homo sapien
atgacgggatgacgggtgaacccac

SEQ ID NO: 4290454 - DNA, 25 bp, Homo sapien
tgttgtccaacttcaaacggtccaa

SEQ ID NO: 4290455 - DNA, 25 bp, Homo sapien
tagtcagtgtctggggcacactcac

SEQ ID NO: 4290456 - DNA, 25 bp, Homo sapien
ctggctctgcacagactccacactc

SEQ ID NO: 4290457 - DNA, 25 bp, Homo sapien
tgtgctccagcgtgctagtcagtgt

SEQ ID NO: 4290458 - DNA, 25 bp, Homo sapien
cccacaatgtgctccagcgtgctag

SEQ ID NO: 4290459 - DNA, 25 bp, Homo sapien
tggccatttctaagacttcggccat

SEQ ID NO: 4290460 - DNA, 25 bp, Homo sapien
cacttccgtggccatttctaagact

SEQ ID NO: 4290461 - DNA, 25 bp, Homo sapien
tcatcagcatgtcggccacttccgt

SEQ ID NO: 4290462 - DNA, 25 bp, Homo sapien
ctatcatcagcatgtcggccacttc

SEQ ID NO: 4290463 - DNA, 25 bp, Homo sapien
gctgagtatcttagggttacctacc

SEQ ID NO: 4290464 - DNA, 25 bp, Homo sapien
tccttgagggcggctctggttcagt

SEQ ID NO: 4290465 - DNA, 25 bp, Homo sapien
ggttcagttcagctccacgtacact

SEQ ID NO: 4290466 - DNA, 25 bp, Homo sapien
gctcactacgagctggtgctgagta

SEQ ID NO: 4290467 - DNA, 25 bp, Homo sapien
tgtgccttgtaggaaagcatcacag

SEQ ID NO: 4290468 - DNA, 25 bp, Homo sapien
aaaaaggcagtgtcatagcagtggc

SEQ ID NO: 4290469 - DNA, 25 bp, Homo sapien
gaaagatccttaaatgccaaagccc

SEQ ID NO: 4290470 - DNA, 25 bp, Homo sapien
taaccctaagcccaagctttggctg

SEQ ID NO: 4290471 - DNA, 25 bp, Homo sapien
ctcctgggctccctatggggttgag

SEQ ID NO: 4290472 - DNA, 25 bp, Homo sapien
gtgctcctgggctccctatggggtt

SEQ ID NO: 4290473 - DNA, 25 bp, Homo sapien
cctgagacatggctgcagtgctcct

SEQ ID NO: 4290474 - DNA, 25 bp, Homo sapien
agctcctgagacatggctgcagtgc

SEQ ID NO: 4290475 - DNA, 25 bp, Homo sapien
accagtccccagatacggtctcggt

SEQ ID NO: 4290476 - DNA, 25 bp, Homo sapien
tggccagccatagaaccagtcccca

SEQ ID NO: 4290477 - DNA, 25 bp, Homo sapien
atacggtctcggtgccagggaagcc

SEQ ID NO: 4290478 - DNA, 25 bp, Homo sapien
cccagatacggtctcggtgccaggg

SEQ ID NO: 4290479 - DNA, 25 bp, Homo sapien
aagggcgagagcacactcatcagct

SEQ ID NO: 4290480 - DNA, 25 bp, Homo sapien
aagaagggcgagagcacactcatca

SEQ ID NO: 4290481 - DNA, 25 bp, Homo sapien
ggcaagaagggcgagagcacactca

SEQ ID NO: 4290482 - DNA, 25 bp, Homo sapien
agaagggcgagagcacactcatcag

SEQ ID NO: 4290483 - DNA, 25 bp, Homo sapien
tcccaccaaatggcacaggcctggg

SEQ ID NO: 4290484 - DNA, 25 bp, Homo sapien
tcaaacagcaccatatgccatggca

SEQ ID NO: 4290485 - DNA, 25 bp, Homo sapien
atggcaacacgctcccaccaaatgg

SEQ ID NO: 4290486 - DNA, 25 bp, Homo sapien
agcttgctgtaacagcctctttgtg

SEQ ID NO: 4290487 - DNA, 25 bp, Homo sapien
gattccccatggagctggccagtgt

SEQ ID NO: 4290488 - DNA, 25 bp, Homo sapien
gacttctccatgatcaacaatatca

SEQ ID NO: 4290489 - DNA, 25 bp, Homo sapien
ggcctcggcactttcgtgacttctc

SEQ ID NO: 4290490 - DNA, 25 bp, Homo sapien
caacaatatcaaagttactcttcca

SEQ ID NO: 4290491 - DNA, 25 bp, Homo sapien
atcagagcctccagaagcaaaatac

SEQ ID NO: 4290492 - DNA, 25 bp, Homo sapien
cagagcctccagaagcaaaatactc

SEQ ID NO: 4290493 - DNA, 25 bp, Homo sapien
ttgttcatcagagcctccagaagca

SEQ ID NO: 4290494 - DNA, 25 bp, Homo sapien
agcctccagaagcaaaatactcccc

SEQ ID NO: 4290495 - DNA, 25 bp, Homo sapien
aaaaggcaacagtggtggctggtcc

SEQ ID NO: 4290496 - DNA, 25 bp, Homo sapien
gaaaaggcaacagtggtggctggtc

SEQ ID NO: 4290497 - DNA, 25 bp, Homo sapien
ttgaaaaggcaacagtggtggctgg

SEQ ID NO: 4290498 - DNA, 25 bp, Homo sapien
cttgaaaaggcaacagtggtggctg

SEQ ID NO: 4290499 - DNA, 25 bp, Homo sapien
ttgccagcagccagatatgatacat

SEQ ID NO: 4290500 - DNA, 25 bp, Homo sapien
aactgggctctcatggctgagtggg

SEQ ID NO: 4290501 - DNA, 25 bp, Homo sapien
actgggctctcatggctgagtgggg

SEQ ID NO: 4290502 - DNA, 25 bp, Homo sapien
tgaactgggctctcatggctgagtg

SEQ ID NO: 4290503 - DNA, 25 bp, Homo sapien
gaactgggctctcatggctgagtgg

SEQ ID NO: 4290504 - DNA, 25 bp, Homo sapien
caaagggcagtgcacatggacatgt

SEQ ID NO: 4290505 - DNA, 25 bp, Homo sapien
atggacatgtacaccaaggcacccg

SEQ ID NO: 4290506 - DNA, 25 bp, Homo sapien
cccttgagatgactggaaggacagg

SEQ ID NO: 4290507 - DNA, 25 bp, Homo sapien
tttccagagcctcaaatagggcact

SEQ ID NO: 4290508 - DNA, 25 bp, Homo sapien
gggagaacaggcccactagtcctgc

SEQ ID NO: 4290509 - DNA, 25 bp, Homo sapien
caggcccactagtcctgcacactgg

SEQ ID NO: 4290510 - DNA, 25 bp, Homo sapien
acaggcccactagtcctgcacactg

SEQ ID NO: 4290511 - DNA, 25 bp, Homo sapien
agaacaggcccactagtcctgcaca

SEQ ID NO: 4290512 - DNA, 25 bp, Homo sapien
tgatcaggtagtttcccgacgggtg

SEQ ID NO: 4290513 - DNA, 25 bp, Homo sapien
ggatcttcagggttgagtcactgga

SEQ ID NO: 4290514 - DNA, 25 bp, Homo sapien
tcttcagggttgagtcactggaggc

SEQ ID NO: 4290515 - DNA, 25 bp, Homo sapien
gaggctgtgatcaggtagtttcccg

SEQ ID NO: 4290516 - DNA, 25 bp, Homo sapien
gggggaaggacatcagtcaggtgct

SEQ ID NO: 4290517 - DNA, 25 bp, Homo sapien
ctgggggaaggacatcagtcaggtg

SEQ ID NO: 4290518 - DNA, 25 bp, Homo sapien
tgggggaaggacatcagtcaggtgc

SEQ ID NO: 4290519 - DNA, 25 bp, Homo sapien
gggaaggacatcagtcaggtgctgg

SEQ ID NO: 4290520 - DNA, 25 bp, Homo sapien
caagtgggcttcaactccaacaacc

SEQ ID NO: 4290521 - DNA, 25 bp, Homo sapien
gtcagccagcgcaagacaaatggct

SEQ ID NO: 4290522 - DNA, 25 bp, Homo sapien
gcctccatagcccaaagccccaagt

SEQ ID NO: 4290523 - DNA, 25 bp, Homo sapien
agccccaagtgggcttcaactccaa

SEQ ID NO: 4290524 - DNA, 25 bp, Homo sapien
tgtgttgtccatgccggcagcggca

SEQ ID NO: 4290525 - DNA, 25 bp, Homo sapien
tgcagcagccggtgagtccgcacgt

SEQ ID NO: 4290526 - DNA, 25 bp, Homo sapien
cagcggcaatgcacgtcccactggg

SEQ ID NO: 4290527 - DNA, 25 bp, Homo sapien
gtggaagtccacataggtgacaaag

SEQ ID NO: 4290528 - DNA, 25 bp, Homo sapien
agtggacacattcccggctgctctt

SEQ ID NO: 4290529 - DNA, 25 bp, Homo sapien
aacagtcttgtcatcactggcagac

SEQ ID NO: 4290530 - DNA, 25 bp, Homo sapien
cagacacgatgagccgcccgtcggg

SEQ ID NO: 4290531 - DNA, 25 bp, Homo sapien
catgctcacaatacgagtggacaca

SEQ ID NO: 4290532 - DNA, 25 bp, Homo sapien
cccagttgatatgctggctcaggga

SEQ ID NO: 4290533 - DNA, 25 bp, Homo sapien
cagaggctgtcacgaaggactggcc

SEQ ID NO: 4290534 - DNA, 25 bp, Homo sapien
tggcacagcggacccagttgatatg

SEQ ID NO: 4290535 - DNA, 25 bp, Homo sapien
cactttgactgtcttgtcgtcagag

SEQ ID NO: 4290536 - DNA, 25 bp, Homo sapien
ctgcagaagtggacactcctcactg

SEQ ID NO: 4290537 - DNA, 25 bp, Homo sapien
tgcagaagtggacactcctcactgt

SEQ ID NO: 4290538 - DNA, 25 bp, Homo sapien
cagaagtggacactcctcactgtgg

SEQ ID NO: 4290539 - DNA, 25 bp, Homo sapien
gcagaagtggacactcctcactgtg

SEQ ID NO: 4290540 - DNA, 25 bp, Homo sapien
tgtgtgtgcacgaaacacagtggac

SEQ ID NO: 4290541 - DNA, 25 bp, Homo sapien
ctgtgtgtgcacgaaacacagtgga

SEQ ID NO: 4290542 - DNA, 25 bp, Homo sapien
gtgtgtgcacgaaacacagtggact

SEQ ID NO: 4290543 - DNA, 25 bp, Homo sapien
ggtaggcgcgtgactgcggcttcat

SEQ ID NO: 4290544 - DNA, 25 bp, Homo sapien
caggtgtcccgaaggagagaagttc

SEQ ID NO: 4290545 - DNA, 25 bp, Homo sapien
acacaggtgacggcatccttgtggc

SEQ ID NO: 4290546 - DNA, 25 bp, Homo sapien
cccagatgcggacagtcttgtctcg

SEQ ID NO: 4290547 - DNA, 25 bp, Homo sapien
atctcggtggcccttaaaatgcctt

SEQ ID NO: 4290548 - DNA, 25 bp, Homo sapien
acaggtaactgcatctcggtggccc

SEQ ID NO: 4290549 - DNA, 25 bp, Homo sapien
tgtgttgatactgaagtccacacag

SEQ ID NO: 4290550 - DNA, 25 bp, Homo sapien
gctttgtgttgatactgaagtccac

SEQ ID NO: 4290551 - DNA, 25 bp, Homo sapien
tttttgcccgacgactggaagcaga

SEQ ID NO: 4290552 - DNA, 25 bp, Homo sapien
agacagcgcagccaaaagcctctgt

SEQ ID NO: 4290553 - DNA, 25 bp, Homo sapien
aagcagagctgtatgaccggcggcc

SEQ ID NO: 4290554 - DNA, 25 bp, Homo sapien
gagaagcgcctcagctttttgcccg

SEQ ID NO: 4290555 - DNA, 25 bp, Homo sapien
tgacaactttcacctactgcagagt

SEQ ID NO: 4290556 - DNA, 25 bp, Homo sapien
tctagactatagaccggctctgtgg

SEQ ID NO: 4290557 - DNA, 25 bp, Homo sapien
cagtagctgtggcaaccctttgtcc

SEQ ID NO: 4290558 - DNA, 25 bp, Homo sapien
tgtatggccagtgcagttctagact

SEQ ID NO: 4290559 - DNA, 25 bp, Homo sapien
ggttcaagcccagcaccaggggtgc

SEQ ID NO: 4290560 - DNA, 25 bp, Homo sapien
caggggtgcccctcgggtggcagga

SEQ ID NO: 4290561 - DNA, 25 bp, Homo sapien
gtgcccctcgggtggcaggatcagg

SEQ ID NO: 4290562 - DNA, 25 bp, Homo sapien
gttcaagcccagcaccaggggtgcc

SEQ ID NO: 4290563 - DNA, 25 bp, Homo sapien
ctttgctgacacaacctgcccacaa

SEQ ID NO: 4290564 - DNA, 25 bp, Homo sapien
gagacagaggtcgcatgagctgaga

SEQ ID NO: 4290565 - DNA, 25 bp, Homo sapien
tgagattgcaccactgcactccagc

SEQ ID NO: 4290566 - DNA, 25 bp, Homo sapien
ctgggagacagaggtcgcatgagct

SEQ ID NO: 4290567 - DNA, 25 bp, Homo sapien
cagaggtcgcatgagctgagattgc

SEQ ID NO: 4290568 - DNA, 25 bp, Homo sapien
cttccttcgtaagacccagagccag

SEQ ID NO: 4290569 - DNA, 25 bp, Homo sapien
aaggccctcaggtgcatgtgcccct

SEQ ID NO: 4290570 - DNA, 25 bp, Homo sapien
tatgagaacgaaggaccgggtgatc

SEQ ID NO: 4290571 - DNA, 25 bp, Homo sapien
gattcgtgaactgcttaaaaatgga

SEQ ID NO: 4290572 - DNA, 25 bp, Homo sapien
ccctaagctgcttcgtggaggcctg

SEQ ID NO: 4290573 - DNA, 25 bp, Homo sapien
ttttccctaagctgcttcgtggagg

SEQ ID NO: 4290574 - DNA, 25 bp, Homo sapien
tggcaattttccctaagctgcttcg

SEQ ID NO: 4290575 - DNA, 25 bp, Homo sapien
ctaagctgcttcgtggaggcctgga

SEQ ID NO: 4290576 - DNA, 25 bp, Homo sapien
gaggtggcaccgtgcaggattccgg

SEQ ID NO: 4290577 - DNA, 25 bp, Homo sapien
gtgtggaggtggcaccgtgcaggat

SEQ ID NO: 4290578 - DNA, 25 bp, Homo sapien
tgctctgtgtcaggtgtggggtgag

SEQ ID NO: 4290579 - DNA, 25 bp, Homo sapien
ggtggcaccgtgcaggattccggct

SEQ ID NO: 4290580 - DNA, 25 bp, Homo sapien
gtaattgtcacggagacgcagcacc

SEQ ID NO: 4290581 - DNA, 25 bp, Homo sapien
gaagctcgttgtacacccagtctgc

SEQ ID NO: 4290582 - DNA, 25 bp, Homo sapien
taggacaacagcagatactccaggc

SEQ ID NO: 4290583 - DNA, 25 bp, Homo sapien
gaaggacaggttaagcttgcgcagc

SEQ ID NO: 4290584 - DNA, 25 bp, Homo sapien
agccagttgcagttcaccaggccgt

SEQ ID NO: 4290585 - DNA, 25 bp, Homo sapien
cagttgcagttcaccaggccgtggg

SEQ ID NO: 4290586 - DNA, 25 bp, Homo sapien
cacagacttcaggaacagccagttg

SEQ ID NO: 4290587 - DNA, 25 bp, Homo sapien
ggaaggcaggcaaggtacccagggc

SEQ ID NO: 4290588 - DNA, 25 bp, Homo sapien
tgcaccaggagagacagcgggtgca

SEQ ID NO: 4290589 - DNA, 25 bp, Homo sapien
ctgcaccaggagagacagcgggtgc

SEQ ID NO: 4290590 - DNA, 25 bp, Homo sapien
gcaccaggagagacagcgggtgcag

SEQ ID NO: 4290591 - DNA, 25 bp, Homo sapien
tcttctagcatcttccaacccctct

SEQ ID NO: 4290592 - DNA, 25 bp, Homo sapien
tccacccactccacttcatgggcat

SEQ ID NO: 4290593 - DNA, 25 bp, Homo sapien
cacttcatgggcatcttctagcatc

SEQ ID NO: 4290594 - DNA, 25 bp, Homo sapien
gggcatcttctagcatcttccaacc

SEQ ID NO: 4290595 - DNA, 25 bp, Homo sapien
gcagaagttcttcctggctgccaag

SEQ ID NO: 4290596 - DNA, 25 bp, Homo sapien
ctgcagaagttcttcctggctgcca

SEQ ID NO: 4290597 - DNA, 25 bp, Homo sapien
agaagttcttcctggctgccaagcc

SEQ ID NO: 4290598 - DNA, 25 bp, Homo sapien
gttcttcctggctgccaagccccat

SEQ ID NO: 4290599 - DNA, 25 bp, Homo sapien
ggatgcttcacactcgaggtccctt

SEQ ID NO: 4290600 - DNA, 25 bp, Homo sapien
gggaaggatgcttcacactcgaggt

SEQ ID NO: 4290601 - DNA, 25 bp, Homo sapien
cttctccagagggtctggcgggcag

SEQ ID NO: 4290602 - DNA, 25 bp, Homo sapien
gaaggatgcttcacactcgaggtcc

SEQ ID NO: 4290603 - DNA, 25 bp, Homo sapien
ttgagcaggaggctaggctgcacct

SEQ ID NO: 4290604 - DNA, 25 bp, Homo sapien
tgggcactccccattctaagaggac

SEQ ID NO: 4290605 - DNA, 25 bp, Homo sapien
gagatgggaattctggatagcacca

SEQ ID NO: 4290606 - DNA, 25 bp, Homo sapien
gatagcaccagtagcgggtacacct

SEQ ID NO: 4290607 - DNA, 25 bp, Homo sapien
ctcgcaggccggcactcccctctcc

SEQ ID NO: 4290608 - DNA, 25 bp, Homo sapien
agtgctggggctccacctcgcaggc

SEQ ID NO: 4290609 - DNA, 25 bp, Homo sapien
tcgcaggccggcactcccctctccc

SEQ ID NO: 4290610 - DNA, 25 bp, Homo sapien
tggaggtggagtgctggggctccac

SEQ ID NO: 4290611 - DNA, 25 bp, Homo sapien
ccctcggacgctgcaagtgcgttca

SEQ ID NO: 4290612 - DNA, 25 bp, Homo sapien
gggctgtgctgggaccctagtctca

SEQ ID NO: 4290613 - DNA, 25 bp, Homo sapien
tcttgtggccaaaggtttctgggct

SEQ ID NO: 4290614 - DNA, 25 bp, Homo sapien
caacagggaagggtcacaaaatgcc

SEQ ID NO: 4290615 - DNA, 25 bp, Homo sapien
aggcctgcttgaaggcgtgttgctt

SEQ ID NO: 4290616 - DNA, 25 bp, Homo sapien
ccgggccgcggatgaggcgcttatg

SEQ ID NO: 4290617 - DNA, 25 bp, Homo sapien
ggcccttgggcttggcgaaggcctg

SEQ ID NO: 4290618 - DNA, 25 bp, Homo sapien
atgaggcgcttatggccccgcttgc

SEQ ID NO: 4290619 - DNA, 25 bp, Homo sapien
aactctgccgtcagctctgccccat

SEQ ID NO: 4290620 - DNA, 25 bp, Homo sapien
ggaactctgccgtcagctctgcccc

SEQ ID NO: 4290621 - DNA, 25 bp, Homo sapien
agaggaactctgccgtcagctctgc

SEQ ID NO: 4290622 - DNA, 25 bp, Homo sapien
gaggaactctgccgtcagctctgcc

SEQ ID NO: 4290623 - DNA, 25 bp, Homo sapien
accccaatgggaggggctctgacac

SEQ ID NO: 4290624 - DNA, 25 bp, Homo sapien
cccaatgggaggggctctgacacac

SEQ ID NO: 4290625 - DNA, 25 bp, Homo sapien
tcaccccaatgggaggggctctgac

SEQ ID NO: 4290626 - DNA, 25 bp, Homo sapien
caccccaatgggaggggctctgaca

SEQ ID NO: 4290627 - DNA, 25 bp, Homo sapien
gatcaacacgacagcaacgattcct

SEQ ID NO: 4290628 - DNA, 25 bp, Homo sapien
gcctcagatgccctatgatcaacac

SEQ ID NO: 4290629 - DNA, 25 bp, Homo sapien
catgcgtgttgctccttgggcctca

SEQ ID NO: 4290630 - DNA, 25 bp, Homo sapien
ttctgagccaccgatcagctgggca

SEQ ID NO: 4290631 - DNA, 25 bp, Homo sapien
gatggaagtcctgctccacggagtc

SEQ ID NO: 4290632 - DNA, 25 bp, Homo sapien
cagctggagtagagcattcgctcct

SEQ ID NO: 4290633 - DNA, 25 bp, Homo sapien
tttcttggcgatctccagatggaag

SEQ ID NO: 4290634 - DNA, 25 bp, Homo sapien
cttgtaccccggcatggagtagatg

SEQ ID NO: 4290635 - DNA, 25 bp, Homo sapien
cctcatgggtgtgcttgtagaggaa

SEQ ID NO: 4290636 - DNA, 25 bp, Homo sapien
ggaagaagtggtagcgggcagcatc

SEQ ID NO: 4290637 - DNA, 25 bp, Homo sapien
aagaagtggtagcgggcagcatctc

SEQ ID NO: 4290638 - DNA, 25 bp, Homo sapien
agactcaagggggtcgccctcatgg

SEQ ID NO: 4290639 - DNA, 25 bp, Homo sapien
ctcaatggtttcccgctctaggtcc

SEQ ID NO: 4290640 - DNA, 25 bp, Homo sapien
caatggtttcccgctctaggtccag

SEQ ID NO: 4290641 - DNA, 25 bp, Homo sapien
aatggtttcccgctctaggtccagc

SEQ ID NO: 4290642 - DNA, 25 bp, Homo sapien
tggtttcccgctctaggtccagctt

SEQ ID NO: 4290643 - DNA, 25 bp, Homo sapien
gcagggtctggtgcttgctttccac

SEQ ID NO: 4290644 - DNA, 25 bp, Homo sapien
ccctgcagggtctggtgcttgcttt

SEQ ID NO: 4290645 - DNA, 25 bp, Homo sapien
ggtctggtgcttgctttccacactg

SEQ ID NO: 4290646 - DNA, 25 bp, Homo sapien
tgcttgctttccacactgatctctg

SEQ ID NO: 4290647 - DNA, 25 bp, Homo sapien
tcgttaatgcggatctgctggagct

SEQ ID NO: 4290648 - DNA, 25 bp, Homo sapien
gggcaggtgccgcacaggacgacag

SEQ ID NO: 4290649 - DNA, 25 bp, Homo sapien
gtgccgcacaggacgacaggtgttt

SEQ ID NO: 4290650 - DNA, 25 bp, Homo sapien
ggagctctctctcagccgaggtcag

SEQ ID NO: 4290651 - DNA, 25 bp, Homo sapien
ggtacccagcaaaagagaggtcatc

SEQ ID NO: 4290652 - DNA, 25 bp, Homo sapien
tggtacccagcaaaagagaggtcat

SEQ ID NO: 4290653 - DNA, 25 bp, Homo sapien
ctggtacccagcaaaagagaggtca

SEQ ID NO: 4290654 - DNA, 25 bp, Homo sapien
agctcatccttgatgtggccacctc

SEQ ID NO: 4290655 - DNA, 25 bp, Homo sapien
cttcacagtcccgaagagctcatcc

SEQ ID NO: 4290656 - DNA, 25 bp, Homo sapien
agagctcatccttgatgtggccacc

SEQ ID NO: 4290657 - DNA, 25 bp, Homo sapien
tcacagtcccgaagagctcatcctt

SEQ ID NO: 4290658 - DNA, 25 bp, Homo sapien
actgtggcccgcgtggccgcgtaca

SEQ ID NO: 4290659 - DNA, 25 bp, Homo sapien
tcactgtggcccgcgtggccgcgta

SEQ ID NO: 4290660 - DNA, 25 bp, Homo sapien
ttttcactgtggcccgcgtggccgc

SEQ ID NO: 4290661 - DNA, 25 bp, Homo sapien
ctttttcactgtggcccgcgtggcc

SEQ ID NO: 4290662 - DNA, 25 bp, Homo sapien
gagcattctgtgagtcgaggcggta

SEQ ID NO: 4290663 - DNA, 25 bp, Homo sapien
cctgtcatagtcctgatcccagcgg

SEQ ID NO: 4290664 - DNA, 25 bp, Homo sapien
gagccattcgaagccctgagcattc

SEQ ID NO: 4290665 - DNA, 25 bp, Homo sapien
cagcggcctactggctcctgcgagg

SEQ ID NO: 4290666 - DNA, 25 bp, Homo sapien
caaccttgatgagccgcacagagcc

SEQ ID NO: 4290667 - DNA, 25 bp, Homo sapien
acaaccttgatgagccgcacagagc

SEQ ID NO: 4290668 - DNA, 25 bp, Homo sapien
cacaaccttgatgagccgcacagag

SEQ ID NO: 4290669 - DNA, 25 bp, Homo sapien
caagaaacatggtgggggatgagtg

SEQ ID NO: 4290670 - DNA, 25 bp, Homo sapien
cagagacgagtatggggcctgctct

SEQ ID NO: 4290671 - DNA, 25 bp, Homo sapien
gagtggacagagacgagtatggggc

SEQ ID NO: 4290672 - DNA, 25 bp, Homo sapien
gaacaagaaacatggtgggggatga

SEQ ID NO: 4290673 - DNA, 25 bp, Homo sapien
tgttaccagggcaaactgacacccc

SEQ ID NO: 4290674 - DNA, 25 bp, Homo sapien
ggccccttctagtgttaccagggca

SEQ ID NO: 4290675 - DNA, 25 bp, Homo sapien
ccagccaccatcaataatccagagg

SEQ ID NO: 4290676 - DNA, 25 bp, Homo sapien
cctgggacacctgagcctctattat

SEQ ID NO: 4290677 - DNA, 25 bp, Homo sapien
tcaggcaggtcgatggtggcagccc

SEQ ID NO: 4290678 - DNA, 25 bp, Homo sapien
cgcaccaggattcaggtggtcaggc

SEQ ID NO: 4290679 - DNA, 25 bp, Homo sapien
gtggctgatggccaaacccgccagg

SEQ ID NO: 4290680 - DNA, 25 bp, Homo sapien
aagtggccacaaccgcaccaggatt

SEQ ID NO: 4290681 - DNA, 25 bp, Homo sapien
gggcgcttccgagagcccagaccga

SEQ ID NO: 4290682 - DNA, 25 bp, Homo sapien
cgacccgcggctgcaaaagagaaca

SEQ ID NO: 4290683 - DNA, 25 bp, Homo sapien
gagaacaggaagctttctcccggct

SEQ ID NO: 4290684 - DNA, 25 bp, Homo sapien
caggaagctttctcccggctggtgt

SEQ ID NO: 4290685 - DNA, 25 bp, Homo sapien
cgtggatgcccgtttggtgcgccat

SEQ ID NO: 4290686 - DNA, 25 bp, Homo sapien
gcttcgctccgtccgcgccgtcgga

SEQ ID NO: 4290687 - DNA, 25 bp, Homo sapien
tcggcgcttcgctccgtccgcgccg

SEQ ID NO: 4290688 - DNA, 25 bp, Homo sapien
gagccctccgcttgaccctggcccg

SEQ ID NO: 4290689 - DNA, 25 bp, Homo sapien
tccgcgccgtcggagccctccgctt

SEQ ID NO: 4290690 - DNA, 25 bp, Homo sapien
ggaggctgtcgaccctcgcgcagct

SEQ ID NO: 4290691 - DNA, 25 bp, Homo sapien
atgtggcggaggctgtcgaccctcg

SEQ ID NO: 4290692 - DNA, 25 bp, Homo sapien
ctcgcgcagcttcccgggcggtgcc

SEQ ID NO: 4290693 - DNA, 25 bp, Homo sapien
ggcggtgccgcaggacccgccccca

SEQ ID NO: 4290694 - DNA, 25 bp, Homo sapien
tggatgaactgtgacaaagtagggt

SEQ ID NO: 4290695 - DNA, 25 bp, Homo sapien
ggtactgcgtggtctccccagctga

SEQ ID NO: 4290696 - DNA, 25 bp, Homo sapien
tgacaaagtagggtactgcgtggtc

SEQ ID NO: 4290697 - DNA, 25 bp, Homo sapien
gtagggtactgcgtggtctccccag

SEQ ID NO: 4290698 - DNA, 25 bp, Homo sapien
gatcctgctgtctattccgcgaaga

SEQ ID NO: 4290699 - DNA, 25 bp, Homo sapien
ccgcgaagacatcttgaatgcaggg

SEQ ID NO: 4290700 - DNA, 25 bp, Homo sapien
agtccagtaaggatcctgctgtcta

SEQ ID NO: 4290701 - DNA, 25 bp, Homo sapien
aagacatcttgaatgcagggacagc

SEQ ID NO: 4290702 - DNA, 25 bp, Homo sapien
aggacgcacgctaccctggaatgca

SEQ ID NO: 4290703 - DNA, 25 bp, Homo sapien
tcctgcgcccgcctagaaagcggga

SEQ ID NO: 4290704 - DNA, 25 bp, Homo sapien
actcggtagagttccagcattcggg

SEQ ID NO: 4290705 - DNA, 25 bp, Homo sapien
ctggaatgcaggctacgccgagtga

SEQ ID NO: 4290706 - DNA, 25 bp, Homo sapien
cggactgcattgcttgggtccccat

SEQ ID NO: 4290707 - DNA, 25 bp, Homo sapien
gcttggtccacagtcggactgcatt

SEQ ID NO: 4290708 - DNA, 25 bp, Homo sapien
agccttgtgcagtgagttctcctaa

SEQ ID NO: 4290709 - DNA, 25 bp, Homo sapien
ttagactctcatggtccagcccgtg

SEQ ID NO: 4290710 - DNA, 25 bp, Homo sapien
aagggtattagccaaagatgccagg

SEQ ID NO: 4290711 - DNA, 25 bp, Homo sapien
tagctagcccatgtttagatccagg

SEQ ID NO: 4290712 - DNA, 25 bp, Homo sapien
agatgccaggatgggtagctagccc

SEQ ID NO: 4290713 - DNA, 25 bp, Homo sapien
cttgtagaaacctttgggcagcctc

SEQ ID NO: 4290714 - DNA, 25 bp, Homo sapien
caattcttaaggtggcaaacgccgc

SEQ ID NO: 4290715 - DNA, 25 bp, Homo sapien
cagaactatacagtgggtggcatcc

SEQ ID NO: 4290716 - DNA, 25 bp, Homo sapien
cagagatggccccaaagtgcagctt

SEQ ID NO: 4290717 - DNA, 25 bp, Homo sapien
cagggcccaacgatagagactgtga

SEQ ID NO: 4290718 - DNA, 25 bp, Homo sapien
tagaaccagctcttggttgggagct

SEQ ID NO: 4290719 - DNA, 25 bp, Homo sapien
ggaagactcactaatacttgtggca

SEQ ID NO: 4290720 - DNA, 25 bp, Homo sapien
caaacactattagcagggatgcagg

SEQ ID NO: 4290721 - DNA, 25 bp, Homo sapien
tatatgcgtatctgtatgcacacag

SEQ ID NO: 4290722 - DNA, 25 bp, Homo sapien
tgtaaacaactcagactcacttcac

SEQ ID NO: 4290723 - DNA, 25 bp, Homo sapien
cagtgtaaacaactcagactcactt

SEQ ID NO: 4290724 - DNA, 25 bp, Homo sapien
gtgtaaacaactcagactcacttca

SEQ ID NO: 4290725 - DNA, 25 bp, Homo sapien
taaacaactcagactcacttcacaa

SEQ ID NO: 4290726 - DNA, 25 bp, Homo sapien
tgtaaaaggatgttctccagcccag

SEQ ID NO: 4290727 - DNA, 25 bp, Homo sapien
tgtgcggaactgatgacttcaccgg

SEQ ID NO: 4290728 - DNA, 25 bp, Homo sapien
gataatgccacaagtacacagggag

SEQ ID NO: 4290729 - DNA, 25 bp, Homo sapien
cagggagacccagtaacaagacatg

SEQ ID NO: 4290730 - DNA, 25 bp, Homo sapien
gtcatcaatggtgggcaaccaaaag

SEQ ID NO: 4290731 - DNA, 25 bp, Homo sapien
tcagtcatcaatggtgggcaaccaa

SEQ ID NO: 4290732 - DNA, 25 bp, Homo sapien
cagtcatcaatggtgggcaaccaaa

SEQ ID NO: 4290733 - DNA, 25 bp, Homo sapien
catcaatggtgggcaaccaaaaggc

SEQ ID NO: 4290734 - DNA, 25 bp, Homo sapien
cagacatggatcttgccatcctctg

SEQ ID NO: 4290735 - DNA, 25 bp, Homo sapien
ccagacatggatcttgccatcctct

SEQ ID NO: 4290736 - DNA, 25 bp, Homo sapien
agacatggatcttgccatcctctga

SEQ ID NO: 4290737 - DNA, 25 bp, Homo sapien
agtaaatgaagcctccagtgtgaca

SEQ ID NO: 4290738 - DNA, 25 bp, Homo sapien
gtaaatgaagcctccagtgtgacag

SEQ ID NO: 4290739 - DNA, 25 bp, Homo sapien
caagttcgatcatactgcatcttaa

SEQ ID NO: 4290740 - DNA, 25 bp, Homo sapien
acaagttcgatcatactgcatctta

SEQ ID NO: 4290741 - DNA, 25 bp, Homo sapien
agttcgatcatactgcatcttaaag

SEQ ID NO: 4290742 - DNA, 25 bp, Homo sapien
ttcgatcatactgcatcttaaaggt

SEQ ID NO: 4290743 - DNA, 25 bp, Homo sapien
taacccttctggatcaaaagaacaa

SEQ ID NO: 4290744 - DNA, 25 bp, Homo sapien
gagttgacacctgcagcgaaaatta

SEQ ID NO: 4290745 - DNA, 25 bp, Homo sapien
acctgcagcgaaaattaacccttct

SEQ ID NO: 4290746 - DNA, 25 bp, Homo sapien
ttcagagttgacacctgcagcgaaa

SEQ ID NO: 4290747 - DNA, 25 bp, Homo sapien
ggtcttatcaagagacccagaaatg

SEQ ID NO: 4290748 - DNA, 25 bp, Homo sapien
cccagagtcgaatggtcttatcaag

SEQ ID NO: 4290749 - DNA, 25 bp, Homo sapien
gaatggtcttatcaagagacccaga

SEQ ID NO: 4290750 - DNA, 25 bp, Homo sapien
gagatcccagagtcgaatggtctta

SEQ ID NO: 4290751 - DNA, 25 bp, Homo sapien
tgcaaggacaagtaacgaatagtat

SEQ ID NO: 4290752 - DNA, 25 bp, Homo sapien
tgtatttgttgtcatgcaaggacaa

SEQ ID NO: 4290753 - DNA, 25 bp, Homo sapien
tccaggaaagtatctgatgtatttg

SEQ ID NO: 4290754 - DNA, 25 bp, Homo sapien
atgtccaggaaagtatctgatgtat

SEQ ID NO: 4290755 - DNA, 25 bp, Homo sapien
ttgaaagcatcgagtcatcccaggg

SEQ ID NO: 4290756 - DNA, 25 bp, Homo sapien
gaagatcaggttgaaccctggcagc

SEQ ID NO: 4290757 - DNA, 25 bp, Homo sapien
taattacaatgcaactcccaccctg

SEQ ID NO: 4290758 - DNA, 25 bp, Homo sapien
gaataattctactctgcagctgaag

SEQ ID NO: 4290759 - DNA, 25 bp, Homo sapien
cctgtaccgggtggtatcatagacc

SEQ ID NO: 4290760 - DNA, 25 bp, Homo sapien
ggtggtatcatagaccctcaaactg

SEQ ID NO: 4290761 - DNA, 25 bp, Homo sapien
gaccctcaaactgtacaaactacta

SEQ ID NO: 4290762 - DNA, 25 bp, Homo sapien
tgtacagttatctcctgtaccgggt

SEQ ID NO: 4290763 - DNA, 25 bp, Homo sapien
gctctgagataggcacagccaaaat

SEQ ID NO: 4290764 - DNA, 25 bp, Homo sapien
gccaaaatagcagtataagctatcc

SEQ ID NO: 4290765 - DNA, 25 bp, Homo sapien
taaaaatcaatacaggcagaagagt

SEQ ID NO: 4290766 - DNA, 25 bp, Homo sapien
gctatccttgtggaatgacattaga

SEQ ID NO: 4290767 - DNA, 25 bp, Homo sapien
gctgtaaacaactgtgtttgctgca

SEQ ID NO: 4290768 - DNA, 25 bp, Homo sapien
agctgtaaacaactgtgtttgctgc

SEQ ID NO: 4290769 - DNA, 25 bp, Homo sapien
atggagtcgtcgtcgctactcgaga

SEQ ID NO: 4290770 - DNA, 25 bp, Homo sapien
tactcgagatgaccgtctcgccgtt

SEQ ID NO: 4290771 - DNA, 25 bp, Homo sapien
cgagttttcgcggaacaccttagcg

SEQ ID NO: 4290772 - DNA, 25 bp, Homo sapien
gaacaccttagcgacgcggaagctc

SEQ ID NO: 4290773 - DNA, 25 bp, Homo sapien
ttgtgtccgccattttggggcgaca

SEQ ID NO: 4290774 - DNA, 25 bp, Homo sapien
cggcgcgtcgccggctcattgtgtc

SEQ ID NO: 4290775 - DNA, 25 bp, Homo sapien
acagccacctcacggacaaccggcg

SEQ ID NO: 4290776 - DNA, 25 bp, Homo sapien
tcttcctgcttggtcgagggtcttc

SEQ ID NO: 4290777 - DNA, 25 bp, Homo sapien
gcaggcaagcttgaccgctagtcca

SEQ ID NO: 4290778 - DNA, 25 bp, Homo sapien
tagtccaccgcagcgtccgcttaga

SEQ ID NO: 4290779 - DNA, 25 bp, Homo sapien
tgactcaggtgagccgctcgcaggc

SEQ ID NO: 4290780 - DNA, 25 bp, Homo sapien
cgcttagacagcttcgacctcttta

SEQ ID NO: 4290781 - DNA, 25 bp, Homo sapien
gacagagcagacggtttccccccaa

SEQ ID NO: 4290782 - DNA, 25 bp, Homo sapien
gcgacagagcagacggtttcccccc

SEQ ID NO: 4290783 - DNA, 25 bp, Homo sapien
ggcgacagagcagacggtttccccc

SEQ ID NO: 4290784 - DNA, 25 bp, Homo sapien
agaattgagaaaggcggaggctgca

SEQ ID NO: 4290785 - DNA, 25 bp, Homo sapien
ctggatggcctgttggatggttacc

SEQ ID NO: 4290786 - DNA, 25 bp, Homo sapien
cctctggatggcctgttggatggtt

SEQ ID NO: 4290787 - DNA, 25 bp, Homo sapien
tctggatggcctgttggatggttac

SEQ ID NO: 4290788 - DNA, 25 bp, Homo sapien
tggatggcctgttggatggttacca

SEQ ID NO: 4290789 - DNA, 25 bp, Homo sapien
aaaaaatcggcaatcggtgaggcgg

SEQ ID NO: 4290790 - DNA, 25 bp, Homo sapien
tcgcatggccttcagaagcggtccc

SEQ ID NO: 4290791 - DNA, 25 bp, Homo sapien
tctttctcgcatcaccgggcattac

SEQ ID NO: 4290792 - DNA, 25 bp, Homo sapien
aggtctgtcagtggccagcaaagag

SEQ ID NO: 4290793 - DNA, 25 bp, Homo sapien
tgtcctgtgctcatacccagtggca

SEQ ID NO: 4290794 - DNA, 25 bp, Homo sapien
tgtgctcatacccagtggcaaggct

SEQ ID NO: 4290795 - DNA, 25 bp, Homo sapien
ggcagccttagcattgagcgtcccc

SEQ ID NO: 4290796 - DNA, 25 bp, Homo sapien
ctctggcagccttagcattgagcgt

SEQ ID NO: 4290797 - DNA, 25 bp, Homo sapien
ttcacaacagaagtcaggcatggct

SEQ ID NO: 4290798 - DNA, 25 bp, Homo sapien
caactgtgtgggtagaagggcatcc

SEQ ID NO: 4290799 - DNA, 25 bp, Homo sapien
tgcagtggacagtatcagagagcct

SEQ ID NO: 4290800 - DNA, 25 bp, Homo sapien
ttaccggagagctgagaactaggca

SEQ ID NO: 4290801 - DNA, 25 bp, Homo sapien
tgcgggaccggaactttcagctgag

SEQ ID NO: 4290802 - DNA, 25 bp, Homo sapien
tgcagggcgtgatcagcgttcccaa

SEQ ID NO: 4290803 - DNA, 25 bp, Homo sapien
tatccttggaccctggtggcagaca

SEQ ID NO: 4290804 - DNA, 25 bp, Homo sapien
gggacaatcaacagcttcctggcag

SEQ ID NO: 4290805 - DNA, 25 bp, Homo sapien
catagccgtgtccaggtattcgagg

SEQ ID NO: 4290806 - DNA, 25 bp, Homo sapien
catgtcagtgggcatcttcgttcat

SEQ ID NO: 4290807 - DNA, 25 bp, Homo sapien
gctgcactggccatccagcaactgg

SEQ ID NO: 4290808 - DNA, 25 bp, Homo sapien
ccacattggcccaagactgttggtg

SEQ ID NO: 4290809 - DNA, 25 bp, Homo sapien
ggctagtcgtctggcctcccctgag

SEQ ID NO: 4290810 - DNA, 25 bp, Homo sapien
ggtcacagggtaaagttaggagcaa

SEQ ID NO: 4290811 - DNA, 25 bp, Homo sapien
tcacagggtaaagttaggagcaagg

SEQ ID NO: 4290812 - DNA, 25 bp, Homo sapien
gtgactcctgggttgccttgggcta

SEQ ID NO: 4290813 - DNA, 25 bp, Homo sapien
gttgaacaccattcggaaggccctg

SEQ ID NO: 4290814 - DNA, 25 bp, Homo sapien
tagaacagcatatagattggcaggg

SEQ ID NO: 4290815 - DNA, 25 bp, Homo sapien
taccctgcccaggtatgagtccctt

SEQ ID NO: 4290816 - DNA, 25 bp, Homo sapien
cagggatgtgaaagctagaacagca

SEQ ID NO: 4290817 - DNA, 25 bp, Homo sapien
aagactgtgctgtctcgggccgact

SEQ ID NO: 4290818 - DNA, 25 bp, Homo sapien
ttttgcaagcccacgtgagaggagt

SEQ ID NO: 4290819 - DNA, 25 bp, Homo sapien
taaccatgggtaaggaaatgcactg

SEQ ID NO: 4290820 - DNA, 25 bp, Homo sapien
tgctggcccatgtggctagaacccg

SEQ ID NO: 4290821 - DNA, 25 bp, Homo sapien
gatgacaggtaccaatgtcatggac

SEQ ID NO: 4290822 - DNA, 25 bp, Homo sapien
acctcttgttcctgcggcctcggtg

SEQ ID NO: 4290823 - DNA, 25 bp, Homo sapien
aatgtcatggacacccacctcttgt

SEQ ID NO: 4290824 - DNA, 25 bp, Homo sapien
ttcctgcggcctcggtgatggcata

SEQ ID NO: 4290825 - DNA, 25 bp, Homo sapien
tctatatctattcccttccagccag

SEQ ID NO: 4290826 - DNA, 25 bp, Homo sapien
tcggccagttcagcgttcccgtgct

SEQ ID NO: 4290827 - DNA, 25 bp, Homo sapien
cagagcaaggttggtcctcagggcc

SEQ ID NO: 4290828 - DNA, 25 bp, Homo sapien
ccttggctgtttggttaactgtcac

SEQ ID NO: 4290829 - DNA, 25 bp, Homo sapien
aaaaagccatagagaacagcgaggc

SEQ ID NO: 4290830 - DNA, 25 bp, Homo sapien
gccacggctccaatccctatatgag

SEQ ID NO: 4290831 - DNA, 25 bp, Homo sapien
aatccctatatgagtgagcagtaga

SEQ ID NO: 4290832 - DNA, 25 bp, Homo sapien
aaagccatagagaacagcgaggcct

SEQ ID NO: 4290833 - DNA, 25 bp, Homo sapien
tcagtggcgctgtctcctcaccaga

SEQ ID NO: 4290834 - DNA, 25 bp, Homo sapien
gaggcactgcagtgtgggaactgtc

SEQ ID NO: 4290835 - DNA, 25 bp, Homo sapien
ggttctcagctgaaacaaagaggtg

SEQ ID NO: 4290836 - DNA, 25 bp, Homo sapien
aactgtcccgaggagctggttctca

SEQ ID NO: 4290837 - DNA, 25 bp, Homo sapien
cccgtgcccagtatgtctgaaaggc

SEQ ID NO: 4290838 - DNA, 25 bp, Homo sapien
tccccgtgcccagtatgtctgaaag

SEQ ID NO: 4290839 - DNA, 25 bp, Homo sapien
tgtccccgtgcccagtatgtctgaa

SEQ ID NO: 4290840 - DNA, 25 bp, Homo sapien
gtgcccagtatgtctgaaaggccac

SEQ ID NO: 4290841 - DNA, 25 bp, Homo sapien
tgtggccagagggccagaaggtcct

SEQ ID NO: 4290842 - DNA, 25 bp, Homo sapien
ggccagaaggtcctgagcaccaagc

SEQ ID NO: 4290843 - DNA, 25 bp, Homo sapien
cagaaggtcctgagcaccaagccat

SEQ ID NO: 4290844 - DNA, 25 bp, Homo sapien
ccagagggccagaaggtcctgagca

SEQ ID NO: 4290845 - DNA, 25 bp, Homo sapien
taattgcattttcgcagcagcagtg

SEQ ID NO: 4290846 - DNA, 25 bp, Homo sapien
ttgcattttcgcagcagcagtgatg

SEQ ID NO: 4290847 - DNA, 25 bp, Homo sapien
tttgctgtaattgcattttcgcagc

SEQ ID NO: 4290848 - DNA, 25 bp, Homo sapien
cagagacagcggctttctctgaggc

SEQ ID NO: 4290849 - DNA, 25 bp, Homo sapien
cacaggggaaggcaacaacaggggc

SEQ ID NO: 4290850 - DNA, 25 bp, Homo sapien
ggaccaccaggttcctgttggagga

SEQ ID NO: 4290851 - DNA, 25 bp, Homo sapien
ccaccaggttcctgttggaggacag

SEQ ID NO: 4290852 - DNA, 25 bp, Homo sapien
caggggaaggcaacaacaggggcaa

SEQ ID NO: 4290853 - DNA, 25 bp, Homo sapien
tgcctcccagggcaatggcgcaccc

SEQ ID NO: 4290854 - DNA, 25 bp, Homo sapien
gatgagacagtttactctggggcca

SEQ ID NO: 4290855 - DNA, 25 bp, Homo sapien
cagcagactcagttctgagcatgtg

SEQ ID NO: 4290856 - DNA, 25 bp, Homo sapien
ctcagttctgagcatgtggccagca

SEQ ID NO: 4290857 - DNA, 25 bp, Homo sapien
gagctccaggcctagaaaatcagag

SEQ ID NO: 4290858 - DNA, 25 bp, Homo sapien
gggtagctcagccactcagtctgga

SEQ ID NO: 4290859 - DNA, 25 bp, Homo sapien
gacagcacattagagggtagcccct

SEQ ID NO: 4290860 - DNA, 25 bp, Homo sapien
tttcaacaagggtaaggctgacctc

SEQ ID NO: 4290861 - DNA, 25 bp, Homo sapien
tgagctctggagtgccaaggcctac

SEQ ID NO: 4290862 - DNA, 25 bp, Homo sapien
tggatccaagatggcatcccagctg

SEQ ID NO: 4290863 - DNA, 25 bp, Homo sapien
caacaatactgtgcctgagctctgg

SEQ ID NO: 4290864 - DNA, 25 bp, Homo sapien
catcatgggtcatggacctgctgca

SEQ ID NO: 4290865 - DNA, 25 bp, Homo sapien
taatagggcatgacctaacccgtcc

SEQ ID NO: 4290866 - DNA, 25 bp, Homo sapien
ggttaatgcccaaggcctgccgtct

SEQ ID NO: 4290867 - DNA, 25 bp, Homo sapien
gataaagcgtggtgtggccctcatc

SEQ ID NO: 4290868 - DNA, 25 bp, Homo sapien
cactgactcgtgctggtatgaggcc

SEQ ID NO: 4290869 - DNA, 25 bp, Homo sapien
ccagtatttacaggggctagagggg

SEQ ID NO: 4290870 - DNA, 25 bp, Homo sapien
cttgccagcaccccccactcagtca

SEQ ID NO: 4290871 - DNA, 25 bp, Homo sapien
tagaggggtcaagctgtgctcagcc

SEQ ID NO: 4290872 - DNA, 25 bp, Homo sapien
tatttacaggggctagaggggtcaa

SEQ ID NO: 4290873 - DNA, 25 bp, Homo sapien
ttttcaaagccatctggcagaggcc

SEQ ID NO: 4290874 - DNA, 25 bp, Homo sapien
ggcccattaccccttggcatcaggt

SEQ ID NO: 4290875 - DNA, 25 bp, Homo sapien
gcatcaggtcctctggaacacaggg

SEQ ID NO: 4290876 - DNA, 25 bp, Homo sapien
caacgggttgtcttgatcctgctgt

SEQ ID NO: 4290877 - DNA, 25 bp, Homo sapien
cttcctataagcaaccctgtctctg

SEQ ID NO: 4290878 - DNA, 25 bp, Homo sapien
cagcttcctataagcaaccctgtct

SEQ ID NO: 4290879 - DNA, 25 bp, Homo sapien
gcttcctataagcaaccctgtctct

SEQ ID NO: 4290880 - DNA, 25 bp, Homo sapien
gccagcttcctataagcaaccctgt

SEQ ID NO: 4290881 - DNA, 25 bp, Homo sapien
catagctagggccacaacactgaag

SEQ ID NO: 4290882 - DNA, 25 bp, Homo sapien
cactgaaggcgaagagccctagaac

SEQ ID NO: 4290883 - DNA, 25 bp, Homo sapien
cctagaaccttgctatggagagcag

SEQ ID NO: 4290884 - DNA, 25 bp, Homo sapien
gacagagacctagagcccaatttag

SEQ ID NO: 4290885 - DNA, 25 bp, Homo sapien
tgatctgccgtgtcaggcctcaggg

SEQ ID NO: 4290886 - DNA, 25 bp, Homo sapien
ttccttacaacagggacaggctggt

SEQ ID NO: 4290887 - DNA, 25 bp, Homo sapien
cctcagggcacgatggaaggaatgt

SEQ ID NO: 4290888 - DNA, 25 bp, Homo sapien
cgtggcatgatacaaggacctgggc

SEQ ID NO: 4290889 - DNA, 25 bp, Homo sapien
gtgagggccacacggcaagagtggg

SEQ ID NO: 4290890 - DNA, 25 bp, Homo sapien
ccacacggcaagagtgggctgcaga

SEQ ID NO: 4290891 - DNA, 25 bp, Homo sapien
tggtgagggccacacggcaagagtg

SEQ ID NO: 4290892 - DNA, 25 bp, Homo sapien
agggccacacggcaagagtgggctg

SEQ ID NO: 4290893 - DNA, 25 bp, Homo sapien
tgttctgctccactaggttggccag

SEQ ID NO: 4290894 - DNA, 25 bp, Homo sapien
ggcgagagcgtttccgccggtcagg

SEQ ID NO: 4290895 - DNA, 25 bp, Homo sapien
gtcaggcttccgctgcttgtggagc

SEQ ID NO: 4290896 - DNA, 25 bp, Homo sapien
ttggcgccgccgcacggagatgttc

SEQ ID NO: 4290897 - DNA, 25 bp, Homo sapien
tcatcgtagttgtgggtccttctct

SEQ ID NO: 4290898 - DNA, 25 bp, Homo sapien
cagatgaactcatcgtagttgtggg

SEQ ID NO: 4290899 - DNA, 25 bp, Homo sapien
tgaactcatcgtagttgtgggtcct

SEQ ID NO: 4290900 - DNA, 25 bp, Homo sapien
ggtgcagatgaactcatcgtagttg

SEQ ID NO: 4290901 - DNA, 25 bp, Homo sapien
cttgaggcacgcctcatagtttgca

SEQ ID NO: 4290902 - DNA, 25 bp, Homo sapien
ctccttgaggcacgcctcatagttt

SEQ ID NO: 4290903 - DNA, 25 bp, Homo sapien
gaggcacgcctcatagtttgcaatc

SEQ ID NO: 4290904 - DNA, 25 bp, Homo sapien
tcctccttgaggcacgcctcatagt

SEQ ID NO: 4290905 - DNA, 25 bp, Homo sapien
ctccacacacttcagcagtgccagc

SEQ ID NO: 4290906 - DNA, 25 bp, Homo sapien
cacacttcagcagtgccagcagctc

SEQ ID NO: 4290907 - DNA, 25 bp, Homo sapien
acacacttcagcagtgccagcagct

SEQ ID NO: 4290908 - DNA, 25 bp, Homo sapien
ccacacacttcagcagtgccagcag

SEQ ID NO: 4290909 - DNA, 25 bp, Homo sapien
acaaagccccacgagcaataggcag

SEQ ID NO: 4290910 - DNA, 25 bp, Homo sapien
caacaaagccccacgagcaataggc

SEQ ID NO: 4290911 - DNA, 25 bp, Homo sapien
ttgcacctctgatcggggcgggcca

SEQ ID NO: 4290912 - DNA, 25 bp, Homo sapien
cccagcattgcacctctgatcgggg

SEQ ID NO: 4290913 - DNA, 25 bp, Homo sapien
tcttcacaccaaagttccaatcaag

SEQ ID NO: 4290914 - DNA, 25 bp, Homo sapien
ggagaaaaccacaacggaggctcac

SEQ ID NO: 4290915 - DNA, 25 bp, Homo sapien
taccctctgccaggattaaaggaga

SEQ ID NO: 4290916 - DNA, 25 bp, Homo sapien
gagcagcgagtccatgcctatcaag

SEQ ID NO: 4290917 - DNA, 25 bp, Homo sapien
ttgggtgagtatttctccccactca

SEQ ID NO: 4290918 - DNA, 25 bp, Homo sapien
cttgggtgagtatttctccccactc

SEQ ID NO: 4290919 - DNA, 25 bp, Homo sapien
gggtgagtatttctccccactcaag

SEQ ID NO: 4290920 - DNA, 25 bp, Homo sapien
tgggtgagtatttctccccactcaa

SEQ ID NO: 4290921 - DNA, 25 bp, Homo sapien
ccttggattggtctgatggagggcg

SEQ ID NO: 4290922 - DNA, 25 bp, Homo sapien
ttctctctgctgtccgtggcttcca

SEQ ID NO: 4290923 - DNA, 25 bp, Homo sapien
gatggagggcgaggaacccttccca

SEQ ID NO: 4290924 - DNA, 25 bp, Homo sapien
tgatggagggcgaggaacccttccc

SEQ ID NO: 4290925 - DNA, 25 bp, Homo sapien
tgctgatgacaggacccagatcacg

SEQ ID NO: 4290926 - DNA, 25 bp, Homo sapien
tagcgtatgcagtcaacacgcagca

SEQ ID NO: 4290927 - DNA, 25 bp, Homo sapien
cagatcacggacagcacggttgtag

SEQ ID NO: 4290928 - DNA, 25 bp, Homo sapien
gaaagcactgccgatctcagaggcc

SEQ ID NO: 4290929 - DNA, 25 bp, Homo sapien
gacgttgatggtgttgggctgcagc

SEQ ID NO: 4290930 - DNA, 25 bp, Homo sapien
aagacgttgatggtgttgggctgca

SEQ ID NO: 4290931 - DNA, 25 bp, Homo sapien
acgttgatggtgttgggctgcagca

SEQ ID NO: 4290932 - DNA, 25 bp, Homo sapien
caagacgttgatggtgttgggctgc

SEQ ID NO: 4290933 - DNA, 25 bp, Homo sapien
ctgacagttgcccatcagcagaacc

SEQ ID NO: 4290934 - DNA, 25 bp, Homo sapien
gttgcccatcagcagaaccgctcaa

SEQ ID NO: 4290935 - DNA, 25 bp, Homo sapien
cagaaccgctcaatgcccctggctt

SEQ ID NO: 4290936 - DNA, 25 bp, Homo sapien
acagttgcccatcagcagaaccgct

SEQ ID NO: 4290937 - DNA, 25 bp, Homo sapien
gggcccgagaagatgtgaagcaagg

SEQ ID NO: 4290938 - DNA, 25 bp, Homo sapien
ccgagaagatgtgaagcaagggaac

SEQ ID NO: 4290939 - DNA, 25 bp, Homo sapien
acgggccaggtgaccatacccagca

SEQ ID NO: 4290940 - DNA, 25 bp, Homo sapien
gccaggtgaccatacccagcagtac

SEQ ID NO: 4290941 - DNA, 25 bp, Homo sapien
cagagttggtgttctgcacgtcatc

SEQ ID NO: 4290942 - DNA, 25 bp, Homo sapien
agagttggtgttctgcacgtcatcc

SEQ ID NO: 4290943 - DNA, 25 bp, Homo sapien
gggcagagttggtgttctgcacgtc

SEQ ID NO: 4290944 - DNA, 25 bp, Homo sapien
ggcagagttggtgttctgcacgtca

SEQ ID NO: 4290945 - DNA, 25 bp, Homo sapien
ctggggtgggcggactggaactcgg

SEQ ID NO: 4290946 - DNA, 25 bp, Homo sapien
gggtgggcggactggaactcggctg

SEQ ID NO: 4290947 - DNA, 25 bp, Homo sapien
gtgggcggactggaactcggctgcg

SEQ ID NO: 4290948 - DNA, 25 bp, Homo sapien
ggcggactggaactcggctgcggcc

SEQ ID NO: 4290949 - DNA, 25 bp, Homo sapien
gaagttgtaccaaggagcgtgacct

SEQ ID NO: 4290950 - DNA, 25 bp, Homo sapien
acttacactggatagaaccccacgg

SEQ ID NO: 4290951 - DNA, 25 bp, Homo sapien
gagtgccctgaaacacatgccttta

SEQ ID NO: 4290952 - DNA, 25 bp, Homo sapien
ttacaaacaagtgctgctcggccca

SEQ ID NO: 4290953 - DNA, 25 bp, Homo sapien
gggcttgtgcgcatgaaccagccgc

SEQ ID NO: 4290954 - DNA, 25 bp, Homo sapien
tgcctggaggcttcaccactagctt

SEQ ID NO: 4290955 - DNA, 25 bp, Homo sapien
gtgattgtctagaaaggccggcagc

SEQ ID NO: 4290956 - DNA, 25 bp, Homo sapien
gggacttggcataattgtgattgtc

SEQ ID NO: 4290957 - DNA, 25 bp, Homo sapien
tgactcttgagacttgtgggtctga

SEQ ID NO: 4290958 - DNA, 25 bp, Homo sapien
ttgctggctgacttggactcctcag

SEQ ID NO: 4290959 - DNA, 25 bp, Homo sapien
tgggtctgaatcagctctggctgtg

SEQ ID NO: 4290960 - DNA, 25 bp, Homo sapien
cctcaggcagctgtgactcttgaga

SEQ ID NO: 4290961 - DNA, 25 bp, Homo sapien
tgctgcagagcctctagtactgtct

SEQ ID NO: 4290962 - DNA, 25 bp, Homo sapien
gagcctctagtactgtctgacggtt

SEQ ID NO: 4290963 - DNA, 25 bp, Homo sapien
tgacggttcaccttcagcacatgca

SEQ ID NO: 4290964 - DNA, 25 bp, Homo sapien
tactgtctgacggttcaccttcagc

SEQ ID NO: 4290965 - DNA, 25 bp, Homo sapien
accactgccatcaggttgaagcgga

SEQ ID NO: 4290966 - DNA, 25 bp, Homo sapien
tgccatcaggttgaagcggatgtcg

SEQ ID NO: 4290967 - DNA, 25 bp, Homo sapien
cactgccatcaggttgaagcggatg

SEQ ID NO: 4290968 - DNA, 25 bp, Homo sapien
ccatcaggttgaagcggatgtcgtg

SEQ ID NO: 4290969 - DNA, 25 bp, Homo sapien
atacgctccatgatgacccgccggg

SEQ ID NO: 4290970 - DNA, 25 bp, Homo sapien
gaggccgatacgctccatgatgacc

SEQ ID NO: 4290971 - DNA, 25 bp, Homo sapien
tgatgacccgccgggccttgtctgt

SEQ ID NO: 4290972 - DNA, 25 bp, Homo sapien
agtggcgaggccgatacgctccatg

SEQ ID NO: 4290973 - DNA, 25 bp, Homo sapien
gggtagaccttcagcccatccagct

SEQ ID NO: 4290974 - DNA, 25 bp, Homo sapien
aaagtggaacgcctccatggtccgc

SEQ ID NO: 4290975 - DNA, 25 bp, Homo sapien
ccagctcaaagagccggcctgtgat

SEQ ID NO: 4290976 - DNA, 25 bp, Homo sapien
cggcctgtgataggcacatagctga

SEQ ID NO: 4290977 - DNA, 25 bp, Homo sapien
gcatggctattatgggccttggcca

SEQ ID NO: 4290978 - DNA, 25 bp, Homo sapien
ctggcatggctattatgggccttgg

SEQ ID NO: 4290979 - DNA, 25 bp, Homo sapien
caactccggggcattgccaatcgca

SEQ ID NO: 4290980 - DNA, 25 bp, Homo sapien
cattgccaatcgcatatcctttgct

SEQ ID NO: 4290981 - DNA, 25 bp, Homo sapien
ttcaggagcacgctcagcaaggcat

SEQ ID NO: 4290982 - DNA, 25 bp, Homo sapien
ttcatgcgactcagggtgggtccca

SEQ ID NO: 4290983 - DNA, 25 bp, Homo sapien
caaggcatgagttgcacaagagttg

SEQ ID NO: 4290984 - DNA, 25 bp, Homo sapien
ccaggtccacgctgctgcagttcag

SEQ ID NO: 4290985 - DNA, 25 bp, Homo sapien
cctccaaacaaagcacagagtccag

SEQ ID NO: 4290986 - DNA, 25 bp, Homo sapien
caaacaaagcacagagtccagcaga

SEQ ID NO: 4290987 - DNA, 25 bp, Homo sapien
aaacaaagcacagagtccagcagac

SEQ ID NO: 4290988 - DNA, 25 bp, Homo sapien
tccaaacaaagcacagagtccagca

SEQ ID NO: 4290989 - DNA, 25 bp, Homo sapien
gaccggcgctcttcgatccatttga

SEQ ID NO: 4290990 - DNA, 25 bp, Homo sapien
caccaaggtagagacctttcgccgg

SEQ ID NO: 4290991 - DNA, 25 bp, Homo sapien
caatatcatcatcaatcacggacgt

SEQ ID NO: 4290992 - DNA, 25 bp, Homo sapien
caggaagataaatccatatacaggg

SEQ ID NO: 4290993 - DNA, 25 bp, Homo sapien
tttgctctgaaggtcgtagatctcc

SEQ ID NO: 4290994 - DNA, 25 bp, Homo sapien
aggtcgtagatctcctccacttgca

SEQ ID NO: 4290995 - DNA, 25 bp, Homo sapien
ccctgacatttgctctgaaggtcgt

SEQ ID NO: 4290996 - DNA, 25 bp, Homo sapien
tctgaaggtcgtagatctcctccac

SEQ ID NO: 4290997 - DNA, 25 bp, Homo sapien
cacagccccggtccggcagggagaa

SEQ ID NO: 4290998 - DNA, 25 bp, Homo sapien
ccctgatgagtgagggcgcaggggt

SEQ ID NO: 4290999 - DNA, 25 bp, Homo sapien
agcccctgatgagtgagggcgcagg

SEQ ID NO: 4291000 - DNA, 25 bp, Homo sapien
gcccctgatgagtgagggcgcaggg

SEQ ID NO: 4291001 - DNA, 25 bp, Homo sapien
cgaaatcttccacgagcagggtgaa

SEQ ID NO: 4291002 - DNA, 25 bp, Homo sapien
gatggtcaggcaggcgcgtcccggg

SEQ ID NO: 4291003 - DNA, 25 bp, Homo sapien
atggtcaggcaggcgcgtcccgggc

SEQ ID NO: 4291004 - DNA, 25 bp, Homo sapien
gtgatggtcaggcaggcgcgtcccg

SEQ ID NO: 4291005 - DNA, 25 bp, Homo sapien
tgatggtcaggcaggcgcgtcccgg

SEQ ID NO: 4291006 - DNA, 25 bp, Homo sapien
ctgggtcgctctccagctccagcca

SEQ ID NO: 4291007 - DNA, 25 bp, Homo sapien
ctctccagctccagccagcccttat

SEQ ID NO: 4291008 - DNA, 25 bp, Homo sapien
tccagctccagccagcccttattca

SEQ ID NO: 4291009 - DNA, 25 bp, Homo sapien
ccagctccagccagcccttattcat

SEQ ID NO: 4291010 - DNA, 25 bp, Homo sapien
acacagacaacgggcccagtcgcgt

SEQ ID NO: 4291011 - DNA, 25 bp, Homo sapien
acaacgggcccagtcgcgtcacccg

SEQ ID NO: 4291012 - DNA, 25 bp, Homo sapien
gcggggcggcccctcagcgccatgt

SEQ ID NO: 4291013 - DNA, 25 bp, Homo sapien
cccacacacagacaacgggcccagt

SEQ ID NO: 4291014 - DNA, 25 bp, Homo sapien
gggcgcaggtggggcgagaggaggg

SEQ ID NO: 4291015 - DNA, 25 bp, Homo sapien
gggccgggaagtgctgggcgcaggt

SEQ ID NO: 4291016 - DNA, 25 bp, Homo sapien
gcggggccgggaagtgctgggcgca

SEQ ID NO: 4291017 - DNA, 25 bp, Homo sapien
caggctaggggaaaaggcggggatg

SEQ ID NO: 4291018 - DNA, 25 bp, Homo sapien
cttggcccagcgatgcaaagaactg

SEQ ID NO: 4291019 - DNA, 25 bp, Homo sapien
ggttgtgaccacaccgacacgtatt

SEQ ID NO: 4291020 - DNA, 25 bp, Homo sapien
gatcgtgacgtcttgtaactagcag

SEQ ID NO: 4291021 - DNA, 25 bp, Homo sapien
gataaatcattcttgcggcggcggg

SEQ ID NO: 4291022 - DNA, 25 bp, Homo sapien
ggctattgtactcggctcagatgga

SEQ ID NO: 4291023 - DNA, 25 bp, Homo sapien
caaaggttgggtacagaccatatct

SEQ ID NO: 4291024 - DNA, 25 bp, Homo sapien
gacaaggtaccttctgcacttttgg

SEQ ID NO: 4291025 - DNA, 25 bp, Homo sapien
cagtggccacctgagcctaggtgaa

SEQ ID NO: 4291026 - DNA, 25 bp, Homo sapien
gctgtccctagtagcaaagtgctga

SEQ ID NO: 4291027 - DNA, 25 bp, Homo sapien
tgctgactctggaaccttactaccc

SEQ ID NO: 4291028 - DNA, 25 bp, Homo sapien
tgtcatacctgtcttaccagtgctg

SEQ ID NO: 4291029 - DNA, 25 bp, Homo sapien
tagtgcctcgcaacaggaaatactt

SEQ ID NO: 4291030 - DNA, 25 bp, Homo sapien
catatatctgtggatctggataatc

SEQ ID NO: 4291031 - DNA, 25 bp, Homo sapien
tttgtgtgttgcaagaaatctttac

SEQ ID NO: 4291032 - DNA, 25 bp, Homo sapien
tattcttacacaagtccccactgtc

SEQ ID NO: 4291033 - DNA, 25 bp, Homo sapien
aattgtaatggagcccagtttatcc

SEQ ID NO: 4291034 - DNA, 25 bp, Homo sapien
ttccctgaacaatgtcctttccagt

SEQ ID NO: 4291035 - DNA, 25 bp, Homo sapien
cctggctttgtgctggtgtgttgtt

SEQ ID NO: 4291036 - DNA, 25 bp, Homo sapien
gccagccgttcacaccattgtctga

SEQ ID NO: 4291037 - DNA, 25 bp, Homo sapien
gttcacaccattgtctgagaccctt

SEQ ID NO: 4291038 - DNA, 25 bp, Homo sapien
tccattagaccccagtagcggtgtg

SEQ ID NO: 4291039 - DNA, 25 bp, Homo sapien
aatcagcgggacttacacttcttcg

SEQ ID NO: 4291040 - DNA, 25 bp, Homo sapien
gagccaccaagatatcacggcgcga

SEQ ID NO: 4291041 - DNA, 25 bp, Homo sapien
tctgtaggctgggaaagaaccaccc

SEQ ID NO: 4291042 - DNA, 25 bp, Homo sapien
ggcgtccgattgtgctcggcatgca

SEQ ID NO: 4291043 - DNA, 25 bp, Homo sapien
tgtgctcggcatgcacccggctctt

SEQ ID NO: 4291044 - DNA, 25 bp, Homo sapien
acctcccggggcgtccgattgtgct

SEQ ID NO: 4291045 - DNA, 25 bp, Homo sapien
tcatcttcttgcctagctccagccc

SEQ ID NO: 4291046 - DNA, 25 bp, Homo sapien
gaagcagcctgagcattccgtggtg

SEQ ID NO: 4291047 - DNA, 25 bp, Homo sapien
tccggaagcagcctgagcattccgt

SEQ ID NO: 4291048 - DNA, 25 bp, Homo sapien
gctccggaagcagcctgagcattcc

SEQ ID NO: 4291049 - DNA, 25 bp, Homo sapien
gcagcctgagcattccgtggtgccc

SEQ ID NO: 4291050 - DNA, 25 bp, Homo sapien
aaacggctaagcctgcggaacagca

SEQ ID NO: 4291051 - DNA, 25 bp, Homo sapien
tctggctttggctccggagggaaca

SEQ ID NO: 4291052 - DNA, 25 bp, Homo sapien
catgctccagagtggtgcaggtgta

SEQ ID NO: 4291053 - DNA, 25 bp, Homo sapien
taggtgcccgcatcgaaacggctaa

SEQ ID NO: 4291054 - DNA, 25 bp, Homo sapien
ctctgcaagagccagcgcacagcag

SEQ ID NO: 4291055 - DNA, 25 bp, Homo sapien
cctctgcaagagccagcgcacagca

SEQ ID NO: 4291056 - DNA, 25 bp, Homo sapien
tctgcaagagccagcgcacagcagc

SEQ ID NO: 4291057 - DNA, 25 bp, Homo sapien
tgctattgtgctccgtgccgtagac

SEQ ID NO: 4291058 - DNA, 25 bp, Homo sapien
gtgccgtagaccatggtggctgcca

SEQ ID NO: 4291059 - DNA, 25 bp, Homo sapien
gtgctccgtgccgtagaccatggtg

SEQ ID NO: 4291060 - DNA, 25 bp, Homo sapien
gaaggtgctattgtgctccgtgccg

SEQ ID NO: 4291061 - DNA, 25 bp, Homo sapien
gcagggcagggttgccgtgccggat

SEQ ID NO: 4291062 - DNA, 25 bp, Homo sapien
tgccggatgtcctgccggcggaacc

SEQ ID NO: 4291063 - DNA, 25 bp, Homo sapien
aagtctcacattggtgcagccgcag

SEQ ID NO: 4291064 - DNA, 25 bp, Homo sapien
tgcacaggcagtgccgtaagtctca

SEQ ID NO: 4291065 - DNA, 25 bp, Homo sapien
ccatttcggtgataggtgttggcac

SEQ ID NO: 4291066 - DNA, 25 bp, Homo sapien
ccttttgacagagatctccatttcg

SEQ ID NO: 4291067 - DNA, 25 bp, Homo sapien
gacagagatctccatttcggtgata

SEQ ID NO: 4291068 - DNA, 25 bp, Homo sapien
gagatctccatttcggtgataggtg

SEQ ID NO: 4291069 - DNA, 25 bp, Homo sapien
cccctgcctggagagcgatgacttt

SEQ ID NO: 4291070 - DNA, 25 bp, Homo sapien
tgcctggagagcgatgactttgagc

SEQ ID NO: 4291071 - DNA, 25 bp, Homo sapien
gccccctgcctggagagcgatgact

SEQ ID NO: 4291072 - DNA, 25 bp, Homo sapien
cctgcctggagagcgatgactttga

SEQ ID NO: 4291073 - DNA, 25 bp, Homo sapien
gccgtcctggctgtgcggtcatctt

SEQ ID NO: 4291074 - DNA, 25 bp, Homo sapien
gggtcttgacaaggacagggcggcc

SEQ ID NO: 4291075 - DNA, 25 bp, Homo sapien
atgtcgaggccgcacaggccagaac

SEQ ID NO: 4291076 - DNA, 25 bp, Homo sapien
ccaggaaaatgacatcgtaggtccc

SEQ ID NO: 4291077 - DNA, 25 bp, Homo sapien
cgttgaaaacctcccagatgtctgc

SEQ ID NO: 4291078 - DNA, 25 bp, Homo sapien
gtggtacacacagacggcgaagccc

SEQ ID NO: 4291079 - DNA, 25 bp, Homo sapien
acagacggcgaagccctggaacacg

SEQ ID NO: 4291080 - DNA, 25 bp, Homo sapien
tgctgaggcccatctcggtgggcaa

SEQ ID NO: 4291081 - DNA, 25 bp, Homo sapien
ttcccggccttgggccacagcagga

SEQ ID NO: 4291082 - DNA, 25 bp, Homo sapien
gctgaacagcgcgtacacctcgagg

SEQ ID NO: 4291083 - DNA, 25 bp, Homo sapien
acagcgcgtacacctcgaggctctt

SEQ ID NO: 4291084 - DNA, 25 bp, Homo sapien
ctgacggtgctgaacagcgcgtaca

SEQ ID NO: 4291085 - DNA, 25 bp, Homo sapien
ctggtcaaagtgggtctcggcacca

SEQ ID NO: 4291086 - DNA, 25 bp, Homo sapien
ctagctggtcaaagtgggtctcggc

SEQ ID NO: 4291087 - DNA, 25 bp, Homo sapien
gctggtcaaagtgggtctcggcacc

SEQ ID NO: 4291088 - DNA, 25 bp, Homo sapien
tagctggtcaaagtgggtctcggca

SEQ ID NO: 4291089 - DNA, 25 bp, Homo sapien
atccgggcggccatcacaaaccggg

SEQ ID NO: 4291090 - DNA, 25 bp, Homo sapien
gctgacagtgacatggttcgagcca

SEQ ID NO: 4291091 - DNA, 25 bp, Homo sapien
atggttcgagccaccatcgggcgag

SEQ ID NO: 4291092 - DNA, 25 bp, Homo sapien
cggcccacgcggctgacagtgacat

SEQ ID NO: 4291093 - DNA, 25 bp, Homo sapien
ggaagatcatggcctctcgccccag

SEQ ID NO: 4291094 - DNA, 25 bp, Homo sapien
gtgagacccgtgtacagctccccgt

SEQ ID NO: 4291095 - DNA, 25 bp, Homo sapien
tctggtcagagtcggaacgcagagc

SEQ ID NO: 4291096 - DNA, 25 bp, Homo sapien
ggaagtcagcagtgagacccgtgta

SEQ ID NO: 4291097 - DNA, 25 bp, Homo sapien
tgaaggtgctggcaaagggacggct

SEQ ID NO: 4291098 - DNA, 25 bp, Homo sapien
ccgcccccggccactttccacactg

SEQ ID NO: 4291099 - DNA, 25 bp, Homo sapien
ctgggctcgtgagggcaccgccccc

SEQ ID NO: 4291100 - DNA, 25 bp, Homo sapien
ctatgaaggtgctggcaaagggacg

SEQ ID NO: 4291101 - DNA, 25 bp, Homo sapien
gaggctgtagcacccgcacgaagtt

SEQ ID NO: 4291102 - DNA, 25 bp, Homo sapien
ccggttgtgaggctgtagcacccgc

SEQ ID NO: 4291103 - DNA, 25 bp, Homo sapien
cacaggctagcaggtgggtccggtt

SEQ ID NO: 4291104 - DNA, 25 bp, Homo sapien
cccgcacgaagttggcgcactctgt

SEQ ID NO: 4291105 - DNA, 25 bp, Homo sapien
tttcgaacacactcctccctctgtc

SEQ ID NO: 4291106 - DNA, 25 bp, Homo sapien
tcttccctttcgaacacactcctcc

SEQ ID NO: 4291107 - DNA, 25 bp, Homo sapien
cctttcgaacacactcctccctctg

SEQ ID NO: 4291108 - DNA, 25 bp, Homo sapien
gatctcttccctttcgaacacactc

SEQ ID NO: 4291109 - DNA, 25 bp, Homo sapien
atgcctggtccagccgcagagagta

SEQ ID NO: 4291110 - DNA, 25 bp, Homo sapien
cagaaagaggcggtctcggtactca

SEQ ID NO: 4291111 - DNA, 25 bp, Homo sapien
aaagatggcagagcggttggcagac

SEQ ID NO: 4291112 - DNA, 25 bp, Homo sapien
tcatctaggtacatggcctggaggt

SEQ ID NO: 4291113 - DNA, 25 bp, Homo sapien
catggtgctggaaggctttcggacc

SEQ ID NO: 4291114 - DNA, 25 bp, Homo sapien
tccatccacatggtgctggaaggct

SEQ ID NO: 4291115 - DNA, 25 bp, Homo sapien
tccacatggtgctggaaggctttcg

SEQ ID NO: 4291116 - DNA, 25 bp, Homo sapien
ctggaaggctttcggaccatggctc

SEQ ID NO: 4291117 - DNA, 25 bp, Homo sapien
ctcggtaggagagccgcaggcgggg

SEQ ID NO: 4291118 - DNA, 25 bp, Homo sapien
tcggtaggagagccgcaggcggggc

SEQ ID NO: 4291119 - DNA, 25 bp, Homo sapien
gtaggagagccgcaggcggggcaca

SEQ ID NO: 4291120 - DNA, 25 bp, Homo sapien
cggtaggagagccgcaggcggggca

SEQ ID NO: 4291121 - DNA, 25 bp, Homo sapien
ccagagctacccccatggagcagga

SEQ ID NO: 4291122 - DNA, 25 bp, Homo sapien
gccagcaaatggcccaggccgaggg

SEQ ID NO: 4291123 - DNA, 25 bp, Homo sapien
gggccagagctacccccatggagca

SEQ ID NO: 4291124 - DNA, 25 bp, Homo sapien
tggggccagagctacccccatggag

SEQ ID NO: 4291125 - DNA, 25 bp, Homo sapien
tctggtcccgctggccgccggttgt

SEQ ID NO: 4291126 - DNA, 25 bp, Homo sapien
tgccaccaggccaccacttataagg

SEQ ID NO: 4291127 - DNA, 25 bp, Homo sapien
cggttgtagtttgctctgctgccac

SEQ ID NO: 4291128 - DNA, 25 bp, Homo sapien
tgcagagccgccctctggtcccgct

SEQ ID NO: 4291129 - DNA, 25 bp, Homo sapien
ggacaggggcatcaggggactccat

SEQ ID NO: 4291130 - DNA, 25 bp, Homo sapien
caggcttgctttggggtaggggaca

SEQ ID NO: 4291131 - DNA, 25 bp, Homo sapien
gggacaggggcatcaggggactcca

SEQ ID NO: 4291132 - DNA, 25 bp, Homo sapien
taggggacaggggcatcaggggact

SEQ ID NO: 4291133 - DNA, 25 bp, Homo sapien
cccaggactcagctggagttggagg

SEQ ID NO: 4291134 - DNA, 25 bp, Homo sapien
ccccaggactcagctggagttggag

SEQ ID NO: 4291135 - DNA, 25 bp, Homo sapien
catcatagtcgatgcggccgtcgtt

SEQ ID NO: 4291136 - DNA, 25 bp, Homo sapien
caggtcgatgtagccatcagcattt

SEQ ID NO: 4291137 - DNA, 25 bp, Homo sapien
tccgtgatggtctcgcctgtagcct

SEQ ID NO: 4291138 - DNA, 25 bp, Homo sapien
tcatgagctcctcgatgtcgtcctc

SEQ ID NO: 4291139 - DNA, 25 bp, Homo sapien
tcaaacatgcggaagaggtcagaca

SEQ ID NO: 4291140 - DNA, 25 bp, Homo sapien
ggaactcatcaaagtccaccgtgcc

SEQ ID NO: 4291141 - DNA, 25 bp, Homo sapien
gtccttcatgcaccgaaccatcatg

SEQ ID NO: 4291142 - DNA, 25 bp, Homo sapien
gatttccctttgctgtcgtccttca

SEQ ID NO: 4291143 - DNA, 25 bp, Homo sapien
cgaagatgtcgaaggctgccttgaa

SEQ ID NO: 4291144 - DNA, 25 bp, Homo sapien
ctcagcgcccagcacgaagatgtcg

SEQ ID NO: 4291145 - DNA, 25 bp, Homo sapien
gcccagcacgaagatgtcgaaggct

SEQ ID NO: 4291146 - DNA, 25 bp, Homo sapien
gcacgaagatgtcgaaggctgcctt

SEQ ID NO: 4291147 - DNA, 25 bp, Homo sapien
catttttctgctcttctgtcagctg

SEQ ID NO: 4291148 - DNA, 25 bp, Homo sapien
tctgctcttctgtcagctgctctac

SEQ ID NO: 4291149 - DNA, 25 bp, Homo sapien
ttctgctcttctgtcagctgctcta

SEQ ID NO: 4291150 - DNA, 25 bp, Homo sapien
ttttctgctcttctgtcagctgctc

SEQ ID NO: 4291151 - DNA, 25 bp, Homo sapien
gaatctcaaggctcagactcaggta

SEQ ID NO: 4291152 - DNA, 25 bp, Homo sapien
gaccctcagtaacaatagtcagtga

SEQ ID NO: 4291153 - DNA, 25 bp, Homo sapien
gaaaccaacccattccacaggtgag

SEQ ID NO: 4291154 - DNA, 25 bp, Homo sapien
tcaatgccctttcggcccctgatga

SEQ ID NO: 4291155 - DNA, 25 bp, Homo sapien
taaacctggtgattgttctggggac

SEQ ID NO: 4291156 - DNA, 25 bp, Homo sapien
agttaaacctggtgattgttctggg

SEQ ID NO: 4291157 - DNA, 25 bp, Homo sapien
caaagttaaacctggtgattgttct

SEQ ID NO: 4291158 - DNA, 25 bp, Homo sapien
aaacctggtgattgttctggggact

SEQ ID NO: 4291159 - DNA, 25 bp, Homo sapien
cggctcacaggacagcttgctgggg

SEQ ID NO: 4291160 - DNA, 25 bp, Homo sapien
gctggcggctcacaggacagcttgc

SEQ ID NO: 4291161 - DNA, 25 bp, Homo sapien
gcggctcacaggacagcttgctggg

SEQ ID NO: 4291162 - DNA, 25 bp, Homo sapien
tggcggctcacaggacagcttgctg

SEQ ID NO: 4291163 - DNA, 25 bp, Homo sapien
tcaccttctacaaggtggctggcgg

SEQ ID NO: 4291164 - DNA, 25 bp, Homo sapien
acactctgttcagccgtgcggcgct

SEQ ID NO: 4291165 - DNA, 25 bp, Homo sapien
tactcaggcaacatcgagtgggcca

SEQ ID NO: 4291166 - DNA, 25 bp, Homo sapien
tctacagtgacaagcgcatggtgca

SEQ ID NO: 4291167 - DNA, 25 bp, Homo sapien
gatgacgtgcaaggtcatgacctca

SEQ ID NO: 4291168 - DNA, 25 bp, Homo sapien
cccactgcccgagtttgccaaagag

SEQ ID NO: 4291169 - DNA, 25 bp, Homo sapien
agtgctcatgggctaccagacctac

SEQ ID NO: 4291170 - DNA, 25 bp, Homo sapien
cagtgtcaccctggaccactttggg

SEQ ID NO: 4291171 - DNA, 25 bp, Homo sapien
gcagaatgcacattggaagctccca

SEQ ID NO: 4291172 - DNA, 25 bp, Homo sapien
ggaggtctcccctgatccagacaag

SEQ ID NO: 4291173 - DNA, 25 bp, Homo sapien
gtcctcgcagagaatgtgaacatgt

SEQ ID NO: 4291174 - DNA, 25 bp, Homo sapien
tttcctgaagtgtcgagtccagtcc

SEQ ID NO: 4291175 - DNA, 25 bp, Homo sapien
agaccacttttattgcttgtctggg

SEQ ID NO: 4291176 - DNA, 25 bp, Homo sapien
gaccacttttattgcttgtctgggt

SEQ ID NO: 4291177 - DNA, 25 bp, Homo sapien
ccacttttattgcttgtctgggtgg

SEQ ID NO: 4291178 - DNA, 25 bp, Homo sapien
gagaccacttttattgcttgtctgg

SEQ ID NO: 4291179 - DNA, 25 bp, Homo sapien
catgtcaccaaggaagggggtcttc

SEQ ID NO: 4291180 - DNA, 25 bp, Homo sapien
gcagagctggtccatccagaggggt

SEQ ID NO: 4291181 - DNA, 25 bp, Homo sapien
tgctgcagcggcgtacggcgtgggt

SEQ ID NO: 4291182 - DNA, 25 bp, Homo sapien
aggtgaagtccacgcggtagttgag

SEQ ID NO: 4291183 - DNA, 25 bp, Homo sapien
actgcgcattgaacagggccttggt

SEQ ID NO: 4291184 - DNA, 25 bp, Homo sapien
ccatgtagaggtcagagaagcgcac

SEQ ID NO: 4291185 - DNA, 25 bp, Homo sapien
tgcggaagatgctgccgaactgcgc

SEQ ID NO: 4291186 - DNA, 25 bp, Homo sapien
agaagcgcacgaggcgccttgagaa

SEQ ID NO: 4291187 - DNA, 25 bp, Homo sapien
tgcctcgactccgcgtcctgatagg

SEQ ID NO: 4291188 - DNA, 25 bp, Homo sapien
gcctcgactccgcgtcctgataggt

SEQ ID NO: 4291189 - DNA, 25 bp, Homo sapien
acctgcctcgactccgcgtcctgat

SEQ ID NO: 4291190 - DNA, 25 bp, Homo sapien
cagcacctgcctcgactccgcgtcc

SEQ ID NO: 4291191 - DNA, 25 bp, Homo sapien
gggacacaaagtgtgcattgggtgt

SEQ ID NO: 4291192 - DNA, 25 bp, Homo sapien
cacaaagtgtgcattgggtgtgtgc

SEQ ID NO: 4291193 - DNA, 25 bp, Homo sapien
gtgcacccaggaggctaccgccctg

SEQ ID NO: 4291194 - DNA, 25 bp, Homo sapien
ctggggacacaaagtgtgcattggg

SEQ ID NO: 4291195 - DNA, 25 bp, Homo sapien
tactgctccgtgttgatgatgcgga

SEQ ID NO: 4291196 - DNA, 25 bp, Homo sapien
atgatgcggatctcacgctccagct

SEQ ID NO: 4291197 - DNA, 25 bp, Homo sapien
atgatggcgcctgtgcgccagccgt

SEQ ID NO: 4291198 - DNA, 25 bp, Homo sapien
tgctgccacgtcagcgagtgcatgt

SEQ ID NO: 4291199 - DNA, 25 bp, Homo sapien
gggccacgccattccgtcaagcgta

SEQ ID NO: 4291200 - DNA, 25 bp, Homo sapien
gtcaagcgtaagaagtcaaacaggt

SEQ ID NO: 4291201 - DNA, 25 bp, Homo sapien
aggtggtccccgaagtagagcacgc

SEQ ID NO: 4291202 - DNA, 25 bp, Homo sapien
cgccagatcactatagaggtggtcc

SEQ ID NO: 4291203 - DNA, 25 bp, Homo sapien
ttagaacccctagcctgaagaagcc

SEQ ID NO: 4291204 - DNA, 25 bp, Homo sapien
gaatcaccagactagtgctcaggca

SEQ ID NO: 4291205 - DNA, 25 bp, Homo sapien
gagaataattgacacccagcaagca

SEQ ID NO: 4291206 - DNA, 25 bp, Homo sapien
tggtctcacacgtaccccaggttag

SEQ ID NO: 4291207 - DNA, 25 bp, Homo sapien
ctgccgatagatcttgcccttttcc

SEQ ID NO: 4291208 - DNA, 25 bp, Homo sapien
tttccaagcgggtgatccggtccca

SEQ ID NO: 4291209 - DNA, 25 bp, Homo sapien
gggtgatccggtcccactgaagtga

SEQ ID NO: 4291210 - DNA, 25 bp, Homo sapien
gaagtgagcccttctcatcgagttt

SEQ ID NO: 4291211 - DNA, 25 bp, Homo sapien
ctcaagtggacccatgccagcaagg

SEQ ID NO: 4291212 - DNA, 25 bp, Homo sapien
tccgtaaaggcccacctgctcaagt

SEQ ID NO: 4291213 - DNA, 25 bp, Homo sapien
aagggcatgacttccagtctgtggc

SEQ ID NO: 4291214 - DNA, 25 bp, Homo sapien
gtaaagggcatgacttccagtctgt

SEQ ID NO: 4291215 - DNA, 25 bp, Homo sapien
acatcgaagagctggcgccaatcgg

SEQ ID NO: 4291216 - DNA, 25 bp, Homo sapien
gaagctgggcttgtctgcctggaca

SEQ ID NO: 4291217 - DNA, 25 bp, Homo sapien
aatgaccacatcgaagagctggcgc

SEQ ID NO: 4291218 - DNA, 25 bp, Homo sapien
aatcgggacccaccatgtgccgcat

SEQ ID NO: 4291219 - DNA, 25 bp, Homo sapien
ctgtgtggaggagtttcaggtggca

SEQ ID NO: 4291220 - DNA, 25 bp, Homo sapien
tgtgtggaggagtttcaggtggcaa

SEQ ID NO: 4291221 - DNA, 25 bp, Homo sapien
aagctgaaaggactgttggtgatga

SEQ ID NO: 4291222 - DNA, 25 bp, Homo sapien
tcatcccctctcaggatgtacttct

SEQ ID NO: 4291223 - DNA, 25 bp, Homo sapien
acagcaaacgtctcatcccctctca

SEQ ID NO: 4291224 - DNA, 25 bp, Homo sapien
acgtctcatcccctctcaggatgta

SEQ ID NO: 4291225 - DNA, 25 bp, Homo sapien
cagatgagtctgtgagggtcagtcc

SEQ ID NO: 4291226 - DNA, 25 bp, Homo sapien
gcagatgagtctgtgagggtcagtc

SEQ ID NO: 4291227 - DNA, 25 bp, Homo sapien
ggcagatgagtctgtgagggtcagt

SEQ ID NO: 4291228 - DNA, 25 bp, Homo sapien
gggcagatgagtctgtgagggtcag

SEQ ID NO: 4291229 - DNA, 25 bp, Homo sapien
cttcacatgcacgtctcggatggcg

SEQ ID NO: 4291230 - DNA, 25 bp, Homo sapien
ggcccttcacatgcacgtctcggat

SEQ ID NO: 4291231 - DNA, 25 bp, Homo sapien
tcacatgcacgtctcggatggcgtc

SEQ ID NO: 4291232 - DNA, 25 bp, Homo sapien
tgaggcccttcacatgcacgtctcg

SEQ ID NO: 4291233 - DNA, 25 bp, Homo sapien
agaaagtagtccaccacacaggaca

SEQ ID NO: 4291234 - DNA, 25 bp, Homo sapien
tgtagagatgtgcttggtcaaactc

SEQ ID NO: 4291235 - DNA, 25 bp, Homo sapien
gcagagccatctccggtagcgagaa

SEQ ID NO: 4291236 - DNA, 25 bp, Homo sapien
tgcttggtcaaactccaggctgtgg

SEQ ID NO: 4291237 - DNA, 25 bp, Homo sapien
aagccactcatctggtatagtggga

SEQ ID NO: 4291238 - DNA, 25 bp, Homo sapien
tcatctggtatagtgggatgtgctg

SEQ ID NO: 4291239 - DNA, 25 bp, Homo sapien
gtatagtgggatgtgctgggtaccc

SEQ ID NO: 4291240 - DNA, 25 bp, Homo sapien
actcatctggtatagtgggatgtgc

SEQ ID NO: 4291241 - DNA, 25 bp, Homo sapien
ctcctcgtctggcacaggctggagg

SEQ ID NO: 4291242 - DNA, 25 bp, Homo sapien
cctcgtctggcacaggctggaggcc

SEQ ID NO: 4291243 - DNA, 25 bp, Homo sapien
tcctcgtctggcacaggctggaggc

SEQ ID NO: 4291244 - DNA, 25 bp, Homo sapien
ctcgtctggcacaggctggaggccc

SEQ ID NO: 4291245 - DNA, 25 bp, Homo sapien
tgcacgtagtggaaggcgtcaatct

SEQ ID NO: 4291246 - DNA, 25 bp, Homo sapien
gctgcacgtagtggaaggcgtcaat

SEQ ID NO: 4291247 - DNA, 25 bp, Homo sapien
cacgtagtggaaggcgtcaatcttc

SEQ ID NO: 4291248 - DNA, 25 bp, Homo sapien
agctgcacgtagtggaaggcgtcaa

SEQ ID NO: 4291249 - DNA, 25 bp, Homo sapien
gaggcaggacggatggtgaggaggc

SEQ ID NO: 4291250 - DNA, 25 bp, Homo sapien
tgaggaggcagtttcaccgtggccc

SEQ ID NO: 4291251 - DNA, 25 bp, Homo sapien
agggaggcaggacggatggtgagga

SEQ ID NO: 4291252 - DNA, 25 bp, Homo sapien
gcaggacggatggtgaggaggcagt

SEQ ID NO: 4291253 - DNA, 25 bp, Homo sapien
agtcatacttccgaatcccttctgg

SEQ ID NO: 4291254 - DNA, 25 bp, Homo sapien
tgtagtcatacttccgaatcccttc

SEQ ID NO: 4291255 - DNA, 25 bp, Homo sapien
gggttgtagtcatacttccgaatcc

SEQ ID NO: 4291256 - DNA, 25 bp, Homo sapien
catacttccgaatcccttctgggta

SEQ ID NO: 4291257 - DNA, 25 bp, Homo sapien
tagtgctcgatcaggatgtcacggg

SEQ ID NO: 4291258 - DNA, 25 bp, Homo sapien
tgtcacgggcggtactgaagatctc

SEQ ID NO: 4291259 - DNA, 25 bp, Homo sapien
ccagggtgtagtcgtagtcaaagcc

SEQ ID NO: 4291260 - DNA, 25 bp, Homo sapien
gtagacctcaacgtcacgcaggctg

SEQ ID NO: 4291261 - DNA, 25 bp, Homo sapien
ctaagccccatcagacacaaggcca

SEQ ID NO: 4291262 - DNA, 25 bp, Homo sapien
cactaagccccatcagacacaaggc

SEQ ID NO: 4291263 - DNA, 25 bp, Homo sapien
taagccccatcagacacaaggccat

SEQ ID NO: 4291264 - DNA, 25 bp, Homo sapien
actaagccccatcagacacaaggcc

SEQ ID NO: 4291265 - DNA, 25 bp, Homo sapien
ttgtgggccacggtcactgcgcccg

SEQ ID NO: 4291266 - DNA, 25 bp, Homo sapien
tgcgcccgcttggttcggacctcgg

SEQ ID NO: 4291267 - DNA, 25 bp, Homo sapien
ggacctcggcaactggccgcactga

SEQ ID NO: 4291268 - DNA, 25 bp, Homo sapien
gacgtccgctaaccaggtgactggg

SEQ ID NO: 4291269 - DNA, 25 bp, Homo sapien
ggtcttttctagcaacgtcgacagg

SEQ ID NO: 4291270 - DNA, 25 bp, Homo sapien
aattcctctttcctgcgcagaaccg

SEQ ID NO: 4291271 - DNA, 25 bp, Homo sapien
cacgcccctcgtgagatgctgtggt

SEQ ID NO: 4291272 - DNA, 25 bp, Homo sapien
gacaggctttccaacaaaattcctc

SEQ ID NO: 4291273 - DNA, 25 bp, Homo sapien
tcttctgctcagatccgtattccga

SEQ ID NO: 4291274 - DNA, 25 bp, Homo sapien
cgcgctgtctttcagggtgtgtgta

SEQ ID NO: 4291275 - DNA, 25 bp, Homo sapien
gagcccgcacgcataccaggctgtg

SEQ ID NO: 4291276 - DNA, 25 bp, Homo sapien
tgtacattcgaaactccactgaacc

SEQ ID NO: 4291277 - DNA, 25 bp, Homo sapien
tgctgggaacctggccacaagtgaa

SEQ ID NO: 4291278 - DNA, 25 bp, Homo sapien
gaggccgtaggatgggctcgagtgt

SEQ ID NO: 4291279 - DNA, 25 bp, Homo sapien
tcgagtgtggcggtgtccccagggc

SEQ ID NO: 4291280 - DNA, 25 bp, Homo sapien
gggactggtaaggattgaggccgta

SEQ ID NO: 4291281 - DNA, 25 bp, Homo sapien
cctccaggcgaggggatgccctgca

SEQ ID NO: 4291282 - DNA, 25 bp, Homo sapien
tgcagcatccagccgtcaaaacctc

SEQ ID NO: 4291283 - DNA, 25 bp, Homo sapien
ctgcagcatccagccgtcaaaacct

SEQ ID NO: 4291284 - DNA, 25 bp, Homo sapien
aaacgggagcgagcatcaagcctgt

SEQ ID NO: 4291285 - DNA, 25 bp, Homo sapien
gaaacgggagcgagcatcaagcctg

SEQ ID NO: 4291286 - DNA, 25 bp, Homo sapien
aacgggagcgagcatcaagcctgtg

SEQ ID NO: 4291287 - DNA, 25 bp, Homo sapien
cagttccattcgcttggcagtcagg

SEQ ID NO: 4291288 - DNA, 25 bp, Homo sapien
gaagcagcgatttggcatctaccgg

SEQ ID NO: 4291289 - DNA, 25 bp, Homo sapien
catgattaaagtgcgcgtgggccag

SEQ ID NO: 4291290 - DNA, 25 bp, Homo sapien
tcctttcaggaaggcacgaggcggt

SEQ ID NO: 4291291 - DNA, 25 bp, Homo sapien
ggcgagatcacgtgcttcttccagc

SEQ ID NO: 4291292 - DNA, 25 bp, Homo sapien
aggcgagatcacgtgcttcttccag

SEQ ID NO: 4291293 - DNA, 25 bp, Homo sapien
gcgagatcacgtgcttcttccagcc

SEQ ID NO: 4291294 - DNA, 25 bp, Homo sapien
catgaaggtggcgagtcaaaggtct

SEQ ID NO: 4291295 - DNA, 25 bp, Homo sapien
gatgcttaaggccatagggtatcct

SEQ ID NO: 4291296 - DNA, 25 bp, Homo sapien
tgtctaccgtagaaaagcctcagaa

SEQ ID NO: 4291297 - DNA, 25 bp, Homo sapien
gggcaacaggtttcacactactcta

SEQ ID NO: 4291298 - DNA, 25 bp, Homo sapien
tcatttatgtgctatctgcaagatg

SEQ ID NO: 4291299 - DNA, 25 bp, Homo sapien
cacgagtattaaatctggagtttct

SEQ ID NO: 4291300 - DNA, 25 bp, Homo sapien
ttcagggacctaacatacttccagg

SEQ ID NO: 4291301 - DNA, 25 bp, Homo sapien
agttctgaactttcattcagggacc

SEQ ID NO: 4291302 - DNA, 25 bp, Homo sapien
tacatgttataagactagttaccac

SEQ ID NO: 4291303 - DNA, 25 bp, Homo sapien
taccacgtaaacctcagatgatatg

SEQ ID NO: 4291304 - DNA, 25 bp, Homo sapien
taaacctcagatgatatgatacaga

SEQ ID NO: 4291305 - DNA, 25 bp, Homo sapien
gactagttaccacgtaaacctcaga

SEQ ID NO: 4291306 - DNA, 25 bp, Homo sapien
taattagggcctgtctagtgatgcc

SEQ ID NO: 4291307 - DNA, 25 bp, Homo sapien
tacctcagggttgtgcacgtgttct

SEQ ID NO: 4291308 - DNA, 25 bp, Homo sapien
gattcaattgcccaaatagccagga

SEQ ID NO: 4291309 - DNA, 25 bp, Homo sapien
ccaggaggtacattagctgcagaca

SEQ ID NO: 4291310 - DNA, 25 bp, Homo sapien
gacaaatggacgtcgcgtcttcgag

SEQ ID NO: 4291311 - DNA, 25 bp, Homo sapien
aatgttgagggtgtcccggagcatc

SEQ ID NO: 4291312 - DNA, 25 bp, Homo sapien
ccggagcatcaaatctcgaaggcgc

SEQ ID NO: 4291313 - DNA, 25 bp, Homo sapien
ggcggctctcctgttctttcgacaa

SEQ ID NO: 4291314 - DNA, 25 bp, Homo sapien
taatgctgttggactccgcactgag

SEQ ID NO: 4291315 - DNA, 25 bp, Homo sapien
agtgtctgatcccacttgctaatgc

SEQ ID NO: 4291316 - DNA, 25 bp, Homo sapien
tgtatttcaggtaggcctctgagtg

SEQ ID NO: 4291317 - DNA, 25 bp, Homo sapien
tgagtgaagaagccgctgggtcttt

SEQ ID NO: 4291318 - DNA, 25 bp, Homo sapien
ccacctggtgctggagtccctacca

SEQ ID NO: 4291319 - DNA, 25 bp, Homo sapien
tccacctggtgctggagtccctacc

SEQ ID NO: 4291320 - DNA, 25 bp, Homo sapien
cacctggtgctggagtccctaccat

SEQ ID NO: 4291321 - DNA, 25 bp, Homo sapien
tcccactaagtgcacctagaaggtg

SEQ ID NO: 4291322 - DNA, 25 bp, Homo sapien
taaggccaagtctacctgccacatg

SEQ ID NO: 4291323 - DNA, 25 bp, Homo sapien
gacatctgcaacctagagggtactg

SEQ ID NO: 4291324 - DNA, 25 bp, Homo sapien
tggtcttattggctcagtgataccc

SEQ ID NO: 4291325 - DNA, 25 bp, Homo sapien
catcgtgcccggcctaacacctggc

SEQ ID NO: 4291326 - DNA, 25 bp, Homo sapien
caccttcctcattctctgaaagtgc

SEQ ID NO: 4291327 - DNA, 25 bp, Homo sapien
gatccaccttcctcattctctgaaa

SEQ ID NO: 4291328 - DNA, 25 bp, Homo sapien
tcgtgcccggcctaacacctggcta

SEQ ID NO: 4291329 - DNA, 25 bp, Homo sapien
aaggccatcaactgggccctgcaaa

SEQ ID NO: 4291330 - DNA, 25 bp, Homo sapien
ccctgcaaaggtggaaggcctggcg

SEQ ID NO: 4291331 - DNA, 25 bp, Homo sapien
gcctggcggatagccacccatcatg

SEQ ID NO: 4291332 - DNA, 25 bp, Homo sapien
tgcatgctgcccatgctaacaaggc

SEQ ID NO: 4291333 - DNA, 25 bp, Homo sapien
gtaagaatggattgtgcttgggctt

SEQ ID NO: 4291334 - DNA, 25 bp, Homo sapien
gaacagcttctaagaaccatcacag

SEQ ID NO: 4291335 - DNA, 25 bp, Homo sapien
aatggattgtgcttgggcttgagtt

SEQ ID NO: 4291336 - DNA, 25 bp, Homo sapien
tgctggtaagaatggattgtgcttg

SEQ ID NO: 4291337 - DNA, 25 bp, Homo sapien
caaatgagcttcaatgcttgtaagc

SEQ ID NO: 4291338 - DNA, 25 bp, Homo sapien
ccagtcacatgtgttcaaatgagct

SEQ ID NO: 4291339 - DNA, 25 bp, Homo sapien
tggtctcaagacagcaacaaggcta

SEQ ID NO: 4291340 - DNA, 25 bp, Homo sapien
tattaagaactgaaagacatgacac

SEQ ID NO: 4291341 - DNA, 25 bp, Homo sapien
tagaaaagcattacagagtgggcac

SEQ ID NO: 4291342 - DNA, 25 bp, Homo sapien
tgggagtccctctagaacagaattc

SEQ ID NO: 4291343 - DNA, 25 bp, Homo sapien
taaatatgtgactgggatactaaca

SEQ ID NO: 4291344 - DNA, 25 bp, Homo sapien
ttagcagtcatgcacattggtgacc

SEQ ID NO: 4291345 - DNA, 25 bp, Homo sapien
gcaatataggacaacatggatgact

SEQ ID NO: 4291346 - DNA, 25 bp, Homo sapien
cagaagggaggcattgcccatatgg

SEQ ID NO: 4291347 - DNA, 25 bp, Homo sapien
agactgtggcctactccttattgga

SEQ ID NO: 4291348 - DNA, 25 bp, Homo sapien
tcaaactttgaatctgtcatgagaa

SEQ ID NO: 4291349 - DNA, 25 bp, Homo sapien
gggagaagcactcggctgctgttgc

SEQ ID NO: 4291350 - DNA, 25 bp, Homo sapien
tgcctgctcggggagaagcactcgg

SEQ ID NO: 4291351 - DNA, 25 bp, Homo sapien
ctgctgttgctgtgctgctcgctct

SEQ ID NO: 4291352 - DNA, 25 bp, Homo sapien
tgctgattgagcatccccattggtg

SEQ ID NO: 4291353 - DNA, 25 bp, Homo sapien
cccaggaattcaaaataccatccat

SEQ ID NO: 4291354 - DNA, 25 bp, Homo sapien
gagtcgggccgatttcacttggtaa

SEQ ID NO: 4291355 - DNA, 25 bp, Homo sapien
tggttaatctcacgaggcaccctga

SEQ ID NO: 4291356 - DNA, 25 bp, Homo sapien
gatgactagtctcaacacaggagga

SEQ ID NO: 4291357 - DNA, 25 bp, Homo sapien
caatatgaagcaattccatggccca

SEQ ID NO: 4291358 - DNA, 25 bp, Homo sapien
gactcatcacgagtgtcatggagtt

SEQ ID NO: 4291359 - DNA, 25 bp, Homo sapien
tgtacccaattttactaagatttga

SEQ ID NO: 4291360 - DNA, 25 bp, Homo sapien
tttgaggactcatcacgagtgtcat

SEQ ID NO: 4291361 - DNA, 25 bp, Homo sapien
tcacgagtgtcatggagtttagcag

SEQ ID NO: 4291362 - DNA, 25 bp, Homo sapien
tgaacccctactgaagaactcctga

SEQ ID NO: 4291363 - DNA, 25 bp, Homo sapien
tctgggccgtagaatacatcctgct

SEQ ID NO: 4291364 - DNA, 25 bp, Homo sapien
ctctgtaagggaaaagtagctgact

SEQ ID NO: 4291365 - DNA, 25 bp, Homo sapien
ttttgtgagctagcagactgaaccc

SEQ ID NO: 4291366 - DNA, 25 bp, Homo sapien
gtagccactcatgttgattttccgt

SEQ ID NO: 4291367 - DNA, 25 bp, Homo sapien
tgttgggccttaatcacagccctca

SEQ ID NO: 4291368 - DNA, 25 bp, Homo sapien
ccccgaaagagtagtctgggtgttg

SEQ ID NO: 4291369 - DNA, 25 bp, Homo sapien
cactgctgaacaggatgtagccact

SEQ ID NO: 4291370 - DNA, 25 bp, Homo sapien
cagggtgatgttgctccttactgct

SEQ ID NO: 4291371 - DNA, 25 bp, Homo sapien
taagttaaagctcacatatggaggg

SEQ ID NO: 4291372 - DNA, 25 bp, Homo sapien
aaagctaaagacaaacagggtgatg

SEQ ID NO: 4291373 - DNA, 25 bp, Homo sapien
gaagagtcttctaactaagcccacc

SEQ ID NO: 4291374 - DNA, 25 bp, Homo sapien
ggtctgaagctgaggtagagaagga

SEQ ID NO: 4291375 - DNA, 25 bp, Homo sapien
agctcactggccaggggggtctgaa

SEQ ID NO: 4291376 - DNA, 25 bp, Homo sapien
gaggtagagaaggaggttcaatgac

SEQ ID NO: 4291377 - DNA, 25 bp, Homo sapien
tagggcatgaggtccagctcactgg

SEQ ID NO: 4291378 - DNA, 25 bp, Homo sapien
aaatttagcttctagcaactggatc

SEQ ID NO: 4291379 - DNA, 25 bp, Homo sapien
cttctaactcggcaaatttagcttc

SEQ ID NO: 4291380 - DNA, 25 bp, Homo sapien
ttagcttctagcaactggatcttct

SEQ ID NO: 4291381 - DNA, 25 bp, Homo sapien
tcggcaaatttagcttctagcaact

SEQ ID NO: 4291382 - DNA, 25 bp, Homo sapien
cattgtagcggctctcacaaagcag

SEQ ID NO: 4291383 - DNA, 25 bp, Homo sapien
cagagagtgaaaacctcttcaatcc

SEQ ID NO: 4291384 - DNA, 25 bp, Homo sapien
tcatctaccactttagcagagagtg

SEQ ID NO: 4291385 - DNA, 25 bp, Homo sapien
tcttcatctgcttgtcgctctcatt

SEQ ID NO: 4291386 - DNA, 25 bp, Homo sapien
ggaagtccttgaatgacaacacagc

SEQ ID NO: 4291387 - DNA, 25 bp, Homo sapien
caggagaggaagtccttgaatgaca

SEQ ID NO: 4291388 - DNA, 25 bp, Homo sapien
ggagaggaagtccttgaatgacaac

SEQ ID NO: 4291389 - DNA, 25 bp, Homo sapien
gaggaagtccttgaatgacaacaca

SEQ ID NO: 4291390 - DNA, 25 bp, Homo sapien
ggggcaggtttcttccagattactc

SEQ ID NO: 4291391 - DNA, 25 bp, Homo sapien
cgagaatacatgtcatggggcaggt

SEQ ID NO: 4291392 - DNA, 25 bp, Homo sapien
tttttgtgggctcatgctctgtttc

SEQ ID NO: 4291393 - DNA, 25 bp, Homo sapien
aatatgcagctccatctcgaaccca

SEQ ID NO: 4291394 - DNA, 25 bp, Homo sapien
tcagccacatgtcattgtaatggag

SEQ ID NO: 4291395 - DNA, 25 bp, Homo sapien
tggcaacctggttcaccattggaca

SEQ ID NO: 4291396 - DNA, 25 bp, Homo sapien
tgatgaagacacagtcgccaacctt

SEQ ID NO: 4291397 - DNA, 25 bp, Homo sapien
taatggagctgctcaaagtagtggc

SEQ ID NO: 4291398 - DNA, 25 bp, Homo sapien
caacagtataataatcataggtccc

SEQ ID NO: 4291399 - DNA, 25 bp, Homo sapien
ttctgtgtggctattatctgcatac

SEQ ID NO: 4291400 - DNA, 25 bp, Homo sapien
ctgtctgacctcagtactctttggg

SEQ ID NO: 4291401 - DNA, 25 bp, Homo sapien
aagtcacctatggaactgtctgacc

SEQ ID NO: 4291402 - DNA, 25 bp, Homo sapien
taaaattgtcttcagctcgactgtc

SEQ ID NO: 4291403 - DNA, 25 bp, Homo sapien
gagggacaaacctgactgagctgat

SEQ ID NO: 4291404 - DNA, 25 bp, Homo sapien
ttgcaaatacagaggccacgcgaac

SEQ ID NO: 4291405 - DNA, 25 bp, Homo sapien
cctcatctcggaagttttctgggca

SEQ ID NO: 4291406 - DNA, 25 bp, Homo sapien
aaacatgaccacacacttgcctaga

SEQ ID NO: 4291407 - DNA, 25 bp, Homo sapien
taactggaactttgttgtaatagtc

SEQ ID NO: 4291408 - DNA, 25 bp, Homo sapien
tgtaatagtcactcttaaaaacttc

SEQ ID NO: 4291409 - DNA, 25 bp, Homo sapien
cttgcctagaattttactaactgga

SEQ ID NO: 4291410 - DNA, 25 bp, Homo sapien
ctagaaattttcgtgtagccaggtg

SEQ ID NO: 4291411 - DNA, 25 bp, Homo sapien
gaaattttcgtgtagccaggtggaa

SEQ ID NO: 4291412 - DNA, 25 bp, Homo sapien
tagaaattttcgtgtagccaggtgg

SEQ ID NO: 4291413 - DNA, 25 bp, Homo sapien
tcatttggtcggtaaaaccaacagc

SEQ ID NO: 4291414 - DNA, 25 bp, Homo sapien
tgtgataggcagctcaaagaactgg

SEQ ID NO: 4291415 - DNA, 25 bp, Homo sapien
gccatgacatgaacctagcactgtg

SEQ ID NO: 4291416 - DNA, 25 bp, Homo sapien
catatttagctctctggtgaaggaa

SEQ ID NO: 4291417 - DNA, 25 bp, Homo sapien
tatatatacaccctcaacctcttgg

SEQ ID NO: 4291418 - DNA, 25 bp, Homo sapien
gggtgcttacttacatttattgaca

SEQ ID NO: 4291419 - DNA, 25 bp, Homo sapien
tgacacttgcccaataggtcctatg

SEQ ID NO: 4291420 - DNA, 25 bp, Homo sapien
tatggaaaggcttaagatgtctgag

SEQ ID NO: 4291421 - DNA, 25 bp, Homo sapien
cgcgcccgacctagaagctgtattt

SEQ ID NO: 4291422 - DNA, 25 bp, Homo sapien
ggttccacatagacgtaatctccaa

SEQ ID NO: 4291423 - DNA, 25 bp, Homo sapien
tcctggctgtatgtgcgatgtaagc

SEQ ID NO: 4291424 - DNA, 25 bp, Homo sapien
taatctccaacatggtacatgctgt

SEQ ID NO: 4291425 - DNA, 25 bp, Homo sapien
tctttcaatacagacgatatgtggt

SEQ ID NO: 4291426 - DNA, 25 bp, Homo sapien
gatgtagggttcaaacaacacatac

SEQ ID NO: 4291427 - DNA, 25 bp, Homo sapien
ggcacaaagaagtacgtatgtcgtt

SEQ ID NO: 4291428 - DNA, 25 bp, Homo sapien
tggataatatcgaaaggcacaaaga

SEQ ID NO: 4291429 - DNA, 25 bp, Homo sapien
catttgcaacatgcgaaggcaggaa

SEQ ID NO: 4291430 - DNA, 25 bp, Homo sapien
tactggcctagttttttctgttatc

SEQ ID NO: 4291431 - DNA, 25 bp, Homo sapien
tagctatttgatatactgctggatt

SEQ ID NO: 4291432 - DNA, 25 bp, Homo sapien
gtggattagctatttgatatactgc

SEQ ID NO: 4291433 - DNA, 25 bp, Homo sapien
atactggcctagttttttctgttat

SEQ ID NO: 4291434 - DNA, 25 bp, Homo sapien
ttgaagacagcatcccattagacct

SEQ ID NO: 4291435 - DNA, 25 bp, Homo sapien
ggtctgtctagtaccgtcagttggg

SEQ ID NO: 4291436 - DNA, 25 bp, Homo sapien
gatattagagtatgtcccatgtggt

SEQ ID NO: 4291437 - DNA, 25 bp, Homo sapien
gtgtcattatgggtctcatgggatg

SEQ ID NO: 4291438 - DNA, 25 bp, Homo sapien
ataatacaaaacagttatcattctg

SEQ ID NO: 4291439 - DNA, 25 bp, Homo sapien
tctaatatttctctgaatggaaaac

SEQ ID NO: 4291440 - DNA, 25 bp, Homo sapien
agttatcattctgaccacttttaag

SEQ ID NO: 4291441 - DNA, 25 bp, Homo sapien
tatatgattcacacaccacataatt

SEQ ID NO: 4291442 - DNA, 25 bp, Homo sapien
tagtcagtctatagtactattgaac

SEQ ID NO: 4291443 - DNA, 25 bp, Homo sapien
tagatggtcaataggcatatgataa

SEQ ID NO: 4291444 - DNA, 25 bp, Homo sapien
tctaactataaacatatagatggtc

SEQ ID NO: 4291445 - DNA, 25 bp, Homo sapien
ctattgaacactagtaacttatcct

SEQ ID NO: 4291446 - DNA, 25 bp, Homo sapien
gcacatgtgacacttcgttgcattt

SEQ ID NO: 4291447 - DNA, 25 bp, Homo sapien
ttttttactgtcaatctcacttgca

SEQ ID NO: 4291448 - DNA, 25 bp, Homo sapien
aacattaacatttcatggatgtatt

SEQ ID NO: 4291449 - DNA, 25 bp, Homo sapien
catttcagtgatattaattacaatc

SEQ ID NO: 4291450 - DNA, 25 bp, Homo sapien
ttttgtggtatagctgagtgccggt

SEQ ID NO: 4291451 - DNA, 25 bp, Homo sapien
gcagagttcatcacgaattttaata

SEQ ID NO: 4291452 - DNA, 25 bp, Homo sapien
aaaactgctgaagttctactgcatc

SEQ ID NO: 4291453 - DNA, 25 bp, Homo sapien
ccatttttgcagagttcatcacgaa

SEQ ID NO: 4291454 - DNA, 25 bp, Homo sapien
agtctgctattgacatgtagcaacg

SEQ ID NO: 4291455 - DNA, 25 bp, Homo sapien
tattgacatgtagcaacgatatatc

SEQ ID NO: 4291456 - DNA, 25 bp, Homo sapien
gctgaatttaatagtcaagtctgct

SEQ ID NO: 4291457 - DNA, 25 bp, Homo sapien
tgtagcaacgatatatcacagataa

SEQ ID NO: 4291458 - DNA, 25 bp, Homo sapien
tctgttttgtattaaatagcacata

SEQ ID NO: 4291459 - DNA, 25 bp, Homo sapien
ctgttttgtattaaatagcacatat

SEQ ID NO: 4291460 - DNA, 25 bp, Homo sapien
atctgttttgtattaaatagcacat

SEQ ID NO: 4291461 - DNA, 25 bp, Homo sapien
tttgtagatcaaagactccggctca

SEQ ID NO: 4291462 - DNA, 25 bp, Homo sapien
tgaaataaatcaagccgacggtagc

SEQ ID NO: 4291463 - DNA, 25 bp, Homo sapien
gcaactcagatctagagggaagcct

SEQ ID NO: 4291464 - DNA, 25 bp, Homo sapien
cagaaatatggcactgaggcggcga

SEQ ID NO: 4291465 - DNA, 25 bp, Homo sapien
ctgagtatagtacagtggctggaca

SEQ ID NO: 4291466 - DNA, 25 bp, Homo sapien
caaattctgtccagttggaactgct

SEQ ID NO: 4291467 - DNA, 25 bp, Homo sapien
ggaactgctgggattcatttttaat

SEQ ID NO: 4291468 - DNA, 25 bp, Homo sapien
caaccacagactacactcaaatgat

SEQ ID NO: 4291469 - DNA, 25 bp, Homo sapien
ccaggatatgtgcatcattataaac

SEQ ID NO: 4291470 - DNA, 25 bp, Homo sapien
tctccaggatatgtgcatcattata

SEQ ID NO: 4291471 - DNA, 25 bp, Homo sapien
ttgagtaacttctccaggatatgtg

SEQ ID NO: 4291472 - DNA, 25 bp, Homo sapien
taacttctccaggatatgtgcatca

SEQ ID NO: 4291473 - DNA, 25 bp, Homo sapien
tcaccagcatatttgtcattgcgga

SEQ ID NO: 4291474 - DNA, 25 bp, Homo sapien
tagtgcctggcattccggaacatca

SEQ ID NO: 4291475 - DNA, 25 bp, Homo sapien
taaataggtcacaaagtcttctgcc

SEQ ID NO: 4291476 - DNA, 25 bp, Homo sapien
ggctctcgagcttcaagaacaacat

SEQ ID NO: 4291477 - DNA, 25 bp, Homo sapien
ggagactgccagactagtgtcttta

SEQ ID NO: 4291478 - DNA, 25 bp, Homo sapien
tgtctttacagtgggtatgagcctc

SEQ ID NO: 4291479 - DNA, 25 bp, Homo sapien
cctactttaaagaataagcggtgtg

SEQ ID NO: 4291480 - DNA, 25 bp, Homo sapien
tcttgcattgattctgtcagggtcg

SEQ ID NO: 4291481 - DNA, 25 bp, Homo sapien
cctcctgagacccaacatctcactg

SEQ ID NO: 4291482 - DNA, 25 bp, Homo sapien
atagcctcctgagacccaacatctc

SEQ ID NO: 4291483 - DNA, 25 bp, Homo sapien
agcctcctgagacccaacatctcac

SEQ ID NO: 4291484 - DNA, 25 bp, Homo sapien
tcctgagacccaacatctcactgtc

SEQ ID NO: 4291485 - DNA, 25 bp, Homo sapien
cagactactagccacacaggtatgt

SEQ ID NO: 4291486 - DNA, 25 bp, Homo sapien
cctgggctaatgcttcgttggaact

SEQ ID NO: 4291487 - DNA, 25 bp, Homo sapien
aactttagcttatttgagtgtccca

SEQ ID NO: 4291488 - DNA, 25 bp, Homo sapien
gtaattttcgagtatctggcctggg

SEQ ID NO: 4291489 - DNA, 25 bp, Homo sapien
gataggtgactgatctggaaaacac

SEQ ID NO: 4291490 - DNA, 25 bp, Homo sapien
gctgcagtagagttacatatttaca

SEQ ID NO: 4291491 - DNA, 25 bp, Homo sapien
cttttgcctgataagtttttatctt

SEQ ID NO: 4291492 - DNA, 25 bp, Homo sapien
tcttgatttgatgtctttgatctgg

SEQ ID NO: 4291493 - DNA, 25 bp, Homo sapien
ggccagtaatggaggagactcacat

SEQ ID NO: 4291494 - DNA, 25 bp, Homo sapien
tcacatctcagggtatactgatcaa

SEQ ID NO: 4291495 - DNA, 25 bp, Homo sapien
tatctataagaaggaaagcaggaca

SEQ ID NO: 4291496 - DNA, 25 bp, Homo sapien
gaaggatgaaattcataggccagta

SEQ ID NO: 4291497 - DNA, 25 bp, Homo sapien
tggcactaccagtatcagaggtggc

SEQ ID NO: 4291498 - DNA, 25 bp, Homo sapien
ggctgaagagatcatgctgtctccg

SEQ ID NO: 4291499 - DNA, 25 bp, Homo sapien
tcttttggcactaccagtatcagag

SEQ ID NO: 4291500 - DNA, 25 bp, Homo sapien
cctcgatatcgtctctcctggcaag

SEQ ID NO: 4291501 - DNA, 25 bp, Homo sapien
cacattatagcgtttggcattttca

SEQ ID NO: 4291502 - DNA, 25 bp, Homo sapien
cttgtagatggctgaattgggcaca

SEQ ID NO: 4291503 - DNA, 25 bp, Homo sapien
gatcacactccaaatgatctaaagt

SEQ ID NO: 4291504 - DNA, 25 bp, Homo sapien
acttgctgcaattttagaactcgct

SEQ ID NO: 4291505 - DNA, 25 bp, Homo sapien
taagtattctgtctggtagcccaat

SEQ ID NO: 4291506 - DNA, 25 bp, Homo sapien
cctaatgagtgcaaagtggtatcac

SEQ ID NO: 4291507 - DNA, 25 bp, Homo sapien
tcatccatgttagagcgtttcaaaa

SEQ ID NO: 4291508 - DNA, 25 bp, Homo sapien
tatggttgcggttaatgaattctcc

SEQ ID NO: 4291509 - DNA, 25 bp, Homo sapien
tggttattccgacaactcctaactg

SEQ ID NO: 4291510 - DNA, 25 bp, Homo sapien
tttgctggtaataatcagggtattt

SEQ ID NO: 4291511 - DNA, 25 bp, Homo sapien
ctgttgtagtgatatgggcatttta

SEQ ID NO: 4291512 - DNA, 25 bp, Homo sapien
ggtaaaaaggttcagctattagctg

SEQ ID NO: 4291513 - DNA, 25 bp, Homo sapien
taaagggacgaatgagatgaagaaa

SEQ ID NO: 4291514 - DNA, 25 bp, Homo sapien
gagatgaagaaagaaccatacttta

SEQ ID NO: 4291515 - DNA, 25 bp, Homo sapien
aagggacgaatgagatgaagaaaga

SEQ ID NO: 4291516 - DNA, 25 bp, Homo sapien
ttataaagggacgaatgagatgaag

SEQ ID NO: 4291517 - DNA, 25 bp, Homo sapien
attttattgatctttcctgttaaag

SEQ ID NO: 4291518 - DNA, 25 bp, Homo sapien
aacagaataacttttgattttattg

SEQ ID NO: 4291519 - DNA, 25 bp, Homo sapien
tgattttattgatctttcctgttaa

SEQ ID NO: 4291520 - DNA, 25 bp, Homo sapien
cagaataacttttgattttattgat

SEQ ID NO: 4291521 - DNA, 25 bp, Homo sapien
ggtactgtgtcagcagcaataggaa

SEQ ID NO: 4291522 - DNA, 25 bp, Homo sapien
cagggtgtttctatgtcgagcaggc

SEQ ID NO: 4291523 - DNA, 25 bp, Homo sapien
tcttgagagaagagggcttccagac

SEQ ID NO: 4291524 - DNA, 25 bp, Homo sapien
aagtccatcttatcaaaagtcagtg

SEQ ID NO: 4291525 - DNA, 25 bp, Homo sapien
ctggtcttatccatccttttagatt

SEQ ID NO: 4291526 - DNA, 25 bp, Homo sapien
gtgtctcttgtaaccagccatataa

SEQ ID NO: 4291527 - DNA, 25 bp, Homo sapien
cttgtaaccagccatataacctctt

SEQ ID NO: 4291528 - DNA, 25 bp, Homo sapien
ggtcttatccatccttttagattca

SEQ ID NO: 4291529 - DNA, 25 bp, Homo sapien
tctgagccatattgaagtgccattg

SEQ ID NO: 4291530 - DNA, 25 bp, Homo sapien
gataaacgacctccttgtactgctc

SEQ ID NO: 4291531 - DNA, 25 bp, Homo sapien
taattgctgataaacgacctccttg

SEQ ID NO: 4291532 - DNA, 25 bp, Homo sapien
gaagtgccattgtaattgctgataa

SEQ ID NO: 4291533 - DNA, 25 bp, Homo sapien
tgtgtgaaggacctgtcagtctggc

SEQ ID NO: 4291534 - DNA, 25 bp, Homo sapien
gtgaaggacctgtcagtctggctgc

SEQ ID NO: 4291535 - DNA, 25 bp, Homo sapien
ttactgtgtgaaggacctgtcagtc

SEQ ID NO: 4291536 - DNA, 25 bp, Homo sapien
tactgtgtgaaggacctgtcagtct

SEQ ID NO: 4291537 - DNA, 25 bp, Homo sapien
aaaagcttagaaacttggtagctga

SEQ ID NO: 4291538 - DNA, 25 bp, Homo sapien
aaaaagcttagaaacttggtagctg

SEQ ID NO: 4291539 - DNA, 25 bp, Homo sapien
ctcattcgaagacttgacttagcca

SEQ ID NO: 4291540 - DNA, 25 bp, Homo sapien
cagataaggtgagggactacggaca

SEQ ID NO: 4291541 - DNA, 25 bp, Homo sapien
ggctacacagtgactaacggcaggt

SEQ ID NO: 4291542 - DNA, 25 bp, Homo sapien
gattacaggcctaaaccagagtgcc

SEQ ID NO: 4291543 - DNA, 25 bp, Homo sapien
tcttaccatgtagaccgggctggtc

SEQ ID NO: 4291544 - DNA, 25 bp, Homo sapien
acctaggcttcacaaagtgccggga

SEQ ID NO: 4291545 - DNA, 25 bp, Homo sapien
acacttttaatgggtaaagtccatg

SEQ ID NO: 4291546 - DNA, 25 bp, Homo sapien
cggattcaaccgactctcctacctc

SEQ ID NO: 4291547 - DNA, 25 bp, Homo sapien
gggtaaagtccatggtatgtgaatt

SEQ ID NO: 4291548 - DNA, 25 bp, Homo sapien
gatctatatctttggccattgcatg

SEQ ID NO: 4291549 - DNA, 25 bp, Homo sapien
tgagagccaggctcattataagttt

SEQ ID NO: 4291550 - DNA, 25 bp, Homo sapien
tttggccattgcatgaatacttttg

SEQ ID NO: 4291551 - DNA, 25 bp, Homo sapien
agttttggcattttttgcgaggaga

SEQ ID NO: 4291552 - DNA, 25 bp, Homo sapien
taaccacaggtcagctaattcatgc

SEQ ID NO: 4291553 - DNA, 25 bp, Homo sapien
gctatttgcctcgtgggactaccaa

SEQ ID NO: 4291554 - DNA, 25 bp, Homo sapien
cttttaggtaagaggcacacatgac

SEQ ID NO: 4291555 - DNA, 25 bp, Homo sapien
cttacacggagggaatcagcacagg

SEQ ID NO: 4291556 - DNA, 25 bp, Homo sapien
gatctataggctccttaattattgc

SEQ ID NO: 4291557 - DNA, 25 bp, Homo sapien
ggtcttgagatctataggctcctta

SEQ ID NO: 4291558 - DNA, 25 bp, Homo sapien
gcaatggtcttgagatctataggct

SEQ ID NO: 4291559 - DNA, 25 bp, Homo sapien
ccttaattattgcataataatctgg

SEQ ID NO: 4291560 - DNA, 25 bp, Homo sapien
tcatttatcttcctcttaccctgtc

SEQ ID NO: 4291561 - DNA, 25 bp, Homo sapien
tacacaaagagaaagtttccactct

SEQ ID NO: 4291562 - DNA, 25 bp, Homo sapien
aatgcaaggtttaggccgggtgtag

SEQ ID NO: 4291563 - DNA, 25 bp, Homo sapien
ggtttaggccgggtgtagtagctca

SEQ ID NO: 4291564 - DNA, 25 bp, Homo sapien
cgctaatgagacgtcctgatggatt

SEQ ID NO: 4291565 - DNA, 25 bp, Homo sapien
gtagctacaactatggcttcaagaa

SEQ ID NO: 4291566 - DNA, 25 bp, Homo sapien
gcagtttctgaaaaagttcgctaat

SEQ ID NO: 4291567 - DNA, 25 bp, Homo sapien
cgtcctgatggatttgtagctacaa

SEQ ID NO: 4291568 - DNA, 25 bp, Homo sapien
ctggtaatgtggagaaaaaagtact

SEQ ID NO: 4291569 - DNA, 25 bp, Homo sapien
gcctggccatgaagcatgtgtcttt

SEQ ID NO: 4291570 - DNA, 25 bp, Homo sapien
ctcgcctggccatgaagcatgtgtc

SEQ ID NO: 4291571 - DNA, 25 bp, Homo sapien
tcgcctggccatgaagcatgtgtct

SEQ ID NO: 4291572 - DNA, 25 bp, Homo sapien
acctcgcctggccatgaagcatgtg

SEQ ID NO: 4291573 - DNA, 25 bp, Homo sapien
cactgtgccctgattgtcttgccca

SEQ ID NO: 4291574 - DNA, 25 bp, Homo sapien
tacaaatcccagagtttgcaagcgg

SEQ ID NO: 4291575 - DNA, 25 bp, Homo sapien
gcaagcggctttatattcaggagaa

SEQ ID NO: 4291576 - DNA, 25 bp, Homo sapien
tcttgttcgaaggtacaaatcccag

SEQ ID NO: 4291577 - DNA, 25 bp, Homo sapien
cacgaacaactaccagtccatggcc

SEQ ID NO: 4291578 - DNA, 25 bp, Homo sapien
ccccagcccacgaacaactaccagt

SEQ ID NO: 4291579 - DNA, 25 bp, Homo sapien
gcccacgaacaactaccagtccatg

SEQ ID NO: 4291580 - DNA, 25 bp, Homo sapien
caggcaagacagcattatcgcctga

SEQ ID NO: 4291581 - DNA, 25 bp, Homo sapien
tagcttctggctttgaataagttaa

SEQ ID NO: 4291582 - DNA, 25 bp, Homo sapien
gattaagatcctgattagcttctgg

SEQ ID NO: 4291583 - DNA, 25 bp, Homo sapien
tacacagcaccagcattataaataa

SEQ ID NO: 4291584 - DNA, 25 bp, Homo sapien
taaagtcttcgtattgtttggagga

SEQ ID NO: 4291585 - DNA, 25 bp, Homo sapien
cacttcataatagtctggttgattt

SEQ ID NO: 4291586 - DNA, 25 bp, Homo sapien
ttgcattgttaaaaagaagctggaa

SEQ ID NO: 4291587 - DNA, 25 bp, Homo sapien
ccacttcataatagtctggttgatt

SEQ ID NO: 4291588 - DNA, 25 bp, Homo sapien
ctttaatacacatggactctggacc

SEQ ID NO: 4291589 - DNA, 25 bp, Homo sapien
caactgtactgatgtgcttcgaact

SEQ ID NO: 4291590 - DNA, 25 bp, Homo sapien
ggaccccagtatcatttaagccatt

SEQ ID NO: 4291591 - DNA, 25 bp, Homo sapien
taagccattcctgccaacaaaaagc

SEQ ID NO: 4291592 - DNA, 25 bp, Homo sapien
gatggtattatagagttcatggcac

SEQ ID NO: 4291593 - DNA, 25 bp, Homo sapien
ttcatccttatagtctcggatggta

SEQ ID NO: 4291594 - DNA, 25 bp, Homo sapien
tccttatagtctcggatggtattat

SEQ ID NO: 4291595 - DNA, 25 bp, Homo sapien
ctttggtgccctaatgaagagctca

SEQ ID NO: 4291596 - DNA, 25 bp, Homo sapien
ggtgttgacacagaatggtgcccat

SEQ ID NO: 4291597 - DNA, 25 bp, Homo sapien
gaaggggaggtagctcttcttctct

SEQ ID NO: 4291598 - DNA, 25 bp, Homo sapien
gtccccgctgacactgctggaaggg

SEQ ID NO: 4291599 - DNA, 25 bp, Homo sapien
tggaagattggaaagtctcctcctt

SEQ ID NO: 4291600 - DNA, 25 bp, Homo sapien
taatcagccatgttcttacatttaa

SEQ ID NO: 4291601 - DNA, 25 bp, Homo sapien
ttacatttaaatagactctgtcacc

SEQ ID NO: 4291602 - DNA, 25 bp, Homo sapien
tcagctggacacctgctaccaaact

SEQ ID NO: 4291603 - DNA, 25 bp, Homo sapien
caagtcttcagctggacacctgcta

SEQ ID NO: 4291604 - DNA, 25 bp, Homo sapien
gagtttcccaacctatatgtagcag

SEQ ID NO: 4291605 - DNA, 25 bp, Homo sapien
ggtattaagccttcagcccatgagg

SEQ ID NO: 4291606 - DNA, 25 bp, Homo sapien
catttgctaggtgggccatcatgtg

SEQ ID NO: 4291607 - DNA, 25 bp, Homo sapien
tccaaatttggcctagagtttccca

SEQ ID NO: 4291608 - DNA, 25 bp, Homo sapien
tataaaaagctgatcaacaggactc

SEQ ID NO: 4291609 - DNA, 25 bp, Homo sapien
ttaaaatcgtcaaaaggcttagcca

SEQ ID NO: 4291610 - DNA, 25 bp, Homo sapien
gaatttcaggacactacgacaccag

SEQ ID NO: 4291611 - DNA, 25 bp, Homo sapien
cactggttgccagcagtatggaaag

SEQ ID NO: 4291612 - DNA, 25 bp, Homo sapien
ccagcgcctcgaaaagccagtctcc

SEQ ID NO: 4291613 - DNA, 25 bp, Homo sapien
accagcgcctcgaaaagccagtctc

SEQ ID NO: 4291614 - DNA, 25 bp, Homo sapien
aagtgctgattcagtgttagtatat

SEQ ID NO: 4291615 - DNA, 25 bp, Homo sapien
tgtctgaaagccaagtgaagccagt

SEQ ID NO: 4291616 - DNA, 25 bp, Homo sapien
gaagggctttagaagtgctgattca

SEQ ID NO: 4291617 - DNA, 25 bp, Homo sapien
tatgtctgaaagccaagtgaagcca

SEQ ID NO: 4291618 - DNA, 25 bp, Homo sapien
aatacatgtgggaggctcacatgtg

SEQ ID NO: 4291619 - DNA, 25 bp, Homo sapien
caactgccccctagtcaataagagc

SEQ ID NO: 4291620 - DNA, 25 bp, Homo sapien
gcagagttcaatcacagagctggaa

SEQ ID NO: 4291621 - DNA, 25 bp, Homo sapien
tgtgggaggctcacatgtgacacca

SEQ ID NO: 4291622 - DNA, 25 bp, Homo sapien
gagctcaaaatcaaatatgggcgac

SEQ ID NO: 4291623 - DNA, 25 bp, Homo sapien
ccattttggagctcaaaatcaaata

SEQ ID NO: 4291624 - DNA, 25 bp, Homo sapien
ccaatcttccattttggagctcaaa

SEQ ID NO: 4291625 - DNA, 25 bp, Homo sapien
tttggagctcaaaatcaaatatggg

SEQ ID NO: 4291626 - DNA, 25 bp, Homo sapien
aagctgccccgcgacgagcgggaaa

SEQ ID NO: 4291627 - DNA, 25 bp, Homo sapien
gactgagggaaacgttgacagcttt

SEQ ID NO: 4291628 - DNA, 25 bp, Homo sapien
agctttgaagctgccccgcgacgag

SEQ ID NO: 4291629 - DNA, 25 bp, Homo sapien
tgagggaaacgttgacagctttgaa

SEQ ID NO: 4291630 - DNA, 25 bp, Homo sapien
gctgctattgctcctccggccgcgg

SEQ ID NO: 4291631 - DNA, 25 bp, Homo sapien
gcggccgctgccgtcgcttcggcac

SEQ ID NO: 4291632 - DNA, 25 bp, Homo sapien
cggccgcggtcaccgaccgccgcgc

SEQ ID NO: 4291633 - DNA, 25 bp, Homo sapien
ggctgctgctattgctcctccggcc

SEQ ID NO: 4291634 - DNA, 25 bp, Homo sapien
tgacgcactttacggcggcagcgta

SEQ ID NO: 4291635 - DNA, 25 bp, Homo sapien
ggcaggttgatgtgtttgtgcttcc

SEQ ID NO: 4291636 - DNA, 25 bp, Homo sapien
gtgacgctcgtcagtggcttcagtt

SEQ ID NO: 4291637 - DNA, 25 bp, Homo sapien
ggcttcagttcacacgtggcgccag

SEQ ID NO: 4291638 - DNA, 25 bp, Homo sapien
ctacggctacggctttgtctctgct

SEQ ID NO: 4291639 - DNA, 25 bp, Homo sapien
tagaaccgagagttggaagtcccta

SEQ ID NO: 4291640 - DNA, 25 bp, Homo sapien
tacgcgtaggccttggccctatttc

SEQ ID NO: 4291641 - DNA, 25 bp, Homo sapien
acgacgctcttctacggctacggct

SEQ ID NO: 4291642 - DNA, 25 bp, Homo sapien
cgatcatgttaaccgcgcgggctca

SEQ ID NO: 4291643 - DNA, 25 bp, Homo sapien
gactaggctagattttcgtaaggaa

SEQ ID NO: 4291644 - DNA, 25 bp, Homo sapien
tctgagccaggtttgaggcccaata

SEQ ID NO: 4291645 - DNA, 25 bp, Homo sapien
ctcattctgcggaacgaagccgggc

SEQ ID NO: 4291646 - DNA, 25 bp, Homo sapien
gcaaaggaaatagcatgtgttttgg

SEQ ID NO: 4291647 - DNA, 25 bp, Homo sapien
tataagctataacatgtagtgttct

SEQ ID NO: 4291648 - DNA, 25 bp, Homo sapien
tctctttagaacagtcgggtatgct

SEQ ID NO: 4291649 - DNA, 25 bp, Homo sapien
tgtgctgagtctgttcaatccaacc

SEQ ID NO: 4291650 - DNA, 25 bp, Homo sapien
aataaaccttcttttgacacatctt

SEQ ID NO: 4291651 - DNA, 25 bp, Homo sapien
gctcagagaagaggtatgcaccaaa

SEQ ID NO: 4291652 - DNA, 25 bp, Homo sapien
tgagtggacagggtaagctttcttt

SEQ ID NO: 4291653 - DNA, 25 bp, Homo sapien
tgctgtggtctgagtggacagggta

SEQ ID NO: 4291654 - DNA, 25 bp, Homo sapien
ctcattgtgagtggaagtagttatc

SEQ ID NO: 4291655 - DNA, 25 bp, Homo sapien
tataggtgaacagtctacaaggtct

SEQ ID NO: 4291656 - DNA, 25 bp, Homo sapien
tataagttatggtatgcatgagctg

SEQ ID NO: 4291657 - DNA, 25 bp, Homo sapien
taagcagactgctaaactgttctct

SEQ ID NO: 4291658 - DNA, 25 bp, Homo sapien
tccagtcattcagcattgtagtaag

SEQ ID NO: 4291659 - DNA, 25 bp, Homo sapien
tagcaactgttacttcccacgcatg

SEQ ID NO: 4291660 - DNA, 25 bp, Homo sapien
cacttggtaaggcagatggagacat

SEQ ID NO: 4291661 - DNA, 25 bp, Homo sapien
tccatggcttgctaccgataggcat

SEQ ID NO: 4291662 - DNA, 25 bp, Homo sapien
cattccaatggagtaacttggcagc

SEQ ID NO: 4291663 - DNA, 25 bp, Homo sapien
aacatcagtatatgaagcagtcctt

SEQ ID NO: 4291664 - DNA, 25 bp, Homo sapien
ctgaggtgaatatcgttttccagca

SEQ ID NO: 4291665 - DNA, 25 bp, Homo sapien
gatctcggtatatcttcggattagg

SEQ ID NO: 4291666 - DNA, 25 bp, Homo sapien
tttagataccaattctttactagct

SEQ ID NO: 4291667 - DNA, 25 bp, Homo sapien
ggatagttctttagataccaattct

SEQ ID NO: 4291668 - DNA, 25 bp, Homo sapien
accccatccctgaggatagttcttt

SEQ ID NO: 4291669 - DNA, 25 bp, Homo sapien
ctagcttatgccactggttaattct

SEQ ID NO: 4291670 - DNA, 25 bp, Homo sapien
agccagggttctgctatacagtccc

SEQ ID NO: 4291671 - DNA, 25 bp, Homo sapien
caaggtggcggacattccacatagg

SEQ ID NO: 4291672 - DNA, 25 bp, Homo sapien
tgttgtgatgctaccagccagggtt

SEQ ID NO: 4291673 - DNA, 25 bp, Homo sapien
ccacataggatcgatggtagagtgc

SEQ ID NO: 4291674 - DNA, 25 bp, Homo sapien
tcctgttagtcaagactctaggaat

SEQ ID NO: 4291675 - DNA, 25 bp, Homo sapien
gactctaggaattgaaatacaacag

SEQ ID NO: 4291676 - DNA, 25 bp, Homo sapien
cagtttttcacagctaggccagtta

SEQ ID NO: 4291677 - DNA, 25 bp, Homo sapien
gaaaagtactgactaactcctgtta

SEQ ID NO: 4291678 - DNA, 25 bp, Homo sapien
cattccgtcaggtttgcaacaaaaa

SEQ ID NO: 4291679 - DNA, 25 bp, Homo sapien
cctttttatagtcaagatagccaat

SEQ ID NO: 4291680 - DNA, 25 bp, Homo sapien
actccaggattaaatgagcaagtgc

SEQ ID NO: 4291681 - DNA, 25 bp, Homo sapien
cattgagtttcatccatttttccag

SEQ ID NO: 4291682 - DNA, 25 bp, Homo sapien
aagcaggcttgagttttgggatgaa

SEQ ID NO: 4291683 - DNA, 25 bp, Homo sapien
aaagagttccctgaatttgcaacct

SEQ ID NO: 4291684 - DNA, 25 bp, Homo sapien
gaacaattaggctgtcaagtccatg

SEQ ID NO: 4291685 - DNA, 25 bp, Homo sapien
tagagagaagagctgttaaactgac

SEQ ID NO: 4291686 - DNA, 25 bp, Homo sapien
caactttagtagaggctgaatcaca

SEQ ID NO: 4291687 - DNA, 25 bp, Homo sapien
ggtttcctgctccacggatgacaac

SEQ ID NO: 4291688 - DNA, 25 bp, Homo sapien
tagaggctgaatcacaatcttctga

SEQ ID NO: 4291689 - DNA, 25 bp, Homo sapien
cagtgctgtattgtaaagggcaaga

SEQ ID NO: 4291690 - DNA, 25 bp, Homo sapien
agatttacatttccgttgccttgag

SEQ ID NO: 4291691 - DNA, 25 bp, Homo sapien
aaatagacaagatgttaagatttac

SEQ ID NO: 4291692 - DNA, 25 bp, Homo sapien
gagagttccctgttactcccacttc

SEQ ID NO: 4291693 - DNA, 25 bp, Homo sapien
cccacttctccctatggtgaccttt

SEQ ID NO: 4291694 - DNA, 25 bp, Homo sapien
caatctgggtggagaacagcactca

SEQ ID NO: 4291695 - DNA, 25 bp, Homo sapien
aatctgggtggagaacagcactcat

SEQ ID NO: 4291696 - DNA, 25 bp, Homo sapien
tctttgcgctgggaaccagaattgg

SEQ ID NO: 4291697 - DNA, 25 bp, Homo sapien
cgctgggaaccagaattggcaagta

SEQ ID NO: 4291698 - DNA, 25 bp, Homo sapien
gtatatggccttctttgcgctggga

SEQ ID NO: 4291699 - DNA, 25 bp, Homo sapien
cagaattggcaagtagaaccttgca

SEQ ID NO: 4291700 - DNA, 25 bp, Homo sapien
tatttcctaatactgccaagtgcaa

SEQ ID NO: 4291701 - DNA, 25 bp, Homo sapien
gatgctttcagtacccattcaggag

SEQ ID NO: 4291702 - DNA, 25 bp, Homo sapien
tggtccccaggaaactacttgcact

SEQ ID NO: 4291703 - DNA, 25 bp, Homo sapien
gaataattggcataggataccgcac

SEQ ID NO: 4291704 - DNA, 25 bp, Homo sapien
gacaattttgtatctgatgcttttc

SEQ ID NO: 4291705 - DNA, 25 bp, Homo sapien
tgcttttcagggaatcactgttgag

SEQ ID NO: 4291706 - DNA, 25 bp, Homo sapien
cagggaatcactgttgagccaggac

SEQ ID NO: 4291707 - DNA, 25 bp, Homo sapien
tggattccccctggtcaggatcctc

SEQ ID NO: 4291708 - DNA, 25 bp, Homo sapien
tgtttgctaaaggagtactgcacat

SEQ ID NO: 4291709 - DNA, 25 bp, Homo sapien
taaatgcgttcagaatttacagctt

SEQ ID NO: 4291710 - DNA, 25 bp, Homo sapien
atgcagagggccacaaggaccaaaa

SEQ ID NO: 4291711 - DNA, 25 bp, Homo sapien
gactatccaagtttccccagatcac

SEQ ID NO: 4291712 - DNA, 25 bp, Homo sapien
tgctgtttatagctgcaatggcccc

SEQ ID NO: 4291713 - DNA, 25 bp, Homo sapien
gacaaagtctataggttgaggccct

SEQ ID NO: 4291714 - DNA, 25 bp, Homo sapien
caagcctgtcttcagatgcagcgat

SEQ ID NO: 4291715 - DNA, 25 bp, Homo sapien
cccatctactgcatgtcggagagca

SEQ ID NO: 4291716 - DNA, 25 bp, Homo sapien
tgaggaagttatggtgcaaaaccag

SEQ ID NO: 4291717 - DNA, 25 bp, Homo sapien
gctgaggaagttatggtgcaaaacc

SEQ ID NO: 4291718 - DNA, 25 bp, Homo sapien
aggaagttatggtgcaaaaccagta

SEQ ID NO: 4291719 - DNA, 25 bp, Homo sapien
tccttaacaaactgctcaagctgag

SEQ ID NO: 4291720 - DNA, 25 bp, Homo sapien
tgaaatagatagggaaaacctatgt

SEQ ID NO: 4291721 - DNA, 25 bp, Homo sapien
aaacctatgttatacctctttatct

SEQ ID NO: 4291722 - DNA, 25 bp, Homo sapien
ctatgttatacctctttatctttga

SEQ ID NO: 4291723 - DNA, 25 bp, Homo sapien
tagatagggaaaacctatgttatac

SEQ ID NO: 4291724 - DNA, 25 bp, Homo sapien
ctttttcttctgtcatataaatatt

SEQ ID NO: 4291725 - DNA, 25 bp, Homo sapien
ttcttctgtcatataaatattagtt

SEQ ID NO: 4291726 - DNA, 25 bp, Homo sapien
ttttcttctgtcatataaatattag

SEQ ID NO: 4291727 - DNA, 25 bp, Homo sapien
cttctgtcatataaatattagtttt

SEQ ID NO: 4291728 - DNA, 25 bp, Homo sapien
gtattccgccagaaactcattttga

SEQ ID NO: 4291729 - DNA, 25 bp, Homo sapien
caagaggcatatacagtattccgcc

SEQ ID NO: 4291730 - DNA, 25 bp, Homo sapien
catgagaagggacatcaaaatgccc

SEQ ID NO: 4291731 - DNA, 25 bp, Homo sapien
ccccaaagtcagtaagcacatgaga

SEQ ID NO: 4291732 - DNA, 25 bp, Homo sapien
tataccctaagtcatatgcctctat

SEQ ID NO: 4291733 - DNA, 25 bp, Homo sapien
aaaagagaagtatatacatcagtat

SEQ ID NO: 4291734 - DNA, 25 bp, Homo sapien
tacatcagtatataccctaagtcat

SEQ ID NO: 4291735 - DNA, 25 bp, Homo sapien
tgcctctatcacattatgggctgac

SEQ ID NO: 4291736 - DNA, 25 bp, Homo sapien
atgaggcaacttccaccaccactga

SEQ ID NO: 4291737 - DNA, 25 bp, Homo sapien
gggagctgttcggacaaagccccaa

SEQ ID NO: 4291738 - DNA, 25 bp, Homo sapien
aaagccccaacatctgcctgcgatg

SEQ ID NO: 4291739 - DNA, 25 bp, Homo sapien
catctgcctgcgatgaggcaacttc

SEQ ID NO: 4291740 - DNA, 25 bp, Homo sapien
agttacgggatcaagaggcacactt

SEQ ID NO: 4291741 - DNA, 25 bp, Homo sapien
acttccagttagcagttacgggatc

SEQ ID NO: 4291742 - DNA, 25 bp, Homo sapien
tagcagttacgggatcaagaggcac

SEQ ID NO: 4291743 - DNA, 25 bp, Homo sapien
cagttagcagttacgggatcaagag

SEQ ID NO: 4291744 - DNA, 25 bp, Homo sapien
aaaacgccagttatcatggagtacg

SEQ ID NO: 4291745 - DNA, 25 bp, Homo sapien
acgaaattgcacacagacgctggat

SEQ ID NO: 4291746 - DNA, 25 bp, Homo sapien
cctgatctggttagaaggaattctc

SEQ ID NO: 4291747 - DNA, 25 bp, Homo sapien
ggctattcctggtaagagagctttc

SEQ ID NO: 4291748 - DNA, 25 bp, Homo sapien
caacagcctggtcttggtaacaacc

SEQ ID NO: 4291749 - DNA, 25 bp, Homo sapien
gcattcaaaggtcaaggtagcctcc

SEQ ID NO: 4291750 - DNA, 25 bp, Homo sapien
tggctggctcccacttggcattcaa

SEQ ID NO: 4291751 - DNA, 25 bp, Homo sapien
ccagggctaatccagctgtcatgta

SEQ ID NO: 4291752 - DNA, 25 bp, Homo sapien
tgatcggaaagtgatgtgacgctcc

SEQ ID NO: 4291753 - DNA, 25 bp, Homo sapien
atcggaaagtgatgtgacgctccgg

SEQ ID NO: 4291754 - DNA, 25 bp, Homo sapien
tgatgtgacgctccggggatcccac

SEQ ID NO: 4291755 - DNA, 25 bp, Homo sapien
aagtgatcggaaagtgatgtgacgc

SEQ ID NO: 4291756 - DNA, 25 bp, Homo sapien
cctggttagggctccgacaagtcgt

SEQ ID NO: 4291757 - DNA, 25 bp, Homo sapien
gcgatggaggagatgcggatgcagc

SEQ ID NO: 4291758 - DNA, 25 bp, Homo sapien
gccgcccttactgcaggcgatggag

SEQ ID NO: 4291759 - DNA, 25 bp, Homo sapien
tgcacgctgggccgagcacacttgc

SEQ ID NO: 4291760 - DNA, 25 bp, Homo sapien
aaaagcgcacgtcgcctagcgatgg

SEQ ID NO: 4291761 - DNA, 25 bp, Homo sapien
ggaaaaaggccgtcgccatggagac

SEQ ID NO: 4291762 - DNA, 25 bp, Homo sapien
gttgggccgcgcaagtactgtcaag

SEQ ID NO: 4291763 - DNA, 25 bp, Homo sapien
cagcggtaaccgctagagcgtcgcg

SEQ ID NO: 4291764 - DNA, 25 bp, Homo sapien
taattcattatgagttaaccatttt

SEQ ID NO: 4291765 - DNA, 25 bp, Homo sapien
gatagtacaatgtaactatcaaagt

SEQ ID NO: 4291766 - DNA, 25 bp, Homo sapien
tcattatgagttaaccattttaatg

SEQ ID NO: 4291767 - DNA, 25 bp, Homo sapien
ataaatgcctcataaatgatagtac

SEQ ID NO: 4291768 - DNA, 25 bp, Homo sapien
taacactgcagtgtagccagagcaa

SEQ ID NO: 4291769 - DNA, 25 bp, Homo sapien
aatatggtgccactagacacgtcta

SEQ ID NO: 4291770 - DNA, 25 bp, Homo sapien
taacggatcatgtacaaagcaacag

SEQ ID NO: 4291771 - DNA, 25 bp, Homo sapien
agtctctgaactgtggccaaaggta

SEQ ID NO: 4291772 - DNA, 25 bp, Homo sapien
agcctgactgacagagtgaaactct

SEQ ID NO: 4291773 - DNA, 25 bp, Homo sapien
gaggctcaggcaggaataccacttg

SEQ ID NO: 4291774 - DNA, 25 bp, Homo sapien
ggcaggaataccacttgagccccag

SEQ ID NO: 4291775 - DNA, 25 bp, Homo sapien
aggaataccacttgagccccagaag

SEQ ID NO: 4291776 - DNA, 25 bp, Homo sapien
tctggcagcagattaggacaaatgc

SEQ ID NO: 4291777 - DNA, 25 bp, Homo sapien
cagctgctcaagtactagatagaac

SEQ ID NO: 4291778 - DNA, 25 bp, Homo sapien
tctgtagggaaacgccaaagagata

SEQ ID NO: 4291779 - DNA, 25 bp, Homo sapien
aatggacctggactttgcttacaaa

SEQ ID NO: 4291780 - DNA, 25 bp, Homo sapien
gctttcacactgtaagttgtatact

SEQ ID NO: 4291781 - DNA, 25 bp, Homo sapien
aaaatttcaactggcgagctttcac

SEQ ID NO: 4291782 - DNA, 25 bp, Homo sapien
tcaactggcgagctttcacactgta

SEQ ID NO: 4291783 - DNA, 25 bp, Homo sapien
ttttcacccatgtgctcccgcaaac

SEQ ID NO: 4291784 - DNA, 25 bp, Homo sapien
tcaagatgtttcgaaaagtcgtaag

SEQ ID NO: 4291785 - DNA, 25 bp, Homo sapien
ggcttttctaagcatggtatccaag

SEQ ID NO: 4291786 - DNA, 25 bp, Homo sapien
caaggtggaaaccatacaggaaaat

SEQ ID NO: 4291787 - DNA, 25 bp, Homo sapien
tctgtaatcttagaggaagggcttt

SEQ ID NO: 4291788 - DNA, 25 bp, Homo sapien
ttttgatccaatgtatgagatctgc

SEQ ID NO: 4291789 - DNA, 25 bp, Homo sapien
tttttgatccaatgtatgagatctg

SEQ ID NO: 4291790 - DNA, 25 bp, Homo sapien
ctttttgatccaatgtatgagatct

SEQ ID NO: 4291791 - DNA, 25 bp, Homo sapien
tctttttgatccaatgtatgagatc

SEQ ID NO: 4291792 - DNA, 25 bp, Homo sapien
tgtgatttatatttcaaaaggttgt

SEQ ID NO: 4291793 - DNA, 25 bp, Homo sapien
tgtgtgatttatatttcaaaaggtt

SEQ ID NO: 4291794 - DNA, 25 bp, Homo sapien
gtgtgatttatatttcaaaaggttg

SEQ ID NO: 4291795 - DNA, 25 bp, Homo sapien
aaaaattctataacataagcatctt

SEQ ID NO: 4291796 - DNA, 25 bp, Homo sapien
agcatcttgatacagttaatgagac

SEQ ID NO: 4291797 - DNA, 25 bp, Homo sapien
aagcatcttgatacagttaatgaga

SEQ ID NO: 4291798 - DNA, 25 bp, Homo sapien
ttctataacataagcatcttgatac

SEQ ID NO: 4291799 - DNA, 25 bp, Homo sapien
aagctgaactcccaggccacgaatt

SEQ ID NO: 4291800 - DNA, 25 bp, Homo sapien
tcaagacttcaactagtctcctgat

SEQ ID NO: 4291801 - DNA, 25 bp, Homo sapien
cgaattacatcagttctcaagactt

SEQ ID NO: 4291802 - DNA, 25 bp, Homo sapien
gacttcaactagtctcctgatcttt

SEQ ID NO: 4291803 - DNA, 25 bp, Homo sapien
cccatgaagtatcagtgtgtcccga

SEQ ID NO: 4291804 - DNA, 25 bp, Homo sapien
ccagtttcagggtctgagtcatcaa

SEQ ID NO: 4291805 - DNA, 25 bp, Homo sapien
gacactgggtttgctaccgggacat

SEQ ID NO: 4291806 - DNA, 25 bp, Homo sapien
gggacatcttcacagctctctttag

SEQ ID NO: 4291807 - DNA, 25 bp, Homo sapien
ccatctgacttatcagttgaacttg

SEQ ID NO: 4291808 - DNA, 25 bp, Homo sapien
tgacttatcagttgaacttgtagaa

SEQ ID NO: 4291809 - DNA, 25 bp, Homo sapien
ccgtaatccccatctgacttatcag

SEQ ID NO: 4291810 - DNA, 25 bp, Homo sapien
acagacaatgaatctgtttcctttc

SEQ ID NO: 4291811 - DNA, 25 bp, Homo sapien
caagtgagactcaaatctggcgaca

SEQ ID NO: 4291812 - DNA, 25 bp, Homo sapien
caaagtgctgcctagtgcaagccct

SEQ ID NO: 4291813 - DNA, 25 bp, Homo sapien
ctctgagatatggaaggcagcctct

SEQ ID NO: 4291814 - DNA, 25 bp, Homo sapien
tctacaggcaagaaggtaaactaca

SEQ ID NO: 4291815 - DNA, 25 bp, Homo sapien
gccctgtcccaaaaataaatggagc

SEQ ID NO: 4291816 - DNA, 25 bp, Homo sapien
ctgtcccaaaaataaatggagctga

SEQ ID NO: 4291817 - DNA, 25 bp, Homo sapien
atggagctgacatttaaaaggttta

SEQ ID NO: 4291818 - DNA, 25 bp, Homo sapien
tggagctgacatttaaaaggtttac

SEQ ID NO: 4291819 - DNA, 25 bp, Homo sapien
tctctcttaggagtacgtaatgcac

SEQ ID NO: 4291820 - DNA, 25 bp, Homo sapien
gctacactcagagacgctttcctca

SEQ ID NO: 4291821 - DNA, 25 bp, Homo sapien
ctgctacactcagagacgctttcct

SEQ ID NO: 4291822 - DNA, 25 bp, Homo sapien
ctcagagacgctttcctcactgaag

SEQ ID NO: 4291823 - DNA, 25 bp, Homo sapien
tacactcagagacgctttcctcact

SEQ ID NO: 4291824 - DNA, 25 bp, Homo sapien
agtgtttctgtccacgaaccatacc

SEQ ID NO: 4291825 - DNA, 25 bp, Homo sapien
gaaagtttcaacctctcatagttag

SEQ ID NO: 4291826 - DNA, 25 bp, Homo sapien
tgccaattagatgaagaaaagaagt

SEQ ID NO: 4291827 - DNA, 25 bp, Homo sapien
gaaccatacccctaactgccaatta

SEQ ID NO: 4291828 - DNA, 25 bp, Homo sapien
ctgtgactgctttagtcgcctcctc

SEQ ID NO: 4291829 - DNA, 25 bp, Homo sapien
cctctctctggctgataatggtcga

SEQ ID NO: 4291830 - DNA, 25 bp, Homo sapien
tgactgctttagtcgcctcctctct

SEQ ID NO: 4291831 - DNA, 25 bp, Homo sapien
tctctctggctgataatggtcgatc

SEQ ID NO: 4291832 - DNA, 25 bp, Homo sapien
agacccagtgaccactctacgttgg

SEQ ID NO: 4291833 - DNA, 25 bp, Homo sapien
ccaacaatgggatgagaaggcaaaa

SEQ ID NO: 4291834 - DNA, 25 bp, Homo sapien
gcaaaaatcgaggaggcgactcttg

SEQ ID NO: 4291835 - DNA, 25 bp, Homo sapien
gatgatgacatctcactgctccttg

SEQ ID NO: 4291836 - DNA, 25 bp, Homo sapien
cctttttggcaattgttaattgctc

SEQ ID NO: 4291837 - DNA, 25 bp, Homo sapien
taattgctctaaatagaaattgagt

SEQ ID NO: 4291838 - DNA, 25 bp, Homo sapien
ggcaattgttaattgctctaaatag

SEQ ID NO: 4291839 - DNA, 25 bp, Homo sapien
tgcctttttggcaattgttaattgc

SEQ ID NO: 4291840 - DNA, 25 bp, Homo sapien
ttcccctctgtgctcagtctgttct

SEQ ID NO: 4291841 - DNA, 25 bp, Homo sapien
ttttcccctctgtgctcagtctgtt

SEQ ID NO: 4291842 - DNA, 25 bp, Homo sapien
tcttttcccctctgtgctcagtctg

SEQ ID NO: 4291843 - DNA, 25 bp, Homo sapien
tctgttctctcctcttttgccgtcg

SEQ ID NO: 4291844 - DNA, 25 bp, Homo sapien
tgtcgagacagggaaggttcagacc

SEQ ID NO: 4291845 - DNA, 25 bp, Homo sapien
agacagggaaggttcagacccagag

SEQ ID NO: 4291846 - DNA, 25 bp, Homo sapien
gagacagggaaggttcagacccaga

SEQ ID NO: 4291847 - DNA, 25 bp, Homo sapien
tcgagacagggaaggttcagaccca

SEQ ID NO: 4291848 - DNA, 25 bp, Homo sapien
tctgggtggattctgccctgttttt

SEQ ID NO: 4291849 - DNA, 25 bp, Homo sapien
gtttttctataatacattcaccagc

SEQ ID NO: 4291850 - DNA, 25 bp, Homo sapien
taatacattcaccagcaacttgatc

SEQ ID NO: 4291851 - DNA, 25 bp, Homo sapien
ctgtaaatctgggtggattctgccc

SEQ ID NO: 4291852 - DNA, 25 bp, Homo sapien
cgggagggggaggctgcagtaagct

SEQ ID NO: 4291853 - DNA, 25 bp, Homo sapien
agaagaattgcttgaacccgggagg

SEQ ID NO: 4291854 - DNA, 25 bp, Homo sapien
tcagaaggctgaggtagaagaattg

SEQ ID NO: 4291855 - DNA, 25 bp, Homo sapien
tgagatcgcaccactgcactccagc

SEQ ID NO: 4291856 - DNA, 25 bp, Homo sapien
ctggatttagtgttgtcctgcagca

SEQ ID NO: 4291857 - DNA, 25 bp, Homo sapien
ggctagttctgtggtattgctcaag

SEQ ID NO: 4291858 - DNA, 25 bp, Homo sapien
cagtgacaatgtcagaggaccacat

SEQ ID NO: 4291859 - DNA, 25 bp, Homo sapien
cattagaggcatccaaatatcttgg

SEQ ID NO: 4291860 - DNA, 25 bp, Homo sapien
gactggcaggtgacttcaagagacc

SEQ ID NO: 4291861 - DNA, 25 bp, Homo sapien
ttctcctgggacaaacatttgcctt

SEQ ID NO: 4291862 - DNA, 25 bp, Homo sapien
tgtttgcaggtatgggctttcagac

SEQ ID NO: 4291863 - DNA, 25 bp, Homo sapien
tcagactggcaggtgacttcaagag

SEQ ID NO: 4291864 - DNA, 25 bp, Homo sapien
gcacaatgcccggaaggctggtaaa

SEQ ID NO: 4291865 - DNA, 25 bp, Homo sapien
gcctggttgacacagttgagatcct

SEQ ID NO: 4291866 - DNA, 25 bp, Homo sapien
cagctgggaactctacattgaaggc

SEQ ID NO: 4291867 - DNA, 25 bp, Homo sapien
cacaaaggtgataggcagctgggaa

SEQ ID NO: 4291868 - DNA, 25 bp, Homo sapien
gatgaactatgccaaagaaacagct

SEQ ID NO: 4291869 - DNA, 25 bp, Homo sapien
tttgcccataactaagcctacggag

SEQ ID NO: 4291870 - DNA, 25 bp, Homo sapien
tctttctggagcatgtctacaagct

SEQ ID NO: 4291871 - DNA, 25 bp, Homo sapien
caagctctacatggaaacgatctga

SEQ ID NO: 4291872 - DNA, 25 bp, Homo sapien
gaaaccactgtagcaaaaggcttgg

SEQ ID NO: 4291873 - DNA, 25 bp, Homo sapien
cattatatatgtctgggagccctca

SEQ ID NO: 4291874 - DNA, 25 bp, Homo sapien
tcatgatttgattctgcctctccag

SEQ ID NO: 4291875 - DNA, 25 bp, Homo sapien
gcttggattgagagtcaccattttt

SEQ ID NO: 4291876 - DNA, 25 bp, Homo sapien
ttgccgctttatataaggctgcctc

SEQ ID NO: 4291877 - DNA, 25 bp, Homo sapien
gctgtaatctcttggcattggtggc

SEQ ID NO: 4291878 - DNA, 25 bp, Homo sapien
aaaagaaggagatttgccgctttat

SEQ ID NO: 4291879 - DNA, 25 bp, Homo sapien
aggatgctcctcacagacggccttt

SEQ ID NO: 4291880 - DNA, 25 bp, Homo sapien
tttccttcaataatccgataaacta

SEQ ID NO: 4291881 - DNA, 25 bp, Homo sapien
gcatgcttcaaggtggccatttcat

SEQ ID NO: 4291882 - DNA, 25 bp, Homo sapien
taatccgataaactaaagaattcat

SEQ ID NO: 4291883 - DNA, 25 bp, Homo sapien
ttgaaagcatgcttcaaggtggcca

SEQ ID NO: 4291884 - DNA, 25 bp, Homo sapien
ttgtttgagaacaattcagggctca

SEQ ID NO: 4291885 - DNA, 25 bp, Homo sapien
tcctaggtcccctactttgatgatg

SEQ ID NO: 4291886 - DNA, 25 bp, Homo sapien
gctcatgtagtagggtgtgccaatg

SEQ ID NO: 4291887 - DNA, 25 bp, Homo sapien
agggtgctagccatgtcacagtggt

SEQ ID NO: 4291888 - DNA, 25 bp, Homo sapien
ctgcaaagccatggcgatctgtaca

SEQ ID NO: 4291889 - DNA, 25 bp, Homo sapien
gcgatctgtacaaaccactctacca

SEQ ID NO: 4291890 - DNA, 25 bp, Homo sapien
catggcgatctgtacaaaccactct

SEQ ID NO: 4291891 - DNA, 25 bp, Homo sapien
aaagccatggcgatctgtacaaacc

SEQ ID NO: 4291892 - DNA, 25 bp, Homo sapien
tgagctttcggtacaaatcacctcc

SEQ ID NO: 4291893 - DNA, 25 bp, Homo sapien
cacagaagcccatgacaatgtagag

SEQ ID NO: 4291894 - DNA, 25 bp, Homo sapien
ccttcccatgactccttgtaggtga

SEQ ID NO: 4291895 - DNA, 25 bp, Homo sapien
gctagaggcatttcggaggttcagt

SEQ ID NO: 4291896 - DNA, 25 bp, Homo sapien
cttcacaagcgtcacctctccatag

SEQ ID NO: 4291897 - DNA, 25 bp, Homo sapien
acccgcaggtagcagtaggcggcca

SEQ ID NO: 4291898 - DNA, 25 bp, Homo sapien
tccccttgcccacgacccgcaggta

SEQ ID NO: 4291899 - DNA, 25 bp, Homo sapien
cgtcccgccggtgcttcacaagcgt

SEQ ID NO: 4291900 - DNA, 25 bp, Homo sapien
cgggcggcaacaagaagctcggttc

SEQ ID NO: 4291901 - DNA, 25 bp, Homo sapien
gctggcccagagtcgggatgcggcg

SEQ ID NO: 4291902 - DNA, 25 bp, Homo sapien
gccgggagcagttctgcgcatgctc

SEQ ID NO: 4291903 - DNA, 25 bp, Homo sapien
gacgccgctgccatagcgatccggg

SEQ ID NO: 4291904 - DNA, 25 bp, Homo sapien
gcttgaggctgtggaaccatagaca

SEQ ID NO: 4291905 - DNA, 25 bp, Homo sapien
taagtcataaaaagggtgtgtgcac

SEQ ID NO: 4291906 - DNA, 25 bp, Homo sapien
catagacaaaggacacctgacccag

SEQ ID NO: 4291907 - DNA, 25 bp, Homo sapien
tatcacctactgtatgctaagcaag

SEQ ID NO: 4291908 - DNA, 25 bp, Homo sapien
tgaatcagccaaggcctgtgcccag

SEQ ID NO: 4291909 - DNA, 25 bp, Homo sapien
tatgacgtgaacagagaatctcctg

SEQ ID NO: 4291910 - DNA, 25 bp, Homo sapien
tacccgggctggctgattcatcatc

SEQ ID NO: 4291911 - DNA, 25 bp, Homo sapien
gatctagtgccatcaccctgggtcc

SEQ ID NO: 4291912 - DNA, 25 bp, Homo sapien
gaatctcctggcaacgtgcaggtac

SEQ ID NO: 4291913 - DNA, 25 bp, Homo sapien
tcaatctcaggtccgctagcctagc

SEQ ID NO: 4291914 - DNA, 25 bp, Homo sapien
ggcttcctcgaaagagtaatcatgt

SEQ ID NO: 4291915 - DNA, 25 bp, Homo sapien
gaaccatcagctgattgtcaccagg

SEQ ID NO: 4291916 - DNA, 25 bp, Homo sapien
agtgtctgacatccggccaggctct

SEQ ID NO: 4291917 - DNA, 25 bp, Homo sapien
catcggcacgaaggttgtctgctgg

SEQ ID NO: 4291918 - DNA, 25 bp, Homo sapien
tcgtccacaacaacggagaagggct

SEQ ID NO: 4291919 - DNA, 25 bp, Homo sapien
actgactacattgtccccaacctgt

SEQ ID NO: 4291920 - DNA, 25 bp, Homo sapien
tgttttgagtagacacaccagctcc

SEQ ID NO: 4291921 - DNA, 25 bp, Homo sapien
ggtccaagagaccatgaagcagact

SEQ ID NO: 4291922 - DNA, 25 bp, Homo sapien
ttcaggatgcgaggttgaggcccta

SEQ ID NO: 4291923 - DNA, 25 bp, Homo sapien
tgttccacgatgctaaggttcagga

SEQ ID NO: 4291924 - DNA, 25 bp, Homo sapien
ctcaaatgggtggttcgagctcagt

SEQ ID NO: 4291925 - DNA, 25 bp, Homo sapien
gggaagccaagtgtacagggtgggc

SEQ ID NO: 4291926 - DNA, 25 bp, Homo sapien
ggaagccaagtgtacagggtgggca

SEQ ID NO: 4291927 - DNA, 25 bp, Homo sapien
agcaggaaatctccactcccggggg

SEQ ID NO: 4291928 - DNA, 25 bp, Homo sapien
gcaggaaatctccactcccgggggc

SEQ ID NO: 4291929 - DNA, 25 bp, Homo sapien
gacagggagaggttccgactgtccc

SEQ ID NO: 4291930 - DNA, 25 bp, Homo sapien
gcatcaaccttccaccggactgtgt

SEQ ID NO: 4291931 - DNA, 25 bp, Homo sapien
ccagggatctcagggcccatgtgtt

SEQ ID NO: 4291932 - DNA, 25 bp, Homo sapien
aagccagtacgtgaggtctccaggg

SEQ ID NO: 4291933 - DNA, 25 bp, Homo sapien
gtggcagagtggtcattgccctgaa

SEQ ID NO: 4291934 - DNA, 25 bp, Homo sapien
ggtggcagagtggtcattgccctga

SEQ ID NO: 4291935 - DNA, 25 bp, Homo sapien
ctggtggcagagtggtcattgccct

SEQ ID NO: 4291936 - DNA, 25 bp, Homo sapien
tggcagagtggtcattgccctgaac

SEQ ID NO: 4291937 - DNA, 25 bp, Homo sapien
gctgctggagatccccagagcacct

SEQ ID NO: 4291938 - DNA, 25 bp, Homo sapien
tgcgtctgccgtcatctgatgctgc

SEQ ID NO: 4291939 - DNA, 25 bp, Homo sapien
ctcagcgtgcgtctgccgtcatctg

SEQ ID NO: 4291940 - DNA, 25 bp, Homo sapien
cagagcacctcctggtaaaactggc

SEQ ID NO: 4291941 - DNA, 25 bp, Homo sapien
gatacaaagggtggatcagtaaggg

SEQ ID NO: 4291942 - DNA, 25 bp, Homo sapien
ggtggatcagtaagggtcagagaca

SEQ ID NO: 4291943 - DNA, 25 bp, Homo sapien
acaaagggtggatcagtaagggtca

SEQ ID NO: 4291944 - DNA, 25 bp, Homo sapien
gtggatcagtaagggtcagagacag

SEQ ID NO: 4291945 - DNA, 25 bp, Homo sapien
tgggccccggtaatgggctcagtac

SEQ ID NO: 4291946 - DNA, 25 bp, Homo sapien
cctgggccccggtaatgggctcagt

SEQ ID NO: 4291947 - DNA, 25 bp, Homo sapien
ctgggccccggtaatgggctcagta

SEQ ID NO: 4291948 - DNA, 25 bp, Homo sapien
ggcctgggccccggtaatgggctca

SEQ ID NO: 4291949 - DNA, 25 bp, Homo sapien
ctgagcagcaggagacccgtcttgt

SEQ ID NO: 4291950 - DNA, 25 bp, Homo sapien
gaacaacaggccgatggtcactttg

SEQ ID NO: 4291951 - DNA, 25 bp, Homo sapien
caagggtccctccaacgtggctgga

SEQ ID NO: 4291952 - DNA, 25 bp, Homo sapien
cggtcagtgtcacgcagaaggagcc

SEQ ID NO: 4291953 - DNA, 25 bp, Homo sapien
ggaagtcacggagtggccttgggtg

SEQ ID NO: 4291954 - DNA, 25 bp, Homo sapien
caggaagtcacggagtggccttggg

SEQ ID NO: 4291955 - DNA, 25 bp, Homo sapien
gaagtcacggagtggccttgggtgg

SEQ ID NO: 4291956 - DNA, 25 bp, Homo sapien
aggaagtcacggagtggccttgggt

SEQ ID NO: 4291957 - DNA, 25 bp, Homo sapien
tctcttttttggtggggcagggaca

SEQ ID NO: 4291958 - DNA, 25 bp, Homo sapien
agctcgttgcaacctgtgcctcctc

SEQ ID NO: 4291959 - DNA, 25 bp, Homo sapien
cgttgcaacctgtgcctcctcggct

SEQ ID NO: 4291960 - DNA, 25 bp, Homo sapien
ctcgttgcaacctgtgcctcctcgg

SEQ ID NO: 4291961 - DNA, 25 bp, Homo sapien
cacaccgggcgtagatcttttatga

SEQ ID NO: 4291962 - DNA, 25 bp, Homo sapien
cccagggtcacaaggattagcagca

SEQ ID NO: 4291963 - DNA, 25 bp, Homo sapien
ccctcgtgatctgcaaagctggaag

SEQ ID NO: 4291964 - DNA, 25 bp, Homo sapien
tctgtcaagtgcaagggagttcccg

SEQ ID NO: 4291965 - DNA, 25 bp, Homo sapien
ccgggcatcactgagaatagcgtct

SEQ ID NO: 4291966 - DNA, 25 bp, Homo sapien
gagcttcttcggttccgagtcacca

SEQ ID NO: 4291967 - DNA, 25 bp, Homo sapien
ttcaggggatgcgtgaacccatacc

SEQ ID NO: 4291968 - DNA, 25 bp, Homo sapien
tccttccacttgtacgcagagcttc

SEQ ID NO: 4291969 - DNA, 25 bp, Homo sapien
tcgatccatgagaacccagccttct

SEQ ID NO: 4291970 - DNA, 25 bp, Homo sapien
tcatactggccagtcacctcaaccc

SEQ ID NO: 4291971 - DNA, 25 bp, Homo sapien
cttcgatccatgagaacccagcctt

SEQ ID NO: 4291972 - DNA, 25 bp, Homo sapien
ttctccctctcatactggccagtca

SEQ ID NO: 4291973 - DNA, 25 bp, Homo sapien
agccaggtctgacaccgacctgcat

SEQ ID NO: 4291974 - DNA, 25 bp, Homo sapien
ccagaccagagaggtcatagctggg

SEQ ID NO: 4291975 - DNA, 25 bp, Homo sapien
ccaggtctgacaccgacctgcatgg

SEQ ID NO: 4291976 - DNA, 25 bp, Homo sapien
gaggaccagaccagagaggtcatag

SEQ ID NO: 4291977 - DNA, 25 bp, Homo sapien
agcaggttcactggcccctggcggt

SEQ ID NO: 4291978 - DNA, 25 bp, Homo sapien
gttcactggcccctggcggtgtctg

SEQ ID NO: 4291979 - DNA, 25 bp, Homo sapien
cacacagagccgctccacactctgc

SEQ ID NO: 4291980 - DNA, 25 bp, Homo sapien
ggtctgagagcaggttcactggccc

SEQ ID NO: 4291981 - DNA, 25 bp, Homo sapien
ggggcaaggatgtggaaaggggcca

SEQ ID NO: 4291982 - DNA, 25 bp, Homo sapien
tgggggcaaggatgtggaaaggggc

SEQ ID NO: 4291983 - DNA, 25 bp, Homo sapien
ctgggggcaaggatgtggaaagggg

SEQ ID NO: 4291984 - DNA, 25 bp, Homo sapien
gggcaaggatgtggaaaggggccaa

SEQ ID NO: 4291985 - DNA, 25 bp, Homo sapien
ctggggtttgggttgtcatggttgt

SEQ ID NO: 4291986 - DNA, 25 bp, Homo sapien
ctcactacttcaacatcgagacatg

SEQ ID NO: 4291987 - DNA, 25 bp, Homo sapien
tcaacatcgagacatgtgacaggtc

SEQ ID NO: 4291988 - DNA, 25 bp, Homo sapien
cgagacatgtgacaggtcactcccc

SEQ ID NO: 4291989 - DNA, 25 bp, Homo sapien
agtgactaggtgtggctgggttccc

SEQ ID NO: 4291990 - DNA, 25 bp, Homo sapien
tcatattcatgacacgagacacagc

SEQ ID NO: 4291991 - DNA, 25 bp, Homo sapien
ttcatattcatgacacgagacacag

SEQ ID NO: 4291992 - DNA, 25 bp, Homo sapien
ttttcatattcatgacacgagacac

SEQ ID NO: 4291993 - DNA, 25 bp, Homo sapien
catattcatgacacgagacacagct

SEQ ID NO: 4291994 - DNA, 25 bp, Homo sapien
gcagcgctgccaccaagctccagcc

SEQ ID NO: 4291995 - DNA, 25 bp, Homo sapien
agcgctgccaccaagctccagcccc

SEQ ID NO: 4291996 - DNA, 25 bp, Homo sapien
ctagggcaggaacatccggaaacag

SEQ ID NO: 4291997 - DNA, 25 bp, Homo sapien
gggcaggaacatccggaaacagaaa

SEQ ID NO: 4291998 - DNA, 25 bp, Homo sapien
tgtcagggataggtccagcctggct

SEQ ID NO: 4291999 - DNA, 25 bp, Homo sapien
aagagcatgctgtcagggataggtc

SEQ ID NO: 4292000 - DNA, 25 bp, Homo sapien
gaatggcctttgtcacaggagattt

SEQ ID NO: 4292001 - DNA, 25 bp, Homo sapien
gagattttcaaacagaagagcatgc

SEQ ID NO: 4292002 - DNA, 25 bp, Homo sapien
gcctctagagtatagtggatcctac

SEQ ID NO: 4292003 - DNA, 25 bp, Homo sapien
cattcgagtgcagatttggggatca

SEQ ID NO: 4292004 - DNA, 25 bp, Homo sapien
tcagaaaacagttcaagggacctct

SEQ ID NO: 4292005 - DNA, 25 bp, Homo sapien
catgagtcagcctctagagtatagt

SEQ ID NO: 4292006 - DNA, 25 bp, Homo sapien
tctgaaattcatccgggagccagca

SEQ ID NO: 4292007 - DNA, 25 bp, Homo sapien
aaattcatccgggagccagcagctc

SEQ ID NO: 4292008 - DNA, 25 bp, Homo sapien
cagacggcggaaggggtggtaagca

SEQ ID NO: 4292009 - DNA, 25 bp, Homo sapien
aggtctgaaattcatccgggagcca

SEQ ID NO: 4292010 - DNA, 25 bp, Homo sapien
gatgaacaataatggacctccctca

SEQ ID NO: 4292011 - DNA, 25 bp, Homo sapien
gacagatgcagtcttctctcaggtg

SEQ ID NO: 4292012 - DNA, 25 bp, Homo sapien
acagccagggcttgagatccaccca

SEQ ID NO: 4292013 - DNA, 25 bp, Homo sapien
tgcggagagggcagctatgtcccct

SEQ ID NO: 4292014 - DNA, 25 bp, Homo sapien
ttccatcctcttcttggagaaaagg

SEQ ID NO: 4292015 - DNA, 25 bp, Homo sapien
ctgtgtggtcaagtcctgatcagat

SEQ ID NO: 4292016 - DNA, 25 bp, Homo sapien
caggactgagcccaatctgtcaatc

SEQ ID NO: 4292017 - DNA, 25 bp, Homo sapien
aggcccgagggctgtcaccagccag

SEQ ID NO: 4292018 - DNA, 25 bp, Homo sapien
agctgggcaaggcactaccctccac

SEQ ID NO: 4292019 - DNA, 25 bp, Homo sapien
ggtatttttgctccctggagataat

SEQ ID NO: 4292020 - DNA, 25 bp, Homo sapien
tttttgctccctggagataatattt

SEQ ID NO: 4292021 - DNA, 25 bp, Homo sapien
ttttggtatttttgctccctggaga

SEQ ID NO: 4292022 - DNA, 25 bp, Homo sapien
ttggtatttttgctccctggagata

SEQ ID NO: 4292023 - DNA, 25 bp, Homo sapien
ctgagtggacattcctgtttctact

SEQ ID NO: 4292024 - DNA, 25 bp, Homo sapien
tgagtggacattcctgtttctactt

SEQ ID NO: 4292025 - DNA, 25 bp, Homo sapien
gagtggacattcctgtttctacttt

SEQ ID NO: 4292026 - DNA, 25 bp, Homo sapien
agtgaataggctgaatctcccaggg

SEQ ID NO: 4292027 - DNA, 25 bp, Homo sapien
gtttaatcttgctacccaatcctgg

SEQ ID NO: 4292028 - DNA, 25 bp, Homo sapien
gggaggctgagatctcaaccccaca

SEQ ID NO: 4292029 - DNA, 25 bp, Homo sapien
ctggactatatcgtaggtgcaatga

SEQ ID NO: 4292030 - DNA, 25 bp, Homo sapien
ctaccatagatgtgagaggcgtgac

SEQ ID NO: 4292031 - DNA, 25 bp, Homo sapien
taaattcagcgcttggttccggagg

SEQ ID NO: 4292032 - DNA, 25 bp, Homo sapien
cctgctgatcagcatcggatgcgga

SEQ ID NO: 4292033 - DNA, 25 bp, Homo sapien
aacttgagactgctcttggtcatcg

SEQ ID NO: 4292034 - DNA, 25 bp, Homo sapien
tctgccacactggactccgtttgga

SEQ ID NO: 4292035 - DNA, 25 bp, Homo sapien
ctccgtttggaaagtgatgttctgt

SEQ ID NO: 4292036 - DNA, 25 bp, Homo sapien
cagagcctctccatgaagttgtgga

SEQ ID NO: 4292037 - DNA, 25 bp, Homo sapien
gctgctggatagtcaggtatgccca

SEQ ID NO: 4292038 - DNA, 25 bp, Homo sapien
tgcttgcaggtgcacagaccggctg

SEQ ID NO: 4292039 - DNA, 25 bp, Homo sapien
ttgcaggtgcacagaccggctgccg

SEQ ID NO: 4292040 - DNA, 25 bp, Homo sapien
caggtgcacagaccggctgccgaga

SEQ ID NO: 4292041 - DNA, 25 bp, Homo sapien
ctgtgcttgcaggtgcacagaccgg

SEQ ID NO: 4292042 - DNA, 25 bp, Homo sapien
cctccacggcattgcttgggtactc

SEQ ID NO: 4292043 - DNA, 25 bp, Homo sapien
tgcttgggtactcgaaggtcactgc

SEQ ID NO: 4292044 - DNA, 25 bp, Homo sapien
tctgagcccttgaagaggagccgga

SEQ ID NO: 4292045 - DNA, 25 bp, Homo sapien
cactgactgtggctgtgagcacatc

SEQ ID NO: 4292046 - DNA, 25 bp, Homo sapien
ctgagtcctcatggatgcgccgggc

SEQ ID NO: 4292047 - DNA, 25 bp, Homo sapien
tacagcttcccgcacgttattctgg

SEQ ID NO: 4292048 - DNA, 25 bp, Homo sapien
catagctgacgtcgaaaccgaagcc

SEQ ID NO: 4292049 - DNA, 25 bp, Homo sapien
cagaagaggctgtaccggccactta

SEQ ID NO: 4292050 - DNA, 25 bp, Homo sapien
agaatatttctggaacctcagagcc

SEQ ID NO: 4292051 - DNA, 25 bp, Homo sapien
atttctggaacctcagagccgaggg

SEQ ID NO: 4292052 - DNA, 25 bp, Homo sapien
aatatttctggaacctcagagccga

SEQ ID NO: 4292053 - DNA, 25 bp, Homo sapien
tatttctggaacctcagagccgagg

SEQ ID NO: 4292054 - DNA, 25 bp, Homo sapien
cagtggggtcgccatcggtgagcag

SEQ ID NO: 4292055 - DNA, 25 bp, Homo sapien
gctgctgtccagcaactgcacagcc

SEQ ID NO: 4292056 - DNA, 25 bp, Homo sapien
cacagccatcagcattgcatcattg

SEQ ID NO: 4292057 - DNA, 25 bp, Homo sapien
tgagacactcccttcgggcagccgc

SEQ ID NO: 4292058 - DNA, 25 bp, Homo sapien
actctcaaggtggtccccagccagg

SEQ ID NO: 4292059 - DNA, 25 bp, Homo sapien
ctctcaaggtggtccccagccagga

SEQ ID NO: 4292060 - DNA, 25 bp, Homo sapien
gaacacgcactctcaaggtggtccc

SEQ ID NO: 4292061 - DNA, 25 bp, Homo sapien
tgaggaacacgcactctcaaggtgg

SEQ ID NO: 4292062 - DNA, 25 bp, Homo sapien
cagtgatggcctccactgagttgct

SEQ ID NO: 4292063 - DNA, 25 bp, Homo sapien
gcaaagctcctggccttgttcacgt

SEQ ID NO: 4292064 - DNA, 25 bp, Homo sapien
tgcttctgtactgaagacgatgagg

SEQ ID NO: 4292065 - DNA, 25 bp, Homo sapien
tgttcacgttctcggctgaggctgg

SEQ ID NO: 4292066 - DNA, 25 bp, Homo sapien
ctcgggggcaaagtagtgtacaaag

SEQ ID NO: 4292067 - DNA, 25 bp, Homo sapien
gcattgtggttaggccctcgggggc

SEQ ID NO: 4292068 - DNA, 25 bp, Homo sapien
ttcttgggcattgtggttaggccct

SEQ ID NO: 4292069 - DNA, 25 bp, Homo sapien
gccctcgggggcaaagtagtgtaca

SEQ ID NO: 4292070 - DNA, 25 bp, Homo sapien
agaactctccctgcaacttttcctt

SEQ ID NO: 4292071 - DNA, 25 bp, Homo sapien
tgccctttttcagggctcagaccag

SEQ ID NO: 4292072 - DNA, 25 bp, Homo sapien
agtatttcagatggtttatactaaa

SEQ ID NO: 4292073 - DNA, 25 bp, Homo sapien
tgctcatgcatagcccaccagaact

SEQ ID NO: 4292074 - DNA, 25 bp, Homo sapien
catcatagcggataatgaggttgcc

SEQ ID NO: 4292075 - DNA, 25 bp, Homo sapien
gataatgaggttgccgtccaggact

SEQ ID NO: 4292076 - DNA, 25 bp, Homo sapien
atggcccggtccacatcatagcgga

SEQ ID NO: 4292077 - DNA, 25 bp, Homo sapien
gaggttgccgtccaggactgtttct

SEQ ID NO: 4292078 - DNA, 25 bp, Homo sapien
gtgttggcttgaaccggatgtgagc

SEQ ID NO: 4292079 - DNA, 25 bp, Homo sapien
ggaaagtgttggcttgaaccggatg

SEQ ID NO: 4292080 - DNA, 25 bp, Homo sapien
aagtgttggcttgaaccggatgtga

SEQ ID NO: 4292081 - DNA, 25 bp, Homo sapien
gaaagtgttggcttgaaccggatgt

SEQ ID NO: 4292082 - DNA, 25 bp, Homo sapien
ggggctcgaagatgtgaatgtccat

SEQ ID NO: 4292083 - DNA, 25 bp, Homo sapien
tgccaggtggtgagggcgtctacca

SEQ ID NO: 4292084 - DNA, 25 bp, Homo sapien
aaagctgatgccctggggctcgaag

SEQ ID NO: 4292085 - DNA, 25 bp, Homo sapien
gatcttggcattgggagccacactg

SEQ ID NO: 4292086 - DNA, 25 bp, Homo sapien
acactgaccgacacctggaactgct

SEQ ID NO: 4292087 - DNA, 25 bp, Homo sapien
ccccaaacgccgcttgagcagctcc

SEQ ID NO: 4292088 - DNA, 25 bp, Homo sapien
gaccagctcaaaggtgatcttggca

SEQ ID NO: 4292089 - DNA, 25 bp, Homo sapien
tctccttgatgatccctgggtaggt

SEQ ID NO: 4292090 - DNA, 25 bp, Homo sapien
tccctgggtaggtcatgccatcgat

SEQ ID NO: 4292091 - DNA, 25 bp, Homo sapien
acgaggccagcgctctttcccttgg

SEQ ID NO: 4292092 - DNA, 25 bp, Homo sapien
actgctgcgctgtactgtgcctggg

SEQ ID NO: 4292093 - DNA, 25 bp, Homo sapien
ccagccctgcgtgcagccgtgtggg

SEQ ID NO: 4292094 - DNA, 25 bp, Homo sapien
gggaactagttcatcaccagcaaga

SEQ ID NO: 4292095 - DNA, 25 bp, Homo sapien
gagctctctgagtcacacttgttcc

SEQ ID NO: 4292096 - DNA, 25 bp, Homo sapien
ccttccatttcacggactgttccag

SEQ ID NO: 4292097 - DNA, 25 bp, Homo sapien
ctggtgacgaccgtgtgggcaaatc

SEQ ID NO: 4292098 - DNA, 25 bp, Homo sapien
ggccctattgaccactcggctggtg

SEQ ID NO: 4292099 - DNA, 25 bp, Homo sapien
cgtgtgggcaaatcgggatgagacc

SEQ ID NO: 4292100 - DNA, 25 bp, Homo sapien
tccacggtgaggctgtagatgtcga

SEQ ID NO: 4292101 - DNA, 25 bp, Homo sapien
cagtaaggcccttggggtagtgcct

SEQ ID NO: 4292102 - DNA, 25 bp, Homo sapien
cacgctggcacatgcggaggctctt

SEQ ID NO: 4292103 - DNA, 25 bp, Homo sapien
acgcacttgtgctgacacgctggca

SEQ ID NO: 4292104 - DNA, 25 bp, Homo sapien
aggtctgcaccatttttttgcacac

SEQ ID NO: 4292105 - DNA, 25 bp, Homo sapien
aagcaggacgagaactttgctgcag

SEQ ID NO: 4292106 - DNA, 25 bp, Homo sapien
tttgctgcaggtacggacaggcctt

SEQ ID NO: 4292107 - DNA, 25 bp, Homo sapien
gcagtgaaagcaggacgagaacttt

SEQ ID NO: 4292108 - DNA, 25 bp, Homo sapien
gcagtagtagtctggtggatggcca

SEQ ID NO: 4292109 - DNA, 25 bp, Homo sapien
tggctccagtgtctgccaggaggct

SEQ ID NO: 4292110 - DNA, 25 bp, Homo sapien
cgtggctccagtgtctgccaggagg

SEQ ID NO: 4292111 - DNA, 25 bp, Homo sapien
gtggctccagtgtctgccaggaggc

SEQ ID NO: 4292112 - DNA, 25 bp, Homo sapien
ggctccagtgtctgccaggaggctt

SEQ ID NO: 4292113 - DNA, 25 bp, Homo sapien
tcgacagcaagtggggaatggatta

SEQ ID NO: 4292114 - DNA, 25 bp, Homo sapien
ctgaactcgacagcaagtggggaat

SEQ ID NO: 4292115 - DNA, 25 bp, Homo sapien
gcaagtggggaatggattagtaact

SEQ ID NO: 4292116 - DNA, 25 bp, Homo sapien
aactcgacagcaagtggggaatgga

SEQ ID NO: 4292117 - DNA, 25 bp, Homo sapien
ggagtttattgacagaagagcatgg

SEQ ID NO: 4292118 - DNA, 25 bp, Homo sapien
cggggagtttattgacagaagagca

SEQ ID NO: 4292119 - DNA, 25 bp, Homo sapien
ctccatgcggggagtttattgacag

SEQ ID NO: 4292120 - DNA, 25 bp, Homo sapien
tggcacagaggtctccatgcgggga

SEQ ID NO: 4292121 - DNA, 25 bp, Homo sapien
gggagtcatttggtggagcagaggg

SEQ ID NO: 4292122 - DNA, 25 bp, Homo sapien
ggggagtcatttggtggagcagagg

SEQ ID NO: 4292123 - DNA, 25 bp, Homo sapien
aagcgctctgctccttgtaaagtgg

SEQ ID NO: 4292124 - DNA, 25 bp, Homo sapien
tgggtcccggccttgctaaagttga

SEQ ID NO: 4292125 - DNA, 25 bp, Homo sapien
agtacatattatgcgctctgggcac

SEQ ID NO: 4292126 - DNA, 25 bp, Homo sapien
gtcataaaagtgtggccagatgcca

SEQ ID NO: 4292127 - DNA, 25 bp, Homo sapien
ccagacagcatggttggagcagaat

SEQ ID NO: 4292128 - DNA, 25 bp, Homo sapien
gaagagacggtagctcaggaaactg

SEQ ID NO: 4292129 - DNA, 25 bp, Homo sapien
tctgccagtccagctccgaaaagag

SEQ ID NO: 4292130 - DNA, 25 bp, Homo sapien
ggtcttgccatcacaacgggacagg

SEQ ID NO: 4292131 - DNA, 25 bp, Homo sapien
gagaggaagcgttctggcataaaaa

SEQ ID NO: 4292132 - DNA, 25 bp, Homo sapien
ctgtttccgagcattcgggcagcaa

SEQ ID NO: 4292133 - DNA, 25 bp, Homo sapien
cagcaaggggagtggcgcacacttc

SEQ ID NO: 4292134 - DNA, 25 bp, Homo sapien
aaaggctcctgtttccgagcattcg

SEQ ID NO: 4292135 - DNA, 25 bp, Homo sapien
gaagacactcttggtgggtccggct

SEQ ID NO: 4292136 - DNA, 25 bp, Homo sapien
gacactcttggtgggtccggctttg

SEQ ID NO: 4292137 - DNA, 25 bp, Homo sapien
tcagccgaagacactcttggtgggt

SEQ ID NO: 4292138 - DNA, 25 bp, Homo sapien
tggtgggtccggctttgggcttctc

SEQ ID NO: 4292139 - DNA, 25 bp, Homo sapien
ctgtgcgggtgcggctgaacaccga

SEQ ID NO: 4292140 - DNA, 25 bp, Homo sapien
gggtgcggctgaacaccgacggggc

SEQ ID NO: 4292141 - DNA, 25 bp, Homo sapien
gcgggtgcggctgaacaccgacggg

SEQ ID NO: 4292142 - DNA, 25 bp, Homo sapien
gtgcgggtgcggctgaacaccgacg

SEQ ID NO: 4292143 - DNA, 25 bp, Homo sapien
cacactctcgcatgacctggtaggt

SEQ ID NO: 4292144 - DNA, 25 bp, Homo sapien
ctggttcttggtcaggtttcctcgg

SEQ ID NO: 4292145 - DNA, 25 bp, Homo sapien
cacaggggggcgcttcttcttgata

SEQ ID NO: 4292146 - DNA, 25 bp, Homo sapien
cttcaggtcctcgtccttcacaggg

SEQ ID NO: 4292147 - DNA, 25 bp, Homo sapien
tcggtagaaaggcacacctacctct

SEQ ID NO: 4292148 - DNA, 25 bp, Homo sapien
atcttactacctgaagcctcggtag

SEQ ID NO: 4292149 - DNA, 25 bp, Homo sapien
tcaaggctctactcctcttccagag

SEQ ID NO: 4292150 - DNA, 25 bp, Homo sapien
tcattaaacccaagcctattcaagg

SEQ ID NO: 4292151 - DNA, 25 bp, Homo sapien
caggcacatgcaaagatctatctag

SEQ ID NO: 4292152 - DNA, 25 bp, Homo sapien
cacatgcaaagatctatctaggccc

SEQ ID NO: 4292153 - DNA, 25 bp, Homo sapien
acatgcaaagatctatctaggcccc

SEQ ID NO: 4292154 - DNA, 25 bp, Homo sapien
ggcacatgcaaagatctatctaggc

SEQ ID NO: 4292155 - DNA, 25 bp, Homo sapien
cagagccgaaagtgtccaggactcc

SEQ ID NO: 4292156 - DNA, 25 bp, Homo sapien
ctccagttcatgcttggggctcaga

SEQ ID NO: 4292157 - DNA, 25 bp, Homo sapien
ccagagccgaaagtgtccaggactc

SEQ ID NO: 4292158 - DNA, 25 bp, Homo sapien
ggtattgtgtaagcgctgggtctct

SEQ ID NO: 4292159 - DNA, 25 bp, Homo sapien
ttgtgtaagcgctgggtctctgaag

SEQ ID NO: 4292160 - DNA, 25 bp, Homo sapien
tgggtctctgaaggcgcctctctgg

SEQ ID NO: 4292161 - DNA, 25 bp, Homo sapien
ggtgggtattgtgtaagcgctgggt

SEQ ID NO: 4292162 - DNA, 25 bp, Homo sapien
tgatgattcaggtccgcagggtcgc

SEQ ID NO: 4292163 - DNA, 25 bp, Homo sapien
tggcactgacggacatgctttgtgt

SEQ ID NO: 4292164 - DNA, 25 bp, Homo sapien
tgcagccctgatgaaagcagatggc

SEQ ID NO: 4292165 - DNA, 25 bp, Homo sapien
tatagcctgcttgcttgtcccgcag

SEQ ID NO: 4292166 - DNA, 25 bp, Homo sapien
cagagcaggagcttcccgtgtctgc

SEQ ID NO: 4292167 - DNA, 25 bp, Homo sapien
cgtgtctgctgcgtctgattatggc

SEQ ID NO: 4292168 - DNA, 25 bp, Homo sapien
tgattatggcaagctcactgggccc

SEQ ID NO: 4292169 - DNA, 25 bp, Homo sapien
tgcaagggttcatcccagtgtgtgg

SEQ ID NO: 4292170 - DNA, 25 bp, Homo sapien
ggaatcttttttgaccctgccaagc

SEQ ID NO: 4292171 - DNA, 25 bp, Homo sapien
gaataggtgtgcataggtcgcagcc

SEQ ID NO: 4292172 - DNA, 25 bp, Homo sapien
tatttttatcctcgaaggctccagg

SEQ ID NO: 4292173 - DNA, 25 bp, Homo sapien
gatggaactcaaccaggcactgaca

SEQ ID NO: 4292174 - DNA, 25 bp, Homo sapien
tcttagcctggctgcgaaaaggcca

SEQ ID NO: 4292175 - DNA, 25 bp, Homo sapien
tacactgtctaagggaagtcacagc

SEQ ID NO: 4292176 - DNA, 25 bp, Homo sapien
cagagctgctaatgtttcacgaagt

SEQ ID NO: 4292177 - DNA, 25 bp, Homo sapien
tgtggcaagtcagaccataagtccc

SEQ ID NO: 4292178 - DNA, 25 bp, Homo sapien
gctgcacctcgtaaggcaccttgga

SEQ ID NO: 4292179 - DNA, 25 bp, Homo sapien
taacagctgggttcatgcgcccaat

SEQ ID NO: 4292180 - DNA, 25 bp, Homo sapien
caacgagtcacttttagcccgaggg

SEQ ID NO: 4292181 - DNA, 25 bp, Homo sapien
taaggaacgatgctgcgggatgacc

SEQ ID NO: 4292182 - DNA, 25 bp, Homo sapien
cctccatctcatcatccgctgagat

SEQ ID NO: 4292183 - DNA, 25 bp, Homo sapien
gtcggactcctccatctcatcatcc

SEQ ID NO: 4292184 - DNA, 25 bp, Homo sapien
actcctccatctcatcatccgctga

SEQ ID NO: 4292185 - DNA, 25 bp, Homo sapien
tcctccatctcatcatccgctgaga

SEQ ID NO: 4292186 - DNA, 25 bp, Homo sapien
cctgtacgagcacatcccaatgcct

SEQ ID NO: 4292187 - DNA, 25 bp, Homo sapien
cattgccgatctagctcagcctgtg

SEQ ID NO: 4292188 - DNA, 25 bp, Homo sapien
agcctggatcacagggcattgccga

SEQ ID NO: 4292189 - DNA, 25 bp, Homo sapien
gatcacagggcattgccgatctagc

SEQ ID NO: 4292190 - DNA, 25 bp, Homo sapien
gacgtttgtctcagcttttctgcag

SEQ ID NO: 4292191 - DNA, 25 bp, Homo sapien
agctggccctgcacgcagatgtggg

SEQ ID NO: 4292192 - DNA, 25 bp, Homo sapien
cccacctgcacacttcctaggcctc

SEQ ID NO: 4292193 - DNA, 25 bp, Homo sapien
tctgacagcctctccggggaagacg

SEQ ID NO: 4292194 - DNA, 25 bp, Homo sapien
tctagcttagctttcgtcttcccct

SEQ ID NO: 4292195 - DNA, 25 bp, Homo sapien
cagactcctcgtgggatgcggccct

SEQ ID NO: 4292196 - DNA, 25 bp, Homo sapien
tgtccactacccaaaacatcaaagc

SEQ ID NO: 4292197 - DNA, 25 bp, Homo sapien
ctcgagtcctggttggctccccttt

SEQ ID NO: 4292198 - DNA, 25 bp, Homo sapien
gatcagcatgacgatggccagcttc

SEQ ID NO: 4292199 - DNA, 25 bp, Homo sapien
atgacgatggccagcttcaagtctg

SEQ ID NO: 4292200 - DNA, 25 bp, Homo sapien
gggacgatcagcatgacgatggcca

SEQ ID NO: 4292201 - DNA, 25 bp, Homo sapien
caaagaaggggacgatcagcatgac

SEQ ID NO: 4292202 - DNA, 25 bp, Homo sapien
ggttttcctagagttggcgtatgtg

SEQ ID NO: 4292203 - DNA, 25 bp, Homo sapien
tttcctagagttggcgtatgtgggt

SEQ ID NO: 4292204 - DNA, 25 bp, Homo sapien
ttttcctagagttggcgtatgtggg

SEQ ID NO: 4292205 - DNA, 25 bp, Homo sapien
ttggttttcctagagttggcgtatg

SEQ ID NO: 4292206 - DNA, 25 bp, Homo sapien
ctgaagtattaggaggacgatgaag

SEQ ID NO: 4292207 - DNA, 25 bp, Homo sapien
gatgtaaagagcgcactgcccgacc

SEQ ID NO: 4292208 - DNA, 25 bp, Homo sapien
cgcactgcccgacccaggctccaca

SEQ ID NO: 4292209 - DNA, 25 bp, Homo sapien
taaagagcgcactgcccgacccagg

SEQ ID NO: 4292210 - DNA, 25 bp, Homo sapien
tgtaaagagcgcactgcccgaccca

SEQ ID NO: 4292211 - DNA, 25 bp, Homo sapien
cttgagagcagaaacgtgactctgg

SEQ ID NO: 4292212 - DNA, 25 bp, Homo sapien
tgggtcaccccaaacaccttggcca

SEQ ID NO: 4292213 - DNA, 25 bp, Homo sapien
gactctacctgtccagcatgggtca

SEQ ID NO: 4292214 - DNA, 25 bp, Homo sapien
actctggaggaatttggactctacc

SEQ ID NO: 4292215 - DNA, 25 bp, Homo sapien
atctcacgcagccaccgttgggaga

SEQ ID NO: 4292216 - DNA, 25 bp, Homo sapien
acttgcgagtctttcagatgtcccc

SEQ ID NO: 4292217 - DNA, 25 bp, Homo sapien
gattcctgtttcacttgcgagtctt

SEQ ID NO: 4292218 - DNA, 25 bp, Homo sapien
acgcagccaccgttgggagaagcac

SEQ ID NO: 4292219 - DNA, 25 bp, Homo sapien
caatgaacaacctcaggcatgtggg

SEQ ID NO: 4292220 - DNA, 25 bp, Homo sapien
aagagtggcctggtaatcagagtgc

SEQ ID NO: 4292221 - DNA, 25 bp, Homo sapien
caccgtgacccagatgtcagggctt

SEQ ID NO: 4292222 - DNA, 25 bp, Homo sapien
tctgtggcgagaggctttcaaaagg

SEQ ID NO: 4292223 - DNA, 25 bp, Homo sapien
cagggcaactcgatgtgggataaac

SEQ ID NO: 4292224 - DNA, 25 bp, Homo sapien
ctggaacctgtgagtgtgtagcatc

SEQ ID NO: 4292225 - DNA, 25 bp, Homo sapien
cagcgactcttgttggcttggacga

SEQ ID NO: 4292226 - DNA, 25 bp, Homo sapien
tagtcagctgactttaagacaggga

SEQ ID NO: 4292227 - DNA, 25 bp, Homo sapien
taactgagcagacaagctatccttc

SEQ ID NO: 4292228 - DNA, 25 bp, Homo sapien
tgatgtatccgaaccagacctgatc

SEQ ID NO: 4292229 - DNA, 25 bp, Homo sapien
gacaaaatgtgagggaacagctggt

SEQ ID NO: 4292230 - DNA, 25 bp, Homo sapien
ggattcaccttagcactggtcagct

SEQ ID NO: 4292231 - DNA, 25 bp, Homo sapien
ctgtccggcatccacagcatattac

SEQ ID NO: 4292232 - DNA, 25 bp, Homo sapien
cctgtccggcatccacagcatatta

SEQ ID NO: 4292233 - DNA, 25 bp, Homo sapien
ccctgtccggcatccacagcatatt

SEQ ID NO: 4292234 - DNA, 25 bp, Homo sapien
gccctgtccggcatccacagcatat

SEQ ID NO: 4292235 - DNA, 25 bp, Homo sapien
ccacgtagatgagcagcatgcccac

SEQ ID NO: 4292236 - DNA, 25 bp, Homo sapien
agatgagcagcatgcccacagtggc

SEQ ID NO: 4292237 - DNA, 25 bp, Homo sapien
atattcgccgaagcgcagggactcc

SEQ ID NO: 4292238 - DNA, 25 bp, Homo sapien
taccaggacgctgacggcgcgcacc

SEQ ID NO: 4292239 - DNA, 25 bp, Homo sapien
gggcacatgcatggtcacggcagaa

SEQ ID NO: 4292240 - DNA, 25 bp, Homo sapien
agaggtcatggctgatgcagggtgg

SEQ ID NO: 4292241 - DNA, 25 bp, Homo sapien
acatgcatggtcacggcagaagcca

SEQ ID NO: 4292242 - DNA, 25 bp, Homo sapien
gacagggcacatgcatggtcacggc

SEQ ID NO: 4292243 - DNA, 25 bp, Homo sapien
tggacccagcatttgtttgggccca

SEQ ID NO: 4292244 - DNA, 25 bp, Homo sapien
tgggagccctcatgtgccagtgtag

SEQ ID NO: 4292245 - DNA, 25 bp, Homo sapien
cagcatttgtttgggcccattctgg

SEQ ID NO: 4292246 - DNA, 25 bp, Homo sapien
agggaagcggatggacccagcattt

SEQ ID NO: 4292247 - DNA, 25 bp, Homo sapien
cagtgagatctgctaggtatacatt

SEQ ID NO: 4292248 - DNA, 25 bp, Homo sapien
ttcagtgagatctgctaggtataca

SEQ ID NO: 4292249 - DNA, 25 bp, Homo sapien
cctcttcagtgagatctgctaggta

SEQ ID NO: 4292250 - DNA, 25 bp, Homo sapien
gggtcctcttcagtgagatctgcta

SEQ ID NO: 4292251 - DNA, 25 bp, Homo sapien
catatcctccacggacgtctttcat

SEQ ID NO: 4292252 - DNA, 25 bp, Homo sapien
tatcctccacggacgtctttcatgc

SEQ ID NO: 4292253 - DNA, 25 bp, Homo sapien
atatcctccacggacgtctttcatg

SEQ ID NO: 4292254 - DNA, 25 bp, Homo sapien
tcctccacggacgtctttcatgctt

SEQ ID NO: 4292255 - DNA, 25 bp, Homo sapien
tcagagatttgagccaatgtagcaa

SEQ ID NO: 4292256 - DNA, 25 bp, Homo sapien
gagacagccacatataggagcacct

SEQ ID NO: 4292257 - DNA, 25 bp, Homo sapien
taagtttaagagtgccactgtactc

SEQ ID NO: 4292258 - DNA, 25 bp, Homo sapien
gatgtgggagaatcagcgtgaccta

SEQ ID NO: 4292259 - DNA, 25 bp, Homo sapien
gccttcatcacaccctagtagggag

SEQ ID NO: 4292260 - DNA, 25 bp, Homo sapien
gaataacatatggagcatggcagac

SEQ ID NO: 4292261 - DNA, 25 bp, Homo sapien
ggcctgctgtgtgacaagccccatt

SEQ ID NO: 4292262 - DNA, 25 bp, Homo sapien
gaggtatgaaggagagcccacgccc

SEQ ID NO: 4292263 - DNA, 25 bp, Homo sapien
ttcagaccagcaaaacatgggtgga

SEQ ID NO: 4292264 - DNA, 25 bp, Homo sapien
agaccagcaaaacatgggtggaaaa

SEQ ID NO: 4292265 - DNA, 25 bp, Homo sapien
gcaaaacatgggtggaaaatcaccc

SEQ ID NO: 4292266 - DNA, 25 bp, Homo sapien
ccagcaaaacatgggtggaaaatca

SEQ ID NO: 4292267 - DNA, 25 bp, Homo sapien
agagtaaatctttaagcacgaagtc

SEQ ID NO: 4292268 - DNA, 25 bp, Homo sapien
gtaaatctttaagcacgaagtccac

SEQ ID NO: 4292269 - DNA, 25 bp, Homo sapien
gaagagtaaatctttaagcacgaag

SEQ ID NO: 4292270 - DNA, 25 bp, Homo sapien
gagtaaatctttaagcacgaagtcc

SEQ ID NO: 4292271 - DNA, 25 bp, Homo sapien
ggtgcccaggaaacacggcaggatt

SEQ ID NO: 4292272 - DNA, 25 bp, Homo sapien
gcccaggaaacacggcaggattgac

SEQ ID NO: 4292273 - DNA, 25 bp, Homo sapien
caggaaacacggcaggattgacagg

SEQ ID NO: 4292274 - DNA, 25 bp, Homo sapien
aacacggcaggattgacagggagca

SEQ ID NO: 4292275 - DNA, 25 bp, Homo sapien
tggacgaacatccacaggcctgtcc

SEQ ID NO: 4292276 - DNA, 25 bp, Homo sapien
ccacaggcctgtcccgtcaagaagg

SEQ ID NO: 4292277 - DNA, 25 bp, Homo sapien
atgtggacgaacatccacaggcctg

SEQ ID NO: 4292278 - DNA, 25 bp, Homo sapien
tcccgtcaagaaggccacaggactc

SEQ ID NO: 4292279 - DNA, 25 bp, Homo sapien
gccggactgctcacgacagtcagca

SEQ ID NO: 4292280 - DNA, 25 bp, Homo sapien
tgctcacgacagtcagcaagcacct

SEQ ID NO: 4292281 - DNA, 25 bp, Homo sapien
caggccggactgctcacgacagtca

SEQ ID NO: 4292282 - DNA, 25 bp, Homo sapien
gactgctcacgacagtcagcaagca

SEQ ID NO: 4292283 - DNA, 25 bp, Homo sapien
ctgtgtgggagcacctgcggcagaa

SEQ ID NO: 4292284 - DNA, 25 bp, Homo sapien
gagcacctgcggcagaaccctggca

SEQ ID NO: 4292285 - DNA, 25 bp, Homo sapien
agcacctgcggcagaaccctggcat

SEQ ID NO: 4292286 - DNA, 25 bp, Homo sapien
gtgggagcacctgcggcagaaccct

SEQ ID NO: 4292287 - DNA, 25 bp, Homo sapien
caactgtgtggagtgttgactgctc

SEQ ID NO: 4292288 - DNA, 25 bp, Homo sapien
cattgaagttcactggcacaggcca

SEQ ID NO: 4292289 - DNA, 25 bp, Homo sapien
tggctgagtccataacaggtctcct

SEQ ID NO: 4292290 - DNA, 25 bp, Homo sapien
tattctacactgaaggtaggtggct

SEQ ID NO: 4292291 - DNA, 25 bp, Homo sapien
gggaatcccttccagagtagtctga

SEQ ID NO: 4292292 - DNA, 25 bp, Homo sapien
gaaacaacagagctcatgtcctcag

SEQ ID NO: 4292293 - DNA, 25 bp, Homo sapien
cctacgagtcaggtggccagagaca

SEQ ID NO: 4292294 - DNA, 25 bp, Homo sapien
tgtagccctacttggccggcagtgg

SEQ ID NO: 4292295 - DNA, 25 bp, Homo sapien
agttctccagcagcggttcttcaat

SEQ ID NO: 4292296 - DNA, 25 bp, Homo sapien
taatgatccgatggtgcacactgca

SEQ ID NO: 4292297 - DNA, 25 bp, Homo sapien
tgtaacatacaacgggctgcctcag

SEQ ID NO: 4292298 - DNA, 25 bp, Homo sapien
tcagaaggcactaccaagaggatgg

SEQ ID NO: 4292299 - DNA, 25 bp, Homo sapien
ctctgggtaaaaggatgcggcatgc

SEQ ID NO: 4292300 - DNA, 25 bp, Homo sapien
tccttctctgaatcacaagtgtcaa

SEQ ID NO: 4292301 - DNA, 25 bp, Homo sapien
tttccttctctgaatcacaagtgtc

SEQ ID NO: 4292302 - DNA, 25 bp, Homo sapien
ttctctgaatcacaagtgtcaaacc

SEQ ID NO: 4292303 - DNA, 25 bp, Homo sapien
catttccttctctgaatcacaagtg

SEQ ID NO: 4292304 - DNA, 25 bp, Homo sapien
gtgctgaaggccacgacgccgagca

SEQ ID NO: 4292305 - DNA, 25 bp, Homo sapien
aggaagatgccgaagctgtgcatga

SEQ ID NO: 4292306 - DNA, 25 bp, Homo sapien
aagctgtgcatgagcgcgccgctct

SEQ ID NO: 4292307 - DNA, 25 bp, Homo sapien
gccccggacgcgactgtggagggcg

SEQ ID NO: 4292308 - DNA, 25 bp, Homo sapien
tgagccggtacctccgcccggccgc

SEQ ID NO: 4292309 - DNA, 25 bp, Homo sapien
tcccaagcctgagccggtacctccg

SEQ ID NO: 4292310 - DNA, 25 bp, Homo sapien
gcagcgccgccaaacccgcagccgg

SEQ ID NO: 4292311 - DNA, 25 bp, Homo sapien
cgcagccgggatcccaagcctgagc

SEQ ID NO: 4292312 - DNA, 25 bp, Homo sapien
caagtactggccgtgggcaaataca

SEQ ID NO: 4292313 - DNA, 25 bp, Homo sapien
gaggaatccttaaggctcacagagg

SEQ ID NO: 4292314 - DNA, 25 bp, Homo sapien
cctaaggacagtgctggaaccagcc

SEQ ID NO: 4292315 - DNA, 25 bp, Homo sapien
ccagaaggtaaaggatgagacagca

SEQ ID NO: 4292316 - DNA, 25 bp, Homo sapien
ggggaaaagaaatgagcacttgaaa

SEQ ID NO: 4292317 - DNA, 25 bp, Homo sapien
agggaggggaaaagaaatgagcact

SEQ ID NO: 4292318 - DNA, 25 bp, Homo sapien
gggaaaagaaatgagcacttgaaat

SEQ ID NO: 4292319 - DNA, 25 bp, Homo sapien
gaggggaaaagaaatgagcacttga

SEQ ID NO: 4292320 - DNA, 25 bp, Homo sapien
caaaaggagctaatggactgcccaa

SEQ ID NO: 4292321 - DNA, 25 bp, Homo sapien
tccagaaataatgggagacccttgc

SEQ ID NO: 4292322 - DNA, 25 bp, Homo sapien
ttgcctcccacagatcagggtccgt

SEQ ID NO: 4292323 - DNA, 25 bp, Homo sapien
tgataggccatagcaccaggacaga

SEQ ID NO: 4292324 - DNA, 25 bp, Homo sapien
tttctctaggaacgggctgagcctg

SEQ ID NO: 4292325 - DNA, 25 bp, Homo sapien
tagataaatgctaggagccacctgc

SEQ ID NO: 4292326 - DNA, 25 bp, Homo sapien
ttacataatatacgggagtcggcgc

SEQ ID NO: 4292327 - DNA, 25 bp, Homo sapien
gagcaagtaaagtgtatccaggtcc

SEQ ID NO: 4292328 - DNA, 25 bp, Homo sapien
ttcagcgccttcatcccctcacctg

SEQ ID NO: 4292329 - DNA, 25 bp, Homo sapien
ctagatcagagactacgtagggctg

SEQ ID NO: 4292330 - DNA, 25 bp, Homo sapien
gctgtatgttttgcccttcagcgcc

SEQ ID NO: 4292331 - DNA, 25 bp, Homo sapien
tcagagactacgtagggctgtatgt

SEQ ID NO: 4292332 - DNA, 25 bp, Homo sapien
tttccttagtaccttgactgaactc

SEQ ID NO: 4292333 - DNA, 25 bp, Homo sapien
taaataagataataacacgaggccc

SEQ ID NO: 4292334 - DNA, 25 bp, Homo sapien
cactacccaccaaaagcttaatgtt

SEQ ID NO: 4292335 - DNA, 25 bp, Homo sapien
cagatagatctggtaggaacctaag

SEQ ID NO: 4292336 - DNA, 25 bp, Homo sapien
taaggaactggtgtaagtgccccat

SEQ ID NO: 4292337 - DNA, 25 bp, Homo sapien
acaaatgggcttcgctgtgggtcca

SEQ ID NO: 4292338 - DNA, 25 bp, Homo sapien
tgcttctacactggagacacctgga

SEQ ID NO: 4292339 - DNA, 25 bp, Homo sapien
gttacttaacacaggcagcctcggc

SEQ ID NO: 4292340 - DNA, 25 bp, Homo sapien
caaaggaactcctaagaatcgattt

SEQ ID NO: 4292341 - DNA, 25 bp, Homo sapien
aagtgtgactatacattcaaaaccc

SEQ ID NO: 4292342 - DNA, 25 bp, Homo sapien
aaaaacctcatacatggctgtaagc

SEQ ID NO: 4292343 - DNA, 25 bp, Homo sapien
ggctgtaagctcaattatcaacaga

SEQ ID NO: 4292344 - DNA, 25 bp, Homo sapien
tccttccccgaaagtgcaaagagag

SEQ ID NO: 4292345 - DNA, 25 bp, Homo sapien
gagagcaagctgatacctgcaggcc

SEQ ID NO: 4292346 - DNA, 25 bp, Homo sapien
gcaggtgatccacttctgtgcacag

SEQ ID NO: 4292347 - DNA, 25 bp, Homo sapien
caaccaaaagggtgctttccagcag

SEQ ID NO: 4292348 - DNA, 25 bp, Homo sapien
aacttgatcctctctatgtgatggc

SEQ ID NO: 4292349 - DNA, 25 bp, Homo sapien
agttggcaaactgctcataaaaagc

SEQ ID NO: 4292350 - DNA, 25 bp, Homo sapien
cattcttgaacagtgggaagggtaa

SEQ ID NO: 4292351 - DNA, 25 bp, Homo sapien
agtttgatggcagggcccaatttta

SEQ ID NO: 4292352 - DNA, 25 bp, Homo sapien
cacagtcagtggatctgatgaaccg

SEQ ID NO: 4292353 - DNA, 25 bp, Homo sapien
cttgctaatggagcacagtcagtgg

SEQ ID NO: 4292354 - DNA, 25 bp, Homo sapien
tctgatgaaccgcacaacgtctgcc

SEQ ID NO: 4292355 - DNA, 25 bp, Homo sapien
ctggtctaggaatattcttgctaat

SEQ ID NO: 4292356 - DNA, 25 bp, Homo sapien
ctttcagcaacttcgatccttattt

SEQ ID NO: 4292357 - DNA, 25 bp, Homo sapien
cctttcagcaacttcgatccttatt

SEQ ID NO: 4292358 - DNA, 25 bp, Homo sapien
tttcagcaacttcgatccttatttc

SEQ ID NO: 4292359 - DNA, 25 bp, Homo sapien
cacaacacaatcaaaccaaatggtg

SEQ ID NO: 4292360 - DNA, 25 bp, Homo sapien
acaatcaaaccaaatggtgttacgg

SEQ ID NO: 4292361 - DNA, 25 bp, Homo sapien
aacacaatcaaaccaaatggtgtta

SEQ ID NO: 4292362 - DNA, 25 bp, Homo sapien
cccacaacacaatcaaaccaaatgg

SEQ ID NO: 4292363 - DNA, 25 bp, Homo sapien
cctttgtctatctggaggcagcgat

SEQ ID NO: 4292364 - DNA, 25 bp, Homo sapien
tttctcctttgtctatctggaggca

SEQ ID NO: 4292365 - DNA, 25 bp, Homo sapien
gaaggaggtttattttcatcgtcag

SEQ ID NO: 4292366 - DNA, 25 bp, Homo sapien
gaaaatgaaaaggtgcgaagctccc

SEQ ID NO: 4292367 - DNA, 25 bp, Homo sapien
agaggagcatgactttttttctgac

SEQ ID NO: 4292368 - DNA, 25 bp, Homo sapien
ttcacttagggaatcatcatcccct

SEQ ID NO: 4292369 - DNA, 25 bp, Homo sapien
ctcggatgtactgccttcacttagg

SEQ ID NO: 4292370 - DNA, 25 bp, Homo sapien
gagaagaggagcatgactttttttc

SEQ ID NO: 4292371 - DNA, 25 bp, Homo sapien
ctaagttactatgcccaccaggtgg

SEQ ID NO: 4292372 - DNA, 25 bp, Homo sapien
caacagatgcagaggagcgtttctt

SEQ ID NO: 4292373 - DNA, 25 bp, Homo sapien
caggtggcctcccaattcttttatt

SEQ ID NO: 4292374 - DNA, 25 bp, Homo sapien
cccgctggggtattatcaacagatg

SEQ ID NO: 4292375 - DNA, 25 bp, Homo sapien
aagttggcacactaaagcccatgag

SEQ ID NO: 4292376 - DNA, 25 bp, Homo sapien
gaagaagttcgtgtgcctctgctat

SEQ ID NO: 4292377 - DNA, 25 bp, Homo sapien
tgagtcaagtctggcccatgacctg

SEQ ID NO: 4292378 - DNA, 25 bp, Homo sapien
tcccagtgctagagcagcataagca

SEQ ID NO: 4292379 - DNA, 25 bp, Homo sapien
gaacacttatccagaaccatccgtg

SEQ ID NO: 4292380 - DNA, 25 bp, Homo sapien
gtttgatacaggtttgccggcagaa

SEQ ID NO: 4292381 - DNA, 25 bp, Homo sapien
gaggttaggacagcattccagtttg

SEQ ID NO: 4292382 - DNA, 25 bp, Homo sapien
catccgtggaccgaagaggttagga

SEQ ID NO: 4292383 - DNA, 25 bp, Homo sapien
tggagctcccgaaggacacggctgg

SEQ ID NO: 4292384 - DNA, 25 bp, Homo sapien
ctcccgaaggacacggctgggtttg

SEQ ID NO: 4292385 - DNA, 25 bp, Homo sapien
cacatccgtgccacacagagtcttt

SEQ ID NO: 4292386 - DNA, 25 bp, Homo sapien
aggacttccccacatccgtgccaca

SEQ ID NO: 4292387 - DNA, 25 bp, Homo sapien
ctgcattgataagtaaagtgaggac

SEQ ID NO: 4292388 - DNA, 25 bp, Homo sapien
caacggtggttgaagtatatctttg

SEQ ID NO: 4292389 - DNA, 25 bp, Homo sapien
gccctgagaagcaacggtggttgaa

SEQ ID NO: 4292390 - DNA, 25 bp, Homo sapien
agttcccaggtcctacacattgagg

SEQ ID NO: 4292391 - DNA, 25 bp, Homo sapien
ttcctttgttaagatatggccctga

SEQ ID NO: 4292392 - DNA, 25 bp, Homo sapien
tccaaagctgaactgccagggaaga

SEQ ID NO: 4292393 - DNA, 25 bp, Homo sapien
tctcagagggctaaaagtatgctgt

SEQ ID NO: 4292394 - DNA, 25 bp, Homo sapien
cctttgatgttgtgagagcaatccc

SEQ ID NO: 4292395 - DNA, 25 bp, Homo sapien
cacatgaggattctggatgatcaat

SEQ ID NO: 4292396 - DNA, 25 bp, Homo sapien
gtggacagtcctcgaggatggtact

SEQ ID NO: 4292397 - DNA, 25 bp, Homo sapien
tcctcaggccctcgtggacagtcct

SEQ ID NO: 4292398 - DNA, 25 bp, Homo sapien
cctcgtggacagtcctcgaggatgg

SEQ ID NO: 4292399 - DNA, 25 bp, Homo sapien
tcaggccctcgtggacagtcctcga

SEQ ID NO: 4292400 - DNA, 25 bp, Homo sapien
aggctgacgtgggcgggtcacaagg

SEQ ID NO: 4292401 - DNA, 25 bp, Homo sapien
ctgacgtgggcgggtcacaaggtca

SEQ ID NO: 4292402 - DNA, 25 bp, Homo sapien
aacaaagcaggactctgtgtcaaaa

SEQ ID NO: 4292403 - DNA, 25 bp, Homo sapien
caacaaagcaggactctgtgtcaaa

SEQ ID NO: 4292404 - DNA, 25 bp, Homo sapien
agccctagtgctcagtgtaactgta

SEQ ID NO: 4292405 - DNA, 25 bp, Homo sapien
caatagcattgatagccttacagga

SEQ ID NO: 4292406 - DNA, 25 bp, Homo sapien
gccctcactaggaagcaatctacca

SEQ ID NO: 4292407 - DNA, 25 bp, Homo sapien
tgtaactgtattcgaagatagggcc

SEQ ID NO: 4292408 - DNA, 25 bp, Homo sapien
ttctggctgaaccactgcaattttc

SEQ ID NO: 4292409 - DNA, 25 bp, Homo sapien
tgtttttctggctgaaccactgcaa

SEQ ID NO: 4292410 - DNA, 25 bp, Homo sapien
gtttttctggctgaaccactgcaat

SEQ ID NO: 4292411 - DNA, 25 bp, Homo sapien
tttcacaccagcccaaaggaaatat

SEQ ID NO: 4292412 - DNA, 25 bp, Homo sapien
caaaggaaatatatccatggattcc

SEQ ID NO: 4292413 - DNA, 25 bp, Homo sapien
tggattccacactcacaatacattc

SEQ ID NO: 4292414 - DNA, 25 bp, Homo sapien
cgtgctcggcgaggagtgctgaggg

SEQ ID NO: 4292415 - DNA, 25 bp, Homo sapien
cttcttcagggagaatggggttcac

SEQ ID NO: 4292416 - DNA, 25 bp, Homo sapien
agccacaggtaggagcctctcactg

SEQ ID NO: 4292417 - DNA, 25 bp, Homo sapien
gggttcaccgcctcgagcttcatgt

SEQ ID NO: 4292418 - DNA, 25 bp, Homo sapien
tgatggtagcaacacacacttcttc

SEQ ID NO: 4292419 - DNA, 25 bp, Homo sapien
cagtcaaagtcctggcttgggtagc

SEQ ID NO: 4292420 - DNA, 25 bp, Homo sapien
gcttcagcaccacactgtttgaggt

SEQ ID NO: 4292421 - DNA, 25 bp, Homo sapien
caccacactgtttgaggtagtcagc

SEQ ID NO: 4292422 - DNA, 25 bp, Homo sapien
ggtagtcagcccagtcaaagtcctg

SEQ ID NO: 4292423 - DNA, 25 bp, Homo sapien
gatcgccgtgcgtggttctcaggac

SEQ ID NO: 4292424 - DNA, 25 bp, Homo sapien
tgccaggactgtcggcgtggcacac

SEQ ID NO: 4292425 - DNA, 25 bp, Homo sapien
tgtcggcgtggcacacaaaggatcg

SEQ ID NO: 4292426 - DNA, 25 bp, Homo sapien
caggacgcaagtcatccatttccac

SEQ ID NO: 4292427 - DNA, 25 bp, Homo sapien
tttacagagaatgtatgaatgccaa

SEQ ID NO: 4292428 - DNA, 25 bp, Homo sapien
gagaccaggggtctacagcttccaa

SEQ ID NO: 4292429 - DNA, 25 bp, Homo sapien
cttaacaactgtagcaggagagatc

SEQ ID NO: 4292430 - DNA, 25 bp, Homo sapien
caactgtagcaggagagatcccaaa

SEQ ID NO: 4292431 - DNA, 25 bp, Homo sapien
taaataagtaagatggtaatggctc

SEQ ID NO: 4292432 - DNA, 25 bp, Homo sapien
gccaaaatctcttgccactcagctt

SEQ ID NO: 4292433 - DNA, 25 bp, Homo sapien
ttggccaaaatctcttgccactcag

SEQ ID NO: 4292434 - DNA, 25 bp, Homo sapien
taagtaagatggtaatggctcttcc

SEQ ID NO: 4292435 - DNA, 25 bp, Homo sapien
ggcacttaatttaacaactccatat

SEQ ID NO: 4292436 - DNA, 25 bp, Homo sapien
tagctctattatgagaactaacaaa

SEQ ID NO: 4292437 - DNA, 25 bp, Homo sapien
ataggcacttaatttaacaactcca

SEQ ID NO: 4292438 - DNA, 25 bp, Homo sapien
tgtaatagctctattatgagaacta

SEQ ID NO: 4292439 - DNA, 25 bp, Homo sapien
caatccaagtgcttaaagagtcctg

SEQ ID NO: 4292440 - DNA, 25 bp, Homo sapien
gcccaaccaacgtgatgaagaaatg

SEQ ID NO: 4292441 - DNA, 25 bp, Homo sapien
caatgagatctaaaggattcctccc

SEQ ID NO: 4292442 - DNA, 25 bp, Homo sapien
tcatatccctgttgagcagcccaac

SEQ ID NO: 4292443 - DNA, 25 bp, Homo sapien
cagtcagatactttatctctgatgc

SEQ ID NO: 4292444 - DNA, 25 bp, Homo sapien
gggtctgccgcagaaactcatccca

SEQ ID NO: 4292445 - DNA, 25 bp, Homo sapien
aggaggactacatgctcctatcagg

SEQ ID NO: 4292446 - DNA, 25 bp, Homo sapien
cctctagcagcggaacaggaggact

SEQ ID NO: 4292447 - DNA, 25 bp, Homo sapien
cacatttaaacgagatgcattttcc

SEQ ID NO: 4292448 - DNA, 25 bp, Homo sapien
tacgttaggatgagatggtaggcca

SEQ ID NO: 4292449 - DNA, 25 bp, Homo sapien
gcattttcctacatacgttaggatg

SEQ ID NO: 4292450 - DNA, 25 bp, Homo sapien
tatccatggtgctgactcattcctg

SEQ ID NO: 4292451 - DNA, 25 bp, Homo sapien
cacgtcttgataggaagtatttcat

SEQ ID NO: 4292452 - DNA, 25 bp, Homo sapien
gtcttgataggaagtatttcattac

SEQ ID NO: 4292453 - DNA, 25 bp, Homo sapien
tcacgtcttgataggaagtatttca

SEQ ID NO: 4292454 - DNA, 25 bp, Homo sapien
cgtcttgataggaagtatttcatta

SEQ ID NO: 4292455 - DNA, 25 bp, Homo sapien
cagtaggtctcaggatctgttctca

SEQ ID NO: 4292456 - DNA, 25 bp, Homo sapien
tgataacggtggcaacccagtaggt

SEQ ID NO: 4292457 - DNA, 25 bp, Homo sapien
ccatcatagcggagaaggagcaact

SEQ ID NO: 4292458 - DNA, 25 bp, Homo sapien
caagggtcttcttattctgctcaca

SEQ ID NO: 4292459 - DNA, 25 bp, Homo sapien
aaatccattttgcaaacgtgtgtcc

SEQ ID NO: 4292460 - DNA, 25 bp, Homo sapien
atccattttgcaaacgtgtgtccac

SEQ ID NO: 4292461 - DNA, 25 bp, Homo sapien
gcaaatccattttgcaaacgtgtgt

SEQ ID NO: 4292462 - DNA, 25 bp, Homo sapien
gagcaaatccattttgcaaacgtgt

SEQ ID NO: 4292463 - DNA, 25 bp, Homo sapien
atataacaccagtaaggcaaatata

SEQ ID NO: 4292464 - DNA, 25 bp, Homo sapien
tacagagattcgaaataaagggata

SEQ ID NO: 4292465 - DNA, 25 bp, Homo sapien
gctcttaaattacttcaagtaccac

SEQ ID NO: 4292466 - DNA, 25 bp, Homo sapien
tatggcaagtgttcttactaagggt

SEQ ID NO: 4292467 - DNA, 25 bp, Homo sapien
ctgctgtggaccctgtttcttctag

SEQ ID NO: 4292468 - DNA, 25 bp, Homo sapien
acctcttccataccagagccggcat

SEQ ID NO: 4292469 - DNA, 25 bp, Homo sapien
catagggaactgctgtggaccctgt

SEQ ID NO: 4292470 - DNA, 25 bp, Homo sapien
ttaaaagacccatagggaactgctg

SEQ ID NO: 4292471 - DNA, 25 bp, Homo sapien
gcatcaagctgctgctccccgttca

SEQ ID NO: 4292472 - DNA, 25 bp, Homo sapien
catcaagctgctgctccccgttcat

SEQ ID NO: 4292473 - DNA, 25 bp, Homo sapien
tgcatcaagctgctgctccccgttc

SEQ ID NO: 4292474 - DNA, 25 bp, Homo sapien
ctgcatcaagctgctgctccccgtt

SEQ ID NO: 4292475 - DNA, 25 bp, Homo sapien
catctgttcaatgggtatccacggg

SEQ ID NO: 4292476 - DNA, 25 bp, Homo sapien
ttccacagcatataggcaggctata

SEQ ID NO: 4292477 - DNA, 25 bp, Homo sapien
gatctgaagattacttgcaggtttc

SEQ ID NO: 4292478 - DNA, 25 bp, Homo sapien
ctatggttctgctaggatctgaaga

SEQ ID NO: 4292479 - DNA, 25 bp, Homo sapien
gtacattaaggcctggacaaaaaga

SEQ ID NO: 4292480 - DNA, 25 bp, Homo sapien
taccttgccagtaagggtctgcttt

SEQ ID NO: 4292481 - DNA, 25 bp, Homo sapien
ttataatcaggacagcccgctaacc

SEQ ID NO: 4292482 - DNA, 25 bp, Homo sapien
cactacattgagcagactagtctga

SEQ ID NO: 4292483 - DNA, 25 bp, Homo sapien
taacacaacagcctaggactacaca

SEQ ID NO: 4292484 - DNA, 25 bp, Homo sapien
cctaggactacacacgaccaggatc

SEQ ID NO: 4292485 - DNA, 25 bp, Homo sapien
ggactacacacgaccaggatcatca

SEQ ID NO: 4292486 - DNA, 25 bp, Homo sapien
tgttaaaaactaacacaacagccta

SEQ ID NO: 4292487 - DNA, 25 bp, Homo sapien
tggtgctgccgatcgacctgactgg

SEQ ID NO: 4292488 - DNA, 25 bp, Homo sapien
tgctcgcctagctgttgatcgcctg

SEQ ID NO: 4292489 - DNA, 25 bp, Homo sapien
ttcagctaccactgcaagggcctgc

SEQ ID NO: 4292490 - DNA, 25 bp, Homo sapien
gactggcccacaacgtcttcagcta

SEQ ID NO: 4292491 - DNA, 25 bp, Homo sapien
gggacgcccgaggacatgctcttca

SEQ ID NO: 4292492 - DNA, 25 bp, Homo sapien
tacaaaggccgtcatggagatccag

SEQ ID NO: 4292493 - DNA, 25 bp, Homo sapien
aggccttcgccaacagcggcctgtt

SEQ ID NO: 4292494 - DNA, 25 bp, Homo sapien
ccttgtcatccatgcgtaagccggg

SEQ ID NO: 4292495 - DNA, 25 bp, Homo sapien
acaacaacaaagaggacttaatgtc

SEQ ID NO: 4292496 - DNA, 25 bp, Homo sapien
ggacttaatgtctggcacactaaaa

SEQ ID NO: 4292497 - DNA, 25 bp, Homo sapien
caaagaggacttaatgtctggcaca

SEQ ID NO: 4292498 - DNA, 25 bp, Homo sapien
taatgtctggcacactaaaatattt

SEQ ID NO: 4292499 - DNA, 25 bp, Homo sapien
caagcatcttggatccagtagtaag

SEQ ID NO: 4292500 - DNA, 25 bp, Homo sapien
cagtagtaagtagatggcagctcac

SEQ ID NO: 4292501 - DNA, 25 bp, Homo sapien
gagttttgctttcaagcatcttgga

SEQ ID NO: 4292502 - DNA, 25 bp, Homo sapien
acatttactgtgctcccaccagcaa

SEQ ID NO: 4292503 - DNA, 25 bp, Homo sapien
tgaggctggaggatatgtaggccca

SEQ ID NO: 4292504 - DNA, 25 bp, Homo sapien
tagggaaatgggagatcctatctct

SEQ ID NO: 4292505 - DNA, 25 bp, Homo sapien
gctggaggatatgtaggcccaggag

SEQ ID NO: 4292506 - DNA, 25 bp, Homo sapien
tgagcactgatcctgccaccgcatt

SEQ ID NO: 4292507 - DNA, 25 bp, Homo sapien
cagcaaaaacttattcgagattaca

SEQ ID NO: 4292508 - DNA, 25 bp, Homo sapien
tttgagagcatgtcatgccagttgg

SEQ ID NO: 4292509 - DNA, 25 bp, Homo sapien
ctggtctgaatgtagtcaggtcact

SEQ ID NO: 4292510 - DNA, 25 bp, Homo sapien
tacatacagtccgtacactttgaga

SEQ ID NO: 4292511 - DNA, 25 bp, Homo sapien
aaatgctctgaataggctgtacgca

SEQ ID NO: 4292512 - DNA, 25 bp, Homo sapien
ccaaatgctctgaataggctgtacg

SEQ ID NO: 4292513 - DNA, 25 bp, Homo sapien
atgactaccaaatgctctgaatagg

SEQ ID NO: 4292514 - DNA, 25 bp, Homo sapien
tgatgactaccaaatgctctgaata

SEQ ID NO: 4292515 - DNA, 25 bp, Homo sapien
tctaaaagaccaatcacaatcatct

SEQ ID NO: 4292516 - DNA, 25 bp, Homo sapien
ttataatgttggcaaaaacacttgc

SEQ ID NO: 4292517 - DNA, 25 bp, Homo sapien
ggagctactggatttgattataatg

SEQ ID NO: 4292518 - DNA, 25 bp, Homo sapien
ttgaaaaagcatctaaaagaccaat

SEQ ID NO: 4292519 - DNA, 25 bp, Homo sapien
gcaccatgtgatatgatacctcttc

SEQ ID NO: 4292520 - DNA, 25 bp, Homo sapien
gaggaagagagctgacacttagtgc

SEQ ID NO: 4292521 - DNA, 25 bp, Homo sapien
tgctcccggccaagaatcattttat

SEQ ID NO: 4292522 - DNA, 25 bp, Homo sapien
tgcttaccgcactaggcaccatgtg

SEQ ID NO: 4292523 - DNA, 25 bp, Homo sapien
caaagacatgtcaatctagctgagg

SEQ ID NO: 4292524 - DNA, 25 bp, Homo sapien
tgatcatggattgcggtgcgaacct

SEQ ID NO: 4292525 - DNA, 25 bp, Homo sapien
gcgtgaataacagctccagtggctc

SEQ ID NO: 4292526 - DNA, 25 bp, Homo sapien
cagtggctctacgtactcagtgaca

SEQ ID NO: 4292527 - DNA, 25 bp, Homo sapien
caggggaggtggaggttgcagtgag

SEQ ID NO: 4292528 - DNA, 25 bp, Homo sapien
cccagctacttgggaggctgaggca

SEQ ID NO: 4292529 - DNA, 25 bp, Homo sapien
gggcatggtggcacgggcttgtagt

SEQ ID NO: 4292530 - DNA, 25 bp, Homo sapien
ggagaatcacttgaaccaggggagg

SEQ ID NO: 4292531 - DNA, 25 bp, Homo sapien
cctggacaacacagtgagacttcgt

SEQ ID NO: 4292532 - DNA, 25 bp, Homo sapien
tggacaacacagtgagacttcgttt

SEQ ID NO: 4292533 - DNA, 25 bp, Homo sapien
ctggacaacacagtgagacttcgtt

SEQ ID NO: 4292534 - DNA, 25 bp, Homo sapien
gaaactcaaatgctttatgcctacc

SEQ ID NO: 4292535 - DNA, 25 bp, Homo sapien
tctattcgtaaaggacatctctaac

SEQ ID NO: 4292536 - DNA, 25 bp, Homo sapien
gaggtcccctattggctacgttgag

SEQ ID NO: 4292537 - DNA, 25 bp, Homo sapien
tctacaactagtcttgggagtaact

SEQ ID NO: 4292538 - DNA, 25 bp, Homo sapien
aattcagtaaaacaggggagactgg

SEQ ID NO: 4292539 - DNA, 25 bp, Homo sapien
aattttactatgtatgtgtatccct

SEQ ID NO: 4292540 - DNA, 25 bp, Homo sapien
taaagtctttgtggcacaatttgaa

SEQ ID NO: 4292541 - DNA, 25 bp, Homo sapien
tttaaaggcgtacttaagtctgtga

SEQ ID NO: 4292542 - DNA, 25 bp, Homo sapien
tggctgcgggatcatgcagccctcc

SEQ ID NO: 4292543 - DNA, 25 bp, Homo sapien
gcgggatcatgcagccctcctcaag

SEQ ID NO: 4292544 - DNA, 25 bp, Homo sapien
cgccctgactggctgcgggatcatg

SEQ ID NO: 4292545 - DNA, 25 bp, Homo sapien
gactggctgcgggatcatgcagccc

SEQ ID NO: 4292546 - DNA, 25 bp, Homo sapien
aaccaggattggacatctatatttc

SEQ ID NO: 4292547 - DNA, 25 bp, Homo sapien
tctccaaccaggattggacatctat

SEQ ID NO: 4292548 - DNA, 25 bp, Homo sapien
ctattacccttaactgtcaaacctg

SEQ ID NO: 4292549 - DNA, 25 bp, Homo sapien
aaatacagaattaaagtgatacagc

SEQ ID NO: 4292550 - DNA, 25 bp, Homo sapien
tctgcaacaacctgaccacattctt

SEQ ID NO: 4292551 - DNA, 25 bp, Homo sapien
catacacgttttcaggtgtctctga

SEQ ID NO: 4292552 - DNA, 25 bp, Homo sapien
tgtgtcagtgttcttatccttcctc

SEQ ID NO: 4292553 - DNA, 25 bp, Homo sapien
tttaaatcattttccgcgaggcgcg

SEQ ID NO: 4292554 - DNA, 25 bp, Homo sapien
aacatctaacccatctcctttacag

SEQ ID NO: 4292555 - DNA, 25 bp, Homo sapien
caagaaaaggcacaagacgacattg

SEQ ID NO: 4292556 - DNA, 25 bp, Homo sapien
ccatctcctttacagtaggaacaag

SEQ ID NO: 4292557 - DNA, 25 bp, Homo sapien
gaaaaggcacaagacgacattggtg

SEQ ID NO: 4292558 - DNA, 25 bp, Homo sapien
ctacgggaacagctgacatcttgtg

SEQ ID NO: 4292559 - DNA, 25 bp, Homo sapien
ggaacagctgacatcttgtgaaaaa

SEQ ID NO: 4292560 - DNA, 25 bp, Homo sapien
cagctgacatcttgtgaaaaactta

SEQ ID NO: 4292561 - DNA, 25 bp, Homo sapien
tgacatcttgtgaaaaacttagcat

SEQ ID NO: 4292562 - DNA, 25 bp, Homo sapien
gcctccttttcagcgtccaaaatcg

SEQ ID NO: 4292563 - DNA, 25 bp, Homo sapien
ccgcgggaatttatttctgttcgca

SEQ ID NO: 4292564 - DNA, 25 bp, Homo sapien
ttctgctccgcacagagcaggcctt

SEQ ID NO: 4292565 - DNA, 25 bp, Homo sapien
tctgttcgcacaaggcgtttctgct

SEQ ID NO: 4292566 - DNA, 25 bp, Homo sapien
gttgcggcggccactagacgctccg

SEQ ID NO: 4292567 - DNA, 25 bp, Homo sapien
taggaacagaaatcgaaacggtcgc

SEQ ID NO: 4292568 - DNA, 25 bp, Homo sapien
gcggacctcccgagcggcaggtcgg

SEQ ID NO: 4292569 - DNA, 25 bp, Homo sapien
gagaggcccgctcacttcacaacgg

SEQ ID NO: 4292570 - DNA, 25 bp, Homo sapien
ctcgctcgatcgctcgcttttcccc

SEQ ID NO: 4292571 - DNA, 25 bp, Homo sapien
gcgctcgctcgatcgctcgcttttc

SEQ ID NO: 4292572 - DNA, 25 bp, Homo sapien
tcctgctgggttcggcggagcgggg

SEQ ID NO: 4292573 - DNA, 25 bp, Homo sapien
tgcccggagttttcgcgcgcgcgct

SEQ ID NO: 4292574 - DNA, 25 bp, Homo sapien
gttgtagacagagcggcggggatcc

SEQ ID NO: 4292575 - DNA, 25 bp, Homo sapien
cagaggggttcgcgggtcggacctg

SEQ ID NO: 4292576 - DNA, 25 bp, Homo sapien
cgggttgtagacagagcggcgggga

SEQ ID NO: 4292577 - DNA, 25 bp, Homo sapien
ctcgggttgtagacagagcggcggg

SEQ ID NO: 4292578 - DNA, 25 bp, Homo sapien
cctctctagggtgaaacctgggtga

SEQ ID NO: 4292579 - DNA, 25 bp, Homo sapien
tccagcgcaggcaagagcattcttc

SEQ ID NO: 4292580 - DNA, 25 bp, Homo sapien
caggccttggaattgacctctctag

SEQ ID NO: 4292581 - DNA, 25 bp, Homo sapien
cacctgctgggcttaggcaagcact

SEQ ID NO: 4292582 - DNA, 25 bp, Homo sapien
catgtcccagttgaccatgtgtgaa

SEQ ID NO: 4292583 - DNA, 25 bp, Homo sapien
gacaaatcaaagtttaacatgtccc

SEQ ID NO: 4292584 - DNA, 25 bp, Homo sapien
caaatcaaagtttaacatgtcccag

SEQ ID NO: 4292585 - DNA, 25 bp, Homo sapien
cacacagcataaaatttgacaaatc

SEQ ID NO: 4292586 - DNA, 25 bp, Homo sapien
tctaaatacaaaactgactatcata

SEQ ID NO: 4292587 - DNA, 25 bp, Homo sapien
aactgactatcatatttgttacttc

SEQ ID NO: 4292588 - DNA, 25 bp, Homo sapien
caaaactgactatcatatttgttac

SEQ ID NO: 4292589 - DNA, 25 bp, Homo sapien
atacaaaactgactatcatatttgt

SEQ ID NO: 4292590 - DNA, 25 bp, Homo sapien
cgccagagcctctgggtcatccaca

SEQ ID NO: 4292591 - DNA, 25 bp, Homo sapien
tacgccagagcctctgggtcatcca

SEQ ID NO: 4292592 - DNA, 25 bp, Homo sapien
acgccagagcctctgggtcatccac

SEQ ID NO: 4292593 - DNA, 25 bp, Homo sapien
ttacgccagagcctctgggtcatcc

SEQ ID NO: 4292594 - DNA, 25 bp, Homo sapien
tgctgccacggtttgggcgcccaac

SEQ ID NO: 4292595 - DNA, 25 bp, Homo sapien
tcaggagcagaagcacttgttggtc

SEQ ID NO: 4292596 - DNA, 25 bp, Homo sapien
agcacttgttggtcctgctgccacg

SEQ ID NO: 4292597 - DNA, 25 bp, Homo sapien
gagcagaagcacttgttggtcctgc

SEQ ID NO: 4292598 - DNA, 25 bp, Homo sapien
ccaaggtctccaaaattgatctcca

SEQ ID NO: 4292599 - DNA, 25 bp, Homo sapien
aaggtctccaaaattgatctccagc

SEQ ID NO: 4292600 - DNA, 25 bp, Homo sapien
caaggtctccaaaattgatctccag

SEQ ID NO: 4292601 - DNA, 25 bp, Homo sapien
ggtctccaaaattgatctccagctg

SEQ ID NO: 4292602 - DNA, 25 bp, Homo sapien
catctaaagtcatctctttcagacc

SEQ ID NO: 4292603 - DNA, 25 bp, Homo sapien
tctaaagtcatctctttcagaccct

SEQ ID NO: 4292604 - DNA, 25 bp, Homo sapien
ctaaagtcatctctttcagaccctc

SEQ ID NO: 4292605 - DNA, 25 bp, Homo sapien
actcatctaaagtcatctctttcag

SEQ ID NO: 4292606 - DNA, 25 bp, Homo sapien
gacagttccccagtggtaagatccg

SEQ ID NO: 4292607 - DNA, 25 bp, Homo sapien
catctttgacagttccccagtggta

SEQ ID NO: 4292608 - DNA, 25 bp, Homo sapien
ttgatggatccaagtcagttaattc

SEQ ID NO: 4292609 - DNA, 25 bp, Homo sapien
taagatccgctacctccatgtttgt

SEQ ID NO: 4292610 - DNA, 25 bp, Homo sapien
tatcaaattcacgtttgccatgaga

SEQ ID NO: 4292611 - DNA, 25 bp, Homo sapien
tcctcagcccattccacatccacga

SEQ ID NO: 4292612 - DNA, 25 bp, Homo sapien
cacgtttgccatgagaatcagatcc

SEQ ID NO: 4292613 - DNA, 25 bp, Homo sapien
gagaatcagatccatctcctcagcc

SEQ ID NO: 4292614 - DNA, 25 bp, Homo sapien
aaccagtgtggcctatccatccata

SEQ ID NO: 4292615 - DNA, 25 bp, Homo sapien
caatggagacaactactcaacgata

SEQ ID NO: 4292616 - DNA, 25 bp, Homo sapien
atccatacaatggagacaactactc

SEQ ID NO: 4292617 - DNA, 25 bp, Homo sapien
aataaaccagtgtggcctatccatc

SEQ ID NO: 4292618 - DNA, 25 bp, Homo sapien
gtaggctaatgtcagtgttgtgggc

SEQ ID NO: 4292619 - DNA, 25 bp, Homo sapien
ctaatgtcagtgttgtgggcatgtt

SEQ ID NO: 4292620 - DNA, 25 bp, Homo sapien
ctgtaggctaatgtcagtgttgtgg

SEQ ID NO: 4292621 - DNA, 25 bp, Homo sapien
aggctaatgtcagtgttgtgggcat

SEQ ID NO: 4292622 - DNA, 25 bp, Homo sapien
tctagaactcctgattcagatgatc

SEQ ID NO: 4292623 - DNA, 25 bp, Homo sapien
caagaccagcccggctcagccttcc

SEQ ID NO: 4292624 - DNA, 25 bp, Homo sapien
agaccagcccggctcagccttccaa

SEQ ID NO: 4292625 - DNA, 25 bp, Homo sapien
tcagatgatccgcccactttggcct

SEQ ID NO: 4292626 - DNA, 25 bp, Homo sapien
tccaggaataggtccccaagacact

SEQ ID NO: 4292627 - DNA, 25 bp, Homo sapien
tccccagggatatgacacttagcag

SEQ ID NO: 4292628 - DNA, 25 bp, Homo sapien
caatggtcccctgaattggcaccca

SEQ ID NO: 4292629 - DNA, 25 bp, Homo sapien
ccccaagtctggctgtaagaacaag

SEQ ID NO: 4292630 - DNA, 25 bp, Homo sapien
tccagtggactttcggacgcatcgc

SEQ ID NO: 4292631 - DNA, 25 bp, Homo sapien
acaggaggtcgtctctacatgaggc

SEQ ID NO: 4292632 - DNA, 25 bp, Homo sapien
tctgccaatgtaggagccaggcact

SEQ ID NO: 4292633 - DNA, 25 bp, Homo sapien
tacatgaggctgtgataaggctgcg

SEQ ID NO: 4292634 - DNA, 25 bp, Homo sapien
tgaagccgaggctggccccatgagc

SEQ ID NO: 4292635 - DNA, 25 bp, Homo sapien
ggctgtgccacagggtttcagccca

SEQ ID NO: 4292636 - DNA, 25 bp, Homo sapien
catctccgagcacctttgagtcctg

SEQ ID NO: 4292637 - DNA, 25 bp, Homo sapien
tgcctgccgcacagcaacaagcagg

SEQ ID NO: 4292638 - DNA, 25 bp, Homo sapien
ctgacggtgtccaggtcgagggcac

SEQ ID NO: 4292639 - DNA, 25 bp, Homo sapien
aaggaggcctgacggtgtccaggtc

SEQ ID NO: 4292640 - DNA, 25 bp, Homo sapien
cgcgaaggaggcctgacggtgtcca

SEQ ID NO: 4292641 - DNA, 25 bp, Homo sapien
gaggcctgacggtgtccaggtcgag

SEQ ID NO: 4292642 - DNA, 25 bp, Homo sapien
actcccagcggctgagcttgtctgt

SEQ ID NO: 4292643 - DNA, 25 bp, Homo sapien
gggacaccaaggtccactgctcctc

SEQ ID NO: 4292644 - DNA, 25 bp, Homo sapien
gtggctgaggatgccgtggagcctg

SEQ ID NO: 4292645 - DNA, 25 bp, Homo sapien
tccttgttgctggcttgtgctcagc

SEQ ID NO: 4292646 - DNA, 25 bp, Homo sapien
cttctggcaggagaaaccagtccat

SEQ ID NO: 4292647 - DNA, 25 bp, Homo sapien
ggcatcctacatcccagtgaagtaa

SEQ ID NO: 4292648 - DNA, 25 bp, Homo sapien
ccctctgggcatcctaaattcaaag

SEQ ID NO: 4292649 - DNA, 25 bp, Homo sapien
tgtggccacccaacacatggcaggg

SEQ ID NO: 4292650 - DNA, 25 bp, Homo sapien
gggccagctgggcctaaaagcagtt

SEQ ID NO: 4292651 - DNA, 25 bp, Homo sapien
cagctgggcctaaaagcagttttcg

SEQ ID NO: 4292652 - DNA, 25 bp, Homo sapien
agcagttttcgtttcttcttcacct

SEQ ID NO: 4292653 - DNA, 25 bp, Homo sapien
gccagctgggcctaaaagcagtttt

SEQ ID NO: 4292654 - DNA, 25 bp, Homo sapien
tgagttcatcaacgccatgcattct

SEQ ID NO: 4292655 - DNA, 25 bp, Homo sapien
tcatcaacgccatgcattctaggcc

SEQ ID NO: 4292656 - DNA, 25 bp, Homo sapien
gttcatcaacgccatgcattctagg

SEQ ID NO: 4292657 - DNA, 25 bp, Homo sapien
ctgagttcatcaacgccatgcattc

SEQ ID NO: 4292658 - DNA, 25 bp, Homo sapien
agccagagctccacatggtttccat

SEQ ID NO: 4292659 - DNA, 25 bp, Homo sapien
cagagctccacatggtttccatcat

SEQ ID NO: 4292660 - DNA, 25 bp, Homo sapien
cagccccaccgggcagccagagctc

SEQ ID NO: 4292661 - DNA, 25 bp, Homo sapien
gcagccagagctccacatggtttcc

SEQ ID NO: 4292662 - DNA, 25 bp, Homo sapien
tgagccgggaacaaaactggcgctg

SEQ ID NO: 4292663 - DNA, 25 bp, Homo sapien
caaagaagtgaggagtagatgagcc

SEQ ID NO: 4292664 - DNA, 25 bp, Homo sapien
acagtggtggacaacaaaagccttc

SEQ ID NO: 4292665 - DNA, 25 bp, Homo sapien
cgtggaagccgcacactattagttc

SEQ ID NO: 4292666 - DNA, 25 bp, Homo sapien
actgcaataggttccacaagctggg

SEQ ID NO: 4292667 - DNA, 25 bp, Homo sapien
taccaccatatcagttaggcagcca

SEQ ID NO: 4292668 - DNA, 25 bp, Homo sapien
tatacgattgtgttcaacatgggac

SEQ ID NO: 4292669 - DNA, 25 bp, Homo sapien
tagggacagagttccgggcacactt

SEQ ID NO: 4292670 - DNA, 25 bp, Homo sapien
gcaaggaaagacctaattcgcacat

SEQ ID NO: 4292671 - DNA, 25 bp, Homo sapien
tttgccgagcatctatgacttgcaa

SEQ ID NO: 4292672 - DNA, 25 bp, Homo sapien
cttgcaaggaaagacctaattcgca

SEQ ID NO: 4292673 - DNA, 25 bp, Homo sapien
tgacttgcaaggaaagacctaattc

SEQ ID NO: 4292674 - DNA, 25 bp, Homo sapien
ttaagccgcgcttcccaagaagaat

SEQ ID NO: 4292675 - DNA, 25 bp, Homo sapien
tgcgctggaacaagggctaactgct

SEQ ID NO: 4292676 - DNA, 25 bp, Homo sapien
tcaactggtgaagaatcgactgcgc

SEQ ID NO: 4292677 - DNA, 25 bp, Homo sapien
cattaggcccctaaaggaggctgaa

SEQ ID NO: 4292678 - DNA, 25 bp, Homo sapien
gatgtgaaactagcaacaggaatgc

SEQ ID NO: 4292679 - DNA, 25 bp, Homo sapien
gcagagtagcggttccagagccaga

SEQ ID NO: 4292680 - DNA, 25 bp, Homo sapien
ggccctgcttgaatcaggttgggaa

SEQ ID NO: 4292681 - DNA, 25 bp, Homo sapien
tagcggttccagagccagaagttgc

SEQ ID NO: 4292682 - DNA, 25 bp, Homo sapien
tcaggtaagcattaaacagcacagc

SEQ ID NO: 4292683 - DNA, 25 bp, Homo sapien
agagaccccaagccaaatctgaagt

SEQ ID NO: 4292684 - DNA, 25 bp, Homo sapien
agcagctcctcactgagagacccca

SEQ ID NO: 4292685 - DNA, 25 bp, Homo sapien
caaatctgaagtgaccaacagttac

SEQ ID NO: 4292686 - DNA, 25 bp, Homo sapien
gctagtcctgggaaaacacgcagcc

SEQ ID NO: 4292687 - DNA, 25 bp, Homo sapien
ccagctgagctttagggaggcacca

SEQ ID NO: 4292688 - DNA, 25 bp, Homo sapien
cctagatacagggaagcaggacacc

SEQ ID NO: 4292689 - DNA, 25 bp, Homo sapien
tcataaaggttgtgcctcagagact

SEQ ID NO: 4292690 - DNA, 25 bp, Homo sapien
gacttgcaatccaggtgattccgag

SEQ ID NO: 4292691 - DNA, 25 bp, Homo sapien
gaggactgccttccgtgtgtgctcc

SEQ ID NO: 4292692 - DNA, 25 bp, Homo sapien
gtgtgctccacttgaccctatggga

SEQ ID NO: 4292693 - DNA, 25 bp, Homo sapien
ccgaggcaggtagaatgaggatcat

SEQ ID NO: 4292694 - DNA, 25 bp, Homo sapien
agctggcctgaccttgcccgatgaa

SEQ ID NO: 4292695 - DNA, 25 bp, Homo sapien
aatgcatgataggagttgcccttac

SEQ ID NO: 4292696 - DNA, 25 bp, Homo sapien
ggccccagtcttggtgtactgacag

SEQ ID NO: 4292697 - DNA, 25 bp, Homo sapien
gactgaggccatgctttggaggtcc

SEQ ID NO: 4292698 - DNA, 25 bp, Homo sapien
gacaggattattaacatccaagtta

SEQ ID NO: 4292699 - DNA, 25 bp, Homo sapien
gtgacaggattattaacatccaagt

SEQ ID NO: 4292700 - DNA, 25 bp, Homo sapien
acatccaagttatagtttgtgcata

SEQ ID NO: 4292701 - DNA, 25 bp, Homo sapien
tgacaggattattaacatccaagtt

SEQ ID NO: 4292702 - DNA, 25 bp, Homo sapien
gaactacccatagctggtccaggtg

SEQ ID NO: 4292703 - DNA, 25 bp, Homo sapien
ccctcagggacaaagtggctcaact

SEQ ID NO: 4292704 - DNA, 25 bp, Homo sapien
aaagtccgcctcttgcaggtggcca

SEQ ID NO: 4292705 - DNA, 25 bp, Homo sapien
gatcacgacaggcaagattctcccg

SEQ ID NO: 4292706 - DNA, 25 bp, Homo sapien
tgtcattttgtcagtgcgtctgggc

SEQ ID NO: 4292707 - DNA, 25 bp, Homo sapien
gtcattttgtcagtgcgtctgggca

SEQ ID NO: 4292708 - DNA, 25 bp, Homo sapien
tcatgtcattttgtcagtgcgtctg

SEQ ID NO: 4292709 - DNA, 25 bp, Homo sapien
catgtcattttgtcagtgcgtctgg

SEQ ID NO: 4292710 - DNA, 25 bp, Homo sapien
agagttgctcccagacagaaggccc

SEQ ID NO: 4292711 - DNA, 25 bp, Homo sapien
tgagtcctgaggaaatggatcagct

SEQ ID NO: 4292712 - DNA, 25 bp, Homo sapien
tctgtgaggaatgctgtcccgagag

SEQ ID NO: 4292713 - DNA, 25 bp, Homo sapien
tcctgaggaaatggatcagcttggt

SEQ ID NO: 4292714 - DNA, 25 bp, Homo sapien
tcagtgcctgttcctcagtctatac

SEQ ID NO: 4292715 - DNA, 25 bp, Homo sapien
gggaaagaaaccattgtcagtgcct

SEQ ID NO: 4292716 - DNA, 25 bp, Homo sapien
cattgtcagtgcctgttcctcagtc

SEQ ID NO: 4292717 - DNA, 25 bp, Homo sapien
gaaaccattgtcagtgcctgttcct

SEQ ID NO: 4292718 - DNA, 25 bp, Homo sapien
gtcacattatcagaagatgctgccc

SEQ ID NO: 4292719 - DNA, 25 bp, Homo sapien
ccagcttctaagtcagataaaaggc

SEQ ID NO: 4292720 - DNA, 25 bp, Homo sapien
cccattggcaacattctcttgtcac

SEQ ID NO: 4292721 - DNA, 25 bp, Homo sapien
tactgcaggtccattgtttccccat

SEQ ID NO: 4292722 - DNA, 25 bp, Homo sapien
aggaggcctagcgggagagacagcg

SEQ ID NO: 4292723 - DNA, 25 bp, Homo sapien
gaggcctagcgggagagacagcggg

SEQ ID NO: 4292724 - DNA, 25 bp, Homo sapien
aagaggaggcctagcgggagagaca

SEQ ID NO: 4292725 - DNA, 25 bp, Homo sapien
agaggaggcctagcgggagagacag

SEQ ID NO: 4292726 - DNA, 25 bp, Homo sapien
tggatgaagcaaaggctctgcgtga

SEQ ID NO: 4292727 - DNA, 25 bp, Homo sapien
caaatgtcccgagcaggactggcga

SEQ ID NO: 4292728 - DNA, 25 bp, Homo sapien
gatccgaatgcccatgttaaagcag

SEQ ID NO: 4292729 - DNA, 25 bp, Homo sapien
gctgccacaccaacgggtcaagaga

SEQ ID NO: 4292730 - DNA, 25 bp, Homo sapien
tgtcgacctcctctttgctcatggc

SEQ ID NO: 4292731 - DNA, 25 bp, Homo sapien
cagtaggaacgcagcaaaacaggac

SEQ ID NO: 4292732 - DNA, 25 bp, Homo sapien
ccattgatggcaagcaggagaacat

SEQ ID NO: 4292733 - DNA, 25 bp, Homo sapien
ggagaacatagagacagtaggaacg

SEQ ID NO: 4292734 - DNA, 25 bp, Homo sapien
aaaagcctgtccgtgctgtgtccga

SEQ ID NO: 4292735 - DNA, 25 bp, Homo sapien
ggacagcagtgttgcgagttccact

SEQ ID NO: 4292736 - DNA, 25 bp, Homo sapien
tgcagggctaatcccaaacaacgga

SEQ ID NO: 4292737 - DNA, 25 bp, Homo sapien
gatggccagtacagctcacaggtaa

SEQ ID NO: 4292738 - DNA, 25 bp, Homo sapien
aaaacacattctaggcccgagagga

SEQ ID NO: 4292739 - DNA, 25 bp, Homo sapien
ggaagctgattgtcctggcgccaac

SEQ ID NO: 4292740 - DNA, 25 bp, Homo sapien
cgagaggaaagccaacagcaaggag

SEQ ID NO: 4292741 - DNA, 25 bp, Homo sapien
cctataccttgagtgtgtgtctgga

SEQ ID NO: 4292742 - DNA, 25 bp, Homo sapien
tgagctaagcatggtccctccgtag

SEQ ID NO: 4292743 - DNA, 25 bp, Homo sapien
gccagctgagaataggcaaagccaa

SEQ ID NO: 4292744 - DNA, 25 bp, Homo sapien
gccagcttgagcagggactccaaga

SEQ ID NO: 4292745 - DNA, 25 bp, Homo sapien
cctccgtagatatccagagccagct

SEQ ID NO: 4292746 - DNA, 25 bp, Homo sapien
aagggagccaagattattcactata

SEQ ID NO: 4292747 - DNA, 25 bp, Homo sapien
acaagggagccaagattattcacta

SEQ ID NO: 4292748 - DNA, 25 bp, Homo sapien
caagggagccaagattattcactat

SEQ ID NO: 4292749 - DNA, 25 bp, Homo sapien
gggagccaagattattcactatatc

SEQ ID NO: 4292750 - DNA, 25 bp, Homo sapien
cctgatcaccaaagttcaatacatt

SEQ ID NO: 4292751 - DNA, 25 bp, Homo sapien
aaaaatgtcatcacatatcgctcgc

SEQ ID NO: 4292752 - DNA, 25 bp, Homo sapien
attcaaaaatgtcatcacatatcgc

SEQ ID NO: 4292753 - DNA, 25 bp, Homo sapien
ctgatcaccaaagttcaatacattc

SEQ ID NO: 4292754 - DNA, 25 bp, Homo sapien
caagtcagtttagcctctttccagt

SEQ ID NO: 4292755 - DNA, 25 bp, Homo sapien
aaactccaagtcagtttagcctctt

SEQ ID NO: 4292756 - DNA, 25 bp, Homo sapien
tccaagtcagtttagcctctttcca

SEQ ID NO: 4292757 - DNA, 25 bp, Homo sapien
cagtttagcctctttccagtttata

SEQ ID NO: 4292758 - DNA, 25 bp, Homo sapien
gatgattgagctctttaaagacaaa

SEQ ID NO: 4292759 - DNA, 25 bp, Homo sapien
tgtttgcctgcaggttgtgaatgga

SEQ ID NO: 4292760 - DNA, 25 bp, Homo sapien
cttgccatgctgtggtggtcctccc

SEQ ID NO: 4292761 - DNA, 25 bp, Homo sapien
tgtcatgaggctctcgtgatgcctg

SEQ ID NO: 4292762 - DNA, 25 bp, Homo sapien
gactcaggatgatatgatcagccac

SEQ ID NO: 4292763 - DNA, 25 bp, Homo sapien
cactcgtccacttcccaaactcttc

SEQ ID NO: 4292764 - DNA, 25 bp, Homo sapien
tgactcaggatgatatgatcagcca

SEQ ID NO: 4292765 - DNA, 25 bp, Homo sapien
ttctgactcaggatgatatgatcag

SEQ ID NO: 4292766 - DNA, 25 bp, Homo sapien
tccccagtgcagaaagctgctctgg

SEQ ID NO: 4292767 - DNA, 25 bp, Homo sapien
ggagtcaagtcaggcatgctgctca

SEQ ID NO: 4292768 - DNA, 25 bp, Homo sapien
tatttgaccagcttccattaaggaa

SEQ ID NO: 4292769 - DNA, 25 bp, Homo sapien
ggtaaagtcatacactgcgttcatg

SEQ ID NO: 4292770 - DNA, 25 bp, Homo sapien
gatctgttattctggagacaggaag

SEQ ID NO: 4292771 - DNA, 25 bp, Homo sapien
tgtaatattgggtaacagatctgtt

SEQ ID NO: 4292772 - DNA, 25 bp, Homo sapien
gcaccagaactgtggtatagaaaag

SEQ ID NO: 4292773 - DNA, 25 bp, Homo sapien
agcagagcaccagaactgtggtata

SEQ ID NO: 4292774 - DNA, 25 bp, Homo sapien
ccacagcacgagaaaagctgtcaga

SEQ ID NO: 4292775 - DNA, 25 bp, Homo sapien
gagaaaatgtacaatccccagtgag

SEQ ID NO: 4292776 - DNA, 25 bp, Homo sapien
gtcagaacgctcttaagaattaccg

SEQ ID NO: 4292777 - DNA, 25 bp, Homo sapien
tcttaagaattaccgacaggctctc

SEQ ID NO: 4292778 - DNA, 25 bp, Homo sapien
catagtgagggacaacattaggatc

SEQ ID NO: 4292779 - DNA, 25 bp, Homo sapien
gcccaggaataaggaccaaaacaca

SEQ ID NO: 4292780 - DNA, 25 bp, Homo sapien
ttaggatcaggcacttcaagcagct

SEQ ID NO: 4292781 - DNA, 25 bp, Homo sapien
caaacatatgtgcttgtgccaagac

SEQ ID NO: 4292782 - DNA, 25 bp, Homo sapien
tctggctccagtctcgctgggtgcc

SEQ ID NO: 4292783 - DNA, 25 bp, Homo sapien
ccccactgagacatgctctgcggaa

SEQ ID NO: 4292784 - DNA, 25 bp, Homo sapien
aagagggtggttgagtaaagcagcg

SEQ ID NO: 4292785 - DNA, 25 bp, Homo sapien
gagacatgctctgcggaaggcctct

SEQ ID NO: 4292786 - DNA, 25 bp, Homo sapien
caaaggtgatcaaccgaaacaacac

SEQ ID NO: 4292787 - DNA, 25 bp, Homo sapien
tacgccaacgatttcctttgacagg

SEQ ID NO: 4292788 - DNA, 25 bp, Homo sapien
ttgacaggaagcgaagaataaatgc

SEQ ID NO: 4292789 - DNA, 25 bp, Homo sapien
aatgcattcaagacaaaggtgatca

SEQ ID NO: 4292790 - DNA, 25 bp, Homo sapien
caggcacttaagaggcatgatttca

SEQ ID NO: 4292791 - DNA, 25 bp, Homo sapien
tccatgtgcctctctaagataaggg

SEQ ID NO: 4292792 - DNA, 25 bp, Homo sapien
taatcttcctaatgaccctgtgagg

SEQ ID NO: 4292793 - DNA, 25 bp, Homo sapien
cgaaggcaggcatctagcaagtgac

SEQ ID NO: 4292794 - DNA, 25 bp, Homo sapien
tgtcctgggtcacggagcaatccaa

SEQ ID NO: 4292795 - DNA, 25 bp, Homo sapien
tctcgagcacgaaataccagtccct

SEQ ID NO: 4292796 - DNA, 25 bp, Homo sapien
catatggactctcggaactcagtgg

SEQ ID NO: 4292797 - DNA, 25 bp, Homo sapien
taattcactcctactgccatatggg

SEQ ID NO: 4292798 - DNA, 25 bp, Homo sapien
cccctccattgcggggtccacctcg

SEQ ID NO: 4292799 - DNA, 25 bp, Homo sapien
ggctgccatcccgcgaatcccggct

SEQ ID NO: 4292800 - DNA, 25 bp, Homo sapien
gcagtacaagctggaacctgaaggg

SEQ ID NO: 4292801 - DNA, 25 bp, Homo sapien
tgcagtacaagctggaacctgaagg

SEQ ID NO: 4292802 - DNA, 25 bp, Homo sapien
agccgggccgcgtggcccagcacct

SEQ ID NO: 4292803 - DNA, 25 bp, Homo sapien
agacaccaggaaatgccgccgccac

SEQ ID NO: 4292804 - DNA, 25 bp, Homo sapien
acaccaggaaatgccgccgccactc

SEQ ID NO: 4292805 - DNA, 25 bp, Homo sapien
caccaggaaatgccgccgccactcc

SEQ ID NO: 4292806 - DNA, 25 bp, Homo sapien
gacaccaggaaatgccgccgccact

SEQ ID NO: 4292807 - DNA, 25 bp, Homo sapien
gatagacaacgtccatgtgtgggtg

SEQ ID NO: 4292808 - DNA, 25 bp, Homo sapien
tcaggtgcatatgttcacgcgcatg

SEQ ID NO: 4292809 - DNA, 25 bp, Homo sapien
tgtgtgggtgcatgtctacctgcat

SEQ ID NO: 4292810 - DNA, 25 bp, Homo sapien
cctgcatatgaatggacatgcttgt

SEQ ID NO: 4292811 - DNA, 25 bp, Homo sapien
tttgaggtcactctcgaacacttgt

SEQ ID NO: 4292812 - DNA, 25 bp, Homo sapien
tctcgaacacttgtaaccgcaaata

SEQ ID NO: 4292813 - DNA, 25 bp, Homo sapien
gaggtcactctcgaacacttgtaac

SEQ ID NO: 4292814 - DNA, 25 bp, Homo sapien
cttgtaaccgcaaatattgagacag

SEQ ID NO: 4292815 - DNA, 25 bp, Homo sapien
gaatgggcgagctcaggtcttcctg

SEQ ID NO: 4292816 - DNA, 25 bp, Homo sapien
catccaaggaatgggcgagctcagg

SEQ ID NO: 4292817 - DNA, 25 bp, Homo sapien
tgctccatccaaggaatgggcgagc

SEQ ID NO: 4292818 - DNA, 25 bp, Homo sapien
tcagttgctccatccaaggaatggg

SEQ ID NO: 4292819 - DNA, 25 bp, Homo sapien
gacactcctgtcgatgacagtcttg

SEQ ID NO: 4292820 - DNA, 25 bp, Homo sapien
gctgacactcctgtcgatgacagtc

SEQ ID NO: 4292821 - DNA, 25 bp, Homo sapien
atgacagtcttggtggcctgaggca

SEQ ID NO: 4292822 - DNA, 25 bp, Homo sapien
tgacagtcttggtggcctgaggcat

SEQ ID NO: 4292823 - DNA, 25 bp, Homo sapien
tcctccagtccaaccccagggaagc

SEQ ID NO: 4292824 - DNA, 25 bp, Homo sapien
ctcatcatcacacaaggacactgaa

SEQ ID NO: 4292825 - DNA, 25 bp, Homo sapien
caaggacactgaaattccccgtggg

SEQ ID NO: 4292826 - DNA, 25 bp, Homo sapien
cgtgggccccacagtgggttggaca

SEQ ID NO: 4292827 - DNA, 25 bp, Homo sapien
cacacaaggacactgaaattccccg

SEQ ID NO: 4292828 - DNA, 25 bp, Homo sapien
caggcagcaaaaggggcaagatgtc

SEQ ID NO: 4292829 - DNA, 25 bp, Homo sapien
ctgggtgctggatctcttggaccct

SEQ ID NO: 4292830 - DNA, 25 bp, Homo sapien
ggaccctcagggacaagccaggcag

SEQ ID NO: 4292831 - DNA, 25 bp, Homo sapien
gggtgctggatctcttggaccctca

SEQ ID NO: 4292832 - DNA, 25 bp, Homo sapien
cacgataagcaccagtgggactgtg

SEQ ID NO: 4292833 - DNA, 25 bp, Homo sapien
tcctggacagatcaggctagccctg

SEQ ID NO: 4292834 - DNA, 25 bp, Homo sapien
tggccgggctctcatggtacttcct

SEQ ID NO: 4292835 - DNA, 25 bp, Homo sapien
agttcctgaacgagaaggcgcgcct

SEQ ID NO: 4292836 - DNA, 25 bp, Homo sapien
ggttgtcaggacacgtttgtcccag

SEQ ID NO: 4292837 - DNA, 25 bp, Homo sapien
gaccctgggcctaaggcagacagct

SEQ ID NO: 4292838 - DNA, 25 bp, Homo sapien
cagggagccccagatgtctctgtgg

SEQ ID NO: 4292839 - DNA, 25 bp, Homo sapien
gaccagctgtagctgtctctggaag

SEQ ID NO: 4292840 - DNA, 25 bp, Homo sapien
taaattctagaatctatatcatagc

SEQ ID NO: 4292841 - DNA, 25 bp, Homo sapien
ctagaatctatatcatagcagcttt

SEQ ID NO: 4292842 - DNA, 25 bp, Homo sapien
agaatctatatcatagcagcttttg

SEQ ID NO: 4292843 - DNA, 25 bp, Homo sapien
ttctagaatctatatcatagcagct

SEQ ID NO: 4292844 - DNA, 25 bp, Homo sapien
cccctgcggtcccacctgcgcagag

SEQ ID NO: 4292845 - DNA, 25 bp, Homo sapien
ggtgatctgtggagggccgggcatc

SEQ ID NO: 4292846 - DNA, 25 bp, Homo sapien
tcccacctgcgcagagccagttggg

SEQ ID NO: 4292847 - DNA, 25 bp, Homo sapien
tcggtgatctgtggagggccgggca

SEQ ID NO: 4292848 - DNA, 25 bp, Homo sapien
aggtgtgctcacagctccctgcaac

SEQ ID NO: 4292849 - DNA, 25 bp, Homo sapien
agctactacacccggcctctgctcc

SEQ ID NO: 4292850 - DNA, 25 bp, Homo sapien
agtgcagaggtgtgctcacagctcc

SEQ ID NO: 4292851 - DNA, 25 bp, Homo sapien
ctacacccggcctctgctccctttt

SEQ ID NO: 4292852 - DNA, 25 bp, Homo sapien
tctgagcccgtatctgcctagcagt

SEQ ID NO: 4292853 - DNA, 25 bp, Homo sapien
ccttgtgaggccgtcatgattccca

SEQ ID NO: 4292854 - DNA, 25 bp, Homo sapien
cagtgaagctgataaccaacaggtc

SEQ ID NO: 4292855 - DNA, 25 bp, Homo sapien
ggaattccaacttcttctgagcccg

SEQ ID NO: 4292856 - DNA, 25 bp, Homo sapien
aggctctcgtcttcttcttcacaag

SEQ ID NO: 4292857 - DNA, 25 bp, Homo sapien
gctgcccaggctctcgtcttcttct

SEQ ID NO: 4292858 - DNA, 25 bp, Homo sapien
agggttcttgactctcctccctcat

SEQ ID NO: 4292859 - DNA, 25 bp, Homo sapien
tcagggttcttgactctcctccctc

SEQ ID NO: 4292860 - DNA, 25 bp, Homo sapien
tctggcactgctagacctggctggg

SEQ ID NO: 4292861 - DNA, 25 bp, Homo sapien
ctagacctggctgggtagctaagtg

SEQ ID NO: 4292862 - DNA, 25 bp, Homo sapien
cagcctctggcactgctagacctgg

SEQ ID NO: 4292863 - DNA, 25 bp, Homo sapien
cactgctagacctggctgggtagct

SEQ ID NO: 4292864 - DNA, 25 bp, Homo sapien
tcttggccagtataaggttttgcac

SEQ ID NO: 4292865 - DNA, 25 bp, Homo sapien
ctcgcaacagctctgaggatttcct

SEQ ID NO: 4292866 - DNA, 25 bp, Homo sapien
ggtttattctctccagacggtcagg

SEQ ID NO: 4292867 - DNA, 25 bp, Homo sapien
caaatgtgtctcatcctcgcaacag

SEQ ID NO: 4292868 - DNA, 25 bp, Homo sapien
aaatccactgtggtcagcagtgtga

SEQ ID NO: 4292869 - DNA, 25 bp, Homo sapien
accccagctgagcccgagcagcagg

SEQ ID NO: 4292870 - DNA, 25 bp, Homo sapien
ttataagcagggctgaccccagctg

SEQ ID NO: 4292871 - DNA, 25 bp, Homo sapien
tggtcagcagtgtgagggcagtcac

SEQ ID NO: 4292872 - DNA, 25 bp, Homo sapien
caatgagggatgtaggtctcagcct

SEQ ID NO: 4292873 - DNA, 25 bp, Homo sapien
gccagttgtcacatggagtcccagg

SEQ ID NO: 4292874 - DNA, 25 bp, Homo sapien
ggccccattggcaagacccagaaat

SEQ ID NO: 4292875 - DNA, 25 bp, Homo sapien
tctcagctagaaggcaggttgcagt

SEQ ID NO: 4292876 - DNA, 25 bp, Homo sapien
cagtacatctttgagcacctttccc

SEQ ID NO: 4292877 - DNA, 25 bp, Homo sapien
cctcctctcagtacatctttgagca

SEQ ID NO: 4292878 - DNA, 25 bp, Homo sapien
caaaacatatatttacccctcctct

SEQ ID NO: 4292879 - DNA, 25 bp, Homo sapien
agaatctcaggaatgtatagacccc

SEQ ID NO: 4292880 - DNA, 25 bp, Homo sapien
aggccttggtgatgaggcccctcac

SEQ ID NO: 4292881 - DNA, 25 bp, Homo sapien
ctaggccttggtgatgaggcccctc

SEQ ID NO: 4292882 - DNA, 25 bp, Homo sapien
taggccttggtgatgaggcccctca

SEQ ID NO: 4292883 - DNA, 25 bp, Homo sapien
tgtcgataccaaacatcttcagcag

SEQ ID NO: 4292884 - DNA, 25 bp, Homo sapien
ttgtgcaatggcatccctgtcgata

SEQ ID NO: 4292885 - DNA, 25 bp, Homo sapien
ggcatccctgtcgataccaaacatc

SEQ ID NO: 4292886 - DNA, 25 bp, Homo sapien
cagctcagccggcttcccacttctt

SEQ ID NO: 4292887 - DNA, 25 bp, Homo sapien
gcactggacacagcctcaccaatgc

SEQ ID NO: 4292888 - DNA, 25 bp, Homo sapien
tgcactggacacagcctcaccaatg

SEQ ID NO: 4292889 - DNA, 25 bp, Homo sapien
tcagatagaagaggcacgtccaacg

SEQ ID NO: 4292890 - DNA, 25 bp, Homo sapien
caagcctgaggccttttaagagacc

SEQ ID NO: 4292891 - DNA, 25 bp, Homo sapien
ctggtgtgtacttagggagcctgct

SEQ ID NO: 4292892 - DNA, 25 bp, Homo sapien
catttagcagcgaggttggaatcct

SEQ ID NO: 4292893 - DNA, 25 bp, Homo sapien
taatggtcctccacggtgaggatcc

SEQ ID NO: 4292894 - DNA, 25 bp, Homo sapien
tgcccttggtggcacgagcgctgtc

SEQ ID NO: 4292895 - DNA, 25 bp, Homo sapien
tccagcacgcggatgttgatctttt

SEQ ID NO: 4292896 - DNA, 25 bp, Homo sapien
cacgagcgctgtcgagaatgagttt

SEQ ID NO: 4292897 - DNA, 25 bp, Homo sapien
tgtgttgcccgcagtatccaagaac

SEQ ID NO: 4292898 - DNA, 25 bp, Homo sapien
catcctgagggctgcgtgtagctaa

SEQ ID NO: 4292899 - DNA, 25 bp, Homo sapien
caagacctagcatgcagtggccgct

SEQ ID NO: 4292900 - DNA, 25 bp, Homo sapien
cacatgcatgtaaccctcaggagag

SEQ ID NO: 4292901 - DNA, 25 bp, Homo sapien
ccgataacggtcacctggtcatcct

SEQ ID NO: 4292902 - DNA, 25 bp, Homo sapien
ccagccccgataacggtcacctggt

SEQ ID NO: 4292903 - DNA, 25 bp, Homo sapien
taacggtcacctggtcatccttgct

SEQ ID NO: 4292904 - DNA, 25 bp, Homo sapien
tttcttcagcagttcggcagcggcc

SEQ ID NO: 4292905 - DNA, 25 bp, Homo sapien
ggctggtccggatgaagcagatacc

SEQ ID NO: 4292906 - DNA, 25 bp, Homo sapien
aagtcctcattgttgttatagatga

SEQ ID NO: 4292907 - DNA, 25 bp, Homo sapien
tccgacctggaagtcctcattgttg

SEQ ID NO: 4292908 - DNA, 25 bp, Homo sapien
cttggcttgtccgacctggaagtcc

SEQ ID NO: 4292909 - DNA, 25 bp, Homo sapien
gggtctgtggcatgcagctccgggc

SEQ ID NO: 4292910 - DNA, 25 bp, Homo sapien
cactgggtctgtggcatgcagctcc

SEQ ID NO: 4292911 - DNA, 25 bp, Homo sapien
aggaaccacgcgcactgggtctgtg

SEQ ID NO: 4292912 - DNA, 25 bp, Homo sapien
actgggtctgtggcatgcagctccg

SEQ ID NO: 4292913 - DNA, 25 bp, Homo sapien
tacacgaacaccaggggcaaggtca

SEQ ID NO: 4292914 - DNA, 25 bp, Homo sapien
aggaaacaccccctggggcagcaag

SEQ ID NO: 4292915 - DNA, 25 bp, Homo sapien
tcccttgggaagtgatggctgccag

SEQ ID NO: 4292916 - DNA, 25 bp, Homo sapien
ggctgccagcaggagaaagaacagc

SEQ ID NO: 4292917 - DNA, 25 bp, Homo sapien
tagcaacgccatcacttgggtaaaa

SEQ ID NO: 4292918 - DNA, 25 bp, Homo sapien
tattggcggctagttccactgcctt

SEQ ID NO: 4292919 - DNA, 25 bp, Homo sapien
ttgtattggcggctagttccactgc

SEQ ID NO: 4292920 - DNA, 25 bp, Homo sapien
cttctctgtagcaacgccatcactt

SEQ ID NO: 4292921 - DNA, 25 bp, Homo sapien
agatcttctagggccatctgggagg

SEQ ID NO: 4292922 - DNA, 25 bp, Homo sapien
tggggactgaccgaaacatagccag

SEQ ID NO: 4292923 - DNA, 25 bp, Homo sapien
gactgaccgaaacatagccagatct

SEQ ID NO: 4292924 - DNA, 25 bp, Homo sapien
gggactgaccgaaacatagccagat

SEQ ID NO: 4292925 - DNA, 25 bp, Homo sapien
tatgcagaaataagacccctacccc

SEQ ID NO: 4292926 - DNA, 25 bp, Homo sapien
cccatccatgggctggaatcctggc

SEQ ID NO: 4292927 - DNA, 25 bp, Homo sapien
tacctcctggtgcaaaagtcaaggg

SEQ ID NO: 4292928 - DNA, 25 bp, Homo sapien
ccctcccatacctcctggtgcaaaa

SEQ ID NO: 4292929 - DNA, 25 bp, Homo sapien
tgttgctctcggagatggcggccat

SEQ ID NO: 4292930 - DNA, 25 bp, Homo sapien
tggcggccatgcgaatctggtcaaa

SEQ ID NO: 4292931 - DNA, 25 bp, Homo sapien
aaggcccgcgtgaagaaggctgcaa

SEQ ID NO: 4292932 - DNA, 25 bp, Homo sapien
tgcagaagggcaccgtcctgttgcg

SEQ ID NO: 4292933 - DNA, 25 bp, Homo sapien
gctcagcaatgtagcactcgatgaa

SEQ ID NO: 4292934 - DNA, 25 bp, Homo sapien
cgatgatgcggtcactggcatggcc

SEQ ID NO: 4292935 - DNA, 25 bp, Homo sapien
ctcgatgaagcggtccgggtgctcc

SEQ ID NO: 4292936 - DNA, 25 bp, Homo sapien
cagtgcctgcccgtaggccttgcgg

SEQ ID NO: 4292937 - DNA, 25 bp, Homo sapien
gcaatgtccactgagggtgcgtcct

SEQ ID NO: 4292938 - DNA, 25 bp, Homo sapien
gatgttggcaatgtccactgagggt

SEQ ID NO: 4292939 - DNA, 25 bp, Homo sapien
atgttggcaatgtccactgagggtg

SEQ ID NO: 4292940 - DNA, 25 bp, Homo sapien
cttgtccccaactttgtagctgggc

SEQ ID NO: 4292941 - DNA, 25 bp, Homo sapien
cctggatgatctgctcagccatgtt

SEQ ID NO: 4292942 - DNA, 25 bp, Homo sapien
gatgatctgctcagccatgtttttg

SEQ ID NO: 4292943 - DNA, 25 bp, Homo sapien
tgccaagactccttatcttctaccc

SEQ ID NO: 4292944 - DNA, 25 bp, Homo sapien
tggatgatctgctcagccatgtttt

SEQ ID NO: 4292945 - DNA, 25 bp, Homo sapien
tgccattgcttgaggagtaccccac

SEQ ID NO: 4292946 - DNA, 25 bp, Homo sapien
ggagtctataagcacctaggcatgc

SEQ ID NO: 4292947 - DNA, 25 bp, Homo sapien
tacctgagtctacatgggcagaaca

SEQ ID NO: 4292948 - DNA, 25 bp, Homo sapien
ggaggtcacctcagtagtcactaga

SEQ ID NO: 4292949 - DNA, 25 bp, Homo sapien
tgaaggtcttggcaatgatggctgt

SEQ ID NO: 4292950 - DNA, 25 bp, Homo sapien
gctcctccacgctgtgtccatccac

SEQ ID NO: 4292951 - DNA, 25 bp, Homo sapien
cgtgatccctcggcccttgaaggtc

SEQ ID NO: 4292952 - DNA, 25 bp, Homo sapien
ccacgctgtgtccatccacgatgat

SEQ ID NO: 4292953 - DNA, 25 bp, Homo sapien
gttcatccgcaaaacgcagtcctgg

SEQ ID NO: 4292954 - DNA, 25 bp, Homo sapien
caaagcaagttagcggtggagccag

SEQ ID NO: 4292955 - DNA, 25 bp, Homo sapien
caggaatctggcttgagtcacgagg

SEQ ID NO: 4292956 - DNA, 25 bp, Homo sapien
tgtgctactgcaaggtaaccccaag

SEQ ID NO: 4292957 - DNA, 25 bp, Homo sapien
cctcgcaccgcttctggtagatgtc

SEQ ID NO: 4292958 - DNA, 25 bp, Homo sapien
cgaaggcctcgcaccgcttctggta

SEQ ID NO: 4292959 - DNA, 25 bp, Homo sapien
ttctggtagatgtccatctggtgct

SEQ ID NO: 4292960 - DNA, 25 bp, Homo sapien
tctggtagatgtccatctggtgctg

SEQ ID NO: 4292961 - DNA, 25 bp, Homo sapien
gttgtccagcttatagatgctggcg

SEQ ID NO: 4292962 - DNA, 25 bp, Homo sapien
tccagcttatagatgctggcgaagg

SEQ ID NO: 4292963 - DNA, 25 bp, Homo sapien
gcttatagatgctggcgaaggccat

SEQ ID NO: 4292964 - DNA, 25 bp, Homo sapien
caaggttgtccagcttatagatgct

SEQ ID NO: 4292965 - DNA, 25 bp, Homo sapien
ccatacagagccctctgacagctcc

SEQ ID NO: 4292966 - DNA, 25 bp, Homo sapien
ctcccatacagagccctctgacagc

SEQ ID NO: 4292967 - DNA, 25 bp, Homo sapien
acagagccctctgacagctccccgt

SEQ ID NO: 4292968 - DNA, 25 bp, Homo sapien
atacagagccctctgacagctcccc

SEQ ID NO: 4292969 - DNA, 25 bp, Homo sapien
tcccagcaagcaatagactcggtag

SEQ ID NO: 4292970 - DNA, 25 bp, Homo sapien
ctcccagcaagcaatagactcggta

SEQ ID NO: 4292971 - DNA, 25 bp, Homo sapien
tctgggtaaaggagcagccacgcat

SEQ ID NO: 4292972 - DNA, 25 bp, Homo sapien
cagaccccgctgtgaaccagaggtt

SEQ ID NO: 4292973 - DNA, 25 bp, Homo sapien
cgcatggatatgcagaacagatggc

SEQ ID NO: 4292974 - DNA, 25 bp, Homo sapien
cagaggtctaggacaacagggatct

SEQ ID NO: 4292975 - DNA, 25 bp, Homo sapien
ccagggagccagtggccacgtcggt

SEQ ID NO: 4292976 - DNA, 25 bp, Homo sapien
tggcccagggagccagtggccacgt

SEQ ID NO: 4292977 - DNA, 25 bp, Homo sapien
cagggagccagtggccacgtcggtg

SEQ ID NO: 4292978 - DNA, 25 bp, Homo sapien
gcccagggagccagtggccacgtcg

SEQ ID NO: 4292979 - DNA, 25 bp, Homo sapien
ctgtcataacagaaggccaccgtta

SEQ ID NO: 4292980 - DNA, 25 bp, Homo sapien
tgtcataacagaaggccaccgttaa

SEQ ID NO: 4292981 - DNA, 25 bp, Homo sapien
gtcataacagaaggccaccgttaat

SEQ ID NO: 4292982 - DNA, 25 bp, Homo sapien
agcccagaccgcgtagaggatggga

SEQ ID NO: 4292983 - DNA, 25 bp, Homo sapien
cagcttcagcccagaccgcgtagag

SEQ ID NO: 4292984 - DNA, 25 bp, Homo sapien
tcagcccagaccgcgtagaggatgg

SEQ ID NO: 4292985 - DNA, 25 bp, Homo sapien
cttcagcccagaccgcgtagaggat

SEQ ID NO: 4292986 - DNA, 25 bp, Homo sapien
gagcacaaagcggtcattgtgcgga

SEQ ID NO: 4292987 - DNA, 25 bp, Homo sapien
gcacaaagcggtcattgtgcggatt

SEQ ID NO: 4292988 - DNA, 25 bp, Homo sapien
acaaagcggtcattgtgcggattcc

SEQ ID NO: 4292989 - DNA, 25 bp, Homo sapien
aaagcggtcattgtgcggattccgg

SEQ ID NO: 4292990 - DNA, 25 bp, Homo sapien
gccatgatctctgcggcgctgcagc

SEQ ID NO: 4292991 - DNA, 25 bp, Homo sapien
ctctgcggcgctgcagcatgacgtg

SEQ ID NO: 4292992 - DNA, 25 bp, Homo sapien
gaggacagccatgatctctgcggcg

SEQ ID NO: 4292993 - DNA, 25 bp, Homo sapien
atctctgcggcgctgcagcatgacg

SEQ ID NO: 4292994 - DNA, 25 bp, Homo sapien
tcagaatcacggcaactgaaaatat

SEQ ID NO: 4292995 - DNA, 25 bp, Homo sapien
ctcagaatcacggcaactgaaaata

SEQ ID NO: 4292996 - DNA, 25 bp, Homo sapien
ggcatcagatcctcagaatcacggc

SEQ ID NO: 4292997 - DNA, 25 bp, Homo sapien
aggggcatcagatcctcagaatcac

SEQ ID NO: 4292998 - DNA, 25 bp, Homo sapien
cccggtcatgggaaaagacactaca

SEQ ID NO: 4292999 - DNA, 25 bp, Homo sapien
actatttctatgaactcccggtcat

SEQ ID NO: 4293000 - DNA, 25 bp, Homo sapien
cacacgatcatcttatacttaacta

SEQ ID NO: 4293001 - DNA, 25 bp, Homo sapien
caacattctcgcacacgatcatctt

SEQ ID NO: 4293002 - DNA, 25 bp, Homo sapien
tgaggggtcctgtttctaaagccat

SEQ ID NO: 4293003 - DNA, 25 bp, Homo sapien
tctcgtccttcccacctccaagggc

SEQ ID NO: 4293004 - DNA, 25 bp, Homo sapien
cagccccggccctgaggggtcctgt

SEQ ID NO: 4293005 - DNA, 25 bp, Homo sapien
cacctccaagggcagccccggccct

SEQ ID NO: 4293006 - DNA, 25 bp, Homo sapien
atgtactagttcttaatcctgggag

SEQ ID NO: 4293007 - DNA, 25 bp, Homo sapien
tggagggacccactgtagttccaaa

SEQ ID NO: 4293008 - DNA, 25 bp, Homo sapien
tgggagcagctacacacaggttcat

SEQ ID NO: 4293009 - DNA, 25 bp, Homo sapien
cattatttatgacaagagtacatca

SEQ ID NO: 4293010 - DNA, 25 bp, Homo sapien
taggtgctgtacttcacttccagtt

SEQ ID NO: 4293011 - DNA, 25 bp, Homo sapien
tgtacttcacttccagtttcttaaa

SEQ ID NO: 4293012 - DNA, 25 bp, Homo sapien
ggtgctgtacttcacttccagtttc

SEQ ID NO: 4293013 - DNA, 25 bp, Homo sapien
ctaggtgctgtacttcacttccagt

SEQ ID NO: 4293014 - DNA, 25 bp, Homo sapien
tcctgaatgaaattggccagaagcc

SEQ ID NO: 4293015 - DNA, 25 bp, Homo sapien
gaacagggtgtcttagaggcacaaa

SEQ ID NO: 4293016 - DNA, 25 bp, Homo sapien
tgaatgcgtatccacccagaaaggt

SEQ ID NO: 4293017 - DNA, 25 bp, Homo sapien
gagagctaacaggtccaaagtgtgc

SEQ ID NO: 4293018 - DNA, 25 bp, Homo sapien
tcaccctagagggtacttggcgagt

SEQ ID NO: 4293019 - DNA, 25 bp, Homo sapien
ccctagagggtacttggcgagtcgc

SEQ ID NO: 4293020 - DNA, 25 bp, Homo sapien
ccgcgccaccatgcagctgcgcggc

SEQ ID NO: 4293021 - DNA, 25 bp, Homo sapien
gtacttggcgagtcgcgagcccatc

SEQ ID NO: 4293022 - DNA, 25 bp, Homo sapien
gcggttggccgtgtccttcaaggcc

SEQ ID NO: 4293023 - DNA, 25 bp, Homo sapien
ctggatggagctgatacgtaggcgg

SEQ ID NO: 4293024 - DNA, 25 bp, Homo sapien
agcttctgctggtcaggcttgtggt

SEQ ID NO: 4293025 - DNA, 25 bp, Homo sapien
ggtcaggcttgtggtagctctccat

SEQ ID NO: 4293026 - DNA, 25 bp, Homo sapien
acacacagagatagcggctgctccc

SEQ ID NO: 4293027 - DNA, 25 bp, Homo sapien
tcccgcggcgacaggcggctgccga

SEQ ID NO: 4293028 - DNA, 25 bp, Homo sapien
cacacagagatagcggctgctcccg

SEQ ID NO: 4293029 - DNA, 25 bp, Homo sapien
cgacaggcggctgccgaggccgggc

SEQ ID NO: 4293030 - DNA, 25 bp, Homo sapien
tgtttcattcaatctgcccaccaca

SEQ ID NO: 4293031 - DNA, 25 bp, Homo sapien
ggactttcatcacagacactgtttc

SEQ ID NO: 4293032 - DNA, 25 bp, Homo sapien
gacactgtttcattcaatctgccca

SEQ ID NO: 4293033 - DNA, 25 bp, Homo sapien
tcacagacactgtttcattcaatct

SEQ ID NO: 4293034 - DNA, 25 bp, Homo sapien
aggtaatatgccgacattgtagcaa

SEQ ID NO: 4293035 - DNA, 25 bp, Homo sapien
ttgtagcaatgtttcaggatggccc

SEQ ID NO: 4293036 - DNA, 25 bp, Homo sapien
ctgtgtgtgaacacctaatccttat

SEQ ID NO: 4293037 - DNA, 25 bp, Homo sapien
tgtgtgaacacctaatccttatgct

SEQ ID NO: 4293038 - DNA, 25 bp, Homo sapien
aaatgttaatgatacagtattgcgc

SEQ ID NO: 4293039 - DNA, 25 bp, Homo sapien
gatgctataaaatccataccattaa

SEQ ID NO: 4293040 - DNA, 25 bp, Homo sapien
catacacagatgctataaaatccat

SEQ ID NO: 4293041 - DNA, 25 bp, Homo sapien
aaaatttaagatgaaaaacgctcat

SEQ ID NO: 4293042 - DNA, 25 bp, Homo sapien
ttccagagcttctcgtccccatgtt

SEQ ID NO: 4293043 - DNA, 25 bp, Homo sapien
cagagcttctcgtccccatgtttca

SEQ ID NO: 4293044 - DNA, 25 bp, Homo sapien
tccagagcttctcgtccccatgttt

SEQ ID NO: 4293045 - DNA, 25 bp, Homo sapien
ccagagcttctcgtccccatgtttc

SEQ ID NO: 4293046 - DNA, 25 bp, Homo sapien
gaagatacactgaacgcaactgaag

SEQ ID NO: 4293047 - DNA, 25 bp, Homo sapien
cacagggcactattggttccagaag

SEQ ID NO: 4293048 - DNA, 25 bp, Homo sapien
gggaatcactgcacacatctgttga

SEQ ID NO: 4293049 - DNA, 25 bp, Homo sapien
tgtcaaatacaaaacggagggaatc

SEQ ID NO: 4293050 - DNA, 25 bp, Homo sapien
caggaggtacacaatgaagaagagc

SEQ ID NO: 4293051 - DNA, 25 bp, Homo sapien
tgcaggatgcgcaccctaggattcc

SEQ ID NO: 4293052 - DNA, 25 bp, Homo sapien
tacaatggcagttagggcctctact

SEQ ID NO: 4293053 - DNA, 25 bp, Homo sapien
tgcagcaaacgtgcagccaggatgc

SEQ ID NO: 4293054 - DNA, 25 bp, Homo sapien
tcctccaagctctgggctgctcctc

SEQ ID NO: 4293055 - DNA, 25 bp, Homo sapien
gctcctcttggagtctacacttaga

SEQ ID NO: 4293056 - DNA, 25 bp, Homo sapien
ctgctcctcttggagtctacactta

SEQ ID NO: 4293057 - DNA, 25 bp, Homo sapien
tcctcttggagtctacacttagacc

SEQ ID NO: 4293058 - DNA, 25 bp, Homo sapien
cactttatggaagtcacgtggctcc

SEQ ID NO: 4293059 - DNA, 25 bp, Homo sapien
caactgaactgtgactttcgggcca

SEQ ID NO: 4293060 - DNA, 25 bp, Homo sapien
tttgggccgggaaagtactcacagc

SEQ ID NO: 4293061 - DNA, 25 bp, Homo sapien
taagggcagtgtgaataacagctcc

SEQ ID NO: 4293062 - DNA, 25 bp, Homo sapien
cataggctcaatttcaggattctca

SEQ ID NO: 4293063 - DNA, 25 bp, Homo sapien
gggctctgcctttagacttattctg

SEQ ID NO: 4293064 - DNA, 25 bp, Homo sapien
gaaatgagtctctttctcataggct

SEQ ID NO: 4293065 - DNA, 25 bp, Homo sapien
gctggtgatgcttcacagtgaaacc

SEQ ID NO: 4293066 - DNA, 25 bp, Homo sapien
gtcagaacctgcaagtagacttcat

SEQ ID NO: 4293067 - DNA, 25 bp, Homo sapien
gaacctgcaagtagacttcatgaag

SEQ ID NO: 4293068 - DNA, 25 bp, Homo sapien
cagaacctgcaagtagacttcatga

SEQ ID NO: 4293069 - DNA, 25 bp, Homo sapien
aacctgcaagtagacttcatgaagt

SEQ ID NO: 4293070 - DNA, 25 bp, Homo sapien
caccacccagagacaatcatgatta

SEQ ID NO: 4293071 - DNA, 25 bp, Homo sapien
gatttgtataactgataatcccacc

SEQ ID NO: 4293072 - DNA, 25 bp, Homo sapien
cgaatgccacatttacctcatcaga

SEQ ID NO: 4293073 - DNA, 25 bp, Homo sapien
taaaggttaaggatacgaatgccac

SEQ ID NO: 4293074 - DNA, 25 bp, Homo sapien
tatgaactgattctgtaagaggaat

SEQ ID NO: 4293075 - DNA, 25 bp, Homo sapien
ctggcctccagctagtcttttgaat

SEQ ID NO: 4293076 - DNA, 25 bp, Homo sapien
gaactgattctgtaagaggaattta

SEQ ID NO: 4293077 - DNA, 25 bp, Homo sapien
cctggcctccagctagtcttttgaa

SEQ ID NO: 4293078 - DNA, 25 bp, Homo sapien
ttctggcgttccaatagttagagga

SEQ ID NO: 4293079 - DNA, 25 bp, Homo sapien
gactttctggcgttccaatagttag

SEQ ID NO: 4293080 - DNA, 25 bp, Homo sapien
cgttccaatagttagaggagaaggg

SEQ ID NO: 4293081 - DNA, 25 bp, Homo sapien
tattaatgtatcctggagctgagac

SEQ ID NO: 4293082 - DNA, 25 bp, Homo sapien
aaggtccgaagatcttgtaactgtc

SEQ ID NO: 4293083 - DNA, 25 bp, Homo sapien
tcaaggtccgaagatcttgtaactg

SEQ ID NO: 4293084 - DNA, 25 bp, Homo sapien
caaggtccgaagatcttgtaactgt

SEQ ID NO: 4293085 - DNA, 25 bp, Homo sapien
ggtccgaagatcttgtaactgtctg

SEQ ID NO: 4293086 - DNA, 25 bp, Homo sapien
aagacactgcagtggtcgttgcagt

SEQ ID NO: 4293087 - DNA, 25 bp, Homo sapien
tgcagtggtcgttgcagtaaccagt

SEQ ID NO: 4293088 - DNA, 25 bp, Homo sapien
cagtggtcgttgcagtaaccagtgg

SEQ ID NO: 4293089 - DNA, 25 bp, Homo sapien
cactgcagtggtcgttgcagtaacc

SEQ ID NO: 4293090 - DNA, 25 bp, Homo sapien
ccacagtaggtaagagaagtaacag

SEQ ID NO: 4293091 - DNA, 25 bp, Homo sapien
cctagaatcattacgggaagccaag

SEQ ID NO: 4293092 - DNA, 25 bp, Homo sapien
tttgtaccgaagtgcagaagccagt

SEQ ID NO: 4293093 - DNA, 25 bp, Homo sapien
tccattagctaaaggatgaccagcc

SEQ ID NO: 4293094 - DNA, 25 bp, Homo sapien
aaaagaggctcgtttccaagaccag

SEQ ID NO: 4293095 - DNA, 25 bp, Homo sapien
gaagatatccatgcagacgcctcga

SEQ ID NO: 4293096 - DNA, 25 bp, Homo sapien
catctaagatgtgctgggctccata

SEQ ID NO: 4293097 - DNA, 25 bp, Homo sapien
agagcgggccacagtttcaacggta

SEQ ID NO: 4293098 - DNA, 25 bp, Homo sapien
tgcacaaatacttcaggatcctggt

SEQ ID NO: 4293099 - DNA, 25 bp, Homo sapien
tggataacaccttaggctgcacaaa

SEQ ID NO: 4293100 - DNA, 25 bp, Homo sapien
ccttaggctgcacaaatacttcagg

SEQ ID NO: 4293101 - DNA, 25 bp, Homo sapien
tggcactggataacaccttaggctg

SEQ ID NO: 4293102 - DNA, 25 bp, Homo sapien
cactctaggagactgccgtgggaga

SEQ ID NO: 4293103 - DNA, 25 bp, Homo sapien
tatggcacctctagggtacttggca

SEQ ID NO: 4293104 - DNA, 25 bp, Homo sapien
tcagtcaaatgaggactcctggaac

SEQ ID NO: 4293105 - DNA, 25 bp, Homo sapien
gagatctaggcagcatggcacctct

SEQ ID NO: 4293106 - DNA, 25 bp, Homo sapien
tctggagaagatcaacgcttgggag

SEQ ID NO: 4293107 - DNA, 25 bp, Homo sapien
gaacctgtgcagtaggagcttcagc

SEQ ID NO: 4293108 - DNA, 25 bp, Homo sapien
gcatcatggtgctgtttcgaggtaa

SEQ ID NO: 4293109 - DNA, 25 bp, Homo sapien
gagaaaagctggctaccattgcacc

SEQ ID NO: 4293110 - DNA, 25 bp, Homo sapien
cagaagccaaagattttgcagaatc

SEQ ID NO: 4293111 - DNA, 25 bp, Homo sapien
tataaatcagcataaccaaacttct

SEQ ID NO: 4293112 - DNA, 25 bp, Homo sapien
cccagtcaaagaggtctgttataaa

SEQ ID NO: 4293113 - DNA, 25 bp, Homo sapien
ttccagaagccaaagattttgcaga

SEQ ID NO: 4293114 - DNA, 25 bp, Homo sapien
tctgaaaagcgaggacattgtgaca

SEQ ID NO: 4293115 - DNA, 25 bp, Homo sapien
ctcaatataatgtctggtgcccaaa

SEQ ID NO: 4293116 - DNA, 25 bp, Homo sapien
cattgtgacaatgatctcagaacac

SEQ ID NO: 4293117 - DNA, 25 bp, Homo sapien
tcttaatagcaagcatggagtacca

SEQ ID NO: 4293118 - DNA, 25 bp, Homo sapien
gaatcatcaaggacacagctgtctg

SEQ ID NO: 4293119 - DNA, 25 bp, Homo sapien
catagctgcagacatgttcacaggt

SEQ ID NO: 4293120 - DNA, 25 bp, Homo sapien
ggctaggctattataaacctcctgg

SEQ ID NO: 4293121 - DNA, 25 bp, Homo sapien
tggtcactcccaatgcaaagaatca

SEQ ID NO: 4293122 - DNA, 25 bp, Homo sapien
tctagctagtgcaaatactgctgct

SEQ ID NO: 4293123 - DNA, 25 bp, Homo sapien
tccgtgttccaacatgtatcagaac

SEQ ID NO: 4293124 - DNA, 25 bp, Homo sapien
tgctgctataaagactggtgtggaa

SEQ ID NO: 4293125 - DNA, 25 bp, Homo sapien
ggccgaataatgttccaatgcatgt

SEQ ID NO: 4293126 - DNA, 25 bp, Homo sapien
gatcagattgggtctatgttgcaga

SEQ ID NO: 4293127 - DNA, 25 bp, Homo sapien
tctactttaagtcaggcagagtgcc

SEQ ID NO: 4293128 - DNA, 25 bp, Homo sapien
caggcctaggcggaagcattgcttg

SEQ ID NO: 4293129 - DNA, 25 bp, Homo sapien
tgaggcataatccagacagcaattt

SEQ ID NO: 4293130 - DNA, 25 bp, Homo sapien
catatggtagaaccctgacccctga

SEQ ID NO: 4293131 - DNA, 25 bp, Homo sapien
tataactactgcgaggccagacaga

SEQ ID NO: 4293132 - DNA, 25 bp, Homo sapien
taagcagtgtgccaccatatggaga

SEQ ID NO: 4293133 - DNA, 25 bp, Homo sapien
ctccggaaaacaggtacagctaagg

SEQ ID NO: 4293134 - DNA, 25 bp, Homo sapien
cacactcctggatgatgatcctaaa

SEQ ID NO: 4293135 - DNA, 25 bp, Homo sapien
aaggggaagtagtaagcccactgca

SEQ ID NO: 4293136 - DNA, 25 bp, Homo sapien
ttcttccttagggtctcacaacaaa

SEQ ID NO: 4293137 - DNA, 25 bp, Homo sapien
caacaaatctgcattaggcggtaca

SEQ ID NO: 4293138 - DNA, 25 bp, Homo sapien
ttatgaaagggcaaaacatcttggg

SEQ ID NO: 4293139 - DNA, 25 bp, Homo sapien
tgaacaaggctcataaaactgccct

SEQ ID NO: 4293140 - DNA, 25 bp, Homo sapien
taatgggtacataggatctttctgc

SEQ ID NO: 4293141 - DNA, 25 bp, Homo sapien
caatgggcaaatgggtaatgggtac

SEQ ID NO: 4293142 - DNA, 25 bp, Homo sapien
agatatttgagtcacccatctgatt

SEQ ID NO: 4293143 - DNA, 25 bp, Homo sapien
cttatcctgtgacccggagggcatt

SEQ ID NO: 4293144 - DNA, 25 bp, Homo sapien
agagctgagtgcttggctgtaaccc

SEQ ID NO: 4293145 - DNA, 25 bp, Homo sapien
gagtctcggtgcttcccagattgga

SEQ ID NO: 4293146 - DNA, 25 bp, Homo sapien
ccagcctggattttagtggcttgat

SEQ ID NO: 4293147 - DNA, 25 bp, Homo sapien
tgggactctgtttgtcccgagcagc

SEQ ID NO: 4293148 - DNA, 25 bp, Homo sapien
gcagcttgctgggatcgccgtgtct

SEQ ID NO: 4293149 - DNA, 25 bp, Homo sapien
tgtggtcgctgcagccattggcctg

SEQ ID NO: 4293150 - DNA, 25 bp, Homo sapien
ccaggatgtcgatgggcctgtggtc

SEQ ID NO: 4293151 - DNA, 25 bp, Homo sapien
gggcatttctggtgaaagaagcccc

SEQ ID NO: 4293152 - DNA, 25 bp, Homo sapien
cttgctatatcaggccaggatggtc

SEQ ID NO: 4293153 - DNA, 25 bp, Homo sapien
ggataaccatgaatcaacaaccctg

SEQ ID NO: 4293154 - DNA, 25 bp, Homo sapien
ggtaaccacaagtaagctgcctttg

SEQ ID NO: 4293155 - DNA, 25 bp, Homo sapien
gctatgcggtgacagtcattcttgt

SEQ ID NO: 4293156 - DNA, 25 bp, Homo sapien
catgagttttgctatgcggtgacag

SEQ ID NO: 4293157 - DNA, 25 bp, Homo sapien
gagttttgctatgcggtgacagtca

SEQ ID NO: 4293158 - DNA, 25 bp, Homo sapien
tttgctatgcggtgacagtcattct

SEQ ID NO: 4293159 - DNA, 25 bp, Homo sapien
agtccaggctcactagtctctgagc

SEQ ID NO: 4293160 - DNA, 25 bp, Homo sapien
gaagtccaggctcactagtctctga

SEQ ID NO: 4293161 - DNA, 25 bp, Homo sapien
aagtccaggctcactagtctctgag

SEQ ID NO: 4293162 - DNA, 25 bp, Homo sapien
tactgttctgagacttgcccttgaa

SEQ ID NO: 4293163 - DNA, 25 bp, Homo sapien
tctactgttctgagacttgcccttg

SEQ ID NO: 4293164 - DNA, 25 bp, Homo sapien
catctctactgttctgagacttgcc

SEQ ID NO: 4293165 - DNA, 25 bp, Homo sapien
ctctactgttctgagacttgccctt

SEQ ID NO: 4293166 - DNA, 25 bp, Homo sapien
actttatcataacttaatgtcagta

SEQ ID NO: 4293167 - DNA, 25 bp, Homo sapien
ctttatcataacttaatgtcagtag

SEQ ID NO: 4293168 - DNA, 25 bp, Homo sapien
agactttatcataacttaatgtcag

SEQ ID NO: 4293169 - DNA, 25 bp, Homo sapien
gactttatcataacttaatgtcagt

SEQ ID NO: 4293170 - DNA, 25 bp, Homo sapien
tgcctcccgaatttaggcaattctc

SEQ ID NO: 4293171 - DNA, 25 bp, Homo sapien
ctcccgaatttaggcaattctctgc

SEQ ID NO: 4293172 - DNA, 25 bp, Homo sapien
gcctcccgaatttaggcaattctct

SEQ ID NO: 4293173 - DNA, 25 bp, Homo sapien
tctgcctcccgaatttaggcaattc

SEQ ID NO: 4293174 - DNA, 25 bp, Homo sapien
gagcagattcctaaacagctctgag

SEQ ID NO: 4293175 - DNA, 25 bp, Homo sapien
gattcctaaacagctctgagcctct

SEQ ID NO: 4293176 - DNA, 25 bp, Homo sapien
gaatctcgagcagattcctaaacag

SEQ ID NO: 4293177 - DNA, 25 bp, Homo sapien
ctttgcgaatctcgagcagattcct

SEQ ID NO: 4293178 - DNA, 25 bp, Homo sapien
tggaaagaattatctgtatctgttc

SEQ ID NO: 4293179 - DNA, 25 bp, Homo sapien
ttctttgtggaaagaattatctgta

SEQ ID NO: 4293180 - DNA, 25 bp, Homo sapien
tttgtggaaagaattatctgtatct

SEQ ID NO: 4293181 - DNA, 25 bp, Homo sapien
tgtggaaagaattatctgtatctgt

SEQ ID NO: 4293182 - DNA, 25 bp, Homo sapien
ttagggacatgggcagctgatagtc

SEQ ID NO: 4293183 - DNA, 25 bp, Homo sapien
gacatgggcagctgatagtccacag

SEQ ID NO: 4293184 - DNA, 25 bp, Homo sapien
gggacatgggcagctgatagtccac

SEQ ID NO: 4293185 - DNA, 25 bp, Homo sapien
tagggacatgggcagctgatagtcc

SEQ ID NO: 4293186 - DNA, 25 bp, Homo sapien
caaatctttattcactggttcaact

SEQ ID NO: 4293187 - DNA, 25 bp, Homo sapien
tggttcaactagattgtgcatattt

SEQ ID NO: 4293188 - DNA, 25 bp, Homo sapien
catatttagtcgattcacaatggta

SEQ ID NO: 4293189 - DNA, 25 bp, Homo sapien
tcgattcacaatggtaaaaccatgg

SEQ ID NO: 4293190 - DNA, 25 bp, Homo sapien
cttcgatatacgaataaggtccctt

SEQ ID NO: 4293191 - DNA, 25 bp, Homo sapien
gaataaggtcccttctatatcagtc

SEQ ID NO: 4293192 - DNA, 25 bp, Homo sapien
cgatatacgaataaggtcccttcta

SEQ ID NO: 4293193 - DNA, 25 bp, Homo sapien
aggtcccttctatatcagtcttctc

SEQ ID NO: 4293194 - DNA, 25 bp, Homo sapien
tggggcagaaggtgtacagagcgac

SEQ ID NO: 4293195 - DNA, 25 bp, Homo sapien
cttggggcagaaggtgtacagagcg

SEQ ID NO: 4293196 - DNA, 25 bp, Homo sapien
ttggccttggggcagaaggtgtaca

SEQ ID NO: 4293197 - DNA, 25 bp, Homo sapien
ccactggttggccttggggcagaag

SEQ ID NO: 4293198 - DNA, 25 bp, Homo sapien
gggtcgtgttgcttcagggccgcta

SEQ ID NO: 4293199 - DNA, 25 bp, Homo sapien
cgtgttgcttcagggccgctaggct

SEQ ID NO: 4293200 - DNA, 25 bp, Homo sapien
tgaggtctgcgatgctggtgatata

SEQ ID NO: 4293201 - DNA, 25 bp, Homo sapien
ctggcccgtgaggtctgcgatgctg

SEQ ID NO: 4293202 - DNA, 25 bp, Homo sapien
ctcctgcccagctcgactcagcgcc

SEQ ID NO: 4293203 - DNA, 25 bp, Homo sapien
gcccagctcgactcagcgcctccat

SEQ ID NO: 4293204 - DNA, 25 bp, Homo sapien
tcctgcccagctcgactcagcgcct

SEQ ID NO: 4293205 - DNA, 25 bp, Homo sapien
ctgcccagctcgactcagcgcctcc

SEQ ID NO: 4293206 - DNA, 25 bp, Homo sapien
aagtgccatcgaggcaaaattcccc

SEQ ID NO: 4293207 - DNA, 25 bp, Homo sapien
cggagtcgcggacaggaaagtgcca

SEQ ID NO: 4293208 - DNA, 25 bp, Homo sapien
ggcggagtcgcggacaggaaagtgc

SEQ ID NO: 4293209 - DNA, 25 bp, Homo sapien
ggaaagtgccatcgaggcaaaattc

SEQ ID NO: 4293210 - DNA, 25 bp, Homo sapien
catttgcgctggttttatggtgtct

SEQ ID NO: 4293211 - DNA, 25 bp, Homo sapien
gcacccagggtttgccagttcccat

SEQ ID NO: 4293212 - DNA, 25 bp, Homo sapien
tgttcatgatctaaaggcacccagg

SEQ ID NO: 4293213 - DNA, 25 bp, Homo sapien
cacgcaggcccaattcataaacatg

SEQ ID NO: 4293214 - DNA, 25 bp, Homo sapien
aattatttcacactagcccactggc

SEQ ID NO: 4293215 - DNA, 25 bp, Homo sapien
actttttcagttagtcgcaggcttt

SEQ ID NO: 4293216 - DNA, 25 bp, Homo sapien
cagttagtcgcaggctttccatttc

SEQ ID NO: 4293217 - DNA, 25 bp, Homo sapien
ctcttaattatttcacactagccca

SEQ ID NO: 4293218 - DNA, 25 bp, Homo sapien
tggcaaagacgaagatttacaaacc

SEQ ID NO: 4293219 - DNA, 25 bp, Homo sapien
gaaacaatgatctgggacggaaatg

SEQ ID NO: 4293220 - DNA, 25 bp, Homo sapien
tgtgtcctcctaagctgctccatgc

SEQ ID NO: 4293221 - DNA, 25 bp, Homo sapien
tacattgctcaagaacactagaaga

SEQ ID NO: 4293222 - DNA, 25 bp, Homo sapien
tgagtgagcaaagcgaactgctgac

SEQ ID NO: 4293223 - DNA, 25 bp, Homo sapien
aagcgaactgctgactgtgtgacct

SEQ ID NO: 4293224 - DNA, 25 bp, Homo sapien
tttataggactgagtgagcaaagcg

SEQ ID NO: 4293225 - DNA, 25 bp, Homo sapien
tgtgtgacctcaagatgtggccatg

SEQ ID NO: 4293226 - DNA, 25 bp, Homo sapien
gactcatggtggtctagagggccat

SEQ ID NO: 4293227 - DNA, 25 bp, Homo sapien
ctttaactcaatccgggacagggca

SEQ ID NO: 4293228 - DNA, 25 bp, Homo sapien
caatcttgggcctacagttccagga

SEQ ID NO: 4293229 - DNA, 25 bp, Homo sapien
tgttcttcctcacgactcatctggg

SEQ ID NO: 4293230 - DNA, 25 bp, Homo sapien
tcggtgtagatgtcctttctggttg

SEQ ID NO: 4293231 - DNA, 25 bp, Homo sapien
ttttcggtgtagatgtcctttctgg

SEQ ID NO: 4293232 - DNA, 25 bp, Homo sapien
gtctgttggaataccctgccgtgtg

SEQ ID NO: 4293233 - DNA, 25 bp, Homo sapien
tctgttggaataccctgccgtgtga

SEQ ID NO: 4293234 - DNA, 25 bp, Homo sapien
gagaaggtcttagaggtgagaacat

SEQ ID NO: 4293235 - DNA, 25 bp, Homo sapien
tgttacggttactatcttctgtccc

SEQ ID NO: 4293236 - DNA, 25 bp, Homo sapien
tcttcgccttgtcattaaatagtgc

SEQ ID NO: 4293237 - DNA, 25 bp, Homo sapien
taggcagctgactaaactcttgttc

SEQ ID NO: 4293238 - DNA, 25 bp, Homo sapien
caaatgatattgtcagctgtggagt

SEQ ID NO: 4293239 - DNA, 25 bp, Homo sapien
actacaaatgatattgtcagctgtg

SEQ ID NO: 4293240 - DNA, 25 bp, Homo sapien
tattgtcagctgtggagtgacaaag

SEQ ID NO: 4293241 - DNA, 25 bp, Homo sapien
tgatattgtcagctgtggagtgaca

SEQ ID NO: 4293242 - DNA, 25 bp, Homo sapien
tcccagtcagtcctgatctctctca

SEQ ID NO: 4293243 - DNA, 25 bp, Homo sapien
gtcagtcctgatctctctcaccacc

SEQ ID NO: 4293244 - DNA, 25 bp, Homo sapien
cagtcagtcctgatctctctcacca

SEQ ID NO: 4293245 - DNA, 25 bp, Homo sapien
ccagtcagtcctgatctctctcacc

SEQ ID NO: 4293246 - DNA, 25 bp, Homo sapien
ggcacgtagttttgtaccttgtcat

SEQ ID NO: 4293247 - DNA, 25 bp, Homo sapien
tccaggctctcatggcacgtagttt

SEQ ID NO: 4293248 - DNA, 25 bp, Homo sapien
tctctagcagaggatagtacacggt

SEQ ID NO: 4293249 - DNA, 25 bp, Homo sapien
gtcatttccactgctagattgcagg

SEQ ID NO: 4293250 - DNA, 25 bp, Homo sapien
cagtgtatctgtgcctttctatgta

SEQ ID NO: 4293251 - DNA, 25 bp, Homo sapien
tttgcctgtgttatatttatgactg

SEQ ID NO: 4293252 - DNA, 25 bp, Homo sapien
tttctcaaaacggattttgcctgtg

SEQ ID NO: 4293253 - DNA, 25 bp, Homo sapien
gttgttgtggtaatgagggtcttct

SEQ ID NO: 4293254 - DNA, 25 bp, Homo sapien
caaattaaaagtacatctacactca

SEQ ID NO: 4293255 - DNA, 25 bp, Homo sapien
aaattaaaagtacatctacactcat

SEQ ID NO: 4293256 - DNA, 25 bp, Homo sapien
attaaaagtacatctacactcatat

SEQ ID NO: 4293257 - DNA, 25 bp, Homo sapien
aattaaaagtacatctacactcata

SEQ ID NO: 4293258 - DNA, 25 bp, Homo sapien
tagcagagcttttcacgttcttctt

SEQ ID NO: 4293259 - DNA, 25 bp, Homo sapien
tttttagcagagcttttcacgttct

SEQ ID NO: 4293260 - DNA, 25 bp, Homo sapien
tttagcagagcttttcacgttcttc

SEQ ID NO: 4293261 - DNA, 25 bp, Homo sapien
gcagagcttttcacgttcttcttga

SEQ ID NO: 4293262 - DNA, 25 bp, Homo sapien
ctgaataaagcagggtaatctttgc

SEQ ID NO: 4293263 - DNA, 25 bp, Homo sapien
aagcagggtaatctttgccattttt

SEQ ID NO: 4293264 - DNA, 25 bp, Homo sapien
taaagcagggtaatctttgccattt

SEQ ID NO: 4293265 - DNA, 25 bp, Homo sapien
aataaagcagggtaatctttgccat

SEQ ID NO: 4293266 - DNA, 25 bp, Homo sapien
atcttcaccagcagttgtggcatct

SEQ ID NO: 4293267 - DNA, 25 bp, Homo sapien
ggtgtaaatgactcgagctctgtgt

SEQ ID NO: 4293268 - DNA, 25 bp, Homo sapien
taaatgactcgagctctgtgttttg

SEQ ID NO: 4293269 - DNA, 25 bp, Homo sapien
gtggcatctccacttttggtatttc

SEQ ID NO: 4293270 - DNA, 25 bp, Homo sapien
tggggttataaacctatagctggaa

SEQ ID NO: 4293271 - DNA, 25 bp, Homo sapien
ctggggttataaacctatagctgga

SEQ ID NO: 4293272 - DNA, 25 bp, Homo sapien
tctttcctcttgttgtcctcggatg

SEQ ID NO: 4293273 - DNA, 25 bp, Homo sapien
tttcctcttgttgtcctcggatggc

SEQ ID NO: 4293274 - DNA, 25 bp, Homo sapien
ttcctcttgttgtcctcggatggca

SEQ ID NO: 4293275 - DNA, 25 bp, Homo sapien
tcctcttgttgtcctcggatggcat

SEQ ID NO: 4293276 - DNA, 25 bp, Homo sapien
agcagcggcaatcgctgcagccttg

SEQ ID NO: 4293277 - DNA, 25 bp, Homo sapien
cagagcagcggcaatcgctgcagcc

SEQ ID NO: 4293278 - DNA, 25 bp, Homo sapien
tgcagagcagcggcaatcgctgcag

SEQ ID NO: 4293279 - DNA, 25 bp, Homo sapien
gagcagcggcaatcgctgcagcctt

SEQ ID NO: 4293280 - DNA, 25 bp, Homo sapien
ggaggtaaacagtggcagcaaattg

SEQ ID NO: 4293281 - DNA, 25 bp, Homo sapien
gaacctgcttgaatgatgggagcct

SEQ ID NO: 4293282 - DNA, 25 bp, Homo sapien
catggctgacaatgttgcccatctg

SEQ ID NO: 4293283 - DNA, 25 bp, Homo sapien
ctgtgaagtcattaagctcttgtgc

SEQ ID NO: 4293284 - DNA, 25 bp, Homo sapien
tgagaggctgactttttgtccatta

SEQ ID NO: 4293285 - DNA, 25 bp, Homo sapien
gaaacacctggcagagttcgtcttt

SEQ ID NO: 4293286 - DNA, 25 bp, Homo sapien
cccaggaaacacctggcagagttcg

SEQ ID NO: 4293287 - DNA, 25 bp, Homo sapien
cattagtaatgacatcccaggaaac

SEQ ID NO: 4293288 - DNA, 25 bp, Homo sapien
gatccaggagtagatgttagcatcc

SEQ ID NO: 4293289 - DNA, 25 bp, Homo sapien
tccccaccatgcagctacaggatgt

SEQ ID NO: 4293290 - DNA, 25 bp, Homo sapien
tgagattggtattctcccagctggg

SEQ ID NO: 4293291 - DNA, 25 bp, Homo sapien
tcctaaaggaatggaagaggttcta

SEQ ID NO: 4293292 - DNA, 25 bp, Homo sapien
cctgctgagacgctgaggtcagcat

SEQ ID NO: 4293293 - DNA, 25 bp, Homo sapien
tcagcattttcagcggcagggagcc

SEQ ID NO: 4293294 - DNA, 25 bp, Homo sapien
tgctgcagcagaaaggcctcctgct

SEQ ID NO: 4293295 - DNA, 25 bp, Homo sapien
cacagcatagcgctgtgtggaagcc

SEQ ID NO: 4293296 - DNA, 25 bp, Homo sapien
cacagctatggtgattgtgcttggg

SEQ ID NO: 4293297 - DNA, 25 bp, Homo sapien
agcacagctatggtgattgtgcttg

SEQ ID NO: 4293298 - DNA, 25 bp, Homo sapien
cagctatggtgattgtgcttgggaa

SEQ ID NO: 4293299 - DNA, 25 bp, Homo sapien
ctatggtgattgtgcttgggaagaa

SEQ ID NO: 4293300 - DNA, 25 bp, Homo sapien
ggcattgttggttgctgatactgct

SEQ ID NO: 4293301 - DNA, 25 bp, Homo sapien
tggtggcattgttggttgctgatac

SEQ ID NO: 4293302 - DNA, 25 bp, Homo sapien
ctgctgtagtttgttcttgcaagac

SEQ ID NO: 4293303 - DNA, 25 bp, Homo sapien
taatctgtattggtggcattgttgg

SEQ ID NO: 4293304 - DNA, 25 bp, Homo sapien
tcctccacggctgctatggccgtgg

SEQ ID NO: 4293305 - DNA, 25 bp, Homo sapien
gctgctatggccgtgggcgctgagc

SEQ ID NO: 4293306 - DNA, 25 bp, Homo sapien
gtgacaggcctgaggcagcttccct

SEQ ID NO: 4293307 - DNA, 25 bp, Homo sapien
tcttctttgtgacaggcctgaggca

SEQ ID NO: 4293308 - DNA, 25 bp, Homo sapien
tgttcctctaaatcatgaactgtag

SEQ ID NO: 4293309 - DNA, 25 bp, Homo sapien
gttcctctaaatcatgaactgtagt

SEQ ID NO: 4293310 - DNA, 25 bp, Homo sapien
cttcagatgtttcgtgagcacctgt

SEQ ID NO: 4293311 - DNA, 25 bp, Homo sapien
cagatgtttcgtgagcacctgtgtt

SEQ ID NO: 4293312 - DNA, 25 bp, Homo sapien
ttcagatgtttcgtgagcacctgtg

SEQ ID NO: 4293313 - DNA, 25 bp, Homo sapien
tcagatgtttcgtgagcacctgtgt

SEQ ID NO: 4293314 - DNA, 25 bp, Homo sapien
gcccatcagtgaaggccattgctaa

SEQ ID NO: 4293315 - DNA, 25 bp, Homo sapien
tcattaaagaccttgggactgagga

SEQ ID NO: 4293316 - DNA, 25 bp, Homo sapien
cagtcaatctctgtcagcccatcag

SEQ ID NO: 4293317 - DNA, 25 bp, Homo sapien
gaggacatacaaatcataatcagga

SEQ ID NO: 4293318 - DNA, 25 bp, Homo sapien
acaaggccatggagctcgtgagaga

SEQ ID NO: 4293319 - DNA, 25 bp, Homo sapien
ctcgtgagagagcataaggccaggt

SEQ ID NO: 4293320 - DNA, 25 bp, Homo sapien
cataaggccaggttccctttacaca

SEQ ID NO: 4293321 - DNA, 25 bp, Homo sapien
catgtggtgtgtaaaacggatgtac

SEQ ID NO: 4293322 - DNA, 25 bp, Homo sapien
tgtcatggaactgagcccgaaggag

SEQ ID NO: 4293323 - DNA, 25 bp, Homo sapien
gtcatggaactgagcccgaaggagg

SEQ ID NO: 4293324 - DNA, 25 bp, Homo sapien
tcatggaactgagcccgaaggaggt

SEQ ID NO: 4293325 - DNA, 25 bp, Homo sapien
catggaactgagcccgaaggaggtt

SEQ ID NO: 4293326 - DNA, 25 bp, Homo sapien
gatttcaggagaggtgattcccagg

SEQ ID NO: 4293327 - DNA, 25 bp, Homo sapien
atttcaggagaggtgattcccaggg

SEQ ID NO: 4293328 - DNA, 25 bp, Homo sapien
cttagaggagcggggtgaggatttc

SEQ ID NO: 4293329 - DNA, 25 bp, Homo sapien
gaaaaggtcatggtgttcttcttta

SEQ ID NO: 4293330 - DNA, 25 bp, Homo sapien
tctttagatgggtgcgtcagggttc

SEQ ID NO: 4293331 - DNA, 25 bp, Homo sapien
gagatgatggacgttgcatttgtgt

SEQ ID NO: 4293332 - DNA, 25 bp, Homo sapien
gctttgtgtacttggtagttggaga

SEQ ID NO: 4293333 - DNA, 25 bp, Homo sapien
ccttctagaaagttgtgagtcagtt

SEQ ID NO: 4293334 - DNA, 25 bp, Homo sapien
tgactcttcatgaactgtcggcctt

SEQ ID NO: 4293335 - DNA, 25 bp, Homo sapien
gccttcctgtgtaagtgggtcaggc

SEQ ID NO: 4293336 - DNA, 25 bp, Homo sapien
ttccttgactcttcatgaactgtcg

SEQ ID NO: 4293337 - DNA, 25 bp, Homo sapien
tgaactgtcggccttcctgtgtaag

SEQ ID NO: 4293338 - DNA, 25 bp, Homo sapien
aatgctcagggcttggttgacacct

SEQ ID NO: 4293339 - DNA, 25 bp, Homo sapien
gctcagggcttggttgacacctctt

SEQ ID NO: 4293340 - DNA, 25 bp, Homo sapien
agaatgctcagggcttggttgacac

SEQ ID NO: 4293341 - DNA, 25 bp, Homo sapien
tgctcagggcttggttgacacctct

SEQ ID NO: 4293342 - DNA, 25 bp, Homo sapien
ggccctgatcaacaactcctcttga

SEQ ID NO: 4293343 - DNA, 25 bp, Homo sapien
atggccctgatcaacaactcctctt

SEQ ID NO: 4293344 - DNA, 25 bp, Homo sapien
catggatggctctatggccctgatc

SEQ ID NO: 4293345 - DNA, 25 bp, Homo sapien
gtcatggatggctctatggccctga

SEQ ID NO: 4293346 - DNA, 25 bp, Homo sapien
ctcttgatttagtgatagccttata

SEQ ID NO: 4293347 - DNA, 25 bp, Homo sapien
gggccttgatgaagtactggtatac

SEQ ID NO: 4293348 - DNA, 25 bp, Homo sapien
actggtatacctcgtttggaatttg

SEQ ID NO: 4293349 - DNA, 25 bp, Homo sapien
agtcggtgataaatgcttgagaaac

SEQ ID NO: 4293350 - DNA, 25 bp, Homo sapien
gtgctggcggcagaggtgcccatac

SEQ ID NO: 4293351 - DNA, 25 bp, Homo sapien
cagtgctggcggcagaggtgcccat

SEQ ID NO: 4293352 - DNA, 25 bp, Homo sapien
ttataggacagtgctggcggcagag

SEQ ID NO: 4293353 - DNA, 25 bp, Homo sapien
gacagtgctggcggcagaggtgccc

SEQ ID NO: 4293354 - DNA, 25 bp, Homo sapien
gcgagcgtgatacccgatctgtgca

SEQ ID NO: 4293355 - DNA, 25 bp, Homo sapien
cctgcatgatgttgcgagcgtgata

SEQ ID NO: 4293356 - DNA, 25 bp, Homo sapien
catgatgttgcgagcgtgatacccg

SEQ ID NO: 4293357 - DNA, 25 bp, Homo sapien
gatacccgatctgtgcacaggaagc

SEQ ID NO: 4293358 - DNA, 25 bp, Homo sapien
ctgaaggtgtggagatgctgccgtg

SEQ ID NO: 4293359 - DNA, 25 bp, Homo sapien
gaaggtgtggagatgctgccgtgca

SEQ ID NO: 4293360 - DNA, 25 bp, Homo sapien
aaggtgtggagatgctgccgtgcat

SEQ ID NO: 4293361 - DNA, 25 bp, Homo sapien
tgaaggtgtggagatgctgccgtgc

SEQ ID NO: 4293362 - DNA, 25 bp, Homo sapien
gtggccatggtgcacaacattgcaa

SEQ ID NO: 4293363 - DNA, 25 bp, Homo sapien
tgtggccatggtgcacaacattgca

SEQ ID NO: 4293364 - DNA, 25 bp, Homo sapien
gtgtggccatggtgcacaacattgc

SEQ ID NO: 4293365 - DNA, 25 bp, Homo sapien
tttgctgagtgtgtctcatgccttc

SEQ ID NO: 4293366 - DNA, 25 bp, Homo sapien
gggctggtagatctcatgcaggtaa

SEQ ID NO: 4293367 - DNA, 25 bp, Homo sapien
tgcaggtaatcacggctgaggatga

SEQ ID NO: 4293368 - DNA, 25 bp, Homo sapien
gagctctgctttgtgtgagttctgg

SEQ ID NO: 4293369 - DNA, 25 bp, Homo sapien
gggagtttggagacgggagatgctc

SEQ ID NO: 4293370 - DNA, 25 bp, Homo sapien
tttggagacgggagatgctccttct

SEQ ID NO: 4293371 - DNA, 25 bp, Homo sapien
ttggagacgggagatgctccttctg

SEQ ID NO: 4293372 - DNA, 25 bp, Homo sapien
agtttggagacgggagatgctcctt

SEQ ID NO: 4293373 - DNA, 25 bp, Homo sapien
tgtggcccgtgtactgcctcagtgc

SEQ ID NO: 4293374 - DNA, 25 bp, Homo sapien
tgggaaatgtggcccgtgtactgcc

SEQ ID NO: 4293375 - DNA, 25 bp, Homo sapien
tgtactgcctcagtgcttgggtcac

SEQ ID NO: 4293376 - DNA, 25 bp, Homo sapien
ccgtgtactgcctcagtgcttgggt

SEQ ID NO: 4293377 - DNA, 25 bp, Homo sapien
cagtcagaaacgctgatgttaggat

SEQ ID NO: 4293378 - DNA, 25 bp, Homo sapien
aaacgctgatgttaggatgcattct

SEQ ID NO: 4293379 - DNA, 25 bp, Homo sapien
cagaaacgctgatgttaggatgcat

SEQ ID NO: 4293380 - DNA, 25 bp, Homo sapien
gtcagaaacgctgatgttaggatgc

SEQ ID NO: 4293381 - DNA, 25 bp, Homo sapien
attaggtttttgacagccagctcag

SEQ ID NO: 4293382 - DNA, 25 bp, Homo sapien
cagctgtgtagtaaggagtataatc

SEQ ID NO: 4293383 - DNA, 25 bp, Homo sapien
tgttttcacagtgccctgtttccca

SEQ ID NO: 4293384 - DNA, 25 bp, Homo sapien
gccagctcagccggcttgttttcac

SEQ ID NO: 4293385 - DNA, 25 bp, Homo sapien
taccaaaaagagatggcgaataaga

SEQ ID NO: 4293386 - DNA, 25 bp, Homo sapien
gggctttgagaacctagtagcgtgt

SEQ ID NO: 4293387 - DNA, 25 bp, Homo sapien
tgtgtgctgtatcacagttctcttc

SEQ ID NO: 4293388 - DNA, 25 bp, Homo sapien
tggcgaataagattgggatccatgg

SEQ ID NO: 4293389 - DNA, 25 bp, Homo sapien
gttgctttctggtaaaaccttgctg

SEQ ID NO: 4293390 - DNA, 25 bp, Homo sapien
ctttcctgaatcagaggcccagagg

SEQ ID NO: 4293391 - DNA, 25 bp, Homo sapien
aattgatacggatgaagtatttgct

SEQ ID NO: 4293392 - DNA, 25 bp, Homo sapien
aaccttgctgatctggtatttgggc

SEQ ID NO: 4293393 - DNA, 25 bp, Homo sapien
tctgaatgattgaaacagataatcc

SEQ ID NO: 4293394 - DNA, 25 bp, Homo sapien
ccccctgttcgctgaaggacttggt

SEQ ID NO: 4293395 - DNA, 25 bp, Homo sapien
cctcccactccagcggtgagtccat

SEQ ID NO: 4293396 - DNA, 25 bp, Homo sapien
gataatcctccgtgattcccgtaca

SEQ ID NO: 4293397 - DNA, 25 bp, Homo sapien
ttgcctgctgcatactggatggaag

SEQ ID NO: 4293398 - DNA, 25 bp, Homo sapien
gttgatgggtactcttaattgtgtg

SEQ ID NO: 4293399 - DNA, 25 bp, Homo sapien
gaatagttgcaaagggagttggaag

SEQ ID NO: 4293400 - DNA, 25 bp, Homo sapien
ctcttaattgtgtgaaaagtgggaa

SEQ ID NO: 4293401 - DNA, 25 bp, Homo sapien
gtagactcgacagctcctagcagct

SEQ ID NO: 4293402 - DNA, 25 bp, Homo sapien
cgccagctcttgtggtcccacttgg

SEQ ID NO: 4293403 - DNA, 25 bp, Homo sapien
gttggacctgtagggacccgccagc

SEQ ID NO: 4293404 - DNA, 25 bp, Homo sapien
ccacttggtagactcgacagctcct

SEQ ID NO: 4293405 - DNA, 25 bp, Homo sapien
acagcatgtagctgtcctcagatgg

SEQ ID NO: 4293406 - DNA, 25 bp, Homo sapien
ctgacgggcaccaaggtcgcccagg

SEQ ID NO: 4293407 - DNA, 25 bp, Homo sapien
ggcagcctggatttgtgctgatgcg

SEQ ID NO: 4293408 - DNA, 25 bp, Homo sapien
tgctgatgcggagacttccctggca

SEQ ID NO: 4293409 - DNA, 25 bp, Homo sapien
gaagccctcaatggcattaccgtaa

SEQ ID NO: 4293410 - DNA, 25 bp, Homo sapien
cacttgggaagtgctccaacagagg

SEQ ID NO: 4293411 - DNA, 25 bp, Homo sapien
agaggcactctgctgtatcccaaga

SEQ ID NO: 4293412 - DNA, 25 bp, Homo sapien
cattatatggcacttcacttgggaa

SEQ ID NO: 4293413 - DNA, 25 bp, Homo sapien
gggcaaacagcgatggataccctgt

SEQ ID NO: 4293414 - DNA, 25 bp, Homo sapien
ttgtccaggtggtatccgtgggatt

SEQ ID NO: 4293415 - DNA, 25 bp, Homo sapien
ttctgtgatagtcactgagttcccc

SEQ ID NO: 4293416 - DNA, 25 bp, Homo sapien
gacagaatcagtaattggaaataga

SEQ ID NO: 4293417 - DNA, 25 bp, Homo sapien
gtcttgaggtcctgacattgagagt

SEQ ID NO: 4293418 - DNA, 25 bp, Homo sapien
gaggtcctgacattgagagtgtgcc

SEQ ID NO: 4293419 - DNA, 25 bp, Homo sapien
tgaggtcctgacattgagagtgtgc

SEQ ID NO: 4293420 - DNA, 25 bp, Homo sapien
cttgaggtcctgacattgagagtgt

SEQ ID NO: 4293421 - DNA, 25 bp, Homo sapien
cttctctcgagggttcagatatgtc

SEQ ID NO: 4293422 - DNA, 25 bp, Homo sapien
cagatatgtcgcgttctgacttccc

SEQ ID NO: 4293423 - DNA, 25 bp, Homo sapien
cgagggttcagatatgtcgcgttct

SEQ ID NO: 4293424 - DNA, 25 bp, Homo sapien
tatgtcgcgttctgacttcccagca

SEQ ID NO: 4293425 - DNA, 25 bp, Homo sapien
gcccatgtagggcacattcccattg

SEQ ID NO: 4293426 - DNA, 25 bp, Homo sapien
gcacattcccattgccatccaattt

SEQ ID NO: 4293427 - DNA, 25 bp, Homo sapien
ggcacattcccattgccatccaatt

SEQ ID NO: 4293428 - DNA, 25 bp, Homo sapien
ccatgtagggcacattcccattgcc

SEQ ID NO: 4293429 - DNA, 25 bp, Homo sapien
taaaccgaaggtgaagaaagatgag

SEQ ID NO: 4293430 - DNA, 25 bp, Homo sapien
aattacccattgttgttcctctaag

SEQ ID NO: 4293431 - DNA, 25 bp, Homo sapien
gagggcaaacagactactgtagcca

SEQ ID NO: 4293432 - DNA, 25 bp, Homo sapien
tgtaaatgtggtgttaaattaccca

SEQ ID NO: 4293433 - DNA, 25 bp, Homo sapien
agccatgtggactgctcttcgccct

SEQ ID NO: 4293434 - DNA, 25 bp, Homo sapien
gccctgaacagcttgccttcgtgca

SEQ ID NO: 4293435 - DNA, 25 bp, Homo sapien
gtggactgctcttcgccctgaacag

SEQ ID NO: 4293436 - DNA, 25 bp, Homo sapien
gcttgccttcgtgcaggctcctctt

SEQ ID NO: 4293437 - DNA, 25 bp, Homo sapien
gttcaccttttgacagcagcttggg

SEQ ID NO: 4293438 - DNA, 25 bp, Homo sapien
ggatagacagatggacaagtattca

SEQ ID NO: 4293439 - DNA, 25 bp, Homo sapien
caggtgctcggggatagatggatag

SEQ ID NO: 4293440 - DNA, 25 bp, Homo sapien
gaggacagggttctggctttgctga

SEQ ID NO: 4293441 - DNA, 25 bp, Homo sapien
tagatcaacaattgcagccacagcc

SEQ ID NO: 4293442 - DNA, 25 bp, Homo sapien
caattttcatgtggccaaacaggtg

SEQ ID NO: 4293443 - DNA, 25 bp, Homo sapien
gcagggtcataccttgggccatcca

SEQ ID NO: 4293444 - DNA, 25 bp, Homo sapien
tctgtaaagttaaaacctggagcca

SEQ ID NO: 4293445 - DNA, 25 bp, Homo sapien
gacagttgccaagaccacacaagct

SEQ ID NO: 4293446 - DNA, 25 bp, Homo sapien
tattgagcgggtaagctacacctct

SEQ ID NO: 4293447 - DNA, 25 bp, Homo sapien
gatgctatgggatttgaattgccct

SEQ ID NO: 4293448 - DNA, 25 bp, Homo sapien
aattgccctgggtgtattttgtcag

SEQ ID NO: 4293449 - DNA, 25 bp, Homo sapien
ccaaatcaagctgtttcctggaacc

SEQ ID NO: 4293450 - DNA, 25 bp, Homo sapien
cagcattgttgcttgagatttaaac

SEQ ID NO: 4293451 - DNA, 25 bp, Homo sapien
ggaacctcaccaggcttcatgaagg

SEQ ID NO: 4293452 - DNA, 25 bp, Homo sapien
gaactatagaacgattattgaccag

SEQ ID NO: 4293453 - DNA, 25 bp, Homo sapien
ccttagtgggtaagcagtcggatcc

SEQ ID NO: 4293454 - DNA, 25 bp, Homo sapien
tgctgccacgtgtgaggcaactctg

SEQ ID NO: 4293455 - DNA, 25 bp, Homo sapien
ggcaactctgcgtgtctcctagctg

SEQ ID NO: 4293456 - DNA, 25 bp, Homo sapien
gattccgtgtttccaatgcttgcca

SEQ ID NO: 4293457 - DNA, 25 bp, Homo sapien
cattctggctaattggataccaggg

SEQ ID NO: 4293458 - DNA, 25 bp, Homo sapien
tagtaagttccagatcctaccagat

SEQ ID NO: 4293459 - DNA, 25 bp, Homo sapien
cctaaggcaaagattcatgggatgg

SEQ ID NO: 4293460 - DNA, 25 bp, Homo sapien
tagacaaagactcaggcatggctac

SEQ ID NO: 4293461 - DNA, 25 bp, Homo sapien
taggtctaaagaaggctggactccc

SEQ ID NO: 4293462 - DNA, 25 bp, Homo sapien
attaaaacagatagcattgcaacac

SEQ ID NO: 4293463 - DNA, 25 bp, Homo sapien
tgaacagaaactgaacctttatgct

SEQ ID NO: 4293464 - DNA, 25 bp, Homo sapien
gagtccctagtgattttcgtggcag

SEQ ID NO: 4293465 - DNA, 25 bp, Homo sapien
acgctgttgttctgttgactgggca

SEQ ID NO: 4293466 - DNA, 25 bp, Homo sapien
cagccccacggaagggacgtaggat

SEQ ID NO: 4293467 - DNA, 25 bp, Homo sapien
aacaatgcctcgttgagcctccgtg

SEQ ID NO: 4293468 - DNA, 25 bp, Homo sapien
tgcagaacatgaggcgtgtgcccag

SEQ ID NO: 4293469 - DNA, 25 bp, Homo sapien
cattgttctgtcgtcagagcgccct

SEQ ID NO: 4293470 - DNA, 25 bp, Homo sapien
cctgggcgatgcagtcacaggtgaa

SEQ ID NO: 4293471 - DNA, 25 bp, Homo sapien
aagctgctgttggttattcctggga

SEQ ID NO: 4293472 - DNA, 25 bp, Homo sapien
tatgcttcttgggtgtcaatgccac

SEQ ID NO: 4293473 - DNA, 25 bp, Homo sapien
tcttcgtcagcctgtgtgttgcctt

SEQ ID NO: 4293474 - DNA, 25 bp, Homo sapien
gcctttgtatgttctcacttctgaa

SEQ ID NO: 4293475 - DNA, 25 bp, Homo sapien
tcagtcaagccatctcaaaatccaa

SEQ ID NO: 4293476 - DNA, 25 bp, Homo sapien
gtgtgtgctcaagccctcggaacca

SEQ ID NO: 4293477 - DNA, 25 bp, Homo sapien
tgtttaatgtaaagatgcctcctgg

SEQ ID NO: 4293478 - DNA, 25 bp, Homo sapien
aacactcaggtagtgctaggcacca

SEQ ID NO: 4293479 - DNA, 25 bp, Homo sapien
tacagaaagcgtccttgaagcccct

SEQ ID NO: 4293480 - DNA, 25 bp, Homo sapien
catgctggctctggttccgctgact

SEQ ID NO: 4293481 - DNA, 25 bp, Homo sapien
ggtaccatgagaaaaccctagctgg

SEQ ID NO: 4293482 - DNA, 25 bp, Homo sapien
gagagataacaaccagatcaatagg

SEQ ID NO: 4293483 - DNA, 25 bp, Homo sapien
ttccagacgtttccccaggcggtgc

SEQ ID NO: 4293484 - DNA, 25 bp, Homo sapien
tcaggtgactgcaactggcttgggc

SEQ ID NO: 4293485 - DNA, 25 bp, Homo sapien
tcgcggacgttgctcacggtggttc

SEQ ID NO: 4293486 - DNA, 25 bp, Homo sapien
cagatgcttgaacggatgctttaga

SEQ ID NO: 4293487 - DNA, 25 bp, Homo sapien
caagcaaagcactcctccggaaggt

SEQ ID NO: 4293488 - DNA, 25 bp, Homo sapien
caccaagctggttagtcggaaggcg

SEQ ID NO: 4293489 - DNA, 25 bp, Homo sapien
tttgggagccttagatatgtaaccg

SEQ ID NO: 4293490 - DNA, 25 bp, Homo sapien
gccttgtaatatggattaatgtacc

SEQ ID NO: 4293491 - DNA, 25 bp, Homo sapien
tgacttaagtgcattataacctatg

SEQ ID NO: 4293492 - DNA, 25 bp, Homo sapien
taatcagacctagtccaatcagttg

SEQ ID NO: 4293493 - DNA, 25 bp, Homo sapien
tactcgggctatccagaagtagaag

SEQ ID NO: 4293494 - DNA, 25 bp, Homo sapien
catgggtcctaataattgtagttcc

SEQ ID NO: 4293495 - DNA, 25 bp, Homo sapien
aactgcagcaatatccatgggtcct

SEQ ID NO: 4293496 - DNA, 25 bp, Homo sapien
tgtacatgacttgtaatatactata

SEQ ID NO: 4293497 - DNA, 25 bp, Homo sapien
taagtgaattacagagcaggtccag

SEQ ID NO: 4293498 - DNA, 25 bp, Homo sapien
gaattaggccgactgtcaggttacc

SEQ ID NO: 4293499 - DNA, 25 bp, Homo sapien
tggatccaccatgggttgcaactgt

SEQ ID NO: 4293500 - DNA, 25 bp, Homo sapien
gactgtacgtcctgatgaaaaccca

SEQ ID NO: 4293501 - DNA, 25 bp, Homo sapien
gatttcaccgtcaactggcagcgag

SEQ ID NO: 4293502 - DNA, 25 bp, Homo sapien
gtaacctaataccagccgcagggag

SEQ ID NO: 4293503 - DNA, 25 bp, Homo sapien
gctgaccctgctatgagaaaaactg

SEQ ID NO: 4293504 - DNA, 25 bp, Homo sapien
aaaattgccagaccaggaccctaag

SEQ ID NO: 4293505 - DNA, 25 bp, Homo sapien
ttatcagtagaagcatgaaaccact

SEQ ID NO: 4293506 - DNA, 25 bp, Homo sapien
tgggccctggttccaacatcaagag

SEQ ID NO: 4293507 - DNA, 25 bp, Homo sapien
cactaaacaggtccagtagagatgg

SEQ ID NO: 4293508 - DNA, 25 bp, Homo sapien
aaccacttctgagtggcgggacatg

SEQ ID NO: 4293509 - DNA, 25 bp, Homo sapien
gaatctatttgaattcgtggagatg

SEQ ID NO: 4293510 - DNA, 25 bp, Homo sapien
ctatttgaattcgtggagatgatgc

SEQ ID NO: 4293511 - DNA, 25 bp, Homo sapien
tctatttgaattcgtggagatgatg

SEQ ID NO: 4293512 - DNA, 25 bp, Homo sapien
aagaatctatttgaattcgtggaga

SEQ ID NO: 4293513 - DNA, 25 bp, Homo sapien
taggtactgcaagcttttggccaag

SEQ ID NO: 4293514 - DNA, 25 bp, Homo sapien
tgtttgggtgcctacaactcctgct

SEQ ID NO: 4293515 - DNA, 25 bp, Homo sapien
cactgggcacatggacagcgcattc

SEQ ID NO: 4293516 - DNA, 25 bp, Homo sapien
cttctgcaataggtcagggctcctg

SEQ ID NO: 4293517 - DNA, 25 bp, Homo sapien
gtcagcacagtcatggttggtccag

SEQ ID NO: 4293518 - DNA, 25 bp, Homo sapien
aaactaacttgtggctgtcggacgc

SEQ ID NO: 4293519 - DNA, 25 bp, Homo sapien
tattctgggcctagtatagctgcag

SEQ ID NO: 4293520 - DNA, 25 bp, Homo sapien
tgcacgaggccctccaagttacggg

SEQ ID NO: 4293521 - DNA, 25 bp, Homo sapien
ttcattaccttgtcagaacagtctg

SEQ ID NO: 4293522 - DNA, 25 bp, Homo sapien
ttaccttgtcagaacagtctggaga

SEQ ID NO: 4293523 - DNA, 25 bp, Homo sapien
cattaccttgtcagaacagtctgga

SEQ ID NO: 4293524 - DNA, 25 bp, Homo sapien
tattttcattaccttgtcagaacag

SEQ ID NO: 4293525 - DNA, 25 bp, Homo sapien
gaatggtaagaaatttaaagagcaa

SEQ ID NO: 4293526 - DNA, 25 bp, Homo sapien
cacagggtgcatggctgtgcttaac

SEQ ID NO: 4293527 - DNA, 25 bp, Homo sapien
tctcgggctagctgcttcagtagga

SEQ ID NO: 4293528 - DNA, 25 bp, Homo sapien
tagtctgttcctgtggacgtctaca

SEQ ID NO: 4293529 - DNA, 25 bp, Homo sapien
tagtgaagccaagcggcattccctc

SEQ ID NO: 4293530 - DNA, 25 bp, Homo sapien
tgcagctcaagaaggaggatgcccc

SEQ ID NO: 4293531 - DNA, 25 bp, Homo sapien
cactgagtagggtaccacctgggtc

SEQ ID NO: 4293532 - DNA, 25 bp, Homo sapien
tgccctgggttagagaatgccacgt

SEQ ID NO: 4293533 - DNA, 25 bp, Homo sapien
tgaatgctggccttccccaaatggc

SEQ ID NO: 4293534 - DNA, 25 bp, Homo sapien
gcaggctgccccttgataatgtcag

SEQ ID NO: 4293535 - DNA, 25 bp, Homo sapien
caggttgccgctgaccatgctaggc

SEQ ID NO: 4293536 - DNA, 25 bp, Homo sapien
gaggcatcgacgaccctgaggtttt

SEQ ID NO: 4293537 - DNA, 25 bp, Homo sapien
tggcccatcttacaggtgcacgagg

SEQ ID NO: 4293538 - DNA, 25 bp, Homo sapien
aggacccctccttttgcccgtgctg

SEQ ID NO: 4293539 - DNA, 25 bp, Homo sapien
ccctccttttgcccgtgctggcctc

SEQ ID NO: 4293540 - DNA, 25 bp, Homo sapien
tgaggacccctccttttgcccgtgc

SEQ ID NO: 4293541 - DNA, 25 bp, Homo sapien
gacccctccttttgcccgtgctggc

SEQ ID NO: 4293542 - DNA, 25 bp, Homo sapien
gattcacggcatggagaggctctgt

SEQ ID NO: 4293543 - DNA, 25 bp, Homo sapien
ctggaagattcacggcatggagagg

SEQ ID NO: 4293544 - DNA, 25 bp, Homo sapien
tggagaggctctgtaagctgtctga

SEQ ID NO: 4293545 - DNA, 25 bp, Homo sapien
cacggcatggagaggctctgtaagc

SEQ ID NO: 4293546 - DNA, 25 bp, Homo sapien
tggtcttggggattggcacttctca

SEQ ID NO: 4293547 - DNA, 25 bp, Homo sapien
ttggcacttctcagtttgagccagc

SEQ ID NO: 4293548 - DNA, 25 bp, Homo sapien
ggctggatcacagggtggtcttggg

SEQ ID NO: 4293549 - DNA, 25 bp, Homo sapien
ctgttgacaagtagttgggctggat

SEQ ID NO: 4293550 - DNA, 25 bp, Homo sapien
cggatgaacccacctgtttccagat

SEQ ID NO: 4293551 - DNA, 25 bp, Homo sapien
ggacccgcccgtggtcaatcacttg

SEQ ID NO: 4293552 - DNA, 25 bp, Homo sapien
gacccgcccgtggtcaatcacttgg

SEQ ID NO: 4293553 - DNA, 25 bp, Homo sapien
ctggctgcggatgaacccacctgtt

SEQ ID NO: 4293554 - DNA, 25 bp, Homo sapien
ggcatcagctctgctctctaccagg

SEQ ID NO: 4293555 - DNA, 25 bp, Homo sapien
actctagtgcctggacccaagtcct

SEQ ID NO: 4293556 - DNA, 25 bp, Homo sapien
atctgttcacccctcacagggggct

SEQ ID NO: 4293557 - DNA, 25 bp, Homo sapien
ccagcaccacaccataaaatgtcag

SEQ ID NO: 4293558 - DNA, 25 bp, Homo sapien
gcgggtgcatgcctgctgaatgtag

SEQ ID NO: 4293559 - DNA, 25 bp, Homo sapien
gtgatagggcgggtgcatgcctgct

SEQ ID NO: 4293560 - DNA, 25 bp, Homo sapien
agaccaatgcagaccttccgcaggg

SEQ ID NO: 4293561 - DNA, 25 bp, Homo sapien
ccactccagaccaatgcagaccttc

SEQ ID NO: 4293562 - DNA, 25 bp, Homo sapien
ggtcatcagcattcccgatgccaga

SEQ ID NO: 4293563 - DNA, 25 bp, Homo sapien
agcattcccgatgccagagagcatg

SEQ ID NO: 4293564 - DNA, 25 bp, Homo sapien
atcagcattcccgatgccagagagc

SEQ ID NO: 4293565 - DNA, 25 bp, Homo sapien
tgaggtcatcagcattcccgatgcc

SEQ ID NO: 4293566 - DNA, 25 bp, Homo sapien
tcagaatcacctccttgctggcata

SEQ ID NO: 4293567 - DNA, 25 bp, Homo sapien
gaatcacctccttgctggcataagc

SEQ ID NO: 4293568 - DNA, 25 bp, Homo sapien
tggagagttgatggcacctccactc

SEQ ID NO: 4293569 - DNA, 25 bp, Homo sapien
gtggagagttgatggcacctccact

SEQ ID NO: 4293570 - DNA, 25 bp, Homo sapien
gttctcctgactcacagaccagcgc

SEQ ID NO: 4293571 - DNA, 25 bp, Homo sapien
tcactccctgaaaagccagctgttc

SEQ ID NO: 4293572 - DNA, 25 bp, Homo sapien
ccctgaaaagccagctgttctcctg

SEQ ID NO: 4293573 - DNA, 25 bp, Homo sapien
ctgactcacagaccagcgccctact

SEQ ID NO: 4293574 - DNA, 25 bp, Homo sapien
ggtgcaggtaggcacaggccgcgct

SEQ ID NO: 4293575 - DNA, 25 bp, Homo sapien
tggctctggccattcttgacatact

SEQ ID NO: 4293576 - DNA, 25 bp, Homo sapien
tcaaatagcaccctgctcacaagcg

SEQ ID NO: 4293577 - DNA, 25 bp, Homo sapien
cactgcacgggtgccctcaaatagc

SEQ ID NO: 4293578 - DNA, 25 bp, Homo sapien
tagcaccagttgtacctgtcgtcgc

SEQ ID NO: 4293579 - DNA, 25 bp, Homo sapien
cacggacgtagaccatggcattgag

SEQ ID NO: 4293580 - DNA, 25 bp, Homo sapien
gtggatcttccacgagagccgcttg

SEQ ID NO: 4293581 - DNA, 25 bp, Homo sapien
gatggtcatgtccatccagccgaag

SEQ ID NO: 4293582 - DNA, 25 bp, Homo sapien
cagggcccgggcacccagggattgc

SEQ ID NO: 4293583 - DNA, 25 bp, Homo sapien
acccagggattgctgctgccccagg

SEQ ID NO: 4293584 - DNA, 25 bp, Homo sapien
gcccgggcacccagggattgctgct

SEQ ID NO: 4293585 - DNA, 25 bp, Homo sapien
tgccccagggctccccgtgccaggg

SEQ ID NO: 4293586 - DNA, 25 bp, Homo sapien
ccaggcctcgtaggagacaccacat

SEQ ID NO: 4293587 - DNA, 25 bp, Homo sapien
tctagtccaagtcctctgatccacg

SEQ ID NO: 4293588 - DNA, 25 bp, Homo sapien
tccaagtcctctgatccacggaggg

SEQ ID NO: 4293589 - DNA, 25 bp, Homo sapien
gcttctatctagtccaagtcctctg

SEQ ID NO: 4293590 - DNA, 25 bp, Homo sapien
cacggaggggaatgagatgactcac

SEQ ID NO: 4293591 - DNA, 25 bp, Homo sapien
gaagctagacagaagatcagtaagg

SEQ ID NO: 4293592 - DNA, 25 bp, Homo sapien
taaacagtcctacaacaataactgg

SEQ ID NO: 4293593 - DNA, 25 bp, Homo sapien
ggagacttcaatactcagatttcaa

SEQ ID NO: 4293594 - DNA, 25 bp, Homo sapien
ggctgtggcctaaatgagattatat

SEQ ID NO: 4293595 - DNA, 25 bp, Homo sapien
atccagaagtgacaggatacggtgc

SEQ ID NO: 4293596 - DNA, 25 bp, Homo sapien
gaagtgacaggatacggtgcactct

SEQ ID NO: 4293597 - DNA, 25 bp, Homo sapien
tgtgaccggggctggcctacacact

SEQ ID NO: 4293598 - DNA, 25 bp, Homo sapien
tggcctacacactctttgtgattgt

SEQ ID NO: 4293599 - DNA, 25 bp, Homo sapien
gaatgaacgcatgttagtgaatggc

SEQ ID NO: 4293600 - DNA, 25 bp, Homo sapien
cgcatgttagtgaatggctgcctgc

SEQ ID NO: 4293601 - DNA, 25 bp, Homo sapien
gaacgcatgttagtgaatggctgcc

SEQ ID NO: 4293602 - DNA, 25 bp, Homo sapien
catgttagtgaatggctgcctgctc

SEQ ID NO: 4293603 - DNA, 25 bp, Homo sapien
ggcagtctgcgttccacccgtttcg

SEQ ID NO: 4293604 - DNA, 25 bp, Homo sapien
gagtcagtgagcttcggcagtctgc

SEQ ID NO: 4293605 - DNA, 25 bp, Homo sapien
ttcgctccctcaaaggagtcagtga

SEQ ID NO: 4293606 - DNA, 25 bp, Homo sapien
ctctaaccccgcgtagctgaaagaa

SEQ ID NO: 4293607 - DNA, 25 bp, Homo sapien
gagagcccgacagtcgggaccggag

SEQ ID NO: 4293608 - DNA, 25 bp, Homo sapien
gacgcagcagttccgacccggtcgg

SEQ ID NO: 4293609 - DNA, 25 bp, Homo sapien
gagccgcgaggctagctgggctcca

SEQ ID NO: 4293610 - DNA, 25 bp, Homo sapien
cgcgcgctctctgcgtccggaatgg

SEQ ID NO: 4293611 - DNA, 25 bp, Homo sapien
catttatatagtggagcaacagtca

SEQ ID NO: 4293612 - DNA, 25 bp, Homo sapien
gattgatgggagtcctacgagccct

SEQ ID NO: 4293613 - DNA, 25 bp, Homo sapien
gattagcaaacattcgaggtgggag

SEQ ID NO: 4293614 - DNA, 25 bp, Homo sapien
aacttgtaacttgaggcagcatagc

SEQ ID NO: 4293615 - DNA, 25 bp, Homo sapien
taatggtaccgcctcactagtgcct

SEQ ID NO: 4293616 - DNA, 25 bp, Homo sapien
tgacttgtgcgtgggcgaagcctta

SEQ ID NO: 4293617 - DNA, 25 bp, Homo sapien
tatgtcagtctaacaagacggcctg

SEQ ID NO: 4293618 - DNA, 25 bp, Homo sapien
tctgagtgccacaaggatctgctga

SEQ ID NO: 4293619 - DNA, 25 bp, Homo sapien
ccagacaaaagcaagccgggaggct

SEQ ID NO: 4293620 - DNA, 25 bp, Homo sapien
cacatgccaggtgaaagcagggtca

SEQ ID NO: 4293621 - DNA, 25 bp, Homo sapien
gatacgagcatgactggattacaca

SEQ ID NO: 4293622 - DNA, 25 bp, Homo sapien
taaatctctacaaagtggctgggcg

SEQ ID NO: 4293623 - DNA, 25 bp, Homo sapien
tttggactgcgcagagccacttaca

SEQ ID NO: 4293624 - DNA, 25 bp, Homo sapien
cactagtaatgctggcagtgctccc

SEQ ID NO: 4293625 - DNA, 25 bp, Homo sapien
cttaggacccatacgaagtgccact

SEQ ID NO: 4293626 - DNA, 25 bp, Homo sapien
cactgaggagaaaggatacctgcct

SEQ ID NO: 4293627 - DNA, 25 bp, Homo sapien
aaagttacactgaggcgcccacctc

SEQ ID NO: 4293628 - DNA, 25 bp, Homo sapien
tggaggaaggattggtaccatatac

SEQ ID NO: 4293629 - DNA, 25 bp, Homo sapien
cctcgtcagcctactcaacaagatg

SEQ ID NO: 4293630 - DNA, 25 bp, Homo sapien
tttgtaacacagacccttctatgat

SEQ ID NO: 4293631 - DNA, 25 bp, Homo sapien
tggtccacttccatttaatgaatta

SEQ ID NO: 4293632 - DNA, 25 bp, Homo sapien
ccacttccatttaatgaattagtaa

SEQ ID NO: 4293633 - DNA, 25 bp, Homo sapien
gtccacttccatttaatgaattagt

SEQ ID NO: 4293634 - DNA, 25 bp, Homo sapien
gatggtccacttccatttaatgaat

SEQ ID NO: 4293635 - DNA, 25 bp, Homo sapien
tttacatactcagctcaaggcagag

SEQ ID NO: 4293636 - DNA, 25 bp, Homo sapien
agggtcagctgtactctctaagggc

SEQ ID NO: 4293637 - DNA, 25 bp, Homo sapien
tttcaactgcatgcagggccggtgc

SEQ ID NO: 4293638 - DNA, 25 bp, Homo sapien
tgttttacagcaccgtatagggcag

SEQ ID NO: 4293639 - DNA, 25 bp, Homo sapien
ttatctgaaaagagaaggcttggtt

SEQ ID NO: 4293640 - DNA, 25 bp, Homo sapien
tatcttaaacctaaagtttctatga

SEQ ID NO: 4293641 - DNA, 25 bp, Homo sapien
ctggccaacaaagtatcttaaacct

SEQ ID NO: 4293642 - DNA, 25 bp, Homo sapien
gaaaagagaaggcttggttgagagg

SEQ ID NO: 4293643 - DNA, 25 bp, Homo sapien
tgctgtcactaacaaggcccttggt

SEQ ID NO: 4293644 - DNA, 25 bp, Homo sapien
ggaaaaagatcacaagcctgccacg

SEQ ID NO: 4293645 - DNA, 25 bp, Homo sapien
tccaatgacgtcaacagtgtgtgcg

SEQ ID NO: 4293646 - DNA, 25 bp, Homo sapien
gaacttctccatgtcaagcagcagg

SEQ ID NO: 4293647 - DNA, 25 bp, Homo sapien
tacggcatgtcaggtaacaaaagcc

SEQ ID NO: 4293648 - DNA, 25 bp, Homo sapien
tgaagggcttcaccacatgagaacc

SEQ ID NO: 4293649 - DNA, 25 bp, Homo sapien
tgagcagttacagagggtactccca

SEQ ID NO: 4293650 - DNA, 25 bp, Homo sapien
caatagcaacgtttacatcactggg

SEQ ID NO: 4293651 - DNA, 25 bp, Homo sapien
tttggtcttcggcagtgacatttcc

SEQ ID NO: 4293652 - DNA, 25 bp, Homo sapien
caaatgccctgactaaactgctcaa

SEQ ID NO: 4293653 - DNA, 25 bp, Homo sapien
tgtcatgtcctcaacataaagttca

SEQ ID NO: 4293654 - DNA, 25 bp, Homo sapien
tactgtccatgacacttaagcatcc

SEQ ID NO: 4293655 - DNA, 25 bp, Homo sapien
gttcctgtgttgtatccaaacaagc

SEQ ID NO: 4293656 - DNA, 25 bp, Homo sapien
gcagcccgctctcgtaacatgcgga

SEQ ID NO: 4293657 - DNA, 25 bp, Homo sapien
tgccactctcgctgataaatccaca

SEQ ID NO: 4293658 - DNA, 25 bp, Homo sapien
cgtaacatgcggacaccaaagcgct

SEQ ID NO: 4293659 - DNA, 25 bp, Homo sapien
gacatatactcaatcatttacttga

SEQ ID NO: 4293660 - DNA, 25 bp, Homo sapien
actcaatcatttacttgaatatggg

SEQ ID NO: 4293661 - DNA, 25 bp, Homo sapien
aatatggggccgagaaaaatccctg

SEQ ID NO: 4293662 - DNA, 25 bp, Homo sapien
aatccctgctgagtcaatacctagt

SEQ ID NO: 4293663 - DNA, 25 bp, Homo sapien
cattttcaataattcgcctgaagga

SEQ ID NO: 4293664 - DNA, 25 bp, Homo sapien
ctaggatggagctgtacatcttctt

SEQ ID NO: 4293665 - DNA, 25 bp, Homo sapien
tttcaataattcgcctgaaggatgg

SEQ ID NO: 4293666 - DNA, 25 bp, Homo sapien
actaggatggagctgtacatcttct

SEQ ID NO: 4293667 - DNA, 25 bp, Homo sapien
tgcttgagcaagtgcaatagccttc

SEQ ID NO: 4293668 - DNA, 25 bp, Homo sapien
agccttctcaaagatttccctccag

SEQ ID NO: 4293669 - DNA, 25 bp, Homo sapien
gacagttgacatcctccatgctttt

SEQ ID NO: 4293670 - DNA, 25 bp, Homo sapien
taattctaggccaagccaccaacac

SEQ ID NO: 4293671 - DNA, 25 bp, Homo sapien
taactgctatcttgtttcactgcta

SEQ ID NO: 4293672 - DNA, 25 bp, Homo sapien
tgctatcttgtttcactgctatctc

SEQ ID NO: 4293673 - DNA, 25 bp, Homo sapien
tatttaactgctatcttgtttcact

SEQ ID NO: 4293674 - DNA, 25 bp, Homo sapien
gctatcttgtttcactgctatctcc

SEQ ID NO: 4293675 - DNA, 25 bp, Homo sapien
tcaaacagcgagatggcagtcttcc

SEQ ID NO: 4293676 - DNA, 25 bp, Homo sapien
tgcagactttcggtcagcagtagct

SEQ ID NO: 4293677 - DNA, 25 bp, Homo sapien
tttctggaagatcagaggactggcc

SEQ ID NO: 4293678 - DNA, 25 bp, Homo sapien
tcttcctggacatcagtgcagtgag

SEQ ID NO: 4293679 - DNA, 25 bp, Homo sapien
gaggatcctcaggatcgccctgaga

SEQ ID NO: 4293680 - DNA, 25 bp, Homo sapien
tgtccaacgattccaaaagttgcgg

SEQ ID NO: 4293681 - DNA, 25 bp, Homo sapien
caggtaatgttcatcgtgaggatcc

SEQ ID NO: 4293682 - DNA, 25 bp, Homo sapien
tgagatctgtgctgcaaagtcgtca

SEQ ID NO: 4293683 - DNA, 25 bp, Homo sapien
ggagaatcaggatgtcgaatctgaa

SEQ ID NO: 4293684 - DNA, 25 bp, Homo sapien
gaatctgaaactcatggtcctgaag

SEQ ID NO: 4293685 - DNA, 25 bp, Homo sapien
taatcgaaactggtaaagcagggca

SEQ ID NO: 4293686 - DNA, 25 bp, Homo sapien
ttttcatctcctaatcgaaactggt

SEQ ID NO: 4293687 - DNA, 25 bp, Homo sapien
cagatcctccgtatgccagacaaag

SEQ ID NO: 4293688 - DNA, 25 bp, Homo sapien
tctctgtaagggaacccagctcgct

SEQ ID NO: 4293689 - DNA, 25 bp, Homo sapien
tatttgttaactggcattctctgta

SEQ ID NO: 4293690 - DNA, 25 bp, Homo sapien
ccagctcgctgcattagccagtaaa

SEQ ID NO: 4293691 - DNA, 25 bp, Homo sapien
caatacacgtgctgcttaagccact

SEQ ID NO: 4293692 - DNA, 25 bp, Homo sapien
cacttccataggtggcacacacaga

SEQ ID NO: 4293693 - DNA, 25 bp, Homo sapien
ccacacagcatacacttgtcttctg

SEQ ID NO: 4293694 - DNA, 25 bp, Homo sapien
cgagtattccgatgagacaccccat

SEQ ID NO: 4293695 - DNA, 25 bp, Homo sapien
gaaaaacccatcttcattagtatca

SEQ ID NO: 4293696 - DNA, 25 bp, Homo sapien
tgaaaaacccatcttcattagtatc

SEQ ID NO: 4293697 - DNA, 25 bp, Homo sapien
aaaaacccatcttcattagtatcat

SEQ ID NO: 4293698 - DNA, 25 bp, Homo sapien
ctgaaaaacccatcttcattagtat

SEQ ID NO: 4293699 - DNA, 25 bp, Homo sapien
tatagatatcaggaattaacaagat

SEQ ID NO: 4293700 - DNA, 25 bp, Homo sapien
ctttcacatgctgcttattatagat

SEQ ID NO: 4293701 - DNA, 25 bp, Homo sapien
tagatatcaggaattaacaagatac

SEQ ID NO: 4293702 - DNA, 25 bp, Homo sapien
acatgctgcttattatagatatcag

SEQ ID NO: 4293703 - DNA, 25 bp, Homo sapien
cagtccagtggattaacatacaagg

SEQ ID NO: 4293704 - DNA, 25 bp, Homo sapien
caagtatttttgtatcgcatgagac

SEQ ID NO: 4293705 - DNA, 25 bp, Homo sapien
gggcctgggtgaatatttaactgac

SEQ ID NO: 4293706 - DNA, 25 bp, Homo sapien
tatctgccagaacagctgtaagaga

SEQ ID NO: 4293707 - DNA, 25 bp, Homo sapien
tcctactaaatactcagggtgatga

SEQ ID NO: 4293708 - DNA, 25 bp, Homo sapien
aattgcaggtcgcatctgcttattg

SEQ ID NO: 4293709 - DNA, 25 bp, Homo sapien
ttcccgaacagtgatctaaaattgc

SEQ ID NO: 4293710 - DNA, 25 bp, Homo sapien
tgtgtttgtccacttatttcccgaa

SEQ ID NO: 4293711 - DNA, 25 bp, Homo sapien
aggaactcccatcttgtatttgcat

SEQ ID NO: 4293712 - DNA, 25 bp, Homo sapien
ggtattatgataccaatagtggtga

SEQ ID NO: 4293713 - DNA, 25 bp, Homo sapien
cgggtattctttaagtggttatgag

SEQ ID NO: 4293714 - DNA, 25 bp, Homo sapien
tgtatttgcatagtggtataggaag

SEQ ID NO: 4293715 - DNA, 25 bp, Homo sapien
tgcgtcttgtaccattggacatctt

SEQ ID NO: 4293716 - DNA, 25 bp, Homo sapien
gggacacaggaatgcgtcttgtacc

SEQ ID NO: 4293717 - DNA, 25 bp, Homo sapien
gcttgatccaccattttaaggccat

SEQ ID NO: 4293718 - DNA, 25 bp, Homo sapien
ccatattgcttgatccaccatttta

SEQ ID NO: 4293719 - DNA, 25 bp, Homo sapien
ttcgggcaatgacgtgaggaatgct

SEQ ID NO: 4293720 - DNA, 25 bp, Homo sapien
ccttgttgtttgtgtcttcgggcaa

SEQ ID NO: 4293721 - DNA, 25 bp, Homo sapien
aggagccaactgtccttgtataggg

SEQ ID NO: 4293722 - DNA, 25 bp, Homo sapien
gagtgtctgtggctcgaccaatcct

SEQ ID NO: 4293723 - DNA, 25 bp, Homo sapien
ctggatgtatgacaatgatgaagtt

SEQ ID NO: 4293724 - DNA, 25 bp, Homo sapien
atgacaatgatgaagttgctctgga

SEQ ID NO: 4293725 - DNA, 25 bp, Homo sapien
caatgatgaagttgctctggatttg

SEQ ID NO: 4293726 - DNA, 25 bp, Homo sapien
gacaatgatgaagttgctctggatt

SEQ ID NO: 4293727 - DNA, 25 bp, Homo sapien
ctgcagatataaaacatagatgtgt

SEQ ID NO: 4293728 - DNA, 25 bp, Homo sapien
gagatcggagcggtgtccctgcggg

SEQ ID NO: 4293729 - DNA, 25 bp, Homo sapien
aggagcgcacacaaccagacggtgg

SEQ ID NO: 4293730 - DNA, 25 bp, Homo sapien
gggcgtgcgggagatcggagcggtg

SEQ ID NO: 4293731 - DNA, 25 bp, Homo sapien
cgggcaggagcgcacacaaccagac

SEQ ID NO: 4293732 - DNA, 25 bp, Homo sapien
cgttctccgtatcacccttctcagc

SEQ ID NO: 4293733 - DNA, 25 bp, Homo sapien
cgcgggcacgatgggccgcttcacg

SEQ ID NO: 4293734 - DNA, 25 bp, Homo sapien
gcttcacgccgcgctgctccttctc

SEQ ID NO: 4293735 - DNA, 25 bp, Homo sapien
agcgactccggcaccagcgcgggca

SEQ ID NO: 4293736 - DNA, 25 bp, Homo sapien
ggatggaagggccaccgcgcaggcg

SEQ ID NO: 4293737 - DNA, 25 bp, Homo sapien
cggagtcgccccagagggctccgaa

SEQ ID NO: 4293738 - DNA, 25 bp, Homo sapien
gcagccacgactgccgggatggaag

SEQ ID NO: 4293739 - DNA, 25 bp, Homo sapien
cgccccagagggctccgaaaaggcg

SEQ ID NO: 4293740 - DNA, 25 bp, Homo sapien
ctatctgaagtgcaaagaagaatac

SEQ ID NO: 4293741 - DNA, 25 bp, Homo sapien
gacaagagttaagcataaagtactc

SEQ ID NO: 4293742 - DNA, 25 bp, Homo sapien
ggcataattcactcaagatcataag

SEQ ID NO: 4293743 - DNA, 25 bp, Homo sapien
agtactcaagaacctgtgttttaca

SEQ ID NO: 4293744 - DNA, 25 bp, Homo sapien
ctgaatgtcaaatgcagccagaact

SEQ ID NO: 4293745 - DNA, 25 bp, Homo sapien
tcactggcaatacaatctaggaagc

SEQ ID NO: 4293746 - DNA, 25 bp, Homo sapien
gctgccaaactttactgaacccttg

SEQ ID NO: 4293747 - DNA, 25 bp, Homo sapien
tctccccgctatagggtaaggtgga

SEQ ID NO: 4293748 - DNA, 25 bp, Homo sapien
ggcagaagaggaccatggttcacat

SEQ ID NO: 4293749 - DNA, 25 bp, Homo sapien
cacctgaacacttggtttcaaagcc

SEQ ID NO: 4293750 - DNA, 25 bp, Homo sapien
caaacggggttgaataaatgctgat

SEQ ID NO: 4293751 - DNA, 25 bp, Homo sapien
gtttcaaagcctgttaaacaccaga

SEQ ID NO: 4293752 - DNA, 25 bp, Homo sapien
tataaaaaggctttcacctgaacac

SEQ ID NO: 4293753 - DNA, 25 bp, Homo sapien
aaactcgtgaacttaggcgatctgc

SEQ ID NO: 4293754 - DNA, 25 bp, Homo sapien
cagtattcagatggagtttaaagcc

SEQ ID NO: 4293755 - DNA, 25 bp, Homo sapien
tgtagtcactattcaaaggactggg

SEQ ID NO: 4293756 - DNA, 25 bp, Homo sapien
tttgtcaagatagcatggaagccca

SEQ ID NO: 4293757 - DNA, 25 bp, Homo sapien
gctttttcgtgaatataaagatgag

SEQ ID NO: 4293758 - DNA, 25 bp, Homo sapien
ctttttcgtgaatataaagatgagg

SEQ ID NO: 4293759 - DNA, 25 bp, Homo sapien
gaggagtccattctgcaacctaaaa

SEQ ID NO: 4293760 - DNA, 25 bp, Homo sapien
atgaggagtccattctgcaacctaa

SEQ ID NO: 4293761 - DNA, 25 bp, Homo sapien
aaaaggtaatgagacaaacatctgc

SEQ ID NO: 4293762 - DNA, 25 bp, Homo sapien
cacattcatctactgctcatcatgg

SEQ ID NO: 4293763 - DNA, 25 bp, Homo sapien
catgtccggttgtctgcttcttaga

SEQ ID NO: 4293764 - DNA, 25 bp, Homo sapien
tcatcatggtcagccttccacttct

SEQ ID NO: 4293765 - DNA, 25 bp, Homo sapien
caacatattacatgttataaaatct

SEQ ID NO: 4293766 - DNA, 25 bp, Homo sapien
tagttactggttattaatttggatc

SEQ ID NO: 4293767 - DNA, 25 bp, Homo sapien
ggatctgtgtgaaaacctcaacata

SEQ ID NO: 4293768 - DNA, 25 bp, Homo sapien
aaatgttacaataattagttactgg

SEQ ID NO: 4293769 - DNA, 25 bp, Homo sapien
cacgcagatgattgattctacccat

SEQ ID NO: 4293770 - DNA, 25 bp, Homo sapien
tagggccacgcagatgattgattct

SEQ ID NO: 4293771 - DNA, 25 bp, Homo sapien
gggactagggccacgcagatgattg

SEQ ID NO: 4293772 - DNA, 25 bp, Homo sapien
ccaccagccattggagggggactag

SEQ ID NO: 4293773 - DNA, 25 bp, Homo sapien
tagcccagtgctacttgatcttgat

SEQ ID NO: 4293774 - DNA, 25 bp, Homo sapien
tagaaactaccattttaggtcagga

SEQ ID NO: 4293775 - DNA, 25 bp, Homo sapien
cacaaggaactgagtcaagaaagga

SEQ ID NO: 4293776 - DNA, 25 bp, Homo sapien
gaatagcacctccagtaatgcccca

SEQ ID NO: 4293777 - DNA, 25 bp, Homo sapien
catatctggaatcagatgagtttcc

SEQ ID NO: 4293778 - DNA, 25 bp, Homo sapien
tcagatgagtttccatagcttcttc

SEQ ID NO: 4293779 - DNA, 25 bp, Homo sapien
cagatgagtttccatagcttcttct

SEQ ID NO: 4293780 - DNA, 25 bp, Homo sapien
cttccatcatcatatctggaatcag

SEQ ID NO: 4293781 - DNA, 25 bp, Homo sapien
aaagataatctccatggagactgac

SEQ ID NO: 4293782 - DNA, 25 bp, Homo sapien
aagataatctccatggagactgact

SEQ ID NO: 4293783 - DNA, 25 bp, Homo sapien
caaagataatctccatggagactga

SEQ ID NO: 4293784 - DNA, 25 bp, Homo sapien
agataatctccatggagactgactc

SEQ ID NO: 4293785 - DNA, 25 bp, Homo sapien
taaagagtacagttctgtgatatta

SEQ ID NO: 4293786 - DNA, 25 bp, Homo sapien
agagtacagttctgtgatattaagt

SEQ ID NO: 4293787 - DNA, 25 bp, Homo sapien
caatggttaccaatggttaaccatt

SEQ ID NO: 4293788 - DNA, 25 bp, Homo sapien
aatgtaacaatggttaccaatggtt

SEQ ID NO: 4293789 - DNA, 25 bp, Homo sapien
gaggaaagaccaccctcgcaaatcc

SEQ ID NO: 4293790 - DNA, 25 bp, Homo sapien
aatcaagcgcttgctgcacgaaggc

SEQ ID NO: 4293791 - DNA, 25 bp, Homo sapien
tttaaggataccgacacccgagaga

SEQ ID NO: 4293792 - DNA, 25 bp, Homo sapien
tcccagtactcaacgtgaggccggc

SEQ ID NO: 4293793 - DNA, 25 bp, Homo sapien
gcccttcgagcgtcacaggccgcga

SEQ ID NO: 4293794 - DNA, 25 bp, Homo sapien
gctccccgcccttcgagcgtcacag

SEQ ID NO: 4293795 - DNA, 25 bp, Homo sapien
cccgcccttcgagcgtcacaggccg

SEQ ID NO: 4293796 - DNA, 25 bp, Homo sapien
cccctgtcggtttctgtatctccct

SEQ ID NO: 4293797 - DNA, 25 bp, Homo sapien
ggctgctgaaagagacgcgcccccg

SEQ ID NO: 4293798 - DNA, 25 bp, Homo sapien
tgctgacgaggacgaaggtgggcag

SEQ ID NO: 4293799 - DNA, 25 bp, Homo sapien
aatgctgacgaggacgaaggtgggc

SEQ ID NO: 4293800 - DNA, 25 bp, Homo sapien
tgctgaaagagacgcgcccccgacg

SEQ ID NO: 4293801 - DNA, 25 bp, Homo sapien
atttcaggattctctgcagaaccac

SEQ ID NO: 4293802 - DNA, 25 bp, Homo sapien
cgtacttaaagccagaacctgagca

SEQ ID NO: 4293803 - DNA, 25 bp, Homo sapien
tacatctagtatgggaggttggcac

SEQ ID NO: 4293804 - DNA, 25 bp, Homo sapien
ttcctcagtcgcctaaagtaggagg

SEQ ID NO: 4293805 - DNA, 25 bp, Homo sapien
gataactgcaggacgaaggctggcc

SEQ ID NO: 4293806 - DNA, 25 bp, Homo sapien
acaccactttagcatccttcctccc

SEQ ID NO: 4293807 - DNA, 25 bp, Homo sapien
catccacaccactttagcatccttc

SEQ ID NO: 4293808 - DNA, 25 bp, Homo sapien
tccatccacaccactttagcatcct

SEQ ID NO: 4293809 - DNA, 25 bp, Homo sapien
tccacaccactttagcatccttcct

SEQ ID NO: 4293810 - DNA, 25 bp, Homo sapien
tccacggcgctgatcctttccatct

SEQ ID NO: 4293811 - DNA, 25 bp, Homo sapien
gtatctaaatccaatgatgcgcagc

SEQ ID NO: 4293812 - DNA, 25 bp, Homo sapien
tgtggatagtatctaaatccaatga

SEQ ID NO: 4293813 - DNA, 25 bp, Homo sapien
taaatccaatgatgcgcagctccac

SEQ ID NO: 4293814 - DNA, 25 bp, Homo sapien
cagcttgtcggaagaaaaaggtcgt

SEQ ID NO: 4293815 - DNA, 25 bp, Homo sapien
ctgtagcaatcaggacggccaggca

SEQ ID NO: 4293816 - DNA, 25 bp, Homo sapien
caaaccgccagttcagctgtagcaa

SEQ ID NO: 4293817 - DNA, 25 bp, Homo sapien
aaggtcgtgttccacaaaccgccag

SEQ ID NO: 4293818 - DNA, 25 bp, Homo sapien
cctctgggtgcaatttatcactgct

SEQ ID NO: 4293819 - DNA, 25 bp, Homo sapien
gtgccctctgggtgcaatttatcac

SEQ ID NO: 4293820 - DNA, 25 bp, Homo sapien
tcaagggcaacagactcagaatagg

SEQ ID NO: 4293821 - DNA, 25 bp, Homo sapien
aagctgctctggaccttggttggga

SEQ ID NO: 4293822 - DNA, 25 bp, Homo sapien
gacgactgcttaaacaataactgag

SEQ ID NO: 4293823 - DNA, 25 bp, Homo sapien
tggactccagatgggagcataaagc

SEQ ID NO: 4293824 - DNA, 25 bp, Homo sapien
aatgccattgaggaaccaggtgttt

SEQ ID NO: 4293825 - DNA, 25 bp, Homo sapien
cataaagctgtttgaaaccccaacg

SEQ ID NO: 4293826 - DNA, 25 bp, Homo sapien
taaagcacagctgtagacctggaaa

SEQ ID NO: 4293827 - DNA, 25 bp, Homo sapien
cagccccctaataaagcacagctgt

SEQ ID NO: 4293828 - DNA, 25 bp, Homo sapien
gcagccccctaataaagcacagctg

SEQ ID NO: 4293829 - DNA, 25 bp, Homo sapien
tggctgcagccccctaataaagcac

SEQ ID NO: 4293830 - DNA, 25 bp, Homo sapien
tcagagctgatgacccgacatggtt

SEQ ID NO: 4293831 - DNA, 25 bp, Homo sapien
catggttagtcgctcacaagcttga

SEQ ID NO: 4293832 - DNA, 25 bp, Homo sapien
aagagccattttatatccaagggaa

SEQ ID NO: 4293833 - DNA, 25 bp, Homo sapien
tagttgtggcctggagaagagccat

SEQ ID NO: 4293834 - DNA, 25 bp, Homo sapien
acaggaacacgtggtgagtggctca

SEQ ID NO: 4293835 - DNA, 25 bp, Homo sapien
caaagaatctggtacagggtgttcc

SEQ ID NO: 4293836 - DNA, 25 bp, Homo sapien
tcaacagaatctgggtgataccgag

SEQ ID NO: 4293837 - DNA, 25 bp, Homo sapien
gaactccaaagaatctggtacaggg

SEQ ID NO: 4293838 - DNA, 25 bp, Homo sapien
ctaggaatgtctgtagccaacgccc

SEQ ID NO: 4293839 - DNA, 25 bp, Homo sapien
cagaagagtagctccctaggaatgt

SEQ ID NO: 4293840 - DNA, 25 bp, Homo sapien
gaattcatctgagtcccttggagag

SEQ ID NO: 4293841 - DNA, 25 bp, Homo sapien
gctccaagaggaagttgtgcaccca

SEQ ID NO: 4293842 - DNA, 25 bp, Homo sapien
ggattcccagagtgatgttccacat

SEQ ID NO: 4293843 - DNA, 25 bp, Homo sapien
taatggtgtccggaagggattccca

SEQ ID NO: 4293844 - DNA, 25 bp, Homo sapien
caagtaggtcctcgtaggcagtaac

SEQ ID NO: 4293845 - DNA, 25 bp, Homo sapien
ggtttcagattcgtgtccccagagt

SEQ ID NO: 4293846 - DNA, 25 bp, Homo sapien
caagcagcaaggagctgggcttgca

SEQ ID NO: 4293847 - DNA, 25 bp, Homo sapien
ctgctggcaaaggcaggcaagcagc

SEQ ID NO: 4293848 - DNA, 25 bp, Homo sapien
cagcaaggagctgggcttgcacggc

SEQ ID NO: 4293849 - DNA, 25 bp, Homo sapien
agcagcaaggagctgggcttgcacg

SEQ ID NO: 4293850 - DNA, 25 bp, Homo sapien
cacaggtgccgccaaacctgggaca

SEQ ID NO: 4293851 - DNA, 25 bp, Homo sapien
ctacctcgaagcaggaaccacaggt

SEQ ID NO: 4293852 - DNA, 25 bp, Homo sapien
ttctacctcgaagcaggaaccacag

SEQ ID NO: 4293853 - DNA, 25 bp, Homo sapien
acctcgaagcaggaaccacaggtgc

SEQ ID NO: 4293854 - DNA, 25 bp, Homo sapien
gacagtggaggtgagtcctctgaac

SEQ ID NO: 4293855 - DNA, 25 bp, Homo sapien
gaacctgagaggagccaatatagat

SEQ ID NO: 4293856 - DNA, 25 bp, Homo sapien
tatagatgctacaggcctgggtcgg

SEQ ID NO: 4293857 - DNA, 25 bp, Homo sapien
tgctggctggaatctgtatgcacca

SEQ ID NO: 4293858 - DNA, 25 bp, Homo sapien
gaaaagttgcttgacaggacgggca

SEQ ID NO: 4293859 - DNA, 25 bp, Homo sapien
tttacaaatgctctcctcgccgagt

SEQ ID NO: 4293860 - DNA, 25 bp, Homo sapien
tatttgctgccatgttgtgcggagc

SEQ ID NO: 4293861 - DNA, 25 bp, Homo sapien
tactcctaggacgtgactctgcttg

SEQ ID NO: 4293862 - DNA, 25 bp, Homo sapien
agagcgaccgttacttcccgggctg

SEQ ID NO: 4293863 - DNA, 25 bp, Homo sapien
caggtctctcgagttctaggctgag

SEQ ID NO: 4293864 - DNA, 25 bp, Homo sapien
tcagcggctctgtgaaacatctcct

SEQ ID NO: 4293865 - DNA, 25 bp, Homo sapien
tccagcaagccctggcaacggagat

SEQ ID NO: 4293866 - DNA, 25 bp, Homo sapien
tgaaatggtaagaggtggttccttg

SEQ ID NO: 4293867 - DNA, 25 bp, Homo sapien
ccaagttgccgtgtgaaatggtaag

SEQ ID NO: 4293868 - DNA, 25 bp, Homo sapien
cagacatagaatccaagttgccgtg

SEQ ID NO: 4293869 - DNA, 25 bp, Homo sapien
tagaatccaagttgccgtgtgaaat

SEQ ID NO: 4293870 - DNA, 25 bp, Homo sapien
acagtccaccggtgactcaggtctt

SEQ ID NO: 4293871 - DNA, 25 bp, Homo sapien
cctgctggctgaatcctgcttccgt

SEQ ID NO: 4293872 - DNA, 25 bp, Homo sapien
tctctgacagtccaccggtgactca

SEQ ID NO: 4293873 - DNA, 25 bp, Homo sapien
ctgctggctgaatcctgcttccgtg

SEQ ID NO: 4293874 - DNA, 25 bp, Homo sapien
aaccacgtagaatgttgcctgcata

SEQ ID NO: 4293875 - DNA, 25 bp, Homo sapien
aatgttgcctgcatacagctcagca

SEQ ID NO: 4293876 - DNA, 25 bp, Homo sapien
tcttttcacctacaatatctgaaac

SEQ ID NO: 4293877 - DNA, 25 bp, Homo sapien
tcacctacaatatctgaaaccacgt

SEQ ID NO: 4293878 - DNA, 25 bp, Homo sapien
gctaccccttctactaagaaagcaa

SEQ ID NO: 4293879 - DNA, 25 bp, Homo sapien
gtcacagttatctcccaagcaatac

SEQ ID NO: 4293880 - DNA, 25 bp, Homo sapien
cgaactttgtgagcatgagtcacag

SEQ ID NO: 4293881 - DNA, 25 bp, Homo sapien
ctttgcgaactttgtgagcatgagt

SEQ ID NO: 4293882 - DNA, 25 bp, Homo sapien
gttagaatatcgtcgtggttgtcct

SEQ ID NO: 4293883 - DNA, 25 bp, Homo sapien
tgcttcacttgctgccattgctaat

SEQ ID NO: 4293884 - DNA, 25 bp, Homo sapien
gcttcacttgctgccattgctaata

SEQ ID NO: 4293885 - DNA, 25 bp, Homo sapien
gtccacatgttagaatatcgtcgtg

SEQ ID NO: 4293886 - DNA, 25 bp, Homo sapien
tgagaacggctttgctaattttcct

SEQ ID NO: 4293887 - DNA, 25 bp, Homo sapien
aataaactgctgcaaactgggtcat

SEQ ID NO: 4293888 - DNA, 25 bp, Homo sapien
ctgggtcatgttcggtgggttggtt

SEQ ID NO: 4293889 - DNA, 25 bp, Homo sapien
gtcccttctctatacataataagtt

SEQ ID NO: 4293890 - DNA, 25 bp, Homo sapien
atgctgaggctcaattatcattgca

SEQ ID NO: 4293891 - DNA, 25 bp, Homo sapien
ttgatggatttctttgacaatcagc

SEQ ID NO: 4293892 - DNA, 25 bp, Homo sapien
tgctgaggctcaattatcattgcag

SEQ ID NO: 4293893 - DNA, 25 bp, Homo sapien
aatgctgaggctcaattatcattgc

SEQ ID NO: 4293894 - DNA, 25 bp, Homo sapien
ctaagtgctttcacgggtatgattc

SEQ ID NO: 4293895 - DNA, 25 bp, Homo sapien
gtatgattctgtggcggtatacact

SEQ ID NO: 4293896 - DNA, 25 bp, Homo sapien
ttctgtggcggtatacacttgtgct

SEQ ID NO: 4293897 - DNA, 25 bp, Homo sapien
ctttcacgggtatgattctgtggcg

SEQ ID NO: 4293898 - DNA, 25 bp, Homo sapien
ctccaggcacatctttaggaatagg

SEQ ID NO: 4293899 - DNA, 25 bp, Homo sapien
ccaggcacatctttaggaataggcg

SEQ ID NO: 4293900 - DNA, 25 bp, Homo sapien
tccaggcacatctttaggaataggc

SEQ ID NO: 4293901 - DNA, 25 bp, Homo sapien
caggcacatctttaggaataggcgg

SEQ ID NO: 4293902 - DNA, 25 bp, Homo sapien
taaggggcactctgcaggtgtgcca

SEQ ID NO: 4293903 - DNA, 25 bp, Homo sapien
ggctgcattcgtgggcaagtttctt

SEQ ID NO: 4293904 - DNA, 25 bp, Homo sapien
ccagacatgcagattgtcagagaga

SEQ ID NO: 4293905 - DNA, 25 bp, Homo sapien
ttcttgcttagaccccagagtgtga

SEQ ID NO: 4293906 - DNA, 25 bp, Homo sapien
gatgatcctaatttcggctgtcaag

SEQ ID NO: 4293907 - DNA, 25 bp, Homo sapien
cacttcttggatgatcctaatttcg

SEQ ID NO: 4293908 - DNA, 25 bp, Homo sapien
gctgtcaagatgtggacaatgcgca

SEQ ID NO: 4293909 - DNA, 25 bp, Homo sapien
ctaatttcggctgtcaagatgtgga

SEQ ID NO: 4293910 - DNA, 25 bp, Homo sapien
gaaggacattgagtggtgagggaag

SEQ ID NO: 4293911 - DNA, 25 bp, Homo sapien
cttcgggaaggacattgagtggtga

SEQ ID NO: 4293912 - DNA, 25 bp, Homo sapien
acccgccttgcaagcaaggtcagct

SEQ ID NO: 4293913 - DNA, 25 bp, Homo sapien
agggacacccgccttgcaagcaagg

SEQ ID NO: 4293914 - DNA, 25 bp, Homo sapien
ggccctgcatacagcctgctattct

SEQ ID NO: 4293915 - DNA, 25 bp, Homo sapien
aggggaacccctgcaagtggtcctg

SEQ ID NO: 4293916 - DNA, 25 bp, Homo sapien
aatctgagccctttggcgggatggc

SEQ ID NO: 4293917 - DNA, 25 bp, Homo sapien
tattctagccttaggtttgcatttc

SEQ ID NO: 4293918 - DNA, 25 bp, Homo sapien
taccagtccttgagggcccagtttc

SEQ ID NO: 4293919 - DNA, 25 bp, Homo sapien
gcggcacagccgtcagccagacagt

SEQ ID NO: 4293920 - DNA, 25 bp, Homo sapien
ccggtttccgcctttgttctctctg

SEQ ID NO: 4293921 - DNA, 25 bp, Homo sapien
cagacagtccaagtgggaccctcta

SEQ ID NO: 4293922 - DNA, 25 bp, Homo sapien
ggctggtctttcagcataagagtta

SEQ ID NO: 4293923 - DNA, 25 bp, Homo sapien
gctggcggtgttgcatggttctctc

SEQ ID NO: 4293924 - DNA, 25 bp, Homo sapien
tttctcagccgaggactgctggcgg

SEQ ID NO: 4293925 - DNA, 25 bp, Homo sapien
ggacagccgtcagttggctggtctt

SEQ ID NO: 4293926 - DNA, 25 bp, Homo sapien
aagtaatggtcactgtctgacggat

SEQ ID NO: 4293927 - DNA, 25 bp, Homo sapien
cctgattttgttagtatgattgctg

SEQ ID NO: 4293928 - DNA, 25 bp, Homo sapien
tctgacggatttgcttcttgcaaca

SEQ ID NO: 4293929 - DNA, 25 bp, Homo sapien
tgctgaaaatggagtggtctattaa

SEQ ID NO: 4293930 - DNA, 25 bp, Homo sapien
aatagcacgttatgctcagttcttg

SEQ ID NO: 4293931 - DNA, 25 bp, Homo sapien
tagcacgttatgctcagttcttgct

SEQ ID NO: 4293932 - DNA, 25 bp, Homo sapien
cacgttatgctcagttcttgctgcc

SEQ ID NO: 4293933 - DNA, 25 bp, Homo sapien
ttagaatagcacgttatgctcagtt

SEQ ID NO: 4293934 - DNA, 25 bp, Homo sapien
aaatcaagtgcttttgtaaaggatc

SEQ ID NO: 4293935 - DNA, 25 bp, Homo sapien
cccacagggatgtaactgaggattc

SEQ ID NO: 4293936 - DNA, 25 bp, Homo sapien
taaaggatctgtgtctagggtaagc

SEQ ID NO: 4293937 - DNA, 25 bp, Homo sapien
tgaggattctcttgagagaaacagt

SEQ ID NO: 4293938 - DNA, 25 bp, Homo sapien
cgggtctgcccgcactcgggaaaag

SEQ ID NO: 4293939 - DNA, 25 bp, Homo sapien
tcgggaaaagcactaagagcctctc

SEQ ID NO: 4293940 - DNA, 25 bp, Homo sapien
tgggagcgcgacctgccagagccca

SEQ ID NO: 4293941 - DNA, 25 bp, Homo sapien
ctctgagatcaagcccaacatctgc

SEQ ID NO: 4293942 - DNA, 25 bp, Homo sapien
ctggaaaggagagccggcctggctc

SEQ ID NO: 4293943 - DNA, 25 bp, Homo sapien
gcctggctcctagccggacaccacc

SEQ ID NO: 4293944 - DNA, 25 bp, Homo sapien
gcggaagctggagcccgcccttact

SEQ ID NO: 4293945 - DNA, 25 bp, Homo sapien
cttacttccctgcaacctgaggatg

SEQ ID NO: 4293946 - DNA, 25 bp, Homo sapien
cccaggctcggagaaatcttttatc

SEQ ID NO: 4293947 - DNA, 25 bp, Homo sapien
agcctggttcccagaacgcgcaggg

SEQ ID NO: 4293948 - DNA, 25 bp, Homo sapien
atcttttatcccgaaatccagggtg

SEQ ID NO: 4293949 - DNA, 25 bp, Homo sapien
tggtgcgcccaagccgtggtggcag

SEQ ID NO: 4293950 - DNA, 25 bp, Homo sapien
tcgggcgccgcggccggaggagcag

SEQ ID NO: 4293951 - DNA, 25 bp, Homo sapien
gtcgggcgccgcggccggaggagca

SEQ ID NO: 4293952 - DNA, 25 bp, Homo sapien
tgtcgggcgccgcggccggaggagc

SEQ ID NO: 4293953 - DNA, 25 bp, Homo sapien
ctgtcgggcgccgcggccggaggag

SEQ ID NO: 4293954 - DNA, 25 bp, Homo sapien
cgtcgccgccgcagcgggcgcgtcg

SEQ ID NO: 4293955 - DNA, 25 bp, Homo sapien
cgccgccgcagcgggcgcgtcggag

SEQ ID NO: 4293956 - DNA, 25 bp, Homo sapien
gtcgccgccgcagcgggcgcgtcgg

SEQ ID NO: 4293957 - DNA, 25 bp, Homo sapien
cgggcgcgtcggagggagcccagca

SEQ ID NO: 4293958 - DNA, 25 bp, Homo sapien
taccgctctccgtgtaagtgccggc

SEQ ID NO: 4293959 - DNA, 25 bp, Homo sapien
cgctcggagcagcagataccgctct

SEQ ID NO: 4293960 - DNA, 25 bp, Homo sapien
cactgtgcccaagtttgggcgcctg

SEQ ID NO: 4293961 - DNA, 25 bp, Homo sapien
tctccgtgtaagtgccggctcctgc

SEQ ID NO: 4293962 - DNA, 25 bp, Homo sapien
gcagatgctcctcgggccaaaaaat

SEQ ID NO: 4293963 - DNA, 25 bp, Homo sapien
ttgcatggctctcgtctccgtgtcg

SEQ ID NO: 4293964 - DNA, 25 bp, Homo sapien
tgtttcagtgccagagcagatgctc

SEQ ID NO: 4293965 - DNA, 25 bp, Homo sapien
ctttcaccttgcgttggaggcgtgg

SEQ ID NO: 4293966 - DNA, 25 bp, Homo sapien
ctttcataatgcggaacataaaggg

SEQ ID NO: 4293967 - DNA, 25 bp, Homo sapien
gttgcttgggcattgtcatttgctt

SEQ ID NO: 4293968 - DNA, 25 bp, Homo sapien
ggaattcttagtcttgttgcttggg

SEQ ID NO: 4293969 - DNA, 25 bp, Homo sapien
cccggtggaattcttagtcttgttg

SEQ ID NO: 4293970 - DNA, 25 bp, Homo sapien
catccacagaacgttccttgggtga

SEQ ID NO: 4293971 - DNA, 25 bp, Homo sapien
cagaacgttccttgggtgatctcac

SEQ ID NO: 4293972 - DNA, 25 bp, Homo sapien
aacgttccttgggtgatctcactgc

SEQ ID NO: 4293973 - DNA, 25 bp, Homo sapien
ctgcagcatccacagaacgttcctt

SEQ ID NO: 4293974 - DNA, 25 bp, Homo sapien
tacaaatccgtgtgcgtggaggctg

SEQ ID NO: 4293975 - DNA, 25 bp, Homo sapien
ggctggcacagggtatagcctttct

SEQ ID NO: 4293976 - DNA, 25 bp, Homo sapien
cctttctcaatgtgggcggcatgaa

SEQ ID NO: 4293977 - DNA, 25 bp, Homo sapien
caggtctgaagcatgggctggcaca

SEQ ID NO: 4293978 - DNA, 25 bp, Homo sapien
ccactgcatccggtgtttgttattg

SEQ ID NO: 4293979 - DNA, 25 bp, Homo sapien
gcacccactgcatccggtgtttgtt

SEQ ID NO: 4293980 - DNA, 25 bp, Homo sapien
agaaatgatggcttgtacttcttgg

SEQ ID NO: 4293981 - DNA, 25 bp, Homo sapien
atctccttctctgaccaggggtcat

SEQ ID NO: 4293982 - DNA, 25 bp, Homo sapien
cctgcagctgtctgcatcaggtgtc

SEQ ID NO: 4293983 - DNA, 25 bp, Homo sapien
tgttgccctgcagctgtctgcatca

SEQ ID NO: 4293984 - DNA, 25 bp, Homo sapien
tgccctgcagctgtctgcatcaggt

SEQ ID NO: 4293985 - DNA, 25 bp, Homo sapien
ctgcagctgtctgcatcaggtgtct

SEQ ID NO: 4293986 - DNA, 25 bp, Homo sapien
aggcatgcacgggctgctgtcccca

SEQ ID NO: 4293987 - DNA, 25 bp, Homo sapien
agggaggcatgcacgggctgctgtc

SEQ ID NO: 4293988 - DNA, 25 bp, Homo sapien
gggaggcatgcacgggctgctgtcc

SEQ ID NO: 4293989 - DNA, 25 bp, Homo sapien
ggagggaggcatgcacgggctgctg

SEQ ID NO: 4293990 - DNA, 25 bp, Homo sapien
ccttttgggaacaatgctgctctct

SEQ ID NO: 4293991 - DNA, 25 bp, Homo sapien
gagtggcttggtacatccacggata

SEQ ID NO: 4293992 - DNA, 25 bp, Homo sapien
ttggcctctagttcccgagcacagg

SEQ ID NO: 4293993 - DNA, 25 bp, Homo sapien
gactttcttgaaggcgctggtccct

SEQ ID NO: 4293994 - DNA, 25 bp, Homo sapien
gacgaggagcagcttgtagggtgag

SEQ ID NO: 4293995 - DNA, 25 bp, Homo sapien
ccacagcagtgtacctccaggttct

SEQ ID NO: 4293996 - DNA, 25 bp, Homo sapien
tgaggacagcaagctcggtccccag

SEQ ID NO: 4293997 - DNA, 25 bp, Homo sapien
acagcaagctcggtccccagtgtga

SEQ ID NO: 4293998 - DNA, 25 bp, Homo sapien
gctggggcagtgagcaaggtcacca

SEQ ID NO: 4293999 - DNA, 25 bp, Homo sapien
tgctggggcagtgagcaaggtcacc

SEQ ID NO: 4294000 - DNA, 25 bp, Homo sapien
cagtgagcaaggtcaccaggatgca

SEQ ID NO: 4294001 - DNA, 25 bp, Homo sapien
gggcagtgagcaaggtcaccaggat

SEQ ID NO: 4294002 - DNA, 25 bp, Homo sapien
cagctcataatctggtttcacattc

SEQ ID NO: 4294003 - DNA, 25 bp, Homo sapien
ttagcagctcataatctggtttcac

SEQ ID NO: 4294004 - DNA, 25 bp, Homo sapien
taggggttctgagtctcctcatttt

SEQ ID NO: 4294005 - DNA, 25 bp, Homo sapien
aaggtttagcagctcataatctggt

SEQ ID NO: 4294006 - DNA, 25 bp, Homo sapien
cttccccagaacttgtttgagacaa

SEQ ID NO: 4294007 - DNA, 25 bp, Homo sapien
gtcatgggcagtgctcttccccaga

SEQ ID NO: 4294008 - DNA, 25 bp, Homo sapien
ttccccagaacttgtttgagacaag

SEQ ID NO: 4294009 - DNA, 25 bp, Homo sapien
atgggcagtgctcttccccagaact

SEQ ID NO: 4294010 - DNA, 25 bp, Homo sapien
catgatgtcaggtgcagcaggaggt

SEQ ID NO: 4294011 - DNA, 25 bp, Homo sapien
caggcatgatgtcaggtgcagcagg

SEQ ID NO: 4294012 - DNA, 25 bp, Homo sapien
ggcatgatgtcaggtgcagcaggag

SEQ ID NO: 4294013 - DNA, 25 bp, Homo sapien
tgatgtcaggtgcagcaggaggtac

SEQ ID NO: 4294014 - DNA, 25 bp, Homo sapien
cattttggtacagtgtggttggttc

SEQ ID NO: 4294015 - DNA, 25 bp, Homo sapien
acctagggaacagctcattttggta

SEQ ID NO: 4294016 - DNA, 25 bp, Homo sapien
gggacaagacctagggaacagctca

SEQ ID NO: 4294017 - DNA, 25 bp, Homo sapien
caagacctagggaacagctcatttt

SEQ ID NO: 4294018 - DNA, 25 bp, Homo sapien
ctccccaaaccctccaggagttctg

SEQ ID NO: 4294019 - DNA, 25 bp, Homo sapien
ccaaaccctccaggagttctgagtc

SEQ ID NO: 4294020 - DNA, 25 bp, Homo sapien
aaaccctccaggagttctgagtctc

SEQ ID NO: 4294021 - DNA, 25 bp, Homo sapien
ccctccaggagttctgagtctctac

SEQ ID NO: 4294022 - DNA, 25 bp, Homo sapien
gccgcaggatgggaccaacagttcc

SEQ ID NO: 4294023 - DNA, 25 bp, Homo sapien
tgtgaatctcacctcgagaatcctc

SEQ ID NO: 4294024 - DNA, 25 bp, Homo sapien
gaaatctgtgaatctcacctcgaga

SEQ ID NO: 4294025 - DNA, 25 bp, Homo sapien
tgctgccgcaggatgggaccaacag

SEQ ID NO: 4294026 - DNA, 25 bp, Homo sapien
tgccctgagctccacattctcctcc

SEQ ID NO: 4294027 - DNA, 25 bp, Homo sapien
agctgccctgagctccacattctcc

SEQ ID NO: 4294028 - DNA, 25 bp, Homo sapien
cacattctcctcctcgggggactcc

SEQ ID NO: 4294029 - DNA, 25 bp, Homo sapien
tgagcgagcagtcacagctgccctg

SEQ ID NO: 4294030 - DNA, 25 bp, Homo sapien
tcaggtttgggagataatgtgtcca

SEQ ID NO: 4294031 - DNA, 25 bp, Homo sapien
ctcccgtggagtcttggtgaggtca

SEQ ID NO: 4294032 - DNA, 25 bp, Homo sapien
gtgtccaacttgaccagctcccgtg

SEQ ID NO: 4294033 - DNA, 25 bp, Homo sapien
ggtcaaggagaaccacatttggatt

SEQ ID NO: 4294034 - DNA, 25 bp, Homo sapien
cacatttgcataagggtgagtaggt

SEQ ID NO: 4294035 - DNA, 25 bp, Homo sapien
gagcctctgtacagaatctgggaca

SEQ ID NO: 4294036 - DNA, 25 bp, Homo sapien
tgttagtgagcccttcagtagagcc

SEQ ID NO: 4294037 - DNA, 25 bp, Homo sapien
tcgcttgggctaacatgatttcaca

SEQ ID NO: 4294038 - DNA, 25 bp, Homo sapien
ctgcgtggaagatcttctgtgcact

SEQ ID NO: 4294039 - DNA, 25 bp, Homo sapien
actgtcctgcgtggaagatcttctg

SEQ ID NO: 4294040 - DNA, 25 bp, Homo sapien
tctcactgtcctgcgtggaagatct

SEQ ID NO: 4294041 - DNA, 25 bp, Homo sapien
tcctgcgtggaagatcttctgtgca

SEQ ID NO: 4294042 - DNA, 25 bp, Homo sapien
ctttgcacagaagagcggtcctttg

SEQ ID NO: 4294043 - DNA, 25 bp, Homo sapien
tatttccacggatggcctgaccatg

SEQ ID NO: 4294044 - DNA, 25 bp, Homo sapien
tccgtgggctgccagtgtaaatcca

SEQ ID NO: 4294045 - DNA, 25 bp, Homo sapien
acaatgctgtttactctccgtgggc

SEQ ID NO: 4294046 - DNA, 25 bp, Homo sapien
aaatagaattaggagatggtttctg

SEQ ID NO: 4294047 - DNA, 25 bp, Homo sapien
agaattaggagatggtttctgacga

SEQ ID NO: 4294048 - DNA, 25 bp, Homo sapien
ttatttccacggatctgtcatctgt

SEQ ID NO: 4294049 - DNA, 25 bp, Homo sapien
tatttccacggatctgtcatctgtt

SEQ ID NO: 4294050 - DNA, 25 bp, Homo sapien
tttagtaagcagacacacgaagaaa

SEQ ID NO: 4294051 - DNA, 25 bp, Homo sapien
cacactggcagatgcctttggattt

SEQ ID NO: 4294052 - DNA, 25 bp, Homo sapien
cacgaagaaaaaggcgaagttgagt

SEQ ID NO: 4294053 - DNA, 25 bp, Homo sapien
gcgaagttgagtggcatcgtcacca

SEQ ID NO: 4294054 - DNA, 25 bp, Homo sapien
agggtttggttgcagggtcattaat

SEQ ID NO: 4294055 - DNA, 25 bp, Homo sapien
tattgtcaccctttattgtaagcat

SEQ ID NO: 4294056 - DNA, 25 bp, Homo sapien
cataaagaagaggtaacaaatggct

SEQ ID NO: 4294057 - DNA, 25 bp, Homo sapien
taaatattgtcaccctttattgtaa

SEQ ID NO: 4294058 - DNA, 25 bp, Homo sapien
attgtaagcataaagaagaggtaac

SEQ ID NO: 4294059 - DNA, 25 bp, Homo sapien
cttgactgtggaatcaaaaagcagg

SEQ ID NO: 4294060 - DNA, 25 bp, Homo sapien
ttgactgtggaatcaaaaagcagga

SEQ ID NO: 4294061 - DNA, 25 bp, Homo sapien
gagggcagagaccttattactagtc

SEQ ID NO: 4294062 - DNA, 25 bp, Homo sapien
accttattactagtctgtatctcca

SEQ ID NO: 4294063 - DNA, 25 bp, Homo sapien
cctggcaccaactttgagctcttgg

SEQ ID NO: 4294064 - DNA, 25 bp, Homo sapien
tcctggcaccaactttgagctcttg

SEQ ID NO: 4294065 - DNA, 25 bp, Homo sapien
aggacagcgttgctcctgccttcct

SEQ ID NO: 4294066 - DNA, 25 bp, Homo sapien
aagctccaggtgtggccatgaccct

SEQ ID NO: 4294067 - DNA, 25 bp, Homo sapien
cctccataatgggaagccctgccaa

SEQ ID NO: 4294068 - DNA, 25 bp, Homo sapien
tctctgaagccaggacagcgttgct

SEQ ID NO: 4294069 - DNA, 25 bp, Homo sapien
gccttcagcctccagatgactgtat

SEQ ID NO: 4294070 - DNA, 25 bp, Homo sapien
cattgctgatgaacggggtgacctt

SEQ ID NO: 4294071 - DNA, 25 bp, Homo sapien
ttgatgccattgctgatgaacgggg

SEQ ID NO: 4294072 - DNA, 25 bp, Homo sapien
ccttcagcctccagatgactgtatc

SEQ ID NO: 4294073 - DNA, 25 bp, Homo sapien
cctgtagggatagcacagctgagga

SEQ ID NO: 4294074 - DNA, 25 bp, Homo sapien
gatagcacagctgaggagagctgta

SEQ ID NO: 4294075 - DNA, 25 bp, Homo sapien
tagcacagctgaggagagctgtaat

SEQ ID NO: 4294076 - DNA, 25 bp, Homo sapien
cacagctgaggagagctgtaatgat

SEQ ID NO: 4294077 - DNA, 25 bp, Homo sapien
tgaatgttgtaagaatagcgttctc

SEQ ID NO: 4294078 - DNA, 25 bp, Homo sapien
cgttctcggcagagtctgtgttcat

SEQ ID NO: 4294079 - DNA, 25 bp, Homo sapien
agcttcaggacctgtaaatccttcc

SEQ ID NO: 4294080 - DNA, 25 bp, Homo sapien
tcaggacctgtaaatccttccttgg

SEQ ID NO: 4294081 - DNA, 25 bp, Homo sapien
cacacttgtttaggaacttggcacc

SEQ ID NO: 4294082 - DNA, 25 bp, Homo sapien
agctgctgtcttgtgagctgttaca

SEQ ID NO: 4294083 - DNA, 25 bp, Homo sapien
tatgagggcctttgatctgcaggcg

SEQ ID NO: 4294084 - DNA, 25 bp, Homo sapien
cttttgggaactgctcttgtgtatg

SEQ ID NO: 4294085 - DNA, 25 bp, Homo sapien
aacgactgtgtctggggatcatggc

SEQ ID NO: 4294086 - DNA, 25 bp, Homo sapien
tctggagaaaacgactgtgtctggg

SEQ ID NO: 4294087 - DNA, 25 bp, Homo sapien
gaaaacgactgtgtctggggatcat

SEQ ID NO: 4294088 - DNA, 25 bp, Homo sapien
acgactgtgtctggggatcatggct

SEQ ID NO: 4294089 - DNA, 25 bp, Homo sapien
ggttcttcccatttggagctcaggg

SEQ ID NO: 4294090 - DNA, 25 bp, Homo sapien
aggccctttgccctttggctggagt

SEQ ID NO: 4294091 - DNA, 25 bp, Homo sapien
ttgagtgcagcaagggctgagatac

SEQ ID NO: 4294092 - DNA, 25 bp, Homo sapien
tcttcccatttggagctcaggggtt

SEQ ID NO: 4294093 - DNA, 25 bp, Homo sapien
ctcaatgtcattggcactgaactcc

SEQ ID NO: 4294094 - DNA, 25 bp, Homo sapien
ttctcaatgtcattggcactgaact

SEQ ID NO: 4294095 - DNA, 25 bp, Homo sapien
cagcgtttctcaatgtcattggcac

SEQ ID NO: 4294096 - DNA, 25 bp, Homo sapien
gcgtttctcaatgtcattggcactg

SEQ ID NO: 4294097 - DNA, 25 bp, Homo sapien
ggtaatacatgtttgaattggtaaa

SEQ ID NO: 4294098 - DNA, 25 bp, Homo sapien
tacccatatccaagaagatgttttg

SEQ ID NO: 4294099 - DNA, 25 bp, Homo sapien
aattggtaaattgtgagggtcatta

SEQ ID NO: 4294100 - DNA, 25 bp, Homo sapien
gcaacctcataagaattatgtaagg

SEQ ID NO: 4294101 - DNA, 25 bp, Homo sapien
ggcacagtgactctttgtgcttcac

SEQ ID NO: 4294102 - DNA, 25 bp, Homo sapien
ttccacaccattggaaacacatcca

SEQ ID NO: 4294103 - DNA, 25 bp, Homo sapien
gaagtggcacagtgactctttgtgc

SEQ ID NO: 4294104 - DNA, 25 bp, Homo sapien
gtgaagtggcacagtgactctttgt

SEQ ID NO: 4294105 - DNA, 25 bp, Homo sapien
ggtaatgcctggctcataggtaagg

SEQ ID NO: 4294106 - DNA, 25 bp, Homo sapien
gctcataggtaagggctcagggttt

SEQ ID NO: 4294107 - DNA, 25 bp, Homo sapien
cactgtggcctcttgatctggggta

SEQ ID NO: 4294108 - DNA, 25 bp, Homo sapien
gatctggggtaatgcctggctcata

SEQ ID NO: 4294109 - DNA, 25 bp, Homo sapien
cttgggctaaagcatgggttccatc

SEQ ID NO: 4294110 - DNA, 25 bp, Homo sapien
gccattgacatagtgcagttgttgc

SEQ ID NO: 4294111 - DNA, 25 bp, Homo sapien
catcagtcaactttgggccattgac

SEQ ID NO: 4294112 - DNA, 25 bp, Homo sapien
actgaaagcaccttgggctaaagca

SEQ ID NO: 4294113 - DNA, 25 bp, Homo sapien
tccttttggaaacattattactctc

SEQ ID NO: 4294114 - DNA, 25 bp, Homo sapien
tttggaaacattattactctcatct

SEQ ID NO: 4294115 - DNA, 25 bp, Homo sapien
ggaaacattattactctcatctgcc

SEQ ID NO: 4294116 - DNA, 25 bp, Homo sapien
ctaggattccttttggaaacattat

SEQ ID NO: 4294117 - DNA, 25 bp, Homo sapien
gggtttgccagtggtgagtttgatc

SEQ ID NO: 4294118 - DNA, 25 bp, Homo sapien
tgggtttgccagtggtgagtttgat

SEQ ID NO: 4294119 - DNA, 25 bp, Homo sapien
gtttgccagtggtgagtttgatctc

SEQ ID NO: 4294120 - DNA, 25 bp, Homo sapien
ggtttgccagtggtgagtttgatct

SEQ ID NO: 4294121 - DNA, 25 bp, Homo sapien
caccatcaacatcgaaataaagcat

SEQ ID NO: 4294122 - DNA, 25 bp, Homo sapien
tgagaagttcacattaatggcattg

SEQ ID NO: 4294123 - DNA, 25 bp, Homo sapien
tgctctctgttactgacaccatcaa

SEQ ID NO: 4294124 - DNA, 25 bp, Homo sapien
cacattaatggcattgtgctctctg

SEQ ID NO: 4294125 - DNA, 25 bp, Homo sapien
ccagaacccacgacaggctgtataa

SEQ ID NO: 4294126 - DNA, 25 bp, Homo sapien
gatgtgtttgctttggcggcagggc

SEQ ID NO: 4294127 - DNA, 25 bp, Homo sapien
tatttcactttagcacgttcccaga

SEQ ID NO: 4294128 - DNA, 25 bp, Homo sapien
ataaatctatagcaaggatgggtag

SEQ ID NO: 4294129 - DNA, 25 bp, Homo sapien
catgagctatcctcctgcccaccag

SEQ ID NO: 4294130 - DNA, 25 bp, Homo sapien
tttgagtggttgctcattcttccct

SEQ ID NO: 4294131 - DNA, 25 bp, Homo sapien
tgcccaccagccctctgcttgtcct

SEQ ID NO: 4294132 - DNA, 25 bp, Homo sapien
tctgcttgtcctctcctttgagtgg

SEQ ID NO: 4294133 - DNA, 25 bp, Homo sapien
taactttgaatttggactgagacct

SEQ ID NO: 4294134 - DNA, 25 bp, Homo sapien
ttttgagtttgctgaatatggtggc

SEQ ID NO: 4294135 - DNA, 25 bp, Homo sapien
gctgaatatggtggcaagtaacttt

SEQ ID NO: 4294136 - DNA, 25 bp, Homo sapien
gaccttggttcataacctgttccat

SEQ ID NO: 4294137 - DNA, 25 bp, Homo sapien
gcttcctcagctgaaacattttcaa

SEQ ID NO: 4294138 - DNA, 25 bp, Homo sapien
tcactttcggtgtttggctgatgtt

SEQ ID NO: 4294139 - DNA, 25 bp, Homo sapien
tccgctagcctagccactctctctt

SEQ ID NO: 4294140 - DNA, 25 bp, Homo sapien
agtgtttgcgcaagtctgggtgctt

SEQ ID NO: 4294141 - DNA, 25 bp, Homo sapien
ttgagggtgatcttattcatcttca

SEQ ID NO: 4294142 - DNA, 25 bp, Homo sapien
ccatccggttgtacacggaggcatc

SEQ ID NO: 4294143 - DNA, 25 bp, Homo sapien
cctcttgccctctgttattgagggt

SEQ ID NO: 4294144 - DNA, 25 bp, Homo sapien
cctccatccggttgtacacggaggc

SEQ ID NO: 4294145 - DNA, 25 bp, Homo sapien
taaggtgtgggcacatgacattttc

SEQ ID NO: 4294146 - DNA, 25 bp, Homo sapien
actccaggatcctccgagtgtaagg

SEQ ID NO: 4294147 - DNA, 25 bp, Homo sapien
ggtgtgggcacatgacattttccat

SEQ ID NO: 4294148 - DNA, 25 bp, Homo sapien
cctccgagtgtaaggtgtgggcaca

SEQ ID NO: 4294149 - DNA, 25 bp, Homo sapien
tcattctggcttttggccctgtaac

SEQ ID NO: 4294150 - DNA, 25 bp, Homo sapien
tcattcagatgcaggttcctaactc

SEQ ID NO: 4294151 - DNA, 25 bp, Homo sapien
gctttaagcttgttagggatcttgc

SEQ ID NO: 4294152 - DNA, 25 bp, Homo sapien
gcagctgcaaatagtattagcttta

SEQ ID NO: 4294153 - DNA, 25 bp, Homo sapien
gtatttcaaaagaatgggaagcaga

SEQ ID NO: 4294154 - DNA, 25 bp, Homo sapien
caaaagaatgggaagcagaaaggtt

SEQ ID NO: 4294155 - DNA, 25 bp, Homo sapien
tcttccagtatttcaaaagaatggg

SEQ ID NO: 4294156 - DNA, 25 bp, Homo sapien
aagaatgggaagcagaaaggttcat

SEQ ID NO: 4294157 - DNA, 25 bp, Homo sapien
actctagagtgagtataggatcgac

SEQ ID NO: 4294158 - DNA, 25 bp, Homo sapien
tgtcctgatgtcaagcagtttttca

SEQ ID NO: 4294159 - DNA, 25 bp, Homo sapien
atatggggccccagttccttgcact

SEQ ID NO: 4294160 - DNA, 25 bp, Homo sapien
taaccagttatagtgcaaggtgtcc

SEQ ID NO: 4294161 - DNA, 25 bp, Homo sapien
agtggggaccacttcaaacatcctg

SEQ ID NO: 4294162 - DNA, 25 bp, Homo sapien
tgcttcaaatgaagtggggaccact

SEQ ID NO: 4294163 - DNA, 25 bp, Homo sapien
caaacatcctgcagtcctctgtcat

SEQ ID NO: 4294164 - DNA, 25 bp, Homo sapien
aaattagaccttctgcttcaaatga

SEQ ID NO: 4294165 - DNA, 25 bp, Homo sapien
tgtgcttaaacccttggtcacactt

SEQ ID NO: 4294166 - DNA, 25 bp, Homo sapien
gccatgtcaagcctctttggaccct

SEQ ID NO: 4294167 - DNA, 25 bp, Homo sapien
gaacttgagccatgtcaagcctctt

SEQ ID NO: 4294168 - DNA, 25 bp, Homo sapien
gcttaaacccttggtcacacttata

SEQ ID NO: 4294169 - DNA, 25 bp, Homo sapien
ctttgatctggtagtgtggagtgat

SEQ ID NO: 4294170 - DNA, 25 bp, Homo sapien
ttgatctggtagtgtggagtgatgg

SEQ ID NO: 4294171 - DNA, 25 bp, Homo sapien
tttgatctggtagtgtggagtgatg

SEQ ID NO: 4294172 - DNA, 25 bp, Homo sapien
tgctgcacggttatcatgttgaggg

SEQ ID NO: 4294173 - DNA, 25 bp, Homo sapien
cctgctgcacggttatcatgttgag

SEQ ID NO: 4294174 - DNA, 25 bp, Homo sapien
tgtttcctgctgcacggttatcatg

SEQ ID NO: 4294175 - DNA, 25 bp, Homo sapien
tgcacggttatcatgttgagggttg

SEQ ID NO: 4294176 - DNA, 25 bp, Homo sapien
tgtcgtacccgtcgccagcctcttc

SEQ ID NO: 4294177 - DNA, 25 bp, Homo sapien
agggtcctgtcgtacccgtcgccag

SEQ ID NO: 4294178 - DNA, 25 bp, Homo sapien
ctgtcgtacccgtcgccagcctctt

SEQ ID NO: 4294179 - DNA, 25 bp, Homo sapien
acagagggtcctgtcgtacccgtcg

SEQ ID NO: 4294180 - DNA, 25 bp, Homo sapien
catttgttgcaaaacttatgattgg

SEQ ID NO: 4294181 - DNA, 25 bp, Homo sapien
cttatgattggcaggttgcagtttc

SEQ ID NO: 4294182 - DNA, 25 bp, Homo sapien
gatccccatgtaaaattgctccttg

SEQ ID NO: 4294183 - DNA, 25 bp, Homo sapien
tctgtatatttggatccccatgtaa

SEQ ID NO: 4294184 - DNA, 25 bp, Homo sapien
agatccttggccgacgaccctggca

SEQ ID NO: 4294185 - DNA, 25 bp, Homo sapien
ggtggagcagacagatccttggccg

SEQ ID NO: 4294186 - DNA, 25 bp, Homo sapien
gatccttggccgacgaccctggcat

SEQ ID NO: 4294187 - DNA, 25 bp, Homo sapien
tgcagacatgccggtggggatttgg

SEQ ID NO: 4294188 - DNA, 25 bp, Homo sapien
ttcccatctgcagacatgccggtgg

SEQ ID NO: 4294189 - DNA, 25 bp, Homo sapien
gctctgcttcccatctgcagacatg

SEQ ID NO: 4294190 - DNA, 25 bp, Homo sapien
cagacatgccggtggggatttggca

SEQ ID NO: 4294191 - DNA, 25 bp, Homo sapien
caagaggcttcaatttcaacaacct

SEQ ID NO: 4294192 - DNA, 25 bp, Homo sapien
acttttacaagaggcttcaatttca

SEQ ID NO: 4294193 - DNA, 25 bp, Homo sapien
tacaagaggcttcaatttcaacaac

SEQ ID NO: 4294194 - DNA, 25 bp, Homo sapien
ttttacaagaggcttcaatttcaac

SEQ ID NO: 4294195 - DNA, 25 bp, Homo sapien
tacattcgtctaagtttttaatcaa

SEQ ID NO: 4294196 - DNA, 25 bp, Homo sapien
tgtttcttagcctttacggggtgca

SEQ ID NO: 4294197 - DNA, 25 bp, Homo sapien
catcttgcagttgattaggtggaag

SEQ ID NO: 4294198 - DNA, 25 bp, Homo sapien
gggcactggctttgctgctgaccat

SEQ ID NO: 4294199 - DNA, 25 bp, Homo sapien
tgggcactggctttgctgctgacca

SEQ ID NO: 4294200 - DNA, 25 bp, Homo sapien
tgagtgggcactggctttgctgctg

SEQ ID NO: 4294201 - DNA, 25 bp, Homo sapien
agtgggcactggctttgctgctgac

SEQ ID NO: 4294202 - DNA, 25 bp, Homo sapien
tgaagaatactagttcccactcaca

SEQ ID NO: 4294203 - DNA, 25 bp, Homo sapien
ggtcatgaacatgatggtgacaggt

SEQ ID NO: 4294204 - DNA, 25 bp, Homo sapien
tcaggaggtcatgaacatgatggtg

SEQ ID NO: 4294205 - DNA, 25 bp, Homo sapien
agccactgaagaatactagttccca

SEQ ID NO: 4294206 - DNA, 25 bp, Homo sapien
ggcgttcatgttagcggtcttcaac

SEQ ID NO: 4294207 - DNA, 25 bp, Homo sapien
ttaacagtaggcgttcatgttagcg

SEQ ID NO: 4294208 - DNA, 25 bp, Homo sapien
cagtaggcgttcatgttagcggtct

SEQ ID NO: 4294209 - DNA, 25 bp, Homo sapien
catgttagcggtcttcaacttgtca

SEQ ID NO: 4294210 - DNA, 25 bp, Homo sapien
agaattacaggtagtcctggcccag

SEQ ID NO: 4294211 - DNA, 25 bp, Homo sapien
aagttgatagggaagtatgacggaa

SEQ ID NO: 4294212 - DNA, 25 bp, Homo sapien
gcttcagaattacaggtagtcctgg

SEQ ID NO: 4294213 - DNA, 25 bp, Homo sapien
ggaagtatgacggaaggatattcat

SEQ ID NO: 4294214 - DNA, 25 bp, Homo sapien
ttaactgggagactggtgagatgtg

SEQ ID NO: 4294215 - DNA, 25 bp, Homo sapien
ggttggaagagaggaaccgccatcc

SEQ ID NO: 4294216 - DNA, 25 bp, Homo sapien
cagccagtttgtggccgggtatttt

SEQ ID NO: 4294217 - DNA, 25 bp, Homo sapien
tttgcaaagctgctgacgagcaggc

SEQ ID NO: 4294218 - DNA, 25 bp, Homo sapien
agaaagtattctctgcgccagccag

SEQ ID NO: 4294219 - DNA, 25 bp, Homo sapien
gcctgttaaaccaatgacagcagac

SEQ ID NO: 4294220 - DNA, 25 bp, Homo sapien
tgacaggggatcctgatccagggac

SEQ ID NO: 4294221 - DNA, 25 bp, Homo sapien
caaaggatgacaggggatcctgatc

SEQ ID NO: 4294222 - DNA, 25 bp, Homo sapien
ccatggtgcctgttaaaccaatgac

SEQ ID NO: 4294223 - DNA, 25 bp, Homo sapien
actgtgtagtgacgtgtgatgctgc

SEQ ID NO: 4294224 - DNA, 25 bp, Homo sapien
ataatcccctgatctccctgcgtgc

SEQ ID NO: 4294225 - DNA, 25 bp, Homo sapien
gatctccctgcgtgccgtgtctggg

SEQ ID NO: 4294226 - DNA, 25 bp, Homo sapien
tgtctgggcccacggaagccgtgac

SEQ ID NO: 4294227 - DNA, 25 bp, Homo sapien
ctttcccacagccctctgctgccca

SEQ ID NO: 4294228 - DNA, 25 bp, Homo sapien
tcctttcccacagccctctgctgcc

SEQ ID NO: 4294229 - DNA, 25 bp, Homo sapien
tcccacagccctctgctgcccacat

SEQ ID NO: 4294230 - DNA, 25 bp, Homo sapien
tttcccacagccctctgctgcccac

SEQ ID NO: 4294231 - DNA, 25 bp, Homo sapien
tcctaattgagggactcagccaagc

SEQ ID NO: 4294232 - DNA, 25 bp, Homo sapien
cacagatagggtcaccttagccagg

SEQ ID NO: 4294233 - DNA, 25 bp, Homo sapien
agcctcgtgcagaaataacctttga

SEQ ID NO: 4294234 - DNA, 25 bp, Homo sapien
gagtgctgtatctggaggtttgtcc

SEQ ID NO: 4294235 - DNA, 25 bp, Homo sapien
ccaatcctgggccatagctttgcat

SEQ ID NO: 4294236 - DNA, 25 bp, Homo sapien
ccaagtgttcatacagaaaaagtcc

SEQ ID NO: 4294237 - DNA, 25 bp, Homo sapien
cattgagtgcaaagaactgtaggtg

SEQ ID NO: 4294238 - DNA, 25 bp, Homo sapien
taacctgtgtcttagcacacgctgc

SEQ ID NO: 4294239 - DNA, 25 bp, Homo sapien
ccaggaagtgggcatagaaagcgtt

SEQ ID NO: 4294240 - DNA, 25 bp, Homo sapien
cagtgaagtcagctacgtgtctcta

SEQ ID NO: 4294241 - DNA, 25 bp, Homo sapien
gagaactggccaccttttggtacac

SEQ ID NO: 4294242 - DNA, 25 bp, Homo sapien
tgttcagcgtctccctgacttgggc

SEQ ID NO: 4294243 - DNA, 25 bp, Homo sapien
gcctcgagcaccaaaagcctgctgt

SEQ ID NO: 4294244 - DNA, 25 bp, Homo sapien
ttcagtctagcacaggcgcggtaaa

SEQ ID NO: 4294245 - DNA, 25 bp, Homo sapien
aatcacaaatcctccgtgccatggg

SEQ ID NO: 4294246 - DNA, 25 bp, Homo sapien
aaagcactggctgttaaagcctcga

SEQ ID NO: 4294247 - DNA, 25 bp, Homo sapien
gcccataaagcacggcgggcccggc

SEQ ID NO: 4294248 - DNA, 25 bp, Homo sapien
ccataaagcacggcgggcccggcat

SEQ ID NO: 4294249 - DNA, 25 bp, Homo sapien
agcccataaagcacggcgggcccgg

SEQ ID NO: 4294250 - DNA, 25 bp, Homo sapien
ataaagcacggcgggcccggcatcg

SEQ ID NO: 4294251 - DNA, 25 bp, Homo sapien
ttggaactatggaggagacacagtc

SEQ ID NO: 4294252 - DNA, 25 bp, Homo sapien
aattcgggcaattgatggcataagg

SEQ ID NO: 4294253 - DNA, 25 bp, Homo sapien
tgactatggagggaaggacctgtcc

SEQ ID NO: 4294254 - DNA, 25 bp, Homo sapien
agaaaatgcctatcccctgagagcg

SEQ ID NO: 4294255 - DNA, 25 bp, Homo sapien
tactggcctctcaagaaaggctagg

SEQ ID NO: 4294256 - DNA, 25 bp, Homo sapien
taatagttttagtgacacagccggc

SEQ ID NO: 4294257 - DNA, 25 bp, Homo sapien
aataatacctgttgccacgaagatg

SEQ ID NO: 4294258 - DNA, 25 bp, Homo sapien
tgtgggttagttacacctgactcca

SEQ ID NO: 4294259 - DNA, 25 bp, Homo sapien
aaattctacagctacagattgcagc

SEQ ID NO: 4294260 - DNA, 25 bp, Homo sapien
tgtgtttaatgcagtctccccagaa

SEQ ID NO: 4294261 - DNA, 25 bp, Homo sapien
tgaacaatggccctagagtattctg

SEQ ID NO: 4294262 - DNA, 25 bp, Homo sapien
gattgcagcagagaataccagggac

SEQ ID NO: 4294263 - DNA, 25 bp, Homo sapien
gatggaccctttaatgggagatgag

SEQ ID NO: 4294264 - DNA, 25 bp, Homo sapien
ttggtgaacatagcaagggaaagat

SEQ ID NO: 4294265 - DNA, 25 bp, Homo sapien
cagtcttagggtgtaaattgtcctt

SEQ ID NO: 4294266 - DNA, 25 bp, Homo sapien
gacagagtcttagcagcttcccaga

SEQ ID NO: 4294267 - DNA, 25 bp, Homo sapien
gattaatacttttggagccctacca

SEQ ID NO: 4294268 - DNA, 25 bp, Homo sapien
gggctgcgtctgctcattaactcag

SEQ ID NO: 4294269 - DNA, 25 bp, Homo sapien
cacatgtgcagtcggagttgcagga

SEQ ID NO: 4294270 - DNA, 25 bp, Homo sapien
tgtaaggagcactcaccctcaggat

SEQ ID NO: 4294271 - DNA, 25 bp, Homo sapien
aagggaaacaggtactagtcctgct

SEQ ID NO: 4294272 - DNA, 25 bp, Homo sapien
actagtcctgctagtacatgcttct

SEQ ID NO: 4294273 - DNA, 25 bp, Homo sapien
aacaggtactagtcctgctagtaca

SEQ ID NO: 4294274 - DNA, 25 bp, Homo sapien
ggtactagtcctgctagtacatgct

SEQ ID NO: 4294275 - DNA, 25 bp, Homo sapien
ctggctgtctcagtagtacctacct

SEQ ID NO: 4294276 - DNA, 25 bp, Homo sapien
ccactgcaaacgacacaaacttcta

SEQ ID NO: 4294277 - DNA, 25 bp, Homo sapien
caaacgacacaaacttctatggctc

SEQ ID NO: 4294278 - DNA, 25 bp, Homo sapien
cacctggctgtctcagtagtaccta

SEQ ID NO: 4294279 - DNA, 25 bp, Homo sapien
gctgtgtctcagtatggccataagg

SEQ ID NO: 4294280 - DNA, 25 bp, Homo sapien
gaaggaaacttatcccaggcacaca

SEQ ID NO: 4294281 - DNA, 25 bp, Homo sapien
catggtaccccgtgcgtgattcgag

SEQ ID NO: 4294282 - DNA, 25 bp, Homo sapien
gcacttaacgtttgcccttcctgga

SEQ ID NO: 4294283 - DNA, 25 bp, Homo sapien
ttgtttttgtatgtcttccctttca

SEQ ID NO: 4294284 - DNA, 25 bp, Homo sapien
cttccctttcatgcgcgtctgtgtg

SEQ ID NO: 4294285 - DNA, 25 bp, Homo sapien
atgtcttccctttcatgcgcgtctg

SEQ ID NO: 4294286 - DNA, 25 bp, Homo sapien
gtcttccctttcatgcgcgtctgtg

SEQ ID NO: 4294287 - DNA, 25 bp, Homo sapien
gacagaacggaagaaatgactggtg

SEQ ID NO: 4294288 - DNA, 25 bp, Homo sapien
tgtaggaaacgcctttacttattca

SEQ ID NO: 4294289 - DNA, 25 bp, Homo sapien
cagaacggaagaaatgactggtggc

SEQ ID NO: 4294290 - DNA, 25 bp, Homo sapien
ggaaacgcctttacttattcagtga

SEQ ID NO: 4294291 - DNA, 25 bp, Homo sapien
gttctagaacagactaatgggtagt

SEQ ID NO: 4294292 - DNA, 25 bp, Homo sapien
gactgcactataaccatgcctagga

SEQ ID NO: 4294293 - DNA, 25 bp, Homo sapien
tgagcctaatcagtgtcagggtgag

SEQ ID NO: 4294294 - DNA, 25 bp, Homo sapien
tcagtgtcagggtgagtctaagtga

SEQ ID NO: 4294295 - DNA, 25 bp, Homo sapien
gtccatgatggtctgcggggcttct

SEQ ID NO: 4294296 - DNA, 25 bp, Homo sapien
ttcagccagtaagccaagaaggagt

SEQ ID NO: 4294297 - DNA, 25 bp, Homo sapien
cagccagtaagccaagaaggagtca

SEQ ID NO: 4294298 - DNA, 25 bp, Homo sapien
ccatgatggtctgcggggcttctga

SEQ ID NO: 4294299 - DNA, 25 bp, Homo sapien
aatacatgctaagggagaagaaagg

SEQ ID NO: 4294300 - DNA, 25 bp, Homo sapien
agaaacgtctggctgctacagttca

SEQ ID NO: 4294301 - DNA, 25 bp, Homo sapien
tccggcatgtgtagcaagttcctgg

SEQ ID NO: 4294302 - DNA, 25 bp, Homo sapien
gttctggagaaacgtctggctgcta

SEQ ID NO: 4294303 - DNA, 25 bp, Homo sapien
tgcgtggtctgaaacgtgaaatcag

SEQ ID NO: 4294304 - DNA, 25 bp, Homo sapien
cgtggtctgaaacgtgaaatcagag

SEQ ID NO: 4294305 - DNA, 25 bp, Homo sapien
cctgcgtggtctgaaacgtgaaatc

SEQ ID NO: 4294306 - DNA, 25 bp, Homo sapien
ccctgcgtggtctgaaacgtgaaat

SEQ ID NO: 4294307 - DNA, 25 bp, Homo sapien
gtcacggcaccaaatttcatgcgcg

SEQ ID NO: 4294308 - DNA, 25 bp, Homo sapien
agtcacggcaccaaatttcatgcgc

SEQ ID NO: 4294309 - DNA, 25 bp, Homo sapien
cggcaccaaatttcatgcgcgtccg

SEQ ID NO: 4294310 - DNA, 25 bp, Homo sapien
cacggcaccaaatttcatgcgcgtc

SEQ ID NO: 4294311 - DNA, 25 bp, Homo sapien
caggcatgcaagatacacaactact

SEQ ID NO: 4294312 - DNA, 25 bp, Homo sapien
tccccgctcagtgcagagtttaagc

SEQ ID NO: 4294313 - DNA, 25 bp, Homo sapien
gcacagcaacggatacaatcagcag

SEQ ID NO: 4294314 - DNA, 25 bp, Homo sapien
tcagcagagtaaagaggaaacctat

SEQ ID NO: 4294315 - DNA, 25 bp, Homo sapien
tacacctcataaatgaagctccttc

SEQ ID NO: 4294316 - DNA, 25 bp, Homo sapien
cgcacccggctgctttctaagctaa

SEQ ID NO: 4294317 - DNA, 25 bp, Homo sapien
tgtattctcagtaggctggccctta

SEQ ID NO: 4294318 - DNA, 25 bp, Homo sapien
ggtagagaaatcacctttacacctc

SEQ ID NO: 4294319 - DNA, 25 bp, Homo sapien
gagagatggcatctggaaaaatgcc

SEQ ID NO: 4294320 - DNA, 25 bp, Homo sapien
gagatggcatctggaaaaatgccct

SEQ ID NO: 4294321 - DNA, 25 bp, Homo sapien
agaagggttcagataaatgagccag

SEQ ID NO: 4294322 - DNA, 25 bp, Homo sapien
ggcagaagggttcagataaatgagc

SEQ ID NO: 4294323 - DNA, 25 bp, Homo sapien
atttgcttattgattacttcactgg

SEQ ID NO: 4294324 - DNA, 25 bp, Homo sapien
tgcttattgattacttcactgggct

SEQ ID NO: 4294325 - DNA, 25 bp, Homo sapien
cttattgattacttcactgggcttg

SEQ ID NO: 4294326 - DNA, 25 bp, Homo sapien
ttgcttattgattacttcactgggc

SEQ ID NO: 4294327 - DNA, 25 bp, Homo sapien
tgttcatagagaccacccctggtca

SEQ ID NO: 4294328 - DNA, 25 bp, Homo sapien
agctattagtacagacaactgcagg

SEQ ID NO: 4294329 - DNA, 25 bp, Homo sapien
agacttcttgttcatagagaccacc

SEQ ID NO: 4294330 - DNA, 25 bp, Homo sapien
tagtaactgttcatggctagctatt

SEQ ID NO: 4294331 - DNA, 25 bp, Homo sapien
tctccttagtccaccacatttctgg

SEQ ID NO: 4294332 - DNA, 25 bp, Homo sapien
ctctccttagtccaccacatttctg

SEQ ID NO: 4294333 - DNA, 25 bp, Homo sapien
cagcagaatgccagcccacatcctc

SEQ ID NO: 4294334 - DNA, 25 bp, Homo sapien
ctccttagtccaccacatttctgga

SEQ ID NO: 4294335 - DNA, 25 bp, Homo sapien
cttttgtgtcttctgatacctttgt

SEQ ID NO: 4294336 - DNA, 25 bp, Homo sapien
ctcctctgttttcattcccttttct

SEQ ID NO: 4294337 - DNA, 25 bp, Homo sapien
tcttcttttgtgtcttctgatacct

SEQ ID NO: 4294338 - DNA, 25 bp, Homo sapien
tcttttgtgtcttctgatacctttg

SEQ ID NO: 4294339 - DNA, 25 bp, Homo sapien
ctttcttcttgtgtgtggtcggtgg

SEQ ID NO: 4294340 - DNA, 25 bp, Homo sapien
ttcttcttgtgtgtggtcggtggct

SEQ ID NO: 4294341 - DNA, 25 bp, Homo sapien
cggtggctgtatgtgcacctaccat

SEQ ID NO: 4294342 - DNA, 25 bp, Homo sapien
tggtcggtggctgtatgtgcaccta

SEQ ID NO: 4294343 - DNA, 25 bp, Homo sapien
aatggaatacagctagagttgtctg

SEQ ID NO: 4294344 - DNA, 25 bp, Homo sapien
ttttcaaaagagctggcttccagac

SEQ ID NO: 4294345 - DNA, 25 bp, Homo sapien
ggaaatggaatacagctagagttgt

SEQ ID NO: 4294346 - DNA, 25 bp, Homo sapien
gctttgttgccagtcctgtttttaa

SEQ ID NO: 4294347 - DNA, 25 bp, Homo sapien
gacagaacccaagtcatagggagct

SEQ ID NO: 4294348 - DNA, 25 bp, Homo sapien
tcaagccatgacagaacccaagtca

SEQ ID NO: 4294349 - DNA, 25 bp, Homo sapien
catagggagctggtggcatctggtt

SEQ ID NO: 4294350 - DNA, 25 bp, Homo sapien
ctctctgataggatgcttgggagac

SEQ ID NO: 4294351 - DNA, 25 bp, Homo sapien
aaatgatcttgtaactggttgccaa

SEQ ID NO: 4294352 - DNA, 25 bp, Homo sapien
tcttgtaactggttgccaaggccat

SEQ ID NO: 4294353 - DNA, 25 bp, Homo sapien
cttttactgaagtgctatgagtttg

SEQ ID NO: 4294354 - DNA, 25 bp, Homo sapien
ctgaagtgctatgagtttgcttctc

SEQ ID NO: 4294355 - DNA, 25 bp, Homo sapien
gtgagatccatcactctgttcccta

SEQ ID NO: 4294356 - DNA, 25 bp, Homo sapien
gaatcccatgctttgtggccaatat

SEQ ID NO: 4294357 - DNA, 25 bp, Homo sapien
tttccatcagctactgtgagatcca

SEQ ID NO: 4294358 - DNA, 25 bp, Homo sapien
gggccctgcataggccaattgtcat

SEQ ID NO: 4294359 - DNA, 25 bp, Homo sapien
ttgtaccaggataagcagatcaggg

SEQ ID NO: 4294360 - DNA, 25 bp, Homo sapien
gaaatatgagctgtataaggcagac

SEQ ID NO: 4294361 - DNA, 25 bp, Homo sapien
cagatcagggtagaagcaatttgcc

SEQ ID NO: 4294362 - DNA, 25 bp, Homo sapien
ctggaatgatttgagtactcattaa

SEQ ID NO: 4294363 - DNA, 25 bp, Homo sapien
gcagttgcctccagcggtctgaact

SEQ ID NO: 4294364 - DNA, 25 bp, Homo sapien
taaaggaagatgatgtcgatttaat

SEQ ID NO: 4294365 - DNA, 25 bp, Homo sapien
cggtctgaactgtcaagataaagga

SEQ ID NO: 4294366 - DNA, 25 bp, Homo sapien
gaagatgatgtcgatttaatttcat

SEQ ID NO: 4294367 - DNA, 25 bp, Homo sapien
tctgatatgactattctggatctga

SEQ ID NO: 4294368 - DNA, 25 bp, Homo sapien
tatctgctctgcacaaaactgtcgc

SEQ ID NO: 4294369 - DNA, 25 bp, Homo sapien
gaatgggcatgtaaatgaccaaatg

SEQ ID NO: 4294370 - DNA, 25 bp, Homo sapien
tgactattctggatctgaatgtgaa

SEQ ID NO: 4294371 - DNA, 25 bp, Homo sapien
ttaaatttaatagcctccagagcct

SEQ ID NO: 4294372 - DNA, 25 bp, Homo sapien
aaacatgtggagcatgctgtgacac

SEQ ID NO: 4294373 - DNA, 25 bp, Homo sapien
tgttgggacctctatttcatagcag

SEQ ID NO: 4294374 - DNA, 25 bp, Homo sapien
tccagagcctttagaaaccgtgtta

SEQ ID NO: 4294375 - DNA, 25 bp, Homo sapien
gagtccagtgcagagttgcaatgaa

SEQ ID NO: 4294376 - DNA, 25 bp, Homo sapien
ccgtagaagaagatgggacaaatga

SEQ ID NO: 4294377 - DNA, 25 bp, Homo sapien
aacatagtaccaaacttctgcagga

SEQ ID NO: 4294378 - DNA, 25 bp, Homo sapien
ccaaatcagtcttatattcaaacat

SEQ ID NO: 4294379 - DNA, 25 bp, Homo sapien
cttccgcaggaccacagtagccacc

SEQ ID NO: 4294380 - DNA, 25 bp, Homo sapien
catccttccgcaggaccacagtagc

SEQ ID NO: 4294381 - DNA, 25 bp, Homo sapien
tccttccgcaggaccacagtagcca

SEQ ID NO: 4294382 - DNA, 25 bp, Homo sapien
tccgcaggaccacagtagccaccag

SEQ ID NO: 4294383 - DNA, 25 bp, Homo sapien
tgcgtcatagggcatttttcctgga

SEQ ID NO: 4294384 - DNA, 25 bp, Homo sapien
actgcgtcatagggcatttttcctg

SEQ ID NO: 4294385 - DNA, 25 bp, Homo sapien
tcactgcgtcatagggcatttttcc

SEQ ID NO: 4294386 - DNA, 25 bp, Homo sapien
gcgtcatagggcatttttcctggac

SEQ ID NO: 4294387 - DNA, 25 bp, Homo sapien
tccccttctgaatacacattctcca

SEQ ID NO: 4294388 - DNA, 25 bp, Homo sapien
ccccttctgaatacacattctccat

SEQ ID NO: 4294389 - DNA, 25 bp, Homo sapien
atccccttctgaatacacattctcc

SEQ ID NO: 4294390 - DNA, 25 bp, Homo sapien
catccccttctgaatacacattctc

SEQ ID NO: 4294391 - DNA, 25 bp, Homo sapien
gccaagagtgctgtccttggcttgc

SEQ ID NO: 4294392 - DNA, 25 bp, Homo sapien
atgggctgccaagagtgctgtcctt

SEQ ID NO: 4294393 - DNA, 25 bp, Homo sapien
gctccgctgaaaaccacctggcagt

SEQ ID NO: 4294394 - DNA, 25 bp, Homo sapien
ctgagcagatctggcaggcggctcc

SEQ ID NO: 4294395 - DNA, 25 bp, Homo sapien
ctttctctgcagcttggcattcacc

SEQ ID NO: 4294396 - DNA, 25 bp, Homo sapien
agatgccttccaggtccagcttgcc

SEQ ID NO: 4294397 - DNA, 25 bp, Homo sapien
tgcagcttggcattcacccccaggg

SEQ ID NO: 4294398 - DNA, 25 bp, Homo sapien
ccaggtccagcttgcctcctttctc

SEQ ID NO: 4294399 - DNA, 25 bp, Homo sapien
ctgcaggagaaacagaggcttctgc

SEQ ID NO: 4294400 - DNA, 25 bp, Homo sapien
aacagaggcttctgccaccagtcct

SEQ ID NO: 4294401 - DNA, 25 bp, Homo sapien
tgcaggagaaacagaggcttctgcc

SEQ ID NO: 4294402 - DNA, 25 bp, Homo sapien
agaaacagaggcttctgccaccagt

SEQ ID NO: 4294403 - DNA, 25 bp, Homo sapien
tttctcctttgtgtggattgtacat

SEQ ID NO: 4294404 - DNA, 25 bp, Homo sapien
gctccgcgctccactaaaggcttga

SEQ ID NO: 4294405 - DNA, 25 bp, Homo sapien
gatgatcagggccccgtcctgatga

SEQ ID NO: 4294406 - DNA, 25 bp, Homo sapien
actaaaggcttgagtgggcactgtt

SEQ ID NO: 4294407 - DNA, 25 bp, Homo sapien
catgattgtcaagggggtggcctcc

SEQ ID NO: 4294408 - DNA, 25 bp, Homo sapien
catgccatacatggggtggcccaaa

SEQ ID NO: 4294409 - DNA, 25 bp, Homo sapien
tagggtcaaaagtggtggtggttgc

SEQ ID NO: 4294410 - DNA, 25 bp, Homo sapien
tggtggttgctaggattttggccat

SEQ ID NO: 4294411 - DNA, 25 bp, Homo sapien
tggttgctagggtcaaaagtggtgg

SEQ ID NO: 4294412 - DNA, 25 bp, Homo sapien
gtcttcatggaccataaatccatcc

SEQ ID NO: 4294413 - DNA, 25 bp, Homo sapien
tcttcatggaccataaatccatcct

SEQ ID NO: 4294414 - DNA, 25 bp, Homo sapien
gcttgtcgtttagcataaaaacctg

SEQ ID NO: 4294415 - DNA, 25 bp, Homo sapien
tcagccatctcagagatggtgagac

SEQ ID NO: 4294416 - DNA, 25 bp, Homo sapien
ttcctgccctgcttgtcgtttagca

SEQ ID NO: 4294417 - DNA, 25 bp, Homo sapien
gtgagactagagtccactgcccagg

SEQ ID NO: 4294418 - DNA, 25 bp, Homo sapien
ctgccccagataatcgctggctgtc

SEQ ID NO: 4294419 - DNA, 25 bp, Homo sapien
ccccagataatcgctggctgtcagc

SEQ ID NO: 4294420 - DNA, 25 bp, Homo sapien
ggctgtcagccctcggtcacacccc

SEQ ID NO: 4294421 - DNA, 25 bp, Homo sapien
ccagataatcgctggctgtcagccc

SEQ ID NO: 4294422 - DNA, 25 bp, Homo sapien
gacaccatcatagtcaacaaacagc

SEQ ID NO: 4294423 - DNA, 25 bp, Homo sapien
cagttcaaacttgtaagctccacac

SEQ ID NO: 4294424 - DNA, 25 bp, Homo sapien
tccacaccaagcagagacatatgaa

SEQ ID NO: 4294425 - DNA, 25 bp, Homo sapien
ttagcgcaggtatgaattttcggcc

SEQ ID NO: 4294426 - DNA, 25 bp, Homo sapien
ctggccataggaggctaggcaccat

SEQ ID NO: 4294427 - DNA, 25 bp, Homo sapien
cccactggccataggaggctaggca

SEQ ID NO: 4294428 - DNA, 25 bp, Homo sapien
cgttgatcagggtggtaagagccca

SEQ ID NO: 4294429 - DNA, 25 bp, Homo sapien
tggtaagagcccactggccatagga

SEQ ID NO: 4294430 - DNA, 25 bp, Homo sapien
gtcaggacctcattggcacagccct

SEQ ID NO: 4294431 - DNA, 25 bp, Homo sapien
ctgtcaggacctcattggcacagcc

SEQ ID NO: 4294432 - DNA, 25 bp, Homo sapien
ttgttttcagagtacagcccagggc

SEQ ID NO: 4294433 - DNA, 25 bp, Homo sapien
tgtcaggacctcattggcacagccc

SEQ ID NO: 4294434 - DNA, 25 bp, Homo sapien
tgagccaccattaggagcacgagct

SEQ ID NO: 4294435 - DNA, 25 bp, Homo sapien
tagtatatgggttatcctcctcggg

SEQ ID NO: 4294436 - DNA, 25 bp, Homo sapien
gaatgcttgcttgggaatgacagac

SEQ ID NO: 4294437 - DNA, 25 bp, Homo sapien
tacacacaacttaaggtggccagtg

SEQ ID NO: 4294438 - DNA, 25 bp, Homo sapien
gctcctcttctcaagccgcagcttc

SEQ ID NO: 4294439 - DNA, 25 bp, Homo sapien
gattctgggcaagttgctcctcttc

SEQ ID NO: 4294440 - DNA, 25 bp, Homo sapien
gcaagttgctcctcttctcaagccg

SEQ ID NO: 4294441 - DNA, 25 bp, Homo sapien
agttgctcctcttctcaagccgcag

SEQ ID NO: 4294442 - DNA, 25 bp, Homo sapien
ggctgtctccttttcggtctatgta

SEQ ID NO: 4294443 - DNA, 25 bp, Homo sapien
ctgtctccttttcggtctatgtaaa

SEQ ID NO: 4294444 - DNA, 25 bp, Homo sapien
gggctgtctccttttcggtctatgt

SEQ ID NO: 4294445 - DNA, 25 bp, Homo sapien
tggggctgtctccttttcggtctat

SEQ ID NO: 4294446 - DNA, 25 bp, Homo sapien
taagagcagcagttttcaatgtggg

SEQ ID NO: 4294447 - DNA, 25 bp, Homo sapien
cagttaagagcagcagttttcaatg

SEQ ID NO: 4294448 - DNA, 25 bp, Homo sapien
ggagaggtcacaaaatccatttagt

SEQ ID NO: 4294449 - DNA, 25 bp, Homo sapien
ggaggagaggtcacaaaatccattt

SEQ ID NO: 4294450 - DNA, 25 bp, Homo sapien
tgtccccagagacgttcttgctcgg

SEQ ID NO: 4294451 - DNA, 25 bp, Homo sapien
ccccagagacgttcttgctcggcat

SEQ ID NO: 4294452 - DNA, 25 bp, Homo sapien
cttgtccccagagacgttcttgctc

SEQ ID NO: 4294453 - DNA, 25 bp, Homo sapien
tccccagagacgttcttgctcggca

SEQ ID NO: 4294454 - DNA, 25 bp, Homo sapien
tctcccattgtacatgagcagttgg

SEQ ID NO: 4294455 - DNA, 25 bp, Homo sapien
gggattcatcagtatcgccaaggct

SEQ ID NO: 4294456 - DNA, 25 bp, Homo sapien
cagaagctctgttttcgaggtgtaa

SEQ ID NO: 4294457 - DNA, 25 bp, Homo sapien
tgaagtttacacgagctccccaaat

SEQ ID NO: 4294458 - DNA, 25 bp, Homo sapien
caccttctgctcagtcgtggctgca

SEQ ID NO: 4294459 - DNA, 25 bp, Homo sapien
acccagggtagagagtagcaatgca

SEQ ID NO: 4294460 - DNA, 25 bp, Homo sapien
tgctgggagtgcgaacaccttctgc

SEQ ID NO: 4294461 - DNA, 25 bp, Homo sapien
tagcaatgcatcctgccatgggcca

SEQ ID NO: 4294462 - DNA, 25 bp, Homo sapien
tactcgatcccattcagcactggtg

SEQ ID NO: 4294463 - DNA, 25 bp, Homo sapien
tcaagggacttcctgaaagctggcg

SEQ ID NO: 4294464 - DNA, 25 bp, Homo sapien
gattccagggagcttcgtctactcg

SEQ ID NO: 4294465 - DNA, 25 bp, Homo sapien
gaagagccgctgagcagattccagg

SEQ ID NO: 4294466 - DNA, 25 bp, Homo sapien
ctgaaggcatgttgtctcccgggag

SEQ ID NO: 4294467 - DNA, 25 bp, Homo sapien
gttgtctcccgggagctgaggccac

SEQ ID NO: 4294468 - DNA, 25 bp, Homo sapien
ggctggtccagcgagctaattctga

SEQ ID NO: 4294469 - DNA, 25 bp, Homo sapien
gctggtccagcgagctaattctgaa

SEQ ID NO: 4294470 - DNA, 25 bp, Homo sapien
ccagccttggtgcataaatgggccc

SEQ ID NO: 4294471 - DNA, 25 bp, Homo sapien
tgacacctttgaagaaaggccagtc

SEQ ID NO: 4294472 - DNA, 25 bp, Homo sapien
gcaagattccatttgtacgccagcc

SEQ ID NO: 4294473 - DNA, 25 bp, Homo sapien
aggccagtcagactgggcaagattc

SEQ ID NO: 4294474 - DNA, 25 bp, Homo sapien
taaagaaggatattgagccatgtcc

SEQ ID NO: 4294475 - DNA, 25 bp, Homo sapien
gtagtcactacgtccataaagaagg

SEQ ID NO: 4294476 - DNA, 25 bp, Homo sapien
tcatctagcaaaattgctgctccag

SEQ ID NO: 4294477 - DNA, 25 bp, Homo sapien
agaaaggtggtccatctttagcctc

SEQ ID NO: 4294478 - DNA, 25 bp, Homo sapien
ataacattgaggatagctgccgcca

SEQ ID NO: 4294479 - DNA, 25 bp, Homo sapien
gtagagccagtaccctgagtagcaa

SEQ ID NO: 4294480 - DNA, 25 bp, Homo sapien
gcctgaaggagtgaatgtagagcca

SEQ ID NO: 4294481 - DNA, 25 bp, Homo sapien
tgtacaactctatgcactctgtgcg

SEQ ID NO: 4294482 - DNA, 25 bp, Homo sapien
cagggcctgagtcctattatccgga

SEQ ID NO: 4294483 - DNA, 25 bp, Homo sapien
acttaatccacagaagagtacctgg

SEQ ID NO: 4294484 - DNA, 25 bp, Homo sapien
tggaccataaagctcccaggaatgc

SEQ ID NO: 4294485 - DNA, 25 bp, Homo sapien
aatgcccatcgggtaagatcaccag

SEQ ID NO: 4294486 - DNA, 25 bp, Homo sapien
gtcttacccccacatagaatcgtcg

SEQ ID NO: 4294487 - DNA, 25 bp, Homo sapien
gaatcgtcgtaataacttcccaggc

SEQ ID NO: 4294488 - DNA, 25 bp, Homo sapien
tgtgtgtgtcttacccccacataga

SEQ ID NO: 4294489 - DNA, 25 bp, Homo sapien
ccccacatagaatcgtcgtaataac

SEQ ID NO: 4294490 - DNA, 25 bp, Homo sapien
gcaaaatcagactaacaggaaacac

SEQ ID NO: 4294491 - DNA, 25 bp, Homo sapien
atcagccctactcagacactatctt

SEQ ID NO: 4294492 - DNA, 25 bp, Homo sapien
ggcctgcaatgaccaatcctatttg

SEQ ID NO: 4294493 - DNA, 25 bp, Homo sapien
aatcgcaacataaattcctccccag

SEQ ID NO: 4294494 - DNA, 25 bp, Homo sapien
tgggtttgagctcgcactccaagag

SEQ ID NO: 4294495 - DNA, 25 bp, Homo sapien
gattgccgcataggtgcagccatag

SEQ ID NO: 4294496 - DNA, 25 bp, Homo sapien
tcattggtttgagccaagggtcccc

SEQ ID NO: 4294497 - DNA, 25 bp, Homo sapien
catggtactgggctgtgattgccgc

SEQ ID NO: 4294498 - DNA, 25 bp, Homo sapien
cctgcgaggacactggatcaggagc

SEQ ID NO: 4294499 - DNA, 25 bp, Homo sapien
ctcaggaccacaccgtgggcagagc

SEQ ID NO: 4294500 - DNA, 25 bp, Homo sapien
ggctggtacagctcatgagggatcc

SEQ ID NO: 4294501 - DNA, 25 bp, Homo sapien
cagatgatgccgtctgttagtcccc

SEQ ID NO: 4294502 - DNA, 25 bp, Homo sapien
caggtgtgtagactgctgttggtcg

SEQ ID NO: 4294503 - DNA, 25 bp, Homo sapien
ggtgtgtagactgctgttggtcggg

SEQ ID NO: 4294504 - DNA, 25 bp, Homo sapien
gattgatatcctcaggtgtgtagac

SEQ ID NO: 4294505 - DNA, 25 bp, Homo sapien
tgatatcctcaggtgtgtagactgc

SEQ ID NO: 4294506 - DNA, 25 bp, Homo sapien
cagagtttaagaccgagcaagtggc

SEQ ID NO: 4294507 - DNA, 25 bp, Homo sapien
ccgcaagtatagttaggttctccca

SEQ ID NO: 4294508 - DNA, 25 bp, Homo sapien
cacactgggcatggattccaggagc

SEQ ID NO: 4294509 - DNA, 25 bp, Homo sapien
tccaggagcgctcgatcaagctgct

SEQ ID NO: 4294510 - DNA, 25 bp, Homo sapien
taaaacctgcaagtgctgaagccca

SEQ ID NO: 4294511 - DNA, 25 bp, Homo sapien
ccaggggccagatttgaaagggaat

SEQ ID NO: 4294512 - DNA, 25 bp, Homo sapien
tagatttaaaacctgcaagtgctga

SEQ ID NO: 4294513 - DNA, 25 bp, Homo sapien
gagggaatggaaaagtctgctttcc

SEQ ID NO: 4294514 - DNA, 25 bp, Homo sapien
ctggagcaggacaatcacactggaa

SEQ ID NO: 4294515 - DNA, 25 bp, Homo sapien
taaatgcagcgttcgagtctgagga

SEQ ID NO: 4294516 - DNA, 25 bp, Homo sapien
gacagtaacacttgtccgggcagct

SEQ ID NO: 4294517 - DNA, 25 bp, Homo sapien
tgctggctgcagtctacaaaatttg

SEQ ID NO: 4294518 - DNA, 25 bp, Homo sapien
ggtcagagtacatccccagtgtcat

SEQ ID NO: 4294519 - DNA, 25 bp, Homo sapien
agtagagccaggctggtcagagtac

SEQ ID NO: 4294520 - DNA, 25 bp, Homo sapien
ggctggtcagagtacatccccagtg

SEQ ID NO: 4294521 - DNA, 25 bp, Homo sapien
gagccaggctggtcagagtacatcc

SEQ ID NO: 4294522 - DNA, 25 bp, Homo sapien
ttgggcgtccttgctgacctcgtag

SEQ ID NO: 4294523 - DNA, 25 bp, Homo sapien
tccttgggcgtccttgctgacctcg

SEQ ID NO: 4294524 - DNA, 25 bp, Homo sapien
agtctccttgggcgtccttgctgac

SEQ ID NO: 4294525 - DNA, 25 bp, Homo sapien
gtctccttgggcgtccttgctgacc

SEQ ID NO: 4294526 - DNA, 25 bp, Homo sapien
cctttcccattcagacgatgagccg

SEQ ID NO: 4294527 - DNA, 25 bp, Homo sapien
ccatctggctgggatcagtttccat

SEQ ID NO: 4294528 - DNA, 25 bp, Homo sapien
tcttaaaatgttggcctccccagga

SEQ ID NO: 4294529 - DNA, 25 bp, Homo sapien
tgcagagcaacacacgaagggcatg

SEQ ID NO: 4294530 - DNA, 25 bp, Homo sapien
gcagagcccgcagagtgtgtaatat

SEQ ID NO: 4294531 - DNA, 25 bp, Homo sapien
tcatcgaagtcttattcagccaaca

SEQ ID NO: 4294532 - DNA, 25 bp, Homo sapien
tttgcaccgtgcacttctttggtca

SEQ ID NO: 4294533 - DNA, 25 bp, Homo sapien
gtgtgtaatatgaggacaaattggc

SEQ ID NO: 4294534 - DNA, 25 bp, Homo sapien
ttgacagagggccatggaacctggc

SEQ ID NO: 4294535 - DNA, 25 bp, Homo sapien
taagtgttcacaattttgcatgaga

SEQ ID NO: 4294536 - DNA, 25 bp, Homo sapien
ttctgaggacaacctggaccggtca

SEQ ID NO: 4294537 - DNA, 25 bp, Homo sapien
tcaggatttgtatgctgccaacttc

SEQ ID NO: 4294538 - DNA, 25 bp, Homo sapien
tctcccaattgtaaggtctgccttg

SEQ ID NO: 4294539 - DNA, 25 bp, Homo sapien
ggtctctacgtgtgatgagccctta

SEQ ID NO: 4294540 - DNA, 25 bp, Homo sapien
gaattagccccacaggtaacatctg

SEQ ID NO: 4294541 - DNA, 25 bp, Homo sapien
caggctcctcatccaaaccatgtgg

SEQ ID NO: 4294542 - DNA, 25 bp, Homo sapien
aggtgctaaggtggttagatttgct

SEQ ID NO: 4294543 - DNA, 25 bp, Homo sapien
ctgagaaagagcagtgcccgtgttc

SEQ ID NO: 4294544 - DNA, 25 bp, Homo sapien
aaggcagctgagtgccgctgtgtgt

SEQ ID NO: 4294545 - DNA, 25 bp, Homo sapien
catgaaggcatctggaaaggcagct

SEQ ID NO: 4294546 - DNA, 25 bp, Homo sapien
gatgttgatttcacaagcattatga

SEQ ID NO: 4294547 - DNA, 25 bp, Homo sapien
tgctgtccctcagtatgcttctcag

SEQ ID NO: 4294548 - DNA, 25 bp, Homo sapien
cctgagctttgatgtggagttggca

SEQ ID NO: 4294549 - DNA, 25 bp, Homo sapien
gcattatgaaatccccgtacacgtt

SEQ ID NO: 4294550 - DNA, 25 bp, Homo sapien
tgctttagagcatccagagtctgaa

SEQ ID NO: 4294551 - DNA, 25 bp, Homo sapien
gccgctggccatgcttgctttagag

SEQ ID NO: 4294552 - DNA, 25 bp, Homo sapien
gggaactccctttgatctatagacc

SEQ ID NO: 4294553 - DNA, 25 bp, Homo sapien
tctatagaccagtagcgggagaagc

SEQ ID NO: 4294554 - DNA, 25 bp, Homo sapien
aaaaccttgctacaggctactccca

SEQ ID NO: 4294555 - DNA, 25 bp, Homo sapien
tatttgctgtcagggtgaactctga

SEQ ID NO: 4294556 - DNA, 25 bp, Homo sapien
caaactgtcactattggaagtgaac

SEQ ID NO: 4294557 - DNA, 25 bp, Homo sapien
aagctccaccaacatttcagacaca

SEQ ID NO: 4294558 - DNA, 25 bp, Homo sapien
gccagcccatggtcccttgaaagtc

SEQ ID NO: 4294559 - DNA, 25 bp, Homo sapien
tgtcagtgcttttaacgccagccca

SEQ ID NO: 4294560 - DNA, 25 bp, Homo sapien
gatacaaccgtgtatctctgcccag

SEQ ID NO: 4294561 - DNA, 25 bp, Homo sapien
tgatttctgcaacagggcagtgata

SEQ ID NO: 4294562 - DNA, 25 bp, Homo sapien
gaagtcttcattatcctagtaggca

SEQ ID NO: 4294563 - DNA, 25 bp, Homo sapien
gaaggtcaccttcgagtcagtcggc

SEQ ID NO: 4294564 - DNA, 25 bp, Homo sapien
tattcccagggtttacctgaggcca

SEQ ID NO: 4294565 - DNA, 25 bp, Homo sapien
tatggcctcctcattccaagggaag

SEQ ID NO: 4294566 - DNA, 25 bp, Homo sapien
cttgatacctccagtttgcatttta

SEQ ID NO: 4294567 - DNA, 25 bp, Homo sapien
ttgatacctccagtttgcattttat

SEQ ID NO: 4294568 - DNA, 25 bp, Homo sapien
tctcttcggtgatttgactgccctc

SEQ ID NO: 4294569 - DNA, 25 bp, Homo sapien
acccctggcggttgtgtctctcaca

SEQ ID NO: 4294570 - DNA, 25 bp, Homo sapien
cacagatagttcaaaagagaggtca

SEQ ID NO: 4294571 - DNA, 25 bp, Homo sapien
tgtccctagattcaagcatgccgat

SEQ ID NO: 4294572 - DNA, 25 bp, Homo sapien
tcctgggtggtgagtaagatatcac

SEQ ID NO: 4294573 - DNA, 25 bp, Homo sapien
cctgggacatctgtaatcaaattga

SEQ ID NO: 4294574 - DNA, 25 bp, Homo sapien
aattgaagtaaggagcactgtgacc

SEQ ID NO: 4294575 - DNA, 25 bp, Homo sapien
tatcaccagatgcagttgtgtaaag

SEQ ID NO: 4294576 - DNA, 25 bp, Homo sapien
agtcagaccctgttttgcaccctgc

SEQ ID NO: 4294577 - DNA, 25 bp, Homo sapien
catcaggagactcatggaagctcaa

SEQ ID NO: 4294578 - DNA, 25 bp, Homo sapien
gctcaagagatgacaggtgggccca

SEQ ID NO: 4294579 - DNA, 25 bp, Homo sapien
cctggagtgactctttcagggagtc

SEQ ID NO: 4294580 - DNA, 25 bp, Homo sapien
gtccccaacagctgatttactaaag

SEQ ID NO: 4294581 - DNA, 25 bp, Homo sapien
acagcttttgtgttgtgtagtctgg

SEQ ID NO: 4294582 - DNA, 25 bp, Homo sapien
tgttgtgtagtctggccacgtggcc

SEQ ID NO: 4294583 - DNA, 25 bp, Homo sapien
acatcacagtaggtccccaacagct

SEQ ID NO: 4294584 - DNA, 25 bp, Homo sapien
cgaaggacacttaaggcagagcaga

SEQ ID NO: 4294585 - DNA, 25 bp, Homo sapien
gcagaatgagcctgggcaccgacat

SEQ ID NO: 4294586 - DNA, 25 bp, Homo sapien
tccagcagggagcaagaacaggtcc

SEQ ID NO: 4294587 - DNA, 25 bp, Homo sapien
agaacgaaggacacttaaggcagag

SEQ ID NO: 4294588 - DNA, 25 bp, Homo sapien
taaacaaggccaggttgacgcattg

SEQ ID NO: 4294589 - DNA, 25 bp, Homo sapien
tgctttatgaccgagggaatgccct

SEQ ID NO: 4294590 - DNA, 25 bp, Homo sapien
tgatgatgaggtaagacggcctcct

SEQ ID NO: 4294591 - DNA, 25 bp, Homo sapien
ctacccctgtggatagaaggtgaca

SEQ ID NO: 4294592 - DNA, 25 bp, Homo sapien
tgtctccccagtcaatgcactctct

SEQ ID NO: 4294593 - DNA, 25 bp, Homo sapien
acacttagccttagatccactccag

SEQ ID NO: 4294594 - DNA, 25 bp, Homo sapien
tcagacacacttagccttagatcca

SEQ ID NO: 4294595 - DNA, 25 bp, Homo sapien
aactccctcgggcttatcagacaca

SEQ ID NO: 4294596 - DNA, 25 bp, Homo sapien
gcttctttactgcatcctgtttatc

SEQ ID NO: 4294597 - DNA, 25 bp, Homo sapien
atcagagtttactctcatcaccatc

SEQ ID NO: 4294598 - DNA, 25 bp, Homo sapien
gtgaggatgatcagagtttactctc

SEQ ID NO: 4294599 - DNA, 25 bp, Homo sapien
ggatgatcagagtttactctcatca

SEQ ID NO: 4294600 - DNA, 25 bp, Homo sapien
tatctgagttcaaggattaacagct

SEQ ID NO: 4294601 - DNA, 25 bp, Homo sapien
cttcatttgactgcaccatgtgcag

SEQ ID NO: 4294602 - DNA, 25 bp, Homo sapien
tattgtttatggctttcgttctggt

SEQ ID NO: 4294603 - DNA, 25 bp, Homo sapien
gctctcaacaccgagggacaagggt

SEQ ID NO: 4294604 - DNA, 25 bp, Homo sapien
gttgattctgtgacatatcccggtg

SEQ ID NO: 4294605 - DNA, 25 bp, Homo sapien
ccattgtggtctgcagttgattctg

SEQ ID NO: 4294606 - DNA, 25 bp, Homo sapien
tcaatggtgagagcgtttctgtgag

SEQ ID NO: 4294607 - DNA, 25 bp, Homo sapien
tatcccggtgtctgggttagtgcta

SEQ ID NO: 4294608 - DNA, 25 bp, Homo sapien
tgttttctcatttagtgaagctccc

SEQ ID NO: 4294609 - DNA, 25 bp, Homo sapien
catcaattggttcccgtgttttctc

SEQ ID NO: 4294610 - DNA, 25 bp, Homo sapien
caagccatgtgtagagccaacaagg

SEQ ID NO: 4294611 - DNA, 25 bp, Homo sapien
caacaaggaaagcagcgatggcgcc

SEQ ID NO: 4294612 - DNA, 25 bp, Homo sapien
ttcaattctccgatatctaaaggca

SEQ ID NO: 4294613 - DNA, 25 bp, Homo sapien
gcagaagcaaggatttggcatgcat

SEQ ID NO: 4294614 - DNA, 25 bp, Homo sapien
attcttctggacctgacatctggag

SEQ ID NO: 4294615 - DNA, 25 bp, Homo sapien
ggcaaccacaaaaggttctgagatt

SEQ ID NO: 4294616 - DNA, 25 bp, Homo sapien
tcattcagcccacgttgaatgtaca

SEQ ID NO: 4294617 - DNA, 25 bp, Homo sapien
ggtcatacattgcacaggtaaattc

SEQ ID NO: 4294618 - DNA, 25 bp, Homo sapien
ctgtttccttaactaaggctttgag

SEQ ID NO: 4294619 - DNA, 25 bp, Homo sapien
gcccacgttgaatgtacatcttgac

SEQ ID NO: 4294620 - DNA, 25 bp, Homo sapien
agcagaatctgctgagttctgcccc

SEQ ID NO: 4294621 - DNA, 25 bp, Homo sapien
acataggctcgttttgccggaatcc

SEQ ID NO: 4294622 - DNA, 25 bp, Homo sapien
tcgttttgccggaatccaggaactc

SEQ ID NO: 4294623 - DNA, 25 bp, Homo sapien
gccggaatccaggaactctctgatt

SEQ ID NO: 4294624 - DNA, 25 bp, Homo sapien
ttcttcatacctagtgaagacgctc

SEQ ID NO: 4294625 - DNA, 25 bp, Homo sapien
tagtgaagacgctcccttctcttca

SEQ ID NO: 4294626 - DNA, 25 bp, Homo sapien
tacctagtgaagacgctcccttctc

SEQ ID NO: 4294627 - DNA, 25 bp, Homo sapien
tcatacctagtgaagacgctccctt

SEQ ID NO: 4294628 - DNA, 25 bp, Homo sapien
gctttacatctaattcgcatacaaa

SEQ ID NO: 4294629 - DNA, 25 bp, Homo sapien
tcttgatgacccatagatgtacaat

SEQ ID NO: 4294630 - DNA, 25 bp, Homo sapien
cctctgctttacatctaattcgcat

SEQ ID NO: 4294631 - DNA, 25 bp, Homo sapien
gatgacccatagatgtacaatggcc

SEQ ID NO: 4294632 - DNA, 25 bp, Homo sapien
gttcgtgccttggaagatatagccc

SEQ ID NO: 4294633 - DNA, 25 bp, Homo sapien
gatatagcccaagaagcttaaccgg

SEQ ID NO: 4294634 - DNA, 25 bp, Homo sapien
cacttggcaccccagggtagagaca

SEQ ID NO: 4294635 - DNA, 25 bp, Homo sapien
taatttccgtatgttgttcgtgcct

SEQ ID NO: 4294636 - DNA, 25 bp, Homo sapien
cgggccgaagataaaccaaagccag

SEQ ID NO: 4294637 - DNA, 25 bp, Homo sapien
ggccgaagataaaccaaagccagga

SEQ ID NO: 4294638 - DNA, 25 bp, Homo sapien
gcgggccgaagataaaccaaagcca

SEQ ID NO: 4294639 - DNA, 25 bp, Homo sapien
agagatacaattgcttgctcagtct

SEQ ID NO: 4294640 - DNA, 25 bp, Homo sapien
tgtttcaaagctgcatggtactcca

SEQ ID NO: 4294641 - DNA, 25 bp, Homo sapien
catgcacatggtgtcaatgccacaa

SEQ ID NO: 4294642 - DNA, 25 bp, Homo sapien
tgaggtaatttagagcagcatcgct

SEQ ID NO: 4294643 - DNA, 25 bp, Homo sapien
tttggtggcctggttttaggcttca

SEQ ID NO: 4294644 - DNA, 25 bp, Homo sapien
ggtggcctggttttaggcttcagaa

SEQ ID NO: 4294645 - DNA, 25 bp, Homo sapien
tggcctggttttaggcttcagaagg

SEQ ID NO: 4294646 - DNA, 25 bp, Homo sapien
tggtggcctggttttaggcttcaga

SEQ ID NO: 4294647 - DNA, 25 bp, Homo sapien
tgagtacatagaagaggacagcaag

SEQ ID NO: 4294648 - DNA, 25 bp, Homo sapien
tcagcaactgagactatagagtaaa

SEQ ID NO: 4294649 - DNA, 25 bp, Homo sapien
gctccaattgtagatcaggcagtga

SEQ ID NO: 4294650 - DNA, 25 bp, Homo sapien
ggttttagtttctctggtggtcagc

SEQ ID NO: 4294651 - DNA, 25 bp, Homo sapien
accacacctggctgtatcttctcat

SEQ ID NO: 4294652 - DNA, 25 bp, Homo sapien
cacctggctgtatcttctcattttc

SEQ ID NO: 4294653 - DNA, 25 bp, Homo sapien
cacacctggctgtatcttctcattt

SEQ ID NO: 4294654 - DNA, 25 bp, Homo sapien
cctggctgtatcttctcattttcca

SEQ ID NO: 4294655 - DNA, 25 bp, Homo sapien
cattgaaatcaggtatatccttttg

SEQ ID NO: 4294656 - DNA, 25 bp, Homo sapien
ttccaacaggtcctttgtcatccag

SEQ ID NO: 4294657 - DNA, 25 bp, Homo sapien
gcaaatcccaagcagcaacctgttc

SEQ ID NO: 4294658 - DNA, 25 bp, Homo sapien
ctcactaccacggaaaccagtaagg

SEQ ID NO: 4294659 - DNA, 25 bp, Homo sapien
tcttcagcaccagcatactcaaaag

SEQ ID NO: 4294660 - DNA, 25 bp, Homo sapien
aacaggtggacgctttcccccacag

SEQ ID NO: 4294661 - DNA, 25 bp, Homo sapien
gcaccagcatactcaaaagaaggta

SEQ ID NO: 4294662 - DNA, 25 bp, Homo sapien
aagaaggtattcctgagttcctgga

SEQ ID NO: 4294663 - DNA, 25 bp, Homo sapien
ttgaatacccacttgtctttttgaa

SEQ ID NO: 4294664 - DNA, 25 bp, Homo sapien
aaaaccagcatctccatcgttcaga

SEQ ID NO: 4294665 - DNA, 25 bp, Homo sapien
cagcatctccatcgttcagacaact

SEQ ID NO: 4294666 - DNA, 25 bp, Homo sapien
cgttcagacaactcctcccaaattt

SEQ ID NO: 4294667 - DNA, 25 bp, Homo sapien
aatcagttcctcgtttttcatgcta

SEQ ID NO: 4294668 - DNA, 25 bp, Homo sapien
tcatgctaatagatggagagtcagc

SEQ ID NO: 4294669 - DNA, 25 bp, Homo sapien
cgtttttcatgctaatagatggaga

SEQ ID NO: 4294670 - DNA, 25 bp, Homo sapien
atgatataagcccaatcagttcctc

SEQ ID NO: 4294671 - DNA, 25 bp, Homo sapien
gagtgggtaatgagcaaatctctgt

SEQ ID NO: 4294672 - DNA, 25 bp, Homo sapien
caatgtttatggttcccgtgcccag

SEQ ID NO: 4294673 - DNA, 25 bp, Homo sapien
tcttccatttgggaaacgacaatgt

SEQ ID NO: 4294674 - DNA, 25 bp, Homo sapien
tatggttcccgtgcccagttggtgg

SEQ ID NO: 4294675 - DNA, 25 bp, Homo sapien
gcatttgtggaataggctgacctgt

SEQ ID NO: 4294676 - DNA, 25 bp, Homo sapien
gaagcaaagtcagtgaggacatcct

SEQ ID NO: 4294677 - DNA, 25 bp, Homo sapien
cctgtgttggacgtgtgatgaagca

SEQ ID NO: 4294678 - DNA, 25 bp, Homo sapien
tcttcttgagacatgaacgggtcag

SEQ ID NO: 4294679 - DNA, 25 bp, Homo sapien
tatatcctgaggacagactgaatga

SEQ ID NO: 4294680 - DNA, 25 bp, Homo sapien
tgtgtcaacgtctgaatggctgacc

SEQ ID NO: 4294681 - DNA, 25 bp, Homo sapien
cgtctgaatggctgaccgggacaca

SEQ ID NO: 4294682 - DNA, 25 bp, Homo sapien
ttctttaggatcaagcctgggtcag

SEQ ID NO: 4294683 - DNA, 25 bp, Homo sapien
gaccccgagaaactgacctgacagg

SEQ ID NO: 4294684 - DNA, 25 bp, Homo sapien
gacctgacaggtgtaaaagggacat

SEQ ID NO: 4294685 - DNA, 25 bp, Homo sapien
ctgtagggattaatgaccccgagaa

SEQ ID NO: 4294686 - DNA, 25 bp, Homo sapien
ttaatgaccccgagaaactgacctg

SEQ ID NO: 4294687 - DNA, 25 bp, Homo sapien
ctgtaccgccttctgctgttggcaa

SEQ ID NO: 4294688 - DNA, 25 bp, Homo sapien
ttctaactgtaccgccttctgctgt

SEQ ID NO: 4294689 - DNA, 25 bp, Homo sapien
ctaactgtaccgccttctgctgttg

SEQ ID NO: 4294690 - DNA, 25 bp, Homo sapien
aactgtaccgccttctgctgttggc

SEQ ID NO: 4294691 - DNA, 25 bp, Homo sapien
ccaatacagtgtttcccaggatcgc

SEQ ID NO: 4294692 - DNA, 25 bp, Homo sapien
gatgctctgctcgtatccatgccct

SEQ ID NO: 4294693 - DNA, 25 bp, Homo sapien
tgcatccactgacgggagaacttga

SEQ ID NO: 4294694 - DNA, 25 bp, Homo sapien
gagaacttgagagctcacctgcctc

SEQ ID NO: 4294695 - DNA, 25 bp, Homo sapien
aatgtggggtggttccttatcctat

SEQ ID NO: 4294696 - DNA, 25 bp, Homo sapien
gagagtcacttatactcaagaggcg

SEQ ID NO: 4294697 - DNA, 25 bp, Homo sapien
aatacatacaccctgaatttttgga

SEQ ID NO: 4294698 - DNA, 25 bp, Homo sapien
gaaaagaaaccattgctatgaccta

SEQ ID NO: 4294699 - DNA, 25 bp, Homo sapien
aattcatgcctactcatgccttgat

SEQ ID NO: 4294700 - DNA, 25 bp, Homo sapien
ttcatgcctactcatgccttgatcc

SEQ ID NO: 4294701 - DNA, 25 bp, Homo sapien
ttaattcatgcctactcatgccttg

SEQ ID NO: 4294702 - DNA, 25 bp, Homo sapien
catgcctactcatgccttgatccat

SEQ ID NO: 4294703 - DNA, 25 bp, Homo sapien
ttggccccagcagtagcacctcggt

SEQ ID NO: 4294704 - DNA, 25 bp, Homo sapien
agtagcacctcggtgtggtctgtat

SEQ ID NO: 4294705 - DNA, 25 bp, Homo sapien
tgctattggccccagcagtagcacc

SEQ ID NO: 4294706 - DNA, 25 bp, Homo sapien
tggtctgtatagacttgtgcattat

SEQ ID NO: 4294707 - DNA, 25 bp, Homo sapien
tgaccagaagacttgagacacagaa

SEQ ID NO: 4294708 - DNA, 25 bp, Homo sapien
tctccccacatgaccagaagacttg

SEQ ID NO: 4294709 - DNA, 25 bp, Homo sapien
cttgagacacagaagccttggtgca

SEQ ID NO: 4294710 - DNA, 25 bp, Homo sapien
tgagacacagaagccttggtgcagt

SEQ ID NO: 4294711 - DNA, 25 bp, Homo sapien
tacagccgggctgcttatgtgaaga

SEQ ID NO: 4294712 - DNA, 25 bp, Homo sapien
tgtgcacggccagttttacagccgg

SEQ ID NO: 4294713 - DNA, 25 bp, Homo sapien
taatcccctcattaagcaacccatg

SEQ ID NO: 4294714 - DNA, 25 bp, Homo sapien
aacggccgtggctctgcacaggttg

SEQ ID NO: 4294715 - DNA, 25 bp, Homo sapien
ccactggccatgagtcattggaaga

SEQ ID NO: 4294716 - DNA, 25 bp, Homo sapien
tggccatgagtcattggaagactga

SEQ ID NO: 4294717 - DNA, 25 bp, Homo sapien
gtgaaatctttgcacgccactggcc

SEQ ID NO: 4294718 - DNA, 25 bp, Homo sapien
tgttggagatgggacgtgaaatctt

SEQ ID NO: 4294719 - DNA, 25 bp, Homo sapien
cataggccctcagacagctgtaaaa

SEQ ID NO: 4294720 - DNA, 25 bp, Homo sapien
tgtttgagccccacttcagcagtgt

SEQ ID NO: 4294721 - DNA, 25 bp, Homo sapien
ctgacagcctgagtgagggaatcca

SEQ ID NO: 4294722 - DNA, 25 bp, Homo sapien
caaaggttttgtccctctcttgact

SEQ ID NO: 4294723 - DNA, 25 bp, Homo sapien
tgtaactaaataggcgagtgcggtt

SEQ ID NO: 4294724 - DNA, 25 bp, Homo sapien
cgagtgcggtttgtggttaaagcat

SEQ ID NO: 4294725 - DNA, 25 bp, Homo sapien
tgtgtttgttgtaactaaataggcg

SEQ ID NO: 4294726 - DNA, 25 bp, Homo sapien
tggttaaagcatgaccaggcaacct

SEQ ID NO: 4294727 - DNA, 25 bp, Homo sapien
atttaaatagccacgtgtggtaagg

SEQ ID NO: 4294728 - DNA, 25 bp, Homo sapien
ggacagcacaagtcttagactttta

SEQ ID NO: 4294729 - DNA, 25 bp, Homo sapien
tgctgcatatggctgagtggtttgt

SEQ ID NO: 4294730 - DNA, 25 bp, Homo sapien
ttcagaaagcctccactctagccaa

SEQ ID NO: 4294731 - DNA, 25 bp, Homo sapien
ccaggagctcaactatgtcatcaag

SEQ ID NO: 4294732 - DNA, 25 bp, Homo sapien
caggagctcaactatgtcatcaaga

SEQ ID NO: 4294733 - DNA, 25 bp, Homo sapien
tctccatagattgtgaggtggtgag

SEQ ID NO: 4294734 - DNA, 25 bp, Homo sapien
catctccatagattgtgaggtggtg

SEQ ID NO: 4294735 - DNA, 25 bp, Homo sapien
agggtgaggagctcaagtcttgttt

SEQ ID NO: 4294736 - DNA, 25 bp, Homo sapien
gcctggcatctccatagattgtgag

SEQ ID NO: 4294737 - DNA, 25 bp, Homo sapien
cagtggtagatataaagtggaaatc

SEQ ID NO: 4294738 - DNA, 25 bp, Homo sapien
cctgtggacgagaggcagtctaaca

SEQ ID NO: 4294739 - DNA, 25 bp, Homo sapien
atcagtggtagatataaagtggaaa

SEQ ID NO: 4294740 - DNA, 25 bp, Homo sapien
tggtagatataaagtggaaatccag

SEQ ID NO: 4294741 - DNA, 25 bp, Homo sapien
cttgagctccagactgtgaaagcac

SEQ ID NO: 4294742 - DNA, 25 bp, Homo sapien
gtcactatatttttcttgagctcca

SEQ ID NO: 4294743 - DNA, 25 bp, Homo sapien
tgagctccagactgtgaaagcacag

SEQ ID NO: 4294744 - DNA, 25 bp, Homo sapien
ttcttgagctccagactgtgaaagc

SEQ ID NO: 4294745 - DNA, 25 bp, Homo sapien
ggtagatccagctcccaaggacact

SEQ ID NO: 4294746 - DNA, 25 bp, Homo sapien
ttcttgtaagcaactaccactcctg

SEQ ID NO: 4294747 - DNA, 25 bp, Homo sapien
caactaccactcctgggtagatcca

SEQ ID NO: 4294748 - DNA, 25 bp, Homo sapien
aaggacactggacaatgaaggaagt

SEQ ID NO: 4294749 - DNA, 25 bp, Homo sapien
ccttctgccacgattattaggtttg

SEQ ID NO: 4294750 - DNA, 25 bp, Homo sapien
gaggtagccatcataatagattggg

SEQ ID NO: 4294751 - DNA, 25 bp, Homo sapien
catcataatagattgggtgtgtaga

SEQ ID NO: 4294752 - DNA, 25 bp, Homo sapien
ccccatatgttcgttctttgaaagg

SEQ ID NO: 4294753 - DNA, 25 bp, Homo sapien
caagctggggcacatttagaggaat

SEQ ID NO: 4294754 - DNA, 25 bp, Homo sapien
gctggggcacatttagaggaattcc

SEQ ID NO: 4294755 - DNA, 25 bp, Homo sapien
catttagaggaattccagtactcac

SEQ ID NO: 4294756 - DNA, 25 bp, Homo sapien
gggcacatttagaggaattccagta

SEQ ID NO: 4294757 - DNA, 25 bp, Homo sapien
tcatttgcagcatgcattcgtgcag

SEQ ID NO: 4294758 - DNA, 25 bp, Homo sapien
gcttgcacagtgtaagtcgtacttc

SEQ ID NO: 4294759 - DNA, 25 bp, Homo sapien
taactccaggatagacaaccacatc

SEQ ID NO: 4294760 - DNA, 25 bp, Homo sapien
ggtaaatcgctgctataactccagg

SEQ ID NO: 4294761 - DNA, 25 bp, Homo sapien
aaatgctccaccaactatgagcctg

SEQ ID NO: 4294762 - DNA, 25 bp, Homo sapien
aaatgtctcctccaagtcagtgtcc

SEQ ID NO: 4294763 - DNA, 25 bp, Homo sapien
tcctaacatggttgtaatttactgc

SEQ ID NO: 4294764 - DNA, 25 bp, Homo sapien
tccaccaactatgagcctgatgttc

SEQ ID NO: 4294765 - DNA, 25 bp, Homo sapien
agattcctgcctatccttcaggcca

SEQ ID NO: 4294766 - DNA, 25 bp, Homo sapien
agtggcacagattcctgcctatcct

SEQ ID NO: 4294767 - DNA, 25 bp, Homo sapien
atgaccagagtggcacagattcctg

SEQ ID NO: 4294768 - DNA, 25 bp, Homo sapien
gcctatccttcaggccagaagccat

SEQ ID NO: 4294769 - DNA, 25 bp, Homo sapien
gctgagattggaaccccgataaccc

SEQ ID NO: 4294770 - DNA, 25 bp, Homo sapien
gataacccggctgaatccagtctgt

SEQ ID NO: 4294771 - DNA, 25 bp, Homo sapien
ttgtagggaaatgaccagccagtgg

SEQ ID NO: 4294772 - DNA, 25 bp, Homo sapien
tcaaaggtgaccaagttaacaggca

SEQ ID NO: 4294773 - DNA, 25 bp, Homo sapien
acccagtttatcagtgacctccaca

SEQ ID NO: 4294774 - DNA, 25 bp, Homo sapien
gaattcttccacatcgcttttctga

SEQ ID NO: 4294775 - DNA, 25 bp, Homo sapien
acactgctgccacccagtttatcag

SEQ ID NO: 4294776 - DNA, 25 bp, Homo sapien
cttccacatcgcttttctgacactg

SEQ ID NO: 4294777 - DNA, 25 bp, Homo sapien
acagtagggcttgcccacatgttag

SEQ ID NO: 4294778 - DNA, 25 bp, Homo sapien
aggcctccacagtagggcttgccca

SEQ ID NO: 4294779 - DNA, 25 bp, Homo sapien
gttcaagcaggcctccacagtaggg

SEQ ID NO: 4294780 - DNA, 25 bp, Homo sapien
agggtgggttcaagcaggcctccac

SEQ ID NO: 4294781 - DNA, 25 bp, Homo sapien
ttaaatggtggttaaacatgttgtc

SEQ ID NO: 4294782 - DNA, 25 bp, Homo sapien
ggttaaacatgttgtctgctttagt

SEQ ID NO: 4294783 - DNA, 25 bp, Homo sapien
aatggtggttaaacatgttgtctgc

SEQ ID NO: 4294784 - DNA, 25 bp, Homo sapien
ggtggttaaacatgttgtctgcttt

SEQ ID NO: 4294785 - DNA, 25 bp, Homo sapien
tatacgcagaactgtatcagcaaca

SEQ ID NO: 4294786 - DNA, 25 bp, Homo sapien
tccaataaattatacgcagaactgt

SEQ ID NO: 4294787 - DNA, 25 bp, Homo sapien
taaaagcagagtgcccttgaggaca

SEQ ID NO: 4294788 - DNA, 25 bp, Homo sapien
aagcagagtgcccttgaggacaata

SEQ ID NO: 4294789 - DNA, 25 bp, Homo sapien
ctgcacagaaccagttgtggttgaa

SEQ ID NO: 4294790 - DNA, 25 bp, Homo sapien
cagaaccagttgtggttgaaaagtt

SEQ ID NO: 4294791 - DNA, 25 bp, Homo sapien
gtttattagcaaagaacgttggtca

SEQ ID NO: 4294792 - DNA, 25 bp, Homo sapien
caaagaacgttggtcagtacctgga

SEQ ID NO: 4294793 - DNA, 25 bp, Homo sapien
gagactggcttaggttatgaactag

SEQ ID NO: 4294794 - DNA, 25 bp, Homo sapien
aatgagactggcttaggttatgaac

SEQ ID NO: 4294795 - DNA, 25 bp, Homo sapien
gttatattattaaagccatacccac

SEQ ID NO: 4294796 - DNA, 25 bp, Homo sapien
gccatacccacccatacaaattttg

SEQ ID NO: 4294797 - DNA, 25 bp, Homo sapien
atagggcggtagtttacccaggatg

SEQ ID NO: 4294798 - DNA, 25 bp, Homo sapien
caggatgtgatcaccacggcatcca

SEQ ID NO: 4294799 - DNA, 25 bp, Homo sapien
ttactgacagtaatagggcggtagt

SEQ ID NO: 4294800 - DNA, 25 bp, Homo sapien
agtgagtatgagtgggcatttctcc

SEQ ID NO: 4294801 - DNA, 25 bp, Homo sapien
caagtggttcgtaagatacagtcgc

SEQ ID NO: 4294802 - DNA, 25 bp, Homo sapien
tgggaatgggagaactaacattgtt

SEQ ID NO: 4294803 - DNA, 25 bp, Homo sapien
agatacagtcgctgaaatcctaagg

SEQ ID NO: 4294804 - DNA, 25 bp, Homo sapien
taacattgttatctcattcatgtgg

SEQ ID NO: 4294805 - DNA, 25 bp, Homo sapien
tctccttctgatctgtatctgtgaa

SEQ ID NO: 4294806 - DNA, 25 bp, Homo sapien
gcattctgcactttatatgcttcct

SEQ ID NO: 4294807 - DNA, 25 bp, Homo sapien
gattgttcttgtgctgttatcacca

SEQ ID NO: 4294808 - DNA, 25 bp, Homo sapien
tgttatcaccatggaggtttctctg

SEQ ID NO: 4294809 - DNA, 25 bp, Homo sapien
ccttggctgcaaatccagattctgg

SEQ ID NO: 4294810 - DNA, 25 bp, Homo sapien
caaatccagattctggcacctgcat

SEQ ID NO: 4294811 - DNA, 25 bp, Homo sapien
tgggccttggctgcaaatccagatt

SEQ ID NO: 4294812 - DNA, 25 bp, Homo sapien
ggccttggctgcaaatccagattct

SEQ ID NO: 4294813 - DNA, 25 bp, Homo sapien
tagaggcccaagactgtcatcactg

SEQ ID NO: 4294814 - DNA, 25 bp, Homo sapien
ttctggactagtggtggacacctgc

SEQ ID NO: 4294815 - DNA, 25 bp, Homo sapien
gtcctcacaagtccatgcttctgga

SEQ ID NO: 4294816 - DNA, 25 bp, Homo sapien
cttagaggcccaagactgtcatcac

SEQ ID NO: 4294817 - DNA, 25 bp, Homo sapien
cattgttgcaagtgtagttggaaac

SEQ ID NO: 4294818 - DNA, 25 bp, Homo sapien
agaacagctcttgggtctaggacaa

SEQ ID NO: 4294819 - DNA, 25 bp, Homo sapien
tctaggacaacaaagcccttattgg

SEQ ID NO: 4294820 - DNA, 25 bp, Homo sapien
gaaaaaagggtgctcgataggatcc

SEQ ID NO: 4294821 - DNA, 25 bp, Homo sapien
tgggatggaaaaccgagcaaactgt

SEQ ID NO: 4294822 - DNA, 25 bp, Homo sapien
ctgggatggaaaaccgagcaaactg

SEQ ID NO: 4294823 - DNA, 25 bp, Homo sapien
cacgtcacactgtactcccccgact

SEQ ID NO: 4294824 - DNA, 25 bp, Homo sapien
tcacactgtactcccccgacttgct

SEQ ID NO: 4294825 - DNA, 25 bp, Homo sapien
cgtcacactgtactcccccgacttg

SEQ ID NO: 4294826 - DNA, 25 bp, Homo sapien
acactgtactcccccgacttgcttt

SEQ ID NO: 4294827 - DNA, 25 bp, Homo sapien
ctggccatttcgcaatctggttctt

SEQ ID NO: 4294828 - DNA, 25 bp, Homo sapien
ggccatttcgcaatctggttcttga

SEQ ID NO: 4294829 - DNA, 25 bp, Homo sapien
atctggcttgagagaagtaaccaac

SEQ ID NO: 4294830 - DNA, 25 bp, Homo sapien
gcttgagagaagtaaccaaccattt

SEQ ID NO: 4294831 - DNA, 25 bp, Homo sapien
tctttgaccaatgtgaatattgtca

SEQ ID NO: 4294832 - DNA, 25 bp, Homo sapien
gaatattgtcatcaggaggattaga

SEQ ID NO: 4294833 - DNA, 25 bp, Homo sapien
aactgccgcattcggttgatgagcc

SEQ ID NO: 4294834 - DNA, 25 bp, Homo sapien
caggaggattagaactgccgcattc

SEQ ID NO: 4294835 - DNA, 25 bp, Homo sapien
gaccttccccggcaaatctctgaaa

SEQ ID NO: 4294836 - DNA, 25 bp, Homo sapien
gatccttccgccagtaaggaaagag

SEQ ID NO: 4294837 - DNA, 25 bp, Homo sapien
tctctcagtggagcacctgaggaag

SEQ ID NO: 4294838 - DNA, 25 bp, Homo sapien
caatagtagaggacacagacatatc

SEQ ID NO: 4294839 - DNA, 25 bp, Homo sapien
ctgagggtttaatgtgaccaaagca

SEQ ID NO: 4294840 - DNA, 25 bp, Homo sapien
cttctgagggtttaatgtgaccaaa

SEQ ID NO: 4294841 - DNA, 25 bp, Homo sapien
tttaatgtgaccaaagcattcttgt

SEQ ID NO: 4294842 - DNA, 25 bp, Homo sapien
atgtgaccaaagcattcttgtccat

SEQ ID NO: 4294843 - DNA, 25 bp, Homo sapien
taaatccctttagcttgagtgacac

SEQ ID NO: 4294844 - DNA, 25 bp, Homo sapien
tcaaggccagtgactagactctatt

SEQ ID NO: 4294845 - DNA, 25 bp, Homo sapien
gttttgactgagacatggatacatc

SEQ ID NO: 4294846 - DNA, 25 bp, Homo sapien
cttctgtaggtcaagtcaaggccag

SEQ ID NO: 4294847 - DNA, 25 bp, Homo sapien
ctgccttatcaagccaggtctggac

SEQ ID NO: 4294848 - DNA, 25 bp, Homo sapien
gtctgccttatcaagccaggtctgg

SEQ ID NO: 4294849 - DNA, 25 bp, Homo sapien
actattttgaacatgaggtacactg

SEQ ID NO: 4294850 - DNA, 25 bp, Homo sapien
gaggtacactggacgctaaagaaaa

SEQ ID NO: 4294851 - DNA, 25 bp, Homo sapien
aatgatgaacccctccagtcccatg

SEQ ID NO: 4294852 - DNA, 25 bp, Homo sapien
agcaaaatgatgaacccctccagtc

SEQ ID NO: 4294853 - DNA, 25 bp, Homo sapien
ctcagtcctcatccaaacaccttct

SEQ ID NO: 4294854 - DNA, 25 bp, Homo sapien
acaagcaaaatgatgaacccctcca

SEQ ID NO: 4294855 - DNA, 25 bp, Homo sapien
catcatggcgctgttgttaaagggt

SEQ ID NO: 4294856 - DNA, 25 bp, Homo sapien
tggactccagaacattccagtaccc

SEQ ID NO: 4294857 - DNA, 25 bp, Homo sapien
cttctgcatcatggcgctgttgtta

SEQ ID NO: 4294858 - DNA, 25 bp, Homo sapien
gactccagaacattccagtacccag

SEQ ID NO: 4294859 - DNA, 25 bp, Homo sapien
ctggaagggtggaatagaagacact

SEQ ID NO: 4294860 - DNA, 25 bp, Homo sapien
aattatgaaacttaccacttggaat

SEQ ID NO: 4294861 - DNA, 25 bp, Homo sapien
tgtgaccaaatcattcttgtctgtg

SEQ ID NO: 4294862 - DNA, 25 bp, Homo sapien
tgaaacttaccacttggaatctatt

SEQ ID NO: 4294863 - DNA, 25 bp, Homo sapien
ggtcttatacctgccctcagcattg

SEQ ID NO: 4294864 - DNA, 25 bp, Homo sapien
gatcttccggggtcttatacctgcc

SEQ ID NO: 4294865 - DNA, 25 bp, Homo sapien
tatacctgccctcagcattgtattt

SEQ ID NO: 4294866 - DNA, 25 bp, Homo sapien
tgcaaacagatcttccggggtctta

SEQ ID NO: 4294867 - DNA, 25 bp, Homo sapien
gagtgcctactccaaaggttggcca

SEQ ID NO: 4294868 - DNA, 25 bp, Homo sapien
ggtctaaaatcagcgtctccatggt

SEQ ID NO: 4294869 - DNA, 25 bp, Homo sapien
gatagtcccatacaacttccaaggt

SEQ ID NO: 4294870 - DNA, 25 bp, Homo sapien
gggaggactccatctatgcacaatg

SEQ ID NO: 4294871 - DNA, 25 bp, Homo sapien
tggcttcatcaaagaactgagcctc

SEQ ID NO: 4294872 - DNA, 25 bp, Homo sapien
tgagcctccaccaagcggctgtaat

SEQ ID NO: 4294873 - DNA, 25 bp, Homo sapien
cagaggggtcttggccctgaatctg

SEQ ID NO: 4294874 - DNA, 25 bp, Homo sapien
gtgagtcctgcacaatgtcctttgt

SEQ ID NO: 4294875 - DNA, 25 bp, Homo sapien
tctttggcactagtcaacaggcccc

SEQ ID NO: 4294876 - DNA, 25 bp, Homo sapien
tttggcactagtcaacaggccccca

SEQ ID NO: 4294877 - DNA, 25 bp, Homo sapien
actctttggcactagtcaacaggcc

SEQ ID NO: 4294878 - DNA, 25 bp, Homo sapien
tggcactagtcaacaggcccccaag

SEQ ID NO: 4294879 - DNA, 25 bp, Homo sapien
tttgcctagttggaagggaacatcc

SEQ ID NO: 4294880 - DNA, 25 bp, Homo sapien
ggaagggaacatcccagtttgcagg

SEQ ID NO: 4294881 - DNA, 25 bp, Homo sapien
tcctggtttgcctagttggaaggga

SEQ ID NO: 4294882 - DNA, 25 bp, Homo sapien
tgaaacacggaggctcttttcctgg

SEQ ID NO: 4294883 - DNA, 25 bp, Homo sapien
cccacactctaacaaatccagcaca

SEQ ID NO: 4294884 - DNA, 25 bp, Homo sapien
ggcccacactctaacaaatccagca

SEQ ID NO: 4294885 - DNA, 25 bp, Homo sapien
tggcccacactctaacaaatccagc

SEQ ID NO: 4294886 - DNA, 25 bp, Homo sapien
acactctaacaaatccagcacagca

SEQ ID NO: 4294887 - DNA, 25 bp, Homo sapien
ctcctgtgctttgagtgttcaccca

SEQ ID NO: 4294888 - DNA, 25 bp, Homo sapien
tgagtgttcacccattacacttcct

SEQ ID NO: 4294889 - DNA, 25 bp, Homo sapien
cattaatttcagcagacagttccag

SEQ ID NO: 4294890 - DNA, 25 bp, Homo sapien
attaatttcagcagacagttccagt

SEQ ID NO: 4294891 - DNA, 25 bp, Homo sapien
ctgggagaccgtggattccttggtc

SEQ ID NO: 4294892 - DNA, 25 bp, Homo sapien
tgggagaccgtggattccttggtca

SEQ ID NO: 4294893 - DNA, 25 bp, Homo sapien
gggcatcaatcccaaaaggcaatga

SEQ ID NO: 4294894 - DNA, 25 bp, Homo sapien
gtaaattttggcttggctgacccag

SEQ ID NO: 4294895 - DNA, 25 bp, Homo sapien
gaatgcaatggacccgtcccaaagg

SEQ ID NO: 4294896 - DNA, 25 bp, Homo sapien
tgttgtaaaagaccctgcccagtgg

SEQ ID NO: 4294897 - DNA, 25 bp, Homo sapien
tatttattctttattcattcattca

SEQ ID NO: 4294898 - DNA, 25 bp, Homo sapien
ggtatttattctttattcattcatt

SEQ ID NO: 4294899 - DNA, 25 bp, Homo sapien
ttcattcattcattctactgcaggc

SEQ ID NO: 4294900 - DNA, 25 bp, Homo sapien
gcggtatttattctttattcattca

SEQ ID NO: 4294901 - DNA, 25 bp, Homo sapien
ttcattgattccactcaggggctcc

SEQ ID NO: 4294902 - DNA, 25 bp, Homo sapien
gatcatactagctgcagcacagtag

SEQ ID NO: 4294903 - DNA, 25 bp, Homo sapien
gggacagtagttgaaaactgttcta

SEQ ID NO: 4294904 - DNA, 25 bp, Homo sapien
tgttctatgtccaggagacagctgg

SEQ ID NO: 4294905 - DNA, 25 bp, Homo sapien
gatgctgctacacatagatcatcta

SEQ ID NO: 4294906 - DNA, 25 bp, Homo sapien
ctataaatgcaaccaccaaaccagc

SEQ ID NO: 4294907 - DNA, 25 bp, Homo sapien
ttttctgatgctgctacacatagat

SEQ ID NO: 4294908 - DNA, 25 bp, Homo sapien
tggtgaagggaacgacaacctgtcc

SEQ ID NO: 4294909 - DNA, 25 bp, Homo sapien
gataaccacttggtctgtgacttga

SEQ ID NO: 4294910 - DNA, 25 bp, Homo sapien
cttgagttccccataatcagagatg

SEQ ID NO: 4294911 - DNA, 25 bp, Homo sapien
ccatgctcacaggtctgagattcag

SEQ ID NO: 4294912 - DNA, 25 bp, Homo sapien
cctacagcagtgtctactatagcaa

SEQ ID NO: 4294913 - DNA, 25 bp, Homo sapien
agagcaagccctgcgcctgtttcag

SEQ ID NO: 4294914 - DNA, 25 bp, Homo sapien
gagagagcaagccctgcgcctgttt

SEQ ID NO: 4294915 - DNA, 25 bp, Homo sapien
gagcaagccctgcgcctgtttcagc

SEQ ID NO: 4294916 - DNA, 25 bp, Homo sapien
agagagcaagccctgcgcctgtttc

SEQ ID NO: 4294917 - DNA, 25 bp, Homo sapien
ggttcttgttcgcaggccctgttgc

SEQ ID NO: 4294918 - DNA, 25 bp, Homo sapien
cacagaaatgtaggtctgctgaccc

SEQ ID NO: 4294919 - DNA, 25 bp, Homo sapien
tgctgacccaggtagatcttgtggc

SEQ ID NO: 4294920 - DNA, 25 bp, Homo sapien
ggtgtagcccagtgaacacttgttg

SEQ ID NO: 4294921 - DNA, 25 bp, Homo sapien
cataagggagtgcatgtttgggcct

SEQ ID NO: 4294922 - DNA, 25 bp, Homo sapien
ctgaaatccataagggagtgcatgt

SEQ ID NO: 4294923 - DNA, 25 bp, Homo sapien
aatccataagggagtgcatgtttgg

SEQ ID NO: 4294924 - DNA, 25 bp, Homo sapien
gagtgcatgtttgggcctgaagaca

SEQ ID NO: 4294925 - DNA, 25 bp, Homo sapien
aagagacactggaagaaactcacac

SEQ ID NO: 4294926 - DNA, 25 bp, Homo sapien
ggtaagagacactggaagaaactca

SEQ ID NO: 4294927 - DNA, 25 bp, Homo sapien
taagagacactggaagaaactcaca

SEQ ID NO: 4294928 - DNA, 25 bp, Homo sapien
gtaagagacactggaagaaactcac

SEQ ID NO: 4294929 - DNA, 25 bp, Homo sapien
tttccactaacaccacggcccacag

SEQ ID NO: 4294930 - DNA, 25 bp, Homo sapien
cagactgaacgtaaccaccattttt

SEQ ID NO: 4294931 - DNA, 25 bp, Homo sapien
cccagactgaacgtaaccaccattt

SEQ ID NO: 4294932 - DNA, 25 bp, Homo sapien
ctccccagactgaacgtaaccacca

SEQ ID NO: 4294933 - DNA, 25 bp, Homo sapien
gacgaactgcccacagaaggcggat

SEQ ID NO: 4294934 - DNA, 25 bp, Homo sapien
tcaacaggagctgtaactgactgtg

SEQ ID NO: 4294935 - DNA, 25 bp, Homo sapien
cattttgagtcatgtgacgaactgc

SEQ ID NO: 4294936 - DNA, 25 bp, Homo sapien
ggaaattgccaaaatcctgagagat

SEQ ID NO: 4294937 - DNA, 25 bp, Homo sapien
ttaaaacacgtttgcatcacatctt

SEQ ID NO: 4294938 - DNA, 25 bp, Homo sapien
gggttaaaacacgtttgcatcacat

SEQ ID NO: 4294939 - DNA, 25 bp, Homo sapien
ttagggttaaaacacgtttgcatca

SEQ ID NO: 4294940 - DNA, 25 bp, Homo sapien
tagggttaaaacacgtttgcatcac

SEQ ID NO: 4294941 - DNA, 25 bp, Homo sapien
tgtgtgcctcggacaaatcccacct

SEQ ID NO: 4294942 - DNA, 25 bp, Homo sapien
ccgagggccagcctatctgtgtgcc

SEQ ID NO: 4294943 - DNA, 25 bp, Homo sapien
cagcctatctgtgtgcctcggacaa

SEQ ID NO: 4294944 - DNA, 25 bp, Homo sapien
tatctgtgtgcctcggacaaatccc

SEQ ID NO: 4294945 - DNA, 25 bp, Homo sapien
taaatgccatgcttggggagaggct

SEQ ID NO: 4294946 - DNA, 25 bp, Homo sapien
gcccctcccttgctccagacttcac

SEQ ID NO: 4294947 - DNA, 25 bp, Homo sapien
tgcccctcccttgctccagacttca

SEQ ID NO: 4294948 - DNA, 25 bp, Homo sapien
gaacactagtgaggaataaccggca

SEQ ID NO: 4294949 - DNA, 25 bp, Homo sapien
cttgaacactagtgaggaataaccg

SEQ ID NO: 4294950 - DNA, 25 bp, Homo sapien
ccggcactcgggttttgataatttg

SEQ ID NO: 4294951 - DNA, 25 bp, Homo sapien
tagtgaggaataaccggcactcggg

SEQ ID NO: 4294952 - DNA, 25 bp, Homo sapien
tcaggcctttaaaataccgcaccat

SEQ ID NO: 4294953 - DNA, 25 bp, Homo sapien
tcgggtggacaccacgtctgacaag

SEQ ID NO: 4294954 - DNA, 25 bp, Homo sapien
tagctcagcctccaagaacaaaagt

SEQ ID NO: 4294955 - DNA, 25 bp, Homo sapien
tgccgaaaactccaagatagctcag

SEQ ID NO: 4294956 - DNA, 25 bp, Homo sapien
cgctgacactgctaaatcgggtata

SEQ ID NO: 4294957 - DNA, 25 bp, Homo sapien
aagatcttgaatacgctccaggatg

SEQ ID NO: 4294958 - DNA, 25 bp, Homo sapien
tgccagtctcaggaggtcagtagct

SEQ ID NO: 4294959 - DNA, 25 bp, Homo sapien
tcttggagttagctagtaccggtct

SEQ ID NO: 4294960 - DNA, 25 bp, Homo sapien
tcttccatttggcataagcctttcg

SEQ ID NO: 4294961 - DNA, 25 bp, Homo sapien
gaaatatacaaatcacgcaagacag

SEQ ID NO: 4294962 - DNA, 25 bp, Homo sapien
caataaattaagagccacagttggc

SEQ ID NO: 4294963 - DNA, 25 bp, Homo sapien
tgagtcactaaaaaggaacaatctg

SEQ ID NO: 4294964 - DNA, 25 bp, Homo sapien
caacacggaggaatcagagagggct

SEQ ID NO: 4294965 - DNA, 25 bp, Homo sapien
ccgtttggaaacgtggccagcatca

SEQ ID NO: 4294966 - DNA, 25 bp, Homo sapien
aacaaggttgcttcgtcgtgctcaa

SEQ ID NO: 4294967 - DNA, 25 bp, Homo sapien
tggaataatcccaactggactgcag

SEQ ID NO: 4294968 - DNA, 25 bp, Homo sapien
ttctataaataagcgggtcctggga

SEQ ID NO: 4294969 - DNA, 25 bp, Homo sapien
aagaccttttatcttgcaccagaga

SEQ ID NO: 4294970 - DNA, 25 bp, Homo sapien
cagaaagcaagctagcagccctgct

SEQ ID NO: 4294971 - DNA, 25 bp, Homo sapien
tggaacctacccatcccatatgatg

SEQ ID NO: 4294972 - DNA, 25 bp, Homo sapien
ttgcaggccacatcagccaggttgt

SEQ ID NO: 4294973 - DNA, 25 bp, Homo sapien
tgttgacctgtaccaacttgccccg

SEQ ID NO: 4294974 - DNA, 25 bp, Homo sapien
cgtctgcacggtcttgaactggtcg

SEQ ID NO: 4294975 - DNA, 25 bp, Homo sapien
cattgcgcacgcagtagtcagggct

SEQ ID NO: 4294976 - DNA, 25 bp, Homo sapien
agggaaatgggggcaatcaatacac

SEQ ID NO: 4294977 - DNA, 25 bp, Homo sapien
gaaatgggggcaatcaatacacaca

SEQ ID NO: 4294978 - DNA, 25 bp, Homo sapien
aaatgggggcaatcaatacacacat

SEQ ID NO: 4294979 - DNA, 25 bp, Homo sapien
ctgcagggaaatgggggcaatcaat

SEQ ID NO: 4294980 - DNA, 25 bp, Homo sapien
caccgcgtatgtgaaggccgtctcg

SEQ ID NO: 4294981 - DNA, 25 bp, Homo sapien
caggttcatgaggatgcgagcactc

SEQ ID NO: 4294982 - DNA, 25 bp, Homo sapien
tagccatagtcgatgttgtcgccgc

SEQ ID NO: 4294983 - DNA, 25 bp, Homo sapien
agcactctcgtaggagcccttggcg

SEQ ID NO: 4294984 - DNA, 25 bp, Homo sapien
tttgagagcttgctaacaatctttt

SEQ ID NO: 4294985 - DNA, 25 bp, Homo sapien
gaaggtgtctgtgatacttgcctcc

SEQ ID NO: 4294986 - DNA, 25 bp, Homo sapien
caagttcctaggttgacatcccaag

SEQ ID NO: 4294987 - DNA, 25 bp, Homo sapien
aaacttatcatcaggtgtagggaca

SEQ ID NO: 4294988 - DNA, 25 bp, Homo sapien
caacttttagttcgatgctcgggcc

SEQ ID NO: 4294989 - DNA, 25 bp, Homo sapien
gccttctccgatgtactgcatgtgg

SEQ ID NO: 4294990 - DNA, 25 bp, Homo sapien
catgtggtcctgatacaagtggcac

SEQ ID NO: 4294991 - DNA, 25 bp, Homo sapien
caaaaacagaggtgttatccacagt

SEQ ID NO: 4294992 - DNA, 25 bp, Homo sapien
tgcagttccaccttcgatgtcggaa

SEQ ID NO: 4294993 - DNA, 25 bp, Homo sapien
aacagggttattcatacctagcgac

SEQ ID NO: 4294994 - DNA, 25 bp, Homo sapien
gaacagggttattcatacctagcga

SEQ ID NO: 4294995 - DNA, 25 bp, Homo sapien
agagaggctgtgctcctataatata

SEQ ID NO: 4294996 - DNA, 25 bp, Homo sapien
tgcactcagaaaacggaggtattgt

SEQ ID NO: 4294997 - DNA, 25 bp, Homo sapien
cagcaatacatagttttaagcacac

SEQ ID NO: 4294998 - DNA, 25 bp, Homo sapien
gaggtattgtgcagtccccatcctg

SEQ ID NO: 4294999 - DNA, 25 bp, Homo sapien
tacgtgaaatctcgaggtgggcccc

SEQ ID NO: 4295000 - DNA, 25 bp, Homo sapien
ggacaggcctctgacattagagaaa

SEQ ID NO: 4295001 - DNA, 25 bp, Homo sapien
tgagggacaggcctctgacattaga

SEQ ID NO: 4295002 - DNA, 25 bp, Homo sapien
agagaaagtgacccactttgcccca

SEQ ID NO: 4295003 - DNA, 25 bp, Homo sapien
ccaatctgccttgaaaacttatgaa

SEQ ID NO: 4295004 - DNA, 25 bp, Homo sapien
ggtaggagatagcagttccttttga

SEQ ID NO: 4295005 - DNA, 25 bp, Homo sapien
cacaattagatacgggtaggagata

SEQ ID NO: 4295006 - DNA, 25 bp, Homo sapien
gaaagtagacacaattagatacggg

SEQ ID NO: 4295007 - DNA, 25 bp, Homo sapien
tagatacgggtaggagatagcagtt

SEQ ID NO: 4295008 - DNA, 25 bp, Homo sapien
tacagtctatctacaaggcccctac

SEQ ID NO: 4295009 - DNA, 25 bp, Homo sapien
gaatgccgtcaaaaataatcctctg

SEQ ID NO: 4295010 - DNA, 25 bp, Homo sapien
tacaagcacacgtctgaacaagggc

SEQ ID NO: 4295011 - DNA, 25 bp, Homo sapien
tgtgagggacccaagacagggtacc

SEQ ID NO: 4295012 - DNA, 25 bp, Homo sapien
accaagaattggcttcaattacaac

SEQ ID NO: 4295013 - DNA, 25 bp, Homo sapien
caccaagaattggcttcaattacaa

SEQ ID NO: 4295014 - DNA, 25 bp, Homo sapien
acttggaagacattgcacttccagc

SEQ ID NO: 4295015 - DNA, 25 bp, Homo sapien
aacttggaagacattgcacttccag

SEQ ID NO: 4295016 - DNA, 25 bp, Homo sapien
actcctgggcttaatattccaatgg

SEQ ID NO: 4295017 - DNA, 25 bp, Homo sapien
ctgggcttaatattccaatggactt

SEQ ID NO: 4295018 - DNA, 25 bp, Homo sapien
tcctgggcttaatattccaatggac

SEQ ID NO: 4295019 - DNA, 25 bp, Homo sapien
aactcctgggcttaatattccaatg

SEQ ID NO: 4295020 - DNA, 25 bp, Homo sapien
tgttgattgactgcgcttctcctcc

SEQ ID NO: 4295021 - DNA, 25 bp, Homo sapien
gaaatctgatttcgctgggatcctg

SEQ ID NO: 4295022 - DNA, 25 bp, Homo sapien
gccagcgattacaaacgtgtctcaa

SEQ ID NO: 4295023 - DNA, 25 bp, Homo sapien
gtaattcactcaggaacccgctgcg

SEQ ID NO: 4295024 - DNA, 25 bp, Homo sapien
gtggagccagaattaattccatggg

SEQ ID NO: 4295025 - DNA, 25 bp, Homo sapien
ctgggccgagcaacaagtggagcca

SEQ ID NO: 4295026 - DNA, 25 bp, Homo sapien
aattaattccatgggcgagaggagc

SEQ ID NO: 4295027 - DNA, 25 bp, Homo sapien
agcacggaggcgagtggagcgcgct

SEQ ID NO: 4295028 - DNA, 25 bp, Homo sapien
gagcagcccggatttccttaaggac

SEQ ID NO: 4295029 - DNA, 25 bp, Homo sapien
gggaaatgcagctccgaattaacat

SEQ ID NO: 4295030 - DNA, 25 bp, Homo sapien
cgttcttcagccagactagggaggg

SEQ ID NO: 4295031 - DNA, 25 bp, Homo sapien
taatcagtttacgagccgatgtggg

SEQ ID NO: 4295032 - DNA, 25 bp, Homo sapien
gggcgcatcgattccagggcaaaga

SEQ ID NO: 4295033 - DNA, 25 bp, Homo sapien
gagcctgtcgttggaactctgccac

SEQ ID NO: 4295034 - DNA, 25 bp, Homo sapien
agttggccttggaagcttccgctgc

SEQ ID NO: 4295035 - DNA, 25 bp, Homo sapien
tcagacttggttcggtcagtgccga

SEQ ID NO: 4295036 - DNA, 25 bp, Homo sapien
cttccgtattgcagcggccggcggc

SEQ ID NO: 4295037 - DNA, 25 bp, Homo sapien
ctgtgtccagctggccgagtcccat

SEQ ID NO: 4295038 - DNA, 25 bp, Homo sapien
agctggccgagtcccatttgctggg

SEQ ID NO: 4295039 - DNA, 25 bp, Homo sapien
cggcgcagcgaaactggtcctctgg

SEQ ID NO: 4295040 - DNA, 25 bp, Homo sapien
gcggggatggctccgagttctgcgc

SEQ ID NO: 4295041 - DNA, 25 bp, Homo sapien
gaagaaaaggccgcggggatggctc

SEQ ID NO: 4295042 - DNA, 25 bp, Homo sapien
gggcagccggcaccgcaccgcgggg

SEQ ID NO: 4295043 - DNA, 25 bp, Homo sapien
ctcaaggcggccaacagggggcagc

SEQ ID NO: 4295044 - DNA, 25 bp, Homo sapien
aaatctggctggttcggcagtgaat

SEQ ID NO: 4295045 - DNA, 25 bp, Homo sapien
atttgtcggcccgcggttcgctgcg

SEQ ID NO: 4295046 - DNA, 25 bp, Homo sapien
ggttcgctgcgcactctccgcattg

SEQ ID NO: 4295047 - DNA, 25 bp, Homo sapien
tcgaaactcccctggcagagtctgt

SEQ ID NO: 4295048 - DNA, 25 bp, Homo sapien
cgagcgcagccgaggaatccgagcg

SEQ ID NO: 4295049 - DNA, 25 bp, Homo sapien
ggaggaagtcgccacccgagcgagc

SEQ ID NO: 4295050 - DNA, 25 bp, Homo sapien
aggaagtcgccacccgagcgagcgc

SEQ ID NO: 4295051 - DNA, 25 bp, Homo sapien
tccgagcggagcgaccgggttaagc

SEQ ID NO: 4295052 - DNA, 25 bp, Homo sapien
aaccggagctgaagcgggcactggc

SEQ ID NO: 4295053 - DNA, 25 bp, Homo sapien
ctgggatgcgcccaggaatggaggg

SEQ ID NO: 4295054 - DNA, 25 bp, Homo sapien
gtccggcgggcgcagtgaaccggag

SEQ ID NO: 4295055 - DNA, 25 bp, Homo sapien
ctgcggagtcctccggcgcgcgtcc

SEQ ID NO: 4295056 - DNA, 25 bp, Homo sapien
gcaactgttccacggagaggcgctc

SEQ ID NO: 4295057 - DNA, 25 bp, Homo sapien
tgtagccgaaacgtctgcttccaga

SEQ ID NO: 4295058 - DNA, 25 bp, Homo sapien
taccactactcaactgtggcccggg

SEQ ID NO: 4295059 - DNA, 25 bp, Homo sapien
caacgtccatcagcgacggcggtaa

SEQ ID NO: 4295060 - DNA, 25 bp, Homo sapien
gaagcactatcaaacgagggtctcg

SEQ ID NO: 4295061 - DNA, 25 bp, Homo sapien
tgagtatcttaaccgcgaatgcacc

SEQ ID NO: 4295062 - DNA, 25 bp, Homo sapien
tgaccaattagagtgaaccagcagg

SEQ ID NO: 4295063 - DNA, 25 bp, Homo sapien
tagacacgaggttacaatgactggc

SEQ ID NO: 4295064 - DNA, 25 bp, Homo sapien
aatacaatgccccacaattgcagca

SEQ ID NO: 4295065 - DNA, 25 bp, Homo sapien
catccttttaaagggctgaccaata

SEQ ID NO: 4295066 - DNA, 25 bp, Homo sapien
gaacaatccattcaccaggaggcct

SEQ ID NO: 4295067 - DNA, 25 bp, Homo sapien
caggtcacaaggcagaatacaatgc

SEQ ID NO: 4295068 - DNA, 25 bp, Homo sapien
ggtcatttgttacaaattctattgg

SEQ ID NO: 4295069 - DNA, 25 bp, Homo sapien
tgttaaacgtgtttggcattaatgc

SEQ ID NO: 4295070 - DNA, 25 bp, Homo sapien
ctaggagtttggcattttgccaagc

SEQ ID NO: 4295071 - DNA, 25 bp, Homo sapien
aaacgtgtttggcattaatgcaaac

SEQ ID NO: 4295072 - DNA, 25 bp, Homo sapien
cacaaccgatagaacaaaaactggt

SEQ ID NO: 4295073 - DNA, 25 bp, Homo sapien
aactaatgatagtctttcttttctg

SEQ ID NO: 4295074 - DNA, 25 bp, Homo sapien
tggaatcttttaaacacaaccgata

SEQ ID NO: 4295075 - DNA, 25 bp, Homo sapien
tgtcaaaactaatgatagtctttct

SEQ ID NO: 4295076 - DNA, 25 bp, Homo sapien
gaaatgatttactactttcttcttc

SEQ ID NO: 4295077 - DNA, 25 bp, Homo sapien
ccaagaagtattcagaaatgattta

SEQ ID NO: 4295078 - DNA, 25 bp, Homo sapien
tcagaaatgatttactactttcttc

SEQ ID NO: 4295079 - DNA, 25 bp, Homo sapien
tttccaagaagtattcagaaatgat

SEQ ID NO: 4295080 - DNA, 25 bp, Homo sapien
ctctggtttgaacttatatttaaat

SEQ ID NO: 4295081 - DNA, 25 bp, Homo sapien
tctggtttgaacttatatttaaatc

SEQ ID NO: 4295082 - DNA, 25 bp, Homo sapien
tctctggtttgaacttatatttaaa

SEQ ID NO: 4295083 - DNA, 25 bp, Homo sapien
ccagcaggagcacacgtgtctccac

SEQ ID NO: 4295084 - DNA, 25 bp, Homo sapien
agcaggagcacacgtgtctccacac

SEQ ID NO: 4295085 - DNA, 25 bp, Homo sapien
ggtgctgatcagctgttcccagctg

SEQ ID NO: 4295086 - DNA, 25 bp, Homo sapien
aggagcacacgtgtctccacacctc

SEQ ID NO: 4295087 - DNA, 25 bp, Homo sapien
tgggaggaagggatgtcctggccac

SEQ ID NO: 4295088 - DNA, 25 bp, Homo sapien
gatgtcctggccaccccagttctgg

SEQ ID NO: 4295089 - DNA, 25 bp, Homo sapien
ctttgggaggaagggatgtcctggc

SEQ ID NO: 4295090 - DNA, 25 bp, Homo sapien
aggaagggatgtcctggccacccca

SEQ ID NO: 4295091 - DNA, 25 bp, Homo sapien
tgaagttgatagggttttgtttctg

SEQ ID NO: 4295092 - DNA, 25 bp, Homo sapien
gaagttgatagggttttgtttctgc

SEQ ID NO: 4295093 - DNA, 25 bp, Homo sapien
gttgagttccaggagatgggagtcc

SEQ ID NO: 4295094 - DNA, 25 bp, Homo sapien
ccaggagatgggagtccccaggcca

SEQ ID NO: 4295095 - DNA, 25 bp, Homo sapien
gagttccaggagatgggagtcccca

SEQ ID NO: 4295096 - DNA, 25 bp, Homo sapien
caggagatgggagtccccaggccat

SEQ ID NO: 4295097 - DNA, 25 bp, Homo sapien
cattttggagtcgatcccttctctg

SEQ ID NO: 4295098 - DNA, 25 bp, Homo sapien
gctcagggaacctcattatgttgca

SEQ ID NO: 4295099 - DNA, 25 bp, Homo sapien
cttttgaagtctgctcagggaacct

SEQ ID NO: 4295100 - DNA, 25 bp, Homo sapien
attcctttgatggttagatttttgc

SEQ ID NO: 4295101 - DNA, 25 bp, Homo sapien
cttggcagtttcgcagtcattaatc

SEQ ID NO: 4295102 - DNA, 25 bp, Homo sapien
ccttggcagtttcgcagtcattaat

SEQ ID NO: 4295103 - DNA, 25 bp, Homo sapien
gccttggcagtttcgcagtcattaa

SEQ ID NO: 4295104 - DNA, 25 bp, Homo sapien
ttggcagtttcgcagtcattaatca

SEQ ID NO: 4295105 - DNA, 25 bp, Homo sapien
gacgtttccggtgcgcctccatcaa

SEQ ID NO: 4295106 - DNA, 25 bp, Homo sapien
taatgaagatgaacgcttcctccgt

SEQ ID NO: 4295107 - DNA, 25 bp, Homo sapien
ccattgctccagtggacgtttccgg

SEQ ID NO: 4295108 - DNA, 25 bp, Homo sapien
ataaaatgtctcattgttgctccgg

SEQ ID NO: 4295109 - DNA, 25 bp, Homo sapien
ctaagaatgattgggtcaaggtgcc

SEQ ID NO: 4295110 - DNA, 25 bp, Homo sapien
tatggaaaccagatgcggagcaaat

SEQ ID NO: 4295111 - DNA, 25 bp, Homo sapien
tatggttccaccagtagcctgtgag

SEQ ID NO: 4295112 - DNA, 25 bp, Homo sapien
cctgtgaggacgaaatgaggtccct

SEQ ID NO: 4295113 - DNA, 25 bp, Homo sapien
ggtctagcctggtcctgtgcacctt

SEQ ID NO: 4295114 - DNA, 25 bp, Homo sapien
gtctagcctggtcctgtgcaccttt

SEQ ID NO: 4295115 - DNA, 25 bp, Homo sapien
tggtctagcctggtcctgtgcacct

SEQ ID NO: 4295116 - DNA, 25 bp, Homo sapien
ctggtctagcctggtcctgtgcacc

SEQ ID NO: 4295117 - DNA, 25 bp, Homo sapien
ctctaagagctagctcggtcctcaa

SEQ ID NO: 4295118 - DNA, 25 bp, Homo sapien
aggcttcctgatgtgtaggcccaat

SEQ ID NO: 4295119 - DNA, 25 bp, Homo sapien
tcctgatgtgtaggcccaatcggca

SEQ ID NO: 4295120 - DNA, 25 bp, Homo sapien
tctaagagctagctcggtcctcaac

SEQ ID NO: 4295121 - DNA, 25 bp, Homo sapien
tcacgtatttggtacctggacactc

SEQ ID NO: 4295122 - DNA, 25 bp, Homo sapien
gatcccttcagaatccaaagcagaa

SEQ ID NO: 4295123 - DNA, 25 bp, Homo sapien
gggaatgagtccaacatgcagagag

SEQ ID NO: 4295124 - DNA, 25 bp, Homo sapien
acttggccagtgtgattactcaacc

SEQ ID NO: 4295125 - DNA, 25 bp, Homo sapien
aacatagtggctgacgggtactgga

SEQ ID NO: 4295126 - DNA, 25 bp, Homo sapien
taagaacatagtggctgacgggtac

SEQ ID NO: 4295127 - DNA, 25 bp, Homo sapien
acatagtggctgacgggtactggaa

SEQ ID NO: 4295128 - DNA, 25 bp, Homo sapien
agaacatagtggctgacgggtactg

SEQ ID NO: 4295129 - DNA, 25 bp, Homo sapien
aggccacaggcagagtgtccccttt

SEQ ID NO: 4295130 - DNA, 25 bp, Homo sapien
gaatccacgttccacctctgcattt

SEQ ID NO: 4295131 - DNA, 25 bp, Homo sapien
tctagaggggtcagtgaatccacgt

SEQ ID NO: 4295132 - DNA, 25 bp, Homo sapien
gcctgctgagatgctaccatcagga

SEQ ID NO: 4295133 - DNA, 25 bp, Homo sapien
cattccgatggcatgtttaagttca

SEQ ID NO: 4295134 - DNA, 25 bp, Homo sapien
tgaaaaatctgcagaaccagttggg

SEQ ID NO: 4295135 - DNA, 25 bp, Homo sapien
ccagttgggtccctatgccgaaggg

SEQ ID NO: 4295136 - DNA, 25 bp, Homo sapien
atctgcactccttccattccgatgg

SEQ ID NO: 4295137 - DNA, 25 bp, Homo sapien
ggagccaatggggctttaaatctcc

SEQ ID NO: 4295138 - DNA, 25 bp, Homo sapien
gagccaatggggctttaaatctccc

SEQ ID NO: 4295139 - DNA, 25 bp, Homo sapien
tcttgtcctggtacttctggtccca

SEQ ID NO: 4295140 - DNA, 25 bp, Homo sapien
tcacagcatggtcacggtaggaagt

SEQ ID NO: 4295141 - DNA, 25 bp, Homo sapien
tgctccaaaattggttcttgtcctg

SEQ ID NO: 4295142 - DNA, 25 bp, Homo sapien
ccagctcagtcataggcagggtagg

SEQ ID NO: 4295143 - DNA, 25 bp, Homo sapien
taatgatttccaggttggttccaaa

SEQ ID NO: 4295144 - DNA, 25 bp, Homo sapien
tgatttccaggttggttccaaatgg

SEQ ID NO: 4295145 - DNA, 25 bp, Homo sapien
tgacgagataatgatttccaggttg

SEQ ID NO: 4295146 - DNA, 25 bp, Homo sapien
ctgacgagataatgatttccaggtt

SEQ ID NO: 4295147 - DNA, 25 bp, Homo sapien
ctgggccgaaattcaggtgttccct

SEQ ID NO: 4295148 - DNA, 25 bp, Homo sapien
ggaggtggcgttgggacagtgaagg

SEQ ID NO: 4295149 - DNA, 25 bp, Homo sapien
gggaggtggcgttgggacagtgaag

SEQ ID NO: 4295150 - DNA, 25 bp, Homo sapien
cctggctgcctgtcatcatgaggca

SEQ ID NO: 4295151 - DNA, 25 bp, Homo sapien
agggaggtggcgttgggacagtgaa

SEQ ID NO: 4295152 - DNA, 25 bp, Homo sapien
agaggcacaggaacccaagggtgag

SEQ ID NO: 4295153 - DNA, 25 bp, Homo sapien
cctggcggtgtgctttcctcaatcc

SEQ ID NO: 4295154 - DNA, 25 bp, Homo sapien
ggaacacccttcctggcggtgtgct

SEQ ID NO: 4295155 - DNA, 25 bp, Homo sapien
ttgtggcccggccagctagaggcac

SEQ ID NO: 4295156 - DNA, 25 bp, Homo sapien
gcacttgatgtagcgcttctcctca

SEQ ID NO: 4295157 - DNA, 25 bp, Homo sapien
ttgatgagggcacttgatgtagcgc

SEQ ID NO: 4295158 - DNA, 25 bp, Homo sapien
aacatagcttttatttgatgagggc

SEQ ID NO: 4295159 - DNA, 25 bp, Homo sapien
ctgaattgagaacatagcttttatt

SEQ ID NO: 4295160 - DNA, 25 bp, Homo sapien
ttgatgctgataaacaaagcgaggc

SEQ ID NO: 4295161 - DNA, 25 bp, Homo sapien
ctgacttggaggcacactggtgcac

SEQ ID NO: 4295162 - DNA, 25 bp, Homo sapien
cacagagtgacctagaaaaagctgc

SEQ ID NO: 4295163 - DNA, 25 bp, Homo sapien
tccaggccaagggtaaggctaccga

SEQ ID NO: 4295164 - DNA, 25 bp, Homo sapien
agagaggtggccctcggactgtgag

SEQ ID NO: 4295165 - DNA, 25 bp, Homo sapien
gactgtgagtctttgccttcacttt

SEQ ID NO: 4295166 - DNA, 25 bp, Homo sapien
cactttcaatgccaacttcaaacca

SEQ ID NO: 4295167 - DNA, 25 bp, Homo sapien
gccttcactttcaatgccaacttca

SEQ ID NO: 4295168 - DNA, 25 bp, Homo sapien
cagcacaaaggcagatcccagccat

SEQ ID NO: 4295169 - DNA, 25 bp, Homo sapien
ggccagcacaaaggcagatcccagc

SEQ ID NO: 4295170 - DNA, 25 bp, Homo sapien
cttaggccagcacaaaggcagatcc

SEQ ID NO: 4295171 - DNA, 25 bp, Homo sapien
ttaggccagcacaaaggcagatccc

SEQ ID NO: 4295172 - DNA, 25 bp, Homo sapien
gaaatccacaccagtagagtgaggg

SEQ ID NO: 4295173 - DNA, 25 bp, Homo sapien
ggaacaacatcataaagcgtcggca

SEQ ID NO: 4295174 - DNA, 25 bp, Homo sapien
ttgaccagacacatgagttgaagcc

SEQ ID NO: 4295175 - DNA, 25 bp, Homo sapien
tcagttacacgagccatttggagca

SEQ ID NO: 4295176 - DNA, 25 bp, Homo sapien
gctacaccagcctgcctcgagtgtg

SEQ ID NO: 4295177 - DNA, 25 bp, Homo sapien
tgcctcgagtgtgtgggaacactcg

SEQ ID NO: 4295178 - DNA, 25 bp, Homo sapien
ggaacactcgaggaaggccgataat

SEQ ID NO: 4295179 - DNA, 25 bp, Homo sapien
taatcatggcttggggcatttcgga

SEQ ID NO: 4295180 - DNA, 25 bp, Homo sapien
cattcttttgggatttggctgacaa

SEQ ID NO: 4295181 - DNA, 25 bp, Homo sapien
tttggattccaccctttctaggcca

SEQ ID NO: 4295182 - DNA, 25 bp, Homo sapien
gatcggtaagcttctgttttgaaaa

SEQ ID NO: 4295183 - DNA, 25 bp, Homo sapien
ccttcagcctttactgatgcttgta

SEQ ID NO: 4295184 - DNA, 25 bp, Homo sapien
aagacactgtgttttagcatcatcc

SEQ ID NO: 4295185 - DNA, 25 bp, Homo sapien
atttctatgtgataaccatctgaga

SEQ ID NO: 4295186 - DNA, 25 bp, Homo sapien
tatgtgataaccatctgagagcagg

SEQ ID NO: 4295187 - DNA, 25 bp, Homo sapien
ttctatgtgataaccatctgagagc

SEQ ID NO: 4295188 - DNA, 25 bp, Homo sapien
tgtgacacaacactcagatttttcc

SEQ ID NO: 4295189 - DNA, 25 bp, Homo sapien
ctttgagttccttacttatatatgc

SEQ ID NO: 4295190 - DNA, 25 bp, Homo sapien
ttctgtgacacaacactcagatttt

SEQ ID NO: 4295191 - DNA, 25 bp, Homo sapien
gacacaacactcagatttttcccca

SEQ ID NO: 4295192 - DNA, 25 bp, Homo sapien
taagagcaggtgacagaaagatttc

SEQ ID NO: 4295193 - DNA, 25 bp, Homo sapien
tctcccataggcagcgcattaaggc

SEQ ID NO: 4295194 - DNA, 25 bp, Homo sapien
tgacagaaagatttctcccataggc

SEQ ID NO: 4295195 - DNA, 25 bp, Homo sapien
actttcccatttaagagcaggtgac

SEQ ID NO: 4295196 - DNA, 25 bp, Homo sapien
aataaatgactaaactatgtccttc

SEQ ID NO: 4295197 - DNA, 25 bp, Homo sapien
atgtccttccccatgcaccaaaaga

SEQ ID NO: 4295198 - DNA, 25 bp, Homo sapien
taatagacggtaaataaatgactaa

SEQ ID NO: 4295199 - DNA, 25 bp, Homo sapien
actaaactatgtccttccccatgca

SEQ ID NO: 4295200 - DNA, 25 bp, Homo sapien
tttctgactgcgagcattactctgc

SEQ ID NO: 4295201 - DNA, 25 bp, Homo sapien
tgctaacgacagagcctgatttctg

SEQ ID NO: 4295202 - DNA, 25 bp, Homo sapien
tgactgcgagcattactctgctcct

SEQ ID NO: 4295203 - DNA, 25 bp, Homo sapien
gcttacagccacatcttgctaacga

SEQ ID NO: 4295204 - DNA, 25 bp, Homo sapien
tgcaacacaacctattatgcgtgga

SEQ ID NO: 4295205 - DNA, 25 bp, Homo sapien
caacacaacctattatgcgtggagg

SEQ ID NO: 4295206 - DNA, 25 bp, Homo sapien
cctgcaacacaacctattatgcgtg

SEQ ID NO: 4295207 - DNA, 25 bp, Homo sapien
gcaacacaacctattatgcgtggag

SEQ ID NO: 4295208 - DNA, 25 bp, Homo sapien
gcaactcctacactctagcaaaatg

SEQ ID NO: 4295209 - DNA, 25 bp, Homo sapien
aaaatgtaaagtacatgtgagcccc

SEQ ID NO: 4295210 - DNA, 25 bp, Homo sapien
aagctcattatgcagagtctctctg

SEQ ID NO: 4295211 - DNA, 25 bp, Homo sapien
tgtgagcccccaaatccaagctcat

SEQ ID NO: 4295212 - DNA, 25 bp, Homo sapien
gtgttaaactgccaccggatcctcc

SEQ ID NO: 4295213 - DNA, 25 bp, Homo sapien
taatgttggatctcgaaggaactgg

SEQ ID NO: 4295214 - DNA, 25 bp, Homo sapien
tgctctggtgttaaactgccaccgg

SEQ ID NO: 4295215 - DNA, 25 bp, Homo sapien
acagacaggtaatgttggatctcga

SEQ ID NO: 4295216 - DNA, 25 bp, Homo sapien
agcatgagatttggctgtgcctacg

SEQ ID NO: 4295217 - DNA, 25 bp, Homo sapien
ctaggcaaaggttggacaggtgatc

SEQ ID NO: 4295218 - DNA, 25 bp, Homo sapien
cgtgcctccgacagagctggatcat

SEQ ID NO: 4295219 - DNA, 25 bp, Homo sapien
ttggacaggtgatcaatgtacagca

SEQ ID NO: 4295220 - DNA, 25 bp, Homo sapien
ccctgctcgctggtactctggtgct

SEQ ID NO: 4295221 - DNA, 25 bp, Homo sapien
ctgctcgctggtactctggtgctct

SEQ ID NO: 4295222 - DNA, 25 bp, Homo sapien
accctgcactttgccctgctcgctg

SEQ ID NO: 4295223 - DNA, 25 bp, Homo sapien
actttgccctgctcgctggtactct

SEQ ID NO: 4295224 - DNA, 25 bp, Homo sapien
agcttggccgacagaacgagacctt

SEQ ID NO: 4295225 - DNA, 25 bp, Homo sapien
ggcatctatatggtgagttccagca

SEQ ID NO: 4295226 - DNA, 25 bp, Homo sapien
tagtaccaactatccggaaggctga

SEQ ID NO: 4295227 - DNA, 25 bp, Homo sapien
tactgtctgtcagggctatgaagcc

SEQ ID NO: 4295228 - DNA, 25 bp, Homo sapien
caaaagaccctgcaactgttacagt

SEQ ID NO: 4295229 - DNA, 25 bp, Homo sapien
tagaattgtgcgatcagcaccacaa

SEQ ID NO: 4295230 - DNA, 25 bp, Homo sapien
tacataccatcaaggtcatccatgg

SEQ ID NO: 4295231 - DNA, 25 bp, Homo sapien
tgaaattccggcaaccctaatccag

SEQ ID NO: 4295232 - DNA, 25 bp, Homo sapien
gaacgctttgctttcgatgaccaaa

SEQ ID NO: 4295233 - DNA, 25 bp, Homo sapien
gaatctgtttgcttcgtaccgccat

SEQ ID NO: 4295234 - DNA, 25 bp, Homo sapien
caacactatttgtagaagccaggta

SEQ ID NO: 4295235 - DNA, 25 bp, Homo sapien
cataactgtttgaaaatccggccac

SEQ ID NO: 4295236 - DNA, 25 bp, Homo sapien
tagccatgccgaaatctggacacca

SEQ ID NO: 4295237 - DNA, 25 bp, Homo sapien
ctagccatgccgaaatctggacacc

SEQ ID NO: 4295238 - DNA, 25 bp, Homo sapien
agccatgccgaaatctggacaccaa

SEQ ID NO: 4295239 - DNA, 25 bp, Homo sapien
tggagccactgagcaataaatacca

SEQ ID NO: 4295240 - DNA, 25 bp, Homo sapien
ggagccactgagcaataaataccat

SEQ ID NO: 4295241 - DNA, 25 bp, Homo sapien
gagcaataaataccatgaagctcac

SEQ ID NO: 4295242 - DNA, 25 bp, Homo sapien
agccactgagcaataaataccatga

SEQ ID NO: 4295243 - DNA, 25 bp, Homo sapien
gatcggaagccagtacacgatgaac

SEQ ID NO: 4295244 - DNA, 25 bp, Homo sapien
tggctcccagagatgatcggaagcc

SEQ ID NO: 4295245 - DNA, 25 bp, Homo sapien
ggcttaagctgcttctgctttgatg

SEQ ID NO: 4295246 - DNA, 25 bp, Homo sapien
acgatgaactctagaaggcttaagc

SEQ ID NO: 4295247 - DNA, 25 bp, Homo sapien
ttgggaggaagccaaaaggcttatc

SEQ ID NO: 4295248 - DNA, 25 bp, Homo sapien
cttatcccaaaaggactctcaaaca

SEQ ID NO: 4295249 - DNA, 25 bp, Homo sapien
aaggcttatcccaaaaggactctca

SEQ ID NO: 4295250 - DNA, 25 bp, Homo sapien
tgggaggaagccaaaaggcttatcc

SEQ ID NO: 4295251 - DNA, 25 bp, Homo sapien
caccgtcaacttggataggcccaaa

SEQ ID NO: 4295252 - DNA, 25 bp, Homo sapien
tccctggtggacacaccgtcaactt

SEQ ID NO: 4295253 - DNA, 25 bp, Homo sapien
ggtggacacaccgtcaacttggata

SEQ ID NO: 4295254 - DNA, 25 bp, Homo sapien
tggataggcccaaattccttggcag

SEQ ID NO: 4295255 - DNA, 25 bp, Homo sapien
tgcacaccagcaggggaagtcttga

SEQ ID NO: 4295256 - DNA, 25 bp, Homo sapien
tggttccctctatgcacaccagcag

SEQ ID NO: 4295257 - DNA, 25 bp, Homo sapien
acagctggttccctctatgcacacc

SEQ ID NO: 4295258 - DNA, 25 bp, Homo sapien
gttccctctatgcacaccagcaggg

SEQ ID NO: 4295259 - DNA, 25 bp, Homo sapien
ccagggtatggatgaccatgaggtt

SEQ ID NO: 4295260 - DNA, 25 bp, Homo sapien
tggatgaccatgaggttcaagctca

SEQ ID NO: 4295261 - DNA, 25 bp, Homo sapien
gggtatggatgaccatgaggttcaa

SEQ ID NO: 4295262 - DNA, 25 bp, Homo sapien
ctgagaactaactgattggagaaga

SEQ ID NO: 4295263 - DNA, 25 bp, Homo sapien
gaattgagtccagcaaaacctgcac

SEQ ID NO: 4295264 - DNA, 25 bp, Homo sapien
cctaggcatagggaagtgcacacat

SEQ ID NO: 4295265 - DNA, 25 bp, Homo sapien
tcgccaggactaaaccacaagtgtt

SEQ ID NO: 4295266 - DNA, 25 bp, Homo sapien
tgagtaacctccctctttggtgggc

SEQ ID NO: 4295267 - DNA, 25 bp, Homo sapien
ttctctgccacacctttctaacgat

SEQ ID NO: 4295268 - DNA, 25 bp, Homo sapien
gaatggccttgtagcctgattctgc

SEQ ID NO: 4295269 - DNA, 25 bp, Homo sapien
gattctgcccaagtttttgcctgtt

SEQ ID NO: 4295270 - DNA, 25 bp, Homo sapien
gacatatattattgccttctctgcc

SEQ ID NO: 4295271 - DNA, 25 bp, Homo sapien
caaaatcttattctgccttgaggta

SEQ ID NO: 4295272 - DNA, 25 bp, Homo sapien
aaaatcttattctgccttgaggtaa

SEQ ID NO: 4295273 - DNA, 25 bp, Homo sapien
cttgaatacttctttgatactgata

SEQ ID NO: 4295274 - DNA, 25 bp, Homo sapien
aaatcttattctgccttgaggtaat

SEQ ID NO: 4295275 - DNA, 25 bp, Homo sapien
ggtgagaaactcagcgatgaaggca

SEQ ID NO: 4295276 - DNA, 25 bp, Homo sapien
gaaactcagcgatgaaggcacaaac

SEQ ID NO: 4295277 - DNA, 25 bp, Homo sapien
gagaaactcagcgatgaaggcacaa

SEQ ID NO: 4295278 - DNA, 25 bp, Homo sapien
ttggtgagaaactcagcgatgaagg

SEQ ID NO: 4295279 - DNA, 25 bp, Homo sapien
aggcagctgcatgccccgcaatagg

SEQ ID NO: 4295280 - DNA, 25 bp, Homo sapien
gcgttggcgggtggagcagaagtgg

SEQ ID NO: 4295281 - DNA, 25 bp, Homo sapien
cagcaagctgaaagcgcagctggct

SEQ ID NO: 4295282 - DNA, 25 bp, Homo sapien
gcaatagggtagtgcccatttgtaa

SEQ ID NO: 4295283 - DNA, 25 bp, Homo sapien
ctggaagccatgtgatcgagcggac

SEQ ID NO: 4295284 - DNA, 25 bp, Homo sapien
gccatgtgatcgagcggacactgat

SEQ ID NO: 4295285 - DNA, 25 bp, Homo sapien
cactgattttgtgtaagccccacat

SEQ ID NO: 4295286 - DNA, 25 bp, Homo sapien
tgatcgagcggacactgattttgtg

SEQ ID NO: 4295287 - DNA, 25 bp, Homo sapien
gaagtaacctcttttgcctgccagt

SEQ ID NO: 4295288 - DNA, 25 bp, Homo sapien
gcctgccagtgtgtagacgataact

SEQ ID NO: 4295289 - DNA, 25 bp, Homo sapien
gctctgaggtatagctcccaccgtg

SEQ ID NO: 4295290 - DNA, 25 bp, Homo sapien
cactgtggcctaagggatagctccc

SEQ ID NO: 4295291 - DNA, 25 bp, Homo sapien
tgtgcccatattgacatagtgctgg

SEQ ID NO: 4295292 - DNA, 25 bp, Homo sapien
ttggctggcttgagtcatgtgccca

SEQ ID NO: 4295293 - DNA, 25 bp, Homo sapien
gacactgggcagaccaaagcaatgg

SEQ ID NO: 4295294 - DNA, 25 bp, Homo sapien
tatcaaaagatagggagacagacac

SEQ ID NO: 4295295 - DNA, 25 bp, Homo sapien
tctgagtagttctgacttgccagcc

SEQ ID NO: 4295296 - DNA, 25 bp, Homo sapien
caggacatgtcaaggccaagagtca

SEQ ID NO: 4295297 - DNA, 25 bp, Homo sapien
tttaactaagcaagtactaccaggc

SEQ ID NO: 4295298 - DNA, 25 bp, Homo sapien
cctgtgacagggaaatagcagccac

SEQ ID NO: 4295299 - DNA, 25 bp, Homo sapien
cagtcctcaggacattcacaaatgg

SEQ ID NO: 4295300 - DNA, 25 bp, Homo sapien
ggcctgtcagcccagaataatattt

SEQ ID NO: 4295301 - DNA, 25 bp, Homo sapien
gcgttacctgctctgaaatccctga

SEQ ID NO: 4295302 - DNA, 25 bp, Homo sapien
taagcccgtgttgcctctgctgact

SEQ ID NO: 4295303 - DNA, 25 bp, Homo sapien
cacatttttcaacctgggcacagag

SEQ ID NO: 4295304 - DNA, 25 bp, Homo sapien
tgagcccgagctcacgaaccgccat

SEQ ID NO: 4295305 - DNA, 25 bp, Homo sapien
tgttttccccatttcgtcatacatt

SEQ ID NO: 4295306 - DNA, 25 bp, Homo sapien
catacattctgttcgcaaatgcgca

SEQ ID NO: 4295307 - DNA, 25 bp, Homo sapien
caaacgctctttgtggtacacccac

SEQ ID NO: 4295308 - DNA, 25 bp, Homo sapien
aaacgctctttgtggtacacccaca

SEQ ID NO: 4295309 - DNA, 25 bp, Homo sapien
ccaaacgctctttgtggtacaccca

SEQ ID NO: 4295310 - DNA, 25 bp, Homo sapien
ggcttcaaaatggaaacaatattta

SEQ ID NO: 4295311 - DNA, 25 bp, Homo sapien
caggcttcaaaatggaaacaatatt

SEQ ID NO: 4295312 - DNA, 25 bp, Homo sapien
cttcaaaatggaaacaatatttaag

SEQ ID NO: 4295313 - DNA, 25 bp, Homo sapien
acaggcttcaaaatggaaacaatat

SEQ ID NO: 4295314 - DNA, 25 bp, Homo sapien
gtgcatagcatgaagtctccaggga

SEQ ID NO: 4295315 - DNA, 25 bp, Homo sapien
tacagagatattgacgtggcaagcc

SEQ ID NO: 4295316 - DNA, 25 bp, Homo sapien
taagtaactattctggctcggccaa

SEQ ID NO: 4295317 - DNA, 25 bp, Homo sapien
tgtggcctctgttgaagtttcccct

SEQ ID NO: 4295318 - DNA, 25 bp, Homo sapien
gagctcacactcttaccccatgaga

SEQ ID NO: 4295319 - DNA, 25 bp, Homo sapien
ttcacaagaactccatgagggagga

SEQ ID NO: 4295320 - DNA, 25 bp, Homo sapien
gagaagtggtcaatggagaaaaccc

SEQ ID NO: 4295321 - DNA, 25 bp, Homo sapien
catgagatcctatatgcagactgga

SEQ ID NO: 4295322 - DNA, 25 bp, Homo sapien
gcaagatagggaatacagttaggcc

SEQ ID NO: 4295323 - DNA, 25 bp, Homo sapien
ctggaaaagtgatcccgtggagtct

SEQ ID NO: 4295324 - DNA, 25 bp, Homo sapien
ggacagtggttgaatatgctttgcc

SEQ ID NO: 4295325 - DNA, 25 bp, Homo sapien
ttgatgttcgcaaacccgaatgcct

SEQ ID NO: 4295326 - DNA, 25 bp, Homo sapien
gactttaggtcaattgccactttta

SEQ ID NO: 4295327 - DNA, 25 bp, Homo sapien
ggagagagttgctcccatagacatc

SEQ ID NO: 4295328 - DNA, 25 bp, Homo sapien
tcttccatgcatgtttgaggcaggc

SEQ ID NO: 4295329 - DNA, 25 bp, Homo sapien
gaatgactttgcatctggaagtgtt

SEQ ID NO: 4295330 - DNA, 25 bp, Homo sapien
atgcccatatgccctcctcgtcatc

SEQ ID NO: 4295331 - DNA, 25 bp, Homo sapien
tatgcccatatgccctcctcgtcat

SEQ ID NO: 4295332 - DNA, 25 bp, Homo sapien
ctatgcccatatgccctcctcgtca

SEQ ID NO: 4295333 - DNA, 25 bp, Homo sapien
gatgttcagatcgacatcttgtatg

SEQ ID NO: 4295334 - DNA, 25 bp, Homo sapien
ctcgtccaccataggaataaaaagg

SEQ ID NO: 4295335 - DNA, 25 bp, Homo sapien
tactgttcctcgtccaccataggaa

SEQ ID NO: 4295336 - DNA, 25 bp, Homo sapien
gggctcccagatgtcgagggttatt

SEQ ID NO: 4295337 - DNA, 25 bp, Homo sapien
caagggggtcttgatggaaatcctg

SEQ ID NO: 4295338 - DNA, 25 bp, Homo sapien
agtcccagatgctgcgccctaatgg

SEQ ID NO: 4295339 - DNA, 25 bp, Homo sapien
cgccctaatgggattctgtaaatat

SEQ ID NO: 4295340 - DNA, 25 bp, Homo sapien
cagttccagggatgacgtgacagac

SEQ ID NO: 4295341 - DNA, 25 bp, Homo sapien
gggctgctcacagcggctatgttga

SEQ ID NO: 4295342 - DNA, 25 bp, Homo sapien
tgggctgctcacagcggctatgttg

SEQ ID NO: 4295343 - DNA, 25 bp, Homo sapien
tgctcacagcggctatgttgatgac

SEQ ID NO: 4295344 - DNA, 25 bp, Homo sapien
cacagcggctatgttgatgacaagc

SEQ ID NO: 4295345 - DNA, 25 bp, Homo sapien
gggcatttattagctccagcaaaga

SEQ ID NO: 4295346 - DNA, 25 bp, Homo sapien
gcatttattagctccagcaaagagg

SEQ ID NO: 4295347 - DNA, 25 bp, Homo sapien
aagggactgagtcatcgttgacaag

SEQ ID NO: 4295348 - DNA, 25 bp, Homo sapien
caagacaagagacttgttgttgtgg

SEQ ID NO: 4295349 - DNA, 25 bp, Homo sapien
tgaggggaaaggcagcaccttcacc

SEQ ID NO: 4295350 - DNA, 25 bp, Homo sapien
accccaacacattttaagatctctg

SEQ ID NO: 4295351 - DNA, 25 bp, Homo sapien
gtggacatatcagcagcaccccaac

SEQ ID NO: 4295352 - DNA, 25 bp, Homo sapien
caacacattttaagatctctgaggg

SEQ ID NO: 4295353 - DNA, 25 bp, Homo sapien
gctggccctgcattcacagagaggg

SEQ ID NO: 4295354 - DNA, 25 bp, Homo sapien
gctcagtgggagtacgggatcccac

SEQ ID NO: 4295355 - DNA, 25 bp, Homo sapien
ggctgcacattgactaatctgttgg

SEQ ID NO: 4295356 - DNA, 25 bp, Homo sapien
tcttctgttggactgtgaggcccca

SEQ ID NO: 4295357 - DNA, 25 bp, Homo sapien
aaactggatcagtcatgttataaaa

SEQ ID NO: 4295358 - DNA, 25 bp, Homo sapien
ctgatactctgagaacaatatttct

SEQ ID NO: 4295359 - DNA, 25 bp, Homo sapien
gaaactggatcagtcatgttataaa

SEQ ID NO: 4295360 - DNA, 25 bp, Homo sapien
ctctgagaacaatatttcttacagc

SEQ ID NO: 4295361 - DNA, 25 bp, Homo sapien
aattttctaggaaagtgctcagcga

SEQ ID NO: 4295362 - DNA, 25 bp, Homo sapien
gagacattccaaagtaacccgccat

SEQ ID NO: 4295363 - DNA, 25 bp, Homo sapien
tgctcagcgaactcaaggcttctct

SEQ ID NO: 4295364 - DNA, 25 bp, Homo sapien
taccgagccagcaatagactacata

SEQ ID NO: 4295365 - DNA, 25 bp, Homo sapien
gattggaatgttgcgacctcccagg

SEQ ID NO: 4295366 - DNA, 25 bp, Homo sapien
ggcctgtgattggaatgttgcgacc

SEQ ID NO: 4295367 - DNA, 25 bp, Homo sapien
tgcgacctcccaggagatcgatggt

SEQ ID NO: 4295368 - DNA, 25 bp, Homo sapien
cggagagggcctgtgattggaatgt

SEQ ID NO: 4295369 - DNA, 25 bp, Homo sapien
ttgtctgccatcaacttcattctgt

SEQ ID NO: 4295370 - DNA, 25 bp, Homo sapien
gttgtctgccatcaacttcattctg

SEQ ID NO: 4295371 - DNA, 25 bp, Homo sapien
agttgtctgccatcaacttcattct

SEQ ID NO: 4295372 - DNA, 25 bp, Homo sapien
ggtgatcccatacataatggtccac

SEQ ID NO: 4295373 - DNA, 25 bp, Homo sapien
gtgatcccatacataatggtccaca

SEQ ID NO: 4295374 - DNA, 25 bp, Homo sapien
aggtgatcccatacataatggtcca

SEQ ID NO: 4295375 - DNA, 25 bp, Homo sapien
caggtgatcccatacataatggtcc

SEQ ID NO: 4295376 - DNA, 25 bp, Homo sapien
tagcactaattcagtttcggccaaa

SEQ ID NO: 4295377 - DNA, 25 bp, Homo sapien
caaacattcatattgagactcagac

SEQ ID NO: 4295378 - DNA, 25 bp, Homo sapien
gagagttctcatcacttagcgtgac

SEQ ID NO: 4295379 - DNA, 25 bp, Homo sapien
gaagtaacacctgcctagcactaat

SEQ ID NO: 4295380 - DNA, 25 bp, Homo sapien
caaggactgtaacagtatgcagagc

SEQ ID NO: 4295381 - DNA, 25 bp, Homo sapien
aagctcttcaaggactgtaacagta

SEQ ID NO: 4295382 - DNA, 25 bp, Homo sapien
gactgtaacagtatgcagagcatga

SEQ ID NO: 4295383 - DNA, 25 bp, Homo sapien
taacagtatgcagagcatgaagagc

SEQ ID NO: 4295384 - DNA, 25 bp, Homo sapien
gcaccgagcacagttttgactccag

SEQ ID NO: 4295385 - DNA, 25 bp, Homo sapien
tgagccatgcaaaacatgtggtggg

SEQ ID NO: 4295386 - DNA, 25 bp, Homo sapien
gggctgtgttggccagcaccgagca

SEQ ID NO: 4295387 - DNA, 25 bp, Homo sapien
gatggggtgagccatgcaaaacatg

SEQ ID NO: 4295388 - DNA, 25 bp, Homo sapien
ctgaagaactgattcaacatgccga

SEQ ID NO: 4295389 - DNA, 25 bp, Homo sapien
gaattaagccctgagaatttatcca

SEQ ID NO: 4295390 - DNA, 25 bp, Homo sapien
catgccgaattaagccctgagaatt

SEQ ID NO: 4295391 - DNA, 25 bp, Homo sapien
ctgattcaacatgccgaattaagcc

SEQ ID NO: 4295392 - DNA, 25 bp, Homo sapien
caagctgaaccactggaactgggtt

SEQ ID NO: 4295393 - DNA, 25 bp, Homo sapien
tgaaccactggaactgggtttctct

SEQ ID NO: 4295394 - DNA, 25 bp, Homo sapien
tcaccctggacaggttgggagtcac

SEQ ID NO: 4295395 - DNA, 25 bp, Homo sapien
cacaagctgaaccactggaactggg

SEQ ID NO: 4295396 - DNA, 25 bp, Homo sapien
gccttagcacatacaggagctgaac

SEQ ID NO: 4295397 - DNA, 25 bp, Homo sapien
tcagacctaaatcacgaaggagccc

SEQ ID NO: 4295398 - DNA, 25 bp, Homo sapien
acagggggttattttgatagcacat

SEQ ID NO: 4295399 - DNA, 25 bp, Homo sapien
aataaggatactgaaattcaggtga

SEQ ID NO: 4295400 - DNA, 25 bp, Homo sapien
tccttactggaatcaagaagtgaat

SEQ ID NO: 4295401 - DNA, 25 bp, Homo sapien
aatccttactggaatcaagaagtga

SEQ ID NO: 4295402 - DNA, 25 bp, Homo sapien
cttactggaatcaagaagtgaattt

SEQ ID NO: 4295403 - DNA, 25 bp, Homo sapien
ccttactggaatcaagaagtgaatt

SEQ ID NO: 4295404 - DNA, 25 bp, Homo sapien
gtatgcatcgtagctggaccagtgg

SEQ ID NO: 4295405 - DNA, 25 bp, Homo sapien
tggtacttggccgtaatatctggac

SEQ ID NO: 4295406 - DNA, 25 bp, Homo sapien
catggtatattcgagctcaagggct

SEQ ID NO: 4295407 - DNA, 25 bp, Homo sapien
tgtggccagcaccacaagtgcatgg

SEQ ID NO: 4295408 - DNA, 25 bp, Homo sapien
gacaattccagcaaggcaatgtttg

SEQ ID NO: 4295409 - DNA, 25 bp, Homo sapien
ctagtcggtctttttcccgcttgag

SEQ ID NO: 4295410 - DNA, 25 bp, Homo sapien
gctgctttaattgatgtactagtcg

SEQ ID NO: 4295411 - DNA, 25 bp, Homo sapien
ggccatgacttcttcctgcgtcttt

SEQ ID NO: 4295412 - DNA, 25 bp, Homo sapien
agaacactctcaagtgccaacgtca

SEQ ID NO: 4295413 - DNA, 25 bp, Homo sapien
agtgccaacgtcatgtgcttcaggg

SEQ ID NO: 4295414 - DNA, 25 bp, Homo sapien
actctcaagtgccaacgtcatgtgc

SEQ ID NO: 4295415 - DNA, 25 bp, Homo sapien
caagtgccaacgtcatgtgcttcag

SEQ ID NO: 4295416 - DNA, 25 bp, Homo sapien
aagagggcaaatgccagcatcattt

SEQ ID NO: 4295417 - DNA, 25 bp, Homo sapien
ctaagagggcaaatgccagcatcat

SEQ ID NO: 4295418 - DNA, 25 bp, Homo sapien
gagggcaaatgccagcatcatttgg

SEQ ID NO: 4295419 - DNA, 25 bp, Homo sapien
gggcaaatgccagcatcatttggca

SEQ ID NO: 4295420 - DNA, 25 bp, Homo sapien
tgaattccgataagaggaccacccc

SEQ ID NO: 4295421 - DNA, 25 bp, Homo sapien
tcagtcacaatgctgccgtcagtaa

SEQ ID NO: 4295422 - DNA, 25 bp, Homo sapien
tatttcatttctagggatgcccaag

SEQ ID NO: 4295423 - DNA, 25 bp, Homo sapien
gccgaccgcagctctacaactggtg

SEQ ID NO: 4295424 - DNA, 25 bp, Homo sapien
tcacaaagttgctaaccaagtccat

SEQ ID NO: 4295425 - DNA, 25 bp, Homo sapien
caaatcacaaagttgctaaccaagt

SEQ ID NO: 4295426 - DNA, 25 bp, Homo sapien
aatcacaaagttgctaaccaagtcc

SEQ ID NO: 4295427 - DNA, 25 bp, Homo sapien
aaatcacaaagttgctaaccaagtc

SEQ ID NO: 4295428 - DNA, 25 bp, Homo sapien
ccagtgtctgggtatgttcaaccca

SEQ ID NO: 4295429 - DNA, 25 bp, Homo sapien
tctggagagaattacatctgatgac

SEQ ID NO: 4295430 - DNA, 25 bp, Homo sapien
tgtattcaaataacgatagagccca

SEQ ID NO: 4295431 - DNA, 25 bp, Homo sapien
agattcagcttaataacacagtgcc

SEQ ID NO: 4295432 - DNA, 25 bp, Homo sapien
acacacatgagtaattaaattgtgc

SEQ ID NO: 4295433 - DNA, 25 bp, Homo sapien
aattaaattgtgcttaacgagctct

SEQ ID NO: 4295434 - DNA, 25 bp, Homo sapien
gagtaattaaattgtgcttaacgag

SEQ ID NO: 4295435 - DNA, 25 bp, Homo sapien
catgagtaattaaattgtgcttaac

SEQ ID NO: 4295436 - DNA, 25 bp, Homo sapien
gatgcagttatggacacagctctag

SEQ ID NO: 4295437 - DNA, 25 bp, Homo sapien
caccaggaacactgagatgcagtta

SEQ ID NO: 4295438 - DNA, 25 bp, Homo sapien
gaacactgagatgcagttatggaca

SEQ ID NO: 4295439 - DNA, 25 bp, Homo sapien
aagggctggcaatcttgaagacacc

SEQ ID NO: 4295440 - DNA, 25 bp, Homo sapien
tattttggttagaagtatcctcgcc

SEQ ID NO: 4295441 - DNA, 25 bp, Homo sapien
tcagagcagtaattaaccccaccgc

SEQ ID NO: 4295442 - DNA, 25 bp, Homo sapien
caaagtattctaaccagaaggccca

SEQ ID NO: 4295443 - DNA, 25 bp, Homo sapien
gctacccctgtctgatgcccaaagt

SEQ ID NO: 4295444 - DNA, 25 bp, Homo sapien
tctaggtgttccagtggtttcccaa

SEQ ID NO: 4295445 - DNA, 25 bp, Homo sapien
tgttgcctggagcaggatacaaagc

SEQ ID NO: 4295446 - DNA, 25 bp, Homo sapien
tcagaggctcggatctccttcagag

SEQ ID NO: 4295447 - DNA, 25 bp, Homo sapien
tcgtggtctcccatcaatgttatga

SEQ ID NO: 4295448 - DNA, 25 bp, Homo sapien
ctggtgtcaatattccagttagtgc

SEQ ID NO: 4295449 - DNA, 25 bp, Homo sapien
tattccagttagtgccagggacatc

SEQ ID NO: 4295450 - DNA, 25 bp, Homo sapien
tccagttagtgccagggacatctgg

SEQ ID NO: 4295451 - DNA, 25 bp, Homo sapien
gtcaatattccagttagtgccaggg

SEQ ID NO: 4295452 - DNA, 25 bp, Homo sapien
ctgcagaaagcagaagtgtacccag

SEQ ID NO: 4295453 - DNA, 25 bp, Homo sapien
agggtgtaccacacagatatctgcc

SEQ ID NO: 4295454 - DNA, 25 bp, Homo sapien
ggcatctcacattggttcccactgt

SEQ ID NO: 4295455 - DNA, 25 bp, Homo sapien
tgccaggggcatctcacattggttc

SEQ ID NO: 4295456 - DNA, 25 bp, Homo sapien
gagacactcaggctttctcacacct

SEQ ID NO: 4295457 - DNA, 25 bp, Homo sapien
cccctgcatccttttgcatttcagc

SEQ ID NO: 4295458 - DNA, 25 bp, Homo sapien
cttccccctgcatccttttgcattt

SEQ ID NO: 4295459 - DNA, 25 bp, Homo sapien
tgcatccttttgcatttcagcaaaa

SEQ ID NO: 4295460 - DNA, 25 bp, Homo sapien
cctgcatccttttgcatttcagcaa

SEQ ID NO: 4295461 - DNA, 25 bp, Homo sapien
cccctaatatgtgtggtaattctgg

SEQ ID NO: 4295462 - DNA, 25 bp, Homo sapien
ccctaatatgtgtggtaattctggc

SEQ ID NO: 4295463 - DNA, 25 bp, Homo sapien
gtgctctgctcatgccaatgaaaag

SEQ ID NO: 4295464 - DNA, 25 bp, Homo sapien
gctctgctcatgccaatgaaaagcc

SEQ ID NO: 4295465 - DNA, 25 bp, Homo sapien
tgctctgctcatgccaatgaaaagc

SEQ ID NO: 4295466 - DNA, 25 bp, Homo sapien
gcactcaatagcacagaacttgtca

SEQ ID NO: 4295467 - DNA, 25 bp, Homo sapien
tcctaccgttgacaccagcaattct

SEQ ID NO: 4295468 - DNA, 25 bp, Homo sapien
tcatcccgtcagcactcaatagcac

SEQ ID NO: 4295469 - DNA, 25 bp, Homo sapien
cacagaacttgtcaacagagtccta

SEQ ID NO: 4295470 - DNA, 25 bp, Homo sapien
ggtcttacaaagacactgactgttt

SEQ ID NO: 4295471 - DNA, 25 bp, Homo sapien
agacactgactgttttcacaaacat

SEQ ID NO: 4295472 - DNA, 25 bp, Homo sapien
acactgactgttttcacaaacatct

SEQ ID NO: 4295473 - DNA, 25 bp, Homo sapien
aaggtcttacaaagacactgactgt

SEQ ID NO: 4295474 - DNA, 25 bp, Homo sapien
gggactgtcaagtgaaattcctcct

SEQ ID NO: 4295475 - DNA, 25 bp, Homo sapien
taaggtctgaacgatgggactgtca

SEQ ID NO: 4295476 - DNA, 25 bp, Homo sapien
tattgacctttcgagccagccattt

SEQ ID NO: 4295477 - DNA, 25 bp, Homo sapien
tttcacgaggcacctcacttctggg

SEQ ID NO: 4295478 - DNA, 25 bp, Homo sapien
tctgctgggcattttcggctatggt

SEQ ID NO: 4295479 - DNA, 25 bp, Homo sapien
ttttggtgccagaaatgccatgggc

SEQ ID NO: 4295480 - DNA, 25 bp, Homo sapien
tgttcagtccaatatgggtcaccgc

SEQ ID NO: 4295481 - DNA, 25 bp, Homo sapien
ggtcaccgctttgagtgaaagatcc

SEQ ID NO: 4295482 - DNA, 25 bp, Homo sapien
ctttgactgcttaatctgagaagaa

SEQ ID NO: 4295483 - DNA, 25 bp, Homo sapien
tttgactgcttaatctgagaagaac

SEQ ID NO: 4295484 - DNA, 25 bp, Homo sapien
cctaaaggggtctagcagaatgccc

SEQ ID NO: 4295485 - DNA, 25 bp, Homo sapien
gggcaagtggataattgtgcccatg

SEQ ID NO: 4295486 - DNA, 25 bp, Homo sapien
gttgttcctaaaggggtctagcaga

SEQ ID NO: 4295487 - DNA, 25 bp, Homo sapien
ttgtgcccatgaggttgttcctaaa

SEQ ID NO: 4295488 - DNA, 25 bp, Homo sapien
tgttccactcagcagcaacgttgag

SEQ ID NO: 4295489 - DNA, 25 bp, Homo sapien
tcgcctgtgttcagcacgtccatcg

SEQ ID NO: 4295490 - DNA, 25 bp, Homo sapien
gagtcactgtcgtgctaccaactgt

SEQ ID NO: 4295491 - DNA, 25 bp, Homo sapien
gccaagccgatggaaaccagctgga

SEQ ID NO: 4295492 - DNA, 25 bp, Homo sapien
gaggttctaacctctaacgatcaaa

SEQ ID NO: 4295493 - DNA, 25 bp, Homo sapien
cgatcaaaagtgagttgaggagctt

SEQ ID NO: 4295494 - DNA, 25 bp, Homo sapien
tccaaacccacataggactgctggt

SEQ ID NO: 4295495 - DNA, 25 bp, Homo sapien
caagaaacgatcaaacgttagaggt

SEQ ID NO: 4295496 - DNA, 25 bp, Homo sapien
gcagggaggactttccaatgctgaa

SEQ ID NO: 4295497 - DNA, 25 bp, Homo sapien
cctgttcataaagcttggagcctca

SEQ ID NO: 4295498 - DNA, 25 bp, Homo sapien
gctgaaaagcacaagttctcccatt

SEQ ID NO: 4295499 - DNA, 25 bp, Homo sapien
gccccaatgtttcatgtcagacctg

SEQ ID NO: 4295500 - DNA, 25 bp, Homo sapien
ctcgaccgtccaaccatgtgattca

SEQ ID NO: 4295501 - DNA, 25 bp, Homo sapien
catgtgattcatgggacatggaagc

SEQ ID NO: 4295502 - DNA, 25 bp, Homo sapien
cgaccgtccaaccatgtgattcatg

SEQ ID NO: 4295503 - DNA, 25 bp, Homo sapien
gacatggaagcttgatgaatcaacc

SEQ ID NO: 4295504 - DNA, 25 bp, Homo sapien
gcaccggagatatagcccaggctct

SEQ ID NO: 4295505 - DNA, 25 bp, Homo sapien
catcaactaattcattcaatcggcg

SEQ ID NO: 4295506 - DNA, 25 bp, Homo sapien
ggcgctgttctgagcaccggagata

SEQ ID NO: 4295507 - DNA, 25 bp, Homo sapien
ttcaatcggcgctgttctgagcacc

SEQ ID NO: 4295508 - DNA, 25 bp, Homo sapien
aatagcgtccagctctcatactcca

SEQ ID NO: 4295509 - DNA, 25 bp, Homo sapien
atagcgtccagctctcatactccat

SEQ ID NO: 4295510 - DNA, 25 bp, Homo sapien
ccctctccaatagcgtccagctctc

SEQ ID NO: 4295511 - DNA, 25 bp, Homo sapien
tctccaatagcgtccagctctcata

SEQ ID NO: 4295512 - DNA, 25 bp, Homo sapien
catatccgcatggatgccaggcttc

SEQ ID NO: 4295513 - DNA, 25 bp, Homo sapien
ttctctccacatatccgcatggatg

SEQ ID NO: 4295514 - DNA, 25 bp, Homo sapien
atgccaggcttccatgcaggcttct

SEQ ID NO: 4295515 - DNA, 25 bp, Homo sapien
tccacatatccgcatggatgccagg

SEQ ID NO: 4295516 - DNA, 25 bp, Homo sapien
tgttgtcagagactgccaattgccc

SEQ ID NO: 4295517 - DNA, 25 bp, Homo sapien
caaaagtctcacactaagaggtgca

SEQ ID NO: 4295518 - DNA, 25 bp, Homo sapien
tagtggaattacatacaggagggtc

SEQ ID NO: 4295519 - DNA, 25 bp, Homo sapien
gcattcaaattaagtccctcaaggg

SEQ ID NO: 4295520 - DNA, 25 bp, Homo sapien
ggttggccaagtgcgcttctttttc

SEQ ID NO: 4295521 - DNA, 25 bp, Homo sapien
caatccggaggttggccaagtgcgc

SEQ ID NO: 4295522 - DNA, 25 bp, Homo sapien
aggcgaggcgtgctttggtggcatc

SEQ ID NO: 4295523 - DNA, 25 bp, Homo sapien
gggactgttgtgtggaggcgaggcg

SEQ ID NO: 4295524 - DNA, 25 bp, Homo sapien
tgtgtggccctggaccgaggaccat

SEQ ID NO: 4295525 - DNA, 25 bp, Homo sapien
catcatgaaggtcccctgttgtagt

SEQ ID NO: 4295526 - DNA, 25 bp, Homo sapien
ccatcatgaaggtcccctgttgtag

SEQ ID NO: 4295527 - DNA, 25 bp, Homo sapien
catgaaggtcccctgttgtagtttt

SEQ ID NO: 4295528 - DNA, 25 bp, Homo sapien
ttccatcatgaaggtcccctgttgt

SEQ ID NO: 4295529 - DNA, 25 bp, Homo sapien
aacccactggcttctagtaaatcag

SEQ ID NO: 4295530 - DNA, 25 bp, Homo sapien
aaatgtcatcaaccaatgaacagat

SEQ ID NO: 4295531 - DNA, 25 bp, Homo sapien
gaataactggttataggtacagagt

SEQ ID NO: 4295532 - DNA, 25 bp, Homo sapien
gaaatactaatacatgctgccacat

SEQ ID NO: 4295533 - DNA, 25 bp, Homo sapien
caaaaatcctgtggacccagatata

SEQ ID NO: 4295534 - DNA, 25 bp, Homo sapien
atcctgtggacccagatatagctga

SEQ ID NO: 4295535 - DNA, 25 bp, Homo sapien
aaaatcctgtggacccagatatagc

SEQ ID NO: 4295536 - DNA, 25 bp, Homo sapien
tgtggacccagatatagctgaatga

SEQ ID NO: 4295537 - DNA, 25 bp, Homo sapien
tgattgtcatttccttaatctggag

SEQ ID NO: 4295538 - DNA, 25 bp, Homo sapien
ggacaagccataagtcaaagttaac

SEQ ID NO: 4295539 - DNA, 25 bp, Homo sapien
aaatcattgcctatgtcattgattg

SEQ ID NO: 4295540 - DNA, 25 bp, Homo sapien
tttagaagttaaccatgcccaggtc

SEQ ID NO: 4295541 - DNA, 25 bp, Homo sapien
gcaaaccttgggaactccataatga

SEQ ID NO: 4295542 - DNA, 25 bp, Homo sapien
cgtctgaaaccatgaacagagtctg

SEQ ID NO: 4295543 - DNA, 25 bp, Homo sapien
caaacagccatggaaaactaggaac

SEQ ID NO: 4295544 - DNA, 25 bp, Homo sapien
gctggtcaggtttcttctaatggca

SEQ ID NO: 4295545 - DNA, 25 bp, Homo sapien
caagcatcaatgtaaagggccttca

SEQ ID NO: 4295546 - DNA, 25 bp, Homo sapien
tcaagcatcaatgtaaagggccttc

SEQ ID NO: 4295547 - DNA, 25 bp, Homo sapien
aagcatcaatgtaaagggccttcag

SEQ ID NO: 4295548 - DNA, 25 bp, Homo sapien
gcatcaatgtaaagggccttcagtg

SEQ ID NO: 4295549 - DNA, 25 bp, Homo sapien
ttcttctagtaactgagcatttttc

SEQ ID NO: 4295550 - DNA, 25 bp, Homo sapien
ctcgcctgcgcacttcttctagtaa

SEQ ID NO: 4295551 - DNA, 25 bp, Homo sapien
atgctgtcttctcgcctgcgcactt

SEQ ID NO: 4295552 - DNA, 25 bp, Homo sapien
ttctagtaactgagcatttttcttc

SEQ ID NO: 4295553 - DNA, 25 bp, Homo sapien
cagcacagcttggttaaattctacc

SEQ ID NO: 4295554 - DNA, 25 bp, Homo sapien
aagtcagcacagcttggttaaattc

SEQ ID NO: 4295555 - DNA, 25 bp, Homo sapien
tcagcacagcttggttaaattctac

SEQ ID NO: 4295556 - DNA, 25 bp, Homo sapien
aaaagtcagcacagcttggttaaat

SEQ ID NO: 4295557 - DNA, 25 bp, Homo sapien
ccatctccccttcagagagttgttt

SEQ ID NO: 4295558 - DNA, 25 bp, Homo sapien
tccatctccccttcagagagttgtt

SEQ ID NO: 4295559 - DNA, 25 bp, Homo sapien
aaaaatgattcctggaacaggcata

SEQ ID NO: 4295560 - DNA, 25 bp, Homo sapien
aaatgattcctggaacaggcataaa

SEQ ID NO: 4295561 - DNA, 25 bp, Homo sapien
agaactgtcccaaaaaatgattcct

SEQ ID NO: 4295562 - DNA, 25 bp, Homo sapien
atgattcctggaacaggcataaaac

SEQ ID NO: 4295563 - DNA, 25 bp, Homo sapien
ggcagaaggatggatgaccgaggtc

SEQ ID NO: 4295564 - DNA, 25 bp, Homo sapien
atctctgccgtccacgatccttgaa

SEQ ID NO: 4295565 - DNA, 25 bp, Homo sapien
gccgtccacgatccttgaagcgcat

SEQ ID NO: 4295566 - DNA, 25 bp, Homo sapien
aaggatggatgaccgaggtcttccc

SEQ ID NO: 4295567 - DNA, 25 bp, Homo sapien
tcaagagagggcaaagactcggacc

SEQ ID NO: 4295568 - DNA, 25 bp, Homo sapien
agggcaaagactcggaccagcagct

SEQ ID NO: 4295569 - DNA, 25 bp, Homo sapien
aggaatttcacattccggctcaaga

SEQ ID NO: 4295570 - DNA, 25 bp, Homo sapien
tcacattccggctcaagagagggca

SEQ ID NO: 4295571 - DNA, 25 bp, Homo sapien
tgacacttcaccagaaatgtcagca

SEQ ID NO: 4295572 - DNA, 25 bp, Homo sapien
tgggcataaaattttctgacacttc

SEQ ID NO: 4295573 - DNA, 25 bp, Homo sapien
tgcttgggcataaaattttctgaca

SEQ ID NO: 4295574 - DNA, 25 bp, Homo sapien
aatgtcagcattagaataaggcagc

SEQ ID NO: 4295575 - DNA, 25 bp, Homo sapien
attggagcaagggtgaaagcagcaa

SEQ ID NO: 4295576 - DNA, 25 bp, Homo sapien
gagcaagggtgaaagcagcaatttg

SEQ ID NO: 4295577 - DNA, 25 bp, Homo sapien
tgattggagcaagggtgaaagcagc

SEQ ID NO: 4295578 - DNA, 25 bp, Homo sapien
tggagcaagggtgaaagcagcaatt

SEQ ID NO: 4295579 - DNA, 25 bp, Homo sapien
gtaagacgcctctttatcgagctgt

SEQ ID NO: 4295580 - DNA, 25 bp, Homo sapien
ccagttctgcgatcttcttgtcctt

SEQ ID NO: 4295581 - DNA, 25 bp, Homo sapien
cttgccacactcgtcgcggtagtaa

SEQ ID NO: 4295582 - DNA, 25 bp, Homo sapien
agcaaccggtccacttccgcttggg

SEQ ID NO: 4295583 - DNA, 25 bp, Homo sapien
ctggagtcatcttcaatattatgtg

SEQ ID NO: 4295584 - DNA, 25 bp, Homo sapien
tggagtcatcttcaatattatgtgc

SEQ ID NO: 4295585 - DNA, 25 bp, Homo sapien
tgtacatctgattgaacaactgctc

SEQ ID NO: 4295586 - DNA, 25 bp, Homo sapien
tctgattgaacaactgctcagcttg

SEQ ID NO: 4295587 - DNA, 25 bp, Homo sapien
catctgattgaacaactgctcagct

SEQ ID NO: 4295588 - DNA, 25 bp, Homo sapien
tgggttgtacatctgattgaacaac

SEQ ID NO: 4295589 - DNA, 25 bp, Homo sapien
gatctccataacaatgactcatcag

SEQ ID NO: 4295590 - DNA, 25 bp, Homo sapien
tttgaggccgtctttcttctcgact

SEQ ID NO: 4295591 - DNA, 25 bp, Homo sapien
tcatcagagtaggtggaggacatct

SEQ ID NO: 4295592 - DNA, 25 bp, Homo sapien
ctttcatgcccaggtctatttgagg

SEQ ID NO: 4295593 - DNA, 25 bp, Homo sapien
tcaatggctatttctagagatttta

SEQ ID NO: 4295594 - DNA, 25 bp, Homo sapien
gaagatgcatgttctttgaggtcaa

SEQ ID NO: 4295595 - DNA, 25 bp, Homo sapien
cagccccgcagaggctaatgaagat

SEQ ID NO: 4295596 - DNA, 25 bp, Homo sapien
ttttcagccccgcagaggctaatga

SEQ ID NO: 4295597 - DNA, 25 bp, Homo sapien
tctttcaagcgctcaattattctct

SEQ ID NO: 4295598 - DNA, 25 bp, Homo sapien
tctcttttcggaaggattctatctc

SEQ ID NO: 4295599 - DNA, 25 bp, Homo sapien
gtctttcccgatcatctctttctcg

SEQ ID NO: 4295600 - DNA, 25 bp, Homo sapien
cagcctgtaaagcattgaccttctc

SEQ ID NO: 4295601 - DNA, 25 bp, Homo sapien
tcatcaaagagccttcattggtttc

SEQ ID NO: 4295602 - DNA, 25 bp, Homo sapien
catatgcaaactcaactccagggtc

SEQ ID NO: 4295603 - DNA, 25 bp, Homo sapien
caaactcaactccagggtctgatac

SEQ ID NO: 4295604 - DNA, 25 bp, Homo sapien
aggagagagcatatgcaaactcaac

SEQ ID NO: 4295605 - DNA, 25 bp, Homo sapien
gagcatatgcaaactcaactccagg

SEQ ID NO: 4295606 - DNA, 25 bp, Homo sapien
gggccaggtagaggatttcaaatta

SEQ ID NO: 4295607 - DNA, 25 bp, Homo sapien
tttcaaattatatcatcgtaagagc

SEQ ID NO: 4295608 - DNA, 25 bp, Homo sapien
gaagccccacataactagggaacag

SEQ ID NO: 4295609 - DNA, 25 bp, Homo sapien
caatggcaagctagtgaaggttttt

SEQ ID NO: 4295610 - DNA, 25 bp, Homo sapien
tctgtattactggaatccgtctgca

SEQ ID NO: 4295611 - DNA, 25 bp, Homo sapien
tccgtctgcaaggacttcactctgt

SEQ ID NO: 4295612 - DNA, 25 bp, Homo sapien
gacagagcttcctctagcgtcgcca

SEQ ID NO: 4295613 - DNA, 25 bp, Homo sapien
cgtcgccagtgcagtatctgtatta

SEQ ID NO: 4295614 - DNA, 25 bp, Homo sapien
cagtactgctgaagcaatagctatg

SEQ ID NO: 4295615 - DNA, 25 bp, Homo sapien
tgaagcaatagctatgccttctggg

SEQ ID NO: 4295616 - DNA, 25 bp, Homo sapien
aagattcagaaggagccagtactgc

SEQ ID NO: 4295617 - DNA, 25 bp, Homo sapien
ggaagattcagaaggagccagtact

SEQ ID NO: 4295618 - DNA, 25 bp, Homo sapien
accactagccctgcagtcatgttgc

SEQ ID NO: 4295619 - DNA, 25 bp, Homo sapien
ggaaccctaacaagagtggcttcaa

SEQ ID NO: 4295620 - DNA, 25 bp, Homo sapien
gtggcttcaactgacccccggacaa

SEQ ID NO: 4295621 - DNA, 25 bp, Homo sapien
cggacaacaccactagccctgcagt

SEQ ID NO: 4295622 - DNA, 25 bp, Homo sapien
tcactgccatttaggagatacccac

SEQ ID NO: 4295623 - DNA, 25 bp, Homo sapien
agcaaagggcatgcaaagattccat

SEQ ID NO: 4295624 - DNA, 25 bp, Homo sapien
gtgagaagggttggcgagtaagctc

SEQ ID NO: 4295625 - DNA, 25 bp, Homo sapien
tggtatttacactgataagggcatc

SEQ ID NO: 4295626 - DNA, 25 bp, Homo sapien
taagaacagcatagacatcggtggt

SEQ ID NO: 4295627 - DNA, 25 bp, Homo sapien
tttccacaggctctcccgtagattt

SEQ ID NO: 4295628 - DNA, 25 bp, Homo sapien
ccacaggctctcccgtagatttcct

SEQ ID NO: 4295629 - DNA, 25 bp, Homo sapien
ttccacaggctctcccgtagatttc

SEQ ID NO: 4295630 - DNA, 25 bp, Homo sapien
atttccacaggctctcccgtagatt

SEQ ID NO: 4295631 - DNA, 25 bp, Homo sapien
gaacagttgtattcttcttaattag

SEQ ID NO: 4295632 - DNA, 25 bp, Homo sapien
tggcatagctgcatggttctttcgc

SEQ ID NO: 4295633 - DNA, 25 bp, Homo sapien
ctataaaatcttcagaacagttgta

SEQ ID NO: 4295634 - DNA, 25 bp, Homo sapien
taattagaaagcctccatcaagacc

SEQ ID NO: 4295635 - DNA, 25 bp, Homo sapien
ctggtattagtgtcatccccaccaa

SEQ ID NO: 4295636 - DNA, 25 bp, Homo sapien
tgaaaagacgaagtctctcagtcct

SEQ ID NO: 4295637 - DNA, 25 bp, Homo sapien
ggttcacaaccttctgattgctcac

SEQ ID NO: 4295638 - DNA, 25 bp, Homo sapien
ccaggtgcctggtattagtgtcatc

SEQ ID NO: 4295639 - DNA, 25 bp, Homo sapien
caggatctagcagattctacatgca

SEQ ID NO: 4295640 - DNA, 25 bp, Homo sapien
ctgcaggcacgactgcacataaata

SEQ ID NO: 4295641 - DNA, 25 bp, Homo sapien
ttcccagccatggtctttatcttga

SEQ ID NO: 4295642 - DNA, 25 bp, Homo sapien
aaagaagcaagtccagaaagatagt

SEQ ID NO: 4295643 - DNA, 25 bp, Homo sapien
gcatttcgaatgtgattttctacct

SEQ ID NO: 4295644 - DNA, 25 bp, Homo sapien
cttgtaagcatttcgaatgtgattt

SEQ ID NO: 4295645 - DNA, 25 bp, Homo sapien
ttgtaagcatttcgaatgtgatttt

SEQ ID NO: 4295646 - DNA, 25 bp, Homo sapien
caaatgtttggactatgaatggaaa

SEQ ID NO: 4295647 - DNA, 25 bp, Homo sapien
tgccatgtttaccagaaatctaagt

SEQ ID NO: 4295648 - DNA, 25 bp, Homo sapien
tatatttccttatgacaattgccat

SEQ ID NO: 4295649 - DNA, 25 bp, Homo sapien
cttgtggcaatgacgagaaaaaata

SEQ ID NO: 4295650 - DNA, 25 bp, Homo sapien
tcataatcatgttgccgaaaggagc

SEQ ID NO: 4295651 - DNA, 25 bp, Homo sapien
gacttcaacaagtgatatcataatc

SEQ ID NO: 4295652 - DNA, 25 bp, Homo sapien
tctagaacttccaaactggttccca

SEQ ID NO: 4295653 - DNA, 25 bp, Homo sapien
ggagccataatatacaactggtttt

SEQ ID NO: 4295654 - DNA, 25 bp, Homo sapien
aattcactctcacacctggtgtcat

SEQ ID NO: 4295655 - DNA, 25 bp, Homo sapien
tttccctaattcactctcacacctg

SEQ ID NO: 4295656 - DNA, 25 bp, Homo sapien
cctaattcactctcacacctggtgt

SEQ ID NO: 4295657 - DNA, 25 bp, Homo sapien
tcactctcacacctggtgtcatcat

SEQ ID NO: 4295658 - DNA, 25 bp, Homo sapien
caaggccttaatcgctacaagtggc

SEQ ID NO: 4295659 - DNA, 25 bp, Homo sapien
gagaatgtccccataaaagctacag

SEQ ID NO: 4295660 - DNA, 25 bp, Homo sapien
gactaccacaatgggcagcacgggt

SEQ ID NO: 4295661 - DNA, 25 bp, Homo sapien
aaattgattcacgaaagcgcttcca

SEQ ID NO: 4295662 - DNA, 25 bp, Homo sapien
atgtcacgaatttcaccggccagtg

SEQ ID NO: 4295663 - DNA, 25 bp, Homo sapien
ctttttcttccagtcgtaatctcag

SEQ ID NO: 4295664 - DNA, 25 bp, Homo sapien
ccagtcgtaatctcagcgcatctac

SEQ ID NO: 4295665 - DNA, 25 bp, Homo sapien
gtcacgaatttcaccggccagtgtc

SEQ ID NO: 4295666 - DNA, 25 bp, Homo sapien
ggaaagatcacacttctcaggcgcc

SEQ ID NO: 4295667 - DNA, 25 bp, Homo sapien
tttgggaagatgaaacgctgtgttt

SEQ ID NO: 4295668 - DNA, 25 bp, Homo sapien
aaagatcacacttctcaggcgcctt

SEQ ID NO: 4295669 - DNA, 25 bp, Homo sapien
ttgggaagatgaaacgctgtgtttt

SEQ ID NO: 4295670 - DNA, 25 bp, Homo sapien
caatagagccggaggggaagtacac

SEQ ID NO: 4295671 - DNA, 25 bp, Homo sapien
gccatgtgcgagttgccagatccta

SEQ ID NO: 4295672 - DNA, 25 bp, Homo sapien
gaagtacacgggatctccacagtgg

SEQ ID NO: 4295673 - DNA, 25 bp, Homo sapien
gatcctaaaactgtgtccaccatag

SEQ ID NO: 4295674 - DNA, 25 bp, Homo sapien
aactctttgctacatggaatcccag

SEQ ID NO: 4295675 - DNA, 25 bp, Homo sapien
ttgccagacacatttgcctgaagtt

SEQ ID NO: 4295676 - DNA, 25 bp, Homo sapien
tggaatcccagccttcccaaaagtc

SEQ ID NO: 4295677 - DNA, 25 bp, Homo sapien
tttgctacatggaatcccagccttc

SEQ ID NO: 4295678 - DNA, 25 bp, Homo sapien
agatcagggatagggcatgctccca

SEQ ID NO: 4295679 - DNA, 25 bp, Homo sapien
gcatccctacgaacatgaaaaaatg

SEQ ID NO: 4295680 - DNA, 25 bp, Homo sapien
catctttcctcagaagatcagggat

SEQ ID NO: 4295681 - DNA, 25 bp, Homo sapien
tgccttcctcatatggcaaatttca

SEQ ID NO: 4295682 - DNA, 25 bp, Homo sapien
ctgaggaagataagagcatttacaa

SEQ ID NO: 4295683 - DNA, 25 bp, Homo sapien
tttacaagttggacaataacaacaa

SEQ ID NO: 4295684 - DNA, 25 bp, Homo sapien
tcaggaaaacggacatcacaagaac

SEQ ID NO: 4295685 - DNA, 25 bp, Homo sapien
ggaaacatccacatacgtgcttcac

SEQ ID NO: 4295686 - DNA, 25 bp, Homo sapien
ctaaatccaggtccggagtagccat

SEQ ID NO: 4295687 - DNA, 25 bp, Homo sapien
gtaagtggcagacaaatggaatcca

SEQ ID NO: 4295688 - DNA, 25 bp, Homo sapien
tgatttctaaatccaggtccggagt

SEQ ID NO: 4295689 - DNA, 25 bp, Homo sapien
gaatccaacaactcgggtttcctga

SEQ ID NO: 4295690 - DNA, 25 bp, Homo sapien
gtcctgttgtcctagtgttgaaggg

SEQ ID NO: 4295691 - DNA, 25 bp, Homo sapien
ctgtcctgttgtcctagtgttgaag

SEQ ID NO: 4295692 - DNA, 25 bp, Homo sapien
cttcactgtcctgttgtcctagtgt

SEQ ID NO: 4295693 - DNA, 25 bp, Homo sapien
ttattcttcactgtcctgttgtcct

SEQ ID NO: 4295694 - DNA, 25 bp, Homo sapien
agttcaagcagtagccgataaaggc

SEQ ID NO: 4295695 - DNA, 25 bp, Homo sapien
caagcagtagccgataaaggcccat

SEQ ID NO: 4295696 - DNA, 25 bp, Homo sapien
ataagttcaagcagtagccgataaa

SEQ ID NO: 4295697 - DNA, 25 bp, Homo sapien
gttcaagcagtagccgataaaggcc

SEQ ID NO: 4295698 - DNA, 25 bp, Homo sapien
ccatgaaattgtaagttataagggc

SEQ ID NO: 4295699 - DNA, 25 bp, Homo sapien
ccaagggtttgttggctgccatgaa

SEQ ID NO: 4295700 - DNA, 25 bp, Homo sapien
caagtatagcccagaagcttggctt

SEQ ID NO: 4295701 - DNA, 25 bp, Homo sapien
tagcctaaacaagtatagcccagaa

SEQ ID NO: 4295702 - DNA, 25 bp, Homo sapien
tcccccaggtaatgcagagtcaagg

SEQ ID NO: 4295703 - DNA, 25 bp, Homo sapien
gtcaaacttgtcccccaggtaatgc

SEQ ID NO: 4295704 - DNA, 25 bp, Homo sapien
acagaatagcaagcctttacatctt

SEQ ID NO: 4295705 - DNA, 25 bp, Homo sapien
cttgtcccccaggtaatgcagagtc

SEQ ID NO: 4295706 - DNA, 25 bp, Homo sapien
tcatgttccttgtctggctcttcct

SEQ ID NO: 4295707 - DNA, 25 bp, Homo sapien
tctttcatgttccttgtctggctct

SEQ ID NO: 4295708 - DNA, 25 bp, Homo sapien
atgttccttgtctggctcttcctgg

SEQ ID NO: 4295709 - DNA, 25 bp, Homo sapien
tttcatgttccttgtctggctcttc

SEQ ID NO: 4295710 - DNA, 25 bp, Homo sapien
gcatccaatgagctctccaaatgct

SEQ ID NO: 4295711 - DNA, 25 bp, Homo sapien
catccaatgagctctccaaatgctc

SEQ ID NO: 4295712 - DNA, 25 bp, Homo sapien
tcagcatccaatgagctctccaaat

SEQ ID NO: 4295713 - DNA, 25 bp, Homo sapien
cagcatccaatgagctctccaaatg

SEQ ID NO: 4295714 - DNA, 25 bp, Homo sapien
gtgctaaggcacagcagacaaaatg

SEQ ID NO: 4295715 - DNA, 25 bp, Homo sapien
gaacaattctggaaactcaatgttg

SEQ ID NO: 4295716 - DNA, 25 bp, Homo sapien
tcaatgttgagtactgtgctaaggc

SEQ ID NO: 4295717 - DNA, 25 bp, Homo sapien
acaattctggaaactcaatgttgag

SEQ ID NO: 4295718 - DNA, 25 bp, Homo sapien
gctcccttccatcacatttcaattt

SEQ ID NO: 4295719 - DNA, 25 bp, Homo sapien
tgccacagaacaaccataaaaagct

SEQ ID NO: 4295720 - DNA, 25 bp, Homo sapien
agcttttatgacaaacttgggatgc

SEQ ID NO: 4295721 - DNA, 25 bp, Homo sapien
gaatttgccacagaacaaccataaa

SEQ ID NO: 4295722 - DNA, 25 bp, Homo sapien
tacaatatctattgcaactgctcga

SEQ ID NO: 4295723 - DNA, 25 bp, Homo sapien
tattgcaactgctcgactctgctgt

SEQ ID NO: 4295724 - DNA, 25 bp, Homo sapien
tttggttgacccctatttgagacaa

SEQ ID NO: 4295725 - DNA, 25 bp, Homo sapien
caaagacaacatgtagatgaatggg

SEQ ID NO: 4295726 - DNA, 25 bp, Homo sapien
gaactacagtttgaatttcactgga

SEQ ID NO: 4295727 - DNA, 25 bp, Homo sapien
tcctcaaaggagatagaagccaact

SEQ ID NO: 4295728 - DNA, 25 bp, Homo sapien
tctagatactattcactgctgcctc

SEQ ID NO: 4295729 - DNA, 25 bp, Homo sapien
gctaatgtgactatagaactacagt

SEQ ID NO: 4295730 - DNA, 25 bp, Homo sapien
tgcaaagacacagctcaaagagccc

SEQ ID NO: 4295731 - DNA, 25 bp, Homo sapien
gcatttcttagcagacccaaagatg

SEQ ID NO: 4295732 - DNA, 25 bp, Homo sapien
gccttctaaagtaatgcacacagca

SEQ ID NO: 4295733 - DNA, 25 bp, Homo sapien
gaaagcacagatctactcaacagtc

SEQ ID NO: 4295734 - DNA, 25 bp, Homo sapien
tccaagtgtgaaccaaacacctttg

SEQ ID NO: 4295735 - DNA, 25 bp, Homo sapien
catctggccccaagggttaggataa

SEQ ID NO: 4295736 - DNA, 25 bp, Homo sapien
tgaaaccattctagatccaagccct

SEQ ID NO: 4295737 - DNA, 25 bp, Homo sapien
caggtagggcaatttctatcaattc

SEQ ID NO: 4295738 - DNA, 25 bp, Homo sapien
gtgactctttgagcacttcaatgtg

SEQ ID NO: 4295739 - DNA, 25 bp, Homo sapien
tgttctttggcagtaagtgactctt

SEQ ID NO: 4295740 - DNA, 25 bp, Homo sapien
tgtttgtaaggcaagaagttccgac

SEQ ID NO: 4295741 - DNA, 25 bp, Homo sapien
gattgctgagggtttcaagctttgt

SEQ ID NO: 4295742 - DNA, 25 bp, Homo sapien
tgtaaacctcaatttgtttgatctc

SEQ ID NO: 4295743 - DNA, 25 bp, Homo sapien
caagatcccttatgtttcgttccaa

SEQ ID NO: 4295744 - DNA, 25 bp, Homo sapien
cttcttcgcggtcctcagtgttcag

SEQ ID NO: 4295745 - DNA, 25 bp, Homo sapien
cagtgttcagcacaccattggcttt

SEQ ID NO: 4295746 - DNA, 25 bp, Homo sapien
gtggaaactggaccatgcctcaggg

SEQ ID NO: 4295747 - DNA, 25 bp, Homo sapien
ggtatgctgtcattactgaaacctg

SEQ ID NO: 4295748 - DNA, 25 bp, Homo sapien
caatgtggcctgatggatgtggaaa

SEQ ID NO: 4295749 - DNA, 25 bp, Homo sapien
cacacgccagtaaggaaattgcaat

SEQ ID NO: 4295750 - DNA, 25 bp, Homo sapien
aaacaaatggctttatgaatgaccc

SEQ ID NO: 4295751 - DNA, 25 bp, Homo sapien
acagtgttctaagtgcaaacttgga

SEQ ID NO: 4295752 - DNA, 25 bp, Homo sapien
tattgacagttatccacaagagcag

SEQ ID NO: 4295753 - DNA, 25 bp, Homo sapien
ttgagattatttgacaagaactacc

SEQ ID NO: 4295754 - DNA, 25 bp, Homo sapien
gccagaccaaatcaggatcaaaatt

SEQ ID NO: 4295755 - DNA, 25 bp, Homo sapien
cagaccaaatcaggatcaaaattaa

SEQ ID NO: 4295756 - DNA, 25 bp, Homo sapien
ctgccagaccaaatcaggatcaaaa

SEQ ID NO: 4295757 - DNA, 25 bp, Homo sapien
ccaaatcaggatcaaaattaaaact

SEQ ID NO: 4295758 - DNA, 25 bp, Homo sapien
caaatgtcttttgcgagtttatgca

SEQ ID NO: 4295759 - DNA, 25 bp, Homo sapien
gatgtaatgtctgcaaaagaactgc

SEQ ID NO: 4295760 - DNA, 25 bp, Homo sapien
gatatttcccaaggttcaccccaga

SEQ ID NO: 4295761 - DNA, 25 bp, Homo sapien
ggtacacaaaaatctagaaccagac

SEQ ID NO: 4295762 - DNA, 25 bp, Homo sapien
ttcgtcttggctggctccggctgaa

SEQ ID NO: 4295763 - DNA, 25 bp, Homo sapien
acagtctggagagccttcgtcttgg

SEQ ID NO: 4295764 - DNA, 25 bp, Homo sapien
ctgaagttggcttcttcggtgcaat

SEQ ID NO: 4295765 - DNA, 25 bp, Homo sapien
ttcatttcgatgacagtctggagag

SEQ ID NO: 4295766 - DNA, 25 bp, Homo sapien
ctggggaggaacacgatagaaataa

SEQ ID NO: 4295767 - DNA, 25 bp, Homo sapien
gaggaacacgatagaaataagcctg

SEQ ID NO: 4295768 - DNA, 25 bp, Homo sapien
cgatagaaataagcctgacggttca

SEQ ID NO: 4295769 - DNA, 25 bp, Homo sapien
acacgatagaaataagcctgacggt

SEQ ID NO: 4295770 - DNA, 25 bp, Homo sapien
tgcaaatccgctgcacgcatggcat

SEQ ID NO: 4295771 - DNA, 25 bp, Homo sapien
gctaccgaggcaggtttgaaatgag

SEQ ID NO: 4295772 - DNA, 25 bp, Homo sapien
tttgaaatgagcagtttaaaaccat

SEQ ID NO: 4295773 - DNA, 25 bp, Homo sapien
ttaaaaccatttcagtacaactgtg

SEQ ID NO: 4295774 - DNA, 25 bp, Homo sapien
tccaggataagataagcaggcaatc

SEQ ID NO: 4295775 - DNA, 25 bp, Homo sapien
tcttacaggtggaccatagggcaca

SEQ ID NO: 4295776 - DNA, 25 bp, Homo sapien
cagtggcccaagaaatcttacaggt

SEQ ID NO: 4295777 - DNA, 25 bp, Homo sapien
taaaagctgtcagaacactcaagac

SEQ ID NO: 4295778 - DNA, 25 bp, Homo sapien
cacttcacctatctttgagatttga

SEQ ID NO: 4295779 - DNA, 25 bp, Homo sapien
gattctgaggctcatcttgattcct

SEQ ID NO: 4295780 - DNA, 25 bp, Homo sapien
tgtaatctatatccagacaacatgg

SEQ ID NO: 4295781 - DNA, 25 bp, Homo sapien
caatcctgacttcatagattctgag

SEQ ID NO: 4295782 - DNA, 25 bp, Homo sapien
cactgcaaggatccctgaggtgtct

SEQ ID NO: 4295783 - DNA, 25 bp, Homo sapien
tgaacacaacttgagggccaccctt

SEQ ID NO: 4295784 - DNA, 25 bp, Homo sapien
tctctcgagtacgtggagaaggcgt

SEQ ID NO: 4295785 - DNA, 25 bp, Homo sapien
gaatggcatatgaatcaacagcgtg

SEQ ID NO: 4295786 - DNA, 25 bp, Homo sapien
cctgaagaaggtgacccattggcct

SEQ ID NO: 4295787 - DNA, 25 bp, Homo sapien
gaatggagctaagcctgaagaaggt

SEQ ID NO: 4295788 - DNA, 25 bp, Homo sapien
gaaggtgacccattggcctcagtca

SEQ ID NO: 4295789 - DNA, 25 bp, Homo sapien
tgaattgtcttcaatgagaggggca

SEQ ID NO: 4295790 - DNA, 25 bp, Homo sapien
ttctctccccatcctatcttcacta

SEQ ID NO: 4295791 - DNA, 25 bp, Homo sapien
actaccatctccctaacatctgaca

SEQ ID NO: 4295792 - DNA, 25 bp, Homo sapien
ccatcctatcttcactaccatctcc

SEQ ID NO: 4295793 - DNA, 25 bp, Homo sapien
ccctaacatctgacacagctcccct

SEQ ID NO: 4295794 - DNA, 25 bp, Homo sapien
tctggatcagtttcagaaaggatgc

SEQ ID NO: 4295795 - DNA, 25 bp, Homo sapien
ttgcaaaaacataacttcttccagt

SEQ ID NO: 4295796 - DNA, 25 bp, Homo sapien
gtttggccatctttgtattccacca

SEQ ID NO: 4295797 - DNA, 25 bp, Homo sapien
aaatgctgccattaactcagagtca

SEQ ID NO: 4295798 - DNA, 25 bp, Homo sapien
cattaaaataacaaccgtcttgcca

SEQ ID NO: 4295799 - DNA, 25 bp, Homo sapien
ataacaaccgtcttgccagctgtgg

SEQ ID NO: 4295800 - DNA, 25 bp, Homo sapien
taccaccaggtcacaaaaccagatg

SEQ ID NO: 4295801 - DNA, 25 bp, Homo sapien
catggccaccgaaactaccaccagg

SEQ ID NO: 4295802 - DNA, 25 bp, Homo sapien
ttcaagttaacctgtgactgtaagt

SEQ ID NO: 4295803 - DNA, 25 bp, Homo sapien
tcaagttaacctgtgactgtaagtt

SEQ ID NO: 4295804 - DNA, 25 bp, Homo sapien
tttcaagttaacctgtgactgtaag

SEQ ID NO: 4295805 - DNA, 25 bp, Homo sapien
atttatcagatccagacaatgtggg

SEQ ID NO: 4295806 - DNA, 25 bp, Homo sapien
gatggcatttgtgttaagcgtaaac

SEQ ID NO: 4295807 - DNA, 25 bp, Homo sapien
gtagtaatttgatccccaaaatgca

SEQ ID NO: 4295808 - DNA, 25 bp, Homo sapien
tggcaacacagcaaagtcgactgta

SEQ ID NO: 4295809 - DNA, 25 bp, Homo sapien
gacaaactatttccaaggcttcact

SEQ ID NO: 4295810 - DNA, 25 bp, Homo sapien
aactatttccaaggcttcactagtt

SEQ ID NO: 4295811 - DNA, 25 bp, Homo sapien
caaactatttccaaggcttcactag

SEQ ID NO: 4295812 - DNA, 25 bp, Homo sapien
ctatttccaaggcttcactagtttt

SEQ ID NO: 4295813 - DNA, 25 bp, Homo sapien
tgagaggcacttagaacccctggaa

SEQ ID NO: 4295814 - DNA, 25 bp, Homo sapien
ccaagacgaaataggtgtttagtgt

SEQ ID NO: 4295815 - DNA, 25 bp, Homo sapien
aacttggactccagaccggagggtg

SEQ ID NO: 4295816 - DNA, 25 bp, Homo sapien
cccatgagagaatgaaccacagcct

SEQ ID NO: 4295817 - DNA, 25 bp, Homo sapien
ttcacacttgcccttattcaggcta

SEQ ID NO: 4295818 - DNA, 25 bp, Homo sapien
ttattcaggctaatttccacttcta

SEQ ID NO: 4295819 - DNA, 25 bp, Homo sapien
tctagaggaagctctttaccctcca

SEQ ID NO: 4295820 - DNA, 25 bp, Homo sapien
cacttctagaggaagctctttaccc

SEQ ID NO: 4295821 - DNA, 25 bp, Homo sapien
tctctaagtttccaatgagggcaca

SEQ ID NO: 4295822 - DNA, 25 bp, Homo sapien
atctctaagtttccaatgagggcac

SEQ ID NO: 4295823 - DNA, 25 bp, Homo sapien
agggcaacaaagcaaagagccacca

SEQ ID NO: 4295824 - DNA, 25 bp, Homo sapien
ggcaacaaagcaaagagccaccatg

SEQ ID NO: 4295825 - DNA, 25 bp, Homo sapien
ctctaagtcctctatgcaatacaca

SEQ ID NO: 4295826 - DNA, 25 bp, Homo sapien
ttctctctaagtcctctatgcaata

SEQ ID NO: 4295827 - DNA, 25 bp, Homo sapien
tggtcttccaagtaagttgagatca

SEQ ID NO: 4295828 - DNA, 25 bp, Homo sapien
gccttttccagaccaccaaaagaca

SEQ ID NO: 4295829 - DNA, 25 bp, Homo sapien
cctgccagacaaagaagtggtttca

SEQ ID NO: 4295830 - DNA, 25 bp, Homo sapien
tcagttggagttcctgcgcaatggt

SEQ ID NO: 4295831 - DNA, 25 bp, Homo sapien
tttactttctgcaaatctcatcccc

SEQ ID NO: 4295832 - DNA, 25 bp, Homo sapien
gatatttgataaacaactaaactga

SEQ ID NO: 4295833 - DNA, 25 bp, Homo sapien
tagtaccatacctaaaagactctga

SEQ ID NO: 4295834 - DNA, 25 bp, Homo sapien
actaaactgaatagtaccataccta

SEQ ID NO: 4295835 - DNA, 25 bp, Homo sapien
tttctgatctaaaatcacttccaag

SEQ ID NO: 4295836 - DNA, 25 bp, Homo sapien
tctctttctgatctaaaatcacttc

SEQ ID NO: 4295837 - DNA, 25 bp, Homo sapien
tggagccgcctaaagttctcctcgg

SEQ ID NO: 4295838 - DNA, 25 bp, Homo sapien
gaagggcctggattgtcaactgtag

SEQ ID NO: 4295839 - DNA, 25 bp, Homo sapien
tctcctcggtcagctcgatggtgaa

SEQ ID NO: 4295840 - DNA, 25 bp, Homo sapien
tggtgaagtgctccgctcctcggtt

SEQ ID NO: 4295841 - DNA, 25 bp, Homo sapien
ccacaggagtatccgcagccttcag

SEQ ID NO: 4295842 - DNA, 25 bp, Homo sapien
gctgtccttaaaccacattagaaca

SEQ ID NO: 4295843 - DNA, 25 bp, Homo sapien
gtccttaaaccacattagaacagag

SEQ ID NO: 4295844 - DNA, 25 bp, Homo sapien
acccgctgtccttaaaccacattag

SEQ ID NO: 4295845 - DNA, 25 bp, Homo sapien
tcctccttcaccctgcatggttgaa

SEQ ID NO: 4295846 - DNA, 25 bp, Homo sapien
ccttcaccctgcatggttgaatcag

SEQ ID NO: 4295847 - DNA, 25 bp, Homo sapien
ggccctggtgcagaggtgcactgat

SEQ ID NO: 4295848 - DNA, 25 bp, Homo sapien
tgcactgatggattatcacaggatc

SEQ ID NO: 4295849 - DNA, 25 bp, Homo sapien
gtgttcataaatggatgaacggata

SEQ ID NO: 4295850 - DNA, 25 bp, Homo sapien
tcttggtaaggatacggagaaattg

SEQ ID NO: 4295851 - DNA, 25 bp, Homo sapien
aagtgttcataaatggatgaacgga

SEQ ID NO: 4295852 - DNA, 25 bp, Homo sapien
acaatcctactctgggtatttatcc

SEQ ID NO: 4295853 - DNA, 25 bp, Homo sapien
caaacatattgcaataaattggtca

SEQ ID NO: 4295854 - DNA, 25 bp, Homo sapien
aacatattgcaataaattggtcaga

SEQ ID NO: 4295855 - DNA, 25 bp, Homo sapien
aaacatattgcaataaattggtcag

SEQ ID NO: 4295856 - DNA, 25 bp, Homo sapien
ccaaacatattgcaataaattggtc

SEQ ID NO: 4295857 - DNA, 25 bp, Homo sapien
agtgtaagggtagtcaaggcaacag

SEQ ID NO: 4295858 - DNA, 25 bp, Homo sapien
caacaggggcagcttgtgttaaggt

SEQ ID NO: 4295859 - DNA, 25 bp, Homo sapien
aagagaagtgtaagggtagtcaagg

SEQ ID NO: 4295860 - DNA, 25 bp, Homo sapien
agaagtgtaagggtagtcaaggcaa

SEQ ID NO: 4295861 - DNA, 25 bp, Homo sapien
ccttctgccccgcaactttcatttc

SEQ ID NO: 4295862 - DNA, 25 bp, Homo sapien
tctgccccgcaactttcatttcctg

SEQ ID NO: 4295863 - DNA, 25 bp, Homo sapien
tcccttctgccccgcaactttcatt

SEQ ID NO: 4295864 - DNA, 25 bp, Homo sapien
tgccccgcaactttcatttcctgaa

SEQ ID NO: 4295865 - DNA, 25 bp, Homo sapien
cttatgaaggtattttctgtagccc

SEQ ID NO: 4295866 - DNA, 25 bp, Homo sapien
gaggcttatgaaggtattttctgta

SEQ ID NO: 4295867 - DNA, 25 bp, Homo sapien
tatgaaggtattttctgtagcccat

SEQ ID NO: 4295868 - DNA, 25 bp, Homo sapien
ggcttatgaaggtattttctgtagc

SEQ ID NO: 4295869 - DNA, 25 bp, Homo sapien
cctgcataggcccaggctgactaca

SEQ ID NO: 4295870 - DNA, 25 bp, Homo sapien
cagtcagacctacagagtgtaccgc

SEQ ID NO: 4295871 - DNA, 25 bp, Homo sapien
tccacaggagaaagttacagggttg

SEQ ID NO: 4295872 - DNA, 25 bp, Homo sapien
tgacgtgggtctcacagactggcag

SEQ ID NO: 4295873 - DNA, 25 bp, Homo sapien
cttctgccctaattgtgcaaataat

SEQ ID NO: 4295874 - DNA, 25 bp, Homo sapien
tccaccagactccttctgccctaat

SEQ ID NO: 4295875 - DNA, 25 bp, Homo sapien
tcaaacgacatcatccttataatgt

SEQ ID NO: 4295876 - DNA, 25 bp, Homo sapien
tggataaagacaagccccataccgg

SEQ ID NO: 4295877 - DNA, 25 bp, Homo sapien
aagtcctcagataaaccagcccctt

SEQ ID NO: 4295878 - DNA, 25 bp, Homo sapien
gggtctactatccaagtcctcagat

SEQ ID NO: 4295879 - DNA, 25 bp, Homo sapien
gcttttgccagggtctactatccaa

SEQ ID NO: 4295880 - DNA, 25 bp, Homo sapien
tatccaagtcctcagataaaccagc

SEQ ID NO: 4295881 - DNA, 25 bp, Homo sapien
tttgctaatgcatccaagcccttgg

SEQ ID NO: 4295882 - DNA, 25 bp, Homo sapien
tcaccatgacaacactgtcgccttt

SEQ ID NO: 4295883 - DNA, 25 bp, Homo sapien
tataacctctctagttgagctcttc

SEQ ID NO: 4295884 - DNA, 25 bp, Homo sapien
ccttggactgccttcgaaaatgaca

SEQ ID NO: 4295885 - DNA, 25 bp, Homo sapien
ctaaatggttgagtgatgagaatgt

SEQ ID NO: 4295886 - DNA, 25 bp, Homo sapien
ggttgagtgatgagaatgttataag

SEQ ID NO: 4295887 - DNA, 25 bp, Homo sapien
ttgagtgatgagaatgttataagcg

SEQ ID NO: 4295888 - DNA, 25 bp, Homo sapien
gagtgatgagaatgttataagcgat

SEQ ID NO: 4295889 - DNA, 25 bp, Homo sapien
cagtctcactcatgggagatgttcc

SEQ ID NO: 4295890 - DNA, 25 bp, Homo sapien
tctcactcatgggagatgttccaaa

SEQ ID NO: 4295891 - DNA, 25 bp, Homo sapien
gaggttccccataccaacacttcaa

SEQ ID NO: 4295892 - DNA, 25 bp, Homo sapien
aataaatgctgaacgaggttcccca

SEQ ID NO: 4295893 - DNA, 25 bp, Homo sapien
tgtcataagaaggaggaggctgaat

SEQ ID NO: 4295894 - DNA, 25 bp, Homo sapien
aggaggaggctgaatttcctgctgt

SEQ ID NO: 4295895 - DNA, 25 bp, Homo sapien
aggaggctgaatttcctgctgtgcc

SEQ ID NO: 4295896 - DNA, 25 bp, Homo sapien
ctgtcataagaaggaggaggctgaa

SEQ ID NO: 4295897 - DNA, 25 bp, Homo sapien
catcttcccagtggattcttgaact

SEQ ID NO: 4295898 - DNA, 25 bp, Homo sapien
cagtggattcttgaacttaataaat

SEQ ID NO: 4295899 - DNA, 25 bp, Homo sapien
aatttctgcttggaaattttcctgg

SEQ ID NO: 4295900 - DNA, 25 bp, Homo sapien
tgcttggaaattttcctggaggcca

SEQ ID NO: 4295901 - DNA, 25 bp, Homo sapien
ggccagaggcggcacgtgacctcaa

SEQ ID NO: 4295902 - DNA, 25 bp, Homo sapien
cagaggcggcacgtgacctcaaagt

SEQ ID NO: 4295903 - DNA, 25 bp, Homo sapien
ctgcggctcccgtgaggcaccatgc

SEQ ID NO: 4295904 - DNA, 25 bp, Homo sapien
aggcctgcggctcccgtgaggcacc

SEQ ID NO: 4295905 - DNA, 25 bp, Homo sapien
aaattgtttcagcacgccggaaagt

SEQ ID NO: 4295906 - DNA, 25 bp, Homo sapien
ttcagcacgccggaaagtataatcc

SEQ ID NO: 4295907 - DNA, 25 bp, Homo sapien
agcacgccggaaagtataatcctca

SEQ ID NO: 4295908 - DNA, 25 bp, Homo sapien
agactgggccaaaaattgtttcagc

SEQ ID NO: 4295909 - DNA, 25 bp, Homo sapien
acagcaggtatggccatcttgggtc

SEQ ID NO: 4295910 - DNA, 25 bp, Homo sapien
cgcacagcaggtatggccatcttgg

SEQ ID NO: 4295911 - DNA, 25 bp, Homo sapien
tgcttggggtcagcgcacagcaggt

SEQ ID NO: 4295912 - DNA, 25 bp, Homo sapien
cttggggtcagcgcacagcaggtat

SEQ ID NO: 4295913 - DNA, 25 bp, Homo sapien
cactacatgtcctacaatgagggta

SEQ ID NO: 4295914 - DNA, 25 bp, Homo sapien
taagtagggttcaagattagcacca

SEQ ID NO: 4295915 - DNA, 25 bp, Homo sapien
tgtggctcagaattgtccagggcag

SEQ ID NO: 4295916 - DNA, 25 bp, Homo sapien
tagccattcctaagcagctcatctg

SEQ ID NO: 4295917 - DNA, 25 bp, Homo sapien
tacgtttcccaatgaccttgtccca

SEQ ID NO: 4295918 - DNA, 25 bp, Homo sapien
cgtttcccaatgaccttgtcccact

SEQ ID NO: 4295919 - DNA, 25 bp, Homo sapien
ccttagatctggagttgggttcagc

SEQ ID NO: 4295920 - DNA, 25 bp, Homo sapien
cagctcccttagacagaaccatgag

SEQ ID NO: 4295921 - DNA, 25 bp, Homo sapien
gaaactgatgagcaggagccctcga

SEQ ID NO: 4295922 - DNA, 25 bp, Homo sapien
ggacttcaaaatctactgccaagaa

SEQ ID NO: 4295923 - DNA, 25 bp, Homo sapien
agaaggaggtacatctgaacagctg

SEQ ID NO: 4295924 - DNA, 25 bp, Homo sapien
aaatgtggcccactaaatgttgctc

SEQ ID NO: 4295925 - DNA, 25 bp, Homo sapien
tctgctacttagagaacaacttcac

SEQ ID NO: 4295926 - DNA, 25 bp, Homo sapien
gaaataatggtgctggtgcttcaaa

SEQ ID NO: 4295927 - DNA, 25 bp, Homo sapien
gatcactcagatacatgggtccaga

SEQ ID NO: 4295928 - DNA, 25 bp, Homo sapien
tgtagcccttcccagagtcatagtg

SEQ ID NO: 4295929 - DNA, 25 bp, Homo sapien
cagctgggcctgaagatctaacatt

SEQ ID NO: 4295930 - DNA, 25 bp, Homo sapien
gatgtctagctctttccggaggagg

SEQ ID NO: 4295931 - DNA, 25 bp, Homo sapien
gcattcttttcacagtccgtaccag

SEQ ID NO: 4295932 - DNA, 25 bp, Homo sapien
taccagaaaataactccactcagag

SEQ ID NO: 4295933 - DNA, 25 bp, Homo sapien
ctgaagagaagaaatgctatattaa

SEQ ID NO: 4295934 - DNA, 25 bp, Homo sapien
gagctaatatttccacgattgtcca

SEQ ID NO: 4295935 - DNA, 25 bp, Homo sapien
agttttcttcccgcttgtctgcctc

SEQ ID NO: 4295936 - DNA, 25 bp, Homo sapien
aagagttttcttcccgcttgtctgc

SEQ ID NO: 4295937 - DNA, 25 bp, Homo sapien
gttttcttcccgcttgtctgcctct

SEQ ID NO: 4295938 - DNA, 25 bp, Homo sapien
tcaaagagttttcttcccgcttgtc

SEQ ID NO: 4295939 - DNA, 25 bp, Homo sapien
cggagccggagaccgagcgagcagg

SEQ ID NO: 4295940 - DNA, 25 bp, Homo sapien
atttttacaacctctcgtcgccttg

SEQ ID NO: 4295941 - DNA, 25 bp, Homo sapien
tcgccttggccccgggcggccagga

SEQ ID NO: 4295942 - DNA, 25 bp, Homo sapien
ggagccggagaccgagcgagcagga

SEQ ID NO: 4295943 - DNA, 25 bp, Homo sapien
cttgaatcttgtctgcatttccatc

SEQ ID NO: 4295944 - DNA, 25 bp, Homo sapien
ttgtctgcatttccatccatgcaga

SEQ ID NO: 4295945 - DNA, 25 bp, Homo sapien
gtctgcatttccatccatgcagata

SEQ ID NO: 4295946 - DNA, 25 bp, Homo sapien
atcttgtctgcatttccatccatgc

SEQ ID NO: 4295947 - DNA, 25 bp, Homo sapien
ttaaagagctgggtgctagccagga

SEQ ID NO: 4295948 - DNA, 25 bp, Homo sapien
attctgttgtccagggctgtatacc

SEQ ID NO: 4295949 - DNA, 25 bp, Homo sapien
taaagagctgggtgctagccaggaa

SEQ ID NO: 4295950 - DNA, 25 bp, Homo sapien
tgtataccgcttccaccttccaagt

SEQ ID NO: 4295951 - DNA, 25 bp, Homo sapien
cagcatgtgctgagtaagaggttcg

SEQ ID NO: 4295952 - DNA, 25 bp, Homo sapien
tagactgacactgagtcagcacgtt

SEQ ID NO: 4295953 - DNA, 25 bp, Homo sapien
gcacgttgagtcttactggtatccc

SEQ ID NO: 4295954 - DNA, 25 bp, Homo sapien
gaggttcggagctgctttaattccc

SEQ ID NO: 4295955 - DNA, 25 bp, Homo sapien
gccaggtctctagatctgacaggag

SEQ ID NO: 4295956 - DNA, 25 bp, Homo sapien
gagagtcctcaagcctccaagagac

SEQ ID NO: 4295957 - DNA, 25 bp, Homo sapien
cagcatcctggacaatggttgagag

SEQ ID NO: 4295958 - DNA, 25 bp, Homo sapien
taaattgtacacctgagatgagagc

SEQ ID NO: 4295959 - DNA, 25 bp, Homo sapien
gcggcggcaaccgacgtacacaagg

SEQ ID NO: 4295960 - DNA, 25 bp, Homo sapien
ctatatccaattggcgtagcgcttg

SEQ ID NO: 4295961 - DNA, 25 bp, Homo sapien
ccaattggcgtagcgcttgctgagc

SEQ ID NO: 4295962 - DNA, 25 bp, Homo sapien
cgacgtacacaaggggcttgagcgt

SEQ ID NO: 4295963 - DNA, 25 bp, Homo sapien
tacgggtttgaaagctatctccact

SEQ ID NO: 4295964 - DNA, 25 bp, Homo sapien
tatagtctggcgttgctgggacctc

SEQ ID NO: 4295965 - DNA, 25 bp, Homo sapien
taaatcaaggattgcgcaggtactg

SEQ ID NO: 4295966 - DNA, 25 bp, Homo sapien
tggaacggcaaaacatcaataaggc

SEQ ID NO: 4295967 - DNA, 25 bp, Homo sapien
tcaactgttacaggccatcatgatt

SEQ ID NO: 4295968 - DNA, 25 bp, Homo sapien
gttacaggccatcatgatttaaata

SEQ ID NO: 4295969 - DNA, 25 bp, Homo sapien
aatttttagatgcttcaactgttac

SEQ ID NO: 4295970 - DNA, 25 bp, Homo sapien
gcttcaactgttacaggccatcatg

SEQ ID NO: 4295971 - DNA, 25 bp, Homo sapien
tatatgtgagatttcatcccctgaa

SEQ ID NO: 4295972 - DNA, 25 bp, Homo sapien
tgatctgttccacgtgatcctttgg

SEQ ID NO: 4295973 - DNA, 25 bp, Homo sapien
cacatcaggagacgattgcaactca

SEQ ID NO: 4295974 - DNA, 25 bp, Homo sapien
tgatgaaagggcatatggtgtcccc

SEQ ID NO: 4295975 - DNA, 25 bp, Homo sapien
cacacaatataacgcgtcagggtct

SEQ ID NO: 4295976 - DNA, 25 bp, Homo sapien
tagatgtgaatgtccagataatccg

SEQ ID NO: 4295977 - DNA, 25 bp, Homo sapien
ggtcttctgccacaagttcacttag

SEQ ID NO: 4295978 - DNA, 25 bp, Homo sapien
aaagcttctgcgaaatgtgttcacg

SEQ ID NO: 4295979 - DNA, 25 bp, Homo sapien
aacttacaacttacactggctacag

SEQ ID NO: 4295980 - DNA, 25 bp, Homo sapien
gaggtacgtggtttcaaaatggtca

SEQ ID NO: 4295981 - DNA, 25 bp, Homo sapien
tcttgaaacactttccctatggctg

SEQ ID NO: 4295982 - DNA, 25 bp, Homo sapien
tcaatgctaaatcgccatatctggt

SEQ ID NO: 4295983 - DNA, 25 bp, Homo sapien
gattgaattgtgatagcccacaaga

SEQ ID NO: 4295984 - DNA, 25 bp, Homo sapien
tagcaccaagctgtggaaggttttc

SEQ ID NO: 4295985 - DNA, 25 bp, Homo sapien
ccattatctgtataactggaaagca

SEQ ID NO: 4295986 - DNA, 25 bp, Homo sapien
tcttcagcagttgcaaccactattc

SEQ ID NO: 4295987 - DNA, 25 bp, Homo sapien
agcccctagccctcacaaaatcttt

SEQ ID NO: 4295988 - DNA, 25 bp, Homo sapien
acacttcaaaatatagacagcccct

SEQ ID NO: 4295989 - DNA, 25 bp, Homo sapien
aaaatatagacagcccctagccctc

SEQ ID NO: 4295990 - DNA, 25 bp, Homo sapien
ttcaaaatatagacagcccctagcc

SEQ ID NO: 4295991 - DNA, 25 bp, Homo sapien
tagacattcagaagcgtcaacagac

SEQ ID NO: 4295992 - DNA, 25 bp, Homo sapien
gttgctgtatgttctgagcctgaag

SEQ ID NO: 4295993 - DNA, 25 bp, Homo sapien
cctgaagtctgataaggcaatccaa

SEQ ID NO: 4295994 - DNA, 25 bp, Homo sapien
tccaattctggagcatttcgagttt

SEQ ID NO: 4295995 - DNA, 25 bp, Homo sapien
gcttaggctaaaatctcagctgatt

SEQ ID NO: 4295996 - DNA, 25 bp, Homo sapien
cactgaggcaactaatgacaactgc

SEQ ID NO: 4295997 - DNA, 25 bp, Homo sapien
gcctcagggccagctatacagctta

SEQ ID NO: 4295998 - DNA, 25 bp, Homo sapien
ctggatctgtacttctaaaatttag

SEQ ID NO: 4295999 - DNA, 25 bp, Homo sapien
gaaatttacagtggactttccattg

SEQ ID NO: 4296000 - DNA, 25 bp, Homo sapien
aaatttacagtggactttccattgc

SEQ ID NO: 4296001 - DNA, 25 bp, Homo sapien
tcagatacgataaaacctccagata

SEQ ID NO: 4296002 - DNA, 25 bp, Homo sapien
cctctgggtttagaattgattcatc

SEQ ID NO: 4296003 - DNA, 25 bp, Homo sapien
catccaggctatcaacaccagcaaa

SEQ ID NO: 4296004 - DNA, 25 bp, Homo sapien
tgattcatcagatacgataaaacct

SEQ ID NO: 4296005 - DNA, 25 bp, Homo sapien
gttcaggatgacattctgtattgcc

SEQ ID NO: 4296006 - DNA, 25 bp, Homo sapien
aaaaactgttcaggatgacattctg

SEQ ID NO: 4296007 - DNA, 25 bp, Homo sapien
tgaatgaaacctgcaatgtcttcat

SEQ ID NO: 4296008 - DNA, 25 bp, Homo sapien
tgacattctgtattgcctaatttga

SEQ ID NO: 4296009 - DNA, 25 bp, Homo sapien
ttcttctactggttcccgggccata

SEQ ID NO: 4296010 - DNA, 25 bp, Homo sapien
caaaggatcactacacagtggctca

SEQ ID NO: 4296011 - DNA, 25 bp, Homo sapien
agaagtcaccattaactctgtggca

SEQ ID NO: 4296012 - DNA, 25 bp, Homo sapien
taaagccgaagtggaatgctgctca

SEQ ID NO: 4296013 - DNA, 25 bp, Homo sapien
cttagcaccagaatcgttaggactg

SEQ ID NO: 4296014 - DNA, 25 bp, Homo sapien
tgaggaaactggtatgacatgcctt

SEQ ID NO: 4296015 - DNA, 25 bp, Homo sapien
tccagaggattcgatgctatcttag

SEQ ID NO: 4296016 - DNA, 25 bp, Homo sapien
ccagaatcgttaggactgactggtg

SEQ ID NO: 4296017 - DNA, 25 bp, Homo sapien
tgtggtttcgctcactgcaggcggc

SEQ ID NO: 4296018 - DNA, 25 bp, Homo sapien
gattgtactctcctaacactgtcct

SEQ ID NO: 4296019 - DNA, 25 bp, Homo sapien
tcatcctcagtggtgccctttagtg

SEQ ID NO: 4296020 - DNA, 25 bp, Homo sapien
tatatgaactcggaaagccgtttca

SEQ ID NO: 4296021 - DNA, 25 bp, Homo sapien
agttgttcttctggtgatttcatac

SEQ ID NO: 4296022 - DNA, 25 bp, Homo sapien
gatggaaactggtaatcagaacttc

SEQ ID NO: 4296023 - DNA, 25 bp, Homo sapien
tggtggcacacacaccagttgttct

SEQ ID NO: 4296024 - DNA, 25 bp, Homo sapien
cttctctgtctatttattacccggg

SEQ ID NO: 4296025 - DNA, 25 bp, Homo sapien
gtaatatctactatggtaatggccc

SEQ ID NO: 4296026 - DNA, 25 bp, Homo sapien
gacagtcaattacatcagcttgctc

SEQ ID NO: 4296027 - DNA, 25 bp, Homo sapien
taatggccccttagtaagaattctg

SEQ ID NO: 4296028 - DNA, 25 bp, Homo sapien
tgttctcacttacgaggttgctaag

SEQ ID NO: 4296029 - DNA, 25 bp, Homo sapien
aagattttgctcacactcatcacac

SEQ ID NO: 4296030 - DNA, 25 bp, Homo sapien
tgaagattttgctcacactcatcac

SEQ ID NO: 4296031 - DNA, 25 bp, Homo sapien
gaagattttgctcacactcatcaca

SEQ ID NO: 4296032 - DNA, 25 bp, Homo sapien
tgcagagaagttgaatccaccaaga

SEQ ID NO: 4296033 - DNA, 25 bp, Homo sapien
aaacaatgcctatgaccatctgcag

SEQ ID NO: 4296034 - DNA, 25 bp, Homo sapien
taggtacccactgccaactagctaa

SEQ ID NO: 4296035 - DNA, 25 bp, Homo sapien
aaatatactgcacaaatggcttagg

SEQ ID NO: 4296036 - DNA, 25 bp, Homo sapien
ccagctggtcttctgggcttcttgc

SEQ ID NO: 4296037 - DNA, 25 bp, Homo sapien
ggtgtttgtttctcaccatgtttcc

SEQ ID NO: 4296038 - DNA, 25 bp, Homo sapien
tggtgtttgtttctcaccatgtttc

SEQ ID NO: 4296039 - DNA, 25 bp, Homo sapien
ctggtcttctgggcttcttgcattc

SEQ ID NO: 4296040 - DNA, 25 bp, Homo sapien
tattcacgctaattaaatttggatc

SEQ ID NO: 4296041 - DNA, 25 bp, Homo sapien
tgggacacaaactgcaatcttcaaa

SEQ ID NO: 4296042 - DNA, 25 bp, Homo sapien
tgacttagactgttgtctacgaaat

SEQ ID NO: 4296043 - DNA, 25 bp, Homo sapien
tccatgttcaatgggaacactggga

SEQ ID NO: 4296044 - DNA, 25 bp, Homo sapien
caaatgtagcttatggtcagtgccc

SEQ ID NO: 4296045 - DNA, 25 bp, Homo sapien
ttcaaatgtagcttatggtcagtgc

SEQ ID NO: 4296046 - DNA, 25 bp, Homo sapien
tcaaatgtagcttatggtcagtgcc

SEQ ID NO: 4296047 - DNA, 25 bp, Homo sapien
aaatgtagcttatggtcagtgccca

SEQ ID NO: 4296048 - DNA, 25 bp, Homo sapien
cagcaatgccggagttacaggtatc

SEQ ID NO: 4296049 - DNA, 25 bp, Homo sapien
caacttttgcacaagtaggctgctc

SEQ ID NO: 4296050 - DNA, 25 bp, Homo sapien
taaacagcctatggatgtcagcaat

SEQ ID NO: 4296051 - DNA, 25 bp, Homo sapien
catgtccaagtgagccaataggctg

SEQ ID NO: 4296052 - DNA, 25 bp, Homo sapien
tcatgcatgcactataaatctgtat

SEQ ID NO: 4296053 - DNA, 25 bp, Homo sapien
gaaagtcatgtgctttaatattggg

SEQ ID NO: 4296054 - DNA, 25 bp, Homo sapien
agaggaaacacgttaagacatggtt

SEQ ID NO: 4296055 - DNA, 25 bp, Homo sapien
taaagggcgcaaacattcagaaagt

SEQ ID NO: 4296056 - DNA, 25 bp, Homo sapien
gctttccagatataatggcttcacc

SEQ ID NO: 4296057 - DNA, 25 bp, Homo sapien
ttttcaggtagatcctcaagcttcc

SEQ ID NO: 4296058 - DNA, 25 bp, Homo sapien
gaaagtggactaaactgctgaagtt

SEQ ID NO: 4296059 - DNA, 25 bp, Homo sapien
taggtaactgatacacttcaggccg

SEQ ID NO: 4296060 - DNA, 25 bp, Homo sapien
ttctgggagctgagtataagaattt

SEQ ID NO: 4296061 - DNA, 25 bp, Homo sapien
tatcatctaatcgtgaatcatatgg

SEQ ID NO: 4296062 - DNA, 25 bp, Homo sapien
ttttatcatctaatcgtgaatcata

SEQ ID NO: 4296063 - DNA, 25 bp, Homo sapien
tctaatcgtgaatcatatggaaaca

SEQ ID NO: 4296064 - DNA, 25 bp, Homo sapien
gaattcctttcgacactgaatcaaa

SEQ ID NO: 4296065 - DNA, 25 bp, Homo sapien
gaatgaaaatttatggcgcttatat

SEQ ID NO: 4296066 - DNA, 25 bp, Homo sapien
ctcctgtggtgctgcattggttgaa

SEQ ID NO: 4296067 - DNA, 25 bp, Homo sapien
taatacatctggcatgctctcatgc

SEQ ID NO: 4296068 - DNA, 25 bp, Homo sapien
gcttctaggttcttgaaatagaaac

SEQ ID NO: 4296069 - DNA, 25 bp, Homo sapien
actatgcttctaggttcttgaaata

SEQ ID NO: 4296070 - DNA, 25 bp, Homo sapien
caaagcatgtaggactcgagacttg

SEQ ID NO: 4296071 - DNA, 25 bp, Homo sapien
tagaaacaaagcatgtaggactcga

SEQ ID NO: 4296072 - DNA, 25 bp, Homo sapien
catatggaggaaccatctgataagg

SEQ ID NO: 4296073 - DNA, 25 bp, Homo sapien
cagaggcttcagcagttatatctgt

SEQ ID NO: 4296074 - DNA, 25 bp, Homo sapien
caacactaaggctgacagaggcttc

SEQ ID NO: 4296075 - DNA, 25 bp, Homo sapien
aaatccatggagtacaagcaatcta

SEQ ID NO: 4296076 - DNA, 25 bp, Homo sapien
atatctgtggcttcagcccaatgaa

SEQ ID NO: 4296077 - DNA, 25 bp, Homo sapien
taggcatactaagagactaacgaca

SEQ ID NO: 4296078 - DNA, 25 bp, Homo sapien
tcaacttcttagtacagatcctaga

SEQ ID NO: 4296079 - DNA, 25 bp, Homo sapien
gatcctagactgcacattaacatgg

SEQ ID NO: 4296080 - DNA, 25 bp, Homo sapien
tgcagaagatatattacaagacccc

SEQ ID NO: 4296081 - DNA, 25 bp, Homo sapien
acaacttcataaaggctgcaataca

SEQ ID NO: 4296082 - DNA, 25 bp, Homo sapien
ggctgcaatacattccattcttcaa

SEQ ID NO: 4296083 - DNA, 25 bp, Homo sapien
taaaggctgcaatacattccattct

SEQ ID NO: 4296084 - DNA, 25 bp, Homo sapien
ttcataaaggctgcaatacattcca

SEQ ID NO: 4296085 - DNA, 25 bp, Homo sapien
tataaaacagtgctggagggatttt

SEQ ID NO: 4296086 - DNA, 25 bp, Homo sapien
ttccttataaaacagtgctggaggg

SEQ ID NO: 4296087 - DNA, 25 bp, Homo sapien
tctgtttcagatgatcaatactcat

SEQ ID NO: 4296088 - DNA, 25 bp, Homo sapien
aaacagtgctggagggattttctgt

SEQ ID NO: 4296089 - DNA, 25 bp, Homo sapien
ctgtttcaacatctaatttctcagg

SEQ ID NO: 4296090 - DNA, 25 bp, Homo sapien
actgtttcaacatctaatttctcag

SEQ ID NO: 4296091 - DNA, 25 bp, Homo sapien
aactgtttcaacatctaatttctca

SEQ ID NO: 4296092 - DNA, 25 bp, Homo sapien
tgtttcaacatctaatttctcaggt

SEQ ID NO: 4296093 - DNA, 25 bp, Homo sapien
agctgtcctttccacaaggtatagt

SEQ ID NO: 4296094 - DNA, 25 bp, Homo sapien
gtcctttccacaaggtatagttata

SEQ ID NO: 4296095 - DNA, 25 bp, Homo sapien
agtttgataggcaaaaaagcacgag

SEQ ID NO: 4296096 - DNA, 25 bp, Homo sapien
aaaagcacgagtggctgacctcaga

SEQ ID NO: 4296097 - DNA, 25 bp, Homo sapien
tctatctgtattaaagctgttagat

SEQ ID NO: 4296098 - DNA, 25 bp, Homo sapien
ggaatattcaaggtacaaggatgga

SEQ ID NO: 4296099 - DNA, 25 bp, Homo sapien
gagagaacagtgtccaccaaagtct

SEQ ID NO: 4296100 - DNA, 25 bp, Homo sapien
tgctgacattagaagacacagcctc

SEQ ID NO: 4296101 - DNA, 25 bp, Homo sapien
caaggatggatgttcactcaatgct

SEQ ID NO: 4296102 - DNA, 25 bp, Homo sapien
aacttcggagtttgtatatcatctt

SEQ ID NO: 4296103 - DNA, 25 bp, Homo sapien
cttgatgaaggtacaaacttcggag

SEQ ID NO: 4296104 - DNA, 25 bp, Homo sapien
gacacaactgcatatggacaaacgt

SEQ ID NO: 4296105 - DNA, 25 bp, Homo sapien
gacaaacgtgtcttggtcttcgcct

SEQ ID NO: 4296106 - DNA, 25 bp, Homo sapien
taaacagagcctaagctcccaggtc

SEQ ID NO: 4296107 - DNA, 25 bp, Homo sapien
tctaagtgcgtaagatcccagagta

SEQ ID NO: 4296108 - DNA, 25 bp, Homo sapien
tgggctccaattgcaaacaaagtag

SEQ ID NO: 4296109 - DNA, 25 bp, Homo sapien
ctgaagagttgaccaccgggagttt

SEQ ID NO: 4296110 - DNA, 25 bp, Homo sapien
tgcatgtttctgagacatctcagaa

SEQ ID NO: 4296111 - DNA, 25 bp, Homo sapien
actgcatgtttctgagacatctcag

SEQ ID NO: 4296112 - DNA, 25 bp, Homo sapien
cactgcatgtttctgagacatctca

SEQ ID NO: 4296113 - DNA, 25 bp, Homo sapien
ctgtaaccttgaagacccactgcat

SEQ ID NO: 4296114 - DNA, 25 bp, Homo sapien
acaggtatgagatcacaacattaca

SEQ ID NO: 4296115 - DNA, 25 bp, Homo sapien
cacaacattacaacggatcctggaa

SEQ ID NO: 4296116 - DNA, 25 bp, Homo sapien
tatgagatcacaacattacaacgga

SEQ ID NO: 4296117 - DNA, 25 bp, Homo sapien
cattacaacggatcctggaacctac

SEQ ID NO: 4296118 - DNA, 25 bp, Homo sapien
gctctgtaagccaaaagtgatgtaa

SEQ ID NO: 4296119 - DNA, 25 bp, Homo sapien
agctcataggctctgtaagccaaaa

SEQ ID NO: 4296120 - DNA, 25 bp, Homo sapien
tctttgacacgtgacattcatgctt

SEQ ID NO: 4296121 - DNA, 25 bp, Homo sapien
tgtaattcgattggcattctttgac

SEQ ID NO: 4296122 - DNA, 25 bp, Homo sapien
ggggtcatatatactctttatttta

SEQ ID NO: 4296123 - DNA, 25 bp, Homo sapien
gggtcatatatactctttattttac

SEQ ID NO: 4296124 - DNA, 25 bp, Homo sapien
ggtcatatatactctttattttacc

SEQ ID NO: 4296125 - DNA, 25 bp, Homo sapien
gaatatagatcaactatcccaacca

SEQ ID NO: 4296126 - DNA, 25 bp, Homo sapien
tttaatatctcacagaacagctggg

SEQ ID NO: 4296127 - DNA, 25 bp, Homo sapien
agtgtctacctaaacctaattgttg

SEQ ID NO: 4296128 - DNA, 25 bp, Homo sapien
aatacttctttgaatatagatcaac

SEQ ID NO: 4296129 - DNA, 25 bp, Homo sapien
ccccgtgtccaaaggattcgcttgt

SEQ ID NO: 4296130 - DNA, 25 bp, Homo sapien
cattgcccccgtgtccaaaggattc

SEQ ID NO: 4296131 - DNA, 25 bp, Homo sapien
aataacaacatcacccattgccccc

SEQ ID NO: 4296132 - DNA, 25 bp, Homo sapien
caaaggattcgcttgtaataaatca

SEQ ID NO: 4296133 - DNA, 25 bp, Homo sapien
ccatggaaggactgccaagaattgt

SEQ ID NO: 4296134 - DNA, 25 bp, Homo sapien
tgttattttggactgacccacatgt

SEQ ID NO: 4296135 - DNA, 25 bp, Homo sapien
caagaattgttattttggactgacc

SEQ ID NO: 4296136 - DNA, 25 bp, Homo sapien
ttggactgacccacatgtaatcctt

SEQ ID NO: 4296137 - DNA, 25 bp, Homo sapien
tgtaattgtaaagaatactgttgaa

SEQ ID NO: 4296138 - DNA, 25 bp, Homo sapien
ttagtaacttacaatggaaacatcc

SEQ ID NO: 4296139 - DNA, 25 bp, Homo sapien
aatactgttgaataatcacaaaatt

SEQ ID NO: 4296140 - DNA, 25 bp, Homo sapien
cattttgccccattaaatcatgtat

SEQ ID NO: 4296141 - DNA, 25 bp, Homo sapien
tatctaaacgaccatcaaacttcag

SEQ ID NO: 4296142 - DNA, 25 bp, Homo sapien
aacttcagttctcttcgcttttctg

SEQ ID NO: 4296143 - DNA, 25 bp, Homo sapien
atgcataggattctgaaagttcctt

SEQ ID NO: 4296144 - DNA, 25 bp, Homo sapien
ggtatcgatcaaccatcagaaatgc

SEQ ID NO: 4296145 - DNA, 25 bp, Homo sapien
gtaccaagcaagcacgtctgtagtt

SEQ ID NO: 4296146 - DNA, 25 bp, Homo sapien
ctgaggttggttcaaggtaagaaga

SEQ ID NO: 4296147 - DNA, 25 bp, Homo sapien
tctcgagagcctggagttaatggct

SEQ ID NO: 4296148 - DNA, 25 bp, Homo sapien
tccaaaagctcattgtgtaccaagc

SEQ ID NO: 4296149 - DNA, 25 bp, Homo sapien
tcttgagaattactggtctagtaac

SEQ ID NO: 4296150 - DNA, 25 bp, Homo sapien
gaattactggtctagtaacctcaaa

SEQ ID NO: 4296151 - DNA, 25 bp, Homo sapien
ggtctagtaacctcaaatttccatc

SEQ ID NO: 4296152 - DNA, 25 bp, Homo sapien
tactggtctagtaacctcaaatttc

SEQ ID NO: 4296153 - DNA, 25 bp, Homo sapien
ttactaatacacctaaaagtctata

SEQ ID NO: 4296154 - DNA, 25 bp, Homo sapien
ttcactgtagagagaactactcata

SEQ ID NO: 4296155 - DNA, 25 bp, Homo sapien
agagagaactactcatagaaactat

SEQ ID NO: 4296156 - DNA, 25 bp, Homo sapien
ctaatacacctaaaagtctatacat

SEQ ID NO: 4296157 - DNA, 25 bp, Homo sapien
ggtaacctattgattgtaagctcca

SEQ ID NO: 4296158 - DNA, 25 bp, Homo sapien
gaatgtaacagtcaaaacaggtcac

SEQ ID NO: 4296159 - DNA, 25 bp, Homo sapien
cagtagctagacctgtgagtgccag

SEQ ID NO: 4296160 - DNA, 25 bp, Homo sapien
tagcagacgaatatgctcggtaacc

SEQ ID NO: 4296161 - DNA, 25 bp, Homo sapien
tcctcagaggtcatttaacactaca

SEQ ID NO: 4296162 - DNA, 25 bp, Homo sapien
atttcaagtcaacttgctgctaaca

SEQ ID NO: 4296163 - DNA, 25 bp, Homo sapien
taacactacatgtatctcgatcaat

SEQ ID NO: 4296164 - DNA, 25 bp, Homo sapien
tatctcgatcaatgtatcctgtcac

SEQ ID NO: 4296165 - DNA, 25 bp, Homo sapien
ttcttcacagtaagatcttttttta

SEQ ID NO: 4296166 - DNA, 25 bp, Homo sapien
tctacaatttggttaaattctataa

SEQ ID NO: 4296167 - DNA, 25 bp, Homo sapien
taatttggttaaatgtaagaatcat

SEQ ID NO: 4296168 - DNA, 25 bp, Homo sapien
gcaatagtgaaacatctaccaacaa

SEQ ID NO: 4296169 - DNA, 25 bp, Homo sapien
gaaacatctaccaacaaaatgcaat

SEQ ID NO: 4296170 - DNA, 25 bp, Homo sapien
gggacaacagctagatttatatttc

SEQ ID NO: 4296171 - DNA, 25 bp, Homo sapien
aagtccactgcgatatattttcctc

SEQ ID NO: 4296172 - DNA, 25 bp, Homo sapien
tttacccaagaggtacaagactatg

SEQ ID NO: 4296173 - DNA, 25 bp, Homo sapien
cagctggtgttcagggtataaataa

SEQ ID NO: 4296174 - DNA, 25 bp, Homo sapien
tttgaagagtttctaggccaatctt

SEQ ID NO: 4296175 - DNA, 25 bp, Homo sapien
attttgaagagtttctaggccaatc

SEQ ID NO: 4296176 - DNA, 25 bp, Homo sapien
tgaagagtttctaggccaatcttct

SEQ ID NO: 4296177 - DNA, 25 bp, Homo sapien
ttttgaagagtttctaggccaatct

SEQ ID NO: 4296178 - DNA, 25 bp, Homo sapien
gtataatgctacagccaagactctg

SEQ ID NO: 4296179 - DNA, 25 bp, Homo sapien
catacagtagggcaaaaaggaagtt

SEQ ID NO: 4296180 - DNA, 25 bp, Homo sapien
caagactctgtaccagatggatgga

SEQ ID NO: 4296181 - DNA, 25 bp, Homo sapien
tagtgcaaatggaactggtgatgct

SEQ ID NO: 4296182 - DNA, 25 bp, Homo sapien
taatgtaactgtttccatatgggtt

SEQ ID NO: 4296183 - DNA, 25 bp, Homo sapien
caagtaattaatgtaactgtttcca

SEQ ID NO: 4296184 - DNA, 25 bp, Homo sapien
caatatggcattaagattttttaaa

SEQ ID NO: 4296185 - DNA, 25 bp, Homo sapien
taattaatgtaactgtttccatatg

SEQ ID NO: 4296186 - DNA, 25 bp, Homo sapien
aaaacagcagtgtgcatggatcaca

SEQ ID NO: 4296187 - DNA, 25 bp, Homo sapien
tatttaatctaacgcttcaaaaaca

SEQ ID NO: 4296188 - DNA, 25 bp, Homo sapien
gagatttctaaataagggaggacgc

SEQ ID NO: 4296189 - DNA, 25 bp, Homo sapien
agcacatttcaagtagacacacaga

SEQ ID NO: 4296190 - DNA, 25 bp, Homo sapien
tccttaggaggacacaacggcttct

SEQ ID NO: 4296191 - DNA, 25 bp, Homo sapien
tcagaagcatccttaggaggacaca

SEQ ID NO: 4296192 - DNA, 25 bp, Homo sapien
gaatccatggccacgggctatttcc

SEQ ID NO: 4296193 - DNA, 25 bp, Homo sapien
tccatagcgagacttctcagaagca

SEQ ID NO: 4296194 - DNA, 25 bp, Homo sapien
tgggagctgcagccttacggacaag

SEQ ID NO: 4296195 - DNA, 25 bp, Homo sapien
ggaggggcgccgagcaccatctttc

SEQ ID NO: 4296196 - DNA, 25 bp, Homo sapien
gggcgccgagcaccatctttcctct

SEQ ID NO: 4296197 - DNA, 25 bp, Homo sapien
ggagctgcagccttacggacaagct

SEQ ID NO: 4296198 - DNA, 25 bp, Homo sapien
ctgagctacttccaacttccgcggg

SEQ ID NO: 4296199 - DNA, 25 bp, Homo sapien
caggggagcgtggttccaccgcttt

SEQ ID NO: 4296200 - DNA, 25 bp, Homo sapien
gggcagcaggggagcgtggttccac

SEQ ID NO: 4296201 - DNA, 25 bp, Homo sapien
agcgtggttccaccgctttctctcg

SEQ ID NO: 4296202 - DNA, 25 bp, Homo sapien
tgcgtgtttacgtatctcggatggg

SEQ ID NO: 4296203 - DNA, 25 bp, Homo sapien
cggccggcgctgcatgcgtgtttac

SEQ ID NO: 4296204 - DNA, 25 bp, Homo sapien
gctgcatgcgtgtttacgtatctcg

SEQ ID NO: 4296205 - DNA, 25 bp, Homo sapien
tgtttacgtatctcggatgggtgtg

SEQ ID NO: 4296206 - DNA, 25 bp, Homo sapien
gggagagagagagggggttgagaag

SEQ ID NO: 4296207 - DNA, 25 bp, Homo sapien
ctaatgaaaagatggaggggagaga

SEQ ID NO: 4296208 - DNA, 25 bp, Homo sapien
taatgaaaagatggaggggagagag

SEQ ID NO: 4296209 - DNA, 25 bp, Homo sapien
agagagagggggttgagaagaaggg

SEQ ID NO: 4296210 - DNA, 25 bp, Homo sapien
tgggctcagcgatgttgaggccgcc

SEQ ID NO: 4296211 - DNA, 25 bp, Homo sapien
tctgaaaactcctcctaacaggcct

SEQ ID NO: 4296212 - DNA, 25 bp, Homo sapien
actcaagctccggaagcgcctgctt

SEQ ID NO: 4296213 - DNA, 25 bp, Homo sapien
cattttgttgggaggactcaagctc

SEQ ID NO: 4296214 - DNA, 25 bp, Homo sapien
ggctgacaggcctccgtctccacag

SEQ ID NO: 4296215 - DNA, 25 bp, Homo sapien
ccgccgccactttcccaactcgcat

SEQ ID NO: 4296216 - DNA, 25 bp, Homo sapien
aactcgcatccgtcggctgacaggc

SEQ ID NO: 4296217 - DNA, 25 bp, Homo sapien
cactttcccaactcgcatccgtcgg

SEQ ID NO: 4296218 - DNA, 25 bp, Homo sapien
tgcgcgagtgcggaaataccgcgcc

SEQ ID NO: 4296219 - DNA, 25 bp, Homo sapien
tctgcccacaaggtcgacgggtgtg

SEQ ID NO: 4296220 - DNA, 25 bp, Homo sapien
gggccactccaccaatgggagcgcg

SEQ ID NO: 4296221 - DNA, 25 bp, Homo sapien
ctgtagcgggcaccccaaatgcgct

SEQ ID NO: 4296222 - DNA, 25 bp, Homo sapien
tcccataggccaacacttgacaaac

SEQ ID NO: 4296223 - DNA, 25 bp, Homo sapien
ggcttctaaaagtggctgatggcgc

SEQ ID NO: 4296224 - DNA, 25 bp, Homo sapien
gcttctaaaagtggctgatggcgcc

SEQ ID NO: 4296225 - DNA, 25 bp, Homo sapien
tcaaaacattcattgaccaccttcc

SEQ ID NO: 4296226 - DNA, 25 bp, Homo sapien
tctgcagcaggttcacttgctgtat

SEQ ID NO: 4296227 - DNA, 25 bp, Homo sapien
cttgctgtatcaataacgacttgag

SEQ ID NO: 4296228 - DNA, 25 bp, Homo sapien
gtctgcagcaggttcacttgctgta

SEQ ID NO: 4296229 - DNA, 25 bp, Homo sapien
tatcaataacgacttgagaaagcag

SEQ ID NO: 4296230 - DNA, 25 bp, Homo sapien
taatatttacacttgcagggagctc

SEQ ID NO: 4296231 - DNA, 25 bp, Homo sapien
aattgacgacccaaaagcagagcag

SEQ ID NO: 4296232 - DNA, 25 bp, Homo sapien
cctgcactgtaaatcaaggctggac

SEQ ID NO: 4296233 - DNA, 25 bp, Homo sapien
cagggagctcttctaggtacttagc

SEQ ID NO: 4296234 - DNA, 25 bp, Homo sapien
tacagatacgagagactgggccaac

SEQ ID NO: 4296235 - DNA, 25 bp, Homo sapien
ttacaaggccgtctaaattccgtgc

SEQ ID NO: 4296236 - DNA, 25 bp, Homo sapien
ttaggctagcaaccaactatgagag

SEQ ID NO: 4296237 - DNA, 25 bp, Homo sapien
tacacagacagattggcagttacag

SEQ ID NO: 4296238 - DNA, 25 bp, Homo sapien
tgtctgttccatgcgctcacagtcg

SEQ ID NO: 4296239 - DNA, 25 bp, Homo sapien
ccatgcgctcacagtcgaggctgac

SEQ ID NO: 4296240 - DNA, 25 bp, Homo sapien
acaggaagagtctgtctgttccatg

SEQ ID NO: 4296241 - DNA, 25 bp, Homo sapien
gagtctgtctgttccatgcgctcac

SEQ ID NO: 4296242 - DNA, 25 bp, Homo sapien
ctcgtgtccatactacagtctgact

SEQ ID NO: 4296243 - DNA, 25 bp, Homo sapien
ctcactcgtgtccatactacagtct

SEQ ID NO: 4296244 - DNA, 25 bp, Homo sapien
cactcgtgtccatactacagtctga

SEQ ID NO: 4296245 - DNA, 25 bp, Homo sapien
cgtgtccatactacagtctgactca

SEQ ID NO: 4296246 - DNA, 25 bp, Homo sapien
gaaagtgtcattggcttgtagcgag

SEQ ID NO: 4296247 - DNA, 25 bp, Homo sapien
taggaacgatccctcggagtcaagc

SEQ ID NO: 4296248 - DNA, 25 bp, Homo sapien
ttgcccggcagcacacaaaactgtt

SEQ ID NO: 4296249 - DNA, 25 bp, Homo sapien
ttgacgaatacagttaagccactgc

SEQ ID NO: 4296250 - DNA, 25 bp, Homo sapien
gacccaatctggctgcataacaaaa

SEQ ID NO: 4296251 - DNA, 25 bp, Homo sapien
tacacttagtatccaatgatggaga

SEQ ID NO: 4296252 - DNA, 25 bp, Homo sapien
gcaatatagtgacgccttttctcaa

SEQ ID NO: 4296253 - DNA, 25 bp, Homo sapien
tcaacaagtacaccaagctggagct

SEQ ID NO: 4296254 - DNA, 25 bp, Homo sapien
cacttccaatggcttagaggctaag

SEQ ID NO: 4296255 - DNA, 25 bp, Homo sapien
tggacatttaaagggccctgcgtgc

SEQ ID NO: 4296256 - DNA, 25 bp, Homo sapien
cacatgcaatgcttggttcacagaa

SEQ ID NO: 4296257 - DNA, 25 bp, Homo sapien
taaccctgcagccagtagactggga

SEQ ID NO: 4296258 - DNA, 25 bp, Homo sapien
tggtagcaaagctgctcattgtggg

SEQ ID NO: 4296259 - DNA, 25 bp, Homo sapien
tgacggctcgagtgatcacaagcac

SEQ ID NO: 4296260 - DNA, 25 bp, Homo sapien
ggtcttccagcaggaggtctttcac

SEQ ID NO: 4296261 - DNA, 25 bp, Homo sapien
ggctgacggtacagctggtagcaaa

SEQ ID NO: 4296262 - DNA, 25 bp, Homo sapien
aaagaagccgctctttataatagcg

SEQ ID NO: 4296263 - DNA, 25 bp, Homo sapien
tataatagcggcattcagattcacc

SEQ ID NO: 4296264 - DNA, 25 bp, Homo sapien
tgtcgatcagggagtctttctggcc

SEQ ID NO: 4296265 - DNA, 25 bp, Homo sapien
caccatgacaacacaagactcgaga

SEQ ID NO: 4296266 - DNA, 25 bp, Homo sapien
gacagaagatcttacagctttgagc

SEQ ID NO: 4296267 - DNA, 25 bp, Homo sapien
tcttatggagagatgcacaatctgt

SEQ ID NO: 4296268 - DNA, 25 bp, Homo sapien
tgagctgaagtttggtgaatgtatc

SEQ ID NO: 4296269 - DNA, 25 bp, Homo sapien
taaaatgatattgtctgccaaaagc

SEQ ID NO: 4296270 - DNA, 25 bp, Homo sapien
gaatatcatgagaatcttatctctc

SEQ ID NO: 4296271 - DNA, 25 bp, Homo sapien
acctgaatatcatgagaatcttatc

SEQ ID NO: 4296272 - DNA, 25 bp, Homo sapien
tatcatgagaatcttatctctctgc

SEQ ID NO: 4296273 - DNA, 25 bp, Homo sapien
cctgaatatcatgagaatcttatct

SEQ ID NO: 4296274 - DNA, 25 bp, Homo sapien
tctggtcccttgtgccatgatactc

SEQ ID NO: 4296275 - DNA, 25 bp, Homo sapien
tgtctggtcccttgtgccatgatac

SEQ ID NO: 4296276 - DNA, 25 bp, Homo sapien
ctgtctggtcccttgtgccatgata

SEQ ID NO: 4296277 - DNA, 25 bp, Homo sapien
gtctggtcccttgtgccatgatact

SEQ ID NO: 4296278 - DNA, 25 bp, Homo sapien
ccagagatctagtttgcggctaaag

SEQ ID NO: 4296279 - DNA, 25 bp, Homo sapien
accaggcggcttcttggaatatcga

SEQ ID NO: 4296280 - DNA, 25 bp, Homo sapien
tttgtggtccagcagagctttggcg

SEQ ID NO: 4296281 - DNA, 25 bp, Homo sapien
gctttggcggctacttgattgctgc

SEQ ID NO: 4296282 - DNA, 25 bp, Homo sapien
gtgctctcacctgacagggtgctca

SEQ ID NO: 4296283 - DNA, 25 bp, Homo sapien
agggtgctcatttcctgggcatgac

SEQ ID NO: 4296284 - DNA, 25 bp, Homo sapien
aaaggctatctggttcagtcaccgg

SEQ ID NO: 4296285 - DNA, 25 bp, Homo sapien
tcctgggcatgacctgaaaggctat

SEQ ID NO: 4296286 - DNA, 25 bp, Homo sapien
ctccggttggctggctctctttgga

SEQ ID NO: 4296287 - DNA, 25 bp, Homo sapien
ctctgtctgtctccggttggctggc

SEQ ID NO: 4296288 - DNA, 25 bp, Homo sapien
gtctgtctccggttggctggctctc

SEQ ID NO: 4296289 - DNA, 25 bp, Homo sapien
gtctctgtctgtctccggttggctg

SEQ ID NO: 4296290 - DNA, 25 bp, Homo sapien
cagcccacgaggatgggaccaacat

SEQ ID NO: 4296291 - DNA, 25 bp, Homo sapien
aacatgttcagtcgagccatcaggc

SEQ ID NO: 4296292 - DNA, 25 bp, Homo sapien
taacatctcgaagctgactaaggag

SEQ ID NO: 4296293 - DNA, 25 bp, Homo sapien
tcaggcttcctaacatctcgaagct

SEQ ID NO: 4296294 - DNA, 25 bp, Homo sapien
cttcatgtagaggaattagagagtc

SEQ ID NO: 4296295 - DNA, 25 bp, Homo sapien
aatttgattcaactcttgttctgtc

SEQ ID NO: 4296296 - DNA, 25 bp, Homo sapien
gagagtttcagcatggggtcatgat

SEQ ID NO: 4296297 - DNA, 25 bp, Homo sapien
aaatttgattcaactcttgttctgt

SEQ ID NO: 4296298 - DNA, 25 bp, Homo sapien
agtcttctatcaagtcttcttctcc

SEQ ID NO: 4296299 - DNA, 25 bp, Homo sapien
ttctatcaagtcttcttctccttgg

SEQ ID NO: 4296300 - DNA, 25 bp, Homo sapien
tttcaagtcttctatcaagtcttct

SEQ ID NO: 4296301 - DNA, 25 bp, Homo sapien
ctccttgggaaagctcaaagatcgc

SEQ ID NO: 4296302 - DNA, 25 bp, Homo sapien
tatctctccgtttcgtgctcgaggg

SEQ ID NO: 4296303 - DNA, 25 bp, Homo sapien
tctcactgcggaagctaatggagcg

SEQ ID NO: 4296304 - DNA, 25 bp, Homo sapien
tgtaagcatctgattgacgcacaca

SEQ ID NO: 4296305 - DNA, 25 bp, Homo sapien
gacgcacacatcgaaggtctcactc

SEQ ID NO: 4296306 - DNA, 25 bp, Homo sapien
gagccactgtgtccggccatagctg

SEQ ID NO: 4296307 - DNA, 25 bp, Homo sapien
agccactgtgtccggccatagctgg

SEQ ID NO: 4296308 - DNA, 25 bp, Homo sapien
ccactgtgtccggccatagctggct

SEQ ID NO: 4296309 - DNA, 25 bp, Homo sapien
gccactgtgtccggccatagctggc

SEQ ID NO: 4296310 - DNA, 25 bp, Homo sapien
gcgcctggccgagaatgttttctct

SEQ ID NO: 4296311 - DNA, 25 bp, Homo sapien
gcctggccgagaatgttttctcttt

SEQ ID NO: 4296312 - DNA, 25 bp, Homo sapien
acagtatcttgaggtgaaatttaca

SEQ ID NO: 4296313 - DNA, 25 bp, Homo sapien
tttctacttgacagtatcttgaggt

SEQ ID NO: 4296314 - DNA, 25 bp, Homo sapien
cccttctgtagcttggagatattct

SEQ ID NO: 4296315 - DNA, 25 bp, Homo sapien
taagaagaaacacggtcagttgacg

SEQ ID NO: 4296316 - DNA, 25 bp, Homo sapien
gaacactgagttagaaatggtgcaa

SEQ ID NO: 4296317 - DNA, 25 bp, Homo sapien
tcagttgacgaacatgaaagacaat

SEQ ID NO: 4296318 - DNA, 25 bp, Homo sapien
gaagaactggtcacaagggagaaaa

SEQ ID NO: 4296319 - DNA, 25 bp, Homo sapien
gggatgcctgcgatgaacttgtcga

SEQ ID NO: 4296320 - DNA, 25 bp, Homo sapien
gaggtctgacaatcaaggaaggaaa

SEQ ID NO: 4296321 - DNA, 25 bp, Homo sapien
caataatgggaagagatggctggta

SEQ ID NO: 4296322 - DNA, 25 bp, Homo sapien
ttgctagcgacgtgactcgggaaag

SEQ ID NO: 4296323 - DNA, 25 bp, Homo sapien
gatgaggtttgctagcgacgtgact

SEQ ID NO: 4296324 - DNA, 25 bp, Homo sapien
ctttaatggcgtggccttcacgggc

SEQ ID NO: 4296325 - DNA, 25 bp, Homo sapien
ttgactgaagcgctttaatggcgtg

SEQ ID NO: 4296326 - DNA, 25 bp, Homo sapien
tcaaagtttcgagggttaaggcaga

SEQ ID NO: 4296327 - DNA, 25 bp, Homo sapien
aactctcagaacactaggaaggctc

SEQ ID NO: 4296328 - DNA, 25 bp, Homo sapien
tccaagacggagaatgcaaccaggc

SEQ ID NO: 4296329 - DNA, 25 bp, Homo sapien
aatgtggccagaaacgattccatga

SEQ ID NO: 4296330 - DNA, 25 bp, Homo sapien
taaggtgctatgaggaaaagatccc

SEQ ID NO: 4296331 - DNA, 25 bp, Homo sapien
cacaggaacgtagggcacatatgca

SEQ ID NO: 4296332 - DNA, 25 bp, Homo sapien
gactttgacaaaccaccaggaactg

SEQ ID NO: 4296333 - DNA, 25 bp, Homo sapien
tgttaatgagggaacagggacagcc

SEQ ID NO: 4296334 - DNA, 25 bp, Homo sapien
accctgaaacgaataggctgtagag

SEQ ID NO: 4296335 - DNA, 25 bp, Homo sapien
ccctgaaacgaataggctgtagagg

SEQ ID NO: 4296336 - DNA, 25 bp, Homo sapien
ctgaaacgaataggctgtagaggca

SEQ ID NO: 4296337 - DNA, 25 bp, Homo sapien
cctgaaacgaataggctgtagaggc

SEQ ID NO: 4296338 - DNA, 25 bp, Homo sapien
ggcattcaagccctatcactctgga

SEQ ID NO: 4296339 - DNA, 25 bp, Homo sapien
tgctaagggcacacttgaggactgg

SEQ ID NO: 4296340 - DNA, 25 bp, Homo sapien
tcagggagcctattggatgaccact

SEQ ID NO: 4296341 - DNA, 25 bp, Homo sapien
tgagcccaggttcaaaggtgtcccg

SEQ ID NO: 4296342 - DNA, 25 bp, Homo sapien
tgctctctccttcaaagctctcaga

SEQ ID NO: 4296343 - DNA, 25 bp, Homo sapien
tctcagataagtcaccaccaaacat

SEQ ID NO: 4296344 - DNA, 25 bp, Homo sapien
gctctctccttcaaagctctcagat

SEQ ID NO: 4296345 - DNA, 25 bp, Homo sapien
gactccacatttccaaatctgacag

SEQ ID NO: 4296346 - DNA, 25 bp, Homo sapien
tttctgccactagcttgttcccttt

SEQ ID NO: 4296347 - DNA, 25 bp, Homo sapien
attttgcccccctcggccatctggc

SEQ ID NO: 4296348 - DNA, 25 bp, Homo sapien
ctttctgtagcgtcttcctctagga

SEQ ID NO: 4296349 - DNA, 25 bp, Homo sapien
ccctggaggtgttaagcagagattg

SEQ ID NO: 4296350 - DNA, 25 bp, Homo sapien
tacaacctgaaatgttgtccctgga

SEQ ID NO: 4296351 - DNA, 25 bp, Homo sapien
cctggaggtgttaagcagagattga

SEQ ID NO: 4296352 - DNA, 25 bp, Homo sapien
ggccaactgtatacaacctgaaatg

SEQ ID NO: 4296353 - DNA, 25 bp, Homo sapien
ctcagactggagtggcgctcggctc

SEQ ID NO: 4296354 - DNA, 25 bp, Homo sapien
caccacactgggcatgacacagcct

SEQ ID NO: 4296355 - DNA, 25 bp, Homo sapien
gacacagcctcttctaaactagtta

SEQ ID NO: 4296356 - DNA, 25 bp, Homo sapien
gctcagactggagtggcgctcggct

SEQ ID NO: 4296357 - DNA, 25 bp, Homo sapien
ggctgcaaggccaagtctgacaggt

SEQ ID NO: 4296358 - DNA, 25 bp, Homo sapien
ctgacaggtgagagggctggtacgt

SEQ ID NO: 4296359 - DNA, 25 bp, Homo sapien
agagggctggtacgtccctctgctc

SEQ ID NO: 4296360 - DNA, 25 bp, Homo sapien
cgctgtgtcctgtttttgctgccaa

SEQ ID NO: 4296361 - DNA, 25 bp, Homo sapien
ggcttgctgacagtaggagaaagtc

SEQ ID NO: 4296362 - DNA, 25 bp, Homo sapien
aactcgcttaaagggtagcgacact

SEQ ID NO: 4296363 - DNA, 25 bp, Homo sapien
gctgacagtaggagaaagtccctct

SEQ ID NO: 4296364 - DNA, 25 bp, Homo sapien
tcgcttaaagggtagcgacactggg

SEQ ID NO: 4296365 - DNA, 25 bp, Homo sapien
tcccagaccggcaggtagagggaca

SEQ ID NO: 4296366 - DNA, 25 bp, Homo sapien
ggaggcagctagtgcttggtccaca

SEQ ID NO: 4296367 - DNA, 25 bp, Homo sapien
gagacagtgacactggacgggcgcc

SEQ ID NO: 4296368 - DNA, 25 bp, Homo sapien
agacgagacaggcagatgacccata

SEQ ID NO: 4296369 - DNA, 25 bp, Homo sapien
ttcgctctcttgaccgtgaggtaga

SEQ ID NO: 4296370 - DNA, 25 bp, Homo sapien
ctcagcgtccttggccggaccgctg

SEQ ID NO: 4296371 - DNA, 25 bp, Homo sapien
tcgctctcttgaccgtgaggtagaa

SEQ ID NO: 4296372 - DNA, 25 bp, Homo sapien
cgtccttggccggaccgctggccgg

SEQ ID NO: 4296373 - DNA, 25 bp, Homo sapien
acggagaccgacagccggcttctag

SEQ ID NO: 4296374 - DNA, 25 bp, Homo sapien
ttctagccgggcaggactcgactgg

SEQ ID NO: 4296375 - DNA, 25 bp, Homo sapien
cctaggcgactacaaaactcccagg

SEQ ID NO: 4296376 - DNA, 25 bp, Homo sapien
ctgggctccggagccgagtgggcgg

SEQ ID NO: 4296377 - DNA, 25 bp, Homo sapien
gggccgccggctcggcaccgcccca

SEQ ID NO: 4296378 - DNA, 25 bp, Homo sapien
gccgccggctcggcaccgccccacg

SEQ ID NO: 4296379 - DNA, 25 bp, Homo sapien
gggcgggccgccggctcggcaccgc

SEQ ID NO: 4296380 - DNA, 25 bp, Homo sapien
gcgggccgccggctcggcaccgccc

SEQ ID NO: 4296381 - DNA, 25 bp, Homo sapien
ccgctggtattcgactccgggcgcc

SEQ ID NO: 4296382 - DNA, 25 bp, Homo sapien
tgggccgcgattgcggggcaggcag

SEQ ID NO: 4296383 - DNA, 25 bp, Homo sapien
ctctctccccgctggtattcgactc

SEQ ID NO: 4296384 - DNA, 25 bp, Homo sapien
tctccccgctggtattcgactccgg

SEQ ID NO: 4296385 - DNA, 25 bp, Homo sapien
ggcactctccgggtgaaaggctgct

SEQ ID NO: 4296386 - DNA, 25 bp, Homo sapien
gatagctcctttcgggctctttggc

SEQ ID NO: 4296387 - DNA, 25 bp, Homo sapien
gggctctttggcactctccgggtga

SEQ ID NO: 4296388 - DNA, 25 bp, Homo sapien
ctctccgggtgaaaggctgctggta

SEQ ID NO: 4296389 - DNA, 25 bp, Homo sapien
cgggcaacggggagaaaggaggctg

SEQ ID NO: 4296390 - DNA, 25 bp, Homo sapien
aaaggaggctgtagtgacacctgga

SEQ ID NO: 4296391 - DNA, 25 bp, Homo sapien
ctgtagtgacacctggaggcaggaa

SEQ ID NO: 4296392 - DNA, 25 bp, Homo sapien
ggcaacggggagaaaggaggctgta

SEQ ID NO: 4296393 - DNA, 25 bp, Homo sapien
gggtaaatagcattgaacactgtct

SEQ ID NO: 4296394 - DNA, 25 bp, Homo sapien
gtggctgaagggaggcacctgggtt

SEQ ID NO: 4296395 - DNA, 25 bp, Homo sapien
atagtgaacaaaagggacttaagct

SEQ ID NO: 4296396 - DNA, 25 bp, Homo sapien
cttaagcttatagctcatgttttaa

SEQ ID NO: 4296397 - DNA, 25 bp, Homo sapien
aagagggctgttctgcatttgcagg

SEQ ID NO: 4296398 - DNA, 25 bp, Homo sapien
ttcacagccgggcagtgttccttgc

SEQ ID NO: 4296399 - DNA, 25 bp, Homo sapien
tcagaacttgccttcggcatagccc

SEQ ID NO: 4296400 - DNA, 25 bp, Homo sapien
catttgcaggaactgtgccaagcac

SEQ ID NO: 4296401 - DNA, 25 bp, Homo sapien
ttcagcaggataaccacaggtaaac

SEQ ID NO: 4296402 - DNA, 25 bp, Homo sapien
ctctttcagcaggataaccacaggt

SEQ ID NO: 4296403 - DNA, 25 bp, Homo sapien
gcaggataaccacaggtaaacctcc

SEQ ID NO: 4296404 - DNA, 25 bp, Homo sapien
ctttcagcaggataaccacaggtaa

SEQ ID NO: 4296405 - DNA, 25 bp, Homo sapien
tcacggcagtcacttacaagctgag

SEQ ID NO: 4296406 - DNA, 25 bp, Homo sapien
actttctccatcacggcagtcactt

SEQ ID NO: 4296407 - DNA, 25 bp, Homo sapien
gtcacttacaagctgagtagctgaa

SEQ ID NO: 4296408 - DNA, 25 bp, Homo sapien
tctccatcacggcagtcacttacaa

SEQ ID NO: 4296409 - DNA, 25 bp, Homo sapien
gcttctatagactgcttcccagctg

SEQ ID NO: 4296410 - DNA, 25 bp, Homo sapien
ggcccatgcatcaccagtcaaatgt

SEQ ID NO: 4296411 - DNA, 25 bp, Homo sapien
aactactagtaagtccaccctgaga

SEQ ID NO: 4296412 - DNA, 25 bp, Homo sapien
tcttggatcttattgcttgggacct

SEQ ID NO: 4296413 - DNA, 25 bp, Homo sapien
tttttcaattccactacttggctca

SEQ ID NO: 4296414 - DNA, 25 bp, Homo sapien
aattccactacttggctcaaagggc

SEQ ID NO: 4296415 - DNA, 25 bp, Homo sapien
caattccactacttggctcaaaggg

SEQ ID NO: 4296416 - DNA, 25 bp, Homo sapien
ttcaattccactacttggctcaaag

SEQ ID NO: 4296417 - DNA, 25 bp, Homo sapien
tcatttcgtgctcagaagctggcaa

SEQ ID NO: 4296418 - DNA, 25 bp, Homo sapien
gatctgcctttatgagtggtctcta

SEQ ID NO: 4296419 - DNA, 25 bp, Homo sapien
gcaatgcggcagaaataaagcacct

SEQ ID NO: 4296420 - DNA, 25 bp, Homo sapien
ctgtaaggaagagcgataccagggc

SEQ ID NO: 4296421 - DNA, 25 bp, Homo sapien
tctctaggcccacaatgaaaaggca

SEQ ID NO: 4296422 - DNA, 25 bp, Homo sapien
tgaacctagggaatttggcactgga

SEQ ID NO: 4296423 - DNA, 25 bp, Homo sapien
tctgcctgaaaaaccgatagcactc

SEQ ID NO: 4296424 - DNA, 25 bp, Homo sapien
ggtctgatagctatacaatgacaga

SEQ ID NO: 4296425 - DNA, 25 bp, Homo sapien
ggtgaagcaatacatacaaggtctg

SEQ ID NO: 4296426 - DNA, 25 bp, Homo sapien
tgccagaagctggttcatttctcat

SEQ ID NO: 4296427 - DNA, 25 bp, Homo sapien
cagaagctggttcatttctcatttc

SEQ ID NO: 4296428 - DNA, 25 bp, Homo sapien
ttgccagaagctggttcatttctca

SEQ ID NO: 4296429 - DNA, 25 bp, Homo sapien
gccagaagctggttcatttctcatt

SEQ ID NO: 4296430 - DNA, 25 bp, Homo sapien
cgagtaaaacaagctaaacacacag

SEQ ID NO: 4296431 - DNA, 25 bp, Homo sapien
tgggttagtatgaccggtgccctgc

SEQ ID NO: 4296432 - DNA, 25 bp, Homo sapien
tagtatgaccggtgccctgcgtcat

SEQ ID NO: 4296433 - DNA, 25 bp, Homo sapien
gagactaaagatggtgggttagtat

SEQ ID NO: 4296434 - DNA, 25 bp, Homo sapien
gagctgaccagcaaaatcgtccctt

SEQ ID NO: 4296435 - DNA, 25 bp, Homo sapien
ccctgcaggattgctaaggagttaa

SEQ ID NO: 4296436 - DNA, 25 bp, Homo sapien
tgatattttgaggtacgtgaggagt

SEQ ID NO: 4296437 - DNA, 25 bp, Homo sapien
cagtctgttgggaataaacccattc

SEQ ID NO: 4296438 - DNA, 25 bp, Homo sapien
gtgaccactgaagataagcccgtga

SEQ ID NO: 4296439 - DNA, 25 bp, Homo sapien
aatgtttcaccttcaatatcagtca

SEQ ID NO: 4296440 - DNA, 25 bp, Homo sapien
cactgaagataagcccgtgatttcg

SEQ ID NO: 4296441 - DNA, 25 bp, Homo sapien
taagcccgtgatttcgtttcaaatg

SEQ ID NO: 4296442 - DNA, 25 bp, Homo sapien
gagaaaccacctgctcatactgagt

SEQ ID NO: 4296443 - DNA, 25 bp, Homo sapien
gaatttcagtgtccgtcaagtaatg

SEQ ID NO: 4296444 - DNA, 25 bp, Homo sapien
taaaatgatcagcacatcgcagggt

SEQ ID NO: 4296445 - DNA, 25 bp, Homo sapien
taagatcaagggcaaaagtcaacat

SEQ ID NO: 4296446 - DNA, 25 bp, Homo sapien
tatgcctgcccgatctcaattttta

SEQ ID NO: 4296447 - DNA, 25 bp, Homo sapien
catcaaactccgcaaagcaaaggtt

SEQ ID NO: 4296448 - DNA, 25 bp, Homo sapien
tatatgctctttagggatacatgtc

SEQ ID NO: 4296449 - DNA, 25 bp, Homo sapien
tcagttgcattggtagctacatggg

SEQ ID NO: 4296450 - DNA, 25 bp, Homo sapien
tgagtagcccacagaggccatttac

SEQ ID NO: 4296451 - DNA, 25 bp, Homo sapien
tcctgagtgcctactgggagaaagt

SEQ ID NO: 4296452 - DNA, 25 bp, Homo sapien
taatactgccagttagctcagggac

SEQ ID NO: 4296453 - DNA, 25 bp, Homo sapien
taatggtcagcggaatctgcagaac

SEQ ID NO: 4296454 - DNA, 25 bp, Homo sapien
acttatgtcgagactgcaaaggcta

SEQ ID NO: 4296455 - DNA, 25 bp, Homo sapien
ttatgtcgagactgcaaaggctaac

SEQ ID NO: 4296456 - DNA, 25 bp, Homo sapien
cttatgtcgagactgcaaaggctaa

SEQ ID NO: 4296457 - DNA, 25 bp, Homo sapien
gtgcatttgcacacttggtctgaca

SEQ ID NO: 4296458 - DNA, 25 bp, Homo sapien
cctgttattcttgtcaaatttactg

SEQ ID NO: 4296459 - DNA, 25 bp, Homo sapien
ttgcacacttggtctgacaggttcc

SEQ ID NO: 4296460 - DNA, 25 bp, Homo sapien
tgaggagccaaggacccaccctgtt

SEQ ID NO: 4296461 - DNA, 25 bp, Homo sapien
catccacaataatactgggaacctg

SEQ ID NO: 4296462 - DNA, 25 bp, Homo sapien
tactccatgtaaacaatcagcttag

SEQ ID NO: 4296463 - DNA, 25 bp, Homo sapien
tcacttggctcgtgttcccgctttc

SEQ ID NO: 4296464 - DNA, 25 bp, Homo sapien
cagcttagattgtccaactgcataa

SEQ ID NO: 4296465 - DNA, 25 bp, Homo sapien
acaacaccccatgggttcatgaaca

SEQ ID NO: 4296466 - DNA, 25 bp, Homo sapien
ggttcatgaacagttccccaaatgc

SEQ ID NO: 4296467 - DNA, 25 bp, Homo sapien
taatgtcttatcagccacaacaccc

SEQ ID NO: 4296468 - DNA, 25 bp, Homo sapien
ctggtaatgtcttatcagccacaac

SEQ ID NO: 4296469 - DNA, 25 bp, Homo sapien
ggcagcacgaatggcctgatgccct

SEQ ID NO: 4296470 - DNA, 25 bp, Homo sapien
ttaggaattgtgcctcagcatgagg

SEQ ID NO: 4296471 - DNA, 25 bp, Homo sapien
agctggcggcagcacgaatggcctg

SEQ ID NO: 4296472 - DNA, 25 bp, Homo sapien
taggaattgtgcctcagcatgaggg

SEQ ID NO: 4296473 - DNA, 25 bp, Homo sapien
gatgtaagtatcagctgttttcttc

SEQ ID NO: 4296474 - DNA, 25 bp, Homo sapien
cctggagcaaagatgtaagtatcag

SEQ ID NO: 4296475 - DNA, 25 bp, Homo sapien
catcatagccctcttgtgcttagaa

SEQ ID NO: 4296476 - DNA, 25 bp, Homo sapien
tgtatttctgcttaacgacacctta

SEQ ID NO: 4296477 - DNA, 25 bp, Homo sapien
gcctgaaagaagcttatctaacgtg

SEQ ID NO: 4296478 - DNA, 25 bp, Homo sapien
gacaccataactcaagcctgaaaga

SEQ ID NO: 4296479 - DNA, 25 bp, Homo sapien
gagacacaaagatacttcaggcagg

SEQ ID NO: 4296480 - DNA, 25 bp, Homo sapien
tcagcttaatgcctcagactgggcc

SEQ ID NO: 4296481 - DNA, 25 bp, Homo sapien
tatagtagagcactgaagcgggcac

SEQ ID NO: 4296482 - DNA, 25 bp, Homo sapien
tgtgagcagaccagagaaggagact

SEQ ID NO: 4296483 - DNA, 25 bp, Homo sapien
agcaccacaccatggggcgctctga

SEQ ID NO: 4296484 - DNA, 25 bp, Homo sapien
cacaccatggggcgctctgacctca

SEQ ID NO: 4296485 - DNA, 25 bp, Homo sapien
accacaccatggggcgctctgacct

SEQ ID NO: 4296486 - DNA, 25 bp, Homo sapien
caccatggggcgctctgacctcatc

SEQ ID NO: 4296487 - DNA, 25 bp, Homo sapien
ctgaacagggctgagcatagtttcc

SEQ ID NO: 4296488 - DNA, 25 bp, Homo sapien
tgaacagggctgagcatagtttccc

SEQ ID NO: 4296489 - DNA, 25 bp, Homo sapien
aagcaatgtgaagcatcccatcggc

SEQ ID NO: 4296490 - DNA, 25 bp, Homo sapien
aaagcaatgtgaagcatcccatcgg

SEQ ID NO: 4296491 - DNA, 25 bp, Homo sapien
agcaatgtgaagcatcccatcggct

SEQ ID NO: 4296492 - DNA, 25 bp, Homo sapien
caaaagcaatgtgaagcatcccatc

SEQ ID NO: 4296493 - DNA, 25 bp, Homo sapien
acagaaggagattaaatccaagact

SEQ ID NO: 4296494 - DNA, 25 bp, Homo sapien
tgtctcaagcctgagtaaagtctgg

SEQ ID NO: 4296495 - DNA, 25 bp, Homo sapien
ggctctttccattcacgttgccaga

SEQ ID NO: 4296496 - DNA, 25 bp, Homo sapien
caagcttccggtctaacagaaggag

SEQ ID NO: 4296497 - DNA, 25 bp, Homo sapien
cagaagcaagaactcccggattgaa

SEQ ID NO: 4296498 - DNA, 25 bp, Homo sapien
ggcacttcaagaggagaatttcaat

SEQ ID NO: 4296499 - DNA, 25 bp, Homo sapien
gtaagaggctctgatccgcaaggtc

SEQ ID NO: 4296500 - DNA, 25 bp, Homo sapien
ccgcaaggtccacgttcattttgag

SEQ ID NO: 4296501 - DNA, 25 bp, Homo sapien
attgcactgtcaaagttggttggaa

SEQ ID NO: 4296502 - DNA, 25 bp, Homo sapien
gcattgcactgtcaaagttggttgg

SEQ ID NO: 4296503 - DNA, 25 bp, Homo sapien
ggcattgcactgtcaaagttggttg

SEQ ID NO: 4296504 - DNA, 25 bp, Homo sapien
cattgcactgtcaaagttggttgga

SEQ ID NO: 4296505 - DNA, 25 bp, Homo sapien
gaaaggaatcaccaaaacactggaa

SEQ ID NO: 4296506 - DNA, 25 bp, Homo sapien
tgtgtgtcccatgactcagagtgtt

SEQ ID NO: 4296507 - DNA, 25 bp, Homo sapien
tgttcattctgcctaaacaccagtg

SEQ ID NO: 4296508 - DNA, 25 bp, Homo sapien
tgactgtcaactgggcatctaagaa

SEQ ID NO: 4296509 - DNA, 25 bp, Homo sapien
agagatttccgcatgcagcttcctg

SEQ ID NO: 4296510 - DNA, 25 bp, Homo sapien
agtcagacttcctggtaaggctgag

SEQ ID NO: 4296511 - DNA, 25 bp, Homo sapien
tcctggagaccgtataagataaaca

SEQ ID NO: 4296512 - DNA, 25 bp, Homo sapien
aatcatggacaataagccccacgtg

SEQ ID NO: 4296513 - DNA, 25 bp, Homo sapien
aatgacagtgccattccagctggtt

SEQ ID NO: 4296514 - DNA, 25 bp, Homo sapien
gaagaagccagggaccattctcagg

SEQ ID NO: 4296515 - DNA, 25 bp, Homo sapien
tcagggtctccccaatgacagtgcc

SEQ ID NO: 4296516 - DNA, 25 bp, Homo sapien
tcagtgatgtataggagttgccagg

SEQ ID NO: 4296517 - DNA, 25 bp, Homo sapien
atgaccctctcccactcttgggtgg

SEQ ID NO: 4296518 - DNA, 25 bp, Homo sapien
cgatgaccctctcccactcttgggt

SEQ ID NO: 4296519 - DNA, 25 bp, Homo sapien
ctctcccactcttgggtggccagcc

SEQ ID NO: 4296520 - DNA, 25 bp, Homo sapien
tcccactcttgggtggccagcccat

SEQ ID NO: 4296521 - DNA, 25 bp, Homo sapien
tgaggtcaatgatttcaactgttac

SEQ ID NO: 4296522 - DNA, 25 bp, Homo sapien
ctgaggtcaatgatttcaactgtta

SEQ ID NO: 4296523 - DNA, 25 bp, Homo sapien
tcttcttttatccttccaaacaaga

SEQ ID NO: 4296524 - DNA, 25 bp, Homo sapien
taatcttcttttatccttccaaaca

SEQ ID NO: 4296525 - DNA, 25 bp, Homo sapien
gatgttaatttgtaccacatcaaaa

SEQ ID NO: 4296526 - DNA, 25 bp, Homo sapien
tccaaacaagatgttaatttgtacc

SEQ ID NO: 4296527 - DNA, 25 bp, Homo sapien
taggagagcgagctgctgaaagatc

SEQ ID NO: 4296528 - DNA, 25 bp, Homo sapien
catgacaagcccaacagtgccacat

SEQ ID NO: 4296529 - DNA, 25 bp, Homo sapien
tggcatcatgacaagcccaacagtg

SEQ ID NO: 4296530 - DNA, 25 bp, Homo sapien
agatcacactgagttggtccagagc

SEQ ID NO: 4296531 - DNA, 25 bp, Homo sapien
tcggctccccgttgaagataaccta

SEQ ID NO: 4296532 - DNA, 25 bp, Homo sapien
gaaattagccagctgttcatccagc

SEQ ID NO: 4296533 - DNA, 25 bp, Homo sapien
gctaattggcaaaccgcagtacaga

SEQ ID NO: 4296534 - DNA, 25 bp, Homo sapien
tattctagcctcatgtgtcttctgc

SEQ ID NO: 4296535 - DNA, 25 bp, Homo sapien
gcccagggcgcctttgtctgtgagt

SEQ ID NO: 4296536 - DNA, 25 bp, Homo sapien
caggcgtacttgtccctgagtctct

SEQ ID NO: 4296537 - DNA, 25 bp, Homo sapien
gtctctttgataaagctagtgtgtg

SEQ ID NO: 4296538 - DNA, 25 bp, Homo sapien
gcgcctttgtctgtgagtctcttgc

SEQ ID NO: 4296539 - DNA, 25 bp, Homo sapien
tccagtctattcagtgggccacact

SEQ ID NO: 4296540 - DNA, 25 bp, Homo sapien
cacaatccaatctcgtccagtctat

SEQ ID NO: 4296541 - DNA, 25 bp, Homo sapien
cgggcagtatgatttgggcatttaa

SEQ ID NO: 4296542 - DNA, 25 bp, Homo sapien
gggtggtattcgagccacaatccaa

SEQ ID NO: 4296543 - DNA, 25 bp, Homo sapien
caggacttttaccaacctccacgca

SEQ ID NO: 4296544 - DNA, 25 bp, Homo sapien
gacttttaccaacctccacgcaaga

SEQ ID NO: 4296545 - DNA, 25 bp, Homo sapien
ttttaccaacctccacgcaagaggc

SEQ ID NO: 4296546 - DNA, 25 bp, Homo sapien
ttaccaacctccacgcaagaggctt

SEQ ID NO: 4296547 - DNA, 25 bp, Homo sapien
cagattcagacacaggcagaaagag

SEQ ID NO: 4296548 - DNA, 25 bp, Homo sapien
tcccagattcagacacaggcagaaa

SEQ ID NO: 4296549 - DNA, 25 bp, Homo sapien
ccagattcagacacaggcagaaaga

SEQ ID NO: 4296550 - DNA, 25 bp, Homo sapien
cccagattcagacacaggcagaaag

SEQ ID NO: 4296551 - DNA, 25 bp, Homo sapien
ttatgataggaggacagatagggaa

SEQ ID NO: 4296552 - DNA, 25 bp, Homo sapien
gacagatagggaagaattttgtagg

SEQ ID NO: 4296553 - DNA, 25 bp, Homo sapien
taggaggacagatagggaagaattt

SEQ ID NO: 4296554 - DNA, 25 bp, Homo sapien
cttttatgataggaggacagatagg

SEQ ID NO: 4296555 - DNA, 25 bp, Homo sapien
agtgcagaggtgcaaccatcgctcc

SEQ ID NO: 4296556 - DNA, 25 bp, Homo sapien
gtgcagaggtgcaaccatcgctccc

SEQ ID NO: 4296557 - DNA, 25 bp, Homo sapien
acaggaataggtcatcacgcccagc

SEQ ID NO: 4296558 - DNA, 25 bp, Homo sapien
tagagtagcagcttcgccatgttgc

SEQ ID NO: 4296559 - DNA, 25 bp, Homo sapien
acgcctggccaccacttggagtttt

SEQ ID NO: 4296560 - DNA, 25 bp, Homo sapien
tacttaacccacaaccactgattca

SEQ ID NO: 4296561 - DNA, 25 bp, Homo sapien
taaagcacagatgcgctcctgatgg

SEQ ID NO: 4296562 - DNA, 25 bp, Homo sapien
catgggaaagttgttttgccgctgc

SEQ ID NO: 4296563 - DNA, 25 bp, Homo sapien
gttgttttgccgctgccgtttaggc

SEQ ID NO: 4296564 - DNA, 25 bp, Homo sapien
aacatgggaaagttgttttgccgct

SEQ ID NO: 4296565 - DNA, 25 bp, Homo sapien
tgggaaagttgttttgccgctgccg

SEQ ID NO: 4296566 - DNA, 25 bp, Homo sapien
ggaagcaccaacaccaggtcctcac

SEQ ID NO: 4296567 - DNA, 25 bp, Homo sapien
cggaagcaccaacaccaggtcctca

SEQ ID NO: 4296568 - DNA, 25 bp, Homo sapien
acggaagcaccaacaccaggtcctc

SEQ ID NO: 4296569 - DNA, 25 bp, Homo sapien
tcacggaagcaccaacaccaggtcc

SEQ ID NO: 4296570 - DNA, 25 bp, Homo sapien
ctatcgtctgtgtccagccctcagg

SEQ ID NO: 4296571 - DNA, 25 bp, Homo sapien
acaaggcttggagggcgtgtctatc

SEQ ID NO: 4296572 - DNA, 25 bp, Homo sapien
gcaaaagtccaagtgagaaaatagc

SEQ ID NO: 4296573 - DNA, 25 bp, Homo sapien
agcacttgatgctgcaggtttccca

SEQ ID NO: 4296574 - DNA, 25 bp, Homo sapien
tgcatggtgtacacacatggttaca

SEQ ID NO: 4296575 - DNA, 25 bp, Homo sapien
caaagcacagccttctgtctaggca

SEQ ID NO: 4296576 - DNA, 25 bp, Homo sapien
gtgcatggtgtacacacatggttac

SEQ ID NO: 4296577 - DNA, 25 bp, Homo sapien
tctccaaggtaattagatgctccat

SEQ ID NO: 4296578 - DNA, 25 bp, Homo sapien
ccaaggtaattagatgctccataaa

SEQ ID NO: 4296579 - DNA, 25 bp, Homo sapien
acagtctccaaggtaattagatgct

SEQ ID NO: 4296580 - DNA, 25 bp, Homo sapien
gtctccaaggtaattagatgctcca

SEQ ID NO: 4296581 - DNA, 25 bp, Homo sapien
gggcccctcactaactctcagctca

SEQ ID NO: 4296582 - DNA, 25 bp, Homo sapien
tctatcaaacatggtccatctaaag

SEQ ID NO: 4296583 - DNA, 25 bp, Homo sapien
atttctatcaaacatggtccatcta

SEQ ID NO: 4296584 - DNA, 25 bp, Homo sapien
ctcttgggcccctcactaactctca

SEQ ID NO: 4296585 - DNA, 25 bp, Homo sapien
agggccagcacttgcatcagcattg

SEQ ID NO: 4296586 - DNA, 25 bp, Homo sapien
gccagcacttgcatcagcattgcca

SEQ ID NO: 4296587 - DNA, 25 bp, Homo sapien
ccagcacttgcatcagcattgccat

SEQ ID NO: 4296588 - DNA, 25 bp, Homo sapien
gggccagcacttgcatcagcattgc

SEQ ID NO: 4296589 - DNA, 25 bp, Homo sapien
ttataataatgggaaccgatgggag

SEQ ID NO: 4296590 - DNA, 25 bp, Homo sapien
ctttataataatgggaaccgatggg

SEQ ID NO: 4296591 - DNA, 25 bp, Homo sapien
tctttataataatgggaaccgatgg

SEQ ID NO: 4296592 - DNA, 25 bp, Homo sapien
ataataatgggaaccgatgggaggt

SEQ ID NO: 4296593 - DNA, 25 bp, Homo sapien
ctctttctggatatgggtcctcttc

SEQ ID NO: 4296594 - DNA, 25 bp, Homo sapien
cagccccgcagtccaggcaacctga

SEQ ID NO: 4296595 - DNA, 25 bp, Homo sapien
gtccaggcaacctgaccgtcaccca

SEQ ID NO: 4296596 - DNA, 25 bp, Homo sapien
ctttctggatatgggtcctcttccc

SEQ ID NO: 4296597 - DNA, 25 bp, Homo sapien
cagaaatctgagtttaacacataca

SEQ ID NO: 4296598 - DNA, 25 bp, Homo sapien
tgaggtcaaagccaatgtcctggca

SEQ ID NO: 4296599 - DNA, 25 bp, Homo sapien
tctgagtttaacacatacaaagtct

SEQ ID NO: 4296600 - DNA, 25 bp, Homo sapien
agctgtagacagaaaggtttggcaa

SEQ ID NO: 4296601 - DNA, 25 bp, Homo sapien
ctgagctctgggcaatgcaacggct

SEQ ID NO: 4296602 - DNA, 25 bp, Homo sapien
caatgcaacggctgagcaggagtag

SEQ ID NO: 4296603 - DNA, 25 bp, Homo sapien
gagtaggagggaagtgtttggcaca

SEQ ID NO: 4296604 - DNA, 25 bp, Homo sapien
tctgggcaatgcaacggctgagcag

SEQ ID NO: 4296605 - DNA, 25 bp, Homo sapien
tcatcagctgagttatcaaagagca

SEQ ID NO: 4296606 - DNA, 25 bp, Homo sapien
ctgtgatgagaagtaattcatcagc

SEQ ID NO: 4296607 - DNA, 25 bp, Homo sapien
ttcatcagctgagttatcaaagagc

SEQ ID NO: 4296608 - DNA, 25 bp, Homo sapien
gatgagaagtaattcatcagctgag

SEQ ID NO: 4296609 - DNA, 25 bp, Homo sapien
gcctttgccctgatcaacagagaga

SEQ ID NO: 4296610 - DNA, 25 bp, Homo sapien
ccgggcaggttgtcacaggaactca

SEQ ID NO: 4296611 - DNA, 25 bp, Homo sapien
gcttggtttccactgagcagctcag

SEQ ID NO: 4296612 - DNA, 25 bp, Homo sapien
gagacagcctgcgagtacaatgaga

SEQ ID NO: 4296613 - DNA, 25 bp, Homo sapien
caccgggcccggctgacatagtatt

SEQ ID NO: 4296614 - DNA, 25 bp, Homo sapien
accgggcccggctgacatagtattt

SEQ ID NO: 4296615 - DNA, 25 bp, Homo sapien
ggctcgtctgcatttaccagccagg

SEQ ID NO: 4296616 - DNA, 25 bp, Homo sapien
gccctgataacgtgtccacatttgc

SEQ ID NO: 4296617 - DNA, 25 bp, Homo sapien
catttgcaagagataaaaagctggc

SEQ ID NO: 4296618 - DNA, 25 bp, Homo sapien
cattttctaatagatccgccctgat

SEQ ID NO: 4296619 - DNA, 25 bp, Homo sapien
ccagcatgcactgatcttaaacaac

SEQ ID NO: 4296620 - DNA, 25 bp, Homo sapien
ctttcaagtaaactggccccagcat

SEQ ID NO: 4296621 - DNA, 25 bp, Homo sapien
tcagacagctgatgcccgacatttc

SEQ ID NO: 4296622 - DNA, 25 bp, Homo sapien
tgtcacagagtcttaccccagcttg

SEQ ID NO: 4296623 - DNA, 25 bp, Homo sapien
cgttaggaaaacagctccccagagc

SEQ ID NO: 4296624 - DNA, 25 bp, Homo sapien
gccaacagacaaggaactcattagg

SEQ ID NO: 4296625 - DNA, 25 bp, Homo sapien
tcttccaagccgttaggaaaacagc

SEQ ID NO: 4296626 - DNA, 25 bp, Homo sapien
aggaactcattaggcggagctcccc

SEQ ID NO: 4296627 - DNA, 25 bp, Homo sapien
actggcaatgatgaactcttggatc

SEQ ID NO: 4296628 - DNA, 25 bp, Homo sapien
gagacaagtcttgttcccaccaatt

SEQ ID NO: 4296629 - DNA, 25 bp, Homo sapien
gaactcttggatctccaatccccag

SEQ ID NO: 4296630 - DNA, 25 bp, Homo sapien
agtggtgagacaagtcttgttccca

SEQ ID NO: 4296631 - DNA, 25 bp, Homo sapien
tgtggagtgcagctggcggttatga

SEQ ID NO: 4296632 - DNA, 25 bp, Homo sapien
tctgagttggtgcacagtgtccttc

SEQ ID NO: 4296633 - DNA, 25 bp, Homo sapien
ctctgagttggtgcacagtgtcctt

SEQ ID NO: 4296634 - DNA, 25 bp, Homo sapien
cggttatgataagcaggtgtcagga

SEQ ID NO: 4296635 - DNA, 25 bp, Homo sapien
ccccttggcacacgttggattgaac

SEQ ID NO: 4296636 - DNA, 25 bp, Homo sapien
ctcctttcccacgatgtcgtcacgg

SEQ ID NO: 4296637 - DNA, 25 bp, Homo sapien
gaccctctgctagttgggttgactc

SEQ ID NO: 4296638 - DNA, 25 bp, Homo sapien
tttcagttgctcaacttgaccctct

SEQ ID NO: 4296639 - DNA, 25 bp, Homo sapien
ctcccttcccggcacaattcttcag

SEQ ID NO: 4296640 - DNA, 25 bp, Homo sapien
ccggcacaattcttcaggatcaggt

SEQ ID NO: 4296641 - DNA, 25 bp, Homo sapien
ccttcccggcacaattcttcaggat

SEQ ID NO: 4296642 - DNA, 25 bp, Homo sapien
ttttccctggacccaagtgtgtgca

SEQ ID NO: 4296643 - DNA, 25 bp, Homo sapien
cacccagtgagggtaccacataagg

SEQ ID NO: 4296644 - DNA, 25 bp, Homo sapien
gatgtacatggtctccacccagtga

SEQ ID NO: 4296645 - DNA, 25 bp, Homo sapien
ccaggagggagaccgacatgatgta

SEQ ID NO: 4296646 - DNA, 25 bp, Homo sapien
acagtggctgttttaggtgccacca

SEQ ID NO: 4296647 - DNA, 25 bp, Homo sapien
cctctacagctgcattgattcattg

SEQ ID NO: 4296648 - DNA, 25 bp, Homo sapien
tgcattgattcattgctgtggaact

SEQ ID NO: 4296649 - DNA, 25 bp, Homo sapien
gctgcattgattcattgctgtggaa

SEQ ID NO: 4296650 - DNA, 25 bp, Homo sapien
tccattcctctacagctgcattgat

SEQ ID NO: 4296651 - DNA, 25 bp, Homo sapien
agactcagtatggcaggctcaggtc

SEQ ID NO: 4296652 - DNA, 25 bp, Homo sapien
actcagtatggcaggctcaggtctc

SEQ ID NO: 4296653 - DNA, 25 bp, Homo sapien
gactcagtatggcaggctcaggtct

SEQ ID NO: 4296654 - DNA, 25 bp, Homo sapien
ttttcatatgccagacaccctgctg

SEQ ID NO: 4296655 - DNA, 25 bp, Homo sapien
cactcagcaatgttgtcaggaactc

SEQ ID NO: 4296656 - DNA, 25 bp, Homo sapien
tcaggaactcttatctcctcacaga

SEQ ID NO: 4296657 - DNA, 25 bp, Homo sapien
cacaagcaatggcaatagaggcctt

SEQ ID NO: 4296658 - DNA, 25 bp, Homo sapien
gaagggcattcagtcaactggtcca

SEQ ID NO: 4296659 - DNA, 25 bp, Homo sapien
tatcccaccatggttcaagcaggcg

SEQ ID NO: 4296660 - DNA, 25 bp, Homo sapien
tcttgaacatataccacaaggtcct

SEQ ID NO: 4296661 - DNA, 25 bp, Homo sapien
tcctctatgaggttgatgcaccaca

SEQ ID NO: 4296662 - DNA, 25 bp, Homo sapien
tgggctttaacccttcagtcgtgtc

SEQ ID NO: 4296663 - DNA, 25 bp, Homo sapien
ctattgtccaaagtgaatttccttt

SEQ ID NO: 4296664 - DNA, 25 bp, Homo sapien
tcctcatattgactgggctttaacc

SEQ ID NO: 4296665 - DNA, 25 bp, Homo sapien
cccttcagtcgtgtccttgccatgg

SEQ ID NO: 4296666 - DNA, 25 bp, Homo sapien
tgtgcacccgctgtatgccatggag

SEQ ID NO: 4296667 - DNA, 25 bp, Homo sapien
tccttggtggatgcacacaataaac

SEQ ID NO: 4296668 - DNA, 25 bp, Homo sapien
tgccatggagcaggagtcagtagtc

SEQ ID NO: 4296669 - DNA, 25 bp, Homo sapien
tcagtagtcaacaggacaacacacc

SEQ ID NO: 4296670 - DNA, 25 bp, Homo sapien
cctcgtgtagatttcaggacgttca

SEQ ID NO: 4296671 - DNA, 25 bp, Homo sapien
tcaagtgcctcgtgtagatttcagg

SEQ ID NO: 4296672 - DNA, 25 bp, Homo sapien
cgtgtagatttcaggacgttcagtg

SEQ ID NO: 4296673 - DNA, 25 bp, Homo sapien
agtgcctcgtgtagatttcaggacg

SEQ ID NO: 4296674 - DNA, 25 bp, Homo sapien
tatctcgggattttctggctgctcg

SEQ ID NO: 4296675 - DNA, 25 bp, Homo sapien
tcggtttacaagatgcagccgccgg

SEQ ID NO: 4296676 - DNA, 25 bp, Homo sapien
tccaccctggtgtcctatctcggga

SEQ ID NO: 4296677 - DNA, 25 bp, Homo sapien
cgacgcgacgctgacctgcgggtgc

SEQ ID NO: 4296678 - DNA, 25 bp, Homo sapien
cgacggctagtcgaggctggcggtg

SEQ ID NO: 4296679 - DNA, 25 bp, Homo sapien
gcgctgggcataccccagaccaggg

SEQ ID NO: 4296680 - DNA, 25 bp, Homo sapien
agtgcgcccccgtgcgctgggcata

SEQ ID NO: 4296681 - DNA, 25 bp, Homo sapien
gggaacagagtcagggtccccagca

SEQ ID NO: 4296682 - DNA, 25 bp, Homo sapien
gacccccgcgctggttcggcctctc

SEQ ID NO: 4296683 - DNA, 25 bp, Homo sapien
cccgcgctggttcggcctctccagg

SEQ ID NO: 4296684 - DNA, 25 bp, Homo sapien
ccccgcgctggttcggcctctccag

SEQ ID NO: 4296685 - DNA, 25 bp, Homo sapien
ctcgacccccgcgctggttcggcct

SEQ ID NO: 4296686 - DNA, 25 bp, Homo sapien
cagcaagctctcaggaatcgccggc

SEQ ID NO: 4296687 - DNA, 25 bp, Homo sapien
gcctggagctgcgtgaaccccggcg

SEQ ID NO: 4296688 - DNA, 25 bp, Homo sapien
ggtgagaatgaggacgagcctggag

SEQ ID NO: 4296689 - DNA, 25 bp, Homo sapien
ttcctccacggtggaggtgagaatg

SEQ ID NO: 4296690 - DNA, 25 bp, Homo sapien
aacctctgccttctgttgcaagtgc

SEQ ID NO: 4296691 - DNA, 25 bp, Homo sapien
tcagccttgcagtgctgggtggcct

SEQ ID NO: 4296692 - DNA, 25 bp, Homo sapien
ccttgcagtgctgggtggcctcttc

SEQ ID NO: 4296693 - DNA, 25 bp, Homo sapien
tgccttctgttgcaagtgctcagcc

SEQ ID NO: 4296694 - DNA, 25 bp, Homo sapien
ccaacttctgttccaacagctgcaa

SEQ ID NO: 4296695 - DNA, 25 bp, Homo sapien
cttgagcaaaccaacttctgttcca

SEQ ID NO: 4296696 - DNA, 25 bp, Homo sapien
acttctgttccaacagctgcaactt

SEQ ID NO: 4296697 - DNA, 25 bp, Homo sapien
gcaaaccaacttctgttccaacagc

SEQ ID NO: 4296698 - DNA, 25 bp, Homo sapien
gacgtactaacagggagtttccaca

SEQ ID NO: 4296699 - DNA, 25 bp, Homo sapien
aattagccctcaaacagcaatggga

SEQ ID NO: 4296700 - DNA, 25 bp, Homo sapien
taagcaccaagtgtttgatctcagg

SEQ ID NO: 4296701 - DNA, 25 bp, Homo sapien
gaaggtggtacttagcaactactgc

SEQ ID NO: 4296702 - DNA, 25 bp, Homo sapien
tgaatacatggaaggtgaccagctg

SEQ ID NO: 4296703 - DNA, 25 bp, Homo sapien
caaatacctggctctaatggacgct

SEQ ID NO: 4296704 - DNA, 25 bp, Homo sapien
tctccactacaagccgaacaaaagg

SEQ ID NO: 4296705 - DNA, 25 bp, Homo sapien
gatatggcaaggatgacccaacacc

SEQ ID NO: 4296706 - DNA, 25 bp, Homo sapien
aacagatgttttgccgtaatctgca

SEQ ID NO: 4296707 - DNA, 25 bp, Homo sapien
tgccgtaatctgcagggcaacgatt

SEQ ID NO: 4296708 - DNA, 25 bp, Homo sapien
tctgcagggcaacgattcccatttc

SEQ ID NO: 4296709 - DNA, 25 bp, Homo sapien
ccatttctagcatactggggagagt

SEQ ID NO: 4296710 - DNA, 25 bp, Homo sapien
tctgaggcaatcacactatggtttc

SEQ ID NO: 4296711 - DNA, 25 bp, Homo sapien
ggcaatcacactatggtttcattac

SEQ ID NO: 4296712 - DNA, 25 bp, Homo sapien
ctgaggcaatcacactatggtttca

SEQ ID NO: 4296713 - DNA, 25 bp, Homo sapien
gaggcaatcacactatggtttcatt

SEQ ID NO: 4296714 - DNA, 25 bp, Homo sapien
tatctcaagtggaacggtcaagacg

SEQ ID NO: 4296715 - DNA, 25 bp, Homo sapien
gatgcctactcagaccaagaggagg

SEQ ID NO: 4296716 - DNA, 25 bp, Homo sapien
caggacacagctttagaccagaagg

SEQ ID NO: 4296717 - DNA, 25 bp, Homo sapien
gctgaatgctgagaaaacgggtgcc

SEQ ID NO: 4296718 - DNA, 25 bp, Homo sapien
gggcgaccgcgtggagttcatcagt

SEQ ID NO: 4296719 - DNA, 25 bp, Homo sapien
ctgctttgcatgacccagaagagag

SEQ ID NO: 4296720 - DNA, 25 bp, Homo sapien
tgtagctgcggcaaccaagatctgc

SEQ ID NO: 4296721 - DNA, 25 bp, Homo sapien
caagatctgctttgcatgacccaga

SEQ ID NO: 4296722 - DNA, 25 bp, Homo sapien
gtcgggctcctcgtcaataaactgg

SEQ ID NO: 4296723 - DNA, 25 bp, Homo sapien
caaatggcgacgtatagggaccggc

SEQ ID NO: 4296724 - DNA, 25 bp, Homo sapien
tagacggcgataaacttgctgagcg

SEQ ID NO: 4296725 - DNA, 25 bp, Homo sapien
agtcatagatgcctgagtcccgcgg

SEQ ID NO: 4296726 - DNA, 25 bp, Homo sapien
ctgaagtcttcccacaggtccagag

SEQ ID NO: 4296727 - DNA, 25 bp, Homo sapien
agtcttcccacaggtccagagccac

SEQ ID NO: 4296728 - DNA, 25 bp, Homo sapien
tgaagtcttcccacaggtccagagc

SEQ ID NO: 4296729 - DNA, 25 bp, Homo sapien
aagtcttcccacaggtccagagcca

SEQ ID NO: 4296730 - DNA, 25 bp, Homo sapien
gcgaaacactggacgacattcatgt

SEQ ID NO: 4296731 - DNA, 25 bp, Homo sapien
tcctggaggaagtaggcgaaacact

SEQ ID NO: 4296732 - DNA, 25 bp, Homo sapien
aatagcagagaaagaccttcggccg

SEQ ID NO: 4296733 - DNA, 25 bp, Homo sapien
tgctgcagtgtatgtggaagactca

SEQ ID NO: 4296734 - DNA, 25 bp, Homo sapien
cgaatgccgatatgactaccagtgg

SEQ ID NO: 4296735 - DNA, 25 bp, Homo sapien
taccagtggcactgtgatggccacg

SEQ ID NO: 4296736 - DNA, 25 bp, Homo sapien
acatcacagtgaagagcgtcgcgaa

SEQ ID NO: 4296737 - DNA, 25 bp, Homo sapien
tgatggccacggctctgatgggccc

SEQ ID NO: 4296738 - DNA, 25 bp, Homo sapien
cacttttcttgttgtgttagtgtca

SEQ ID NO: 4296739 - DNA, 25 bp, Homo sapien
ttaaggcataatgcatcacttttct

SEQ ID NO: 4296740 - DNA, 25 bp, Homo sapien
tttcttgttgtgttagtgtcatcca

SEQ ID NO: 4296741 - DNA, 25 bp, Homo sapien
ctggctttaaggcataatgcatcac

SEQ ID NO: 4296742 - DNA, 25 bp, Homo sapien
ctcaattatataatcccctggagaa

SEQ ID NO: 4296743 - DNA, 25 bp, Homo sapien
aggaggcagctggtcgtctctgtag

SEQ ID NO: 4296744 - DNA, 25 bp, Homo sapien
agctggtcgtctctgtagtttgctc

SEQ ID NO: 4296745 - DNA, 25 bp, Homo sapien
tatataatcccctggagaaacattt

SEQ ID NO: 4296746 - DNA, 25 bp, Homo sapien
gaagaaacggaagccgaagttgtgc

SEQ ID NO: 4296747 - DNA, 25 bp, Homo sapien
ttgaaaggtccttcgtgcttgagct

SEQ ID NO: 4296748 - DNA, 25 bp, Homo sapien
tgcggtgcatggtcgaaggacacct

SEQ ID NO: 4296749 - DNA, 25 bp, Homo sapien
gatgttcaggttccgaggcttccag

SEQ ID NO: 4296750 - DNA, 25 bp, Homo sapien
gtttacaagctagattgtccggctg

SEQ ID NO: 4296751 - DNA, 25 bp, Homo sapien
caagctagattgtccggctgtaaca

SEQ ID NO: 4296752 - DNA, 25 bp, Homo sapien
agggtttacaagctagattgtccgg

SEQ ID NO: 4296753 - DNA, 25 bp, Homo sapien
tagattgtccggctgtaacaacagg

SEQ ID NO: 4296754 - DNA, 25 bp, Homo sapien
gactgaccatccaaggccttgaatg

SEQ ID NO: 4296755 - DNA, 25 bp, Homo sapien
caggactgaccatccaaggccttga

SEQ ID NO: 4296756 - DNA, 25 bp, Homo sapien
cagccaccaaagtttgaaagcagca

SEQ ID NO: 4296757 - DNA, 25 bp, Homo sapien
tggacaggactgaccatccaaggcc

SEQ ID NO: 4296758 - DNA, 25 bp, Homo sapien
cccaggccagctgtcttttttaact

SEQ ID NO: 4296759 - DNA, 25 bp, Homo sapien
aggccagctgtcttttttaactaga

SEQ ID NO: 4296760 - DNA, 25 bp, Homo sapien
gccagctgtcttttttaactagaaa

SEQ ID NO: 4296761 - DNA, 25 bp, Homo sapien
tgccccaggccagctgtctttttta

SEQ ID NO: 4296762 - DNA, 25 bp, Homo sapien
catattcaggaaaggttgagattcc

SEQ ID NO: 4296763 - DNA, 25 bp, Homo sapien
aaataatccgtttcaaatttcatat

SEQ ID NO: 4296764 - DNA, 25 bp, Homo sapien
ttcatattcaggaaaggttgagatt

SEQ ID NO: 4296765 - DNA, 25 bp, Homo sapien
cgaaataatccgtttcaaatttcat

SEQ ID NO: 4296766 - DNA, 25 bp, Homo sapien
caccttcataaggtcttcgctccta

SEQ ID NO: 4296767 - DNA, 25 bp, Homo sapien
gacaatgcggtctgttttttggcaa

SEQ ID NO: 4296768 - DNA, 25 bp, Homo sapien
tttttggcaaagaacccatggcttg

SEQ ID NO: 4296769 - DNA, 25 bp, Homo sapien
gatcgcttaaccatgaagatggaca

SEQ ID NO: 4296770 - DNA, 25 bp, Homo sapien
tttagaatcagttgttggcactgtc

SEQ ID NO: 4296771 - DNA, 25 bp, Homo sapien
ccagtattacccgaaatcctttcag

SEQ ID NO: 4296772 - DNA, 25 bp, Homo sapien
tcagctcctccagtattacccgaaa

SEQ ID NO: 4296773 - DNA, 25 bp, Homo sapien
gaagctactgttgagctgcttcgga

SEQ ID NO: 4296774 - DNA, 25 bp, Homo sapien
attaatagtgaacctaattacttct

SEQ ID NO: 4296775 - DNA, 25 bp, Homo sapien
tattaatagtgaacctaattacttc

SEQ ID NO: 4296776 - DNA, 25 bp, Homo sapien
cgtccgactagatgctttcaaaagg

SEQ ID NO: 4296777 - DNA, 25 bp, Homo sapien
caaaaggattaagctctgacggtca

SEQ ID NO: 4296778 - DNA, 25 bp, Homo sapien
tcccacggagactgaagtggtccag

SEQ ID NO: 4296779 - DNA, 25 bp, Homo sapien
caagcgccagcaccgggtttgtgta

SEQ ID NO: 4296780 - DNA, 25 bp, Homo sapien
tttaagccttacatggaatgaccac

SEQ ID NO: 4296781 - DNA, 25 bp, Homo sapien
ggacaagcagatttagccccaaccc

SEQ ID NO: 4296782 - DNA, 25 bp, Homo sapien
catgtgtgtctctaaccatgaggca

SEQ ID NO: 4296783 - DNA, 25 bp, Homo sapien
tgtcaaagcggcagtcctgagaacc

SEQ ID NO: 4296784 - DNA, 25 bp, Homo sapien
cactggattcaagtaggtggtacaa

SEQ ID NO: 4296785 - DNA, 25 bp, Homo sapien
tattctgggcgtcagcaatcacatg

SEQ ID NO: 4296786 - DNA, 25 bp, Homo sapien
gctgatggtgatattctgggcgtca

SEQ ID NO: 4296787 - DNA, 25 bp, Homo sapien
cacttggtcatggcaagcatactgg

SEQ ID NO: 4296788 - DNA, 25 bp, Homo sapien
gaaggtgatgttgtacagcccactg

SEQ ID NO: 4296789 - DNA, 25 bp, Homo sapien
tcatatttgaaggtgatgttgtaca

SEQ ID NO: 4296790 - DNA, 25 bp, Homo sapien
gtgatgttgtacagcccactgtttc

SEQ ID NO: 4296791 - DNA, 25 bp, Homo sapien
tttgaaggtgatgttgtacagccca

SEQ ID NO: 4296792 - DNA, 25 bp, Homo sapien
ttggagggaaccatatgcgggcagc

SEQ ID NO: 4296793 - DNA, 25 bp, Homo sapien
gttggagggaaccatatgcgggcag

SEQ ID NO: 4296794 - DNA, 25 bp, Homo sapien
gaaagtgtatccctgaactcagata

SEQ ID NO: 4296795 - DNA, 25 bp, Homo sapien
tcacgctgcttatcctgaagccagg

SEQ ID NO: 4296796 - DNA, 25 bp, Homo sapien
gggttttcagccacaaccacatgac

SEQ ID NO: 4296797 - DNA, 25 bp, Homo sapien
gagaacacttctgatggagcccagg

SEQ ID NO: 4296798 - DNA, 25 bp, Homo sapien
actgcagttctgctcggaaaatgtc

SEQ ID NO: 4296799 - DNA, 25 bp, Homo sapien
ccttctaaaccctttgggcactgca

SEQ ID NO: 4296800 - DNA, 25 bp, Homo sapien
aaccctttgggcactgcagttctgc

SEQ ID NO: 4296801 - DNA, 25 bp, Homo sapien
agttctgctcggaaaatgtccttgg

SEQ ID NO: 4296802 - DNA, 25 bp, Homo sapien
caaatgccagggaacgtaacttgga

SEQ ID NO: 4296803 - DNA, 25 bp, Homo sapien
aggtttcagatgaggctcgccttta

SEQ ID NO: 4296804 - DNA, 25 bp, Homo sapien
tgtgactttccattcccgggcttga

SEQ ID NO: 4296805 - DNA, 25 bp, Homo sapien
agctcattgctttcgctgctgcggc

SEQ ID NO: 4296806 - DNA, 25 bp, Homo sapien
gccgaccctcataacttaaccacag

SEQ ID NO: 4296807 - DNA, 25 bp, Homo sapien
ttaaccacagtatgctgatgttttc

SEQ ID NO: 4296808 - DNA, 25 bp, Homo sapien
acttaaccacagtatgctgatgttt

SEQ ID NO: 4296809 - DNA, 25 bp, Homo sapien
ccagccgaccctcataacttaacca

SEQ ID NO: 4296810 - DNA, 25 bp, Homo sapien
ctccactgacaaacaacgcaggaac

SEQ ID NO: 4296811 - DNA, 25 bp, Homo sapien
acaaacaacgcaggaacacctgagg

SEQ ID NO: 4296812 - DNA, 25 bp, Homo sapien
tgacaaacaacgcaggaacacctga

SEQ ID NO: 4296813 - DNA, 25 bp, Homo sapien
actgacaaacaacgcaggaacacct

SEQ ID NO: 4296814 - DNA, 25 bp, Homo sapien
cactccggcctcctggcagggagat

SEQ ID NO: 4296815 - DNA, 25 bp, Homo sapien
tctgacctcccccactccggcctcc

SEQ ID NO: 4296816 - DNA, 25 bp, Homo sapien
tgacctcccccactccggcctcctg

SEQ ID NO: 4296817 - DNA, 25 bp, Homo sapien
cccccactccggcctcctggcaggg

SEQ ID NO: 4296818 - DNA, 25 bp, Homo sapien
tcttcctgatcgaaagaagtcaagt

SEQ ID NO: 4296819 - DNA, 25 bp, Homo sapien
acagtaataactcggaaacagccca

SEQ ID NO: 4296820 - DNA, 25 bp, Homo sapien
gagatgttatgatccatccaggatg

SEQ ID NO: 4296821 - DNA, 25 bp, Homo sapien
tatagcagctatgcaacaagatctg

SEQ ID NO: 4296822 - DNA, 25 bp, Homo sapien
tctgatggcttcctgtatatcctat

SEQ ID NO: 4296823 - DNA, 25 bp, Homo sapien
tgatggcttcctgtatatcctatca

SEQ ID NO: 4296824 - DNA, 25 bp, Homo sapien
cctctgatggcttcctgtatatcct

SEQ ID NO: 4296825 - DNA, 25 bp, Homo sapien
ggcccctctgatggcttcctgtata

SEQ ID NO: 4296826 - DNA, 25 bp, Homo sapien
gtgtatgggtccacaagttatatgc

SEQ ID NO: 4296827 - DNA, 25 bp, Homo sapien
tggaaatcccacttaagcaggtctg

SEQ ID NO: 4296828 - DNA, 25 bp, Homo sapien
tccactgctataatcagtatacaga

SEQ ID NO: 4296829 - DNA, 25 bp, Homo sapien
tacacagtacaattgacagtttttg

SEQ ID NO: 4296830 - DNA, 25 bp, Homo sapien
tattcactgcggctttcctgaaatc

SEQ ID NO: 4296831 - DNA, 25 bp, Homo sapien
tatgctattcactgcggctttcctg

SEQ ID NO: 4296832 - DNA, 25 bp, Homo sapien
ttcctgaaatcagacacttttgccc

SEQ ID NO: 4296833 - DNA, 25 bp, Homo sapien
gctattcactgcggctttcctgaaa

SEQ ID NO: 4296834 - DNA, 25 bp, Homo sapien
tgaatgtcccactattacatctcgg

SEQ ID NO: 4296835 - DNA, 25 bp, Homo sapien
gcaaagttgaatctctgcggaccat

SEQ ID NO: 4296836 - DNA, 25 bp, Homo sapien
tccctggtaccctgtaagaataaca

SEQ ID NO: 4296837 - DNA, 25 bp, Homo sapien
tacatctcggcatgacatttcatgg

SEQ ID NO: 4296838 - DNA, 25 bp, Homo sapien
gaagtcactgattgcttggctggat

SEQ ID NO: 4296839 - DNA, 25 bp, Homo sapien
tcatagccagccaaccaggactttt

SEQ ID NO: 4296840 - DNA, 25 bp, Homo sapien
ttaattcatagccagccaaccagga

SEQ ID NO: 4296841 - DNA, 25 bp, Homo sapien
cacaaaaaagcccgggaagtcactg

SEQ ID NO: 4296842 - DNA, 25 bp, Homo sapien
cagcatatgactgaacaggtagaat

SEQ ID NO: 4296843 - DNA, 25 bp, Homo sapien
cttttcagcatatgactgaacaggt

SEQ ID NO: 4296844 - DNA, 25 bp, Homo sapien
tttcagcatatgactgaacaggtag

SEQ ID NO: 4296845 - DNA, 25 bp, Homo sapien
tcagcatatgactgaacaggtagaa

SEQ ID NO: 4296846 - DNA, 25 bp, Homo sapien
tttcatctcggccagggccggagga

SEQ ID NO: 4296847 - DNA, 25 bp, Homo sapien
accccgcgaagagcagacaggttgg

SEQ ID NO: 4296848 - DNA, 25 bp, Homo sapien
ggaaaccaggaggatgcgcgggagg

SEQ ID NO: 4296849 - DNA, 25 bp, Homo sapien
ccgcgagttggcgacggcaagaaac

SEQ ID NO: 4296850 - DNA, 25 bp, Homo sapien
ccacaggtgtcggcgccccgcgcgc

SEQ ID NO: 4296851 - DNA, 25 bp, Homo sapien
agccacaggtgtcggcgccccgcgc

SEQ ID NO: 4296852 - DNA, 25 bp, Homo sapien
ccagccacaggtgtcggcgccccgc

SEQ ID NO: 4296853 - DNA, 25 bp, Homo sapien
cagccacaggtgtcggcgccccgcg

SEQ ID NO: 4296854 - DNA, 25 bp, Homo sapien
ttgaggcaggcgttgaccgtaaaga

SEQ ID NO: 4296855 - DNA, 25 bp, Homo sapien
cagccagctgcgagccgttgaggca

SEQ ID NO: 4296856 - DNA, 25 bp, Homo sapien
ggccacagccagctgcgagccgttg

SEQ ID NO: 4296857 - DNA, 25 bp, Homo sapien
ccgtaaagaagacggagcagagctg

SEQ ID NO: 4296858 - DNA, 25 bp, Homo sapien
ccgtgcgctcgcccagccaggccgt

SEQ ID NO: 4296859 - DNA, 25 bp, Homo sapien
cgtgcgctcgcccagccaggccgtt

SEQ ID NO: 4296860 - DNA, 25 bp, Homo sapien
gccgtgcgctcgcccagccaggccg

SEQ ID NO: 4296861 - DNA, 25 bp, Homo sapien
ggccgtgcgctcgcccagccaggcc

SEQ ID NO: 4296862 - DNA, 25 bp, Homo sapien
cggcggcagcgaaggggaccgcact

SEQ ID NO: 4296863 - DNA, 25 bp, Homo sapien
agccccgagtgggcggtggccgcgg

SEQ ID NO: 4296864 - DNA, 25 bp, Homo sapien
gccccgagtgggcggtggccgcggc

SEQ ID NO: 4296865 - DNA, 25 bp, Homo sapien
cggcagcgaaggggaccgcactggg

SEQ ID NO: 4296866 - DNA, 25 bp, Homo sapien
ccaaggccaggattgcctgtagtcc

SEQ ID NO: 4296867 - DNA, 25 bp, Homo sapien
tgccaaggccaggattgcctgtagt

SEQ ID NO: 4296868 - DNA, 25 bp, Homo sapien
ctgccaaggccaggattgcctgtag

SEQ ID NO: 4296869 - DNA, 25 bp, Homo sapien
aaggccaggattgcctgtagtccag

SEQ ID NO: 4296870 - DNA, 25 bp, Homo sapien
ttcagtgggcaagagactgtcacca

SEQ ID NO: 4296871 - DNA, 25 bp, Homo sapien
tgcctagcactctgtctggcacgct

SEQ ID NO: 4296872 - DNA, 25 bp, Homo sapien
tttcagccactcctcgtggtgagag

SEQ ID NO: 4296873 - DNA, 25 bp, Homo sapien
ccactcctcgtggtgagaggtggct

SEQ ID NO: 4296874 - DNA, 25 bp, Homo sapien
tacacggaattcaccggcccacggc

SEQ ID NO: 4296875 - DNA, 25 bp, Homo sapien
tggccactacacggaattcaccggc

SEQ ID NO: 4296876 - DNA, 25 bp, Homo sapien
ccactacacggaattcaccggccca

SEQ ID NO: 4296877 - DNA, 25 bp, Homo sapien
actacacggaattcaccggcccacg

SEQ ID NO: 4296878 - DNA, 25 bp, Homo sapien
tgctggctgccattatgtaatgtct

SEQ ID NO: 4296879 - DNA, 25 bp, Homo sapien
tactgctttgggtgctcttccagct

SEQ ID NO: 4296880 - DNA, 25 bp, Homo sapien
tgtaatgtctcacagtgtttcccag

SEQ ID NO: 4296881 - DNA, 25 bp, Homo sapien
accctccaggcggtctcatttactg

SEQ ID NO: 4296882 - DNA, 25 bp, Homo sapien
ccgcatcgggccagaaatgtttctt

SEQ ID NO: 4296883 - DNA, 25 bp, Homo sapien
ccaccgcatcgggccagaaatgttt

SEQ ID NO: 4296884 - DNA, 25 bp, Homo sapien
gcgagagccaccgcatcgggccaga

SEQ ID NO: 4296885 - DNA, 25 bp, Homo sapien
accgcatcgggccagaaatgtttct

SEQ ID NO: 4296886 - DNA, 25 bp, Homo sapien
tgtggaatcacttagtcatgagtct

SEQ ID NO: 4296887 - DNA, 25 bp, Homo sapien
catgagtctattgattttaacaaac

SEQ ID NO: 4296888 - DNA, 25 bp, Homo sapien
actaaaagtgcccaaatatgtacca

SEQ ID NO: 4296889 - DNA, 25 bp, Homo sapien
tactttataattagaatccagcttg

SEQ ID NO: 4296890 - DNA, 25 bp, Homo sapien
tcagttttgcacgccgattttgaaa

SEQ ID NO: 4296891 - DNA, 25 bp, Homo sapien
ttttcagttttgcacgccgattttg

SEQ ID NO: 4296892 - DNA, 25 bp, Homo sapien
gttttgcacgccgattttgaaacca

SEQ ID NO: 4296893 - DNA, 25 bp, Homo sapien
ttttgcacgccgattttgaaaccaa

SEQ ID NO: 4296894 - DNA, 25 bp, Homo sapien
tcttctctaatatcgataccaggat

SEQ ID NO: 4296895 - DNA, 25 bp, Homo sapien
ctagattcaatttttgagctaagtc

SEQ ID NO: 4296896 - DNA, 25 bp, Homo sapien
tctaatatcgataccaggatagcag

SEQ ID NO: 4296897 - DNA, 25 bp, Homo sapien
aagtcttctctaatatcgataccag

SEQ ID NO: 4296898 - DNA, 25 bp, Homo sapien
aagtaattttcatatttcgaagctc

SEQ ID NO: 4296899 - DNA, 25 bp, Homo sapien
ttctggcattgggtgatccaccacg

SEQ ID NO: 4296900 - DNA, 25 bp, Homo sapien
tggttttgagtaaaagcagttcttg

SEQ ID NO: 4296901 - DNA, 25 bp, Homo sapien
gtcttcggcctctataccaactcaa

SEQ ID NO: 4296902 - DNA, 25 bp, Homo sapien
tgtagacataagttaccatctttcc

SEQ ID NO: 4296903 - DNA, 25 bp, Homo sapien
aggatttgggacatgtagacataag

SEQ ID NO: 4296904 - DNA, 25 bp, Homo sapien
atgtagacataagttaccatctttc

SEQ ID NO: 4296905 - DNA, 25 bp, Homo sapien
catgtagacataagttaccatcttt

SEQ ID NO: 4296906 - DNA, 25 bp, Homo sapien
tggtccagtcctaagattctctcaa

SEQ ID NO: 4296907 - DNA, 25 bp, Homo sapien
taatggaacacagtctttcttctgg

SEQ ID NO: 4296908 - DNA, 25 bp, Homo sapien
ctgagcgccttcctgaaggctggga

SEQ ID NO: 4296909 - DNA, 25 bp, Homo sapien
tttgttttccccgagctgagcgcct

SEQ ID NO: 4296910 - DNA, 25 bp, Homo sapien
ctggctctgccccacgtgtataggg

SEQ ID NO: 4296911 - DNA, 25 bp, Homo sapien
tctcgtggtctgcacagagcaacag

SEQ ID NO: 4296912 - DNA, 25 bp, Homo sapien
tcttcctgcagttcaccttatagct

SEQ ID NO: 4296913 - DNA, 25 bp, Homo sapien
cgtgtatagggctgggatcttcctg

SEQ ID NO: 4296914 - DNA, 25 bp, Homo sapien
aaaagtgttatctctcctaagcaga

SEQ ID NO: 4296915 - DNA, 25 bp, Homo sapien
atgtcaatgaacacttgcccagcca

SEQ ID NO: 4296916 - DNA, 25 bp, Homo sapien
ttagcaactaatggctacaccaggg

SEQ ID NO: 4296917 - DNA, 25 bp, Homo sapien
tagaacgtcactaattaaaatcctg

SEQ ID NO: 4296918 - DNA, 25 bp, Homo sapien
tggactccaacaccctgttctgggc

SEQ ID NO: 4296919 - DNA, 25 bp, Homo sapien
ctcctctgtggggatgtcctcctca

SEQ ID NO: 4296920 - DNA, 25 bp, Homo sapien
aggccactcctctgtggggatgtcc

SEQ ID NO: 4296921 - DNA, 25 bp, Homo sapien
tcctcacacagcttggactccaaca

SEQ ID NO: 4296922 - DNA, 25 bp, Homo sapien
aagtcttccttctttagagctgggg

SEQ ID NO: 4296923 - DNA, 25 bp, Homo sapien
gtcttccttctttagagctggggtg

SEQ ID NO: 4296924 - DNA, 25 bp, Homo sapien
tgaaagtcttccttctttagagctg

SEQ ID NO: 4296925 - DNA, 25 bp, Homo sapien
ttccttctttagagctggggtgcat

SEQ ID NO: 4296926 - DNA, 25 bp, Homo sapien
tgtaagaactgcctccaaatcaact

SEQ ID NO: 4296927 - DNA, 25 bp, Homo sapien
ctgggaacccttaactcattgtaag

SEQ ID NO: 4296928 - DNA, 25 bp, Homo sapien
agagactggctgataaacaatctaa

SEQ ID NO: 4296929 - DNA, 25 bp, Homo sapien
gactggctgataaacaatctaaggg

SEQ ID NO: 4296930 - DNA, 25 bp, Homo sapien
gagacggtcccctgcgatttagata

SEQ ID NO: 4296931 - DNA, 25 bp, Homo sapien
tatacagagacataaacgagccagg

SEQ ID NO: 4296932 - DNA, 25 bp, Homo sapien
gattaagactggacgcttcgagcgg

SEQ ID NO: 4296933 - DNA, 25 bp, Homo sapien
gccctattattgacacagctgcgga

SEQ ID NO: 4296934 - DNA, 25 bp, Homo sapien
gcgcgtgcagggaaggccatcccag

SEQ ID NO: 4296935 - DNA, 25 bp, Homo sapien
cgcgcgtgcagggaaggccatccca

SEQ ID NO: 4296936 - DNA, 25 bp, Homo sapien
gcgcgcgtgcagggaaggccatccc

SEQ ID NO: 4296937 - DNA, 25 bp, Homo sapien
tgaagtagacacattgatatccctt

SEQ ID NO: 4296938 - DNA, 25 bp, Homo sapien
ggaagtgtacatacttggaggtgat

SEQ ID NO: 4296939 - DNA, 25 bp, Homo sapien
taattggtacaactgggatttagga

SEQ ID NO: 4296940 - DNA, 25 bp, Homo sapien
gatatcccttcaatgttgaaaggca

SEQ ID NO: 4296941 - DNA, 25 bp, Homo sapien
gacttgctgaacattacagtgttat

SEQ ID NO: 4296942 - DNA, 25 bp, Homo sapien
ccaatatgccatgtcaattgcttac

SEQ ID NO: 4296943 - DNA, 25 bp, Homo sapien
ttggaggaactggagctaaatgcta

SEQ ID NO: 4296944 - DNA, 25 bp, Homo sapien
aaatgctaaatctttgaacttccag

SEQ ID NO: 4296945 - DNA, 25 bp, Homo sapien
agtcccccgttctatcaaataccag

SEQ ID NO: 4296946 - DNA, 25 bp, Homo sapien
ttgaccgtagtcccccgttctatca

SEQ ID NO: 4296947 - DNA, 25 bp, Homo sapien
ttgctacacttatgcaatgcgtaat

SEQ ID NO: 4296948 - DNA, 25 bp, Homo sapien
tgctacacttatgcaatgcgtaata

SEQ ID NO: 4296949 - DNA, 25 bp, Homo sapien
tgatagctgcttccagtagaccaaa

SEQ ID NO: 4296950 - DNA, 25 bp, Homo sapien
tctttaggatcgtagggcatcagaa

SEQ ID NO: 4296951 - DNA, 25 bp, Homo sapien
tgtgtagacttaactgccattgctg

SEQ ID NO: 4296952 - DNA, 25 bp, Homo sapien
gaggaggttgtctctgtcaaagcag

SEQ ID NO: 4296953 - DNA, 25 bp, Homo sapien
gcagtagccagtcagaagagagtga

SEQ ID NO: 4296954 - DNA, 25 bp, Homo sapien
gaatcagaagcataagcttatactt

SEQ ID NO: 4296955 - DNA, 25 bp, Homo sapien
gtaacaactatgttgaaatatcaag

SEQ ID NO: 4296956 - DNA, 25 bp, Homo sapien
gaagcataagcttatacttttggta

SEQ ID NO: 4296957 - DNA, 25 bp, Homo sapien
caggcttagacattcatggatatgc

SEQ ID NO: 4296958 - DNA, 25 bp, Homo sapien
ccagtaggaaagaagcttaagtgtc

SEQ ID NO: 4296959 - DNA, 25 bp, Homo sapien
gctgcagagcagtagtggttaaaaa

SEQ ID NO: 4296960 - DNA, 25 bp, Homo sapien
tctaatgtactgcacttgatgccag

SEQ ID NO: 4296961 - DNA, 25 bp, Homo sapien
taactatggcaatgaagtcagtaga

SEQ ID NO: 4296962 - DNA, 25 bp, Homo sapien
gaatcctcaggctctacaatctagg

SEQ ID NO: 4296963 - DNA, 25 bp, Homo sapien
ttgccaaccagggattaaagctatt

SEQ ID NO: 4296964 - DNA, 25 bp, Homo sapien
tcctattaatgctgagagatcctaa

SEQ ID NO: 4296965 - DNA, 25 bp, Homo sapien
caattcaaaatcatgcaatgtttca

SEQ ID NO: 4296966 - DNA, 25 bp, Homo sapien
cactttagaattggatttgaagaac

SEQ ID NO: 4296967 - DNA, 25 bp, Homo sapien
gatactattaatcatgcagtgtaca

SEQ ID NO: 4296968 - DNA, 25 bp, Homo sapien
gaactcgactttatgtgatcatggt

SEQ ID NO: 4296969 - DNA, 25 bp, Homo sapien
aaaatatgaatcatacataagtgaa

SEQ ID NO: 4296970 - DNA, 25 bp, Homo sapien
tggtgggtaaagcaaaaaatatgaa

SEQ ID NO: 4296971 - DNA, 25 bp, Homo sapien
aatatgaatcatacataagtgaaat

SEQ ID NO: 4296972 - DNA, 25 bp, Homo sapien
ttggtgggtaaagcaaaaaatatga

SEQ ID NO: 4296973 - DNA, 25 bp, Homo sapien
tgaagacagggcagcgcaaatgtaa

SEQ ID NO: 4296974 - DNA, 25 bp, Homo sapien
cgtattctttgtaaaggacatatgc

SEQ ID NO: 4296975 - DNA, 25 bp, Homo sapien
ccttgtccataaaggtcgtattctt

SEQ ID NO: 4296976 - DNA, 25 bp, Homo sapien
ggacatatgcttttagacgattggg

SEQ ID NO: 4296977 - DNA, 25 bp, Homo sapien
cacaaatgttttagggagcgagggt

SEQ ID NO: 4296978 - DNA, 25 bp, Homo sapien
aggcggcacaaatgttttagggagc

SEQ ID NO: 4296979 - DNA, 25 bp, Homo sapien
cggcacaaatgttttagggagcgag

SEQ ID NO: 4296980 - DNA, 25 bp, Homo sapien
ctttaggcggcacaaatgttttagg

SEQ ID NO: 4296981 - DNA, 25 bp, Homo sapien
aataagaatacaattagtacttttg

SEQ ID NO: 4296982 - DNA, 25 bp, Homo sapien
taaaaagtcattctatgagaaggat

SEQ ID NO: 4296983 - DNA, 25 bp, Homo sapien
tctaaaacaaccaaataagaataca

SEQ ID NO: 4296984 - DNA, 25 bp, Homo sapien
taaccagaagagaagggtgttctaa

SEQ ID NO: 4296985 - DNA, 25 bp, Homo sapien
tcgaacaacctttccagagagatgt

SEQ ID NO: 4296986 - DNA, 25 bp, Homo sapien
tgttgcagccatgacaaagttatta

SEQ ID NO: 4296987 - DNA, 25 bp, Homo sapien
caacataatcaagcatcactcgaac

SEQ ID NO: 4296988 - DNA, 25 bp, Homo sapien
tcaactttgaacagatccgaacttg

SEQ ID NO: 4296989 - DNA, 25 bp, Homo sapien
tgtgtcatacccatagttcagcagc

SEQ ID NO: 4296990 - DNA, 25 bp, Homo sapien
taaccgggtcttgattaggcagagc

SEQ ID NO: 4296991 - DNA, 25 bp, Homo sapien
tgtgggcaatcaaaacatcgctctg

SEQ ID NO: 4296992 - DNA, 25 bp, Homo sapien
taatggcagcaagatccgtaactgg

SEQ ID NO: 4296993 - DNA, 25 bp, Homo sapien
agaatttcaaaatgcatttcaacat

SEQ ID NO: 4296994 - DNA, 25 bp, Homo sapien
ctgagaaagaatttcaaaatgcatt

SEQ ID NO: 4296995 - DNA, 25 bp, Homo sapien
gagaaagaatttcaaaatgcatttc

SEQ ID NO: 4296996 - DNA, 25 bp, Homo sapien
gaaagaatttcaaaatgcatttcaa

SEQ ID NO: 4296997 - DNA, 25 bp, Homo sapien
gcaggtggcctgaattcttagggat

SEQ ID NO: 4296998 - DNA, 25 bp, Homo sapien
ttcttagggatgttggcatcagctc

SEQ ID NO: 4296999 - DNA, 25 bp, Homo sapien
tgccacatggatgggcaggtggcct

SEQ ID NO: 4297000 - DNA, 25 bp, Homo sapien
gcctgaattcttagggatgttggca

SEQ ID NO: 4297001 - DNA, 25 bp, Homo sapien
tccacttgcggcttcaagtaagatg

SEQ ID NO: 4297002 - DNA, 25 bp, Homo sapien
gaggcctgaccatgagcattagctc

SEQ ID NO: 4297003 - DNA, 25 bp, Homo sapien
gcttcaagtaagatggaagaagaat

SEQ ID NO: 4297004 - DNA, 25 bp, Homo sapien
cagaggcctgaccatgagcattagc

SEQ ID NO: 4297005 - DNA, 25 bp, Homo sapien
gagagctgtcctctcgttggcacaa

SEQ ID NO: 4297006 - DNA, 25 bp, Homo sapien
gagtgaatccatacgtgctctgtgg

SEQ ID NO: 4297007 - DNA, 25 bp, Homo sapien
tccatagttgatcagcaaggcagcc

SEQ ID NO: 4297008 - DNA, 25 bp, Homo sapien
ccagtttggctgcttcgtggagagc

SEQ ID NO: 4297009 - DNA, 25 bp, Homo sapien
gaagaggagaattgccttcgaaatt

SEQ ID NO: 4297010 - DNA, 25 bp, Homo sapien
tgccttcgaaattcttagcatttgg

SEQ ID NO: 4297011 - DNA, 25 bp, Homo sapien
tagcatttggattgcagccattgag

SEQ ID NO: 4297012 - DNA, 25 bp, Homo sapien
ttcttagcatttggattgcagccat

SEQ ID NO: 4297013 - DNA, 25 bp, Homo sapien
tttcaccattgtgagtggtttgctc

SEQ ID NO: 4297014 - DNA, 25 bp, Homo sapien
tgtgagtggtttgctcccacagact

SEQ ID NO: 4297015 - DNA, 25 bp, Homo sapien
gagtggtttgctcccacagactggg

SEQ ID NO: 4297016 - DNA, 25 bp, Homo sapien
caccattgtgagtggtttgctccca

SEQ ID NO: 4297017 - DNA, 25 bp, Homo sapien
tgcagccttatgcagaggaatccag

SEQ ID NO: 4297018 - DNA, 25 bp, Homo sapien
aagtgtgacaatgcatcttccttac

SEQ ID NO: 4297019 - DNA, 25 bp, Homo sapien
tcaccaaatgcggaatggtacttgg

SEQ ID NO: 4297020 - DNA, 25 bp, Homo sapien
gcctatctcatctgcttcaccaaat

SEQ ID NO: 4297021 - DNA, 25 bp, Homo sapien
ttggcacacttacaaggaagcccat

SEQ ID NO: 4297022 - DNA, 25 bp, Homo sapien
tattaacgagtcaaatgagaacaga

SEQ ID NO: 4297023 - DNA, 25 bp, Homo sapien
agaacagattcacatttggcacact

SEQ ID NO: 4297024 - DNA, 25 bp, Homo sapien
attcacatttggcacacttacaagg

SEQ ID NO: 4297025 - DNA, 25 bp, Homo sapien
ctatcttcttatagtcagcgctcaa

SEQ ID NO: 4297026 - DNA, 25 bp, Homo sapien
tcttcttatagtcagcgctcaaaaa

SEQ ID NO: 4297027 - DNA, 25 bp, Homo sapien
tatcttcttatagtcagcgctcaaa

SEQ ID NO: 4297028 - DNA, 25 bp, Homo sapien
aactatcttcttatagtcagcgctc

SEQ ID NO: 4297029 - DNA, 25 bp, Homo sapien
gcttataaatatcctgcaaactctg

SEQ ID NO: 4297030 - DNA, 25 bp, Homo sapien
catccttaggtgcatgttgtgctgt

SEQ ID NO: 4297031 - DNA, 25 bp, Homo sapien
taggtgcatgttgtgctgttcctgg

SEQ ID NO: 4297032 - DNA, 25 bp, Homo sapien
tgctgttcctggcttataaatatcc

SEQ ID NO: 4297033 - DNA, 25 bp, Homo sapien
ttactttaaagtcagagtgaattaa

SEQ ID NO: 4297034 - DNA, 25 bp, Homo sapien
tttactttaaagtcagagtgaatta

SEQ ID NO: 4297035 - DNA, 25 bp, Homo sapien
gtgaagttttcactgttaaggacta

SEQ ID NO: 4297036 - DNA, 25 bp, Homo sapien
tatcctctaggacagcagtgaagtt

SEQ ID NO: 4297037 - DNA, 25 bp, Homo sapien
ttttgttttatcctctaggacagca

SEQ ID NO: 4297038 - DNA, 25 bp, Homo sapien
tgttttatcctctaggacagcagtg

SEQ ID NO: 4297039 - DNA, 25 bp, Homo sapien
ttggatgttttataaatttgtccaa

SEQ ID NO: 4297040 - DNA, 25 bp, Homo sapien
tttggatgttttataaatttgtcca

SEQ ID NO: 4297041 - DNA, 25 bp, Homo sapien
tggatgttttataaatttgtccaat

SEQ ID NO: 4297042 - DNA, 25 bp, Homo sapien
aaagcaaagcaaccccgcgcttgat

SEQ ID NO: 4297043 - DNA, 25 bp, Homo sapien
taggcatccgactttataatccgag

SEQ ID NO: 4297044 - DNA, 25 bp, Homo sapien
gcttgatccagtgccgagtaggttg

SEQ ID NO: 4297045 - DNA, 25 bp, Homo sapien
caaagttagtagaatgtcccgtagt

SEQ ID NO: 4297046 - DNA, 25 bp, Homo sapien
gggatattgttcagcaagcaatcca

SEQ ID NO: 4297047 - DNA, 25 bp, Homo sapien
ttttatccatatgatgggcatcagg

SEQ ID NO: 4297048 - DNA, 25 bp, Homo sapien
tcaggtcaaacagaagtttgggata

SEQ ID NO: 4297049 - DNA, 25 bp, Homo sapien
tggttttatccatatgatgggcatc

SEQ ID NO: 4297050 - DNA, 25 bp, Homo sapien
ggtcctggcagctgaatccactgac

SEQ ID NO: 4297051 - DNA, 25 bp, Homo sapien
aggtcctggcagctgaatccactga

SEQ ID NO: 4297052 - DNA, 25 bp, Homo sapien
ctacaaatgaagaggtcctggcagc

SEQ ID NO: 4297053 - DNA, 25 bp, Homo sapien
ctatgattcagctacaaatgaagag

SEQ ID NO: 4297054 - DNA, 25 bp, Homo sapien
ggatataaacaccatcttctggtga

SEQ ID NO: 4297055 - DNA, 25 bp, Homo sapien
tgtcagatgtatcagatgggataac

SEQ ID NO: 4297056 - DNA, 25 bp, Homo sapien
gatacagtccgtggatataaacacc

SEQ ID NO: 4297057 - DNA, 25 bp, Homo sapien
ccagcgtgcgccatcgagatacagt

SEQ ID NO: 4297058 - DNA, 25 bp, Homo sapien
gtgaaaaagaaacctgacagccaaa

SEQ ID NO: 4297059 - DNA, 25 bp, Homo sapien
ttcatatcctagcaaatcaataggg

SEQ ID NO: 4297060 - DNA, 25 bp, Homo sapien
tgcatagctccagttaaaaaggcct

SEQ ID NO: 4297061 - DNA, 25 bp, Homo sapien
attttctggcataattctgcatagc

SEQ ID NO: 4297062 - DNA, 25 bp, Homo sapien
caaaacacattatgtcagtttttaa

SEQ ID NO: 4297063 - DNA, 25 bp, Homo sapien
aagtgccacctgatgtacaattcct

SEQ ID NO: 4297064 - DNA, 25 bp, Homo sapien
acattttccatcacgaggccctctt

SEQ ID NO: 4297065 - DNA, 25 bp, Homo sapien
tccctgacgtcaaacacacagccta

SEQ ID NO: 4297066 - DNA, 25 bp, Homo sapien
aagagtcaaatcttctgcaaaagcc

SEQ ID NO: 4297067 - DNA, 25 bp, Homo sapien
ttgagcattaacgtgaatgaaacat

SEQ ID NO: 4297068 - DNA, 25 bp, Homo sapien
agtttgaagagtcaaatcttctgca

SEQ ID NO: 4297069 - DNA, 25 bp, Homo sapien
ttaacgtgaatgaaacatagtttga

SEQ ID NO: 4297070 - DNA, 25 bp, Homo sapien
tatggaacatcccttactatagtgt

SEQ ID NO: 4297071 - DNA, 25 bp, Homo sapien
aaatggactttgtctctgagcaggc

SEQ ID NO: 4297072 - DNA, 25 bp, Homo sapien
cttgtcccctgtaagctcttggcag

SEQ ID NO: 4297073 - DNA, 25 bp, Homo sapien
ttctttagatacatggcttgtcccc

SEQ ID NO: 4297074 - DNA, 25 bp, Homo sapien
aacaagtaagctaccggagagtgcc

SEQ ID NO: 4297075 - DNA, 25 bp, Homo sapien
atagctttttcaaggtcccgtagag

SEQ ID NO: 4297076 - DNA, 25 bp, Homo sapien
tcaaccgggctaggaaatctgtgat

SEQ ID NO: 4297077 - DNA, 25 bp, Homo sapien
taaggcttgggtatgaacgtttggc

SEQ ID NO: 4297078 - DNA, 25 bp, Homo sapien
tttccatttcttgtactaacacagt

SEQ ID NO: 4297079 - DNA, 25 bp, Homo sapien
gccatttcaatgtcgaaatcactag

SEQ ID NO: 4297080 - DNA, 25 bp, Homo sapien
taacacagtattcatgctttcttca

SEQ ID NO: 4297081 - DNA, 25 bp, Homo sapien
ggatacttccgtagtgccatttcaa

SEQ ID NO: 4297082 - DNA, 25 bp, Homo sapien
ttcatgtaatccaaatatctcaggg

SEQ ID NO: 4297083 - DNA, 25 bp, Homo sapien
atccttggagatgtcaacgttttca

SEQ ID NO: 4297084 - DNA, 25 bp, Homo sapien
ccaaatatctcagggtgttgagtaa

SEQ ID NO: 4297085 - DNA, 25 bp, Homo sapien
atctttggtaatttctaacagaatc

SEQ ID NO: 4297086 - DNA, 25 bp, Homo sapien
cccagtcaggtaagatatagcttca

SEQ ID NO: 4297087 - DNA, 25 bp, Homo sapien
tcataagtgcctttaggaggtgcaa

SEQ ID NO: 4297088 - DNA, 25 bp, Homo sapien
tccataattacactccccagtcagg

SEQ ID NO: 4297089 - DNA, 25 bp, Homo sapien
gaggtgcaaaatagtttccactggg

SEQ ID NO: 4297090 - DNA, 25 bp, Homo sapien
ggaatattccaaccaagaggaccaa

SEQ ID NO: 4297091 - DNA, 25 bp, Homo sapien
gatgcgcaagtcagattcattaaat

SEQ ID NO: 4297092 - DNA, 25 bp, Homo sapien
agttgtcggatactgatgcgcaagt

SEQ ID NO: 4297093 - DNA, 25 bp, Homo sapien
tcattaaatccatatggaatattcc

SEQ ID NO: 4297094 - DNA, 25 bp, Homo sapien
gacccgtgggaggttcattagtcat

SEQ ID NO: 4297095 - DNA, 25 bp, Homo sapien
tcagaaactggatcagtgagatatg

SEQ ID NO: 4297096 - DNA, 25 bp, Homo sapien
tgaaggagattcagccgaagacccg

SEQ ID NO: 4297097 - DNA, 25 bp, Homo sapien
cacggcatcccttgaaaaactcagg

SEQ ID NO: 4297098 - DNA, 25 bp, Homo sapien
caagatggcaattctgtaggcacac

SEQ ID NO: 4297099 - DNA, 25 bp, Homo sapien
tacaggtttcagaggtaaaatcttc

SEQ ID NO: 4297100 - DNA, 25 bp, Homo sapien
tgaagatggatagcttgtcagccaa

SEQ ID NO: 4297101 - DNA, 25 bp, Homo sapien
ttgtcagccaaagcctaaaggatga

SEQ ID NO: 4297102 - DNA, 25 bp, Homo sapien
tccagacatagatttatcatttgca

SEQ ID NO: 4297103 - DNA, 25 bp, Homo sapien
tccctgtcccagtgaaatagcttga

SEQ ID NO: 4297104 - DNA, 25 bp, Homo sapien
cagacatagatttatcatttgcaaa

SEQ ID NO: 4297105 - DNA, 25 bp, Homo sapien
ttgtccctgtcccagtgaaatagct

SEQ ID NO: 4297106 - DNA, 25 bp, Homo sapien
aatggtggaggctctacaaactttt

SEQ ID NO: 4297107 - DNA, 25 bp, Homo sapien
caaatcaaatggtggaggctctaca

SEQ ID NO: 4297108 - DNA, 25 bp, Homo sapien
ttaagggaatggtgcaatttgaatc

SEQ ID NO: 4297109 - DNA, 25 bp, Homo sapien
acatagtttgttatagctggggtta

SEQ ID NO: 4297110 - DNA, 25 bp, Homo sapien
tatcaggtcttaaacaccgaagaat

SEQ ID NO: 4297111 - DNA, 25 bp, Homo sapien
cttatcaggtcttaaacaccgaaga

SEQ ID NO: 4297112 - DNA, 25 bp, Homo sapien
caggtcttaaacaccgaagaattat

SEQ ID NO: 4297113 - DNA, 25 bp, Homo sapien
tcaggtcttaaacaccgaagaatta

SEQ ID NO: 4297114 - DNA, 25 bp, Homo sapien
tttactgtcatagatttctcgccat

SEQ ID NO: 4297115 - DNA, 25 bp, Homo sapien
tactgtcatagatttctcgccattc

SEQ ID NO: 4297116 - DNA, 25 bp, Homo sapien
gatttctcgccattcatatatatgt

SEQ ID NO: 4297117 - DNA, 25 bp, Homo sapien
tagatttctcgccattcatatatat

SEQ ID NO: 4297118 - DNA, 25 bp, Homo sapien
ttcctggtattcaatctctttcctt

SEQ ID NO: 4297119 - DNA, 25 bp, Homo sapien
attcacttgcccgacagatttcctc

SEQ ID NO: 4297120 - DNA, 25 bp, Homo sapien
ctcccagcttttgtcctgtagccaa

SEQ ID NO: 4297121 - DNA, 25 bp, Homo sapien
gcacttttaagacttactcctccag

SEQ ID NO: 4297122 - DNA, 25 bp, Homo sapien
tttgcatggaaccacgaaagaccgc

SEQ ID NO: 4297123 - DNA, 25 bp, Homo sapien
taccaggcttcgaaatatactacca

SEQ ID NO: 4297124 - DNA, 25 bp, Homo sapien
caaagctctattaacgaaaacagca

SEQ ID NO: 4297125 - DNA, 25 bp, Homo sapien
aaatgactctactacccaaggtgat

SEQ ID NO: 4297126 - DNA, 25 bp, Homo sapien
gaagaagattggcacataataaaaa

SEQ ID NO: 4297127 - DNA, 25 bp, Homo sapien
agaagaagattggcacataataaaa

SEQ ID NO: 4297128 - DNA, 25 bp, Homo sapien
gaagattggcacataataaaaagga

SEQ ID NO: 4297129 - DNA, 25 bp, Homo sapien
agaagattggcacataataaaaagg

SEQ ID NO: 4297130 - DNA, 25 bp, Homo sapien
gtccttctcaaatagtgatcggcat

SEQ ID NO: 4297131 - DNA, 25 bp, Homo sapien
gtggtcatttaaatatcgtaggcgc

SEQ ID NO: 4297132 - DNA, 25 bp, Homo sapien
tatcgtaggcgcttttccaaaatct

SEQ ID NO: 4297133 - DNA, 25 bp, Homo sapien
tagtgatcggcatatattacaatat

SEQ ID NO: 4297134 - DNA, 25 bp, Homo sapien
tcatatcctctctccattcattcat

SEQ ID NO: 4297135 - DNA, 25 bp, Homo sapien
cttcatatcctctctccattcattc

SEQ ID NO: 4297136 - DNA, 25 bp, Homo sapien
catatcctctctccattcattcata

SEQ ID NO: 4297137 - DNA, 25 bp, Homo sapien
atatcctctctccattcattcatac

SEQ ID NO: 4297138 - DNA, 25 bp, Homo sapien
ccagattgctttagaactcgacata

SEQ ID NO: 4297139 - DNA, 25 bp, Homo sapien
gccatggatgtagccagacgagtta

SEQ ID NO: 4297140 - DNA, 25 bp, Homo sapien
gagttaaagattgacgaccacttcc

SEQ ID NO: 4297141 - DNA, 25 bp, Homo sapien
ttcctccaagaccaacaagcaaagc

SEQ ID NO: 4297142 - DNA, 25 bp, Homo sapien
tggtccacaacatcactaaaatgat

SEQ ID NO: 4297143 - DNA, 25 bp, Homo sapien
tgtgtgtttgattatactcatctaa

SEQ ID NO: 4297144 - DNA, 25 bp, Homo sapien
tcatataatcaccaaacatgagatt

SEQ ID NO: 4297145 - DNA, 25 bp, Homo sapien
tcaatataaactctatcatctcctt

SEQ ID NO: 4297146 - DNA, 25 bp, Homo sapien
atgtgaaaagatactgtgaaatgat

SEQ ID NO: 4297147 - DNA, 25 bp, Homo sapien
ggtgcattttgtttcctcaaatgtg

SEQ ID NO: 4297148 - DNA, 25 bp, Homo sapien
tgaaatgattctttaaaatggtcct

SEQ ID NO: 4297149 - DNA, 25 bp, Homo sapien
gcattttgtttcctcaaatgtgaaa

SEQ ID NO: 4297150 - DNA, 25 bp, Homo sapien
gaacctcatgcacaaacagacggat

SEQ ID NO: 4297151 - DNA, 25 bp, Homo sapien
tcgccacggcgtctctttcaatgag

SEQ ID NO: 4297152 - DNA, 25 bp, Homo sapien
gaggcgatcataaaacactcggaga

SEQ ID NO: 4297153 - DNA, 25 bp, Homo sapien
tttcaatgagtaaacagccccggat

SEQ ID NO: 4297154 - DNA, 25 bp, Homo sapien
ctgcagatgttgaaatgtcgaatac

SEQ ID NO: 4297155 - DNA, 25 bp, Homo sapien
gaagattcggaccatagtttcatca

SEQ ID NO: 4297156 - DNA, 25 bp, Homo sapien
caattacaaagtactctggaggaaa

SEQ ID NO: 4297157 - DNA, 25 bp, Homo sapien
gtcccattgactatctggttcccaa

SEQ ID NO: 4297158 - DNA, 25 bp, Homo sapien
gtccaccagcgtgattttacttgtg

SEQ ID NO: 4297159 - DNA, 25 bp, Homo sapien
cattgcagcaatcagctctatgtcc

SEQ ID NO: 4297160 - DNA, 25 bp, Homo sapien
aatcagctctatgtccaccagcgtg

SEQ ID NO: 4297161 - DNA, 25 bp, Homo sapien
ctggagggcccattgcagcaatcag

SEQ ID NO: 4297162 - DNA, 25 bp, Homo sapien
tcccataggtggtccaaagactcct

SEQ ID NO: 4297163 - DNA, 25 bp, Homo sapien
aaaactgtcgtaataattcaatagg

SEQ ID NO: 4297164 - DNA, 25 bp, Homo sapien
tacttctccaatgcaggcatattca

SEQ ID NO: 4297165 - DNA, 25 bp, Homo sapien
ggtggttgagctccatacttctcca

SEQ ID NO: 4297166 - DNA, 25 bp, Homo sapien
cgctggtccgtgcagataagttaat

SEQ ID NO: 4297167 - DNA, 25 bp, Homo sapien
gattcattagcttatccttcacata

SEQ ID NO: 4297168 - DNA, 25 bp, Homo sapien
cacagattttcctgtacccgttgga

SEQ ID NO: 4297169 - DNA, 25 bp, Homo sapien
ccttttccaagtgattcattagctt

SEQ ID NO: 4297170 - DNA, 25 bp, Homo sapien
taattcattccaatggacccagcga

SEQ ID NO: 4297171 - DNA, 25 bp, Homo sapien
tttgcataggtaatactcaaatcca

SEQ ID NO: 4297172 - DNA, 25 bp, Homo sapien
tcaaatccattagaaacgtatatct

SEQ ID NO: 4297173 - DNA, 25 bp, Homo sapien
tatctaattgtgtccatcgtaggga

SEQ ID NO: 4297174 - DNA, 25 bp, Homo sapien
catgtagtcatagaccaggcctttt

SEQ ID NO: 4297175 - DNA, 25 bp, Homo sapien
ctcatacatgtagtcatagaccagg

SEQ ID NO: 4297176 - DNA, 25 bp, Homo sapien
catagaccaggcctttttcatcaaa

SEQ ID NO: 4297177 - DNA, 25 bp, Homo sapien
atgggcattcccatttacccacaga

SEQ ID NO: 4297178 - DNA, 25 bp, Homo sapien
gacggccatctgtatcacaacttcc

SEQ ID NO: 4297179 - DNA, 25 bp, Homo sapien
tccaatcgaccaaatcaaagagaat

SEQ ID NO: 4297180 - DNA, 25 bp, Homo sapien
cccagtatgattaatcgtatgaaag

SEQ ID NO: 4297181 - DNA, 25 bp, Homo sapien
aaagtatcaaaaacacgacggccat

SEQ ID NO: 4297182 - DNA, 25 bp, Homo sapien
gaggcgtgtgagagatacaaccacg

SEQ ID NO: 4297183 - DNA, 25 bp, Homo sapien
tgcaaagtagcacttcaaagaggcg

SEQ ID NO: 4297184 - DNA, 25 bp, Homo sapien
gcttgctagtaggatcattttctac

SEQ ID NO: 4297185 - DNA, 25 bp, Homo sapien
atccaaacacgaatgtgcttgctag

SEQ ID NO: 4297186 - DNA, 25 bp, Homo sapien
gaattcaaccaagaagacacaagtg

SEQ ID NO: 4297187 - DNA, 25 bp, Homo sapien
taccacaacgacttacagtggcagg

SEQ ID NO: 4297188 - DNA, 25 bp, Homo sapien
taaccaggcaaaaagtcctctcaga

SEQ ID NO: 4297189 - DNA, 25 bp, Homo sapien
gtggttcccatcctaactgtgaagg

SEQ ID NO: 4297190 - DNA, 25 bp, Homo sapien
aagatgaggctcatttggggggaca

SEQ ID NO: 4297191 - DNA, 25 bp, Homo sapien
atgcctgggaaaggtccattgtttc

SEQ ID NO: 4297192 - DNA, 25 bp, Homo sapien
gcctgggaaaggtccattgtttcaa

SEQ ID NO: 4297193 - DNA, 25 bp, Homo sapien
aaaggtccattgtttcaaagatgag

SEQ ID NO: 4297194 - DNA, 25 bp, Homo sapien
tgttagccacaataccatcagtcca

SEQ ID NO: 4297195 - DNA, 25 bp, Homo sapien
tccggtcaggtgtttctgataaggc

SEQ ID NO: 4297196 - DNA, 25 bp, Homo sapien
tcaataggaccatcaaatacaaccc

SEQ ID NO: 4297197 - DNA, 25 bp, Homo sapien
catgctctctatccacaaagtgtca

SEQ ID NO: 4297198 - DNA, 25 bp, Homo sapien
catgcagaacttttgtcttagcagc

SEQ ID NO: 4297199 - DNA, 25 bp, Homo sapien
actgtccaaaaagttggcccatagt

SEQ ID NO: 4297200 - DNA, 25 bp, Homo sapien
tacagttctataaatgaccttttct

SEQ ID NO: 4297201 - DNA, 25 bp, Homo sapien
aagttagcgtatccgccagcacatg

SEQ ID NO: 4297202 - DNA, 25 bp, Homo sapien
cattgcaggcttcatgagcacattc

SEQ ID NO: 4297203 - DNA, 25 bp, Homo sapien
ccatgtctaacaatcatcatttcat

SEQ ID NO: 4297204 - DNA, 25 bp, Homo sapien
caggctgaagattatgtacattgca

SEQ ID NO: 4297205 - DNA, 25 bp, Homo sapien
agaaaaaatttaacaggctgaagat

SEQ ID NO: 4297206 - DNA, 25 bp, Homo sapien
ccaggaaataagtcactagttattc

SEQ ID NO: 4297207 - DNA, 25 bp, Homo sapien
tgatagtcagcttcaggaagtttaa

SEQ ID NO: 4297208 - DNA, 25 bp, Homo sapien
tatatcatgtgataaaaactttggt

SEQ ID NO: 4297209 - DNA, 25 bp, Homo sapien
ttacatctttaattgatcgaagaag

SEQ ID NO: 4297210 - DNA, 25 bp, Homo sapien
ttttagttttagattgccagcagcc

SEQ ID NO: 4297211 - DNA, 25 bp, Homo sapien
tttagttttagattgccagcagcca

SEQ ID NO: 4297212 - DNA, 25 bp, Homo sapien
tagttttagattgccagcagccact

SEQ ID NO: 4297213 - DNA, 25 bp, Homo sapien
cagcagccactaaaacggcttttac

SEQ ID NO: 4297214 - DNA, 25 bp, Homo sapien
tataagcgcatagtttggaaccatc

SEQ ID NO: 4297215 - DNA, 25 bp, Homo sapien
tgctctgagcaaagcctataggtca

SEQ ID NO: 4297216 - DNA, 25 bp, Homo sapien
gagggagatttctgctataagcgca

SEQ ID NO: 4297217 - DNA, 25 bp, Homo sapien
aatgaaattgcgatgagagctgctc

SEQ ID NO: 4297218 - DNA, 25 bp, Homo sapien
ggatctgttgagctaccactgacaa

SEQ ID NO: 4297219 - DNA, 25 bp, Homo sapien
tgaatagctctctgaatgcaaagga

SEQ ID NO: 4297220 - DNA, 25 bp, Homo sapien
gctacaaaacaattcggattgagct

SEQ ID NO: 4297221 - DNA, 25 bp, Homo sapien
ttgtccggcaattcagagcgtcctg

SEQ ID NO: 4297222 - DNA, 25 bp, Homo sapien
tcaaagcaagcccaagcaccagaag

SEQ ID NO: 4297223 - DNA, 25 bp, Homo sapien
atcaaagcaagcccaagcaccagaa

SEQ ID NO: 4297224 - DNA, 25 bp, Homo sapien
caaagcaagcccaagcaccagaaga

SEQ ID NO: 4297225 - DNA, 25 bp, Homo sapien
aagagctttagccaagtccttggtg

SEQ ID NO: 4297226 - DNA, 25 bp, Homo sapien
gcccatcagaacagttgaacaccac

SEQ ID NO: 4297227 - DNA, 25 bp, Homo sapien
tttcccattgctagataatctagcc

SEQ ID NO: 4297228 - DNA, 25 bp, Homo sapien
caaggtttaaatagaaagcacctat

SEQ ID NO: 4297229 - DNA, 25 bp, Homo sapien
tgaaaaacacatgtgaaaagaaatc

SEQ ID NO: 4297230 - DNA, 25 bp, Homo sapien
gaaaaacacatgtgaaaagaaatcc

SEQ ID NO: 4297231 - DNA, 25 bp, Homo sapien
gaaatgaaaaacacatgtgaaaaga

SEQ ID NO: 4297232 - DNA, 25 bp, Homo sapien
aaacacatgtgaaaagaaatccatg

SEQ ID NO: 4297233 - DNA, 25 bp, Homo sapien
tcagttagaggcgtaatgacaagtc

SEQ ID NO: 4297234 - DNA, 25 bp, Homo sapien
tagaggcgtaatgacaagtcgaggt

SEQ ID NO: 4297235 - DNA, 25 bp, Homo sapien
cctgtcagttagaggcgtaatgaca

SEQ ID NO: 4297236 - DNA, 25 bp, Homo sapien
cgtaatgacaagtcgaggtgagtta

SEQ ID NO: 4297237 - DNA, 25 bp, Homo sapien
ttttcccaataatatcggagctgag

SEQ ID NO: 4297238 - DNA, 25 bp, Homo sapien
tacattgcaattaatgatacgaact

SEQ ID NO: 4297239 - DNA, 25 bp, Homo sapien
tacgaactcgggcattctcattttc

SEQ ID NO: 4297240 - DNA, 25 bp, Homo sapien
atatcggagctgagcaagccacagg

SEQ ID NO: 4297241 - DNA, 25 bp, Homo sapien
ccattttaatcatgtccatgaccac

SEQ ID NO: 4297242 - DNA, 25 bp, Homo sapien
ccagagtggtcctggtctgcttaga

SEQ ID NO: 4297243 - DNA, 25 bp, Homo sapien
tggttctgaagttccttataatact

SEQ ID NO: 4297244 - DNA, 25 bp, Homo sapien
ttaccagctctacaatctcattcag

SEQ ID NO: 4297245 - DNA, 25 bp, Homo sapien
tacaaagtacaacttggccaggcca

SEQ ID NO: 4297246 - DNA, 25 bp, Homo sapien
ctcagatgtccagaacatttgagaa

SEQ ID NO: 4297247 - DNA, 25 bp, Homo sapien
tcctgtgtctcagatgtccagaaca

SEQ ID NO: 4297248 - DNA, 25 bp, Homo sapien
tccgtcccgccacttatcacttcct

SEQ ID NO: 4297249 - DNA, 25 bp, Homo sapien
tcgccctcagagctatacatggctt

SEQ ID NO: 4297250 - DNA, 25 bp, Homo sapien
cccgcgctgcagacgtggaaatgag

SEQ ID NO: 4297251 - DNA, 25 bp, Homo sapien
gaaggaactctaatttagcaatgcc

SEQ ID NO: 4297252 - DNA, 25 bp, Homo sapien
atcgtgaacactccggagcattagg

SEQ ID NO: 4297253 - DNA, 25 bp, Homo sapien
ctctaacatttcatcattagataag

SEQ ID NO: 4297254 - DNA, 25 bp, Homo sapien
ctttggtctctgataaaatctctaa

SEQ ID NO: 4297255 - DNA, 25 bp, Homo sapien
ctaagtggatctttggtctctgata

SEQ ID NO: 4297256 - DNA, 25 bp, Homo sapien
aacatttcatcattagataagaaga

SEQ ID NO: 4297257 - DNA, 25 bp, Homo sapien
ttcttttcaagatatgcgttaagac

SEQ ID NO: 4297258 - DNA, 25 bp, Homo sapien
aaaagacgtttcttttcaagatatg

SEQ ID NO: 4297259 - DNA, 25 bp, Homo sapien
cgtttcttttcaagatatgcgttaa

SEQ ID NO: 4297260 - DNA, 25 bp, Homo sapien
aagacgtttcttttcaagatatgcg

SEQ ID NO: 4297261 - DNA, 25 bp, Homo sapien
taaacctgttaaagaagtggcagca

SEQ ID NO: 4297262 - DNA, 25 bp, Homo sapien
caaaagatgggctctaagtacagcc

SEQ ID NO: 4297263 - DNA, 25 bp, Homo sapien
gaaattgacgcccttcttctggcat

SEQ ID NO: 4297264 - DNA, 25 bp, Homo sapien
acaaaacttcatgatatctctccag

SEQ ID NO: 4297265 - DNA, 25 bp, Homo sapien
tgtattcgaatcaagcggtcctccc

SEQ ID NO: 4297266 - DNA, 25 bp, Homo sapien
gaaaagcaatatcttcccaagttcc

SEQ ID NO: 4297267 - DNA, 25 bp, Homo sapien
caaatggtttgatgaaaggtgagcc

SEQ ID NO: 4297268 - DNA, 25 bp, Homo sapien
ggcctgaatctcatccaccgaagaa

SEQ ID NO: 4297269 - DNA, 25 bp, Homo sapien
aatttgatcatcaaggatggcctga

SEQ ID NO: 4297270 - DNA, 25 bp, Homo sapien
taaaacttttctcagtgtagttcca

SEQ ID NO: 4297271 - DNA, 25 bp, Homo sapien
cacttcaaattgttccaagtatggg

SEQ ID NO: 4297272 - DNA, 25 bp, Homo sapien
ctgtttccagtgacgagctctcatt

SEQ ID NO: 4297273 - DNA, 25 bp, Homo sapien
catagcctacaatttctgatatctg

SEQ ID NO: 4297274 - DNA, 25 bp, Homo sapien
gaatggagacagtaggaatatattc

SEQ ID NO: 4297275 - DNA, 25 bp, Homo sapien
ctggattgcacagaatggagacagt

SEQ ID NO: 4297276 - DNA, 25 bp, Homo sapien
gattgcacagaatggagacagtagg

SEQ ID NO: 4297277 - DNA, 25 bp, Homo sapien
ttgcacagaatggagacagtaggaa

SEQ ID NO: 4297278 - DNA, 25 bp, Homo sapien
taaaagcttttatctgttccatgac

SEQ ID NO: 4297279 - DNA, 25 bp, Homo sapien
ttaaaagcttttatctgttccatga

SEQ ID NO: 4297280 - DNA, 25 bp, Homo sapien
cttaaaagcttttatctgttccatg

SEQ ID NO: 4297281 - DNA, 25 bp, Homo sapien
tttctcgggaaaactcttccacatc

SEQ ID NO: 4297282 - DNA, 25 bp, Homo sapien
ttccaaagaccgttttcttgctgcc

SEQ ID NO: 4297283 - DNA, 25 bp, Homo sapien
gtaatagtagcattgtcttttggtt

SEQ ID NO: 4297284 - DNA, 25 bp, Homo sapien
aatagtagcattgtcttttggttct

SEQ ID NO: 4297285 - DNA, 25 bp, Homo sapien
tgaaaatccaatcattatgctcata

SEQ ID NO: 4297286 - DNA, 25 bp, Homo sapien
attatgctcataaaccagaaaagga

SEQ ID NO: 4297287 - DNA, 25 bp, Homo sapien
cagaagggtaatgtgccgacattgt

SEQ ID NO: 4297288 - DNA, 25 bp, Homo sapien
tgtgccgacattgtaacaacgtttg

SEQ ID NO: 4297289 - DNA, 25 bp, Homo sapien
tattaataaactgcactgcttcttc

SEQ ID NO: 4297290 - DNA, 25 bp, Homo sapien
taaaaaacttctgatagggctcaat

SEQ ID NO: 4297291 - DNA, 25 bp, Homo sapien
cagattcctgaatacgtttttgtag

SEQ ID NO: 4297292 - DNA, 25 bp, Homo sapien
cgtttttctgatcgctgccacttca

SEQ ID NO: 4297293 - DNA, 25 bp, Homo sapien
ctctctcttggccattagttcattt

SEQ ID NO: 4297294 - DNA, 25 bp, Homo sapien
tctcttggccattagttcattttct

SEQ ID NO: 4297295 - DNA, 25 bp, Homo sapien
taaactcctccatgcggcgtgattc

SEQ ID NO: 4297296 - DNA, 25 bp, Homo sapien
catgcggcgtgattctttttctatt

SEQ ID NO: 4297297 - DNA, 25 bp, Homo sapien
ttcatcaaagatgggattaattttc

SEQ ID NO: 4297298 - DNA, 25 bp, Homo sapien
aaagtaactcatttggcgtttagat

SEQ ID NO: 4297299 - DNA, 25 bp, Homo sapien
catttaaagctaagtcttcttgagg

SEQ ID NO: 4297300 - DNA, 25 bp, Homo sapien
taggccacatgaggacagttgcatt

SEQ ID NO: 4297301 - DNA, 25 bp, Homo sapien
tggatccttaaaatcaactcttcga

SEQ ID NO: 4297302 - DNA, 25 bp, Homo sapien
tttcagggacttttaatgcatgttc

SEQ ID NO: 4297303 - DNA, 25 bp, Homo sapien
tacagtccgggctttttctacataa

SEQ ID NO: 4297304 - DNA, 25 bp, Homo sapien
tcaactcttcgattcctacagtccg

SEQ ID NO: 4297305 - DNA, 25 bp, Homo sapien
ctttatttgtcaggcctgtcttcaa

SEQ ID NO: 4297306 - DNA, 25 bp, Homo sapien
aatccaaacgcaccatagtgtaatg

SEQ ID NO: 4297307 - DNA, 25 bp, Homo sapien
aacgcaccatagtgtaatgaatcca

SEQ ID NO: 4297308 - DNA, 25 bp, Homo sapien
cttcacaatccaaacgcaccatagt

SEQ ID NO: 4297309 - DNA, 25 bp, Homo sapien
ctgaggcaagactgagaaatttttc

SEQ ID NO: 4297310 - DNA, 25 bp, Homo sapien
gaggcaagactgagaaatttttcta

SEQ ID NO: 4297311 - DNA, 25 bp, Homo sapien
ggcaagactgagaaatttttctata

SEQ ID NO: 4297312 - DNA, 25 bp, Homo sapien
gcaagactgagaaatttttctataa

SEQ ID NO: 4297313 - DNA, 25 bp, Homo sapien
catgaaaaacacctgaacagtgacc

SEQ ID NO: 4297314 - DNA, 25 bp, Homo sapien
ccacagtgggataccaatatacaca

SEQ ID NO: 4297315 - DNA, 25 bp, Homo sapien
aaagactgataagcccaaaggttga

SEQ ID NO: 4297316 - DNA, 25 bp, Homo sapien
tcttaggacacaaaacgtatgaacc

SEQ ID NO: 4297317 - DNA, 25 bp, Homo sapien
cccataccacccagcaatccagctc

SEQ ID NO: 4297318 - DNA, 25 bp, Homo sapien
ttcccataccacccagcaatccagc

SEQ ID NO: 4297319 - DNA, 25 bp, Homo sapien
tcccataccacccagcaatccagct

SEQ ID NO: 4297320 - DNA, 25 bp, Homo sapien
tgtatattcatcaaaagtatgatct

SEQ ID NO: 4297321 - DNA, 25 bp, Homo sapien
ctgtatattcatcaaaagtatgatc

SEQ ID NO: 4297322 - DNA, 25 bp, Homo sapien
tatattcatcaaaagtatgatcttc

SEQ ID NO: 4297323 - DNA, 25 bp, Homo sapien
ctctgtatattcatcaaaagtatga

SEQ ID NO: 4297324 - DNA, 25 bp, Homo sapien
gcagtcccatcaaggagccaattat

SEQ ID NO: 4297325 - DNA, 25 bp, Homo sapien
aactgcagtcccatcaaggagccaa

SEQ ID NO: 4297326 - DNA, 25 bp, Homo sapien
tgcagtcccatcaaggagccaatta

SEQ ID NO: 4297327 - DNA, 25 bp, Homo sapien
gtcccatcaaggagccaattatatt

SEQ ID NO: 4297328 - DNA, 25 bp, Homo sapien
ttgaagttcctgatagccaagaggg

SEQ ID NO: 4297329 - DNA, 25 bp, Homo sapien
caagatttactggtgttgaagttcc

SEQ ID NO: 4297330 - DNA, 25 bp, Homo sapien
tatcaacagcccagtgtaacacgtg

SEQ ID NO: 4297331 - DNA, 25 bp, Homo sapien
taagttccgatgtactgctgccttc

SEQ ID NO: 4297332 - DNA, 25 bp, Homo sapien
taaaattccattttgtcgtcatcaa

SEQ ID NO: 4297333 - DNA, 25 bp, Homo sapien
tattcgttccaccaaactcaagaca

SEQ ID NO: 4297334 - DNA, 25 bp, Homo sapien
gagcttcggctattcgttccaccaa

SEQ ID NO: 4297335 - DNA, 25 bp, Homo sapien
ccattttgtcgtcatcaaatgtcaa

SEQ ID NO: 4297336 - DNA, 25 bp, Homo sapien
tgttgatcttttgggtcaaagagtt

SEQ ID NO: 4297337 - DNA, 25 bp, Homo sapien
cagttctccttaatagatcctttag

SEQ ID NO: 4297338 - DNA, 25 bp, Homo sapien
aagagttttacaaatccttctacag

SEQ ID NO: 4297339 - DNA, 25 bp, Homo sapien
aatccttctacagttctccttaata

SEQ ID NO: 4297340 - DNA, 25 bp, Homo sapien
ttagagagtacaaattcaaccttta

SEQ ID NO: 4297341 - DNA, 25 bp, Homo sapien
aaatcactgttactttagagagtac

SEQ ID NO: 4297342 - DNA, 25 bp, Homo sapien
tagagagtacaaattcaacctttaa

SEQ ID NO: 4297343 - DNA, 25 bp, Homo sapien
gatataaatcactgttactttagag

SEQ ID NO: 4297344 - DNA, 25 bp, Homo sapien
tataacctttggataccatgtattc

SEQ ID NO: 4297345 - DNA, 25 bp, Homo sapien
cttctagtgcctccttcttggtaaa

SEQ ID NO: 4297346 - DNA, 25 bp, Homo sapien
cttctgcgtttctagtttgtattga

SEQ ID NO: 4297347 - DNA, 25 bp, Homo sapien
tcagtgattcacagtcaattggacc

SEQ ID NO: 4297348 - DNA, 25 bp, Homo sapien
aaaactgtatcagcaaatgttgtat

SEQ ID NO: 4297349 - DNA, 25 bp, Homo sapien
actgtatcagcaaatgttgtataac

SEQ ID NO: 4297350 - DNA, 25 bp, Homo sapien
tgtatcagcaaatgttgtataacca

SEQ ID NO: 4297351 - DNA, 25 bp, Homo sapien
aaactgtatcagcaaatgttgtata

SEQ ID NO: 4297352 - DNA, 25 bp, Homo sapien
gatgaataatgtgcaaattagagaa

SEQ ID NO: 4297353 - DNA, 25 bp, Homo sapien
ccaaggattagaataatctaggcct

SEQ ID NO: 4297354 - DNA, 25 bp, Homo sapien
gcctgcacatagctagaatgccaag

SEQ ID NO: 4297355 - DNA, 25 bp, Homo sapien
catagctagaatgccaaggattaga

SEQ ID NO: 4297356 - DNA, 25 bp, Homo sapien
caagcgatttaactggtggtttcac

SEQ ID NO: 4297357 - DNA, 25 bp, Homo sapien
gagattcaggtaaaggacctccttc

SEQ ID NO: 4297358 - DNA, 25 bp, Homo sapien
ggtggtttcacaagaacgctctgca

SEQ ID NO: 4297359 - DNA, 25 bp, Homo sapien
ctccttcatcttcaagcgatttaac

SEQ ID NO: 4297360 - DNA, 25 bp, Homo sapien
ccttcctttaaagactcaggtatca

SEQ ID NO: 4297361 - DNA, 25 bp, Homo sapien
tcaggtatcagccttaacatgtgat

SEQ ID NO: 4297362 - DNA, 25 bp, Homo sapien
cacttgacacctcatttatgagact

SEQ ID NO: 4297363 - DNA, 25 bp, Homo sapien
gccattcctgctgaataggtactaa

SEQ ID NO: 4297364 - DNA, 25 bp, Homo sapien
tagcacaggtgtatggatagacaga

SEQ ID NO: 4297365 - DNA, 25 bp, Homo sapien
tagacagaccagtagaaaacaacag

SEQ ID NO: 4297366 - DNA, 25 bp, Homo sapien
aaaatctgcaatggagggctagccc

SEQ ID NO: 4297367 - DNA, 25 bp, Homo sapien
gggctagccctaggagacattagaa

SEQ ID NO: 4297368 - DNA, 25 bp, Homo sapien
cctttgaagggcacttgataacaag

SEQ ID NO: 4297369 - DNA, 25 bp, Homo sapien
tgataacaagatccaccaaggctct

SEQ ID NO: 4297370 - DNA, 25 bp, Homo sapien
tgaagaagtaatcccctggagtgtt

SEQ ID NO: 4297371 - DNA, 25 bp, Homo sapien
actcctaagctatgtgtgcgacaca

SEQ ID NO: 4297372 - DNA, 25 bp, Homo sapien
ttctcccaagaccacaacacagtcc

SEQ ID NO: 4297373 - DNA, 25 bp, Homo sapien
cagttgcggaaggaatgattacatt

SEQ ID NO: 4297374 - DNA, 25 bp, Homo sapien
gacatgcagcagttgcggaaggaat

SEQ ID NO: 4297375 - DNA, 25 bp, Homo sapien
ggcagcgattgttctgtttcaccca

SEQ ID NO: 4297376 - DNA, 25 bp, Homo sapien
ctgagacaggcatccatcacctgga

SEQ ID NO: 4297377 - DNA, 25 bp, Homo sapien
gagacaggcatccatcacctggact

SEQ ID NO: 4297378 - DNA, 25 bp, Homo sapien
tgagacaggcatccatcacctggac

SEQ ID NO: 4297379 - DNA, 25 bp, Homo sapien
cagggcgtagggttcctcgccgtct

SEQ ID NO: 4297380 - DNA, 25 bp, Homo sapien
agtgagaggtcagggcgtagggttc

SEQ ID NO: 4297381 - DNA, 25 bp, Homo sapien
tcagggcgtagggttcctcgccgtc

SEQ ID NO: 4297382 - DNA, 25 bp, Homo sapien
gaggtcagggcgtagggttcctcgc

SEQ ID NO: 4297383 - DNA, 25 bp, Homo sapien
ggctagtctcgaaccgcccgcctcg

SEQ ID NO: 4297384 - DNA, 25 bp, Homo sapien
cagttagtagttattgatgacattc

SEQ ID NO: 4297385 - DNA, 25 bp, Homo sapien
tgatgaagtgatggaattcctagaa

SEQ ID NO: 4297386 - DNA, 25 bp, Homo sapien
ggctcaggagtgaatgactgtatgc

SEQ ID NO: 4297387 - DNA, 25 bp, Homo sapien
cctagaagccatattgccaagagca

SEQ ID NO: 4297388 - DNA, 25 bp, Homo sapien
caaattctccagaaacgggtggcca

SEQ ID NO: 4297389 - DNA, 25 bp, Homo sapien
gatttcctctttcacgtctccagtt

SEQ ID NO: 4297390 - DNA, 25 bp, Homo sapien
tccaaatatcctgaattcatagagg

SEQ ID NO: 4297391 - DNA, 25 bp, Homo sapien
tataccccatctgaaaacatgctgc

SEQ ID NO: 4297392 - DNA, 25 bp, Homo sapien
agcaggtggtcttagatgaaactac

SEQ ID NO: 4297393 - DNA, 25 bp, Homo sapien
cttagcaggtggtcttagatgaaac

SEQ ID NO: 4297394 - DNA, 25 bp, Homo sapien
caggtggtcttagatgaaactactt

SEQ ID NO: 4297395 - DNA, 25 bp, Homo sapien
ggtcttagatgaaactactttgcaa

SEQ ID NO: 4297396 - DNA, 25 bp, Homo sapien
ctttttttttcatttcactggtcat

SEQ ID NO: 4297397 - DNA, 25 bp, Homo sapien
cccagtgttctgtctaaatttcttt

SEQ ID NO: 4297398 - DNA, 25 bp, Homo sapien
tggtggtaatagaggtgttctttta

SEQ ID NO: 4297399 - DNA, 25 bp, Homo sapien
tttgaggataatcaggtggtggtaa

SEQ ID NO: 4297400 - DNA, 25 bp, Homo sapien
ttacccagtgttctgtctaaatttc

SEQ ID NO: 4297401 - DNA, 25 bp, Homo sapien
ctctggccttgatgtgatacatgcc

SEQ ID NO: 4297402 - DNA, 25 bp, Homo sapien
cttgatgtgatacatgccagatgct

SEQ ID NO: 4297403 - DNA, 25 bp, Homo sapien
ggccttgatgtgatacatgccagat

SEQ ID NO: 4297404 - DNA, 25 bp, Homo sapien
tctggccttgatgtgatacatgcca

SEQ ID NO: 4297405 - DNA, 25 bp, Homo sapien
gggcttactcttgcccctgtcttgc

SEQ ID NO: 4297406 - DNA, 25 bp, Homo sapien
agcggggcactccagctcatacttc

SEQ ID NO: 4297407 - DNA, 25 bp, Homo sapien
cagactgtgtggacgcagcgggggc

SEQ ID NO: 4297408 - DNA, 25 bp, Homo sapien
ttggcagcggggcactccagctcat

SEQ ID NO: 4297409 - DNA, 25 bp, Homo sapien
tctttgcgcagacaccttactaatc

SEQ ID NO: 4297410 - DNA, 25 bp, Homo sapien
gtcatctttgcgcagacaccttact

SEQ ID NO: 4297411 - DNA, 25 bp, Homo sapien
gcagacaccttactaatcttctctg

SEQ ID NO: 4297412 - DNA, 25 bp, Homo sapien
tgcgcagacaccttactaatcttct

SEQ ID NO: 4297413 - DNA, 25 bp, Homo sapien
ctccttggatcttctgtattttagc

SEQ ID NO: 4297414 - DNA, 25 bp, Homo sapien
tggatcttctgtattttagcagctt

SEQ ID NO: 4297415 - DNA, 25 bp, Homo sapien
gatcttctgtattttagcagcttac

SEQ ID NO: 4297416 - DNA, 25 bp, Homo sapien
cttggatcttctgtattttagcagc

SEQ ID NO: 4297417 - DNA, 25 bp, Homo sapien
ggggtaacttcaagttcagagcttc

SEQ ID NO: 4297418 - DNA, 25 bp, Homo sapien
tttgtgttggtgtatcaacgcctat

SEQ ID NO: 4297419 - DNA, 25 bp, Homo sapien
ttggtgtatcaacgcctatgttttc

SEQ ID NO: 4297420 - DNA, 25 bp, Homo sapien
tggggggtaacttcaagttcagagc

SEQ ID NO: 4297421 - DNA, 25 bp, Homo sapien
tgatcccctaaagattaaaatactc

SEQ ID NO: 4297422 - DNA, 25 bp, Homo sapien
caaaattttcccgagatgcaaacca

SEQ ID NO: 4297423 - DNA, 25 bp, Homo sapien
tgtaaatatccctacagctgtagca

SEQ ID NO: 4297424 - DNA, 25 bp, Homo sapien
ggatcttcctcccaagtatggtatt

SEQ ID NO: 4297425 - DNA, 25 bp, Homo sapien
gagccagtcagttccccttcagggc

SEQ ID NO: 4297426 - DNA, 25 bp, Homo sapien
tcagatgatttcccgcctcggtccc

SEQ ID NO: 4297427 - DNA, 25 bp, Homo sapien
ctcagatgatttcccgcctcggtcc

SEQ ID NO: 4297428 - DNA, 25 bp, Homo sapien
cagatgatttcccgcctcggtcccc

SEQ ID NO: 4297429 - DNA, 25 bp, Homo sapien
gatgatttcccgcctcggtccccca

SEQ ID NO: 4297430 - DNA, 25 bp, Homo sapien
gattgtttctcactacttccccgct

SEQ ID NO: 4297431 - DNA, 25 bp, Homo sapien
gccaccggctctcaaacgagtagct

SEQ ID NO: 4297432 - DNA, 25 bp, Homo sapien
ttccccgctgcgcagacgccagaga

SEQ ID NO: 4297433 - DNA, 25 bp, Homo sapien
ctccggaacgccaccggctctcaaa

SEQ ID NO: 4297434 - DNA, 25 bp, Homo sapien
tgtcatttaagcgagtgaatgaaca

SEQ ID NO: 4297435 - DNA, 25 bp, Homo sapien
aaatacttgtataaataatgtgact

SEQ ID NO: 4297436 - DNA, 25 bp, Homo sapien
cagagtaggtgctctaaaatgtcat

SEQ ID NO: 4297437 - DNA, 25 bp, Homo sapien
aaaatgtcatttaagcgagtgaatg

SEQ ID NO: 4297438 - DNA, 25 bp, Homo sapien
tcatctcatactgctaatctcagcc

SEQ ID NO: 4297439 - DNA, 25 bp, Homo sapien
atgcttatcccattcacagttatct

SEQ ID NO: 4297440 - DNA, 25 bp, Homo sapien
ccaccaggtatagtgtctcatctca

SEQ ID NO: 4297441 - DNA, 25 bp, Homo sapien
ttcattaagccccttccattctaga

SEQ ID NO: 4297442 - DNA, 25 bp, Homo sapien
tctgtttgcaggaggttgaccgcgc

SEQ ID NO: 4297443 - DNA, 25 bp, Homo sapien
ttaagtacaaggtggagcgcaaccc

SEQ ID NO: 4297444 - DNA, 25 bp, Homo sapien
tccgctggtataaggaagccaagcc

SEQ ID NO: 4297445 - DNA, 25 bp, Homo sapien
gaagctgtactaccgggaagaggca

SEQ ID NO: 4297446 - DNA, 25 bp, Homo sapien
cataaatgaacagggtatttgacca

SEQ ID NO: 4297447 - DNA, 25 bp, Homo sapien
ggagtaacattagggtctacctcta

SEQ ID NO: 4297448 - DNA, 25 bp, Homo sapien
taagttataggtgaccttagagacc

SEQ ID NO: 4297449 - DNA, 25 bp, Homo sapien
gaatcatgcttatgtactaagaggg

SEQ ID NO: 4297450 - DNA, 25 bp, Homo sapien
gctaccaaattgtgccttcctaaat

SEQ ID NO: 4297451 - DNA, 25 bp, Homo sapien
catttgacattgaaccttgaagtac

SEQ ID NO: 4297452 - DNA, 25 bp, Homo sapien
catctgtactttcatattctgctca

SEQ ID NO: 4297453 - DNA, 25 bp, Homo sapien
gaagtttcttcggatcttgtttaga

SEQ ID NO: 4297454 - DNA, 25 bp, Homo sapien
agaggttccctgcaaactagtttgg

SEQ ID NO: 4297455 - DNA, 25 bp, Homo sapien
tctgaggagcctaatacaagggaga

SEQ ID NO: 4297456 - DNA, 25 bp, Homo sapien
caagacccatgtgacaactcagaaa

SEQ ID NO: 4297457 - DNA, 25 bp, Homo sapien
gagtactaagctatgatctcatcag

SEQ ID NO: 4297458 - DNA, 25 bp, Homo sapien
gcaacactatctagagggccaggca

SEQ ID NO: 4297459 - DNA, 25 bp, Homo sapien
gagttgtgatcaaggtgcgctgcac

SEQ ID NO: 4297460 - DNA, 25 bp, Homo sapien
ccactctagatttcatgttgtaggg

SEQ ID NO: 4297461 - DNA, 25 bp, Homo sapien
taacagctttaactgacatgggtaa

SEQ ID NO: 4297462 - DNA, 25 bp, Homo sapien
aaaatttcctcagtgcaagagagct

SEQ ID NO: 4297463 - DNA, 25 bp, Homo sapien
gcaaccagcacagaactaattggct

SEQ ID NO: 4297464 - DNA, 25 bp, Homo sapien
tctggctggtacaagcagtattaga

SEQ ID NO: 4297465 - DNA, 25 bp, Homo sapien
gaagatatgtctgcccaataaacaa

SEQ ID NO: 4297466 - DNA, 25 bp, Homo sapien
taaaggttgcacaagagctatgtcc

SEQ ID NO: 4297467 - DNA, 25 bp, Homo sapien
tttatttaaaggttgcacaagagct

SEQ ID NO: 4297468 - DNA, 25 bp, Homo sapien
tgcacaagagctatgtccaggcatt

SEQ ID NO: 4297469 - DNA, 25 bp, Homo sapien
ggttgcacaagagctatgtccaggc

SEQ ID NO: 4297470 - DNA, 25 bp, Homo sapien
atcaaacatgtccttggttagatat

SEQ ID NO: 4297471 - DNA, 25 bp, Homo sapien
ccagttccttgtgttgcacaagtgg

SEQ ID NO: 4297472 - DNA, 25 bp, Homo sapien
tgtttgcaaaaagtagcagcactgc

SEQ ID NO: 4297473 - DNA, 25 bp, Homo sapien
cgaagagactgaagccctagtttat

SEQ ID NO: 4297474 - DNA, 25 bp, Homo sapien
tagcagcactgcatctctcaattca

SEQ ID NO: 4297475 - DNA, 25 bp, Homo sapien
tgttctgttacgaagagactgaagc

SEQ ID NO: 4297476 - DNA, 25 bp, Homo sapien
taatttctcgacacaaagttcactc

SEQ ID NO: 4297477 - DNA, 25 bp, Homo sapien
gcattaacaactaccaaccggaatc

SEQ ID NO: 4297478 - DNA, 25 bp, Homo sapien
tgttttccaagtcaatcatcctaca

SEQ ID NO: 4297479 - DNA, 25 bp, Homo sapien
taaatccagagcaaacaatcatatg

SEQ ID NO: 4297480 - DNA, 25 bp, Homo sapien
aaatcatgacaaggattctcagcag

SEQ ID NO: 4297481 - DNA, 25 bp, Homo sapien
taatccaatctatgggaaggctgca

SEQ ID NO: 4297482 - DNA, 25 bp, Homo sapien
atttgactcaggcaaaaatccaaca

SEQ ID NO: 4297483 - DNA, 25 bp, Homo sapien
catatactggcacaatggttttaca

SEQ ID NO: 4297484 - DNA, 25 bp, Homo sapien
atcatagtcaaaatgtactaaacca

SEQ ID NO: 4297485 - DNA, 25 bp, Homo sapien
ccaccaccagtttaatccagaaaag

SEQ ID NO: 4297486 - DNA, 25 bp, Homo sapien
ctgcagctcatctgctacttcctga

SEQ ID NO: 4297487 - DNA, 25 bp, Homo sapien
gcagctcatctgctacttcctgaat

SEQ ID NO: 4297488 - DNA, 25 bp, Homo sapien
gctcatctgctacttcctgaattct

SEQ ID NO: 4297489 - DNA, 25 bp, Homo sapien
cagctcatctgctacttcctgaatt

SEQ ID NO: 4297490 - DNA, 25 bp, Homo sapien
tttaacagttaaacgacactctcta

SEQ ID NO: 4297491 - DNA, 25 bp, Homo sapien
cttaaggctgtaatgctaaaagctg

SEQ ID NO: 4297492 - DNA, 25 bp, Homo sapien
taccaatggttagacattaggaaga

SEQ ID NO: 4297493 - DNA, 25 bp, Homo sapien
tctatatgaaacagtgtaggcagca

SEQ ID NO: 4297494 - DNA, 25 bp, Homo sapien
tgctgggaatgcaagctaagagctt

SEQ ID NO: 4297495 - DNA, 25 bp, Homo sapien
gctaggattctacagataagcccag

SEQ ID NO: 4297496 - DNA, 25 bp, Homo sapien
gaactccctaggaagcagtacttag

SEQ ID NO: 4297497 - DNA, 25 bp, Homo sapien
tcctggaacagcctagaatcaagag

SEQ ID NO: 4297498 - DNA, 25 bp, Homo sapien
ggtattctggaagtaatgcttccag

SEQ ID NO: 4297499 - DNA, 25 bp, Homo sapien
ctggaagtaatgcttccagagaggc

SEQ ID NO: 4297500 - DNA, 25 bp, Homo sapien
tattctggaagtaatgcttccagag

SEQ ID NO: 4297501 - DNA, 25 bp, Homo sapien
tgggtattctggaagtaatgcttcc

SEQ ID NO: 4297502 - DNA, 25 bp, Homo sapien
caccaacatcccatactgtgaaaca

SEQ ID NO: 4297503 - DNA, 25 bp, Homo sapien
ttcttatattctactgtttccacat

SEQ ID NO: 4297504 - DNA, 25 bp, Homo sapien
acatcccatactgtgaaacaaatgt

SEQ ID NO: 4297505 - DNA, 25 bp, Homo sapien
ctaattctatcttgaccaccaacat

SEQ ID NO: 4297506 - DNA, 25 bp, Homo sapien
gtgcagcgtcattaagaaaataaaa

SEQ ID NO: 4297507 - DNA, 25 bp, Homo sapien
tgtgcagcgtcattaagaaaataaa

SEQ ID NO: 4297508 - DNA, 25 bp, Homo sapien
ctgtgcagcgtcattaagaaaataa

SEQ ID NO: 4297509 - DNA, 25 bp, Homo sapien
tgcagcgtcattaagaaaataaaac

SEQ ID NO: 4297510 - DNA, 25 bp, Homo sapien
cagtttatacagaatggttgtcttg

SEQ ID NO: 4297511 - DNA, 25 bp, Homo sapien
tacagaatggttgtcttgccagcag

SEQ ID NO: 4297512 - DNA, 25 bp, Homo sapien
acttcagtttatacagaatggttgt

SEQ ID NO: 4297513 - DNA, 25 bp, Homo sapien
cagaatggttgtcttgccagcagca

SEQ ID NO: 4297514 - DNA, 25 bp, Homo sapien
gcagaagtacaagtagggaggaatg

SEQ ID NO: 4297515 - DNA, 25 bp, Homo sapien
aatgattcagttgaggcagaagtac

SEQ ID NO: 4297516 - DNA, 25 bp, Homo sapien
taaaatgattcagttgaggcagaag

SEQ ID NO: 4297517 - DNA, 25 bp, Homo sapien
cagttgaggcagaagtacaagtagg

SEQ ID NO: 4297518 - DNA, 25 bp, Homo sapien
cattcctatgcaagtaagtctatct

SEQ ID NO: 4297519 - DNA, 25 bp, Homo sapien
caagtattgatttaagcaaggacac

SEQ ID NO: 4297520 - DNA, 25 bp, Homo sapien
taaatcaaagcatgacttagcacat

SEQ ID NO: 4297521 - DNA, 25 bp, Homo sapien
gaagcgaaggctacaggcaattctg

SEQ ID NO: 4297522 - DNA, 25 bp, Homo sapien
tacactggcatactacactacactg

SEQ ID NO: 4297523 - DNA, 25 bp, Homo sapien
acttaaaataggacaatgcagccag

SEQ ID NO: 4297524 - DNA, 25 bp, Homo sapien
tgtaacagaaggaacacatactact

SEQ ID NO: 4297525 - DNA, 25 bp, Homo sapien
tatgtgccccagagtatgggtgaca

SEQ ID NO: 4297526 - DNA, 25 bp, Homo sapien
ccagaaagggcctcgccaagtgttt

SEQ ID NO: 4297527 - DNA, 25 bp, Homo sapien
gcagggactgtacacgaaacgcaga

SEQ ID NO: 4297528 - DNA, 25 bp, Homo sapien
cacatctctgcccaatgttgtccag

SEQ ID NO: 4297529 - DNA, 25 bp, Homo sapien
caagaaggtatgcagatcgcacccc

SEQ ID NO: 4297530 - DNA, 25 bp, Homo sapien
aaaatgcgcatctgcttcttgccaa

SEQ ID NO: 4297531 - DNA, 25 bp, Homo sapien
cttgccaaatagtcgggagaagagg

SEQ ID NO: 4297532 - DNA, 25 bp, Homo sapien
cttcttgccaaatagtcgggagaag

SEQ ID NO: 4297533 - DNA, 25 bp, Homo sapien
tcaaaatgcgcatctgcttcttgcc

SEQ ID NO: 4297534 - DNA, 25 bp, Homo sapien
tttctcctttcaagctcccaggcaa

SEQ ID NO: 4297535 - DNA, 25 bp, Homo sapien
gtgctttctcctttcaagctcccag

SEQ ID NO: 4297536 - DNA, 25 bp, Homo sapien
cagaagcagaaggggtttggggcga

SEQ ID NO: 4297537 - DNA, 25 bp, Homo sapien
gcgaccccgtgctttctcctttcaa

SEQ ID NO: 4297538 - DNA, 25 bp, Homo sapien
gcacaggaataagccggtagaggac

SEQ ID NO: 4297539 - DNA, 25 bp, Homo sapien
agtggcccctgtgccgatgaagatc

SEQ ID NO: 4297540 - DNA, 25 bp, Homo sapien
cccctgtgccgatgaagatccggca

SEQ ID NO: 4297541 - DNA, 25 bp, Homo sapien
gatccggcacaggaataagccggta

SEQ ID NO: 4297542 - DNA, 25 bp, Homo sapien
tacggtacgcgcgatgggtattccc

SEQ ID NO: 4297543 - DNA, 25 bp, Homo sapien
acacgggaccagacgcttgctttag

SEQ ID NO: 4297544 - DNA, 25 bp, Homo sapien
cacatgcgtactgggagacggacaa

SEQ ID NO: 4297545 - DNA, 25 bp, Homo sapien
ttgcttccggaaaggcgagctgagc

SEQ ID NO: 4297546 - DNA, 25 bp, Homo sapien
cattttggaagcttgctaagtgaca

SEQ ID NO: 4297547 - DNA, 25 bp, Homo sapien
gaagtaccctcctttgcattggaga

SEQ ID NO: 4297548 - DNA, 25 bp, Homo sapien
gcattggagatacatgtaaagagtt

SEQ ID NO: 4297549 - DNA, 25 bp, Homo sapien
agttgcttagcagttgaataactca

SEQ ID NO: 4297550 - DNA, 25 bp, Homo sapien
taactcatatgatccaaggcaaacg

SEQ ID NO: 4297551 - DNA, 25 bp, Homo sapien
ccacagttacaaacgcaaggagtct

SEQ ID NO: 4297552 - DNA, 25 bp, Homo sapien
ggcacatttgggtattagaccacag

SEQ ID NO: 4297553 - DNA, 25 bp, Homo sapien
tatccataagaacagggcacatttg

SEQ ID NO: 4297554 - DNA, 25 bp, Homo sapien
caacaaaagctaaccatgacagtga

SEQ ID NO: 4297555 - DNA, 25 bp, Homo sapien
taaaacgctaccaaacaaataatgc

SEQ ID NO: 4297556 - DNA, 25 bp, Homo sapien
cttggactctcgaccttaagtgacc

SEQ ID NO: 4297557 - DNA, 25 bp, Homo sapien
tgacagtgactcaggcgaaagttcc

SEQ ID NO: 4297558 - DNA, 25 bp, Homo sapien
acatgattgggcaaagcagcaccaa

SEQ ID NO: 4297559 - DNA, 25 bp, Homo sapien
gccagcactgcagtatgaaatcact

SEQ ID NO: 4297560 - DNA, 25 bp, Homo sapien
cacaatgggtagcaagaaacttttt

SEQ ID NO: 4297561 - DNA, 25 bp, Homo sapien
gaaaagcttcaagactagcagctga

SEQ ID NO: 4297562 - DNA, 25 bp, Homo sapien
gatgcataatcctttttggctggaa

SEQ ID NO: 4297563 - DNA, 25 bp, Homo sapien
gatctcctttgtgcgtctggttgaa

SEQ ID NO: 4297564 - DNA, 25 bp, Homo sapien
taccctgtaactagcattcatggca

SEQ ID NO: 4297565 - DNA, 25 bp, Homo sapien
tccgctgccactgagagatctcctt

SEQ ID NO: 4297566 - DNA, 25 bp, Homo sapien
agtatgccttgcaagtcctctggca

SEQ ID NO: 4297567 - DNA, 25 bp, Homo sapien
catgtcatgcccgttttgagcagta

SEQ ID NO: 4297568 - DNA, 25 bp, Homo sapien
tttccatagtgtcaggtttcacagg

SEQ ID NO: 4297569 - DNA, 25 bp, Homo sapien
catctatgtgtgtccgtaacttttc

SEQ ID NO: 4297570 - DNA, 25 bp, Homo sapien
tatttttcagcttcaagacaaggtc

SEQ ID NO: 4297571 - DNA, 25 bp, Homo sapien
tcaagacaaggtctactgtttctac

SEQ ID NO: 4297572 - DNA, 25 bp, Homo sapien
tggtgtagtactcccactgtaggct

SEQ ID NO: 4297573 - DNA, 25 bp, Homo sapien
tcttgtgagccaatgcaagtggact

SEQ ID NO: 4297574 - DNA, 25 bp, Homo sapien
ggattagaatccttactctacccag

SEQ ID NO: 4297575 - DNA, 25 bp, Homo sapien
caagtggttctccaaaagaggtctc

SEQ ID NO: 4297576 - DNA, 25 bp, Homo sapien
cttctaagcataattatctttattt

SEQ ID NO: 4297577 - DNA, 25 bp, Homo sapien
caacttctaagcataattatcttta

SEQ ID NO: 4297578 - DNA, 25 bp, Homo sapien
aacttctaagcataattatctttat

SEQ ID NO: 4297579 - DNA, 25 bp, Homo sapien
ttcaacttctaagcataattatctt

SEQ ID NO: 4297580 - DNA, 25 bp, Homo sapien
caacagttgttaatcattacacaaa

SEQ ID NO: 4297581 - DNA, 25 bp, Homo sapien
tcaacagttgttaatcattacacaa

SEQ ID NO: 4297582 - DNA, 25 bp, Homo sapien
ggagtgcctccaatttttgggtcat

SEQ ID NO: 4297583 - DNA, 25 bp, Homo sapien
taaaccagccatcaaaatttggaga

SEQ ID NO: 4297584 - DNA, 25 bp, Homo sapien
agcttctagatggagtgcctccaat

SEQ ID NO: 4297585 - DNA, 25 bp, Homo sapien
ccagccatcaaaatttggagacttt

SEQ ID NO: 4297586 - DNA, 25 bp, Homo sapien
tttattctagaggttagctgaggtc

SEQ ID NO: 4297587 - DNA, 25 bp, Homo sapien
aggttagctgaggtcctgttttctc

SEQ ID NO: 4297588 - DNA, 25 bp, Homo sapien
tctagaggttagctgaggtcctgtt

SEQ ID NO: 4297589 - DNA, 25 bp, Homo sapien
gaaactgtcttaattgaggtggact

SEQ ID NO: 4297590 - DNA, 25 bp, Homo sapien
gcaaaggcatcaagcttgccacata

SEQ ID NO: 4297591 - DNA, 25 bp, Homo sapien
aaaggcatcaagcttgccacatatc

SEQ ID NO: 4297592 - DNA, 25 bp, Homo sapien
tgcaaaggcatcaagcttgccacat

SEQ ID NO: 4297593 - DNA, 25 bp, Homo sapien
aggcatcaagcttgccacatatctt

SEQ ID NO: 4297594 - DNA, 25 bp, Homo sapien
taaatttagactgacttgggaagtc

SEQ ID NO: 4297595 - DNA, 25 bp, Homo sapien
taatcatatgccctttcaatggaca

SEQ ID NO: 4297596 - DNA, 25 bp, Homo sapien
tccccacaagagatatagctaaatt

SEQ ID NO: 4297597 - DNA, 25 bp, Homo sapien
ccatcactccccacaagagatatag

SEQ ID NO: 4297598 - DNA, 25 bp, Homo sapien
taatccttggaatgatcctatgtgg

SEQ ID NO: 4297599 - DNA, 25 bp, Homo sapien
tataggccagataatgcactcaaca

SEQ ID NO: 4297600 - DNA, 25 bp, Homo sapien
aaatgaggtctacttgactttggtc

SEQ ID NO: 4297601 - DNA, 25 bp, Homo sapien
taatagttaaccttactgagcaact

SEQ ID NO: 4297602 - DNA, 25 bp, Homo sapien
caagcaagacagatatagtccctgt

SEQ ID NO: 4297603 - DNA, 25 bp, Homo sapien
tatttgagtgctaccatatgccagt

SEQ ID NO: 4297604 - DNA, 25 bp, Homo sapien
tagtccctgttatcatagagctaca

SEQ ID NO: 4297605 - DNA, 25 bp, Homo sapien
tacttaggaaagtggaatcagccat

SEQ ID NO: 4297606 - DNA, 25 bp, Homo sapien
tgaaactttgtgtcagttccaaaaa

SEQ ID NO: 4297607 - DNA, 25 bp, Homo sapien
cagttccaaaaaatagcgtcgaaga

SEQ ID NO: 4297608 - DNA, 25 bp, Homo sapien
gaagaataacactttgagcctcaga

SEQ ID NO: 4297609 - DNA, 25 bp, Homo sapien
cagaaggacgtttctgttgtacacc

SEQ ID NO: 4297610 - DNA, 25 bp, Homo sapien
cttaaaagaggaaataatgagaatc

SEQ ID NO: 4297611 - DNA, 25 bp, Homo sapien
agaggaaataatgagaatctgtatt

SEQ ID NO: 4297612 - DNA, 25 bp, Homo sapien
aaaagaggaaataatgagaatctgt

SEQ ID NO: 4297613 - DNA, 25 bp, Homo sapien
taaaagaggaaataatgagaatctg

SEQ ID NO: 4297614 - DNA, 25 bp, Homo sapien
ttaaatatggcttatatgaagtata

SEQ ID NO: 4297615 - DNA, 25 bp, Homo sapien
ttgttttatgatctcttcatctcta

SEQ ID NO: 4297616 - DNA, 25 bp, Homo sapien
cttctgtaattgttttatgatctct

SEQ ID NO: 4297617 - DNA, 25 bp, Homo sapien
tatggcttatatgaagtataaactc

SEQ ID NO: 4297618 - DNA, 25 bp, Homo sapien
ccagagtctttagattcttcagttt

SEQ ID NO: 4297619 - DNA, 25 bp, Homo sapien
ttggaatccagagtctttagattct

SEQ ID NO: 4297620 - DNA, 25 bp, Homo sapien
aatccagagtctttagattcttcag

SEQ ID NO: 4297621 - DNA, 25 bp, Homo sapien
cactttaacctgcttaggaatttca

SEQ ID NO: 4297622 - DNA, 25 bp, Homo sapien
tatgcagatgtagtcttcaagggtt

SEQ ID NO: 4297623 - DNA, 25 bp, Homo sapien
actgccagcaagtggtgatggtgtg

SEQ ID NO: 4297624 - DNA, 25 bp, Homo sapien
aaatttagatgctgaataggaataa

SEQ ID NO: 4297625 - DNA, 25 bp, Homo sapien
tggtgtgtgcagcaaccacaggtct

SEQ ID NO: 4297626 - DNA, 25 bp, Homo sapien
aaagcaatccctttatatcaggagg

SEQ ID NO: 4297627 - DNA, 25 bp, Homo sapien
taatgagtgccctattaagacaggt

SEQ ID NO: 4297628 - DNA, 25 bp, Homo sapien
tcttgtcaaggatgtgggtgcacta

SEQ ID NO: 4297629 - DNA, 25 bp, Homo sapien
tgcactaaaactaggtacaatccag

SEQ ID NO: 4297630 - DNA, 25 bp, Homo sapien
ttaaggtctcctattcgaataatgt

SEQ ID NO: 4297631 - DNA, 25 bp, Homo sapien
tggccagtgctggagtgtcttagca

SEQ ID NO: 4297632 - DNA, 25 bp, Homo sapien
tctcctattcgaataatgtgtggcc

SEQ ID NO: 4297633 - DNA, 25 bp, Homo sapien
ggtctcctattcgaataatgtgtgg

SEQ ID NO: 4297634 - DNA, 25 bp, Homo sapien
tatcatgaatagtgaaataaggtcg

SEQ ID NO: 4297635 - DNA, 25 bp, Homo sapien
taaggtcggaaatcactgaagtact

SEQ ID NO: 4297636 - DNA, 25 bp, Homo sapien
tacgggtagtatattctttgaattc

SEQ ID NO: 4297637 - DNA, 25 bp, Homo sapien
tgggtacgggtagtatattctttga

SEQ ID NO: 4297638 - DNA, 25 bp, Homo sapien
aacaaaggcatggttccagccctca

SEQ ID NO: 4297639 - DNA, 25 bp, Homo sapien
tgtaatgaatcaatgtgcctgccac

SEQ ID NO: 4297640 - DNA, 25 bp, Homo sapien
gaagatgcggtgaaattctggctct

SEQ ID NO: 4297641 - DNA, 25 bp, Homo sapien
tgcctgccactcagaacaacaaagg

SEQ ID NO: 4297642 - DNA, 25 bp, Homo sapien
ttaacaagtgccaatacagtctctg

SEQ ID NO: 4297643 - DNA, 25 bp, Homo sapien
tacagtctctgatgattccgatggt

SEQ ID NO: 4297644 - DNA, 25 bp, Homo sapien
taacaagtgccaatacagtctctga

SEQ ID NO: 4297645 - DNA, 25 bp, Homo sapien
gatgattccgatggtgatggcgcca

SEQ ID NO: 4297646 - DNA, 25 bp, Homo sapien
cccccaacagcaccagctcccagag

SEQ ID NO: 4297647 - DNA, 25 bp, Homo sapien
ccaacagcaccagctcccagagcat

SEQ ID NO: 4297648 - DNA, 25 bp, Homo sapien
accacaaggggctcccccaacagca

SEQ ID NO: 4297649 - DNA, 25 bp, Homo sapien
ccacaaggggctcccccaacagcac

SEQ ID NO: 4297650 - DNA, 25 bp, Homo sapien
tggagatgtggtctagtgggacaga

SEQ ID NO: 4297651 - DNA, 25 bp, Homo sapien
ctggagatgtggtctagtgggacag

SEQ ID NO: 4297652 - DNA, 25 bp, Homo sapien
ggagatgtggtctagtgggacagag

SEQ ID NO: 4297653 - DNA, 25 bp, Homo sapien
atgtggtctagtgggacagagtaac

SEQ ID NO: 4297654 - DNA, 25 bp, Homo sapien
ctgaatgagacaggagggtatccat

SEQ ID NO: 4297655 - DNA, 25 bp, Homo sapien
ccttaccaaagatctagaatagttc

SEQ ID NO: 4297656 - DNA, 25 bp, Homo sapien
gagtcaagtatcaaaacgagaaatg

SEQ ID NO: 4297657 - DNA, 25 bp, Homo sapien
tggaagtctttcacattgttgcatg

SEQ ID NO: 4297658 - DNA, 25 bp, Homo sapien
gaaatgcccgcagcccttatgtagt

SEQ ID NO: 4297659 - DNA, 25 bp, Homo sapien
ttttctaagtgctaacagtatctct

SEQ ID NO: 4297660 - DNA, 25 bp, Homo sapien
ttccctaattgtcaaagcttataac

SEQ ID NO: 4297661 - DNA, 25 bp, Homo sapien
tgtacccagggatgaaccattgatt

SEQ ID NO: 4297662 - DNA, 25 bp, Homo sapien
gaaccattgatttataacatgtaaa

SEQ ID NO: 4297663 - DNA, 25 bp, Homo sapien
aaataacagatatatttgtgtccac

SEQ ID NO: 4297664 - DNA, 25 bp, Homo sapien
tatccacctcatgaacagtaggtaa

SEQ ID NO: 4297665 - DNA, 25 bp, Homo sapien
aatatccacctcatgaacagtaggt

SEQ ID NO: 4297666 - DNA, 25 bp, Homo sapien
cacctcatgaacagtaggtaaaata

SEQ ID NO: 4297667 - DNA, 25 bp, Homo sapien
ctgagagatagaaaagaaaaataaa

SEQ ID NO: 4297668 - DNA, 25 bp, Homo sapien
tgagagatagaaaagaaaaataaaa

SEQ ID NO: 4297669 - DNA, 25 bp, Homo sapien
gataaagaattaatcccggccaggc

SEQ ID NO: 4297670 - DNA, 25 bp, Homo sapien
catgctgccctgtctaacttttaag

SEQ ID NO: 4297671 - DNA, 25 bp, Homo sapien
gaatgggtcttaccaatattcccta

SEQ ID NO: 4297672 - DNA, 25 bp, Homo sapien
tctcatgatcaataagccatgctgc

SEQ ID NO: 4297673 - DNA, 25 bp, Homo sapien
ctgctgagttaactgcactatttga

SEQ ID NO: 4297674 - DNA, 25 bp, Homo sapien
ctgcactatttgagttgtcccaggc

SEQ ID NO: 4297675 - DNA, 25 bp, Homo sapien
gttaactgcactatttgagttgtcc

SEQ ID NO: 4297676 - DNA, 25 bp, Homo sapien
gctgagttaactgcactatttgagt

SEQ ID NO: 4297677 - DNA, 25 bp, Homo sapien
ggcaggccatcgatcaacatcatta

SEQ ID NO: 4297678 - DNA, 25 bp, Homo sapien
tggggcaggccatcgatcaacatca

SEQ ID NO: 4297679 - DNA, 25 bp, Homo sapien
gattggcaggtgtaatgttttccct

SEQ ID NO: 4297680 - DNA, 25 bp, Homo sapien
actggggcaggccatcgatcaacat

SEQ ID NO: 4297681 - DNA, 25 bp, Homo sapien
tttccatacagcagaaaaaatatac

SEQ ID NO: 4297682 - DNA, 25 bp, Homo sapien
ctactttccatacagcagaaaaaat

SEQ ID NO: 4297683 - DNA, 25 bp, Homo sapien
ctttccatacagcagaaaaaatata

SEQ ID NO: 4297684 - DNA, 25 bp, Homo sapien
tactttccatacagcagaaaaaata

SEQ ID NO: 4297685 - DNA, 25 bp, Homo sapien
attcttttcaaaatactctggtgct

SEQ ID NO: 4297686 - DNA, 25 bp, Homo sapien
aaatactctggtgctatctgtttga

SEQ ID NO: 4297687 - DNA, 25 bp, Homo sapien
tctggtgctatctgtttgagcacag

SEQ ID NO: 4297688 - DNA, 25 bp, Homo sapien
ttcaaaatactctggtgctatctgt

SEQ ID NO: 4297689 - DNA, 25 bp, Homo sapien
gtaagccactgtgacctacctgatt

SEQ ID NO: 4297690 - DNA, 25 bp, Homo sapien
taaaacttaagtggactcctctggc

SEQ ID NO: 4297691 - DNA, 25 bp, Homo sapien
tcaggaatctagcacagagagcaaa

SEQ ID NO: 4297692 - DNA, 25 bp, Homo sapien
cagaatcctgtgcaataactgtaac

SEQ ID NO: 4297693 - DNA, 25 bp, Homo sapien
gaacttgtcggaaatacacatatcc

SEQ ID NO: 4297694 - DNA, 25 bp, Homo sapien
tgtcggaaatacacatatccataaa

SEQ ID NO: 4297695 - DNA, 25 bp, Homo sapien
tatctcgaacttgtcggaaatacac

SEQ ID NO: 4297696 - DNA, 25 bp, Homo sapien
ttttatctcgaacttgtcggaaata

SEQ ID NO: 4297697 - DNA, 25 bp, Homo sapien
caaaactgggtatctccaagacaac

SEQ ID NO: 4297698 - DNA, 25 bp, Homo sapien
taaatctttgtcaaattgatccagg

SEQ ID NO: 4297699 - DNA, 25 bp, Homo sapien
tcctcccagaagactgtcgaaatct

SEQ ID NO: 4297700 - DNA, 25 bp, Homo sapien
aggagacaatgcagcgacaccctcc

SEQ ID NO: 4297701 - DNA, 25 bp, Homo sapien
atctggaaaagacaaatagcaaata

SEQ ID NO: 4297702 - DNA, 25 bp, Homo sapien
ctctgtcagtaagtttggaatgctg

SEQ ID NO: 4297703 - DNA, 25 bp, Homo sapien
tctgtcagtaagtttggaatgctga

SEQ ID NO: 4297704 - DNA, 25 bp, Homo sapien
tctctgtcagtaagtttggaatgct

SEQ ID NO: 4297705 - DNA, 25 bp, Homo sapien
tgtcagtaagtttggaatgctgagg

SEQ ID NO: 4297706 - DNA, 25 bp, Homo sapien
gcacataaatgccttgataaacagc

SEQ ID NO: 4297707 - DNA, 25 bp, Homo sapien
cagcttatcagaaatcaataggaga

SEQ ID NO: 4297708 - DNA, 25 bp, Homo sapien
ggattataggccactacatccggcc

SEQ ID NO: 4297709 - DNA, 25 bp, Homo sapien
cccctatcagctgggattaatataa

SEQ ID NO: 4297710 - DNA, 25 bp, Homo sapien
agaactgattcaccatttatgcgcc

SEQ ID NO: 4297711 - DNA, 25 bp, Homo sapien
tgcaacccttaaggttcaaatcaat

SEQ ID NO: 4297712 - DNA, 25 bp, Homo sapien
tcccttgctcatgcttaagaactga

SEQ ID NO: 4297713 - DNA, 25 bp, Homo sapien
ctattcattaattctaaagatgctt

SEQ ID NO: 4297714 - DNA, 25 bp, Homo sapien
taggtcacgctggtcttttgtccaa

SEQ ID NO: 4297715 - DNA, 25 bp, Homo sapien
gaaatccaactttatgtcattgaca

SEQ ID NO: 4297716 - DNA, 25 bp, Homo sapien
ggaaatccaactttatgtcattgac

SEQ ID NO: 4297717 - DNA, 25 bp, Homo sapien
tcattgacataggtcacgctggtct

SEQ ID NO: 4297718 - DNA, 25 bp, Homo sapien
cagcaaggactgatagagagctgca

SEQ ID NO: 4297719 - DNA, 25 bp, Homo sapien
ccttctgttggaagactatgccctc

SEQ ID NO: 4297720 - DNA, 25 bp, Homo sapien
tttcaaaggataggatgacagccag

SEQ ID NO: 4297721 - DNA, 25 bp, Homo sapien
tacggctgagagaggtgatgaatcc

SEQ ID NO: 4297722 - DNA, 25 bp, Homo sapien
agctccaggtcgaagcccaccacac

SEQ ID NO: 4297723 - DNA, 25 bp, Homo sapien
tggcccagctccaggtcgaagccca

SEQ ID NO: 4297724 - DNA, 25 bp, Homo sapien
gcccagctccaggtcgaagcccacc

SEQ ID NO: 4297725 - DNA, 25 bp, Homo sapien
ccagctccaggtcgaagcccaccac

SEQ ID NO: 4297726 - DNA, 25 bp, Homo sapien
cgcttcgtccaacggccttcgagag

SEQ ID NO: 4297727 - DNA, 25 bp, Homo sapien
agaagctgtcccagcgcagcaggcc

SEQ ID NO: 4297728 - DNA, 25 bp, Homo sapien
cttcatcgtcctctggcgcgcctcc

SEQ ID NO: 4297729 - DNA, 25 bp, Homo sapien
tgcagccaggcggagaagctgtccc

SEQ ID NO: 4297730 - DNA, 25 bp, Homo sapien
gccgccccctgaccgttcgcgccgc

SEQ ID NO: 4297731 - DNA, 25 bp, Homo sapien
caggcgcagacgctgctgtcgcagc

SEQ ID NO: 4297732 - DNA, 25 bp, Homo sapien
ctggggacccactcagtccgggcgg

SEQ ID NO: 4297733 - DNA, 25 bp, Homo sapien
cgcaggcgcagacgctgctgtcgca

SEQ ID NO: 4297734 - DNA, 25 bp, Homo sapien
gacccactcagtccgggcggggctg

SEQ ID NO: 4297735 - DNA, 25 bp, Homo sapien
ctgtaggccaggtgtacgtgttcct

SEQ ID NO: 4297736 - DNA, 25 bp, Homo sapien
tgagtaaaacccatagttgttcggc

SEQ ID NO: 4297737 - DNA, 25 bp, Homo sapien
aggtgtacgtgttcctcctgagtcc

SEQ ID NO: 4297738 - DNA, 25 bp, Homo sapien
taattggcaagcgactgctgtaggc

SEQ ID NO: 4297739 - DNA, 25 bp, Homo sapien
tcagatgaaggtaaatcaacagcat

SEQ ID NO: 4297740 - DNA, 25 bp, Homo sapien
ccaaactctagaggtcttgtatact

SEQ ID NO: 4297741 - DNA, 25 bp, Homo sapien
catcaccccgtttcagtgacccagg

SEQ ID NO: 4297742 - DNA, 25 bp, Homo sapien
gagacaggtcactaagcactgagac

SEQ ID NO: 4297743 - DNA, 25 bp, Homo sapien
tctaccatcatcagaggctgtcctc

SEQ ID NO: 4297744 - DNA, 25 bp, Homo sapien
gaatggcagaaacgcaggacttctg

SEQ ID NO: 4297745 - DNA, 25 bp, Homo sapien
aggacttctggaaactctaccatca

SEQ ID NO: 4297746 - DNA, 25 bp, Homo sapien
cagaatggcagaaacgcaggacttc

SEQ ID NO: 4297747 - DNA, 25 bp, Homo sapien
tagcaccctgtgtagcttgatagga

SEQ ID NO: 4297748 - DNA, 25 bp, Homo sapien
tacagaatcacagagaggaacaccc

SEQ ID NO: 4297749 - DNA, 25 bp, Homo sapien
cttgtagaagaaagtccactctgct

SEQ ID NO: 4297750 - DNA, 25 bp, Homo sapien
tgtgcctgctgaataccagtgggtg

SEQ ID NO: 4297751 - DNA, 25 bp, Homo sapien
cattttgaatagcatacctggaaca

SEQ ID NO: 4297752 - DNA, 25 bp, Homo sapien
tcattagggatctgtggagggtcct

SEQ ID NO: 4297753 - DNA, 25 bp, Homo sapien
tatcccaatagcatcagactagctg

SEQ ID NO: 4297754 - DNA, 25 bp, Homo sapien
taaatcgagcaacttgagggagtct

SEQ ID NO: 4297755 - DNA, 25 bp, Homo sapien
ctgtggaagaatccgcgcaggagcc

SEQ ID NO: 4297756 - DNA, 25 bp, Homo sapien
ttaaactttctggacgctccttctg

SEQ ID NO: 4297757 - DNA, 25 bp, Homo sapien
tttctggacgctccttctgtggaag

SEQ ID NO: 4297758 - DNA, 25 bp, Homo sapien
tccttctgtggaagaatccgcgcag

SEQ ID NO: 4297759 - DNA, 25 bp, Homo sapien
tgtttgaaaaaccttctacggcgca

SEQ ID NO: 4297760 - DNA, 25 bp, Homo sapien
gcccttaactaagatggcgcctgga

SEQ ID NO: 4297761 - DNA, 25 bp, Homo sapien
tagataaaataagaaggtggcactg

SEQ ID NO: 4297762 - DNA, 25 bp, Homo sapien
gttgtcccgaggtttgaagcttcca

SEQ ID NO: 4297763 - DNA, 25 bp, Homo sapien
taccaacacggcttccgtggcgtcg

SEQ ID NO: 4297764 - DNA, 25 bp, Homo sapien
acattcctggactacggcgcgggag

SEQ ID NO: 4297765 - DNA, 25 bp, Homo sapien
cccttgaagggtgcgcgttcccgtg

SEQ ID NO: 4297766 - DNA, 25 bp, Homo sapien
tcagtcagagtcactatggcggccg

SEQ ID NO: 4297767 - DNA, 25 bp, Homo sapien
tcctcgtagcctgcttgcggagagg

SEQ ID NO: 4297768 - DNA, 25 bp, Homo sapien
ccgtcgtggcgtcctggctccaaat

SEQ ID NO: 4297769 - DNA, 25 bp, Homo sapien
gaggtcgtgcctagcggtgtgggct

SEQ ID NO: 4297770 - DNA, 25 bp, Homo sapien
gagaggtcggcggaggtcgtgccta

SEQ ID NO: 4297771 - DNA, 25 bp, Homo sapien
ctgaggcgcctgacggccgtttgtt

SEQ ID NO: 4297772 - DNA, 25 bp, Homo sapien
ttgagcttgccccatcggccgcgat

SEQ ID NO: 4297773 - DNA, 25 bp, Homo sapien
gcctcgtcgggcgcagcttgagctt

SEQ ID NO: 4297774 - DNA, 25 bp, Homo sapien
caccaggtcggaaagtttcctgcct

SEQ ID NO: 4297775 - DNA, 25 bp, Homo sapien
agatgcgaccctcgcgggggcgacc

SEQ ID NO: 4297776 - DNA, 25 bp, Homo sapien
gtccctgagatgcgaccctcgcggg

SEQ ID NO: 4297777 - DNA, 25 bp, Homo sapien
ctgccgtccctgagatgcgaccctc

SEQ ID NO: 4297778 - DNA, 25 bp, Homo sapien
ccgtccctgagatgcgaccctcgcg

SEQ ID NO: 4297779 - DNA, 25 bp, Homo sapien
ggcggcccagaagcctaggcgtccg

SEQ ID NO: 4297780 - DNA, 25 bp, Homo sapien
cggcccagaagcctaggcgtccggg

SEQ ID NO: 4297781 - DNA, 25 bp, Homo sapien
tgagcggcggcccagaagcctaggc

SEQ ID NO: 4297782 - DNA, 25 bp, Homo sapien
agcggcggcccagaagcctaggcgt

SEQ ID NO: 4297783 - DNA, 25 bp, Homo sapien
tcgagcctcccggtgtcgcgcctcg

SEQ ID NO: 4297784 - DNA, 25 bp, Homo sapien
cctgccgcctgggaactcgagcctc

SEQ ID NO: 4297785 - DNA, 25 bp, Homo sapien
cgcctgggaactcgagcctcccggt

SEQ ID NO: 4297786 - DNA, 25 bp, Homo sapien
ggtgtcgcgcctcgctcggtccgca

SEQ ID NO: 4297787 - DNA, 25 bp, Homo sapien
agaattggcgtgtgactcatctgct

SEQ ID NO: 4297788 - DNA, 25 bp, Homo sapien
aagaattggcgtgtgactcatctgc

SEQ ID NO: 4297789 - DNA, 25 bp, Homo sapien
acacaagaattggcgtgtgactcat

SEQ ID NO: 4297790 - DNA, 25 bp, Homo sapien
acaagaattggcgtgtgactcatct

SEQ ID NO: 4297791 - DNA, 25 bp, Homo sapien
gactttttgtgatcacggcgttgca

SEQ ID NO: 4297792 - DNA, 25 bp, Homo sapien
ttttcttggccgaagctgcccgatg

SEQ ID NO: 4297793 - DNA, 25 bp, Homo sapien
gaactcgcacccgtttcaggagcgt

SEQ ID NO: 4297794 - DNA, 25 bp, Homo sapien
tggacgagcccatcaaaatcggccg

SEQ ID NO: 4297795 - DNA, 25 bp, Homo sapien
aatggtggcatttattagcggctga

SEQ ID NO: 4297796 - DNA, 25 bp, Homo sapien
ccccaaactttgtgtactagctgta

SEQ ID NO: 4297797 - DNA, 25 bp, Homo sapien
caggtacatgcttctcttactgaca

SEQ ID NO: 4297798 - DNA, 25 bp, Homo sapien
cgttctaagtttacagtccagactc

SEQ ID NO: 4297799 - DNA, 25 bp, Homo sapien
ataacaggtgtccttggtgtatatg

SEQ ID NO: 4297800 - DNA, 25 bp, Homo sapien
agaataacaggtgtccttggtgtat

SEQ ID NO: 4297801 - DNA, 25 bp, Homo sapien
catgtaagggggacttgaattggac

SEQ ID NO: 4297802 - DNA, 25 bp, Homo sapien
gcttgtttgtcatgtaagggggact

SEQ ID NO: 4297803 - DNA, 25 bp, Homo sapien
aaagtgccaggtttacaggcaagaa

SEQ ID NO: 4297804 - DNA, 25 bp, Homo sapien
agtgccaggtttacaggcaagaacc

SEQ ID NO: 4297805 - DNA, 25 bp, Homo sapien
gaaacaggatctcgccaggttgccc

SEQ ID NO: 4297806 - DNA, 25 bp, Homo sapien
tagaaacaggatctcgccaggttgc

SEQ ID NO: 4297807 - DNA, 25 bp, Homo sapien
ttgattatttgttggatataggata

SEQ ID NO: 4297808 - DNA, 25 bp, Homo sapien
atttccatttcttgagatttggtca

SEQ ID NO: 4297809 - DNA, 25 bp, Homo sapien
tatttgttggatataggatatttcc

SEQ ID NO: 4297810 - DNA, 25 bp, Homo sapien
tgttggatataggatatttccattt

SEQ ID NO: 4297811 - DNA, 25 bp, Homo sapien
tgtcattctatacagttacgcaacg

SEQ ID NO: 4297812 - DNA, 25 bp, Homo sapien
tttatggtactcttggaagcactga

SEQ ID NO: 4297813 - DNA, 25 bp, Homo sapien
gtgccagttggcacaacaggttgtg

SEQ ID NO: 4297814 - DNA, 25 bp, Homo sapien
tacgcaacgatcactgtaattcagc

SEQ ID NO: 4297815 - DNA, 25 bp, Homo sapien
ttactgagggttttcgcatcgatgg

SEQ ID NO: 4297816 - DNA, 25 bp, Homo sapien
taggctttttttgttggataggctg

SEQ ID NO: 4297817 - DNA, 25 bp, Homo sapien
gggttttcgcatcgatggcctgaag

SEQ ID NO: 4297818 - DNA, 25 bp, Homo sapien
actgagggttttcgcatcgatggcc

SEQ ID NO: 4297819 - DNA, 25 bp, Homo sapien
tagagaggagctatccacttcaggg

SEQ ID NO: 4297820 - DNA, 25 bp, Homo sapien
cgttgagatgacctgcctgtagaga

SEQ ID NO: 4297821 - DNA, 25 bp, Homo sapien
cagggcctcctctgagctactctgt

SEQ ID NO: 4297822 - DNA, 25 bp, Homo sapien
cctacagacagaagcgggaacttgt

SEQ ID NO: 4297823 - DNA, 25 bp, Homo sapien
tgtgcccagcctaagttttatattt

SEQ ID NO: 4297824 - DNA, 25 bp, Homo sapien
cacccaccatcatgttgagcaggct

SEQ ID NO: 4297825 - DNA, 25 bp, Homo sapien
actgtgcccagcctaagttttatat

SEQ ID NO: 4297826 - DNA, 25 bp, Homo sapien
agcaggctggtcttgaactcctgac

SEQ ID NO: 4297827 - DNA, 25 bp, Homo sapien
aagagtcaacattaaatctagagaa

SEQ ID NO: 4297828 - DNA, 25 bp, Homo sapien
aaaaaatggctggatgcaaatagaa

SEQ ID NO: 4297829 - DNA, 25 bp, Homo sapien
tagagaaaagcctttgtacaagagg

SEQ ID NO: 4297830 - DNA, 25 bp, Homo sapien
caaaggattaaaagtagatcttatg

SEQ ID NO: 4297831 - DNA, 25 bp, Homo sapien
gaacaaattggactaatgagcaaga

SEQ ID NO: 4297832 - DNA, 25 bp, Homo sapien
caaattggactaatgagcaagaata

SEQ ID NO: 4297833 - DNA, 25 bp, Homo sapien
ttaaagaacaaattggactaatgag

SEQ ID NO: 4297834 - DNA, 25 bp, Homo sapien
ttggactaatgagcaagaatattta

SEQ ID NO: 4297835 - DNA, 25 bp, Homo sapien
gaaattctttgcacaggggtgaaca

SEQ ID NO: 4297836 - DNA, 25 bp, Homo sapien
gtagcagagggagtttctagtgaaa

SEQ ID NO: 4297837 - DNA, 25 bp, Homo sapien
cacaagaaggctatagacagaagat

SEQ ID NO: 4297838 - DNA, 25 bp, Homo sapien
gacagaagataggaactaggtttgg

SEQ ID NO: 4297839 - DNA, 25 bp, Homo sapien
caaggttatgaagcagattgatata

SEQ ID NO: 4297840 - DNA, 25 bp, Homo sapien
gacttgcatgtctaaataaaatgaa

SEQ ID NO: 4297841 - DNA, 25 bp, Homo sapien
ctaaacgcttttccaccagtactca

SEQ ID NO: 4297842 - DNA, 25 bp, Homo sapien
cagtactcatcacaagactccccaa

SEQ ID NO: 4297843 - DNA, 25 bp, Homo sapien
tacagtgagcccttgatcaaccttt

SEQ ID NO: 4297844 - DNA, 25 bp, Homo sapien
gatcaaacactatagagttcaagac

SEQ ID NO: 4297845 - DNA, 25 bp, Homo sapien
gaggatctgcacactaactattcga

SEQ ID NO: 4297846 - DNA, 25 bp, Homo sapien
gcaccttgagaatggacccaagcca

SEQ ID NO: 4297847 - DNA, 25 bp, Homo sapien
ctgcagtgagtagacattgtgacac

SEQ ID NO: 4297848 - DNA, 25 bp, Homo sapien
cctgcagtgagtagacattgtgaca

SEQ ID NO: 4297849 - DNA, 25 bp, Homo sapien
tctgagccattcttgaggctgaggt

SEQ ID NO: 4297850 - DNA, 25 bp, Homo sapien
aagagaggggagaatgtgatattga

SEQ ID NO: 4297851 - DNA, 25 bp, Homo sapien
agagaggggagaatgtgatattgac

SEQ ID NO: 4297852 - DNA, 25 bp, Homo sapien
gtcctccctctagaagctggcatca

SEQ ID NO: 4297853 - DNA, 25 bp, Homo sapien
tggttgcagtaacagccatcgtgct

SEQ ID NO: 4297854 - DNA, 25 bp, Homo sapien
gagcgttccttgagtccgtacaccg

SEQ ID NO: 4297855 - DNA, 25 bp, Homo sapien
catcgtgctgtacgtgccaggtctg

SEQ ID NO: 4297856 - DNA, 25 bp, Homo sapien
gcaatccacaggtctagccaaatat

SEQ ID NO: 4297857 - DNA, 25 bp, Homo sapien
tagccatggttttgtgcggcatcat

SEQ ID NO: 4297858 - DNA, 25 bp, Homo sapien
tatttgcactaacacacgtgacgtg

SEQ ID NO: 4297859 - DNA, 25 bp, Homo sapien
gaatgctaatatgccagtggtaccc

SEQ ID NO: 4297860 - DNA, 25 bp, Homo sapien
tatgtgaagtaccattcgagtggtg

SEQ ID NO: 4297861 - DNA, 25 bp, Homo sapien
cgagtggtgaatacgtttttatgag

SEQ ID NO: 4297862 - DNA, 25 bp, Homo sapien
tataacatgcggagaataatactta

SEQ ID NO: 4297863 - DNA, 25 bp, Homo sapien
gatgttgttgccttgtgcaaatcac

SEQ ID NO: 4297864 - DNA, 25 bp, Homo sapien
ttaagctccaacatgacatgcaaag

SEQ ID NO: 4297865 - DNA, 25 bp, Homo sapien
tcctaatcaagcaaattctttgtca

SEQ ID NO: 4297866 - DNA, 25 bp, Homo sapien
ccagcaggaactcctaatcaagcaa

SEQ ID NO: 4297867 - DNA, 25 bp, Homo sapien
actttttaagctccaacatgacatg

SEQ ID NO: 4297868 - DNA, 25 bp, Homo sapien
catggtcttcgatattgctgtcaac

SEQ ID NO: 4297869 - DNA, 25 bp, Homo sapien
cacactggtggcacatccatctaca

SEQ ID NO: 4297870 - DNA, 25 bp, Homo sapien
aacgacaagcccttgggccgtatct

SEQ ID NO: 4297871 - DNA, 25 bp, Homo sapien
gtcaaccccaccatggtcttcgata

SEQ ID NO: 4297872 - DNA, 25 bp, Homo sapien
catgtggcctttggcatggtgaagg

SEQ ID NO: 4297873 - DNA, 25 bp, Homo sapien
gttcccagttttcatgtgccctgcc

SEQ ID NO: 4297874 - DNA, 25 bp, Homo sapien
tttggcatggtgaaggcatgaatat

SEQ ID NO: 4297875 - DNA, 25 bp, Homo sapien
tcccagttttcatgtgccctgccaa

SEQ ID NO: 4297876 - DNA, 25 bp, Homo sapien
tcaactaagtggaataagtaaaggc

SEQ ID NO: 4297877 - DNA, 25 bp, Homo sapien
ccttattcctttcatgcctagctgg

SEQ ID NO: 4297878 - DNA, 25 bp, Homo sapien
aaaaaaggatacacctaatccacag

SEQ ID NO: 4297879 - DNA, 25 bp, Homo sapien
tccacagtttcttatgaaaccctgg

SEQ ID NO: 4297880 - DNA, 25 bp, Homo sapien
cagcatatccctagcttctcctttg

SEQ ID NO: 4297881 - DNA, 25 bp, Homo sapien
acctcctcctagtcattggcacgtt

SEQ ID NO: 4297882 - DNA, 25 bp, Homo sapien
cctcaggttcgggttgggctcctga

SEQ ID NO: 4297883 - DNA, 25 bp, Homo sapien
cattggcacgttaacctcaaacacc

SEQ ID NO: 4297884 - DNA, 25 bp, Homo sapien
tgatgatgattatccgaatcactct

SEQ ID NO: 4297885 - DNA, 25 bp, Homo sapien
gacacagctttgccgcttttttggt

SEQ ID NO: 4297886 - DNA, 25 bp, Homo sapien
tcctgatggacacgctggaaaattt

SEQ ID NO: 4297887 - DNA, 25 bp, Homo sapien
ggctgttcctgatggacacgctgga

SEQ ID NO: 4297888 - DNA, 25 bp, Homo sapien
cagctttgccgcttttttggtgaga

SEQ ID NO: 4297889 - DNA, 25 bp, Homo sapien
cccaggtgacttgtaggcagaggcc

SEQ ID NO: 4297890 - DNA, 25 bp, Homo sapien
gaaaatccggattggcctagcttca

SEQ ID NO: 4297891 - DNA, 25 bp, Homo sapien
tgtctttgccacaggagcacctctg

SEQ ID NO: 4297892 - DNA, 25 bp, Homo sapien
cattggaccttcaggtcataccagg

SEQ ID NO: 4297893 - DNA, 25 bp, Homo sapien
tgcccggctccaaaggtgcattgga

SEQ ID NO: 4297894 - DNA, 25 bp, Homo sapien
cagggactgtgagtagctccattta

SEQ ID NO: 4297895 - DNA, 25 bp, Homo sapien
ccatttaggagcatggaaggaatga

SEQ ID NO: 4297896 - DNA, 25 bp, Homo sapien
agacccagggactgtgagtagctcc

SEQ ID NO: 4297897 - DNA, 25 bp, Homo sapien
gactgtgagtagctccatttaggag

SEQ ID NO: 4297898 - DNA, 25 bp, Homo sapien
ggctgcaactggacctccttctgtg

SEQ ID NO: 4297899 - DNA, 25 bp, Homo sapien
gcaactggacctccttctgtggggc

SEQ ID NO: 4297900 - DNA, 25 bp, Homo sapien
gcctatctgataagctctggggagt

SEQ ID NO: 4297901 - DNA, 25 bp, Homo sapien
cctgcctatctgataagctctgggg

SEQ ID NO: 4297902 - DNA, 25 bp, Homo sapien
tgcctatctgataagctctggggag

SEQ ID NO: 4297903 - DNA, 25 bp, Homo sapien
ctgcctatctgataagctctgggga

SEQ ID NO: 4297904 - DNA, 25 bp, Homo sapien
cccagcggtttcctgctccttcttc

SEQ ID NO: 4297905 - DNA, 25 bp, Homo sapien
catgcaaggatttgcctctgaggag

SEQ ID NO: 4297906 - DNA, 25 bp, Homo sapien
tccagtggtttcttccaaggtctcc

SEQ ID NO: 4297907 - DNA, 25 bp, Homo sapien
cctcagaccccttccagtggtttct

SEQ ID NO: 4297908 - DNA, 25 bp, Homo sapien
tgtgggcctgccatgccctcagacc

SEQ ID NO: 4297909 - DNA, 25 bp, Homo sapien
gaaaaataggttgcaaggagacagg

SEQ ID NO: 4297910 - DNA, 25 bp, Homo sapien
taggacggtgctgacactgtgtgct

SEQ ID NO: 4297911 - DNA, 25 bp, Homo sapien
acaggaagatggtgagttacttgcg

SEQ ID NO: 4297912 - DNA, 25 bp, Homo sapien
gcaccacgacgccaagcttgcagtg

SEQ ID NO: 4297913 - DNA, 25 bp, Homo sapien
gagacattcctcacattttcaccag

SEQ ID NO: 4297914 - DNA, 25 bp, Homo sapien
aaggacagagacattcctcacattt

SEQ ID NO: 4297915 - DNA, 25 bp, Homo sapien
ggacagagacattcctcacattttc

SEQ ID NO: 4297916 - DNA, 25 bp, Homo sapien
ctgaggtctgatgagtcagggaagg

SEQ ID NO: 4297917 - DNA, 25 bp, Homo sapien
ttgccaggtgagcagtagctagaca

SEQ ID NO: 4297918 - DNA, 25 bp, Homo sapien
tttagcagaaaagtgctctgtggca

SEQ ID NO: 4297919 - DNA, 25 bp, Homo sapien
tcagcgtaaagccattcgcaaaggg

SEQ ID NO: 4297920 - DNA, 25 bp, Homo sapien
cagaaaagggctttgtcagcgtaaa

SEQ ID NO: 4297921 - DNA, 25 bp, Homo sapien
gaacaacacgcagatgtggagtgaa

SEQ ID NO: 4297922 - DNA, 25 bp, Homo sapien
acaacacgcagatgtggagtgaagg

SEQ ID NO: 4297923 - DNA, 25 bp, Homo sapien
ggagtgaagggtggctgccgccttc

SEQ ID NO: 4297924 - DNA, 25 bp, Homo sapien
aggaacaacacgcagatgtggagtg

SEQ ID NO: 4297925 - DNA, 25 bp, Homo sapien
ggacaatagcttgaatccaagggca

SEQ ID NO: 4297926 - DNA, 25 bp, Homo sapien
acaatagcttgaatccaagggcaga

SEQ ID NO: 4297927 - DNA, 25 bp, Homo sapien
caagggcagaggctgtgttgagctg

SEQ ID NO: 4297928 - DNA, 25 bp, Homo sapien
caggacaatagcttgaatccaaggg

SEQ ID NO: 4297929 - DNA, 25 bp, Homo sapien
tcttttgagtacaagtgagagaaac

SEQ ID NO: 4297930 - DNA, 25 bp, Homo sapien
tgcccgggggaatgatctctgctca

SEQ ID NO: 4297931 - DNA, 25 bp, Homo sapien
tgaaaaaattctttgtcaggagagt

SEQ ID NO: 4297932 - DNA, 25 bp, Homo sapien
tgagagaaactcacttgagctggct

SEQ ID NO: 4297933 - DNA, 25 bp, Homo sapien
gcccagctacgtggatggctgcttc

SEQ ID NO: 4297934 - DNA, 25 bp, Homo sapien
ttcctgcctggaagcgatgcccaga

SEQ ID NO: 4297935 - DNA, 25 bp, Homo sapien
agcgatgcccagatcagcaccttgg

SEQ ID NO: 4297936 - DNA, 25 bp, Homo sapien
ctaggaagatatcagctgaagctct

SEQ ID NO: 4297937 - DNA, 25 bp, Homo sapien
tgtagtggtatctccgtgctgtggc

SEQ ID NO: 4297938 - DNA, 25 bp, Homo sapien
cgccttctcggggatggccaccatt

SEQ ID NO: 4297939 - DNA, 25 bp, Homo sapien
gtgtagtggtatctccgtgctgtgg

SEQ ID NO: 4297940 - DNA, 25 bp, Homo sapien
ctcggggatggccaccatttgtgtt

SEQ ID NO: 4297941 - DNA, 25 bp, Homo sapien
ggcacctccggttctgcaagcatgt

SEQ ID NO: 4297942 - DNA, 25 bp, Homo sapien
tttttctggtctgctacgtgtccat

SEQ ID NO: 4297943 - DNA, 25 bp, Homo sapien
tgttgccttgagacaagtggcccgc

SEQ ID NO: 4297944 - DNA, 25 bp, Homo sapien
gctttgcgcaatagccttgggcacc

SEQ ID NO: 4297945 - DNA, 25 bp, Homo sapien
ccttgctgctctttccagaagcaac

SEQ ID NO: 4297946 - DNA, 25 bp, Homo sapien
ctgctctttccagaagcaactgcat

SEQ ID NO: 4297947 - DNA, 25 bp, Homo sapien
gctgctctttccagaagcaactgca

SEQ ID NO: 4297948 - DNA, 25 bp, Homo sapien
ctattccttgctgctctttccagaa

SEQ ID NO: 4297949 - DNA, 25 bp, Homo sapien
tgcggcatgcataggggacctcttg

SEQ ID NO: 4297950 - DNA, 25 bp, Homo sapien
tctgtgccaagcagtgcggcatgca

SEQ ID NO: 4297951 - DNA, 25 bp, Homo sapien
gacctcttgaatggagggacagtcc

SEQ ID NO: 4297952 - DNA, 25 bp, Homo sapien
ggacctcttgaatggagggacagtc

SEQ ID NO: 4297953 - DNA, 25 bp, Homo sapien
tgtccagcctagtttggaattcttc

SEQ ID NO: 4297954 - DNA, 25 bp, Homo sapien
gtccagcctagtttggaattcttca

SEQ ID NO: 4297955 - DNA, 25 bp, Homo sapien
cagcctagtttggaattcttcataa

SEQ ID NO: 4297956 - DNA, 25 bp, Homo sapien
ccagcctagtttggaattcttcata

SEQ ID NO: 4297957 - DNA, 25 bp, Homo sapien
gcagaccaaccagggatcttgggac

SEQ ID NO: 4297958 - DNA, 25 bp, Homo sapien
tcttgggactcgaggaatgacacag

SEQ ID NO: 4297959 - DNA, 25 bp, Homo sapien
gatgaggcagaccaaccagggatct

SEQ ID NO: 4297960 - DNA, 25 bp, Homo sapien
cacagtactgagttccttgggttta

SEQ ID NO: 4297961 - DNA, 25 bp, Homo sapien
agaactcaaaatgttgctgagactg

SEQ ID NO: 4297962 - DNA, 25 bp, Homo sapien
gaacactagtatctagaacatgtag

SEQ ID NO: 4297963 - DNA, 25 bp, Homo sapien
cagttaagaggatgaatatacaggc

SEQ ID NO: 4297964 - DNA, 25 bp, Homo sapien
gctgtcttagccctcacactataaa

SEQ ID NO: 4297965 - DNA, 25 bp, Homo sapien
ctaacatattcctaagcaaagctct

SEQ ID NO: 4297966 - DNA, 25 bp, Homo sapien
catattcctaagcaaagctcttttt

SEQ ID NO: 4297967 - DNA, 25 bp, Homo sapien
tcctcactcgtggacttcctttttc

SEQ ID NO: 4297968 - DNA, 25 bp, Homo sapien
tttccaacctttcctcactcgtgga

SEQ ID NO: 4297969 - DNA, 25 bp, Homo sapien
tacagaaaatatcttagacaagtct

SEQ ID NO: 4297970 - DNA, 25 bp, Homo sapien
gtgctgactgtgtatccttggtaat

SEQ ID NO: 4297971 - DNA, 25 bp, Homo sapien
tatccattgtcaggctcttcagtta

SEQ ID NO: 4297972 - DNA, 25 bp, Homo sapien
tatgcgtaaatatagggtatgcctt

SEQ ID NO: 4297973 - DNA, 25 bp, Homo sapien
cttgtgattataaacccgaaatgga

SEQ ID NO: 4297974 - DNA, 25 bp, Homo sapien
attcttgtgattataaacccgaaat

SEQ ID NO: 4297975 - DNA, 25 bp, Homo sapien
ttcttgtgattataaacccgaaatg

SEQ ID NO: 4297976 - DNA, 25 bp, Homo sapien
tcttgtgattataaacccgaaatgg

SEQ ID NO: 4297977 - DNA, 25 bp, Homo sapien
tcttagcacaggtctaggtgaactc

SEQ ID NO: 4297978 - DNA, 25 bp, Homo sapien
gccatgagatttcttggagcctcga

SEQ ID NO: 4297979 - DNA, 25 bp, Homo sapien
aaatggcgcacacatggctatcgcg

SEQ ID NO: 4297980 - DNA, 25 bp, Homo sapien
ggtgaactcttgcaaatccctgttg

SEQ ID NO: 4297981 - DNA, 25 bp, Homo sapien
tccgacaatggtgatgggacctgct

SEQ ID NO: 4297982 - DNA, 25 bp, Homo sapien
gaggccaaaatcgagtgctccgaca

SEQ ID NO: 4297983 - DNA, 25 bp, Homo sapien
gaagctgtctcggactcgggaacaa

SEQ ID NO: 4297984 - DNA, 25 bp, Homo sapien
ttcaccatcgataccaaaggagctg

SEQ ID NO: 4297985 - DNA, 25 bp, Homo sapien
ggactggaccctcgttcagagctgc

SEQ ID NO: 4297986 - DNA, 25 bp, Homo sapien
acagacaatgcggatgggacctacc

SEQ ID NO: 4297987 - DNA, 25 bp, Homo sapien
ttacagttgactctcggccgctgac

SEQ ID NO: 4297988 - DNA, 25 bp, Homo sapien
tccaccgagtgctttgtcacagaca

SEQ ID NO: 4297989 - DNA, 25 bp, Homo sapien
cacctcttggaacaatctctaaggg

SEQ ID NO: 4297990 - DNA, 25 bp, Homo sapien
tggtgaacctgcaagtagttttctg

SEQ ID NO: 4297991 - DNA, 25 bp, Homo sapien
tagttttctgattgggacaggacaa

SEQ ID NO: 4297992 - DNA, 25 bp, Homo sapien
gttacataagctcttcacctcttgg

SEQ ID NO: 4297993 - DNA, 25 bp, Homo sapien
gatgctaggaagtggattcccatct

SEQ ID NO: 4297994 - DNA, 25 bp, Homo sapien
tcacattacctagtggcaaggatgc

SEQ ID NO: 4297995 - DNA, 25 bp, Homo sapien
cctagctaagagttatggtcctgtt

SEQ ID NO: 4297996 - DNA, 25 bp, Homo sapien
ttctgggagcggtgcacctagctaa

SEQ ID NO: 4297997 - DNA, 25 bp, Homo sapien
gaggtgcatgaagactccattccaa

SEQ ID NO: 4297998 - DNA, 25 bp, Homo sapien
tttgatactgtggtcagcagccgca

SEQ ID NO: 4297999 - DNA, 25 bp, Homo sapien
tctagacagacaccaaataccatgc

SEQ ID NO: 4298000 - DNA, 25 bp, Homo sapien
ccttaatgacctggccttgtgcaca

SEQ ID NO: 4298001 - DNA, 25 bp, Homo sapien
atgcaaacggaaatacagatatata

SEQ ID NO: 4298002 - DNA, 25 bp, Homo sapien
aatgccaaagcttcttgacggtaaa

SEQ ID NO: 4298003 - DNA, 25 bp, Homo sapien
tgctcaaagctttgctcacgcatgg

SEQ ID NO: 4298004 - DNA, 25 bp, Homo sapien
ccattgggacttacatatgttcacc

SEQ ID NO: 4298005 - DNA, 25 bp, Homo sapien
tctaactttgtcttgttgcctaaaa

SEQ ID NO: 4298006 - DNA, 25 bp, Homo sapien
gaaaaggtatctgtgcttggccgcc

SEQ ID NO: 4298007 - DNA, 25 bp, Homo sapien
cctgggtctggaagcaaacggctct

SEQ ID NO: 4298008 - DNA, 25 bp, Homo sapien
taatgaaatggtccaggaaccccag

SEQ ID NO: 4298009 - DNA, 25 bp, Homo sapien
ggtcatgcacacttcggaggcgctt

SEQ ID NO: 4298010 - DNA, 25 bp, Homo sapien
cagcattatcgtggaagcaccttac

SEQ ID NO: 4298011 - DNA, 25 bp, Homo sapien
tggcatccagtacacctgggctgga

SEQ ID NO: 4298012 - DNA, 25 bp, Homo sapien
ccttaaggtgcttgtgagagtaaac

SEQ ID NO: 4298013 - DNA, 25 bp, Homo sapien
ctagggagaggtgagattccagtcc

SEQ ID NO: 4298014 - DNA, 25 bp, Homo sapien
tgtcctgatgcatccgggtggagta

SEQ ID NO: 4298015 - DNA, 25 bp, Homo sapien
taggctccaacatgctgctgatcgg

SEQ ID NO: 4298016 - DNA, 25 bp, Homo sapien
tgcatccgggtggagtaaccacctt

SEQ ID NO: 4298017 - DNA, 25 bp, Homo sapien
ttgcctcctaggctccaacatgctg

SEQ ID NO: 4298018 - DNA, 25 bp, Homo sapien
gaagatcctgagtacactaggtgca

SEQ ID NO: 4298019 - DNA, 25 bp, Homo sapien
actcttggtggaacagaccagccac

SEQ ID NO: 4298020 - DNA, 25 bp, Homo sapien
taatctcttccagtgtccgtgttaa

SEQ ID NO: 4298021 - DNA, 25 bp, Homo sapien
caaaactggctagcctgagctgctg

SEQ ID NO: 4298022 - DNA, 25 bp, Homo sapien
caccattggcagaaacagtgagagc

SEQ ID NO: 4298023 - DNA, 25 bp, Homo sapien
taagctgggacacggaagccaaact

SEQ ID NO: 4298024 - DNA, 25 bp, Homo sapien
caaactggaatcaaacgccgactgt

SEQ ID NO: 4298025 - DNA, 25 bp, Homo sapien
actcctgcgggtctttggcctgaaa

SEQ ID NO: 4298026 - DNA, 25 bp, Homo sapien
tgtggcctgcaccaggaagcactgc

SEQ ID NO: 4298027 - DNA, 25 bp, Homo sapien
acttgccaaagagtccattcaggct

SEQ ID NO: 4298028 - DNA, 25 bp, Homo sapien
aaggtccgtgggcttcgggattctg

SEQ ID NO: 4298029 - DNA, 25 bp, Homo sapien
ggtctggccgggccacagtatcatg

SEQ ID NO: 4298030 - DNA, 25 bp, Homo sapien
aggtgaagcggacagcagctgcact

SEQ ID NO: 4298031 - DNA, 25 bp, Homo sapien
ctttgcaacccagggaggcactcac

SEQ ID NO: 4298032 - DNA, 25 bp, Homo sapien
tgcactgccctgtagagattcccag

SEQ ID NO: 4298033 - DNA, 25 bp, Homo sapien
gaaaccagctgtttgtgcaaatacc

SEQ ID NO: 4298034 - DNA, 25 bp, Homo sapien
aggcatctcccacgatggccaaggc

SEQ ID NO: 4298035 - DNA, 25 bp, Homo sapien
aaaaatgggcaccttggatacaggc

SEQ ID NO: 4298036 - DNA, 25 bp, Homo sapien
gatagcagagaccttcatggtggcc

SEQ ID NO: 4298037 - DNA, 25 bp, Homo sapien
cagcctctcgcatgacagggttgag

SEQ ID NO: 4298038 - DNA, 25 bp, Homo sapien
gaacaggacccctcatgaggactga

SEQ ID NO: 4298039 - DNA, 25 bp, Homo sapien
tggttaataagatgagacccttggg

SEQ ID NO: 4298040 - DNA, 25 bp, Homo sapien
atggttaataagatgagacccttgg

SEQ ID NO: 4298041 - DNA, 25 bp, Homo sapien
aaatggttaataagatgagaccctt

SEQ ID NO: 4298042 - DNA, 25 bp, Homo sapien
aatggttaataagatgagacccttg

SEQ ID NO: 4298043 - DNA, 25 bp, Homo sapien
gaaagtggtcgctgacatccagggc

SEQ ID NO: 4298044 - DNA, 25 bp, Homo sapien
gaaggcccttgaagactgtagttta

SEQ ID NO: 4298045 - DNA, 25 bp, Homo sapien
gactgtagtttaaattcaactggaa

SEQ ID NO: 4298046 - DNA, 25 bp, Homo sapien
ttggtgaaggcccttgaagactgta

SEQ ID NO: 4298047 - DNA, 25 bp, Homo sapien
cattgagggtcaaggtctagtgccc

SEQ ID NO: 4298048 - DNA, 25 bp, Homo sapien
tccaagaccagctcgatcagaaatt

SEQ ID NO: 4298049 - DNA, 25 bp, Homo sapien
tcagtggtgacctcaaagggtggca

SEQ ID NO: 4298050 - DNA, 25 bp, Homo sapien
tagcgatgagcaaatttaggaccag

SEQ ID NO: 4298051 - DNA, 25 bp, Homo sapien
cttgggaacaacagaactgacgatt

SEQ ID NO: 4298052 - DNA, 25 bp, Homo sapien
agaactgacgatttcttgtcctcta

SEQ ID NO: 4298053 - DNA, 25 bp, Homo sapien
tttgacttgggaacaacagaactga

SEQ ID NO: 4298054 - DNA, 25 bp, Homo sapien
caacagaactgacgatttcttgtcc

SEQ ID NO: 4298055 - DNA, 25 bp, Homo sapien
tcttggtccccgatcagccaaacaa

SEQ ID NO: 4298056 - DNA, 25 bp, Homo sapien
gacgtagctgcagccggcattgaag

SEQ ID NO: 4298057 - DNA, 25 bp, Homo sapien
gttggtgctcttcttcaccgtggtg

SEQ ID NO: 4298058 - DNA, 25 bp, Homo sapien
agtcctcaagcggatgttcttccag

SEQ ID NO: 4298059 - DNA, 25 bp, Homo sapien
gggataatcacgaagtctttgacag

SEQ ID NO: 4298060 - DNA, 25 bp, Homo sapien
gtccgtgtagacctcaaccaactca

SEQ ID NO: 4298061 - DNA, 25 bp, Homo sapien
cgatctccttaacggatgtctctgg

SEQ ID NO: 4298062 - DNA, 25 bp, Homo sapien
gccttccagcggtgtttcacgtccg

SEQ ID NO: 4298063 - DNA, 25 bp, Homo sapien
gtctcataaacactgctggagggaa

SEQ ID NO: 4298064 - DNA, 25 bp, Homo sapien
cagccagtggccgagattttaatga

SEQ ID NO: 4298065 - DNA, 25 bp, Homo sapien
cacttcccctgtcaaggtctcataa

SEQ ID NO: 4298066 - DNA, 25 bp, Homo sapien
caggctgcattatctgggtccccag

SEQ ID NO: 4298067 - DNA, 25 bp, Homo sapien
aacagcagctgtcgccttctgagca

SEQ ID NO: 4298068 - DNA, 25 bp, Homo sapien
tgctaacagcagctgtcgccttctg

SEQ ID NO: 4298069 - DNA, 25 bp, Homo sapien
tacctcaacagacacgggctgtggg

SEQ ID NO: 4298070 - DNA, 25 bp, Homo sapien
tggattcccactcttacctcaacag

SEQ ID NO: 4298071 - DNA, 25 bp, Homo sapien
gctgctgcgcattcatgggccgttg

SEQ ID NO: 4298072 - DNA, 25 bp, Homo sapien
cattctgagaagcaagcctggtgcc

SEQ ID NO: 4298073 - DNA, 25 bp, Homo sapien
cactgaactgcatcgtctacattga

SEQ ID NO: 4298074 - DNA, 25 bp, Homo sapien
tgggctcatgctcaaggctgctgcg

SEQ ID NO: 4298075 - DNA, 25 bp, Homo sapien
tccctggaaaacacatctgcgtctc

SEQ ID NO: 4298076 - DNA, 25 bp, Homo sapien
tgcgtctccatcctgatagtcatgg

SEQ ID NO: 4298077 - DNA, 25 bp, Homo sapien
tagtcatggtagtgataactcctct

SEQ ID NO: 4298078 - DNA, 25 bp, Homo sapien
tggggagattggaaccagaccacaa

SEQ ID NO: 4298079 - DNA, 25 bp, Homo sapien
ggaaaaggaagtcctcccagctgag

SEQ ID NO: 4298080 - DNA, 25 bp, Homo sapien
aaggaaaaggaagtcctcccagctg

SEQ ID NO: 4298081 - DNA, 25 bp, Homo sapien
aaaggaagtcctcccagctgagtca

SEQ ID NO: 4298082 - DNA, 25 bp, Homo sapien
gaaaaggaagtcctcccagctgagt

SEQ ID NO: 4298083 - DNA, 25 bp, Homo sapien
tatatgtgtttcttccaagccgaga

SEQ ID NO: 4298084 - DNA, 25 bp, Homo sapien
atcacatagttgtacgttatgcctc

SEQ ID NO: 4298085 - DNA, 25 bp, Homo sapien
tccaagccgagagctaatcacatag

SEQ ID NO: 4298086 - DNA, 25 bp, Homo sapien
tgtagagaaaggcatattgttcttt

SEQ ID NO: 4298087 - DNA, 25 bp, Homo sapien
atttccatcacgagtatgatgtcac

SEQ ID NO: 4298088 - DNA, 25 bp, Homo sapien
aaggacctgacgttgaaggagcaga

SEQ ID NO: 4298089 - DNA, 25 bp, Homo sapien
acgttgaaggagcagatcctcatgg

SEQ ID NO: 4298090 - DNA, 25 bp, Homo sapien
cccaaaggacctgacgttgaaggag

SEQ ID NO: 4298091 - DNA, 25 bp, Homo sapien
cctgacgttgaaggagcagatcctc

SEQ ID NO: 4298092 - DNA, 25 bp, Homo sapien
gaaatacagatacattgggctagcc

SEQ ID NO: 4298093 - DNA, 25 bp, Homo sapien
taaggagcccttatgttcgtcaccc

SEQ ID NO: 4298094 - DNA, 25 bp, Homo sapien
gctccactgacttataaagcctgca

SEQ ID NO: 4298095 - DNA, 25 bp, Homo sapien
tggattctggccacttccgcaggct

SEQ ID NO: 4298096 - DNA, 25 bp, Homo sapien
ctccatcttcgggatgaagtttcct

SEQ ID NO: 4298097 - DNA, 25 bp, Homo sapien
tacttgcaaacaccagtctctaaga

SEQ ID NO: 4298098 - DNA, 25 bp, Homo sapien
gggtctccatcttcgggatgaagtt

SEQ ID NO: 4298099 - DNA, 25 bp, Homo sapien
taacgcctgctgacagccccggggt

SEQ ID NO: 4298100 - DNA, 25 bp, Homo sapien
ggtgtccaaaatttattgtctgtgg

SEQ ID NO: 4298101 - DNA, 25 bp, Homo sapien
gcagtgacaatcagatcccctcaaa

SEQ ID NO: 4298102 - DNA, 25 bp, Homo sapien
actgtccttgattgtgcagtgacaa

SEQ ID NO: 4298103 - DNA, 25 bp, Homo sapien
tatcttgagcaacatccactcttgg

SEQ ID NO: 4298104 - DNA, 25 bp, Homo sapien
gctccatgcatgtcacatgagtggg

SEQ ID NO: 4298105 - DNA, 25 bp, Homo sapien
ttgtcctggtcagtaagtccctgct

SEQ ID NO: 4298106 - DNA, 25 bp, Homo sapien
tcaagctcttgtcctggtcagtaag

SEQ ID NO: 4298107 - DNA, 25 bp, Homo sapien
gctcttgtcctggtcagtaagtccc

SEQ ID NO: 4298108 - DNA, 25 bp, Homo sapien
gatatgttgcgcaaaggctaccttg

SEQ ID NO: 4298109 - DNA, 25 bp, Homo sapien
gctaccttggaatttgagaaaagca

SEQ ID NO: 4298110 - DNA, 25 bp, Homo sapien
tatgggccctgatgggacaagagtc

SEQ ID NO: 4298111 - DNA, 25 bp, Homo sapien
agcaagatatggagatttcaggagg

SEQ ID NO: 4298112 - DNA, 25 bp, Homo sapien
tttgcagatttgtgaaaccacaccc

SEQ ID NO: 4298113 - DNA, 25 bp, Homo sapien
cagctggcggccaaagcctgtcggt

SEQ ID NO: 4298114 - DNA, 25 bp, Homo sapien
gcggccaaagcctgtcggtgcctat

SEQ ID NO: 4298115 - DNA, 25 bp, Homo sapien
ttgcccttggaatttgcagatttgt

SEQ ID NO: 4298116 - DNA, 25 bp, Homo sapien
gatgacatgggcgaaaacatcgccc

SEQ ID NO: 4298117 - DNA, 25 bp, Homo sapien
tcaaaggatgacatgggcgaaaaca

SEQ ID NO: 4298118 - DNA, 25 bp, Homo sapien
gaaaacatcgccctcttctgtctgg

SEQ ID NO: 4298119 - DNA, 25 bp, Homo sapien
tgggcgaaaacatcgccctcttctg

SEQ ID NO: 4298120 - DNA, 25 bp, Homo sapien
ggcagcatctcagtgctagaagtct

SEQ ID NO: 4298121 - DNA, 25 bp, Homo sapien
tttgcccctgaaggcagcatctcag

SEQ ID NO: 4298122 - DNA, 25 bp, Homo sapien
gagccaggttaatctttgcccctga

SEQ ID NO: 4298123 - DNA, 25 bp, Homo sapien
gccaggttaatctttgcccctgaag

SEQ ID NO: 4298124 - DNA, 25 bp, Homo sapien
tctgtgcctctgagctatcattcta

SEQ ID NO: 4298125 - DNA, 25 bp, Homo sapien
atcattctatatccagtggccacaa

SEQ ID NO: 4298126 - DNA, 25 bp, Homo sapien
gcctctgagctatcattctatatcc

SEQ ID NO: 4298127 - DNA, 25 bp, Homo sapien
tcattctatatccagtggccacaaa

SEQ ID NO: 4298128 - DNA, 25 bp, Homo sapien
cttcagccgtaaggagagataaagc

SEQ ID NO: 4298129 - DNA, 25 bp, Homo sapien
ggtgggactgagcaacccgctgttt

SEQ ID NO: 4298130 - DNA, 25 bp, Homo sapien
gagcaacccgctgtttggtgaataa

SEQ ID NO: 4298131 - DNA, 25 bp, Homo sapien
gaataaattgccactgaaactcggg

SEQ ID NO: 4298132 - DNA, 25 bp, Homo sapien
gacgatcctcggttggaattcccag

SEQ ID NO: 4298133 - DNA, 25 bp, Homo sapien
ttctcccgtatagctttggagtcag

SEQ ID NO: 4298134 - DNA, 25 bp, Homo sapien
agtccttacagtctgacgtcccgca

SEQ ID NO: 4298135 - DNA, 25 bp, Homo sapien
tttccaggtgcccatttctcccgta

SEQ ID NO: 4298136 - DNA, 25 bp, Homo sapien
tttcagtgtattcagtcaggcgata

SEQ ID NO: 4298137 - DNA, 25 bp, Homo sapien
caggtgatgttttaggttctgggaa

SEQ ID NO: 4298138 - DNA, 25 bp, Homo sapien
cactttacacgataaatagataaaa

SEQ ID NO: 4298139 - DNA, 25 bp, Homo sapien
acatgatcaagcaccaagtctttgc

SEQ ID NO: 4298140 - DNA, 25 bp, Homo sapien
ttttaatatcgtcattctctttggc

SEQ ID NO: 4298141 - DNA, 25 bp, Homo sapien
gttttaatatcgtcattctctttgg

SEQ ID NO: 4298142 - DNA, 25 bp, Homo sapien
tgttgagtatccagtagtctgctga

SEQ ID NO: 4298143 - DNA, 25 bp, Homo sapien
tgtatgttgagtatccagtagtctg

SEQ ID NO: 4298144 - DNA, 25 bp, Homo sapien
gagtatccagtagtctgctgaagtt

SEQ ID NO: 4298145 - DNA, 25 bp, Homo sapien
tgatgtatgttgagtatccagtagt

SEQ ID NO: 4298146 - DNA, 25 bp, Homo sapien
tctatttcaatgtgctactaagaac

SEQ ID NO: 4298147 - DNA, 25 bp, Homo sapien
tctgtgaattctgtgaagagtaatg

SEQ ID NO: 4298148 - DNA, 25 bp, Homo sapien
gaacccttggatgtaacatactagt

SEQ ID NO: 4298149 - DNA, 25 bp, Homo sapien
gattgaaaataagtctaaacagctg

SEQ ID NO: 4298150 - DNA, 25 bp, Homo sapien
caaccccaaactgggtgctgttctt

SEQ ID NO: 4298151 - DNA, 25 bp, Homo sapien
ctccccaaccccaaactgggtgctg

SEQ ID NO: 4298152 - DNA, 25 bp, Homo sapien
tggaccttctcatcagccttttctc

SEQ ID NO: 4298153 - DNA, 25 bp, Homo sapien
ccttcaaccacagactggaccttct

SEQ ID NO: 4298154 - DNA, 25 bp, Homo sapien
ggctctggggcccagtatttgctcc

SEQ ID NO: 4298155 - DNA, 25 bp, Homo sapien
ctccctggggctggtaccaaccagg

SEQ ID NO: 4298156 - DNA, 25 bp, Homo sapien
tctggggcccagtatttgctccctg

SEQ ID NO: 4298157 - DNA, 25 bp, Homo sapien
gacttggggttgcctgtgctggcag

SEQ ID NO: 4298158 - DNA, 25 bp, Homo sapien
tctggtcaggcgtcaggctagtccg

SEQ ID NO: 4298159 - DNA, 25 bp, Homo sapien
gaagccaaacgtaaagacaccagga

SEQ ID NO: 4298160 - DNA, 25 bp, Homo sapien
ccttgcggcgaataggagtctggtc

SEQ ID NO: 4298161 - DNA, 25 bp, Homo sapien
tggaagccttccaaagagcggcggt

SEQ ID NO: 4298162 - DNA, 25 bp, Homo sapien
ccttcagtgagacttgcgtttcagg

SEQ ID NO: 4298163 - DNA, 25 bp, Homo sapien
caaatccctacctatagccatgtgg

SEQ ID NO: 4298164 - DNA, 25 bp, Homo sapien
ggcgtatgtgcatcctcggtctcag

SEQ ID NO: 4298165 - DNA, 25 bp, Homo sapien
tcggtctcagttatgtaaacggtct

SEQ ID NO: 4298166 - DNA, 25 bp, Homo sapien
aatgaatgtacgaatgccctccaga

SEQ ID NO: 4298167 - DNA, 25 bp, Homo sapien
tggtcagtccacatcacaataggag

SEQ ID NO: 4298168 - DNA, 25 bp, Homo sapien
tgaatcctccctaaatgacatatgg

SEQ ID NO: 4298169 - DNA, 25 bp, Homo sapien
gaaaggtggcgccaatttatactcc

SEQ ID NO: 4298170 - DNA, 25 bp, Homo sapien
ccgaagcccggagctaagggcaccg

SEQ ID NO: 4298171 - DNA, 25 bp, Homo sapien
caggcgtctctggatctgaggatcc

SEQ ID NO: 4298172 - DNA, 25 bp, Homo sapien
aagcgcaggcccatggcagccgcga

SEQ ID NO: 4298173 - DNA, 25 bp, Homo sapien
gcctggtttggaaatctcgccctga

SEQ ID NO: 4298174 - DNA, 25 bp, Homo sapien
agcagccatcgaggcgagccagagc

SEQ ID NO: 4298175 - DNA, 25 bp, Homo sapien
ggcgtcccgggatggccttcatgga

SEQ ID NO: 4298176 - DNA, 25 bp, Homo sapien
gacacggtgccgctgacagcagcca

SEQ ID NO: 4298177 - DNA, 25 bp, Homo sapien
ggagaagccgccagccggcaaggtg

SEQ ID NO: 4298178 - DNA, 25 bp, Homo sapien
gagcaggaacgagaccgctcaggac

SEQ ID NO: 4298179 - DNA, 25 bp, Homo sapien
ccagagcctacttgttgggacagca

SEQ ID NO: 4298180 - DNA, 25 bp, Homo sapien
ggccgtgtaatttcctccttgcagc

SEQ ID NO: 4298181 - DNA, 25 bp, Homo sapien
tgtgactccagagcctacttgttgg

SEQ ID NO: 4298182 - DNA, 25 bp, Homo sapien
cgggaagtggtgggggcggcagtcg

SEQ ID NO: 4298183 - DNA, 25 bp, Homo sapien
tagcattgtcttgcgtaattttttg

SEQ ID NO: 4298184 - DNA, 25 bp, Homo sapien
gcagatgtggtagagtaaaaaactg

SEQ ID NO: 4298185 - DNA, 25 bp, Homo sapien
cattgtcttgcgtaattttttgact

SEQ ID NO: 4298186 - DNA, 25 bp, Homo sapien
aaactgtagcattgtcttgcgtaat

SEQ ID NO: 4298187 - DNA, 25 bp, Homo sapien
tggagtaacacgttttgacagccat

SEQ ID NO: 4298188 - DNA, 25 bp, Homo sapien
ctggagtaacacgttttgacagcca

SEQ ID NO: 4298189 - DNA, 25 bp, Homo sapien
cctggagtaacacgttttgacagcc

SEQ ID NO: 4298190 - DNA, 25 bp, Homo sapien
tgtagacttcaaaaggcccggagaa

SEQ ID NO: 4298191 - DNA, 25 bp, Homo sapien
catgacgctcatctcactgcaggga

SEQ ID NO: 4298192 - DNA, 25 bp, Homo sapien
tctttgaagtcggtgtggagaccag

SEQ ID NO: 4298193 - DNA, 25 bp, Homo sapien
tcccacagcggagagtgtagacttc

SEQ ID NO: 4298194 - DNA, 25 bp, Homo sapien
ggagccatggaaggtcctggagcag

SEQ ID NO: 4298195 - DNA, 25 bp, Homo sapien
cctgtgagccagtgggagccatgga

SEQ ID NO: 4298196 - DNA, 25 bp, Homo sapien
gtgagccagtgggagccatggaagg

SEQ ID NO: 4298197 - DNA, 25 bp, Homo sapien
agccatggaaggtcctggagcagag

SEQ ID NO: 4298198 - DNA, 25 bp, Homo sapien
ggatctcaggtccactcatgggcag

SEQ ID NO: 4298199 - DNA, 25 bp, Homo sapien
gaaaagaattcctggacagatcgag

SEQ ID NO: 4298200 - DNA, 25 bp, Homo sapien
gctagctccctcattgtctctaggg

SEQ ID NO: 4298201 - DNA, 25 bp, Homo sapien
tctgagttgacttacagagggtggc

SEQ ID NO: 4298202 - DNA, 25 bp, Homo sapien
gggtcttacaacctatagtcagaca

SEQ ID NO: 4298203 - DNA, 25 bp, Homo sapien
caacctatagtcagacaaggtaggt

SEQ ID NO: 4298204 - DNA, 25 bp, Homo sapien
cttacaacctatagtcagacaaggt

SEQ ID NO: 4298205 - DNA, 25 bp, Homo sapien
atgggggtcttacaacctatagtca

SEQ ID NO: 4298206 - DNA, 25 bp, Homo sapien
ctcagacatcctgtccacaaggctg

SEQ ID NO: 4298207 - DNA, 25 bp, Homo sapien
tcctccctagatctgacctacgctc

SEQ ID NO: 4298208 - DNA, 25 bp, Homo sapien
agatctgacctacgctctccctgca

SEQ ID NO: 4298209 - DNA, 25 bp, Homo sapien
catcctgtccacaaggctgtcaagg

SEQ ID NO: 4298210 - DNA, 25 bp, Homo sapien
cacttggtgaaaaggatgtacttac

SEQ ID NO: 4298211 - DNA, 25 bp, Homo sapien
ccatacaaacttaagtagggtagct

SEQ ID NO: 4298212 - DNA, 25 bp, Homo sapien
tccaagattgcagagcatgagcgtg

SEQ ID NO: 4298213 - DNA, 25 bp, Homo sapien
gattctgagccagtcgtccatacaa

SEQ ID NO: 4298214 - DNA, 25 bp, Homo sapien
tgggacctggctaaagtaactgata

SEQ ID NO: 4298215 - DNA, 25 bp, Homo sapien
ccctctgagaaaaacatgtggactc

SEQ ID NO: 4298216 - DNA, 25 bp, Homo sapien
cagtactaggtatgttggtccctct

SEQ ID NO: 4298217 - DNA, 25 bp, Homo sapien
tctcaccagtccgttgtgctcagga

SEQ ID NO: 4298218 - DNA, 25 bp, Homo sapien
taaatggcctttgtgttgcaatccc

SEQ ID NO: 4298219 - DNA, 25 bp, Homo sapien
ccaggcttttgggacagcagcatat

SEQ ID NO: 4298220 - DNA, 25 bp, Homo sapien
tcctgggaaagtaattgctgagcca

SEQ ID NO: 4298221 - DNA, 25 bp, Homo sapien
taaagttaggctggcattgctccct

SEQ ID NO: 4298222 - DNA, 25 bp, Homo sapien
gctactgtggcctggcagcactaat

SEQ ID NO: 4298223 - DNA, 25 bp, Homo sapien
tgtggcctggcagcactaatttctt

SEQ ID NO: 4298224 - DNA, 25 bp, Homo sapien
ctgtggcctggcagcactaatttct

SEQ ID NO: 4298225 - DNA, 25 bp, Homo sapien
tgagctactgtggcctggcagcact

SEQ ID NO: 4298226 - DNA, 25 bp, Homo sapien
gctaatttcctactgaggctgaggc

SEQ ID NO: 4298227 - DNA, 25 bp, Homo sapien
cggatgtggtggctaatttcctact

SEQ ID NO: 4298228 - DNA, 25 bp, Homo sapien
gatgtggtggctaatttcctactga

SEQ ID NO: 4298229 - DNA, 25 bp, Homo sapien
tggtggctaatttcctactgaggct

SEQ ID NO: 4298230 - DNA, 25 bp, Homo sapien
attccttatcaaaacaaactaacag

SEQ ID NO: 4298231 - DNA, 25 bp, Homo sapien
tattccttatcaaaacaaactaaca

SEQ ID NO: 4298232 - DNA, 25 bp, Homo sapien
tcgttttccgttatgaatagtcagg

SEQ ID NO: 4298233 - DNA, 25 bp, Homo sapien
tggcaaccgtaacagacaaaaggaa

SEQ ID NO: 4298234 - DNA, 25 bp, Homo sapien
catactttgtccttgtggtgagaga

SEQ ID NO: 4298235 - DNA, 25 bp, Homo sapien
tcttgcagtacaaatccaggtgcag

SEQ ID NO: 4298236 - DNA, 25 bp, Homo sapien
tttctttattgcaaatatgatgtct

SEQ ID NO: 4298237 - DNA, 25 bp, Homo sapien
ctttattgcaaatatgatgtctttg

SEQ ID NO: 4298238 - DNA, 25 bp, Homo sapien
tctttattgcaaatatgatgtcttt

SEQ ID NO: 4298239 - DNA, 25 bp, Homo sapien
ttattgcaaatatgatgtctttgac

SEQ ID NO: 4298240 - DNA, 25 bp, Homo sapien
gcaccagtgacacgaacagcaggag

SEQ ID NO: 4298241 - DNA, 25 bp, Homo sapien
ttgcataaggcatagggacatcagc

SEQ ID NO: 4298242 - DNA, 25 bp, Homo sapien
ggagcatccaggaaattgaacgcag

SEQ ID NO: 4298243 - DNA, 25 bp, Homo sapien
tgtcctctagaatctttgcataagg

SEQ ID NO: 4298244 - DNA, 25 bp, Homo sapien
tctctttatcctgtacgtattcagg

SEQ ID NO: 4298245 - DNA, 25 bp, Homo sapien
ttgaagtcgtttggccactcctagc

SEQ ID NO: 4298246 - DNA, 25 bp, Homo sapien
tagcttgactgtattctagaaccag

SEQ ID NO: 4298247 - DNA, 25 bp, Homo sapien
taaagttgaagtcgtttggccactc

SEQ ID NO: 4298248 - DNA, 25 bp, Homo sapien
agcctccttccacagttacaagatg

SEQ ID NO: 4298249 - DNA, 25 bp, Homo sapien
tgacactggcttctatggtttccat

SEQ ID NO: 4298250 - DNA, 25 bp, Homo sapien
ccttccacagttacaagatgatttg

SEQ ID NO: 4298251 - DNA, 25 bp, Homo sapien
actggcttctatggtttccatgtcc

SEQ ID NO: 4298252 - DNA, 25 bp, Homo sapien
tcaactccttctttagatagcactg

SEQ ID NO: 4298253 - DNA, 25 bp, Homo sapien
caactccttctttagatagcactgc

SEQ ID NO: 4298254 - DNA, 25 bp, Homo sapien
tgcagcttctaagcagtggcccaca

SEQ ID NO: 4298255 - DNA, 25 bp, Homo sapien
tcagagatcaggttgaaactgaaga

SEQ ID NO: 4298256 - DNA, 25 bp, Homo sapien
atcagagatcaggttgaaactgaag

SEQ ID NO: 4298257 - DNA, 25 bp, Homo sapien
cagagatcaggttgaaactgaagat

SEQ ID NO: 4298258 - DNA, 25 bp, Homo sapien
gagatcaggttgaaactgaagatgc

SEQ ID NO: 4298259 - DNA, 25 bp, Homo sapien
cattcataaagtcttcaattcaact

SEQ ID NO: 4298260 - DNA, 25 bp, Homo sapien
attcataaagtcttcaattcaactt

SEQ ID NO: 4298261 - DNA, 25 bp, Homo sapien
tctattttggcttttccaataggaa

SEQ ID NO: 4298262 - DNA, 25 bp, Homo sapien
aggaaccccatacatcaattcattc

SEQ ID NO: 4298263 - DNA, 25 bp, Homo sapien
tgagcttccggaggaaattcaaaag

SEQ ID NO: 4298264 - DNA, 25 bp, Homo sapien
aattcaaaaggaaccccatacatca

SEQ ID NO: 4298265 - DNA, 25 bp, Homo sapien
gccctctgaagactataggcacagg

SEQ ID NO: 4298266 - DNA, 25 bp, Homo sapien
gactgaccacctttaagcctgggca

SEQ ID NO: 4298267 - DNA, 25 bp, Homo sapien
agtgctgggcagctacacctgctga

SEQ ID NO: 4298268 - DNA, 25 bp, Homo sapien
taacctggtcaatggcttgcatgga

SEQ ID NO: 4298269 - DNA, 25 bp, Homo sapien
tgcacctacagcaattccagcaaag

SEQ ID NO: 4298270 - DNA, 25 bp, Homo sapien
catagctgcacctacagcaattcca

SEQ ID NO: 4298271 - DNA, 25 bp, Homo sapien
tagctgcacctacagcaattccagc

SEQ ID NO: 4298272 - DNA, 25 bp, Homo sapien
gctgcacctacagcaattccagcaa

SEQ ID NO: 4298273 - DNA, 25 bp, Homo sapien
agtgtcaataatcctcttgtctcca

SEQ ID NO: 4298274 - DNA, 25 bp, Homo sapien
tgatatgggagtgtcaataatcctc

SEQ ID NO: 4298275 - DNA, 25 bp, Homo sapien
ctctgatatgggagtgtcaataatc

SEQ ID NO: 4298276 - DNA, 25 bp, Homo sapien
tgggagtgtcaataatcctcttgtc

SEQ ID NO: 4298277 - DNA, 25 bp, Homo sapien
gatttatagcatcacgaactgtcac

SEQ ID NO: 4298278 - DNA, 25 bp, Homo sapien
tgtatgccccatcatactgggcaac

SEQ ID NO: 4298279 - DNA, 25 bp, Homo sapien
agctcctcatccataccctgattta

SEQ ID NO: 4298280 - DNA, 25 bp, Homo sapien
cttgtatgccccatcatactgggca

SEQ ID NO: 4298281 - DNA, 25 bp, Homo sapien
agccggcgcggtccagtgaaagcgc

SEQ ID NO: 4298282 - DNA, 25 bp, Homo sapien
ggcgcggtccagtgaaagcgcctct

SEQ ID NO: 4298283 - DNA, 25 bp, Homo sapien
ccggcgcggtccagtgaaagcgcct

SEQ ID NO: 4298284 - DNA, 25 bp, Homo sapien
gcgcagccggcgcggtccagtgaaa

SEQ ID NO: 4298285 - DNA, 25 bp, Homo sapien
atgacggcgggacgcagggtgggca

SEQ ID NO: 4298286 - DNA, 25 bp, Homo sapien
ggcaggggtcgcgtgggaatacagg

SEQ ID NO: 4298287 - DNA, 25 bp, Homo sapien
gcgtgggaatacaggccgcgcgctg

SEQ ID NO: 4298288 - DNA, 25 bp, Homo sapien
aggaagatgacggcgggacgcaggg

SEQ ID NO: 4298289 - DNA, 25 bp, Homo sapien
aggggtctccgcaccaagccagaca

SEQ ID NO: 4298290 - DNA, 25 bp, Homo sapien
cgaaggggtctccgcaccaagccag

SEQ ID NO: 4298291 - DNA, 25 bp, Homo sapien
tcccgaaggggtctccgcaccaagc

SEQ ID NO: 4298292 - DNA, 25 bp, Homo sapien
ggtctccgcaccaagccagacaccg

SEQ ID NO: 4298293 - DNA, 25 bp, Homo sapien
taagagtcatggccgcctaggcctc

SEQ ID NO: 4298294 - DNA, 25 bp, Homo sapien
tgtgatgatcccttttactctgcgc

SEQ ID NO: 4298295 - DNA, 25 bp, Homo sapien
tgtctggaggccctgccgctttcct

SEQ ID NO: 4298296 - DNA, 25 bp, Homo sapien
cagcccagtggtctgcctgtaagtg

SEQ ID NO: 4298297 - DNA, 25 bp, Homo sapien
tgctagggcagaaggtgcacaaacc

SEQ ID NO: 4298298 - DNA, 25 bp, Homo sapien
gcacaaaccacggtcggggctgctc

SEQ ID NO: 4298299 - DNA, 25 bp, Homo sapien
gctgctagggcagaaggtgcacaaa

SEQ ID NO: 4298300 - DNA, 25 bp, Homo sapien
gtcgcctcttcgcttgactggcagc

SEQ ID NO: 4298301 - DNA, 25 bp, Homo sapien
gatttgcggacctttgtatccactg

SEQ ID NO: 4298302 - DNA, 25 bp, Homo sapien
tggaaattcttcacaccagctatgg

SEQ ID NO: 4298303 - DNA, 25 bp, Homo sapien
gctcttggttgagatttgcggacct

SEQ ID NO: 4298304 - DNA, 25 bp, Homo sapien
ggaacaagcaactggaaattcttca

SEQ ID NO: 4298305 - DNA, 25 bp, Homo sapien
ccagactctggacggtattcccaga

SEQ ID NO: 4298306 - DNA, 25 bp, Homo sapien
gactctggacggtattcccagagtc

SEQ ID NO: 4298307 - DNA, 25 bp, Homo sapien
cttccagactctggacggtattccc

SEQ ID NO: 4298308 - DNA, 25 bp, Homo sapien
tccagactctggacggtattcccag

SEQ ID NO: 4298309 - DNA, 25 bp, Homo sapien
cttgtacagaattggggctatagaa

SEQ ID NO: 4298310 - DNA, 25 bp, Homo sapien
gggctatagaacagacaagatctat

SEQ ID NO: 4298311 - DNA, 25 bp, Homo sapien
gctctggattcaggatagagggctg

SEQ ID NO: 4298312 - DNA, 25 bp, Homo sapien
tctggattcaggatagagggctggg

SEQ ID NO: 4298313 - DNA, 25 bp, Homo sapien
aggagcctggatacttggtggccac

SEQ ID NO: 4298314 - DNA, 25 bp, Homo sapien
caggagcctggatacttggtggcca

SEQ ID NO: 4298315 - DNA, 25 bp, Homo sapien
acaggagcctggatacttggtggcc

SEQ ID NO: 4298316 - DNA, 25 bp, Homo sapien
cacaggagcctggatacttggtggc

SEQ ID NO: 4298317 - DNA, 25 bp, Homo sapien
gatggagaccaattagccctgaggc

SEQ ID NO: 4298318 - DNA, 25 bp, Homo sapien
ctggctagcaggaagtgaatggact

SEQ ID NO: 4298319 - DNA, 25 bp, Homo sapien
catgcagacgtgaaacccaagtgag

SEQ ID NO: 4298320 - DNA, 25 bp, Homo sapien
atcaggtaactggtcccaccggaag

SEQ ID NO: 4298321 - DNA, 25 bp, Homo sapien
cttcctggtgaagtggggacaatac

SEQ ID NO: 4298322 - DNA, 25 bp, Homo sapien
ccttcctggtgaagtggggacaata

SEQ ID NO: 4298323 - DNA, 25 bp, Homo sapien
tgtctgctgaaggtagctctgccct

SEQ ID NO: 4298324 - DNA, 25 bp, Homo sapien
cagcgccagtctcatctagggtcga

SEQ ID NO: 4298325 - DNA, 25 bp, Homo sapien
gctgcccgtgttgctgagcttctgg

SEQ ID NO: 4298326 - DNA, 25 bp, Homo sapien
ccagagcctttgcatgggtcgtttt

SEQ ID NO: 4298327 - DNA, 25 bp, Homo sapien
cgcagggttgtctccccaatgcagg

SEQ ID NO: 4298328 - DNA, 25 bp, Homo sapien
cgcaggtcggggtccaggtcttcct

SEQ ID NO: 4298329 - DNA, 25 bp, Homo sapien
ggttgtctccccaatgcagggcagg

SEQ ID NO: 4298330 - DNA, 25 bp, Homo sapien
tctggccgcaggtcggggtccaggt

SEQ ID NO: 4298331 - DNA, 25 bp, Homo sapien
tgtttggatattctgccgaagttac

SEQ ID NO: 4298332 - DNA, 25 bp, Homo sapien
gaaatgaaacgtgacagagatcctg

SEQ ID NO: 4298333 - DNA, 25 bp, Homo sapien
acggggaaatgaaacgtgacagaga

SEQ ID NO: 4298334 - DNA, 25 bp, Homo sapien
tttggatattctgccgaagttacca

SEQ ID NO: 4298335 - DNA, 25 bp, Homo sapien
tgtatatagttctcccttctggagc

SEQ ID NO: 4298336 - DNA, 25 bp, Homo sapien
cgtctccaggccaatgctctaaatt

SEQ ID NO: 4298337 - DNA, 25 bp, Homo sapien
gaagcaaattaagaggctgcctcct

SEQ ID NO: 4298338 - DNA, 25 bp, Homo sapien
ccatatttgccgtctccaggccaat

SEQ ID NO: 4298339 - DNA, 25 bp, Homo sapien
caacacccgggtgcatcacatgagt

SEQ ID NO: 4298340 - DNA, 25 bp, Homo sapien
caaaacatcatgtagggtgacctag

SEQ ID NO: 4298341 - DNA, 25 bp, Homo sapien
tggactttctgtaggctagcccgga

SEQ ID NO: 4298342 - DNA, 25 bp, Homo sapien
ctagcccggaagacagacgactgat

SEQ ID NO: 4298343 - DNA, 25 bp, Homo sapien
gatctacagcaaaatccttgtattt

SEQ ID NO: 4298344 - DNA, 25 bp, Homo sapien
gcctattggcttttgctagatctac

SEQ ID NO: 4298345 - DNA, 25 bp, Homo sapien
aaatagatgctataaatggacagtg

SEQ ID NO: 4298346 - DNA, 25 bp, Homo sapien
ttaaccaaatagatgctataaatgg

SEQ ID NO: 4298347 - DNA, 25 bp, Homo sapien
agtagagaggatagtgtaatgaaca

SEQ ID NO: 4298348 - DNA, 25 bp, Homo sapien
gaagtagagaggatagtgtaatgaa

SEQ ID NO: 4298349 - DNA, 25 bp, Homo sapien
cactcatgtacctgcccattgacca

SEQ ID NO: 4298350 - DNA, 25 bp, Homo sapien
gaacactcatgtacctgcccattga

SEQ ID NO: 4298351 - DNA, 25 bp, Homo sapien
tgttgcatatatgccatagtaccat

SEQ ID NO: 4298352 - DNA, 25 bp, Homo sapien
tagtaccattatcacatgatggtgc

SEQ ID NO: 4298353 - DNA, 25 bp, Homo sapien
ggtgctggttgcttcttgaatactg

SEQ ID NO: 4298354 - DNA, 25 bp, Homo sapien
aatgttgcatatatgccatagtacc

SEQ ID NO: 4298355 - DNA, 25 bp, Homo sapien
tatattcctcataggcagggttctc

SEQ ID NO: 4298356 - DNA, 25 bp, Homo sapien
ctttgtaaaagtggtcttatatatt

SEQ ID NO: 4298357 - DNA, 25 bp, Homo sapien
tatatattcctcataggcagggttc

SEQ ID NO: 4298358 - DNA, 25 bp, Homo sapien
actttgtaaaagtggtcttatatat

SEQ ID NO: 4298359 - DNA, 25 bp, Homo sapien
gagagcttctcctatgattctaaga

SEQ ID NO: 4298360 - DNA, 25 bp, Homo sapien
tctacagggtgtgtttcaacatagc

SEQ ID NO: 4298361 - DNA, 25 bp, Homo sapien
tgtccaggaataaagctcaacgctg

SEQ ID NO: 4298362 - DNA, 25 bp, Homo sapien
taaaccaagaaagcacatcatcctg

SEQ ID NO: 4298363 - DNA, 25 bp, Homo sapien
tatcatctctagcaggcaatcaggt

SEQ ID NO: 4298364 - DNA, 25 bp, Homo sapien
cctaccacttctgaatacctacttt

SEQ ID NO: 4298365 - DNA, 25 bp, Homo sapien
gattgtattccttagagtgaagagg

SEQ ID NO: 4298366 - DNA, 25 bp, Homo sapien
ggctactaatggcagtgcagcagct

SEQ ID NO: 4298367 - DNA, 25 bp, Homo sapien
gatcggtgaagtcaaaagcatcagt

SEQ ID NO: 4298368 - DNA, 25 bp, Homo sapien
tgagcccactggaacaggcgttcgt

SEQ ID NO: 4298369 - DNA, 25 bp, Homo sapien
cataacagccaagtgctgaatttaa

SEQ ID NO: 4298370 - DNA, 25 bp, Homo sapien
tcgtagacgtttccatcataacagc

SEQ ID NO: 4298371 - DNA, 25 bp, Homo sapien
tcagattgacactatccacctttcc

SEQ ID NO: 4298372 - DNA, 25 bp, Homo sapien
ttgatcctcagattgacactatcca

SEQ ID NO: 4298373 - DNA, 25 bp, Homo sapien
tcttttgcctggatggctttacatc

SEQ ID NO: 4298374 - DNA, 25 bp, Homo sapien
cctggatggctttacatcgtatttc

SEQ ID NO: 4298375 - DNA, 25 bp, Homo sapien
taaaattactcacagaggctaggtg

SEQ ID NO: 4298376 - DNA, 25 bp, Homo sapien
tatttggcctataaagaaccctgtg

SEQ ID NO: 4298377 - DNA, 25 bp, Homo sapien
tcttcttgcagggtactagtctggc

SEQ ID NO: 4298378 - DNA, 25 bp, Homo sapien
cactatggagtgaattgggtggacc

SEQ ID NO: 4298379 - DNA, 25 bp, Homo sapien
aaggcgtcatggagaaagtcacccg

SEQ ID NO: 4298380 - DNA, 25 bp, Homo sapien
gagcacctgctgaatcgctggttca

SEQ ID NO: 4298381 - DNA, 25 bp, Homo sapien
gctgttcttgccatgtccacttggg

SEQ ID NO: 4298382 - DNA, 25 bp, Homo sapien
gtcacccgagttagtcaagattcca

SEQ ID NO: 4298383 - DNA, 25 bp, Homo sapien
ccatcaaccctgtgagagccccttc

SEQ ID NO: 4298384 - DNA, 25 bp, Homo sapien
agagccccttctgccagatggactc

SEQ ID NO: 4298385 - DNA, 25 bp, Homo sapien
gccatcaaccctgtgagagcccctt

SEQ ID NO: 4298386 - DNA, 25 bp, Homo sapien
tagggctaaagtccattttgattgg

SEQ ID NO: 4298387 - DNA, 25 bp, Homo sapien
tccgcatctcgtcaagacaagcaca

SEQ ID NO: 4298388 - DNA, 25 bp, Homo sapien
tattttgaacagtccgcatctcgtc

SEQ ID NO: 4298389 - DNA, 25 bp, Homo sapien
ccttgtcctactggttgtaacatat

SEQ ID NO: 4298390 - DNA, 25 bp, Homo sapien
cttagcagcctggaggtgtatgaca

SEQ ID NO: 4298391 - DNA, 25 bp, Homo sapien
tagcagcctggaggtgtatgacagt

SEQ ID NO: 4298392 - DNA, 25 bp, Homo sapien
tgctggtcagctccggattgcgtca

SEQ ID NO: 4298393 - DNA, 25 bp, Homo sapien
tggtctggttccaagcctcgtgctg

SEQ ID NO: 4298394 - DNA, 25 bp, Homo sapien
aaatgctgcactgagtcctttatga

SEQ ID NO: 4298395 - DNA, 25 bp, Homo sapien
gtaaatgctgcactgagtcctttat

SEQ ID NO: 4298396 - DNA, 25 bp, Homo sapien
atgctgcactgagtcctttatgagc

SEQ ID NO: 4298397 - DNA, 25 bp, Homo sapien
ctgtaaatgctgcactgagtccttt

SEQ ID NO: 4298398 - DNA, 25 bp, Homo sapien
tgagtcccagagaggttaaccaatt

SEQ ID NO: 4298399 - DNA, 25 bp, Homo sapien
gtttgcaatggggaaaactgagtcc

SEQ ID NO: 4298400 - DNA, 25 bp, Homo sapien
cacacagctagtaaggagtggagcc

SEQ ID NO: 4298401 - DNA, 25 bp, Homo sapien
gtgccataaagctaaatgattgata

SEQ ID NO: 4298402 - DNA, 25 bp, Homo sapien
gctgtcccctatttctaatgcagat

SEQ ID NO: 4298403 - DNA, 25 bp, Homo sapien
tgttataaagcctcagggccacagg

SEQ ID NO: 4298404 - DNA, 25 bp, Homo sapien
tgttaatcgccatgttataaagcct

SEQ ID NO: 4298405 - DNA, 25 bp, Homo sapien
ccaggagctgtcccctatttctaat

SEQ ID NO: 4298406 - DNA, 25 bp, Homo sapien
ctttttgttgactgacgtcctgtgg

SEQ ID NO: 4298407 - DNA, 25 bp, Homo sapien
gactgacgtcctgtggcctgagcaa

SEQ ID NO: 4298408 - DNA, 25 bp, Homo sapien
gtatgttcaggcctttttgttgact

SEQ ID NO: 4298409 - DNA, 25 bp, Homo sapien
tgttgactgacgtcctgtggcctga

SEQ ID NO: 4298410 - DNA, 25 bp, Homo sapien
ctgtaaaggctagagaggcccgtcg

SEQ ID NO: 4298411 - DNA, 25 bp, Homo sapien
taaaggctagagaggcccgtcggtc

SEQ ID NO: 4298412 - DNA, 25 bp, Homo sapien
tgtaaaggctagagaggcccgtcgg

SEQ ID NO: 4298413 - DNA, 25 bp, Homo sapien
tcaggtgcggtgagatatgcgacag

SEQ ID NO: 4298414 - DNA, 25 bp, Homo sapien
gctccgggcagaggaagtcggctgc

SEQ ID NO: 4298415 - DNA, 25 bp, Homo sapien
ttactgccacatgtgcccaggccgt

SEQ ID NO: 4298416 - DNA, 25 bp, Homo sapien
agagatctctgtggcgtggagccag

SEQ ID NO: 4298417 - DNA, 25 bp, Homo sapien
cagctttgagtagccatgtccgcca

SEQ ID NO: 4298418 - DNA, 25 bp, Homo sapien
caggaggccgacaatttggtgacca

SEQ ID NO: 4298419 - DNA, 25 bp, Homo sapien
tgtgttctcaccctcgtaggtacag

SEQ ID NO: 4298420 - DNA, 25 bp, Homo sapien
tgatggcaggccactcagctttgag

SEQ ID NO: 4298421 - DNA, 25 bp, Homo sapien
tccaccatagggaccaaccctgtgc

SEQ ID NO: 4298422 - DNA, 25 bp, Homo sapien
aaccctgtgcaccacttactgagca

SEQ ID NO: 4298423 - DNA, 25 bp, Homo sapien
gcggtgttagggggcctccaccata

SEQ ID NO: 4298424 - DNA, 25 bp, Homo sapien
tgtgcaccacttactgagcatctac

SEQ ID NO: 4298425 - DNA, 25 bp, Homo sapien
cagggtgccgttcacccagacgccc

SEQ ID NO: 4298426 - DNA, 25 bp, Homo sapien
cacccagacgccctgggatgctgaa

SEQ ID NO: 4298427 - DNA, 25 bp, Homo sapien
ccgttcacccagacgccctgggatg

SEQ ID NO: 4298428 - DNA, 25 bp, Homo sapien
gtgccgttcacccagacgccctggg

SEQ ID NO: 4298429 - DNA, 25 bp, Homo sapien
gaatggcagtgtaggagtgctggaa

SEQ ID NO: 4298430 - DNA, 25 bp, Homo sapien
tccaagaggctgactgccaggaaat

SEQ ID NO: 4298431 - DNA, 25 bp, Homo sapien
gatggccagctgaggaaagagtttc

SEQ ID NO: 4298432 - DNA, 25 bp, Homo sapien
caggaagctgaagtcttggttcaga

SEQ ID NO: 4298433 - DNA, 25 bp, Homo sapien
gaaccagaagatttagatcactacc

SEQ ID NO: 4298434 - DNA, 25 bp, Homo sapien
tttcactgcaggaatactgacacat

SEQ ID NO: 4298435 - DNA, 25 bp, Homo sapien
gatcactacctgttgtgtccacctt

SEQ ID NO: 4298436 - DNA, 25 bp, Homo sapien
ctgacacatttgttggtgggtactg

SEQ ID NO: 4298437 - DNA, 25 bp, Homo sapien
gatgatttgaacctgtgaccttcca

SEQ ID NO: 4298438 - DNA, 25 bp, Homo sapien
ctgtgatgatttgaacctgtgacct

SEQ ID NO: 4298439 - DNA, 25 bp, Homo sapien
atttgaacctgtgaccttccactgc

SEQ ID NO: 4298440 - DNA, 25 bp, Homo sapien
ttccactgcccgtgtgcacttgccg

SEQ ID NO: 4298441 - DNA, 25 bp, Homo sapien
tccagagaactcttgcagcccagat

SEQ ID NO: 4298442 - DNA, 25 bp, Homo sapien
gcatctttcttataaccaccctggg

SEQ ID NO: 4298443 - DNA, 25 bp, Homo sapien
ttctgcagcccagataaatgggcct

SEQ ID NO: 4298444 - DNA, 25 bp, Homo sapien
gcccagataaatgggcctcgggcag

SEQ ID NO: 4298445 - DNA, 25 bp, Homo sapien
gaaatggccgagctgagtgttcaca

SEQ ID NO: 4298446 - DNA, 25 bp, Homo sapien
taatgtgccttactgcatttcaccc

SEQ ID NO: 4298447 - DNA, 25 bp, Homo sapien
tggagggagtggtagcaacacaacc

SEQ ID NO: 4298448 - DNA, 25 bp, Homo sapien
ccctgggctgaggacttaatgtgcc

SEQ ID NO: 4298449 - DNA, 25 bp, Homo sapien
tagggaggatctcccctgacagcag

SEQ ID NO: 4298450 - DNA, 25 bp, Homo sapien
taccgagtttgacgtaggtgccatc

SEQ ID NO: 4298451 - DNA, 25 bp, Homo sapien
gacacaggccttctgcagtataggg

SEQ ID NO: 4298452 - DNA, 25 bp, Homo sapien
caccaccatgggaaggtagttgctc

SEQ ID NO: 4298453 - DNA, 25 bp, Homo sapien
ggcccagcctgcacaaagcgcaggt

SEQ ID NO: 4298454 - DNA, 25 bp, Homo sapien
ggaggaggttatgtggcccaaacta

SEQ ID NO: 4298455 - DNA, 25 bp, Homo sapien
aactaagctctatggaggacccagg

SEQ ID NO: 4298456 - DNA, 25 bp, Homo sapien
cccaatctgtgggatatcagagcct

SEQ ID NO: 4298457 - DNA, 25 bp, Homo sapien
cagctgcaggaagccattgtctgtt

SEQ ID NO: 4298458 - DNA, 25 bp, Homo sapien
gcaaagcgactcagcatgttctccc

SEQ ID NO: 4298459 - DNA, 25 bp, Homo sapien
tgggtccgatgtccccaatgatgat

SEQ ID NO: 4298460 - DNA, 25 bp, Homo sapien
tggggacccgcacatggttcagctg

SEQ ID NO: 4298461 - DNA, 25 bp, Homo sapien
cttgaaggagatggagatgaggaca

SEQ ID NO: 4298462 - DNA, 25 bp, Homo sapien
ttgaaggagatggagatgaggacac

SEQ ID NO: 4298463 - DNA, 25 bp, Homo sapien
ataaaagcgtgcatgccccgcctgg

SEQ ID NO: 4298464 - DNA, 25 bp, Homo sapien
ggtcctgaagactccggattggcac

SEQ ID NO: 4298465 - DNA, 25 bp, Homo sapien
gattggcacaataaaagcgtgcatg

SEQ ID NO: 4298466 - DNA, 25 bp, Homo sapien
cagggcatgggtggctgaccgtccc

SEQ ID NO: 4298467 - DNA, 25 bp, Homo sapien
tccactgtgtcatcacagggcctgt

SEQ ID NO: 4298468 - DNA, 25 bp, Homo sapien
ccacagcaggaggtacggcgttggt

SEQ ID NO: 4298469 - DNA, 25 bp, Homo sapien
ggcaggcaggcgtattctttccact

SEQ ID NO: 4298470 - DNA, 25 bp, Homo sapien
tctggctggtggcaagctctgccac

SEQ ID NO: 4298471 - DNA, 25 bp, Homo sapien
ccaccatttggtggcagtcagcgtg

SEQ ID NO: 4298472 - DNA, 25 bp, Homo sapien
ctgggtggctgcgtcataggtggct

SEQ ID NO: 4298473 - DNA, 25 bp, Homo sapien
aactcctgggtggctgcgtcatagg

SEQ ID NO: 4298474 - DNA, 25 bp, Homo sapien
gggtggctgcgtcataggtggcttc

SEQ ID NO: 4298475 - DNA, 25 bp, Homo sapien
tcttaggcatcagcgcagtatggag

SEQ ID NO: 4298476 - DNA, 25 bp, Homo sapien
tcccagctgtacttgcaggcagttc

SEQ ID NO: 4298477 - DNA, 25 bp, Homo sapien
tctgaactcttaggcatcagcgcag

SEQ ID NO: 4298478 - DNA, 25 bp, Homo sapien
ctgcttctaggtgggtctgaactct

SEQ ID NO: 4298479 - DNA, 25 bp, Homo sapien
gtttttgcagagtgggtcccatttg

SEQ ID NO: 4298480 - DNA, 25 bp, Homo sapien
tgggtcccatttggcaatctgctcc

SEQ ID NO: 4298481 - DNA, 25 bp, Homo sapien
gcatacgttgcgatgatctggatgt

SEQ ID NO: 4298482 - DNA, 25 bp, Homo sapien
ctctgtctgtgcatacgttgcgatg

SEQ ID NO: 4298483 - DNA, 25 bp, Homo sapien
ctgtgtatatttaaggccacgtctc

SEQ ID NO: 4298484 - DNA, 25 bp, Homo sapien
ctcacgaagactctgtgtatattta

SEQ ID NO: 4298485 - DNA, 25 bp, Homo sapien
tatttaaggccacgtctccagaaag

SEQ ID NO: 4298486 - DNA, 25 bp, Homo sapien
tatatttaaggccacgtctccagaa

SEQ ID NO: 4298487 - DNA, 25 bp, Homo sapien
tatcaaccggatgtggaatgccctc

SEQ ID NO: 4298488 - DNA, 25 bp, Homo sapien
attgtccttacagctaaactccggg

SEQ ID NO: 4298489 - DNA, 25 bp, Homo sapien
taagcgtagcctaattcacgaccat

SEQ ID NO: 4298490 - DNA, 25 bp, Homo sapien
gccttataacgctcattctgggtca

SEQ ID NO: 4298491 - DNA, 25 bp, Homo sapien
cagagggcttagggacctgggtgag

SEQ ID NO: 4298492 - DNA, 25 bp, Homo sapien
acagagggcttagggacctgggtga

SEQ ID NO: 4298493 - DNA, 25 bp, Homo sapien
aatcttctcacccacttgcttcatg

SEQ ID NO: 4298494 - DNA, 25 bp, Homo sapien
ttgaaatcttctcacccacttgctt

SEQ ID NO: 4298495 - DNA, 25 bp, Homo sapien
cttgaaatcttctcacccacttgct

SEQ ID NO: 4298496 - DNA, 25 bp, Homo sapien
cttctcacccacttgcttcatggat

SEQ ID NO: 4298497 - DNA, 25 bp, Homo sapien
ggctcaggcaatattgacatgtgaa

SEQ ID NO: 4298498 - DNA, 25 bp, Homo sapien
gcccaaggttacaaagctatgcagt

SEQ ID NO: 4298499 - DNA, 25 bp, Homo sapien
ggactcttctatcccctaggtgggc

SEQ ID NO: 4298500 - DNA, 25 bp, Homo sapien
gaagattgtctttacagttcgaagg

SEQ ID NO: 4298501 - DNA, 25 bp, Homo sapien
tatgtcggggtgcatttgcctgctc

SEQ ID NO: 4298502 - DNA, 25 bp, Homo sapien
tatacctctcgctctctatgtcggg

SEQ ID NO: 4298503 - DNA, 25 bp, Homo sapien
gccgttccacgtcaaaggactgcat

SEQ ID NO: 4298504 - DNA, 25 bp, Homo sapien
caaggatgttggtgagccgttccac

SEQ ID NO: 4298505 - DNA, 25 bp, Homo sapien
cctatcctggatctgtctggtgact

SEQ ID NO: 4298506 - DNA, 25 bp, Homo sapien
tgactatggagagacacttccaacc

SEQ ID NO: 4298507 - DNA, 25 bp, Homo sapien
ctcagcattggtcagtgcaaagaac

SEQ ID NO: 4298508 - DNA, 25 bp, Homo sapien
tgctctcagcattggtcagtgcaaa

SEQ ID NO: 4298509 - DNA, 25 bp, Homo sapien
tgtgtgcaagaggaactgcctaggg

SEQ ID NO: 4298510 - DNA, 25 bp, Homo sapien
gtgtgcaagaggaactgcctagggc

SEQ ID NO: 4298511 - DNA, 25 bp, Homo sapien
ctgtgtgcaagaggaactgcctagg

SEQ ID NO: 4298512 - DNA, 25 bp, Homo sapien
tacatgaattgcctagggaaatctt

SEQ ID NO: 4298513 - DNA, 25 bp, Homo sapien
gaccccaaagattgggctctatcca

SEQ ID NO: 4298514 - DNA, 25 bp, Homo sapien
attgcttggtacatgtttgttcaat

SEQ ID NO: 4298515 - DNA, 25 bp, Homo sapien
tgttagccaaaattggacagggcct

SEQ ID NO: 4298516 - DNA, 25 bp, Homo sapien
tgtcctgtgtccgcactgtaggccg

SEQ ID NO: 4298517 - DNA, 25 bp, Homo sapien
gtcctgtgtccgcactgtaggccgg

SEQ ID NO: 4298518 - DNA, 25 bp, Homo sapien
ccggctgtaggccgcagcctctggc

SEQ ID NO: 4298519 - DNA, 25 bp, Homo sapien
tctgggcttatggagctcctctcct

SEQ ID NO: 4298520 - DNA, 25 bp, Homo sapien
tgtctgggcttatggagctcctctc

SEQ ID NO: 4298521 - DNA, 25 bp, Homo sapien
tgggcttatggagctcctctccttc

SEQ ID NO: 4298522 - DNA, 25 bp, Homo sapien
ggcttatggagctcctctccttcct

SEQ ID NO: 4298523 - DNA, 25 bp, Homo sapien
ggagatacagagttgggacgacccc

SEQ ID NO: 4298524 - DNA, 25 bp, Homo sapien
tgaaccaaggtcgtctgcacggctg

SEQ ID NO: 4298525 - DNA, 25 bp, Homo sapien
ggatttacagcctccacagttggag

SEQ ID NO: 4298526 - DNA, 25 bp, Homo sapien
tggagagccctcgtccatctgagac

SEQ ID NO: 4298527 - DNA, 25 bp, Homo sapien
aatcaagtttgtgaggcaccgctgc

SEQ ID NO: 4298528 - DNA, 25 bp, Homo sapien
gcaggtgggaacatcacagacgtcc

SEQ ID NO: 4298529 - DNA, 25 bp, Homo sapien
caggttatccctcttggagcaggag

SEQ ID NO: 4298530 - DNA, 25 bp, Homo sapien
tcagcacgccagtcacattcaggag

SEQ ID NO: 4298531 - DNA, 25 bp, Homo sapien
tctccgcaggttttccctgacttta

SEQ ID NO: 4298532 - DNA, 25 bp, Homo sapien
tcagtgtggcaattctccgcaggtt

SEQ ID NO: 4298533 - DNA, 25 bp, Homo sapien
agctctctctcttcgctggtcagtg

SEQ ID NO: 4298534 - DNA, 25 bp, Homo sapien
tctcttcgctggtcagtgtggcaat

SEQ ID NO: 4298535 - DNA, 25 bp, Homo sapien
tctgaaaacctgtggagtttggacc

SEQ ID NO: 4298536 - DNA, 25 bp, Homo sapien
taaaatgggaatgccacctggctca

SEQ ID NO: 4298537 - DNA, 25 bp, Homo sapien
ctaaggacctagcaaagtgaatggc

SEQ ID NO: 4298538 - DNA, 25 bp, Homo sapien
gaatcagcatgcagtacactgggcc

SEQ ID NO: 4298539 - DNA, 25 bp, Homo sapien
ggttcagcctctgctgccgtctcag

SEQ ID NO: 4298540 - DNA, 25 bp, Homo sapien
ctggttcagcctctgctgccgtctc

SEQ ID NO: 4298541 - DNA, 25 bp, Homo sapien
tcagcctctgctgccgtctcagcag

SEQ ID NO: 4298542 - DNA, 25 bp, Homo sapien
cagcagctcctgctcaaaggggcac

SEQ ID NO: 4298543 - DNA, 25 bp, Homo sapien
agctggttccgccggcggtgctcta

SEQ ID NO: 4298544 - DNA, 25 bp, Homo sapien
tgagctggttccgccggcggtgctc

SEQ ID NO: 4298545 - DNA, 25 bp, Homo sapien
gttccgccggcggtgctctaggaca

SEQ ID NO: 4298546 - DNA, 25 bp, Homo sapien
tccgccggcggtgctctaggacacg

SEQ ID NO: 4298547 - DNA, 25 bp, Homo sapien
ctgcagctctggcttgctgtccaca

SEQ ID NO: 4298548 - DNA, 25 bp, Homo sapien
tgcagctctggcttgctgtccacac

SEQ ID NO: 4298549 - DNA, 25 bp, Homo sapien
ctctggcttgctgtccacaccaagg

SEQ ID NO: 4298550 - DNA, 25 bp, Homo sapien
agctctggcttgctgtccacaccaa

SEQ ID NO: 4298551 - DNA, 25 bp, Homo sapien
gctcccggtggagctcctggtgact

SEQ ID NO: 4298552 - DNA, 25 bp, Homo sapien
gctcctggtgactccgagaggcctt

SEQ ID NO: 4298553 - DNA, 25 bp, Homo sapien
gcttgatgagctccggattccactc

SEQ ID NO: 4298554 - DNA, 25 bp, Homo sapien
gccttcacggggttcagcagcttct

SEQ ID NO: 4298555 - DNA, 25 bp, Homo sapien
atcaggcccccaatgtctgcccgct

SEQ ID NO: 4298556 - DNA, 25 bp, Homo sapien
tgtctgcccgctccctctggatctc

SEQ ID NO: 4298557 - DNA, 25 bp, Homo sapien
caatgtctgcccgctccctctggat

SEQ ID NO: 4298558 - DNA, 25 bp, Homo sapien
cgggccatcaggcccccaatgtctg

SEQ ID NO: 4298559 - DNA, 25 bp, Homo sapien
ccacagttccacaactgttcagctt

SEQ ID NO: 4298560 - DNA, 25 bp, Homo sapien
cacagttccacaactgttcagcttt

SEQ ID NO: 4298561 - DNA, 25 bp, Homo sapien
gccacacgcttgagaggcacaaata

SEQ ID NO: 4298562 - DNA, 25 bp, Homo sapien
tgtttcttatgggagggtcaggcaa

SEQ ID NO: 4298563 - DNA, 25 bp, Homo sapien
tattccacttggtgcacggccactt

SEQ ID NO: 4298564 - DNA, 25 bp, Homo sapien
gcaaggcggctcacgtaaaggaatt

SEQ ID NO: 4298565 - DNA, 25 bp, Homo sapien
gaactgggcagtagtcctcggatgt

SEQ ID NO: 4298566 - DNA, 25 bp, Homo sapien
agagcccggtggcatcggagggccc

SEQ ID NO: 4298567 - DNA, 25 bp, Homo sapien
acagcccggtagagcccggtggcat

SEQ ID NO: 4298568 - DNA, 25 bp, Homo sapien
cgaccggagcagcacagcccggtag

SEQ ID NO: 4298569 - DNA, 25 bp, Homo sapien
gaccggagcagcacagcccggtaga

SEQ ID NO: 4298570 - DNA, 25 bp, Homo sapien
tttcactatgaaatctggcctgagg

SEQ ID NO: 4298571 - DNA, 25 bp, Homo sapien
tctcattttcactatgaaatctggc

SEQ ID NO: 4298572 - DNA, 25 bp, Homo sapien
cgacaaaaccctcacaggtctccct

SEQ ID NO: 4298573 - DNA, 25 bp, Homo sapien
cacaggacccgacaaaaccctcaca

SEQ ID NO: 4298574 - DNA, 25 bp, Homo sapien
acaggtctcccttcgggcaccagag

SEQ ID NO: 4298575 - DNA, 25 bp, Homo sapien
caaaaccctcacaggtctcccttcg

SEQ ID NO: 4298576 - DNA, 25 bp, Homo sapien
gcaaatggcgtaacgtgtctgggcc

SEQ ID NO: 4298577 - DNA, 25 bp, Homo sapien
aaggaggccccatgatgcaggagct

SEQ ID NO: 4298578 - DNA, 25 bp, Homo sapien
ggctttgcatgcatctctttcccct

SEQ ID NO: 4298579 - DNA, 25 bp, Homo sapien
ggcaggtataggtccatcccagcca

SEQ ID NO: 4298580 - DNA, 25 bp, Homo sapien
tggttgtgtcctctatcctgggcga

SEQ ID NO: 4298581 - DNA, 25 bp, Homo sapien
gagctgtgctcaggaacattttcca

SEQ ID NO: 4298582 - DNA, 25 bp, Homo sapien
taagggtggcattacggtcacagcc

SEQ ID NO: 4298583 - DNA, 25 bp, Homo sapien
tgcaagggcttaaaacgtggctccc

SEQ ID NO: 4298584 - DNA, 25 bp, Homo sapien
cagacaggcttagggcgattgatcc

SEQ ID NO: 4298585 - DNA, 25 bp, Homo sapien
tggcgttgatctcaggagccaggac

SEQ ID NO: 4298586 - DNA, 25 bp, Homo sapien
tcccatggcacgaagtgggcaccag

SEQ ID NO: 4298587 - DNA, 25 bp, Homo sapien
cacagcagatactctgagagcagac

SEQ ID NO: 4298588 - DNA, 25 bp, Homo sapien
tctgactcctaagtcaggcaggagc

SEQ ID NO: 4298589 - DNA, 25 bp, Homo sapien
gtcagcagtccctgacgaaagcacc

SEQ ID NO: 4298590 - DNA, 25 bp, Homo sapien
tctgtttccgaggaggagaggcgcg

SEQ ID NO: 4298591 - DNA, 25 bp, Homo sapien
acacagcgtgcaaggacctgcagca

SEQ ID NO: 4298592 - DNA, 25 bp, Homo sapien
ttgtgtctgggctgttctttaagaa

SEQ ID NO: 4298593 - DNA, 25 bp, Homo sapien
cagctctggccatccctcgtatttg

SEQ ID NO: 4298594 - DNA, 25 bp, Homo sapien
ccatccctcgtatttgtttgtgtct

SEQ ID NO: 4298595 - DNA, 25 bp, Homo sapien
ctaaaatggcttcgggggcatgcag

SEQ ID NO: 4298596 - DNA, 25 bp, Homo sapien
cccattagggtgcttggttcatttt

SEQ ID NO: 4298597 - DNA, 25 bp, Homo sapien
tttgtgtgtcggtcccggccagctg

SEQ ID NO: 4298598 - DNA, 25 bp, Homo sapien
gaacagaccggcttagtcccattag

SEQ ID NO: 4298599 - DNA, 25 bp, Homo sapien
gtgaggactaagaacagaccggctt

SEQ ID NO: 4298600 - DNA, 25 bp, Homo sapien
tccccaagtcagagaagagtttcct

SEQ ID NO: 4298601 - DNA, 25 bp, Homo sapien
tttggctcctatgaagacccagctg

SEQ ID NO: 4298602 - DNA, 25 bp, Homo sapien
gcccagttgttttgcgtaggaactc

SEQ ID NO: 4298603 - DNA, 25 bp, Homo sapien
cagctgtcccggaagcccagttgtt

SEQ ID NO: 4298604 - DNA, 25 bp, Homo sapien
ggtccctggatcgtcgtaggaggcc

SEQ ID NO: 4298605 - DNA, 25 bp, Homo sapien
ttggtccctggatcgtcgtaggagg

SEQ ID NO: 4298606 - DNA, 25 bp, Homo sapien
tggtccctggatcgtcgtaggaggc

SEQ ID NO: 4298607 - DNA, 25 bp, Homo sapien
ggtcccttgccacatgaagaggctc

SEQ ID NO: 4298608 - DNA, 25 bp, Homo sapien
tcagccctctgcaccgcacccccga

SEQ ID NO: 4298609 - DNA, 25 bp, Homo sapien
accaggtcccttgccacatgaagag

SEQ ID NO: 4298610 - DNA, 25 bp, Homo sapien
ctctgcaccgcacccccgactgtga

SEQ ID NO: 4298611 - DNA, 25 bp, Homo sapien
acatgtcaaatgccttctgtcccag

SEQ ID NO: 4298612 - DNA, 25 bp, Homo sapien
cagtaacctggattgcgtttgtggg

SEQ ID NO: 4298613 - DNA, 25 bp, Homo sapien
agccctccagggaaccgagtcttct

SEQ ID NO: 4298614 - DNA, 25 bp, Homo sapien
gaacgttacagttcgcgctctccgc

SEQ ID NO: 4298615 - DNA, 25 bp, Homo sapien
gctaagcggtactcagtttcccagg

SEQ ID NO: 4298616 - DNA, 25 bp, Homo sapien
gaaggagtctatgaacccatggggc

SEQ ID NO: 4298617 - DNA, 25 bp, Homo sapien
tgatcgcgtgcgcttgtgaatgatt

SEQ ID NO: 4298618 - DNA, 25 bp, Homo sapien
ttttgtgatcgcgtgcgcttgtgaa

SEQ ID NO: 4298619 - DNA, 25 bp, Homo sapien
gctgcttttgtgatcgcgtgcgctt

SEQ ID NO: 4298620 - DNA, 25 bp, Homo sapien
aactgtctggggatggatatgcaac

SEQ ID NO: 4298621 - DNA, 25 bp, Homo sapien
ctgtctggggatggatatgcaactc

SEQ ID NO: 4298622 - DNA, 25 bp, Homo sapien
gaactgtctggggatggatatgcaa

SEQ ID NO: 4298623 - DNA, 25 bp, Homo sapien
gtctggggatggatatgcaactcac

SEQ ID NO: 4298624 - DNA, 25 bp, Homo sapien
attgtttttcacaggactcatgatc

SEQ ID NO: 4298625 - DNA, 25 bp, Homo sapien
gggcgatgtttaggcctctgcccac

SEQ ID NO: 4298626 - DNA, 25 bp, Homo sapien
caccagggcgatgtttaggcctctg

SEQ ID NO: 4298627 - DNA, 25 bp, Homo sapien
tgtttaggcctctgcccacattgtt

SEQ ID NO: 4298628 - DNA, 25 bp, Homo sapien
gcagattttaaacgcaaagtagttg

SEQ ID NO: 4298629 - DNA, 25 bp, Homo sapien
tcaaagcacatagtagggcccacga

SEQ ID NO: 4298630 - DNA, 25 bp, Homo sapien
catagtagggcccacgacgttggcg

SEQ ID NO: 4298631 - DNA, 25 bp, Homo sapien
atgcggtcttcaaagcacatagtag

SEQ ID NO: 4298632 - DNA, 25 bp, Homo sapien
cacagggtaaattggggaggtccat

SEQ ID NO: 4298633 - DNA, 25 bp, Homo sapien
tcacagggtaaattggggaggtcca

SEQ ID NO: 4298634 - DNA, 25 bp, Homo sapien
cctgatgtggtctctggcactttgc

SEQ ID NO: 4298635 - DNA, 25 bp, Homo sapien
ggcactttgcagcaggaaccctgag

SEQ ID NO: 4298636 - DNA, 25 bp, Homo sapien
caatggggttaaggagcacagccct

SEQ ID NO: 4298637 - DNA, 25 bp, Homo sapien
tctctggggcccctgtagtgcctga

SEQ ID NO: 4298638 - DNA, 25 bp, Homo sapien
ctgcagggctcagagcaggggccct

SEQ ID NO: 4298639 - DNA, 25 bp, Homo sapien
tgcagggctcagagcaggggccctg

SEQ ID NO: 4298640 - DNA, 25 bp, Homo sapien
cagagcaggggccctgggccttgtt

SEQ ID NO: 4298641 - DNA, 25 bp, Homo sapien
agcaggggccctgggccttgttgcc

SEQ ID NO: 4298642 - DNA, 25 bp, Homo sapien
aaagtggtcctcgatgtgggcacat

SEQ ID NO: 4298643 - DNA, 25 bp, Homo sapien
caaagtggtcctcgatgtgggcaca

SEQ ID NO: 4298644 - DNA, 25 bp, Homo sapien
agtggtcctcgatgtgggcacatgt

SEQ ID NO: 4298645 - DNA, 25 bp, Homo sapien
tcaaagtggtcctcgatgtgggcac

SEQ ID NO: 4298646 - DNA, 25 bp, Homo sapien
cacccttcctggtagtctgggggtg

SEQ ID NO: 4298647 - DNA, 25 bp, Homo sapien
ccctgcaattgctggggtcccaaag

SEQ ID NO: 4298648 - DNA, 25 bp, Homo sapien
cagcttgtcatgtctcctgggtcac

SEQ ID NO: 4298649 - DNA, 25 bp, Homo sapien
ttccccatggactccacccttcctg

SEQ ID NO: 4298650 - DNA, 25 bp, Homo sapien
cagccagcgtggcagacggatggtt

SEQ ID NO: 4298651 - DNA, 25 bp, Homo sapien
ggcagacggatggttttcatgctga

SEQ ID NO: 4298652 - DNA, 25 bp, Homo sapien
cagcgtggcagacggatggttttca

SEQ ID NO: 4298653 - DNA, 25 bp, Homo sapien
cgtggcagacggatggttttcatgc

SEQ ID NO: 4298654 - DNA, 25 bp, Homo sapien
cttcgaataaacatccatgtcgtga

SEQ ID NO: 4298655 - DNA, 25 bp, Homo sapien
agatgagggccaggaggcgaagcac

SEQ ID NO: 4298656 - DNA, 25 bp, Homo sapien
atggcaaagatgagggccaggaggc

SEQ ID NO: 4298657 - DNA, 25 bp, Homo sapien
atgagggccaggaggcgaagcacac

SEQ ID NO: 4298658 - DNA, 25 bp, Homo sapien
ctatggcaaagatgagggccaggag

SEQ ID NO: 4298659 - DNA, 25 bp, Homo sapien
gaattcagctctagagccttgaact

SEQ ID NO: 4298660 - DNA, 25 bp, Homo sapien
tccccagccccgaattcagctctag

SEQ ID NO: 4298661 - DNA, 25 bp, Homo sapien
agccccgaattcagctctagagcct

SEQ ID NO: 4298662 - DNA, 25 bp, Homo sapien
gctctagagccttgaactagtctct

SEQ ID NO: 4298663 - DNA, 25 bp, Homo sapien
ccaggtgaagggtggcttggggtca

SEQ ID NO: 4298664 - DNA, 25 bp, Homo sapien
cctgtccaggtgaagggtggcttgg

SEQ ID NO: 4298665 - DNA, 25 bp, Homo sapien
tgaagggtggcttggggtcagcttc

SEQ ID NO: 4298666 - DNA, 25 bp, Homo sapien
gaagggtggcttggggtcagcttcc

SEQ ID NO: 4298667 - DNA, 25 bp, Homo sapien
cagagggttagcctcttgctgtcct

SEQ ID NO: 4298668 - DNA, 25 bp, Homo sapien
tgctgagcaggaaatctggcttcag

SEQ ID NO: 4298669 - DNA, 25 bp, Homo sapien
cccattgggcggtgagggctcccca

SEQ ID NO: 4298670 - DNA, 25 bp, Homo sapien
tgcagagctacctggtgtcgtgagt

SEQ ID NO: 4298671 - DNA, 25 bp, Homo sapien
tcccatgggataagagtgagtttct

SEQ ID NO: 4298672 - DNA, 25 bp, Homo sapien
gctgcatttgacctgcgggctgttg

SEQ ID NO: 4298673 - DNA, 25 bp, Homo sapien
tagctctaggtagacccgagcctcg

SEQ ID NO: 4298674 - DNA, 25 bp, Homo sapien
gagcctcgggtgttccttttgctga

SEQ ID NO: 4298675 - DNA, 25 bp, Homo sapien
gggtggctccatgagctctgctttc

SEQ ID NO: 4298676 - DNA, 25 bp, Homo sapien
cattcacctgacagatcatcctctg

SEQ ID NO: 4298677 - DNA, 25 bp, Homo sapien
tcctctgaaggtgccacgctcagta

SEQ ID NO: 4298678 - DNA, 25 bp, Homo sapien
cctgacagatcatcctctgaaggtg

SEQ ID NO: 4298679 - DNA, 25 bp, Homo sapien
tgcacccttcgactttgcagaggcc

SEQ ID NO: 4298680 - DNA, 25 bp, Homo sapien
acccaggtcaccctcagtaagtggc

SEQ ID NO: 4298681 - DNA, 25 bp, Homo sapien
ctgtataacgtggtggctaagagtg

SEQ ID NO: 4298682 - DNA, 25 bp, Homo sapien
cctgggaattgggagtctgtataac

SEQ ID NO: 4298683 - DNA, 25 bp, Homo sapien
ctcgccagaggaattccatactttg

SEQ ID NO: 4298684 - DNA, 25 bp, Homo sapien
cgccagaggaattccatactttgtg

SEQ ID NO: 4298685 - DNA, 25 bp, Homo sapien
gtcctcgccagaggaattccatact

SEQ ID NO: 4298686 - DNA, 25 bp, Homo sapien
tcctttgtgaggtcccccttctgca

SEQ ID NO: 4298687 - DNA, 25 bp, Homo sapien
gaaatgtctgctccgctccagggca

SEQ ID NO: 4298688 - DNA, 25 bp, Homo sapien
tggcaccaactgtaggaaatgtctg

SEQ ID NO: 4298689 - DNA, 25 bp, Homo sapien
tgtcggctgcccacttgaagtctca

SEQ ID NO: 4298690 - DNA, 25 bp, Homo sapien
agggattggcaccaactgtaggaaa

SEQ ID NO: 4298691 - DNA, 25 bp, Homo sapien
tgccagtagtagacaggtaggtctc

SEQ ID NO: 4298692 - DNA, 25 bp, Homo sapien
caggactgccagtagtagacaggta

SEQ ID NO: 4298693 - DNA, 25 bp, Homo sapien
cagtagtagacaggtaggtctcctc

SEQ ID NO: 4298694 - DNA, 25 bp, Homo sapien
gtagtagacaggtaggtctcctcca

SEQ ID NO: 4298695 - DNA, 25 bp, Homo sapien
ccccaccgcagggaagtgccaatga

SEQ ID NO: 4298696 - DNA, 25 bp, Homo sapien
aatgttggcaaatgatgacttcgag

SEQ ID NO: 4298697 - DNA, 25 bp, Homo sapien
cccaccgcagggaagtgccaatgag

SEQ ID NO: 4298698 - DNA, 25 bp, Homo sapien
gcaaatgatgacttcgagcatcccc

SEQ ID NO: 4298699 - DNA, 25 bp, Homo sapien
ccatagccctttccattcttggggg

SEQ ID NO: 4298700 - DNA, 25 bp, Homo sapien
catagccctttccattcttgggggg

SEQ ID NO: 4298701 - DNA, 25 bp, Homo sapien
ctggaaccatagccctttccattct

SEQ ID NO: 4298702 - DNA, 25 bp, Homo sapien
gaaccatagccctttccattcttgg

SEQ ID NO: 4298703 - DNA, 25 bp, Homo sapien
ttcgatggagaaggcgaggtggtcc

SEQ ID NO: 4298704 - DNA, 25 bp, Homo sapien
agcaggtgccgtaggtccctgaccc

SEQ ID NO: 4298705 - DNA, 25 bp, Homo sapien
ccacttccctgcttcgatggagaag

SEQ ID NO: 4298706 - DNA, 25 bp, Homo sapien
aggggtagtggcctcacagacggcc

SEQ ID NO: 4298707 - DNA, 25 bp, Homo sapien
agacggagtgttgcgggccgccagt

SEQ ID NO: 4298708 - DNA, 25 bp, Homo sapien
cgggccgccagtgggccagctgctc

SEQ ID NO: 4298709 - DNA, 25 bp, Homo sapien
gggcccagagggtgagacggagtgt

SEQ ID NO: 4298710 - DNA, 25 bp, Homo sapien
gcccagagggtgagacggagtgttg

SEQ ID NO: 4298711 - DNA, 25 bp, Homo sapien
tgcccatccccaggtaggcacgtgg

SEQ ID NO: 4298712 - DNA, 25 bp, Homo sapien
gaatgcttccgtaggctgtgtggcc

SEQ ID NO: 4298713 - DNA, 25 bp, Homo sapien
ctgtgtggcccacttggaaggaata

SEQ ID NO: 4298714 - DNA, 25 bp, Homo sapien
cttattctgctaggacggttctgcc

SEQ ID NO: 4298715 - DNA, 25 bp, Homo sapien
gtgtcacttcctcaggggggccctc

SEQ ID NO: 4298716 - DNA, 25 bp, Homo sapien
ctcaggggggccctcctgaccctca

SEQ ID NO: 4298717 - DNA, 25 bp, Homo sapien
cagtgtcacttcctcaggggggccc

SEQ ID NO: 4298718 - DNA, 25 bp, Homo sapien
ctgcagtgtcacttcctcagggggg

SEQ ID NO: 4298719 - DNA, 25 bp, Homo sapien
tgagtctcaggcattctcaccccag

SEQ ID NO: 4298720 - DNA, 25 bp, Homo sapien
tctctgagtctcaggcattctcacc

SEQ ID NO: 4298721 - DNA, 25 bp, Homo sapien
cctgtgaagttgtgtgacctggagc

SEQ ID NO: 4298722 - DNA, 25 bp, Homo sapien
cgcaccctgtgaagttgtgtgacct

SEQ ID NO: 4298723 - DNA, 25 bp, Homo sapien
atgtactgttctttactgagcacag

SEQ ID NO: 4298724 - DNA, 25 bp, Homo sapien
gcactgcaatagtggattccctggg

SEQ ID NO: 4298725 - DNA, 25 bp, Homo sapien
gctgcaggcatcagcgatgagggcc

SEQ ID NO: 4298726 - DNA, 25 bp, Homo sapien
atgagggccccagagcactgcaata

SEQ ID NO: 4298727 - DNA, 25 bp, Homo sapien
ggcagacaaactaatctgaagatta

SEQ ID NO: 4298728 - DNA, 25 bp, Homo sapien
caaactaatctgaagattatttccc

SEQ ID NO: 4298729 - DNA, 25 bp, Homo sapien
tggcaggcagacaaactaatctgaa

SEQ ID NO: 4298730 - DNA, 25 bp, Homo sapien
actaatctgaagattatttccccag

SEQ ID NO: 4298731 - DNA, 25 bp, Homo sapien
gataaatgaccgttgcatcgatttt

SEQ ID NO: 4298732 - DNA, 25 bp, Homo sapien
cgatgggataaatgaccgttgcatc

SEQ ID NO: 4298733 - DNA, 25 bp, Homo sapien
tctttgagaagaaactagaccaggc

SEQ ID NO: 4298734 - DNA, 25 bp, Homo sapien
gaagaaactagaccaggcagtaatt

SEQ ID NO: 4298735 - DNA, 25 bp, Homo sapien
ccaggtgcgctctgaagccaaggga

SEQ ID NO: 4298736 - DNA, 25 bp, Homo sapien
aagccaggtgcgctctgaagccaag

SEQ ID NO: 4298737 - DNA, 25 bp, Homo sapien
caaaaggaagccaggtgcgctctga

SEQ ID NO: 4298738 - DNA, 25 bp, Homo sapien
aggaagccaggtgcgctctgaagcc

SEQ ID NO: 4298739 - DNA, 25 bp, Homo sapien
tccaatgtggccacgtgtgcctcat

SEQ ID NO: 4298740 - DNA, 25 bp, Homo sapien
ctcggtaattgaccacatccaatgt

SEQ ID NO: 4298741 - DNA, 25 bp, Homo sapien
taattgaccacatccaatgtggcca

SEQ ID NO: 4298742 - DNA, 25 bp, Homo sapien
cacatccaatgtggccacgtgtgcc

SEQ ID NO: 4298743 - DNA, 25 bp, Homo sapien
ggctttgtaataaagtcagtgcctt

SEQ ID NO: 4298744 - DNA, 25 bp, Homo sapien
ctttgtaataaagtcagtgccttgg

SEQ ID NO: 4298745 - DNA, 25 bp, Homo sapien
taagagacgaagttgaggatagcat

SEQ ID NO: 4298746 - DNA, 25 bp, Homo sapien
agtgccttggtgtaagagacgaagt

SEQ ID NO: 4298747 - DNA, 25 bp, Homo sapien
agaggccccactgaggtaggtgacc

SEQ ID NO: 4298748 - DNA, 25 bp, Homo sapien
cagaggccccactgaggtaggtgac

SEQ ID NO: 4298749 - DNA, 25 bp, Homo sapien
gcagaggccccactgaggtaggtga

SEQ ID NO: 4298750 - DNA, 25 bp, Homo sapien
aacctggaggcaaatgtgaccgagc

SEQ ID NO: 4298751 - DNA, 25 bp, Homo sapien
tcagtagatttgagtagattccaag

SEQ ID NO: 4298752 - DNA, 25 bp, Homo sapien
ctgcattccaatcagtagatttgag

SEQ ID NO: 4298753 - DNA, 25 bp, Homo sapien
tgtgaccgagccctctcttttgtcc

SEQ ID NO: 4298754 - DNA, 25 bp, Homo sapien
agccctggatgacccgttgcctgaa

SEQ ID NO: 4298755 - DNA, 25 bp, Homo sapien
tcttctgctagtccttctttcctca

SEQ ID NO: 4298756 - DNA, 25 bp, Homo sapien
cgttgcctgaacatgctgtgggact

SEQ ID NO: 4298757 - DNA, 25 bp, Homo sapien
gcttcttgatcttccctggccattt

SEQ ID NO: 4298758 - DNA, 25 bp, Homo sapien
tctcagagcttttgtcatgtgcaat

SEQ ID NO: 4298759 - DNA, 25 bp, Homo sapien
gttctcagagcttttgtcatgtgca

SEQ ID NO: 4298760 - DNA, 25 bp, Homo sapien
tttcagttctcagagcttttgtcat

SEQ ID NO: 4298761 - DNA, 25 bp, Homo sapien
cagttctcagagcttttgtcatgtg

SEQ ID NO: 4298762 - DNA, 25 bp, Homo sapien
tttatgctggaaattcttaagatat

SEQ ID NO: 4298763 - DNA, 25 bp, Homo sapien
taaagctagattagttattaaatat

SEQ ID NO: 4298764 - DNA, 25 bp, Homo sapien
aatgcaaacagaaatttatgctgga

SEQ ID NO: 4298765 - DNA, 25 bp, Homo sapien
gcaaacagaaatttatgctggaaat

SEQ ID NO: 4298766 - DNA, 25 bp, Homo sapien
tttccttatgccaagcctgtgtttt

SEQ ID NO: 4298767 - DNA, 25 bp, Homo sapien
ttatgccaagcctgtgttttattgc

SEQ ID NO: 4298768 - DNA, 25 bp, Homo sapien
catagagctggacggttttaaggtt

SEQ ID NO: 4298769 - DNA, 25 bp, Homo sapien
tttcatagagctggacggttttaag

SEQ ID NO: 4298770 - DNA, 25 bp, Homo sapien
attgtttgccatcataaaaccagaa

SEQ ID NO: 4298771 - DNA, 25 bp, Homo sapien
cgtgatgctgcttgtgtcatgctgc

SEQ ID NO: 4298772 - DNA, 25 bp, Homo sapien
tgagctctgtctcctttgcgtgatg

SEQ ID NO: 4298773 - DNA, 25 bp, Homo sapien
gtgtcatgctgcattgtttgccatc

SEQ ID NO: 4298774 - DNA, 25 bp, Homo sapien
tgacaatccacactgggaggtaagc

SEQ ID NO: 4298775 - DNA, 25 bp, Homo sapien
tgagcagtgactttggagagagttc

SEQ ID NO: 4298776 - DNA, 25 bp, Homo sapien
gaaagaggtcaatcttcatggtgca

SEQ ID NO: 4298777 - DNA, 25 bp, Homo sapien
gaagcaggtccaggaggaacattct

SEQ ID NO: 4298778 - DNA, 25 bp, Homo sapien
cttgttgatttgtttccaagccatt

SEQ ID NO: 4298779 - DNA, 25 bp, Homo sapien
tgtttccaagccattcaaactgaac

SEQ ID NO: 4298780 - DNA, 25 bp, Homo sapien
tttgtttccaagccattcaaactga

SEQ ID NO: 4298781 - DNA, 25 bp, Homo sapien
ttgatttgtttccaagccattcaaa

SEQ ID NO: 4298782 - DNA, 25 bp, Homo sapien
aattacttcatactcctcaggatcc

SEQ ID NO: 4298783 - DNA, 25 bp, Homo sapien
caggatccacccaaagcttgtattt

SEQ ID NO: 4298784 - DNA, 25 bp, Homo sapien
gctccccaaattggcaaacactcac

SEQ ID NO: 4298785 - DNA, 25 bp, Homo sapien
actcacaagaagtgctttaattgga

SEQ ID NO: 4298786 - DNA, 25 bp, Homo sapien
tacctgttctgtatgccctttgccc

SEQ ID NO: 4298787 - DNA, 25 bp, Homo sapien
tactacctgttctgtatgccctttg

SEQ ID NO: 4298788 - DNA, 25 bp, Homo sapien
caaacgcctcatctggtcatggttc

SEQ ID NO: 4298789 - DNA, 25 bp, Homo sapien
tttgccctcagcaaacgcctcatct

SEQ ID NO: 4298790 - DNA, 25 bp, Homo sapien
gcaccatctataaactaggcctgag

SEQ ID NO: 4298791 - DNA, 25 bp, Homo sapien
tcccagagaggaactgtcgtgctac

SEQ ID NO: 4298792 - DNA, 25 bp, Homo sapien
gcttaaactggatcatgaatacacc

SEQ ID NO: 4298793 - DNA, 25 bp, Homo sapien
ccttcaccgctgtgctttagaggga

SEQ ID NO: 4298794 - DNA, 25 bp, Homo sapien
tgaaggtgtattgctggcttgccaa

SEQ ID NO: 4298795 - DNA, 25 bp, Homo sapien
aactaaattataacagggctggagg

SEQ ID NO: 4298796 - DNA, 25 bp, Homo sapien
ggaaaaggtgatcaagatgcctgca

SEQ ID NO: 4298797 - DNA, 25 bp, Homo sapien
gcattgctgatactaccctggtctg

SEQ ID NO: 4298798 - DNA, 25 bp, Homo sapien
cccaggattcactaggtaaggcata

SEQ ID NO: 4298799 - DNA, 25 bp, Homo sapien
cctgcgaccctgagttaaaagagta

SEQ ID NO: 4298800 - DNA, 25 bp, Homo sapien
gacagaatgagcgaccatagcatgg

SEQ ID NO: 4298801 - DNA, 25 bp, Homo sapien
tgagttcttttccatcgcgtgcacc

SEQ ID NO: 4298802 - DNA, 25 bp, Homo sapien
cagcatcttggatgtctccaagctc

SEQ ID NO: 4298803 - DNA, 25 bp, Homo sapien
taagtgctttttcttcggtggtcca

SEQ ID NO: 4298804 - DNA, 25 bp, Homo sapien
ttcggtggtccatttgtcagcatct

SEQ ID NO: 4298805 - DNA, 25 bp, Homo sapien
gcatcttggatgtctccaagctctc

SEQ ID NO: 4298806 - DNA, 25 bp, Homo sapien
tgaaaagtgggtctaaaaaatcatc

SEQ ID NO: 4298807 - DNA, 25 bp, Homo sapien
ctaaaaaatcatcttgttacagcct

SEQ ID NO: 4298808 - DNA, 25 bp, Homo sapien
cagcctggtcaggagtgtgtgaaat

SEQ ID NO: 4298809 - DNA, 25 bp, Homo sapien
tcatcttgttacagcctggtcagga

SEQ ID NO: 4298810 - DNA, 25 bp, Homo sapien
aagtatcatataggaatattctgga

SEQ ID NO: 4298811 - DNA, 25 bp, Homo sapien
gtctgaccagttcacaatgtttctt

SEQ ID NO: 4298812 - DNA, 25 bp, Homo sapien
ggtccagtgccaataaaatgtgatc

SEQ ID NO: 4298813 - DNA, 25 bp, Homo sapien
tgtgatcataaagtctgaccagttc

SEQ ID NO: 4298814 - DNA, 25 bp, Homo sapien
tactgttgattttgtggtcacccaa

SEQ ID NO: 4298815 - DNA, 25 bp, Homo sapien
taagcgaccctgaactgctattctg

SEQ ID NO: 4298816 - DNA, 25 bp, Homo sapien
cattttctgtacatcaagccatcat

SEQ ID NO: 4298817 - DNA, 25 bp, Homo sapien
aagttgtggtgactccttaagcgac

SEQ ID NO: 4298818 - DNA, 25 bp, Homo sapien
caactcatagtatttccctgtttgg

SEQ ID NO: 4298819 - DNA, 25 bp, Homo sapien
aaagtaacagttcagacaagggtca

SEQ ID NO: 4298820 - DNA, 25 bp, Homo sapien
gggtcaaagtaacagttcagacaag

SEQ ID NO: 4298821 - DNA, 25 bp, Homo sapien
aactcatagtatttccctgtttggg

SEQ ID NO: 4298822 - DNA, 25 bp, Homo sapien
atactagtgaggcactgatttcccc

SEQ ID NO: 4298823 - DNA, 25 bp, Homo sapien
aaagaaggcacctcttgatactagt

SEQ ID NO: 4298824 - DNA, 25 bp, Homo sapien
tgcaatgtgtttcgctctactggag

SEQ ID NO: 4298825 - DNA, 25 bp, Homo sapien
gagttcacttctagtggccctgaaa

SEQ ID NO: 4298826 - DNA, 25 bp, Homo sapien
tcttatgcatatcgtttttcatagt

SEQ ID NO: 4298827 - DNA, 25 bp, Homo sapien
tttcttatgcatatcgtttttcata

SEQ ID NO: 4298828 - DNA, 25 bp, Homo sapien
ttcttatgcatatcgtttttcatag

SEQ ID NO: 4298829 - DNA, 25 bp, Homo sapien
gctgttgactgggaggaacgattgg

SEQ ID NO: 4298830 - DNA, 25 bp, Homo sapien
tcacaggaatctggacgctgctcag

SEQ ID NO: 4298831 - DNA, 25 bp, Homo sapien
gactgggaggaacgattggtgggct

SEQ ID NO: 4298832 - DNA, 25 bp, Homo sapien
tgggctcaacatatttaaccagtcc

SEQ ID NO: 4298833 - DNA, 25 bp, Homo sapien
gcactgctattagtgcccgttatca

SEQ ID NO: 4298834 - DNA, 25 bp, Homo sapien
cttcactagtggtaaggagcaggca

SEQ ID NO: 4298835 - DNA, 25 bp, Homo sapien
tatttcttgcactgctattagtgcc

SEQ ID NO: 4298836 - DNA, 25 bp, Homo sapien
cttgcactgctattagtgcccgtta

SEQ ID NO: 4298837 - DNA, 25 bp, Homo sapien
caactcctttaaacctccatgcttt

SEQ ID NO: 4298838 - DNA, 25 bp, Homo sapien
aatgctggcccattgtcttgatcct

SEQ ID NO: 4298839 - DNA, 25 bp, Homo sapien
atatgtgatatttaatgctggccca

SEQ ID NO: 4298840 - DNA, 25 bp, Homo sapien
tccttgatcaactcctttaaacctc

SEQ ID NO: 4298841 - DNA, 25 bp, Homo sapien
gcttcagaatctactcctgcttgct

SEQ ID NO: 4298842 - DNA, 25 bp, Homo sapien
acacctgtgcttcagaatctactcc

SEQ ID NO: 4298843 - DNA, 25 bp, Homo sapien
ccagacacctgtgcttcagaatcta

SEQ ID NO: 4298844 - DNA, 25 bp, Homo sapien
ctgtgcttcagaatctactcctgct

SEQ ID NO: 4298845 - DNA, 25 bp, Homo sapien
tatgcttgattaccatcagaaactg

SEQ ID NO: 4298846 - DNA, 25 bp, Homo sapien
tcaagtagttttggctgttcaacag

SEQ ID NO: 4298847 - DNA, 25 bp, Homo sapien
gagctaagggactgttcaagactcc

SEQ ID NO: 4298848 - DNA, 25 bp, Homo sapien
tgtatgcgtttctcctacccttacc

SEQ ID NO: 4298849 - DNA, 25 bp, Homo sapien
tgcttccctggaacttctcaaactg

SEQ ID NO: 4298850 - DNA, 25 bp, Homo sapien
ctgtgcttccctggaacttctcaaa

SEQ ID NO: 4298851 - DNA, 25 bp, Homo sapien
agctgctgtgcttccctggaacttc

SEQ ID NO: 4298852 - DNA, 25 bp, Homo sapien
ttccctggaacttctcaaactggat

SEQ ID NO: 4298853 - DNA, 25 bp, Homo sapien
gccttctaaccagtcttgtttcaga

SEQ ID NO: 4298854 - DNA, 25 bp, Homo sapien
tgtcctgagcaccaaattgcatctg

SEQ ID NO: 4298855 - DNA, 25 bp, Homo sapien
tttcccatgcctacaccaaacatcc

SEQ ID NO: 4298856 - DNA, 25 bp, Homo sapien
gggaagctgccttctaaccagtctt

SEQ ID NO: 4298857 - DNA, 25 bp, Homo sapien
agaaaaatgtacaatcttccaacta

SEQ ID NO: 4298858 - DNA, 25 bp, Homo sapien
aaaaatgtacaatcttccaactaag

SEQ ID NO: 4298859 - DNA, 25 bp, Homo sapien
aatgtagattattaatgattcttac

SEQ ID NO: 4298860 - DNA, 25 bp, Homo sapien
aatgtacaatcttccaactaagttt

SEQ ID NO: 4298861 - DNA, 25 bp, Homo sapien
tctgatagtggcgaccctggttgac

SEQ ID NO: 4298862 - DNA, 25 bp, Homo sapien
tctttctgatagtggcgaccctggt

SEQ ID NO: 4298863 - DNA, 25 bp, Homo sapien
tcatttctttctgatagtggcgacc

SEQ ID NO: 4298864 - DNA, 25 bp, Homo sapien
gagaaggtgggttcatttctttctg

SEQ ID NO: 4298865 - DNA, 25 bp, Homo sapien
caggagacttcagtccttgccagaa

SEQ ID NO: 4298866 - DNA, 25 bp, Homo sapien
tttttggctgtatacttttcgagtg

SEQ ID NO: 4298867 - DNA, 25 bp, Homo sapien
tttcgagtggaatagatgtcatgca

SEQ ID NO: 4298868 - DNA, 25 bp, Homo sapien
ccagaacaggacagcgatgagaaca

SEQ ID NO: 4298869 - DNA, 25 bp, Homo sapien
tccaggtggttgtgtcgtcactgct

SEQ ID NO: 4298870 - DNA, 25 bp, Homo sapien
tcttcattttgttgccaccgtaggc

SEQ ID NO: 4298871 - DNA, 25 bp, Homo sapien
caccgtaggcttgctagcatctgta

SEQ ID NO: 4298872 - DNA, 25 bp, Homo sapien
gacattacagttgtccacctgggag

SEQ ID NO: 4298873 - DNA, 25 bp, Homo sapien
gcaggatgtattgccggcatctgta

SEQ ID NO: 4298874 - DNA, 25 bp, Homo sapien
atgtattgccggcatctgtaaacca

SEQ ID NO: 4298875 - DNA, 25 bp, Homo sapien
tattgccggcatctgtaaaccacac

SEQ ID NO: 4298876 - DNA, 25 bp, Homo sapien
cggcatctgtaaaccacacgggaac

SEQ ID NO: 4298877 - DNA, 25 bp, Homo sapien
tgttgggcctcgagaaccctggata

SEQ ID NO: 4298878 - DNA, 25 bp, Homo sapien
tatttgctccatcgaggaatcctgg

SEQ ID NO: 4298879 - DNA, 25 bp, Homo sapien
cacttgctgggctgatagatccttc

SEQ ID NO: 4298880 - DNA, 25 bp, Homo sapien
ccttcgctttgattacgggctctgg

SEQ ID NO: 4298881 - DNA, 25 bp, Homo sapien
ggtatttagcctacttaagcagaga

SEQ ID NO: 4298882 - DNA, 25 bp, Homo sapien
gctaaaatgtcctgctatacggtat

SEQ ID NO: 4298883 - DNA, 25 bp, Homo sapien
taataaatacaagtgggtctaggga

SEQ ID NO: 4298884 - DNA, 25 bp, Homo sapien
tacggtatttggtctggataaggca

SEQ ID NO: 4298885 - DNA, 25 bp, Homo sapien
aaaatctgataaaggcagaattaca

SEQ ID NO: 4298886 - DNA, 25 bp, Homo sapien
atctgataaaggcagaattacaaac

SEQ ID NO: 4298887 - DNA, 25 bp, Homo sapien
aaatctgataaaggcagaattacaa

SEQ ID NO: 4298888 - DNA, 25 bp, Homo sapien
aatctgataaaggcagaattacaaa

SEQ ID NO: 4298889 - DNA, 25 bp, Homo sapien
gagaagttagtgtatcatgacctgg

SEQ ID NO: 4298890 - DNA, 25 bp, Homo sapien
gggctcaacatgttctgggatgaat

SEQ ID NO: 4298891 - DNA, 25 bp, Homo sapien
ggtgcactggcataaccctattcct

SEQ ID NO: 4298892 - DNA, 25 bp, Homo sapien
ctaatttgcattgggtcagcttctc

SEQ ID NO: 4298893 - DNA, 25 bp, Homo sapien
taatgcaattaatagtaaggatgcc

SEQ ID NO: 4298894 - DNA, 25 bp, Homo sapien
gcaaaccccaaagcttgataatgtg

SEQ ID NO: 4298895 - DNA, 25 bp, Homo sapien
tatctcgttagtctctgtaccagca

SEQ ID NO: 4298896 - DNA, 25 bp, Homo sapien
tagaagaagctatcctacaggaaaa

SEQ ID NO: 4298897 - DNA, 25 bp, Homo sapien
tagaccatggaaggattatcagctg

SEQ ID NO: 4298898 - DNA, 25 bp, Homo sapien
ggacactattaggtgctgaagacaa

SEQ ID NO: 4298899 - DNA, 25 bp, Homo sapien
aaggcttagccttcctatagatgga

SEQ ID NO: 4298900 - DNA, 25 bp, Homo sapien
tgtccagcagcaacacttaaaatgc

SEQ ID NO: 4298901 - DNA, 25 bp, Homo sapien
caacctgatgcaactgtggactgac

SEQ ID NO: 4298902 - DNA, 25 bp, Homo sapien
tgtaaggcaagtcccagcactaatc

SEQ ID NO: 4298903 - DNA, 25 bp, Homo sapien
tattggagctaaggaaacaactgtg

SEQ ID NO: 4298904 - DNA, 25 bp, Homo sapien
tcaaattctgggaccatatggaaaa

SEQ ID NO: 4298905 - DNA, 25 bp, Homo sapien
catgaggtgctgatcgtggtcttga

SEQ ID NO: 4298906 - DNA, 25 bp, Homo sapien
gattcctctgcctgctggtcgtgtt

SEQ ID NO: 4298907 - DNA, 25 bp, Homo sapien
tgtcgccgccgtaaaaatcatcctc

SEQ ID NO: 4298908 - DNA, 25 bp, Homo sapien
gcaggagtcatcacccagaagtaga

SEQ ID NO: 4298909 - DNA, 25 bp, Homo sapien
ggtgatcaatgtatacttcctagag

SEQ ID NO: 4298910 - DNA, 25 bp, Homo sapien
caaggctttcatatattgagggaca

SEQ ID NO: 4298911 - DNA, 25 bp, Homo sapien
tggtaaaatcttgcagaatcacagt

SEQ ID NO: 4298912 - DNA, 25 bp, Homo sapien
aggcatatggccaatggcaggctga

SEQ ID NO: 4298913 - DNA, 25 bp, Homo sapien
caagatatgttgatgggctcaatgc

SEQ ID NO: 4298914 - DNA, 25 bp, Homo sapien
tgttgatgggctcaatgctctcagc

SEQ ID NO: 4298915 - DNA, 25 bp, Homo sapien
tatgttgatgggctcaatgctctca

SEQ ID NO: 4298916 - DNA, 25 bp, Homo sapien
aggcaagatatgttgatgggctcaa

SEQ ID NO: 4298917 - DNA, 25 bp, Homo sapien
tcttcaatcctattatttcctgaag

SEQ ID NO: 4298918 - DNA, 25 bp, Homo sapien
caggagactggggtcctagagtgcc

SEQ ID NO: 4298919 - DNA, 25 bp, Homo sapien
tgctttatcttcaatcctattattt

SEQ ID NO: 4298920 - DNA, 25 bp, Homo sapien
gggtcctagagtgccggagttcaac

SEQ ID NO: 4298921 - DNA, 25 bp, Homo sapien
ttattattcttatctgctgatggtt

SEQ ID NO: 4298922 - DNA, 25 bp, Homo sapien
ctgttattattcttatctgctgatg

SEQ ID NO: 4298923 - DNA, 25 bp, Homo sapien
gggggatgcggatgcataatatgta

SEQ ID NO: 4298924 - DNA, 25 bp, Homo sapien
gggatgcggatgcataatatgtaga

SEQ ID NO: 4298925 - DNA, 25 bp, Homo sapien
ggatgcggatgcataatatgtagat

SEQ ID NO: 4298926 - DNA, 25 bp, Homo sapien
gagggggatgcggatgcataatatg

SEQ ID NO: 4298927 - DNA, 25 bp, Homo sapien
atgaataggtacagtctgctttatt

SEQ ID NO: 4298928 - DNA, 25 bp, Homo sapien
tctgtaccattaacacacttctcta

SEQ ID NO: 4298929 - DNA, 25 bp, Homo sapien
ggacggctggcatgatcggttattt

SEQ ID NO: 4298930 - DNA, 25 bp, Homo sapien
tttttggacccaacggatctcactg

SEQ ID NO: 4298931 - DNA, 25 bp, Homo sapien
tggaggtggcccaagaactttggat

SEQ ID NO: 4298932 - DNA, 25 bp, Homo sapien
tactgttccgtgtaatacttgttcc

SEQ ID NO: 4298933 - DNA, 25 bp, Homo sapien
gttattccttctgccagagagtgga

SEQ ID NO: 4298934 - DNA, 25 bp, Homo sapien
gatccaaatgcgatatgacaaacat

SEQ ID NO: 4298935 - DNA, 25 bp, Homo sapien
aaatgcactccaaaatagttacaag

SEQ ID NO: 4298936 - DNA, 25 bp, Homo sapien
cagcttgtgtgaaaacactagaaag

SEQ ID NO: 4298937 - DNA, 25 bp, Homo sapien
gagtagcccatagttaattaaagag

SEQ ID NO: 4298938 - DNA, 25 bp, Homo sapien
agaggtttcactgggatctctcaat

SEQ ID NO: 4298939 - DNA, 25 bp, Homo sapien
tcactactatgcattgagagccctt

SEQ ID NO: 4298940 - DNA, 25 bp, Homo sapien
gaagtgcaatcataaaccctatggt

SEQ ID NO: 4298941 - DNA, 25 bp, Homo sapien
gagagcccttttatggaaattgcaa

SEQ ID NO: 4298942 - DNA, 25 bp, Homo sapien
tatcgggatatagacttgcactttc

SEQ ID NO: 4298943 - DNA, 25 bp, Homo sapien
tcagtttggcgaagtttagtcatgt

SEQ ID NO: 4298944 - DNA, 25 bp, Homo sapien
gctgtgtgacatgtggaacatctgt

SEQ ID NO: 4298945 - DNA, 25 bp, Homo sapien
gctgatcttagaggatggcctccga

SEQ ID NO: 4298946 - DNA, 25 bp, Homo sapien
gaagtttagtcatgtttagcagctg

SEQ ID NO: 4298947 - DNA, 25 bp, Homo sapien
tgttgaaaagggaacaccatagaca

SEQ ID NO: 4298948 - DNA, 25 bp, Homo sapien
ctgttgaaaagggaacaccatagac

SEQ ID NO: 4298949 - DNA, 25 bp, Homo sapien
gttgaaaagggaacaccatagacag

SEQ ID NO: 4298950 - DNA, 25 bp, Homo sapien
gagatttcatggtggaatacttgga

SEQ ID NO: 4298951 - DNA, 25 bp, Homo sapien
cattaagcccatctagaactactag

SEQ ID NO: 4298952 - DNA, 25 bp, Homo sapien
gatttcatggtggaatacttggaaa

SEQ ID NO: 4298953 - DNA, 25 bp, Homo sapien
tagaactactagctctaaaggtttc

SEQ ID NO: 4298954 - DNA, 25 bp, Homo sapien
tggcagctaagatgaaaggaatacg

SEQ ID NO: 4298955 - DNA, 25 bp, Homo sapien
tacaaggcgaagtactggcagctaa

SEQ ID NO: 4298956 - DNA, 25 bp, Homo sapien
ccttgaaccatagtgtgcttccccg

SEQ ID NO: 4298957 - DNA, 25 bp, Homo sapien
taaagatagggtgcgtacaaggcga

SEQ ID NO: 4298958 - DNA, 25 bp, Homo sapien
tatccggtgttaaaaagaattgagc

SEQ ID NO: 4298959 - DNA, 25 bp, Homo sapien
tgcaagaacccaaagagcgtatagt

SEQ ID NO: 4298960 - DNA, 25 bp, Homo sapien
cagaagacctttagggcagtgaacc

SEQ ID NO: 4298961 - DNA, 25 bp, Homo sapien
tatagtactagctagacacaggtct

SEQ ID NO: 4298962 - DNA, 25 bp, Homo sapien
ccaaatattggagttgtgagctaaa

SEQ ID NO: 4298963 - DNA, 25 bp, Homo sapien
gaaaattactgttatgtgccacaac

SEQ ID NO: 4298964 - DNA, 25 bp, Homo sapien
gataaatgcctacatgaatgcccca

SEQ ID NO: 4298965 - DNA, 25 bp, Homo sapien
aacagataatagaactaggcctaca

SEQ ID NO: 4298966 - DNA, 25 bp, Homo sapien
tactatcccaaaggtatggctaatt

SEQ ID NO: 4298967 - DNA, 25 bp, Homo sapien
acatttgatctagaacaaagaaatc

SEQ ID NO: 4298968 - DNA, 25 bp, Homo sapien
gcagacataacatcaaactgctacc

SEQ ID NO: 4298969 - DNA, 25 bp, Homo sapien
aaactgctaccacacactcatacta

SEQ ID NO: 4298970 - DNA, 25 bp, Homo sapien
catccttatcagcagtgtcttgtgg

SEQ ID NO: 4298971 - DNA, 25 bp, Homo sapien
tggtgaatgctactaagtcaatgca

SEQ ID NO: 4298972 - DNA, 25 bp, Homo sapien
tgagacaacaattccatccaatgac

SEQ ID NO: 4298973 - DNA, 25 bp, Homo sapien
ggtgaagatcttccgtagcttacag

SEQ ID NO: 4298974 - DNA, 25 bp, Homo sapien
actgtacacttttcttatccatcat

SEQ ID NO: 4298975 - DNA, 25 bp, Homo sapien
ccactgtacacttttcttatccatc

SEQ ID NO: 4298976 - DNA, 25 bp, Homo sapien
cactgtacacttttcttatccatca

SEQ ID NO: 4298977 - DNA, 25 bp, Homo sapien
tctcatgttgaaagttcgtgcccaa

SEQ ID NO: 4298978 - DNA, 25 bp, Homo sapien
gagttgaaggctaccatcttgctct

SEQ ID NO: 4298979 - DNA, 25 bp, Homo sapien
tgaaaagagtctgacaatgcctcct

SEQ ID NO: 4298980 - DNA, 25 bp, Homo sapien
tcttcccagattcagatgccagtgc

SEQ ID NO: 4298981 - DNA, 25 bp, Homo sapien
ccttatggaccgttgataaatataa

SEQ ID NO: 4298982 - DNA, 25 bp, Homo sapien
tcttttgatgttccctaaatcagta

SEQ ID NO: 4298983 - DNA, 25 bp, Homo sapien
agagtggaatttttgcatgaagagg

SEQ ID NO: 4298984 - DNA, 25 bp, Homo sapien
aggatagttccttatggaccgttga

SEQ ID NO: 4298985 - DNA, 25 bp, Homo sapien
cctggctgtcggtttcacttcctaa

SEQ ID NO: 4298986 - DNA, 25 bp, Homo sapien
gtataggctcttagtctgcttagag

SEQ ID NO: 4298987 - DNA, 25 bp, Homo sapien
ggctgtcggtttcacttcctaagca

SEQ ID NO: 4298988 - DNA, 25 bp, Homo sapien
tgcatctgtcattttgtataggctc

SEQ ID NO: 4298989 - DNA, 25 bp, Homo sapien
tcgctccccgaaaaatgccacataa

SEQ ID NO: 4298990 - DNA, 25 bp, Homo sapien
tccctcaggtattgctcggagaact

SEQ ID NO: 4298991 - DNA, 25 bp, Homo sapien
aataagctctctttgggctggtagc

SEQ ID NO: 4298992 - DNA, 25 bp, Homo sapien
tacccattaaatctgggccatgtgc

SEQ ID NO: 4298993 - DNA, 25 bp, Homo sapien
cactctaccctggtaccaaggctag

SEQ ID NO: 4298994 - DNA, 25 bp, Homo sapien
tggtaccaaggctagaactctgcat

SEQ ID NO: 4298995 - DNA, 25 bp, Homo sapien
agcctcacaccttccgtgtttgtct

SEQ ID NO: 4298996 - DNA, 25 bp, Homo sapien
caaggctagaactctgcataagaac

SEQ ID NO: 4298997 - DNA, 25 bp, Homo sapien
ccagggctacagctaagttactttc

SEQ ID NO: 4298998 - DNA, 25 bp, Homo sapien
cagggctacagctaagttactttcc

SEQ ID NO: 4298999 - DNA, 25 bp, Homo sapien
gggctacagctaagttactttccac

SEQ ID NO: 4299000 - DNA, 25 bp, Homo sapien
ctccagggctacagctaagttactt

SEQ ID NO: 4299001 - DNA, 25 bp, Homo sapien
ggtgggaagctagaactgagcctcc

SEQ ID NO: 4299002 - DNA, 25 bp, Homo sapien
gggcctcaggattgtaacatctata

SEQ ID NO: 4299003 - DNA, 25 bp, Homo sapien
tatacaggaaccagagggttaatat

SEQ ID NO: 4299004 - DNA, 25 bp, Homo sapien
ccagagggttaatatgtgtgcatgt

SEQ ID NO: 4299005 - DNA, 25 bp, Homo sapien
tcccttgaggtctacattatataaa

SEQ ID NO: 4299006 - DNA, 25 bp, Homo sapien
gtagttgaaccaaatactcatcagt

SEQ ID NO: 4299007 - DNA, 25 bp, Homo sapien
cagaggctcagtaacaaactgctta

SEQ ID NO: 4299008 - DNA, 25 bp, Homo sapien
tcctcctaggaaattaatgatgtct

SEQ ID NO: 4299009 - DNA, 25 bp, Homo sapien
tgtttccttccacgcatccatgtgt

SEQ ID NO: 4299010 - DNA, 25 bp, Homo sapien
cattccccatcctccaacaggccct

SEQ ID NO: 4299011 - DNA, 25 bp, Homo sapien
tccccatcctccaacaggccctagt

SEQ ID NO: 4299012 - DNA, 25 bp, Homo sapien
gttgtttccttccacgcatccatgt

SEQ ID NO: 4299013 - DNA, 25 bp, Homo sapien
tctttacccacagggctaggtcttc

SEQ ID NO: 4299014 - DNA, 25 bp, Homo sapien
ctctttacccacagggctaggtctt

SEQ ID NO: 4299015 - DNA, 25 bp, Homo sapien
tctctttacccacagggctaggtct

SEQ ID NO: 4299016 - DNA, 25 bp, Homo sapien
ttctctttacccacagggctaggtc

SEQ ID NO: 4299017 - DNA, 25 bp, Homo sapien
tggcagcatcaaataagggaaaatg

SEQ ID NO: 4299018 - DNA, 25 bp, Homo sapien
tcatttagtgtgattggcagcatca

SEQ ID NO: 4299019 - DNA, 25 bp, Homo sapien
ctgtgcaccagatgtctgcccccag

SEQ ID NO: 4299020 - DNA, 25 bp, Homo sapien
tcctgtgcaccagatgtctgccccc

SEQ ID NO: 4299021 - DNA, 25 bp, Homo sapien
cctctgagaacagagactgggtgct

SEQ ID NO: 4299022 - DNA, 25 bp, Homo sapien
catttggcaggaaccacttttccct

SEQ ID NO: 4299023 - DNA, 25 bp, Homo sapien
aataaagttttgtgtgatcccctct

SEQ ID NO: 4299024 - DNA, 25 bp, Homo sapien
catgcctttggagtcttgaaaatgc

SEQ ID NO: 4299025 - DNA, 25 bp, Homo sapien
tacctttagcatgcctttggagtct

SEQ ID NO: 4299026 - DNA, 25 bp, Homo sapien
gtcacttgcaattaatgattgttgg

SEQ ID NO: 4299027 - DNA, 25 bp, Homo sapien
tacttgatgttgacttgatgtaagt

SEQ ID NO: 4299028 - DNA, 25 bp, Homo sapien
tggtactgcttcaattgatcaaatg

SEQ ID NO: 4299029 - DNA, 25 bp, Homo sapien
tgatcaaatgtctaatacacacaaa

SEQ ID NO: 4299030 - DNA, 25 bp, Homo sapien
ttgtcccaggggtacgtaaatctga

SEQ ID NO: 4299031 - DNA, 25 bp, Homo sapien
acaagaaacctctggatcaatccaa

SEQ ID NO: 4299032 - DNA, 25 bp, Homo sapien
gggtacgtaaatctgaagtacaaga

SEQ ID NO: 4299033 - DNA, 25 bp, Homo sapien
aagtacaagaaacctctggatcaat

SEQ ID NO: 4299034 - DNA, 25 bp, Homo sapien
cacatagaaggtcattttacacaag

SEQ ID NO: 4299035 - DNA, 25 bp, Homo sapien
ccaattatctattcaaggcatgtca

SEQ ID NO: 4299036 - DNA, 25 bp, Homo sapien
ggcatcagtgcagggcagactatat

SEQ ID NO: 4299037 - DNA, 25 bp, Homo sapien
tgtcctgtgcctcttgcaagaagat

SEQ ID NO: 4299038 - DNA, 25 bp, Homo sapien
cttattctcctttggtaactgaatt

SEQ ID NO: 4299039 - DNA, 25 bp, Homo sapien
tggactaccaaggatcttccatttt

SEQ ID NO: 4299040 - DNA, 25 bp, Homo sapien
gactaccaaggatcttccattttgc

SEQ ID NO: 4299041 - DNA, 25 bp, Homo sapien
gatggactaccaaggatcttccatt

SEQ ID NO: 4299042 - DNA, 25 bp, Homo sapien
acagatggactaccaaggatcttcc

SEQ ID NO: 4299043 - DNA, 25 bp, Homo sapien
gtttccagcgagtggcgtgaccctg

SEQ ID NO: 4299044 - DNA, 25 bp, Homo sapien
catttttgaacattcccgcaggggg

SEQ ID NO: 4299045 - DNA, 25 bp, Homo sapien
ccctgacggctggaaatcggctggc

SEQ ID NO: 4299046 - DNA, 25 bp, Homo sapien
tccatcagcaccattgcggctccag

SEQ ID NO: 4299047 - DNA, 25 bp, Homo sapien
cccagtcgcggagccacagacaacc

SEQ ID NO: 4299048 - DNA, 25 bp, Homo sapien
cagtcgcggagccacagacaaccgc

SEQ ID NO: 4299049 - DNA, 25 bp, Homo sapien
agacaaccgcccgctggcctaggaa

SEQ ID NO: 4299050 - DNA, 25 bp, Homo sapien
taggaaaagcgggcgcgctcccgct

SEQ ID NO: 4299051 - DNA, 25 bp, Homo sapien
gcgccgagcgccacccgcgttccgg

SEQ ID NO: 4299052 - DNA, 25 bp, Homo sapien
atcaaaccgcgaaagagcagcgccg

SEQ ID NO: 4299053 - DNA, 25 bp, Homo sapien
aaccgcgaaagagcagcgccgagcg

SEQ ID NO: 4299054 - DNA, 25 bp, Homo sapien
ccagaatcaaaccgcgaaagagcag

SEQ ID NO: 4299055 - DNA, 25 bp, Homo sapien
aaatccaatgttattggatgcctgt

SEQ ID NO: 4299056 - DNA, 25 bp, Homo sapien
caatgttattggatgcctgtgtatt

SEQ ID NO: 4299057 - DNA, 25 bp, Homo sapien
gttattggatgcctgtgtatttcca

SEQ ID NO: 4299058 - DNA, 25 bp, Homo sapien
tattggatgcctgtgtatttccagg

SEQ ID NO: 4299059 - DNA, 25 bp, Homo sapien
gatttttcgatgtgtatcttctttc

SEQ ID NO: 4299060 - DNA, 25 bp, Homo sapien
gtccatactgatttttcgatgtgta

SEQ ID NO: 4299061 - DNA, 25 bp, Homo sapien
tactgatttttcgatgtgtatcttc

SEQ ID NO: 4299062 - DNA, 25 bp, Homo sapien
ccatactgatttttcgatgtgtatc

SEQ ID NO: 4299063 - DNA, 25 bp, Homo sapien
aaacaagttgctttaattcactgac

SEQ ID NO: 4299064 - DNA, 25 bp, Homo sapien
tcaaatataatccccaggggaaaca

SEQ ID NO: 4299065 - DNA, 25 bp, Homo sapien
gaaacaagttgctttaattcactga

SEQ ID NO: 4299066 - DNA, 25 bp, Homo sapien
ggaaacaagttgctttaattcactg

SEQ ID NO: 4299067 - DNA, 25 bp, Homo sapien
agaatcaagtgccaccacccctacc

SEQ ID NO: 4299068 - DNA, 25 bp, Homo sapien
tctggaactattttgctggctcttc

SEQ ID NO: 4299069 - DNA, 25 bp, Homo sapien
gaagctcagactctgaactttcttc

SEQ ID NO: 4299070 - DNA, 25 bp, Homo sapien
ccctaccctcagaagctcagactct

SEQ ID NO: 4299071 - DNA, 25 bp, Homo sapien
tgcactgcttttcgaaaaatgccat

SEQ ID NO: 4299072 - DNA, 25 bp, Homo sapien
ctgcactgcttttcgaaaaatgcca

SEQ ID NO: 4299073 - DNA, 25 bp, Homo sapien
ctttctgtgaaaccttctacttcat

SEQ ID NO: 4299074 - DNA, 25 bp, Homo sapien
cttcagcctagattaaagtgttaaa

SEQ ID NO: 4299075 - DNA, 25 bp, Homo sapien
ctaggtactgaggttgtcccacatg

SEQ ID NO: 4299076 - DNA, 25 bp, Homo sapien
taggtactgaggttgtcccacatgg

SEQ ID NO: 4299077 - DNA, 25 bp, Homo sapien
ggtactgaggttgtcccacatggca

SEQ ID NO: 4299078 - DNA, 25 bp, Homo sapien
tactgaggttgtcccacatggcagt

SEQ ID NO: 4299079 - DNA, 25 bp, Homo sapien
gcttcaggtacgtggggaggtgctc

SEQ ID NO: 4299080 - DNA, 25 bp, Homo sapien
tctttgtcgttcacacccatgcact

SEQ ID NO: 4299081 - DNA, 25 bp, Homo sapien
ggaggtgctctttgtcgttcacacc

SEQ ID NO: 4299082 - DNA, 25 bp, Homo sapien
gtgctctttgtcgttcacacccatg

SEQ ID NO: 4299083 - DNA, 25 bp, Homo sapien
tcttttaacctgagtcagccttagg

SEQ ID NO: 4299084 - DNA, 25 bp, Homo sapien
caacttcccgtgtggtcaaaactga

SEQ ID NO: 4299085 - DNA, 25 bp, Homo sapien
gaggaaaccactgctccttggtcca

SEQ ID NO: 4299086 - DNA, 25 bp, Homo sapien
gagtcagccttaggacctttctccc

SEQ ID NO: 4299087 - DNA, 25 bp, Homo sapien
tctggtgctaagaatgatcaacctc

SEQ ID NO: 4299088 - DNA, 25 bp, Homo sapien
caatgaggaatcagagctggtggca

SEQ ID NO: 4299089 - DNA, 25 bp, Homo sapien
ccctccatgggatttggcttaaatt

SEQ ID NO: 4299090 - DNA, 25 bp, Homo sapien
tgttctataaaaccagcctctctgg

SEQ ID NO: 4299091 - DNA, 25 bp, Homo sapien
taacttgtaggctttttgagaacaa

SEQ ID NO: 4299092 - DNA, 25 bp, Homo sapien
tttatgtaacttgtaggctttttga

SEQ ID NO: 4299093 - DNA, 25 bp, Homo sapien
tgaattactggagctgtacttatac

SEQ ID NO: 4299094 - DNA, 25 bp, Homo sapien
tgtgaattactggagctgtacttat

SEQ ID NO: 4299095 - DNA, 25 bp, Homo sapien
tcttcacggcacaacgtactcaagg

SEQ ID NO: 4299096 - DNA, 25 bp, Homo sapien
gaatgactgttcaacgtttcaacag

SEQ ID NO: 4299097 - DNA, 25 bp, Homo sapien
tttcaacagaaacatacgttgggct

SEQ ID NO: 4299098 - DNA, 25 bp, Homo sapien
gaaagtcgttttcagacaggtgaag

SEQ ID NO: 4299099 - DNA, 25 bp, Homo sapien
ctaagggatattttacaagggcagt

SEQ ID NO: 4299100 - DNA, 25 bp, Homo sapien
gggatattttacaagggcagtggaa

SEQ ID NO: 4299101 - DNA, 25 bp, Homo sapien
aagggatattttacaagggcagtgg

SEQ ID NO: 4299102 - DNA, 25 bp, Homo sapien
taagggatattttacaagggcagtg

SEQ ID NO: 4299103 - DNA, 25 bp, Homo sapien
atatggatgacctgtcttccagtaa

SEQ ID NO: 4299104 - DNA, 25 bp, Homo sapien
tatggatgacctgtcttccagtaac

SEQ ID NO: 4299105 - DNA, 25 bp, Homo sapien
tggtgttaatttatgtgattcagcg

SEQ ID NO: 4299106 - DNA, 25 bp, Homo sapien
ttatgtgattcagcgttgagaggta

SEQ ID NO: 4299107 - DNA, 25 bp, Homo sapien
gaaagcggcgttacgggaacatgaa

SEQ ID NO: 4299108 - DNA, 25 bp, Homo sapien
cagcgttgagaggtataatcttaac

SEQ ID NO: 4299109 - DNA, 25 bp, Homo sapien
tccttgcaaggtgccaactgcaaga

SEQ ID NO: 4299110 - DNA, 25 bp, Homo sapien
acacaaacttagatctccttgcaag

SEQ ID NO: 4299111 - DNA, 25 bp, Homo sapien
cccttcacctaagctctcacacaaa

SEQ ID NO: 4299112 - DNA, 25 bp, Homo sapien
tctccttgcaaggtgccaactgcaa

SEQ ID NO: 4299113 - DNA, 25 bp, Homo sapien
cccatcccttgcataatccacacca

SEQ ID NO: 4299114 - DNA, 25 bp, Homo sapien
ccttgcataatccacaccaaacctc

SEQ ID NO: 4299115 - DNA, 25 bp, Homo sapien
ttgcataatccacaccaaacctcat

SEQ ID NO: 4299116 - DNA, 25 bp, Homo sapien
catcccttgcataatccacaccaaa

SEQ ID NO: 4299117 - DNA, 25 bp, Homo sapien
gcttcaggcctgatcacttccctaa

SEQ ID NO: 4299118 - DNA, 25 bp, Homo sapien
acttccctaaggtcaaatatattat

SEQ ID NO: 4299119 - DNA, 25 bp, Homo sapien
tatccttttgggtacgacttgtgaa

SEQ ID NO: 4299120 - DNA, 25 bp, Homo sapien
ttatccctttcctgtactcagacgg

SEQ ID NO: 4299121 - DNA, 25 bp, Homo sapien
tttgagcagaggatggtcatccagg

SEQ ID NO: 4299122 - DNA, 25 bp, Homo sapien
gagaacgatgccttacagatatgga

SEQ ID NO: 4299123 - DNA, 25 bp, Homo sapien
tgttcagtgagtgggaaacgattgg

SEQ ID NO: 4299124 - DNA, 25 bp, Homo sapien
ggaagtagggagaacgatgccttac

SEQ ID NO: 4299125 - DNA, 25 bp, Homo sapien
ttcttcggagatgctccatgatctc

SEQ ID NO: 4299126 - DNA, 25 bp, Homo sapien
tcttcggagatgctccatgatctcc

SEQ ID NO: 4299127 - DNA, 25 bp, Homo sapien
aaaaataggactgtgactttctgaa

SEQ ID NO: 4299128 - DNA, 25 bp, Homo sapien
tttctgaaacgctctcctttgttct

SEQ ID NO: 4299129 - DNA, 25 bp, Homo sapien
caggtttggcagtagatgcctgcag

SEQ ID NO: 4299130 - DNA, 25 bp, Homo sapien
cagctggcttattcccaactttctt

SEQ ID NO: 4299131 - DNA, 25 bp, Homo sapien
tacagctggcttattcccaactttc

SEQ ID NO: 4299132 - DNA, 25 bp, Homo sapien
tggggtacagctggcttattcccaa

SEQ ID NO: 4299133 - DNA, 25 bp, Homo sapien
ggtacagctggcttattcccaactt

SEQ ID NO: 4299134 - DNA, 25 bp, Homo sapien
gggagaacagcagtatatttctttg

SEQ ID NO: 4299135 - DNA, 25 bp, Homo sapien
ctatagggagaacagcagtatattt

SEQ ID NO: 4299136 - DNA, 25 bp, Homo sapien
tatagggagaacagcagtatatttc

SEQ ID NO: 4299137 - DNA, 25 bp, Homo sapien
tagggagaacagcagtatatttctt

SEQ ID NO: 4299138 - DNA, 25 bp, Homo sapien
cctgtgtttctctagtgtccaaata

SEQ ID NO: 4299139 - DNA, 25 bp, Homo sapien
ctgtgtttctctagtgtccaaatac

SEQ ID NO: 4299140 - DNA, 25 bp, Homo sapien
tattcaagcccatagcggtgaaatc

SEQ ID NO: 4299141 - DNA, 25 bp, Homo sapien
cttccttgcacagtggaccagtgta

SEQ ID NO: 4299142 - DNA, 25 bp, Homo sapien
caattgcctgctcgggaggacagta

SEQ ID NO: 4299143 - DNA, 25 bp, Homo sapien
gtatcctggcccaattgcctgctcg

SEQ ID NO: 4299144 - DNA, 25 bp, Homo sapien
ccccttttgatggtgtgcaaaattt

SEQ ID NO: 4299145 - DNA, 25 bp, Homo sapien
cccttttgatggtgtgcaaaatttt

SEQ ID NO: 4299146 - DNA, 25 bp, Homo sapien
gccccttttgatggtgtgcaaaatt

SEQ ID NO: 4299147 - DNA, 25 bp, Homo sapien
tcattctgtggactaacactgcaac

SEQ ID NO: 4299148 - DNA, 25 bp, Homo sapien
gactaacactgcaactggaaagctg

SEQ ID NO: 4299149 - DNA, 25 bp, Homo sapien
tgtggactaacactgcaactggaaa

SEQ ID NO: 4299150 - DNA, 25 bp, Homo sapien
ttctgtggactaacactgcaactgg

SEQ ID NO: 4299151 - DNA, 25 bp, Homo sapien
ccatccagttttgttgagtactgca

SEQ ID NO: 4299152 - DNA, 25 bp, Homo sapien
ttcgcctaataggacgtgcatcctg

SEQ ID NO: 4299153 - DNA, 25 bp, Homo sapien
tctctgggcctttggattccttgct

SEQ ID NO: 4299154 - DNA, 25 bp, Homo sapien
ccatagctacccaaatgttgcgcct

SEQ ID NO: 4299155 - DNA, 25 bp, Homo sapien
tccttagtagcatgaacctgagcat

SEQ ID NO: 4299156 - DNA, 25 bp, Homo sapien
tttagcatgcaacaagaactgcgtg

SEQ ID NO: 4299157 - DNA, 25 bp, Homo sapien
gaactgcgtgcctcagttactagca

SEQ ID NO: 4299158 - DNA, 25 bp, Homo sapien
gcttcagggactatccttttcgtca

SEQ ID NO: 4299159 - DNA, 25 bp, Homo sapien
gcaatacacagccttatgggtcaga

SEQ ID NO: 4299160 - DNA, 25 bp, Homo sapien
aatgctgaaaaaacccctcctcttg

SEQ ID NO: 4299161 - DNA, 25 bp, Homo sapien
ttttgtatagagtgaaccaggatgc

SEQ ID NO: 4299162 - DNA, 25 bp, Homo sapien
ccatcagtgggttactaggatacca

SEQ ID NO: 4299163 - DNA, 25 bp, Homo sapien
gacagcattggtaggcacagcagtt

SEQ ID NO: 4299164 - DNA, 25 bp, Homo sapien
tgaactagtagcatcctgacagcat

SEQ ID NO: 4299165 - DNA, 25 bp, Homo sapien
tgtgtgccctgttgcacccagcaca

SEQ ID NO: 4299166 - DNA, 25 bp, Homo sapien
acagcagttatggtgtgtgcacacg

SEQ ID NO: 4299167 - DNA, 25 bp, Homo sapien
aaggcaccacctttgtgcaggcccc

SEQ ID NO: 4299168 - DNA, 25 bp, Homo sapien
aggccccaggattcattgggtccat

SEQ ID NO: 4299169 - DNA, 25 bp, Homo sapien
ccgttgggtgggttgattcctgtct

SEQ ID NO: 4299170 - DNA, 25 bp, Homo sapien
gttgggtgggttgattcctgtcttc

SEQ ID NO: 4299171 - DNA, 25 bp, Homo sapien
tgggtgggttgattcctgtcttctt

SEQ ID NO: 4299172 - DNA, 25 bp, Homo sapien
tccgttgggtgggttgattcctgtc

SEQ ID NO: 4299173 - DNA, 25 bp, Homo sapien
tctggctgagttacatcgccctgat

SEQ ID NO: 4299174 - DNA, 25 bp, Homo sapien
gcttctctggctgagttacatcgcc

SEQ ID NO: 4299175 - DNA, 25 bp, Homo sapien
gctgagttacatcgccctgatctga

SEQ ID NO: 4299176 - DNA, 25 bp, Homo sapien
acatcgccctgatctgatgctcaag

SEQ ID NO: 4299177 - DNA, 25 bp, Homo sapien
tgcagatttgagtggcttgctcaat

SEQ ID NO: 4299178 - DNA, 25 bp, Homo sapien
gatttgagtggcttgctcaattact

SEQ ID NO: 4299179 - DNA, 25 bp, Homo sapien
aagtgcagatttgagtggcttgctc

SEQ ID NO: 4299180 - DNA, 25 bp, Homo sapien
tgttgtaagtgcagatttgagtggc

SEQ ID NO: 4299181 - DNA, 25 bp, Homo sapien
ggagcagcagcacaatgtttccttg

SEQ ID NO: 4299182 - DNA, 25 bp, Homo sapien
gaagttcgtgcttggagcttctgtt

SEQ ID NO: 4299183 - DNA, 25 bp, Homo sapien
agttgacctgttgaagttcgtgctt

SEQ ID NO: 4299184 - DNA, 25 bp, Homo sapien
gagcagcagcacaatgtttccttgc

SEQ ID NO: 4299185 - DNA, 25 bp, Homo sapien
aacttgtgtctgatttttagcaggt

SEQ ID NO: 4299186 - DNA, 25 bp, Homo sapien
tttccctggtatctctgggctcctc

SEQ ID NO: 4299187 - DNA, 25 bp, Homo sapien
tgcatggccccactctaaacttgtg

SEQ ID NO: 4299188 - DNA, 25 bp, Homo sapien
gcaggtggtcctcggactttatttc

SEQ ID NO: 4299189 - DNA, 25 bp, Homo sapien
ggagaaggcccagtttgactctgta

SEQ ID NO: 4299190 - DNA, 25 bp, Homo sapien
catctacacctctggtcggagaagg

SEQ ID NO: 4299191 - DNA, 25 bp, Homo sapien
gaaggagtccctgcagtataacggc

SEQ ID NO: 4299192 - DNA, 25 bp, Homo sapien
caggtgctcagagtaaacatctcta

SEQ ID NO: 4299193 - DNA, 25 bp, Homo sapien
ctcagcgggcccacagatggatgtc

SEQ ID NO: 4299194 - DNA, 25 bp, Homo sapien
tgagatagagggcttcaacctgctc

SEQ ID NO: 4299195 - DNA, 25 bp, Homo sapien
ggtctgcctgttcatgatctctctg

SEQ ID NO: 4299196 - DNA, 25 bp, Homo sapien
ctaaggatctatccctgcactgagg

SEQ ID NO: 4299197 - DNA, 25 bp, Homo sapien
gcaggtcttctatttatgatgctca

SEQ ID NO: 4299198 - DNA, 25 bp, Homo sapien
caggtcttctatttatgatgctcat

SEQ ID NO: 4299199 - DNA, 25 bp, Homo sapien
agagcaggtcttctatttatgatgc

SEQ ID NO: 4299200 - DNA, 25 bp, Homo sapien
aagagcaggtcttctatttatgatg

SEQ ID NO: 4299201 - DNA, 25 bp, Homo sapien
gggtattgcgtctggaagcgccact

SEQ ID NO: 4299202 - DNA, 25 bp, Homo sapien
gtctggaagcgccacttgtatcaaa

SEQ ID NO: 4299203 - DNA, 25 bp, Homo sapien
ggaagcgccacttgtatcaaaagtt

SEQ ID NO: 4299204 - DNA, 25 bp, Homo sapien
ttgcgtctggaagcgccacttgtat

SEQ ID NO: 4299205 - DNA, 25 bp, Homo sapien
tagcatctctgaatttagctggacc

SEQ ID NO: 4299206 - DNA, 25 bp, Homo sapien
gctggcatctgtgaatgctagcatc

SEQ ID NO: 4299207 - DNA, 25 bp, Homo sapien
cgtgagagaacaggacgtattgctt

SEQ ID NO: 4299208 - DNA, 25 bp, Homo sapien
gcttctctaataacccgtgccgagg

SEQ ID NO: 4299209 - DNA, 25 bp, Homo sapien
ggtaatttgagaaacagccccttca

SEQ ID NO: 4299210 - DNA, 25 bp, Homo sapien
aacattttgacagctcctgccagtc

SEQ ID NO: 4299211 - DNA, 25 bp, Homo sapien
cctgccagtctagggtctgcttaga

SEQ ID NO: 4299212 - DNA, 25 bp, Homo sapien
cattccagggaggagctttccaaca

SEQ ID NO: 4299213 - DNA, 25 bp, Homo sapien
ccccagtggagcaaacaccatttgc

SEQ ID NO: 4299214 - DNA, 25 bp, Homo sapien
tagcattctgtgttagttccttgaa

SEQ ID NO: 4299215 - DNA, 25 bp, Homo sapien
tcccaccccagtctaagactgtggt

SEQ ID NO: 4299216 - DNA, 25 bp, Homo sapien
gccacctgggaagcaaatattgcat

SEQ ID NO: 4299217 - DNA, 25 bp, Homo sapien
gctctctgtcacatggtatagaagg

SEQ ID NO: 4299218 - DNA, 25 bp, Homo sapien
catggtatagaaggaagaccctgca

SEQ ID NO: 4299219 - DNA, 25 bp, Homo sapien
ggcttggtccaagccgagacagagc

SEQ ID NO: 4299220 - DNA, 25 bp, Homo sapien
gaagtttagatctgtagccagcagg

SEQ ID NO: 4299221 - DNA, 25 bp, Homo sapien
tccctatagatgatctgaactgcag

SEQ ID NO: 4299222 - DNA, 25 bp, Homo sapien
gcccactcaagggtcccaaggcaag

SEQ ID NO: 4299223 - DNA, 25 bp, Homo sapien
gatgatctgaactgcagcccactca

SEQ ID NO: 4299224 - DNA, 25 bp, Homo sapien
ggcaagaaggggactgtccttcaga

SEQ ID NO: 4299225 - DNA, 25 bp, Homo sapien
tgtgtagccaaaaacagcagaccca

SEQ ID NO: 4299226 - DNA, 25 bp, Homo sapien
caccaggctatatccaatggaggag

SEQ ID NO: 4299227 - DNA, 25 bp, Homo sapien
cctggaagggagcattcaatgacct

SEQ ID NO: 4299228 - DNA, 25 bp, Homo sapien
tctgctgggatctgatgactgggtc

SEQ ID NO: 4299229 - DNA, 25 bp, Homo sapien
ataaagcaaagtcttcgctttcctc

SEQ ID NO: 4299230 - DNA, 25 bp, Homo sapien
cgctttcctctttctaaaacaatgt

SEQ ID NO: 4299231 - DNA, 25 bp, Homo sapien
tcccagcagtctgcaagcttcagga

SEQ ID NO: 4299232 - DNA, 25 bp, Homo sapien
aatgttctgtgttgctggttcccag

SEQ ID NO: 4299233 - DNA, 25 bp, Homo sapien
gacccttgtgatcctatgttttcaa

SEQ ID NO: 4299234 - DNA, 25 bp, Homo sapien
tccaatagtaaccatctgacccttg

SEQ ID NO: 4299235 - DNA, 25 bp, Homo sapien
ttcataggagccagattccaatagt

SEQ ID NO: 4299236 - DNA, 25 bp, Homo sapien
accttatcctgtgccccattgggtg

SEQ ID NO: 4299237 - DNA, 25 bp, Homo sapien
taaagaccatcagggctaggaagaa

SEQ ID NO: 4299238 - DNA, 25 bp, Homo sapien
atgctgagagatttttgtcatcacc

SEQ ID NO: 4299239 - DNA, 25 bp, Homo sapien
tgccctaaaagagctcctgaaggaa

SEQ ID NO: 4299240 - DNA, 25 bp, Homo sapien
gagagatttttgtcatcaccaggcc

SEQ ID NO: 4299241 - DNA, 25 bp, Homo sapien
ggtttctgtatcttggacagtgtgt

SEQ ID NO: 4299242 - DNA, 25 bp, Homo sapien
ttggtttctgtatcttggacagtgt

SEQ ID NO: 4299243 - DNA, 25 bp, Homo sapien
tctgtatcttggacagtgtgtttgt

SEQ ID NO: 4299244 - DNA, 25 bp, Homo sapien
tttgtatggggtgagtggtgaccaa

SEQ ID NO: 4299245 - DNA, 25 bp, Homo sapien
tgagagaaaaggctcgaggtgctcc

SEQ ID NO: 4299246 - DNA, 25 bp, Homo sapien
tccattctggctggaggagccaccc

SEQ ID NO: 4299247 - DNA, 25 bp, Homo sapien
tggcaggttgttccccgctgagaga

SEQ ID NO: 4299248 - DNA, 25 bp, Homo sapien
tccatcagcgtcagaagaaatccaa

SEQ ID NO: 4299249 - DNA, 25 bp, Homo sapien
ctgagctgaagctgtggactgggta

SEQ ID NO: 4299250 - DNA, 25 bp, Homo sapien
ctttcaccatgaggaggaagttgag

SEQ ID NO: 4299251 - DNA, 25 bp, Homo sapien
caccatgaggaggaagttgaggcag

SEQ ID NO: 4299252 - DNA, 25 bp, Homo sapien
ttcaccatgaggaggaagttgaggc

SEQ ID NO: 4299253 - DNA, 25 bp, Homo sapien
gaagttgaggcaggacacatgccat

SEQ ID NO: 4299254 - DNA, 25 bp, Homo sapien
ttggcacaaaagtgctgcctttagc

SEQ ID NO: 4299255 - DNA, 25 bp, Homo sapien
taaagtagagcacaaaagccttttg

SEQ ID NO: 4299256 - DNA, 25 bp, Homo sapien
cttggcacaaaagtgctgcctttag

SEQ ID NO: 4299257 - DNA, 25 bp, Homo sapien
cagagcttgcataaagtagagcaca

SEQ ID NO: 4299258 - DNA, 25 bp, Homo sapien
gctgggtcggtgctcgtcctggtgt

SEQ ID NO: 4299259 - DNA, 25 bp, Homo sapien
taatgtggacctggagtcccgtcct

SEQ ID NO: 4299260 - DNA, 25 bp, Homo sapien
ttagagctggcacaagatctcagtg

SEQ ID NO: 4299261 - DNA, 25 bp, Homo sapien
cctggtgtctggtgtaatgtggacc

SEQ ID NO: 4299262 - DNA, 25 bp, Homo sapien
tcttggtgctgaacttgacaggaga

SEQ ID NO: 4299263 - DNA, 25 bp, Homo sapien
ggagttacctcattgctgcctagcc

SEQ ID NO: 4299264 - DNA, 25 bp, Homo sapien
gttccagctcatcggtgattgtttg

SEQ ID NO: 4299265 - DNA, 25 bp, Homo sapien
tcatgttccagctcatcggtgattg

SEQ ID NO: 4299266 - DNA, 25 bp, Homo sapien
cagttaagttgtgagaaaagccctc

SEQ ID NO: 4299267 - DNA, 25 bp, Homo sapien
aaggttgcttgaaagacgcacgcac

SEQ ID NO: 4299268 - DNA, 25 bp, Homo sapien
ttgcagttaagttgtgagaaaagcc

SEQ ID NO: 4299269 - DNA, 25 bp, Homo sapien
aaaagccctcaagtggccgagaagg

SEQ ID NO: 4299270 - DNA, 25 bp, Homo sapien
aggagtgagcaatgagggttaaaac

SEQ ID NO: 4299271 - DNA, 25 bp, Homo sapien
gagtgagcaatgagggttaaaacca

SEQ ID NO: 4299272 - DNA, 25 bp, Homo sapien
agtgagcaatgagggttaaaaccat

SEQ ID NO: 4299273 - DNA, 25 bp, Homo sapien
cacaggaaggagtgagcaatgaggg

SEQ ID NO: 4299274 - DNA, 25 bp, Homo sapien
tacgtcattcgttggcagcctttga

SEQ ID NO: 4299275 - DNA, 25 bp, Homo sapien
tctgggaactagacatatgtttttg

SEQ ID NO: 4299276 - DNA, 25 bp, Homo sapien
gcagttaacctgtctcattacgtca

SEQ ID NO: 4299277 - DNA, 25 bp, Homo sapien
cagaagctggggttgtaatagtaaa

SEQ ID NO: 4299278 - DNA, 25 bp, Homo sapien
tttaatatcatatccaaaacgaagt

SEQ ID NO: 4299279 - DNA, 25 bp, Homo sapien
ttaatatcatatccaaaacgaagtc

SEQ ID NO: 4299280 - DNA, 25 bp, Homo sapien
tgttcccaaacctatgactgtggcc

SEQ ID NO: 4299281 - DNA, 25 bp, Homo sapien
tggcctggccacgtaatgaagaccc

SEQ ID NO: 4299282 - DNA, 25 bp, Homo sapien
ttttgttcccaaacctatgactgtg

SEQ ID NO: 4299283 - DNA, 25 bp, Homo sapien
gacccggttggttctagcttcacaa

SEQ ID NO: 4299284 - DNA, 25 bp, Homo sapien
gataccgcttggctttgaaagaaga

SEQ ID NO: 4299285 - DNA, 25 bp, Homo sapien
gaaagtcagcataacccatctaggc

SEQ ID NO: 4299286 - DNA, 25 bp, Homo sapien
tctcagacgcaaagatgtgcagact

SEQ ID NO: 4299287 - DNA, 25 bp, Homo sapien
ttgtctctcgcttcagaaaaatggc

SEQ ID NO: 4299288 - DNA, 25 bp, Homo sapien
cactgctgattttgtgttcatctct

SEQ ID NO: 4299289 - DNA, 25 bp, Homo sapien
cattgtccgtttatttggcacatag

SEQ ID NO: 4299290 - DNA, 25 bp, Homo sapien
gcacatagttttccccatcagcatg

SEQ ID NO: 4299291 - DNA, 25 bp, Homo sapien
aatccaggtgaaccctgtggacctg

SEQ ID NO: 4299292 - DNA, 25 bp, Homo sapien
cagttccgacggctcaatgaccaag

SEQ ID NO: 4299293 - DNA, 25 bp, Homo sapien
ggaggcagttccgacggctcaatga

SEQ ID NO: 4299294 - DNA, 25 bp, Homo sapien
aagatggaggcagttccgacggctc

SEQ ID NO: 4299295 - DNA, 25 bp, Homo sapien
tccgacggctcaatgaccaagttca

SEQ ID NO: 4299296 - DNA, 25 bp, Homo sapien
tacatctccggaatgagaatcttca

SEQ ID NO: 4299297 - DNA, 25 bp, Homo sapien
aaacactgtagtacaatgacggcat

SEQ ID NO: 4299298 - DNA, 25 bp, Homo sapien
gaagaattgtagctgtcaaaatgca

SEQ ID NO: 4299299 - DNA, 25 bp, Homo sapien
ggatgctggcaggttattcacgttg

SEQ ID NO: 4299300 - DNA, 25 bp, Homo sapien
catcatacttatcacacagcagctt

SEQ ID NO: 4299301 - DNA, 25 bp, Homo sapien
attaaaaccatcatacttatcacac

SEQ ID NO: 4299302 - DNA, 25 bp, Homo sapien
accatcatacttatcacacagcagc

SEQ ID NO: 4299303 - DNA, 25 bp, Homo sapien
taaaaccatcatacttatcacacag

SEQ ID NO: 4299304 - DNA, 25 bp, Homo sapien
gagacctgctcgagtcgctggagtt

SEQ ID NO: 4299305 - DNA, 25 bp, Homo sapien
gagtcgctggagtttaaaggccatc

SEQ ID NO: 4299306 - DNA, 25 bp, Homo sapien
ttaagggctcttttggttgccagga

SEQ ID NO: 4299307 - DNA, 25 bp, Homo sapien
taagggctcttttggttgccaggaa

SEQ ID NO: 4299308 - DNA, 25 bp, Homo sapien
catcctgcttggatgcagtttcaat

SEQ ID NO: 4299309 - DNA, 25 bp, Homo sapien
taattttgcaggaccctctgactcc

SEQ ID NO: 4299310 - DNA, 25 bp, Homo sapien
taatctcgccccagcagtaattttg

SEQ ID NO: 4299311 - DNA, 25 bp, Homo sapien
actccagtttgaccagtcctaatct

SEQ ID NO: 4299312 - DNA, 25 bp, Homo sapien
ccactgcgtttattgtagcaccggg

SEQ ID NO: 4299313 - DNA, 25 bp, Homo sapien
gggagcttgacagtcattccaaact

SEQ ID NO: 4299314 - DNA, 25 bp, Homo sapien
tagtactagtattgcctgtggccat

SEQ ID NO: 4299315 - DNA, 25 bp, Homo sapien
cattccaaacttttgctgcaatagt

SEQ ID NO: 4299316 - DNA, 25 bp, Homo sapien
ggcaggcacacatcatagattcaga

SEQ ID NO: 4299317 - DNA, 25 bp, Homo sapien
tgtgggagcacagatgacaggatcc

SEQ ID NO: 4299318 - DNA, 25 bp, Homo sapien
tcagacagaccttgaatgtgtgatc

SEQ ID NO: 4299319 - DNA, 25 bp, Homo sapien
gacaggtggtgctaaaaccatctgg

SEQ ID NO: 4299320 - DNA, 25 bp, Homo sapien
tctcctttctacaggatagagacag

SEQ ID NO: 4299321 - DNA, 25 bp, Homo sapien
tcaccagaatgtagttggcactcag

SEQ ID NO: 4299322 - DNA, 25 bp, Homo sapien
gatgaaatctatcctgtcaccagaa

SEQ ID NO: 4299323 - DNA, 25 bp, Homo sapien
gaatgagtgaactctgagacttctc

SEQ ID NO: 4299324 - DNA, 25 bp, Homo sapien
gctgggatcacttctgatgcctaat

SEQ ID NO: 4299325 - DNA, 25 bp, Homo sapien
gcaaagtaggaacagtgagttccaa

SEQ ID NO: 4299326 - DNA, 25 bp, Homo sapien
gacagtctgcgtggcctttttctct

SEQ ID NO: 4299327 - DNA, 25 bp, Homo sapien
atgcctaattcttgggaaacagcaa

SEQ ID NO: 4299328 - DNA, 25 bp, Homo sapien
atttccgtcatgctcactgtagagg

SEQ ID NO: 4299329 - DNA, 25 bp, Homo sapien
gaggccattctgaaagaaggttctc

SEQ ID NO: 4299330 - DNA, 25 bp, Homo sapien
tctgaaagaaggttctctccatcct

SEQ ID NO: 4299331 - DNA, 25 bp, Homo sapien
tttccgtcatgctcactgtagaggg

SEQ ID NO: 4299332 - DNA, 25 bp, Homo sapien
acatccttcaggtaatagcagaacc

SEQ ID NO: 4299333 - DNA, 25 bp, Homo sapien
gcaggtactctgaacatccttcagg

SEQ ID NO: 4299334 - DNA, 25 bp, Homo sapien
ttctggaattccaagcaggtactct

SEQ ID NO: 4299335 - DNA, 25 bp, Homo sapien
atcttgacatgacttttgtgcctgc

SEQ ID NO: 4299336 - DNA, 25 bp, Homo sapien
gcaatgcagtgcttaggcgtgtgat

SEQ ID NO: 4299337 - DNA, 25 bp, Homo sapien
cgtgtgattaactgagctgaggatc

SEQ ID NO: 4299338 - DNA, 25 bp, Homo sapien
gaaatactgtaatggctcctgtgcg

SEQ ID NO: 4299339 - DNA, 25 bp, Homo sapien
gattggaccccgctttatgaagcac

SEQ ID NO: 4299340 - DNA, 25 bp, Homo sapien
gccagtacagggtaggtcctcataa

SEQ ID NO: 4299341 - DNA, 25 bp, Homo sapien
acagggtaggtcctcataactttat

SEQ ID NO: 4299342 - DNA, 25 bp, Homo sapien
ggcagccagtacagggtaggtcctc

SEQ ID NO: 4299343 - DNA, 25 bp, Homo sapien
ttattgaatgcaagatgtagaggca

SEQ ID NO: 4299344 - DNA, 25 bp, Homo sapien
tggtggttctataggtctgcttctg

SEQ ID NO: 4299345 - DNA, 25 bp, Homo sapien
ggtggttctataggtctgcttctgc

SEQ ID NO: 4299346 - DNA, 25 bp, Homo sapien
tcaggagacccaatatgtctttaac

SEQ ID NO: 4299347 - DNA, 25 bp, Homo sapien
tatacaccagtgcatttgcatatcc

SEQ ID NO: 4299348 - DNA, 25 bp, Homo sapien
tctgaggactaggattggaagatgc

SEQ ID NO: 4299349 - DNA, 25 bp, Homo sapien
caaaagttagacttctgtgtattcg

SEQ ID NO: 4299350 - DNA, 25 bp, Homo sapien
tttctgtacaactaggacttctgta

SEQ ID NO: 4299351 - DNA, 25 bp, Homo sapien
tgtacaactaggacttctgtagctg

SEQ ID NO: 4299352 - DNA, 25 bp, Homo sapien
gacttctgtagctgatgtgctggtt

SEQ ID NO: 4299353 - DNA, 25 bp, Homo sapien
tgtgctggtttttccgtaatctccc

SEQ ID NO: 4299354 - DNA, 25 bp, Homo sapien
caatggcctttgtgtagatctccct

SEQ ID NO: 4299355 - DNA, 25 bp, Homo sapien
gaaagtgttcacacctcctacaggc

SEQ ID NO: 4299356 - DNA, 25 bp, Homo sapien
tgtgatctccagaaaccctgatcca

SEQ ID NO: 4299357 - DNA, 25 bp, Homo sapien
cagcaggccatagctcacattggca

SEQ ID NO: 4299358 - DNA, 25 bp, Homo sapien
tactccctgagcatcccgtgaagat

SEQ ID NO: 4299359 - DNA, 25 bp, Homo sapien
tcccacgtgcataatgtaaatctaa

SEQ ID NO: 4299360 - DNA, 25 bp, Homo sapien
tcttttctgcatcccacgtgcataa

SEQ ID NO: 4299361 - DNA, 25 bp, Homo sapien
atactccctgagcatcccgtgaaga

SEQ ID NO: 4299362 - DNA, 25 bp, Homo sapien
ctcgtctctgttatgtcttccttca

SEQ ID NO: 4299363 - DNA, 25 bp, Homo sapien
cttcattgtgcatggaaattagaaa

SEQ ID NO: 4299364 - DNA, 25 bp, Homo sapien
tttcgctctcgtctctgttatgtct

SEQ ID NO: 4299365 - DNA, 25 bp, Homo sapien
ttgcatttttcgctctcgtctctgt

SEQ ID NO: 4299366 - DNA, 25 bp, Homo sapien
tgcaagatcagcctgaatgtggcct

SEQ ID NO: 4299367 - DNA, 25 bp, Homo sapien
atttttctgcatgggagctccacct

SEQ ID NO: 4299368 - DNA, 25 bp, Homo sapien
tgccttagctgccaagcgggctgct

SEQ ID NO: 4299369 - DNA, 25 bp, Homo sapien
tccaatccagtcctcgtaggtggcg

SEQ ID NO: 4299370 - DNA, 25 bp, Homo sapien
gggcagtcttatctgcatgaactct

SEQ ID NO: 4299371 - DNA, 25 bp, Homo sapien
tgcatgaactctccactctgacttc

SEQ ID NO: 4299372 - DNA, 25 bp, Homo sapien
gacaggactctgcaccaacgagaaa

SEQ ID NO: 4299373 - DNA, 25 bp, Homo sapien
aggacaggactctgcaccaacgaga

SEQ ID NO: 4299374 - DNA, 25 bp, Homo sapien
ggtccagtctagttcgtcgctgggt

SEQ ID NO: 4299375 - DNA, 25 bp, Homo sapien
tccctgctttgtatttgtctgtctg

SEQ ID NO: 4299376 - DNA, 25 bp, Homo sapien
tccctctctgtcatctggacccctc

SEQ ID NO: 4299377 - DNA, 25 bp, Homo sapien
gggctctgaactccctgctttgtat

SEQ ID NO: 4299378 - DNA, 25 bp, Homo sapien
gtgtctctctgtctagctcctttgc

SEQ ID NO: 4299379 - DNA, 25 bp, Homo sapien
gtcagaaggtgacacaacccagaca

SEQ ID NO: 4299380 - DNA, 25 bp, Homo sapien
tagtgtcagaaggtgacacaaccca

SEQ ID NO: 4299381 - DNA, 25 bp, Homo sapien
aaggtcacattcataatcgtgatag

SEQ ID NO: 4299382 - DNA, 25 bp, Homo sapien
cataatcgtgatagttagtgtcaga

SEQ ID NO: 4299383 - DNA, 25 bp, Homo sapien
aaattgagtgtaagccagagacagc

SEQ ID NO: 4299384 - DNA, 25 bp, Homo sapien
agtcaaaagtccaaattgagtgtaa

SEQ ID NO: 4299385 - DNA, 25 bp, Homo sapien
aagtccaaattgagtgtaagccaga

SEQ ID NO: 4299386 - DNA, 25 bp, Homo sapien
tccaaattgagtgtaagccagagac

SEQ ID NO: 4299387 - DNA, 25 bp, Homo sapien
aaaatagtgcttattgcacatttag

SEQ ID NO: 4299388 - DNA, 25 bp, Homo sapien
ggcttgctaaaagcactgacttcaa

SEQ ID NO: 4299389 - DNA, 25 bp, Homo sapien
actgacttcaaaatagtgcttattg

SEQ ID NO: 4299390 - DNA, 25 bp, Homo sapien
gaaggcttgctaaaagcactgactt

SEQ ID NO: 4299391 - DNA, 25 bp, Homo sapien
gcacaattacgtttagttacagaac

SEQ ID NO: 4299392 - DNA, 25 bp, Homo sapien
tttgtgttgctgtgtgtgctgtcag

SEQ ID NO: 4299393 - DNA, 25 bp, Homo sapien
tccttactggttgcacaattacgtt

SEQ ID NO: 4299394 - DNA, 25 bp, Homo sapien
gaacctttgaggagtctcctatcaa

SEQ ID NO: 4299395 - DNA, 25 bp, Homo sapien
gactgcacctcggagataacttttg

SEQ ID NO: 4299396 - DNA, 25 bp, Homo sapien
cagaatgttcgaaggagagggagag

SEQ ID NO: 4299397 - DNA, 25 bp, Homo sapien
gagggagagattgcacatacacaag

SEQ ID NO: 4299398 - DNA, 25 bp, Homo sapien
caggcagcattgcaaggagtgtggg

SEQ ID NO: 4299399 - DNA, 25 bp, Homo sapien
tctagaaaatatacgcaggcattgt

SEQ ID NO: 4299400 - DNA, 25 bp, Homo sapien
gccagggtgatgtttacaatctcat

SEQ ID NO: 4299401 - DNA, 25 bp, Homo sapien
catctgatgaaaatgctgccagggt

SEQ ID NO: 4299402 - DNA, 25 bp, Homo sapien
ccaggctcccttgagatcgtgcagg

SEQ ID NO: 4299403 - DNA, 25 bp, Homo sapien
gatgcacaaaagctctagcactctt

SEQ ID NO: 4299404 - DNA, 25 bp, Homo sapien
tagaggctcagagatagagagctac

SEQ ID NO: 4299405 - DNA, 25 bp, Homo sapien
gttagatagtagtcctcccactgag

SEQ ID NO: 4299406 - DNA, 25 bp, Homo sapien
tggccagtaaagagcaccaataaca

SEQ ID NO: 4299407 - DNA, 25 bp, Homo sapien
ccttgtgtatctgacgttgaccatc

SEQ ID NO: 4299408 - DNA, 25 bp, Homo sapien
actgctcaagccagccttgtgtatc

SEQ ID NO: 4299409 - DNA, 25 bp, Homo sapien
tgaattttccccagtgaacactgct

SEQ ID NO: 4299410 - DNA, 25 bp, Homo sapien
gaccatcttgcttgcatgactgcca

SEQ ID NO: 4299411 - DNA, 25 bp, Homo sapien
gcagctcagaggtgtaatttctcca

SEQ ID NO: 4299412 - DNA, 25 bp, Homo sapien
ccagttgggccaacttctgttcttg

SEQ ID NO: 4299413 - DNA, 25 bp, Homo sapien
tgctccacggatgcgtcccagttgg

SEQ ID NO: 4299414 - DNA, 25 bp, Homo sapien
tgtgcatatttgctgctccacggat

SEQ ID NO: 4299415 - DNA, 25 bp, Homo sapien
acaggatgccgtctgacaggtttct

SEQ ID NO: 4299416 - DNA, 25 bp, Homo sapien
tcacgttggatcacacacacaagcg

SEQ ID NO: 4299417 - DNA, 25 bp, Homo sapien
cacacaagcgtgagtgagtggccag

SEQ ID NO: 4299418 - DNA, 25 bp, Homo sapien
tccttgggctgctgaaagaacccat

SEQ ID NO: 4299419 - DNA, 25 bp, Homo sapien
cagaacacaggcaaccttgatcgac

SEQ ID NO: 4299420 - DNA, 25 bp, Homo sapien
ggcaaccttgatcgaccctgaactt

SEQ ID NO: 4299421 - DNA, 25 bp, Homo sapien
tcctttcggaagctatctgtggttc

SEQ ID NO: 4299422 - DNA, 25 bp, Homo sapien
ccctgaacttcagagccatcagcaa

SEQ ID NO: 4299423 - DNA, 25 bp, Homo sapien
caacaatggggagagccaagaatcc

SEQ ID NO: 4299424 - DNA, 25 bp, Homo sapien
acaatggggagagccaagaatccat

SEQ ID NO: 4299425 - DNA, 25 bp, Homo sapien
aacaatggggagagccaagaatcca

SEQ ID NO: 4299426 - DNA, 25 bp, Homo sapien
agacaaactcttctcaccagggagc

SEQ ID NO: 4299427 - DNA, 25 bp, Homo sapien
aagacaaactcttctcaccagggag

SEQ ID NO: 4299428 - DNA, 25 bp, Homo sapien
actcttctcaccagggagcttcata

SEQ ID NO: 4299429 - DNA, 25 bp, Homo sapien
tcttctcaccagggagcttcataga

SEQ ID NO: 4299430 - DNA, 25 bp, Homo sapien
gtagacaccaagtatctttggtaaa

SEQ ID NO: 4299431 - DNA, 25 bp, Homo sapien
tattatagtagacaccaagtatctt

SEQ ID NO: 4299432 - DNA, 25 bp, Homo sapien
aggtattatagtagacaccaagtat

SEQ ID NO: 4299433 - DNA, 25 bp, Homo sapien
tatagtagacaccaagtatctttgg

SEQ ID NO: 4299434 - DNA, 25 bp, Homo sapien
tgacagtcatcgtctctttttcttt

SEQ ID NO: 4299435 - DNA, 25 bp, Homo sapien
ttgacagtcatcgtctctttttctt

SEQ ID NO: 4299436 - DNA, 25 bp, Homo sapien
cttgacagtcatcgtctctttttct

SEQ ID NO: 4299437 - DNA, 25 bp, Homo sapien
gctgggtatgtagaccatccctgag

SEQ ID NO: 4299438 - DNA, 25 bp, Homo sapien
ctgctgctgggtatgtagaccatcc

SEQ ID NO: 4299439 - DNA, 25 bp, Homo sapien
tgctgctgctgggtatgtagaccat

SEQ ID NO: 4299440 - DNA, 25 bp, Homo sapien
gctgctgggtatgtagaccatccct

SEQ ID NO: 4299441 - DNA, 25 bp, Homo sapien
catgcccaactggactgattagaaa

SEQ ID NO: 4299442 - DNA, 25 bp, Homo sapien
tctgccttttcatgcccaactggac

SEQ ID NO: 4299443 - DNA, 25 bp, Homo sapien
tccaatgggcttttgagggaaggac

SEQ ID NO: 4299444 - DNA, 25 bp, Homo sapien
ttgcaaacctggaatgcgaacgtgg

SEQ ID NO: 4299445 - DNA, 25 bp, Homo sapien
tgtccagctgcacactctgcagctt

SEQ ID NO: 4299446 - DNA, 25 bp, Homo sapien
agggcctgtccagctgcacactctg

SEQ ID NO: 4299447 - DNA, 25 bp, Homo sapien
gagcacacagggcctgtccagctgc

SEQ ID NO: 4299448 - DNA, 25 bp, Homo sapien
agcacacagggcctgtccagctgca

SEQ ID NO: 4299449 - DNA, 25 bp, Homo sapien
caggccccgacaggcccttctggtg

SEQ ID NO: 4299450 - DNA, 25 bp, Homo sapien
ggccccgacaggcccttctggtggc

SEQ ID NO: 4299451 - DNA, 25 bp, Homo sapien
aggccccgacaggcccttctggtgg

SEQ ID NO: 4299452 - DNA, 25 bp, Homo sapien
gcaggccccgacaggcccttctggt

SEQ ID NO: 4299453 - DNA, 25 bp, Homo sapien
cattgctcttcctgagtgctctaga

SEQ ID NO: 4299454 - DNA, 25 bp, Homo sapien
ttgctcttcctgagtgctctagaaa

SEQ ID NO: 4299455 - DNA, 25 bp, Homo sapien
tcttcctgagtgctctagaaaccat

SEQ ID NO: 4299456 - DNA, 25 bp, Homo sapien
gctcttcctgagtgctctagaaacc

SEQ ID NO: 4299457 - DNA, 25 bp, Homo sapien
atcttgttccctggctaccacaatg

SEQ ID NO: 4299458 - DNA, 25 bp, Homo sapien
tatcaaaggttttgccctcgtccat

SEQ ID NO: 4299459 - DNA, 25 bp, Homo sapien
atttcccgggtaggtctctgacaat

SEQ ID NO: 4299460 - DNA, 25 bp, Homo sapien
ctgaactgacagtatcaaaggtttt

SEQ ID NO: 4299461 - DNA, 25 bp, Homo sapien
cctccagattgggttaactgagact

SEQ ID NO: 4299462 - DNA, 25 bp, Homo sapien
tccagattgggttaactgagactgg

SEQ ID NO: 4299463 - DNA, 25 bp, Homo sapien
ccagattgggttaactgagactggg

SEQ ID NO: 4299464 - DNA, 25 bp, Homo sapien
ctccagattgggttaactgagactg

SEQ ID NO: 4299465 - DNA, 25 bp, Homo sapien
gacaagctctgtcatatatgtgccc

SEQ ID NO: 4299466 - DNA, 25 bp, Homo sapien
tgaccaactaaaaccatgacaagct

SEQ ID NO: 4299467 - DNA, 25 bp, Homo sapien
taatccaagagggaattttcacaag

SEQ ID NO: 4299468 - DNA, 25 bp, Homo sapien
atatgtgcccttataatctcaggcc

SEQ ID NO: 4299469 - DNA, 25 bp, Homo sapien
cagtcagatgcttgtgattgcaaca

SEQ ID NO: 4299470 - DNA, 25 bp, Homo sapien
taacaggactactaacagtcagatg

SEQ ID NO: 4299471 - DNA, 25 bp, Homo sapien
cattgacagtagaattgagcctatg

SEQ ID NO: 4299472 - DNA, 25 bp, Homo sapien
ccttcagtgtgggaatattatgaca

SEQ ID NO: 4299473 - DNA, 25 bp, Homo sapien
aagtgatggtccattgagttgaagc

SEQ ID NO: 4299474 - DNA, 25 bp, Homo sapien
taagtgatggtccattgagttgaag

SEQ ID NO: 4299475 - DNA, 25 bp, Homo sapien
taaatgctcattgaactgacacaga

SEQ ID NO: 4299476 - DNA, 25 bp, Homo sapien
ttagtggcctaaactgcttcacctg

SEQ ID NO: 4299477 - DNA, 25 bp, Homo sapien
tctcatctgagaaagtaggtatgtt

SEQ ID NO: 4299478 - DNA, 25 bp, Homo sapien
tgacacagattgagacttagtggcc

SEQ ID NO: 4299479 - DNA, 25 bp, Homo sapien
catcagcacaaaggagcaacttgcc

SEQ ID NO: 4299480 - DNA, 25 bp, Homo sapien
atatttggatatcccttgcttttct

SEQ ID NO: 4299481 - DNA, 25 bp, Homo sapien
aggagcaacttgccaactcaataga

SEQ ID NO: 4299482 - DNA, 25 bp, Homo sapien
agaatatttggatatcccttgcttt

SEQ ID NO: 4299483 - DNA, 25 bp, Homo sapien
tcccatcactgcattacatgcttgt

SEQ ID NO: 4299484 - DNA, 25 bp, Homo sapien
tgttcctgaagctgattttgccatt

SEQ ID NO: 4299485 - DNA, 25 bp, Homo sapien
ccattttaagctcttgagctttgct

SEQ ID NO: 4299486 - DNA, 25 bp, Homo sapien
agctcagtctgaaaggtcccatcac

SEQ ID NO: 4299487 - DNA, 25 bp, Homo sapien
tgattgaaacataaccccaatggct

SEQ ID NO: 4299488 - DNA, 25 bp, Homo sapien
cattttatttccatccaggccaagg

SEQ ID NO: 4299489 - DNA, 25 bp, Homo sapien
gcagagttctagagaacgagaccca

SEQ ID NO: 4299490 - DNA, 25 bp, Homo sapien
ccattgtttagaagttagcctgtca

SEQ ID NO: 4299491 - DNA, 25 bp, Homo sapien
atctcttctagtaagtgggtaaagg

SEQ ID NO: 4299492 - DNA, 25 bp, Homo sapien
agaagctgctggcggcaatctcttc

SEQ ID NO: 4299493 - DNA, 25 bp, Homo sapien
tgctggcggcaatctcttctagtaa

SEQ ID NO: 4299494 - DNA, 25 bp, Homo sapien
agctgctggcggcaatctcttctag

SEQ ID NO: 4299495 - DNA, 25 bp, Homo sapien
tccccgtgcctgtgcatagccagga

SEQ ID NO: 4299496 - DNA, 25 bp, Homo sapien
tcctttgctgcccacttgaagccag

SEQ ID NO: 4299497 - DNA, 25 bp, Homo sapien
gaaccaggcaaatccacccttagaa

SEQ ID NO: 4299498 - DNA, 25 bp, Homo sapien
ttatacttaggtgcagaaccaggca

SEQ ID NO: 4299499 - DNA, 25 bp, Homo sapien
gaaagaaagtccctacagtgtgaaa

SEQ ID NO: 4299500 - DNA, 25 bp, Homo sapien
tttgagaaagaaagtccctacagtg

SEQ ID NO: 4299501 - DNA, 25 bp, Homo sapien
tgcatttttcgtgagaaaaactaat

SEQ ID NO: 4299502 - DNA, 25 bp, Homo sapien
gaaagtccctacagtgtgaaacagt

SEQ ID NO: 4299503 - DNA, 25 bp, Homo sapien
tttgagggtgaccttcgtccagcat

SEQ ID NO: 4299504 - DNA, 25 bp, Homo sapien
tatcatgtttttgagggtgaccttc

SEQ ID NO: 4299505 - DNA, 25 bp, Homo sapien
tgtttttgagggtgaccttcgtcca

SEQ ID NO: 4299506 - DNA, 25 bp, Homo sapien
aaaggcatacatgctttgtcattga

SEQ ID NO: 4299507 - DNA, 25 bp, Homo sapien
acttctagcaggtggttgtgacagc

SEQ ID NO: 4299508 - DNA, 25 bp, Homo sapien
gaataaggactaggcactacccagc

SEQ ID NO: 4299509 - DNA, 25 bp, Homo sapien
taaagtgatccaaagcacaagaatc

SEQ ID NO: 4299510 - DNA, 25 bp, Homo sapien
gagtaaggtataccttgcaccccag

SEQ ID NO: 4299511 - DNA, 25 bp, Homo sapien
ttgagcacaaaagagcgacacgtcc

SEQ ID NO: 4299512 - DNA, 25 bp, Homo sapien
gaggcgctgggacataattttcacc

SEQ ID NO: 4299513 - DNA, 25 bp, Homo sapien
cgacacgtccaggttcagagagtaa

SEQ ID NO: 4299514 - DNA, 25 bp, Homo sapien
actttcagtcggtggtgtatatgcc

SEQ ID NO: 4299515 - DNA, 25 bp, Homo sapien
atttacatgaagctctagtacaggg

SEQ ID NO: 4299516 - DNA, 25 bp, Homo sapien
cggtatcatttacatgaagctctag

SEQ ID NO: 4299517 - DNA, 25 bp, Homo sapien
tgattcggtatcatttacatgaagc

SEQ ID NO: 4299518 - DNA, 25 bp, Homo sapien
cttttgattcggtatcatttacatg

SEQ ID NO: 4299519 - DNA, 25 bp, Homo sapien
gggttgtaaaatccagtgcagtgag

SEQ ID NO: 4299520 - DNA, 25 bp, Homo sapien
tagggttgtaaaatccagtgcagtg

SEQ ID NO: 4299521 - DNA, 25 bp, Homo sapien
gatagggttgtaaaatccagtgcag

SEQ ID NO: 4299522 - DNA, 25 bp, Homo sapien
gttgtaaaatccagtgcagtgaggg

SEQ ID NO: 4299523 - DNA, 25 bp, Homo sapien
tgtatggttcctgacctctccaaaa

SEQ ID NO: 4299524 - DNA, 25 bp, Homo sapien
ccctgaaggagttgggtataagaca

SEQ ID NO: 4299525 - DNA, 25 bp, Homo sapien
ggaggtggcagacattcgtcccctg

SEQ ID NO: 4299526 - DNA, 25 bp, Homo sapien
tcttcccctgtctttgtatggttcc

SEQ ID NO: 4299527 - DNA, 25 bp, Homo sapien
gtataactaggtatgtccaccccaa

SEQ ID NO: 4299528 - DNA, 25 bp, Homo sapien
tcggcaagcaaaatgtcagaggcaa

SEQ ID NO: 4299529 - DNA, 25 bp, Homo sapien
gcatctctggatataggtgttcaca

SEQ ID NO: 4299530 - DNA, 25 bp, Homo sapien
gcaagcactgagatttgacccatca

SEQ ID NO: 4299531 - DNA, 25 bp, Homo sapien
tagataaggtgaagaggctaagaag

SEQ ID NO: 4299532 - DNA, 25 bp, Homo sapien
caggtaaggaagaagtccagcaggc

SEQ ID NO: 4299533 - DNA, 25 bp, Homo sapien
gtcctcaaggcagaaataggccagt

SEQ ID NO: 4299534 - DNA, 25 bp, Homo sapien
ctgggcagggttgtattaacaaggc

SEQ ID NO: 4299535 - DNA, 25 bp, Homo sapien
agtctagctatgtccaaatatttca

SEQ ID NO: 4299536 - DNA, 25 bp, Homo sapien
gaagaaataagcaggtggaccaatc

SEQ ID NO: 4299537 - DNA, 25 bp, Homo sapien
cctaattcatggcaagtcaatacac

SEQ ID NO: 4299538 - DNA, 25 bp, Homo sapien
gggtttcatgaaccacttaatgtat

SEQ ID NO: 4299539 - DNA, 25 bp, Homo sapien
gaagtttaatcataaggctgccgaa

SEQ ID NO: 4299540 - DNA, 25 bp, Homo sapien
taaggctgccgaataaggagacagg

SEQ ID NO: 4299541 - DNA, 25 bp, Homo sapien
tgtctgagccgtttaggtctaggta

SEQ ID NO: 4299542 - DNA, 25 bp, Homo sapien
gaaacctcaaatctgcctgtctgag

SEQ ID NO: 4299543 - DNA, 25 bp, Homo sapien
gctgattcagttcctcttggggaga

SEQ ID NO: 4299544 - DNA, 25 bp, Homo sapien
aaactggttggcaatagctcttttg

SEQ ID NO: 4299545 - DNA, 25 bp, Homo sapien
aaactgcattttcatgctgattcag

SEQ ID NO: 4299546 - DNA, 25 bp, Homo sapien
ttcagttcctcttggggagaggcgg

SEQ ID NO: 4299547 - DNA, 25 bp, Homo sapien
gcatctggtgctctgggacttttgg

SEQ ID NO: 4299548 - DNA, 25 bp, Homo sapien
ggcaaatggttagcatctggtgctc

SEQ ID NO: 4299549 - DNA, 25 bp, Homo sapien
tggttagcatctggtgctctgggac

SEQ ID NO: 4299550 - DNA, 25 bp, Homo sapien
caatgaggaggcaaatggttagcat

SEQ ID NO: 4299551 - DNA, 25 bp, Homo sapien
cagatagatctaggcatgagctcgt

SEQ ID NO: 4299552 - DNA, 25 bp, Homo sapien
gaatacagtactcaagggccagggt

SEQ ID NO: 4299553 - DNA, 25 bp, Homo sapien
tcaagtctgaggtattgtcacccca

SEQ ID NO: 4299554 - DNA, 25 bp, Homo sapien
cagaaagaggtttgtagtcatgccc

SEQ ID NO: 4299555 - DNA, 25 bp, Homo sapien
ctcctctgatctccaagaggcagga

SEQ ID NO: 4299556 - DNA, 25 bp, Homo sapien
actgaaagtagacccgcagagctgc

SEQ ID NO: 4299557 - DNA, 25 bp, Homo sapien
tcactgaaagtagacccgcagagct

SEQ ID NO: 4299558 - DNA, 25 bp, Homo sapien
agtagacccgcagagctgcggcttc

SEQ ID NO: 4299559 - DNA, 25 bp, Homo sapien
tttctacaataggatcattctgctt

SEQ ID NO: 4299560 - DNA, 25 bp, Homo sapien
agtccactggattggtcacgattcc

SEQ ID NO: 4299561 - DNA, 25 bp, Homo sapien
gtccactggattggtcacgattcct

SEQ ID NO: 4299562 - DNA, 25 bp, Homo sapien
ctttctacaataggatcattctgct

SEQ ID NO: 4299563 - DNA, 25 bp, Homo sapien
gaaaaagactgattagcataattct

SEQ ID NO: 4299564 - DNA, 25 bp, Homo sapien
tgaactctacactcacagatggcct

SEQ ID NO: 4299565 - DNA, 25 bp, Homo sapien
cagaagtttcagattgtggtcatca

SEQ ID NO: 4299566 - DNA, 25 bp, Homo sapien
ggtcatcagatgaacgctttaaatg

SEQ ID NO: 4299567 - DNA, 25 bp, Homo sapien
cactcggttcagttgggattcaaac

SEQ ID NO: 4299568 - DNA, 25 bp, Homo sapien
taaacagggctaaaggcaggctacg

SEQ ID NO: 4299569 - DNA, 25 bp, Homo sapien
catagtgttctaggaagtgccctcc

SEQ ID NO: 4299570 - DNA, 25 bp, Homo sapien
tccgtgccaataaagatgctgaccc

SEQ ID NO: 4299571 - DNA, 25 bp, Homo sapien
tagtcacttcactactgctataatc

SEQ ID NO: 4299572 - DNA, 25 bp, Homo sapien
cacatcacaggtgttcattgagggc

SEQ ID NO: 4299573 - DNA, 25 bp, Homo sapien
ttcattgagggccagaaactagtca

SEQ ID NO: 4299574 - DNA, 25 bp, Homo sapien
gagggccagaaactagtcacttcac

SEQ ID NO: 4299575 - DNA, 25 bp, Homo sapien
gctgcattaacggtctccgaatgtg

SEQ ID NO: 4299576 - DNA, 25 bp, Homo sapien
tcacctgggtgagcgggcttgcttc

SEQ ID NO: 4299577 - DNA, 25 bp, Homo sapien
gggccagcgaaggattctgttttaa

SEQ ID NO: 4299578 - DNA, 25 bp, Homo sapien
tccgaatgtgatttggcggcagcac

SEQ ID NO: 4299579 - DNA, 25 bp, Homo sapien
atcttagagtctagtgtaggcttca

SEQ ID NO: 4299580 - DNA, 25 bp, Homo sapien
gctctaatcttagagtctagtgtag

SEQ ID NO: 4299581 - DNA, 25 bp, Homo sapien
ggagtgctctaatcttagagtctag

SEQ ID NO: 4299582 - DNA, 25 bp, Homo sapien
gtattggagtgctctaatcttagag

SEQ ID NO: 4299583 - DNA, 25 bp, Homo sapien
gccttgggtttgtctctagagggag

SEQ ID NO: 4299584 - DNA, 25 bp, Homo sapien
ccttgggtttgtctctagagggaga

SEQ ID NO: 4299585 - DNA, 25 bp, Homo sapien
ttgggtttgtctctagagggagaaa

SEQ ID NO: 4299586 - DNA, 25 bp, Homo sapien
aggccttgggtttgtctctagaggg

SEQ ID NO: 4299587 - DNA, 25 bp, Homo sapien
ccgctctccttttccaggctgagag

SEQ ID NO: 4299588 - DNA, 25 bp, Homo sapien
gctctccttttccaggctgagagac

SEQ ID NO: 4299589 - DNA, 25 bp, Homo sapien
ccccgctctccttttccaggctgag

SEQ ID NO: 4299590 - DNA, 25 bp, Homo sapien
tgttcctcctttgttccccgctctc

SEQ ID NO: 4299591 - DNA, 25 bp, Homo sapien
gagattggaacctaaccaaagaagc

SEQ ID NO: 4299592 - DNA, 25 bp, Homo sapien
cacattatatgggatccctctggtg

SEQ ID NO: 4299593 - DNA, 25 bp, Homo sapien
aagcaagcacacgctggctgagctg

SEQ ID NO: 4299594 - DNA, 25 bp, Homo sapien
tactaggggatacgtcagttttgag

SEQ ID NO: 4299595 - DNA, 25 bp, Homo sapien
tcgtcatttgtgtgaggaggagtac

SEQ ID NO: 4299596 - DNA, 25 bp, Homo sapien
tccctgaaagccatcgtcatttgtg

SEQ ID NO: 4299597 - DNA, 25 bp, Homo sapien
ggtcttctgaggtgtgaaaggctgt

SEQ ID NO: 4299598 - DNA, 25 bp, Homo sapien
ggctgtactggtggtccctgaaagc

SEQ ID NO: 4299599 - DNA, 25 bp, Homo sapien
tgagtcagactggaagaagtcggca

SEQ ID NO: 4299600 - DNA, 25 bp, Homo sapien
ccacaggggctagatctgagtcaga

SEQ ID NO: 4299601 - DNA, 25 bp, Homo sapien
gactggaagaagtcggcacactcag

SEQ ID NO: 4299602 - DNA, 25 bp, Homo sapien
aagtcggcacactcagggtaacggc

SEQ ID NO: 4299603 - DNA, 25 bp, Homo sapien
gcatttttatgttgcagctaaggcc

SEQ ID NO: 4299604 - DNA, 25 bp, Homo sapien
tttttatgttgcagctaaggccagc

SEQ ID NO: 4299605 - DNA, 25 bp, Homo sapien
aaaagccaagcgctgggcattttta

SEQ ID NO: 4299606 - DNA, 25 bp, Homo sapien
tgttgcagctaaggccagcatgctg

SEQ ID NO: 4299607 - DNA, 25 bp, Homo sapien
aaaaatggtaatgtcattactcctg

SEQ ID NO: 4299608 - DNA, 25 bp, Homo sapien
taaatgacggccaacagtttggtgt

SEQ ID NO: 4299609 - DNA, 25 bp, Homo sapien
tcagacttgttggaaaatgctccgc

SEQ ID NO: 4299610 - DNA, 25 bp, Homo sapien
caggtgccagagcacgtatggtctt

SEQ ID NO: 4299611 - DNA, 25 bp, Homo sapien
tgagatggaacaacatcagacttgt

SEQ ID NO: 4299612 - DNA, 25 bp, Homo sapien
cctgggaatgaggtcttgtctgtct

SEQ ID NO: 4299613 - DNA, 25 bp, Homo sapien
ctgcttcggagaacctggattgagc

SEQ ID NO: 4299614 - DNA, 25 bp, Homo sapien
agttggcccatccctagatccacat

SEQ ID NO: 4299615 - DNA, 25 bp, Homo sapien
gaacctggattgagcataatggaaa

SEQ ID NO: 4299616 - DNA, 25 bp, Homo sapien
tgtcattactagtgggaatgagagc

SEQ ID NO: 4299617 - DNA, 25 bp, Homo sapien
ctgtcattactagtgggaatgagag

SEQ ID NO: 4299618 - DNA, 25 bp, Homo sapien
gtcattactagtgggaatgagagcc

SEQ ID NO: 4299619 - DNA, 25 bp, Homo sapien
cattactagtgggaatgagagccat

SEQ ID NO: 4299620 - DNA, 25 bp, Homo sapien
taagtacccggagcattcattatga

SEQ ID NO: 4299621 - DNA, 25 bp, Homo sapien
gctgtgcaagccagacacgcaattc

SEQ ID NO: 4299622 - DNA, 25 bp, Homo sapien
tatagagaccactgtgtggacaccc

SEQ ID NO: 4299623 - DNA, 25 bp, Homo sapien
cacagcgtgtgcaaggtttgggaat

SEQ ID NO: 4299624 - DNA, 25 bp, Homo sapien
cagcagtaggaggatgtgagagccc

SEQ ID NO: 4299625 - DNA, 25 bp, Homo sapien
gggcctctatattctcatatctctg

SEQ ID NO: 4299626 - DNA, 25 bp, Homo sapien
cagtaggaggatgtgagagcccagg

SEQ ID NO: 4299627 - DNA, 25 bp, Homo sapien
tatattctcatatctctgcaccagc

SEQ ID NO: 4299628 - DNA, 25 bp, Homo sapien
tgtataattagctccctgtttaggg

SEQ ID NO: 4299629 - DNA, 25 bp, Homo sapien
cattttcaggcactcagagattcag

SEQ ID NO: 4299630 - DNA, 25 bp, Homo sapien
aaatgttgctttgcgattccaaaag

SEQ ID NO: 4299631 - DNA, 25 bp, Homo sapien
aatgtgccatgtcaaaactgtctcc

SEQ ID NO: 4299632 - DNA, 25 bp, Homo sapien
agagagtctttgtgcgaaccatttc

SEQ ID NO: 4299633 - DNA, 25 bp, Homo sapien
gtctttgtgcgaaccatttctacta

SEQ ID NO: 4299634 - DNA, 25 bp, Homo sapien
taaagagagtctttgtgcgaaccat

SEQ ID NO: 4299635 - DNA, 25 bp, Homo sapien
cataataaagagagtctttgtgcga

SEQ ID NO: 4299636 - DNA, 25 bp, Homo sapien
caaattccaagtagattccagaacc

SEQ ID NO: 4299637 - DNA, 25 bp, Homo sapien
gcctctgcatagactcaaattccaa

SEQ ID NO: 4299638 - DNA, 25 bp, Homo sapien
tcccacttggaatgtcgttcctagc

SEQ ID NO: 4299639 - DNA, 25 bp, Homo sapien
aattccaagtagattccagaaccca

SEQ ID NO: 4299640 - DNA, 25 bp, Homo sapien
aatatctgagccttctggcctgtaa

SEQ ID NO: 4299641 - DNA, 25 bp, Homo sapien
caagttactgtctagcatcacctca

SEQ ID NO: 4299642 - DNA, 25 bp, Homo sapien
gggctctcacaatgcatacgttggt

SEQ ID NO: 4299643 - DNA, 25 bp, Homo sapien
gatccctagtgcatgacaaatctct

SEQ ID NO: 4299644 - DNA, 25 bp, Homo sapien
gaagagtgatggagcatcatatctg

SEQ ID NO: 4299645 - DNA, 25 bp, Homo sapien
cagtgttgattcctgattggaagtg

SEQ ID NO: 4299646 - DNA, 25 bp, Homo sapien
tagtaatgagaagagtgctcttgtt

SEQ ID NO: 4299647 - DNA, 25 bp, Homo sapien
aatggtagtgctgtatcagtgttga

SEQ ID NO: 4299648 - DNA, 25 bp, Homo sapien
ttcagttcatcagctgctaatcagc

SEQ ID NO: 4299649 - DNA, 25 bp, Homo sapien
cactagggatgcagcaagaaccaga

SEQ ID NO: 4299650 - DNA, 25 bp, Homo sapien
cccttattagagtggtccttcccag

SEQ ID NO: 4299651 - DNA, 25 bp, Homo sapien
caagtgcttccctttttgactctga

SEQ ID NO: 4299652 - DNA, 25 bp, Homo sapien
agaagtgtgggcgaagccatcctgc

SEQ ID NO: 4299653 - DNA, 25 bp, Homo sapien
tgcctggcgtcctcaagactcttgt

SEQ ID NO: 4299654 - DNA, 25 bp, Homo sapien
tcttgtctgataccagggctctctc

SEQ ID NO: 4299655 - DNA, 25 bp, Homo sapien
tgtgggcgaagccatcctgcctggc

SEQ ID NO: 4299656 - DNA, 25 bp, Homo sapien
gcttaacaagagatgggaagccatt

SEQ ID NO: 4299657 - DNA, 25 bp, Homo sapien
gcgtcagccatgagtaacatcattt

SEQ ID NO: 4299658 - DNA, 25 bp, Homo sapien
tattatcagggagctaacgatggct

SEQ ID NO: 4299659 - DNA, 25 bp, Homo sapien
gattcatatgccagccatgcgtcag

SEQ ID NO: 4299660 - DNA, 25 bp, Homo sapien
tatgatagatgtgtcctaacagcac

SEQ ID NO: 4299661 - DNA, 25 bp, Homo sapien
tctctgactgtcactgcaagccaga

SEQ ID NO: 4299662 - DNA, 25 bp, Homo sapien
gatatttctcaatacagcccctgct

SEQ ID NO: 4299663 - DNA, 25 bp, Homo sapien
gccagaacatgaggatacattgata

SEQ ID NO: 4299664 - DNA, 25 bp, Homo sapien
acagcttcatcatggttcaacctca

SEQ ID NO: 4299665 - DNA, 25 bp, Homo sapien
cacagcttcatcatggttcaacctc

SEQ ID NO: 4299666 - DNA, 25 bp, Homo sapien
tcacagcttcatcatggttcaacct

SEQ ID NO: 4299667 - DNA, 25 bp, Homo sapien
gatcacagcttcatcatggttcaac

SEQ ID NO: 4299668 - DNA, 25 bp, Homo sapien
aacaggaagcagcattgagcacggg

SEQ ID NO: 4299669 - DNA, 25 bp, Homo sapien
gaaacaggaagcagcattgagcacg

SEQ ID NO: 4299670 - DNA, 25 bp, Homo sapien
catgtgtcctctccactgaagatag

SEQ ID NO: 4299671 - DNA, 25 bp, Homo sapien
ctgccatgtgtcctctccactgaag

SEQ ID NO: 4299672 - DNA, 25 bp, Homo sapien
ccacatttcacctgagcatcccagc

SEQ ID NO: 4299673 - DNA, 25 bp, Homo sapien
agcagtggaatctttcccatggccc

SEQ ID NO: 4299674 - DNA, 25 bp, Homo sapien
cagtagcagtggaatctttcccatg

SEQ ID NO: 4299675 - DNA, 25 bp, Homo sapien
agaacagtagcagtggaatctttcc

SEQ ID NO: 4299676 - DNA, 25 bp, Homo sapien
catctctgttcgctggagtctgagc

SEQ ID NO: 4299677 - DNA, 25 bp, Homo sapien
ggaagaacaggatctaaattccaca

SEQ ID NO: 4299678 - DNA, 25 bp, Homo sapien
gaagaacaggatctaaattccacat

SEQ ID NO: 4299679 - DNA, 25 bp, Homo sapien
gggaagaacaggatctaaattccac

SEQ ID NO: 4299680 - DNA, 25 bp, Homo sapien
gagcttggaaaataagacgggtgta

SEQ ID NO: 4299681 - DNA, 25 bp, Homo sapien
tttcaaggattctgttgccatcggg

SEQ ID NO: 4299682 - DNA, 25 bp, Homo sapien
cctgaggatttcaaggattctgttg

SEQ ID NO: 4299683 - DNA, 25 bp, Homo sapien
ttatccccaatttgttccctgagga

SEQ ID NO: 4299684 - DNA, 25 bp, Homo sapien
gttccctgaggatttcaaggattct

SEQ ID NO: 4299685 - DNA, 25 bp, Homo sapien
gaagggctgagctagtgtttacaag

SEQ ID NO: 4299686 - DNA, 25 bp, Homo sapien
aacaacatcaattcattcatgacag

SEQ ID NO: 4299687 - DNA, 25 bp, Homo sapien
gcatcacatagccagaagagagggt

SEQ ID NO: 4299688 - DNA, 25 bp, Homo sapien
tgtttacaagaaacctactcccatg

SEQ ID NO: 4299689 - DNA, 25 bp, Homo sapien
cttcacagtcatccggcacaatcac

SEQ ID NO: 4299690 - DNA, 25 bp, Homo sapien
ggattccccactctggtagccacag

SEQ ID NO: 4299691 - DNA, 25 bp, Homo sapien
aatcaccaggggcaaagcatgaagc

SEQ ID NO: 4299692 - DNA, 25 bp, Homo sapien
gattccccactctggtagccacagt

SEQ ID NO: 4299693 - DNA, 25 bp, Homo sapien
gtgcctgctttgactcccctagatg

SEQ ID NO: 4299694 - DNA, 25 bp, Homo sapien
tgcctgctttgactcccctagatgc

SEQ ID NO: 4299695 - DNA, 25 bp, Homo sapien
tgagctatctccttgcacttgaatc

SEQ ID NO: 4299696 - DNA, 25 bp, Homo sapien
ttgcacttgaatcccccatgtctca

SEQ ID NO: 4299697 - DNA, 25 bp, Homo sapien
tctttgggtgtttcagctacttagc

SEQ ID NO: 4299698 - DNA, 25 bp, Homo sapien
actaggttcaccaaacaactgccag

SEQ ID NO: 4299699 - DNA, 25 bp, Homo sapien
gctcttaaaaagtgacccctgatgt

SEQ ID NO: 4299700 - DNA, 25 bp, Homo sapien
tgtgtacatgcgattatgggcacgc

SEQ ID NO: 4299701 - DNA, 25 bp, Homo sapien
actggtgcaactggcctacaagata

SEQ ID NO: 4299702 - DNA, 25 bp, Homo sapien
caggtactggtgcaactggcctaca

SEQ ID NO: 4299703 - DNA, 25 bp, Homo sapien
ggtactggtgcaactggcctacaag

SEQ ID NO: 4299704 - DNA, 25 bp, Homo sapien
gtgcaactggcctacaagatattta

SEQ ID NO: 4299705 - DNA, 25 bp, Homo sapien
cattaatggtagacgtcaccccgca

SEQ ID NO: 4299706 - DNA, 25 bp, Homo sapien
tcaagccgggattctaaacatcagg

SEQ ID NO: 4299707 - DNA, 25 bp, Homo sapien
catcaggctatgtttccaggactct

SEQ ID NO: 4299708 - DNA, 25 bp, Homo sapien
actggtcacaggtggctagctgcta

SEQ ID NO: 4299709 - DNA, 25 bp, Homo sapien
ctccttcaccggcaagcaccttaga

SEQ ID NO: 4299710 - DNA, 25 bp, Homo sapien
cttcaccggcaagcaccttagagct

SEQ ID NO: 4299711 - DNA, 25 bp, Homo sapien
tcaccggcaagcaccttagagcttt

SEQ ID NO: 4299712 - DNA, 25 bp, Homo sapien
caccggcaagcaccttagagctttc

SEQ ID NO: 4299713 - DNA, 25 bp, Homo sapien
ttcctctttagtgtccaatgacttc

SEQ ID NO: 4299714 - DNA, 25 bp, Homo sapien
tttcctctttagtgtccaatgactt

SEQ ID NO: 4299715 - DNA, 25 bp, Homo sapien
catcactaccattatagccctccat

SEQ ID NO: 4299716 - DNA, 25 bp, Homo sapien
gcaatataatggttctctccagccc

SEQ ID NO: 4299717 - DNA, 25 bp, Homo sapien
tgttaagccaagcaattgtttccca

SEQ ID NO: 4299718 - DNA, 25 bp, Homo sapien
gagcccattgtcaaatgccgtgtga

SEQ ID NO: 4299719 - DNA, 25 bp, Homo sapien
catgacatgcttgaacccacagttg

SEQ ID NO: 4299720 - DNA, 25 bp, Homo sapien
caatgtcacccataagcatttgatg

SEQ ID NO: 4299721 - DNA, 25 bp, Homo sapien
tgatatgacattaggccatgggtgt

SEQ ID NO: 4299722 - DNA, 25 bp, Homo sapien
gggttttatatacagtgcacagtca

SEQ ID NO: 4299723 - DNA, 25 bp, Homo sapien
gggatacagctagggtaagtcttac

SEQ ID NO: 4299724 - DNA, 25 bp, Homo sapien
tcccaaaggtagtcatgcatcagag

SEQ ID NO: 4299725 - DNA, 25 bp, Homo sapien
aaatcagcacttagggactggtgac

SEQ ID NO: 4299726 - DNA, 25 bp, Homo sapien
tgtaaaacccagagagcctattccc

SEQ ID NO: 4299727 - DNA, 25 bp, Homo sapien
atcagaatctccagcgacgggacct

SEQ ID NO: 4299728 - DNA, 25 bp, Homo sapien
ggcatctgaaagttctcatgtagac

SEQ ID NO: 4299729 - DNA, 25 bp, Homo sapien
taggcgcagatcacctggctcttgc

SEQ ID NO: 4299730 - DNA, 25 bp, Homo sapien
gcctgatccatgacaggctgtatgc

SEQ ID NO: 4299731 - DNA, 25 bp, Homo sapien
caggctgtatgctccacaaggtgga

SEQ ID NO: 4299732 - DNA, 25 bp, Homo sapien
agatgctgtcattcctgtgaaagtc

SEQ ID NO: 4299733 - DNA, 25 bp, Homo sapien
ctcctcatagatgctgtcattcctg

SEQ ID NO: 4299734 - DNA, 25 bp, Homo sapien
cctcatagatgctgtcattcctgtg

SEQ ID NO: 4299735 - DNA, 25 bp, Homo sapien
catagatgctgtcattcctgtgaaa

SEQ ID NO: 4299736 - DNA, 25 bp, Homo sapien
tgggaagaacatggacgtgaacgtg

SEQ ID NO: 4299737 - DNA, 25 bp, Homo sapien
ctgggaagaacatggacgtgaacgt

SEQ ID NO: 4299738 - DNA, 25 bp, Homo sapien
gaagagagtgcactaagcaagagag

SEQ ID NO: 4299739 - DNA, 25 bp, Homo sapien
tgaagcccaattactccacgatggt

SEQ ID NO: 4299740 - DNA, 25 bp, Homo sapien
gaagttgatatccaccttcggtaac

SEQ ID NO: 4299741 - DNA, 25 bp, Homo sapien
tatacctgaaatctgccgagaagag

SEQ ID NO: 4299742 - DNA, 25 bp, Homo sapien
ttaaagccgaggcagggtgcaacgt

SEQ ID NO: 4299743 - DNA, 25 bp, Homo sapien
caacgtggtccaaggtgaatgaagc

SEQ ID NO: 4299744 - DNA, 25 bp, Homo sapien
cacggatctctcagcaattgggcca

SEQ ID NO: 4299745 - DNA, 25 bp, Homo sapien
cctgattactgcgatcgggttccga

SEQ ID NO: 4299746 - DNA, 25 bp, Homo sapien
tggttgtatcgatatcctttttcct

SEQ ID NO: 4299747 - DNA, 25 bp, Homo sapien
cagtgtggttgtatcgatatccttt

SEQ ID NO: 4299748 - DNA, 25 bp, Homo sapien
ccagtgtggttgtatcgatatcctt

SEQ ID NO: 4299749 - DNA, 25 bp, Homo sapien
gtgtggttgtatcgatatccttttt

SEQ ID NO: 4299750 - DNA, 25 bp, Homo sapien
ttggccctgtgtgaatccttctccc

SEQ ID NO: 4299751 - DNA, 25 bp, Homo sapien
ctcacatgtgccaatgagcaactgc

SEQ ID NO: 4299752 - DNA, 25 bp, Homo sapien
gaaggctgaagagctaccctgctcc

SEQ ID NO: 4299753 - DNA, 25 bp, Homo sapien
agcaaggaaggctgaagagctaccc

SEQ ID NO: 4299754 - DNA, 25 bp, Homo sapien
gctccaagccacaatgagagtttaa

SEQ ID NO: 4299755 - DNA, 25 bp, Homo sapien
aggagcttttagcagccagacagct

SEQ ID NO: 4299756 - DNA, 25 bp, Homo sapien
ttaaaggagcttttagcagccagac

SEQ ID NO: 4299757 - DNA, 25 bp, Homo sapien
aaaggagcttttagcagccagacag

SEQ ID NO: 4299758 - DNA, 25 bp, Homo sapien
ggtgagcaagtgtcaatgcatccat

SEQ ID NO: 4299759 - DNA, 25 bp, Homo sapien
gcacagaggtgagcaagtgtcaatg

SEQ ID NO: 4299760 - DNA, 25 bp, Homo sapien
cagaggtgagcaagtgtcaatgcat

SEQ ID NO: 4299761 - DNA, 25 bp, Homo sapien
gaggtgagcaagtgtcaatgcatcc

SEQ ID NO: 4299762 - DNA, 25 bp, Homo sapien
actgcaagcctgagtagctcatcat

SEQ ID NO: 4299763 - DNA, 25 bp, Homo sapien
tttgccaatcaatttcccccatctt

SEQ ID NO: 4299764 - DNA, 25 bp, Homo sapien
atcttccacactgcaagcctgagta

SEQ ID NO: 4299765 - DNA, 25 bp, Homo sapien
ttccacactgcaagcctgagtagct

SEQ ID NO: 4299766 - DNA, 25 bp, Homo sapien
catcccaaagactggatcacataaa

SEQ ID NO: 4299767 - DNA, 25 bp, Homo sapien
ccaaagactggatcacataaaatgc

SEQ ID NO: 4299768 - DNA, 25 bp, Homo sapien
cattttggtgtagttagaagttgtg

SEQ ID NO: 4299769 - DNA, 25 bp, Homo sapien
tgggcccacgtgcaacattttaaaa

SEQ ID NO: 4299770 - DNA, 25 bp, Homo sapien
ataaatatctctgggcccacgtgca

SEQ ID NO: 4299771 - DNA, 25 bp, Homo sapien
tatctctgggcccacgtgcaacatt

SEQ ID NO: 4299772 - DNA, 25 bp, Homo sapien
caaagggcctccttgtgatatccca

SEQ ID NO: 4299773 - DNA, 25 bp, Homo sapien
tgcatagactcctgttgtgggtact

SEQ ID NO: 4299774 - DNA, 25 bp, Homo sapien
accagagttgggatgttttactgcc

SEQ ID NO: 4299775 - DNA, 25 bp, Homo sapien
cttgcgttgtgggtctgtgtaatct

SEQ ID NO: 4299776 - DNA, 25 bp, Homo sapien
gcataacactcagagctgcactcca

SEQ ID NO: 4299777 - DNA, 25 bp, Homo sapien
tagcgcataacactcagagctgcac

SEQ ID NO: 4299778 - DNA, 25 bp, Homo sapien
gacatagcgcataacactcagagct

SEQ ID NO: 4299779 - DNA, 25 bp, Homo sapien
ctggacatagcgcataacactcaga

SEQ ID NO: 4299780 - DNA, 25 bp, Homo sapien
cacactcctgtagtcagatgtgatg

SEQ ID NO: 4299781 - DNA, 25 bp, Homo sapien
tccccacactcctgtagtcagatgt

SEQ ID NO: 4299782 - DNA, 25 bp, Homo sapien
cagatgtgatgcttcaaactcagct

SEQ ID NO: 4299783 - DNA, 25 bp, Homo sapien
actcagcttgagcgcaggtctcatt

SEQ ID NO: 4299784 - DNA, 25 bp, Homo sapien
taatgaggaccaggcctcaggagga

SEQ ID NO: 4299785 - DNA, 25 bp, Homo sapien
ctaatgaggaccaggcctcaggagg

SEQ ID NO: 4299786 - DNA, 25 bp, Homo sapien
aatgaggaccaggcctcaggaggaa

SEQ ID NO: 4299787 - DNA, 25 bp, Homo sapien
tgggttctgtgcatggaaataacac

SEQ ID NO: 4299788 - DNA, 25 bp, Homo sapien
ttgacaactttcatggccacggcca

SEQ ID NO: 4299789 - DNA, 25 bp, Homo sapien
tctaaattacaccaacactcagggt

SEQ ID NO: 4299790 - DNA, 25 bp, Homo sapien
tccacgactttgtagccattgctgt

SEQ ID NO: 4299791 - DNA, 25 bp, Homo sapien
aacgtccttatccattagggtcaca

SEQ ID NO: 4299792 - DNA, 25 bp, Homo sapien
gctagagggtgcaaaaacgtcctta

SEQ ID NO: 4299793 - DNA, 25 bp, Homo sapien
caagcgctggttctgcatttgaaca

SEQ ID NO: 4299794 - DNA, 25 bp, Homo sapien
cacaagttggagtcctggttaggat

SEQ ID NO: 4299795 - DNA, 25 bp, Homo sapien
agcaagatgctccccttgtggacag

SEQ ID NO: 4299796 - DNA, 25 bp, Homo sapien
acagcaagatgctccccttgtggac

SEQ ID NO: 4299797 - DNA, 25 bp, Homo sapien
cagcaagatgctccccttgtggaca

SEQ ID NO: 4299798 - DNA, 25 bp, Homo sapien
cacagcaagatgctccccttgtgga

SEQ ID NO: 4299799 - DNA, 25 bp, Homo sapien
ccagcctctgcaactggcattctct

SEQ ID NO: 4299800 - DNA, 25 bp, Homo sapien
cagcctctgcaactggcattctctg

SEQ ID NO: 4299801 - DNA, 25 bp, Homo sapien
ttccagcctctgcaactggcattct

SEQ ID NO: 4299802 - DNA, 25 bp, Homo sapien
gcctctgcaactggcattctctgca

SEQ ID NO: 4299803 - DNA, 25 bp, Homo sapien
gaagaaaaaatcacggtccctgctc

SEQ ID NO: 4299804 - DNA, 25 bp, Homo sapien
caagaccagagtagcactgagaagt

SEQ ID NO: 4299805 - DNA, 25 bp, Homo sapien
catagtaggcacttgcaatcaaagc

SEQ ID NO: 4299806 - DNA, 25 bp, Homo sapien
gaacagcctgagtaaatgcctagaa

SEQ ID NO: 4299807 - DNA, 25 bp, Homo sapien
tgggagaggcaccactattattatc

SEQ ID NO: 4299808 - DNA, 25 bp, Homo sapien
tctacattcaatcagggtttaaccg

SEQ ID NO: 4299809 - DNA, 25 bp, Homo sapien
tctgtggcccagttaaatgaagttc

SEQ ID NO: 4299810 - DNA, 25 bp, Homo sapien
tcagaatatgtgtggacttgtcagc

SEQ ID NO: 4299811 - DNA, 25 bp, Homo sapien
gacatagggccacttaaccttggac

SEQ ID NO: 4299812 - DNA, 25 bp, Homo sapien
taactaatgggaggcagaacttttc

SEQ ID NO: 4299813 - DNA, 25 bp, Homo sapien
gaaggtatccttggcgctcactgta

SEQ ID NO: 4299814 - DNA, 25 bp, Homo sapien
gatgaaacgagttaccacagggtgt

SEQ ID NO: 4299815 - DNA, 25 bp, Homo sapien
cgtatagtgacgctcttgaaacaca

SEQ ID NO: 4299816 - DNA, 25 bp, Homo sapien
tttgctggcccctacctagtgcttt

SEQ ID NO: 4299817 - DNA, 25 bp, Homo sapien
tccatgaacctcagctagacagggt

SEQ ID NO: 4299818 - DNA, 25 bp, Homo sapien
tgtcttccatcctaaccgtatagtg

SEQ ID NO: 4299819 - DNA, 25 bp, Homo sapien
agctcttcatgatcatcacaaattt

SEQ ID NO: 4299820 - DNA, 25 bp, Homo sapien
catgatcatcacaaatttgggcatt

SEQ ID NO: 4299821 - DNA, 25 bp, Homo sapien
catctctgccaactgtaaggcagat

SEQ ID NO: 4299822 - DNA, 25 bp, Homo sapien
ttcatgatcatcacaaatttgggca

SEQ ID NO: 4299823 - DNA, 25 bp, Homo sapien
gaggtctatgatccagtaatgaacc

SEQ ID NO: 4299824 - DNA, 25 bp, Homo sapien
cagggtcagcagtattgggcttcac

SEQ ID NO: 4299825 - DNA, 25 bp, Homo sapien
tgtggtccctaatcttaagagtagc

SEQ ID NO: 4299826 - DNA, 25 bp, Homo sapien
gagagttcccatcgtaggacagtga

SEQ ID NO: 4299827 - DNA, 25 bp, Homo sapien
cctgcagagcccaaatgatctccat

SEQ ID NO: 4299828 - DNA, 25 bp, Homo sapien
tgcccatctggggattgaactggca

SEQ ID NO: 4299829 - DNA, 25 bp, Homo sapien
aacacagaatgctccgccttccaaa

SEQ ID NO: 4299830 - DNA, 25 bp, Homo sapien
tgaactggcatcagtgacttcaaat

SEQ ID NO: 4299831 - DNA, 25 bp, Homo sapien
ggatttgtatcagttgctggttcat

SEQ ID NO: 4299832 - DNA, 25 bp, Homo sapien
gttggcctcaatcggtagcaattct

SEQ ID NO: 4299833 - DNA, 25 bp, Homo sapien
ttcctgtggatttgtatcagttgct

SEQ ID NO: 4299834 - DNA, 25 bp, Homo sapien
gcctcaatcggtagcaattctaatt

SEQ ID NO: 4299835 - DNA, 25 bp, Homo sapien
tcttcacctggagcttgtaacaaca

SEQ ID NO: 4299836 - DNA, 25 bp, Homo sapien
ttcacctggagcttgtaacaacatc

SEQ ID NO: 4299837 - DNA, 25 bp, Homo sapien
cttcttcacctggagcttgtaacaa

SEQ ID NO: 4299838 - DNA, 25 bp, Homo sapien
cttcacctggagcttgtaacaacat

SEQ ID NO: 4299839 - DNA, 25 bp, Homo sapien
ggtgcataaacctctgtcagcaata

SEQ ID NO: 4299840 - DNA, 25 bp, Homo sapien
cttgtccaggatagtacaaatctgc

SEQ ID NO: 4299841 - DNA, 25 bp, Homo sapien
tgtccaggatagtacaaatctgctg

SEQ ID NO: 4299842 - DNA, 25 bp, Homo sapien
ctgttcatcccttctgacaatcttg

SEQ ID NO: 4299843 - DNA, 25 bp, Homo sapien
ctctgttcatcccttctgacaatct

SEQ ID NO: 4299844 - DNA, 25 bp, Homo sapien
tttactgtgaaaaactagctgcagg

SEQ ID NO: 4299845 - DNA, 25 bp, Homo sapien
tgtgaaaaactagctgcaggataag

SEQ ID NO: 4299846 - DNA, 25 bp, Homo sapien
tactgtgaaaaactagctgcaggat

SEQ ID NO: 4299847 - DNA, 25 bp, Homo sapien
gaaaaactagctgcaggataagatt

SEQ ID NO: 4299848 - DNA, 25 bp, Homo sapien
gcccatccacaactaatgcatctaa

SEQ ID NO: 4299849 - DNA, 25 bp, Homo sapien
cagtagtggagaaaacagcccatcc

SEQ ID NO: 4299850 - DNA, 25 bp, Homo sapien
ggactccgatcctttagagtgtagg

SEQ ID NO: 4299851 - DNA, 25 bp, Homo sapien
catctaagtcctccatgatgatggg

SEQ ID NO: 4299852 - DNA, 25 bp, Homo sapien
ctgctttttgtgtcttgagacttac

SEQ ID NO: 4299853 - DNA, 25 bp, Homo sapien
ccagctgctttttgtgtcttgagac

SEQ ID NO: 4299854 - DNA, 25 bp, Homo sapien
ttccagctgctttttgtgtcttgag

SEQ ID NO: 4299855 - DNA, 25 bp, Homo sapien
cagctgctttttgtgtcttgagact

SEQ ID NO: 4299856 - DNA, 25 bp, Homo sapien
tggcataaagggtaaagagaagcgc

SEQ ID NO: 4299857 - DNA, 25 bp, Homo sapien
atgactttggcataaagggtaaaga

SEQ ID NO: 4299858 - DNA, 25 bp, Homo sapien
gactttggcataaagggtaaagaga

SEQ ID NO: 4299859 - DNA, 25 bp, Homo sapien
ttattaatgactttggcataaaggg

SEQ ID NO: 4299860 - DNA, 25 bp, Homo sapien
tttgtaaccgcgacttactcgtgat

SEQ ID NO: 4299861 - DNA, 25 bp, Homo sapien
tcgtgatcatctgtgcatacaccag

SEQ ID NO: 4299862 - DNA, 25 bp, Homo sapien
tactctatcgatttgtaaccgcgac

SEQ ID NO: 4299863 - DNA, 25 bp, Homo sapien
caggtaactgtgaagtactctatcg

SEQ ID NO: 4299864 - DNA, 25 bp, Homo sapien
tattagttctcataatcgcctctta

SEQ ID NO: 4299865 - DNA, 25 bp, Homo sapien
ttttttattagttctcataatcgcc

SEQ ID NO: 4299866 - DNA, 25 bp, Homo sapien
tcgcctcttattaatttgtatgcac

SEQ ID NO: 4299867 - DNA, 25 bp, Homo sapien
cataatcgcctcttattaatttgta

SEQ ID NO: 4299868 - DNA, 25 bp, Homo sapien
cagtctgtccggcttcggggccatc

SEQ ID NO: 4299869 - DNA, 25 bp, Homo sapien
cacagtctgtccggcttcggggcca

SEQ ID NO: 4299870 - DNA, 25 bp, Homo sapien
cttcacagtctgtccggcttcgggg

SEQ ID NO: 4299871 - DNA, 25 bp, Homo sapien
ttcacagtctgtccggcttcggggc

SEQ ID NO: 4299872 - DNA, 25 bp, Homo sapien
cccgccgtaaggattaagcataact

SEQ ID NO: 4299873 - DNA, 25 bp, Homo sapien
ggtttgtctacctctatgagcctga

SEQ ID NO: 4299874 - DNA, 25 bp, Homo sapien
ctctggctattctgaccttgtggga

SEQ ID NO: 4299875 - DNA, 25 bp, Homo sapien
tggaaatgggcaaactcaccaagtc

SEQ ID NO: 4299876 - DNA, 25 bp, Homo sapien
ccactgtcccgactctctgggtcgt

SEQ ID NO: 4299877 - DNA, 25 bp, Homo sapien
aatcggccacttcatcaggacgcag

SEQ ID NO: 4299878 - DNA, 25 bp, Homo sapien
tcggccacttcatcaggacgcaggt

SEQ ID NO: 4299879 - DNA, 25 bp, Homo sapien
ggacgcaggtcatggaagcgctcca

SEQ ID NO: 4299880 - DNA, 25 bp, Homo sapien
cggccacttcatcaggacgcaggtc

SEQ ID NO: 4299881 - DNA, 25 bp, Homo sapien
ctggccgcagcgggcacacaaggac

SEQ ID NO: 4299882 - DNA, 25 bp, Homo sapien
tggccgcagcgggcacacaaggaca

SEQ ID NO: 4299883 - DNA, 25 bp, Homo sapien
ggccgcagcgggcacacaaggacat

SEQ ID NO: 4299884 - DNA, 25 bp, Homo sapien
caagcagttcatacccacaggattg

SEQ ID NO: 4299885 - DNA, 25 bp, Homo sapien
gcagttcatacccacaggattgaat

SEQ ID NO: 4299886 - DNA, 25 bp, Homo sapien
aagcagttcatacccacaggattga

SEQ ID NO: 4299887 - DNA, 25 bp, Homo sapien
agcagttcatacccacaggattgaa

SEQ ID NO: 4299888 - DNA, 25 bp, Homo sapien
caccagcccagaactgactatctct

SEQ ID NO: 4299889 - DNA, 25 bp, Homo sapien
accagcccagaactgactatctctc

SEQ ID NO: 4299890 - DNA, 25 bp, Homo sapien
ccagcccagaactgactatctctct

SEQ ID NO: 4299891 - DNA, 25 bp, Homo sapien
cagcccagaactgactatctctctt

SEQ ID NO: 4299892 - DNA, 25 bp, Homo sapien
tttctctattcccttctcccaagcc

SEQ ID NO: 4299893 - DNA, 25 bp, Homo sapien
ttctctattcccttctcccaagcct

SEQ ID NO: 4299894 - DNA, 25 bp, Homo sapien
ccaagcctggttctggctctctcat

SEQ ID NO: 4299895 - DNA, 25 bp, Homo sapien
ttctcccaagcctggttctggctct

SEQ ID NO: 4299896 - DNA, 25 bp, Homo sapien
tgaatgagggctgcctagagctccc

SEQ ID NO: 4299897 - DNA, 25 bp, Homo sapien
cgttttctaacaagagcccagtgga

SEQ ID NO: 4299898 - DNA, 25 bp, Homo sapien
gaattgactcccactagctgtaaag

SEQ ID NO: 4299899 - DNA, 25 bp, Homo sapien
cataggtgccacacagcgaaaggac

SEQ ID NO: 4299900 - DNA, 25 bp, Homo sapien
ttctttaggtgcttccgggatgcca

SEQ ID NO: 4299901 - DNA, 25 bp, Homo sapien
caactgctcagctatgtttagaggt

SEQ ID NO: 4299902 - DNA, 25 bp, Homo sapien
ggtgcccaataaggagctgctcctt

SEQ ID NO: 4299903 - DNA, 25 bp, Homo sapien
caccaggtaggtgagtatctgacag

SEQ ID NO: 4299904 - DNA, 25 bp, Homo sapien
tggctccattaatgggacaggacag

SEQ ID NO: 4299905 - DNA, 25 bp, Homo sapien
gagattagaatatcctgtggtgcca

SEQ ID NO: 4299906 - DNA, 25 bp, Homo sapien
agaagtggttggctccattaatggg

SEQ ID NO: 4299907 - DNA, 25 bp, Homo sapien
gaatatcctgtggtgccacaaagtt

SEQ ID NO: 4299908 - DNA, 25 bp, Homo sapien
tgcattcattggcaaccatgtacct

SEQ ID NO: 4299909 - DNA, 25 bp, Homo sapien
catgacatgtaatgaaaggaaggga

SEQ ID NO: 4299910 - DNA, 25 bp, Homo sapien
caggcatctatctctatcaaggtac

SEQ ID NO: 4299911 - DNA, 25 bp, Homo sapien
catgtacctctagacatgggagtgc

SEQ ID NO: 4299912 - DNA, 25 bp, Homo sapien
gacattgccacagctacgtttacca

SEQ ID NO: 4299913 - DNA, 25 bp, Homo sapien
catttcgtaaaactcagaaagctgg

SEQ ID NO: 4299914 - DNA, 25 bp, Homo sapien
ccaaaggagggctgaaatatggcct

SEQ ID NO: 4299915 - DNA, 25 bp, Homo sapien
agaaaaacacgactgcagggaacct

SEQ ID NO: 4299916 - DNA, 25 bp, Homo sapien
gctccaacttggccaaacccaggga

SEQ ID NO: 4299917 - DNA, 25 bp, Homo sapien
ctgctccaacttggccaaacccagg

SEQ ID NO: 4299918 - DNA, 25 bp, Homo sapien
tgctccaacttggccaaacccaggg

SEQ ID NO: 4299919 - DNA, 25 bp, Homo sapien
caacaatgtccctgccaaatggatc

SEQ ID NO: 4299920 - DNA, 25 bp, Homo sapien
aatgtccctgccaaatggatcttca

SEQ ID NO: 4299921 - DNA, 25 bp, Homo sapien
caatgtccctgccaaatggatcttc

SEQ ID NO: 4299922 - DNA, 25 bp, Homo sapien
ctcaacaatgtccctgccaaatgga

SEQ ID NO: 4299923 - DNA, 25 bp, Homo sapien
gaggtgcgcgcttccgtaactagtg

SEQ ID NO: 4299924 - DNA, 25 bp, Homo sapien
tcctcctctttgagctaatacctgc

SEQ ID NO: 4299925 - DNA, 25 bp, Homo sapien
ctctttgagctaatacctgcaggga

SEQ ID NO: 4299926 - DNA, 25 bp, Homo sapien
gcgcttccgtaactagtggcctttg

SEQ ID NO: 4299927 - DNA, 25 bp, Homo sapien
gagctgaagctgtgggctctagaaa

SEQ ID NO: 4299928 - DNA, 25 bp, Homo sapien
gcttttcgaagtacagagagaactg

SEQ ID NO: 4299929 - DNA, 25 bp, Homo sapien
ctctagaaagacatccaggatgacc

SEQ ID NO: 4299930 - DNA, 25 bp, Homo sapien
atgaccacgaggagtaccactactt

SEQ ID NO: 4299931 - DNA, 25 bp, Homo sapien
tgcagtaatgatattgagacagcat

SEQ ID NO: 4299932 - DNA, 25 bp, Homo sapien
ttcctcctaagattgtagttgtgca

SEQ ID NO: 4299933 - DNA, 25 bp, Homo sapien
tagttgtgcagtaatgatattgaga

SEQ ID NO: 4299934 - DNA, 25 bp, Homo sapien
cctcctaagattgtagttgtgcagt

SEQ ID NO: 4299935 - DNA, 25 bp, Homo sapien
caatttaagaggcatacaaaagaca

SEQ ID NO: 4299936 - DNA, 25 bp, Homo sapien
gcccagcatgcaagacaatttaaga

SEQ ID NO: 4299937 - DNA, 25 bp, Homo sapien
tagatcagccactcaagtcactagg

SEQ ID NO: 4299938 - DNA, 25 bp, Homo sapien
tcacttagatatggctgctctaagc

SEQ ID NO: 4299939 - DNA, 25 bp, Homo sapien
taatgaaactcatgagcaaggctgg

SEQ ID NO: 4299940 - DNA, 25 bp, Homo sapien
gaacactcataataacccaaggagg

SEQ ID NO: 4299941 - DNA, 25 bp, Homo sapien
taacaacagtaatagctgaatccca

SEQ ID NO: 4299942 - DNA, 25 bp, Homo sapien
tatccagcatccatacggcagaagt

SEQ ID NO: 4299943 - DNA, 25 bp, Homo sapien
tgagttaggctatcttcccggagct

SEQ ID NO: 4299944 - DNA, 25 bp, Homo sapien
tgcctcatggagcaacggtgcagtt

SEQ ID NO: 4299945 - DNA, 25 bp, Homo sapien
cgctagatgcagtcagctggaaaca

SEQ ID NO: 4299946 - DNA, 25 bp, Homo sapien
tgggactcaagtgcttcgccaggcc

SEQ ID NO: 4299947 - DNA, 25 bp, Homo sapien
tatctattagctcgtaggaagcaca

SEQ ID NO: 4299948 - DNA, 25 bp, Homo sapien
attagctcgtaggaagcacatgcac

SEQ ID NO: 4299949 - DNA, 25 bp, Homo sapien
gtaagtatctattagctcgtaggaa

SEQ ID NO: 4299950 - DNA, 25 bp, Homo sapien
ggctgtgtaataggagtaagtatct

SEQ ID NO: 4299951 - DNA, 25 bp, Homo sapien
cccatgggcatcacgaagcttgtaa

SEQ ID NO: 4299952 - DNA, 25 bp, Homo sapien
cacaactgtgatgagggtagggcct

SEQ ID NO: 4299953 - DNA, 25 bp, Homo sapien
gccagtgcttaggaatctccgggta

SEQ ID NO: 4299954 - DNA, 25 bp, Homo sapien
caactgcgttgtccctatggctgaa

SEQ ID NO: 4299955 - DNA, 25 bp, Homo sapien
tgatagtactcttgtgtctgcaaaa

SEQ ID NO: 4299956 - DNA, 25 bp, Homo sapien
actaattaacactgttggcctttct

SEQ ID NO: 4299957 - DNA, 25 bp, Homo sapien
taaatctatttgctttcaaggtcca

SEQ ID NO: 4299958 - DNA, 25 bp, Homo sapien
tatgctcctggactgtaagattttg

SEQ ID NO: 4299959 - DNA, 25 bp, Homo sapien
gcctggcacgtagtgaattttaaaa

SEQ ID NO: 4299960 - DNA, 25 bp, Homo sapien
gagtcactacagcagttaacacagt

SEQ ID NO: 4299961 - DNA, 25 bp, Homo sapien
tatgtcaacctatccacagagccca

SEQ ID NO: 4299962 - DNA, 25 bp, Homo sapien
tctgtgacgatgacactatgtcaac

SEQ ID NO: 4299963 - DNA, 25 bp, Homo sapien
caagtgaggtaaaaggaatgattct

SEQ ID NO: 4299964 - DNA, 25 bp, Homo sapien
tattggtaactcgtcttatgatcag

SEQ ID NO: 4299965 - DNA, 25 bp, Homo sapien
tgccaggcaaaagtactagcacaac

SEQ ID NO: 4299966 - DNA, 25 bp, Homo sapien
taactatagtcccttcgcatagaag

SEQ ID NO: 4299967 - DNA, 25 bp, Homo sapien
cagctttagcaccattgttttgcac

SEQ ID NO: 4299968 - DNA, 25 bp, Homo sapien
aagtggcagctttagcaccattgtt

SEQ ID NO: 4299969 - DNA, 25 bp, Homo sapien
ctttagcaccattgttttgcactct

SEQ ID NO: 4299970 - DNA, 25 bp, Homo sapien
gctttagcaccattgttttgcactc

SEQ ID NO: 4299971 - DNA, 25 bp, Homo sapien
tatgcaacagcctagataaatggga

SEQ ID NO: 4299972 - DNA, 25 bp, Homo sapien
cactgcatctgaaaacgggattgac

SEQ ID NO: 4299973 - DNA, 25 bp, Homo sapien
tgcttctattagtgggaccatgacc

SEQ ID NO: 4299974 - DNA, 25 bp, Homo sapien
tgtaaactgtcctggcgccaatggg

SEQ ID NO: 4299975 - DNA, 25 bp, Homo sapien
taaattaggccatggagggaaactc

SEQ ID NO: 4299976 - DNA, 25 bp, Homo sapien
attgctggtgccctcggaagccttc

SEQ ID NO: 4299977 - DNA, 25 bp, Homo sapien
ttaggccatggagggaaactcttgg

SEQ ID NO: 4299978 - DNA, 25 bp, Homo sapien
tggagggaaactcttggattgttcc

SEQ ID NO: 4299979 - DNA, 25 bp, Homo sapien
tttggaatcacaggagttgagagac

SEQ ID NO: 4299980 - DNA, 25 bp, Homo sapien
gactcatgaccatcagttagaaaca

SEQ ID NO: 4299981 - DNA, 25 bp, Homo sapien
aaatccatcagtgactcatgaccat

SEQ ID NO: 4299982 - DNA, 25 bp, Homo sapien
tcacaggagttgagagactgccagc

SEQ ID NO: 4299983 - DNA, 25 bp, Homo sapien
actgtgggtcctcaaaggggaatgt

SEQ ID NO: 4299984 - DNA, 25 bp, Homo sapien
tgggtcctcaaaggggaatgttcca

SEQ ID NO: 4299985 - DNA, 25 bp, Homo sapien
tcatttaactgtgggtcctcaaagg

SEQ ID NO: 4299986 - DNA, 25 bp, Homo sapien
attgtcatttaactgtgggtcctca

SEQ ID NO: 4299987 - DNA, 25 bp, Homo sapien
tgaagaggggtaatagcgagagaat

SEQ ID NO: 4299988 - DNA, 25 bp, Homo sapien
gtaatagcgagagaattaatgtcag

SEQ ID NO: 4299989 - DNA, 25 bp, Homo sapien
ggaaaatgaagaggggtaatagcga

SEQ ID NO: 4299990 - DNA, 25 bp, Homo sapien
gggtaatagcgagagaattaatgtc

SEQ ID NO: 4299991 - DNA, 25 bp, Homo sapien
tgagcctacaagttgccttagctgg

SEQ ID NO: 4299992 - DNA, 25 bp, Homo sapien
gcatgttctcatgcatcgatcacat

SEQ ID NO: 4299993 - DNA, 25 bp, Homo sapien
aaattcttcctaattgactgtggcc

SEQ ID NO: 4299994 - DNA, 25 bp, Homo sapien
gactggtatcgatattctgagactc

SEQ ID NO: 4299995 - DNA, 25 bp, Homo sapien
gcagaaactccctgacatctggata

SEQ ID NO: 4299996 - DNA, 25 bp, Homo sapien
cactcccctgataaaactcttgaca

SEQ ID NO: 4299997 - DNA, 25 bp, Homo sapien
gctactgttatgatggacagattcc

SEQ ID NO: 4299998 - DNA, 25 bp, Homo sapien
catctggatactcaggatggctact

SEQ ID NO: 4299999 - DNA, 25 bp, Homo sapien
tcacactaagcattaggttggtgca

SEQ ID NO: 4300000 - DNA, 25 bp, Homo sapien
caagaaaataggacctgctatggtg

SEQ ID NO: 4300001 - DNA, 25 bp, Homo sapien
gatggtttgactaaaggaggacaag

SEQ ID NO: 4300002 - DNA, 25 bp, Homo sapien
tcagtagcagacactatgctgatgg

SEQ ID NO: 4300003 - DNA, 25 bp, Homo sapien
tataccaagtgactgctaacagcct

SEQ ID NO: 4300004 - DNA, 25 bp, Homo sapien
taccatggtgtgttgcgactggaac

SEQ ID NO: 4300005 - DNA, 25 bp, Homo sapien
caggccacccaagatcacaagattg

SEQ ID NO: 4300006 - DNA, 25 bp, Homo sapien
ttgattccacaaagcgctccactga

SEQ ID NO: 4300007 - DNA, 25 bp, Homo sapien
tgtctgtagtcccactaacttgatt

SEQ ID NO: 4300008 - DNA, 25 bp, Homo sapien
ctgaaaatttggtagttgaatgtac

SEQ ID NO: 4300009 - DNA, 25 bp, Homo sapien
gaaagcatctttttggctgggagga

SEQ ID NO: 4300010 - DNA, 25 bp, Homo sapien
gtcccactaacttgatttggaaggc

SEQ ID NO: 4300011 - DNA, 25 bp, Homo sapien
aagttggtcagttcgcctccctaag

SEQ ID NO: 4300012 - DNA, 25 bp, Homo sapien
tacaacatatgctaccgaggatgca

SEQ ID NO: 4300013 - DNA, 25 bp, Homo sapien
gggttccagtcaacaaaagccattg

SEQ ID NO: 4300014 - DNA, 25 bp, Homo sapien
gacagagacagctacagttactgga

SEQ ID NO: 4300015 - DNA, 25 bp, Homo sapien
tttgccagccacatgtagagtaacg

SEQ ID NO: 4300016 - DNA, 25 bp, Homo sapien
catttgcttaagatcagggtagggc

SEQ ID NO: 4300017 - DNA, 25 bp, Homo sapien
taattttcccggcatgagatgacaa

SEQ ID NO: 4300018 - DNA, 25 bp, Homo sapien
tagagtaacgagcaggcaacatggc

SEQ ID NO: 4300019 - DNA, 25 bp, Homo sapien
caatccctaggactttggcaacaaa

SEQ ID NO: 4300020 - DNA, 25 bp, Homo sapien
aatgatgttccgtgttctcccaaga

SEQ ID NO: 4300021 - DNA, 25 bp, Homo sapien
aagctaaaacctgaagctgacttga

SEQ ID NO: 4300022 - DNA, 25 bp, Homo sapien
aaacgggctatttaagattccagca

SEQ ID NO: 4300023 - DNA, 25 bp, Homo sapien
tgtttatcagttaaatggctgtcca

SEQ ID NO: 4300024 - DNA, 25 bp, Homo sapien
tcttagcagagtctttcagagagaa

SEQ ID NO: 4300025 - DNA, 25 bp, Homo sapien
caagaaccctttgcctagacataga

SEQ ID NO: 4300026 - DNA, 25 bp, Homo sapien
tataaatgttagataatagccctgt

SEQ ID NO: 4300027 - DNA, 25 bp, Homo sapien
cataaaataggtgtagggtgaggcc

SEQ ID NO: 4300028 - DNA, 25 bp, Homo sapien
catgaatattctaggtcaggcagag

SEQ ID NO: 4300029 - DNA, 25 bp, Homo sapien
gaagaagtccttgtcaatcatttcc

SEQ ID NO: 4300030 - DNA, 25 bp, Homo sapien
taacatgggacctgttaagacagaa

SEQ ID NO: 4300031 - DNA, 25 bp, Homo sapien
acaacaagtaaacctcatcagaggg

SEQ ID NO: 4300032 - DNA, 25 bp, Homo sapien
tcatgtgatgtgatggacagagaac

SEQ ID NO: 4300033 - DNA, 25 bp, Homo sapien
tcaagagtgaaatagaaatcaacca

SEQ ID NO: 4300034 - DNA, 25 bp, Homo sapien
cctttgggccttgtcacaacaagta

SEQ ID NO: 4300035 - DNA, 25 bp, Homo sapien
tgtagtcatgaacctaacccagctg

SEQ ID NO: 4300036 - DNA, 25 bp, Homo sapien
gaaagccaagcaccgtaagactcta

SEQ ID NO: 4300037 - DNA, 25 bp, Homo sapien
tgcttgaggcaagcagacccctctt

SEQ ID NO: 4300038 - DNA, 25 bp, Homo sapien
caagacattctttaccagtggacag

SEQ ID NO: 4300039 - DNA, 25 bp, Homo sapien
ttcagcatggccacgaaactcagca

SEQ ID NO: 4300040 - DNA, 25 bp, Homo sapien
tcatggatctctctcaagtgggtgg

SEQ ID NO: 4300041 - DNA, 25 bp, Homo sapien
cgatcaggattcaaacgggtcataa

SEQ ID NO: 4300042 - DNA, 25 bp, Homo sapien
cagagtcttactgccaccggtggag

SEQ ID NO: 4300043 - DNA, 25 bp, Homo sapien
tggaattctatgctcacactttgct

SEQ ID NO: 4300044 - DNA, 25 bp, Homo sapien
ggaattctatgctcacactttgctc

SEQ ID NO: 4300045 - DNA, 25 bp, Homo sapien
tgactgcgttctcattccaccgtgg

SEQ ID NO: 4300046 - DNA, 25 bp, Homo sapien
cagaatatgcaagacgatgggctgc

SEQ ID NO: 4300047 - DNA, 25 bp, Homo sapien
cacagagccaaatgcgggacttgag

SEQ ID NO: 4300048 - DNA, 25 bp, Homo sapien
gcacccggcctatatgagaattttt

SEQ ID NO: 4300049 - DNA, 25 bp, Homo sapien
ggccccatgtaatttgcaatgtctt

SEQ ID NO: 4300050 - DNA, 25 bp, Homo sapien
acttggccaatgtgatatcagcaaa

SEQ ID NO: 4300051 - DNA, 25 bp, Homo sapien
cacctttggatgcttggcttagcca

SEQ ID NO: 4300052 - DNA, 25 bp, Homo sapien
agagagcaaaaatggccccatgtaa

SEQ ID NO: 4300053 - DNA, 25 bp, Homo sapien
gtgaaaggatcaagcaccacagtta

SEQ ID NO: 4300054 - DNA, 25 bp, Homo sapien
gaaaggatcaagcaccacagttaaa

SEQ ID NO: 4300055 - DNA, 25 bp, Homo sapien
aaggatcaagcaccacagttaaaat

SEQ ID NO: 4300056 - DNA, 25 bp, Homo sapien
ttgcaactggggaactgagggtcct

SEQ ID NO: 4300057 - DNA, 25 bp, Homo sapien
ctttttcgaattctgtgacagccca

SEQ ID NO: 4300058 - DNA, 25 bp, Homo sapien
aacaccacttgttttcgccaaagag

SEQ ID NO: 4300059 - DNA, 25 bp, Homo sapien
gttctggtatttatcatctgggctt

SEQ ID NO: 4300060 - DNA, 25 bp, Homo sapien
acttgttttcgccaaagagacagga

SEQ ID NO: 4300061 - DNA, 25 bp, Homo sapien
tgtaaggaaaggacagatccctgct

SEQ ID NO: 4300062 - DNA, 25 bp, Homo sapien
tagaacactaggacattcaagactt

SEQ ID NO: 4300063 - DNA, 25 bp, Homo sapien
cactaaaagagtcaaaggctgagta

SEQ ID NO: 4300064 - DNA, 25 bp, Homo sapien
gaaagttccccattaggtgcatcta

SEQ ID NO: 4300065 - DNA, 25 bp, Homo sapien
taaaacgtggatcagattgccttcc

SEQ ID NO: 4300066 - DNA, 25 bp, Homo sapien
caaaaaggcccgtgtcagagaaatc

SEQ ID NO: 4300067 - DNA, 25 bp, Homo sapien
gaacttcagaaggtatccccagcct

SEQ ID NO: 4300068 - DNA, 25 bp, Homo sapien
ttcaataaacggcagacaaatccca

SEQ ID NO: 4300069 - DNA, 25 bp, Homo sapien
taatgactcattaaaacaactttct

SEQ ID NO: 4300070 - DNA, 25 bp, Homo sapien
ccaaagaaggatgtatcacagtcat

SEQ ID NO: 4300071 - DNA, 25 bp, Homo sapien
ttttctgttaagtcatatttcttcc

SEQ ID NO: 4300072 - DNA, 25 bp, Homo sapien
ttcagttctcataactcattagtta

SEQ ID NO: 4300073 - DNA, 25 bp, Homo sapien
gaatattcctacctccttctgtgag

SEQ ID NO: 4300074 - DNA, 25 bp, Homo sapien
tcactgcattgtggcggtatctcca

SEQ ID NO: 4300075 - DNA, 25 bp, Homo sapien
aattggcacggtcctgctagtgaca

SEQ ID NO: 4300076 - DNA, 25 bp, Homo sapien
gtttcctagcctaaaaagtctgaga

SEQ ID NO: 4300077 - DNA, 25 bp, Homo sapien
taagccgtctccctagctcagtgga

SEQ ID NO: 4300078 - DNA, 25 bp, Homo sapien
gctcagaggccatcttaggacatca

SEQ ID NO: 4300079 - DNA, 25 bp, Homo sapien
tgcagtacagagagcaaggcacgat

SEQ ID NO: 4300080 - DNA, 25 bp, Homo sapien
tagtagggagaccagcaattgtccc

SEQ ID NO: 4300081 - DNA, 25 bp, Homo sapien
taggtctgtcttgatcccacaaaag

SEQ ID NO: 4300082 - DNA, 25 bp, Homo sapien
tttaagtagagtaactaggtctgtc

SEQ ID NO: 4300083 - DNA, 25 bp, Homo sapien
tagctacacgtggttagtggtttcc

SEQ ID NO: 4300084 - DNA, 25 bp, Homo sapien
ccttgtaggacttggcatatttgca

SEQ ID NO: 4300085 - DNA, 25 bp, Homo sapien
tggtttttcaggaggcactctgcct

SEQ ID NO: 4300086 - DNA, 25 bp, Homo sapien
cgagactattcttaaaaacgcccat

SEQ ID NO: 4300087 - DNA, 25 bp, Homo sapien
gccaacaattgtaacgtttgcctaa

SEQ ID NO: 4300088 - DNA, 25 bp, Homo sapien
aacaggctgattatgaagagtgaca

SEQ ID NO: 4300089 - DNA, 25 bp, Homo sapien
gtattcccgcgattagccccaaaga

SEQ ID NO: 4300090 - DNA, 25 bp, Homo sapien
tcttggtctcaacatgactagaggc

SEQ ID NO: 4300091 - DNA, 25 bp, Homo sapien
taacacccctgagcattttgacccg

SEQ ID NO: 4300092 - DNA, 25 bp, Homo sapien
tatgcgaacatcatggcaaccgcgt

SEQ ID NO: 4300093 - DNA, 25 bp, Homo sapien
caaaggcctagtgctgtgctgtcca

SEQ ID NO: 4300094 - DNA, 25 bp, Homo sapien
aactctgtaactctgggtatggcgt

SEQ ID NO: 4300095 - DNA, 25 bp, Homo sapien
catagaattgcggagtggtgcccac

SEQ ID NO: 4300096 - DNA, 25 bp, Homo sapien
gaatagacatctcttgcggacatag

SEQ ID NO: 4300097 - DNA, 25 bp, Homo sapien
ggaactcccgacctcaagtgatcca

SEQ ID NO: 4300098 - DNA, 25 bp, Homo sapien
tcacaatgtcagctaggctggtctg

SEQ ID NO: 4300099 - DNA, 25 bp, Homo sapien
agggtttcacaatgtcagctaggct

SEQ ID NO: 4300100 - DNA, 25 bp, Homo sapien
gacagggtttcacaatgtcagctag

SEQ ID NO: 4300101 - DNA, 25 bp, Homo sapien
ctgacctggcgcacgcctaggctaa

SEQ ID NO: 4300102 - DNA, 25 bp, Homo sapien
tgacctggcgcacgcctaggctaat

SEQ ID NO: 4300103 - DNA, 25 bp, Homo sapien
gacctggcgcacgcctaggctaatg

SEQ ID NO: 4300104 - DNA, 25 bp, Homo sapien
cctggcgcacgcctaggctaatgtg

SEQ ID NO: 4300105 - DNA, 25 bp, Homo sapien
gatggaagaatggtaaagtcgctga

SEQ ID NO: 4300106 - DNA, 25 bp, Homo sapien
catgaattctgctaatgttgaggca

SEQ ID NO: 4300107 - DNA, 25 bp, Homo sapien
aatatgaagcctacagtggcagacc

SEQ ID NO: 4300108 - DNA, 25 bp, Homo sapien
aaaggtggtgctgaaacaagatatc

SEQ ID NO: 4300109 - DNA, 25 bp, Homo sapien
tatccactttacagtcccgatttgg

SEQ ID NO: 4300110 - DNA, 25 bp, Homo sapien
taaaaccaaaggtggactggtcaca

SEQ ID NO: 4300111 - DNA, 25 bp, Homo sapien
gaagctttagcggagaaacagctag

SEQ ID NO: 4300112 - DNA, 25 bp, Homo sapien
tggttttacccgcatgatcctgaag

SEQ ID NO: 4300113 - DNA, 25 bp, Homo sapien
tatgagctagatagagagtcttcca

SEQ ID NO: 4300114 - DNA, 25 bp, Homo sapien
gagtcttccaaaggctaatttgtgc

SEQ ID NO: 4300115 - DNA, 25 bp, Homo sapien
caggacaagtggcagggtttcattt

SEQ ID NO: 4300116 - DNA, 25 bp, Homo sapien
gagacaaaagcgaatgagtcatgcc

SEQ ID NO: 4300117 - DNA, 25 bp, Homo sapien
ggaggtgaaagaagccctgtaatgt

SEQ ID NO: 4300118 - DNA, 25 bp, Homo sapien
acgggatggaggaccctggcagcag

SEQ ID NO: 4300119 - DNA, 25 bp, Homo sapien
cctgtaatgtgaagcacgggatgga

SEQ ID NO: 4300120 - DNA, 25 bp, Homo sapien
aaagaagccctgtaatgtgaagcac

SEQ ID NO: 4300121 - DNA, 25 bp, Homo sapien
ttttccaccagatgcattctctttc

SEQ ID NO: 4300122 - DNA, 25 bp, Homo sapien
agactcactgatcctctgacttact

SEQ ID NO: 4300123 - DNA, 25 bp, Homo sapien
tcctgtgtacctgccagactcactg

SEQ ID NO: 4300124 - DNA, 25 bp, Homo sapien
cttactgttaggttcggccagtgag

SEQ ID NO: 4300125 - DNA, 25 bp, Homo sapien
aaggaccacctttgtacagtcatgc

SEQ ID NO: 4300126 - DNA, 25 bp, Homo sapien
ttcaaggaccacctttgtacagtca

SEQ ID NO: 4300127 - DNA, 25 bp, Homo sapien
gaccacctttgtacagtcatgctca

SEQ ID NO: 4300128 - DNA, 25 bp, Homo sapien
tactttcaaggaccacctttgtaca

SEQ ID NO: 4300129 - DNA, 25 bp, Homo sapien
caatcttaatatggactttcatttg

SEQ ID NO: 4300130 - DNA, 25 bp, Homo sapien
gttttgtggatcaagttaatcattt

SEQ ID NO: 4300131 - DNA, 25 bp, Homo sapien
tcgtttgctttcactgtatgttttg

SEQ ID NO: 4300132 - DNA, 25 bp, Homo sapien
cattttcatgtaaagatcaatctta

SEQ ID NO: 4300133 - DNA, 25 bp, Homo sapien
tcaaggcaatgctaactgttactgg

SEQ ID NO: 4300134 - DNA, 25 bp, Homo sapien
tagctcacccacttgttaaggagga

SEQ ID NO: 4300135 - DNA, 25 bp, Homo sapien
tacagatgcctagtaggtccagagg

SEQ ID NO: 4300136 - DNA, 25 bp, Homo sapien
ggtccagagggttgctattacagtt

SEQ ID NO: 4300137 - DNA, 25 bp, Homo sapien
aaactgttaacccaagcactactga

SEQ ID NO: 4300138 - DNA, 25 bp, Homo sapien
taaatcctggagtaatcataaccct

SEQ ID NO: 4300139 - DNA, 25 bp, Homo sapien
agttgggtgactcctgcaagttcct

SEQ ID NO: 4300140 - DNA, 25 bp, Homo sapien
actttgcagcttaagagttgggtga

SEQ ID NO: 4300141 - DNA, 25 bp, Homo sapien
tttgagaccaatctgtggagttcgt

SEQ ID NO: 4300142 - DNA, 25 bp, Homo sapien
ggagttcgtgttcttgtaaagctga

SEQ ID NO: 4300143 - DNA, 25 bp, Homo sapien
catcatttggtttaccagagctggc

SEQ ID NO: 4300144 - DNA, 25 bp, Homo sapien
gctgaatataggcatcatttggttt

SEQ ID NO: 4300145 - DNA, 25 bp, Homo sapien
gagtgagtctaatgatcaagacaac

SEQ ID NO: 4300146 - DNA, 25 bp, Homo sapien
aaattcagaacctgtctaggacttg

SEQ ID NO: 4300147 - DNA, 25 bp, Homo sapien
tcaagacaactatgaccactactgt

SEQ ID NO: 4300148 - DNA, 25 bp, Homo sapien
tgccaaaggaaggacctctattact

SEQ ID NO: 4300149 - DNA, 25 bp, Homo sapien
gcttcacctagctcagtgtttgcat

SEQ ID NO: 4300150 - DNA, 25 bp, Homo sapien
caaaaaacttgcatggagtgtcttg

SEQ ID NO: 4300151 - DNA, 25 bp, Homo sapien
tgcttactgtccaacacacataatg

SEQ ID NO: 4300152 - DNA, 25 bp, Homo sapien
attaagttgtgcctacatcccaggg

SEQ ID NO: 4300153 - DNA, 25 bp, Homo sapien
tccagctcacagactcgcatgttta

SEQ ID NO: 4300154 - DNA, 25 bp, Homo sapien
gccgaagacagttttgatgagatgg

SEQ ID NO: 4300155 - DNA, 25 bp, Homo sapien
gattctgaaccccatcctagaaaag

SEQ ID NO: 4300156 - DNA, 25 bp, Homo sapien
gggttcaattccaatagcacagatg

SEQ ID NO: 4300157 - DNA, 25 bp, Homo sapien
ctgagacaaaattaactgttgcccc

SEQ ID NO: 4300158 - DNA, 25 bp, Homo sapien
gctcagagtcttctcttagtagctt

SEQ ID NO: 4300159 - DNA, 25 bp, Homo sapien
agctcagagtcttctcttagtagct

SEQ ID NO: 4300160 - DNA, 25 bp, Homo sapien
gagacaaaattaactgttgccccat

SEQ ID NO: 4300161 - DNA, 25 bp, Homo sapien
aataaagggcttctactgtgctctg

SEQ ID NO: 4300162 - DNA, 25 bp, Homo sapien
tacaaaagcccagaagaactgtgcc

SEQ ID NO: 4300163 - DNA, 25 bp, Homo sapien
caaagccttgggtagctagaggcaa

SEQ ID NO: 4300164 - DNA, 25 bp, Homo sapien
taatgatgtccgtggtacccagaac

SEQ ID NO: 4300165 - DNA, 25 bp, Homo sapien
gcaaagtcccataaggtagaaccag

SEQ ID NO: 4300166 - DNA, 25 bp, Homo sapien
gaaccaggtgatatcactatcttta

SEQ ID NO: 4300167 - DNA, 25 bp, Homo sapien
tgctgctgtacctcttgcaaagtcc

SEQ ID NO: 4300168 - DNA, 25 bp, Homo sapien
cttgctgctgtacctcttgcaaagt

SEQ ID NO: 4300169 - DNA, 25 bp, Homo sapien
tcagattccttcttggctgtactac

SEQ ID NO: 4300170 - DNA, 25 bp, Homo sapien
attccttcttggctgtactaccagt

SEQ ID NO: 4300171 - DNA, 25 bp, Homo sapien
ctttgccctcttcagattccttctt

SEQ ID NO: 4300172 - DNA, 25 bp, Homo sapien
gctgtactaccagtaagtttgacca

SEQ ID NO: 4300173 - DNA, 25 bp, Homo sapien
tagtctttcatatacctgggactac

SEQ ID NO: 4300174 - DNA, 25 bp, Homo sapien
ttagtctttcatatacctgggacta

SEQ ID NO: 4300175 - DNA, 25 bp, Homo sapien
cttagtctttcatatacctgggact

SEQ ID NO: 4300176 - DNA, 25 bp, Homo sapien
gatgccggcctcatacttcatgtct

SEQ ID NO: 4300177 - DNA, 25 bp, Homo sapien
tgccggcctcatacttcatgtctaa

SEQ ID NO: 4300178 - DNA, 25 bp, Homo sapien
gccggcctcatacttcatgtctaaa

SEQ ID NO: 4300179 - DNA, 25 bp, Homo sapien
atgccggcctcatacttcatgtcta

SEQ ID NO: 4300180 - DNA, 25 bp, Homo sapien
tgggaatgtaaactacttcaaccac

SEQ ID NO: 4300181 - DNA, 25 bp, Homo sapien
gaagtcagtgtggcggttcctcagg

SEQ ID NO: 4300182 - DNA, 25 bp, Homo sapien
aatgtaaactacttcaaccactgtg

SEQ ID NO: 4300183 - DNA, 25 bp, Homo sapien
gatctagaactagaaataccatttg

SEQ ID NO: 4300184 - DNA, 25 bp, Homo sapien
ccaggagacactacttatccagggt

SEQ ID NO: 4300185 - DNA, 25 bp, Homo sapien
tatcttcttaataaaagggccacca

SEQ ID NO: 4300186 - DNA, 25 bp, Homo sapien
tttctgggcactagtcactgtgcaa

SEQ ID NO: 4300187 - DNA, 25 bp, Homo sapien
gtgcacatctggagccctttctggg

SEQ ID NO: 4300188 - DNA, 25 bp, Homo sapien
tagtatattttaagggttgagccag

SEQ ID NO: 4300189 - DNA, 25 bp, Homo sapien
taataatgacctagttccagaaatc

SEQ ID NO: 4300190 - DNA, 25 bp, Homo sapien
tacatcccagagctagtgaattagt

SEQ ID NO: 4300191 - DNA, 25 bp, Homo sapien
gtttaaaatacaagctacatcccag

SEQ ID NO: 4300192 - DNA, 25 bp, Homo sapien
caagttggtctctcacccaatagcc

SEQ ID NO: 4300193 - DNA, 25 bp, Homo sapien
cagaccatcattatttagggcaaag

SEQ ID NO: 4300194 - DNA, 25 bp, Homo sapien
gggatcccaaacaagccatgctctt

SEQ ID NO: 4300195 - DNA, 25 bp, Homo sapien
caatagccttagaaagcagaccatc

SEQ ID NO: 4300196 - DNA, 25 bp, Homo sapien
gaatactgctttcaccatatctcat

SEQ ID NO: 4300197 - DNA, 25 bp, Homo sapien
taggttttgatacattgcgtttcca

SEQ ID NO: 4300198 - DNA, 25 bp, Homo sapien
ttccaatgctgacagtgggtgaagt

SEQ ID NO: 4300199 - DNA, 25 bp, Homo sapien
ttcctcgagaatgatccatgagctg

SEQ ID NO: 4300200 - DNA, 25 bp, Homo sapien
atttgtctaatacaactctgaactc

SEQ ID NO: 4300201 - DNA, 25 bp, Homo sapien
gcttgtacagataccaccgtggtgg

SEQ ID NO: 4300202 - DNA, 25 bp, Homo sapien
tattgggtcagaaatgaagccagcc

SEQ ID NO: 4300203 - DNA, 25 bp, Homo sapien
tctctccaggattggctacaggtga

SEQ ID NO: 4300204 - DNA, 25 bp, Homo sapien
cactgtggctattgcaggcttgtac

SEQ ID NO: 4300205 - DNA, 25 bp, Homo sapien
gatacctgtcaacttcatgggcctg

SEQ ID NO: 4300206 - DNA, 25 bp, Homo sapien
catgcaaatccgaaacccagtgagg

SEQ ID NO: 4300207 - DNA, 25 bp, Homo sapien
tgaaaacttaacctcagctgggcgc

SEQ ID NO: 4300208 - DNA, 25 bp, Homo sapien
gagaatagatgaagccccaaagggc

SEQ ID NO: 4300209 - DNA, 25 bp, Homo sapien
tgcacccagttcagacaagatttgg

SEQ ID NO: 4300210 - DNA, 25 bp, Homo sapien
gaagaattcacagaaaatcgcctga

SEQ ID NO: 4300211 - DNA, 25 bp, Homo sapien
gttcagggccaactttgtgacccat

SEQ ID NO: 4300212 - DNA, 25 bp, Homo sapien
tttcaggctgctaaagacacaccca

SEQ ID NO: 4300213 - DNA, 25 bp, Homo sapien
cctgcaacaccatgaccagtctttt

SEQ ID NO: 4300214 - DNA, 25 bp, Homo sapien
ttagcaagtgcgatgcctgcaacac

SEQ ID NO: 4300215 - DNA, 25 bp, Homo sapien
tatattccttagcaagtgcgatgcc

SEQ ID NO: 4300216 - DNA, 25 bp, Homo sapien
caccatgaccagtcttttcctgttc

SEQ ID NO: 4300217 - DNA, 25 bp, Homo sapien
tggtcaatgatctgcaagctggtat

SEQ ID NO: 4300218 - DNA, 25 bp, Homo sapien
gataagctgaaaaccaagtgcccgt

SEQ ID NO: 4300219 - DNA, 25 bp, Homo sapien
tctccaagaggtaaagcaacaaagt

SEQ ID NO: 4300220 - DNA, 25 bp, Homo sapien
gcaaaatcatgtctcagcgtggaaa

SEQ ID NO: 4300221 - DNA, 25 bp, Homo sapien
acattgatcaagcatattactggtg

SEQ ID NO: 4300222 - DNA, 25 bp, Homo sapien
gctaagcaactctcctcagaagttc

SEQ ID NO: 4300223 - DNA, 25 bp, Homo sapien
ctccaaagccacggttgctaagcaa

SEQ ID NO: 4300224 - DNA, 25 bp, Homo sapien
tcaagcatattactggtgccaccaa

SEQ ID NO: 4300225 - DNA, 25 bp, Homo sapien
cttacctggtgtctccgaagtggga

SEQ ID NO: 4300226 - DNA, 25 bp, Homo sapien
gctggttaggctcagaagactttta

SEQ ID NO: 4300227 - DNA, 25 bp, Homo sapien
tacctttttggacagactggaggcc

SEQ ID NO: 4300228 - DNA, 25 bp, Homo sapien
catttggctggttaggctcagaaga

SEQ ID NO: 4300229 - DNA, 25 bp, Homo sapien
cctattcacaagagcgaaggacagt

SEQ ID NO: 4300230 - DNA, 25 bp, Homo sapien
tcctggtaccacaggtttcctattc

SEQ ID NO: 4300231 - DNA, 25 bp, Homo sapien
tttgagaaacactacagagggcttg

SEQ ID NO: 4300232 - DNA, 25 bp, Homo sapien
gcttgatgagatgttggccaaatct

SEQ ID NO: 4300233 - DNA, 25 bp, Homo sapien
caaaagctatatattgccgtgaaag

SEQ ID NO: 4300234 - DNA, 25 bp, Homo sapien
gccgtgaaagtattccattagctct

SEQ ID NO: 4300235 - DNA, 25 bp, Homo sapien
caaaccttgggcttataggattcca

SEQ ID NO: 4300236 - DNA, 25 bp, Homo sapien
gaagcttgtgtctaatccacatgcc

SEQ ID NO: 4300237 - DNA, 25 bp, Homo sapien
ggtaaatatgacagaccagccctct

SEQ ID NO: 4300238 - DNA, 25 bp, Homo sapien
tgtagtattctaggcacagggtgca

SEQ ID NO: 4300239 - DNA, 25 bp, Homo sapien
gaagacaacttgaagtgtcccagaa

SEQ ID NO: 4300240 - DNA, 25 bp, Homo sapien
tagagactacaagccagtcaacaag

SEQ ID NO: 4300241 - DNA, 25 bp, Homo sapien
ttttacgtaatgtgaatcagcaacc

SEQ ID NO: 4300242 - DNA, 25 bp, Homo sapien
tatgactcaagtgaggacttgtgtt

SEQ ID NO: 4300243 - DNA, 25 bp, Homo sapien
tcttccactgattgatccgacggag

SEQ ID NO: 4300244 - DNA, 25 bp, Homo sapien
caagtgaggacttgtgtttttacgt

SEQ ID NO: 4300245 - DNA, 25 bp, Homo sapien
caatatcaaggcagtacagactgct

SEQ ID NO: 4300246 - DNA, 25 bp, Homo sapien
taacaattagtatttgggcagaaag

SEQ ID NO: 4300247 - DNA, 25 bp, Homo sapien
tgaaaccagcaccacaagattaccc

SEQ ID NO: 4300248 - DNA, 25 bp, Homo sapien
ccaagctgagcatgtgtaggttaga

SEQ ID NO: 4300249 - DNA, 25 bp, Homo sapien
gcagaagcacccatctcctttagaa

SEQ ID NO: 4300250 - DNA, 25 bp, Homo sapien
tggcaaggcctggatggaatgcaat

SEQ ID NO: 4300251 - DNA, 25 bp, Homo sapien
tgtccataactgtgtgatattgcac

SEQ ID NO: 4300252 - DNA, 25 bp, Homo sapien
tcctagggacatttgagaccatttc

SEQ ID NO: 4300253 - DNA, 25 bp, Homo sapien
atgtccttcctgaactgagaacgaa

SEQ ID NO: 4300254 - DNA, 25 bp, Homo sapien
tgtccttcctgaactgagaacgaac

SEQ ID NO: 4300255 - DNA, 25 bp, Homo sapien
tgactgtcatcatttggattctgac

SEQ ID NO: 4300256 - DNA, 25 bp, Homo sapien
tgggtgagagtgatgagtcaaatga

SEQ ID NO: 4300257 - DNA, 25 bp, Homo sapien
ctgcctccgttcaaggctgggtgag

SEQ ID NO: 4300258 - DNA, 25 bp, Homo sapien
gactgtcatcatttggattctgaca

SEQ ID NO: 4300259 - DNA, 25 bp, Homo sapien
aaacataagttccagttcttggaga

SEQ ID NO: 4300260 - DNA, 25 bp, Homo sapien
ttggagagatgcaagaacatactgc

SEQ ID NO: 4300261 - DNA, 25 bp, Homo sapien
ggagagatgcaagaacatactgctc

SEQ ID NO: 4300262 - DNA, 25 bp, Homo sapien
cataagttccagttcttggagagat

SEQ ID NO: 4300263 - DNA, 25 bp, Homo sapien
ctgaagctgcctttcagcagcaatt

SEQ ID NO: 4300264 - DNA, 25 bp, Homo sapien
gcagcaatttgagggaccaagaaca

SEQ ID NO: 4300265 - DNA, 25 bp, Homo sapien
tctgaagctgcctttcagcagcaat

SEQ ID NO: 4300266 - DNA, 25 bp, Homo sapien
cagcaatttgagggaccaagaacat

SEQ ID NO: 4300267 - DNA, 25 bp, Homo sapien
gtaatggaaaaaggatgagcatgtg

SEQ ID NO: 4300268 - DNA, 25 bp, Homo sapien
taagctcagttaattggaccttctc

SEQ ID NO: 4300269 - DNA, 25 bp, Homo sapien
aaaaggatgagcatgtgtcctaagc

SEQ ID NO: 4300270 - DNA, 25 bp, Homo sapien
ggtcctggagacttctggtatattt

SEQ ID NO: 4300271 - DNA, 25 bp, Homo sapien
actggcatcctaggggggctctcca

SEQ ID NO: 4300272 - DNA, 25 bp, Homo sapien
caaacctggggctacctccctgact

SEQ ID NO: 4300273 - DNA, 25 bp, Homo sapien
gactggcatcctaggggggctctcc

SEQ ID NO: 4300274 - DNA, 25 bp, Homo sapien
acctggggctacctccctgactggc

SEQ ID NO: 4300275 - DNA, 25 bp, Homo sapien
aagtggatactgacatggcaaagaa

SEQ ID NO: 4300276 - DNA, 25 bp, Homo sapien
aagatgtttcttcgttccaaaggag

SEQ ID NO: 4300277 - DNA, 25 bp, Homo sapien
cgacagcctggagtttttaacagaa

SEQ ID NO: 4300278 - DNA, 25 bp, Homo sapien
taacagaatgttcccaatgagcagg

SEQ ID NO: 4300279 - DNA, 25 bp, Homo sapien
cattcacgtacaagcttttgagtgg

SEQ ID NO: 4300280 - DNA, 25 bp, Homo sapien
gtatatatctacaggtggaattgct

SEQ ID NO: 4300281 - DNA, 25 bp, Homo sapien
atcatatggcaattcgtttttcaac

SEQ ID NO: 4300282 - DNA, 25 bp, Homo sapien
tcacgtacaagcttttgagtggaca

SEQ ID NO: 4300283 - DNA, 25 bp, Homo sapien
tcaacctaatccaggggcccatccc

SEQ ID NO: 4300284 - DNA, 25 bp, Homo sapien
gagagcgcgtcttctccaaatgctg

SEQ ID NO: 4300285 - DNA, 25 bp, Homo sapien
tagctccaagttgacatggcccgtt

SEQ ID NO: 4300286 - DNA, 25 bp, Homo sapien
tgtggccaaaagaatacctcggaga

SEQ ID NO: 4300287 - DNA, 25 bp, Homo sapien
tccgcagggacgtaaagaggtgaca

SEQ ID NO: 4300288 - DNA, 25 bp, Homo sapien
aaaccagaaaggaacgaattggcag

SEQ ID NO: 4300289 - DNA, 25 bp, Homo sapien
ttgtgagggtaactatgagacttga

SEQ ID NO: 4300290 - DNA, 25 bp, Homo sapien
tgagacttgaacagtccaccaggga

SEQ ID NO: 4300291 - DNA, 25 bp, Homo sapien
tatgatcaagggtagtagtatctgc

SEQ ID NO: 4300292 - DNA, 25 bp, Homo sapien
tgaagcatcgcaggagcaaaggcaa

SEQ ID NO: 4300293 - DNA, 25 bp, Homo sapien
ttgatgaagcatcgcaggagcaaag

SEQ ID NO: 4300294 - DNA, 25 bp, Homo sapien
tctccagagctaagagagctaatgt

SEQ ID NO: 4300295 - DNA, 25 bp, Homo sapien
tgttacttgatgaagcatcgcagga

SEQ ID NO: 4300296 - DNA, 25 bp, Homo sapien
acaaaattccgccaactgggtacat

SEQ ID NO: 4300297 - DNA, 25 bp, Homo sapien
ctgtcccataatggcttctgttttc

SEQ ID NO: 4300298 - DNA, 25 bp, Homo sapien
ttcacacaaaattccgccaactggg

SEQ ID NO: 4300299 - DNA, 25 bp, Homo sapien
ttctgttttcacacaaaattccgcc

SEQ ID NO: 4300300 - DNA, 25 bp, Homo sapien
tattgattttctacacaccttacag

SEQ ID NO: 4300301 - DNA, 25 bp, Homo sapien
catcactgtcttcttgtgtggttag

SEQ ID NO: 4300302 - DNA, 25 bp, Homo sapien
ttttgaatactcaaagcaccacaaa

SEQ ID NO: 4300303 - DNA, 25 bp, Homo sapien
tctttgtagttaccacagggattat

SEQ ID NO: 4300304 - DNA, 25 bp, Homo sapien
tgtcttgcatcagatttgggaagct

SEQ ID NO: 4300305 - DNA, 25 bp, Homo sapien
cacttttgaaggacaatttgctgaa

SEQ ID NO: 4300306 - DNA, 25 bp, Homo sapien
gagtatactgtgtcttgtgtcttgg

SEQ ID NO: 4300307 - DNA, 25 bp, Homo sapien
tctgtagccctttgactatgtcagc

SEQ ID NO: 4300308 - DNA, 25 bp, Homo sapien
ccatgcagttgttctctaggtgagg

SEQ ID NO: 4300309 - DNA, 25 bp, Homo sapien
agtggcctttttgcacaccctggct

SEQ ID NO: 4300310 - DNA, 25 bp, Homo sapien
cataaactgtgtgcaggctactcct

SEQ ID NO: 4300311 - DNA, 25 bp, Homo sapien
tctaagagctaaagtcaaccacagt

SEQ ID NO: 4300312 - DNA, 25 bp, Homo sapien
tgagtactaaaacctaatatgtgac

SEQ ID NO: 4300313 - DNA, 25 bp, Homo sapien
tctatttgctgattgtgatggcgca

SEQ ID NO: 4300314 - DNA, 25 bp, Homo sapien
gaatgttcttcggttgcttgagata

SEQ ID NO: 4300315 - DNA, 25 bp, Homo sapien
gccttcctgtgtgtaacctaaacat

SEQ ID NO: 4300316 - DNA, 25 bp, Homo sapien
aagcagtaaccctcataatcaaatc

SEQ ID NO: 4300317 - DNA, 25 bp, Homo sapien
gaaagcagtaaccctcataatcaaa

SEQ ID NO: 4300318 - DNA, 25 bp, Homo sapien
aaagcagtaaccctcataatcaaat

SEQ ID NO: 4300319 - DNA, 25 bp, Homo sapien
tgatatgtcagtacacagcagcagt

SEQ ID NO: 4300320 - DNA, 25 bp, Homo sapien
ggttcatttcactacccagtctcac

SEQ ID NO: 4300321 - DNA, 25 bp, Homo sapien
ctttcatgcagaaaaatagtgttcc

SEQ ID NO: 4300322 - DNA, 25 bp, Homo sapien
ttaaagcaacagactcactttgtgc

SEQ ID NO: 4300323 - DNA, 25 bp, Homo sapien
ttgctaataaccgtcttagtgggtg

SEQ ID NO: 4300324 - DNA, 25 bp, Homo sapien
tctgtctttttgctaataaccgtct

SEQ ID NO: 4300325 - DNA, 25 bp, Homo sapien
agccaacgcgcccaaacttatctgt

SEQ ID NO: 4300326 - DNA, 25 bp, Homo sapien
gatgtggtatctcgtaatggttttg

SEQ ID NO: 4300327 - DNA, 25 bp, Homo sapien
aaagaagcaccgaaggaccactggg

SEQ ID NO: 4300328 - DNA, 25 bp, Homo sapien
gtcttctctttttgtagcctcccca

SEQ ID NO: 4300329 - DNA, 25 bp, Homo sapien
gtaatctccatgttgatgcccagga

SEQ ID NO: 4300330 - DNA, 25 bp, Homo sapien
gagtcatggtggacactcggtcact

SEQ ID NO: 4300331 - DNA, 25 bp, Homo sapien
tgaaatagcccaagaccatggtcag

SEQ ID NO: 4300332 - DNA, 25 bp, Homo sapien
gctcagcgagcgtcaccacagtggg

SEQ ID NO: 4300333 - DNA, 25 bp, Homo sapien
gcagctcagcgagcgtcaccacagt

SEQ ID NO: 4300334 - DNA, 25 bp, Homo sapien
tgctgatgaaatagcccaagaccat

SEQ ID NO: 4300335 - DNA, 25 bp, Homo sapien
gctggccttatcattcctggaccca

SEQ ID NO: 4300336 - DNA, 25 bp, Homo sapien
cttgccaccagtgccatatggcatg

SEQ ID NO: 4300337 - DNA, 25 bp, Homo sapien
gacttgccaccagtgccatatggca

SEQ ID NO: 4300338 - DNA, 25 bp, Homo sapien
tgccaccagtgccatatggcatgtg

SEQ ID NO: 4300339 - DNA, 25 bp, Homo sapien
accagtgccatatggcatgtgaagt

SEQ ID NO: 4300340 - DNA, 25 bp, Homo sapien
taattctgtgaaagcaggaaccctc

SEQ ID NO: 4300341 - DNA, 25 bp, Homo sapien
attctgtgaaagcaggaaccctcac

SEQ ID NO: 4300342 - DNA, 25 bp, Homo sapien
caccctgacatataaaccctgtaat

SEQ ID NO: 4300343 - DNA, 25 bp, Homo sapien
aataattctgtgaaagcaggaaccc

SEQ ID NO: 4300344 - DNA, 25 bp, Homo sapien
agggctccgtgtcaatggcaatgtg

SEQ ID NO: 4300345 - DNA, 25 bp, Homo sapien
ctgatagtagggtgctcccggcagt

SEQ ID NO: 4300346 - DNA, 25 bp, Homo sapien
ccggcagtggcagcgtctgcaaaga

SEQ ID NO: 4300347 - DNA, 25 bp, Homo sapien
tcccggcagtggcagcgtctgcaaa

SEQ ID NO: 4300348 - DNA, 25 bp, Homo sapien
gctcccggcagtggcagcgtctgca

SEQ ID NO: 4300349 - DNA, 25 bp, Homo sapien
ttcaaattccgtttacaaatatcta

SEQ ID NO: 4300350 - DNA, 25 bp, Homo sapien
tcaaattccgtttacaaatatctaa

SEQ ID NO: 4300351 - DNA, 25 bp, Homo sapien
gctcggctgtgggactctgcatact

SEQ ID NO: 4300352 - DNA, 25 bp, Homo sapien
tgaggcagaccataatcagaaggca

SEQ ID NO: 4300353 - DNA, 25 bp, Homo sapien
gaccgccagtgctcaaatctgaaaa

SEQ ID NO: 4300354 - DNA, 25 bp, Homo sapien
gcagatcgcatgaaagaccgccagt

SEQ ID NO: 4300355 - DNA, 25 bp, Homo sapien
catccactatcatttttgacagtgg

SEQ ID NO: 4300356 - DNA, 25 bp, Homo sapien
tccactatcatttttgacagtggat

SEQ ID NO: 4300357 - DNA, 25 bp, Homo sapien
cactatcatttttgacagtggatct

SEQ ID NO: 4300358 - DNA, 25 bp, Homo sapien
tcatccactatcatttttgacagtg

SEQ ID NO: 4300359 - DNA, 25 bp, Homo sapien
tgatcatcttcagcaagtggtctgg

SEQ ID NO: 4300360 - DNA, 25 bp, Homo sapien
gaaaggtgttttgtgctccacagct

SEQ ID NO: 4300361 - DNA, 25 bp, Homo sapien
gagctgtcagcacgttgcctgatca

SEQ ID NO: 4300362 - DNA, 25 bp, Homo sapien
aagacagactccactcggactcaac

SEQ ID NO: 4300363 - DNA, 25 bp, Homo sapien
tgctggctcttctcattaagaaaaa

SEQ ID NO: 4300364 - DNA, 25 bp, Homo sapien
ctggctcttctcattaagaaaaatc

SEQ ID NO: 4300365 - DNA, 25 bp, Homo sapien
ttccactggagagtggcctgctggc

SEQ ID NO: 4300366 - DNA, 25 bp, Homo sapien
gaaaaatctccctctggctacacat

SEQ ID NO: 4300367 - DNA, 25 bp, Homo sapien
cagtgattaacataaagggcagtcc

SEQ ID NO: 4300368 - DNA, 25 bp, Homo sapien
gaaagatagaaggaactgtgtcccg

SEQ ID NO: 4300369 - DNA, 25 bp, Homo sapien
taagaatttgataggcagggcttcc

SEQ ID NO: 4300370 - DNA, 25 bp, Homo sapien
aaagtcccatggcaaggcataacca

SEQ ID NO: 4300371 - DNA, 25 bp, Homo sapien
gctccatgtgatccagtcacggtac

SEQ ID NO: 4300372 - DNA, 25 bp, Homo sapien
gggctccatgtgatccagtcacggt

SEQ ID NO: 4300373 - DNA, 25 bp, Homo sapien
aatcctggggctccatgtgatccag

SEQ ID NO: 4300374 - DNA, 25 bp, Homo sapien
tggggctccatgtgatccagtcacg

SEQ ID NO: 4300375 - DNA, 25 bp, Homo sapien
gccttgagaggatgaaccctgtaag

SEQ ID NO: 4300376 - DNA, 25 bp, Homo sapien
tcagaactatattgacttgccagct

SEQ ID NO: 4300377 - DNA, 25 bp, Homo sapien
cagcttcacaactggtaaggcctgg

SEQ ID NO: 4300378 - DNA, 25 bp, Homo sapien
taggctaaataatgcaggtcagatg

SEQ ID NO: 4300379 - DNA, 25 bp, Homo sapien
agcctaggggaggttatggactgaa

SEQ ID NO: 4300380 - DNA, 25 bp, Homo sapien
cctaggggaggttatggactgaatg

SEQ ID NO: 4300381 - DNA, 25 bp, Homo sapien
ctcttaaagcctaggggaggttatg

SEQ ID NO: 4300382 - DNA, 25 bp, Homo sapien
aaagcctaggggaggttatggactg

SEQ ID NO: 4300383 - DNA, 25 bp, Homo sapien
ccagaggtgtaactggaatggactc

SEQ ID NO: 4300384 - DNA, 25 bp, Homo sapien
cattagacaccggatctggacttca

SEQ ID NO: 4300385 - DNA, 25 bp, Homo sapien
gaaggcatcctctattaaccagaaa

SEQ ID NO: 4300386 - DNA, 25 bp, Homo sapien
tgtcttgttttagcagcccaaatgg

SEQ ID NO: 4300387 - DNA, 25 bp, Homo sapien
agaaaaactgcttacagcgtggcaa

SEQ ID NO: 4300388 - DNA, 25 bp, Homo sapien
catagcgcccagacaaacaagcggg

SEQ ID NO: 4300389 - DNA, 25 bp, Homo sapien
aaaggcaagaagccaagcgagggtg

SEQ ID NO: 4300390 - DNA, 25 bp, Homo sapien
aaaactgcttacagcgtggcaagaa

SEQ ID NO: 4300391 - DNA, 25 bp, Homo sapien
atttagaggtatgttcttcagtgcc

SEQ ID NO: 4300392 - DNA, 25 bp, Homo sapien
ggaccaaatttgcatgccagaatga

SEQ ID NO: 4300393 - DNA, 25 bp, Homo sapien
cagttcgcaagggtaatgctttcag

SEQ ID NO: 4300394 - DNA, 25 bp, Homo sapien
catctagtgagatgattctaaggct

SEQ ID NO: 4300395 - DNA, 25 bp, Homo sapien
gattccatctggtgttatctcactt

SEQ ID NO: 4300396 - DNA, 25 bp, Homo sapien
ggtagaattttgctatgacactgct

SEQ ID NO: 4300397 - DNA, 25 bp, Homo sapien
tcttccctctgcaacttttggatca

SEQ ID NO: 4300398 - DNA, 25 bp, Homo sapien
aacaggtcctgtgtagttaaagatc

SEQ ID NO: 4300399 - DNA, 25 bp, Homo sapien
tatatacagatttgggagcttcccc

SEQ ID NO: 4300400 - DNA, 25 bp, Homo sapien
ggtagcagctcgaatctcagttcag

SEQ ID NO: 4300401 - DNA, 25 bp, Homo sapien
ttttctattggaggatggccacccg

SEQ ID NO: 4300402 - DNA, 25 bp, Homo sapien
gaaactcactctggaccgacctgtg

SEQ ID NO: 4300403 - DNA, 25 bp, Homo sapien
tataaggatactcacagcaggtcaa

SEQ ID NO: 4300404 - DNA, 25 bp, Homo sapien
aaatggcagctacaaatagaagtcg

SEQ ID NO: 4300405 - DNA, 25 bp, Homo sapien
taatataatggcatgtcagtcaggt

SEQ ID NO: 4300406 - DNA, 25 bp, Homo sapien
tctccaagggaatctagccctgaaa

SEQ ID NO: 4300407 - DNA, 25 bp, Homo sapien
aggatgcacagagcttttatagagg

SEQ ID NO: 4300408 - DNA, 25 bp, Homo sapien
tatagagggtctaagcaggcaggta

SEQ ID NO: 4300409 - DNA, 25 bp, Homo sapien
agactgctacctcttcggagtcctc

SEQ ID NO: 4300410 - DNA, 25 bp, Homo sapien
gctacctcttcggagtcctcagtgg

SEQ ID NO: 4300411 - DNA, 25 bp, Homo sapien
ctgatatatcagatagatacaatct

SEQ ID NO: 4300412 - DNA, 25 bp, Homo sapien
ccaggcatctttctgatatatcaga

SEQ ID NO: 4300413 - DNA, 25 bp, Homo sapien
ctaccaggcatctttctgatatatc

SEQ ID NO: 4300414 - DNA, 25 bp, Homo sapien
aaatctaccaggcatctttctgata

SEQ ID NO: 4300415 - DNA, 25 bp, Homo sapien
aagatttatttgcatctgagtgtcc

SEQ ID NO: 4300416 - DNA, 25 bp, Homo sapien
gatttatttgcatctgagtgtcctg

SEQ ID NO: 4300417 - DNA, 25 bp, Homo sapien
tcctgtggtgaggcattccacagca

SEQ ID NO: 4300418 - DNA, 25 bp, Homo sapien
cctgtggtgaggcattccacagcag

SEQ ID NO: 4300419 - DNA, 25 bp, Homo sapien
ttagggtacctctgaacagctgttg

SEQ ID NO: 4300420 - DNA, 25 bp, Homo sapien
ccagttagggtacctctgaacagct

SEQ ID NO: 4300421 - DNA, 25 bp, Homo sapien
ttccagttagggtacctctgaacag

SEQ ID NO: 4300422 - DNA, 25 bp, Homo sapien
ggcatttccagttagggtacctctg

SEQ ID NO: 4300423 - DNA, 25 bp, Homo sapien
gaagggaacaaccaatgcctaccat

SEQ ID NO: 4300424 - DNA, 25 bp, Homo sapien
cacaagtatttgtggtgagcagaca

SEQ ID NO: 4300425 - DNA, 25 bp, Homo sapien
tgtcatagacggctgctggatctcc

SEQ ID NO: 4300426 - DNA, 25 bp, Homo sapien
aagtttgacacattctccctaggca

SEQ ID NO: 4300427 - DNA, 25 bp, Homo sapien
ctcctttaagtaatgaaccacagaa

SEQ ID NO: 4300428 - DNA, 25 bp, Homo sapien
ttcgtgctcgggagagaacattgca

SEQ ID NO: 4300429 - DNA, 25 bp, Homo sapien
gaacattgcatatcttcctgtggtt

SEQ ID NO: 4300430 - DNA, 25 bp, Homo sapien
agcaacaccaagaacgagcttcgtg

SEQ ID NO: 4300431 - DNA, 25 bp, Homo sapien
gttccagcctgtttataaaggactc

SEQ ID NO: 4300432 - DNA, 25 bp, Homo sapien
ggtgacacactcctgaatgggactt

SEQ ID NO: 4300433 - DNA, 25 bp, Homo sapien
gcatgttttgcctgctgtgtgtccc

SEQ ID NO: 4300434 - DNA, 25 bp, Homo sapien
caggatgctaaatgtctgactgtat

SEQ ID NO: 4300435 - DNA, 25 bp, Homo sapien
caaagattatagtagaattctacgc

SEQ ID NO: 4300436 - DNA, 25 bp, Homo sapien
gccaactatatttcctgagtgtttc

SEQ ID NO: 4300437 - DNA, 25 bp, Homo sapien
gaggatacaagggaaagccgctaca

SEQ ID NO: 4300438 - DNA, 25 bp, Homo sapien
ctcctgacacatcctgagctgaaga

SEQ ID NO: 4300439 - DNA, 25 bp, Homo sapien
tggcaacattaaccctattgtgaac

SEQ ID NO: 4300440 - DNA, 25 bp, Homo sapien
gggaacctaactgcctgatctccgc

SEQ ID NO: 4300441 - DNA, 25 bp, Homo sapien
tcctgtgtcattcagacaggtcctc

SEQ ID NO: 4300442 - DNA, 25 bp, Homo sapien
caattagtcattgctctaagcaggg

SEQ ID NO: 4300443 - DNA, 25 bp, Homo sapien
cactggtcctgcaaaaaggcaagat

SEQ ID NO: 4300444 - DNA, 25 bp, Homo sapien
taataaacctttgcagaatccactg

SEQ ID NO: 4300445 - DNA, 25 bp, Homo sapien
gattcataacggtaaaggctgctca

SEQ ID NO: 4300446 - DNA, 25 bp, Homo sapien
tgcataatttcaaagcctggagtgg

SEQ ID NO: 4300447 - DNA, 25 bp, Homo sapien
gttgttcttcaggacctctttccaa

SEQ ID NO: 4300448 - DNA, 25 bp, Homo sapien
actgcaagatgcaagctggcttccc

SEQ ID NO: 4300449 - DNA, 25 bp, Homo sapien
tctcctgcagcatgatcagacttct

SEQ ID NO: 4300450 - DNA, 25 bp, Homo sapien
cagggctcagtgagacggctcatct

SEQ ID NO: 4300451 - DNA, 25 bp, Homo sapien
caatctgcaataaacctattgagag

SEQ ID NO: 4300452 - DNA, 25 bp, Homo sapien
ggaatcttgaccagaatgaaataag

SEQ ID NO: 4300453 - DNA, 25 bp, Homo sapien
agccttaatctccaacttgtcatca

SEQ ID NO: 4300454 - DNA, 25 bp, Homo sapien
taaatagtgatgacaagccttaatc

SEQ ID NO: 4300455 - DNA, 25 bp, Homo sapien
gaatacacagggaaataagctgcag

SEQ ID NO: 4300456 - DNA, 25 bp, Homo sapien
cagacacaattccactctcgaggta

SEQ ID NO: 4300457 - DNA, 25 bp, Homo sapien
cattggatgtgtcccggctgaggca

SEQ ID NO: 4300458 - DNA, 25 bp, Homo sapien
cagggaagacaagggtgcatccgtc

SEQ ID NO: 4300459 - DNA, 25 bp, Homo sapien
taatgcagaaagactaggaatctat

SEQ ID NO: 4300460 - DNA, 25 bp, Homo sapien
gagctccatgaacttgccctccaag

SEQ ID NO: 4300461 - DNA, 25 bp, Homo sapien
tgtacatggtacatcaagggttcca

SEQ ID NO: 4300462 - DNA, 25 bp, Homo sapien
tcctgattaatagtcagggtccctt

SEQ ID NO: 4300463 - DNA, 25 bp, Homo sapien
ttatctatctataccacaccgaatc

SEQ ID NO: 4300464 - DNA, 25 bp, Homo sapien
taccacaccgaatcagtcgatcaat

SEQ ID NO: 4300465 - DNA, 25 bp, Homo sapien
cacagattgtaatctcggccaacca

SEQ ID NO: 4300466 - DNA, 25 bp, Homo sapien
tgaccacagattgtaatctcggcca

SEQ ID NO: 4300467 - DNA, 25 bp, Homo sapien
gctttggcatcgacatgaccaaata

SEQ ID NO: 4300468 - DNA, 25 bp, Homo sapien
tgtatctcttgtgatttaagtttaa

SEQ ID NO: 4300469 - DNA, 25 bp, Homo sapien
tttctgctttggcatcgacatgacc

SEQ ID NO: 4300470 - DNA, 25 bp, Homo sapien
tctcttgtgatttaagtttaaacca

SEQ ID NO: 4300471 - DNA, 25 bp, Homo sapien
aaaatagttgcaatgttccaatttt

SEQ ID NO: 4300472 - DNA, 25 bp, Homo sapien
ggcccttcatcaagtgcaatttggt

SEQ ID NO: 4300473 - DNA, 25 bp, Homo sapien
tgcaatgttccaattttgactgcca

SEQ ID NO: 4300474 - DNA, 25 bp, Homo sapien
ccttcatcaagtgcaatttggtagc

SEQ ID NO: 4300475 - DNA, 25 bp, Homo sapien
gttgaattggcccccattctcttct

SEQ ID NO: 4300476 - DNA, 25 bp, Homo sapien
gaatgttgaattggcccccattctc

SEQ ID NO: 4300477 - DNA, 25 bp, Homo sapien
aatgttgaattggcccccattctct

SEQ ID NO: 4300478 - DNA, 25 bp, Homo sapien
tatttcgcccattagttggtgcagt

SEQ ID NO: 4300479 - DNA, 25 bp, Homo sapien
ttgccatttactcctgtatcagata

SEQ ID NO: 4300480 - DNA, 25 bp, Homo sapien
gactgctacaatatctgctttgcca

SEQ ID NO: 4300481 - DNA, 25 bp, Homo sapien
acactgagactgctacaatatctgc

SEQ ID NO: 4300482 - DNA, 25 bp, Homo sapien
gccatttactcctgtatcagatatt

SEQ ID NO: 4300483 - DNA, 25 bp, Homo sapien
ggtggtatcaactgttgtttcatca

SEQ ID NO: 4300484 - DNA, 25 bp, Homo sapien
tggtatcaactgttgtttcatcact

SEQ ID NO: 4300485 - DNA, 25 bp, Homo sapien
gtggtatcaactgttgtttcatcac

SEQ ID NO: 4300486 - DNA, 25 bp, Homo sapien
gaagaacatgttttcttaatgaacc

SEQ ID NO: 4300487 - DNA, 25 bp, Homo sapien
ctgtgaagaacatgttttcttaatg

SEQ ID NO: 4300488 - DNA, 25 bp, Homo sapien
gtgaagaacatgttttcttaatgaa

SEQ ID NO: 4300489 - DNA, 25 bp, Homo sapien
tgaagaacatgttttcttaatgaac

SEQ ID NO: 4300490 - DNA, 25 bp, Homo sapien
tacatattggcaggttggaaagtaa

SEQ ID NO: 4300491 - DNA, 25 bp, Homo sapien
tttcatcatcaacatgacggtctga

SEQ ID NO: 4300492 - DNA, 25 bp, Homo sapien
gtctgatgatgggtgtatgagtttc

SEQ ID NO: 4300493 - DNA, 25 bp, Homo sapien
tttacatattggcaggttggaaagt

SEQ ID NO: 4300494 - DNA, 25 bp, Homo sapien
gctggcagcggatgggtgttataac

SEQ ID NO: 4300495 - DNA, 25 bp, Homo sapien
atgcctgacccttctgggcccgtca

SEQ ID NO: 4300496 - DNA, 25 bp, Homo sapien
gacccttctgggcccgtcatgactt

SEQ ID NO: 4300497 - DNA, 25 bp, Homo sapien
tgttataactcctatggatcatgcc

SEQ ID NO: 4300498 - DNA, 25 bp, Homo sapien
catacagatctggaggatggcctaa

SEQ ID NO: 4300499 - DNA, 25 bp, Homo sapien
caagcatgggacatataggctcacc

SEQ ID NO: 4300500 - DNA, 25 bp, Homo sapien
tgtaaccatgagagcagcacaaacc

SEQ ID NO: 4300501 - DNA, 25 bp, Homo sapien
tcagcagcattagtgacctggctct

SEQ ID NO: 4300502 - DNA, 25 bp, Homo sapien
tccagcaagctatccgatcctcctt

SEQ ID NO: 4300503 - DNA, 25 bp, Homo sapien
cctgaaatttcatgggttctgtggt

SEQ ID NO: 4300504 - DNA, 25 bp, Homo sapien
actccctgaaatttcatgggttctg

SEQ ID NO: 4300505 - DNA, 25 bp, Homo sapien
gtctctccagcaagctatccgatcc

SEQ ID NO: 4300506 - DNA, 25 bp, Homo sapien
ccagcatttgatcggcatgatacat

SEQ ID NO: 4300507 - DNA, 25 bp, Homo sapien
taaacaactttctagagaggaggct

SEQ ID NO: 4300508 - DNA, 25 bp, Homo sapien
cctggaggcctgttcaagactgttc

SEQ ID NO: 4300509 - DNA, 25 bp, Homo sapien
gaactgagtatatggaagacagcct

SEQ ID NO: 4300510 - DNA, 25 bp, Homo sapien
tttgcttaggattcaatgtatatct

SEQ ID NO: 4300511 - DNA, 25 bp, Homo sapien
taagctcttgctacatataagacac

SEQ ID NO: 4300512 - DNA, 25 bp, Homo sapien
agatatcatattacggaaactttaa

SEQ ID NO: 4300513 - DNA, 25 bp, Homo sapien
ttaagatatcatattacggaaactt

SEQ ID NO: 4300514 - DNA, 25 bp, Homo sapien
tatgataagataaggagcagctcgt

SEQ ID NO: 4300515 - DNA, 25 bp, Homo sapien
cattgccagaagtcaattcccgcga

SEQ ID NO: 4300516 - DNA, 25 bp, Homo sapien
caacagcagctaagagagtggcgaa

SEQ ID NO: 4300517 - DNA, 25 bp, Homo sapien
ttgtgtcacatgctatgctccaggg

SEQ ID NO: 4300518 - DNA, 25 bp, Homo sapien
gaagatcttagcatactggaccaga

SEQ ID NO: 4300519 - DNA, 25 bp, Homo sapien
cttggcaacatctggctgaagctgt

SEQ ID NO: 4300520 - DNA, 25 bp, Homo sapien
tggaccagaaagactacttggcaac

SEQ ID NO: 4300521 - DNA, 25 bp, Homo sapien
tctctggatcaaaactggctctagt

SEQ ID NO: 4300522 - DNA, 25 bp, Homo sapien
tattcctcctgactaactgcaaatt

SEQ ID NO: 4300523 - DNA, 25 bp, Homo sapien
attcctcctgactaactgcaaattt

SEQ ID NO: 4300524 - DNA, 25 bp, Homo sapien
ttattcctcctgactaactgcaaat

SEQ ID NO: 4300525 - DNA, 25 bp, Homo sapien
cttattcctcctgactaactgcaaa

SEQ ID NO: 4300526 - DNA, 25 bp, Homo sapien
tttatggaagctaacctcaagaagc

SEQ ID NO: 4300527 - DNA, 25 bp, Homo sapien
gagaaatctggcatgtccatttctg

SEQ ID NO: 4300528 - DNA, 25 bp, Homo sapien
ctcaagaagcaaaacatgctctgtg

SEQ ID NO: 4300529 - DNA, 25 bp, Homo sapien
acttcagatcatccttatgcttggg

SEQ ID NO: 4300530 - DNA, 25 bp, Homo sapien
ctttggcctgagagtgtaatcgttt

SEQ ID NO: 4300531 - DNA, 25 bp, Homo sapien
agtgtaatcgttttttcatctgcca

SEQ ID NO: 4300532 - DNA, 25 bp, Homo sapien
tccctctttggcctgagagtgtaat

SEQ ID NO: 4300533 - DNA, 25 bp, Homo sapien
ggcctgagagtgtaatcgttttttc

SEQ ID NO: 4300534 - DNA, 25 bp, Homo sapien
tctgatatcatgtgaaggcaccaac

SEQ ID NO: 4300535 - DNA, 25 bp, Homo sapien
ttaagaagcaatagactgggtccca

SEQ ID NO: 4300536 - DNA, 25 bp, Homo sapien
gcaccaacatgctatgggcacttag

SEQ ID NO: 4300537 - DNA, 25 bp, Homo sapien
gcagctaaccgcctcagtaaattaa

SEQ ID NO: 4300538 - DNA, 25 bp, Homo sapien
caggcatgagcttcacttagcgtca

SEQ ID NO: 4300539 - DNA, 25 bp, Homo sapien
tgaaacggtaaagtgctttcctcca

SEQ ID NO: 4300540 - DNA, 25 bp, Homo sapien
aacaacggctgacactgacaaggaa

SEQ ID NO: 4300541 - DNA, 25 bp, Homo sapien
gaaggccacgtgatatatgttctgg

SEQ ID NO: 4300542 - DNA, 25 bp, Homo sapien
tctatactctttaagcttatttgca

SEQ ID NO: 4300543 - DNA, 25 bp, Homo sapien
tatttgcacctattgtatttgtaga

SEQ ID NO: 4300544 - DNA, 25 bp, Homo sapien
ctcttcctaattcacttgcagtaaa

SEQ ID NO: 4300545 - DNA, 25 bp, Homo sapien
gagtggaaacactacataatagagt

SEQ ID NO: 4300546 - DNA, 25 bp, Homo sapien
caaagctttgggaatcaaggtaggg

SEQ ID NO: 4300547 - DNA, 25 bp, Homo sapien
ctatgaactgtaggtcactgtagcc

SEQ ID NO: 4300548 - DNA, 25 bp, Homo sapien
tgttatcttgtaggtaatccagcta

SEQ ID NO: 4300549 - DNA, 25 bp, Homo sapien
cacattttacccacaagtgagaatg

SEQ ID NO: 4300550 - DNA, 25 bp, Homo sapien
ttcaaggcctgtgttcactaagaca

SEQ ID NO: 4300551 - DNA, 25 bp, Homo sapien
catggaagttatactgaacaggcaa

SEQ ID NO: 4300552 - DNA, 25 bp, Homo sapien
gagcgccatcgcctgagatttattc

SEQ ID NO: 4300553 - DNA, 25 bp, Homo sapien
ctaaaatgactgagcgccatcgcct

SEQ ID NO: 4300554 - DNA, 25 bp, Homo sapien
taactgctcagatgctcatggccgg

SEQ ID NO: 4300555 - DNA, 25 bp, Homo sapien
taaatcaaggcatgttgggtcattg

SEQ ID NO: 4300556 - DNA, 25 bp, Homo sapien
caacgtcagtgattggagtccagaa

SEQ ID NO: 4300557 - DNA, 25 bp, Homo sapien
tcatggccggtgagtgaatcaactg

SEQ ID NO: 4300558 - DNA, 25 bp, Homo sapien
aaagcctggcacatataccactggg

SEQ ID NO: 4300559 - DNA, 25 bp, Homo sapien
tgcaaactttgaccgcttagaaaag

SEQ ID NO: 4300560 - DNA, 25 bp, Homo sapien
tccacccagggagtgtcgcttaacc

SEQ ID NO: 4300561 - DNA, 25 bp, Homo sapien
gaaaagcgctacaagactggagtgg

SEQ ID NO: 4300562 - DNA, 25 bp, Homo sapien
gaatgtgtgacttcctacagaacaa

SEQ ID NO: 4300563 - DNA, 25 bp, Homo sapien
gagacagcatcccttaagaaaaaat

SEQ ID NO: 4300564 - DNA, 25 bp, Homo sapien
caggttctgaatagtggatgcttcc

SEQ ID NO: 4300565 - DNA, 25 bp, Homo sapien
gaagtgcgctccaaacagtcctagt

SEQ ID NO: 4300566 - DNA, 25 bp, Homo sapien
cagagagcccataaccagctgaggg

SEQ ID NO: 4300567 - DNA, 25 bp, Homo sapien
gggagcatgtccataaatcagcaat

SEQ ID NO: 4300568 - DNA, 25 bp, Homo sapien
tgtccataaatcagcaatatagcag

SEQ ID NO: 4300569 - DNA, 25 bp, Homo sapien
cctgactggtaacccctcagggagg

SEQ ID NO: 4300570 - DNA, 25 bp, Homo sapien
atgaaccagaacaataccttaaaga

SEQ ID NO: 4300571 - DNA, 25 bp, Homo sapien
gtataatgtgagaactgaaggctgt

SEQ ID NO: 4300572 - DNA, 25 bp, Homo sapien
ccaggtgactttagccagtggcata

SEQ ID NO: 4300573 - DNA, 25 bp, Homo sapien
aacagacccgcttgtgtggccaggt

SEQ ID NO: 4300574 - DNA, 25 bp, Homo sapien
tccaccgtctggatgtagatagcac

SEQ ID NO: 4300575 - DNA, 25 bp, Homo sapien
tcccttccaccgtctggatgtagat

SEQ ID NO: 4300576 - DNA, 25 bp, Homo sapien
caccgtctggatgtagatagcacta

SEQ ID NO: 4300577 - DNA, 25 bp, Homo sapien
tctggatgtagatagcactacggac

SEQ ID NO: 4300578 - DNA, 25 bp, Homo sapien
ccaagatccaggactttagagccag

SEQ ID NO: 4300579 - DNA, 25 bp, Homo sapien
gagtgttgcattcctatccgatagt

SEQ ID NO: 4300580 - DNA, 25 bp, Homo sapien
tgagctaaacagacccattgacatt

SEQ ID NO: 4300581 - DNA, 25 bp, Homo sapien
cctatacccagggacaagaggctgg

SEQ ID NO: 4300582 - DNA, 25 bp, Homo sapien
tcaaccttgtgtcgcatctggagct

SEQ ID NO: 4300583 - DNA, 25 bp, Homo sapien
gacattctcagtgggagcttctgca

SEQ ID NO: 4300584 - DNA, 25 bp, Homo sapien
aaaataggcacaacaggaagatgcc

SEQ ID NO: 4300585 - DNA, 25 bp, Homo sapien
tcactgcccattggtttaacaatct

SEQ ID NO: 4300586 - DNA, 25 bp, Homo sapien
caggcccatccctacttagctccca

SEQ ID NO: 4300587 - DNA, 25 bp, Homo sapien
tcaggcccatccctacttagctccc

SEQ ID NO: 4300588 - DNA, 25 bp, Homo sapien
aatcaggcccatccctacttagctc

SEQ ID NO: 4300589 - DNA, 25 bp, Homo sapien
atcaggcccatccctacttagctcc

SEQ ID NO: 4300590 - DNA, 25 bp, Homo sapien
gcaaacaggattttatgcacaggta

SEQ ID NO: 4300591 - DNA, 25 bp, Homo sapien
aagcagggttgccttgagacttgca

SEQ ID NO: 4300592 - DNA, 25 bp, Homo sapien
ataagatacagactccgcaagggcc

SEQ ID NO: 4300593 - DNA, 25 bp, Homo sapien
tacagactccgcaagggccttttca

SEQ ID NO: 4300594 - DNA, 25 bp, Homo sapien
ctgcccaataacatatccacgaaga

SEQ ID NO: 4300595 - DNA, 25 bp, Homo sapien
aatgactctgtaggcatttgccagt

SEQ ID NO: 4300596 - DNA, 25 bp, Homo sapien
agaatgactctgtaggcatttgcca

SEQ ID NO: 4300597 - DNA, 25 bp, Homo sapien
cccaataacatatccacgaagaatg

SEQ ID NO: 4300598 - DNA, 25 bp, Homo sapien
tgctttttcgctgccaccacattta

SEQ ID NO: 4300599 - DNA, 25 bp, Homo sapien
attctgctttttcgctgccaccaca

SEQ ID NO: 4300600 - DNA, 25 bp, Homo sapien
tcgctgccaccacatttactgtgct

SEQ ID NO: 4300601 - DNA, 25 bp, Homo sapien
tttttcgctgccaccacatttactg

SEQ ID NO: 4300602 - DNA, 25 bp, Homo sapien
agcttccttgtattgagtttcaatg

SEQ ID NO: 4300603 - DNA, 25 bp, Homo sapien
tgtattgagtttcaatgtactcctg

SEQ ID NO: 4300604 - DNA, 25 bp, Homo sapien
tgagtttcaatgtactcctgtagct

SEQ ID NO: 4300605 - DNA, 25 bp, Homo sapien
tccttgtattgagtttcaatgtact

SEQ ID NO: 4300606 - DNA, 25 bp, Homo sapien
caggcggccccagtttcaagttctt

SEQ ID NO: 4300607 - DNA, 25 bp, Homo sapien
gatttgcaagcagttcctaattgag

SEQ ID NO: 4300608 - DNA, 25 bp, Homo sapien
tcataacctatagggaagttccgca

SEQ ID NO: 4300609 - DNA, 25 bp, Homo sapien
acattggcccttctggtgtgtccca

SEQ ID NO: 4300610 - DNA, 25 bp, Homo sapien
gagcaactattattaccacggtccc

SEQ ID NO: 4300611 - DNA, 25 bp, Homo sapien
gaagcaagtcgaagaaacatccctg

SEQ ID NO: 4300612 - DNA, 25 bp, Homo sapien
cacatgatatacagcggatgctcga

SEQ ID NO: 4300613 - DNA, 25 bp, Homo sapien
atccctgggttgctatcgctgtaag

SEQ ID NO: 4300614 - DNA, 25 bp, Homo sapien
ccatacttccaccactcttgtatca

SEQ ID NO: 4300615 - DNA, 25 bp, Homo sapien
tcattaaacattcttcgcagccttg

SEQ ID NO: 4300616 - DNA, 25 bp, Homo sapien
aaggccataagtggactgtctgggc

SEQ ID NO: 4300617 - DNA, 25 bp, Homo sapien
taagtggactgtctgggccgaaagt

SEQ ID NO: 4300618 - DNA, 25 bp, Homo sapien
ttggagagtagtggcccactcttgg

SEQ ID NO: 4300619 - DNA, 25 bp, Homo sapien
caggtacatagcagtcttgtcaagc

SEQ ID NO: 4300620 - DNA, 25 bp, Homo sapien
aagtggcccaggtacatagcagtct

SEQ ID NO: 4300621 - DNA, 25 bp, Homo sapien
ttgtcaagcttggagagtagtggcc

SEQ ID NO: 4300622 - DNA, 25 bp, Homo sapien
ttctcacttggctcagggaaacctc

SEQ ID NO: 4300623 - DNA, 25 bp, Homo sapien
gaatccctggatgacagaaaacatg

SEQ ID NO: 4300624 - DNA, 25 bp, Homo sapien
aaaataattaccaggctcgcacgtg

SEQ ID NO: 4300625 - DNA, 25 bp, Homo sapien
tgcaagcctggatattcatgaaagc

SEQ ID NO: 4300626 - DNA, 25 bp, Homo sapien
tttctgcattgctttcggccatctg

SEQ ID NO: 4300627 - DNA, 25 bp, Homo sapien
tgctacttctgaacggcagcgcgtg

SEQ ID NO: 4300628 - DNA, 25 bp, Homo sapien
ttctgaacggcagcgcgtgtccttg

SEQ ID NO: 4300629 - DNA, 25 bp, Homo sapien
ttcggccatctgatattgcagctct

SEQ ID NO: 4300630 - DNA, 25 bp, Homo sapien
cactgccaaaggcaatactcccagg

SEQ ID NO: 4300631 - DNA, 25 bp, Homo sapien
caaggcactgccaaaggcaatactc

SEQ ID NO: 4300632 - DNA, 25 bp, Homo sapien
aaaggcaatactcccaggcaatatc

SEQ ID NO: 4300633 - DNA, 25 bp, Homo sapien
gccaaaggcaatactcccaggcaat

SEQ ID NO: 4300634 - DNA, 25 bp, Homo sapien
caaagcatgactctgcaagggggct

SEQ ID NO: 4300635 - DNA, 25 bp, Homo sapien
tcaccttttaggtgagacaaagcat

SEQ ID NO: 4300636 - DNA, 25 bp, Homo sapien
ctttccaccttacaatcctctagag

SEQ ID NO: 4300637 - DNA, 25 bp, Homo sapien
tgcatcacattataggaccctcttt

SEQ ID NO: 4300638 - DNA, 25 bp, Homo sapien
agttcctgcagcatgttaagatggc

SEQ ID NO: 4300639 - DNA, 25 bp, Homo sapien
caatggtgagagacccaagctttga

SEQ ID NO: 4300640 - DNA, 25 bp, Homo sapien
gaaaaacgtgccatgatctaccatc

SEQ ID NO: 4300641 - DNA, 25 bp, Homo sapien
gattactctgtaagcgacaaggaaa

SEQ ID NO: 4300642 - DNA, 25 bp, Homo sapien
ctagtctgactttctgattgcttct

SEQ ID NO: 4300643 - DNA, 25 bp, Homo sapien
ttcagattcactggaaagcccctct

SEQ ID NO: 4300644 - DNA, 25 bp, Homo sapien
cttggcaaaccactttggttttcag

SEQ ID NO: 4300645 - DNA, 25 bp, Homo sapien
tcctgaatgaaagccaagttctagt

SEQ ID NO: 4300646 - DNA, 25 bp, Homo sapien
taggcaagtttgttacctgagtata

SEQ ID NO: 4300647 - DNA, 25 bp, Homo sapien
tgtctatgagtacccaacatttagc

SEQ ID NO: 4300648 - DNA, 25 bp, Homo sapien
catccaggtactgagaatagtactc

SEQ ID NO: 4300649 - DNA, 25 bp, Homo sapien
gagaatagtactcaacagttagctt

SEQ ID NO: 4300650 - DNA, 25 bp, Homo sapien
tgcctagaaaattgactgacaggct

SEQ ID NO: 4300651 - DNA, 25 bp, Homo sapien
ttttgagtaatgtctataaattgcc

SEQ ID NO: 4300652 - DNA, 25 bp, Homo sapien
ctcgacaacagtttataagcatcct

SEQ ID NO: 4300653 - DNA, 25 bp, Homo sapien
gcccatcttttaatagagttacttg

SEQ ID NO: 4300654 - DNA, 25 bp, Homo sapien
gttcaagaccagcctggccaacatg

SEQ ID NO: 4300655 - DNA, 25 bp, Homo sapien
ggctgaggtggacagatcacccaag

SEQ ID NO: 4300656 - DNA, 25 bp, Homo sapien
gtggacagatcacccaaggtcagca

SEQ ID NO: 4300657 - DNA, 25 bp, Homo sapien
ctgaggtggacagatcacccaaggt

SEQ ID NO: 4300658 - DNA, 25 bp, Homo sapien
cagggaatgactccagacagggtgg

SEQ ID NO: 4300659 - DNA, 25 bp, Homo sapien
ggaatgactccagacagggtggtcc

SEQ ID NO: 4300660 - DNA, 25 bp, Homo sapien
agggaatgactccagacagggtggt

SEQ ID NO: 4300661 - DNA, 25 bp, Homo sapien
gggaatgactccagacagggtggtc

SEQ ID NO: 4300662 - DNA, 25 bp, Homo sapien
tgaaagaatttaacctaatggcagt

SEQ ID NO: 4300663 - DNA, 25 bp, Homo sapien
ctaatggcagttgcctgaggcacaa

SEQ ID NO: 4300664 - DNA, 25 bp, Homo sapien
aatttaacctaatggcagttgcctg

SEQ ID NO: 4300665 - DNA, 25 bp, Homo sapien
gttgcctgaggcacaactttctcaa

SEQ ID NO: 4300666 - DNA, 25 bp, Homo sapien
actcacagcaaggagcacgggatca

SEQ ID NO: 4300667 - DNA, 25 bp, Homo sapien
tccagagctccagtgtgggatgact

SEQ ID NO: 4300668 - DNA, 25 bp, Homo sapien
tccagtgtgggatgactcacagcaa

SEQ ID NO: 4300669 - DNA, 25 bp, Homo sapien
ggagcacgggatcaaaatttttgag

SEQ ID NO: 4300670 - DNA, 25 bp, Homo sapien
tagtctctatcatccccttgaatga

SEQ ID NO: 4300671 - DNA, 25 bp, Homo sapien
gtgactctggcaagggtgggcgcct

SEQ ID NO: 4300672 - DNA, 25 bp, Homo sapien
tgacctacatcaaaccattcagatt

SEQ ID NO: 4300673 - DNA, 25 bp, Homo sapien
cacagggagttgcacgggtagccat

SEQ ID NO: 4300674 - DNA, 25 bp, Homo sapien
acagactgttctcagtggatttctc

SEQ ID NO: 4300675 - DNA, 25 bp, Homo sapien
ttacagactgttctcagtggatttc

SEQ ID NO: 4300676 - DNA, 25 bp, Homo sapien
ttctcttctttcctgagcttcaaag

SEQ ID NO: 4300677 - DNA, 25 bp, Homo sapien
ctttacagactgttctcagtggatt

SEQ ID NO: 4300678 - DNA, 25 bp, Homo sapien
tattcagccaccagctcaatttgga

SEQ ID NO: 4300679 - DNA, 25 bp, Homo sapien
gcagacagttctagcagcgttattc

SEQ ID NO: 4300680 - DNA, 25 bp, Homo sapien
gggcaccagcggcaagatttctgct

SEQ ID NO: 4300681 - DNA, 25 bp, Homo sapien
gctttgcaacaacagtcagctctga

SEQ ID NO: 4300682 - DNA, 25 bp, Homo sapien
tattctgccagtcggacaaattcca

SEQ ID NO: 4300683 - DNA, 25 bp, Homo sapien
tcggacaaattccattcgacaaatt

SEQ ID NO: 4300684 - DNA, 25 bp, Homo sapien
gataggccaagcagcagaacagagt

SEQ ID NO: 4300685 - DNA, 25 bp, Homo sapien
cacagtttgcatgataggccaagca

SEQ ID NO: 4300686 - DNA, 25 bp, Homo sapien
cagcaatgagatacaatcgtgatga

SEQ ID NO: 4300687 - DNA, 25 bp, Homo sapien
cattactagagaagaagtgggtcaa

SEQ ID NO: 4300688 - DNA, 25 bp, Homo sapien
tcaattaccctgatagtccaggaag

SEQ ID NO: 4300689 - DNA, 25 bp, Homo sapien
gaagcaacttgttccgcctgtcagc

SEQ ID NO: 4300690 - DNA, 25 bp, Homo sapien
cctttcattgtattcatctgcctca

SEQ ID NO: 4300691 - DNA, 25 bp, Homo sapien
tcagtccctttcattgtattcatct

SEQ ID NO: 4300692 - DNA, 25 bp, Homo sapien
ctttcattgtattcatctgcctcac

SEQ ID NO: 4300693 - DNA, 25 bp, Homo sapien
gtccctttcattgtattcatctgcc

SEQ ID NO: 4300694 - DNA, 25 bp, Homo sapien
tactgctagggctttgttcttgatt

SEQ ID NO: 4300695 - DNA, 25 bp, Homo sapien
gggtatcgcagatgctctgatcaga

SEQ ID NO: 4300696 - DNA, 25 bp, Homo sapien
cagagaagtcaaatcaggagggata

SEQ ID NO: 4300697 - DNA, 25 bp, Homo sapien
gatatggatgtgataccgcattagg

SEQ ID NO: 4300698 - DNA, 25 bp, Homo sapien
gggagtgctgatcggtcgaattgga

SEQ ID NO: 4300699 - DNA, 25 bp, Homo sapien
ttggtgggtagcgggccaggcagtg

SEQ ID NO: 4300700 - DNA, 25 bp, Homo sapien
ctgatcggtcgaattggagatgaaa

SEQ ID NO: 4300701 - DNA, 25 bp, Homo sapien
atcggtcgaattggagatgaaatca

SEQ ID NO: 4300702 - DNA, 25 bp, Homo sapien
agaatcagctgcgaatcattccaca

SEQ ID NO: 4300703 - DNA, 25 bp, Homo sapien
tttagaatcagctgcgaatcattcc

SEQ ID NO: 4300704 - DNA, 25 bp, Homo sapien
atcagctgcgaatcattccacaatg

SEQ ID NO: 4300705 - DNA, 25 bp, Homo sapien
actttagaatcagctgcgaatcatt

SEQ ID NO: 4300706 - DNA, 25 bp, Homo sapien
atactccggtttgctcctgtcctgg

SEQ ID NO: 4300707 - DNA, 25 bp, Homo sapien
taaattcgatgcctctttgcctgtt

SEQ ID NO: 4300708 - DNA, 25 bp, Homo sapien
gagttctcccacaacaataaattcg

SEQ ID NO: 4300709 - DNA, 25 bp, Homo sapien
tgccttctctatactccggtttgct

SEQ ID NO: 4300710 - DNA, 25 bp, Homo sapien
aatacgcgcagagcatgcgcctacg

SEQ ID NO: 4300711 - DNA, 25 bp, Homo sapien
gaaagccatagtgacagtaaccctg

SEQ ID NO: 4300712 - DNA, 25 bp, Homo sapien
tacgccgggccaattgaaagccata

SEQ ID NO: 4300713 - DNA, 25 bp, Homo sapien
gagggcaaaaagtcctgtgaccgga

SEQ ID NO: 4300714 - DNA, 25 bp, Homo sapien
gcagtccctggcttgatccatcaaa

SEQ ID NO: 4300715 - DNA, 25 bp, Homo sapien
cgcgtttaactatcccttcacgact

SEQ ID NO: 4300716 - DNA, 25 bp, Homo sapien
cccactggctggatttcttttcgtt

SEQ ID NO: 4300717 - DNA, 25 bp, Homo sapien
gaaacacagacttgcagtccctggc

SEQ ID NO: 4300718 - DNA, 25 bp, Homo sapien
gggaataccctgatagctgataaag

SEQ ID NO: 4300719 - DNA, 25 bp, Homo sapien
tattttaggccatgtctgtgacggt

SEQ ID NO: 4300720 - DNA, 25 bp, Homo sapien
tactcgaactaggtgaaagcttagg

SEQ ID NO: 4300721 - DNA, 25 bp, Homo sapien
tcaacttgatgggttagggaatacc

SEQ ID NO: 4300722 - DNA, 25 bp, Homo sapien
gggtgtgggcattcaagtatagcct

SEQ ID NO: 4300723 - DNA, 25 bp, Homo sapien
tgtttcagatcaatgttctggtgat

SEQ ID NO: 4300724 - DNA, 25 bp, Homo sapien
actgaatggttactaccctgggtct

SEQ ID NO: 4300725 - DNA, 25 bp, Homo sapien
tcttctaccgaaagaaagaacatgg

SEQ ID NO: 4300726 - DNA, 25 bp, Homo sapien
tccccttgaggagagctttgttcca

SEQ ID NO: 4300727 - DNA, 25 bp, Homo sapien
ttctttccccttgaggagagctttg

SEQ ID NO: 4300728 - DNA, 25 bp, Homo sapien
tttccccttgaggagagctttgttc

SEQ ID NO: 4300729 - DNA, 25 bp, Homo sapien
ccccttgaggagagctttgttccac

SEQ ID NO: 4300730 - DNA, 25 bp, Homo sapien
ttttacgagattttcagttatgaac

SEQ ID NO: 4300731 - DNA, 25 bp, Homo sapien
tcagttatgaactcaatttctttaa

SEQ ID NO: 4300732 - DNA, 25 bp, Homo sapien
tcaagacattgatgtgcagttgtct

SEQ ID NO: 4300733 - DNA, 25 bp, Homo sapien
tatcagggtaatattaacctcagaa

SEQ ID NO: 4300734 - DNA, 25 bp, Homo sapien
aggaattcaatgtctcacaattctg

SEQ ID NO: 4300735 - DNA, 25 bp, Homo sapien
aagtacatccaactaaatggcttaa

SEQ ID NO: 4300736 - DNA, 25 bp, Homo sapien
tgcatcactccaatcacatggctgt

SEQ ID NO: 4300737 - DNA, 25 bp, Homo sapien
ggctgatgtaactaagtacatccaa

SEQ ID NO: 4300738 - DNA, 25 bp, Homo sapien
aacaggcactactcacttttaacag

SEQ ID NO: 4300739 - DNA, 25 bp, Homo sapien
gtatagaaggccacaaatttcctcc

SEQ ID NO: 4300740 - DNA, 25 bp, Homo sapien
cacatcctgagcttctaagggttag

SEQ ID NO: 4300741 - DNA, 25 bp, Homo sapien
cattacttcacaataattcaaccca

SEQ ID NO: 4300742 - DNA, 25 bp, Homo sapien
ggtctgagatgctccaaccaacagc

SEQ ID NO: 4300743 - DNA, 25 bp, Homo sapien
tgtaaataagtctgagacaggctgc

SEQ ID NO: 4300744 - DNA, 25 bp, Homo sapien
ggaatcttagactacgaagccccag

SEQ ID NO: 4300745 - DNA, 25 bp, Homo sapien
gatgcatgagtgacctcacacagaa

SEQ ID NO: 4300746 - DNA, 25 bp, Homo sapien
cgcgcagcttgtgaattgcacttat

SEQ ID NO: 4300747 - DNA, 25 bp, Homo sapien
tcatacatggataccatctacgcgc

SEQ ID NO: 4300748 - DNA, 25 bp, Homo sapien
tgaattttgggtactttaagagctg

SEQ ID NO: 4300749 - DNA, 25 bp, Homo sapien
ggataccatctacgcgcagcttgtg

SEQ ID NO: 4300750 - DNA, 25 bp, Homo sapien
aaacaaacaacagttatactcagat

SEQ ID NO: 4300751 - DNA, 25 bp, Homo sapien
aagggtcaactctattctgattttt

SEQ ID NO: 4300752 - DNA, 25 bp, Homo sapien
cccttgagtcgttcaagggtcaact

SEQ ID NO: 4300753 - DNA, 25 bp, Homo sapien
tactcagattttcgaccgtgcagga

SEQ ID NO: 4300754 - DNA, 25 bp, Homo sapien
atgttactcacagcagaaattaagg

SEQ ID NO: 4300755 - DNA, 25 bp, Homo sapien
ggatgggggtagtgttctgactcct

SEQ ID NO: 4300756 - DNA, 25 bp, Homo sapien
tctgtgatggcccattgcaggggcc

SEQ ID NO: 4300757 - DNA, 25 bp, Homo sapien
caggggccactgttacgggggatgg

SEQ ID NO: 4300758 - DNA, 25 bp, Homo sapien
ttcagactgatgctttccgagacac

SEQ ID NO: 4300759 - DNA, 25 bp, Homo sapien
cagagggtttcagactgatgctttc

SEQ ID NO: 4300760 - DNA, 25 bp, Homo sapien
ccagagatgatgctaggagccagag

SEQ ID NO: 4300761 - DNA, 25 bp, Homo sapien
gccagagatgatgctaggagccaga

SEQ ID NO: 4300762 - DNA, 25 bp, Homo sapien
tgtgtccgtgtaccattgggcacaa

SEQ ID NO: 4300763 - DNA, 25 bp, Homo sapien
tggcagcatctactcctggagtagg

SEQ ID NO: 4300764 - DNA, 25 bp, Homo sapien
tgggcacaatccttctcaggatggc

SEQ ID NO: 4300765 - DNA, 25 bp, Homo sapien
gaaatgcctagagcttgtgtccgtg

SEQ ID NO: 4300766 - DNA, 25 bp, Homo sapien
tctctcaatattcaccctgtctctg

SEQ ID NO: 4300767 - DNA, 25 bp, Homo sapien
ctctcaatattcaccctgtctctga

SEQ ID NO: 4300768 - DNA, 25 bp, Homo sapien
gggggtgatctgtctagcttgtgga

SEQ ID NO: 4300769 - DNA, 25 bp, Homo sapien
ggtgatctgtctagcttgtggactc

SEQ ID NO: 4300770 - DNA, 25 bp, Homo sapien
ctgtgggctgttagttacatgggca

SEQ ID NO: 4300771 - DNA, 25 bp, Homo sapien
tgtgggctgttagttacatgggcat

SEQ ID NO: 4300772 - DNA, 25 bp, Homo sapien
tgggctgttagttacatgggcattt

SEQ ID NO: 4300773 - DNA, 25 bp, Homo sapien
ggctgttagttacatgggcatttct

SEQ ID NO: 4300774 - DNA, 25 bp, Homo sapien
ttccaagaaagggactagatgtcag

SEQ ID NO: 4300775 - DNA, 25 bp, Homo sapien
ggtcagcagtgttgcaattccaaga

SEQ ID NO: 4300776 - DNA, 25 bp, Homo sapien
tatattctccaagatgggtcagcag

SEQ ID NO: 4300777 - DNA, 25 bp, Homo sapien
tatagtgttacgtagctgctcaaag

SEQ ID NO: 4300778 - DNA, 25 bp, Homo sapien
tgatcaagatttgggtcacgttcag

SEQ ID NO: 4300779 - DNA, 25 bp, Homo sapien
cacgttcagctggaccaataactga

SEQ ID NO: 4300780 - DNA, 25 bp, Homo sapien
gatttgggtcacgttcagctggacc

SEQ ID NO: 4300781 - DNA, 25 bp, Homo sapien
tcttaatgatcaagatttgggtcac

SEQ ID NO: 4300782 - DNA, 25 bp, Homo sapien
cattctaggggtctagaattggtat

SEQ ID NO: 4300783 - DNA, 25 bp, Homo sapien
attctaggggtctagaattggtatt

SEQ ID NO: 4300784 - DNA, 25 bp, Homo sapien
tcattctaggggtctagaattggta

SEQ ID NO: 4300785 - DNA, 25 bp, Homo sapien
cttgacactgtagtggtatggacag

SEQ ID NO: 4300786 - DNA, 25 bp, Homo sapien
acactgtagtggtatggacagccac

SEQ ID NO: 4300787 - DNA, 25 bp, Homo sapien
tccttgacactgtagtggtatggac

SEQ ID NO: 4300788 - DNA, 25 bp, Homo sapien
ccttccttgacactgtagtggtatg

SEQ ID NO: 4300789 - DNA, 25 bp, Homo sapien
tgtcagtctgagactgctcagccac

SEQ ID NO: 4300790 - DNA, 25 bp, Homo sapien
agatgcatcaaacactactgtcagt

SEQ ID NO: 4300791 - DNA, 25 bp, Homo sapien
gccacatcgctaccgctctcatttc

SEQ ID NO: 4300792 - DNA, 25 bp, Homo sapien
tgctcagccacatcgctaccgctct

SEQ ID NO: 4300793 - DNA, 25 bp, Homo sapien
tcctgcttctctttagaagtgacat

SEQ ID NO: 4300794 - DNA, 25 bp, Homo sapien
taacagagtggctacaaacttaatt

SEQ ID NO: 4300795 - DNA, 25 bp, Homo sapien
gaaggtctgagcaaagataacagag

SEQ ID NO: 4300796 - DNA, 25 bp, Homo sapien
tagagggaaggtctgagcaaagata

SEQ ID NO: 4300797 - DNA, 25 bp, Homo sapien
gatgctgtttgatgccttgtcagca

SEQ ID NO: 4300798 - DNA, 25 bp, Homo sapien
tccttcttcgtacagagcctcggtt

SEQ ID NO: 4300799 - DNA, 25 bp, Homo sapien
ggttttgtacagatatctgtcctcc

SEQ ID NO: 4300800 - DNA, 25 bp, Homo sapien
gctgtttgatgccttgtcagcatcc

SEQ ID NO: 4300801 - DNA, 25 bp, Homo sapien
ctgagcagcaagggagaagctgagc

SEQ ID NO: 4300802 - DNA, 25 bp, Homo sapien
tgagcagcaagggagaagctgagcc

SEQ ID NO: 4300803 - DNA, 25 bp, Homo sapien
gagcagcaagggagaagctgagcca

SEQ ID NO: 4300804 - DNA, 25 bp, Homo sapien
tgaatcccagcatggctacctagtg

SEQ ID NO: 4300805 - DNA, 25 bp, Homo sapien
gacagcccttctattaataatgcag

SEQ ID NO: 4300806 - DNA, 25 bp, Homo sapien
tagtgcctggcgcagtctaagtgct

SEQ ID NO: 4300807 - DNA, 25 bp, Homo sapien
taaaatctgcagtactactactggc

SEQ ID NO: 4300808 - DNA, 25 bp, Homo sapien
ggctgggatggttcagcaggcctgg

SEQ ID NO: 4300809 - DNA, 25 bp, Homo sapien
gatggttcagcaggcctggctccat

SEQ ID NO: 4300810 - DNA, 25 bp, Homo sapien
ctgggatggttcagcaggcctggct

SEQ ID NO: 4300811 - DNA, 25 bp, Homo sapien
gggatggttcagcaggcctggctcc

SEQ ID NO: 4300812 - DNA, 25 bp, Homo sapien
catatgaactcataatgaggtggcc

SEQ ID NO: 4300813 - DNA, 25 bp, Homo sapien
ggaatccgccaggaatcaaatacct

SEQ ID NO: 4300814 - DNA, 25 bp, Homo sapien
tcctcgtccggtgaatggagcagtt

SEQ ID NO: 4300815 - DNA, 25 bp, Homo sapien
tgaggtggcctcacagatttgtaat

SEQ ID NO: 4300816 - DNA, 25 bp, Homo sapien
tgatcatagagtggattttcaaaca

SEQ ID NO: 4300817 - DNA, 25 bp, Homo sapien
ctttaaggttatccagtgcagggct

SEQ ID NO: 4300818 - DNA, 25 bp, Homo sapien
gctttgatcatagagtggattttca

SEQ ID NO: 4300819 - DNA, 25 bp, Homo sapien
ttctttaaggttatccagtgcaggg

SEQ ID NO: 4300820 - DNA, 25 bp, Homo sapien
cagttgctgtttgtagaagtcacat

SEQ ID NO: 4300821 - DNA, 25 bp, Homo sapien
agttgctgtttgtagaagtcacata

SEQ ID NO: 4300822 - DNA, 25 bp, Homo sapien
tcagttgctgtttgtagaagtcaca

SEQ ID NO: 4300823 - DNA, 25 bp, Homo sapien
gttgctgtttgtagaagtcacatac

SEQ ID NO: 4300824 - DNA, 25 bp, Homo sapien
ggcttcacctgtttgaggattataa

SEQ ID NO: 4300825 - DNA, 25 bp, Homo sapien
tgtctgtatccaccaaatcgtgaac

SEQ ID NO: 4300826 - DNA, 25 bp, Homo sapien
gaaccttctcagagtcatagtccca

SEQ ID NO: 4300827 - DNA, 25 bp, Homo sapien
gaaagatgacattgcggttagcact

SEQ ID NO: 4300828 - DNA, 25 bp, Homo sapien
gctcaacttcccagcagtgttagga

SEQ ID NO: 4300829 - DNA, 25 bp, Homo sapien
tttcagttatctgcagttgcctgca

SEQ ID NO: 4300830 - DNA, 25 bp, Homo sapien
agtagtccacccttatctgcggttt

SEQ ID NO: 4300831 - DNA, 25 bp, Homo sapien
cagggaattgttatcagaagtgagg

SEQ ID NO: 4300832 - DNA, 25 bp, Homo sapien
gagagagaccaaaactatattcaca

SEQ ID NO: 4300833 - DNA, 25 bp, Homo sapien
ttagagctctcagccctaaatggaa

SEQ ID NO: 4300834 - DNA, 25 bp, Homo sapien
ctaaatttgagctatcctgaaggtc

SEQ ID NO: 4300835 - DNA, 25 bp, Homo sapien
gcttctaataactggagagctcacc

SEQ ID NO: 4300836 - DNA, 25 bp, Homo sapien
tgaccaacagttagatagcctctgc

SEQ ID NO: 4300837 - DNA, 25 bp, Homo sapien
tctacaagctggtgactggacccac

SEQ ID NO: 4300838 - DNA, 25 bp, Homo sapien
tggacccacaatacccagaagaggt

SEQ ID NO: 4300839 - DNA, 25 bp, Homo sapien
gctttgctgctcatatgcgaggacc

SEQ ID NO: 4300840 - DNA, 25 bp, Homo sapien
tgcgaggacctttcttggccagcct

SEQ ID NO: 4300841 - DNA, 25 bp, Homo sapien
tgagcttgaagctaagcaatttccg

SEQ ID NO: 4300842 - DNA, 25 bp, Homo sapien
gcttgaagctaagcaatttccgtgc

SEQ ID NO: 4300843 - DNA, 25 bp, Homo sapien
ttgaagctaagcaatttccgtgcac

SEQ ID NO: 4300844 - DNA, 25 bp, Homo sapien
gaagctaagcaatttccgtgcacca

SEQ ID NO: 4300845 - DNA, 25 bp, Homo sapien
atatatataaaagtaggccaggcgc

SEQ ID NO: 4300846 - DNA, 25 bp, Homo sapien
atatatatataaaagtaggccaggc

SEQ ID NO: 4300847 - DNA, 25 bp, Homo sapien
gagacttcatctcaatatatatata

SEQ ID NO: 4300848 - DNA, 25 bp, Homo sapien
cctgggctacacagcgagacttcat

SEQ ID NO: 4300849 - DNA, 25 bp, Homo sapien
gtggctgtgtatcttagtaaataaa

SEQ ID NO: 4300850 - DNA, 25 bp, Homo sapien
taaagaacgatgttaacctctccag

SEQ ID NO: 4300851 - DNA, 25 bp, Homo sapien
aatgctggtgactattgagtttggc

SEQ ID NO: 4300852 - DNA, 25 bp, Homo sapien
gactattgagtttggccagaaaatc

SEQ ID NO: 4300853 - DNA, 25 bp, Homo sapien
gctggtaccggtatcaagaggctca

SEQ ID NO: 4300854 - DNA, 25 bp, Homo sapien
gacccagaatcaggtcagaggactg

SEQ ID NO: 4300855 - DNA, 25 bp, Homo sapien
tatgagttgttcaccgagacccaga

SEQ ID NO: 4300856 - DNA, 25 bp, Homo sapien
gaggaacattggatgtgtctgtccc

SEQ ID NO: 4300857 - DNA, 25 bp, Homo sapien
catatggtcatactccaaagctaga

SEQ ID NO: 4300858 - DNA, 25 bp, Homo sapien
ttaaattatgtcacagcgcattgca

SEQ ID NO: 4300859 - DNA, 25 bp, Homo sapien
gatcagcgcgacatcttttacttgc

SEQ ID NO: 4300860 - DNA, 25 bp, Homo sapien
tttcaaaatggtattgtctgcgccc

SEQ ID NO: 4300861 - DNA, 25 bp, Homo sapien
gagcgatcaggttaggtgaggccat

SEQ ID NO: 4300862 - DNA, 25 bp, Homo sapien
gtgacgtagagacactgcgaagccg

SEQ ID NO: 4300863 - DNA, 25 bp, Homo sapien
gagtgtgacgtagagacactgcgaa

SEQ ID NO: 4300864 - DNA, 25 bp, Homo sapien
actgcgaagccggagcgatcaggtt

SEQ ID NO: 4300865 - DNA, 25 bp, Homo sapien
tgttgccttgagtagaaagatctgg

SEQ ID NO: 4300866 - DNA, 25 bp, Homo sapien
ttagcagggagtagtgatcccagct

SEQ ID NO: 4300867 - DNA, 25 bp, Homo sapien
cagctccccgctctttcagttttgg

SEQ ID NO: 4300868 - DNA, 25 bp, Homo sapien
ttaaagccatattggttagcaggga

SEQ ID NO: 4300869 - DNA, 25 bp, Homo sapien
gcttcaaatgcacagggtcccagag

SEQ ID NO: 4300870 - DNA, 25 bp, Homo sapien
cccagagtggtagagtggcttgctt

SEQ ID NO: 4300871 - DNA, 25 bp, Homo sapien
taaaagccatagatctaggcctgtg

SEQ ID NO: 4300872 - DNA, 25 bp, Homo sapien
tggaaatcggcagcccctcttgatg

SEQ ID NO: 4300873 - DNA, 25 bp, Homo sapien
cacttgaaaactaacagctgggaaa

SEQ ID NO: 4300874 - DNA, 25 bp, Homo sapien
tgggaaattcgatacccagaggtgc

SEQ ID NO: 4300875 - DNA, 25 bp, Homo sapien
tcaaaaggtagcttgtgtacacccc

SEQ ID NO: 4300876 - DNA, 25 bp, Homo sapien
taagcaaaccaaaggcatgcgtgtg

SEQ ID NO: 4300877 - DNA, 25 bp, Homo sapien
tcggagcatccccagacaagatggc

SEQ ID NO: 4300878 - DNA, 25 bp, Homo sapien
agctcggagcatccccagacaagat

SEQ ID NO: 4300879 - DNA, 25 bp, Homo sapien
cggagcatccccagacaagatggcc

SEQ ID NO: 4300880 - DNA, 25 bp, Homo sapien
ctccagctcggagcatccccagaca

SEQ ID NO: 4300881 - DNA, 25 bp, Homo sapien
aggctttcagggtatattggtgagc

SEQ ID NO: 4300882 - DNA, 25 bp, Homo sapien
gggtatattggtgagcaaacttttc

SEQ ID NO: 4300883 - DNA, 25 bp, Homo sapien
ggtataggctttcagggtatattgg

SEQ ID NO: 4300884 - DNA, 25 bp, Homo sapien
gcctctggtataggctttcagggta

SEQ ID NO: 4300885 - DNA, 25 bp, Homo sapien
tcacagcaggcaataactagggtta

SEQ ID NO: 4300886 - DNA, 25 bp, Homo sapien
acccggttggtgtttggtgcctgct

SEQ ID NO: 4300887 - DNA, 25 bp, Homo sapien
tgttgggaacctgtatatggcatat

SEQ ID NO: 4300888 - DNA, 25 bp, Homo sapien
ctgtgtaacttgctgggtgttggga

SEQ ID NO: 4300889 - DNA, 25 bp, Homo sapien
gagattgagttaatcttatatcttt

SEQ ID NO: 4300890 - DNA, 25 bp, Homo sapien
gttaatcttatatctttatgttcta

SEQ ID NO: 4300891 - DNA, 25 bp, Homo sapien
ctttttagtgagattgagttaatct

SEQ ID NO: 4300892 - DNA, 25 bp, Homo sapien
agtgagattgagttaatcttatatc

SEQ ID NO: 4300893 - DNA, 25 bp, Homo sapien
tcccatcctaaaagcttttagcttg

SEQ ID NO: 4300894 - DNA, 25 bp, Homo sapien
gcttttagcttgtgaaaagcttctt

SEQ ID NO: 4300895 - DNA, 25 bp, Homo sapien
gcaatttaaggtccatcccatccta

SEQ ID NO: 4300896 - DNA, 25 bp, Homo sapien
tcactctgcgtttagaataaatggc

SEQ ID NO: 4300897 - DNA, 25 bp, Homo sapien
tgtcagactgcctgctaggaccagc

SEQ ID NO: 4300898 - DNA, 25 bp, Homo sapien
taataatgccacagaaactacccac

SEQ ID NO: 4300899 - DNA, 25 bp, Homo sapien
ccacaaaacttgctcagaggcagga

SEQ ID NO: 4300900 - DNA, 25 bp, Homo sapien
cctgaaggttgactggatctcgtaa

SEQ ID NO: 4300901 - DNA, 25 bp, Homo sapien
ttcctggcaacctggcatataatgg

SEQ ID NO: 4300902 - DNA, 25 bp, Homo sapien
gggagcgccgtgcttctgaacattt

SEQ ID NO: 4300903 - DNA, 25 bp, Homo sapien
tgctggcacattgaggagcacagga

SEQ ID NO: 4300904 - DNA, 25 bp, Homo sapien
tacctcattcccgtggtcttgcgtg

SEQ ID NO: 4300905 - DNA, 25 bp, Homo sapien
tctggtggattggagcaggcaaatc

SEQ ID NO: 4300906 - DNA, 25 bp, Homo sapien
cacggcggggaaggctcttcgcatt

SEQ ID NO: 4300907 - DNA, 25 bp, Homo sapien
ctctctggtggattggagcaggcaa

SEQ ID NO: 4300908 - DNA, 25 bp, Homo sapien
gaaggctcttcgcattttcctctgt

SEQ ID NO: 4300909 - DNA, 25 bp, Homo sapien
ttaaattctgtgtcctttgcctgtt

SEQ ID NO: 4300910 - DNA, 25 bp, Homo sapien
ttgtcagctgctgctttaaattctg

SEQ ID NO: 4300911 - DNA, 25 bp, Homo sapien
tgtcctttgcctgtttctgggtcat

SEQ ID NO: 4300912 - DNA, 25 bp, Homo sapien
ccttgtcagctgctgctttaaattc

SEQ ID NO: 4300913 - DNA, 25 bp, Homo sapien
taaatacaacggctgtctcaggacc

SEQ ID NO: 4300914 - DNA, 25 bp, Homo sapien
gcttgatgcttgatagggacgtatt

SEQ ID NO: 4300915 - DNA, 25 bp, Homo sapien
gacgtctgatacatgcaaagtggag

SEQ ID NO: 4300916 - DNA, 25 bp, Homo sapien
tcatcacctggacgtctgatacatg

SEQ ID NO: 4300917 - DNA, 25 bp, Homo sapien
tgaacttggcacgatattccttttt

SEQ ID NO: 4300918 - DNA, 25 bp, Homo sapien
tgtccgtgaacttggcacgatattc

SEQ ID NO: 4300919 - DNA, 25 bp, Homo sapien
cttggcacgatattccttttttcta

SEQ ID NO: 4300920 - DNA, 25 bp, Homo sapien
atgaggtgtccgtgaacttggcacg

SEQ ID NO: 4300921 - DNA, 25 bp, Homo sapien
agccagtttccagtagattcagcag

SEQ ID NO: 4300922 - DNA, 25 bp, Homo sapien
cagtttccagtagattcagcagaca

SEQ ID NO: 4300923 - DNA, 25 bp, Homo sapien
gttcttatcaatagtgtctgtcagc

SEQ ID NO: 4300924 - DNA, 25 bp, Homo sapien
caatagtgtctgtcagccagtttcc

SEQ ID NO: 4300925 - DNA, 25 bp, Homo sapien
gctcttggggcacctgagagttgaa

SEQ ID NO: 4300926 - DNA, 25 bp, Homo sapien
ccataggcatccaccacgaaggggc

SEQ ID NO: 4300927 - DNA, 25 bp, Homo sapien
gcatccaccacgaaggggctcttgg

SEQ ID NO: 4300928 - DNA, 25 bp, Homo sapien
tgaaattaagttagtgaagatgcct

SEQ ID NO: 4300929 - DNA, 25 bp, Homo sapien
actgatgcttgagcagaggccgtga

SEQ ID NO: 4300930 - DNA, 25 bp, Homo sapien
aagcatactccgatttcccctaaga

SEQ ID NO: 4300931 - DNA, 25 bp, Homo sapien
tgaagattgtagcaatacacaagca

SEQ ID NO: 4300932 - DNA, 25 bp, Homo sapien
gaggccgtgaggtgccctcttcaat

SEQ ID NO: 4300933 - DNA, 25 bp, Homo sapien
cccaagtaccccctttcatcagcca

SEQ ID NO: 4300934 - DNA, 25 bp, Homo sapien
tggcatcccaagtaccccctttcat

SEQ ID NO: 4300935 - DNA, 25 bp, Homo sapien
tttatctggcatcccaagtaccccc

SEQ ID NO: 4300936 - DNA, 25 bp, Homo sapien
tatctggcatcccaagtaccccctt

SEQ ID NO: 4300937 - DNA, 25 bp, Homo sapien
tttgagtcagggttgtcctgtcttt

SEQ ID NO: 4300938 - DNA, 25 bp, Homo sapien
gctggtctacctgtttgtgaggcaa

SEQ ID NO: 4300939 - DNA, 25 bp, Homo sapien
tgaggcaaagcactttaccagctgg

SEQ ID NO: 4300940 - DNA, 25 bp, Homo sapien
tctcaaatttgcctagcgtgctggc

SEQ ID NO: 4300941 - DNA, 25 bp, Homo sapien
tcagcagtttgcgaagcttcttggc

SEQ ID NO: 4300942 - DNA, 25 bp, Homo sapien
ttggctttggcacccggttgtccca

SEQ ID NO: 4300943 - DNA, 25 bp, Homo sapien
caatttgttccagagtattttactg

SEQ ID NO: 4300944 - DNA, 25 bp, Homo sapien
tactgcatatgcgatgtctttctcg

SEQ ID NO: 4300945 - DNA, 25 bp, Homo sapien
ccaggatttctgtgatctgcggttc

SEQ ID NO: 4300946 - DNA, 25 bp, Homo sapien
aattagcctttacttagatgtgctc

SEQ ID NO: 4300947 - DNA, 25 bp, Homo sapien
tgctcacaccgacttacggaaaagt

SEQ ID NO: 4300948 - DNA, 25 bp, Homo sapien
tctcattgtgcagagacaatttacc

SEQ ID NO: 4300949 - DNA, 25 bp, Homo sapien
tcctgaacaggtgctaaagacaaag

SEQ ID NO: 4300950 - DNA, 25 bp, Homo sapien
caggcaatccgcctgcctcagcctc

SEQ ID NO: 4300951 - DNA, 25 bp, Homo sapien
tggagacagcatctcgctctgttgc

SEQ ID NO: 4300952 - DNA, 25 bp, Homo sapien
aggcaatccgcctgcctcagcctcc

SEQ ID NO: 4300953 - DNA, 25 bp, Homo sapien
ttttggagacagcatctcgctctgt

SEQ ID NO: 4300954 - DNA, 25 bp, Homo sapien
aagaacaaagaaatctgttcctggt

SEQ ID NO: 4300955 - DNA, 25 bp, Homo sapien
caaagaaatctgttcctggttgtga

SEQ ID NO: 4300956 - DNA, 25 bp, Homo sapien
agaacaaagaaatctgttcctggtt

SEQ ID NO: 4300957 - DNA, 25 bp, Homo sapien
aacaaagaaatctgttcctggttgt

SEQ ID NO: 4300958 - DNA, 25 bp, Homo sapien
ttaatataggcgctggggcttgccc

SEQ ID NO: 4300959 - DNA, 25 bp, Homo sapien
ataggcgctggggcttgcccatggt

SEQ ID NO: 4300960 - DNA, 25 bp, Homo sapien
ggcgctggggcttgcccatggtgct

SEQ ID NO: 4300961 - DNA, 25 bp, Homo sapien
taatataggcgctggggcttgccca

SEQ ID NO: 4300962 - DNA, 25 bp, Homo sapien
aatgttatacacaagctcatcggct

SEQ ID NO: 4300963 - DNA, 25 bp, Homo sapien
gtttttcttgagcaatgacaccaag

SEQ ID NO: 4300964 - DNA, 25 bp, Homo sapien
tatacacaagctcatcggctgtcat

SEQ ID NO: 4300965 - DNA, 25 bp, Homo sapien
tgaccaacagctacagccagacata

SEQ ID NO: 4300966 - DNA, 25 bp, Homo sapien
cacacacacaacttagggcggggag

SEQ ID NO: 4300967 - DNA, 25 bp, Homo sapien
cgtctccaggaacttgcggcgcttg

SEQ ID NO: 4300968 - DNA, 25 bp, Homo sapien
acttgcggcgcttgcgctggttccg

SEQ ID NO: 4300969 - DNA, 25 bp, Homo sapien
cttgcgctggttccggtgcaggact

SEQ ID NO: 4300970 - DNA, 25 bp, Homo sapien
gccacaccgcctttggttgtctgtc

SEQ ID NO: 4300971 - DNA, 25 bp, Homo sapien
ttgccacaccgcctttggttgtctg

SEQ ID NO: 4300972 - DNA, 25 bp, Homo sapien
tgccacaccgcctttggttgtctgt

SEQ ID NO: 4300973 - DNA, 25 bp, Homo sapien
ccacaccgcctttggttgtctgtct

SEQ ID NO: 4300974 - DNA, 25 bp, Homo sapien
atcactaccctctagaacacagaaa

SEQ ID NO: 4300975 - DNA, 25 bp, Homo sapien
cactaccctctagaacacagaaacc

SEQ ID NO: 4300976 - DNA, 25 bp, Homo sapien
aaaccatcagctttttgatctttca

SEQ ID NO: 4300977 - DNA, 25 bp, Homo sapien
tcactaccctctagaacacagaaac

SEQ ID NO: 4300978 - DNA, 25 bp, Homo sapien
gctcaagtccaattccttataccac

SEQ ID NO: 4300979 - DNA, 25 bp, Homo sapien
agacaggcagtcctgttgctcaagt

SEQ ID NO: 4300980 - DNA, 25 bp, Homo sapien
caggcagtcctgttgctcaagtcca

SEQ ID NO: 4300981 - DNA, 25 bp, Homo sapien
gtcctgttgctcaagtccaattcct

SEQ ID NO: 4300982 - DNA, 25 bp, Homo sapien
tcaagcaggattattctaagaggca

SEQ ID NO: 4300983 - DNA, 25 bp, Homo sapien
gcagtgaccaaaattccccgtaaga

SEQ ID NO: 4300984 - DNA, 25 bp, Homo sapien
cccagaattgaaataggcagtgacc

SEQ ID NO: 4300985 - DNA, 25 bp, Homo sapien
ttttggcctccaccctggagtagag

SEQ ID NO: 4300986 - DNA, 25 bp, Homo sapien
ttttcatgtctatttttaagaatgt

SEQ ID NO: 4300987 - DNA, 25 bp, Homo sapien
attttcatgtctatttttaagaatg

SEQ ID NO: 4300988 - DNA, 25 bp, Homo sapien
tcattgagagattttagcaggaaaa

SEQ ID NO: 4300989 - DNA, 25 bp, Homo sapien
tgaaatatgaagctcttcttggctg

SEQ ID NO: 4300990 - DNA, 25 bp, Homo sapien
ctcttcttggctgttggactagcac

SEQ ID NO: 4300991 - DNA, 25 bp, Homo sapien
gagagattttagcaggaaaatgaaa

SEQ ID NO: 4300992 - DNA, 25 bp, Homo sapien
gaatccatcgtttttacacagttgg

SEQ ID NO: 4300993 - DNA, 25 bp, Homo sapien
tcgtttttacacagttggtctccat

SEQ ID NO: 4300994 - DNA, 25 bp, Homo sapien
cagaatccatcgtttttacacagtt

SEQ ID NO: 4300995 - DNA, 25 bp, Homo sapien
tccatcgtttttacacagttggtct

SEQ ID NO: 4300996 - DNA, 25 bp, Homo sapien
acatggaggtgatgaatgttgattg

SEQ ID NO: 4300997 - DNA, 25 bp, Homo sapien
gtaatgtcacatggaggtgatgaat

SEQ ID NO: 4300998 - DNA, 25 bp, Homo sapien
catggaggtgatgaatgttgattgt

SEQ ID NO: 4300999 - DNA, 25 bp, Homo sapien
ctcgtaatgtcacatggaggtgatg

SEQ ID NO: 4301000 - DNA, 25 bp, Homo sapien
ggagtgtggtgtcataatctctggt

SEQ ID NO: 4301001 - DNA, 25 bp, Homo sapien
agtgtggtgtcataatctctggtca

SEQ ID NO: 4301002 - DNA, 25 bp, Homo sapien
gtggtgtcataatctctggtcactg

SEQ ID NO: 4301003 - DNA, 25 bp, Homo sapien
tgtggtgtcataatctctggtcact

SEQ ID NO: 4301004 - DNA, 25 bp, Homo sapien
agaattccttgaacctgagagacag

SEQ ID NO: 4301005 - DNA, 25 bp, Homo sapien
ttccttgaacctgagagacagaggt

SEQ ID NO: 4301006 - DNA, 25 bp, Homo sapien
attgcaccactgcactctagccttg

SEQ ID NO: 4301007 - DNA, 25 bp, Homo sapien
aattccttgaacctgagagacagag

SEQ ID NO: 4301008 - DNA, 25 bp, Homo sapien
tcatgctactctggccagcacaccg

SEQ ID NO: 4301009 - DNA, 25 bp, Homo sapien
ctggccagcacaccgggaatgtgtg

SEQ ID NO: 4301010 - DNA, 25 bp, Homo sapien
atgctactctggccagcacaccggg

SEQ ID NO: 4301011 - DNA, 25 bp, Homo sapien
ctctggccagcacaccgggaatgtg

SEQ ID NO: 4301012 - DNA, 25 bp, Homo sapien
actgaacacttctcatggtcagtca

SEQ ID NO: 4301013 - DNA, 25 bp, Homo sapien
ctgaacacttctcatggtcagtcat

SEQ ID NO: 4301014 - DNA, 25 bp, Homo sapien
tactgaacacttctcatggtcagtc

SEQ ID NO: 4301015 - DNA, 25 bp, Homo sapien
cctgctggcacttgcaactctttcc

SEQ ID NO: 4301016 - DNA, 25 bp, Homo sapien
tggcacttgcaactctttccccaag

SEQ ID NO: 4301017 - DNA, 25 bp, Homo sapien
tcctgctggcacttgcaactctttc

SEQ ID NO: 4301018 - DNA, 25 bp, Homo sapien
acttgcaactctttccccaagggct

SEQ ID NO: 4301019 - DNA, 25 bp, Homo sapien
ggggccacagatgacatgttgccat

SEQ ID NO: 4301020 - DNA, 25 bp, Homo sapien
gccacagatgacatgttgccatcca

SEQ ID NO: 4301021 - DNA, 25 bp, Homo sapien
ccacagatgacatgttgccatccag

SEQ ID NO: 4301022 - DNA, 25 bp, Homo sapien
tggggccacagatgacatgttgcca

SEQ ID NO: 4301023 - DNA, 25 bp, Homo sapien
tagttgttctttaagttgggtatgc

SEQ ID NO: 4301024 - DNA, 25 bp, Homo sapien
tccacaagacttaagccagatctag

SEQ ID NO: 4301025 - DNA, 25 bp, Homo sapien
taagccagatctagttagctgatca

SEQ ID NO: 4301026 - DNA, 25 bp, Homo sapien
gttagctgatcatctgcatagttgt

SEQ ID NO: 4301027 - DNA, 25 bp, Homo sapien
ttctgtggtgtgctcaagaacagct

SEQ ID NO: 4301028 - DNA, 25 bp, Homo sapien
catttccaagtacgaagtggcactg

SEQ ID NO: 4301029 - DNA, 25 bp, Homo sapien
gagagttgaaggtcgtaacccagca

SEQ ID NO: 4301030 - DNA, 25 bp, Homo sapien
catcattacgtagagcacaggtata

SEQ ID NO: 4301031 - DNA, 25 bp, Homo sapien
aattttgtgcatggagtgaatttcc

SEQ ID NO: 4301032 - DNA, 25 bp, Homo sapien
cctgtcctggttgagatcttgtgca

SEQ ID NO: 4301033 - DNA, 25 bp, Homo sapien
gaatttccataactggcatatcctg

SEQ ID NO: 4301034 - DNA, 25 bp, Homo sapien
gcatcacatgatttagtgcttcatt

SEQ ID NO: 4301035 - DNA, 25 bp, Homo sapien
ctggatgctgtctacttgttgttgt

SEQ ID NO: 4301036 - DNA, 25 bp, Homo sapien
aagtccagtccagtacagctttctg

SEQ ID NO: 4301037 - DNA, 25 bp, Homo sapien
cttaacttgcaaattggcagaagtc

SEQ ID NO: 4301038 - DNA, 25 bp, Homo sapien
gccaagaccttaacttgcaaattgg

SEQ ID NO: 4301039 - DNA, 25 bp, Homo sapien
gagaatcacttgaatctgggaagca

SEQ ID NO: 4301040 - DNA, 25 bp, Homo sapien
atcccagctattgaggaggccgaga

SEQ ID NO: 4301041 - DNA, 25 bp, Homo sapien
ctgggaagcagaggttgcagtgagc

SEQ ID NO: 4301042 - DNA, 25 bp, Homo sapien
ccagctattgaggaggccgagacag

SEQ ID NO: 4301043 - DNA, 25 bp, Homo sapien
gcatcactacctttgccttacatga

SEQ ID NO: 4301044 - DNA, 25 bp, Homo sapien
taattgaacagcagcagatacctct

SEQ ID NO: 4301045 - DNA, 25 bp, Homo sapien
gttcgtatggctttgagtgtaatca

SEQ ID NO: 4301046 - DNA, 25 bp, Homo sapien
tatctttgggtggatagtgcatcac

SEQ ID NO: 4301047 - DNA, 25 bp, Homo sapien
tatcagaatcacttgccaactcact

SEQ ID NO: 4301048 - DNA, 25 bp, Homo sapien
tatcagtgtaatgtttatcagaatc

SEQ ID NO: 4301049 - DNA, 25 bp, Homo sapien
ctcactatgcttcctctgagactta

SEQ ID NO: 4301050 - DNA, 25 bp, Homo sapien
gcttcctctgagacttatatccaaa

SEQ ID NO: 4301051 - DNA, 25 bp, Homo sapien
gcccatctgataactcaagagtcgg

SEQ ID NO: 4301052 - DNA, 25 bp, Homo sapien
gacaagggcttgactagtgaatgaa

SEQ ID NO: 4301053 - DNA, 25 bp, Homo sapien
tccgttcctgagcagagttctcgtc

SEQ ID NO: 4301054 - DNA, 25 bp, Homo sapien
cattactagaacctgaaaccttgag

SEQ ID NO: 4301055 - DNA, 25 bp, Homo sapien
tttatagaactctactattttcata

SEQ ID NO: 4301056 - DNA, 25 bp, Homo sapien
tatagaactctactattttcataat

SEQ ID NO: 4301057 - DNA, 25 bp, Homo sapien
ttatagaactctactattttcataa

SEQ ID NO: 4301058 - DNA, 25 bp, Homo sapien
tcaggtgctctccaggtacagacca

SEQ ID NO: 4301059 - DNA, 25 bp, Homo sapien
gcagtgctctctggtgaagcccctg

SEQ ID NO: 4301060 - DNA, 25 bp, Homo sapien
ttctgcaaaacagatgcactggcag

SEQ ID NO: 4301061 - DNA, 25 bp, Homo sapien
gcctgccgtagcttccctctgggaa

SEQ ID NO: 4301062 - DNA, 25 bp, Homo sapien
tggggagggtggtgtgcgcacacgc

SEQ ID NO: 4301063 - DNA, 25 bp, Homo sapien
ctggggagggtggtgtgcgcacacg

SEQ ID NO: 4301064 - DNA, 25 bp, Homo sapien
gggagggtggtgtgcgcacacgcat

SEQ ID NO: 4301065 - DNA, 25 bp, Homo sapien
ggggagggtggtgtgcgcacacgca

SEQ ID NO: 4301066 - DNA, 25 bp, Homo sapien
cctgatgtataaatgccagctctct

SEQ ID NO: 4301067 - DNA, 25 bp, Homo sapien
cattaaacaaaagttcacgtttctg

SEQ ID NO: 4301068 - DNA, 25 bp, Homo sapien
gcagcagttttgaagcataggattt

SEQ ID NO: 4301069 - DNA, 25 bp, Homo sapien
ttaaaaataggcctcacagcatcag

SEQ ID NO: 4301070 - DNA, 25 bp, Homo sapien
ggctgaccttcatcattctaaggga

SEQ ID NO: 4301071 - DNA, 25 bp, Homo sapien
gaggcagggtggatctgcaccactt

SEQ ID NO: 4301072 - DNA, 25 bp, Homo sapien
ccagcttcactggtgatgaggacac

SEQ ID NO: 4301073 - DNA, 25 bp, Homo sapien
tctgtcctgaattgttgatagtgcc

SEQ ID NO: 4301074 - DNA, 25 bp, Homo sapien
tcaaggtgacatcatatgatgtaag

SEQ ID NO: 4301075 - DNA, 25 bp, Homo sapien
gccaatgagggttcccccttgccta

SEQ ID NO: 4301076 - DNA, 25 bp, Homo sapien
catatgatgtaagaatgagtatctg

SEQ ID NO: 4301077 - DNA, 25 bp, Homo sapien
gtatctgattggctacctgccagcc

SEQ ID NO: 4301078 - DNA, 25 bp, Homo sapien
ctcagataattctctgatgcagtta

SEQ ID NO: 4301079 - DNA, 25 bp, Homo sapien
tctgatgcagttaagagtgtgggaa

SEQ ID NO: 4301080 - DNA, 25 bp, Homo sapien
catgttgggccagctctcagataat

SEQ ID NO: 4301081 - DNA, 25 bp, Homo sapien
gggccagctctcagataattctctg

SEQ ID NO: 4301082 - DNA, 25 bp, Homo sapien
taatgaccgttatttatcacaaacg

SEQ ID NO: 4301083 - DNA, 25 bp, Homo sapien
tgttcacattgggtaatgaatgacc

SEQ ID NO: 4301084 - DNA, 25 bp, Homo sapien
tttctgtttccgtggccagggccaa

SEQ ID NO: 4301085 - DNA, 25 bp, Homo sapien
tatttatcacaaacgtgcactctgt

SEQ ID NO: 4301086 - DNA, 25 bp, Homo sapien
gaacatagcccttttctgttcatcc

SEQ ID NO: 4301087 - DNA, 25 bp, Homo sapien
taggcctttgttatagaacatagcc

SEQ ID NO: 4301088 - DNA, 25 bp, Homo sapien
tgttcatccactaccctctgacctc

SEQ ID NO: 4301089 - DNA, 25 bp, Homo sapien
ccattgttctttgtttaggcctttg

SEQ ID NO: 4301090 - DNA, 25 bp, Homo sapien
cctgataggtgcttggtgaaatgaa

SEQ ID NO: 4301091 - DNA, 25 bp, Homo sapien
ttgcgctgtcaccttgagcaaagtg

SEQ ID NO: 4301092 - DNA, 25 bp, Homo sapien
aggcacctgccaaatacctgatagg

SEQ ID NO: 4301093 - DNA, 25 bp, Homo sapien
tcaaggttttttagtgggtgcagaa

SEQ ID NO: 4301094 - DNA, 25 bp, Homo sapien
gataccattcaaggagctgtttcag

SEQ ID NO: 4301095 - DNA, 25 bp, Homo sapien
tctgcaactgacacttgaggaggta

SEQ ID NO: 4301096 - DNA, 25 bp, Homo sapien
ttttaggccacattctggttctgca

SEQ ID NO: 4301097 - DNA, 25 bp, Homo sapien
gatggtgttctaagtacttgattcc

SEQ ID NO: 4301098 - DNA, 25 bp, Homo sapien
aaatagaccatttcaccgtcactgc

SEQ ID NO: 4301099 - DNA, 25 bp, Homo sapien
cacagcagcaatcgatgaaccttca

SEQ ID NO: 4301100 - DNA, 25 bp, Homo sapien
gctggacgctgtttagggacccaaa

SEQ ID NO: 4301101 - DNA, 25 bp, Homo sapien
gagtcagacgactgtgagtttacaa

SEQ ID NO: 4301102 - DNA, 25 bp, Homo sapien
gatgttccttgtttctgtgtgccct

SEQ ID NO: 4301103 - DNA, 25 bp, Homo sapien
gaataacttctcctgctaggatgtc

SEQ ID NO: 4301104 - DNA, 25 bp, Homo sapien
tgtggttctccacctggggtctaac

SEQ ID NO: 4301105 - DNA, 25 bp, Homo sapien
ggtctaacggtgcaaaagtcctgtc

SEQ ID NO: 4301106 - DNA, 25 bp, Homo sapien
agagtcgcttacagatctgtcctgc

SEQ ID NO: 4301107 - DNA, 25 bp, Homo sapien
tgcccagagtcgcttacagatctgt

SEQ ID NO: 4301108 - DNA, 25 bp, Homo sapien
gcatttggtaaataatcttgatgtg

SEQ ID NO: 4301109 - DNA, 25 bp, Homo sapien
gatctgtcctgcgtgtgcatttggt

SEQ ID NO: 4301110 - DNA, 25 bp, Homo sapien
tcctgcttagcaacagaatagagta

SEQ ID NO: 4301111 - DNA, 25 bp, Homo sapien
gagctgaacctcacaccctttcatg

SEQ ID NO: 4301112 - DNA, 25 bp, Homo sapien
tgcagggtgtttcttggaccgtact

SEQ ID NO: 4301113 - DNA, 25 bp, Homo sapien
ccaagggatctggaaagtgattgat

SEQ ID NO: 4301114 - DNA, 25 bp, Homo sapien
aatcagctctactggctgatggcag

SEQ ID NO: 4301115 - DNA, 25 bp, Homo sapien
ccaatgctttttgcgtcccctgcag

SEQ ID NO: 4301116 - DNA, 25 bp, Homo sapien
ctgatggcagatgcgttttgggtca

SEQ ID NO: 4301117 - DNA, 25 bp, Homo sapien
ttttgggtcaaggtggccgccaatg

SEQ ID NO: 4301118 - DNA, 25 bp, Homo sapien
aaacattatttctatcctgctctat

SEQ ID NO: 4301119 - DNA, 25 bp, Homo sapien
gaactcaggtactctgcctggcttg

SEQ ID NO: 4301120 - DNA, 25 bp, Homo sapien
ggtcttgagttccagaactcaggta

SEQ ID NO: 4301121 - DNA, 25 bp, Homo sapien
tgagttccagaactcaggtactctg

SEQ ID NO: 4301122 - DNA, 25 bp, Homo sapien
tatatcctgtactatggaaacagga

SEQ ID NO: 4301123 - DNA, 25 bp, Homo sapien
aactggtgtgctgttttgagttaac

SEQ ID NO: 4301124 - DNA, 25 bp, Homo sapien
tgtgtgacatttggaggccgagctc

SEQ ID NO: 4301125 - DNA, 25 bp, Homo sapien
gtgtgggccagaagcctctatccca

SEQ ID NO: 4301126 - DNA, 25 bp, Homo sapien
gctaaccgtgtgagtctgcaaaatg

SEQ ID NO: 4301127 - DNA, 25 bp, Homo sapien
ctgtggtttgctgctaaccgtgtga

SEQ ID NO: 4301128 - DNA, 25 bp, Homo sapien
gtttgctgctaaccgtgtgagtctg

SEQ ID NO: 4301129 - DNA, 25 bp, Homo sapien
accgtgtgagtctgcaaaatgatcc

SEQ ID NO: 4301130 - DNA, 25 bp, Homo sapien
aaagttcatgcattgcacctaaccg

SEQ ID NO: 4301131 - DNA, 25 bp, Homo sapien
tcataatgggcttcctttgagcaaa

SEQ ID NO: 4301132 - DNA, 25 bp, Homo sapien
tcaagtgaccccgtatttagtccta

SEQ ID NO: 4301133 - DNA, 25 bp, Homo sapien
cacctaaccgtcctttggatgtgag

SEQ ID NO: 4301134 - DNA, 25 bp, Homo sapien
ccactttgctctgttctgatttgca

SEQ ID NO: 4301135 - DNA, 25 bp, Homo sapien
gctctgttctgatttgcattcttgt

SEQ ID NO: 4301136 - DNA, 25 bp, Homo sapien
ttctgatttgcattcttgttctgtg

SEQ ID NO: 4301137 - DNA, 25 bp, Homo sapien
tgctgggccactttgctctgttctg

SEQ ID NO: 4301138 - DNA, 25 bp, Homo sapien
ctcaacagttctgcttaaaggttta

SEQ ID NO: 4301139 - DNA, 25 bp, Homo sapien
ctaactccaagttactttgctgccg

SEQ ID NO: 4301140 - DNA, 25 bp, Homo sapien
tattacttgttgtggctaactccaa

SEQ ID NO: 4301141 - DNA, 25 bp, Homo sapien
gagcgcattttcaccctcaacagtt

SEQ ID NO: 4301142 - DNA, 25 bp, Homo sapien
acaagtcaagaccccgtgtcctctt

SEQ ID NO: 4301143 - DNA, 25 bp, Homo sapien
gctggcgagggactgtgtgtcccgg

SEQ ID NO: 4301144 - DNA, 25 bp, Homo sapien
ccgggcccaaatgggttactgctct

SEQ ID NO: 4301145 - DNA, 25 bp, Homo sapien
ggttactgctcttacacaagtcaag

SEQ ID NO: 4301146 - DNA, 25 bp, Homo sapien
tagtgtgtttaggagcagtttttgc

SEQ ID NO: 4301147 - DNA, 25 bp, Homo sapien
ggcagtcacacttgtagtgtgttta

SEQ ID NO: 4301148 - DNA, 25 bp, Homo sapien
tttgacagttgtttggatcccgttc

SEQ ID NO: 4301149 - DNA, 25 bp, Homo sapien
gatcccgttcaaactggcagtcaca

SEQ ID NO: 4301150 - DNA, 25 bp, Homo sapien
gaaattccccgtggcattagaggtg

SEQ ID NO: 4301151 - DNA, 25 bp, Homo sapien
gcgtgtgtcatgaaggtctctgcac

SEQ ID NO: 4301152 - DNA, 25 bp, Homo sapien
gctgtctgtcctacagattgcagtg

SEQ ID NO: 4301153 - DNA, 25 bp, Homo sapien
tagaggtgtttcgtaaggtgctccc

SEQ ID NO: 4301154 - DNA, 25 bp, Homo sapien
tatctttgtcacagtgggaatatag

SEQ ID NO: 4301155 - DNA, 25 bp, Homo sapien
tgttaccactgttaatgtctatgat

SEQ ID NO: 4301156 - DNA, 25 bp, Homo sapien
gtctatgattatctttgtcacagtg

SEQ ID NO: 4301157 - DNA, 25 bp, Homo sapien
gcactgagttgatgatctaatagct

SEQ ID NO: 4301158 - DNA, 25 bp, Homo sapien
tcagtaatcgagctcaaactgctga

SEQ ID NO: 4301159 - DNA, 25 bp, Homo sapien
ttcactttcagtaatcgagctcaaa

SEQ ID NO: 4301160 - DNA, 25 bp, Homo sapien
cactttcagtaatcgagctcaaact

SEQ ID NO: 4301161 - DNA, 25 bp, Homo sapien
ctttcagtaatcgagctcaaactgc

SEQ ID NO: 4301162 - DNA, 25 bp, Homo sapien
tctgactggtattagcaagtaacgc

SEQ ID NO: 4301163 - DNA, 25 bp, Homo sapien
taaaaatgatagaatcggcctggcg

SEQ ID NO: 4301164 - DNA, 25 bp, Homo sapien
gaggactcccctaatttcctgtgta

SEQ ID NO: 4301165 - DNA, 25 bp, Homo sapien
tttacaaagtacagagaggctgtgc

SEQ ID NO: 4301166 - DNA, 25 bp, Homo sapien
ggtccctgcaaatctaaggcctcaa

SEQ ID NO: 4301167 - DNA, 25 bp, Homo sapien
ggtactgctgtaccatggtaccagc

SEQ ID NO: 4301168 - DNA, 25 bp, Homo sapien
tgtctcttggtctgatggtactgct

SEQ ID NO: 4301169 - DNA, 25 bp, Homo sapien
tggtaccagcatctgtcagtctgat

SEQ ID NO: 4301170 - DNA, 25 bp, Homo sapien
ctgcagagagaatatcatggccttc

SEQ ID NO: 4301171 - DNA, 25 bp, Homo sapien
tgcagagagaatatcatggccttct

SEQ ID NO: 4301172 - DNA, 25 bp, Homo sapien
cgtggttttacacgcgtggctcagc

SEQ ID NO: 4301173 - DNA, 25 bp, Homo sapien
catttgatcacatactgtctcattg

SEQ ID NO: 4301174 - DNA, 25 bp, Homo sapien
tgatgagtcgctgggtagttccaac

SEQ ID NO: 4301175 - DNA, 25 bp, Homo sapien
tatagttcctttgtccgtccttgtg

SEQ ID NO: 4301176 - DNA, 25 bp, Homo sapien
tcagtccctgcatcgtgcatggacc

SEQ ID NO: 4301177 - DNA, 25 bp, Homo sapien
catcgtgcatggaccctggtgtgca

SEQ ID NO: 4301178 - DNA, 25 bp, Homo sapien
gcacctatcagctgcatatgtccaa

SEQ ID NO: 4301179 - DNA, 25 bp, Homo sapien
cattgggactaaaacatttggcacc

SEQ ID NO: 4301180 - DNA, 25 bp, Homo sapien
ctgggtagctttttggatggcattg

SEQ ID NO: 4301181 - DNA, 25 bp, Homo sapien
tggccatatctgagtgaaggacagt

SEQ ID NO: 4301182 - DNA, 25 bp, Homo sapien
ctggccatatctgagtgaaggacag

SEQ ID NO: 4301183 - DNA, 25 bp, Homo sapien
tacttgacttgcaacgcttgacagc

SEQ ID NO: 4301184 - DNA, 25 bp, Homo sapien
tcagcttcgtatcaccaatgacagg

SEQ ID NO: 4301185 - DNA, 25 bp, Homo sapien
ggttcactcgatgcaagctgattca

SEQ ID NO: 4301186 - DNA, 25 bp, Homo sapien
cagccttcggcaaagataacacgtt

SEQ ID NO: 4301187 - DNA, 25 bp, Homo sapien
cattttgtacgaaactgggttgact

SEQ ID NO: 4301188 - DNA, 25 bp, Homo sapien
aaaggtgacattttgtacgaaactg

SEQ ID NO: 4301189 - DNA, 25 bp, Homo sapien
tgacattttgtacgaaactgggttg

SEQ ID NO: 4301190 - DNA, 25 bp, Homo sapien
ttgtacgaaactgggttgacttcat

SEQ ID NO: 4301191 - DNA, 25 bp, Homo sapien
tcttccctggaatacgtctgtcaca

SEQ ID NO: 4301192 - DNA, 25 bp, Homo sapien
ggtatgttaccttgacctcctactg

SEQ ID NO: 4301193 - DNA, 25 bp, Homo sapien
cctgagagccttcctaatgatttgc

SEQ ID NO: 4301194 - DNA, 25 bp, Homo sapien
tgttctgtgatcgattctcctttga

SEQ ID NO: 4301195 - DNA, 25 bp, Homo sapien
tcatagtgaacaagacaagcaagct

SEQ ID NO: 4301196 - DNA, 25 bp, Homo sapien
ccgcgcccggctcagaaaatgatct

SEQ ID NO: 4301197 - DNA, 25 bp, Homo sapien
aatgaggcccacgtttttgagagct

SEQ ID NO: 4301198 - DNA, 25 bp, Homo sapien
tagaacctgagagaccaacagagtg

SEQ ID NO: 4301199 - DNA, 25 bp, Homo sapien
tttctgttgatcatagattctgttg

SEQ ID NO: 4301200 - DNA, 25 bp, Homo sapien
tagattctgttgatcatagagtgat

SEQ ID NO: 4301201 - DNA, 25 bp, Homo sapien
agattctgttgatcatagagtgatc

SEQ ID NO: 4301202 - DNA, 25 bp, Homo sapien
tagagatcagaactggcagggaact

SEQ ID NO: 4301203 - DNA, 25 bp, Homo sapien
atttaagtagattacggtgtgaacg

SEQ ID NO: 4301204 - DNA, 25 bp, Homo sapien
aactggcagggaactgggatttgaa

SEQ ID NO: 4301205 - DNA, 25 bp, Homo sapien
tgtgaacgatgcaggtagagatcag

SEQ ID NO: 4301206 - DNA, 25 bp, Homo sapien
aaaatctgaacaccgagtctctgtt

SEQ ID NO: 4301207 - DNA, 25 bp, Homo sapien
cagggaatggcaaaaccctccagta

SEQ ID NO: 4301208 - DNA, 25 bp, Homo sapien
taaaatctgaacaccgagtctctgt

SEQ ID NO: 4301209 - DNA, 25 bp, Homo sapien
ttaaaatctgaacaccgagtctctg

SEQ ID NO: 4301210 - DNA, 25 bp, Homo sapien
tcaggcagggctgatatttcaaaaa

SEQ ID NO: 4301211 - DNA, 25 bp, Homo sapien
gtcatcaggcagggctgatatttca

SEQ ID NO: 4301212 - DNA, 25 bp, Homo sapien
catcaggcagggctgatatttcaaa

SEQ ID NO: 4301213 - DNA, 25 bp, Homo sapien
aggcagggctgatatttcaaaaacc

SEQ ID NO: 4301214 - DNA, 25 bp, Homo sapien
ctgtcaaatgtaaaagccaatcaga

SEQ ID NO: 4301215 - DNA, 25 bp, Homo sapien
agccaatcagaaaggttgcagttca

SEQ ID NO: 4301216 - DNA, 25 bp, Homo sapien
aaaggttgcagttcaactttcttgc

SEQ ID NO: 4301217 - DNA, 25 bp, Homo sapien
caatcagaaaggttgcagttcaact

SEQ ID NO: 4301218 - DNA, 25 bp, Homo sapien
gctttattaatgctttggctttcag

SEQ ID NO: 4301219 - DNA, 25 bp, Homo sapien
gacatttatcattctctaatggagg

SEQ ID NO: 4301220 - DNA, 25 bp, Homo sapien
tatcattctctaatggaggagctgt

SEQ ID NO: 4301221 - DNA, 25 bp, Homo sapien
tttattaatgctttggctttcagca

SEQ ID NO: 4301222 - DNA, 25 bp, Homo sapien
catgggtgagcagattgttgtcaaa

SEQ ID NO: 4301223 - DNA, 25 bp, Homo sapien
ggttgagatgataccatccaagaat

SEQ ID NO: 4301224 - DNA, 25 bp, Homo sapien
gtacttgaagaatactggcatcttt

SEQ ID NO: 4301225 - DNA, 25 bp, Homo sapien
tcaaaaggttgagatgataccatcc

SEQ ID NO: 4301226 - DNA, 25 bp, Homo sapien
ttggaggctacaaagctggtgtcga

SEQ ID NO: 4301227 - DNA, 25 bp, Homo sapien
tctttaacagacatgaactgtgtag

SEQ ID NO: 4301228 - DNA, 25 bp, Homo sapien
gagttagctgtaccgcccttagcca

SEQ ID NO: 4301229 - DNA, 25 bp, Homo sapien
taacagacatgaactgtgtagagtc

SEQ ID NO: 4301230 - DNA, 25 bp, Homo sapien
tcactgcacatctatgagcgtactg

SEQ ID NO: 4301231 - DNA, 25 bp, Homo sapien
actgcacatctatgagcgtactgac

SEQ ID NO: 4301232 - DNA, 25 bp, Homo sapien
cactgcacatctatgagcgtactga

SEQ ID NO: 4301233 - DNA, 25 bp, Homo sapien
gctgctgctattgtagtcccaattg

SEQ ID NO: 4301234 - DNA, 25 bp, Homo sapien
tgtgaccaacaatgattgctgctgc

SEQ ID NO: 4301235 - DNA, 25 bp, Homo sapien
tccaataggaggacaaggcctgtct

SEQ ID NO: 4301236 - DNA, 25 bp, Homo sapien
tagactcagagtcattcttgggact

SEQ ID NO: 4301237 - DNA, 25 bp, Homo sapien
catttgttttaaagcgtcatagaat

SEQ ID NO: 4301238 - DNA, 25 bp, Homo sapien
ttgttttaaagcgtcatagaatctc

SEQ ID NO: 4301239 - DNA, 25 bp, Homo sapien
tgttttaaagcgtcatagaatctca

SEQ ID NO: 4301240 - DNA, 25 bp, Homo sapien
atttgttttaaagcgtcatagaatc

SEQ ID NO: 4301241 - DNA, 25 bp, Homo sapien
gatggaaccatagaaatctgtctga

SEQ ID NO: 4301242 - DNA, 25 bp, Homo sapien
tctagcttgtggagcccttgaagat

SEQ ID NO: 4301243 - DNA, 25 bp, Homo sapien
tgaatacatgtaccacctttggcag

SEQ ID NO: 4301244 - DNA, 25 bp, Homo sapien
tccatggttgtgtaccgcatgagac

SEQ ID NO: 4301245 - DNA, 25 bp, Homo sapien
tagcaaatactcttagatcttcatc

SEQ ID NO: 4301246 - DNA, 25 bp, Homo sapien
ctatagcaaatactcttagatcttc

SEQ ID NO: 4301247 - DNA, 25 bp, Homo sapien
tatagcaaatactcttagatcttca

SEQ ID NO: 4301248 - DNA, 25 bp, Homo sapien
gcaaatactcttagatcttcatcta

SEQ ID NO: 4301249 - DNA, 25 bp, Homo sapien
gtaagagtgtgaactgggctgtaac

SEQ ID NO: 4301250 - DNA, 25 bp, Homo sapien
aagctgtaagagtgtgaactgggct

SEQ ID NO: 4301251 - DNA, 25 bp, Homo sapien
taacaggggctacattctccaaggt

SEQ ID NO: 4301252 - DNA, 25 bp, Homo sapien
tgggctgtaacaggggctacattct

SEQ ID NO: 4301253 - DNA, 25 bp, Homo sapien
ttttaattctgctgttgcctttttg

SEQ ID NO: 4301254 - DNA, 25 bp, Homo sapien
gatttttaattctgctgttgccttt

SEQ ID NO: 4301255 - DNA, 25 bp, Homo sapien
gtgatttttaattctgctgttgcct

SEQ ID NO: 4301256 - DNA, 25 bp, Homo sapien
aattctgctgttgcctttttggtta

SEQ ID NO: 4301257 - DNA, 25 bp, Homo sapien
cctggaaatgtctattgagtcgttc

SEQ ID NO: 4301258 - DNA, 25 bp, Homo sapien
taaaaatccccagcagtatcctgga

SEQ ID NO: 4301259 - DNA, 25 bp, Homo sapien
tgagtcgttcagtagattgccttcc

SEQ ID NO: 4301260 - DNA, 25 bp, Homo sapien
ttctgtagcttttgcctgtgtgttc

SEQ ID NO: 4301261 - DNA, 25 bp, Homo sapien
ttcttttacaatccagatgactttg

SEQ ID NO: 4301262 - DNA, 25 bp, Homo sapien
taacagtggctgaagtacttcaaag

SEQ ID NO: 4301263 - DNA, 25 bp, Homo sapien
tctgagaacagaataatcggagcca

SEQ ID NO: 4301264 - DNA, 25 bp, Homo sapien
gacagctttcaaaccgcaatttctg

SEQ ID NO: 4301265 - DNA, 25 bp, Homo sapien
tggtgttaaactctcaacctcacgt

SEQ ID NO: 4301266 - DNA, 25 bp, Homo sapien
gtgttaaactctcaacctcacgtga

SEQ ID NO: 4301267 - DNA, 25 bp, Homo sapien
gctggtgttaaactctcaacctcac

SEQ ID NO: 4301268 - DNA, 25 bp, Homo sapien
gtcaggctggtgttaaactctcaac

SEQ ID NO: 4301269 - DNA, 25 bp, Homo sapien
aaacccaggtatgagatttgctcat

SEQ ID NO: 4301270 - DNA, 25 bp, Homo sapien
ttgtcccacctcattggcaccaaaa

SEQ ID NO: 4301271 - DNA, 25 bp, Homo sapien
caccagaggacggtatacgttttca

SEQ ID NO: 4301272 - DNA, 25 bp, Homo sapien
tggattggaggatatgactggcacc

SEQ ID NO: 4301273 - DNA, 25 bp, Homo sapien
ccatgagcccatggtttggaatagg

SEQ ID NO: 4301274 - DNA, 25 bp, Homo sapien
tgtagtatcaggcagcaaacccctt

SEQ ID NO: 4301275 - DNA, 25 bp, Homo sapien
aatgctccgacagctttaacagtag

SEQ ID NO: 4301276 - DNA, 25 bp, Homo sapien
tctgcagagactacattatgagagc

SEQ ID NO: 4301277 - DNA, 25 bp, Homo sapien
gactatagatgtgcaccaccaaaca

SEQ ID NO: 4301278 - DNA, 25 bp, Homo sapien
tatagatgtgcaccaccaaacactg

SEQ ID NO: 4301279 - DNA, 25 bp, Homo sapien
ggactatagatgtgcaccaccaaac

SEQ ID NO: 4301280 - DNA, 25 bp, Homo sapien
agatgtgcaccaccaaacactggct

SEQ ID NO: 4301281 - DNA, 25 bp, Homo sapien
taagttcagcgcttaaaaggttctg

SEQ ID NO: 4301282 - DNA, 25 bp, Homo sapien
aagttcagcgcttaaaaggttctgt

SEQ ID NO: 4301283 - DNA, 25 bp, Homo sapien
ataagttcagcgcttaaaaggttct

SEQ ID NO: 4301284 - DNA, 25 bp, Homo sapien
tggttctgcccgggtctctggtgat

SEQ ID NO: 4301285 - DNA, 25 bp, Homo sapien
ctggttctgcccgggtctctggtga

SEQ ID NO: 4301286 - DNA, 25 bp, Homo sapien
gatctgcaggtccaagatgtagtcg

SEQ ID NO: 4301287 - DNA, 25 bp, Homo sapien
gttctgcccgggtctctggtgatgc

SEQ ID NO: 4301288 - DNA, 25 bp, Homo sapien
ttacagcaggctcatcaggtcatcc

SEQ ID NO: 4301289 - DNA, 25 bp, Homo sapien
acagcaggctcatcaggtcatccac

SEQ ID NO: 4301290 - DNA, 25 bp, Homo sapien
tacagcaggctcatcaggtcatcca

SEQ ID NO: 4301291 - DNA, 25 bp, Homo sapien
tgggagatgcccaggcggtggtcca

SEQ ID NO: 4301292 - DNA, 25 bp, Homo sapien
caggcggtggtccaacaggctgttt

SEQ ID NO: 4301293 - DNA, 25 bp, Homo sapien
tttcctaatggacctcacgggactg

SEQ ID NO: 4301294 - DNA, 25 bp, Homo sapien
taatggacctcacgggactgaaggc

SEQ ID NO: 4301295 - DNA, 25 bp, Homo sapien
ccgctgccgcctgctgagctagctg

SEQ ID NO: 4301296 - DNA, 25 bp, Homo sapien
agtccgagggacaattctgcactgg

SEQ ID NO: 4301297 - DNA, 25 bp, Homo sapien
tattatccacgggttgaagggtgtc

SEQ ID NO: 4301298 - DNA, 25 bp, Homo sapien
gaagggtgtcgtacatcatggtaag

SEQ ID NO: 4301299 - DNA, 25 bp, Homo sapien
ctttacatttaggtcagtccgaggg

SEQ ID NO: 4301300 - DNA, 25 bp, Homo sapien
acgaggctggtggatcccttcaggt

SEQ ID NO: 4301301 - DNA, 25 bp, Homo sapien
ccaacattgtggggggacgaggctg

SEQ ID NO: 4301302 - DNA, 25 bp, Homo sapien
ctcagcaacatggtgttttatctct

SEQ ID NO: 4301303 - DNA, 25 bp, Homo sapien
ctgtgagcaactttggagccgaggc

SEQ ID NO: 4301304 - DNA, 25 bp, Homo sapien
ggctattaacataccaagaaatgca

SEQ ID NO: 4301305 - DNA, 25 bp, Homo sapien
tgaaaggaaactgcaaggataactg

SEQ ID NO: 4301306 - DNA, 25 bp, Homo sapien
tccttgcactgctatcagaagtaag

SEQ ID NO: 4301307 - DNA, 25 bp, Homo sapien
cacaattcctgattactgcacaggt

SEQ ID NO: 4301308 - DNA, 25 bp, Homo sapien
cagtcttgagtctggccagttgagc

SEQ ID NO: 4301309 - DNA, 25 bp, Homo sapien
aatggaagagtttacgttttcagct

SEQ ID NO: 4301310 - DNA, 25 bp, Homo sapien
ttcaaggttgcggtgccaccacagc

SEQ ID NO: 4301311 - DNA, 25 bp, Homo sapien
ggctatactcaggaaccaccagtct

SEQ ID NO: 4301312 - DNA, 25 bp, Homo sapien
gagaagagccttctcgctgaggagt

SEQ ID NO: 4301313 - DNA, 25 bp, Homo sapien
agagactcaagtggctcagtccctg

SEQ ID NO: 4301314 - DNA, 25 bp, Homo sapien
gctcttcagagcgtatggacctatt

SEQ ID NO: 4301315 - DNA, 25 bp, Homo sapien
aattctttgcttccgggctggcacc

SEQ ID NO: 4301316 - DNA, 25 bp, Homo sapien
gccacatctggggattgaaatgagg

SEQ ID NO: 4301317 - DNA, 25 bp, Homo sapien
ttggaacccaaacattggagttcat

SEQ ID NO: 4301318 - DNA, 25 bp, Homo sapien
tgaggttggaacccaaacattggag

SEQ ID NO: 4301319 - DNA, 25 bp, Homo sapien
tggttcagacgccacatctggggat

SEQ ID NO: 4301320 - DNA, 25 bp, Homo sapien
tatactatctgacctcactttgggc

SEQ ID NO: 4301321 - DNA, 25 bp, Homo sapien
caattaggcccttttcatctgatgg

SEQ ID NO: 4301322 - DNA, 25 bp, Homo sapien
ccggagagccggttcatttctttag

SEQ ID NO: 4301323 - DNA, 25 bp, Homo sapien
taacagctatgcaacccggagagcc

SEQ ID NO: 4301324 - DNA, 25 bp, Homo sapien
ctacctaaacaaatggccgtggctg

SEQ ID NO: 4301325 - DNA, 25 bp, Homo sapien
tagagtggagggagccatacaccta

SEQ ID NO: 4301326 - DNA, 25 bp, Homo sapien
acacccctatgttagccaagtggca

SEQ ID NO: 4301327 - DNA, 25 bp, Homo sapien
gtttctttaggaagcaagtgctgcc

SEQ ID NO: 4301328 - DNA, 25 bp, Homo sapien
catcagctcggggtcttctacctgg

SEQ ID NO: 4301329 - DNA, 25 bp, Homo sapien
cctgcctcttcagccgacatggccc

SEQ ID NO: 4301330 - DNA, 25 bp, Homo sapien
ttgccgggtgaccctttccagccca

SEQ ID NO: 4301331 - DNA, 25 bp, Homo sapien
gggtcttctacctggacgtcctctg

SEQ ID NO: 4301332 - DNA, 25 bp, Homo sapien
tcctgtagcagaagttgagcccttc

SEQ ID NO: 4301333 - DNA, 25 bp, Homo sapien
tcttggatccaagctagttttagtc

SEQ ID NO: 4301334 - DNA, 25 bp, Homo sapien
gtcttgacaccagagcggttcttgt

SEQ ID NO: 4301335 - DNA, 25 bp, Homo sapien
tcttgtcctgtagcagaagttgagc

SEQ ID NO: 4301336 - DNA, 25 bp, Homo sapien
gctgttcacctgcacattacatcca

SEQ ID NO: 4301337 - DNA, 25 bp, Homo sapien
gagggttcgttagcattttgctcca

SEQ ID NO: 4301338 - DNA, 25 bp, Homo sapien
tctgggctctaactggcctcacatc

SEQ ID NO: 4301339 - DNA, 25 bp, Homo sapien
catcaccctctgagtagctgttcac

SEQ ID NO: 4301340 - DNA, 25 bp, Homo sapien
aattgaagggctagtcctgctggga

SEQ ID NO: 4301341 - DNA, 25 bp, Homo sapien
cctgctgggaaaactacatcatctg

SEQ ID NO: 4301342 - DNA, 25 bp, Homo sapien
tgaaagtgtgctgctcctgacagag

SEQ ID NO: 4301343 - DNA, 25 bp, Homo sapien
tgtgcttggtacctgactgatccag

SEQ ID NO: 4301344 - DNA, 25 bp, Homo sapien
tctctctatgctggtggttctcact

SEQ ID NO: 4301345 - DNA, 25 bp, Homo sapien
gagccttgtcttcaggaccttcatt

SEQ ID NO: 4301346 - DNA, 25 bp, Homo sapien
ctgggctgtgactcaagagccttgt

SEQ ID NO: 4301347 - DNA, 25 bp, Homo sapien
gggcctgaacctctctgagaatcta

SEQ ID NO: 4301348 - DNA, 25 bp, Homo sapien
gggatacatcaggtcctgtctgcgt

SEQ ID NO: 4301349 - DNA, 25 bp, Homo sapien
acatcaggtcctgtctgcgtcacag

SEQ ID NO: 4301350 - DNA, 25 bp, Homo sapien
tcctgtctgcgtcacaggcctgtgc

SEQ ID NO: 4301351 - DNA, 25 bp, Homo sapien
tgtgagcaggggatacatcaggtcc

SEQ ID NO: 4301352 - DNA, 25 bp, Homo sapien
tagctctgcatttagtccatcctgc

SEQ ID NO: 4301353 - DNA, 25 bp, Homo sapien
tcaacctgattagctctgcatttag

SEQ ID NO: 4301354 - DNA, 25 bp, Homo sapien
tcacctggaaactcaacctgattag

SEQ ID NO: 4301355 - DNA, 25 bp, Homo sapien
atcctgcagagggacactccgggct

SEQ ID NO: 4301356 - DNA, 25 bp, Homo sapien
agggcttcatttgggccacctggca

SEQ ID NO: 4301357 - DNA, 25 bp, Homo sapien
caaccagggcttcatttgggccacc

SEQ ID NO: 4301358 - DNA, 25 bp, Homo sapien
cccaaccagggcttcatttgggcca

SEQ ID NO: 4301359 - DNA, 25 bp, Homo sapien
cagcaccccaaccagggcttcattt

SEQ ID NO: 4301360 - DNA, 25 bp, Homo sapien
tgtcattgtcctggcttgagtgcta

SEQ ID NO: 4301361 - DNA, 25 bp, Homo sapien
gattctagggcaagatgtcattgtc

SEQ ID NO: 4301362 - DNA, 25 bp, Homo sapien
gctcagtcttagagtcggtggttga

SEQ ID NO: 4301363 - DNA, 25 bp, Homo sapien
gctaaatcgttgaccagagcaggga

SEQ ID NO: 4301364 - DNA, 25 bp, Homo sapien
tgagacttcagcacatgtcctcagc

SEQ ID NO: 4301365 - DNA, 25 bp, Homo sapien
ttggacagccattccacccttgctt

SEQ ID NO: 4301366 - DNA, 25 bp, Homo sapien
ctttgagacttcagcacatgtcctc

SEQ ID NO: 4301367 - DNA, 25 bp, Homo sapien
gaggctcttggacagccattccacc

SEQ ID NO: 4301368 - DNA, 25 bp, Homo sapien
gaacattcttgtcaggcctaggtct

SEQ ID NO: 4301369 - DNA, 25 bp, Homo sapien
catttgtccataccccggagtcgtc

SEQ ID NO: 4301370 - DNA, 25 bp, Homo sapien
caaaaccttggactgaagccgaaca

SEQ ID NO: 4301371 - DNA, 25 bp, Homo sapien
gagctcagaagtaggatcagtacca

SEQ ID NO: 4301372 - DNA, 25 bp, Homo sapien
gaaacagctttatgttcgaatgcca

SEQ ID NO: 4301373 - DNA, 25 bp, Homo sapien
gaggtcagcgttatctcagctttgg

SEQ ID NO: 4301374 - DNA, 25 bp, Homo sapien
gatttccctctaacagttctgaaga

SEQ ID NO: 4301375 - DNA, 25 bp, Homo sapien
gttctgaagatgcaagtacggccga

SEQ ID NO: 4301376 - DNA, 25 bp, Homo sapien
aagcagtcttggtcaattgcattat

SEQ ID NO: 4301377 - DNA, 25 bp, Homo sapien
ggccatattgaatgacagctttaaa

SEQ ID NO: 4301378 - DNA, 25 bp, Homo sapien
gaggcaacagatcagacaaggggtt

SEQ ID NO: 4301379 - DNA, 25 bp, Homo sapien
aacaaagagtttggccatattgaat

SEQ ID NO: 4301380 - DNA, 25 bp, Homo sapien
tcagactaaggtactaaaagccaaa

SEQ ID NO: 4301381 - DNA, 25 bp, Homo sapien
catgccaaaggtgtgaccttcaaaa

SEQ ID NO: 4301382 - DNA, 25 bp, Homo sapien
aaccctaaagaagtacatgccaaag

SEQ ID NO: 4301383 - DNA, 25 bp, Homo sapien
aaatctctcagcataagatacctga

SEQ ID NO: 4301384 - DNA, 25 bp, Homo sapien
tactaggcaactcctttgtggaaaa

SEQ ID NO: 4301385 - DNA, 25 bp, Homo sapien
catctcagggactaggtcaaaaact

SEQ ID NO: 4301386 - DNA, 25 bp, Homo sapien
tcagcactgagtctttagagtcaat

SEQ ID NO: 4301387 - DNA, 25 bp, Homo sapien
aatggatgacgtttaaatccacggc

SEQ ID NO: 4301388 - DNA, 25 bp, Homo sapien
tcaaggaataccctaggagcacaag

SEQ ID NO: 4301389 - DNA, 25 bp, Homo sapien
tcatatcacatgttgggagccaaaa

SEQ ID NO: 4301390 - DNA, 25 bp, Homo sapien
tcttcactaggaagtccagcgctgt

SEQ ID NO: 4301391 - DNA, 25 bp, Homo sapien
gctttaaactaccttcaactgcgag

SEQ ID NO: 4301392 - DNA, 25 bp, Homo sapien
tgtccttctgggtatgtgcagcaaa

SEQ ID NO: 4301393 - DNA, 25 bp, Homo sapien
tgtattcctacaatgcctgtgtcct

SEQ ID NO: 4301394 - DNA, 25 bp, Homo sapien
gccaggaggatatgttattcatcaa

SEQ ID NO: 4301395 - DNA, 25 bp, Homo sapien
tctgcctcagctgataacactttag

SEQ ID NO: 4301396 - DNA, 25 bp, Homo sapien
gaacccccagtcttggtgacatgca

SEQ ID NO: 4301397 - DNA, 25 bp, Homo sapien
actgtgtgcccagtcagtaggaact

SEQ ID NO: 4301398 - DNA, 25 bp, Homo sapien
ttcactttgtcgcattttgctccag

SEQ ID NO: 4301399 - DNA, 25 bp, Homo sapien
gctccagcttcaggataccaagact

SEQ ID NO: 4301400 - DNA, 25 bp, Homo sapien
catgaactgtgaggcctttaccgtc

SEQ ID NO: 4301401 - DNA, 25 bp, Homo sapien
tatcagcaaagacagactgtgcctc

SEQ ID NO: 4301402 - DNA, 25 bp, Homo sapien
tgtgtactggccaagtcgagaagaa

SEQ ID NO: 4301403 - DNA, 25 bp, Homo sapien
taatttaccaccctcaagccaggct

SEQ ID NO: 4301404 - DNA, 25 bp, Homo sapien
caaggtagctcttggtcagcagcat

SEQ ID NO: 4301405 - DNA, 25 bp, Homo sapien
taagtgtcacaatggtatcccagcc

SEQ ID NO: 4301406 - DNA, 25 bp, Homo sapien
cttcatggcctgtaagtcagttgta

SEQ ID NO: 4301407 - DNA, 25 bp, Homo sapien
cacaaacctttagccaatatggaat

SEQ ID NO: 4301408 - DNA, 25 bp, Homo sapien
cttttttgcttgtcacaactgcaga

SEQ ID NO: 4301409 - DNA, 25 bp, Homo sapien
agcagtagttctcaattgggggtga

SEQ ID NO: 4301410 - DNA, 25 bp, Homo sapien
ccatttatgctggttaagagatccc

SEQ ID NO: 4301411 - DNA, 25 bp, Homo sapien
gaactgcttcatgtgaacatccctt

SEQ ID NO: 4301412 - DNA, 25 bp, Homo sapien
ggtctgttaatgtcatggccttgaa

SEQ ID NO: 4301413 - DNA, 25 bp, Homo sapien
tcttttacagactagcaggctactg

SEQ ID NO: 4301414 - DNA, 25 bp, Homo sapien
tactgtcttagcaaaagtcttggga

SEQ ID NO: 4301415 - DNA, 25 bp, Homo sapien
ggagccatactcacgctgcagtgca

SEQ ID NO: 4301416 - DNA, 25 bp, Homo sapien
caaggaagttattaggtgcagcctc

SEQ ID NO: 4301417 - DNA, 25 bp, Homo sapien
caataatcattagagctcaaggaag

SEQ ID NO: 4301418 - DNA, 25 bp, Homo sapien
ctgtttcttctattgcatgtttgct

SEQ ID NO: 4301419 - DNA, 25 bp, Homo sapien
gatctgtttcttctattgcatgttt

SEQ ID NO: 4301420 - DNA, 25 bp, Homo sapien
cttttgagggacagcttctgtcaaa

SEQ ID NO: 4301421 - DNA, 25 bp, Homo sapien
gcttttgagggacagcttctgtcaa

SEQ ID NO: 4301422 - DNA, 25 bp, Homo sapien
tgtcttcagcgagcttgaaccaaag

SEQ ID NO: 4301423 - DNA, 25 bp, Homo sapien
tagaagttccctgtgagcaatctgt

SEQ ID NO: 4301424 - DNA, 25 bp, Homo sapien
caattcgtagaaaggcataccctcc

SEQ ID NO: 4301425 - DNA, 25 bp, Homo sapien
gtagtccaaacacacttcaatgagg

SEQ ID NO: 4301426 - DNA, 25 bp, Homo sapien
gaaggcatgctacaaataggaagga

SEQ ID NO: 4301427 - DNA, 25 bp, Homo sapien
tataaaatgtcgcaactctccaaca

SEQ ID NO: 4301428 - DNA, 25 bp, Homo sapien
cctttgcgctttcccttagttgtca

SEQ ID NO: 4301429 - DNA, 25 bp, Homo sapien
gacatttgaaactagcaagcagcca

SEQ ID NO: 4301430 - DNA, 25 bp, Homo sapien
tttgaggcagtgattgtgaaagttg

SEQ ID NO: 4301431 - DNA, 25 bp, Homo sapien
tttcctttttgtggtggatatgtga

SEQ ID NO: 4301432 - DNA, 25 bp, Homo sapien
tctagtttcaactccgtcatagttt

SEQ ID NO: 4301433 - DNA, 25 bp, Homo sapien
gtggatatgtgaattcaactttctg

SEQ ID NO: 4301434 - DNA, 25 bp, Homo sapien
ggtgagggccttcaataactgagag

SEQ ID NO: 4301435 - DNA, 25 bp, Homo sapien
gaggtgagggccttcaataactgag

SEQ ID NO: 4301436 - DNA, 25 bp, Homo sapien
aggtgagggccttcaataactgaga

SEQ ID NO: 4301437 - DNA, 25 bp, Homo sapien
aaacgaatacccagtaattctgagt

SEQ ID NO: 4301438 - DNA, 25 bp, Homo sapien
caggatgaaaaacgaatacccagta

SEQ ID NO: 4301439 - DNA, 25 bp, Homo sapien
tttcaggatgaaaaacgaataccca

SEQ ID NO: 4301440 - DNA, 25 bp, Homo sapien
aaaacgaatacccagtaattctgag

SEQ ID NO: 4301441 - DNA, 25 bp, Homo sapien
agtatcttcatagttttgcttctgc

SEQ ID NO: 4301442 - DNA, 25 bp, Homo sapien
gtatcttcatagttttgcttctgca

SEQ ID NO: 4301443 - DNA, 25 bp, Homo sapien
ctgataaatacagaagctgtatatt

SEQ ID NO: 4301444 - DNA, 25 bp, Homo sapien
tagatacaatgttgccatagattct

SEQ ID NO: 4301445 - DNA, 25 bp, Homo sapien
tacagaagctgtatattaatagata

SEQ ID NO: 4301446 - DNA, 25 bp, Homo sapien
agatacaatgttgccatagattctt

SEQ ID NO: 4301447 - DNA, 25 bp, Homo sapien
aaaatacctgttcttaggatgttca

SEQ ID NO: 4301448 - DNA, 25 bp, Homo sapien
aatacctgttcttaggatgttcaaa

SEQ ID NO: 4301449 - DNA, 25 bp, Homo sapien
atgtcaggcagttccggttgctgag

SEQ ID NO: 4301450 - DNA, 25 bp, Homo sapien
gcagttccggttgctgaggatacat

SEQ ID NO: 4301451 - DNA, 25 bp, Homo sapien
cccgcgcgccgcgttaccacacgcc

SEQ ID NO: 4301452 - DNA, 25 bp, Homo sapien
ctcccgcgcgccgcgttaccacacg

SEQ ID NO: 4301453 - DNA, 25 bp, Homo sapien
gcgcgccgcgttaccacacgcccac

SEQ ID NO: 4301454 - DNA, 25 bp, Homo sapien
cagacggcctttccctagggttcat

SEQ ID NO: 4301455 - DNA, 25 bp, Homo sapien
ggttgccgcgactacacctcacgaa

SEQ ID NO: 4301456 - DNA, 25 bp, Homo sapien
gactacacctcacgaacttttcgcg

SEQ ID NO: 4301457 - DNA, 25 bp, Homo sapien
cctggttgccgcgactacacctcac

SEQ ID NO: 4301458 - DNA, 25 bp, Homo sapien
tcacgaacttttcgcgccccaaggc

SEQ ID NO: 4301459 - DNA, 25 bp, Homo sapien
gccgcgcgtgcgcaaatatggtaac

SEQ ID NO: 4301460 - DNA, 25 bp, Homo sapien
cgcgtgcgcaaatatggtaacgtga

SEQ ID NO: 4301461 - DNA, 25 bp, Homo sapien
cgcgcgtgcgcaaatatggtaacgt

SEQ ID NO: 4301462 - DNA, 25 bp, Homo sapien
cgtgcgcaaatatggtaacgtgacc

SEQ ID NO: 4301463 - DNA, 25 bp, Homo sapien
tgttacaggatatagaagcagcaga

SEQ ID NO: 4301464 - DNA, 25 bp, Homo sapien
tacagatattgctagtacaggtgcc

SEQ ID NO: 4301465 - DNA, 25 bp, Homo sapien
gacactcttggtgcatgaattactg

SEQ ID NO: 4301466 - DNA, 25 bp, Homo sapien
gttttcctaccatagtgtgcctcca

SEQ ID NO: 4301467 - DNA, 25 bp, Homo sapien
gaggcacagcgataacttcttcaca

SEQ ID NO: 4301468 - DNA, 25 bp, Homo sapien
aataccattcaaaatgaggcacagc

SEQ ID NO: 4301469 - DNA, 25 bp, Homo sapien
tatgagaatttactggcaagtcaca

SEQ ID NO: 4301470 - DNA, 25 bp, Homo sapien
tcgattatctcctaagtgacagtga

SEQ ID NO: 4301471 - DNA, 25 bp, Homo sapien
tcttggaaatatcctgttgagtggg

SEQ ID NO: 4301472 - DNA, 25 bp, Homo sapien
aaggaataaacagcacagggtgtca

SEQ ID NO: 4301473 - DNA, 25 bp, Homo sapien
ggcagattagcacacttctctacag

SEQ ID NO: 4301474 - DNA, 25 bp, Homo sapien
ctatagtgtcacaatacaaaatgtc

SEQ ID NO: 4301475 - DNA, 25 bp, Homo sapien
tacaccctgggttacgatcgagggc

SEQ ID NO: 4301476 - DNA, 25 bp, Homo sapien
gagcatgcacttcctttgagatctg

SEQ ID NO: 4301477 - DNA, 25 bp, Homo sapien
tgtgtcaagcgagtaggcaaattcc

SEQ ID NO: 4301478 - DNA, 25 bp, Homo sapien
tctttctcatgcgtagggagcagtg

SEQ ID NO: 4301479 - DNA, 25 bp, Homo sapien
gagagtcagtccacccttctgctta

SEQ ID NO: 4301480 - DNA, 25 bp, Homo sapien
ctggagtttgctctgccacggagag

SEQ ID NO: 4301481 - DNA, 25 bp, Homo sapien
tcatgaaagaaacatccagagggtg

SEQ ID NO: 4301482 - DNA, 25 bp, Homo sapien
tgggcaccaagagcttcaaatcagc

SEQ ID NO: 4301483 - DNA, 25 bp, Homo sapien
aattaaatacgtttcggcgcactgg

SEQ ID NO: 4301484 - DNA, 25 bp, Homo sapien
gctgccagtcatcgaggaaacattt

SEQ ID NO: 4301485 - DNA, 25 bp, Homo sapien
gaagcggaggcctggaattaaatac

SEQ ID NO: 4301486 - DNA, 25 bp, Homo sapien
tatattccgtgttcgcttgtacagg

SEQ ID NO: 4301487 - DNA, 25 bp, Homo sapien
gcgcacatgtttctttaagtcaaag

SEQ ID NO: 4301488 - DNA, 25 bp, Homo sapien
tctgcactgtcctagtcaggtcctt

SEQ ID NO: 4301489 - DNA, 25 bp, Homo sapien
tcctagtcaggtcctttgcggaggg

SEQ ID NO: 4301490 - DNA, 25 bp, Homo sapien
cacgctgtcgtggagtttgcgcaca

SEQ ID NO: 4301491 - DNA, 25 bp, Homo sapien
ggtacatttgtactgcttctcgccg

SEQ ID NO: 4301492 - DNA, 25 bp, Homo sapien
gatggtacatttgtactgcttctcg

SEQ ID NO: 4301493 - DNA, 25 bp, Homo sapien
tgggtcagcttgtggttcttgtagt

SEQ ID NO: 4301494 - DNA, 25 bp, Homo sapien
catttgtactgcttctcgccgctgt

SEQ ID NO: 4301495 - DNA, 25 bp, Homo sapien
tatgcgtgttgagcgtggagctgcg

SEQ ID NO: 4301496 - DNA, 25 bp, Homo sapien
gttgaacgctttgccgcactggttg

SEQ ID NO: 4301497 - DNA, 25 bp, Homo sapien
tttgccgcaaaattcgcagacgaag

SEQ ID NO: 4301498 - DNA, 25 bp, Homo sapien
cagacgaagggcttgtagcccgcgt

SEQ ID NO: 4301499 - DNA, 25 bp, Homo sapien
ctcgggaacacctggaagggacatc

SEQ ID NO: 4301500 - DNA, 25 bp, Homo sapien
ggtaagggataatctttggccatcg

SEQ ID NO: 4301501 - DNA, 25 bp, Homo sapien
cactcaaccctagagggtaagggat

SEQ ID NO: 4301502 - DNA, 25 bp, Homo sapien
cgtatccccggtgttatcactaaga

SEQ ID NO: 4301503 - DNA, 25 bp, Homo sapien
acacgaacggtctggctccggtgtg

SEQ ID NO: 4301504 - DNA, 25 bp, Homo sapien
ccgcagactttgcacacgaacggtc

SEQ ID NO: 4301505 - DNA, 25 bp, Homo sapien
gcgtgctggcctggcgaaagccttt

SEQ ID NO: 4301506 - DNA, 25 bp, Homo sapien
ttttgtgcctgcagagcgtgctggc

SEQ ID NO: 4301507 - DNA, 25 bp, Homo sapien
tgagattatagtgagcgttaaacac

SEQ ID NO: 4301508 - DNA, 25 bp, Homo sapien
gtggcgggtgagattatagtgagcg

SEQ ID NO: 4301509 - DNA, 25 bp, Homo sapien
cgggtgagattatagtgagcgttaa

SEQ ID NO: 4301510 - DNA, 25 bp, Homo sapien
ggtgagattatagtgagcgttaaac

SEQ ID NO: 4301511 - DNA, 25 bp, Homo sapien
tacgcggtcgagtccaggtagttga

SEQ ID NO: 4301512 - DNA, 25 bp, Homo sapien
cagtcagggccgagttttccttcag

SEQ ID NO: 4301513 - DNA, 25 bp, Homo sapien
tagttgaagtagtagagcgagccgc

SEQ ID NO: 4301514 - DNA, 25 bp, Homo sapien
cacagcctggttgatgacctgcggc

SEQ ID NO: 4301515 - DNA, 25 bp, Homo sapien
ctgcccgcgggcagcgcggacggcg

SEQ ID NO: 4301516 - DNA, 25 bp, Homo sapien
cccgcgggcagcgcggacggcgcca

SEQ ID NO: 4301517 - DNA, 25 bp, Homo sapien
tgcccgcgggcagcgcggacggcgc

SEQ ID NO: 4301518 - DNA, 25 bp, Homo sapien
gcgggcagcgcggacggcgccaggc

SEQ ID NO: 4301519 - DNA, 25 bp, Homo sapien
ttttgcacaagccgctggcgccgca

SEQ ID NO: 4301520 - DNA, 25 bp, Homo sapien
ggttttgcacaagccgctggcgccg

SEQ ID NO: 4301521 - DNA, 25 bp, Homo sapien
cttgcagcacacgccacagttggtt

SEQ ID NO: 4301522 - DNA, 25 bp, Homo sapien
tgcagcacacgccacagttggtttt

SEQ ID NO: 4301523 - DNA, 25 bp, Homo sapien
tccgagtaactgagcagtgtctttg

SEQ ID NO: 4301524 - DNA, 25 bp, Homo sapien
ttccagagctccgagtaactgagca

SEQ ID NO: 4301525 - DNA, 25 bp, Homo sapien
cgcccgcccggaggctgcttttcca

SEQ ID NO: 4301526 - DNA, 25 bp, Homo sapien
aactgagcagtgtctttgacggcac

SEQ ID NO: 4301527 - DNA, 25 bp, Homo sapien
gtagcctaggggctggagggggatc

SEQ ID NO: 4301528 - DNA, 25 bp, Homo sapien
agcctaggggctggagggggatcat

SEQ ID NO: 4301529 - DNA, 25 bp, Homo sapien
cctaggggctggagggggatcatac

SEQ ID NO: 4301530 - DNA, 25 bp, Homo sapien
ctcgtagcctaggggctggaggggg

SEQ ID NO: 4301531 - DNA, 25 bp, Homo sapien
gcggcgagcagaggttgagcagttt

SEQ ID NO: 4301532 - DNA, 25 bp, Homo sapien
cagcggcgagcagaggttgagcagt

SEQ ID NO: 4301533 - DNA, 25 bp, Homo sapien
cgtccgcctctagcgctccaggccg

SEQ ID NO: 4301534 - DNA, 25 bp, Homo sapien
gccctggctgccgtccgcctctagc

SEQ ID NO: 4301535 - DNA, 25 bp, Homo sapien
tgtcttggaagtggccggcgacgct

SEQ ID NO: 4301536 - DNA, 25 bp, Homo sapien
cgctcgatggaaaaggccagtgtct

SEQ ID NO: 4301537 - DNA, 25 bp, Homo sapien
cgtcttggccatgatgcgctcgatg

SEQ ID NO: 4301538 - DNA, 25 bp, Homo sapien
aaaaggccagtgtcttggaagtggc

SEQ ID NO: 4301539 - DNA, 25 bp, Homo sapien
tgggccagggcgcagcctctctcct

SEQ ID NO: 4301540 - DNA, 25 bp, Homo sapien
aggctgggccagggcgcagcctctc

SEQ ID NO: 4301541 - DNA, 25 bp, Homo sapien
ggcgcgcggagctgagccgagccag

SEQ ID NO: 4301542 - DNA, 25 bp, Homo sapien
gcgcggagctgagccgagccaggct

SEQ ID NO: 4301543 - DNA, 25 bp, Homo sapien
taagcacctagtcgggcccgggtca

SEQ ID NO: 4301544 - DNA, 25 bp, Homo sapien
cccgggtcacccatttgcattcaaa

SEQ ID NO: 4301545 - DNA, 25 bp, Homo sapien
taaagaggaccggagagccacctcg

SEQ ID NO: 4301546 - DNA, 25 bp, Homo sapien
cctctgccacgcgtgctgggagctg

SEQ ID NO: 4301547 - DNA, 25 bp, Homo sapien
gccatgcagcgtgtctcttctgtca

SEQ ID NO: 4301548 - DNA, 25 bp, Homo sapien
aaacatcttcccctccgcgtgagat

SEQ ID NO: 4301549 - DNA, 25 bp, Homo sapien
cattttgatggcaaacatcttcccc

SEQ ID NO: 4301550 - DNA, 25 bp, Homo sapien
ccaccaccaaggagatgcgttccga

SEQ ID NO: 4301551 - DNA, 25 bp, Homo sapien
gtggaatgacatgggcggcggcgcg

SEQ ID NO: 4301552 - DNA, 25 bp, Homo sapien
aagtggaatgacatgggcggcggcg

SEQ ID NO: 4301553 - DNA, 25 bp, Homo sapien
gcggctcccgtagcggcccctgtgt

SEQ ID NO: 4301554 - DNA, 25 bp, Homo sapien
gcgcggctcccgtagcggcccctgt

SEQ ID NO: 4301555 - DNA, 25 bp, Homo sapien
ctcaaactttaaaaggaggcaactg

SEQ ID NO: 4301556 - DNA, 25 bp, Homo sapien
tttctgaggcaaagccgagttctgc

SEQ ID NO: 4301557 - DNA, 25 bp, Homo sapien
tgatcgggtttctgaggcaaagccg

SEQ ID NO: 4301558 - DNA, 25 bp, Homo sapien
ttatgatcgggtttctgaggcaaag

SEQ ID NO: 4301559 - DNA, 25 bp, Homo sapien
gcaaagccgagttctgcttctggtt

SEQ ID NO: 4301560 - DNA, 25 bp, Homo sapien
cagattgaaacagcagaacctcccc

SEQ ID NO: 4301561 - DNA, 25 bp, Homo sapien
ttttagccactaaagcaccgcgtgg

SEQ ID NO: 4301562 - DNA, 25 bp, Homo sapien
cagtcgaaccaattttccgaagtga

SEQ ID NO: 4301563 - DNA, 25 bp, Homo sapien
tcctcctaaggccattcagtcgaac

SEQ ID NO: 4301564 - DNA, 25 bp, Homo sapien
cccaacattgaaacaatatcaatac

SEQ ID NO: 4301565 - DNA, 25 bp, Homo sapien
aatttctatcccgactctcctgtgg

SEQ ID NO: 4301566 - DNA, 25 bp, Homo sapien
acctgcagcatctcaagacccgaat

SEQ ID NO: 4301567 - DNA, 25 bp, Homo sapien
tgtggatcccgtttgccacaagtac

SEQ ID NO: 4301568 - DNA, 25 bp, Homo sapien
aattgttgctctccgcagcagctcg

SEQ ID NO: 4301569 - DNA, 25 bp, Homo sapien
tttccaaattgggtaattgttgctc

SEQ ID NO: 4301570 - DNA, 25 bp, Homo sapien
aaattgggtaattgttgctctccgc

SEQ ID NO: 4301571 - DNA, 25 bp, Homo sapien
gtttgaaagctccatcaggctgaaa

SEQ ID NO: 4301572 - DNA, 25 bp, Homo sapien
tcggtgcgcgttgttctcaggatta

SEQ ID NO: 4301573 - DNA, 25 bp, Homo sapien
cgtggcgggcttgtccaaagcacag

SEQ ID NO: 4301574 - DNA, 25 bp, Homo sapien
gaaaacattcgaactggcttgcccg

SEQ ID NO: 4301575 - DNA, 25 bp, Homo sapien
tagtgctgttgggagacaaagagcc

SEQ ID NO: 4301576 - DNA, 25 bp, Homo sapien
tgggccagagccgtctgcatctgcc

SEQ ID NO: 4301577 - DNA, 25 bp, Homo sapien
acagatgggccagagccgtctgcat

SEQ ID NO: 4301578 - DNA, 25 bp, Homo sapien
ccggagcacgcaagcacagtcccag

SEQ ID NO: 4301579 - DNA, 25 bp, Homo sapien
ccgtctgcatctgcccgcatccttt

SEQ ID NO: 4301580 - DNA, 25 bp, Homo sapien
tgcacccggcggctgttttgcagcg

SEQ ID NO: 4301581 - DNA, 25 bp, Homo sapien
ggcggctgttttgcagcgcccctgg

SEQ ID NO: 4301582 - DNA, 25 bp, Homo sapien
ccggcggctgttttgcagcgcccct

SEQ ID NO: 4301583 - DNA, 25 bp, Homo sapien
cacccggcggctgttttgcagcgcc

SEQ ID NO: 4301584 - DNA, 25 bp, Homo sapien
gatgtgaggcacagccaaaagcaac

SEQ ID NO: 4301585 - DNA, 25 bp, Homo sapien
gttctcaacagtagaacttgacagc

SEQ ID NO: 4301586 - DNA, 25 bp, Homo sapien
tgctctcagttctcaacagtagaac

SEQ ID NO: 4301587 - DNA, 25 bp, Homo sapien
tacacagtagctcccagaatcggct

SEQ ID NO: 4301588 - DNA, 25 bp, Homo sapien
cggatgcccctcagtgatcccgagg

SEQ ID NO: 4301589 - DNA, 25 bp, Homo sapien
ggatgcccctcagtgatcccgaggc

SEQ ID NO: 4301590 - DNA, 25 bp, Homo sapien
tgcccctcagtgatcccgaggccca

SEQ ID NO: 4301591 - DNA, 25 bp, Homo sapien
tccggatgcccctcagtgatcccga

SEQ ID NO: 4301592 - DNA, 25 bp, Homo sapien
gaactgcgcgcttgatgttaagtca

SEQ ID NO: 4301593 - DNA, 25 bp, Homo sapien
aaaccccagggttgtgcagttacag

SEQ ID NO: 4301594 - DNA, 25 bp, Homo sapien
tgttaagtcatgataggatcgcccc

SEQ ID NO: 4301595 - DNA, 25 bp, Homo sapien
cttgccgtggcaattaagagaatca

SEQ ID NO: 4301596 - DNA, 25 bp, Homo sapien
tggtaccacatagctaaaatggcag

SEQ ID NO: 4301597 - DNA, 25 bp, Homo sapien
taactggcatccacatacgtgaaac

SEQ ID NO: 4301598 - DNA, 25 bp, Homo sapien
tctttgctgataacagggacacgcc

SEQ ID NO: 4301599 - DNA, 25 bp, Homo sapien
taaggacatgcactgattacaggac

SEQ ID NO: 4301600 - DNA, 25 bp, Homo sapien
ttgctgtttaaggtggagtccagga

SEQ ID NO: 4301601 - DNA, 25 bp, Homo sapien
tgcaatcggaaatctctgtaggttt

SEQ ID NO: 4301602 - DNA, 25 bp, Homo sapien
ccaggaccccttgcaatcggaaatc

SEQ ID NO: 4301603 - DNA, 25 bp, Homo sapien
ttccggatcgtttcataggtcttgc

SEQ ID NO: 4301604 - DNA, 25 bp, Homo sapien
gaatgctaacatacgtcaacaccac

SEQ ID NO: 4301605 - DNA, 25 bp, Homo sapien
cctattacaggcagtggcaattatg

SEQ ID NO: 4301606 - DNA, 25 bp, Homo sapien
aacaatggcttggtattactgcacc

SEQ ID NO: 4301607 - DNA, 25 bp, Homo sapien
gagaaagatggagcgctaatgcctc

SEQ ID NO: 4301608 - DNA, 25 bp, Homo sapien
acagcagttggttgtaagtcagcac

SEQ ID NO: 4301609 - DNA, 25 bp, Homo sapien
tgctgtctataacctttcccgggtg

SEQ ID NO: 4301610 - DNA, 25 bp, Homo sapien
taaaaccctctatggtgaagcatca

SEQ ID NO: 4301611 - DNA, 25 bp, Homo sapien
caggcgaccacttgacgattgagct

SEQ ID NO: 4301612 - DNA, 25 bp, Homo sapien
agtccatccggtccgtcaaccaggt

SEQ ID NO: 4301613 - DNA, 25 bp, Homo sapien
gaagctgtaagtccatccggtccgt

SEQ ID NO: 4301614 - DNA, 25 bp, Homo sapien
aatatgaagctgtaagtccatccgg

SEQ ID NO: 4301615 - DNA, 25 bp, Homo sapien
tccggtccgtcaaccaggtgcagat

SEQ ID NO: 4301616 - DNA, 25 bp, Homo sapien
gcaggcaatgtttgagtaccccact

SEQ ID NO: 4301617 - DNA, 25 bp, Homo sapien
ggaccaatccaagacagacaatcta

SEQ ID NO: 4301618 - DNA, 25 bp, Homo sapien
cacatcatggagcatttatagggca

SEQ ID NO: 4301619 - DNA, 25 bp, Homo sapien
caaaattgcaaggtactgggtactg

SEQ ID NO: 4301620 - DNA, 25 bp, Homo sapien
tccacaccctgtctgctaagtacaa

SEQ ID NO: 4301621 - DNA, 25 bp, Homo sapien
tgtctgctaagtacaatactggaaa

SEQ ID NO: 4301622 - DNA, 25 bp, Homo sapien
ttgaaaattccacaccctgtctgct

SEQ ID NO: 4301623 - DNA, 25 bp, Homo sapien
gaaattgggctgagagccttaggaa

SEQ ID NO: 4301624 - DNA, 25 bp, Homo sapien
taaagatcatggaggcgaaactgtc

SEQ ID NO: 4301625 - DNA, 25 bp, Homo sapien
gatgaccttcgagcaatcctggcaa

SEQ ID NO: 4301626 - DNA, 25 bp, Homo sapien
gaaacgacacagtctcagccatggc

SEQ ID NO: 4301627 - DNA, 25 bp, Homo sapien
caactggagggctctcttgtgctaa

SEQ ID NO: 4301628 - DNA, 25 bp, Homo sapien
gaaataagaattgtgggctgacgac

SEQ ID NO: 4301629 - DNA, 25 bp, Homo sapien
catcatagacaacagggcccttgga

SEQ ID NO: 4301630 - DNA, 25 bp, Homo sapien
gagcacaggctctaacatccacctg

SEQ ID NO: 4301631 - DNA, 25 bp, Homo sapien
gggctcacagtgcttattaatcggg

SEQ ID NO: 4301632 - DNA, 25 bp, Homo sapien
aaacttgtgactcagtccaatatat

SEQ ID NO: 4301633 - DNA, 25 bp, Homo sapien
acttgtgactcagtccaatatatct

SEQ ID NO: 4301634 - DNA, 25 bp, Homo sapien
gtgactcagtccaatatatctccat

SEQ ID NO: 4301635 - DNA, 25 bp, Homo sapien
ttgtgactcagtccaatatatctcc

SEQ ID NO: 4301636 - DNA, 25 bp, Homo sapien
gaaacgacgtctacagatcggttgc

SEQ ID NO: 4301637 - DNA, 25 bp, Homo sapien
gatcggttgcataacactgtgaatc

SEQ ID NO: 4301638 - DNA, 25 bp, Homo sapien
cacttagagatggttaagacagtac

SEQ ID NO: 4301639 - DNA, 25 bp, Homo sapien
ttgcctaagaaagaacagatatgta

SEQ ID NO: 4301640 - DNA, 25 bp, Homo sapien
taatgagcccaatgtgattaagccc

SEQ ID NO: 4301641 - DNA, 25 bp, Homo sapien
gaaaaatggaacatgggccagacac

SEQ ID NO: 4301642 - DNA, 25 bp, Homo sapien
cttactttctgcaagcaaaccggga

SEQ ID NO: 4301643 - DNA, 25 bp, Homo sapien
cctgtgcactgagaaaatggacccc

SEQ ID NO: 4301644 - DNA, 25 bp, Homo sapien
tacttgaggcgcacagcgagcgcct

SEQ ID NO: 4301645 - DNA, 25 bp, Homo sapien
tgtcgagcaagttaatcaagcaaat

SEQ ID NO: 4301646 - DNA, 25 bp, Homo sapien
cagatgtacaaaggcggaactgcgc

SEQ ID NO: 4301647 - DNA, 25 bp, Homo sapien
gaactgcgccgtgcagcttatccgc

SEQ ID NO: 4301648 - DNA, 25 bp, Homo sapien
ccttgaaaagttgacagggcggtca

SEQ ID NO: 4301649 - DNA, 25 bp, Homo sapien
atgctcctaacatctgctcgatata

SEQ ID NO: 4301650 - DNA, 25 bp, Homo sapien
gctcctaacatctgctcgatataaa

SEQ ID NO: 4301651 - DNA, 25 bp, Homo sapien
tcctaacatctgctcgatataaaga

SEQ ID NO: 4301652 - DNA, 25 bp, Homo sapien
ctaagtgggactactctggatacag

SEQ ID NO: 4301653 - DNA, 25 bp, Homo sapien
ccttcttttggctctaagtgggact

SEQ ID NO: 4301654 - DNA, 25 bp, Homo sapien
gctgtattgctgatctaacgtgctg

SEQ ID NO: 4301655 - DNA, 25 bp, Homo sapien
gagaagtaatcaagggaggccaaag

SEQ ID NO: 4301656 - DNA, 25 bp, Homo sapien
tccttcagagactggcaaaggctcc

SEQ ID NO: 4301657 - DNA, 25 bp, Homo sapien
cagatggacacatggacttcttgag

SEQ ID NO: 4301658 - DNA, 25 bp, Homo sapien
gctcccaagctaactcccagatgga

SEQ ID NO: 4301659 - DNA, 25 bp, Homo sapien
agagggtcctggatgtctaacaagc

SEQ ID NO: 4301660 - DNA, 25 bp, Homo sapien
cagtggtgccaaagacgagaaactt

SEQ ID NO: 4301661 - DNA, 25 bp, Homo sapien
cctcttttctagttcgtgcagatca

SEQ ID NO: 4301662 - DNA, 25 bp, Homo sapien
tcattttgagaaggacagtggctgc

SEQ ID NO: 4301663 - DNA, 25 bp, Homo sapien
tcctttaatacacagactagcactc

SEQ ID NO: 4301664 - DNA, 25 bp, Homo sapien
tcttcattgcctacaagctccagag

SEQ ID NO: 4301665 - DNA, 25 bp, Homo sapien
tgattaatggaacattctcctctgg

SEQ ID NO: 4301666 - DNA, 25 bp, Homo sapien
tactgtgaccttaacgtaacagagc

SEQ ID NO: 4301667 - DNA, 25 bp, Homo sapien
taacagagcaatcagcttggcttct

SEQ ID NO: 4301668 - DNA, 25 bp, Homo sapien
tcacagattctaagggatgtcctag

SEQ ID NO: 4301669 - DNA, 25 bp, Homo sapien
tcagatagctgtgccttattccagt

SEQ ID NO: 4301670 - DNA, 25 bp, Homo sapien
caaagcagttacagtgacacaagaa

SEQ ID NO: 4301671 - DNA, 25 bp, Homo sapien
caaaggacccttcccaatagtatgg

SEQ ID NO: 4301672 - DNA, 25 bp, Homo sapien
ggtttgcacaaaccagctgtaaaga

SEQ ID NO: 4301673 - DNA, 25 bp, Homo sapien
tactggcatgggaaatagtgaccat

SEQ ID NO: 4301674 - DNA, 25 bp, Homo sapien
tgcagaacaattggcacggcagtcc

SEQ ID NO: 4301675 - DNA, 25 bp, Homo sapien
cggcagtccctataacaagtcaaga

SEQ ID NO: 4301676 - DNA, 25 bp, Homo sapien
cctccttgtagcctattatttggta

SEQ ID NO: 4301677 - DNA, 25 bp, Homo sapien
tgtagcctattatttggtactttca

SEQ ID NO: 4301678 - DNA, 25 bp, Homo sapien
cagctggtgatataccttacagata

SEQ ID NO: 4301679 - DNA, 25 bp, Homo sapien
gatatagcgtcatgtcctccttgta

SEQ ID NO: 4301680 - DNA, 25 bp, Homo sapien
cctgaagaaagccagtgcggatgcg

SEQ ID NO: 4301681 - DNA, 25 bp, Homo sapien
ccgtgcgaggcaaagaatactgagt

SEQ ID NO: 4301682 - DNA, 25 bp, Homo sapien
ggatgcggcattactaccaatgtgg

SEQ ID NO: 4301683 - DNA, 25 bp, Homo sapien
taactgccacggagaagccaaatgc

SEQ ID NO: 4301684 - DNA, 25 bp, Homo sapien
gccccaggacccctatcattaagga

SEQ ID NO: 4301685 - DNA, 25 bp, Homo sapien
cacaagagatttgcagagcatgtac

SEQ ID NO: 4301686 - DNA, 25 bp, Homo sapien
catcagttaggttgcctagcaccaa

SEQ ID NO: 4301687 - DNA, 25 bp, Homo sapien
tcccttgtttagcttggtggacaca

SEQ ID NO: 4301688 - DNA, 25 bp, Homo sapien
tattggatggtgattgtgccccgga

SEQ ID NO: 4301689 - DNA, 25 bp, Homo sapien
gacccgctggtgagctttatgcatg

SEQ ID NO: 4301690 - DNA, 25 bp, Homo sapien
cattctcagtggatgtgggtcatgc

SEQ ID NO: 4301691 - DNA, 25 bp, Homo sapien
tgccccggacattctaggctcagta

SEQ ID NO: 4301692 - DNA, 25 bp, Homo sapien
gatctgggtccgcagcccaatgtac

SEQ ID NO: 4301693 - DNA, 25 bp, Homo sapien
tttgatctgggtccgcagcccaatg

SEQ ID NO: 4301694 - DNA, 25 bp, Homo sapien
aagtttgatctgggtccgcagccca

SEQ ID NO: 4301695 - DNA, 25 bp, Homo sapien
ggaaataagattgctcaaaaatgat

SEQ ID NO: 4301696 - DNA, 25 bp, Homo sapien
ctgactgagcaactctaatgtaagt

SEQ ID NO: 4301697 - DNA, 25 bp, Homo sapien
gggcgccatggtttaaagctgcaac

SEQ ID NO: 4301698 - DNA, 25 bp, Homo sapien
tctttgaagtgataacgatgcgaca

SEQ ID NO: 4301699 - DNA, 25 bp, Homo sapien
gataacgatgcgacatttactgcac

SEQ ID NO: 4301700 - DNA, 25 bp, Homo sapien
gccagattgcaaggaggaaaaccat

SEQ ID NO: 4301701 - DNA, 25 bp, Homo sapien
cctccctgatgagaatatctcccta

SEQ ID NO: 4301702 - DNA, 25 bp, Homo sapien
tccctgatgagaatatctccctaaa

SEQ ID NO: 4301703 - DNA, 25 bp, Homo sapien
ccctgatgagaatatctccctaaag

SEQ ID NO: 4301704 - DNA, 25 bp, Homo sapien
tatcacacagattgggactgagaca

SEQ ID NO: 4301705 - DNA, 25 bp, Homo sapien
ggttcagaacagacacaagacagat

SEQ ID NO: 4301706 - DNA, 25 bp, Homo sapien
gaatgagcctgcttgccgagaggct

SEQ ID NO: 4301707 - DNA, 25 bp, Homo sapien
gcaagcttcgtgcaggaatgagcct

SEQ ID NO: 4301708 - DNA, 25 bp, Homo sapien
tcctcctgtctcttattttgtcaca

SEQ ID NO: 4301709 - DNA, 25 bp, Homo sapien
cctcctgtctcttattttgtcacat

SEQ ID NO: 4301710 - DNA, 25 bp, Homo sapien
acgaaagtcacgtaggcgtcggcca

SEQ ID NO: 4301711 - DNA, 25 bp, Homo sapien
tatgtacatctcctcattgacctta

SEQ ID NO: 4301712 - DNA, 25 bp, Homo sapien
gacatcctgagaatggcggacgaaa

SEQ ID NO: 4301713 - DNA, 25 bp, Homo sapien
gaccttatcacgcaggacatcctga

SEQ ID NO: 4301714 - DNA, 25 bp, Homo sapien
caagtgcggcagatctatcagtaac

SEQ ID NO: 4301715 - DNA, 25 bp, Homo sapien
gctaaggtacaaagtcaagtgcggc

SEQ ID NO: 4301716 - DNA, 25 bp, Homo sapien
caattatcatgcaaagggccaatgc

SEQ ID NO: 4301717 - DNA, 25 bp, Homo sapien
ggcccctgggatgctagtaacattt

SEQ ID NO: 4301718 - DNA, 25 bp, Homo sapien
atttgtgaataagctaccctgtggc

SEQ ID NO: 4301719 - DNA, 25 bp, Homo sapien
tgactaactgctagtgcccacatgg

SEQ ID NO: 4301720 - DNA, 25 bp, Homo sapien
tagtttccaatatgtagccaaggtc

SEQ ID NO: 4301721 - DNA, 25 bp, Homo sapien
taggtgactggtactagaacttccc

SEQ ID NO: 4301722 - DNA, 25 bp, Homo sapien
gatgcacataattgaccttgggaac

SEQ ID NO: 4301723 - DNA, 25 bp, Homo sapien
tctaccacacccctggaagtgcagg

SEQ ID NO: 4301724 - DNA, 25 bp, Homo sapien
gaagtgcaggctttatggtccaact

SEQ ID NO: 4301725 - DNA, 25 bp, Homo sapien
gcttcgcccggcataaactgactct

SEQ ID NO: 4301726 - DNA, 25 bp, Homo sapien
tcttcttacctctgctgtcttgtga

SEQ ID NO: 4301727 - DNA, 25 bp, Homo sapien
ctagtgagtactttataacgcttgg

SEQ ID NO: 4301728 - DNA, 25 bp, Homo sapien
aacatgctgcatcaacttcttctgc

SEQ ID NO: 4301729 - DNA, 25 bp, Homo sapien
tcaggagatgtcatggttttacggg

SEQ ID NO: 4301730 - DNA, 25 bp, Homo sapien
caaatctttgggtcgaaagccgaga

SEQ ID NO: 4301731 - DNA, 25 bp, Homo sapien
gatcctacagagaatagaccacagc

SEQ ID NO: 4301732 - DNA, 25 bp, Homo sapien
actgttgaagaccagtggagcccaa

SEQ ID NO: 4301733 - DNA, 25 bp, Homo sapien
tcaagtttctctaggtgtttgggcc

SEQ ID NO: 4301734 - DNA, 25 bp, Homo sapien
gaaacttcgagtgctttatctgtga

SEQ ID NO: 4301735 - DNA, 25 bp, Homo sapien
gatttatcacaggtaatcccacact

SEQ ID NO: 4301736 - DNA, 25 bp, Homo sapien
gagctctcttcattaatgaggcctg

SEQ ID NO: 4301737 - DNA, 25 bp, Homo sapien
atgaggcctgcactaaattataagc

SEQ ID NO: 4301738 - DNA, 25 bp, Homo sapien
gtacatccacatatttggaagctgc

SEQ ID NO: 4301739 - DNA, 25 bp, Homo sapien
tatcttttctctagcagcattcatg

SEQ ID NO: 4301740 - DNA, 25 bp, Homo sapien
tcttgtccccgactctccagataga

SEQ ID NO: 4301741 - DNA, 25 bp, Homo sapien
cagatagagccagttctggaaaaag

SEQ ID NO: 4301742 - DNA, 25 bp, Homo sapien
ccctctggtaggacaacccatatct

SEQ ID NO: 4301743 - DNA, 25 bp, Homo sapien
aagctctttgcacaatacctgctgc

SEQ ID NO: 4301744 - DNA, 25 bp, Homo sapien
ggtttcaagctctttgcacaatacc

SEQ ID NO: 4301745 - DNA, 25 bp, Homo sapien
ctaggacgcacagctggttctttca

SEQ ID NO: 4301746 - DNA, 25 bp, Homo sapien
ttgcacaatacctgctgcctctgct

SEQ ID NO: 4301747 - DNA, 25 bp, Homo sapien
taagctccagggataggggccatcg

SEQ ID NO: 4301748 - DNA, 25 bp, Homo sapien
gccatcgcacctctgggattgaatt

SEQ ID NO: 4301749 - DNA, 25 bp, Homo sapien
agggataggggccatcgcacctctg

SEQ ID NO: 4301750 - DNA, 25 bp, Homo sapien
ctgggattgaattcaatcctcgtac

SEQ ID NO: 4301751 - DNA, 25 bp, Homo sapien
aaacaaagtcccttcgtcatatctg

SEQ ID NO: 4301752 - DNA, 25 bp, Homo sapien
caaagtcccttcgtcatatctggat

SEQ ID NO: 4301753 - DNA, 25 bp, Homo sapien
aagtcccttcgtcatatctggataa

SEQ ID NO: 4301754 - DNA, 25 bp, Homo sapien
gtcccttcgtcatatctggataatt

SEQ ID NO: 4301755 - DNA, 25 bp, Homo sapien
caagagtgttatcatttctttaaca

SEQ ID NO: 4301756 - DNA, 25 bp, Homo sapien
cagtttcttcaattagttcgtctat

SEQ ID NO: 4301757 - DNA, 25 bp, Homo sapien
caaccaagagtgttatcatttcttt

SEQ ID NO: 4301758 - DNA, 25 bp, Homo sapien
aattagttcgtctatttttgaatgg

SEQ ID NO: 4301759 - DNA, 25 bp, Homo sapien
cataaggagacatggttgagacatc

SEQ ID NO: 4301760 - DNA, 25 bp, Homo sapien
tgaggagttaatgatgtcattcttt

SEQ ID NO: 4301761 - DNA, 25 bp, Homo sapien
caacaaagatttagggtcttactct

SEQ ID NO: 4301762 - DNA, 25 bp, Homo sapien
gaaacaagctttctcttcaggagct

SEQ ID NO: 4301763 - DNA, 25 bp, Homo sapien
ggaaaaatgtcacgaaagatctctc

SEQ ID NO: 4301764 - DNA, 25 bp, Homo sapien
cagctggtcatttaagtgtctcaga

SEQ ID NO: 4301765 - DNA, 25 bp, Homo sapien
ggcattcaaagaagcctcatttccc

SEQ ID NO: 4301766 - DNA, 25 bp, Homo sapien
gtgtctcagattcaattatactaag

SEQ ID NO: 4301767 - DNA, 25 bp, Homo sapien
gttgtatcaacccttctgcaccctg

SEQ ID NO: 4301768 - DNA, 25 bp, Homo sapien
agcaaaacagcccagatcaaagtga

SEQ ID NO: 4301769 - DNA, 25 bp, Homo sapien
gaaacatggccgtcattgaatcaag

SEQ ID NO: 4301770 - DNA, 25 bp, Homo sapien
ggcaagaccagtcctgttgtatcaa

SEQ ID NO: 4301771 - DNA, 25 bp, Homo sapien
aacacagatctgttcgagacaccag

SEQ ID NO: 4301772 - DNA, 25 bp, Homo sapien
tcagcacatgccttagaaatctact

SEQ ID NO: 4301773 - DNA, 25 bp, Homo sapien
gaaaggcctctcttgctgtccagat

SEQ ID NO: 4301774 - DNA, 25 bp, Homo sapien
gaagttgtttgatgcaagaaaggcc

SEQ ID NO: 4301775 - DNA, 25 bp, Homo sapien
tttccatgctgcaaagttttgttga

SEQ ID NO: 4301776 - DNA, 25 bp, Homo sapien
gctttggcatcaaccataacattaa

SEQ ID NO: 4301777 - DNA, 25 bp, Homo sapien
tgttgattgagctttggcatcaacc

SEQ ID NO: 4301778 - DNA, 25 bp, Homo sapien
tgagctttggcatcaaccataacat

SEQ ID NO: 4301779 - DNA, 25 bp, Homo sapien
gcttaacttcaaatgcaatcctggt

SEQ ID NO: 4301780 - DNA, 25 bp, Homo sapien
tgttgatcgactggttttttgcagc

SEQ ID NO: 4301781 - DNA, 25 bp, Homo sapien
tttttgcagcttaacttcaaatgca

SEQ ID NO: 4301782 - DNA, 25 bp, Homo sapien
ggtgcatattgactgtgggactcga

SEQ ID NO: 4301783 - DNA, 25 bp, Homo sapien
agtaatcgtcttcagttttcacagg

SEQ ID NO: 4301784 - DNA, 25 bp, Homo sapien
tgaggcttgtgtgccagttccggcc

SEQ ID NO: 4301785 - DNA, 25 bp, Homo sapien
aggagaactgttcatagcccttgga

SEQ ID NO: 4301786 - DNA, 25 bp, Homo sapien
gactgagttggacaggtccctgtgc

SEQ ID NO: 4301787 - DNA, 25 bp, Homo sapien
tacagccaattgaaagagcagccat

SEQ ID NO: 4301788 - DNA, 25 bp, Homo sapien
gaatggaagttagacgttgacagcc

SEQ ID NO: 4301789 - DNA, 25 bp, Homo sapien
cactactccagctgactttgacaag

SEQ ID NO: 4301790 - DNA, 25 bp, Homo sapien
tgaaaaaattggcagccagattatt

SEQ ID NO: 4301791 - DNA, 25 bp, Homo sapien
cacaagattcgatcatgtcacttgc

SEQ ID NO: 4301792 - DNA, 25 bp, Homo sapien
tgcaggtcccgaatgaaggtctgaa

SEQ ID NO: 4301793 - DNA, 25 bp, Homo sapien
tgaagggcgtcaagtttccaaaaca

SEQ ID NO: 4301794 - DNA, 25 bp, Homo sapien
cttttgacacaagattcgatcatgt

SEQ ID NO: 4301795 - DNA, 25 bp, Homo sapien
cacttgttctgacatcgtctataga

SEQ ID NO: 4301796 - DNA, 25 bp, Homo sapien
catcgtctatagaaacagatgagag

SEQ ID NO: 4301797 - DNA, 25 bp, Homo sapien
ttctgacatcgtctatagaaacaga

SEQ ID NO: 4301798 - DNA, 25 bp, Homo sapien
gacatcgtctatagaaacagatgag

SEQ ID NO: 4301799 - DNA, 25 bp, Homo sapien
cctagagggatgttaactggtagat

SEQ ID NO: 4301800 - DNA, 25 bp, Homo sapien
tgacggtgccgaaaaagtaggcatt

SEQ ID NO: 4301801 - DNA, 25 bp, Homo sapien
tgggatgcctagagggatgttaact

SEQ ID NO: 4301802 - DNA, 25 bp, Homo sapien
tatatagcagccatccatgacggtg

SEQ ID NO: 4301803 - DNA, 25 bp, Homo sapien
tcagtccctggtggctcttagtctt

SEQ ID NO: 4301804 - DNA, 25 bp, Homo sapien
ccatgtaacaaaaccgttggcgatt

SEQ ID NO: 4301805 - DNA, 25 bp, Homo sapien
gatttccactgagacatgtgtaagc

SEQ ID NO: 4301806 - DNA, 25 bp, Homo sapien
gtggctcttagtcttaaacactgcc

SEQ ID NO: 4301807 - DNA, 25 bp, Homo sapien
tgaatggattgtgcaattgaggact

SEQ ID NO: 4301808 - DNA, 25 bp, Homo sapien
tctaacaacaagtggggcaaacagg

SEQ ID NO: 4301809 - DNA, 25 bp, Homo sapien
attgtgcaattgaggactccatcag

SEQ ID NO: 4301810 - DNA, 25 bp, Homo sapien
acatatctaacaacaagtggggcaa

SEQ ID NO: 4301811 - DNA, 25 bp, Homo sapien
tcagtacggagaaaatcattcagca

SEQ ID NO: 4301812 - DNA, 25 bp, Homo sapien
gagtgacaggaacgtctccgcatgc

SEQ ID NO: 4301813 - DNA, 25 bp, Homo sapien
gaaaactgtcccatgtgtctggagg

SEQ ID NO: 4301814 - DNA, 25 bp, Homo sapien
acctctaaggctgcatccatgtcta

SEQ ID NO: 4301815 - DNA, 25 bp, Homo sapien
tactgagcacccagagaacatggta

SEQ ID NO: 4301816 - DNA, 25 bp, Homo sapien
caataaattgagctgggacaagacc

SEQ ID NO: 4301817 - DNA, 25 bp, Homo sapien
aaccctatgtttagtgtgccagcag

SEQ ID NO: 4301818 - DNA, 25 bp, Homo sapien
gagctgtccacgtgattgcaatctg

SEQ ID NO: 4301819 - DNA, 25 bp, Homo sapien
cgccggaaccccagatgcctgcaat

SEQ ID NO: 4301820 - DNA, 25 bp, Homo sapien
catcgccggaaccccagatgcctgc

SEQ ID NO: 4301821 - DNA, 25 bp, Homo sapien
atcgccggaaccccagatgcctgca

SEQ ID NO: 4301822 - DNA, 25 bp, Homo sapien
tcgccggaaccccagatgcctgcaa

SEQ ID NO: 4301823 - DNA, 25 bp, Homo sapien
gcgtggtgctcctcattttgctgaa

SEQ ID NO: 4301824 - DNA, 25 bp, Homo sapien
gctttttggcaggagtgattaaccg

SEQ ID NO: 4301825 - DNA, 25 bp, Homo sapien
caggagtgattaaccggcctacatt

SEQ ID NO: 4301826 - DNA, 25 bp, Homo sapien
ctagttcagcaagacgtattgtatc

SEQ ID NO: 4301827 - DNA, 25 bp, Homo sapien
aattcagcgaaagtggcaggctact

SEQ ID NO: 4301828 - DNA, 25 bp, Homo sapien
aaagtggcaggctacttttatggcc

SEQ ID NO: 4301829 - DNA, 25 bp, Homo sapien
caggctacttttatggccattagaa

SEQ ID NO: 4301830 - DNA, 25 bp, Homo sapien
aagagtttgtgttaaaattcagcga

SEQ ID NO: 4301831 - DNA, 25 bp, Homo sapien
gcagtgctccagcttcaaatttgca

SEQ ID NO: 4301832 - DNA, 25 bp, Homo sapien
tatgcctgggccattagtcaggaat

SEQ ID NO: 4301833 - DNA, 25 bp, Homo sapien
gattcaaccagtctgaattccaggg

SEQ ID NO: 4301834 - DNA, 25 bp, Homo sapien
taatttttcattgcaggctcgcgta

SEQ ID NO: 4301835 - DNA, 25 bp, Homo sapien
ccaagcttgcgctagctggagcact

SEQ ID NO: 4301836 - DNA, 25 bp, Homo sapien
tgccaattaacccatgtagccagtc

SEQ ID NO: 4301837 - DNA, 25 bp, Homo sapien
gctgctgtactactagctaaatggc

SEQ ID NO: 4301838 - DNA, 25 bp, Homo sapien
tcatctgtagatcaagccacattag

SEQ ID NO: 4301839 - DNA, 25 bp, Homo sapien
acttcatttacccaattaccattgc

SEQ ID NO: 4301840 - DNA, 25 bp, Homo sapien
ttcatttacccaattaccattgctc

SEQ ID NO: 4301841 - DNA, 25 bp, Homo sapien
catttacccaattaccattgctcat

SEQ ID NO: 4301842 - DNA, 25 bp, Homo sapien
tccaacttcatttacccaattacca

SEQ ID NO: 4301843 - DNA, 25 bp, Homo sapien
tggaacctagtggatatttaacaaa

SEQ ID NO: 4301844 - DNA, 25 bp, Homo sapien
tcaacttggaagaacatccttttaa

SEQ ID NO: 4301845 - DNA, 25 bp, Homo sapien
ggctctcaaagtaccatccctggat

SEQ ID NO: 4301846 - DNA, 25 bp, Homo sapien
acacactcccctggtgtctggcata

SEQ ID NO: 4301847 - DNA, 25 bp, Homo sapien
gctctatgtgttggtgagttttgcc

SEQ ID NO: 4301848 - DNA, 25 bp, Homo sapien
tttcaacaagccttagatctgtagg

SEQ ID NO: 4301849 - DNA, 25 bp, Homo sapien
tattattggtcccttgtggaagaca

SEQ ID NO: 4301850 - DNA, 25 bp, Homo sapien
gatgagattcactattattggtccc

SEQ ID NO: 4301851 - DNA, 25 bp, Homo sapien
tcacagacagaaccaacagacaagc

SEQ ID NO: 4301852 - DNA, 25 bp, Homo sapien
gataaaaagtgactggacttctcac

SEQ ID NO: 4301853 - DNA, 25 bp, Homo sapien
aggagagtgagttggtttggatctg

SEQ ID NO: 4301854 - DNA, 25 bp, Homo sapien
aagccaatgctaaaaaacttgaagc

SEQ ID NO: 4301855 - DNA, 25 bp, Homo sapien
cagaagacaggatgctcatacattt

SEQ ID NO: 4301856 - DNA, 25 bp, Homo sapien
agacaggatgctcatacatttctct

SEQ ID NO: 4301857 - DNA, 25 bp, Homo sapien
gcagaagacaggatgctcatacatt

SEQ ID NO: 4301858 - DNA, 25 bp, Homo sapien
gaagacaggatgctcatacatttct

SEQ ID NO: 4301859 - DNA, 25 bp, Homo sapien
gctgagccaatcacggacaaggaag

SEQ ID NO: 4301860 - DNA, 25 bp, Homo sapien
ggttgtctgaattaacaatcccagc

SEQ ID NO: 4301861 - DNA, 25 bp, Homo sapien
gctttgaaattggtgtctcagccac

SEQ ID NO: 4301862 - DNA, 25 bp, Homo sapien
gaaaacctgatacatgcagccagag

SEQ ID NO: 4301863 - DNA, 25 bp, Homo sapien
ccttttggtgcccaattcttaagtg

SEQ ID NO: 4301864 - DNA, 25 bp, Homo sapien
gatgcataacagtgaattcattacc

SEQ ID NO: 4301865 - DNA, 25 bp, Homo sapien
tttctccctggatgcataacagtga

SEQ ID NO: 4301866 - DNA, 25 bp, Homo sapien
gagttgataaacatccttttggtgc

SEQ ID NO: 4301867 - DNA, 25 bp, Homo sapien
tccagacatttacggataactgttt

SEQ ID NO: 4301868 - DNA, 25 bp, Homo sapien
ctctgagagccgagaatagttgact

SEQ ID NO: 4301869 - DNA, 25 bp, Homo sapien
ggcactggggtaacaatatctttca

SEQ ID NO: 4301870 - DNA, 25 bp, Homo sapien
agttgactaacgcagcctgttccag

SEQ ID NO: 4301871 - DNA, 25 bp, Homo sapien
accttcaggtcgaccaaatggaaag

SEQ ID NO: 4301872 - DNA, 25 bp, Homo sapien
tcaggtcgaccaaatggaaagcaat

SEQ ID NO: 4301873 - DNA, 25 bp, Homo sapien
ccttcaggtcgaccaaatggaaagc

SEQ ID NO: 4301874 - DNA, 25 bp, Homo sapien
aggtcgaccaaatggaaagcaatac

SEQ ID NO: 4301875 - DNA, 25 bp, Homo sapien
tctagcagaactcggagcctctctt

SEQ ID NO: 4301876 - DNA, 25 bp, Homo sapien
ttttctagcagaactcggagcctct

SEQ ID NO: 4301877 - DNA, 25 bp, Homo sapien
aaatgtgtaatctgattttctagca

SEQ ID NO: 4301878 - DNA, 25 bp, Homo sapien
gcagaactcggagcctctctttgat

SEQ ID NO: 4301879 - DNA, 25 bp, Homo sapien
tcaaagcttacaatgatctatatgt

SEQ ID NO: 4301880 - DNA, 25 bp, Homo sapien
tatttggtgattaagggcagaatcc

SEQ ID NO: 4301881 - DNA, 25 bp, Homo sapien
gtctggtccactgctccgcatataa

SEQ ID NO: 4301882 - DNA, 25 bp, Homo sapien
tcaggctccagtcactaccaacaag

SEQ ID NO: 4301883 - DNA, 25 bp, Homo sapien
gatccaaggaacattgacgcaactt

SEQ ID NO: 4301884 - DNA, 25 bp, Homo sapien
gcagcactggcattcaagaaatgtt

SEQ ID NO: 4301885 - DNA, 25 bp, Homo sapien
cacaggccatatgtgaagagcagca

SEQ ID NO: 4301886 - DNA, 25 bp, Homo sapien
gacgcaacttgcaatcatcagagct

SEQ ID NO: 4301887 - DNA, 25 bp, Homo sapien
ggattttatgatcgccaaatgcaac

SEQ ID NO: 4301888 - DNA, 25 bp, Homo sapien
ttatgatcgccaaatgcaaccagct

SEQ ID NO: 4301889 - DNA, 25 bp, Homo sapien
tgtggattttatgatcgccaaatgc

SEQ ID NO: 4301890 - DNA, 25 bp, Homo sapien
atctgtggattttatgatcgccaaa

SEQ ID NO: 4301891 - DNA, 25 bp, Homo sapien
cttggtcactgccacgtcagtggtc

SEQ ID NO: 4301892 - DNA, 25 bp, Homo sapien
ggagatggtgcacaagtttccagag

SEQ ID NO: 4301893 - DNA, 25 bp, Homo sapien
ctgccacgtcagtggtcattaatga

SEQ ID NO: 4301894 - DNA, 25 bp, Homo sapien
tcacggagatggtgcacaagtttcc

SEQ ID NO: 4301895 - DNA, 25 bp, Homo sapien
gcttgcaaaagtggaagtgatggca

SEQ ID NO: 4301896 - DNA, 25 bp, Homo sapien
taaagatattacaaacacaagccaa

SEQ ID NO: 4301897 - DNA, 25 bp, Homo sapien
gcttaaagagagactttaggaatac

SEQ ID NO: 4301898 - DNA, 25 bp, Homo sapien
gaatactcaaagcttgcaaaagtgg

SEQ ID NO: 4301899 - DNA, 25 bp, Homo sapien
cttttcagctcttgatttgcctggg

SEQ ID NO: 4301900 - DNA, 25 bp, Homo sapien
tcagctcttgatttgcctgggtttt

SEQ ID NO: 4301901 - DNA, 25 bp, Homo sapien
agctcttgatttgcctgggttttgg

SEQ ID NO: 4301902 - DNA, 25 bp, Homo sapien
gagttttgctcccttcagggtctgt

SEQ ID NO: 4301903 - DNA, 25 bp, Homo sapien
gagaatcaagagcacacgcacatgc

SEQ ID NO: 4301904 - DNA, 25 bp, Homo sapien
tgcacagagtgtggccagccatagg

SEQ ID NO: 4301905 - DNA, 25 bp, Homo sapien
gccataggagaatcaagagcacacg

SEQ ID NO: 4301906 - DNA, 25 bp, Homo sapien
tggtcgcatgaggcatgcacagagt

SEQ ID NO: 4301907 - DNA, 25 bp, Homo sapien
cattttctgcccgttcaagcaagtc

SEQ ID NO: 4301908 - DNA, 25 bp, Homo sapien
cggactccatttcgggcgcaatact

SEQ ID NO: 4301909 - DNA, 25 bp, Homo sapien
gtagcagagatgtcggtgacacccc

SEQ ID NO: 4301910 - DNA, 25 bp, Homo sapien
gggtcgatcatggcgccattttctg

SEQ ID NO: 4301911 - DNA, 25 bp, Homo sapien
ctagtacaaacacctggccaggact

SEQ ID NO: 4301912 - DNA, 25 bp, Homo sapien
acacctggccaggactgaaccagcc

SEQ ID NO: 4301913 - DNA, 25 bp, Homo sapien
aaacacctggccaggactgaaccag

SEQ ID NO: 4301914 - DNA, 25 bp, Homo sapien
acaaacacctggccaggactgaacc

SEQ ID NO: 4301915 - DNA, 25 bp, Homo sapien
agtcatcttttgaatattgctccat

SEQ ID NO: 4301916 - DNA, 25 bp, Homo sapien
gagtcatcttttgaatattgctcca

SEQ ID NO: 4301917 - DNA, 25 bp, Homo sapien
taatcttgtattagggatctgggaa

SEQ ID NO: 4301918 - DNA, 25 bp, Homo sapien
ttcaattgacaacatgcagctcagt

SEQ ID NO: 4301919 - DNA, 25 bp, Homo sapien
cagtgatgcatccaacgaaagacgg

SEQ ID NO: 4301920 - DNA, 25 bp, Homo sapien
ccacagaagtacagcgagagaggcc

SEQ ID NO: 4301921 - DNA, 25 bp, Homo sapien
atttatgtatccctgctggtcggtc

SEQ ID NO: 4301922 - DNA, 25 bp, Homo sapien
tatgtatccctgctggtcggtctcc

SEQ ID NO: 4301923 - DNA, 25 bp, Homo sapien
gaactcagtcgaagacacagaaaaa

SEQ ID NO: 4301924 - DNA, 25 bp, Homo sapien
caattaggaactcagtcgaagacac

SEQ ID NO: 4301925 - DNA, 25 bp, Homo sapien
cattcatgtaatgagataggattac

SEQ ID NO: 4301926 - DNA, 25 bp, Homo sapien
acattcatgtaatgagataggatta

SEQ ID NO: 4301927 - DNA, 25 bp, Homo sapien
ggagggaagggcatcttaaactcta

SEQ ID NO: 4301928 - DNA, 25 bp, Homo sapien
tctaagctactgaggcaatttttac

SEQ ID NO: 4301929 - DNA, 25 bp, Homo sapien
caagttctccacaagcaggtgccaa

SEQ ID NO: 4301930 - DNA, 25 bp, Homo sapien
caaactcgattaccctcttgggaat

SEQ ID NO: 4301931 - DNA, 25 bp, Homo sapien
tgtttaaattgctgtagaccaaaga

SEQ ID NO: 4301932 - DNA, 25 bp, Homo sapien
tcaacccaggaaatcgggaacacat

SEQ ID NO: 4301933 - DNA, 25 bp, Homo sapien
taagtaaaactatctcaacccagga

SEQ ID NO: 4301934 - DNA, 25 bp, Homo sapien
tgataacttcctcccgctcagtctt

SEQ ID NO: 4301935 - DNA, 25 bp, Homo sapien
tgtgatccaaagtaaggcgttgtac

SEQ ID NO: 4301936 - DNA, 25 bp, Homo sapien
caggcaagaataggaatcattaagt

SEQ ID NO: 4301937 - DNA, 25 bp, Homo sapien
tctgtgatccaaagtaaggcgttgt

SEQ ID NO: 4301938 - DNA, 25 bp, Homo sapien
ataggaatcattaagtctgtgatcc

SEQ ID NO: 4301939 - DNA, 25 bp, Homo sapien
gaagagataaattcatccatgccat

SEQ ID NO: 4301940 - DNA, 25 bp, Homo sapien
atctcaaagagggaagcgtggtcaa

SEQ ID NO: 4301941 - DNA, 25 bp, Homo sapien
tccatgccatgtttttgagctctat

SEQ ID NO: 4301942 - DNA, 25 bp, Homo sapien
acaggggttggaagagataaattca

SEQ ID NO: 4301943 - DNA, 25 bp, Homo sapien
aattctaggtgcaggtgtctttgga

SEQ ID NO: 4301944 - DNA, 25 bp, Homo sapien
aggaacatgtgctcttaggggaaaa

SEQ ID NO: 4301945 - DNA, 25 bp, Homo sapien
tggtatcttgcaaatccaaaagtag

SEQ ID NO: 4301946 - DNA, 25 bp, Homo sapien
gggattcagatggtatcttgcaaat

SEQ ID NO: 4301947 - DNA, 25 bp, Homo sapien
caataacgaacaatgacagtagtca

SEQ ID NO: 4301948 - DNA, 25 bp, Homo sapien
ctgatggcagctggttgtttatgga

SEQ ID NO: 4301949 - DNA, 25 bp, Homo sapien
tcatatctgcttgacagtacaagag

SEQ ID NO: 4301950 - DNA, 25 bp, Homo sapien
tccttggaatagtcaagtaaccagg

SEQ ID NO: 4301951 - DNA, 25 bp, Homo sapien
tgcaaggtgtaagaatatagtcttg

SEQ ID NO: 4301952 - DNA, 25 bp, Homo sapien
tactggacaggaattcctgggagca

SEQ ID NO: 4301953 - DNA, 25 bp, Homo sapien
catctgatagacagaatttgtgatc

SEQ ID NO: 4301954 - DNA, 25 bp, Homo sapien
gcatgcatcaccatcagtactggac

SEQ ID NO: 4301955 - DNA, 25 bp, Homo sapien
agagataggggcatccagctgaggt

SEQ ID NO: 4301956 - DNA, 25 bp, Homo sapien
aattgagagataggggcatccagct

SEQ ID NO: 4301957 - DNA, 25 bp, Homo sapien
aaaattgagagataggggcatccag

SEQ ID NO: 4301958 - DNA, 25 bp, Homo sapien
agataggggcatccagctgaggtac

SEQ ID NO: 4301959 - DNA, 25 bp, Homo sapien
cccgtggcccgatacatggcctgga

SEQ ID NO: 4301960 - DNA, 25 bp, Homo sapien
cctcccttggcgttgagtttctgga

SEQ ID NO: 4301961 - DNA, 25 bp, Homo sapien
tggacccacaggatgcggtcttgtt

SEQ ID NO: 4301962 - DNA, 25 bp, Homo sapien
tcgtcactggcaaatatcacggtgt

SEQ ID NO: 4301963 - DNA, 25 bp, Homo sapien
gggtcggtgtaatccacagtgtagc

SEQ ID NO: 4301964 - DNA, 25 bp, Homo sapien
cagtgtagccatccaattgtagaag

SEQ ID NO: 4301965 - DNA, 25 bp, Homo sapien
tcttctcccgataactgcacatggc

SEQ ID NO: 4301966 - DNA, 25 bp, Homo sapien
acatggcaaacgtgtactgactgac

SEQ ID NO: 4301967 - DNA, 25 bp, Homo sapien
tggaatcacaggacaggccgttggg

SEQ ID NO: 4301968 - DNA, 25 bp, Homo sapien
atggaatcacaggacaggccgttgg

SEQ ID NO: 4301969 - DNA, 25 bp, Homo sapien
ggaatcacaggacaggccgttggga

SEQ ID NO: 4301970 - DNA, 25 bp, Homo sapien
catggaatcacaggacaggccgttg

SEQ ID NO: 4301971 - DNA, 25 bp, Homo sapien
gaagctcctcgcaactgcttcattc

SEQ ID NO: 4301972 - DNA, 25 bp, Homo sapien
caggaatgcttgaatctctgtcaca

SEQ ID NO: 4301973 - DNA, 25 bp, Homo sapien
tctgtcacagaagctcctcgcaact

SEQ ID NO: 4301974 - DNA, 25 bp, Homo sapien
ggtagggtagactctagccacatct

SEQ ID NO: 4301975 - DNA, 25 bp, Homo sapien
gcaccacccaaggtattgcctgagc

SEQ ID NO: 4301976 - DNA, 25 bp, Homo sapien
gtacagacatggctttactgatgtt

SEQ ID NO: 4301977 - DNA, 25 bp, Homo sapien
tctcctaagtacttcatcatatcaa

SEQ ID NO: 4301978 - DNA, 25 bp, Homo sapien
gatgttttccacatatttcctcttg

SEQ ID NO: 4301979 - DNA, 25 bp, Homo sapien
tggccctgaaacagtgcacagtcta

SEQ ID NO: 4301980 - DNA, 25 bp, Homo sapien
ctgaaacagtgcacagtctatcggg

SEQ ID NO: 4301981 - DNA, 25 bp, Homo sapien
ctgtgtatgcgtgtggtggaggaaa

SEQ ID NO: 4301982 - DNA, 25 bp, Homo sapien
aactggccctgaaacagtgcacagt

SEQ ID NO: 4301983 - DNA, 25 bp, Homo sapien
ttccatctcttccagacattcttac

SEQ ID NO: 4301984 - DNA, 25 bp, Homo sapien
tcttccatctcttccagacattctt

SEQ ID NO: 4301985 - DNA, 25 bp, Homo sapien
ttttcttccatctcttccagacatt

SEQ ID NO: 4301986 - DNA, 25 bp, Homo sapien
ttcttccatctcttccagacattct

SEQ ID NO: 4301987 - DNA, 25 bp, Homo sapien
ttttcagagttacacgattatcatg

SEQ ID NO: 4301988 - DNA, 25 bp, Homo sapien
ttcccttttcagagttacacgatta

SEQ ID NO: 4301989 - DNA, 25 bp, Homo sapien
cagaatacccgccaaacactccatt

SEQ ID NO: 4301990 - DNA, 25 bp, Homo sapien
cagagttacacgattatcatgtttt

SEQ ID NO: 4301991 - DNA, 25 bp, Homo sapien
tggatgcctccgacaaggtacgcgg

SEQ ID NO: 4301992 - DNA, 25 bp, Homo sapien
ggtacgcggagcctgtaagacctct

SEQ ID NO: 4301993 - DNA, 25 bp, Homo sapien
agcatgctgctaggaaagttttgaa

SEQ ID NO: 4301994 - DNA, 25 bp, Homo sapien
gctgattgaggtgcaagtgagtcat

SEQ ID NO: 4301995 - DNA, 25 bp, Homo sapien
aatgcttcatgttttgaggcttatc

SEQ ID NO: 4301996 - DNA, 25 bp, Homo sapien
tgattttgagatcttggtcggggca

SEQ ID NO: 4301997 - DNA, 25 bp, Homo sapien
ttttgtgccactctgactgtttggg

SEQ ID NO: 4301998 - DNA, 25 bp, Homo sapien
cattcggacagcaagtttgattttg

SEQ ID NO: 4301999 - DNA, 25 bp, Homo sapien
gacacagagggcctacaatcctata

SEQ ID NO: 4302000 - DNA, 25 bp, Homo sapien
gcacaggacaaatgattggacacag

SEQ ID NO: 4302001 - DNA, 25 bp, Homo sapien
tggaaggatcaattggtgcatgcac

SEQ ID NO: 4302002 - DNA, 25 bp, Homo sapien
gacaggtcagtctagggtcatatga

SEQ ID NO: 4302003 - DNA, 25 bp, Homo sapien
cacaaagtctttgggacagtggcct

SEQ ID NO: 4302004 - DNA, 25 bp, Homo sapien
cagtgtagtgcaaatagccctggag

SEQ ID NO: 4302005 - DNA, 25 bp, Homo sapien
catgggtccctgactggcttgatcg

SEQ ID NO: 4302006 - DNA, 25 bp, Homo sapien
tgaagtaactgaaccctctgggcgt

SEQ ID NO: 4302007 - DNA, 25 bp, Homo sapien
gtcctccaacgccaggacgcctgtg

SEQ ID NO: 4302008 - DNA, 25 bp, Homo sapien
gtgcatgggttgtggagaagtcacc

SEQ ID NO: 4302009 - DNA, 25 bp, Homo sapien
gctggcagtgcatgggttgtggaga

SEQ ID NO: 4302010 - DNA, 25 bp, Homo sapien
gcagtgcatgggttgtggagaagtc

SEQ ID NO: 4302011 - DNA, 25 bp, Homo sapien
catggggatccaatttgctgctcta

SEQ ID NO: 4302012 - DNA, 25 bp, Homo sapien
cccatggggatccaatttgctgctc

SEQ ID NO: 4302013 - DNA, 25 bp, Homo sapien
ccccatggggatccaatttgctgct

SEQ ID NO: 4302014 - DNA, 25 bp, Homo sapien
tggggatccaatttgctgctctaaa

SEQ ID NO: 4302015 - DNA, 25 bp, Homo sapien
gtctcggagactggatttgcattta

SEQ ID NO: 4302016 - DNA, 25 bp, Homo sapien
caaggtatacggctcatgtgaactg

SEQ ID NO: 4302017 - DNA, 25 bp, Homo sapien
taaggccataattcatgtctcggag

SEQ ID NO: 4302018 - DNA, 25 bp, Homo sapien
tgtgaactgggtgttaaattggtgc

SEQ ID NO: 4302019 - DNA, 25 bp, Homo sapien
atcaaacatcatgaaatgagctgac

SEQ ID NO: 4302020 - DNA, 25 bp, Homo sapien
catctcaaagatgcacaagtaatcc

SEQ ID NO: 4302021 - DNA, 25 bp, Homo sapien
cctaaaagtgtggtgataattattc

SEQ ID NO: 4302022 - DNA, 25 bp, Homo sapien
caagtgccagtactggaatcaaaca

SEQ ID NO: 4302023 - DNA, 25 bp, Homo sapien
tcccaatcctcttatcttccttcac

SEQ ID NO: 4302024 - DNA, 25 bp, Homo sapien
catctgagcaatggcttttgtgttt

SEQ ID NO: 4302025 - DNA, 25 bp, Homo sapien
atgttttccaaaccatctgagcaat

SEQ ID NO: 4302026 - DNA, 25 bp, Homo sapien
ctgagaaacataaaatcggggcttg

SEQ ID NO: 4302027 - DNA, 25 bp, Homo sapien
ccaatatgacagtattgaggagtgg

SEQ ID NO: 4302028 - DNA, 25 bp, Homo sapien
tgggttatcaaagaactgagacttg

SEQ ID NO: 4302029 - DNA, 25 bp, Homo sapien
gttcatgcgattactccttttggcc

SEQ ID NO: 4302030 - DNA, 25 bp, Homo sapien
gaaaagagacctgacctagcatgct

SEQ ID NO: 4302031 - DNA, 25 bp, Homo sapien
ttgacaataacaaaacttgctttct

SEQ ID NO: 4302032 - DNA, 25 bp, Homo sapien
tgacaataacaaaacttgctttctt

SEQ ID NO: 4302033 - DNA, 25 bp, Homo sapien
ccctggaacttttctttcaatgcat

SEQ ID NO: 4302034 - DNA, 25 bp, Homo sapien
ctttcaatgcatttgacaataacaa

SEQ ID NO: 4302035 - DNA, 25 bp, Homo sapien
tttacactcagtttctgaaaaacag

SEQ ID NO: 4302036 - DNA, 25 bp, Homo sapien
aaggtcagccacagtcaagaagact

SEQ ID NO: 4302037 - DNA, 25 bp, Homo sapien
ttgattcatgaagcacgtctgggac

SEQ ID NO: 4302038 - DNA, 25 bp, Homo sapien
ccacagtcaagaagacttgattcat

SEQ ID NO: 4302039 - DNA, 25 bp, Homo sapien
tctgtgcacctttctggataaatcc

SEQ ID NO: 4302040 - DNA, 25 bp, Homo sapien
gtcctctgtgcacctttctggataa

SEQ ID NO: 4302041 - DNA, 25 bp, Homo sapien
tctggataaatccagcccttgctca

SEQ ID NO: 4302042 - DNA, 25 bp, Homo sapien
tcctacaagtttcacgtcctctgtg

SEQ ID NO: 4302043 - DNA, 25 bp, Homo sapien
tatgctgcatcctgaaaacagggtc

SEQ ID NO: 4302044 - DNA, 25 bp, Homo sapien
tatccaagtataacggctgcaagct

SEQ ID NO: 4302045 - DNA, 25 bp, Homo sapien
gccgggtcacactggttcaggagct

SEQ ID NO: 4302046 - DNA, 25 bp, Homo sapien
gactataggtgttggcggataccac

SEQ ID NO: 4302047 - DNA, 25 bp, Homo sapien
gtcactttgcaagctggcacggatt

SEQ ID NO: 4302048 - DNA, 25 bp, Homo sapien
cactttgcaagctggcacggattta

SEQ ID NO: 4302049 - DNA, 25 bp, Homo sapien
tcactttgcaagctggcacggattt

SEQ ID NO: 4302050 - DNA, 25 bp, Homo sapien
cccaaaaggatgagtgtaaaccagg

SEQ ID NO: 4302051 - DNA, 25 bp, Homo sapien
tacccctggagatgatttgacatgg

SEQ ID NO: 4302052 - DNA, 25 bp, Homo sapien
agacgggacatcaaatggcactgtg

SEQ ID NO: 4302053 - DNA, 25 bp, Homo sapien
tttgacatggcacaaagacgggaca

SEQ ID NO: 4302054 - DNA, 25 bp, Homo sapien
tctggtaattgagttttgatcatca

SEQ ID NO: 4302055 - DNA, 25 bp, Homo sapien
aagttctggtaattgagttttgatc

SEQ ID NO: 4302056 - DNA, 25 bp, Homo sapien
tgtgaagttctggtaattgagtttt

SEQ ID NO: 4302057 - DNA, 25 bp, Homo sapien
tgaagttctggtaattgagttttga

SEQ ID NO: 4302058 - DNA, 25 bp, Homo sapien
taatttgaagctaatctcaagggag

SEQ ID NO: 4302059 - DNA, 25 bp, Homo sapien
taattggtgtatcccttgtgtctaa

SEQ ID NO: 4302060 - DNA, 25 bp, Homo sapien
ccactagaatatagggttgctgagg

SEQ ID NO: 4302061 - DNA, 25 bp, Homo sapien
cacttgatcttcaggtgagtggatc

SEQ ID NO: 4302062 - DNA, 25 bp, Homo sapien
tgtgttggacctagcaattccttgg

SEQ ID NO: 4302063 - DNA, 25 bp, Homo sapien
cctcatctagatggagagatctgca

SEQ ID NO: 4302064 - DNA, 25 bp, Homo sapien
ggtgtcaagcactcatacaatgggt

SEQ ID NO: 4302065 - DNA, 25 bp, Homo sapien
gattgatcctgcaactctactgtac

SEQ ID NO: 4302066 - DNA, 25 bp, Homo sapien
ccttggccaattgatttccaggtgt

SEQ ID NO: 4302067 - DNA, 25 bp, Homo sapien
cattttggcaatggtactcccttct

SEQ ID NO: 4302068 - DNA, 25 bp, Homo sapien
ggatgttgccttttggattcctctt

SEQ ID NO: 4302069 - DNA, 25 bp, Homo sapien
tttatcatcaaatcgaaggcagtcc

SEQ ID NO: 4302070 - DNA, 25 bp, Homo sapien
gcgtaatgggatctaaacaaggcta

SEQ ID NO: 4302071 - DNA, 25 bp, Homo sapien
acttttcattgtatccaggtaccac

SEQ ID NO: 4302072 - DNA, 25 bp, Homo sapien
ccttgacctgatcagaagaattgaa

SEQ ID NO: 4302073 - DNA, 25 bp, Homo sapien
gatgctgttgcctgcagaaggctct

SEQ ID NO: 4302074 - DNA, 25 bp, Homo sapien
tatacgatgcgatttggagccaaag

SEQ ID NO: 4302075 - DNA, 25 bp, Homo sapien
ggccttggacttccataattaccac

SEQ ID NO: 4302076 - DNA, 25 bp, Homo sapien
ggtttagaagcctcggcctgatcag

SEQ ID NO: 4302077 - DNA, 25 bp, Homo sapien
gcctgatcagtctgtagtttctctc

SEQ ID NO: 4302078 - DNA, 25 bp, Homo sapien
ccttgatctccctagctaaattgat

SEQ ID NO: 4302079 - DNA, 25 bp, Homo sapien
catctgacttggagagctggttctc

SEQ ID NO: 4302080 - DNA, 25 bp, Homo sapien
tgagaaagacagcacgacatctgac

SEQ ID NO: 4302081 - DNA, 25 bp, Homo sapien
gataccggcatgctctccaagttgg

SEQ ID NO: 4302082 - DNA, 25 bp, Homo sapien
ggagcttgaactccccgcctttgga

SEQ ID NO: 4302083 - DNA, 25 bp, Homo sapien
cctggctatttggtctgccatttgt

SEQ ID NO: 4302084 - DNA, 25 bp, Homo sapien
tagacgtccatccagctctcgtctg

SEQ ID NO: 4302085 - DNA, 25 bp, Homo sapien
gctgcttgctcatctggattgtcca

SEQ ID NO: 4302086 - DNA, 25 bp, Homo sapien
ctgggctgcttgctcatctggattg

SEQ ID NO: 4302087 - DNA, 25 bp, Homo sapien
ccttgcactgtgctccatggacata

SEQ ID NO: 4302088 - DNA, 25 bp, Homo sapien
gcacagacattgagacttttagttt

SEQ ID NO: 4302089 - DNA, 25 bp, Homo sapien
gccaataaactcaggacattccatt

SEQ ID NO: 4302090 - DNA, 25 bp, Homo sapien
cttttagtttgggtcacaagtgcca

SEQ ID NO: 4302091 - DNA, 25 bp, Homo sapien
gtagacacgggccagtttgatccat

SEQ ID NO: 4302092 - DNA, 25 bp, Homo sapien
tttgttccttgtagacacgggccag

SEQ ID NO: 4302093 - DNA, 25 bp, Homo sapien
tccttgtagacacgggccagtttga

SEQ ID NO: 4302094 - DNA, 25 bp, Homo sapien
tagacacgggccagtttgatccata

SEQ ID NO: 4302095 - DNA, 25 bp, Homo sapien
aaccctctgtcacttgtcatgactg

SEQ ID NO: 4302096 - DNA, 25 bp, Homo sapien
gagaaatgtcaaccctctgtcactt

SEQ ID NO: 4302097 - DNA, 25 bp, Homo sapien
tgtcacttgtcatgactgatttctt

SEQ ID NO: 4302098 - DNA, 25 bp, Homo sapien
gggacagagaaatgtcaaccctctg

SEQ ID NO: 4302099 - DNA, 25 bp, Homo sapien
gggtcgagtccccttgctctgttag

SEQ ID NO: 4302100 - DNA, 25 bp, Homo sapien
cagaaatgatgtgatcagaggctcc

SEQ ID NO: 4302101 - DNA, 25 bp, Homo sapien
gatgtgatcagaggctcccatctct

SEQ ID NO: 4302102 - DNA, 25 bp, Homo sapien
aatgtagggtgtcggtctgacagtc

SEQ ID NO: 4302103 - DNA, 25 bp, Homo sapien
ggttctgtttattgcgctggtcttt

SEQ ID NO: 4302104 - DNA, 25 bp, Homo sapien
gttctgtttattgcgctggtctttt

SEQ ID NO: 4302105 - DNA, 25 bp, Homo sapien
aggttctgtttattgcgctggtctt

SEQ ID NO: 4302106 - DNA, 25 bp, Homo sapien
tctgtttattgcgctggtcttttcc

SEQ ID NO: 4302107 - DNA, 25 bp, Homo sapien
agatcagctggagaaccaagccaag

SEQ ID NO: 4302108 - DNA, 25 bp, Homo sapien
agccaagggcaagcctttcacgttg

SEQ ID NO: 4302109 - DNA, 25 bp, Homo sapien
atcagctggagaaccaagccaaggg

SEQ ID NO: 4302110 - DNA, 25 bp, Homo sapien
caagcctttcacgttggcagatcat

SEQ ID NO: 4302111 - DNA, 25 bp, Homo sapien
agggatcttatgctcctgataggaa

SEQ ID NO: 4302112 - DNA, 25 bp, Homo sapien
gcagccagcctgcatggaacaagat

SEQ ID NO: 4302113 - DNA, 25 bp, Homo sapien
tggaacaagatagcgccctgggtga

SEQ ID NO: 4302114 - DNA, 25 bp, Homo sapien
aaggatggaagggatcttatgctcc

SEQ ID NO: 4302115 - DNA, 25 bp, Homo sapien
caccagttgtatatgagaagaaaac

SEQ ID NO: 4302116 - DNA, 25 bp, Homo sapien
cagggttcccaaggcattagcctga

SEQ ID NO: 4302117 - DNA, 25 bp, Homo sapien
aagaaaacagcgaaaggagaggcga

SEQ ID NO: 4302118 - DNA, 25 bp, Homo sapien
tggaacattcataccctccagggct

SEQ ID NO: 4302119 - DNA, 25 bp, Homo sapien
catggttctgttgaaagtctgcttt

SEQ ID NO: 4302120 - DNA, 25 bp, Homo sapien
tggttgacctgccttgtgtctagtt

SEQ ID NO: 4302121 - DNA, 25 bp, Homo sapien
taacctttagagattggaattcctg

SEQ ID NO: 4302122 - DNA, 25 bp, Homo sapien
gcagccagctggttgacctgccttg

SEQ ID NO: 4302123 - DNA, 25 bp, Homo sapien
tctctaagatgggaatagcagtctc

SEQ ID NO: 4302124 - DNA, 25 bp, Homo sapien
tccatcagttaatcgagaatcaagc

SEQ ID NO: 4302125 - DNA, 25 bp, Homo sapien
catgtgctttgctaggtgctcaatc

SEQ ID NO: 4302126 - DNA, 25 bp, Homo sapien
gcagggcctgtcctattcattgtag

SEQ ID NO: 4302127 - DNA, 25 bp, Homo sapien
ggattcagaagactgtaacccactt

SEQ ID NO: 4302128 - DNA, 25 bp, Homo sapien
tttcctgttatgaccttaggtggct

SEQ ID NO: 4302129 - DNA, 25 bp, Homo sapien
caatggatcataaagccctcagagt

SEQ ID NO: 4302130 - DNA, 25 bp, Homo sapien
ccatgctgtacctgagctgaaaaaa

SEQ ID NO: 4302131 - DNA, 25 bp, Homo sapien
cagaatttcttaaaggtccatccac

SEQ ID NO: 4302132 - DNA, 25 bp, Homo sapien
acagaatttcttaaaggtccatcca

SEQ ID NO: 4302133 - DNA, 25 bp, Homo sapien
tgtgactcagggctcgtcttttgcc

SEQ ID NO: 4302134 - DNA, 25 bp, Homo sapien
ctttctggtaaacatcagctggtcc

SEQ ID NO: 4302135 - DNA, 25 bp, Homo sapien
tcaatttccttaagtagagtcatca

SEQ ID NO: 4302136 - DNA, 25 bp, Homo sapien
tttgccctgtgggacctcaatttcc

SEQ ID NO: 4302137 - DNA, 25 bp, Homo sapien
tgcccactctgcattggactttgtc

SEQ ID NO: 4302138 - DNA, 25 bp, Homo sapien
cccactctgcattggactttgtcat

SEQ ID NO: 4302139 - DNA, 25 bp, Homo sapien
ctgcccactctgcattggactttgt

SEQ ID NO: 4302140 - DNA, 25 bp, Homo sapien
gcccactctgcattggactttgtca

SEQ ID NO: 4302141 - DNA, 25 bp, Homo sapien
ctttggagacatcacaagatcttga

SEQ ID NO: 4302142 - DNA, 25 bp, Homo sapien
tcatctgctcattgtgactaacgcc

SEQ ID NO: 4302143 - DNA, 25 bp, Homo sapien
taactgaagagtatatcggtcctcc

SEQ ID NO: 4302144 - DNA, 25 bp, Homo sapien
taacgcctatcatgtagtttgactg

SEQ ID NO: 4302145 - DNA, 25 bp, Homo sapien
aatttaatttgcatatgctgcttaa

SEQ ID NO: 4302146 - DNA, 25 bp, Homo sapien
tccctgcacgctgacactttgctgg

SEQ ID NO: 4302147 - DNA, 25 bp, Homo sapien
tgcacgctgacactttgctggcttc

SEQ ID NO: 4302148 - DNA, 25 bp, Homo sapien
cctggcagctccctgcacgctgaca

SEQ ID NO: 4302149 - DNA, 25 bp, Homo sapien
ttatctcagtcactctcaaacctgc

SEQ ID NO: 4302150 - DNA, 25 bp, Homo sapien
ttggagaccaccacctttcctgtat

SEQ ID NO: 4302151 - DNA, 25 bp, Homo sapien
tgcctcccttttactgatgaactca

SEQ ID NO: 4302152 - DNA, 25 bp, Homo sapien
tcatccacatgtctacgagctttta

SEQ ID NO: 4302153 - DNA, 25 bp, Homo sapien
gcaatggcatgcagctcagaagttc

SEQ ID NO: 4302154 - DNA, 25 bp, Homo sapien
cagctcagaagttcccaggtttggg

SEQ ID NO: 4302155 - DNA, 25 bp, Homo sapien
catgcagctcagaagttcccaggtt

SEQ ID NO: 4302156 - DNA, 25 bp, Homo sapien
ggcatgcagctcagaagttcccagg

SEQ ID NO: 4302157 - DNA, 25 bp, Homo sapien
cctcatttagcaatgcatcagtgaa

SEQ ID NO: 4302158 - DNA, 25 bp, Homo sapien
cttcctcatttagcaatgcatcagt

SEQ ID NO: 4302159 - DNA, 25 bp, Homo sapien
tcctcatttagcaatgcatcagtga

SEQ ID NO: 4302160 - DNA, 25 bp, Homo sapien
ttcctcatttagcaatgcatcagtg

SEQ ID NO: 4302161 - DNA, 25 bp, Homo sapien
caaactgaggtagtccacatttgtc

SEQ ID NO: 4302162 - DNA, 25 bp, Homo sapien
aaactgaggtagtccacatttgtca

SEQ ID NO: 4302163 - DNA, 25 bp, Homo sapien
tccaaactgaggtagtccacatttg

SEQ ID NO: 4302164 - DNA, 25 bp, Homo sapien
cttccaaactgaggtagtccacatt

SEQ ID NO: 4302165 - DNA, 25 bp, Homo sapien
gaaagatcactcatgcgaagaacta

SEQ ID NO: 4302166 - DNA, 25 bp, Homo sapien
gtatggatacaacccagcaatctgg

SEQ ID NO: 4302167 - DNA, 25 bp, Homo sapien
gcaatctgttacacggccaagacaa

SEQ ID NO: 4302168 - DNA, 25 bp, Homo sapien
gaaagtttaggctgtatcctcagca

SEQ ID NO: 4302169 - DNA, 25 bp, Homo sapien
ctgtctactgccaccgtgtcttctg

SEQ ID NO: 4302170 - DNA, 25 bp, Homo sapien
tgtctactgccaccgtgtcttctgc

SEQ ID NO: 4302171 - DNA, 25 bp, Homo sapien
tactgccaccgtgtcttctgcatca

SEQ ID NO: 4302172 - DNA, 25 bp, Homo sapien
tctactgccaccgtgtcttctgcat

SEQ ID NO: 4302173 - DNA, 25 bp, Homo sapien
agctctaggcccaggcgagaaacac

SEQ ID NO: 4302174 - DNA, 25 bp, Homo sapien
gatgttcgaacttcttgatcccaag

SEQ ID NO: 4302175 - DNA, 25 bp, Homo sapien
gcgggtcctcttctccacggtagat

SEQ ID NO: 4302176 - DNA, 25 bp, Homo sapien
tgcttcttgaagacctcccgggagt

SEQ ID NO: 4302177 - DNA, 25 bp, Homo sapien
tcagaatcagctcggaggctgcgct

SEQ ID NO: 4302178 - DNA, 25 bp, Homo sapien
ggtggaaaatccctggttggtctgc

SEQ ID NO: 4302179 - DNA, 25 bp, Homo sapien
tgggaccaagacttcttctattaag

SEQ ID NO: 4302180 - DNA, 25 bp, Homo sapien
gtgctacctggttgagtcctgggac

SEQ ID NO: 4302181 - DNA, 25 bp, Homo sapien
tctcctgcttgatgaaaacctctcc

SEQ ID NO: 4302182 - DNA, 25 bp, Homo sapien
tgtaatacaaggcagtgaagccgcc

SEQ ID NO: 4302183 - DNA, 25 bp, Homo sapien
tctgacacgtttgagctgcgtcctg

SEQ ID NO: 4302184 - DNA, 25 bp, Homo sapien
gaagccgccgcttcatattcacgga

SEQ ID NO: 4302185 - DNA, 25 bp, Homo sapien
tattcacggagaggaagcatctgac

SEQ ID NO: 4302186 - DNA, 25 bp, Homo sapien
tgatactgtagtaaaccaaaacgac

SEQ ID NO: 4302187 - DNA, 25 bp, Homo sapien
ggtcttggcattcttctgaacagtg

SEQ ID NO: 4302188 - DNA, 25 bp, Homo sapien
caaaacgactgtccccattgccctg

SEQ ID NO: 4302189 - DNA, 25 bp, Homo sapien
caccaacccatttgccttaggaagg

SEQ ID NO: 4302190 - DNA, 25 bp, Homo sapien
aaaccggtccttgactgtctgcagc

SEQ ID NO: 4302191 - DNA, 25 bp, Homo sapien
tctgcacagcgttcatgaaggcttc

SEQ ID NO: 4302192 - DNA, 25 bp, Homo sapien
gcttcgtcagccatgatctgggttt

SEQ ID NO: 4302193 - DNA, 25 bp, Homo sapien
cccattgaggaaagcctgaaaccgg

SEQ ID NO: 4302194 - DNA, 25 bp, Homo sapien
ccagtccagtagcagttctgttggc

SEQ ID NO: 4302195 - DNA, 25 bp, Homo sapien
gtgtcatctggaaaaagcgacttat

SEQ ID NO: 4302196 - DNA, 25 bp, Homo sapien
tcatctggaaaaagcgacttatatt

SEQ ID NO: 4302197 - DNA, 25 bp, Homo sapien
aaagtaagaccagtccagtagcagt

SEQ ID NO: 4302198 - DNA, 25 bp, Homo sapien
ctgagagtgaagagccagcctttct

SEQ ID NO: 4302199 - DNA, 25 bp, Homo sapien
gagtgaagagccagcctttctggat

SEQ ID NO: 4302200 - DNA, 25 bp, Homo sapien
gtgaagagccagcctttctggatca

SEQ ID NO: 4302201 - DNA, 25 bp, Homo sapien
aagagccagcctttctggatcaggg

SEQ ID NO: 4302202 - DNA, 25 bp, Homo sapien
ccttctagtttagaggctggaaagc

SEQ ID NO: 4302203 - DNA, 25 bp, Homo sapien
gctggaaagccaattactcccttcc

SEQ ID NO: 4302204 - DNA, 25 bp, Homo sapien
ttcttggcccttctagtttagaggc

SEQ ID NO: 4302205 - DNA, 25 bp, Homo sapien
aggctggaaagccaattactccctt

SEQ ID NO: 4302206 - DNA, 25 bp, Homo sapien
agaatacaaatctattgtctatagc

SEQ ID NO: 4302207 - DNA, 25 bp, Homo sapien
aatacaaatctattgtctatagcca

SEQ ID NO: 4302208 - DNA, 25 bp, Homo sapien
gaatacaaatctattgtctatagcc

SEQ ID NO: 4302209 - DNA, 25 bp, Homo sapien
tgagcttccaaaggaggtactgcct

SEQ ID NO: 4302210 - DNA, 25 bp, Homo sapien
gcagcagcactcttaatagcaggtg

SEQ ID NO: 4302211 - DNA, 25 bp, Homo sapien
gaaacttctgggttgcagccttctt

SEQ ID NO: 4302212 - DNA, 25 bp, Homo sapien
ccttctgagcttccaaaggaggtac

SEQ ID NO: 4302213 - DNA, 25 bp, Homo sapien
ctacagttgtgaccagttttccagc

SEQ ID NO: 4302214 - DNA, 25 bp, Homo sapien
taacatctacagttgtgaccagttt

SEQ ID NO: 4302215 - DNA, 25 bp, Homo sapien
catctacagttgtgaccagttttcc

SEQ ID NO: 4302216 - DNA, 25 bp, Homo sapien
ccaccgaccaaagccccattctgat

SEQ ID NO: 4302217 - DNA, 25 bp, Homo sapien
tatgaacagcataagagtttgacct

SEQ ID NO: 4302218 - DNA, 25 bp, Homo sapien
tggtccctgctagcaggagataacc

SEQ ID NO: 4302219 - DNA, 25 bp, Homo sapien
ccattatgaacagcataagagtttg

SEQ ID NO: 4302220 - DNA, 25 bp, Homo sapien
accacattgatgctggattcagcac

SEQ ID NO: 4302221 - DNA, 25 bp, Homo sapien
tttagtggacataagcacactccat

SEQ ID NO: 4302222 - DNA, 25 bp, Homo sapien
tacatgggtagtccctgtactgaat

SEQ ID NO: 4302223 - DNA, 25 bp, Homo sapien
tgtactgaatttgatggcctgtgga

SEQ ID NO: 4302224 - DNA, 25 bp, Homo sapien
ccaactgtgttacattcagtgtacc

SEQ ID NO: 4302225 - DNA, 25 bp, Homo sapien
agccaaattggtacaccaggtgaga

SEQ ID NO: 4302226 - DNA, 25 bp, Homo sapien
caaattggtacaccaggtgagaaaa

SEQ ID NO: 4302227 - DNA, 25 bp, Homo sapien
ttaatagcaatcagctgctgacaat

SEQ ID NO: 4302228 - DNA, 25 bp, Homo sapien
taatagcaatcagctgctgacaatc

SEQ ID NO: 4302229 - DNA, 25 bp, Homo sapien
tatcctcatgcaaattgtggacttt

SEQ ID NO: 4302230 - DNA, 25 bp, Homo sapien
tttgccaactgtcagccatggaaca

SEQ ID NO: 4302231 - DNA, 25 bp, Homo sapien
tctgctggggaggatttattccatc

SEQ ID NO: 4302232 - DNA, 25 bp, Homo sapien
catggaacaattccaatctgctggg

SEQ ID NO: 4302233 - DNA, 25 bp, Homo sapien
tggctacagatttggctccgcttgg

SEQ ID NO: 4302234 - DNA, 25 bp, Homo sapien
gatggaatgaagaacccctccactc

SEQ ID NO: 4302235 - DNA, 25 bp, Homo sapien
tggaggaattgcctcctctaggtat

SEQ ID NO: 4302236 - DNA, 25 bp, Homo sapien
tctaggtatggaatgttttaaacac

SEQ ID NO: 4302237 - DNA, 25 bp, Homo sapien
acaaatagaggatggaaaacggcaa

SEQ ID NO: 4302238 - DNA, 25 bp, Homo sapien
tagaggaatgactctggcagagagt

SEQ ID NO: 4302239 - DNA, 25 bp, Homo sapien
tgagatctgtgaagtcgacaaatag

SEQ ID NO: 4302240 - DNA, 25 bp, Homo sapien
ggaaggaaactaattgagtgagatc

SEQ ID NO: 4302241 - DNA, 25 bp, Homo sapien
tctacaattctcttttttggctgtg

SEQ ID NO: 4302242 - DNA, 25 bp, Homo sapien
ggtctacaattctcttttttggctg

SEQ ID NO: 4302243 - DNA, 25 bp, Homo sapien
acaattctcttttttggctgtgtct

SEQ ID NO: 4302244 - DNA, 25 bp, Homo sapien
tggtctacaattctcttttttggct

SEQ ID NO: 4302245 - DNA, 25 bp, Homo sapien
tgaacagtaggacaaacaggaaatg

SEQ ID NO: 4302246 - DNA, 25 bp, Homo sapien
taagtgaacagtaggacaaacagga

SEQ ID NO: 4302247 - DNA, 25 bp, Homo sapien
ctgaattcctaagtgaacagtagga

SEQ ID NO: 4302248 - DNA, 25 bp, Homo sapien
ttcctaagtgaacagtaggacaaac

SEQ ID NO: 4302249 - DNA, 25 bp, Homo sapien
gcaagtcacaaaacgtaagttgtca

SEQ ID NO: 4302250 - DNA, 25 bp, Homo sapien
gcaccaagagtagcttaaaactatt

SEQ ID NO: 4302251 - DNA, 25 bp, Homo sapien
tatttagctgaagtagcaagtcaca

SEQ ID NO: 4302252 - DNA, 25 bp, Homo sapien
tacgtactatgttatcatgccatga

SEQ ID NO: 4302253 - DNA, 25 bp, Homo sapien
gttctgaaaccatagctcaatgaca

SEQ ID NO: 4302254 - DNA, 25 bp, Homo sapien
tgagtagtagattgtgctggaaaca

SEQ ID NO: 4302255 - DNA, 25 bp, Homo sapien
taaacacactgcgtaaatttgtagt

SEQ ID NO: 4302256 - DNA, 25 bp, Homo sapien
ccaaaggatagtaattagagaaagc

SEQ ID NO: 4302257 - DNA, 25 bp, Homo sapien
gaaaaagcttttgatgcctcagatt

SEQ ID NO: 4302258 - DNA, 25 bp, Homo sapien
ctgtactttatcaaggcagcagtgg

SEQ ID NO: 4302259 - DNA, 25 bp, Homo sapien
tcagattgcgaagctttttgcagct

SEQ ID NO: 4302260 - DNA, 25 bp, Homo sapien
cttggaggacccaggcgagccagaa

SEQ ID NO: 4302261 - DNA, 25 bp, Homo sapien
attaaaggggtaggcgatgcagcgc

SEQ ID NO: 4302262 - DNA, 25 bp, Homo sapien
ggtaggcgatgcagcgcatcacgaa

SEQ ID NO: 4302263 - DNA, 25 bp, Homo sapien
tgcagcgcatcacgaacacatacag

SEQ ID NO: 4302264 - DNA, 25 bp, Homo sapien
tctgctgccggcgagccatgtcggt

SEQ ID NO: 4302265 - DNA, 25 bp, Homo sapien
gggctggagggccggccgccgccag

SEQ ID NO: 4302266 - DNA, 25 bp, Homo sapien
tgggagacaggcgcgcgccggacgg

SEQ ID NO: 4302267 - DNA, 25 bp, Homo sapien
ccctcgctggtacggctgggagaca

SEQ ID NO: 4302268 - DNA, 25 bp, Homo sapien
ttctcgctcaccaccgacgggctgg

SEQ ID NO: 4302269 - DNA, 25 bp, Homo sapien
ttcttcgctggacgaagggtccagc

SEQ ID NO: 4302270 - DNA, 25 bp, Homo sapien
catccgattcttcttcgctggacga

SEQ ID NO: 4302271 - DNA, 25 bp, Homo sapien
acgatctcatccgattcttcttcgc

SEQ ID NO: 4302272 - DNA, 25 bp, Homo sapien
gattcttcttcgctggacgaagggt

SEQ ID NO: 4302273 - DNA, 25 bp, Homo sapien
gatgccgagtgttgcaagctgtcga

SEQ ID NO: 4302274 - DNA, 25 bp, Homo sapien
gggagaatcaattgcgagccccgag

SEQ ID NO: 4302275 - DNA, 25 bp, Homo sapien
gaggcgcctccagaaaagatgccga

SEQ ID NO: 4302276 - DNA, 25 bp, Homo sapien
tgtcgatgcagccaagagccgaaga

SEQ ID NO: 4302277 - DNA, 25 bp, Homo sapien
taaatgcttggcctctcaacccaga

SEQ ID NO: 4302278 - DNA, 25 bp, Homo sapien
gagctatcctgaacgaactaatgat

SEQ ID NO: 4302279 - DNA, 25 bp, Homo sapien
taagactagcttgcaagctccaaaa

SEQ ID NO: 4302280 - DNA, 25 bp, Homo sapien
aatagtactcacttcccctggaatg

SEQ ID NO: 4302281 - DNA, 25 bp, Homo sapien
ctgagagggatgtgccataaatgag

SEQ ID NO: 4302282 - DNA, 25 bp, Homo sapien
gatcctgaaaaatagaagagttgct

SEQ ID NO: 4302283 - DNA, 25 bp, Homo sapien
tagatagtattgtcagggattagaa

SEQ ID NO: 4302284 - DNA, 25 bp, Homo sapien
tacttgatgcctgtctggttttaga

SEQ ID NO: 4302285 - DNA, 25 bp, Homo sapien
aaacggaacgtgaacaccagaagag

SEQ ID NO: 4302286 - DNA, 25 bp, Homo sapien
tctatagccttgctctctatcccca

SEQ ID NO: 4302287 - DNA, 25 bp, Homo sapien
tgatgtctgggagcctctatagcct

SEQ ID NO: 4302288 - DNA, 25 bp, Homo sapien
ttcagtttgatggaaacggaacgtg

SEQ ID NO: 4302289 - DNA, 25 bp, Homo sapien
tgaatatcataatgtgaattgtgtc

SEQ ID NO: 4302290 - DNA, 25 bp, Homo sapien
ctatttcaggtcaggtccaggttct

SEQ ID NO: 4302291 - DNA, 25 bp, Homo sapien
ttctggagggtcctgaatatcataa

SEQ ID NO: 4302292 - DNA, 25 bp, Homo sapien
tttcaggtcaggtccaggttctgga

SEQ ID NO: 4302293 - DNA, 25 bp, Homo sapien
cttctttaagtttctccatcagata

SEQ ID NO: 4302294 - DNA, 25 bp, Homo sapien
tctttaagtttctccatcagatatg

SEQ ID NO: 4302295 - DNA, 25 bp, Homo sapien
catcttctttaagtttctccatcag

SEQ ID NO: 4302296 - DNA, 25 bp, Homo sapien
tttaagtttctccatcagatatggc

SEQ ID NO: 4302297 - DNA, 25 bp, Homo sapien
cataccagttttgattgtcagccag

SEQ ID NO: 4302298 - DNA, 25 bp, Homo sapien
gcccactgatatggtaatttgacaa

SEQ ID NO: 4302299 - DNA, 25 bp, Homo sapien
taaggaacagttaaagcccactgat

SEQ ID NO: 4302300 - DNA, 25 bp, Homo sapien
caaccagacatgtttctaatagaat

SEQ ID NO: 4302301 - DNA, 25 bp, Homo sapien
gaagtaataccccaatgagccaaag

SEQ ID NO: 4302302 - DNA, 25 bp, Homo sapien
gatactttcctgatcggaagtaata

SEQ ID NO: 4302303 - DNA, 25 bp, Homo sapien
ctcatgaatgagtgcctggtgatac

SEQ ID NO: 4302304 - DNA, 25 bp, Homo sapien
ttgcctcatgaatgagtgcctggtg

SEQ ID NO: 4302305 - DNA, 25 bp, Homo sapien
tgcatgtgactggatccagcggaca

SEQ ID NO: 4302306 - DNA, 25 bp, Homo sapien
aatgcagacctgctgactcatcaaa

SEQ ID NO: 4302307 - DNA, 25 bp, Homo sapien
gctgtctgggtagccatgcatgtga

SEQ ID NO: 4302308 - DNA, 25 bp, Homo sapien
tcatcaaattgcttaggtgccagca

SEQ ID NO: 4302309 - DNA, 25 bp, Homo sapien
cctagcctggtattgtccgggagta

SEQ ID NO: 4302310 - DNA, 25 bp, Homo sapien
gcagacaacagatccagtagtgagg

SEQ ID NO: 4302311 - DNA, 25 bp, Homo sapien
tatgtagagaaagcctgcagacaac

SEQ ID NO: 4302312 - DNA, 25 bp, Homo sapien
aaactgctgatacttaccttgggag

SEQ ID NO: 4302313 - DNA, 25 bp, Homo sapien
ataaatttgtagcagggagattcat

SEQ ID NO: 4302314 - DNA, 25 bp, Homo sapien
cataaatttgtagcagggagattca

SEQ ID NO: 4302315 - DNA, 25 bp, Homo sapien
tcataaatttgtagcagggagattc

SEQ ID NO: 4302316 - DNA, 25 bp, Homo sapien
tactgtatgacttcgaaattgaggg

SEQ ID NO: 4302317 - DNA, 25 bp, Homo sapien
tatgtctgaccctggcacacaatag

SEQ ID NO: 4302318 - DNA, 25 bp, Homo sapien
tacatagttgcctacaatttggtgt

SEQ ID NO: 4302319 - DNA, 25 bp, Homo sapien
cacacaataggcatttgataaacgt

SEQ ID NO: 4302320 - DNA, 25 bp, Homo sapien
tttcagcaatggtgaaccacatagc

SEQ ID NO: 4302321 - DNA, 25 bp, Homo sapien
ggcattagtcgtgtattgattttct

SEQ ID NO: 4302322 - DNA, 25 bp, Homo sapien
catagcattgtcagaacctgactca

SEQ ID NO: 4302323 - DNA, 25 bp, Homo sapien
ttacggtgaggcattagtcgtgtat

SEQ ID NO: 4302324 - DNA, 25 bp, Homo sapien
tatgcttcgaggatgttgaggctga

SEQ ID NO: 4302325 - DNA, 25 bp, Homo sapien
aaatggtgtccatattcttgcctga

SEQ ID NO: 4302326 - DNA, 25 bp, Homo sapien
atgactataatgaactgtatgcttc

SEQ ID NO: 4302327 - DNA, 25 bp, Homo sapien
tccttgatggttgagttaaatgact

SEQ ID NO: 4302328 - DNA, 25 bp, Homo sapien
accatagatgagatatttactgagc

SEQ ID NO: 4302329 - DNA, 25 bp, Homo sapien
tacagctgaaccgtgtctctcagta

SEQ ID NO: 4302330 - DNA, 25 bp, Homo sapien
gaagcacttagcagcatctaatagg

SEQ ID NO: 4302331 - DNA, 25 bp, Homo sapien
tcatcaccaccatagatgagatatt

SEQ ID NO: 4302332 - DNA, 25 bp, Homo sapien
cctgcttccattgggccagctgagg

SEQ ID NO: 4302333 - DNA, 25 bp, Homo sapien
ctgcttccattgggccagctgaggg

SEQ ID NO: 4302334 - DNA, 25 bp, Homo sapien
tcctgcttccattgggccagctgag

SEQ ID NO: 4302335 - DNA, 25 bp, Homo sapien
gtgtaagcatagctctctggttgac

SEQ ID NO: 4302336 - DNA, 25 bp, Homo sapien
gagaatgagaggttggcttgtttcc

SEQ ID NO: 4302337 - DNA, 25 bp, Homo sapien
gtttccttggagtgtaagcatagct

SEQ ID NO: 4302338 - DNA, 25 bp, Homo sapien
tggagtgtaagcatagctctctggt

SEQ ID NO: 4302339 - DNA, 25 bp, Homo sapien
gcagctgaggtacaactgtgggcct

SEQ ID NO: 4302340 - DNA, 25 bp, Homo sapien
cctttgactgcactggcggttcaga

SEQ ID NO: 4302341 - DNA, 25 bp, Homo sapien
tggaatctcaggttcagtgcgcaca

SEQ ID NO: 4302342 - DNA, 25 bp, Homo sapien
gctgagggctttgacctttaaggga

SEQ ID NO: 4302343 - DNA, 25 bp, Homo sapien
tcaagacgtgatcttggatgattcc

SEQ ID NO: 4302344 - DNA, 25 bp, Homo sapien
gacgtgatcttggatgattcctgct

SEQ ID NO: 4302345 - DNA, 25 bp, Homo sapien
ctgtgctgggtcaagacgtgatctt

SEQ ID NO: 4302346 - DNA, 25 bp, Homo sapien
gctgggtcaagacgtgatcttggat

SEQ ID NO: 4302347 - DNA, 25 bp, Homo sapien
tgagcagtaagttttgatctcttta

SEQ ID NO: 4302348 - DNA, 25 bp, Homo sapien
ttgagcagtaagttttgatctcttt

SEQ ID NO: 4302349 - DNA, 25 bp, Homo sapien
gagcagtaagttttgatctctttaa

SEQ ID NO: 4302350 - DNA, 25 bp, Homo sapien
gacataagacccctttttctcctga

SEQ ID NO: 4302351 - DNA, 25 bp, Homo sapien
agacataagacccctttttctcctg

SEQ ID NO: 4302352 - DNA, 25 bp, Homo sapien
gaagaacttgtcctccggatctctc

SEQ ID NO: 4302353 - DNA, 25 bp, Homo sapien
ctggtaggatccactattcagtgtg

SEQ ID NO: 4302354 - DNA, 25 bp, Homo sapien
tagtgttaaaatcggcatgaagctg

SEQ ID NO: 4302355 - DNA, 25 bp, Homo sapien
tgtagagatggccaattgttatgtc

SEQ ID NO: 4302356 - DNA, 25 bp, Homo sapien
cctttgactccttgagctgtactca

SEQ ID NO: 4302357 - DNA, 25 bp, Homo sapien
taagacttagctcaaataccagctc

SEQ ID NO: 4302358 - DNA, 25 bp, Homo sapien
gtctgcatcctaccctttttaagac

SEQ ID NO: 4302359 - DNA, 25 bp, Homo sapien
ctcctttgactccttgagctgtact

SEQ ID NO: 4302360 - DNA, 25 bp, Homo sapien
ttcctggatcttgcttactgatgct

SEQ ID NO: 4302361 - DNA, 25 bp, Homo sapien
cttcctggatcttgcttactgatgc

SEQ ID NO: 4302362 - DNA, 25 bp, Homo sapien
ttcttggagccatagggtgacagca

SEQ ID NO: 4302363 - DNA, 25 bp, Homo sapien
actgggtgtttagaatggtgtcagc

SEQ ID NO: 4302364 - DNA, 25 bp, Homo sapien
catagggtgacagcatcaagattcc

SEQ ID NO: 4302365 - DNA, 25 bp, Homo sapien
ctgccagtaactgggtgtttagaat

SEQ ID NO: 4302366 - DNA, 25 bp, Homo sapien
atgtgtctgaatctcttggatttat

SEQ ID NO: 4302367 - DNA, 25 bp, Homo sapien
tgtgtctgaatctcttggatttata

SEQ ID NO: 4302368 - DNA, 25 bp, Homo sapien
gatgtgtctgaatctcttggattta

SEQ ID NO: 4302369 - DNA, 25 bp, Homo sapien
agatgtgtctgaatctcttggattt

SEQ ID NO: 4302370 - DNA, 25 bp, Homo sapien
tttccaacagcaattatatacactg

SEQ ID NO: 4302371 - DNA, 25 bp, Homo sapien
tgtatcgggctcagcatagggattt

SEQ ID NO: 4302372 - DNA, 25 bp, Homo sapien
gctgagacgaaatggtgaaatatgt

SEQ ID NO: 4302373 - DNA, 25 bp, Homo sapien
ctgggagaatctgtatctttccaac

SEQ ID NO: 4302374 - DNA, 25 bp, Homo sapien
cttcctgtgcaggtgctctgtcctc

SEQ ID NO: 4302375 - DNA, 25 bp, Homo sapien
ccctcttcaacaggagcttggcaga

SEQ ID NO: 4302376 - DNA, 25 bp, Homo sapien
caactccctcttcaacaggagcttg

SEQ ID NO: 4302377 - DNA, 25 bp, Homo sapien
gcttggcagaagaccagagaagctg

SEQ ID NO: 4302378 - DNA, 25 bp, Homo sapien
gcagaagaccagagaagctgagtca

SEQ ID NO: 4302379 - DNA, 25 bp, Homo sapien
tttttttcactgcatccactataag

SEQ ID NO: 4302380 - DNA, 25 bp, Homo sapien
cctcaaggaggagtttttttcactg

SEQ ID NO: 4302381 - DNA, 25 bp, Homo sapien
tttcactgcatccactataagcagt

SEQ ID NO: 4302382 - DNA, 25 bp, Homo sapien
ttttttcactgcatccactataagc

SEQ ID NO: 4302383 - DNA, 25 bp, Homo sapien
aatgattccatgtgtggagactcag

SEQ ID NO: 4302384 - DNA, 25 bp, Homo sapien
gattccatgtgtggagactcagatt

SEQ ID NO: 4302385 - DNA, 25 bp, Homo sapien
caaatgattccatgtgtggagactc

SEQ ID NO: 4302386 - DNA, 25 bp, Homo sapien
ttccatgtgtggagactcagattca

SEQ ID NO: 4302387 - DNA, 25 bp, Homo sapien
tgcacagaggtgactatagatgtaa

SEQ ID NO: 4302388 - DNA, 25 bp, Homo sapien
cacagaggtgactatagatgtaaaa

SEQ ID NO: 4302389 - DNA, 25 bp, Homo sapien
ctgcacagaggtgactatagatgta

SEQ ID NO: 4302390 - DNA, 25 bp, Homo sapien
cagaggtgactatagatgtaaaata

SEQ ID NO: 4302391 - DNA, 25 bp, Homo sapien
gtgaataaatttgtcaactcttttc

SEQ ID NO: 4302392 - DNA, 25 bp, Homo sapien
tttagtgtgaataaatttgtcaact

SEQ ID NO: 4302393 - DNA, 25 bp, Homo sapien
gtgtgaataaatttgtcaactcttt

SEQ ID NO: 4302394 - DNA, 25 bp, Homo sapien
tagtgtgaataaatttgtcaactct

SEQ ID NO: 4302395 - DNA, 25 bp, Homo sapien
cagtcctactaggatctgtctcagc

SEQ ID NO: 4302396 - DNA, 25 bp, Homo sapien
caatacttcgtactgcagtgtttca

SEQ ID NO: 4302397 - DNA, 25 bp, Homo sapien
tgattgccataggatcaatacttcg

SEQ ID NO: 4302398 - DNA, 25 bp, Homo sapien
tctgggtgtttactcagccacaggg

SEQ ID NO: 4302399 - DNA, 25 bp, Homo sapien
gactcggacaccagcttcccatcgc

SEQ ID NO: 4302400 - DNA, 25 bp, Homo sapien
tttggctggatgtcagaggactcgg

SEQ ID NO: 4302401 - DNA, 25 bp, Homo sapien
ttggctggatgtcagaggactcgga

SEQ ID NO: 4302402 - DNA, 25 bp, Homo sapien
cggacaccagcttcccatcgcaggt

SEQ ID NO: 4302403 - DNA, 25 bp, Homo sapien
acgaccacggccctggcggaactgg

SEQ ID NO: 4302404 - DNA, 25 bp, Homo sapien
cttcacgaccacggccctggcggaa

SEQ ID NO: 4302405 - DNA, 25 bp, Homo sapien
cgaccacggccctggcggaactggt

SEQ ID NO: 4302406 - DNA, 25 bp, Homo sapien
tcacgaccacggccctggcggaact

SEQ ID NO: 4302407 - DNA, 25 bp, Homo sapien
ctgaaggagggggaccccgcgccag

SEQ ID NO: 4302408 - DNA, 25 bp, Homo sapien
ggagggggaccccgcgccagagcca

SEQ ID NO: 4302409 - DNA, 25 bp, Homo sapien
ctagagcccaggccatagctgagac

SEQ ID NO: 4302410 - DNA, 25 bp, Homo sapien
agagcccaggccatagctgagaccg

SEQ ID NO: 4302411 - DNA, 25 bp, Homo sapien
cttctatggatactcctgttctgca

SEQ ID NO: 4302412 - DNA, 25 bp, Homo sapien
ggtcttctatggatactcctgttct

SEQ ID NO: 4302413 - DNA, 25 bp, Homo sapien
ggtggtcttctatggatactcctgt

SEQ ID NO: 4302414 - DNA, 25 bp, Homo sapien
caccgccactggtggtcttctatgg

SEQ ID NO: 4302415 - DNA, 25 bp, Homo sapien
ccttaaccaccaaatccccgtgcag

SEQ ID NO: 4302416 - DNA, 25 bp, Homo sapien
ggtattcacgcagctgccacgccat

SEQ ID NO: 4302417 - DNA, 25 bp, Homo sapien
tggtattcacgcagctgccacgcca

SEQ ID NO: 4302418 - DNA, 25 bp, Homo sapien
gttggcatccttaaccaccaaatcc

SEQ ID NO: 4302419 - DNA, 25 bp, Homo sapien
cggcatctgtgatggcggcctccag

SEQ ID NO: 4302420 - DNA, 25 bp, Homo sapien
ctcggcatctgtgatggcggcctcc

SEQ ID NO: 4302421 - DNA, 25 bp, Homo sapien
tgatggcggcctccagggaagccct

SEQ ID NO: 4302422 - DNA, 25 bp, Homo sapien
tgtgatggcggcctccagggaagcc

SEQ ID NO: 4302423 - DNA, 25 bp, Homo sapien
ggtcaacatgagcctggagctggct

SEQ ID NO: 4302424 - DNA, 25 bp, Homo sapien
ggagctggctgatgttcccgtatat

SEQ ID NO: 4302425 - DNA, 25 bp, Homo sapien
ctggagctggctgatgttcccgtat

SEQ ID NO: 4302426 - DNA, 25 bp, Homo sapien
ctggtcaacatgagcctggagctgg

SEQ ID NO: 4302427 - DNA, 25 bp, Homo sapien
acagacgtgtctgagatctgggact

SEQ ID NO: 4302428 - DNA, 25 bp, Homo sapien
acagcaccacagacgtgtctgagat

SEQ ID NO: 4302429 - DNA, 25 bp, Homo sapien
accacagacgtgtctgagatctggg

SEQ ID NO: 4302430 - DNA, 25 bp, Homo sapien
gacagcaccacagacgtgtctgaga

SEQ ID NO: 4302431 - DNA, 25 bp, Homo sapien
ccttccaggcgagaccctagctcta

SEQ ID NO: 4302432 - DNA, 25 bp, Homo sapien
gcgagaccctagctctaccttgttc

SEQ ID NO: 4302433 - DNA, 25 bp, Homo sapien
ggaagcttcatctgcatccttcttg

SEQ ID NO: 4302434 - DNA, 25 bp, Homo sapien
tcagcccttccaggcgagaccctag

SEQ ID NO: 4302435 - DNA, 25 bp, Homo sapien
caagctccgcctccagcttcagctt

SEQ ID NO: 4302436 - DNA, 25 bp, Homo sapien
gctccgcctccagcttcagcttctc

SEQ ID NO: 4302437 - DNA, 25 bp, Homo sapien
ccaagctccgcctccagcttcagct

SEQ ID NO: 4302438 - DNA, 25 bp, Homo sapien
ctgcatgttgccaagctccgcctcc

SEQ ID NO: 4302439 - DNA, 25 bp, Homo sapien
aaggttgttgacgtagctctcaaac

SEQ ID NO: 4302440 - DNA, 25 bp, Homo sapien
ctgccacctaaggttgttgacgtag

SEQ ID NO: 4302441 - DNA, 25 bp, Homo sapien
cctaaggttgttgacgtagctctca

SEQ ID NO: 4302442 - DNA, 25 bp, Homo sapien
ccacctaaggttgttgacgtagctc

SEQ ID NO: 4302443 - DNA, 25 bp, Homo sapien
atgttgctccgagccgtctgctgct

SEQ ID NO: 4302444 - DNA, 25 bp, Homo sapien
atgttgtccatgttgctccgagccg

SEQ ID NO: 4302445 - DNA, 25 bp, Homo sapien
tgtccatgttgctccgagccgtctg

SEQ ID NO: 4302446 - DNA, 25 bp, Homo sapien
ccatgttgctccgagccgtctgctg

SEQ ID NO: 4302447 - DNA, 25 bp, Homo sapien
tgttctgctgctctagggaccttac

SEQ ID NO: 4302448 - DNA, 25 bp, Homo sapien
ttgttctgctgctctagggacctta

SEQ ID NO: 4302449 - DNA, 25 bp, Homo sapien
cttgttctgctgctctagggacctt

SEQ ID NO: 4302450 - DNA, 25 bp, Homo sapien
tctgctcctcctgggtgcgcatggc

SEQ ID NO: 4302451 - DNA, 25 bp, Homo sapien
tgctcctcctgggtgcgcatggcct

SEQ ID NO: 4302452 - DNA, 25 bp, Homo sapien
gatctgctcctcctgggtgcgcatg

SEQ ID NO: 4302453 - DNA, 25 bp, Homo sapien
gctcctcctgggtgcgcatggcctg

SEQ ID NO: 4302454 - DNA, 25 bp, Homo sapien
caggctttggttgaccgggacggtg

SEQ ID NO: 4302455 - DNA, 25 bp, Homo sapien
taagctgtggtcagggactctggat

SEQ ID NO: 4302456 - DNA, 25 bp, Homo sapien
gctgtggtcagggactctggattcc

SEQ ID NO: 4302457 - DNA, 25 bp, Homo sapien
tgtggtcagggactctggattccat

SEQ ID NO: 4302458 - DNA, 25 bp, Homo sapien
ctaagctgtggtcagggactctgga

SEQ ID NO: 4302459 - DNA, 25 bp, Homo sapien
aagctcctctaggtttgttgagtac

SEQ ID NO: 4302460 - DNA, 25 bp, Homo sapien
gacttgtaagctcctctaggtttgt

SEQ ID NO: 4302461 - DNA, 25 bp, Homo sapien
tgcttacatccatagacttgtaagc

SEQ ID NO: 4302462 - DNA, 25 bp, Homo sapien
tctcactctgctactcagattggag

SEQ ID NO: 4302463 - DNA, 25 bp, Homo sapien
ctcagccaacagagaaccttcttct

SEQ ID NO: 4302464 - DNA, 25 bp, Homo sapien
gaacctctcctattgtattatgaag

SEQ ID NO: 4302465 - DNA, 25 bp, Homo sapien
tattatgaaggcagttcatctctct

SEQ ID NO: 4302466 - DNA, 25 bp, Homo sapien
tgatcacctctaaactcactttgag

SEQ ID NO: 4302467 - DNA, 25 bp, Homo sapien
catggcccacgaaatgttttagttt

SEQ ID NO: 4302468 - DNA, 25 bp, Homo sapien
taattcaatccactagaagattcac

SEQ ID NO: 4302469 - DNA, 25 bp, Homo sapien
attcacatggcccacgaaatgtttt

SEQ ID NO: 4302470 - DNA, 25 bp, Homo sapien
aagattcacatggcccacgaaatgt

SEQ ID NO: 4302471 - DNA, 25 bp, Homo sapien
aatgggatagcctttaatgtgtatg

SEQ ID NO: 4302472 - DNA, 25 bp, Homo sapien
ccagtaatacctaaacttgagggca

SEQ ID NO: 4302473 - DNA, 25 bp, Homo sapien
agtaatacctaaacttgagggcaat

SEQ ID NO: 4302474 - DNA, 25 bp, Homo sapien
tgggatagcctttaatgtgtatgtg

SEQ ID NO: 4302475 - DNA, 25 bp, Homo sapien
ttccacaccatacttgtaaagactt

SEQ ID NO: 4302476 - DNA, 25 bp, Homo sapien
tgttaataaccggaaagcaatctca

SEQ ID NO: 4302477 - DNA, 25 bp, Homo sapien
tccacaccatacttgtaaagacttc

SEQ ID NO: 4302478 - DNA, 25 bp, Homo sapien
taaccggaaagcaatctcaaagagt

SEQ ID NO: 4302479 - DNA, 25 bp, Homo sapien
aaactctattttccagacctggata

SEQ ID NO: 4302480 - DNA, 25 bp, Homo sapien
ctctattttccagacctggatagaa

SEQ ID NO: 4302481 - DNA, 25 bp, Homo sapien
tattttccagacctggatagaaaac

SEQ ID NO: 4302482 - DNA, 25 bp, Homo sapien
gaaaactctattttccagacctgga

SEQ ID NO: 4302483 - DNA, 25 bp, Homo sapien
tcacacggcagggtattccaacaga

SEQ ID NO: 4302484 - DNA, 25 bp, Homo sapien
cacacggcagggtattccaacagac

SEQ ID NO: 4302485 - DNA, 25 bp, Homo sapien
cctcacacggcagggtattccaaca

SEQ ID NO: 4302486 - DNA, 25 bp, Homo sapien
acggcagggtattccaacagacctg

SEQ ID NO: 4302487 - DNA, 25 bp, Homo sapien
tagtcagaaaactgcgactattttt

SEQ ID NO: 4302488 - DNA, 25 bp, Homo sapien
gtgctggtgtgtacatcctcagtgt

SEQ ID NO: 4302489 - DNA, 25 bp, Homo sapien
tcagtgttttccagcgactgtgtcg

SEQ ID NO: 4302490 - DNA, 25 bp, Homo sapien
tgtcggtaagacatttttagtcaga

SEQ ID NO: 4302491 - DNA, 25 bp, Homo sapien
catagttgctacaaacaaaatctgc

SEQ ID NO: 4302492 - DNA, 25 bp, Homo sapien
tgagaataattttcgcaggaagtgg

SEQ ID NO: 4302493 - DNA, 25 bp, Homo sapien
gaataattttcgcaggaagtggtat

SEQ ID NO: 4302494 - DNA, 25 bp, Homo sapien
gaaggttgagaataattttcgcagg

SEQ ID NO: 4302495 - DNA, 25 bp, Homo sapien
gctagaataacttcttctacaccac

SEQ ID NO: 4302496 - DNA, 25 bp, Homo sapien
tatcacatctttggcaatgttgaca

SEQ ID NO: 4302497 - DNA, 25 bp, Homo sapien
tgcaatcagttcatattgtacggac

SEQ ID NO: 4302498 - DNA, 25 bp, Homo sapien
tctacaccactttttatcaacctca

SEQ ID NO: 4302499 - DNA, 25 bp, Homo sapien
aggatgtttgtctatgaggaaaggc

SEQ ID NO: 4302500 - DNA, 25 bp, Homo sapien
cctcgtttatcaatgctttctgtct

SEQ ID NO: 4302501 - DNA, 25 bp, Homo sapien
tgacttccattgcaattgatggtga

SEQ ID NO: 4302502 - DNA, 25 bp, Homo sapien
tcgtttatcaatgctttctgtcttc

SEQ ID NO: 4302503 - DNA, 25 bp, Homo sapien
ttctccggtgcctccaattctaagt

SEQ ID NO: 4302504 - DNA, 25 bp, Homo sapien
ctccaattctaagtctgcaggtctg

SEQ ID NO: 4302505 - DNA, 25 bp, Homo sapien
gcaggtctgagaccactggggccca

SEQ ID NO: 4302506 - DNA, 25 bp, Homo sapien
ggtgcctccaattctaagtctgcag

SEQ ID NO: 4302507 - DNA, 25 bp, Homo sapien
tttgccttgagttaggtgtcaggtc

SEQ ID NO: 4302508 - DNA, 25 bp, Homo sapien
aatcagtttgccttgagttaggtgt

SEQ ID NO: 4302509 - DNA, 25 bp, Homo sapien
tcagtttgccttgagttaggtgtca

SEQ ID NO: 4302510 - DNA, 25 bp, Homo sapien
agtttgccttgagttaggtgtcagg

SEQ ID NO: 4302511 - DNA, 25 bp, Homo sapien
caagctttggcatgaggctcttgag

SEQ ID NO: 4302512 - DNA, 25 bp, Homo sapien
ttgagctccaccttttatgccaagc

SEQ ID NO: 4302513 - DNA, 25 bp, Homo sapien
tccaccttttatgccaagctttggc

SEQ ID NO: 4302514 - DNA, 25 bp, Homo sapien
tgaggctcttgaggacttcaagctc

SEQ ID NO: 4302515 - DNA, 25 bp, Homo sapien
gcaattgtggagcattggtttctcc

SEQ ID NO: 4302516 - DNA, 25 bp, Homo sapien
tattctggcaaagaagctgatcttt

SEQ ID NO: 4302517 - DNA, 25 bp, Homo sapien
tgtaaacctgatccttaactctgct

SEQ ID NO: 4302518 - DNA, 25 bp, Homo sapien
caaagactaagagaagtctcaagga

SEQ ID NO: 4302519 - DNA, 25 bp, Homo sapien
ctttctgcctttacctatcacattg

SEQ ID NO: 4302520 - DNA, 25 bp, Homo sapien
gtactggtgccatctttctttctgc

SEQ ID NO: 4302521 - DNA, 25 bp, Homo sapien
gttctgctagctcaaagtcattctg

SEQ ID NO: 4302522 - DNA, 25 bp, Homo sapien
cagcaaaggcatcatatttagttct

SEQ ID NO: 4302523 - DNA, 25 bp, Homo sapien
tccatcccatcatggatttcatggt

SEQ ID NO: 4302524 - DNA, 25 bp, Homo sapien
tcccatcatggatttcatggtcccc

SEQ ID NO: 4302525 - DNA, 25 bp, Homo sapien
ttcatggtcccccagtatcgtgtgg

SEQ ID NO: 4302526 - DNA, 25 bp, Homo sapien
tcccccagtatcgtgtggtccctaa

SEQ ID NO: 4302527 - DNA, 25 bp, Homo sapien
gcaatcagcttcttacggtctctta

SEQ ID NO: 4302528 - DNA, 25 bp, Homo sapien
ttacaatgggtgacagcttgggctg

SEQ ID NO: 4302529 - DNA, 25 bp, Homo sapien
taatctttttacaatgggtgacagc

SEQ ID NO: 4302530 - DNA, 25 bp, Homo sapien
ctcttaaggtctccagtggcgtcat

SEQ ID NO: 4302531 - DNA, 25 bp, Homo sapien
cacaatcaccactcctaacttttga

SEQ ID NO: 4302532 - DNA, 25 bp, Homo sapien
tcaccactcctaacttttgatgctc

SEQ ID NO: 4302533 - DNA, 25 bp, Homo sapien
tttcccttcttagttattctcacaa

SEQ ID NO: 4302534 - DNA, 25 bp, Homo sapien
tcccttcttagttattctcacaatc

SEQ ID NO: 4302535 - DNA, 25 bp, Homo sapien
cagatagttgtaggtatgcagcgtt

SEQ ID NO: 4302536 - DNA, 25 bp, Homo sapien
gatagttgtaggtatgcagcgttat

SEQ ID NO: 4302537 - DNA, 25 bp, Homo sapien
tagttgtaggtatgcagcgttattt

SEQ ID NO: 4302538 - DNA, 25 bp, Homo sapien
atcagatagttgtaggtatgcagcg

SEQ ID NO: 4302539 - DNA, 25 bp, Homo sapien
tgctcccttgagtagaaattttaat

SEQ ID NO: 4302540 - DNA, 25 bp, Homo sapien
tgttttccctcttgcatgtttcaat

SEQ ID NO: 4302541 - DNA, 25 bp, Homo sapien
atgtttcaatgggtgctcaggataa

SEQ ID NO: 4302542 - DNA, 25 bp, Homo sapien
caggataatctggtaaagttggagc

SEQ ID NO: 4302543 - DNA, 25 bp, Homo sapien
taccacctgggtagatcaaagcaaa

SEQ ID NO: 4302544 - DNA, 25 bp, Homo sapien
gggccccactcttgaatagcatggt

SEQ ID NO: 4302545 - DNA, 25 bp, Homo sapien
cactgggcttacgaatctgctggat

SEQ ID NO: 4302546 - DNA, 25 bp, Homo sapien
ccccaatggaggacgtttgcaaact

SEQ ID NO: 4302547 - DNA, 25 bp, Homo sapien
ctatcccaccattgtcaagtgtgtc

SEQ ID NO: 4302548 - DNA, 25 bp, Homo sapien
ttgtcaagtgtgtcatgcacccatc

SEQ ID NO: 4302549 - DNA, 25 bp, Homo sapien
ttaccattgtcatctatcccaccat

SEQ ID NO: 4302550 - DNA, 25 bp, Homo sapien
gtgtgtcatgcacccatcctaccat

SEQ ID NO: 4302551 - DNA, 25 bp, Homo sapien
tggaaaatgttacagcattccctac

SEQ ID NO: 4302552 - DNA, 25 bp, Homo sapien
ctgtgctcttgctatgggggcctcc

SEQ ID NO: 4302553 - DNA, 25 bp, Homo sapien
gaaaatgttacagcattccctacac

SEQ ID NO: 4302554 - DNA, 25 bp, Homo sapien
tgctcttgctatgggggcctccgaa

SEQ ID NO: 4302555 - DNA, 25 bp, Homo sapien
caatgatagccctgttccacaagct

SEQ ID NO: 4302556 - DNA, 25 bp, Homo sapien
cttgagcttggtagtcagtgttggc

SEQ ID NO: 4302557 - DNA, 25 bp, Homo sapien
acagacttgtttggtgtcacaggcc

SEQ ID NO: 4302558 - DNA, 25 bp, Homo sapien
tgttggcttgaaaatggcgcatgca

SEQ ID NO: 4302559 - DNA, 25 bp, Homo sapien
tctgcatccgtctgcttggaaagac

SEQ ID NO: 4302560 - DNA, 25 bp, Homo sapien
catccgtctgcttggaaagacaaca

SEQ ID NO: 4302561 - DNA, 25 bp, Homo sapien
ctctgcatccgtctgcttggaaaga

SEQ ID NO: 4302562 - DNA, 25 bp, Homo sapien
tgcatccgtctgcttggaaagacaa

SEQ ID NO: 4302563 - DNA, 25 bp, Homo sapien
cctctgacaatgtgcaattgttgtc

SEQ ID NO: 4302564 - DNA, 25 bp, Homo sapien
tgttggaagctcatacatttctgga

SEQ ID NO: 4302565 - DNA, 25 bp, Homo sapien
gttgtctaagctattacactgccat

SEQ ID NO: 4302566 - DNA, 25 bp, Homo sapien
attgttgtctaagctattacactgc

SEQ ID NO: 4302567 - DNA, 25 bp, Homo sapien
ggcaccgggcgcacggctgagcctg

SEQ ID NO: 4302568 - DNA, 25 bp, Homo sapien
gagcctgcaccaatgtctgtgggcc

SEQ ID NO: 4302569 - DNA, 25 bp, Homo sapien
tggacagccgtcttgctgatggtgc

SEQ ID NO: 4302570 - DNA, 25 bp, Homo sapien
gtgccaagcccgctttcccaaacca

SEQ ID NO: 4302571 - DNA, 25 bp, Homo sapien
cctgccccagctcttccctgcccac

SEQ ID NO: 4302572 - DNA, 25 bp, Homo sapien
ttcgcttccccgacgcgctgggttc

SEQ ID NO: 4302573 - DNA, 25 bp, Homo sapien
ccagggtgtcgctcctctggctgct

SEQ ID NO: 4302574 - DNA, 25 bp, Homo sapien
cagagcccagcgttagcgggtgggc

SEQ ID NO: 4302575 - DNA, 25 bp, Homo sapien
ccctcgctgactcgcttcgcttccc

SEQ ID NO: 4302576 - DNA, 25 bp, Homo sapien
acccatagttgagcggaggagccgg

SEQ ID NO: 4302577 - DNA, 25 bp, Homo sapien
tgctggaagcgcgtgttcaactgct

SEQ ID NO: 4302578 - DNA, 25 bp, Homo sapien
ccgggaagacttggccaagctcaga

SEQ ID NO: 4302579 - DNA, 25 bp, Homo sapien
cagaaagttggtcagaactgagaca

SEQ ID NO: 4302580 - DNA, 25 bp, Homo sapien
ttttctgattatacccagaagagcc

SEQ ID NO: 4302581 - DNA, 25 bp, Homo sapien
ggcttttctgattatacccagaaga

SEQ ID NO: 4302582 - DNA, 25 bp, Homo sapien
tctctggccactcctctagggcttt

SEQ ID NO: 4302583 - DNA, 25 bp, Homo sapien
tttctgattatacccagaagagccc

SEQ ID NO: 4302584 - DNA, 25 bp, Homo sapien
gttgtattccacttccgtgaaacca

SEQ ID NO: 4302585 - DNA, 25 bp, Homo sapien
caccctgacgctcttattgcaattt

SEQ ID NO: 4302586 - DNA, 25 bp, Homo sapien
ccatggctttcttcagcgactgggc

SEQ ID NO: 4302587 - DNA, 25 bp, Homo sapien
tcttcagcgactgggctttaggaag

SEQ ID NO: 4302588 - DNA, 25 bp, Homo sapien
tttcatagcgcttggttaaacagca

SEQ ID NO: 4302589 - DNA, 25 bp, Homo sapien
ttttacaaagcaatggagagcagct

SEQ ID NO: 4302590 - DNA, 25 bp, Homo sapien
cagcaagtaatcagcaaaaattgta

SEQ ID NO: 4302591 - DNA, 25 bp, Homo sapien
tgtaaaccggtaatgacagagcact

SEQ ID NO: 4302592 - DNA, 25 bp, Homo sapien
tatctccagttaggcttttcagaac

SEQ ID NO: 4302593 - DNA, 25 bp, Homo sapien
cctctatctccagttaggcttttca

SEQ ID NO: 4302594 - DNA, 25 bp, Homo sapien
tctatctccagttaggcttttcaga

SEQ ID NO: 4302595 - DNA, 25 bp, Homo sapien
gccctctatctccagttaggctttt

SEQ ID NO: 4302596 - DNA, 25 bp, Homo sapien
tcccagtgatcctgtaactttgaat

SEQ ID NO: 4302597 - DNA, 25 bp, Homo sapien
catctcccagtgatcctgtaacttt

SEQ ID NO: 4302598 - DNA, 25 bp, Homo sapien
taatcaacagtgagttcctgctgct

SEQ ID NO: 4302599 - DNA, 25 bp, Homo sapien
gggtcatctcccagtgatcctgtaa

SEQ ID NO: 4302600 - DNA, 25 bp, Homo sapien
ccaaattaacgcacattaaagccat

SEQ ID NO: 4302601 - DNA, 25 bp, Homo sapien
accaaattaacgcacattaaagcca

SEQ ID NO: 4302602 - DNA, 25 bp, Homo sapien
ctgaaagtccaggagatttccattt

SEQ ID NO: 4302603 - DNA, 25 bp, Homo sapien
tgaaagtccaggagatttccatttt

SEQ ID NO: 4302604 - DNA, 25 bp, Homo sapien
aagagacactactgatgcttttagg

SEQ ID NO: 4302605 - DNA, 25 bp, Homo sapien
tattacctgatacactggtgctttg

SEQ ID NO: 4302606 - DNA, 25 bp, Homo sapien
gccaaagtaaaggaccatgtcagcg

SEQ ID NO: 4302607 - DNA, 25 bp, Homo sapien
tcttagattcacctctattacctga

SEQ ID NO: 4302608 - DNA, 25 bp, Homo sapien
cctagaagttgttttctgcaggctc

SEQ ID NO: 4302609 - DNA, 25 bp, Homo sapien
ctagaagttgttttctgcaggctca

SEQ ID NO: 4302610 - DNA, 25 bp, Homo sapien
tagaagttgttttctgcaggctcat

SEQ ID NO: 4302611 - DNA, 25 bp, Homo sapien
ttctccctctcgcctagcctctctt

SEQ ID NO: 4302612 - DNA, 25 bp, Homo sapien
gctggtctcgcattggctgactcca

SEQ ID NO: 4302613 - DNA, 25 bp, Homo sapien
tggtctcgcattggctgactccaac

SEQ ID NO: 4302614 - DNA, 25 bp, Homo sapien
cctgctggtctcgcattggctgact

SEQ ID NO: 4302615 - DNA, 25 bp, Homo sapien
ttaaccaagagttgagttgtttgca

SEQ ID NO: 4302616 - DNA, 25 bp, Homo sapien
acttaaccaagagttgagttgtttg

SEQ ID NO: 4302617 - DNA, 25 bp, Homo sapien
caaccacactaccgttaggagaact

SEQ ID NO: 4302618 - DNA, 25 bp, Homo sapien
cttaaccaagagttgagttgtttgc

SEQ ID NO: 4302619 - DNA, 25 bp, Homo sapien
atcaccattgtctgaactggaaaag

SEQ ID NO: 4302620 - DNA, 25 bp, Homo sapien
caagtaatgggcatccactgagcat

SEQ ID NO: 4302621 - DNA, 25 bp, Homo sapien
ccctggatgaaggaatctataatca

SEQ ID NO: 4302622 - DNA, 25 bp, Homo sapien
tgagcatcaactttgtgcctttccc

SEQ ID NO: 4302623 - DNA, 25 bp, Homo sapien
atcagttctccttgaggcatagtga

SEQ ID NO: 4302624 - DNA, 25 bp, Homo sapien
ttctccttgaggcatagtgatgcct

SEQ ID NO: 4302625 - DNA, 25 bp, Homo sapien
gctgtaactacatcagttctccttg

SEQ ID NO: 4302626 - DNA, 25 bp, Homo sapien
cagttctccttgaggcatagtgatg

SEQ ID NO: 4302627 - DNA, 25 bp, Homo sapien
attgaaatcactatgagctattgtt

SEQ ID NO: 4302628 - DNA, 25 bp, Homo sapien
ttgaaatcactatgagctattgttt

SEQ ID NO: 4302629 - DNA, 25 bp, Homo sapien
ccattgaaatcactatgagctattg

SEQ ID NO: 4302630 - DNA, 25 bp, Homo sapien
cccattgaaatcactatgagctatt

SEQ ID NO: 4302631 - DNA, 25 bp, Homo sapien
gataacatctatggaataaaagtgc

SEQ ID NO: 4302632 - DNA, 25 bp, Homo sapien
gaaaaacacattgcagatcgattgt

SEQ ID NO: 4302633 - DNA, 25 bp, Homo sapien
gcagatcgattgttcattatgataa

SEQ ID NO: 4302634 - DNA, 25 bp, Homo sapien
gatcttaaaaatctaatgtctagaa

SEQ ID NO: 4302635 - DNA, 25 bp, Homo sapien
tgctttgaaagagtgccggcggtca

SEQ ID NO: 4302636 - DNA, 25 bp, Homo sapien
tgttatacagcaaatggactccctg

SEQ ID NO: 4302637 - DNA, 25 bp, Homo sapien
gctttgttacaaggctggccagcga

SEQ ID NO: 4302638 - DNA, 25 bp, Homo sapien
tacaaatgttggcttggcaaggtcc

SEQ ID NO: 4302639 - DNA, 25 bp, Homo sapien
ggggtcacaaagttgcttttggcat

SEQ ID NO: 4302640 - DNA, 25 bp, Homo sapien
cttgacttcctctgatagggggtca

SEQ ID NO: 4302641 - DNA, 25 bp, Homo sapien
acttcctctgatagggggtcacaaa

SEQ ID NO: 4302642 - DNA, 25 bp, Homo sapien
gggggtcacaaagttgcttttggca

SEQ ID NO: 4302643 - DNA, 25 bp, Homo sapien
agaaatccataggacagggccctca

SEQ ID NO: 4302644 - DNA, 25 bp, Homo sapien
tagctcaggtaagccacatggaacc

SEQ ID NO: 4302645 - DNA, 25 bp, Homo sapien
tacatacttagaacaagggtctcag

SEQ ID NO: 4302646 - DNA, 25 bp, Homo sapien
cctttgatgagctcaggatagctca

SEQ ID NO: 4302647 - DNA, 25 bp, Homo sapien
tcagagcttgtgttgaacatggaac

SEQ ID NO: 4302648 - DNA, 25 bp, Homo sapien
gagcttgtgttgaacatggaactca

SEQ ID NO: 4302649 - DNA, 25 bp, Homo sapien
agcttgtgttgaacatggaactcac

SEQ ID NO: 4302650 - DNA, 25 bp, Homo sapien
cagagcttgtgttgaacatggaact

SEQ ID NO: 4302651 - DNA, 25 bp, Homo sapien
gacaagttatggtggccttcttcat

SEQ ID NO: 4302652 - DNA, 25 bp, Homo sapien
gtgtgacaagttatggtggccttct

SEQ ID NO: 4302653 - DNA, 25 bp, Homo sapien
cttgtgtgacaagttatggtggcct

SEQ ID NO: 4302654 - DNA, 25 bp, Homo sapien
tgacaagttatggtggccttcttca

SEQ ID NO: 4302655 - DNA, 25 bp, Homo sapien
tcattcaatgtaatcactagcttca

SEQ ID NO: 4302656 - DNA, 25 bp, Homo sapien
gatcattcaatgtaatcactagctt

SEQ ID NO: 4302657 - DNA, 25 bp, Homo sapien
cattcaatgtaatcactagcttcat

SEQ ID NO: 4302658 - DNA, 25 bp, Homo sapien
atcattcaatgtaatcactagcttc

SEQ ID NO: 4302659 - DNA, 25 bp, Homo sapien
attagcttgaaatatttaggacaga

SEQ ID NO: 4302660 - DNA, 25 bp, Homo sapien
tgtgatatgtaaaacctgagtcgcc

SEQ ID NO: 4302661 - DNA, 25 bp, Homo sapien
gaatgatggttttagctgtgatatg

SEQ ID NO: 4302662 - DNA, 25 bp, Homo sapien
tagggagtttctaaagggactcagc

SEQ ID NO: 4302663 - DNA, 25 bp, Homo sapien
ctggttagctgcgttctttttgttc

SEQ ID NO: 4302664 - DNA, 25 bp, Homo sapien
ggttagctgcgttctttttgttcga

SEQ ID NO: 4302665 - DNA, 25 bp, Homo sapien
tggttagctgcgttctttttgttcg

SEQ ID NO: 4302666 - DNA, 25 bp, Homo sapien
gttattttagccagtttcagcctca

SEQ ID NO: 4302667 - DNA, 25 bp, Homo sapien
ttcagcctcactaaaggatgcagag

SEQ ID NO: 4302668 - DNA, 25 bp, Homo sapien
gatgcagagcatgtactcctaggtg

SEQ ID NO: 4302669 - DNA, 25 bp, Homo sapien
actggacgtacccaaacatctttgg

SEQ ID NO: 4302670 - DNA, 25 bp, Homo sapien
cactgtgacttcaacgctctcccct

SEQ ID NO: 4302671 - DNA, 25 bp, Homo sapien
ctgtgacttcaacgctctcccctct

SEQ ID NO: 4302672 - DNA, 25 bp, Homo sapien
acactgtgacttcaacgctctcccc

SEQ ID NO: 4302673 - DNA, 25 bp, Homo sapien
tgacttcaacgctctcccctctcca

SEQ ID NO: 4302674 - DNA, 25 bp, Homo sapien
aagatccttttgcataagaccctca

SEQ ID NO: 4302675 - DNA, 25 bp, Homo sapien
tcggagccccatccaatgcctcctt

SEQ ID NO: 4302676 - DNA, 25 bp, Homo sapien
gaataagatccttttgcataagacc

SEQ ID NO: 4302677 - DNA, 25 bp, Homo sapien
ttttccaactcagcgtaacttctcg

SEQ ID NO: 4302678 - DNA, 25 bp, Homo sapien
ggcaagctgaaggtgctaaggcctc

SEQ ID NO: 4302679 - DNA, 25 bp, Homo sapien
agctgaaggtgctaaggcctcttct

SEQ ID NO: 4302680 - DNA, 25 bp, Homo sapien
agctgaaggtgctggcaagctgaag

SEQ ID NO: 4302681 - DNA, 25 bp, Homo sapien
caagctgaaggtgctaaggcctctt

SEQ ID NO: 4302682 - DNA, 25 bp, Homo sapien
tatgtttgcgatctaagggcaccac

SEQ ID NO: 4302683 - DNA, 25 bp, Homo sapien
tggtcagtccatctgtgtcaagtgt

SEQ ID NO: 4302684 - DNA, 25 bp, Homo sapien
tttcaaccaaatgctgctagccaga

SEQ ID NO: 4302685 - DNA, 25 bp, Homo sapien
gacgtgttgaacttttgagccctcg

SEQ ID NO: 4302686 - DNA, 25 bp, Homo sapien
actacagaagtaggccagccatggt

SEQ ID NO: 4302687 - DNA, 25 bp, Homo sapien
aactacagaagtaggccagccatgg

SEQ ID NO: 4302688 - DNA, 25 bp, Homo sapien
cttgagaaaccagcaggatgcatgt

SEQ ID NO: 4302689 - DNA, 25 bp, Homo sapien
accttgagaaaccagcaggatgcat

SEQ ID NO: 4302690 - DNA, 25 bp, Homo sapien
ccttgagaaaccagcaggatgcatg

SEQ ID NO: 4302691 - DNA, 25 bp, Homo sapien
actctgcaggtttgtaacaatccac

SEQ ID NO: 4302692 - DNA, 25 bp, Homo sapien
tctgcaggtttgtaacaatccaccc

SEQ ID NO: 4302693 - DNA, 25 bp, Homo sapien
ctctgcaggtttgtaacaatccacc

SEQ ID NO: 4302694 - DNA, 25 bp, Homo sapien
aggtggccccgtcaacatccaggtt

SEQ ID NO: 4302695 - DNA, 25 bp, Homo sapien
gcttcagcaattgctcgccgactag

SEQ ID NO: 4302696 - DNA, 25 bp, Homo sapien
gactagttcctcacaagatcagagg

SEQ ID NO: 4302697 - DNA, 25 bp, Homo sapien
ctcacaagatcagaggtggccccgt

SEQ ID NO: 4302698 - DNA, 25 bp, Homo sapien
ttccatgatcccctgttcctctttc

SEQ ID NO: 4302699 - DNA, 25 bp, Homo sapien
tccatgatcccctgttcctctttct

SEQ ID NO: 4302700 - DNA, 25 bp, Homo sapien
ttcataaactgcatcaagggagcac

SEQ ID NO: 4302701 - DNA, 25 bp, Homo sapien
gcactgcgttgagaaccattacctt

SEQ ID NO: 4302702 - DNA, 25 bp, Homo sapien
caagggagcactgcgttgagaacca

SEQ ID NO: 4302703 - DNA, 25 bp, Homo sapien
tctctgttccaaagcgatacttcat

SEQ ID NO: 4302704 - DNA, 25 bp, Homo sapien
aatagcccaaggagtctttggtcct

SEQ ID NO: 4302705 - DNA, 25 bp, Homo sapien
caaatagcccaaggagtctttggtc

SEQ ID NO: 4302706 - DNA, 25 bp, Homo sapien
gcccaaggagtctttggtcctggcc

SEQ ID NO: 4302707 - DNA, 25 bp, Homo sapien
cagcaaatagcccaaggagtctttg

SEQ ID NO: 4302708 - DNA, 25 bp, Homo sapien
gctctgcctgagctcagagaaaacc

SEQ ID NO: 4302709 - DNA, 25 bp, Homo sapien
gagctctgcctgagctcagagaaaa

SEQ ID NO: 4302710 - DNA, 25 bp, Homo sapien
gagagctctgcctgagctcagagaa

SEQ ID NO: 4302711 - DNA, 25 bp, Homo sapien
cacttctgtgggcctcttcctgcag

SEQ ID NO: 4302712 - DNA, 25 bp, Homo sapien
cacctcaggctcacaggttgatagg

SEQ ID NO: 4302713 - DNA, 25 bp, Homo sapien
acctcaggctcacaggttgatagga

SEQ ID NO: 4302714 - DNA, 25 bp, Homo sapien
ctgggatcaggcgatctcccacctc

SEQ ID NO: 4302715 - DNA, 25 bp, Homo sapien
agtcttttcgttcttgtggttggtg

SEQ ID NO: 4302716 - DNA, 25 bp, Homo sapien
ttggtgggttcatcagcttgggcaa

SEQ ID NO: 4302717 - DNA, 25 bp, Homo sapien
gttgcaacggatcccaaggaagtat

SEQ ID NO: 4302718 - DNA, 25 bp, Homo sapien
actgtctgacgtcaaagttgcaacg

SEQ ID NO: 4302719 - DNA, 25 bp, Homo sapien
cttgtggaccataaataacacggcc

SEQ ID NO: 4302720 - DNA, 25 bp, Homo sapien
gcagatatagataccatagtcaagg

SEQ ID NO: 4302721 - DNA, 25 bp, Homo sapien
tcaaggtaccgccttgctgaagtat

SEQ ID NO: 4302722 - DNA, 25 bp, Homo sapien
ttagtgctacatatgataactgccc

SEQ ID NO: 4302723 - DNA, 25 bp, Homo sapien
tcagaaggttgtatgcccacggagt

SEQ ID NO: 4302724 - DNA, 25 bp, Homo sapien
cagaaggttgtatgcccacggagtc

SEQ ID NO: 4302725 - DNA, 25 bp, Homo sapien
tgaggtggtggctacaagattgcat

SEQ ID NO: 4302726 - DNA, 25 bp, Homo sapien
taagggggctggaaatggtctccat

SEQ ID NO: 4302727 - DNA, 25 bp, Homo sapien
cacactgaaaagagtgaattgtact

SEQ ID NO: 4302728 - DNA, 25 bp, Homo sapien
caaactcatagaactgcacactgaa

SEQ ID NO: 4302729 - DNA, 25 bp, Homo sapien
ggtagctcagcatatggcaatgggc

SEQ ID NO: 4302730 - DNA, 25 bp, Homo sapien
agcatatggcaatgggcactcaagg

SEQ ID NO: 4302731 - DNA, 25 bp, Homo sapien
cagtagggtagctcagcatatggca

SEQ ID NO: 4302732 - DNA, 25 bp, Homo sapien
agcaggccccagtagggtagctcag

SEQ ID NO: 4302733 - DNA, 25 bp, Homo sapien
attttgactgcttttagcatcctgg

SEQ ID NO: 4302734 - DNA, 25 bp, Homo sapien
gaagtttaattattaaagcagcaat

SEQ ID NO: 4302735 - DNA, 25 bp, Homo sapien
cctaaagagcttagggtcagatggg

SEQ ID NO: 4302736 - DNA, 25 bp, Homo sapien
ccaggccctaaagagcttagggtca

SEQ ID NO: 4302737 - DNA, 25 bp, Homo sapien
gtaaagttttcaggtggtcattctc

SEQ ID NO: 4302738 - DNA, 25 bp, Homo sapien
ataagtaaagttttcaggtggtcat

SEQ ID NO: 4302739 - DNA, 25 bp, Homo sapien
agtaaagttttcaggtggtcattct

SEQ ID NO: 4302740 - DNA, 25 bp, Homo sapien
tctgacagcattccataatgttccc

SEQ ID NO: 4302741 - DNA, 25 bp, Homo sapien
ttctgacagcattccataatgttcc

SEQ ID NO: 4302742 - DNA, 25 bp, Homo sapien
tttctgacagcattccataatgttc

SEQ ID NO: 4302743 - DNA, 25 bp, Homo sapien
tgacagcattccataatgttcccat

SEQ ID NO: 4302744 - DNA, 25 bp, Homo sapien
cagtcattggatttgtacgtgttta

SEQ ID NO: 4302745 - DNA, 25 bp, Homo sapien
tagctgtgtacaggacgatcagacc

SEQ ID NO: 4302746 - DNA, 25 bp, Homo sapien
tgtacaggacgatcagaccttttct

SEQ ID NO: 4302747 - DNA, 25 bp, Homo sapien
ggatttgtacgtgtttatagctgtg

SEQ ID NO: 4302748 - DNA, 25 bp, Homo sapien
tggaggaggtggcatattggctctt

SEQ ID NO: 4302749 - DNA, 25 bp, Homo sapien
ttcacaactagtggttggaggaggt

SEQ ID NO: 4302750 - DNA, 25 bp, Homo sapien
gaggtggcatattggctcttctcac

SEQ ID NO: 4302751 - DNA, 25 bp, Homo sapien
gaggaggtggcatattggctcttct

SEQ ID NO: 4302752 - DNA, 25 bp, Homo sapien
caattatatgcacaacaagatggta

SEQ ID NO: 4302753 - DNA, 25 bp, Homo sapien
ggcttggtggatttgccatatttca

SEQ ID NO: 4302754 - DNA, 25 bp, Homo sapien
tctataacagcggtgcctgtcctgg

SEQ ID NO: 4302755 - DNA, 25 bp, Homo sapien
gaacctcgagttgggtcaaatccaa

SEQ ID NO: 4302756 - DNA, 25 bp, Homo sapien
cttatatagagagggtgtgcagaca

SEQ ID NO: 4302757 - DNA, 25 bp, Homo sapien
aaaatcttgtgactctccgtcgtgg

SEQ ID NO: 4302758 - DNA, 25 bp, Homo sapien
gcagacaggtgcttcatcattctca

SEQ ID NO: 4302759 - DNA, 25 bp, Homo sapien
gacatttgtcccaagaacaacattg

SEQ ID NO: 4302760 - DNA, 25 bp, Homo sapien
ataatgtcaaaatctgggtctctct

SEQ ID NO: 4302761 - DNA, 25 bp, Homo sapien
tataatgtcaaaatctgggtctctc

SEQ ID NO: 4302762 - DNA, 25 bp, Homo sapien
ctataatgtcaaaatctgggtctct

SEQ ID NO: 4302763 - DNA, 25 bp, Homo sapien
cagtccacagcttccacggtgaggt

SEQ ID NO: 4302764 - DNA, 25 bp, Homo sapien
cagtctggctgtgtggtaagttcga

SEQ ID NO: 4302765 - DNA, 25 bp, Homo sapien
catggtcattgctgtacaagggtga

SEQ ID NO: 4302766 - DNA, 25 bp, Homo sapien
tataacctgggtgtctccattggct

SEQ ID NO: 4302767 - DNA, 25 bp, Homo sapien
ggctcattctcatcatgcagataca

SEQ ID NO: 4302768 - DNA, 25 bp, Homo sapien
tttataaggctcattctcatcatgc

SEQ ID NO: 4302769 - DNA, 25 bp, Homo sapien
taacattttataaggctcattctca

SEQ ID NO: 4302770 - DNA, 25 bp, Homo sapien
taaggctcattctcatcatgcagat

SEQ ID NO: 4302771 - DNA, 25 bp, Homo sapien
gacttgcaacccagtgtgatttaat

SEQ ID NO: 4302772 - DNA, 25 bp, Homo sapien
aagcaaatttccactgattgtgaag

SEQ ID NO: 4302773 - DNA, 25 bp, Homo sapien
tgtcctcaaagtctataggctaaac

SEQ ID NO: 4302774 - DNA, 25 bp, Homo sapien
tgtgctaatccacacagcatgaaaa

SEQ ID NO: 4302775 - DNA, 25 bp, Homo sapien
cagctttaaatacagggctgaagtc

SEQ ID NO: 4302776 - DNA, 25 bp, Homo sapien
cccaacgtttccggaacagagaatg

SEQ ID NO: 4302777 - DNA, 25 bp, Homo sapien
gctttaaatacagggctgaagtcac

SEQ ID NO: 4302778 - DNA, 25 bp, Homo sapien
aacgtttccggaacagagaatgaat

SEQ ID NO: 4302779 - DNA, 25 bp, Homo sapien
tgttggcgtgtcattctcaacccag

SEQ ID NO: 4302780 - DNA, 25 bp, Homo sapien
agtctcctccattagagagtttgtt

SEQ ID NO: 4302781 - DNA, 25 bp, Homo sapien
caacccagcatgtgacattctcaat

SEQ ID NO: 4302782 - DNA, 25 bp, Homo sapien
cattagagagtttgttggcgtgtca

SEQ ID NO: 4302783 - DNA, 25 bp, Homo sapien
aaagagttgtccagaaccaactggg

SEQ ID NO: 4302784 - DNA, 25 bp, Homo sapien
caaggtcccgacacaagagttttgc

SEQ ID NO: 4302785 - DNA, 25 bp, Homo sapien
cataatggattgtatcaggaggctc

SEQ ID NO: 4302786 - DNA, 25 bp, Homo sapien
ggcctgagctaggagcataatggat

SEQ ID NO: 4302787 - DNA, 25 bp, Homo sapien
tgtagcagtaaacacagttccacgc

SEQ ID NO: 4302788 - DNA, 25 bp, Homo sapien
taggcagttactagaattgctgcac

SEQ ID NO: 4302789 - DNA, 25 bp, Homo sapien
tcacagtcacgagccttaatggaga

SEQ ID NO: 4302790 - DNA, 25 bp, Homo sapien
cattaatgccatgggtataggcagt

SEQ ID NO: 4302791 - DNA, 25 bp, Homo sapien
taatcattccgtggatctagttgaa

SEQ ID NO: 4302792 - DNA, 25 bp, Homo sapien
ctgttgcctggcatactccaatcat

SEQ ID NO: 4302793 - DNA, 25 bp, Homo sapien
tccgtggatctagttgaaaggttaa

SEQ ID NO: 4302794 - DNA, 25 bp, Homo sapien
gcaaagtaatcattccgtggatcta

SEQ ID NO: 4302795 - DNA, 25 bp, Homo sapien
gaatttcttcatccagtgtgatgtc

SEQ ID NO: 4302796 - DNA, 25 bp, Homo sapien
atttcttcatccagtgtgatgtcaa

SEQ ID NO: 4302797 - DNA, 25 bp, Homo sapien
ttggaatttcttcatccagtgtgat

SEQ ID NO: 4302798 - DNA, 25 bp, Homo sapien
tcccaattggaatttcttcatccag

SEQ ID NO: 4302799 - DNA, 25 bp, Homo sapien
ctgtagataagaatggggtccttat

SEQ ID NO: 4302800 - DNA, 25 bp, Homo sapien
gggtccttattgtgtacattgatga

SEQ ID NO: 4302801 - DNA, 25 bp, Homo sapien
ccagagtcaacactttaataaccac

SEQ ID NO: 4302802 - DNA, 25 bp, Homo sapien
ctgtaaacagtcctccagagtcaac

SEQ ID NO: 4302803 - DNA, 25 bp, Homo sapien
taagagtgctcgaaatgatgaaact

SEQ ID NO: 4302804 - DNA, 25 bp, Homo sapien
gaatgaatcctaattgaaagatgaa

SEQ ID NO: 4302805 - DNA, 25 bp, Homo sapien
gggatattaggacagttagatgact

SEQ ID NO: 4302806 - DNA, 25 bp, Homo sapien
gaaagatgaatgttcatatccataa

SEQ ID NO: 4302807 - DNA, 25 bp, Homo sapien
gttggattgagccaaatacgcacca

SEQ ID NO: 4302808 - DNA, 25 bp, Homo sapien
tagaagttggattgagccaaatacg

SEQ ID NO: 4302809 - DNA, 25 bp, Homo sapien
gaagtagaagttggattgagccaaa

SEQ ID NO: 4302810 - DNA, 25 bp, Homo sapien
ggattgagccaaatacgcaccactg

SEQ ID NO: 4302811 - DNA, 25 bp, Homo sapien
ttaaagatactgtattacacggtga

SEQ ID NO: 4302812 - DNA, 25 bp, Homo sapien
tatccagagaggagtattcacctac

SEQ ID NO: 4302813 - DNA, 25 bp, Homo sapien
acacggtgaatgaatttggtgtcac

SEQ ID NO: 4302814 - DNA, 25 bp, Homo sapien
aggtatccagagaggagtattcacc

SEQ ID NO: 4302815 - DNA, 25 bp, Homo sapien
cacccccaaaataatcgtggcttca

SEQ ID NO: 4302816 - DNA, 25 bp, Homo sapien
cccccaaaataatcgtggcttcact

SEQ ID NO: 4302817 - DNA, 25 bp, Homo sapien
gctgctgtggaaattgttccgatgc

SEQ ID NO: 4302818 - DNA, 25 bp, Homo sapien
actgctgctgtggaaattgttccga

SEQ ID NO: 4302819 - DNA, 25 bp, Homo sapien
tgttccgatgctgtcaattataaag

SEQ ID NO: 4302820 - DNA, 25 bp, Homo sapien
cgatgctgtcaattataaagccaga

SEQ ID NO: 4302821 - DNA, 25 bp, Homo sapien
ggtaccaagcccatagtttcctctc

SEQ ID NO: 4302822 - DNA, 25 bp, Homo sapien
tacctgtgtatagccaagattccta

SEQ ID NO: 4302823 - DNA, 25 bp, Homo sapien
cgagacctagagttttgaaatacaa

SEQ ID NO: 4302824 - DNA, 25 bp, Homo sapien
tataaaacctgaggacgagacctag

SEQ ID NO: 4302825 - DNA, 25 bp, Homo sapien
ggactgcaggatttgcattaataat

SEQ ID NO: 4302826 - DNA, 25 bp, Homo sapien
ggatctatgagacagcacaaatgga

SEQ ID NO: 4302827 - DNA, 25 bp, Homo sapien
tctccaaccagagaagcatgaggtg

SEQ ID NO: 4302828 - DNA, 25 bp, Homo sapien
caaatggatggactgcaggatttgc

SEQ ID NO: 4302829 - DNA, 25 bp, Homo sapien
tggggcagcaatcaacacaaaaaac

SEQ ID NO: 4302830 - DNA, 25 bp, Homo sapien
ctggggcagcaatcaacacaaaaaa

SEQ ID NO: 4302831 - DNA, 25 bp, Homo sapien
ggcagcaatcaacacaaaaaacaaa

SEQ ID NO: 4302832 - DNA, 25 bp, Homo sapien
gggcagcaatcaacacaaaaaacaa

SEQ ID NO: 4302833 - DNA, 25 bp, Homo sapien
ccagttgctatttccccacatgcaa

SEQ ID NO: 4302834 - DNA, 25 bp, Homo sapien
tggaaaagcccccagttgctatttc

SEQ ID NO: 4302835 - DNA, 25 bp, Homo sapien
aggatttgcttgagccaggtggaaa

SEQ ID NO: 4302836 - DNA, 25 bp, Homo sapien
ttccccacatgcaaaggtctcccaa

SEQ ID NO: 4302837 - DNA, 25 bp, Homo sapien
ctgcttggttcctgcggttattcat

SEQ ID NO: 4302838 - DNA, 25 bp, Homo sapien
ttaatacaacgtaatagcataatat

SEQ ID NO: 4302839 - DNA, 25 bp, Homo sapien
agcataatataaaacctgggatttc

SEQ ID NO: 4302840 - DNA, 25 bp, Homo sapien
tagcataatataaaacctgggattt

SEQ ID NO: 4302841 - DNA, 25 bp, Homo sapien
tatatttaatacaacgtaatagcat

SEQ ID NO: 4302842 - DNA, 25 bp, Homo sapien
aacccaagtatccttcaatcagtga

SEQ ID NO: 4302843 - DNA, 25 bp, Homo sapien
agtgtggtacattcacatcatggac

SEQ ID NO: 4302844 - DNA, 25 bp, Homo sapien
tcttgaaaggacgagaattacgcaa

SEQ ID NO: 4302845 - DNA, 25 bp, Homo sapien
gacagattcgtagatgccggtttaa

SEQ ID NO: 4302846 - DNA, 25 bp, Homo sapien
gattatcttgctacaccagtatggc

SEQ ID NO: 4302847 - DNA, 25 bp, Homo sapien
agaagccctcctgtcaaacacgcag

SEQ ID NO: 4302848 - DNA, 25 bp, Homo sapien
gagctgtgtctaccaacttactaaa

SEQ ID NO: 4302849 - DNA, 25 bp, Homo sapien
tcctacaagtatagaagcaagccag

SEQ ID NO: 4302850 - DNA, 25 bp, Homo sapien
tacatccaccataatttcactgctc

SEQ ID NO: 4302851 - DNA, 25 bp, Homo sapien
cagttctgtgggatttgacaaatac

SEQ ID NO: 4302852 - DNA, 25 bp, Homo sapien
tcatactctgtcataacatacatcc

SEQ ID NO: 4302853 - DNA, 25 bp, Homo sapien
cacacagcccttctagtatatgtaa

SEQ ID NO: 4302854 - DNA, 25 bp, Homo sapien
catggagaggctttcaaacatgcag

SEQ ID NO: 4302855 - DNA, 25 bp, Homo sapien
tatatgacagccacaatatttggga

SEQ ID NO: 4302856 - DNA, 25 bp, Homo sapien
aatcataggtgctctaactttaggg

SEQ ID NO: 4302857 - DNA, 25 bp, Homo sapien
gatagagtagcacatagaacagaca

SEQ ID NO: 4302858 - DNA, 25 bp, Homo sapien
caatgaatacccaagggagggcctt

SEQ ID NO: 4302859 - DNA, 25 bp, Homo sapien
gagaggtggctaccttgtcaaagac

SEQ ID NO: 4302860 - DNA, 25 bp, Homo sapien
cacctggctcctggatataggaaag

SEQ ID NO: 4302861 - DNA, 25 bp, Homo sapien
gaggtcatgaccataacaaaaggca

SEQ ID NO: 4302862 - DNA, 25 bp, Homo sapien
aaaccaagttctgtcctaccatgag

SEQ ID NO: 4302863 - DNA, 25 bp, Homo sapien
gaatttagggtactctctgggtcag

SEQ ID NO: 4302864 - DNA, 25 bp, Homo sapien
tccaatatagtagccgttagccaca

SEQ ID NO: 4302865 - DNA, 25 bp, Homo sapien
gaaacacactccttcgggccaggag

SEQ ID NO: 4302866 - DNA, 25 bp, Homo sapien
cttaaaactcctggaggacaataag

SEQ ID NO: 4302867 - DNA, 25 bp, Homo sapien
aaaactcctggaggacaataagaat

SEQ ID NO: 4302868 - DNA, 25 bp, Homo sapien
actcctggaggacaataagaatatc

SEQ ID NO: 4302869 - DNA, 25 bp, Homo sapien
taaaactcctggaggacaataagaa

SEQ ID NO: 4302870 - DNA, 25 bp, Homo sapien
tgttgcttcctaccacttaagaata

SEQ ID NO: 4302871 - DNA, 25 bp, Homo sapien
taaacacattatggtcatgtagcta

SEQ ID NO: 4302872 - DNA, 25 bp, Homo sapien
caaatctatactgaagtcattttcc

SEQ ID NO: 4302873 - DNA, 25 bp, Homo sapien
taaatatctcaagagcataccacat

SEQ ID NO: 4302874 - DNA, 25 bp, Homo sapien
tctacctctgagagtttttcatcat

SEQ ID NO: 4302875 - DNA, 25 bp, Homo sapien
gatctgtttccatgcttgcttcctg

SEQ ID NO: 4302876 - DNA, 25 bp, Homo sapien
ggcttaggatctgtttccatgcttg

SEQ ID NO: 4302877 - DNA, 25 bp, Homo sapien
gcttcctgagcttcttctacctctg

SEQ ID NO: 4302878 - DNA, 25 bp, Homo sapien
aagaacatgaaactgtttccgtctc

SEQ ID NO: 4302879 - DNA, 25 bp, Homo sapien
gaaactgtttccgtctcaattccag

SEQ ID NO: 4302880 - DNA, 25 bp, Homo sapien
ttcatggatggtactaagaagaaca

SEQ ID NO: 4302881 - DNA, 25 bp, Homo sapien
tttccaatgtttgctgaagttcatg

SEQ ID NO: 4302882 - DNA, 25 bp, Homo sapien
tcaacactttctttaatgtgtgaaa

SEQ ID NO: 4302883 - DNA, 25 bp, Homo sapien
taatgtgtgaaagatgctctaattc

SEQ ID NO: 4302884 - DNA, 25 bp, Homo sapien
ttcttttcccagagcctctagttcc

SEQ ID NO: 4302885 - DNA, 25 bp, Homo sapien
cttatcttcaacactttctttaatg

SEQ ID NO: 4302886 - DNA, 25 bp, Homo sapien
gacatatagctggtaaggttagagg

SEQ ID NO: 4302887 - DNA, 25 bp, Homo sapien
tcctttcaaagtaaagctctacact

SEQ ID NO: 4302888 - DNA, 25 bp, Homo sapien
taatattgaatatctgacccctcct

SEQ ID NO: 4302889 - DNA, 25 bp, Homo sapien
gcctacggtagttttcgagcattta

SEQ ID NO: 4302890 - DNA, 25 bp, Homo sapien
ggtgctgaatcacttttgccaaagc

SEQ ID NO: 4302891 - DNA, 25 bp, Homo sapien
tctggatggtgctgaatcacttttg

SEQ ID NO: 4302892 - DNA, 25 bp, Homo sapien
gctgaatcacttttgccaaagcatc

SEQ ID NO: 4302893 - DNA, 25 bp, Homo sapien
gatggtgctgaatcacttttgccaa

SEQ ID NO: 4302894 - DNA, 25 bp, Homo sapien
cattatttaggcaaaagggtccaag

SEQ ID NO: 4302895 - DNA, 25 bp, Homo sapien
taggcagtctagaaatgtttgcttg

SEQ ID NO: 4302896 - DNA, 25 bp, Homo sapien
cttgctttgtacttaatgaaaactc

SEQ ID NO: 4302897 - DNA, 25 bp, Homo sapien
gcctctgctgattaaccataacatt

SEQ ID NO: 4302898 - DNA, 25 bp, Homo sapien
ttttcgtattcgttttgcttgaaga

SEQ ID NO: 4302899 - DNA, 25 bp, Homo sapien
tattcgttttgcttgaagaatttgc

SEQ ID NO: 4302900 - DNA, 25 bp, Homo sapien
cgttttgcttgaagaatttgctttt

SEQ ID NO: 4302901 - DNA, 25 bp, Homo sapien
tcgtattcgttttgcttgaagaatt

SEQ ID NO: 4302902 - DNA, 25 bp, Homo sapien
tatcatatactagtaaagttttgcc

SEQ ID NO: 4302903 - DNA, 25 bp, Homo sapien
cagcatacgttggtactggctatat

SEQ ID NO: 4302904 - DNA, 25 bp, Homo sapien
gaaaattcacattgagacagcgtgc

SEQ ID NO: 4302905 - DNA, 25 bp, Homo sapien
tatactagtaaagttttgcccattg

SEQ ID NO: 4302906 - DNA, 25 bp, Homo sapien
ctcttcctgggacccagagttgcac

SEQ ID NO: 4302907 - DNA, 25 bp, Homo sapien
cctcttcctgggacccagagttgca

SEQ ID NO: 4302908 - DNA, 25 bp, Homo sapien
ccctcttcctgggacccagagttgc

SEQ ID NO: 4302909 - DNA, 25 bp, Homo sapien
cttcactagcagattaattctccga

SEQ ID NO: 4302910 - DNA, 25 bp, Homo sapien
ccatctccatcaatgaggagacgct

SEQ ID NO: 4302911 - DNA, 25 bp, Homo sapien
gattaattctccgatcatctccagc

SEQ ID NO: 4302912 - DNA, 25 bp, Homo sapien
gaggagacgcttccgtataacttcg

SEQ ID NO: 4302913 - DNA, 25 bp, Homo sapien
gcaggaaagaagggcaatgttacca

SEQ ID NO: 4302914 - DNA, 25 bp, Homo sapien
tgcaggaaagaagggcaatgttacc

SEQ ID NO: 4302915 - DNA, 25 bp, Homo sapien
ctgcaggaaagaagggcaatgttac

SEQ ID NO: 4302916 - DNA, 25 bp, Homo sapien
caggaaagaagggcaatgttaccat

SEQ ID NO: 4302917 - DNA, 25 bp, Homo sapien
ctcttggtaactttcaagtacaaat

SEQ ID NO: 4302918 - DNA, 25 bp, Homo sapien
gctcttggtaactttcaagtacaaa

SEQ ID NO: 4302919 - DNA, 25 bp, Homo sapien
tcttggtaactttcaagtacaaata

SEQ ID NO: 4302920 - DNA, 25 bp, Homo sapien
tgtcacaccagagacaatcaaactg

SEQ ID NO: 4302921 - DNA, 25 bp, Homo sapien
caagaccattggaataagactcccc

SEQ ID NO: 4302922 - DNA, 25 bp, Homo sapien
catagagaattcaccagaatgcctg

SEQ ID NO: 4302923 - DNA, 25 bp, Homo sapien
gcaaaagctggacaactcgatgtaa

SEQ ID NO: 4302924 - DNA, 25 bp, Homo sapien
tggagtgtcacctgatagaaaaggc

SEQ ID NO: 4302925 - DNA, 25 bp, Homo sapien
ataacgtattaagggtgacagcagc

SEQ ID NO: 4302926 - DNA, 25 bp, Homo sapien
tcctcaaaacaatccgctgatgtgg

SEQ ID NO: 4302927 - DNA, 25 bp, Homo sapien
taagtggcgaggaaacttagctcct

SEQ ID NO: 4302928 - DNA, 25 bp, Homo sapien
gggtctttatacaagtggctaccaa

SEQ ID NO: 4302929 - DNA, 25 bp, Homo sapien
caatctgattaacaccacaccagtg

SEQ ID NO: 4302930 - DNA, 25 bp, Homo sapien
caaaaatgggattaacttcgaggag

SEQ ID NO: 4302931 - DNA, 25 bp, Homo sapien
tcctattgcccttagagatctctgg

SEQ ID NO: 4302932 - DNA, 25 bp, Homo sapien
ggcgctcgggctctggcgagaggag

SEQ ID NO: 4302933 - DNA, 25 bp, Homo sapien
tatagccccgcgctgcctccgggag

SEQ ID NO: 4302934 - DNA, 25 bp, Homo sapien
cagcgggcgcgtgtggcggcgagcg

SEQ ID NO: 4302935 - DNA, 25 bp, Homo sapien
aggccgaagcgctctggcgaagagg

SEQ ID NO: 4302936 - DNA, 25 bp, Homo sapien
gcggcggcggaggtcaaactcccac

SEQ ID NO: 4302937 - DNA, 25 bp, Homo sapien
tcccacaatgcagccgggtaaacag

SEQ ID NO: 4302938 - DNA, 25 bp, Homo sapien
ggcgcaagctgaggcggcggttggc

SEQ ID NO: 4302939 - DNA, 25 bp, Homo sapien
ggaggtcaaactcccacaatgcagc

SEQ ID NO: 4302940 - DNA, 25 bp, Homo sapien
gcgggacccgcgctccccgcgctcc

SEQ ID NO: 4302941 - DNA, 25 bp, Homo sapien
ctataataattggtgctttaataaa

SEQ ID NO: 4302942 - DNA, 25 bp, Homo sapien
taataattggtgctttaataaaagc

SEQ ID NO: 4302943 - DNA, 25 bp, Homo sapien
cttaagggcagccagtcttttggtg

SEQ ID NO: 4302944 - DNA, 25 bp, Homo sapien
taagggcagccagtcttttggtgcc

SEQ ID NO: 4302945 - DNA, 25 bp, Homo sapien
aagggcagccagtcttttggtgcct

SEQ ID NO: 4302946 - DNA, 25 bp, Homo sapien
ggcagccagtcttttggtgcctttc

SEQ ID NO: 4302947 - DNA, 25 bp, Homo sapien
atggcagtgaataagcactggctcc

SEQ ID NO: 4302948 - DNA, 25 bp, Homo sapien
gcacatggcagtgaataagcactgg

SEQ ID NO: 4302949 - DNA, 25 bp, Homo sapien
gcagtgaataagcactggctcctca

SEQ ID NO: 4302950 - DNA, 25 bp, Homo sapien
agtgaataagcactggctcctcagc

SEQ ID NO: 4302951 - DNA, 25 bp, Homo sapien
agttatccaaaagtgtgctcttgtt

SEQ ID NO: 4302952 - DNA, 25 bp, Homo sapien
ttccatgtaatgtagacccagctgc

SEQ ID NO: 4302953 - DNA, 25 bp, Homo sapien
ttatccaaaagtgtgctcttgtttc

SEQ ID NO: 4302954 - DNA, 25 bp, Homo sapien
agctgcttagggcagggaagatcat

SEQ ID NO: 4302955 - DNA, 25 bp, Homo sapien
tttctactgtgtgcatggggattgt

SEQ ID NO: 4302956 - DNA, 25 bp, Homo sapien
ttatggagtttctactgtgtgcatg

SEQ ID NO: 4302957 - DNA, 25 bp, Homo sapien
tctactgtgtgcatggggattgtcc

SEQ ID NO: 4302958 - DNA, 25 bp, Homo sapien
atggagtttctactgtgtgcatggg

SEQ ID NO: 4302959 - DNA, 25 bp, Homo sapien
tgcccgcttgtgattgctgctttgc

SEQ ID NO: 4302960 - DNA, 25 bp, Homo sapien
actaattgcccgcttgtgattgctg

SEQ ID NO: 4302961 - DNA, 25 bp, Homo sapien
gattccaacccactaattgcccgct

SEQ ID NO: 4302962 - DNA, 25 bp, Homo sapien
tgaaaataccggttttctgaagaga

SEQ ID NO: 4302963 - DNA, 25 bp, Homo sapien
acttagaacaccttgatgtagacgt

SEQ ID NO: 4302964 - DNA, 25 bp, Homo sapien
caccttgatgtagacgtgggggcat

SEQ ID NO: 4302965 - DNA, 25 bp, Homo sapien
agaacaccttgatgtagacgtgggg

SEQ ID NO: 4302966 - DNA, 25 bp, Homo sapien
cttagaacaccttgatgtagacgtg

SEQ ID NO: 4302967 - DNA, 25 bp, Homo sapien
cgtctccgcttaagggagccggccg

SEQ ID NO: 4302968 - DNA, 25 bp, Homo sapien
caaacttcgccggagcgagctgaga

SEQ ID NO: 4302969 - DNA, 25 bp, Homo sapien
gcgggaggcgtctccgcttaaggga

SEQ ID NO: 4302970 - DNA, 25 bp, Homo sapien
tccgggggcttgacgtgcaaacttc

SEQ ID NO: 4302971 - DNA, 25 bp, Homo sapien
ctaccccgtgcgtgcgtgagtgtgc

SEQ ID NO: 4302972 - DNA, 25 bp, Homo sapien
gcgtgagtgtgcgtcacactcctgg

SEQ ID NO: 4302973 - DNA, 25 bp, Homo sapien
tgcgtgcgtgagtgtgcgtcacact

SEQ ID NO: 4302974 - DNA, 25 bp, Homo sapien
tgtgcgtcacactcctggccactga

SEQ ID NO: 4302975 - DNA, 25 bp, Homo sapien
catagatgagaatcagcgtggccgt

SEQ ID NO: 4302976 - DNA, 25 bp, Homo sapien
tggccgtgacagtgggcattgtcct

SEQ ID NO: 4302977 - DNA, 25 bp, Homo sapien
cactaacgcgtaggtgcaggaaccc

SEQ ID NO: 4302978 - DNA, 25 bp, Homo sapien
tccttgtaagctcttcactaacgcg

SEQ ID NO: 4302979 - DNA, 25 bp, Homo sapien
cagttgcagcgtgtgggccaaatct

SEQ ID NO: 4302980 - DNA, 25 bp, Homo sapien
gacttttccccagttgcagcgtgtg

SEQ ID NO: 4302981 - DNA, 25 bp, Homo sapien
tccccagttgcagcgtgtgggccaa

SEQ ID NO: 4302982 - DNA, 25 bp, Homo sapien
tgtagcagggacttttccccagttg

SEQ ID NO: 4302983 - DNA, 25 bp, Homo sapien
tgttattgccccagcttccaagagc

SEQ ID NO: 4302984 - DNA, 25 bp, Homo sapien
cagagcacgaatagcgctgttattg

SEQ ID NO: 4302985 - DNA, 25 bp, Homo sapien
gaatagcgctgttattgccccagct

SEQ ID NO: 4302986 - DNA, 25 bp, Homo sapien
gcagttcacatacagagcacgaata

SEQ ID NO: 4302987 - DNA, 25 bp, Homo sapien
tttgaagagattgtataacttgccc

SEQ ID NO: 4302988 - DNA, 25 bp, Homo sapien
tgggcgacagaaaccttgtgtctgg

SEQ ID NO: 4302989 - DNA, 25 bp, Homo sapien
tttgattgagggaaccaggattcag

SEQ ID NO: 4302990 - DNA, 25 bp, Homo sapien
aaaaagtgataatttgaagagattg

SEQ ID NO: 4302991 - DNA, 25 bp, Homo sapien
attttaaagaatcactctggcagcc

SEQ ID NO: 4302992 - DNA, 25 bp, Homo sapien
gactacttaggggacttcttccaga

SEQ ID NO: 4302993 - DNA, 25 bp, Homo sapien
cttccagagttcattgaaagggtgc

SEQ ID NO: 4302994 - DNA, 25 bp, Homo sapien
cagagttcattgaaagggtgctggt

SEQ ID NO: 4302995 - DNA, 25 bp, Homo sapien
tattagatgaaattagactccaccc

SEQ ID NO: 4302996 - DNA, 25 bp, Homo sapien
gttacataagcccaaacatggagca

SEQ ID NO: 4302997 - DNA, 25 bp, Homo sapien
ggtgggcagacccaaatcatgatgc

SEQ ID NO: 4302998 - DNA, 25 bp, Homo sapien
gccaggacgccttgtatgaccatat

SEQ ID NO: 4302999 - DNA, 25 bp, Homo sapien
ggatcagcgtgggtaatcgcagcca

SEQ ID NO: 4303000 - DNA, 25 bp, Homo sapien
agggttctgctgctcaagtagtgga

SEQ ID NO: 4303001 - DNA, 25 bp, Homo sapien
gaatggaaggtagcaagacgcctct

SEQ ID NO: 4303002 - DNA, 25 bp, Homo sapien
gccacagggattagctgctgcaagc

SEQ ID NO: 4303003 - DNA, 25 bp, Homo sapien
tgtgactggccaaagactgtgtgca

SEQ ID NO: 4303004 - DNA, 25 bp, Homo sapien
gtgactggccaaagactgtgtgcat

SEQ ID NO: 4303005 - DNA, 25 bp, Homo sapien
atagctcatccagcaagccgccttt

SEQ ID NO: 4303006 - DNA, 25 bp, Homo sapien
tgagattcgcctaaaacatgatgtc

SEQ ID NO: 4303007 - DNA, 25 bp, Homo sapien
ggaacaccaggccaatgcatcccat

SEQ ID NO: 4303008 - DNA, 25 bp, Homo sapien
tagcgcatcctcatcaagttccaag

SEQ ID NO: 4303009 - DNA, 25 bp, Homo sapien
aagcaaatgcggtgaacgtccggca

SEQ ID NO: 4303010 - DNA, 25 bp, Homo sapien
tcaaaatgccagtagcagtaccagt

SEQ ID NO: 4303011 - DNA, 25 bp, Homo sapien
taccagtggcggctcaggaaagaaa

SEQ ID NO: 4303012 - DNA, 25 bp, Homo sapien
tagcatcggcctcaactgtgtgacg

SEQ ID NO: 4303013 - DNA, 25 bp, Homo sapien
agtgccagccgtgaacaatgtccac

SEQ ID NO: 4303014 - DNA, 25 bp, Homo sapien
taggtcactctccagcagttaggca

SEQ ID NO: 4303015 - DNA, 25 bp, Homo sapien
gatgttagcccaagacaccatgaca

SEQ ID NO: 4303016 - DNA, 25 bp, Homo sapien
ttaggcaccttaactggagaccaga

SEQ ID NO: 4303017 - DNA, 25 bp, Homo sapien
ttgaaatttttgatgcccagacagc

SEQ ID NO: 4303018 - DNA, 25 bp, Homo sapien
tgaggtgctctctgtaggtaaatcc

SEQ ID NO: 4303019 - DNA, 25 bp, Homo sapien
aaagagtcatgttggcttcagttcc

SEQ ID NO: 4303020 - DNA, 25 bp, Homo sapien
aacattactgtattctggccttgca

SEQ ID NO: 4303021 - DNA, 25 bp, Homo sapien
gaggaaccgctgtgtgttagcaaga

SEQ ID NO: 4303022 - DNA, 25 bp, Homo sapien
ttgatttgttcagggtcacagagca

SEQ ID NO: 4303023 - DNA, 25 bp, Homo sapien
tatgcaggtgctcttaagacattgg

SEQ ID NO: 4303024 - DNA, 25 bp, Homo sapien
gaagccaaccatgtagaatctatgc

SEQ ID NO: 4303025 - DNA, 25 bp, Homo sapien
tattcagggaagagaactagaagcc

SEQ ID NO: 4303026 - DNA, 25 bp, Homo sapien
aagcagcatggaggaaaagagcact

SEQ ID NO: 4303027 - DNA, 25 bp, Homo sapien
agaagcagcatggaggaaaagagca

SEQ ID NO: 4303028 - DNA, 25 bp, Homo sapien
acagaagcagcatggaggaaaagag

SEQ ID NO: 4303029 - DNA, 25 bp, Homo sapien
gcagcatggaggaaaagagcactgg

SEQ ID NO: 4303030 - DNA, 25 bp, Homo sapien
tttgtacagggaaagttatgccact

SEQ ID NO: 4303031 - DNA, 25 bp, Homo sapien
cagtactttggaaaagcacaggtct

SEQ ID NO: 4303032 - DNA, 25 bp, Homo sapien
aactaaatggtctcttcaagggatc

SEQ ID NO: 4303033 - DNA, 25 bp, Homo sapien
ggtctctggtcacctctaaaaggca

SEQ ID NO: 4303034 - DNA, 25 bp, Homo sapien
tccttagcgtattttgtgtcaccca

SEQ ID NO: 4303035 - DNA, 25 bp, Homo sapien
ggacacccctgtcttagttgattaa

SEQ ID NO: 4303036 - DNA, 25 bp, Homo sapien
cacaggaggctgttaaccatcaacc

SEQ ID NO: 4303037 - DNA, 25 bp, Homo sapien
aacccagagcccacaacagctttga

SEQ ID NO: 4303038 - DNA, 25 bp, Homo sapien
cattaaggtcactagctgtctttca

SEQ ID NO: 4303039 - DNA, 25 bp, Homo sapien
ttaaggtcactagctgtctttcact

SEQ ID NO: 4303040 - DNA, 25 bp, Homo sapien
gccaaaaagcctaggatctcctctg

SEQ ID NO: 4303041 - DNA, 25 bp, Homo sapien
cctaggatctcctctgacaaatttt

SEQ ID NO: 4303042 - DNA, 25 bp, Homo sapien
tgtgaagtaagctataaaaattcca

SEQ ID NO: 4303043 - DNA, 25 bp, Homo sapien
gcaaatcctttgttagttacatggc

SEQ ID NO: 4303044 - DNA, 25 bp, Homo sapien
tctaaagcaaatcctttgttagtta

SEQ ID NO: 4303045 - DNA, 25 bp, Homo sapien
tattttatacagctgacctgggcac

SEQ ID NO: 4303046 - DNA, 25 bp, Homo sapien
ctctggaaagtttttgaactctgtt

SEQ ID NO: 4303047 - DNA, 25 bp, Homo sapien
agtttttgaactctgtttagtagca

SEQ ID NO: 4303048 - DNA, 25 bp, Homo sapien
tctgtttagtagcagatctcctttc

SEQ ID NO: 4303049 - DNA, 25 bp, Homo sapien
tagcagatctcctttcttgatagtt

SEQ ID NO: 4303050 - DNA, 25 bp, Homo sapien
gtactgccagttcttgctatcaggt

SEQ ID NO: 4303051 - DNA, 25 bp, Homo sapien
aaatttaggaatgccccttattctg

SEQ ID NO: 4303052 - DNA, 25 bp, Homo sapien
tccatgacaatagttgacctacttt

SEQ ID NO: 4303053 - DNA, 25 bp, Homo sapien
cccttattctgagaaatgagagtac

SEQ ID NO: 4303054 - DNA, 25 bp, Homo sapien
tatttaccagtcacattattccatg

SEQ ID NO: 4303055 - DNA, 25 bp, Homo sapien
tttgcagtgtagtctcccggcagca

SEQ ID NO: 4303056 - DNA, 25 bp, Homo sapien
gcagtgtagtctcccggcagcaata

SEQ ID NO: 4303057 - DNA, 25 bp, Homo sapien
tgtagtctcccggcagcaataaacc

SEQ ID NO: 4303058 - DNA, 25 bp, Homo sapien
gtagtctcccggcagcaataaacct

SEQ ID NO: 4303059 - DNA, 25 bp, Homo sapien
tgaagagacgtaacctgaccaaggc

SEQ ID NO: 4303060 - DNA, 25 bp, Homo sapien
taaaaacacctacatgtgggagcca

SEQ ID NO: 4303061 - DNA, 25 bp, Homo sapien
taatgaacagccctcttaagagtgg

SEQ ID NO: 4303062 - DNA, 25 bp, Homo sapien
ggaatactgcggtgtgtgcccctaa

SEQ ID NO: 4303063 - DNA, 25 bp, Homo sapien
gagtcattaccgtagctgcagtgtg

SEQ ID NO: 4303064 - DNA, 25 bp, Homo sapien
gcagtgtggtctacaaagaagtaac

SEQ ID NO: 4303065 - DNA, 25 bp, Homo sapien
cccgttaagattgagggaaccaatg

SEQ ID NO: 4303066 - DNA, 25 bp, Homo sapien
gaccagaattgcagcagcaacctaa

SEQ ID NO: 4303067 - DNA, 25 bp, Homo sapien
ggttaatgacctatatgattccagc

SEQ ID NO: 4303068 - DNA, 25 bp, Homo sapien
cagctgactgtatgcatgaattctc

SEQ ID NO: 4303069 - DNA, 25 bp, Homo sapien
aacaccaaacgcttctgccatatag

SEQ ID NO: 4303070 - DNA, 25 bp, Homo sapien
tcttacatagtatcgataatgaggg

SEQ ID NO: 4303071 - DNA, 25 bp, Homo sapien
tttgacatcactatcagagctcagc

SEQ ID NO: 4303072 - DNA, 25 bp, Homo sapien
gaagaaagcaaagactgatgactcc

SEQ ID NO: 4303073 - DNA, 25 bp, Homo sapien
taaccacggagaacttcttatgcct

SEQ ID NO: 4303074 - DNA, 25 bp, Homo sapien
gggccaggtatgcaaacatcgtctt

SEQ ID NO: 4303075 - DNA, 25 bp, Homo sapien
tggacagggaatacctctctcaggg

SEQ ID NO: 4303076 - DNA, 25 bp, Homo sapien
gaaaagcatggttaagcccaggaac

SEQ ID NO: 4303077 - DNA, 25 bp, Homo sapien
gcagtgaaccagaagacaagaccct

SEQ ID NO: 4303078 - DNA, 25 bp, Homo sapien
ctagatagttatatggcagtgaacc

SEQ ID NO: 4303079 - DNA, 25 bp, Homo sapien
tactcatcatgctcgggaaacctgt

SEQ ID NO: 4303080 - DNA, 25 bp, Homo sapien
taggtccagagaaaacaagagcacg

SEQ ID NO: 4303081 - DNA, 25 bp, Homo sapien
tgagttgagtgatgaccaggagacc

SEQ ID NO: 4303082 - DNA, 25 bp, Homo sapien
tactggatgtgggaacactggaacc

SEQ ID NO: 4303083 - DNA, 25 bp, Homo sapien
gactgtgcaacacttcaagaatctc

SEQ ID NO: 4303084 - DNA, 25 bp, Homo sapien
gtgaaaacagatactgccgaactgc

SEQ ID NO: 4303085 - DNA, 25 bp, Homo sapien
aacggcattcatagagtgaaaacag

SEQ ID NO: 4303086 - DNA, 25 bp, Homo sapien
gatactgccgaactgctggaagact

SEQ ID NO: 4303087 - DNA, 25 bp, Homo sapien
aagaccctgatacacttttaggcgg

SEQ ID NO: 4303088 - DNA, 25 bp, Homo sapien
aacagtgtcaaggaagagttcagct

SEQ ID NO: 4303089 - DNA, 25 bp, Homo sapien
gaatagccacacaataaagaccctg

SEQ ID NO: 4303090 - DNA, 25 bp, Homo sapien
gcctgtttgaaatcacgaatagcca

SEQ ID NO: 4303091 - DNA, 25 bp, Homo sapien
aatatccaatcggtgacccagggcc

SEQ ID NO: 4303092 - DNA, 25 bp, Homo sapien
ccaatcctaaggagatagaatacaa

SEQ ID NO: 4303093 - DNA, 25 bp, Homo sapien
gccttttctgtgtttcgtgtgatga

SEQ ID NO: 4303094 - DNA, 25 bp, Homo sapien
catatgtcttgcgaaaggctgtcag

SEQ ID NO: 4303095 - DNA, 25 bp, Homo sapien
ggtccacgtctatctgccagtcgag

SEQ ID NO: 4303096 - DNA, 25 bp, Homo sapien
tatccggcagaggtactcggccttt

SEQ ID NO: 4303097 - DNA, 25 bp, Homo sapien
ccagtcgagggatttgcacaaggct

SEQ ID NO: 4303098 - DNA, 25 bp, Homo sapien
tcattttattgagtaggtccacgtc

SEQ ID NO: 4303099 - DNA, 25 bp, Homo sapien
ccacaagtcatccaccagtctcttc

SEQ ID NO: 4303100 - DNA, 25 bp, Homo sapien
ctaacatgcaaaaagagggatgtgt

SEQ ID NO: 4303101 - DNA, 25 bp, Homo sapien
cttgtgccctcaagtcaaagtctgc

SEQ ID NO: 4303102 - DNA, 25 bp, Homo sapien
caaagtctgcccacgtatttcaccc

SEQ ID NO: 4303103 - DNA, 25 bp, Homo sapien
catgcgatggcgcttaataatcggc

SEQ ID NO: 4303104 - DNA, 25 bp, Homo sapien
gaggtttgcgtgacggccaatcctg

SEQ ID NO: 4303105 - DNA, 25 bp, Homo sapien
taatcggcttggcaaaacataaacg

SEQ ID NO: 4303106 - DNA, 25 bp, Homo sapien
cataaacgtatgctggtgggaggtt

SEQ ID NO: 4303107 - DNA, 25 bp, Homo sapien
tacacattcactacagaagggccag

SEQ ID NO: 4303108 - DNA, 25 bp, Homo sapien
agtccccactgacagaaagtcacgg

SEQ ID NO: 4303109 - DNA, 25 bp, Homo sapien
atattaatgcctcacgattctcccc

SEQ ID NO: 4303110 - DNA, 25 bp, Homo sapien
gggtaaatattaatgcctcacgatt

SEQ ID NO: 4303111 - DNA, 25 bp, Homo sapien
catcaaaaaaagtccccgcaggctc

SEQ ID NO: 4303112 - DNA, 25 bp, Homo sapien
tggtctctgagaccccgtcagaggg

SEQ ID NO: 4303113 - DNA, 25 bp, Homo sapien
agaccccgctgaggcaagtcgaggt

SEQ ID NO: 4303114 - DNA, 25 bp, Homo sapien
aggcctaggccgctgactcggcgct

SEQ ID NO: 4303115 - DNA, 25 bp, Homo sapien
cgcagctgcgcgatacgcaagtcgg

SEQ ID NO: 4303116 - DNA, 25 bp, Homo sapien
tctccgcggtgctcgggcaggctga

SEQ ID NO: 4303117 - DNA, 25 bp, Homo sapien
atcagctcgtcgcgcacggcagcgt

SEQ ID NO: 4303118 - DNA, 25 bp, Homo sapien
tgttatcgcggacggccgccatcag

SEQ ID NO: 4303119 - DNA, 25 bp, Homo sapien
actgatgggagcttaaaattttttg

SEQ ID NO: 4303120 - DNA, 25 bp, Homo sapien
ggaggagtcggcgaatacgcccggc

SEQ ID NO: 4303121 - DNA, 25 bp, Homo sapien
cctgcggagtcccagagtgggtgca

SEQ ID NO: 4303122 - DNA, 25 bp, Homo sapien
acttggttacgaccggctgcggcag

SEQ ID NO: 4303123 - DNA, 25 bp, Homo sapien
gtttgtcgagtcgttactctcattc

SEQ ID NO: 4303124 - DNA, 25 bp, Homo sapien
tagtttgtcgagtcgttactctcat

SEQ ID NO: 4303125 - DNA, 25 bp, Homo sapien
ttgtcgagtcgttactctcattcat

SEQ ID NO: 4303126 - DNA, 25 bp, Homo sapien
catagtttgtcgagtcgttactctc

SEQ ID NO: 4303127 - DNA, 25 bp, Homo sapien
gcacaaagaggttagggaaacagac

SEQ ID NO: 4303128 - DNA, 25 bp, Homo sapien
tagcctatttagtaggtaagacaaa

SEQ ID NO: 4303129 - DNA, 25 bp, Homo sapien
tgtcgcaaggcctaaatgaaaaccc

SEQ ID NO: 4303130 - DNA, 25 bp, Homo sapien
aaaatcatcttcatgctgcgaggta

SEQ ID NO: 4303131 - DNA, 25 bp, Homo sapien
tcttcatcagtccttaagtgctggt

SEQ ID NO: 4303132 - DNA, 25 bp, Homo sapien
tatttctataccaactttttcttca

SEQ ID NO: 4303133 - DNA, 25 bp, Homo sapien
cttaagtgctggttgatttgggtta

SEQ ID NO: 4303134 - DNA, 25 bp, Homo sapien
ctgtttgagacggatctcaggctgg

SEQ ID NO: 4303135 - DNA, 25 bp, Homo sapien
ctttcctcggaaaagcccagaagtg

SEQ ID NO: 4303136 - DNA, 25 bp, Homo sapien
tattcacagcccctttcctcggaaa

SEQ ID NO: 4303137 - DNA, 25 bp, Homo sapien
tcacagcccctttcctcggaaaagc

SEQ ID NO: 4303138 - DNA, 25 bp, Homo sapien
ttattcacagcccctttcctcggaa

SEQ ID NO: 4303139 - DNA, 25 bp, Homo sapien
gaggtagactgtcttccggtcccac

SEQ ID NO: 4303140 - DNA, 25 bp, Homo sapien
cttcccgcagagcacggcgtgcgga

SEQ ID NO: 4303141 - DNA, 25 bp, Homo sapien
cagagggcagcagtatccaccgctt

SEQ ID NO: 4303142 - DNA, 25 bp, Homo sapien
gagggcagcagtatccaccgcttcc

SEQ ID NO: 4303143 - DNA, 25 bp, Homo sapien
ggccaggtgggtgtgacgacgtgca

SEQ ID NO: 4303144 - DNA, 25 bp, Homo sapien
tgcgttcttcatttcggccttctcc

SEQ ID NO: 4303145 - DNA, 25 bp, Homo sapien
agcccttctggtcttgaggaatctt

SEQ ID NO: 4303146 - DNA, 25 bp, Homo sapien
cactcctctgcgttcttcatttcgg

SEQ ID NO: 4303147 - DNA, 25 bp, Homo sapien
ttctggtcttgaggaatcttctcca

SEQ ID NO: 4303148 - DNA, 25 bp, Homo sapien
ccagacctgctgttcatagattctg

SEQ ID NO: 4303149 - DNA, 25 bp, Homo sapien
acccagacctgctgttcatagattc

SEQ ID NO: 4303150 - DNA, 25 bp, Homo sapien
cagacctgctgttcatagattctga

SEQ ID NO: 4303151 - DNA, 25 bp, Homo sapien
agacctgctgttcatagattctgag

SEQ ID NO: 4303152 - DNA, 25 bp, Homo sapien
ccagtgaggcattccgggtactcta

SEQ ID NO: 4303153 - DNA, 25 bp, Homo sapien
tatacctgcagtggttaatgggcca

SEQ ID NO: 4303154 - DNA, 25 bp, Homo sapien
cttgtcaacaaagggatggcatcca

SEQ ID NO: 4303155 - DNA, 25 bp, Homo sapien
cagaaatggagggacatgcgtctta

SEQ ID NO: 4303156 - DNA, 25 bp, Homo sapien
cctggagataatccacttggttatc

SEQ ID NO: 4303157 - DNA, 25 bp, Homo sapien
gaacgtgatattttctccgcctcct

SEQ ID NO: 4303158 - DNA, 25 bp, Homo sapien
tcagcggtcttttctaggcaagaaa

SEQ ID NO: 4303159 - DNA, 25 bp, Homo sapien
ggttatccgtggatgtgaacataat

SEQ ID NO: 4303160 - DNA, 25 bp, Homo sapien
cagacactgtgtctccttgtggttt

SEQ ID NO: 4303161 - DNA, 25 bp, Homo sapien
tgcctcaaatactcactgccctgga

SEQ ID NO: 4303162 - DNA, 25 bp, Homo sapien
ccagcttggtgtacaaacgttatca

SEQ ID NO: 4303163 - DNA, 25 bp, Homo sapien
tctggctgcgtaactccaatagctg

SEQ ID NO: 4303164 - DNA, 25 bp, Homo sapien
aatgtctaacatgctggaatccaac

SEQ ID NO: 4303165 - DNA, 25 bp, Homo sapien
tgccaagtctcaatcaaaaggtgcc

SEQ ID NO: 4303166 - DNA, 25 bp, Homo sapien
ggtataaatatgattggcctccagc

SEQ ID NO: 4303167 - DNA, 25 bp, Homo sapien
tggtcctcgtcctttcctagatagt

SEQ ID NO: 4303168 - DNA, 25 bp, Homo sapien
tccagcactggccaactttgaatct

SEQ ID NO: 4303169 - DNA, 25 bp, Homo sapien
gcccatcttcaatagtttcaccacc

SEQ ID NO: 4303170 - DNA, 25 bp, Homo sapien
gttcttcccattgcccatcttcaat

SEQ ID NO: 4303171 - DNA, 25 bp, Homo sapien
ctccctcctggttggttccaggttg

SEQ ID NO: 4303172 - DNA, 25 bp, Homo sapien
tcttcaatagtttcaccaccctgcc

SEQ ID NO: 4303173 - DNA, 25 bp, Homo sapien
tagccagtgtatcatgtgtgtgcac

SEQ ID NO: 4303174 - DNA, 25 bp, Homo sapien
cctttgtgacggcagatgatggatg

SEQ ID NO: 4303175 - DNA, 25 bp, Homo sapien
taaaatggaattgatctgcctacac

SEQ ID NO: 4303176 - DNA, 25 bp, Homo sapien
ggcaggccttgggtccaattatgtt

SEQ ID NO: 4303177 - DNA, 25 bp, Homo sapien
tacagctgttcggtgaccctagagg

SEQ ID NO: 4303178 - DNA, 25 bp, Homo sapien
gacatatatctcctgggtgaggttg

SEQ ID NO: 4303179 - DNA, 25 bp, Homo sapien
ggagagcacatgtttctgggtgaca

SEQ ID NO: 4303180 - DNA, 25 bp, Homo sapien
gaggactgccccgatgatgtcagga

SEQ ID NO: 4303181 - DNA, 25 bp, Homo sapien
tttgagcaacacatcgaggaggaag

SEQ ID NO: 4303182 - DNA, 25 bp, Homo sapien
caaaagttctgagctccagtctgag

SEQ ID NO: 4303183 - DNA, 25 bp, Homo sapien
tttaacacagggcaggataccagtt

SEQ ID NO: 4303184 - DNA, 25 bp, Homo sapien
aatgcttagatactgctccgtgtgg

SEQ ID NO: 4303185 - DNA, 25 bp, Homo sapien
caattagcactagacccatgaaaga

SEQ ID NO: 4303186 - DNA, 25 bp, Homo sapien
tgtccttgcttgctcaggcaccttc

SEQ ID NO: 4303187 - DNA, 25 bp, Homo sapien
taattcagcggcagatttttgccta

SEQ ID NO: 4303188 - DNA, 25 bp, Homo sapien
cctaagtgtgccctgattgtgtcct

SEQ ID NO: 4303189 - DNA, 25 bp, Homo sapien
ggtggaattcatacagtccatgaag

SEQ ID NO: 4303190 - DNA, 25 bp, Homo sapien
agctgggtggaattcatacagtcca

SEQ ID NO: 4303191 - DNA, 25 bp, Homo sapien
gtcaccagctgggtggaattcatac

SEQ ID NO: 4303192 - DNA, 25 bp, Homo sapien
tacagtccatgaagtaataggaaga

SEQ ID NO: 4303193 - DNA, 25 bp, Homo sapien
gagaaaagaactcattcagggcaga

SEQ ID NO: 4303194 - DNA, 25 bp, Homo sapien
caagtgtgacagaaaagacctgtgc

SEQ ID NO: 4303195 - DNA, 25 bp, Homo sapien
agagacaactcaagagacaagctgg

SEQ ID NO: 4303196 - DNA, 25 bp, Homo sapien
ccttcggtgtttccttgatagacag

SEQ ID NO: 4303197 - DNA, 25 bp, Homo sapien
tggcattcacatgcagggtagtgac

SEQ ID NO: 4303198 - DNA, 25 bp, Homo sapien
ggactgagcccttagcatacaagga

SEQ ID NO: 4303199 - DNA, 25 bp, Homo sapien
cagtatctactttacacatagggca

SEQ ID NO: 4303200 - DNA, 25 bp, Homo sapien
cagatgagtatttgggaagcagacc

SEQ ID NO: 4303201 - DNA, 25 bp, Homo sapien
taaagactttcccatggtgagaggg

SEQ ID NO: 4303202 - DNA, 25 bp, Homo sapien
cttgttgctcctgtgctggactcca

SEQ ID NO: 4303203 - DNA, 25 bp, Homo sapien
ttgttgctcctgtgctggactccac

SEQ ID NO: 4303204 - DNA, 25 bp, Homo sapien
ccccatacattctcttagcttccac

SEQ ID NO: 4303205 - DNA, 25 bp, Homo sapien
ctccccatacattctcttagcttcc

SEQ ID NO: 4303206 - DNA, 25 bp, Homo sapien
ggctcccagtcagtgttaatgctgc

SEQ ID NO: 4303207 - DNA, 25 bp, Homo sapien
taatgctgccctaaccagaacacag

SEQ ID NO: 4303208 - DNA, 25 bp, Homo sapien
cctaatgttgtggatcagacacggg

SEQ ID NO: 4303209 - DNA, 25 bp, Homo sapien
tgaatttacatgctgccttggtcct

SEQ ID NO: 4303210 - DNA, 25 bp, Homo sapien
caaaaggtggcgatctgaaactgcc

SEQ ID NO: 4303211 - DNA, 25 bp, Homo sapien
cattttacagggcacggatctcaag

SEQ ID NO: 4303212 - DNA, 25 bp, Homo sapien
tttagaaaagcttggtcagtgacct

SEQ ID NO: 4303213 - DNA, 25 bp, Homo sapien
ggaggcttggctactgagtcttgca

SEQ ID NO: 4303214 - DNA, 25 bp, Homo sapien
tctacggcaagagaaccaagagtgg

SEQ ID NO: 4303215 - DNA, 25 bp, Homo sapien
ggccctactcacaggaggagcttgt

SEQ ID NO: 4303216 - DNA, 25 bp, Homo sapien
gatcccacaactatatgacagaagg

SEQ ID NO: 4303217 - DNA, 25 bp, Homo sapien
tagctagtagtacccaagaagcaga

SEQ ID NO: 4303218 - DNA, 25 bp, Homo sapien
tggccatgtgtcagtttttaggcca

SEQ ID NO: 4303219 - DNA, 25 bp, Homo sapien
actggccatgtgtcagtttttaggc

SEQ ID NO: 4303220 - DNA, 25 bp, Homo sapien
ctctgggcatctagacttatgcctc

SEQ ID NO: 4303221 - DNA, 25 bp, Homo sapien
gcatctagacttatgcctccagacc

SEQ ID NO: 4303222 - DNA, 25 bp, Homo sapien
ttaatacatcccgaatggagtgcca

SEQ ID NO: 4303223 - DNA, 25 bp, Homo sapien
tatactgaaaagagatcacgctcac

SEQ ID NO: 4303224 - DNA, 25 bp, Homo sapien
gaaacctgccactttagtagcacgg

SEQ ID NO: 4303225 - DNA, 25 bp, Homo sapien
tagagttaattctccggaggctcgg

SEQ ID NO: 4303226 - DNA, 25 bp, Homo sapien
cactgagatacaccgggcactacat

SEQ ID NO: 4303227 - DNA, 25 bp, Homo sapien
accgggcactacatcgacagtacat

SEQ ID NO: 4303228 - DNA, 25 bp, Homo sapien
cagatggccactgagatacaccggg

SEQ ID NO: 4303229 - DNA, 25 bp, Homo sapien
tggcagatggccactgagatacacc

SEQ ID NO: 4303230 - DNA, 25 bp, Homo sapien
tttcaactgccacaatccattaagg

SEQ ID NO: 4303231 - DNA, 25 bp, Homo sapien
ttcaactgccacaatccattaaggg

SEQ ID NO: 4303232 - DNA, 25 bp, Homo sapien
cactacaggtgggtcatccgatgga

SEQ ID NO: 4303233 - DNA, 25 bp, Homo sapien
ggtgggtcatccgatggattatttc

SEQ ID NO: 4303234 - DNA, 25 bp, Homo sapien
caccggttggtttctctaattggca

SEQ ID NO: 4303235 - DNA, 25 bp, Homo sapien
tacaatctctgggagctcttcgagg

SEQ ID NO: 4303236 - DNA, 25 bp, Homo sapien
aataaattctactgagggtgggagc

SEQ ID NO: 4303237 - DNA, 25 bp, Homo sapien
aaccggttgtcaggctaaggcagca

SEQ ID NO: 4303238 - DNA, 25 bp, Homo sapien
gctccgctggcgcataaattggtca

SEQ ID NO: 4303239 - DNA, 25 bp, Homo sapien
tcttttaaccgggagatggcctcgc

SEQ ID NO: 4303240 - DNA, 25 bp, Homo sapien
gaaatagccctcgttgtcagactct

SEQ ID NO: 4303241 - DNA, 25 bp, Homo sapien
gaaaatcgggataggtgctcctggc

SEQ ID NO: 4303242 - DNA, 25 bp, Homo sapien
atagtggaatgccaaccgctgtcag

SEQ ID NO: 4303243 - DNA, 25 bp, Homo sapien
ccgctgtcagtagagtaagttcaca

SEQ ID NO: 4303244 - DNA, 25 bp, Homo sapien
aaccattggaggtagagtgcttcac

SEQ ID NO: 4303245 - DNA, 25 bp, Homo sapien
tattacccgaatgcattcaggagga

SEQ ID NO: 4303246 - DNA, 25 bp, Homo sapien
cctctagaaagggtagttctgtggt

SEQ ID NO: 4303247 - DNA, 25 bp, Homo sapien
tctagaaagggtagttctgtggtta

SEQ ID NO: 4303248 - DNA, 25 bp, Homo sapien
agggtagttctgtggttactttcat

SEQ ID NO: 4303249 - DNA, 25 bp, Homo sapien
ttgcctctagaaagggtagttctgt

SEQ ID NO: 4303250 - DNA, 25 bp, Homo sapien
ttacgcatgttgtcatatatgaaat

SEQ ID NO: 4303251 - DNA, 25 bp, Homo sapien
tttaaagcacttttacgcatgttgt

SEQ ID NO: 4303252 - DNA, 25 bp, Homo sapien
gcacttttacgcatgttgtcatata

SEQ ID NO: 4303253 - DNA, 25 bp, Homo sapien
aaagcacttttacgcatgttgtcat

SEQ ID NO: 4303254 - DNA, 25 bp, Homo sapien
gaattgcagaggatcttgcttctac

SEQ ID NO: 4303255 - DNA, 25 bp, Homo sapien
gaaatccaggacataaccaagagag

SEQ ID NO: 4303256 - DNA, 25 bp, Homo sapien
aaatccaggacataaccaagagaga

SEQ ID NO: 4303257 - DNA, 25 bp, Homo sapien
aatccaggacataaccaagagagaa

SEQ ID NO: 4303258 - DNA, 25 bp, Homo sapien
gggcctgtttctcatccacagactc

SEQ ID NO: 4303259 - DNA, 25 bp, Homo sapien
ttgtcttcctcacttagggaccaaa

SEQ ID NO: 4303260 - DNA, 25 bp, Homo sapien
cttcctcacttagggaccaaagctg

SEQ ID NO: 4303261 - DNA, 25 bp, Homo sapien
aacttccattactgtactctcctca

SEQ ID NO: 4303262 - DNA, 25 bp, Homo sapien
tcccttgccaaggtgtgtagatgag

SEQ ID NO: 4303263 - DNA, 25 bp, Homo sapien
tcagcaatgctgaaaaattaccctg

SEQ ID NO: 4303264 - DNA, 25 bp, Homo sapien
cctgttaccttctggcattgcacaa

SEQ ID NO: 4303265 - DNA, 25 bp, Homo sapien
aaaggcatggccttgacacaacaat

SEQ ID NO: 4303266 - DNA, 25 bp, Homo sapien
cattcacagctgtgctcgcatgctt

SEQ ID NO: 4303267 - DNA, 25 bp, Homo sapien
ggcacatcatcttggactgccacct

SEQ ID NO: 4303268 - DNA, 25 bp, Homo sapien
gcaaacagacaaatcaacaagccag

SEQ ID NO: 4303269 - DNA, 25 bp, Homo sapien
gcatgcttctctttagcattggcaa

SEQ ID NO: 4303270 - DNA, 25 bp, Homo sapien
ccactctgaaagctgagtgactttg

SEQ ID NO: 4303271 - DNA, 25 bp, Homo sapien
gcttgtattagactggcagcctggt

SEQ ID NO: 4303272 - DNA, 25 bp, Homo sapien
catatgcacaggttcaaatccctgc

SEQ ID NO: 4303273 - DNA, 25 bp, Homo sapien
tgcatggacaagctacaactcagag

SEQ ID NO: 4303274 - DNA, 25 bp, Homo sapien
ctgttgcattagacagggccaggga

SEQ ID NO: 4303275 - DNA, 25 bp, Homo sapien
ggtctgctctgtgggcgtcatgtcc

SEQ ID NO: 4303276 - DNA, 25 bp, Homo sapien
actgatgggatgacgggtccgacac

SEQ ID NO: 4303277 - DNA, 25 bp, Homo sapien
ctgtgggcgtcatgtcctctgtgta

SEQ ID NO: 4303278 - DNA, 25 bp, Homo sapien
tgagtggacaagcccccttcctctt

SEQ ID NO: 4303279 - DNA, 25 bp, Homo sapien
ctgagtggacaagcccccttcctct

SEQ ID NO: 4303280 - DNA, 25 bp, Homo sapien
ccaattttggcactgcgccgggact

SEQ ID NO: 4303281 - DNA, 25 bp, Homo sapien
cagaaacaggtctcagtggcatgcc

SEQ ID NO: 4303282 - DNA, 25 bp, Homo sapien
aatatctggccctgcttcgggagga

SEQ ID NO: 4303283 - DNA, 25 bp, Homo sapien
tgcaggcccgtgagcagaatatctg

SEQ ID NO: 4303284 - DNA, 25 bp, Homo sapien
tgagaactgggcctactgaccactc

SEQ ID NO: 4303285 - DNA, 25 bp, Homo sapien
gggctagaaacagacaaccccgagc

SEQ ID NO: 4303286 - DNA, 25 bp, Homo sapien
tgacggccatctgcttgggttcaaa

SEQ ID NO: 4303287 - DNA, 25 bp, Homo sapien
tgcgttaggtctgaaagcctgcctc

SEQ ID NO: 4303288 - DNA, 25 bp, Homo sapien
tcgaagcagtggcaacagtagggtc

SEQ ID NO: 4303289 - DNA, 25 bp, Homo sapien
tccttcatgatgtagcgctggccgc

SEQ ID NO: 4303290 - DNA, 25 bp, Homo sapien
tattctgcatacaaggactcgaagc

SEQ ID NO: 4303291 - DNA, 25 bp, Homo sapien
tgtttcatgtgccagtgtcgcccct

SEQ ID NO: 4303292 - DNA, 25 bp, Homo sapien
gagacctccacgctcagtaaagcag

SEQ ID NO: 4303293 - DNA, 25 bp, Homo sapien
cattctagaaaccagggatgggtgg

SEQ ID NO: 4303294 - DNA, 25 bp, Homo sapien
tagggccagttatatgtcacttggg

SEQ ID NO: 4303295 - DNA, 25 bp, Homo sapien
catgtgttggctatggtgcaatgaa

SEQ ID NO: 4303296 - DNA, 25 bp, Homo sapien
gcgtgacgcaaacacagcgatgtct

SEQ ID NO: 4303297 - DNA, 25 bp, Homo sapien
tgcatacgaagcacggcgggtgcca

SEQ ID NO: 4303298 - DNA, 25 bp, Homo sapien
ccaggagctcattgcagacagtgca

SEQ ID NO: 4303299 - DNA, 25 bp, Homo sapien
gcggcttcaggcactcagcatggtg

SEQ ID NO: 4303300 - DNA, 25 bp, Homo sapien
aaaggacaaccaccattagctggct

SEQ ID NO: 4303301 - DNA, 25 bp, Homo sapien
tgttcaaagcagtcactatgcttcc

SEQ ID NO: 4303302 - DNA, 25 bp, Homo sapien
gaaacatcagtagtcacactagccc

SEQ ID NO: 4303303 - DNA, 25 bp, Homo sapien
catctcccagtgctgtgcataaatg

SEQ ID NO: 4303304 - DNA, 25 bp, Homo sapien
cattttctcaagttccctcttgatc

SEQ ID NO: 4303305 - DNA, 25 bp, Homo sapien
cttctcactcattttctcaagttcc

SEQ ID NO: 4303306 - DNA, 25 bp, Homo sapien
tcactcattttctcaagttccctct

SEQ ID NO: 4303307 - DNA, 25 bp, Homo sapien
tcattttctcaagttccctcttgat

SEQ ID NO: 4303308 - DNA, 25 bp, Homo sapien
ttcagctctcaaggggtctacgcag

SEQ ID NO: 4303309 - DNA, 25 bp, Homo sapien
tctttgatccagttaacatatcttc

SEQ ID NO: 4303310 - DNA, 25 bp, Homo sapien
ctcttctttgatccagttaacatat

SEQ ID NO: 4303311 - DNA, 25 bp, Homo sapien
gttaacatatcttcagctctcaagg

SEQ ID NO: 4303312 - DNA, 25 bp, Homo sapien
tcacaaatagctcctgtcatggtga

SEQ ID NO: 4303313 - DNA, 25 bp, Homo sapien
aagttttcgcgtttcctctggctgc

SEQ ID NO: 4303314 - DNA, 25 bp, Homo sapien
gttcacaaatagctcctgtcatggt

SEQ ID NO: 4303315 - DNA, 25 bp, Homo sapien
tgacattcccgcggcccaagttttc

SEQ ID NO: 4303316 - DNA, 25 bp, Homo sapien
tctccaggactgttgacataaggga

SEQ ID NO: 4303317 - DNA, 25 bp, Homo sapien
tcattgtcatgtggcggcagctggt

SEQ ID NO: 4303318 - DNA, 25 bp, Homo sapien
ggtgtagtagctgcttgattcgcag

SEQ ID NO: 4303319 - DNA, 25 bp, Homo sapien
tctgggagacagctatagtactggt

SEQ ID NO: 4303320 - DNA, 25 bp, Homo sapien
aaaccatgtgcctattcccacttac

SEQ ID NO: 4303321 - DNA, 25 bp, Homo sapien
agatgacttgcccattactcaaacc

SEQ ID NO: 4303322 - DNA, 25 bp, Homo sapien
tactcaaaccatgtgcctattccca

SEQ ID NO: 4303323 - DNA, 25 bp, Homo sapien
tgcccattactcaaaccatgtgcct

SEQ ID NO: 4303324 - DNA, 25 bp, Homo sapien
agatgattcccccagcaggatgtaa

SEQ ID NO: 4303325 - DNA, 25 bp, Homo sapien
gatgattcccccagcaggatgtaac

SEQ ID NO: 4303326 - DNA, 25 bp, Homo sapien
tgattcccccagcaggatgtaactg

SEQ ID NO: 4303327 - DNA, 25 bp, Homo sapien
aagatgattcccccagcaggatgta

SEQ ID NO: 4303328 - DNA, 25 bp, Homo sapien
tcatccatatctgggatttttccct

SEQ ID NO: 4303329 - DNA, 25 bp, Homo sapien
catccttaaagcaagagtcaggcaa

SEQ ID NO: 4303330 - DNA, 25 bp, Homo sapien
gaaattcatccttaaagcaagagtc

SEQ ID NO: 4303331 - DNA, 25 bp, Homo sapien
aagagtcaggcaaatcatccatatc

SEQ ID NO: 4303332 - DNA, 25 bp, Homo sapien
cattcctgtttacgactgttaggac

SEQ ID NO: 4303333 - DNA, 25 bp, Homo sapien
taaaaattgtcactaacatgaggat

SEQ ID NO: 4303334 - DNA, 25 bp, Homo sapien
gaggatttttgcacatcccacaaca

SEQ ID NO: 4303335 - DNA, 25 bp, Homo sapien
tactttatgaggctcattcaaccct

SEQ ID NO: 4303336 - DNA, 25 bp, Homo sapien
tggggaaagcaccaagcagctaatt

SEQ ID NO: 4303337 - DNA, 25 bp, Homo sapien
ggggaaagcaccaagcagctaattt

SEQ ID NO: 4303338 - DNA, 25 bp, Homo sapien
ctggggaaagcaccaagcagctaat

SEQ ID NO: 4303339 - DNA, 25 bp, Homo sapien
caggtataaaaaagcacgcccagtc

SEQ ID NO: 4303340 - DNA, 25 bp, Homo sapien
tgatgccgggttctgaagagagccc

SEQ ID NO: 4303341 - DNA, 25 bp, Homo sapien
gaaaagtccctgtgccatatgcctc

SEQ ID NO: 4303342 - DNA, 25 bp, Homo sapien
caaaggcagggtctgtataagcccc

SEQ ID NO: 4303343 - DNA, 25 bp, Homo sapien
catggccagtagatctggaccccga

SEQ ID NO: 4303344 - DNA, 25 bp, Homo sapien
cctgtccattgcctagagcacagtc

SEQ ID NO: 4303345 - DNA, 25 bp, Homo sapien
gatactgtctaaggctggcccaagt

SEQ ID NO: 4303346 - DNA, 25 bp, Homo sapien
ggcctgagagcccttcttaactggt

SEQ ID NO: 4303347 - DNA, 25 bp, Homo sapien
gctgaccacagaaacgatgaacaca

SEQ ID NO: 4303348 - DNA, 25 bp, Homo sapien
caataggtctgcgtggctgaccaca

SEQ ID NO: 4303349 - DNA, 25 bp, Homo sapien
agatacagtagattcccaataggtc

SEQ ID NO: 4303350 - DNA, 25 bp, Homo sapien
gaccacagaaacgatgaacacattt

SEQ ID NO: 4303351 - DNA, 25 bp, Homo sapien
taaagccaaaatgaacagacagtaa

SEQ ID NO: 4303352 - DNA, 25 bp, Homo sapien
gccaaaatgaacagacagtaagtga

SEQ ID NO: 4303353 - DNA, 25 bp, Homo sapien
agccaaaatgaacagacagtaagtg

SEQ ID NO: 4303354 - DNA, 25 bp, Homo sapien
ccatcatgttgaactcccctaggat

SEQ ID NO: 4303355 - DNA, 25 bp, Homo sapien
tactcaggaagcaatttaggaaaca

SEQ ID NO: 4303356 - DNA, 25 bp, Homo sapien
aatttcattacccaagcaataggag

SEQ ID NO: 4303357 - DNA, 25 bp, Homo sapien
gagtaaatagggatgggctgctcat

SEQ ID NO: 4303358 - DNA, 25 bp, Homo sapien
atgcctggcctcattttaaccattt

SEQ ID NO: 4303359 - DNA, 25 bp, Homo sapien
tacaattcagtggcactgggtacat

SEQ ID NO: 4303360 - DNA, 25 bp, Homo sapien
ccatgcctggcctcattttaaccat

SEQ ID NO: 4303361 - DNA, 25 bp, Homo sapien
agtggcactgggtacattcacaata

SEQ ID NO: 4303362 - DNA, 25 bp, Homo sapien
actgaatttctgaatactaaacatt

SEQ ID NO: 4303363 - DNA, 25 bp, Homo sapien
catgcctgactgaagattatctaac

SEQ ID NO: 4303364 - DNA, 25 bp, Homo sapien
tactaaacattcctcctaggagaaa

SEQ ID NO: 4303365 - DNA, 25 bp, Homo sapien
tcatgcctgactgaagattatctaa

SEQ ID NO: 4303366 - DNA, 25 bp, Homo sapien
gagaaaatgagtcagacagtgtgtc

SEQ ID NO: 4303367 - DNA, 25 bp, Homo sapien
tgatttttattacgtgttgggaaca

SEQ ID NO: 4303368 - DNA, 25 bp, Homo sapien
cagtgtgtctacacttacatttaag

SEQ ID NO: 4303369 - DNA, 25 bp, Homo sapien
ttttctgtggtaaattctctgaaat

SEQ ID NO: 4303370 - DNA, 25 bp, Homo sapien
caggtcccagctgcgtctgatacca

SEQ ID NO: 4303371 - DNA, 25 bp, Homo sapien
caattggccattctagtctggaaag

SEQ ID NO: 4303372 - DNA, 25 bp, Homo sapien
ggcccacaccaatgactgactgatt

SEQ ID NO: 4303373 - DNA, 25 bp, Homo sapien
tcataaatatagctggacagtggca

SEQ ID NO: 4303374 - DNA, 25 bp, Homo sapien
cagataatcccaaagcctgcttggg

SEQ ID NO: 4303375 - DNA, 25 bp, Homo sapien
gaataacttccacaggctccacaga

SEQ ID NO: 4303376 - DNA, 25 bp, Homo sapien
tcagaatcaagaggctccatctggg

SEQ ID NO: 4303377 - DNA, 25 bp, Homo sapien
ccactgggacgaacttgtatcttta

SEQ ID NO: 4303378 - DNA, 25 bp, Homo sapien
cactattcactgtttgagtttgaaa

SEQ ID NO: 4303379 - DNA, 25 bp, Homo sapien
gcacctcaaagagatacggtataca

SEQ ID NO: 4303380 - DNA, 25 bp, Homo sapien
gaatgtcttcagaccaggcgtggtg

SEQ ID NO: 4303381 - DNA, 25 bp, Homo sapien
tgaaattgaagccttaagaatgtct

SEQ ID NO: 4303382 - DNA, 25 bp, Homo sapien
cagttcagtcattagagatcacaag

SEQ ID NO: 4303383 - DNA, 25 bp, Homo sapien
taaaccccttatttggagtgagcag

SEQ ID NO: 4303384 - DNA, 25 bp, Homo sapien
tgtccgtattcgagaacacttccct

SEQ ID NO: 4303385 - DNA, 25 bp, Homo sapien
caattgaaggcatttctcaggagaa

SEQ ID NO: 4303386 - DNA, 25 bp, Homo sapien
tgggcatttaggctcatgccatgtc

SEQ ID NO: 4303387 - DNA, 25 bp, Homo sapien
tgctggctaaacaaatcctaccgtg

SEQ ID NO: 4303388 - DNA, 25 bp, Homo sapien
taattttctctatccggtctgtcat

SEQ ID NO: 4303389 - DNA, 25 bp, Homo sapien
caatggccgaactcatttacgctcc

SEQ ID NO: 4303390 - DNA, 25 bp, Homo sapien
tggatcactcctggctcaatttcat

SEQ ID NO: 4303391 - DNA, 25 bp, Homo sapien
tggtaacagttaataatgacaatac

SEQ ID NO: 4303392 - DNA, 25 bp, Homo sapien
tagcaatggatcactcctggctcaa

SEQ ID NO: 4303393 - DNA, 25 bp, Homo sapien
gaatgaattagcaatggatcactcc

SEQ ID NO: 4303394 - DNA, 25 bp, Homo sapien
ccagcatgctcccatccagaatggt

SEQ ID NO: 4303395 - DNA, 25 bp, Homo sapien
caccagcatgctcccatccagaatg

SEQ ID NO: 4303396 - DNA, 25 bp, Homo sapien
agcatgctcccatccagaatggtac

SEQ ID NO: 4303397 - DNA, 25 bp, Homo sapien
aaaccaccagcatgctcccatccag

SEQ ID NO: 4303398 - DNA, 25 bp, Homo sapien
gagtcatcatctgaggtcgagttcc

SEQ ID NO: 4303399 - DNA, 25 bp, Homo sapien
tgttcaggcttcagacccggcggga

SEQ ID NO: 4303400 - DNA, 25 bp, Homo sapien
gaggtcgagttcctctgaaagtcaa

SEQ ID NO: 4303401 - DNA, 25 bp, Homo sapien
gaaagtcaaacatgagtttgctgat

SEQ ID NO: 4303402 - DNA, 25 bp, Homo sapien
acacttgcagtgcaggcagatcttc

SEQ ID NO: 4303403 - DNA, 25 bp, Homo sapien
tcctggggacacttgcagtgcaggc

SEQ ID NO: 4303404 - DNA, 25 bp, Homo sapien
cctggggacacttgcagtgcaggca

SEQ ID NO: 4303405 - DNA, 25 bp, Homo sapien
gggacacttgcagtgcaggcagatc

SEQ ID NO: 4303406 - DNA, 25 bp, Homo sapien
tttccaagagcctgccagtcactag

SEQ ID NO: 4303407 - DNA, 25 bp, Homo sapien
taaacacattccttggcaatgggca

SEQ ID NO: 4303408 - DNA, 25 bp, Homo sapien
ctagcccctggatcccaaaccataa

SEQ ID NO: 4303409 - DNA, 25 bp, Homo sapien
gcatcgggcaaaggcatcgcgagca

SEQ ID NO: 4303410 - DNA, 25 bp, Homo sapien
cataatacatatgttgacctgaagt

SEQ ID NO: 4303411 - DNA, 25 bp, Homo sapien
catgaccacaatttccttgactgca

SEQ ID NO: 4303412 - DNA, 25 bp, Homo sapien
tgacctgaagtgttacttgtagatt

SEQ ID NO: 4303413 - DNA, 25 bp, Homo sapien
taggtagaccactggatatggccca

SEQ ID NO: 4303414 - DNA, 25 bp, Homo sapien
gtgatgctaagaggatttctcttca

SEQ ID NO: 4303415 - DNA, 25 bp, Homo sapien
tgatgctaagaggatttctcttcat

SEQ ID NO: 4303416 - DNA, 25 bp, Homo sapien
agagggtcagaagtgatgctaagag

SEQ ID NO: 4303417 - DNA, 25 bp, Homo sapien
aatgaaagcatcaactcttcacatg

SEQ ID NO: 4303418 - DNA, 25 bp, Homo sapien
tccctgagtttccaatgaaagcatc

SEQ ID NO: 4303419 - DNA, 25 bp, Homo sapien
tttccctgagtttccaatgaaagca

SEQ ID NO: 4303420 - DNA, 25 bp, Homo sapien
atcaactcttcacatgcacgcacaa

SEQ ID NO: 4303421 - DNA, 25 bp, Homo sapien
gaaaatatattcgtagaggctggcc

SEQ ID NO: 4303422 - DNA, 25 bp, Homo sapien
taagcggagagtcagaacgccagaa

SEQ ID NO: 4303423 - DNA, 25 bp, Homo sapien
gaggctggcctgaaatcaaatggga

SEQ ID NO: 4303424 - DNA, 25 bp, Homo sapien
tccaagaggtaaaaatctgctccaa

SEQ ID NO: 4303425 - DNA, 25 bp, Homo sapien
gatcagaagactccacaaaacacct

SEQ ID NO: 4303426 - DNA, 25 bp, Homo sapien
ccacaaaacacctcttcgtttgctt

SEQ ID NO: 4303427 - DNA, 25 bp, Homo sapien
ttcaaggcaaggatcagaagactcc

SEQ ID NO: 4303428 - DNA, 25 bp, Homo sapien
cagaagactccacaaaacacctctt

SEQ ID NO: 4303429 - DNA, 25 bp, Homo sapien
tcagccttccaccatctagctgaga

SEQ ID NO: 4303430 - DNA, 25 bp, Homo sapien
taccaagttgcaataaggcagacag

SEQ ID NO: 4303431 - DNA, 25 bp, Homo sapien
ggcagacaggttagacagtaaatta

SEQ ID NO: 4303432 - DNA, 25 bp, Homo sapien
cagtaaattaatgacctgtcggatg

SEQ ID NO: 4303433 - DNA, 25 bp, Homo sapien
tctctggtatggacgtgagccagct

SEQ ID NO: 4303434 - DNA, 25 bp, Homo sapien
gcttggcttgtggtgattctggcaa

SEQ ID NO: 4303435 - DNA, 25 bp, Homo sapien
cagctggcagcggaatccctcaggg

SEQ ID NO: 4303436 - DNA, 25 bp, Homo sapien
ggcaatggtcacacccttcaaaact

SEQ ID NO: 4303437 - DNA, 25 bp, Homo sapien
gctacaactcgcttcctcattctta

SEQ ID NO: 4303438 - DNA, 25 bp, Homo sapien
tctgagctacaactcgcttcctcat

SEQ ID NO: 4303439 - DNA, 25 bp, Homo sapien
agctggatctatggaaaggtttttg

SEQ ID NO: 4303440 - DNA, 25 bp, Homo sapien
ttgttctgagctacaactcgcttcc

SEQ ID NO: 4303441 - DNA, 25 bp, Homo sapien
cgggaccgtggacttccttggtgca

SEQ ID NO: 4303442 - DNA, 25 bp, Homo sapien
ttttagcatagttgacgaaacgaac

SEQ ID NO: 4303443 - DNA, 25 bp, Homo sapien
tgacgaaacgaacaaggaggagccg

SEQ ID NO: 4303444 - DNA, 25 bp, Homo sapien
tggtgcacgggatgagtcttagtca

SEQ ID NO: 4303445 - DNA, 25 bp, Homo sapien
tactgaaaaactctggcctagcaca

SEQ ID NO: 4303446 - DNA, 25 bp, Homo sapien
gaaagaacgcctcaagtacagaaat

SEQ ID NO: 4303447 - DNA, 25 bp, Homo sapien
catgacgagtagtgtttggccaaga

SEQ ID NO: 4303448 - DNA, 25 bp, Homo sapien
aacaagaactcctatggccttggca

SEQ ID NO: 4303449 - DNA, 25 bp, Homo sapien
tccagtccgtggcaagcttctagtc

SEQ ID NO: 4303450 - DNA, 25 bp, Homo sapien
tcagaagccagtctagcaagaatcg

SEQ ID NO: 4303451 - DNA, 25 bp, Homo sapien
caagaatcgaagctcctgttgagag

SEQ ID NO: 4303452 - DNA, 25 bp, Homo sapien
ccttcctaatgaggcaggcacttcg

SEQ ID NO: 4303453 - DNA, 25 bp, Homo sapien
agagaacccccgactattgcttcct

SEQ ID NO: 4303454 - DNA, 25 bp, Homo sapien
cagctcaaacactagcaccaggaag

SEQ ID NO: 4303455 - DNA, 25 bp, Homo sapien
cctgtaggttcactctgctgttctg

SEQ ID NO: 4303456 - DNA, 25 bp, Homo sapien
cccgactattgcttcctcctgtagg

SEQ ID NO: 4303457 - DNA, 25 bp, Homo sapien
caccaaaaatgctacctggccaaga

SEQ ID NO: 4303458 - DNA, 25 bp, Homo sapien
taagcgtttcttcaggactccctag

SEQ ID NO: 4303459 - DNA, 25 bp, Homo sapien
catgtgttgaaatgactactgtaca

SEQ ID NO: 4303460 - DNA, 25 bp, Homo sapien
catgaacgctatcaggtatttggtc

SEQ ID NO: 4303461 - DNA, 25 bp, Homo sapien
gaattagagcaaatttcttacccac

SEQ ID NO: 4303462 - DNA, 25 bp, Homo sapien
tgtgaattagagcaaatttcttacc

SEQ ID NO: 4303463 - DNA, 25 bp, Homo sapien
aatatactgctgtttaatttgtgaa

SEQ ID NO: 4303464 - DNA, 25 bp, Homo sapien
aaatatactgctgtttaatttgtga

SEQ ID NO: 4303465 - DNA, 25 bp, Homo sapien
gatgaaatgcccagtctcggaggaa

SEQ ID NO: 4303466 - DNA, 25 bp, Homo sapien
tgaagctggcaacagactcaagccg

SEQ ID NO: 4303467 - DNA, 25 bp, Homo sapien
tctaagaacgcaagcaggacctcag

SEQ ID NO: 4303468 - DNA, 25 bp, Homo sapien
taataataactctcggtggcgctgc

SEQ ID NO: 4303469 - DNA, 25 bp, Homo sapien
cagagacttagtaaataggaacaaa

SEQ ID NO: 4303470 - DNA, 25 bp, Homo sapien
aacttcatgcgagtaaaggcaggga

SEQ ID NO: 4303471 - DNA, 25 bp, Homo sapien
cggaggacactcttgtcaggagaca

SEQ ID NO: 4303472 - DNA, 25 bp, Homo sapien
tcaggagacaaggatgcaactgtcg

SEQ ID NO: 4303473 - DNA, 25 bp, Homo sapien
taggaaggaaaattatgaacacaaa

SEQ ID NO: 4303474 - DNA, 25 bp, Homo sapien
gaataagaacatgagtaggaaggaa

SEQ ID NO: 4303475 - DNA, 25 bp, Homo sapien
ggcaggaataagaacatgagtagga

SEQ ID NO: 4303476 - DNA, 25 bp, Homo sapien
tctgctagaggtgttccaggcagga

SEQ ID NO: 4303477 - DNA, 25 bp, Homo sapien
gggcgaggtagcagcctctgactca

SEQ ID NO: 4303478 - DNA, 25 bp, Homo sapien
cagggcgaggtagcagcctctgact

SEQ ID NO: 4303479 - DNA, 25 bp, Homo sapien
ggcgaggtagcagcctctgactcat

SEQ ID NO: 4303480 - DNA, 25 bp, Homo sapien
acagggcgaggtagcagcctctgac

SEQ ID NO: 4303481 - DNA, 25 bp, Homo sapien
aattcagggatgagggccacagctc

SEQ ID NO: 4303482 - DNA, 25 bp, Homo sapien
ggatgagggccacagctcttgatct

SEQ ID NO: 4303483 - DNA, 25 bp, Homo sapien
cttgatctgtccttgactttgcaac

SEQ ID NO: 4303484 - DNA, 25 bp, Homo sapien
ccttgactttgcaacttgagcaaga

SEQ ID NO: 4303485 - DNA, 25 bp, Homo sapien
tgtgagagcacgtcagcagtactgt

SEQ ID NO: 4303486 - DNA, 25 bp, Homo sapien
tgctgtgagagcacgtcagcagtac

SEQ ID NO: 4303487 - DNA, 25 bp, Homo sapien
cacaggaatgctgtgagagcacgtc

SEQ ID NO: 4303488 - DNA, 25 bp, Homo sapien
gaatgctgtgagagcacgtcagcag

SEQ ID NO: 4303489 - DNA, 25 bp, Homo sapien
ctgtccccacactaccgcaaataaa

SEQ ID NO: 4303490 - DNA, 25 bp, Homo sapien
tctgtccccacactaccgcaaataa

SEQ ID NO: 4303491 - DNA, 25 bp, Homo sapien
ttctgtccccacactaccgcaaata

SEQ ID NO: 4303492 - DNA, 25 bp, Homo sapien
aaagtaccctcataaagttctctgg

SEQ ID NO: 4303493 - DNA, 25 bp, Homo sapien
taatacactgaggaatcccagagga

SEQ ID NO: 4303494 - DNA, 25 bp, Homo sapien
atttctgacgactttccaggtgctg

SEQ ID NO: 4303495 - DNA, 25 bp, Homo sapien
aaaccccaatgtgtttttcagcgag

SEQ ID NO: 4303496 - DNA, 25 bp, Homo sapien
taaagatgagtcaaaaccatccccg

SEQ ID NO: 4303497 - DNA, 25 bp, Homo sapien
cagtccactttgaatcaggagagca

SEQ ID NO: 4303498 - DNA, 25 bp, Homo sapien
gagtgtcaaaaacaataccaggagc

SEQ ID NO: 4303499 - DNA, 25 bp, Homo sapien
tcaatcaatccaacatgtggtgccc

SEQ ID NO: 4303500 - DNA, 25 bp, Homo sapien
ttagctcaagcaactgggtagctgg

SEQ ID NO: 4303501 - DNA, 25 bp, Homo sapien
caagtctgagaagccgattggacat

SEQ ID NO: 4303502 - DNA, 25 bp, Homo sapien
tagcgctatgttttgacacagcaag

SEQ ID NO: 4303503 - DNA, 25 bp, Homo sapien
ccagtgtaacaagaagccatgggct

SEQ ID NO: 4303504 - DNA, 25 bp, Homo sapien
tcaatgggtttctctactccaggcc

SEQ ID NO: 4303505 - DNA, 25 bp, Homo sapien
catgcaacatcaagcctcaatgggt

SEQ ID NO: 4303506 - DNA, 25 bp, Homo sapien
ggttccagggtcacattagcacaga

SEQ ID NO: 4303507 - DNA, 25 bp, Homo sapien
gaatgatccactgggacaaaccctg

SEQ ID NO: 4303508 - DNA, 25 bp, Homo sapien
gccttgcattgctccgacgctgcgg

SEQ ID NO: 4303509 - DNA, 25 bp, Homo sapien
ggcttagccttgcattgctccgacg

SEQ ID NO: 4303510 - DNA, 25 bp, Homo sapien
ccggcttagccttgcattgctccga

SEQ ID NO: 4303511 - DNA, 25 bp, Homo sapien
ttagccttgcattgctccgacgctg

SEQ ID NO: 4303512 - DNA, 25 bp, Homo sapien
aagaggagaagctacctcttacagt

SEQ ID NO: 4303513 - DNA, 25 bp, Homo sapien
aacagattggcaactagaatcacaa

SEQ ID NO: 4303514 - DNA, 25 bp, Homo sapien
agaggagaagctacctcttacagta

SEQ ID NO: 4303515 - DNA, 25 bp, Homo sapien
atgaacagattggcaactagaatca

SEQ ID NO: 4303516 - DNA, 25 bp, Homo sapien
agctggtggtcacgggccgttcctc

SEQ ID NO: 4303517 - DNA, 25 bp, Homo sapien
caacaagtctatggcctctaccgca

SEQ ID NO: 4303518 - DNA, 25 bp, Homo sapien
taatgcatgtgcatcctgccctatg

SEQ ID NO: 4303519 - DNA, 25 bp, Homo sapien
tctaccgcatctacatgctctgttt

SEQ ID NO: 4303520 - DNA, 25 bp, Homo sapien
acttcttcagcagcttccaaaagaa

SEQ ID NO: 4303521 - DNA, 25 bp, Homo sapien
taacttcttcagcagcttccaaaag

SEQ ID NO: 4303522 - DNA, 25 bp, Homo sapien
caactctaacttcttcagcagcttc

SEQ ID NO: 4303523 - DNA, 25 bp, Homo sapien
tctaacttcttcagcagcttccaaa

SEQ ID NO: 4303524 - DNA, 25 bp, Homo sapien
tgtatcctttttccacccacagcat

SEQ ID NO: 4303525 - DNA, 25 bp, Homo sapien
agctgaaatagtttactgtatcctt

SEQ ID NO: 4303526 - DNA, 25 bp, Homo sapien
ttactgtatcctttttccacccaca

SEQ ID NO: 4303527 - DNA, 25 bp, Homo sapien
cagctgaaatagtttactgtatcct

SEQ ID NO: 4303528 - DNA, 25 bp, Homo sapien
caaagtggagctgcgtccatgtgga

SEQ ID NO: 4303529 - DNA, 25 bp, Homo sapien
catgggctcccaggatcaaaagggc

SEQ ID NO: 4303530 - DNA, 25 bp, Homo sapien
tcccaggatcaaaagggcggagtcc

SEQ ID NO: 4303531 - DNA, 25 bp, Homo sapien
tccgggtcagcacaccaaggtatgt

SEQ ID NO: 4303532 - DNA, 25 bp, Homo sapien
cctctttactgaagttagcagaatc

SEQ ID NO: 4303533 - DNA, 25 bp, Homo sapien
ctgtgaggcaatctatatctttcct

SEQ ID NO: 4303534 - DNA, 25 bp, Homo sapien
tgtagcttgcaatcaaagaatccaa

SEQ ID NO: 4303535 - DNA, 25 bp, Homo sapien
tagttcgtacttccttgatcctcag

SEQ ID NO: 4303536 - DNA, 25 bp, Homo sapien
taactgagaatctgtccgaggtgac

SEQ ID NO: 4303537 - DNA, 25 bp, Homo sapien
gaaggtcctggcatggtaactgaga

SEQ ID NO: 4303538 - DNA, 25 bp, Homo sapien
gacattgatggacagcgaggcttga

SEQ ID NO: 4303539 - DNA, 25 bp, Homo sapien
tgtttggacaggaggacccaactgc

SEQ ID NO: 4303540 - DNA, 25 bp, Homo sapien
gcgaatgagtttccctctaatggag

SEQ ID NO: 4303541 - DNA, 25 bp, Homo sapien
tcagccagtttgtgacagcaccagg

SEQ ID NO: 4303542 - DNA, 25 bp, Homo sapien
ttatcctgggatcaaaaacacagtg

SEQ ID NO: 4303543 - DNA, 25 bp, Homo sapien
gctggtacacttgactctggcctga

SEQ ID NO: 4303544 - DNA, 25 bp, Homo sapien
tgctgacttaacaggtaaaacggca

SEQ ID NO: 4303545 - DNA, 25 bp, Homo sapien
gaaactgtctactgcctgtacctca

SEQ ID NO: 4303546 - DNA, 25 bp, Homo sapien
tacctcatcagcaccgggcattgtg

SEQ ID NO: 4303547 - DNA, 25 bp, Homo sapien
ggtttttgataatgccttgccagaa

SEQ ID NO: 4303548 - DNA, 25 bp, Homo sapien
tacaattattgctggactgctcctc

SEQ ID NO: 4303549 - DNA, 25 bp, Homo sapien
gaagaaagctgcaagggctcagaag

SEQ ID NO: 4303550 - DNA, 25 bp, Homo sapien
catctacggaagagacacttggttc

SEQ ID NO: 4303551 - DNA, 25 bp, Homo sapien
gctcagaaggtgacggaaactcaat

SEQ ID NO: 4303552 - DNA, 25 bp, Homo sapien
gctgctcatgaaacagaatggaaac

SEQ ID NO: 4303553 - DNA, 25 bp, Homo sapien
cctgaggaaacagccgcctgtcaat

SEQ ID NO: 4303554 - DNA, 25 bp, Homo sapien
tataagtcagtgataggcttcccga

SEQ ID NO: 4303555 - DNA, 25 bp, Homo sapien
cactgagcaagacgcctcaggaagc

SEQ ID NO: 4303556 - DNA, 25 bp, Homo sapien
gaggactttgtttagatctctgaaa

SEQ ID NO: 4303557 - DNA, 25 bp, Homo sapien
tctccaccttataccctccctgtat

SEQ ID NO: 4303558 - DNA, 25 bp, Homo sapien
ctatggatgcaagtcctggatttgc

SEQ ID NO: 4303559 - DNA, 25 bp, Homo sapien
ggatttgccctgctagtgtcttcat

SEQ ID NO: 4303560 - DNA, 25 bp, Homo sapien
tcttaaacacaccggtttctgacat

SEQ ID NO: 4303561 - DNA, 25 bp, Homo sapien
ctcttaaacacaccggtttctgaca

SEQ ID NO: 4303562 - DNA, 25 bp, Homo sapien
tctcttaaacacaccggtttctgac

SEQ ID NO: 4303563 - DNA, 25 bp, Homo sapien
gcggggtctctatccaagactttct

SEQ ID NO: 4303564 - DNA, 25 bp, Homo sapien
gaacccagcggggtctctatccaag

SEQ ID NO: 4303565 - DNA, 25 bp, Homo sapien
ttcctagaatctggatagtactaaa

SEQ ID NO: 4303566 - DNA, 25 bp, Homo sapien
tagaatctggatagtactaaacacc

SEQ ID NO: 4303567 - DNA, 25 bp, Homo sapien
gaagggatagccacttgccaaaaca

SEQ ID NO: 4303568 - DNA, 25 bp, Homo sapien
tgttctttcggacaacactgccaga

SEQ ID NO: 4303569 - DNA, 25 bp, Homo sapien
gaaacaccgcatgtaagcttgtgcc

SEQ ID NO: 4303570 - DNA, 25 bp, Homo sapien
gtttctcattaacgggccccagcag

SEQ ID NO: 4303571 - DNA, 25 bp, Homo sapien
gaaaagatgacaacacggtccatcg

SEQ ID NO: 4303572 - DNA, 25 bp, Homo sapien
aagatgacaacacggtccatcgcct

SEQ ID NO: 4303573 - DNA, 25 bp, Homo sapien
ctgaaaagatgacaacacggtccat

SEQ ID NO: 4303574 - DNA, 25 bp, Homo sapien
atgacaacacggtccatcgcctcat

SEQ ID NO: 4303575 - DNA, 25 bp, Homo sapien
tttctatggtaacgaggagctgact

SEQ ID NO: 4303576 - DNA, 25 bp, Homo sapien
tgccgtccggatgctccaaagcaaa

SEQ ID NO: 4303577 - DNA, 25 bp, Homo sapien
aaaaaatagcaacactccagctgtc

SEQ ID NO: 4303578 - DNA, 25 bp, Homo sapien
tttatccagtgaacaaaactcctta

SEQ ID NO: 4303579 - DNA, 25 bp, Homo sapien
tctgcccactctgtgccattttatg

SEQ ID NO: 4303580 - DNA, 25 bp, Homo sapien
cctccgcctttcccagctgcagtac

SEQ ID NO: 4303581 - DNA, 25 bp, Homo sapien
ttctctgcccactctgtgccatttt

SEQ ID NO: 4303582 - DNA, 25 bp, Homo sapien
gtgccattttatggccccctccgcc

SEQ ID NO: 4303583 - DNA, 25 bp, Homo sapien
catggtgacgtttccgctgaatgct

SEQ ID NO: 4303584 - DNA, 25 bp, Homo sapien
ctttctcatggtgacgtttccgctg

SEQ ID NO: 4303585 - DNA, 25 bp, Homo sapien
tcactcccactgggactttgtcttt

SEQ ID NO: 4303586 - DNA, 25 bp, Homo sapien
tgacgtttccgctgaatgctggcag

SEQ ID NO: 4303587 - DNA, 25 bp, Homo sapien
ggtctgtgtagtaaatgtgaatatt

SEQ ID NO: 4303588 - DNA, 25 bp, Homo sapien
agacctccactcctgttgatgctgt

SEQ ID NO: 4303589 - DNA, 25 bp, Homo sapien
cactagatgtgacagtcccaagacc

SEQ ID NO: 4303590 - DNA, 25 bp, Homo sapien
cactcccaggataaaggtctgtgta

SEQ ID NO: 4303591 - DNA, 25 bp, Homo sapien
caaaaatgttgataaagctatcttc

SEQ ID NO: 4303592 - DNA, 25 bp, Homo sapien
tcttcaatagtcaaaaatgttgata

SEQ ID NO: 4303593 - DNA, 25 bp, Homo sapien
ctttgcagaaactttcttcaatagt

SEQ ID NO: 4303594 - DNA, 25 bp, Homo sapien
ctttcttcaatagtcaaaaatgttg

SEQ ID NO: 4303595 - DNA, 25 bp, Homo sapien
gagctgatgtcgcaggctttccaac

SEQ ID NO: 4303596 - DNA, 25 bp, Homo sapien
tccaaaacatctttgcagcatggac

SEQ ID NO: 4303597 - DNA, 25 bp, Homo sapien
actgggctctaggatgaatgtcaca

SEQ ID NO: 4303598 - DNA, 25 bp, Homo sapien
tagcacctttgtatccctgctgtgg

SEQ ID NO: 4303599 - DNA, 25 bp, Homo sapien
tcccacagggatgagttgattcaat

SEQ ID NO: 4303600 - DNA, 25 bp, Homo sapien
aatgggaactctcctgtcacaatct

SEQ ID NO: 4303601 - DNA, 25 bp, Homo sapien
tcttgccgaaagagccagctttctc

SEQ ID NO: 4303602 - DNA, 25 bp, Homo sapien
cacaatcttgccgaaagagccagct

SEQ ID NO: 4303603 - DNA, 25 bp, Homo sapien
agggcactggtcaccacaggcgtta

SEQ ID NO: 4303604 - DNA, 25 bp, Homo sapien
acaggcgttacatggctggcctcgc

SEQ ID NO: 4303605 - DNA, 25 bp, Homo sapien
tccatttatgcaaggcgaacccagg

SEQ ID NO: 4303606 - DNA, 25 bp, Homo sapien
tttatgcaaggcgaacccagggcac

SEQ ID NO: 4303607 - DNA, 25 bp, Homo sapien
cacctcctgtgatttgagccaactg

SEQ ID NO: 4303608 - DNA, 25 bp, Homo sapien
aacacacgcatgtctccaccacggg

SEQ ID NO: 4303609 - DNA, 25 bp, Homo sapien
tcctcttctgtatgggggacacggg

SEQ ID NO: 4303610 - DNA, 25 bp, Homo sapien
cctgtgatttgagccaactgctcct

SEQ ID NO: 4303611 - DNA, 25 bp, Homo sapien
cttttccgggagctccggctgaaca

SEQ ID NO: 4303612 - DNA, 25 bp, Homo sapien
ttttccgggagctccggctgaacat

SEQ ID NO: 4303613 - DNA, 25 bp, Homo sapien
caagatgttaagtgcccgtgaagtc

SEQ ID NO: 4303614 - DNA, 25 bp, Homo sapien
tgctgctagcaatgaaagagagacc

SEQ ID NO: 4303615 - DNA, 25 bp, Homo sapien
ggcctcttggtaggacccttctgga

SEQ ID NO: 4303616 - DNA, 25 bp, Homo sapien
taaaacttcctacgtagcgtgcaac

SEQ ID NO: 4303617 - DNA, 25 bp, Homo sapien
tccaatatggcagtgatgtcatatg

SEQ ID NO: 4303618 - DNA, 25 bp, Homo sapien
gattctactatactagatgcacaga

SEQ ID NO: 4303619 - DNA, 25 bp, Homo sapien
tccagaaaattctatttgaccactt

SEQ ID NO: 4303620 - DNA, 25 bp, Homo sapien
tgcattagccatatttccagttctc

SEQ ID NO: 4303621 - DNA, 25 bp, Homo sapien
ctccaccggattgtctgaatccgac

SEQ ID NO: 4303622 - DNA, 25 bp, Homo sapien
tgctccaccggattgtctgaatccg

SEQ ID NO: 4303623 - DNA, 25 bp, Homo sapien
gagtgctccaccggattgtctgaat

SEQ ID NO: 4303624 - DNA, 25 bp, Homo sapien
agtgctccaccggattgtctgaatc

SEQ ID NO: 4303625 - DNA, 25 bp, Homo sapien
ggaaccaatgatgccaagagctggg

SEQ ID NO: 4303626 - DNA, 25 bp, Homo sapien
tgggcaacgtgatctctactgctgc

SEQ ID NO: 4303627 - DNA, 25 bp, Homo sapien
tactgctgcttccaagcctgacagc

SEQ ID NO: 4303628 - DNA, 25 bp, Homo sapien
tgacagcattatcctccacgaacct

SEQ ID NO: 4303629 - DNA, 25 bp, Homo sapien
tgaggatgccagacgtgaaaagtgc

SEQ ID NO: 4303630 - DNA, 25 bp, Homo sapien
cttggtatgtaggaggcatgggatg

SEQ ID NO: 4303631 - DNA, 25 bp, Homo sapien
ggatgaactgtgttagccagtggcc

SEQ ID NO: 4303632 - DNA, 25 bp, Homo sapien
gatgccagacgtgaaaagtgcctgg

SEQ ID NO: 4303633 - DNA, 25 bp, Homo sapien
ttttcatggatggtcagctaggcta

SEQ ID NO: 4303634 - DNA, 25 bp, Homo sapien
tcagctaggctatgaaacagttcat

SEQ ID NO: 4303635 - DNA, 25 bp, Homo sapien
agtttcccagtgattcgcatcagcc

SEQ ID NO: 4303636 - DNA, 25 bp, Homo sapien
ccagtgattcgcatcagcccggttt

SEQ ID NO: 4303637 - DNA, 25 bp, Homo sapien
ccgtgagatggcactcctgatcaca

SEQ ID NO: 4303638 - DNA, 25 bp, Homo sapien
tgatcacagatccttagctggtggc

SEQ ID NO: 4303639 - DNA, 25 bp, Homo sapien
gccaggttttccagagtcattgtgg

SEQ ID NO: 4303640 - DNA, 25 bp, Homo sapien
cctgttaccgtgagatggcactcct

SEQ ID NO: 4303641 - DNA, 25 bp, Homo sapien
ttgtttggagttggagaatactgcc

SEQ ID NO: 4303642 - DNA, 25 bp, Homo sapien
atactgccaggcttttcctaatctc

SEQ ID NO: 4303643 - DNA, 25 bp, Homo sapien
ttttcctggagcactctagagcttg

SEQ ID NO: 4303644 - DNA, 25 bp, Homo sapien
taataatggagaataacacttattc

SEQ ID NO: 4303645 - DNA, 25 bp, Homo sapien
tcaaaccaagtgtcttccatgggcc

SEQ ID NO: 4303646 - DNA, 25 bp, Homo sapien
tgaattaatgagcaatcggaaagac

SEQ ID NO: 4303647 - DNA, 25 bp, Homo sapien
ttttgtactccacagttcatttctt

SEQ ID NO: 4303648 - DNA, 25 bp, Homo sapien
aaaagtgaattaatgagcaatcgga

SEQ ID NO: 4303649 - DNA, 25 bp, Homo sapien
ttaatgagcaatcggaaagactcaa

SEQ ID NO: 4303650 - DNA, 25 bp, Homo sapien
tgaaaaccggcagggtgttaggctc

SEQ ID NO: 4303651 - DNA, 25 bp, Homo sapien
aaaccggcagggtgttaggctcatg

SEQ ID NO: 4303652 - DNA, 25 bp, Homo sapien
ctgcagcgggcatgaaaaccggcag

SEQ ID NO: 4303653 - DNA, 25 bp, Homo sapien
catgaaaaccggcagggtgttaggc

SEQ ID NO: 4303654 - DNA, 25 bp, Homo sapien
gaatttctccaggtgtgctcgtgag

SEQ ID NO: 4303655 - DNA, 25 bp, Homo sapien
tgcccattctgtgcatcctgtgtct

SEQ ID NO: 4303656 - DNA, 25 bp, Homo sapien
catcctgtgtctttctactggtaaa

SEQ ID NO: 4303657 - DNA, 25 bp, Homo sapien
caatcgtgatgattcagaacctggt

SEQ ID NO: 4303658 - DNA, 25 bp, Homo sapien
tcactctgtaatgaagctgcttggg

SEQ ID NO: 4303659 - DNA, 25 bp, Homo sapien
gcaccgtgggctgaagcaacgaata

SEQ ID NO: 4303660 - DNA, 25 bp, Homo sapien
gctgatacttgcctagaaatgccaa

SEQ ID NO: 4303661 - DNA, 25 bp, Homo sapien
catattactacatgcaaaggcagtc

SEQ ID NO: 4303662 - DNA, 25 bp, Homo sapien
gggcaagcaatcctcccatctcagc

SEQ ID NO: 4303663 - DNA, 25 bp, Homo sapien
catgatcatggcttgcttcagcctt

SEQ ID NO: 4303664 - DNA, 25 bp, Homo sapien
ggcatgatcatggcttgcttcagcc

SEQ ID NO: 4303665 - DNA, 25 bp, Homo sapien
cttgacctcctgggcaagcaatcct

SEQ ID NO: 4303666 - DNA, 25 bp, Homo sapien
aaagtacgtatataatggtgatctc

SEQ ID NO: 4303667 - DNA, 25 bp, Homo sapien
tggtgatctctagtggatacctgct

SEQ ID NO: 4303668 - DNA, 25 bp, Homo sapien
gagataactgctcttcatatattgg

SEQ ID NO: 4303669 - DNA, 25 bp, Homo sapien
cttgtcctttgggaaccatccctct

SEQ ID NO: 4303670 - DNA, 25 bp, Homo sapien
ggatcttcaagagccttacacggta

SEQ ID NO: 4303671 - DNA, 25 bp, Homo sapien
aaataggcactcttgtatcaggatc

SEQ ID NO: 4303672 - DNA, 25 bp, Homo sapien
cacggtaatgggctactggaagctt

SEQ ID NO: 4303673 - DNA, 25 bp, Homo sapien
caggtgggtcacatgaattggttga

SEQ ID NO: 4303674 - DNA, 25 bp, Homo sapien
tgatcgagtggactttattcttggc

SEQ ID NO: 4303675 - DNA, 25 bp, Homo sapien
gaatccaccagagacctaatgaagc

SEQ ID NO: 4303676 - DNA, 25 bp, Homo sapien
taatgaagcaggacccctagagatg

SEQ ID NO: 4303677 - DNA, 25 bp, Homo sapien
gagatgcagcccaataaacagcctt

SEQ ID NO: 4303678 - DNA, 25 bp, Homo sapien
gaatcaacctaggtaccgattaatg

SEQ ID NO: 4303679 - DNA, 25 bp, Homo sapien
tttaaaaatgtggtctgtatacatg

SEQ ID NO: 4303680 - DNA, 25 bp, Homo sapien
tgtggtctgtatacatgatgaaata

SEQ ID NO: 4303681 - DNA, 25 bp, Homo sapien
cctaggtaccgattaatggtggact

SEQ ID NO: 4303682 - DNA, 25 bp, Homo sapien
ttccacagtaaccaccgcatttccc

SEQ ID NO: 4303683 - DNA, 25 bp, Homo sapien
catttccctacgactcgggtaccat

SEQ ID NO: 4303684 - DNA, 25 bp, Homo sapien
caccgcatttccctacgactcgggt

SEQ ID NO: 4303685 - DNA, 25 bp, Homo sapien
attttccacagtaaccaccgcattt

SEQ ID NO: 4303686 - DNA, 25 bp, Homo sapien
gcttggttaatgctttcagggcctg

SEQ ID NO: 4303687 - DNA, 25 bp, Homo sapien
tcaccatggtctaaagcaggggctg

SEQ ID NO: 4303688 - DNA, 25 bp, Homo sapien
ttctgaactgatgtgaagcccaaca

SEQ ID NO: 4303689 - DNA, 25 bp, Homo sapien
gggctggcaaacttcagcctgtgag

SEQ ID NO: 4303690 - DNA, 25 bp, Homo sapien
tctgaaggcctattccagaatcttc

SEQ ID NO: 4303691 - DNA, 25 bp, Homo sapien
ctctgaaggcctattccagaatctt

SEQ ID NO: 4303692 - DNA, 25 bp, Homo sapien
ctgaaggcctattccagaatcttct

SEQ ID NO: 4303693 - DNA, 25 bp, Homo sapien
tgaaggcctattccagaatcttcta

SEQ ID NO: 4303694 - DNA, 25 bp, Homo sapien
gcaccaagggctgagttgcggcagg

SEQ ID NO: 4303695 - DNA, 25 bp, Homo sapien
gtcagatttcagagtccacgtgctt

SEQ ID NO: 4303696 - DNA, 25 bp, Homo sapien
gagccagtgggcacagactctggca

SEQ ID NO: 4303697 - DNA, 25 bp, Homo sapien
tgacggttttcactgtggcaccaag

SEQ ID NO: 4303698 - DNA, 25 bp, Homo sapien
tgttatcccaatctcctggtgacag

SEQ ID NO: 4303699 - DNA, 25 bp, Homo sapien
tatcccaatctcctggtgacagcac

SEQ ID NO: 4303700 - DNA, 25 bp, Homo sapien
tcccaatctcctggtgacagcacag

SEQ ID NO: 4303701 - DNA, 25 bp, Homo sapien
gttatcccaatctcctggtgacagc

SEQ ID NO: 4303702 - DNA, 25 bp, Homo sapien
gattatgggcacaaggcactacatc

SEQ ID NO: 4303703 - DNA, 25 bp, Homo sapien
tgatggtgaagcactcctgagtttg

SEQ ID NO: 4303704 - DNA, 25 bp, Homo sapien
tgctaatgcttactgtgactcttca

SEQ ID NO: 4303705 - DNA, 25 bp, Homo sapien
caggaaggaaatacaatatactagc

SEQ ID NO: 4303706 - DNA, 25 bp, Homo sapien
taatcggatttgaggacattgattg

SEQ ID NO: 4303707 - DNA, 25 bp, Homo sapien
aatcggatttgaggacattgattgg

SEQ ID NO: 4303708 - DNA, 25 bp, Homo sapien
ttaatcggatttgaggacattgatt

SEQ ID NO: 4303709 - DNA, 25 bp, Homo sapien
cggcgacttcttgatgtcagagaca

SEQ ID NO: 4303710 - DNA, 25 bp, Homo sapien
gcagattcagttaaagacaagccgg

SEQ ID NO: 4303711 - DNA, 25 bp, Homo sapien
aagccggttccataaaggttgatgc

SEQ ID NO: 4303712 - DNA, 25 bp, Homo sapien
taattcccttgtgatatccatctgg

SEQ ID NO: 4303713 - DNA, 25 bp, Homo sapien
ccaaaattttcttatcttactatca

SEQ ID NO: 4303714 - DNA, 25 bp, Homo sapien
ggtccgaacactgcagacgttgtag

SEQ ID NO: 4303715 - DNA, 25 bp, Homo sapien
ctgctgagtggctccgctgaaaagc

SEQ ID NO: 4303716 - DNA, 25 bp, Homo sapien
gctgaaaagccatccaacagaagat

SEQ ID NO: 4303717 - DNA, 25 bp, Homo sapien
tgaatttgcacttctggtccgaaca

SEQ ID NO: 4303718 - DNA, 25 bp, Homo sapien
cttaggacccactttcaggagctga

SEQ ID NO: 4303719 - DNA, 25 bp, Homo sapien
gaattacgagattagactccagagc

SEQ ID NO: 4303720 - DNA, 25 bp, Homo sapien
cagatgcaactgaggatgttcccgg

SEQ ID NO: 4303721 - DNA, 25 bp, Homo sapien
tagcactccgctgactgtacaatat

SEQ ID NO: 4303722 - DNA, 25 bp, Homo sapien
tgggcacttggcagcgctgtagcaa

SEQ ID NO: 4303723 - DNA, 25 bp, Homo sapien
gcgctgtagcaatccccggctgtgg

SEQ ID NO: 4303724 - DNA, 25 bp, Homo sapien
gacgggatgtccttcgcttgtcctt

SEQ ID NO: 4303725 - DNA, 25 bp, Homo sapien
tggcaaaagggacgggatgtccttc

SEQ ID NO: 4303726 - DNA, 25 bp, Homo sapien
ttccgacattggcagtcatcgcgcc

SEQ ID NO: 4303727 - DNA, 25 bp, Homo sapien
gcatgctggtcaggtctattctgat

SEQ ID NO: 4303728 - DNA, 25 bp, Homo sapien
cagcggccgtgtaatccttccgaca

SEQ ID NO: 4303729 - DNA, 25 bp, Homo sapien
cgccggctcccgttatagggacatt

SEQ ID NO: 4303730 - DNA, 25 bp, Homo sapien
ctgtgcccataaacctcggagaaat

SEQ ID NO: 4303731 - DNA, 25 bp, Homo sapien
gcaccagtgtcacgtactctttggg

SEQ ID NO: 4303732 - DNA, 25 bp, Homo sapien
tcagagtctccatgcaccagtgtca

SEQ ID NO: 4303733 - DNA, 25 bp, Homo sapien
gtcagagtgcatccccgcacagaat

SEQ ID NO: 4303734 - DNA, 25 bp, Homo sapien
agaagctttcctctaatcatcagga

SEQ ID NO: 4303735 - DNA, 25 bp, Homo sapien
ctccttgcaattctggggtaactca

SEQ ID NO: 4303736 - DNA, 25 bp, Homo sapien
tcagaagctttcctctaatcatcag

SEQ ID NO: 4303737 - DNA, 25 bp, Homo sapien
tccttgcaattctggggtaactcac

SEQ ID NO: 4303738 - DNA, 25 bp, Homo sapien
tcagatcagtgtggcataagtggct

SEQ ID NO: 4303739 - DNA, 25 bp, Homo sapien
ttggtcctcattggttaaacattgc

SEQ ID NO: 4303740 - DNA, 25 bp, Homo sapien
tctgcatcactccaacaccacaaga

SEQ ID NO: 4303741 - DNA, 25 bp, Homo sapien
ttatagacattacggcaggtttttc

SEQ ID NO: 4303742 - DNA, 25 bp, Homo sapien
ttaggcaggacatgtttaagacggg

SEQ ID NO: 4303743 - DNA, 25 bp, Homo sapien
aagaagtccctttgatccctgttag

SEQ ID NO: 4303744 - DNA, 25 bp, Homo sapien
ggctttcagatttgagtgctcagtc

SEQ ID NO: 4303745 - DNA, 25 bp, Homo sapien
catttcaagttgctaactccagggt

SEQ ID NO: 4303746 - DNA, 25 bp, Homo sapien
gatggtggtttggtagctgtattca

SEQ ID NO: 4303747 - DNA, 25 bp, Homo sapien
agttgccaactctccaggtggccga

SEQ ID NO: 4303748 - DNA, 25 bp, Homo sapien
gtattcataattctccttcccggtg

SEQ ID NO: 4303749 - DNA, 25 bp, Homo sapien
ctcgctgcacgagacaagcctttgt

SEQ ID NO: 4303750 - DNA, 25 bp, Homo sapien
gagaggagaggttcgagcagttcct

SEQ ID NO: 4303751 - DNA, 25 bp, Homo sapien
caccaagcgctgaccgtgtgactat

SEQ ID NO: 4303752 - DNA, 25 bp, Homo sapien
gtgactatgctgcagaaagctccca

SEQ ID NO: 4303753 - DNA, 25 bp, Homo sapien
tgggggcagcccacaataggcccct

SEQ ID NO: 4303754 - DNA, 25 bp, Homo sapien
aagggtctagataagcactgtgcac

SEQ ID NO: 4303755 - DNA, 25 bp, Homo sapien
tgttaaacaggcacaacacatctgg

SEQ ID NO: 4303756 - DNA, 25 bp, Homo sapien
ttcacagtggcaaatcgggcgggta

SEQ ID NO: 4303757 - DNA, 25 bp, Homo sapien
cacagcatcctatgagtttgcagcc

SEQ ID NO: 4303758 - DNA, 25 bp, Homo sapien
tgaccattctcctgtgatccagaca

SEQ ID NO: 4303759 - DNA, 25 bp, Homo sapien
tactcgcagggttgcaaactacagc

SEQ ID NO: 4303760 - DNA, 25 bp, Homo sapien
tgatccagacatactcgcagggttg

SEQ ID NO: 4303761 - DNA, 25 bp, Homo sapien
aaactacagctttcacggtccaccg

SEQ ID NO: 4303762 - DNA, 25 bp, Homo sapien
acacaccaccttgcggtacctggag

SEQ ID NO: 4303763 - DNA, 25 bp, Homo sapien
tacctggagccttcgccgcaggtct

SEQ ID NO: 4303764 - DNA, 25 bp, Homo sapien
cccatgcacctcgtttttgttgtca

SEQ ID NO: 4303765 - DNA, 25 bp, Homo sapien
agcgtgccccatgcacctcgttttt

SEQ ID NO: 4303766 - DNA, 25 bp, Homo sapien
tcacaagtatagaattcagtggcct

SEQ ID NO: 4303767 - DNA, 25 bp, Homo sapien
gtggcctttattacctgacttctct

SEQ ID NO: 4303768 - DNA, 25 bp, Homo sapien
cagtggcctttaggacatttgcaat

SEQ ID NO: 4303769 - DNA, 25 bp, Homo sapien
ttcatcactgcaaaaggaagccttg

SEQ ID NO: 4303770 - DNA, 25 bp, Homo sapien
gcaacagtcagacatatctgagcac

SEQ ID NO: 4303771 - DNA, 25 bp, Homo sapien
caacagtcagacatatctgagcaca

SEQ ID NO: 4303772 - DNA, 25 bp, Homo sapien
ccttgcatgtatgggaaacatgaag

SEQ ID NO: 4303773 - DNA, 25 bp, Homo sapien
ttactgtcgtccttcacgctcagtc

SEQ ID NO: 4303774 - DNA, 25 bp, Homo sapien
tcgtccttcacgctcagtcttgctg

SEQ ID NO: 4303775 - DNA, 25 bp, Homo sapien
cagcaggccttgcatgtatgggaaa

SEQ ID NO: 4303776 - DNA, 25 bp, Homo sapien
gctcctcggagcagggttgagttta

SEQ ID NO: 4303777 - DNA, 25 bp, Homo sapien
ttgagtttagcgtgacacaaagagg

SEQ ID NO: 4303778 - DNA, 25 bp, Homo sapien
ttccgctcctcggagcagggttgag

SEQ ID NO: 4303779 - DNA, 25 bp, Homo sapien
agcagggttgagtttagcgtgacac

SEQ ID NO: 4303780 - DNA, 25 bp, Homo sapien
cacccttgttggagcgaatgcgcga

SEQ ID NO: 4303781 - DNA, 25 bp, Homo sapien
gaatgcgcgagtctgacagtgaacc

SEQ ID NO: 4303782 - DNA, 25 bp, Homo sapien
gatatctgaatgcattcggcccaca

SEQ ID NO: 4303783 - DNA, 25 bp, Homo sapien
gaaagagccagcattgtaaccgtgc

SEQ ID NO: 4303784 - DNA, 25 bp, Homo sapien
actccggtctggtgtatgggttgca

SEQ ID NO: 4303785 - DNA, 25 bp, Homo sapien
tgtgtgttccgatctgacagcccac

SEQ ID NO: 4303786 - DNA, 25 bp, Homo sapien
actcggtctctctggctattttgtg

SEQ ID NO: 4303787 - DNA, 25 bp, Homo sapien
ttggcagtcgcgttccgactccggt

SEQ ID NO: 4303788 - DNA, 25 bp, Homo sapien
ggatgactaggctgtaactaccagc

SEQ ID NO: 4303789 - DNA, 25 bp, Homo sapien
tgctgcaagtggacaatcattactc

SEQ ID NO: 4303790 - DNA, 25 bp, Homo sapien
taatctttaatcatgcagaccgtct

SEQ ID NO: 4303791 - DNA, 25 bp, Homo sapien
ccactggatcattaggaagccaata

SEQ ID NO: 4303792 - DNA, 25 bp, Homo sapien
cagtgcagtctgagttagtagtttt

SEQ ID NO: 4303793 - DNA, 25 bp, Homo sapien
tagaactttcgtcaacagccctttc

SEQ ID NO: 4303794 - DNA, 25 bp, Homo sapien
tccaagataaactgagactcaattt

SEQ ID NO: 4303795 - DNA, 25 bp, Homo sapien
gaccacagtcagcttcagtgcagtc

SEQ ID NO: 4303796 - DNA, 25 bp, Homo sapien
ttcctcctcggcactttctgtgccc

SEQ ID NO: 4303797 - DNA, 25 bp, Homo sapien
cagtaatcactttctaaatggcttc

SEQ ID NO: 4303798 - DNA, 25 bp, Homo sapien
ggcttagccaggtgcttacagtaat

SEQ ID NO: 4303799 - DNA, 25 bp, Homo sapien
tccaagcgccagctttccatttggg

SEQ ID NO: 4303800 - DNA, 25 bp, Homo sapien
ttatgccctcgaccacaagagacag

SEQ ID NO: 4303801 - DNA, 25 bp, Homo sapien
cagtaaacatttcgttgtttatgcc

SEQ ID NO: 4303802 - DNA, 25 bp, Homo sapien
catttcgttgtttatgccctcgacc

SEQ ID NO: 4303803 - DNA, 25 bp, Homo sapien
gttgtttatgccctcgaccacaaga

SEQ ID NO: 4303804 - DNA, 25 bp, Homo sapien
gctggctcgggttttcaagacacat

SEQ ID NO: 4303805 - DNA, 25 bp, Homo sapien
gtttaggaatcaaagtgcccatgga

SEQ ID NO: 4303806 - DNA, 25 bp, Homo sapien
gtaagctagcaggtaagtctgtgcc

SEQ ID NO: 4303807 - DNA, 25 bp, Homo sapien
tgggagggaggcattacctttcaac

SEQ ID NO: 4303808 - DNA, 25 bp, Homo sapien
cacacagagattctttgttgatggg

SEQ ID NO: 4303809 - DNA, 25 bp, Homo sapien
gttgtaaagggcctgctgaacatcc

SEQ ID NO: 4303810 - DNA, 25 bp, Homo sapien
tcaaaactgaattgattcaaattga

SEQ ID NO: 4303811 - DNA, 25 bp, Homo sapien
ggcctgctgaacatccgctcaatga

SEQ ID NO: 4303812 - DNA, 25 bp, Homo sapien
gactggctctaataaaatctatcat

SEQ ID NO: 4303813 - DNA, 25 bp, Homo sapien
cacctgactggctctaataaaatct

SEQ ID NO: 4303814 - DNA, 25 bp, Homo sapien
acagatgtaaagtcacctgactggc

SEQ ID NO: 4303815 - DNA, 25 bp, Homo sapien
agatgtaaagtcacctgactggctc

SEQ ID NO: 4303816 - DNA, 25 bp, Homo sapien
catttacatcgctgcagaaagctac

SEQ ID NO: 4303817 - DNA, 25 bp, Homo sapien
tgctaatcaccagatgcatgggcat

SEQ ID NO: 4303818 - DNA, 25 bp, Homo sapien
tgaggttgccctgtccgatatggta

SEQ ID NO: 4303819 - DNA, 25 bp, Homo sapien
tagccaccagcgacaggtagctatt

SEQ ID NO: 4303820 - DNA, 25 bp, Homo sapien
tagactacttaatgtcctcctggga

SEQ ID NO: 4303821 - DNA, 25 bp, Homo sapien
gcaatgcacaaaggaacaccgaaga

SEQ ID NO: 4303822 - DNA, 25 bp, Homo sapien
tattccaatgcacctaaagcaaggc

SEQ ID NO: 4303823 - DNA, 25 bp, Homo sapien
taaatccgcaatgacttgagccaga

SEQ ID NO: 4303824 - DNA, 25 bp, Homo sapien
caagtgttgaagtaggcaatctcca

SEQ ID NO: 4303825 - DNA, 25 bp, Homo sapien
gtaacaagtgttgaagtaggcaatc

SEQ ID NO: 4303826 - DNA, 25 bp, Homo sapien
ttagtaacaagtgttgaagtaggca

SEQ ID NO: 4303827 - DNA, 25 bp, Homo sapien
gttgaagtaggcaatctccattttg

SEQ ID NO: 4303828 - DNA, 25 bp, Homo sapien
cttggagaaggctaattcacacagc

SEQ ID NO: 4303829 - DNA, 25 bp, Homo sapien
ggagaaggctaattcacacagcagc

SEQ ID NO: 4303830 - DNA, 25 bp, Homo sapien
gcagcagttgcttcttgacatcatc

SEQ ID NO: 4303831 - DNA, 25 bp, Homo sapien
tgacatcatctaatgcatgggagta

SEQ ID NO: 4303832 - DNA, 25 bp, Homo sapien
aatgaactacgactttgtggacagc

SEQ ID NO: 4303833 - DNA, 25 bp, Homo sapien
caaccaggcagaaggattaattgct

SEQ ID NO: 4303834 - DNA, 25 bp, Homo sapien
gcttatgggcacaactcagccaaag

SEQ ID NO: 4303835 - DNA, 25 bp, Homo sapien
gactagagatacaacagaccagagc

SEQ ID NO: 4303836 - DNA, 25 bp, Homo sapien
tgttcagagctgtacccgagtcaca

SEQ ID NO: 4303837 - DNA, 25 bp, Homo sapien
aaggcagctacttcttggcaccagg

SEQ ID NO: 4303838 - DNA, 25 bp, Homo sapien
gagtcacacaggcaaattacagtca

SEQ ID NO: 4303839 - DNA, 25 bp, Homo sapien
cagatagcaaaggaagactaggacc

SEQ ID NO: 4303840 - DNA, 25 bp, Homo sapien
gctcaaatctggaaaccgttcaccg

SEQ ID NO: 4303841 - DNA, 25 bp, Homo sapien
ccatgcagcgtcgtgtggacaagca

SEQ ID NO: 4303842 - DNA, 25 bp, Homo sapien
gttcaccgttggaccgctgacagac

SEQ ID NO: 4303843 - DNA, 25 bp, Homo sapien
tgttacactgctcacgatcgggagg

SEQ ID NO: 4303844 - DNA, 25 bp, Homo sapien
ggctctttgctcatcaggttttatt

SEQ ID NO: 4303845 - DNA, 25 bp, Homo sapien
ccagttgccataagcccactgagga

SEQ ID NO: 4303846 - DNA, 25 bp, Homo sapien
gacaagggccggattcacaggctct

SEQ ID NO: 4303847 - DNA, 25 bp, Homo sapien
tattctctccacacagtcgtttgcg

SEQ ID NO: 4303848 - DNA, 25 bp, Homo sapien
tgacatacaacaacacgccgctggg

SEQ ID NO: 4303849 - DNA, 25 bp, Homo sapien
tacaacaacacgccgctgggatccg

SEQ ID NO: 4303850 - DNA, 25 bp, Homo sapien
ctgacatacaacaacacgccgctgg

SEQ ID NO: 4303851 - DNA, 25 bp, Homo sapien
acatacaacaacacgccgctgggat

SEQ ID NO: 4303852 - DNA, 25 bp, Homo sapien
tgcctcaggccctctacaggggttc

SEQ ID NO: 4303853 - DNA, 25 bp, Homo sapien
gggttccataaatgcctaatgtgac

SEQ ID NO: 4303854 - DNA, 25 bp, Homo sapien
gcctaatgtgacttccaaagcaggc

SEQ ID NO: 4303855 - DNA, 25 bp, Homo sapien
tcaggccctctacaggggttccata

SEQ ID NO: 4303856 - DNA, 25 bp, Homo sapien
ttccatagtgctggtcacaggattt

SEQ ID NO: 4303857 - DNA, 25 bp, Homo sapien
tccatggtattctctctccaatatg

SEQ ID NO: 4303858 - DNA, 25 bp, Homo sapien
tctggaagaaacagctctagaaact

SEQ ID NO: 4303859 - DNA, 25 bp, Homo sapien
tacctggtccagttaaagattctgg

SEQ ID NO: 4303860 - DNA, 25 bp, Homo sapien
acctgatccatggtcaagcaatcca

SEQ ID NO: 4303861 - DNA, 25 bp, Homo sapien
gatgaacacctgatccatggtcaag

SEQ ID NO: 4303862 - DNA, 25 bp, Homo sapien
gcaaggatgaacacctgatccatgg

SEQ ID NO: 4303863 - DNA, 25 bp, Homo sapien
tgatgggtgcaaggatgaacacctg

SEQ ID NO: 4303864 - DNA, 25 bp, Homo sapien
cttttccttacatctggcagcccaa

SEQ ID NO: 4303865 - DNA, 25 bp, Homo sapien
ttccttacatctggcagcccaattt

SEQ ID NO: 4303866 - DNA, 25 bp, Homo sapien
ttttccttacatctggcagcccaat

SEQ ID NO: 4303867 - DNA, 25 bp, Homo sapien
tttccttacatctggcagcccaatt

SEQ ID NO: 4303868 - DNA, 25 bp, Homo sapien
cagtgtttataaccctttgccgcct

SEQ ID NO: 4303869 - DNA, 25 bp, Homo sapien
gcaggaagaccatgtacagtttgtg

SEQ ID NO: 4303870 - DNA, 25 bp, Homo sapien
agcttcagcctcacttaacgtaggg

SEQ ID NO: 4303871 - DNA, 25 bp, Homo sapien
cacgtcaagctagggctgaaaatca

SEQ ID NO: 4303872 - DNA, 25 bp, Homo sapien
ggtattacccatcgccacaaaaagc

SEQ ID NO: 4303873 - DNA, 25 bp, Homo sapien
gacactcggtgattacttccttgga

SEQ ID NO: 4303874 - DNA, 25 bp, Homo sapien
taaccgcagtgggaaacagacagct

SEQ ID NO: 4303875 - DNA, 25 bp, Homo sapien
tcttgggcaacttggcagctgttct

SEQ ID NO: 4303876 - DNA, 25 bp, Homo sapien
caaagacagtgggtgcaaatgctca

SEQ ID NO: 4303877 - DNA, 25 bp, Homo sapien
tccgatcgatcacgtggtcactgta

SEQ ID NO: 4303878 - DNA, 25 bp, Homo sapien
tagttgacacacatcacttgccggg

SEQ ID NO: 4303879 - DNA, 25 bp, Homo sapien
gcatggtgacatggaacagtcctgg

SEQ ID NO: 4303880 - DNA, 25 bp, Homo sapien
ggtgctgagctaagccactgtctgg

SEQ ID NO: 4303881 - DNA, 25 bp, Homo sapien
cacagagccattctcatctcggcag

SEQ ID NO: 4303882 - DNA, 25 bp, Homo sapien
gcagctgacgtatctcatccgggta

SEQ ID NO: 4303883 - DNA, 25 bp, Homo sapien
aggcagggtagcacaggcactctcg

SEQ ID NO: 4303884 - DNA, 25 bp, Homo sapien
ctttgccactggtctaggcagggta

SEQ ID NO: 4303885 - DNA, 25 bp, Homo sapien
gtatgtgcttctcctcgtttccggg

SEQ ID NO: 4303886 - DNA, 25 bp, Homo sapien
tcttggtgcactgtatgtgcttctc

SEQ ID NO: 4303887 - DNA, 25 bp, Homo sapien
gatgacatgatggtaattcacagtc

SEQ ID NO: 4303888 - DNA, 25 bp, Homo sapien
gggaggatgacatgatggtaattca

SEQ ID NO: 4303889 - DNA, 25 bp, Homo sapien
gcaaagctgctatgcaaacccgagt

SEQ ID NO: 4303890 - DNA, 25 bp, Homo sapien
ccaaatgagcgtagttcaggcatga

SEQ ID NO: 4303891 - DNA, 25 bp, Homo sapien
ggagatagtacatcagccacatggg

SEQ ID NO: 4303892 - DNA, 25 bp, Homo sapien
tacatgatgccaaaatcaaggccca

SEQ ID NO: 4303893 - DNA, 25 bp, Homo sapien
ggtatcagttggtctagttgctgca

SEQ ID NO: 4303894 - DNA, 25 bp, Homo sapien
agttgctgcattacagtcattgtca

SEQ ID NO: 4303895 - DNA, 25 bp, Homo sapien
gctggtatccctgtccacaagtgac

SEQ ID NO: 4303896 - DNA, 25 bp, Homo sapien
taagtcccaatgatgcatttcactg

SEQ ID NO: 4303897 - DNA, 25 bp, Homo sapien
cactgaagcaactgttaagctggca

SEQ ID NO: 4303898 - DNA, 25 bp, Homo sapien
taagtagaggaagtgatgccacaga

SEQ ID NO: 4303899 - DNA, 25 bp, Homo sapien
gggagctccaagaattggtccctcc

SEQ ID NO: 4303900 - DNA, 25 bp, Homo sapien
agactagggagctccaagaattggt

SEQ ID NO: 4303901 - DNA, 25 bp, Homo sapien
tgccaggatgcacattccggctgct

SEQ ID NO: 4303902 - DNA, 25 bp, Homo sapien
ttcaccaaactgacaccagacctgg

SEQ ID NO: 4303903 - DNA, 25 bp, Homo sapien
cagacctggcggtgcttatgccctt

SEQ ID NO: 4303904 - DNA, 25 bp, Homo sapien
tccggctgctgacaagtctgcatag

SEQ ID NO: 4303905 - DNA, 25 bp, Homo sapien
tataaccagtcacaagatctctctg

SEQ ID NO: 4303906 - DNA, 25 bp, Homo sapien
gttttaacacttatataaccagtca

SEQ ID NO: 4303907 - DNA, 25 bp, Homo sapien
cacagctccatgctataaaatttga

SEQ ID NO: 4303908 - DNA, 25 bp, Homo sapien
gggaattataaatcacatcaaccta

SEQ ID NO: 4303909 - DNA, 25 bp, Homo sapien
tcagtgacttagctagggctcaaag

SEQ ID NO: 4303910 - DNA, 25 bp, Homo sapien
ccctgaggtcactggtagactagtt

SEQ ID NO: 4303911 - DNA, 25 bp, Homo sapien
gttacatccagtacgacagtcatgg

SEQ ID NO: 4303912 - DNA, 25 bp, Homo sapien
tgtcttaaacagatagagagcacca

SEQ ID NO: 4303913 - DNA, 25 bp, Homo sapien
ctaggggaaataacagccctcccat

SEQ ID NO: 4303914 - DNA, 25 bp, Homo sapien
aggggaaataacagccctcccatct

SEQ ID NO: 4303915 - DNA, 25 bp, Homo sapien
ggaaataacagccctcccatcttac

SEQ ID NO: 4303916 - DNA, 25 bp, Homo sapien
gggaaataacagccctcccatctta

SEQ ID NO: 4303917 - DNA, 25 bp, Homo sapien
gaactcactgcacctctgaatggta

SEQ ID NO: 4303918 - DNA, 25 bp, Homo sapien
ctgtcatccagtacatcatttcggg

SEQ ID NO: 4303919 - DNA, 25 bp, Homo sapien
ccactgtggacaagggaactcactg

SEQ ID NO: 4303920 - DNA, 25 bp, Homo sapien
tgggtcccaccgtcacagctttttg

SEQ ID NO: 4303921 - DNA, 25 bp, Homo sapien
atctcttccgcacagcctaaatggg

SEQ ID NO: 4303922 - DNA, 25 bp, Homo sapien
gactctttgagtgagagccaactta

SEQ ID NO: 4303923 - DNA, 25 bp, Homo sapien
gggcttacacacctgcaaggagcca

SEQ ID NO: 4303924 - DNA, 25 bp, Homo sapien
gccaccatcaactaatcagacagca

SEQ ID NO: 4303925 - DNA, 25 bp, Homo sapien
cagtagatgtccaatgtgcggtaac

SEQ ID NO: 4303926 - DNA, 25 bp, Homo sapien
gtgcggtaacccaagccacactggg

SEQ ID NO: 4303927 - DNA, 25 bp, Homo sapien
tgggcactacattcactcctgctgg

SEQ ID NO: 4303928 - DNA, 25 bp, Homo sapien
tcagtccaggcagaatagcgccagc

SEQ ID NO: 4303929 - DNA, 25 bp, Homo sapien
tcatggctgccaatgtacatagaag

SEQ ID NO: 4303930 - DNA, 25 bp, Homo sapien
tcgaataccatgaagcccaaagcca

SEQ ID NO: 4303931 - DNA, 25 bp, Homo sapien
gccacagtcagttgctaaaatctaa

SEQ ID NO: 4303932 - DNA, 25 bp, Homo sapien
tcacagaatgacagccagaggtgtt

SEQ ID NO: 4303933 - DNA, 25 bp, Homo sapien
gagccttcagtcagaactggcaaaa

SEQ ID NO: 4303934 - DNA, 25 bp, Homo sapien
taatctgccctaaagcactacaggc

SEQ ID NO: 4303935 - DNA, 25 bp, Homo sapien
ccaatttcactagggcaatgagcta

SEQ ID NO: 4303936 - DNA, 25 bp, Homo sapien
caatgagctagaaagtcagtgacac

SEQ ID NO: 4303937 - DNA, 25 bp, Homo sapien
gaaacagtaagctgatcagattccc

SEQ ID NO: 4303938 - DNA, 25 bp, Homo sapien
gccgatcgcatctttgatcagaaac

SEQ ID NO: 4303939 - DNA, 25 bp, Homo sapien
ggcagccgatcgcatctttgatcag

SEQ ID NO: 4303940 - DNA, 25 bp, Homo sapien
gattccctggtgcaaacaagttttc

SEQ ID NO: 4303941 - DNA, 25 bp, Homo sapien
aatagcgtacatcggggttgtacaa

SEQ ID NO: 4303942 - DNA, 25 bp, Homo sapien
tatcttcaattggaatattgaaaga

SEQ ID NO: 4303943 - DNA, 25 bp, Homo sapien
tattgaaagaatagcgtacatcggg

SEQ ID NO: 4303944 - DNA, 25 bp, Homo sapien
ggcccatgactgttccagtaaaact

SEQ ID NO: 4303945 - DNA, 25 bp, Homo sapien
ccaatgcgaatttcccttttggcca

SEQ ID NO: 4303946 - DNA, 25 bp, Homo sapien
gcaagaattcacctttactgcttga

SEQ ID NO: 4303947 - DNA, 25 bp, Homo sapien
taattctttctacggcagtctcgga

SEQ ID NO: 4303948 - DNA, 25 bp, Homo sapien
caaagtttccatttagcaagaattc

SEQ ID NO: 4303949 - DNA, 25 bp, Homo sapien
ggaatgactgcaatcactaggacaa

SEQ ID NO: 4303950 - DNA, 25 bp, Homo sapien
caccctctgagtgagtaatctggga

SEQ ID NO: 4303951 - DNA, 25 bp, Homo sapien
tgttgtgaggatactaaagaaccca

SEQ ID NO: 4303952 - DNA, 25 bp, Homo sapien
agtggattctccagccctagttgag

SEQ ID NO: 4303953 - DNA, 25 bp, Homo sapien
gacttgagaaaaatacgtgtcacca

SEQ ID NO: 4303954 - DNA, 25 bp, Homo sapien
tagatctgagtgtaagccatgcggc

SEQ ID NO: 4303955 - DNA, 25 bp, Homo sapien
gaaacttttgcaacgaacaggcata

SEQ ID NO: 4303956 - DNA, 25 bp, Homo sapien
tcaacacagggtcatcggcatgttg

SEQ ID NO: 4303957 - DNA, 25 bp, Homo sapien
tttcccctgagaaactgtgctgccg

SEQ ID NO: 4303958 - DNA, 25 bp, Homo sapien
ggaattcggaccacagtattgtaac

SEQ ID NO: 4303959 - DNA, 25 bp, Homo sapien
cgcacatcaatattggtagcaccag

SEQ ID NO: 4303960 - DNA, 25 bp, Homo sapien
gagaaactgtgctgccgcacatcaa

SEQ ID NO: 4303961 - DNA, 25 bp, Homo sapien
gactgatttttatgctcgacattaa

SEQ ID NO: 4303962 - DNA, 25 bp, Homo sapien
tattaggtgccttctagtcgatgga

SEQ ID NO: 4303963 - DNA, 25 bp, Homo sapien
ggataatccaccataacgagactga

SEQ ID NO: 4303964 - DNA, 25 bp, Homo sapien
gcatattacatgtggttaacaattt

SEQ ID NO: 4303965 - DNA, 25 bp, Homo sapien
catgaagaattatcgccaccacaaa

SEQ ID NO: 4303966 - DNA, 25 bp, Homo sapien
ttaaatgttcctgccactgttttgc

SEQ ID NO: 4303967 - DNA, 25 bp, Homo sapien
gagtttaaaacatgatcgcatccag

SEQ ID NO: 4303968 - DNA, 25 bp, Homo sapien
cacatttatctctccgggcttttga

SEQ ID NO: 4303969 - DNA, 25 bp, Homo sapien
gattcctcaggtgcttcatctacag

SEQ ID NO: 4303970 - DNA, 25 bp, Homo sapien
actccagactattgctgccatgagg

SEQ ID NO: 4303971 - DNA, 25 bp, Homo sapien
gctatttaaaatgtggtccttggac

SEQ ID NO: 4303972 - DNA, 25 bp, Homo sapien
tcatgccccatcttaagggagtagc

SEQ ID NO: 4303973 - DNA, 25 bp, Homo sapien
tcacaggttggcagcgggaaaacac

SEQ ID NO: 4303974 - DNA, 25 bp, Homo sapien
gaaatggtatctagcccctgagaaa

SEQ ID NO: 4303975 - DNA, 25 bp, Homo sapien
tatctaggaagccacaaatcacagg

SEQ ID NO: 4303976 - DNA, 25 bp, Homo sapien
tattgatgctgttgctgatcccggg

SEQ ID NO: 4303977 - DNA, 25 bp, Homo sapien
tctgtctcgaagctgatagtaggct

SEQ ID NO: 4303978 - DNA, 25 bp, Homo sapien
gcagaacaacttgcaccggtccttc

SEQ ID NO: 4303979 - DNA, 25 bp, Homo sapien
caaggagttccatctatcactctgt

SEQ ID NO: 4303980 - DNA, 25 bp, Homo sapien
aacttgcaccggtccttcatcagaa

SEQ ID NO: 4303981 - DNA, 25 bp, Homo sapien
gcttctgcttgagacatggctccgt

SEQ ID NO: 4303982 - DNA, 25 bp, Homo sapien
ccactgtatttagggacccagcgca

SEQ ID NO: 4303983 - DNA, 25 bp, Homo sapien
cgcacattgggaagcagaccgttga

SEQ ID NO: 4303984 - DNA, 25 bp, Homo sapien
gagcacactgttcatctcggaagtc

SEQ ID NO: 4303985 - DNA, 25 bp, Homo sapien
tgatgccccctccacatgttctgga

SEQ ID NO: 4303986 - DNA, 25 bp, Homo sapien
ttttgatgccccctccacatgttct

SEQ ID NO: 4303987 - DNA, 25 bp, Homo sapien
tctggtctgttgcactctcgaatgg

SEQ ID NO: 4303988 - DNA, 25 bp, Homo sapien
gtctgttgcactctcgaatggctgt

SEQ ID NO: 4303989 - DNA, 25 bp, Homo sapien
ggaacacaaaatccatacttgcagt

SEQ ID NO: 4303990 - DNA, 25 bp, Homo sapien
gggaacacaaaatccatacttgcag

SEQ ID NO: 4303991 - DNA, 25 bp, Homo sapien
gaacacaaaatccatacttgcagtg

SEQ ID NO: 4303992 - DNA, 25 bp, Homo sapien
tgggaacacaaaatccatacttgca

SEQ ID NO: 4303993 - DNA, 25 bp, Homo sapien
tggttatagacagggccaaaatgag

SEQ ID NO: 4303994 - DNA, 25 bp, Homo sapien
cacacttagtgattttaggctgggt

SEQ ID NO: 4303995 - DNA, 25 bp, Homo sapien
gctccaggctgacagggtaactcca

SEQ ID NO: 4303996 - DNA, 25 bp, Homo sapien
agacttggcgctgtgagttgttaca

SEQ ID NO: 4303997 - DNA, 25 bp, Homo sapien
gatgccaaacatcacaaagaggcag

SEQ ID NO: 4303998 - DNA, 25 bp, Homo sapien
cttagtatacaacttagcacatggg

SEQ ID NO: 4303999 - DNA, 25 bp, Homo sapien
actcttaactgggacacatgctgcc

SEQ ID NO: 4304000 - DNA, 25 bp, Homo sapien
tgagatggctaggtaagactgagac

SEQ ID NO: 4304001 - DNA, 25 bp, Homo sapien
tccctacggatagaggtggtcagag

SEQ ID NO: 4304002 - DNA, 25 bp, Homo sapien
ttggcaatagaacctatattttcca

SEQ ID NO: 4304003 - DNA, 25 bp, Homo sapien
cactgggtaggattcctgaagaggc

SEQ ID NO: 4304004 - DNA, 25 bp, Homo sapien
gtaagcagaattcactgggtaggat

SEQ ID NO: 4304005 - DNA, 25 bp, Homo sapien
acagccattttgtaccttgaggaca

SEQ ID NO: 4304006 - DNA, 25 bp, Homo sapien
gcaaccacagccattttgtaccttg

SEQ ID NO: 4304007 - DNA, 25 bp, Homo sapien
ccacagccattttgtaccttgagga

SEQ ID NO: 4304008 - DNA, 25 bp, Homo sapien
ggaagtcagactccatggctggagc

SEQ ID NO: 4304009 - DNA, 25 bp, Homo sapien
ccatccctcagaagatagaaaatta

SEQ ID NO: 4304010 - DNA, 25 bp, Homo sapien
gaagatagaaaattaccctacgatc

SEQ ID NO: 4304011 - DNA, 25 bp, Homo sapien
ggtctgctgaaagctctcccgaagc

SEQ ID NO: 4304012 - DNA, 25 bp, Homo sapien
cacttgcttgtgtttagcaggagca

SEQ ID NO: 4304013 - DNA, 25 bp, Homo sapien
tgtgtactccattgacgttattgca

SEQ ID NO: 4304014 - DNA, 25 bp, Homo sapien
cattgacgttattgcaccagagccg

SEQ ID NO: 4304015 - DNA, 25 bp, Homo sapien
tgtgtgctgagtccggcagcctttg

SEQ ID NO: 4304016 - DNA, 25 bp, Homo sapien
tgcaccagagccgtctgcactgcat

SEQ ID NO: 4304017 - DNA, 25 bp, Homo sapien
tgggcacacctgagaacctggtcca

SEQ ID NO: 4304018 - DNA, 25 bp, Homo sapien
gatgcctggcagttggacaggcaaa

SEQ ID NO: 4304019 - DNA, 25 bp, Homo sapien
gtttattcacgttgtaaaggatgcc

SEQ ID NO: 4304020 - DNA, 25 bp, Homo sapien
tcaggttcgttaagcaaacactcgc

SEQ ID NO: 4304021 - DNA, 25 bp, Homo sapien
tgtttactttgtagaaccacatgca

SEQ ID NO: 4304022 - DNA, 25 bp, Homo sapien
gatgcgtgagcgaatcaatgactca

SEQ ID NO: 4304023 - DNA, 25 bp, Homo sapien
caatgaatacaacatagccagtagg

SEQ ID NO: 4304024 - DNA, 25 bp, Homo sapien
tacaacgttgatcacacttcacagc

SEQ ID NO: 4304025 - DNA, 25 bp, Homo sapien
gagttctgattgataaagcctcctc

SEQ ID NO: 4304026 - DNA, 25 bp, Homo sapien
aaattcacacccgttgagttctgat

SEQ ID NO: 4304027 - DNA, 25 bp, Homo sapien
ttccccgtggttgcagaaatataca

SEQ ID NO: 4304028 - DNA, 25 bp, Homo sapien
tttcatacttctgagcgagaagagc

SEQ ID NO: 4304029 - DNA, 25 bp, Homo sapien
tgtaggccaggcactagaagtttgt

SEQ ID NO: 4304030 - DNA, 25 bp, Homo sapien
taattggatctttgagcagcctagc

SEQ ID NO: 4304031 - DNA, 25 bp, Homo sapien
tgtcctcaactcaacaatgtgggag

SEQ ID NO: 4304032 - DNA, 25 bp, Homo sapien
tagaagtgcataaatacctgtggcc

SEQ ID NO: 4304033 - DNA, 25 bp, Homo sapien
cagtgttggagccatgacatgctgg

SEQ ID NO: 4304034 - DNA, 25 bp, Homo sapien
gacatgctggggactcttaactcct

SEQ ID NO: 4304035 - DNA, 25 bp, Homo sapien
tttgaccacatccaggggttggtgt

SEQ ID NO: 4304036 - DNA, 25 bp, Homo sapien
gatatattttcgactacactttgac

SEQ ID NO: 4304037 - DNA, 25 bp, Homo sapien
cagctcatgggcgatcgtaaaagct

SEQ ID NO: 4304038 - DNA, 25 bp, Homo sapien
agctgtactcaatccactatcttca

SEQ ID NO: 4304039 - DNA, 25 bp, Homo sapien
cactaatagaacagcttctataggg

SEQ ID NO: 4304040 - DNA, 25 bp, Homo sapien
ttctatagggatcacaaatggttcc

SEQ ID NO: 4304041 - DNA, 25 bp, Homo sapien
atcacatttgtcgtgagctctgcag

SEQ ID NO: 4304042 - DNA, 25 bp, Homo sapien
aggtatcacatttgtcgtgagctct

SEQ ID NO: 4304043 - DNA, 25 bp, Homo sapien
ctaaggtatcacatttgtcgtgagc

SEQ ID NO: 4304044 - DNA, 25 bp, Homo sapien
gtatcacatttgtcgtgagctctgc

SEQ ID NO: 4304045 - DNA, 25 bp, Homo sapien
gaggcacaattaagccagcacgcgt

SEQ ID NO: 4304046 - DNA, 25 bp, Homo sapien
tagggtcgtctaggcattcacaaca

SEQ ID NO: 4304047 - DNA, 25 bp, Homo sapien
tcatatactacatggcaacgccagg

SEQ ID NO: 4304048 - DNA, 25 bp, Homo sapien
tactaatacgtagtgagcagaggcc

SEQ ID NO: 4304049 - DNA, 25 bp, Homo sapien
acctggactgttcttcgaatgctgc

SEQ ID NO: 4304050 - DNA, 25 bp, Homo sapien
tcgaatgctgccactggcaaaagtt

SEQ ID NO: 4304051 - DNA, 25 bp, Homo sapien
cagtatcatgatggattccacctgg

SEQ ID NO: 4304052 - DNA, 25 bp, Homo sapien
tgtctgagcattaaaagatatggaa

SEQ ID NO: 4304053 - DNA, 25 bp, Homo sapien
gccatttcggatacagatagaagaa

SEQ ID NO: 4304054 - DNA, 25 bp, Homo sapien
aattatggttaatctgttgtaccga

SEQ ID NO: 4304055 - DNA, 25 bp, Homo sapien
tgtaccgatcccaattagatatgcc

SEQ ID NO: 4304056 - DNA, 25 bp, Homo sapien
cccaattagatatgccatttcggat

SEQ ID NO: 4304057 - DNA, 25 bp, Homo sapien
cattatgaatcacaattaagttcac

SEQ ID NO: 4304058 - DNA, 25 bp, Homo sapien
ttgggtctttatagatagaggctac

SEQ ID NO: 4304059 - DNA, 25 bp, Homo sapien
tccaatacttgggtctttatagata

SEQ ID NO: 4304060 - DNA, 25 bp, Homo sapien
tatgaatcacaattaagttcacaat

SEQ ID NO: 4304061 - DNA, 25 bp, Homo sapien
gcattgccacgtgacttaacagttc

SEQ ID NO: 4304062 - DNA, 25 bp, Homo sapien
tgtgaactccgtgtaagcaataagc

SEQ ID NO: 4304063 - DNA, 25 bp, Homo sapien
cacattgggtgcacgttagccgaca

SEQ ID NO: 4304064 - DNA, 25 bp, Homo sapien
tcacgtcttacgttgggctccacct

SEQ ID NO: 4304065 - DNA, 25 bp, Homo sapien
gcctggaagtctgcatagagaatga

SEQ ID NO: 4304066 - DNA, 25 bp, Homo sapien
cacaggtgactatggttcacaacca

SEQ ID NO: 4304067 - DNA, 25 bp, Homo sapien
tcctaagtgaggcaaaaagcattgg

SEQ ID NO: 4304068 - DNA, 25 bp, Homo sapien
tactactgaatatccacaactggct

SEQ ID NO: 4304069 - DNA, 25 bp, Homo sapien
tgctaagccgctgtttaatgctgct

SEQ ID NO: 4304070 - DNA, 25 bp, Homo sapien
tctccatggtatgaaaccattctgt

SEQ ID NO: 4304071 - DNA, 25 bp, Homo sapien
caagacttctacaaaccgtggatag

SEQ ID NO: 4304072 - DNA, 25 bp, Homo sapien
tgctgctacgtcaccagccaggtta

SEQ ID NO: 4304073 - DNA, 25 bp, Homo sapien
tccagtcataggaaatgtctaaaac

SEQ ID NO: 4304074 - DNA, 25 bp, Homo sapien
aggtctccagtcataggaaatgtct

SEQ ID NO: 4304075 - DNA, 25 bp, Homo sapien
gtctaaaactgggaaatctacagag

SEQ ID NO: 4304076 - DNA, 25 bp, Homo sapien
agaaagtagagtagtacaagttggg

SEQ ID NO: 4304077 - DNA, 25 bp, Homo sapien
aataattcagcatactttaggtggc

SEQ ID NO: 4304078 - DNA, 25 bp, Homo sapien
tcatcagagaggacttgggcacaag

SEQ ID NO: 4304079 - DNA, 25 bp, Homo sapien
tgggcacaagaaaacctgcagatga

SEQ ID NO: 4304080 - DNA, 25 bp, Homo sapien
ggaggatatttcacccacaagtaat

SEQ ID NO: 4304081 - DNA, 25 bp, Homo sapien
tgatgttaaattatattaaggggag

SEQ ID NO: 4304082 - DNA, 25 bp, Homo sapien
gctaaaacagataatagtttctgaa

SEQ ID NO: 4304083 - DNA, 25 bp, Homo sapien
cagataatagtttctgaaaaaccac

SEQ ID NO: 4304084 - DNA, 25 bp, Homo sapien
tctaatctgacttgttacaatgaaa

SEQ ID NO: 4304085 - DNA, 25 bp, Homo sapien
ttatttcggacctgctaaaacagat

SEQ ID NO: 4304086 - DNA, 25 bp, Homo sapien
tgtggtcataaggactgaatctcat

SEQ ID NO: 4304087 - DNA, 25 bp, Homo sapien
tccacaaagcacagaatggaagctt

SEQ ID NO: 4304088 - DNA, 25 bp, Homo sapien
taataccaaactcttctacctctgt

SEQ ID NO: 4304089 - DNA, 25 bp, Homo sapien
tatattctatccctcttcagcagca

SEQ ID NO: 4304090 - DNA, 25 bp, Homo sapien
ttccagaggtgtccttgacctgttg

SEQ ID NO: 4304091 - DNA, 25 bp, Homo sapien
ctctgatacctgctggtgaatcgtg

SEQ ID NO: 4304092 - DNA, 25 bp, Homo sapien
tgaatcgtgccatattctaaactgt

SEQ ID NO: 4304093 - DNA, 25 bp, Homo sapien
gaggtgtccttgacctgttggtcca

SEQ ID NO: 4304094 - DNA, 25 bp, Homo sapien
ctgaattcaaagaaggggtgcagaa

SEQ ID NO: 4304095 - DNA, 25 bp, Homo sapien
gaattcaaagaaggggtgcagaagt

SEQ ID NO: 4304096 - DNA, 25 bp, Homo sapien
attcaaagaaggggtgcagaagtag

SEQ ID NO: 4304097 - DNA, 25 bp, Homo sapien
tgaattcaaagaaggggtgcagaag

SEQ ID NO: 4304098 - DNA, 25 bp, Homo sapien
ctcacagcataacgtacaggtacct

SEQ ID NO: 4304099 - DNA, 25 bp, Homo sapien
aggtaccttgctacagttccttaag

SEQ ID NO: 4304100 - DNA, 25 bp, Homo sapien
ttccttaagtcacagaacatgagca

SEQ ID NO: 4304101 - DNA, 25 bp, Homo sapien
gcataacgtacaggtaccttgctac

SEQ ID NO: 4304102 - DNA, 25 bp, Homo sapien
catatatgttttcgtggcttccatt

SEQ ID NO: 4304103 - DNA, 25 bp, Homo sapien
acatatatgttttcgtggcttccat

SEQ ID NO: 4304104 - DNA, 25 bp, Homo sapien
atctcaaagagctgggctctccgct

SEQ ID NO: 4304105 - DNA, 25 bp, Homo sapien
aagagctgggctctccgcttaagca

SEQ ID NO: 4304106 - DNA, 25 bp, Homo sapien
caaagagctgggctctccgcttaag

SEQ ID NO: 4304107 - DNA, 25 bp, Homo sapien
gagctgggctctccgcttaagcaag

SEQ ID NO: 4304108 - DNA, 25 bp, Homo sapien
gggcgctgcgcctataaatgatgtg

SEQ ID NO: 4304109 - DNA, 25 bp, Homo sapien
aataatccccatcatgagaccggaa

SEQ ID NO: 4304110 - DNA, 25 bp, Homo sapien
tgcatgccttcctgttgagggctct

SEQ ID NO: 4304111 - DNA, 25 bp, Homo sapien
cccatcatgagaccggaatgtgccc

SEQ ID NO: 4304112 - DNA, 25 bp, Homo sapien
aacaatctcgacagcgcatttcggg

SEQ ID NO: 4304113 - DNA, 25 bp, Homo sapien
actttaagacccacgaacgacagcg

SEQ ID NO: 4304114 - DNA, 25 bp, Homo sapien
aacgacagcgcactgatggagcagc

SEQ ID NO: 4304115 - DNA, 25 bp, Homo sapien
ccttgaatcccagcaggctagaact

SEQ ID NO: 4304116 - DNA, 25 bp, Homo sapien
ctgggggtgagtatccaaggccccg

SEQ ID NO: 4304117 - DNA, 25 bp, Homo sapien
gtcacacgcgcgtggcagaaacgca

SEQ ID NO: 4304118 - DNA, 25 bp, Homo sapien
aagtttctgcgtcacacgcgcgtgg

SEQ ID NO: 4304119 - DNA, 25 bp, Homo sapien
tttctgcgtcacacgcgcgtggcag

SEQ ID NO: 4304120 - DNA, 25 bp, Homo sapien
ccgggaaagtttctgcgtcacacgc

SEQ ID NO: 4304121 - DNA, 25 bp, Homo sapien
aggaccacccttgctcgggccagaa

SEQ ID NO: 4304122 - DNA, 25 bp, Homo sapien
ggaaagtcaaggaccacccttgctc

SEQ ID NO: 4304123 - DNA, 25 bp, Homo sapien
gtcgcttgggaaagtcaaggaccac

SEQ ID NO: 4304124 - DNA, 25 bp, Homo sapien
agtcaaggaccacccttgctcgggc

SEQ ID NO: 4304125 - DNA, 25 bp, Homo sapien
gactcctcaaatgtcgtggagaagt

SEQ ID NO: 4304126 - DNA, 25 bp, Homo sapien
tcctcaaatgtcgtggagaagtggg

SEQ ID NO: 4304127 - DNA, 25 bp, Homo sapien
cgcagcgactcctcaaatgtcgtgg

SEQ ID NO: 4304128 - DNA, 25 bp, Homo sapien
gggggcagatgccttgtaagatcca

SEQ ID NO: 4304129 - DNA, 25 bp, Homo sapien
tccggacagcctctccaggctgtct

SEQ ID NO: 4304130 - DNA, 25 bp, Homo sapien
gtccggacagcctctccaggctgtc

SEQ ID NO: 4304131 - DNA, 25 bp, Homo sapien
acagcctctccaggctgtctcccac

SEQ ID NO: 4304132 - DNA, 25 bp, Homo sapien
cggacagcctctccaggctgtctcc

SEQ ID NO: 4304133 - DNA, 25 bp, Homo sapien
tagctgatatttaacgccggagagg

SEQ ID NO: 4304134 - DNA, 25 bp, Homo sapien
ttcctggcgcgtgaataaaggccct

SEQ ID NO: 4304135 - DNA, 25 bp, Homo sapien
tgcaaggcgcaccaataaggagtct

SEQ ID NO: 4304136 - DNA, 25 bp, Homo sapien
agtgtactcgcacgcacagagctag

SEQ ID NO: 4304137 - DNA, 25 bp, Homo sapien
ctcggagttggtattgacatagcct

SEQ ID NO: 4304138 - DNA, 25 bp, Homo sapien
aacttggtctgattcaccccgggcg

SEQ ID NO: 4304139 - DNA, 25 bp, Homo sapien
aaacagtgcttgagttccgcttcct

SEQ ID NO: 4304140 - DNA, 25 bp, Homo sapien
gaacagtggagcgataaatccggca

SEQ ID NO: 4304141 - DNA, 25 bp, Homo sapien
ctggccgaaggcagagaggcggtaa

SEQ ID NO: 4304142 - DNA, 25 bp, Homo sapien
ggccgaaggcagagaggcggtaatg

SEQ ID NO: 4304143 - DNA, 25 bp, Homo sapien
tggccgaaggcagagaggcggtaat

SEQ ID NO: 4304144 - DNA, 25 bp, Homo sapien
gttaatgctccgtcgcgttcttttg

SEQ ID NO: 4304145 - DNA, 25 bp, Homo sapien
atgctccgtcgcgttcttttgaagt

SEQ ID NO: 4304146 - DNA, 25 bp, Homo sapien
cagagttaatgctccgtcgcgttct

SEQ ID NO: 4304147 - DNA, 25 bp, Homo sapien
gctccgtcgcgttcttttgaagtgg

SEQ ID NO: 4304148 - DNA, 25 bp, Homo sapien
ggaaagggttctccgagagcgttca

SEQ ID NO: 4304149 - DNA, 25 bp, Homo sapien
gaaagggttctccgagagcgttcac

SEQ ID NO: 4304150 - DNA, 25 bp, Homo sapien
tcgctcagggtctctaataatttca

SEQ ID NO: 4304151 - DNA, 25 bp, Homo sapien
cgatttcgtattcgctcagggtctc

SEQ ID NO: 4304152 - DNA, 25 bp, Homo sapien
tgggagacacgatttcgtattcgct

SEQ ID NO: 4304153 - DNA, 25 bp, Homo sapien
cgtattcgctcagggtctctaataa

SEQ ID NO: 4304154 - DNA, 25 bp, Homo sapien
cccgcaccaggagcgttagcagtgt

SEQ ID NO: 4304155 - DNA, 25 bp, Homo sapien
ccaggagcgttagcagtgtggccca

SEQ ID NO: 4304156 - DNA, 25 bp, Homo sapien
gcaccaggagcgttagcagtgtggc

SEQ ID NO: 4304157 - DNA, 25 bp, Homo sapien
gcacggccgccgcggcgtctgggct

SEQ ID NO: 4304158 - DNA, 25 bp, Homo sapien
gcggccgtggagagcgcgcggagcc

SEQ ID NO: 4304159 - DNA, 25 bp, Homo sapien
ttaggagtcgctgaggtctcgctgc

SEQ ID NO: 4304160 - DNA, 25 bp, Homo sapien
agaaggcgaggaacttgcgctccga

SEQ ID NO: 4304161 - DNA, 25 bp, Homo sapien
gtctcgctgcgagggtcccgtctgc

SEQ ID NO: 4304162 - DNA, 25 bp, Homo sapien
gctgcttggccgcataatgcccagc

SEQ ID NO: 4304163 - DNA, 25 bp, Homo sapien
tgggctctttgtaagcggtacagtt

SEQ ID NO: 4304164 - DNA, 25 bp, Homo sapien
taaacttcagctactgttgggctct

SEQ ID NO: 4304165 - DNA, 25 bp, Homo sapien
tacagttactaaagcgagagtttgg

SEQ ID NO: 4304166 - DNA, 25 bp, Homo sapien
acagtacatattggtggcattcaca

SEQ ID NO: 4304167 - DNA, 25 bp, Homo sapien
gcaatgagcaaacgccactcagaat

SEQ ID NO: 4304168 - DNA, 25 bp, Homo sapien
gttaccagcaatgagcaaacgccac

SEQ ID NO: 4304169 - DNA, 25 bp, Homo sapien
caaagttaccagcaatgagcaaacg

SEQ ID NO: 4304170 - DNA, 25 bp, Homo sapien
taccagcaatgagcaaacgccactc

SEQ ID NO: 4304171 - DNA, 25 bp, Homo sapien
tcacataacagggaagtccagatca

SEQ ID NO: 4304172 - DNA, 25 bp, Homo sapien
ccaggggtctgattgcaaagtccat

SEQ ID NO: 4304173 - DNA, 25 bp, Homo sapien
agggaagtccagatcaaatccaggg

SEQ ID NO: 4304174 - DNA, 25 bp, Homo sapien
ctcagggcttcacataacagggaag

SEQ ID NO: 4304175 - DNA, 25 bp, Homo sapien
cacttcccagcttctttagaagttt

SEQ ID NO: 4304176 - DNA, 25 bp, Homo sapien
tcagcacttcccagcttctttagaa

SEQ ID NO: 4304177 - DNA, 25 bp, Homo sapien
agcacttcccagcttctttagaagt

SEQ ID NO: 4304178 - DNA, 25 bp, Homo sapien
cagcacttcccagcttctttagaag

SEQ ID NO: 4304179 - DNA, 25 bp, Homo sapien
aagcctttatatacattgatgccgt

SEQ ID NO: 4304180 - DNA, 25 bp, Homo sapien
gaaagtgtgcttggtctgaataacc

SEQ ID NO: 4304181 - DNA, 25 bp, Homo sapien
tgcttggtctgaataaccttgtttc

SEQ ID NO: 4304182 - DNA, 25 bp, Homo sapien
ctgatctttacacagctgattggga

SEQ ID NO: 4304183 - DNA, 25 bp, Homo sapien
gacagtcacccgattgctaccaact

SEQ ID NO: 4304184 - DNA, 25 bp, Homo sapien
cacacaggtgtactggtctgggaca

SEQ ID NO: 4304185 - DNA, 25 bp, Homo sapien
tgtaatgacaccatgttcacacagg

SEQ ID NO: 4304186 - DNA, 25 bp, Homo sapien
cctgctctgtgattgacagctcaag

SEQ ID NO: 4304187 - DNA, 25 bp, Homo sapien
gttataaggctgtaaaatagatgtg

SEQ ID NO: 4304188 - DNA, 25 bp, Homo sapien
acatggtaaagactttatgttctgt

SEQ ID NO: 4304189 - DNA, 25 bp, Homo sapien
aaatagatgtgtggctaaaccaaga

SEQ ID NO: 4304190 - DNA, 25 bp, Homo sapien
ttctgtgatcggagagcccatggcc

SEQ ID NO: 4304191 - DNA, 25 bp, Homo sapien
agctgaacattctgagcaagttctg

SEQ ID NO: 4304192 - DNA, 25 bp, Homo sapien
gggtctgatagagccctttcatcca

SEQ ID NO: 4304193 - DNA, 25 bp, Homo sapien
ttcatcttgggtctgatagagccct

SEQ ID NO: 4304194 - DNA, 25 bp, Homo sapien
tccagatgtggggaccagctgaaca

SEQ ID NO: 4304195 - DNA, 25 bp, Homo sapien
cttccactgtgaggcacggtgatgt

SEQ ID NO: 4304196 - DNA, 25 bp, Homo sapien
gtgaggcacggtgatgtttttccaa

SEQ ID NO: 4304197 - DNA, 25 bp, Homo sapien
tccactgtgaggcacggtgatgttt

SEQ ID NO: 4304198 - DNA, 25 bp, Homo sapien
cactgtgaggcacggtgatgttttt

SEQ ID NO: 4304199 - DNA, 25 bp, Homo sapien
ctggaagctaacttgtctctatttt

SEQ ID NO: 4304200 - DNA, 25 bp, Homo sapien
tcaaatgtgtagtcaacccgaagaa

SEQ ID NO: 4304201 - DNA, 25 bp, Homo sapien
aatgtgtagtcaacccgaagaatca

SEQ ID NO: 4304202 - DNA, 25 bp, Homo sapien
gctaacttgtctctattttcctcaa

SEQ ID NO: 4304203 - DNA, 25 bp, Homo sapien
ctacttcctgctgactttgaaagga

SEQ ID NO: 4304204 - DNA, 25 bp, Homo sapien
acttcctgctgactttgaaaggagc

SEQ ID NO: 4304205 - DNA, 25 bp, Homo sapien
ttgtcagtttagctcccatggcttg

SEQ ID NO: 4304206 - DNA, 25 bp, Homo sapien
tatttcccagttgtcagtttagctc

SEQ ID NO: 4304207 - DNA, 25 bp, Homo sapien
tcctcaagtaacacctggacctgct

SEQ ID NO: 4304208 - DNA, 25 bp, Homo sapien
tcccttcaaacgctgagggctcagt

SEQ ID NO: 4304209 - DNA, 25 bp, Homo sapien
tggctgaaagccgaagcatgacgca

SEQ ID NO: 4304210 - DNA, 25 bp, Homo sapien
gatttgtatattttcgctttctcct

SEQ ID NO: 4304211 - DNA, 25 bp, Homo sapien
ccaacatagcctgacattcctctac

SEQ ID NO: 4304212 - DNA, 25 bp, Homo sapien
caacatagcctgacattcctctacc

SEQ ID NO: 4304213 - DNA, 25 bp, Homo sapien
aaaacattctcgacacatcccctca

SEQ ID NO: 4304214 - DNA, 25 bp, Homo sapien
cttcattctctgcacgaaaacattc

SEQ ID NO: 4304215 - DNA, 25 bp, Homo sapien
gaagcttaactgacattcctcttcc

SEQ ID NO: 4304216 - DNA, 25 bp, Homo sapien
ggagaattgtccagaagcttaactg

SEQ ID NO: 4304217 - DNA, 25 bp, Homo sapien
aagacaagcaggaaacgcagatttc

SEQ ID NO: 4304218 - DNA, 25 bp, Homo sapien
cataacctgaaatctctttagcttc

SEQ ID NO: 4304219 - DNA, 25 bp, Homo sapien
tgttcaaatacagacccataaggga

SEQ ID NO: 4304220 - DNA, 25 bp, Homo sapien
cacgaggccataagttaacaataag

SEQ ID NO: 4304221 - DNA, 25 bp, Homo sapien
caataagatcatctactgtcacgtg

SEQ ID NO: 4304222 - DNA, 25 bp, Homo sapien
gttgatcctctgctccggatgaaga

SEQ ID NO: 4304223 - DNA, 25 bp, Homo sapien
cacgatcaccaggaggcattgtaac

SEQ ID NO: 4304224 - DNA, 25 bp, Homo sapien
taggcccaccatgccagaagtcact

SEQ ID NO: 4304225 - DNA, 25 bp, Homo sapien
ccttgccatttagagtgtaacataa

SEQ ID NO: 4304226 - DNA, 25 bp, Homo sapien
ttttcaccagctgccgagtgtctgc

SEQ ID NO: 4304227 - DNA, 25 bp, Homo sapien
ctaggtaggtggttttagcacatag

SEQ ID NO: 4304228 - DNA, 25 bp, Homo sapien
taggtaggtggttttagcacataga

SEQ ID NO: 4304229 - DNA, 25 bp, Homo sapien
aggtaggtggttttagcacatagag

SEQ ID NO: 4304230 - DNA, 25 bp, Homo sapien
acgtgaggagcatcaagttgtcatt

SEQ ID NO: 4304231 - DNA, 25 bp, Homo sapien
tgtctgtctttgaacacctggtgtg

SEQ ID NO: 4304232 - DNA, 25 bp, Homo sapien
ccacgtgaggagcatcaagttgtca

SEQ ID NO: 4304233 - DNA, 25 bp, Homo sapien
ggccacgtgaggagcatcaagttgt

SEQ ID NO: 4304234 - DNA, 25 bp, Homo sapien
ccatggtacacaacgttctgatggg

SEQ ID NO: 4304235 - DNA, 25 bp, Homo sapien
tcaaacttctagtaggacttgtaaa

SEQ ID NO: 4304236 - DNA, 25 bp, Homo sapien
caaagagacagctgtaaaaagcatc

SEQ ID NO: 4304237 - DNA, 25 bp, Homo sapien
tgtaaaagttccactgttgttggca

SEQ ID NO: 4304238 - DNA, 25 bp, Homo sapien
ttatctcagacctggcaacgagcca

SEQ ID NO: 4304239 - DNA, 25 bp, Homo sapien
gtctgctctgattgcagtacccggg

SEQ ID NO: 4304240 - DNA, 25 bp, Homo sapien
ccctcagagggaccaccagtgttat

SEQ ID NO: 4304241 - DNA, 25 bp, Homo sapien
caagggcttttctcgtgacatttgc

SEQ ID NO: 4304242 - DNA, 25 bp, Homo sapien
caaatgatgtcataagtgctctcca

SEQ ID NO: 4304243 - DNA, 25 bp, Homo sapien
ctccatcttttcagcagaccctcct

SEQ ID NO: 4304244 - DNA, 25 bp, Homo sapien
ggcagggaatgcttgcattggacat

SEQ ID NO: 4304245 - DNA, 25 bp, Homo sapien
tctggactctggcattcaaatgatg

SEQ ID NO: 4304246 - DNA, 25 bp, Homo sapien
ctattttggtccttaagcatacatt

SEQ ID NO: 4304247 - DNA, 25 bp, Homo sapien
catacattctctttgaatgcttatc

SEQ ID NO: 4304248 - DNA, 25 bp, Homo sapien
tccttaagcatacattctctttgaa

SEQ ID NO: 4304249 - DNA, 25 bp, Homo sapien
tattttggtccttaagcatacattc

SEQ ID NO: 4304250 - DNA, 25 bp, Homo sapien
tgtgctgcctcgacattctgactca

SEQ ID NO: 4304251 - DNA, 25 bp, Homo sapien
tagtctaacccacagtctgctggtg

SEQ ID NO: 4304252 - DNA, 25 bp, Homo sapien
ggcatgtttgcagctaacaccttgc

SEQ ID NO: 4304253 - DNA, 25 bp, Homo sapien
tctgactcaataccgctgcagtttc

SEQ ID NO: 4304254 - DNA, 25 bp, Homo sapien
ctaagtttttgtgccgtgaagtgct

SEQ ID NO: 4304255 - DNA, 25 bp, Homo sapien
ccgtgaagtgctggcgacagctgtt

SEQ ID NO: 4304256 - DNA, 25 bp, Homo sapien
tttgtgccgtgaagtgctggcgaca

SEQ ID NO: 4304257 - DNA, 25 bp, Homo sapien
gctggcgacagctgtttagtgtcct

SEQ ID NO: 4304258 - DNA, 25 bp, Homo sapien
taagagagaattaaagagagaaaac

SEQ ID NO: 4304259 - DNA, 25 bp, Homo sapien
gagagaattaaagagagaaaacaaa

SEQ ID NO: 4304260 - DNA, 25 bp, Homo sapien
cttaagagagaattaaagagagaaa

SEQ ID NO: 4304261 - DNA, 25 bp, Homo sapien
aagagagaattaaagagagaaaaca

SEQ ID NO: 4304262 - DNA, 25 bp, Homo sapien
tcggcactgcaaagccggatgctaa

SEQ ID NO: 4304263 - DNA, 25 bp, Homo sapien
cccaggtcaccgtggatagattttc

SEQ ID NO: 4304264 - DNA, 25 bp, Homo sapien
tccaaagacaccagatcatgcgtag

SEQ ID NO: 4304265 - DNA, 25 bp, Homo sapien
aatgaagaagttggatcggcactgc

SEQ ID NO: 4304266 - DNA, 25 bp, Homo sapien
ggctatgggacttgatgagttcagg

SEQ ID NO: 4304267 - DNA, 25 bp, Homo sapien
tggcagaaggtccatagacaaaggg

SEQ ID NO: 4304268 - DNA, 25 bp, Homo sapien
gggctatgggacttgatgagttcag

SEQ ID NO: 4304269 - DNA, 25 bp, Homo sapien
cttacagaagatgctggcagaaggt

SEQ ID NO: 4304270 - DNA, 25 bp, Homo sapien
tggagcagcaggtcttggcaatgca

SEQ ID NO: 4304271 - DNA, 25 bp, Homo sapien
cactgccagcgtggagcagcaggtc

SEQ ID NO: 4304272 - DNA, 25 bp, Homo sapien
ggagcagcaggtcttggcaatgcat

SEQ ID NO: 4304273 - DNA, 25 bp, Homo sapien
tttcacaaagacactgccagcgtgg

SEQ ID NO: 4304274 - DNA, 25 bp, Homo sapien
gggcagcatgtatgatagcatccat

SEQ ID NO: 4304275 - DNA, 25 bp, Homo sapien
gataaaatcctcactaggggcagca

SEQ ID NO: 4304276 - DNA, 25 bp, Homo sapien
gagtgaccttgtaatgagaccttaa

SEQ ID NO: 4304277 - DNA, 25 bp, Homo sapien
tgctccagtgccctacagcagataa

SEQ ID NO: 4304278 - DNA, 25 bp, Homo sapien
gaaaagttgacattggcagataatc

SEQ ID NO: 4304279 - DNA, 25 bp, Homo sapien
aacttgtacccattcacaacaggaa

SEQ ID NO: 4304280 - DNA, 25 bp, Homo sapien
ctggaagtccttgaatggcaatatc

SEQ ID NO: 4304281 - DNA, 25 bp, Homo sapien
gataatcttggcacatgaggaggaa

SEQ ID NO: 4304282 - DNA, 25 bp, Homo sapien
tcacttataaagtcctatagacagc

SEQ ID NO: 4304283 - DNA, 25 bp, Homo sapien
tccaagaaagtgcattaagagctcc

SEQ ID NO: 4304284 - DNA, 25 bp, Homo sapien
gacagcactgtcaaataatgagtca

SEQ ID NO: 4304285 - DNA, 25 bp, Homo sapien
tgagtcaagatcactatttagcacc

SEQ ID NO: 4304286 - DNA, 25 bp, Homo sapien
ttccagctgattgaaccaagcctcc

SEQ ID NO: 4304287 - DNA, 25 bp, Homo sapien
gctgattgaaccaagcctcctttct

SEQ ID NO: 4304288 - DNA, 25 bp, Homo sapien
cagctgattgaaccaagcctccttt

SEQ ID NO: 4304289 - DNA, 25 bp, Homo sapien
tgattgaaccaagcctcctttctca

SEQ ID NO: 4304290 - DNA, 25 bp, Homo sapien
cagaagcagtgaagtagtcaacaaa

SEQ ID NO: 4304291 - DNA, 25 bp, Homo sapien
gaacagtccctacagaagcagtgaa

SEQ ID NO: 4304292 - DNA, 25 bp, Homo sapien
tctttcaacagtgccctgaacagtc

SEQ ID NO: 4304293 - DNA, 25 bp, Homo sapien
tctacttgggatggagcactggctc

SEQ ID NO: 4304294 - DNA, 25 bp, Homo sapien
caccaagtctttaataggatctcta

SEQ ID NO: 4304295 - DNA, 25 bp, Homo sapien
ggatctctatcttggtctacagtga

SEQ ID NO: 4304296 - DNA, 25 bp, Homo sapien
ttcctcaaccaccaagtctttaata

SEQ ID NO: 4304297 - DNA, 25 bp, Homo sapien
ctctatcttggtctacagtgaccat

SEQ ID NO: 4304298 - DNA, 25 bp, Homo sapien
tctaagcgagctagtcaatgtttgg

SEQ ID NO: 4304299 - DNA, 25 bp, Homo sapien
taagcgagctagtcaatgtttggac

SEQ ID NO: 4304300 - DNA, 25 bp, Homo sapien
aagcgagctagtcaatgtttggacc

SEQ ID NO: 4304301 - DNA, 25 bp, Homo sapien
ctctaagcgagctagtcaatgtttg

SEQ ID NO: 4304302 - DNA, 25 bp, Homo sapien
gtcaccctcaatttgttgggcacca

SEQ ID NO: 4304303 - DNA, 25 bp, Homo sapien
ttgttgggcaccatgggactgcagg

SEQ ID NO: 4304304 - DNA, 25 bp, Homo sapien
agtcaccctcaatttgttgggcacc

SEQ ID NO: 4304305 - DNA, 25 bp, Homo sapien
caccctcaatttgttgggcaccatg

SEQ ID NO: 4304306 - DNA, 25 bp, Homo sapien
tgcagggattgctggtagatcatcc

SEQ ID NO: 4304307 - DNA, 25 bp, Homo sapien
tataacttttccctaacagtggcca

SEQ ID NO: 4304308 - DNA, 25 bp, Homo sapien
tctgctgcctcttatagaaaccaag

SEQ ID NO: 4304309 - DNA, 25 bp, Homo sapien
ggcgtagctccgatagtgaaatcaa

SEQ ID NO: 4304310 - DNA, 25 bp, Homo sapien
gacatctgggaattctgaagcctga

SEQ ID NO: 4304311 - DNA, 25 bp, Homo sapien
tgaaaattccatgagttcatagcag

SEQ ID NO: 4304312 - DNA, 25 bp, Homo sapien
tgagttcatagcagtgttcactaat

SEQ ID NO: 4304313 - DNA, 25 bp, Homo sapien
acttgaagacatctgggaattctga

SEQ ID NO: 4304314 - DNA, 25 bp, Homo sapien
gagtcaactgcgtgcccaaactcat

SEQ ID NO: 4304315 - DNA, 25 bp, Homo sapien
aagacaaaaaggagagtcaactgcg

SEQ ID NO: 4304316 - DNA, 25 bp, Homo sapien
caaaaaggagagtcaactgcgtgcc

SEQ ID NO: 4304317 - DNA, 25 bp, Homo sapien
aggagagtcaactgcgtgcccaaac

SEQ ID NO: 4304318 - DNA, 25 bp, Homo sapien
cagttgacacagaaatctagttcag

SEQ ID NO: 4304319 - DNA, 25 bp, Homo sapien
tttcaagcagttgacacagaaatct

SEQ ID NO: 4304320 - DNA, 25 bp, Homo sapien
aatgtgtggtgtaggactgcagctt

SEQ ID NO: 4304321 - DNA, 25 bp, Homo sapien
acaaaacaggtctgataattttcaa

SEQ ID NO: 4304322 - DNA, 25 bp, Homo sapien
ctgtgttttgggatcagccaggagc

SEQ ID NO: 4304323 - DNA, 25 bp, Homo sapien
tgtgttttgggatcagccaggagcg

SEQ ID NO: 4304324 - DNA, 25 bp, Homo sapien
taagaagtaagcaagagtccagtgc

SEQ ID NO: 4304325 - DNA, 25 bp, Homo sapien
gcagaattcccaacaggcccttgaa

SEQ ID NO: 4304326 - DNA, 25 bp, Homo sapien
aatgaccccttaagattctctttag

SEQ ID NO: 4304327 - DNA, 25 bp, Homo sapien
tagcctgaaattatggtccgtaccc

SEQ ID NO: 4304328 - DNA, 25 bp, Homo sapien
gagagctgaattctgtaaacttcca

SEQ ID NO: 4304329 - DNA, 25 bp, Homo sapien
tcccattagccaccagtgagagctg

SEQ ID NO: 4304330 - DNA, 25 bp, Homo sapien
aaatgctgatatggttaatggctgc

SEQ ID NO: 4304331 - DNA, 25 bp, Homo sapien
tgattactatgacccagataccgtg

SEQ ID NO: 4304332 - DNA, 25 bp, Homo sapien
cgtagactagtctgctggccccgca

SEQ ID NO: 4304333 - DNA, 25 bp, Homo sapien
tgtgtatactacctgtgcagaatcg

SEQ ID NO: 4304334 - DNA, 25 bp, Homo sapien
tactacctgtgcagaatcgactgga

SEQ ID NO: 4304335 - DNA, 25 bp, Homo sapien
cctgtgcagaatcgactggagatac

SEQ ID NO: 4304336 - DNA, 25 bp, Homo sapien
aactatactctgtgtatactacctg

SEQ ID NO: 4304337 - DNA, 25 bp, Homo sapien
tgtgtgccaaaattccatgaggaga

SEQ ID NO: 4304338 - DNA, 25 bp, Homo sapien
taagtgctgcaatatggaaccaacc

SEQ ID NO: 4304339 - DNA, 25 bp, Homo sapien
tatatttgttacagcactaagtgct

SEQ ID NO: 4304340 - DNA, 25 bp, Homo sapien
tattccccgatgtgctcaaatactg

SEQ ID NO: 4304341 - DNA, 25 bp, Homo sapien
ctttcaaactgttcggtggggagtg

SEQ ID NO: 4304342 - DNA, 25 bp, Homo sapien
cagctgagcaaagttaggtcctcct

SEQ ID NO: 4304343 - DNA, 25 bp, Homo sapien
ctgcatgcacaggatttaataccag

SEQ ID NO: 4304344 - DNA, 25 bp, Homo sapien
tagaaaccttacatgttcaaagctg

SEQ ID NO: 4304345 - DNA, 25 bp, Homo sapien
aagtggtacagctttattaagtaca

SEQ ID NO: 4304346 - DNA, 25 bp, Homo sapien
tatttggaaacaattacagtggcaa

SEQ ID NO: 4304347 - DNA, 25 bp, Homo sapien
agcagcccatgacaagtacatgctg

SEQ ID NO: 4304348 - DNA, 25 bp, Homo sapien
gaggctaccttttagtatcaatcta

SEQ ID NO: 4304349 - DNA, 25 bp, Homo sapien
tctgagaaattcaagaaaaataggt

SEQ ID NO: 4304350 - DNA, 25 bp, Homo sapien
tgagaaattcaagaaaaataggtct

SEQ ID NO: 4304351 - DNA, 25 bp, Homo sapien
tttctgagaaattcaagaaaaatag

SEQ ID NO: 4304352 - DNA, 25 bp, Homo sapien
caccttttctgagaaattcaagaaa

SEQ ID NO: 4304353 - DNA, 25 bp, Homo sapien
tctttattcgagcaagcttgagaat

SEQ ID NO: 4304354 - DNA, 25 bp, Homo sapien
ttattcgagcaagcttgagaattct

SEQ ID NO: 4304355 - DNA, 25 bp, Homo sapien
cctctttattcgagcaagcttgaga

SEQ ID NO: 4304356 - DNA, 25 bp, Homo sapien
ttcctctttattcgagcaagcttga

SEQ ID NO: 4304357 - DNA, 25 bp, Homo sapien
cggggcagagttgggctctcgacca

SEQ ID NO: 4304358 - DNA, 25 bp, Homo sapien
gcggggcagagttgggctctcgacc

SEQ ID NO: 4304359 - DNA, 25 bp, Homo sapien
tcgcggggcagagttgggctctcga

SEQ ID NO: 4304360 - DNA, 25 bp, Homo sapien
catcgcggggcagagttgggctctc

SEQ ID NO: 4304361 - DNA, 25 bp, Homo sapien
cacatatcggggatggggaataaaa

SEQ ID NO: 4304362 - DNA, 25 bp, Homo sapien
gggcagtgatctatacaagtcatca

SEQ ID NO: 4304363 - DNA, 25 bp, Homo sapien
aagccttattaagggcacatatcgg

SEQ ID NO: 4304364 - DNA, 25 bp, Homo sapien
catctggatgaatcttttctctaaa

SEQ ID NO: 4304365 - DNA, 25 bp, Homo sapien
gatgaaatgtaatgtgggagtgtaa

SEQ ID NO: 4304366 - DNA, 25 bp, Homo sapien
tagacagcaaagagacatagggtaa

SEQ ID NO: 4304367 - DNA, 25 bp, Homo sapien
ttcctgagatatatcccctgggtac

SEQ ID NO: 4304368 - DNA, 25 bp, Homo sapien
gaaggaaacattgtcaaataactag

SEQ ID NO: 4304369 - DNA, 25 bp, Homo sapien
tttcattgatgcacatcagtaaggg

SEQ ID NO: 4304370 - DNA, 25 bp, Homo sapien
ctttcattgatgcacatcagtaagg

SEQ ID NO: 4304371 - DNA, 25 bp, Homo sapien
cctttcattgatgcacatcagtaag

SEQ ID NO: 4304372 - DNA, 25 bp, Homo sapien
tttactgccatgcacaacttggatt

SEQ ID NO: 4304373 - DNA, 25 bp, Homo sapien
tactgccatgcacaacttggatttt

SEQ ID NO: 4304374 - DNA, 25 bp, Homo sapien
ctgccatgcacaacttggattttct

SEQ ID NO: 4304375 - DNA, 25 bp, Homo sapien
cctttactgccatgcacaacttgga

SEQ ID NO: 4304376 - DNA, 25 bp, Homo sapien
caaaatgctgaaacgaacaagatgc

SEQ ID NO: 4304377 - DNA, 25 bp, Homo sapien
aacaagatgctgtctatctcctgct

SEQ ID NO: 4304378 - DNA, 25 bp, Homo sapien
cagctgccagatccattggagaaac

SEQ ID NO: 4304379 - DNA, 25 bp, Homo sapien
catggctctcgaaattaaggtcaag

SEQ ID NO: 4304380 - DNA, 25 bp, Homo sapien
tatttccaacatctagtgcgggctg

SEQ ID NO: 4304381 - DNA, 25 bp, Homo sapien
acattaatcttccacctttgccggg

SEQ ID NO: 4304382 - DNA, 25 bp, Homo sapien
tatagcccagacacaggtaggatct

SEQ ID NO: 4304383 - DNA, 25 bp, Homo sapien
tctagtgcgggctgcctccctgttg

SEQ ID NO: 4304384 - DNA, 25 bp, Homo sapien
aatcaggagagcagcttgctcgtgt

SEQ ID NO: 4304385 - DNA, 25 bp, Homo sapien
tcgtgtccacacatgatcagtatca

SEQ ID NO: 4304386 - DNA, 25 bp, Homo sapien
gatcagtatcattcttgagcttcca

SEQ ID NO: 4304387 - DNA, 25 bp, Homo sapien
tgagcttccacgctggattccgttt

SEQ ID NO: 4304388 - DNA, 25 bp, Homo sapien
gaaatgccttactcaggacatgaac

SEQ ID NO: 4304389 - DNA, 25 bp, Homo sapien
tcttcagattcctagccagtgcgct

SEQ ID NO: 4304390 - DNA, 25 bp, Homo sapien
agtgcgctcacctgtagatcatgaa

SEQ ID NO: 4304391 - DNA, 25 bp, Homo sapien
tgagagtgggctggcctacaacttt

SEQ ID NO: 4304392 - DNA, 25 bp, Homo sapien
cacatcaatctttgttgctagccag

SEQ ID NO: 4304393 - DNA, 25 bp, Homo sapien
cttctcttcacatcaatctttgttg

SEQ ID NO: 4304394 - DNA, 25 bp, Homo sapien
tcctgatcaagccaaaagcactttc

SEQ ID NO: 4304395 - DNA, 25 bp, Homo sapien
tctttgttgctagccaggtcatttt

SEQ ID NO: 4304396 - DNA, 25 bp, Homo sapien
tttgtacatcaactagactctctag

SEQ ID NO: 4304397 - DNA, 25 bp, Homo sapien
gacaccaccctctatagagttctct

SEQ ID NO: 4304398 - DNA, 25 bp, Homo sapien
actagactctctagatcatcttctt

SEQ ID NO: 4304399 - DNA, 25 bp, Homo sapien
agcaaatttctgacaccaccctcta

SEQ ID NO: 4304400 - DNA, 25 bp, Homo sapien
cgtgttgttcgtgcgagatagtcat

SEQ ID NO: 4304401 - DNA, 25 bp, Homo sapien
gccttgtggcttgggcccacgtgtt

SEQ ID NO: 4304402 - DNA, 25 bp, Homo sapien
tggcttgggcccacgtgttgttcgt

SEQ ID NO: 4304403 - DNA, 25 bp, Homo sapien
cccacgtgttgttcgtgcgagatag

SEQ ID NO: 4304404 - DNA, 25 bp, Homo sapien
gcatcacgttaggaacatggcacct

SEQ ID NO: 4304405 - DNA, 25 bp, Homo sapien
cactgcctcccggtaactggttgga

SEQ ID NO: 4304406 - DNA, 25 bp, Homo sapien
tggcacctacgtgctctcccatggg

SEQ ID NO: 4304407 - DNA, 25 bp, Homo sapien
gcaaagctgtgcgtcagcatcacgt

SEQ ID NO: 4304408 - DNA, 25 bp, Homo sapien
accaagaagttggtgatcaagccag

SEQ ID NO: 4304409 - DNA, 25 bp, Homo sapien
agaagttggtgatcaagccagcgac

SEQ ID NO: 4304410 - DNA, 25 bp, Homo sapien
ccaagaagttggtgatcaagccagc

SEQ ID NO: 4304411 - DNA, 25 bp, Homo sapien
caagaagttggtgatcaagccagcg

SEQ ID NO: 4304412 - DNA, 25 bp, Homo sapien
tcagagcattggtgttatcattaac

SEQ ID NO: 4304413 - DNA, 25 bp, Homo sapien
gaaatgctacattggccatctggat

SEQ ID NO: 4304414 - DNA, 25 bp, Homo sapien
tcctcctgacatctatatttttcaa

SEQ ID NO: 4304415 - DNA, 25 bp, Homo sapien
gccacagtgccctcaacctgttcct

SEQ ID NO: 4304416 - DNA, 25 bp, Homo sapien
gaaggattgctttgcactcgcctca

SEQ ID NO: 4304417 - DNA, 25 bp, Homo sapien
tgtggatcatatcaaccaagggaga

SEQ ID NO: 4304418 - DNA, 25 bp, Homo sapien
gccctggcccatgcttgagagtttc

SEQ ID NO: 4304419 - DNA, 25 bp, Homo sapien
gggagacactttgacagctctgcag

SEQ ID NO: 4304420 - DNA, 25 bp, Homo sapien
ttggtggtgggtacagttgatatgc

SEQ ID NO: 4304421 - DNA, 25 bp, Homo sapien
gatgatgctattgatggaacctcta

SEQ ID NO: 4304422 - DNA, 25 bp, Homo sapien
tgtactgatgatgctattgatggaa

SEQ ID NO: 4304423 - DNA, 25 bp, Homo sapien
tactgatgatgctattgatggaacc

SEQ ID NO: 4304424 - DNA, 25 bp, Homo sapien
gctctgataactgatccttcacaca

SEQ ID NO: 4304425 - DNA, 25 bp, Homo sapien
cttggggctctgataactgatcctt

SEQ ID NO: 4304426 - DNA, 25 bp, Homo sapien
aatgtcttcagcaaccaattggcac

SEQ ID NO: 4304427 - DNA, 25 bp, Homo sapien
cacatcccagacatttctataatgt

SEQ ID NO: 4304428 - DNA, 25 bp, Homo sapien
aaaatgacactttctaaaacactgt

SEQ ID NO: 4304429 - DNA, 25 bp, Homo sapien
aaatgacactttctaaaacactgtc

SEQ ID NO: 4304430 - DNA, 25 bp, Homo sapien
actgtcccttcagttcctccacaaa

SEQ ID NO: 4304431 - DNA, 25 bp, Homo sapien
aatgacactttctaaaacactgtcc

SEQ ID NO: 4304432 - DNA, 25 bp, Homo sapien
attcccacagacgagcccctggtgt

SEQ ID NO: 4304433 - DNA, 25 bp, Homo sapien
gttcttacaatcataccggctttca

SEQ ID NO: 4304434 - DNA, 25 bp, Homo sapien
cacaactgtcattaaggatgctgta

SEQ ID NO: 4304435 - DNA, 25 bp, Homo sapien
tcaatagcctcagcacattcacaac

SEQ ID NO: 4304436 - DNA, 25 bp, Homo sapien
tagctctgtctggaacagtcagcat

SEQ ID NO: 4304437 - DNA, 25 bp, Homo sapien
tcaaaagttccttctgtagctctgt

SEQ ID NO: 4304438 - DNA, 25 bp, Homo sapien
tccttctgtagctctgtctggaaca

SEQ ID NO: 4304439 - DNA, 25 bp, Homo sapien
gtagctctgtctggaacagtcagca

SEQ ID NO: 4304440 - DNA, 25 bp, Homo sapien
gatcggtggatcttagccttcagta

SEQ ID NO: 4304441 - DNA, 25 bp, Homo sapien
taactgcatcaccaagtagaaaagc

SEQ ID NO: 4304442 - DNA, 25 bp, Homo sapien
gcagaagagtcatatccactgataa

SEQ ID NO: 4304443 - DNA, 25 bp, Homo sapien
gaaaagcatcagtaccatcagagag

SEQ ID NO: 4304444 - DNA, 25 bp, Homo sapien
gatgtgaccgtgacagcaggactga

SEQ ID NO: 4304445 - DNA, 25 bp, Homo sapien
ccaaagtgagtgagggagctctgat

SEQ ID NO: 4304446 - DNA, 25 bp, Homo sapien
gcagatggatgatgtgaccgtgaca

SEQ ID NO: 4304447 - DNA, 25 bp, Homo sapien
gactgacatgtgcattgtcctccat

SEQ ID NO: 4304448 - DNA, 25 bp, Homo sapien
ttgcattgactggggattctactac

SEQ ID NO: 4304449 - DNA, 25 bp, Homo sapien
gggattctactaccaatgtccttac

SEQ ID NO: 4304450 - DNA, 25 bp, Homo sapien
actggggattctactaccaatgtcc

SEQ ID NO: 4304451 - DNA, 25 bp, Homo sapien
ttgactggggattctactaccaatg

SEQ ID NO: 4304452 - DNA, 25 bp, Homo sapien
acctcttgtctatacattttacctg

SEQ ID NO: 4304453 - DNA, 25 bp, Homo sapien
cttcggaagccttctcggtccactg

SEQ ID NO: 4304454 - DNA, 25 bp, Homo sapien
gaagccttctcggtccactgccaat

SEQ ID NO: 4304455 - DNA, 25 bp, Homo sapien
ctggattcttcttactaacccttcg

SEQ ID NO: 4304456 - DNA, 25 bp, Homo sapien
agaatgatgctatcaggttaaaatc

SEQ ID NO: 4304457 - DNA, 25 bp, Homo sapien
gaagaatgatgctatcaggttaaaa

SEQ ID NO: 4304458 - DNA, 25 bp, Homo sapien
tcaggttaaaatccacacagtctgt

SEQ ID NO: 4304459 - DNA, 25 bp, Homo sapien
aagaatgatgctatcaggttaaaat

SEQ ID NO: 4304460 - DNA, 25 bp, Homo sapien
tagaaagatacaataactccttttc

SEQ ID NO: 4304461 - DNA, 25 bp, Homo sapien
ctagaaagatacaataactcctttt

SEQ ID NO: 4304462 - DNA, 25 bp, Homo sapien
gctcctcttataagcaatgtagtca

SEQ ID NO: 4304463 - DNA, 25 bp, Homo sapien
tctccatcagagaagcatctgctct

SEQ ID NO: 4304464 - DNA, 25 bp, Homo sapien
attctcagtgcacatgctcctctta

SEQ ID NO: 4304465 - DNA, 25 bp, Homo sapien
ccaaaagatcccttgcagatggctc

SEQ ID NO: 4304466 - DNA, 25 bp, Homo sapien
gatggaacgaacattaaaggtctta

SEQ ID NO: 4304467 - DNA, 25 bp, Homo sapien
agatggaacgaacattaaaggtctt

SEQ ID NO: 4304468 - DNA, 25 bp, Homo sapien
acgaacattaaaggtcttaagtgat

SEQ ID NO: 4304469 - DNA, 25 bp, Homo sapien
aagatggaacgaacattaaaggtct

SEQ ID NO: 4304470 - DNA, 25 bp, Homo sapien
aacaaggcaaggcaatttagcctca

SEQ ID NO: 4304471 - DNA, 25 bp, Homo sapien
agcaggcacactccaaaagggatgg

SEQ ID NO: 4304472 - DNA, 25 bp, Homo sapien
tgagctgatttgctttgaatccggt

SEQ ID NO: 4304473 - DNA, 25 bp, Homo sapien
caggcacactccaaaagggatggca

SEQ ID NO: 4304474 - DNA, 25 bp, Homo sapien
gggtatctgctatacaccttactgg

SEQ ID NO: 4304475 - DNA, 25 bp, Homo sapien
tctgggtatctgctatacaccttac

SEQ ID NO: 4304476 - DNA, 25 bp, Homo sapien
tctgctatacaccttactggcatct

SEQ ID NO: 4304477 - DNA, 25 bp, Homo sapien
cttcttggaatgatttctggaggct

SEQ ID NO: 4304478 - DNA, 25 bp, Homo sapien
gatctgagtaatgtgttccatagaa

SEQ ID NO: 4304479 - DNA, 25 bp, Homo sapien
agatctgagtaatgtgttccataga

SEQ ID NO: 4304480 - DNA, 25 bp, Homo sapien
tcttgtgtccccagcaaggggcagg

SEQ ID NO: 4304481 - DNA, 25 bp, Homo sapien
catggttaagtttgctctcaaggaa

SEQ ID NO: 4304482 - DNA, 25 bp, Homo sapien
aggaagaactccatgagcatctgcc

SEQ ID NO: 4304483 - DNA, 25 bp, Homo sapien
ccccaaacatggttaagtttgctct

SEQ ID NO: 4304484 - DNA, 25 bp, Homo sapien
gtctgagctacttaagccaacaaca

SEQ ID NO: 4304485 - DNA, 25 bp, Homo sapien
tttccaagatattggggcaacctcc

SEQ ID NO: 4304486 - DNA, 25 bp, Homo sapien
ttgcttgtctgtctgagctacttaa

SEQ ID NO: 4304487 - DNA, 25 bp, Homo sapien
tcaaggtaaagcgtgcatctcagtc

SEQ ID NO: 4304488 - DNA, 25 bp, Homo sapien
ccacttgacaattcaaccaaagcat

SEQ ID NO: 4304489 - DNA, 25 bp, Homo sapien
agatggataagtgaaatctggcttc

SEQ ID NO: 4304490 - DNA, 25 bp, Homo sapien
tcagaggcagatggataagtgaaat

SEQ ID NO: 4304491 - DNA, 25 bp, Homo sapien
tcttcttgctgaaggctcttcaagg

SEQ ID NO: 4304492 - DNA, 25 bp, Homo sapien
actgtcactgcccctacatacttct

SEQ ID NO: 4304493 - DNA, 25 bp, Homo sapien
tgtcactgcccctacatacttctga

SEQ ID NO: 4304494 - DNA, 25 bp, Homo sapien
ctgtcactgcccctacatacttctg

SEQ ID NO: 4304495 - DNA, 25 bp, Homo sapien
tatattacatctacagtcatgtgtt

SEQ ID NO: 4304496 - DNA, 25 bp, Homo sapien
tctacacatagtttggacacatttt

SEQ ID NO: 4304497 - DNA, 25 bp, Homo sapien
tgttgccatcccttaaaaagacaga

SEQ ID NO: 4304498 - DNA, 25 bp, Homo sapien
cacaaacccagatgggctagcctac

SEQ ID NO: 4304499 - DNA, 25 bp, Homo sapien
tgaattcacatatatgctcagtact

SEQ ID NO: 4304500 - DNA, 25 bp, Homo sapien
tctctgcctgatcgtttcctcatga

SEQ ID NO: 4304501 - DNA, 25 bp, Homo sapien
cacccccagatttagacttgtgacc

SEQ ID NO: 4304502 - DNA, 25 bp, Homo sapien
agcaatctctagcaacattccaaat

SEQ ID NO: 4304503 - DNA, 25 bp, Homo sapien
cattatcgtgcagaaaaaccctgct

SEQ ID NO: 4304504 - DNA, 25 bp, Homo sapien
tgcttgccctggttcgggagtaact

SEQ ID NO: 4304505 - DNA, 25 bp, Homo sapien
gatgaaggatgggtactatgagaac

SEQ ID NO: 4304506 - DNA, 25 bp, Homo sapien
tcgggagtaactggcggcagatgaa

SEQ ID NO: 4304507 - DNA, 25 bp, Homo sapien
aatgcaacacagcattcaaacaatc

SEQ ID NO: 4304508 - DNA, 25 bp, Homo sapien
tggaatgcaacacagcattcaaaca

SEQ ID NO: 4304509 - DNA, 25 bp, Homo sapien
ctggaatgcaacacagcattcaaac

SEQ ID NO: 4304510 - DNA, 25 bp, Homo sapien
ctcactactaagggatattaatttc

SEQ ID NO: 4304511 - DNA, 25 bp, Homo sapien
tcactactaagggatattaatttcc

SEQ ID NO: 4304512 - DNA, 25 bp, Homo sapien
cctcactactaagggatattaattt

SEQ ID NO: 4304513 - DNA, 25 bp, Homo sapien
ttcacaagcaggctcaccatggagg

SEQ ID NO: 4304514 - DNA, 25 bp, Homo sapien
tacaattagggtgttgagtcctccc

SEQ ID NO: 4304515 - DNA, 25 bp, Homo sapien
catcaactgtgtaacggagggagac

SEQ ID NO: 4304516 - DNA, 25 bp, Homo sapien
tccacggattgagacaagcccaggt

SEQ ID NO: 4304517 - DNA, 25 bp, Homo sapien
tgatgatcacgaacctgactgtctg

SEQ ID NO: 4304518 - DNA, 25 bp, Homo sapien
tcagacgagacaacacgaaagatgc

SEQ ID NO: 4304519 - DNA, 25 bp, Homo sapien
cagtttggcaaagggcaaccatggg

SEQ ID NO: 4304520 - DNA, 25 bp, Homo sapien
caaccatgggcttctactaaaaggg

SEQ ID NO: 4304521 - DNA, 25 bp, Homo sapien
tcctcttagaacctttgacacggta

SEQ ID NO: 4304522 - DNA, 25 bp, Homo sapien
aggtgtcagatgcttcattaggtaa

SEQ ID NO: 4304523 - DNA, 25 bp, Homo sapien
taatatgatacatcaggcacaatac

SEQ ID NO: 4304524 - DNA, 25 bp, Homo sapien
aaaggttggaatgtgactcagcgtc

SEQ ID NO: 4304525 - DNA, 25 bp, Homo sapien
gaggtcggtgctacattctttgtaa

SEQ ID NO: 4304526 - DNA, 25 bp, Homo sapien
tttgtccagggaccgctctctcctg

SEQ ID NO: 4304527 - DNA, 25 bp, Homo sapien
gggatgtctggaacttctgccggca

SEQ ID NO: 4304528 - DNA, 25 bp, Homo sapien
ttctttgtaaggtcgccttctctgc

SEQ ID NO: 4304529 - DNA, 25 bp, Homo sapien
gatcgggtgggtaactggactccaa

SEQ ID NO: 4304530 - DNA, 25 bp, Homo sapien
tgctgcctttcggatcccttgcgtg

SEQ ID NO: 4304531 - DNA, 25 bp, Homo sapien
tgtgcccgcttttccccatgtggtg

SEQ ID NO: 4304532 - DNA, 25 bp, Homo sapien
tggactccaatgacggatgctgccg

SEQ ID NO: 4304533 - DNA, 25 bp, Homo sapien
gggccgtggcggtcgctgctggggt

SEQ ID NO: 4304534 - DNA, 25 bp, Homo sapien
tggcggggccgtggcggtcgctgct

SEQ ID NO: 4304535 - DNA, 25 bp, Homo sapien
cggaacaccttgtggaccggtggcg

SEQ ID NO: 4304536 - DNA, 25 bp, Homo sapien
tcacttccggaacaccttgtggacc

SEQ ID NO: 4304537 - DNA, 25 bp, Homo sapien
caggctatggacaggattgggccca

SEQ ID NO: 4304538 - DNA, 25 bp, Homo sapien
acaggtttaaaagcagggcagccca

SEQ ID NO: 4304539 - DNA, 25 bp, Homo sapien
tacagggctccatgaaacaaggttc

SEQ ID NO: 4304540 - DNA, 25 bp, Homo sapien
caattcaaagaacgcagggtgctca

SEQ ID NO: 4304541 - DNA, 25 bp, Homo sapien
aagcctccccgagcttttcatttct

SEQ ID NO: 4304542 - DNA, 25 bp, Homo sapien
tctcatacatgcagcgatattagga

SEQ ID NO: 4304543 - DNA, 25 bp, Homo sapien
cccataaggtagaagcaagcctccc

SEQ ID NO: 4304544 - DNA, 25 bp, Homo sapien
cgtagtttgattatggcccataagg

SEQ ID NO: 4304545 - DNA, 25 bp, Homo sapien
aacatttagattccctataacacag

SEQ ID NO: 4304546 - DNA, 25 bp, Homo sapien
gaacatttagattccctataacaca

SEQ ID NO: 4304547 - DNA, 25 bp, Homo sapien
ttgaacatttagattccctataaca

SEQ ID NO: 4304548 - DNA, 25 bp, Homo sapien
catttagattccctataacacagag

SEQ ID NO: 4304549 - DNA, 25 bp, Homo sapien
gaagcaggttccaatcaagtcagaa

SEQ ID NO: 4304550 - DNA, 25 bp, Homo sapien
cataaggtgactcgagaacccagac

SEQ ID NO: 4304551 - DNA, 25 bp, Homo sapien
caactggaacaatgacaggctggca

SEQ ID NO: 4304552 - DNA, 25 bp, Homo sapien
agttcagtacagtgcacagccacgg

SEQ ID NO: 4304553 - DNA, 25 bp, Homo sapien
caaacattccttcgctcttggtcgg

SEQ ID NO: 4304554 - DNA, 25 bp, Homo sapien
agatcttgtcttaggccatgcccca

SEQ ID NO: 4304555 - DNA, 25 bp, Homo sapien
tatacagagcataagggaggttagc

SEQ ID NO: 4304556 - DNA, 25 bp, Homo sapien
cccagtccacgtaagcaagcaaaag

SEQ ID NO: 4304557 - DNA, 25 bp, Homo sapien
actttcctgctgccgttctggagac

SEQ ID NO: 4304558 - DNA, 25 bp, Homo sapien
gactttcctgctgccgttctggaga

SEQ ID NO: 4304559 - DNA, 25 bp, Homo sapien
tttcctgctgccgttctggagacaa

SEQ ID NO: 4304560 - DNA, 25 bp, Homo sapien
tcctgctgccgttctggagacaaat

SEQ ID NO: 4304561 - DNA, 25 bp, Homo sapien
ggaatgttttcatagtttgacccac

SEQ ID NO: 4304562 - DNA, 25 bp, Homo sapien
gaaggaatgttttcatagtttgacc

SEQ ID NO: 4304563 - DNA, 25 bp, Homo sapien
aaggaaggaatgttttcatagtttg

SEQ ID NO: 4304564 - DNA, 25 bp, Homo sapien
tcatggagtcatgccagggaaggaa

SEQ ID NO: 4304565 - DNA, 25 bp, Homo sapien
cccgcttcagaaacagacgaactct

SEQ ID NO: 4304566 - DNA, 25 bp, Homo sapien
tctcaccattgatctctaaaatttc

SEQ ID NO: 4304567 - DNA, 25 bp, Homo sapien
aactctgcggccaccattcttaatc

SEQ ID NO: 4304568 - DNA, 25 bp, Homo sapien
ttcttaatcagttctatagctcgag

SEQ ID NO: 4304569 - DNA, 25 bp, Homo sapien
tagaggtccatgttatactctcggc

SEQ ID NO: 4304570 - DNA, 25 bp, Homo sapien
cggcctcctcgaaggctaaagccaa

SEQ ID NO: 4304571 - DNA, 25 bp, Homo sapien
ctgctaagcgcagaacatagaggtc

SEQ ID NO: 4304572 - DNA, 25 bp, Homo sapien
cagttccacagtgtaaaaatcttgc

SEQ ID NO: 4304573 - DNA, 25 bp, Homo sapien
ggtgctttgaactcaaattgagatt

SEQ ID NO: 4304574 - DNA, 25 bp, Homo sapien
ttcctgctttggtttggtggtattc

SEQ ID NO: 4304575 - DNA, 25 bp, Homo sapien
ttggggtgctttgaactcaaattga

SEQ ID NO: 4304576 - DNA, 25 bp, Homo sapien
ggggtgctttgaactcaaattgaga

SEQ ID NO: 4304577 - DNA, 25 bp, Homo sapien
attggtcagcaaggtggcattcgag

SEQ ID NO: 4304578 - DNA, 25 bp, Homo sapien
tgcattggtcagcaaggtggcattc

SEQ ID NO: 4304579 - DNA, 25 bp, Homo sapien
tctctgcattggtcagcaaggtggc

SEQ ID NO: 4304580 - DNA, 25 bp, Homo sapien
cttctctgcattggtcagcaaggtg

SEQ ID NO: 4304581 - DNA, 25 bp, Homo sapien
aataacaagtgtgacttctctgtcc

SEQ ID NO: 4304582 - DNA, 25 bp, Homo sapien
ctgtccccatttcaagcagtctgac

SEQ ID NO: 4304583 - DNA, 25 bp, Homo sapien
cctgtatctgaataacaagtgtgac

SEQ ID NO: 4304584 - DNA, 25 bp, Homo sapien
tctagacaattaggagtttaataaa

SEQ ID NO: 4304585 - DNA, 25 bp, Homo sapien
gatggtttaaacgtgccaagcactg

SEQ ID NO: 4304586 - DNA, 25 bp, Homo sapien
gctgtatagcccatcgctgtgactc

SEQ ID NO: 4304587 - DNA, 25 bp, Homo sapien
aaaataggtgcaattatggccccag

SEQ ID NO: 4304588 - DNA, 25 bp, Homo sapien
aatcaccaggttgttcaggccatgg

SEQ ID NO: 4304589 - DNA, 25 bp, Homo sapien
taaggctaccgatgacaagagcaaa

SEQ ID NO: 4304590 - DNA, 25 bp, Homo sapien
caaagcaatgaaggtaaggactccc

SEQ ID NO: 4304591 - DNA, 25 bp, Homo sapien
tctaacatacaataatgccaaggaa

SEQ ID NO: 4304592 - DNA, 25 bp, Homo sapien
tgaaaacactcctgccagaccttct

SEQ ID NO: 4304593 - DNA, 25 bp, Homo sapien
taaggacaggcctagtttaatgcag

SEQ ID NO: 4304594 - DNA, 25 bp, Homo sapien
gatgttttgaagcatgtctgaccta

SEQ ID NO: 4304595 - DNA, 25 bp, Homo sapien
tactggctctgaattgccaccatgc

SEQ ID NO: 4304596 - DNA, 25 bp, Homo sapien
aactagatgctactcacacccactg

SEQ ID NO: 4304597 - DNA, 25 bp, Homo sapien
catccccaggaatgatgcggagggt

SEQ ID NO: 4304598 - DNA, 25 bp, Homo sapien
agcagggctcccctcaataatccga

SEQ ID NO: 4304599 - DNA, 25 bp, Homo sapien
tcctactttcagcttgccacagcgg

SEQ ID NO: 4304600 - DNA, 25 bp, Homo sapien
tgtgtttcccgcttccttgattagg

SEQ ID NO: 4304601 - DNA, 25 bp, Homo sapien
ggagagctctgcaccgatggtcaaa

SEQ ID NO: 4304602 - DNA, 25 bp, Homo sapien
cacacatgcatagacctggctgagt

SEQ ID NO: 4304603 - DNA, 25 bp, Homo sapien
tgcaaatgtgaaacccaaggctggg

SEQ ID NO: 4304604 - DNA, 25 bp, Homo sapien
taacaaaggtatcgaacagcaggtc

SEQ ID NO: 4304605 - DNA, 25 bp, Homo sapien
agcaggaagcaacacaccaggatta

SEQ ID NO: 4304606 - DNA, 25 bp, Homo sapien
cacaccaggattaaatggaggccaa

SEQ ID NO: 4304607 - DNA, 25 bp, Homo sapien
gaagcaacacaccaggattaaatgg

SEQ ID NO: 4304608 - DNA, 25 bp, Homo sapien
ggattaaatggaggccaagtgagct

SEQ ID NO: 4304609 - DNA, 25 bp, Homo sapien
gatgagaatgctaaagggttgtagc

SEQ ID NO: 4304610 - DNA, 25 bp, Homo sapien
tgattctagccagtttccatgtgga

SEQ ID NO: 4304611 - DNA, 25 bp, Homo sapien
gtggataagtcattcagggatagag

SEQ ID NO: 4304612 - DNA, 25 bp, Homo sapien
gtagcaccttgctgattctagccag

SEQ ID NO: 4304613 - DNA, 25 bp, Homo sapien
ttttacccaatcaggaaggtggatc

SEQ ID NO: 4304614 - DNA, 25 bp, Homo sapien
tattggtctttgctagtgtacccag

SEQ ID NO: 4304615 - DNA, 25 bp, Homo sapien
gaacacagatgaggcagactagcat

SEQ ID NO: 4304616 - DNA, 25 bp, Homo sapien
gaaaccctcaatgtctggacgagac

SEQ ID NO: 4304617 - DNA, 25 bp, Homo sapien
tgagtcagctttcactcgcaagaga

SEQ ID NO: 4304618 - DNA, 25 bp, Homo sapien
catttctgcacgtgaggtctgagtc

SEQ ID NO: 4304619 - DNA, 25 bp, Homo sapien
tacccagagcaagaagctataaagc

SEQ ID NO: 4304620 - DNA, 25 bp, Homo sapien
tgtatgcgtgatcacattctcagtg

SEQ ID NO: 4304621 - DNA, 25 bp, Homo sapien
tgcttcgggcctgctcaccgaggac

SEQ ID NO: 4304622 - DNA, 25 bp, Homo sapien
cacgatgacgaagccgaagccctcg

SEQ ID NO: 4304623 - DNA, 25 bp, Homo sapien
cgcgccggatctccacgtcgtaggg

SEQ ID NO: 4304624 - DNA, 25 bp, Homo sapien
aaaggtcgtgcctgcttcgggcctg

SEQ ID NO: 4304625 - DNA, 25 bp, Homo sapien
cgccactgccgatgccgctggtgct

SEQ ID NO: 4304626 - DNA, 25 bp, Homo sapien
ccgccactgccgatgccgctggtgc

SEQ ID NO: 4304627 - DNA, 25 bp, Homo sapien
tgccctgcggagtgcgcttctcttc

SEQ ID NO: 4304628 - DNA, 25 bp, Homo sapien
tactgtgatgagaggaggctggcga

SEQ ID NO: 4304629 - DNA, 25 bp, Homo sapien
ttctcttctgtcagcgaggccggct

SEQ ID NO: 4304630 - DNA, 25 bp, Homo sapien
gaggccggctggttgctactgtgat

SEQ ID NO: 4304631 - DNA, 25 bp, Homo sapien
gcagagagatgcacgcgtacatcac

SEQ ID NO: 4304632 - DNA, 25 bp, Homo sapien
gagatgcacgcgtacatcaccgtgt

SEQ ID NO: 4304633 - DNA, 25 bp, Homo sapien
tgcacgcgtacatcaccgtgtcctg

SEQ ID NO: 4304634 - DNA, 25 bp, Homo sapien
ctgtagcagagagatgcacgcgtac

SEQ ID NO: 4304635 - DNA, 25 bp, Homo sapien
cagggaagcgagatagttagttttc

SEQ ID NO: 4304636 - DNA, 25 bp, Homo sapien
gaagcgagatagttagttttcatct

SEQ ID NO: 4304637 - DNA, 25 bp, Homo sapien
gccagggaagcgagatagttagttt

SEQ ID NO: 4304638 - DNA, 25 bp, Homo sapien
ttgggccagggaagcgagatagtta

SEQ ID NO: 4304639 - DNA, 25 bp, Homo sapien
gattgacgtggccttgcttggcagc

SEQ ID NO: 4304640 - DNA, 25 bp, Homo sapien
gattaattcatctccagacctcagg

SEQ ID NO: 4304641 - DNA, 25 bp, Homo sapien
tacgccgcaccgtgagattgacgtg

SEQ ID NO: 4304642 - DNA, 25 bp, Homo sapien
tgcataagctggaccacaagctggt

SEQ ID NO: 4304643 - DNA, 25 bp, Homo sapien
aacgatggatgaaacattgctctcc

SEQ ID NO: 4304644 - DNA, 25 bp, Homo sapien
ctgttgagtaattgaacgatggatg

SEQ ID NO: 4304645 - DNA, 25 bp, Homo sapien
tatgtttactgttacatcaatagcc

SEQ ID NO: 4304646 - DNA, 25 bp, Homo sapien
gtttactgttacatcaatagccttc

SEQ ID NO: 4304647 - DNA, 25 bp, Homo sapien
ggttcatttccacccagaatcctaa

SEQ ID NO: 4304648 - DNA, 25 bp, Homo sapien
atttccacccagaatcctaaatcca

SEQ ID NO: 4304649 - DNA, 25 bp, Homo sapien
tccagaggaagatgtcctgttcctg

SEQ ID NO: 4304650 - DNA, 25 bp, Homo sapien
ttttctccagaggaagatgtcctgt

SEQ ID NO: 4304651 - DNA, 25 bp, Homo sapien
tagaccactggtgctttccagccag

SEQ ID NO: 4304652 - DNA, 25 bp, Homo sapien
tctgggaacaacgaaagggcctctg

SEQ ID NO: 4304653 - DNA, 25 bp, Homo sapien
gaacatttgcccatcctacagtgac

SEQ ID NO: 4304654 - DNA, 25 bp, Homo sapien
tctttctgttcgagtagctggctac

SEQ ID NO: 4304655 - DNA, 25 bp, Homo sapien
gacattctccaaaattcgtggaatt

SEQ ID NO: 4304656 - DNA, 25 bp, Homo sapien
aaattcgtggaattgatttctctct

SEQ ID NO: 4304657 - DNA, 25 bp, Homo sapien
ttgctcaatcccgacgcaggtgaag

SEQ ID NO: 4304658 - DNA, 25 bp, Homo sapien
aatcccgacgcaggtgaaggtgaca

SEQ ID NO: 4304659 - DNA, 25 bp, Homo sapien
actgtattgaggagagcaggagttc

SEQ ID NO: 4304660 - DNA, 25 bp, Homo sapien
cttaagaaaatttgccgccaccagg

SEQ ID NO: 4304661 - DNA, 25 bp, Homo sapien
gccagcccttcagaatgcaattcat

SEQ ID NO: 4304662 - DNA, 25 bp, Homo sapien
caagagccttctattaaacggatgt

SEQ ID NO: 4304663 - DNA, 25 bp, Homo sapien
ccattgactggacgagccacaagct

SEQ ID NO: 4304664 - DNA, 25 bp, Homo sapien
tcaataaagcaatatctcaacatta

SEQ ID NO: 4304665 - DNA, 25 bp, Homo sapien
tctcaacattaactgaagttgggcc

SEQ ID NO: 4304666 - DNA, 25 bp, Homo sapien
cggggaatgtgaaaacgctcctctt

SEQ ID NO: 4304667 - DNA, 25 bp, Homo sapien
ctacagtgagcgaggagacacaatg

SEQ ID NO: 4304668 - DNA, 25 bp, Homo sapien
ggaccctgctgagcagtgaccacat

SEQ ID NO: 4304669 - DNA, 25 bp, Homo sapien
ctcggccggcaaaggaagcacagca

SEQ ID NO: 4304670 - DNA, 25 bp, Homo sapien
catggccaagtctgtgtagtggacg

SEQ ID NO: 4304671 - DNA, 25 bp, Homo sapien
gaggagtcgactttcagcatgcacc

SEQ ID NO: 4304672 - DNA, 25 bp, Homo sapien
tgtgtgcaggcttcggtggctggaa

SEQ ID NO: 4304673 - DNA, 25 bp, Homo sapien
actgtgctgagaactattctggctg

SEQ ID NO: 4304674 - DNA, 25 bp, Homo sapien
gtcggttttcatacatgctcctgga

SEQ ID NO: 4304675 - DNA, 25 bp, Homo sapien
agagctgtcagtttgatctggagct

SEQ ID NO: 4304676 - DNA, 25 bp, Homo sapien
gataggaagacataatcataaccca

SEQ ID NO: 4304677 - DNA, 25 bp, Homo sapien
tttctccagctaatgctgaatgtag

SEQ ID NO: 4304678 - DNA, 25 bp, Homo sapien
ggtgggccagataggaagacataat

SEQ ID NO: 4304679 - DNA, 25 bp, Homo sapien
gctgaatgtagataaatccccaggt

SEQ ID NO: 4304680 - DNA, 25 bp, Homo sapien
ttctcttttatagatcctgtagagc

SEQ ID NO: 4304681 - DNA, 25 bp, Homo sapien
tatagatcctgtagagctcgtggtt

SEQ ID NO: 4304682 - DNA, 25 bp, Homo sapien
acaccatgtcactatacttagctga

SEQ ID NO: 4304683 - DNA, 25 bp, Homo sapien
tagctgatttaaagcattgtatggg

SEQ ID NO: 4304684 - DNA, 25 bp, Homo sapien
gttccgatcaatcctatcaaggcca

SEQ ID NO: 4304685 - DNA, 25 bp, Homo sapien
tgtctccccgagtatccttcatctt

SEQ ID NO: 4304686 - DNA, 25 bp, Homo sapien
ccttcatctttcattcccctggaat

SEQ ID NO: 4304687 - DNA, 25 bp, Homo sapien
ccaaatcttccaccaggtgttccga

SEQ ID NO: 4304688 - DNA, 25 bp, Homo sapien
tagggttattggcagtttctgttcc

SEQ ID NO: 4304689 - DNA, 25 bp, Homo sapien
tgtagggttattggcagtttctgtt

SEQ ID NO: 4304690 - DNA, 25 bp, Homo sapien
gcttcttttgtagggttattggcag

SEQ ID NO: 4304691 - DNA, 25 bp, Homo sapien
tttgtagggttattggcagtttctg

SEQ ID NO: 4304692 - DNA, 25 bp, Homo sapien
ggctgtagaagctttgatgggatca

SEQ ID NO: 4304693 - DNA, 25 bp, Homo sapien
tcttgtaggctgtagaagctttgat

SEQ ID NO: 4304694 - DNA, 25 bp, Homo sapien
tcacacaagtggcatcagggaaaag

SEQ ID NO: 4304695 - DNA, 25 bp, Homo sapien
gtttcttcttgtaggctgtagaagc

SEQ ID NO: 4304696 - DNA, 25 bp, Homo sapien
tcctccggcgcctaagaaagctaag

SEQ ID NO: 4304697 - DNA, 25 bp, Homo sapien
gaaatgtcctattctcagtgctggg

SEQ ID NO: 4304698 - DNA, 25 bp, Homo sapien
tgggaacaccagttgagagcaatgc

SEQ ID NO: 4304699 - DNA, 25 bp, Homo sapien
ccctttgaaggagagtgtggatgca

SEQ ID NO: 4304700 - DNA, 25 bp, Homo sapien
ttgggctcttcttgggaactggcag

SEQ ID NO: 4304701 - DNA, 25 bp, Homo sapien
cgactttgggctcttcttgggaact

SEQ ID NO: 4304702 - DNA, 25 bp, Homo sapien
gactttgggctcttcttgggaactg

SEQ ID NO: 4304703 - DNA, 25 bp, Homo sapien
ctttgggctcttcttgggaactggc

SEQ ID NO: 4304704 - DNA, 25 bp, Homo sapien
tctccccagcatcggagttaccagg

SEQ ID NO: 4304705 - DNA, 25 bp, Homo sapien
taaagaacaatccccaggtgttcca

SEQ ID NO: 4304706 - DNA, 25 bp, Homo sapien
gatttctccccagcatcggagttac

SEQ ID NO: 4304707 - DNA, 25 bp, Homo sapien
aagaacaatccccaggtgttccatg

SEQ ID NO: 4304708 - DNA, 25 bp, Homo sapien
tattaggttgtataagtgtgggtca

SEQ ID NO: 4304709 - DNA, 25 bp, Homo sapien
cagagagaccttcttagttaattgg

SEQ ID NO: 4304710 - DNA, 25 bp, Homo sapien
taattggaatcagcaaggtttcacc

SEQ ID NO: 4304711 - DNA, 25 bp, Homo sapien
ctcctaattcagagagaccttctta

SEQ ID NO: 4304712 - DNA, 25 bp, Homo sapien
ggccttgaatccgaacgctttcttc

SEQ ID NO: 4304713 - DNA, 25 bp, Homo sapien
taagagtgacgaatataaccccggc

SEQ ID NO: 4304714 - DNA, 25 bp, Homo sapien
gctcttcccgaggtttggatgccag

SEQ ID NO: 4304715 - DNA, 25 bp, Homo sapien
tgttctattctcaacctcctgtggg

SEQ ID NO: 4304716 - DNA, 25 bp, Homo sapien
aagagattagcctcacaagatggca

SEQ ID NO: 4304717 - DNA, 25 bp, Homo sapien
tcaccagtggtacctgggcaacaca

SEQ ID NO: 4304718 - DNA, 25 bp, Homo sapien
gagattagcctcacaagatggcaca

SEQ ID NO: 4304719 - DNA, 25 bp, Homo sapien
tgcaactctggttgtatatcagaat

SEQ ID NO: 4304720 - DNA, 25 bp, Homo sapien
aaatgtaacaccattaatgagaaga

SEQ ID NO: 4304721 - DNA, 25 bp, Homo sapien
tataaaatgtaacaccattaatgag

SEQ ID NO: 4304722 - DNA, 25 bp, Homo sapien
ttaaaatcaaggagtatagtcaggt

SEQ ID NO: 4304723 - DNA, 25 bp, Homo sapien
gatggcattgggaattaagaagaga

SEQ ID NO: 4304724 - DNA, 25 bp, Homo sapien
tgtcataatcgttcttatacccaag

SEQ ID NO: 4304725 - DNA, 25 bp, Homo sapien
cagtcaagtgatctaggtacaagaa

SEQ ID NO: 4304726 - DNA, 25 bp, Homo sapien
ttcctactacatacatcttggctac

SEQ ID NO: 4304727 - DNA, 25 bp, Homo sapien
ttgaaaattagttggtggaaatgac

SEQ ID NO: 4304728 - DNA, 25 bp, Homo sapien
attgctcagtgtgacgtcctgtgtt

SEQ ID NO: 4304729 - DNA, 25 bp, Homo sapien
tattgctcagtgtgacgtcctgtgt

SEQ ID NO: 4304730 - DNA, 25 bp, Homo sapien
tgctcagtgtgacgtcctgtgtttt

SEQ ID NO: 4304731 - DNA, 25 bp, Homo sapien
gtattgctcagtgtgacgtcctgtg

SEQ ID NO: 4304732 - DNA, 25 bp, Homo sapien
tgtctgcgatagtaaaaccaaagcc

SEQ ID NO: 4304733 - DNA, 25 bp, Homo sapien
ccactatgagatccccttctttcag

SEQ ID NO: 4304734 - DNA, 25 bp, Homo sapien
caccacttggttgtgagttagggcc

SEQ ID NO: 4304735 - DNA, 25 bp, Homo sapien
ccttaggacactcaaccagcatatc

SEQ ID NO: 4304736 - DNA, 25 bp, Homo sapien
acagtgtcattaggataaccatgag

SEQ ID NO: 4304737 - DNA, 25 bp, Homo sapien
agttatgagttctggctgagtggct

SEQ ID NO: 4304738 - DNA, 25 bp, Homo sapien
tactactgtggctagctggtgaatc

SEQ ID NO: 4304739 - DNA, 25 bp, Homo sapien
actatttgaagccacgtccgctggg

SEQ ID NO: 4304740 - DNA, 25 bp, Homo sapien
tatccaaaatggctaccgaggtcac

SEQ ID NO: 4304741 - DNA, 25 bp, Homo sapien
ctcggcagagttcaaggtccacgct

SEQ ID NO: 4304742 - DNA, 25 bp, Homo sapien
ccgaggtcactaaacttgtattggg

SEQ ID NO: 4304743 - DNA, 25 bp, Homo sapien
tcaaaaggcaatggataacctcggc

SEQ ID NO: 4304744 - DNA, 25 bp, Homo sapien
tgccatccaatgcagcaggaccatc

SEQ ID NO: 4304745 - DNA, 25 bp, Homo sapien
tcccctccaaccaccgtgaagccaa

SEQ ID NO: 4304746 - DNA, 25 bp, Homo sapien
acgactgcttttccgcagctttgtg

SEQ ID NO: 4304747 - DNA, 25 bp, Homo sapien
aagccacgactgcttttccgcagct

SEQ ID NO: 4304748 - DNA, 25 bp, Homo sapien
ttcaactcagaagggtttcgtgtaa

SEQ ID NO: 4304749 - DNA, 25 bp, Homo sapien
tcaactcagaagggtttcgtgtaaa

SEQ ID NO: 4304750 - DNA, 25 bp, Homo sapien
ctttcaactcagaagggtttcgtgt

SEQ ID NO: 4304751 - DNA, 25 bp, Homo sapien
tttcaactcagaagggtttcgtgta

SEQ ID NO: 4304752 - DNA, 25 bp, Homo sapien
caagtagtagacctaatttcatgag

SEQ ID NO: 4304753 - DNA, 25 bp, Homo sapien
cccaagtagtagacctaatttcatg

SEQ ID NO: 4304754 - DNA, 25 bp, Homo sapien
ccaagtagtagacctaatttcatga

SEQ ID NO: 4304755 - DNA, 25 bp, Homo sapien
tggagggtggtttggaataacagga

SEQ ID NO: 4304756 - DNA, 25 bp, Homo sapien
ctctggattgcttggagggtggttt

SEQ ID NO: 4304757 - DNA, 25 bp, Homo sapien
acaagggctgagtgatcttctgtcc

SEQ ID NO: 4304758 - DNA, 25 bp, Homo sapien
aatttctgcacagggcttatctctg

SEQ ID NO: 4304759 - DNA, 25 bp, Homo sapien
taaaagatcacaatgaaaaactggg

SEQ ID NO: 4304760 - DNA, 25 bp, Homo sapien
tattgatgggagtattaagcctatg

SEQ ID NO: 4304761 - DNA, 25 bp, Homo sapien
catgaaatggaatattacgtcacca

SEQ ID NO: 4304762 - DNA, 25 bp, Homo sapien
catattgtgtcttcctgttgatgtg

SEQ ID NO: 4304763 - DNA, 25 bp, Homo sapien
tctagaaccgggttctcatattgtg

SEQ ID NO: 4304764 - DNA, 25 bp, Homo sapien
gttctcatattgtgtcttcctgttg

SEQ ID NO: 4304765 - DNA, 25 bp, Homo sapien
accgggttctcatattgtgtcttcc

SEQ ID NO: 4304766 - DNA, 25 bp, Homo sapien
taacttgcccctcaaactagtgtct

SEQ ID NO: 4304767 - DNA, 25 bp, Homo sapien
tgagcttcaaatagcaaaaacccca

SEQ ID NO: 4304768 - DNA, 25 bp, Homo sapien
tggtctaccattaacaggcacatga

SEQ ID NO: 4304769 - DNA, 25 bp, Homo sapien
taatgcataaactagttgagggaca

SEQ ID NO: 4304770 - DNA, 25 bp, Homo sapien
catataccaggacgatgttgggcct

SEQ ID NO: 4304771 - DNA, 25 bp, Homo sapien
taccgtggctgaaccttttgaaatg

SEQ ID NO: 4304772 - DNA, 25 bp, Homo sapien
caaagtctgcatcctaggctagttc

SEQ ID NO: 4304773 - DNA, 25 bp, Homo sapien
catctggtctactgaatcctggctt

SEQ ID NO: 4304774 - DNA, 25 bp, Homo sapien
tagacagggtcttcaatcttttccc

SEQ ID NO: 4304775 - DNA, 25 bp, Homo sapien
catagacagggtcttcaatcttttc

SEQ ID NO: 4304776 - DNA, 25 bp, Homo sapien
atagacagggtcttcaatcttttcc

SEQ ID NO: 4304777 - DNA, 25 bp, Homo sapien
gatttacctcaaaagtcaatggtgg

SEQ ID NO: 4304778 - DNA, 25 bp, Homo sapien
gctaagatccttttggcattgccca

SEQ ID NO: 4304779 - DNA, 25 bp, Homo sapien
ggaatcctcgtatgactaaccacag

SEQ ID NO: 4304780 - DNA, 25 bp, Homo sapien
cattgcccagatataagattgagcc

SEQ ID NO: 4304781 - DNA, 25 bp, Homo sapien
atgtctgcagaggacgtgataaatt

SEQ ID NO: 4304782 - DNA, 25 bp, Homo sapien
ttaattctggggagatgtctgcaga

SEQ ID NO: 4304783 - DNA, 25 bp, Homo sapien
gggagatgtctgcagaggacgtgat

SEQ ID NO: 4304784 - DNA, 25 bp, Homo sapien
gagatgtctgcagaggacgtgataa

SEQ ID NO: 4304785 - DNA, 25 bp, Homo sapien
agtacataatggagcaactgaccca

SEQ ID NO: 4304786 - DNA, 25 bp, Homo sapien
ctgcaaaccaaagtacataatggag

SEQ ID NO: 4304787 - DNA, 25 bp, Homo sapien
cataatggagcaactgacccagctc

SEQ ID NO: 4304788 - DNA, 25 bp, Homo sapien
aaaccaaagtacataatggagcaac

SEQ ID NO: 4304789 - DNA, 25 bp, Homo sapien
gtccagctcctcggtgtgtacccct

SEQ ID NO: 4304790 - DNA, 25 bp, Homo sapien
tgtccagctcctcggtgtgtacccc

SEQ ID NO: 4304791 - DNA, 25 bp, Homo sapien
tccagctcctcggtgtgtacccctt

SEQ ID NO: 4304792 - DNA, 25 bp, Homo sapien
aacgggaagagctgatattggcaaa

SEQ ID NO: 4304793 - DNA, 25 bp, Homo sapien
tacagaccttattgggagtaaacaa

SEQ ID NO: 4304794 - DNA, 25 bp, Homo sapien
gatagtaaacttgcgacctcagtgt

SEQ ID NO: 4304795 - DNA, 25 bp, Homo sapien
tcaatgttcttaagtgggaagtcac

SEQ ID NO: 4304796 - DNA, 25 bp, Homo sapien
ggagagtggtgctctaggtaacacc

SEQ ID NO: 4304797 - DNA, 25 bp, Homo sapien
gaatgtgtgactgaccagaccgtct

SEQ ID NO: 4304798 - DNA, 25 bp, Homo sapien
catttccaagattaacagggagagt

SEQ ID NO: 4304799 - DNA, 25 bp, Homo sapien
cctccaagactagggaagtatgtga

SEQ ID NO: 4304800 - DNA, 25 bp, Homo sapien
gcttgtttaggcaccgagggtctaa

SEQ ID NO: 4304801 - DNA, 25 bp, Homo sapien
ccaagatgttgttttcgtgttatgg

SEQ ID NO: 4304802 - DNA, 25 bp, Homo sapien
ttctgctgcttgtttaggcaccgag

SEQ ID NO: 4304803 - DNA, 25 bp, Homo sapien
gcaccgagggtctaaccaagatgtt

SEQ ID NO: 4304804 - DNA, 25 bp, Homo sapien
tttgaaagtgtagagacacattccc

SEQ ID NO: 4304805 - DNA, 25 bp, Homo sapien
tgacttgagtcttggatgctgaaac

SEQ ID NO: 4304806 - DNA, 25 bp, Homo sapien
gaaggcagccccaaattactcgtca

SEQ ID NO: 4304807 - DNA, 25 bp, Homo sapien
tgctgaaactcacaaagagggctgc

SEQ ID NO: 4304808 - DNA, 25 bp, Homo sapien
tcttactttatgactggcttttccc

SEQ ID NO: 4304809 - DNA, 25 bp, Homo sapien
tttctagaatgccagacaatcccac

SEQ ID NO: 4304810 - DNA, 25 bp, Homo sapien
tccctagggctgaactaatatttca

SEQ ID NO: 4304811 - DNA, 25 bp, Homo sapien
taaatgatcacgtgtgtcgttgcca

SEQ ID NO: 4304812 - DNA, 25 bp, Homo sapien
ttaggtggaggttagcttacatgcc

SEQ ID NO: 4304813 - DNA, 25 bp, Homo sapien
gggcacacttatggatctatctctg

SEQ ID NO: 4304814 - DNA, 25 bp, Homo sapien
tacatgcctctggtcgtccacttgc

SEQ ID NO: 4304815 - DNA, 25 bp, Homo sapien
catttactgaaaaggctatctgccc

SEQ ID NO: 4304816 - DNA, 25 bp, Homo sapien
atgaagtgaccatctccctcaagca

SEQ ID NO: 4304817 - DNA, 25 bp, Homo sapien
gaagatacttcgatacagacataca

SEQ ID NO: 4304818 - DNA, 25 bp, Homo sapien
tatggtttgttagattgacacctgt

SEQ ID NO: 4304819 - DNA, 25 bp, Homo sapien
catatttatgaggtgtagaagatac

SEQ ID NO: 4304820 - DNA, 25 bp, Homo sapien
ccaataacagtgtgagaaggtttcc

SEQ ID NO: 4304821 - DNA, 25 bp, Homo sapien
tccatagagttgcttgagctcccta

SEQ ID NO: 4304822 - DNA, 25 bp, Homo sapien
caaaccgtttcccatagtgattata

SEQ ID NO: 4304823 - DNA, 25 bp, Homo sapien
cccatttttcaatcagactactaga

SEQ ID NO: 4304824 - DNA, 25 bp, Homo sapien
tttcctgaaattgtttaccagctta

SEQ ID NO: 4304825 - DNA, 25 bp, Homo sapien
ctccttgagcagtggtgcgtagttc

SEQ ID NO: 4304826 - DNA, 25 bp, Homo sapien
ctcttatctccttgagcagtggtgc

SEQ ID NO: 4304827 - DNA, 25 bp, Homo sapien
gtagcctgaaactttcctgaaattg

SEQ ID NO: 4304828 - DNA, 25 bp, Homo sapien
ccaccaggcctttgttgataccagc

SEQ ID NO: 4304829 - DNA, 25 bp, Homo sapien
tgggctccttcttaccgctgggtgg

SEQ ID NO: 4304830 - DNA, 25 bp, Homo sapien
ggaagtcctgagttccctcaagtgg

SEQ ID NO: 4304831 - DNA, 25 bp, Homo sapien
tactgcctggatgcaaagtgccagc

SEQ ID NO: 4304832 - DNA, 25 bp, Homo sapien
acagaaacatgggttgtcccctctc

SEQ ID NO: 4304833 - DNA, 25 bp, Homo sapien
tacacttcttgactctcaagaaaag

SEQ ID NO: 4304834 - DNA, 25 bp, Homo sapien
cttaactaatacacttcttgactct

SEQ ID NO: 4304835 - DNA, 25 bp, Homo sapien
cttgactctcaagaaaagactgctt

SEQ ID NO: 4304836 - DNA, 25 bp, Homo sapien
gaaaaatcatactacctaattttca

SEQ ID NO: 4304837 - DNA, 25 bp, Homo sapien
ccggctgtcaaagagggtgttctga

SEQ ID NO: 4304838 - DNA, 25 bp, Homo sapien
aagagggtgttctgagttccaagcc

SEQ ID NO: 4304839 - DNA, 25 bp, Homo sapien
actgcacccggctgtcaaagagggt

SEQ ID NO: 4304840 - DNA, 25 bp, Homo sapien
taaaaaataccatcagtgggtgatc

SEQ ID NO: 4304841 - DNA, 25 bp, Homo sapien
cctcaaactgttgagaatcgataag

SEQ ID NO: 4304842 - DNA, 25 bp, Homo sapien
tgggtgatcaatcccttaaatgtaa

SEQ ID NO: 4304843 - DNA, 25 bp, Homo sapien
ttggcaactgctagacagagggaag

SEQ ID NO: 4304844 - DNA, 25 bp, Homo sapien
attttcagtataggccatctcccag

SEQ ID NO: 4304845 - DNA, 25 bp, Homo sapien
tctcccagttttcaggtagaggacc

SEQ ID NO: 4304846 - DNA, 25 bp, Homo sapien
ggagagtgtgctcctcttgttcacc

SEQ ID NO: 4304847 - DNA, 25 bp, Homo sapien
tgatgctactattcacaggtggtaa

SEQ ID NO: 4304848 - DNA, 25 bp, Homo sapien
gcattttgcatatcattgtaggact

SEQ ID NO: 4304849 - DNA, 25 bp, Homo sapien
cattctccgcgtggactatgccagc

SEQ ID NO: 4304850 - DNA, 25 bp, Homo sapien
ttcatttcaggaacgtcatcctcct

SEQ ID NO: 4304851 - DNA, 25 bp, Homo sapien
aaggctgtgcaaggcatccgtcgtg

SEQ ID NO: 4304852 - DNA, 25 bp, Homo sapien
gagtcgaatcagcttgaagaaaggc

SEQ ID NO: 4304853 - DNA, 25 bp, Homo sapien
ctagaattgagtcgaatcagcttga

SEQ ID NO: 4304854 - DNA, 25 bp, Homo sapien
gaattgagtcgaatcagcttgaaga

SEQ ID NO: 4304855 - DNA, 25 bp, Homo sapien
aggcgctagaattgagtcgaatcag

SEQ ID NO: 4304856 - DNA, 25 bp, Homo sapien
tagtgtccaccaatagacagcagcc

SEQ ID NO: 4304857 - DNA, 25 bp, Homo sapien
catgcagcattaagcaacttgccgg

SEQ ID NO: 4304858 - DNA, 25 bp, Homo sapien
gaatcaaactcaggcagtgtgacag

SEQ ID NO: 4304859 - DNA, 25 bp, Homo sapien
aaaaacttatgagccatctcggcca

SEQ ID NO: 4304860 - DNA, 25 bp, Homo sapien
cacagtcagaaagttatagtccacg

SEQ ID NO: 4304861 - DNA, 25 bp, Homo sapien
gaaagttatagtccacgccaggcac

SEQ ID NO: 4304862 - DNA, 25 bp, Homo sapien
cttcataggtgccgacttccagaag

SEQ ID NO: 4304863 - DNA, 25 bp, Homo sapien
actctgctcgaggtccaagaactcc

SEQ ID NO: 4304864 - DNA, 25 bp, Homo sapien
cagaaaatacaaaggcacaacaaac

SEQ ID NO: 4304865 - DNA, 25 bp, Homo sapien
ctgtagcagaaaatacaaaggcaca

SEQ ID NO: 4304866 - DNA, 25 bp, Homo sapien
aaaatacaaaggcacaacaaaccat

SEQ ID NO: 4304867 - DNA, 25 bp, Homo sapien
gtagcagaaaatacaaaggcacaac

SEQ ID NO: 4304868 - DNA, 25 bp, Homo sapien
gtcagcagcttttacgactccagta

SEQ ID NO: 4304869 - DNA, 25 bp, Homo sapien
cacaggccttgagattctcgtattc

SEQ ID NO: 4304870 - DNA, 25 bp, Homo sapien
cgtatccaccttaagctcagagcct

SEQ ID NO: 4304871 - DNA, 25 bp, Homo sapien
caatacaaccggcaagttccaaagc

SEQ ID NO: 4304872 - DNA, 25 bp, Homo sapien
aacaagttttcggagagtagggcag

SEQ ID NO: 4304873 - DNA, 25 bp, Homo sapien
tgtcagctcatcacaccatgctagg

SEQ ID NO: 4304874 - DNA, 25 bp, Homo sapien
catagtgtccaggtgaatggtaatc

SEQ ID NO: 4304875 - DNA, 25 bp, Homo sapien
catcatcaaggtattaagcgccaca

SEQ ID NO: 4304876 - DNA, 25 bp, Homo sapien
ctcaaacagatagaagaaaaccgct

SEQ ID NO: 4304877 - DNA, 25 bp, Homo sapien
catgacatctcaaacagatagaaga

SEQ ID NO: 4304878 - DNA, 25 bp, Homo sapien
tctcaaacagatagaagaaaaccgc

SEQ ID NO: 4304879 - DNA, 25 bp, Homo sapien
gaaacagcatgacatctcaaacaga

SEQ ID NO: 4304880 - DNA, 25 bp, Homo sapien
gaaagtcaacctgaacatgaacatt

SEQ ID NO: 4304881 - DNA, 25 bp, Homo sapien
aagtcaacctgaacatgaacattaa

SEQ ID NO: 4304882 - DNA, 25 bp, Homo sapien
tactgaggaggaccagaaaacattc

SEQ ID NO: 4304883 - DNA, 25 bp, Homo sapien
gcctcttaaccagaatactgaggag

SEQ ID NO: 4304884 - DNA, 25 bp, Homo sapien
cacatttatcagaaatcaacttttg

SEQ ID NO: 4304885 - DNA, 25 bp, Homo sapien
gaaacctcgcattcattaaagtcag

SEQ ID NO: 4304886 - DNA, 25 bp, Homo sapien
ttcaggaaaccagtaacgctatacc

SEQ ID NO: 4304887 - DNA, 25 bp, Homo sapien
cttttgaggattatccttgaaggca

SEQ ID NO: 4304888 - DNA, 25 bp, Homo sapien
gagggcagaggcaatctttatttcc

SEQ ID NO: 4304889 - DNA, 25 bp, Homo sapien
catttggcagcagggtaagactgcc

SEQ ID NO: 4304890 - DNA, 25 bp, Homo sapien
tcactcttgggttccatctgatttg

SEQ ID NO: 4304891 - DNA, 25 bp, Homo sapien
tcaacagcaactgctgatcaagggc

SEQ ID NO: 4304892 - DNA, 25 bp, Homo sapien
gcggtagaatgtgcttaactcaaca

SEQ ID NO: 4304893 - DNA, 25 bp, Homo sapien
cttgtcaataatatagcggtagaat

SEQ ID NO: 4304894 - DNA, 25 bp, Homo sapien
aatatagcggtagaatgtgcttaac

SEQ ID NO: 4304895 - DNA, 25 bp, Homo sapien
tgtcaataatatagcggtagaatgt

SEQ ID NO: 4304896 - DNA, 25 bp, Homo sapien
gcatatagcacaaatacagcaagca

SEQ ID NO: 4304897 - DNA, 25 bp, Homo sapien
catatagcacaaatacagcaagcac

SEQ ID NO: 4304898 - DNA, 25 bp, Homo sapien
tgcatatagcacaaatacagcaagc

SEQ ID NO: 4304899 - DNA, 25 bp, Homo sapien
cttgcatatagcacaaatacagcaa

SEQ ID NO: 4304900 - DNA, 25 bp, Homo sapien
aaatagagaaggtgatccctagtgt

SEQ ID NO: 4304901 - DNA, 25 bp, Homo sapien
ctgtagcaagatcaacgccataatc

SEQ ID NO: 4304902 - DNA, 25 bp, Homo sapien
ttcagagtgctactttgaatgtcac

SEQ ID NO: 4304903 - DNA, 25 bp, Homo sapien
agatcaacgccataatcatatccaa

SEQ ID NO: 4304904 - DNA, 25 bp, Homo sapien
cagacaggcctgattgccagaagtt

SEQ ID NO: 4304905 - DNA, 25 bp, Homo sapien
aataaccagcaataaccagctctgc

SEQ ID NO: 4304906 - DNA, 25 bp, Homo sapien
tgtgaatacgctttgctctggagga

SEQ ID NO: 4304907 - DNA, 25 bp, Homo sapien
tcctcaagcaaaggtctccaataac

SEQ ID NO: 4304908 - DNA, 25 bp, Homo sapien
tcaaaatgcaggctactggaggggt

SEQ ID NO: 4304909 - DNA, 25 bp, Homo sapien
ggtggggtgagccaacagttcatta

SEQ ID NO: 4304910 - DNA, 25 bp, Homo sapien
cagttcattaagtggcagcaggcca

SEQ ID NO: 4304911 - DNA, 25 bp, Homo sapien
tcccggctgcaaacaacactcttaa

SEQ ID NO: 4304912 - DNA, 25 bp, Homo sapien
gctcgcccaagaaacatggctggct

SEQ ID NO: 4304913 - DNA, 25 bp, Homo sapien
cgcccaagaaacatggctggctgga

SEQ ID NO: 4304914 - DNA, 25 bp, Homo sapien
ccgagatgctcgcccaagaaacatg

SEQ ID NO: 4304915 - DNA, 25 bp, Homo sapien
gatgctcgcccaagaaacatggctg

SEQ ID NO: 4304916 - DNA, 25 bp, Homo sapien
cagtggaaacctctgctggccccat

SEQ ID NO: 4304917 - DNA, 25 bp, Homo sapien
gacagaatcacatcttccctcttct

SEQ ID NO: 4304918 - DNA, 25 bp, Homo sapien
ctggcactttggttaatacagacag

SEQ ID NO: 4304919 - DNA, 25 bp, Homo sapien
tctcagtggaaacctctgctggccc

SEQ ID NO: 4304920 - DNA, 25 bp, Homo sapien
ttcattattatcatggttacaagcc

SEQ ID NO: 4304921 - DNA, 25 bp, Homo sapien
ttgtatgagaccagtatgccaagcc

SEQ ID NO: 4304922 - DNA, 25 bp, Homo sapien
tgccaagcctttatattcatattca

SEQ ID NO: 4304923 - DNA, 25 bp, Homo sapien
ggttacaagccttcacagtccttct

SEQ ID NO: 4304924 - DNA, 25 bp, Homo sapien
taaatgtttaagacggcaggcacgg

SEQ ID NO: 4304925 - DNA, 25 bp, Homo sapien
cctgctctgggcaaaaccttgtgca

SEQ ID NO: 4304926 - DNA, 25 bp, Homo sapien
tagaaagcccttgttatatccatgc

SEQ ID NO: 4304927 - DNA, 25 bp, Homo sapien
gattgctgccaagtttgctctaggg

SEQ ID NO: 4304928 - DNA, 25 bp, Homo sapien
tttcccattatggaagaggcactgt

SEQ ID NO: 4304929 - DNA, 25 bp, Homo sapien
gaagcttctggtatgggcgaatgaa

SEQ ID NO: 4304930 - DNA, 25 bp, Homo sapien
tgtaacaggtcacaaaagctgatgc

SEQ ID NO: 4304931 - DNA, 25 bp, Homo sapien
caacctggtgaattaccccgagatc

SEQ ID NO: 4304932 - DNA, 25 bp, Homo sapien
caaacgtataggttcaaagagctcc

SEQ ID NO: 4304933 - DNA, 25 bp, Homo sapien
cagggttggtagttccagtggacac

SEQ ID NO: 4304934 - DNA, 25 bp, Homo sapien
ttttgctcagcaaggatcgggagag

SEQ ID NO: 4304935 - DNA, 25 bp, Homo sapien
aaagcccatgtgaaactgttttgcc

SEQ ID NO: 4304936 - DNA, 25 bp, Homo sapien
gaccacttgtacttgcctgcaaacc

SEQ ID NO: 4304937 - DNA, 25 bp, Homo sapien
tcaaacctccggtggcagggagcct

SEQ ID NO: 4304938 - DNA, 25 bp, Homo sapien
cagcggagcgttcgaatccagaggt

SEQ ID NO: 4304939 - DNA, 25 bp, Homo sapien
ggcgagaggagatcatggaccactt

SEQ ID NO: 4304940 - DNA, 25 bp, Homo sapien
agagcattacatcacagagcccggg

SEQ ID NO: 4304941 - DNA, 25 bp, Homo sapien
tccatctgtatttaagccgggagtg

SEQ ID NO: 4304942 - DNA, 25 bp, Homo sapien
gaccacagagcggtttttcgaggga

SEQ ID NO: 4304943 - DNA, 25 bp, Homo sapien
gagaagatgcccaggcttgcgcctt

SEQ ID NO: 4304944 - DNA, 25 bp, Homo sapien
gaatctagtgtgcagatggacatcc

SEQ ID NO: 4304945 - DNA, 25 bp, Homo sapien
gacctaagactgcttttcctgacaa

SEQ ID NO: 4304946 - DNA, 25 bp, Homo sapien
tgtaatatggtttgggatgcccagg

SEQ ID NO: 4304947 - DNA, 25 bp, Homo sapien
gatactggtcaacactgatatgggt

SEQ ID NO: 4304948 - DNA, 25 bp, Homo sapien
gattgctatgtgtatctgataagac

SEQ ID NO: 4304949 - DNA, 25 bp, Homo sapien
aagacagtggttgagtcagtactac

SEQ ID NO: 4304950 - DNA, 25 bp, Homo sapien
tattactaataacacccaacttgag

SEQ ID NO: 4304951 - DNA, 25 bp, Homo sapien
ggtttaaccctgacaatgctacttg

SEQ ID NO: 4304952 - DNA, 25 bp, Homo sapien
aattttgttgcttcatcttttggcc

SEQ ID NO: 4304953 - DNA, 25 bp, Homo sapien
taattaaatttcaactaacatgccc

SEQ ID NO: 4304954 - DNA, 25 bp, Homo sapien
cactggatgaacactttaaacaggt

SEQ ID NO: 4304955 - DNA, 25 bp, Homo sapien
gaattatatttcaacaacgccgtta

SEQ ID NO: 4304956 - DNA, 25 bp, Homo sapien
aaatggtgtgctcatttgcttcatc

SEQ ID NO: 4304957 - DNA, 25 bp, Homo sapien
tgctcatttgcttcatccccatttc

SEQ ID NO: 4304958 - DNA, 25 bp, Homo sapien
tcaagaaatggtgtgctcatttgct

SEQ ID NO: 4304959 - DNA, 25 bp, Homo sapien
tcatccccatttcttaaattggaat

SEQ ID NO: 4304960 - DNA, 25 bp, Homo sapien
tgctggagctcatgatcaggagacc

SEQ ID NO: 4304961 - DNA, 25 bp, Homo sapien
gagaaaatgtcgcaggtccttgttc

SEQ ID NO: 4304962 - DNA, 25 bp, Homo sapien
gaccccttctggaatcgctgattga

SEQ ID NO: 4304963 - DNA, 25 bp, Homo sapien
cacagcatggcggtaaaggttatcc

SEQ ID NO: 4304964 - DNA, 25 bp, Homo sapien
ttctgaattcatccccaaaatggtg

SEQ ID NO: 4304965 - DNA, 25 bp, Homo sapien
caaagtccagagaaaatcgggtgta

SEQ ID NO: 4304966 - DNA, 25 bp, Homo sapien
cgggtgtaagtttccaagtgtcatc

SEQ ID NO: 4304967 - DNA, 25 bp, Homo sapien
tcactaggaagattcggaggactcg

SEQ ID NO: 4304968 - DNA, 25 bp, Homo sapien
gagccactcttaccagttatcagaa

SEQ ID NO: 4304969 - DNA, 25 bp, Homo sapien
taaatgtttcccaatctactaaaga

SEQ ID NO: 4304970 - DNA, 25 bp, Homo sapien
gattacaactgagagtgagcattct

SEQ ID NO: 4304971 - DNA, 25 bp, Homo sapien
tgcagtctagacatagtgagccact

SEQ ID NO: 4304972 - DNA, 25 bp, Homo sapien
tatccatctgtgaccgagagggcag

SEQ ID NO: 4304973 - DNA, 25 bp, Homo sapien
ggactgatctctatctcctaggata

SEQ ID NO: 4304974 - DNA, 25 bp, Homo sapien
gtgtattccatgtgctccacagcta

SEQ ID NO: 4304975 - DNA, 25 bp, Homo sapien
ttttcaatgctaaggagaacctgca

SEQ ID NO: 4304976 - DNA, 25 bp, Homo sapien
caacaatgttgagaggtgtgacctt

SEQ ID NO: 4304977 - DNA, 25 bp, Homo sapien
tgcacacgtgtttttaggatagatg

SEQ ID NO: 4304978 - DNA, 25 bp, Homo sapien
tcttgcataaatgctctggtgctct

SEQ ID NO: 4304979 - DNA, 25 bp, Homo sapien
gaacaggctggttcctcataaaagg

SEQ ID NO: 4304980 - DNA, 25 bp, Homo sapien
tctttcctgacatcagtttagagct

SEQ ID NO: 4304981 - DNA, 25 bp, Homo sapien
catctttcctgacatcagtttagag

SEQ ID NO: 4304982 - DNA, 25 bp, Homo sapien
ggacacagaaccatctttcctgaca

SEQ ID NO: 4304983 - DNA, 25 bp, Homo sapien
cttcaggacacagaaccatctttcc

SEQ ID NO: 4304984 - DNA, 25 bp, Homo sapien
tattggccagctagggtcaaggcag

SEQ ID NO: 4304985 - DNA, 25 bp, Homo sapien
cagagttcctggctaatccggtcaa

SEQ ID NO: 4304986 - DNA, 25 bp, Homo sapien
tggctcaatgacacaccggcaaggt

SEQ ID NO: 4304987 - DNA, 25 bp, Homo sapien
taagaggcttctgcagtcactaagg

SEQ ID NO: 4304988 - DNA, 25 bp, Homo sapien
cttattcaggttttcctcctcaatc

SEQ ID NO: 4304989 - DNA, 25 bp, Homo sapien
tccacttattcaggttttcctcctc

SEQ ID NO: 4304990 - DNA, 25 bp, Homo sapien
tgttccacttattcaggttttcctc

SEQ ID NO: 4304991 - DNA, 25 bp, Homo sapien
cacttattcaggttttcctcctcaa

SEQ ID NO: 4304992 - DNA, 25 bp, Homo sapien
gccagaaaaggagacccagtgacaa

SEQ ID NO: 4304993 - DNA, 25 bp, Homo sapien
gcccagcccttgactagcaaaaata

SEQ ID NO: 4304994 - DNA, 25 bp, Homo sapien
tagcttttagcgtactcagaggaaa

SEQ ID NO: 4304995 - DNA, 25 bp, Homo sapien
tgctactttgtccagctgagtttgg

SEQ ID NO: 4304996 - DNA, 25 bp, Homo sapien
gtaaaactgcctatgaatccacaat

SEQ ID NO: 4304997 - DNA, 25 bp, Homo sapien
tataccactggaggaaaccaaacta

SEQ ID NO: 4304998 - DNA, 25 bp, Homo sapien
ggcctggtagactgtattaatgtca

SEQ ID NO: 4304999 - DNA, 25 bp, Homo sapien
gcataacagaagtgaaaataccagc

SEQ ID NO: 4305000 - DNA, 25 bp, Homo sapien
ctatggcatgcatgacttaggactg

SEQ ID NO: 4305001 - DNA, 25 bp, Homo sapien
tttggcagagactcggtgtcaccag

SEQ ID NO: 4305002 - DNA, 25 bp, Homo sapien
tgttgcagcaactggacaccaaaac

SEQ ID NO: 4305003 - DNA, 25 bp, Homo sapien
caccaaaactgggatttaacaggca

SEQ ID NO: 4305004 - DNA, 25 bp, Homo sapien
tcattctgataccaaagccaggcag

SEQ ID NO: 4305005 - DNA, 25 bp, Homo sapien
ccaggcagagacacaaccaaaaaag

SEQ ID NO: 4305006 - DNA, 25 bp, Homo sapien
cagcatataaacagagccaaagaca

SEQ ID NO: 4305007 - DNA, 25 bp, Homo sapien
acaaaattcaataacccttcatgct

SEQ ID NO: 4305008 - DNA, 25 bp, Homo sapien
taggaagagcttgaataagaacttc

SEQ ID NO: 4305009 - DNA, 25 bp, Homo sapien
aaatggtctctggtggactcagatt

SEQ ID NO: 4305010 - DNA, 25 bp, Homo sapien
aaaaagatgtgactaggaagagctt

SEQ ID NO: 4305011 - DNA, 25 bp, Homo sapien
ttgagcttccaagacagaccccaaa

SEQ ID NO: 4305012 - DNA, 25 bp, Homo sapien
aaggtttctgatcagtattcagtac

SEQ ID NO: 4305013 - DNA, 25 bp, Homo sapien
gatgacaaatctgaaggtttctgat

SEQ ID NO: 4305014 - DNA, 25 bp, Homo sapien
ctatactgaagatgacaaatctgaa

SEQ ID NO: 4305015 - DNA, 25 bp, Homo sapien
tgaaggtttctgatcagtattcagt

SEQ ID NO: 4305016 - DNA, 25 bp, Homo sapien
tacttgcaagcagaatctggagcag

SEQ ID NO: 4305017 - DNA, 25 bp, Homo sapien
gcagcccaccctccacgttcaggag

SEQ ID NO: 4305018 - DNA, 25 bp, Homo sapien
agaatacttgcaagcagaatctgga

SEQ ID NO: 4305019 - DNA, 25 bp, Homo sapien
aatacttgcaagcagaatctggagc

SEQ ID NO: 4305020 - DNA, 25 bp, Homo sapien
tgacttaacaaatgtgcgcccagca

SEQ ID NO: 4305021 - DNA, 25 bp, Homo sapien
gaaatgaaaacgcaagcaggagcca

SEQ ID NO: 4305022 - DNA, 25 bp, Homo sapien
ctattccagaaagactaaggcgcca

SEQ ID NO: 4305023 - DNA, 25 bp, Homo sapien
tgtcgaaaatgagccaaagtcctct

SEQ ID NO: 4305024 - DNA, 25 bp, Homo sapien
cattgggataagtatcctctgtcct

SEQ ID NO: 4305025 - DNA, 25 bp, Homo sapien
tctgtcctcttgtaattaccagtga

SEQ ID NO: 4305026 - DNA, 25 bp, Homo sapien
gggataagtatcctctgtcctcttg

SEQ ID NO: 4305027 - DNA, 25 bp, Homo sapien
taattaccagtgagaagctcttctg

SEQ ID NO: 4305028 - DNA, 25 bp, Homo sapien
gggtgcgcctaatccaatacaattg

SEQ ID NO: 4305029 - DNA, 25 bp, Homo sapien
aaagtccatcgttcaagccacctgg

SEQ ID NO: 4305030 - DNA, 25 bp, Homo sapien
ttagatactcagtcttggcgcccac

SEQ ID NO: 4305031 - DNA, 25 bp, Homo sapien
gaagctcatataccctacgaggtag

SEQ ID NO: 4305032 - DNA, 25 bp, Homo sapien
cattctggttgcttgagtgatgcaa

SEQ ID NO: 4305033 - DNA, 25 bp, Homo sapien
ctactcctgagccagtttctgttca

SEQ ID NO: 4305034 - DNA, 25 bp, Homo sapien
cttggtcaaaccctccatgctgtca

SEQ ID NO: 4305035 - DNA, 25 bp, Homo sapien
tcaccatggaaactagcccgggaag

SEQ ID NO: 4305036 - DNA, 25 bp, Homo sapien
taacctgtcttggtatgggatggcc

SEQ ID NO: 4305037 - DNA, 25 bp, Homo sapien
tgagtcaaccaattcgtgcagcagt

SEQ ID NO: 4305038 - DNA, 25 bp, Homo sapien
catggacttaggttgcccggactgt

SEQ ID NO: 4305039 - DNA, 25 bp, Homo sapien
ttccagaggtagtgagaccaacgcc

SEQ ID NO: 4305040 - DNA, 25 bp, Homo sapien
gagcatagccataacttcacctgag

SEQ ID NO: 4305041 - DNA, 25 bp, Homo sapien
tatataggagggtctcattagagcc

SEQ ID NO: 4305042 - DNA, 25 bp, Homo sapien
gaagacagccctttcagcatgggac

SEQ ID NO: 4305043 - DNA, 25 bp, Homo sapien
ttaattagcccaaacactgtgtgtc

SEQ ID NO: 4305044 - DNA, 25 bp, Homo sapien
taatgcccgacacatactaggtgct

SEQ ID NO: 4305045 - DNA, 25 bp, Homo sapien
cagttaagcaagacttgggaggcct

SEQ ID NO: 4305046 - DNA, 25 bp, Homo sapien
catgctgctctaagggcatacctga

SEQ ID NO: 4305047 - DNA, 25 bp, Homo sapien
tatcaatcaccatgaaaaacacagc

SEQ ID NO: 4305048 - DNA, 25 bp, Homo sapien
tattttctgggcactggtcatcgtg

SEQ ID NO: 4305049 - DNA, 25 bp, Homo sapien
ggctgtagggccacacattattttc

SEQ ID NO: 4305050 - DNA, 25 bp, Homo sapien
catcgtgtgagggacattactacat

SEQ ID NO: 4305051 - DNA, 25 bp, Homo sapien
aatgagcttgcaaaggtcatacacc

SEQ ID NO: 4305052 - DNA, 25 bp, Homo sapien
atttgatgagcacatttgatgaaat

SEQ ID NO: 4305053 - DNA, 25 bp, Homo sapien
tttgatgagcacatttgatgaaata

SEQ ID NO: 4305054 - DNA, 25 bp, Homo sapien
aacctaacagggagtaattctatct

SEQ ID NO: 4305055 - DNA, 25 bp, Homo sapien
gataaatctcccagtcctagttggt

SEQ ID NO: 4305056 - DNA, 25 bp, Homo sapien
aaggtcattcgtccttttcaaagat

SEQ ID NO: 4305057 - DNA, 25 bp, Homo sapien
cacagcaagacataaagcggagcat

SEQ ID NO: 4305058 - DNA, 25 bp, Homo sapien
gaccccctagaatggagctgttgag

SEQ ID NO: 4305059 - DNA, 25 bp, Homo sapien
gaaaatggcatgatacttaatgatc

SEQ ID NO: 4305060 - DNA, 25 bp, Homo sapien
acagctgaggccttttggaaagatc

SEQ ID NO: 4305061 - DNA, 25 bp, Homo sapien
catggtctatggtcttccgtttcct

SEQ ID NO: 4305062 - DNA, 25 bp, Homo sapien
caagccagcatgatattacttatgg

SEQ ID NO: 4305063 - DNA, 25 bp, Homo sapien
ggaagtcaatggatggcacctaaca

SEQ ID NO: 4305064 - DNA, 25 bp, Homo sapien
cctgtgtccccaaggtaaggaatgc

SEQ ID NO: 4305065 - DNA, 25 bp, Homo sapien
aattaagtcaacctaacagtgaggc

SEQ ID NO: 4305066 - DNA, 25 bp, Homo sapien
cataggcgtaaacacacagattcag

SEQ ID NO: 4305067 - DNA, 25 bp, Homo sapien
tctgatgtagcttaatgtaaaccaa

SEQ ID NO: 4305068 - DNA, 25 bp, Homo sapien
aaaaattacttaagcaggctgggtg

SEQ ID NO: 4305069 - DNA, 25 bp, Homo sapien
tactggcaaccctttacacaagttg

SEQ ID NO: 4305070 - DNA, 25 bp, Homo sapien
cacaaccaaaataggcaagcattct

SEQ ID NO: 4305071 - DNA, 25 bp, Homo sapien
tcatggtgctacaagggagggacac

SEQ ID NO: 4305072 - DNA, 25 bp, Homo sapien
tgagtacagctgtccatcatgagac

SEQ ID NO: 4305073 - DNA, 25 bp, Homo sapien
tgggatggccaatcaccaccaatgt

SEQ ID NO: 4305074 - DNA, 25 bp, Homo sapien
aaaagacctaactgagccaactgag

SEQ ID NO: 4305075 - DNA, 25 bp, Homo sapien
taattaatgccagctttcaggcatc

SEQ ID NO: 4305076 - DNA, 25 bp, Homo sapien
taatgtaaaacatgaatccacaggc

SEQ ID NO: 4305077 - DNA, 25 bp, Homo sapien
aattggacatcagttttgtacaggc

SEQ ID NO: 4305078 - DNA, 25 bp, Homo sapien
tggctctcctcgaatatctggtttt

SEQ ID NO: 4305079 - DNA, 25 bp, Homo sapien
tgagcttttacagacacagggcccg

SEQ ID NO: 4305080 - DNA, 25 bp, Homo sapien
tgtttagtcggttctaggcagccca

SEQ ID NO: 4305081 - DNA, 25 bp, Homo sapien
taacaccgctgaatgttaggagccg

SEQ ID NO: 4305082 - DNA, 25 bp, Homo sapien
cagggcccggtcatctttaagacac

SEQ ID NO: 4305083 - DNA, 25 bp, Homo sapien
tggacaatgggaggattcacgttcc

SEQ ID NO: 4305084 - DNA, 25 bp, Homo sapien
tatacagcatgggtccgatggacaa

SEQ ID NO: 4305085 - DNA, 25 bp, Homo sapien
cataagcactaggatactgtcccac

SEQ ID NO: 4305086 - DNA, 25 bp, Homo sapien
taacagggaagtggcgtatacagca

SEQ ID NO: 4305087 - DNA, 25 bp, Homo sapien
gaattagaataaccattgagctcac

SEQ ID NO: 4305088 - DNA, 25 bp, Homo sapien
ttaaagaattagaataaccattgag

SEQ ID NO: 4305089 - DNA, 25 bp, Homo sapien
aagaattagaataaccattgagctc

SEQ ID NO: 4305090 - DNA, 25 bp, Homo sapien
taaagaattagaataaccattgagc

SEQ ID NO: 4305091 - DNA, 25 bp, Homo sapien
gggttgagcctaagaatctgagttg

SEQ ID NO: 4305092 - DNA, 25 bp, Homo sapien
ctgagttgagatactgatgaaagca

SEQ ID NO: 4305093 - DNA, 25 bp, Homo sapien
aaagcagctgcgaaaatgcctgcaa

SEQ ID NO: 4305094 - DNA, 25 bp, Homo sapien
ttcaagggttgagcctaagaatctg

SEQ ID NO: 4305095 - DNA, 25 bp, Homo sapien
tgcgctaccacaatacagaacacga

SEQ ID NO: 4305096 - DNA, 25 bp, Homo sapien
tttttcctcggagcaagacagccac

SEQ ID NO: 4305097 - DNA, 25 bp, Homo sapien
gacagccaccatatctgtgatttat

SEQ ID NO: 4305098 - DNA, 25 bp, Homo sapien
agaacacgactcgacctggaccaca

SEQ ID NO: 4305099 - DNA, 25 bp, Homo sapien
ctgggtttccttaaacttcgcagat

SEQ ID NO: 4305100 - DNA, 25 bp, Homo sapien
gtttccttaaacttcgcagattcat

SEQ ID NO: 4305101 - DNA, 25 bp, Homo sapien
tctgggtttccttaaacttcgcaga

SEQ ID NO: 4305102 - DNA, 25 bp, Homo sapien
ggtttccttaaacttcgcagattca

SEQ ID NO: 4305103 - DNA, 25 bp, Homo sapien
caattcaactgttactgtacctcac

SEQ ID NO: 4305104 - DNA, 25 bp, Homo sapien
ttttaatagggcaaacgccgagctg

SEQ ID NO: 4305105 - DNA, 25 bp, Homo sapien
ttttgcccgtaagtctcccaccaca

SEQ ID NO: 4305106 - DNA, 25 bp, Homo sapien
tgtacgtcactttccattttttgcc

SEQ ID NO: 4305107 - DNA, 25 bp, Homo sapien
gaaatgccttgtacaacagcgcagc

SEQ ID NO: 4305108 - DNA, 25 bp, Homo sapien
taaggagttgagagcactgctggcc

SEQ ID NO: 4305109 - DNA, 25 bp, Homo sapien
gaatccacgttagccacagaagatg

SEQ ID NO: 4305110 - DNA, 25 bp, Homo sapien
gcacagcgtgcagtcagaacaaata

SEQ ID NO: 4305111 - DNA, 25 bp, Homo sapien
gcttgcactgcatagaatttaccat

SEQ ID NO: 4305112 - DNA, 25 bp, Homo sapien
ttctgctacagttttagaagcttgt

SEQ ID NO: 4305113 - DNA, 25 bp, Homo sapien
gaatttaccattatcagggagatcc

SEQ ID NO: 4305114 - DNA, 25 bp, Homo sapien
aaaactgccacacttgtaggcagtg

SEQ ID NO: 4305115 - DNA, 25 bp, Homo sapien
cacagaacttgcttctccacgaagt

SEQ ID NO: 4305116 - DNA, 25 bp, Homo sapien
taaaatatgggaatcacctcctgct

SEQ ID NO: 4305117 - DNA, 25 bp, Homo sapien
cacgaagtattatggtacctcagct

SEQ ID NO: 4305118 - DNA, 25 bp, Homo sapien
ctgctagaaataattccaggcaaaa

SEQ ID NO: 4305119 - DNA, 25 bp, Homo sapien
atcagggctgtcatttctacagcag

SEQ ID NO: 4305120 - DNA, 25 bp, Homo sapien
gaacaaccccacagatgagtatcaa

SEQ ID NO: 4305121 - DNA, 25 bp, Homo sapien
tagggatggttgatgccacgacctc

SEQ ID NO: 4305122 - DNA, 25 bp, Homo sapien
tgccacacctgctgacggaagataa

SEQ ID NO: 4305123 - DNA, 25 bp, Homo sapien
taaccagtagatgccttcgtcctct

SEQ ID NO: 4305124 - DNA, 25 bp, Homo sapien
tatatctgtccagctcacacaaggg

SEQ ID NO: 4305125 - DNA, 25 bp, Homo sapien
tctataaaatatgccacgaccccac

SEQ ID NO: 4305126 - DNA, 25 bp, Homo sapien
cacacaagggaaccataaccagtag

SEQ ID NO: 4305127 - DNA, 25 bp, Homo sapien
gggccaacgtcctgatgcttggtaa

SEQ ID NO: 4305128 - DNA, 25 bp, Homo sapien
ggccaacgtcctgatgcttggtaac

SEQ ID NO: 4305129 - DNA, 25 bp, Homo sapien
ggggccaacgtcctgatgcttggta

SEQ ID NO: 4305130 - DNA, 25 bp, Homo sapien
caacagggcgcttctcctggaaggt

SEQ ID NO: 4305131 - DNA, 25 bp, Homo sapien
tttttctagcaagcttcagagccaa

SEQ ID NO: 4305132 - DNA, 25 bp, Homo sapien
tatttggaccatagtaaaatgcttc

SEQ ID NO: 4305133 - DNA, 25 bp, Homo sapien
ttaatctggctgaaacaaatatttg

SEQ ID NO: 4305134 - DNA, 25 bp, Homo sapien
agattaagacttatttacccaccag

SEQ ID NO: 4305135 - DNA, 25 bp, Homo sapien
tatagggaaataagtcatcaccatg

SEQ ID NO: 4305136 - DNA, 25 bp, Homo sapien
ttcatttcgctctcctcatcaggtt

SEQ ID NO: 4305137 - DNA, 25 bp, Homo sapien
cagattctagaggaccccttcttca

SEQ ID NO: 4305138 - DNA, 25 bp, Homo sapien
aaagctacaacagtggagttggtag

SEQ ID NO: 4305139 - DNA, 25 bp, Homo sapien
ctaaaagatgtcacttgacagaagc

SEQ ID NO: 4305140 - DNA, 25 bp, Homo sapien
gaagcaatgtgtgccattccaaagc

SEQ ID NO: 4305141 - DNA, 25 bp, Homo sapien
gagcagatccgggtgaacaaagcac

SEQ ID NO: 4305142 - DNA, 25 bp, Homo sapien
acggtcagattaactgatacacgag

SEQ ID NO: 4305143 - DNA, 25 bp, Homo sapien
taactgatacacgagctctccctgc

SEQ ID NO: 4305144 - DNA, 25 bp, Homo sapien
aaggtacaaattgttcctaaagcag

SEQ ID NO: 4305145 - DNA, 25 bp, Homo sapien
ggtacaaattgttcctaaagcagaa

SEQ ID NO: 4305146 - DNA, 25 bp, Homo sapien
agacatcagcactctttgtggccat

SEQ ID NO: 4305147 - DNA, 25 bp, Homo sapien
tgtctcgagaacactacaagctatg

SEQ ID NO: 4305148 - DNA, 25 bp, Homo sapien
caattcatgcaagacctagggctta

SEQ ID NO: 4305149 - DNA, 25 bp, Homo sapien
tcaactgagatcttactgaaccaga

SEQ ID NO: 4305150 - DNA, 25 bp, Homo sapien
ggagaagacttcctgccatagtaca

SEQ ID NO: 4305151 - DNA, 25 bp, Homo sapien
tagcttagcagttaaacacctgggt

SEQ ID NO: 4305152 - DNA, 25 bp, Homo sapien
tttgagcccagtcacctgcaagctg

SEQ ID NO: 4305153 - DNA, 25 bp, Homo sapien
ccagataggcctgagtttgagccca

SEQ ID NO: 4305154 - DNA, 25 bp, Homo sapien
gttgacagccctggttgagatatac

SEQ ID NO: 4305155 - DNA, 25 bp, Homo sapien
tggttgagatatacaaatgtgggtc

SEQ ID NO: 4305156 - DNA, 25 bp, Homo sapien
ctttgttgacagccctggttgagat

SEQ ID NO: 4305157 - DNA, 25 bp, Homo sapien
ggttgagatatacaaatgtgggtca

SEQ ID NO: 4305158 - DNA, 25 bp, Homo sapien
ggaagcctggactgtcaaggccacc

SEQ ID NO: 4305159 - DNA, 25 bp, Homo sapien
ggccacccgtcagcgagacggcaga

SEQ ID NO: 4305160 - DNA, 25 bp, Homo sapien
ctggactgtcaaggccacccgtcag

SEQ ID NO: 4305161 - DNA, 25 bp, Homo sapien
ccgtcagcgagacggcagactccat

SEQ ID NO: 4305162 - DNA, 25 bp, Homo sapien
gactgtccaaatgatagggaaagcc

SEQ ID NO: 4305163 - DNA, 25 bp, Homo sapien
tgaatggaccaaggcagtgactcac

SEQ ID NO: 4305164 - DNA, 25 bp, Homo sapien
agggaaagcctgtgtagcaatgagc

SEQ ID NO: 4305165 - DNA, 25 bp, Homo sapien
gtcaattcaatactggaagcctggg

SEQ ID NO: 4305166 - DNA, 25 bp, Homo sapien
ccaggattgggacagcgtgactgca

SEQ ID NO: 4305167 - DNA, 25 bp, Homo sapien
ccagccagctgaaagcacaacactg

SEQ ID NO: 4305168 - DNA, 25 bp, Homo sapien
ttgggacagcgtgactgcagcacag

SEQ ID NO: 4305169 - DNA, 25 bp, Homo sapien
gccagctgaaagcacaacactgaga

SEQ ID NO: 4305170 - DNA, 25 bp, Homo sapien
tctcccagggtacttatgatgttcc

SEQ ID NO: 4305171 - DNA, 25 bp, Homo sapien
aattaaaaggtcacgaagttgcact

SEQ ID NO: 4305172 - DNA, 25 bp, Homo sapien
gaaatagcacaaggagtctcccagg

SEQ ID NO: 4305173 - DNA, 25 bp, Homo sapien
tagaagaaccggaacagtgctgacc

SEQ ID NO: 4305174 - DNA, 25 bp, Homo sapien
taagaacgtgtagatgacccacaga

SEQ ID NO: 4305175 - DNA, 25 bp, Homo sapien
tccagcttgggaggtaaactctgtc

SEQ ID NO: 4305176 - DNA, 25 bp, Homo sapien
agtgttcctgtgataaccctcaaag

SEQ ID NO: 4305177 - DNA, 25 bp, Homo sapien
tgagcccaagcattcgatattagcc

SEQ ID NO: 4305178 - DNA, 25 bp, Homo sapien
ccaggcttcaagtcaaaagttggat

SEQ ID NO: 4305179 - DNA, 25 bp, Homo sapien
cacaggaacacggacatcacaaaac

SEQ ID NO: 4305180 - DNA, 25 bp, Homo sapien
tcacctgtgccgaggagttggaaac

SEQ ID NO: 4305181 - DNA, 25 bp, Homo sapien
tataagaatgcagacttggccgggc

SEQ ID NO: 4305182 - DNA, 25 bp, Homo sapien
tattccctatcaagtataatgaggg

SEQ ID NO: 4305183 - DNA, 25 bp, Homo sapien
tctggaattgtagcttccttaatcc

SEQ ID NO: 4305184 - DNA, 25 bp, Homo sapien
caaaactcagagtgtgtgatatggt

SEQ ID NO: 4305185 - DNA, 25 bp, Homo sapien
cacatatattgtgaacgttattccc

SEQ ID NO: 4305186 - DNA, 25 bp, Homo sapien
ccacaatttctcttagacagagaca

SEQ ID NO: 4305187 - DNA, 25 bp, Homo sapien
taccaaataccacaatttctcttag

SEQ ID NO: 4305188 - DNA, 25 bp, Homo sapien
aaataccacaatttctcttagacag

SEQ ID NO: 4305189 - DNA, 25 bp, Homo sapien
ctttaccaaataccacaatttctct

SEQ ID NO: 4305190 - DNA, 25 bp, Homo sapien
ccactggtgacgttcaaaaaattct

SEQ ID NO: 4305191 - DNA, 25 bp, Homo sapien
caaagtcagtgcaacacaggagttt

SEQ ID NO: 4305192 - DNA, 25 bp, Homo sapien
cagtagtctgcattccaaagtcagt

SEQ ID NO: 4305193 - DNA, 25 bp, Homo sapien
aaatactcgcctaaaagctgctgcc

SEQ ID NO: 4305194 - DNA, 25 bp, Homo sapien
tactgctgcgtaataaatcatccca

SEQ ID NO: 4305195 - DNA, 25 bp, Homo sapien
gaattacgcgagtcccatttacaat

SEQ ID NO: 4305196 - DNA, 25 bp, Homo sapien
tcaaaccggtttcttgcctggagaa

SEQ ID NO: 4305197 - DNA, 25 bp, Homo sapien
tcagaagtccagagggaattacgcg

SEQ ID NO: 4305198 - DNA, 25 bp, Homo sapien
tgaaaaggccaatcccagctatgag

SEQ ID NO: 4305199 - DNA, 25 bp, Homo sapien
ttgaaaagactagcaaccacctagg

SEQ ID NO: 4305200 - DNA, 25 bp, Homo sapien
taggacagtggtgcaaaccatccaa

SEQ ID NO: 4305201 - DNA, 25 bp, Homo sapien
cacatctttattgccggctgaggcc

SEQ ID NO: 4305202 - DNA, 25 bp, Homo sapien
cctattatgaaccattgagaatcct

SEQ ID NO: 4305203 - DNA, 25 bp, Homo sapien
tcagccatcattttcgcatagaacg

SEQ ID NO: 4305204 - DNA, 25 bp, Homo sapien
gattccagcttcagtctggatgaac

SEQ ID NO: 4305205 - DNA, 25 bp, Homo sapien
tagaacgccattacgctggccacag

SEQ ID NO: 4305206 - DNA, 25 bp, Homo sapien
tgatgaggaatccaccatgcaggcc

SEQ ID NO: 4305207 - DNA, 25 bp, Homo sapien
gatgacgccacacaaaaggaagagc

SEQ ID NO: 4305208 - DNA, 25 bp, Homo sapien
aagagcaaaatagcccagggtggtc

SEQ ID NO: 4305209 - DNA, 25 bp, Homo sapien
catttatactacttgcaacgcagag

SEQ ID NO: 4305210 - DNA, 25 bp, Homo sapien
ttcttgtacagtcttgtttgaaact

SEQ ID NO: 4305211 - DNA, 25 bp, Homo sapien
tcttgtacagtcttgtttgaaactc

SEQ ID NO: 4305212 - DNA, 25 bp, Homo sapien
tgtacagtcttgtttgaaactctgg

SEQ ID NO: 4305213 - DNA, 25 bp, Homo sapien
cttgtacagtcttgtttgaaactct

SEQ ID NO: 4305214 - DNA, 25 bp, Homo sapien
aaataaagaactgcaacggcaaggt

SEQ ID NO: 4305215 - DNA, 25 bp, Homo sapien
tccccagattctgcgaaaaaggcaa

SEQ ID NO: 4305216 - DNA, 25 bp, Homo sapien
acttgtggcttgctatcgctgtgga

SEQ ID NO: 4305217 - DNA, 25 bp, Homo sapien
tctgttaagcttcagaacggtgaaa

SEQ ID NO: 4305218 - DNA, 25 bp, Homo sapien
gagagttctctgatatggattaatg

SEQ ID NO: 4305219 - DNA, 25 bp, Homo sapien
caaatacgagggagacaaacaagca

SEQ ID NO: 4305220 - DNA, 25 bp, Homo sapien
atagcaatagtagggaataaatgtc

SEQ ID NO: 4305221 - DNA, 25 bp, Homo sapien
actaaacaataatcttacaggttgg

SEQ ID NO: 4305222 - DNA, 25 bp, Homo sapien
acttattccaatttgcgacaggcat

SEQ ID NO: 4305223 - DNA, 25 bp, Homo sapien
attccaatttgcgacaggcatccag

SEQ ID NO: 4305224 - DNA, 25 bp, Homo sapien
ccaatttgcgacaggcatccagggc

SEQ ID NO: 4305225 - DNA, 25 bp, Homo sapien
tgcaactctgaacggggcggatcct

SEQ ID NO: 4305226 - DNA, 25 bp, Homo sapien
gaaactgagcatgctccccatcagg

SEQ ID NO: 4305227 - DNA, 25 bp, Homo sapien
ttgggaatcagaccagatcagcagc

SEQ ID NO: 4305228 - DNA, 25 bp, Homo sapien
ggacacacgccattacctccagctt

SEQ ID NO: 4305229 - DNA, 25 bp, Homo sapien
ctgaatgcaggaaactgagcatgct

SEQ ID NO: 4305230 - DNA, 25 bp, Homo sapien
ccaaagtatggcctgtagaaagcta

SEQ ID NO: 4305231 - DNA, 25 bp, Homo sapien
tttcaggtcacacgcaaagtaggat

SEQ ID NO: 4305232 - DNA, 25 bp, Homo sapien
aaacaggtgcagtccaaatccagcc

SEQ ID NO: 4305233 - DNA, 25 bp, Homo sapien
ggaaggccaccatccttaagaggat

SEQ ID NO: 4305234 - DNA, 25 bp, Homo sapien
ttcccgtctcagccattgtattagt

SEQ ID NO: 4305235 - DNA, 25 bp, Homo sapien
cttcccgtctcagccattgtattag

SEQ ID NO: 4305236 - DNA, 25 bp, Homo sapien
cgccatgatagctaggctgatctca

SEQ ID NO: 4305237 - DNA, 25 bp, Homo sapien
tataaccttaaccatccttaatgga

SEQ ID NO: 4305238 - DNA, 25 bp, Homo sapien
aaacagaatgacaataaagggcacc

SEQ ID NO: 4305239 - DNA, 25 bp, Homo sapien
tagtaatagctctctcatataacct

SEQ ID NO: 4305240 - DNA, 25 bp, Homo sapien
cagatttgatgtaaaaaggcccacc

SEQ ID NO: 4305241 - DNA, 25 bp, Homo sapien
tcactttgtggatttgcctcaagtt

SEQ ID NO: 4305242 - DNA, 25 bp, Homo sapien
aataaacatcctttcactttgtgga

SEQ ID NO: 4305243 - DNA, 25 bp, Homo sapien
caagttcttatgtgagatccaagaa

SEQ ID NO: 4305244 - DNA, 25 bp, Homo sapien
tgaggtctagatcgagacccctttc

SEQ ID NO: 4305245 - DNA, 25 bp, Homo sapien
agaggtttagtgattacaatgttga

SEQ ID NO: 4305246 - DNA, 25 bp, Homo sapien
tgtagattgaattctctgcagcaaa

SEQ ID NO: 4305247 - DNA, 25 bp, Homo sapien
aagaggtttagtgattacaatgttg

SEQ ID NO: 4305248 - DNA, 25 bp, Homo sapien
caaaagggggcatgtggaatgaata

SEQ ID NO: 4305249 - DNA, 25 bp, Homo sapien
aatctctacctaattttctccacag

SEQ ID NO: 4305250 - DNA, 25 bp, Homo sapien
tatctcctcctgatgattaacaatt

SEQ ID NO: 4305251 - DNA, 25 bp, Homo sapien
tgtcccaggaagagaatctcatcag

SEQ ID NO: 4305252 - DNA, 25 bp, Homo sapien
ggtgtgcgccactgagctcaggttc

SEQ ID NO: 4305253 - DNA, 25 bp, Homo sapien
gacaggccctccgatcttccctgga

SEQ ID NO: 4305254 - DNA, 25 bp, Homo sapien
gccctccgatcttccctggactgtg

SEQ ID NO: 4305255 - DNA, 25 bp, Homo sapien
tcagacaggccctccgatcttccct

SEQ ID NO: 4305256 - DNA, 25 bp, Homo sapien
cgatcttccctggactgtgtcatct

SEQ ID NO: 4305257 - DNA, 25 bp, Homo sapien
ttgctgctagcagcaatggacactc

SEQ ID NO: 4305258 - DNA, 25 bp, Homo sapien
acccagcctggcagtatctttttaa

SEQ ID NO: 4305259 - DNA, 25 bp, Homo sapien
gacgatgctgcagatacctatccat

SEQ ID NO: 4305260 - DNA, 25 bp, Homo sapien
ggtccagagcacgtgtcatatcaga

SEQ ID NO: 4305261 - DNA, 25 bp, Homo sapien
gagtacatctatctttgacccacag

SEQ ID NO: 4305262 - DNA, 25 bp, Homo sapien
tctacagggcacgaagacgatgctg

SEQ ID NO: 4305263 - DNA, 25 bp, Homo sapien
tccacatctatctaaattcccaagt

SEQ ID NO: 4305264 - DNA, 25 bp, Homo sapien
tgctaagatataccacaagtgctac

SEQ ID NO: 4305265 - DNA, 25 bp, Homo sapien
ggagagtctacttactggtaggatc

SEQ ID NO: 4305266 - DNA, 25 bp, Homo sapien
taggatctaaacttaaacctccaca

SEQ ID NO: 4305267 - DNA, 25 bp, Homo sapien
tcctggtaagggtactctgcataga

SEQ ID NO: 4305268 - DNA, 25 bp, Homo sapien
tcccagacagaggtatgcactgtgt

SEQ ID NO: 4305269 - DNA, 25 bp, Homo sapien
tacctagctttagttcagagaccac

SEQ ID NO: 4305270 - DNA, 25 bp, Homo sapien
gaaagtagactagaccacccaagtg

SEQ ID NO: 4305271 - DNA, 25 bp, Homo sapien
aagtagctaccagacaattttaaat

SEQ ID NO: 4305272 - DNA, 25 bp, Homo sapien
tactctttttaaagtagctaccaga

SEQ ID NO: 4305273 - DNA, 25 bp, Homo sapien
aaaacacgtcaaatatctcacaagt

SEQ ID NO: 4305274 - DNA, 25 bp, Homo sapien
acaagtggttcgcattatatttcta

SEQ ID NO: 4305275 - DNA, 25 bp, Homo sapien
atattagaaggaagtgcttgcactt

SEQ ID NO: 4305276 - DNA, 25 bp, Homo sapien
tattagaaggaagtgcttgcacttg

SEQ ID NO: 4305277 - DNA, 25 bp, Homo sapien
tagaaggaagtgcttgcacttgttt

SEQ ID NO: 4305278 - DNA, 25 bp, Homo sapien
tcatgactcataattcctgtttttg

SEQ ID NO: 4305279 - DNA, 25 bp, Homo sapien
tctcagacaacaacctcagcacaga

SEQ ID NO: 4305280 - DNA, 25 bp, Homo sapien
cagcacagaaacagtgtagcttgct

SEQ ID NO: 4305281 - DNA, 25 bp, Homo sapien
gaaacagtgtagcttgctgccactc

SEQ ID NO: 4305282 - DNA, 25 bp, Homo sapien
agggccagataaatctctctcagac

SEQ ID NO: 4305283 - DNA, 25 bp, Homo sapien
agatgcacaggcagtggagtgtctg

SEQ ID NO: 4305284 - DNA, 25 bp, Homo sapien
cggcggatccggaaacaggcaagat

SEQ ID NO: 4305285 - DNA, 25 bp, Homo sapien
tgacatagaaaatgtctgtgacacg

SEQ ID NO: 4305286 - DNA, 25 bp, Homo sapien
aatgtctgtgacacggcggatccgg

SEQ ID NO: 4305287 - DNA, 25 bp, Homo sapien
ccatatggactgactttgtggtaac

SEQ ID NO: 4305288 - DNA, 25 bp, Homo sapien
catccactgcgatttatgcccttct

SEQ ID NO: 4305289 - DNA, 25 bp, Homo sapien
ttcttgattgaactgttgtaaccca

SEQ ID NO: 4305290 - DNA, 25 bp, Homo sapien
cataaaaccttcaagtctaaatcaa

SEQ ID NO: 4305291 - DNA, 25 bp, Homo sapien
tcagagaggagaaagtcacccaagc

SEQ ID NO: 4305292 - DNA, 25 bp, Homo sapien
aaggatgtctgtcctatgtaaggac

SEQ ID NO: 4305293 - DNA, 25 bp, Homo sapien
tgtacaagatttcccttgagcagac

SEQ ID NO: 4305294 - DNA, 25 bp, Homo sapien
tggtcaccaaacaagaaggatgtct

SEQ ID NO: 4305295 - DNA, 25 bp, Homo sapien
ctttgtttccatataacttcaccat

SEQ ID NO: 4305296 - DNA, 25 bp, Homo sapien
caatctagggtaaatgaccaactgg

SEQ ID NO: 4305297 - DNA, 25 bp, Homo sapien
catctcagaagctaaacaggtgacc

SEQ ID NO: 4305298 - DNA, 25 bp, Homo sapien
gacggtatcaatgccacaatctagg

SEQ ID NO: 4305299 - DNA, 25 bp, Homo sapien
tcagtctgcctagtagaatgcacca

SEQ ID NO: 4305300 - DNA, 25 bp, Homo sapien
ccatggtgcctttgaaatgctggag

SEQ ID NO: 4305301 - DNA, 25 bp, Homo sapien
taattacgaggcatcagcttgttca

SEQ ID NO: 4305302 - DNA, 25 bp, Homo sapien
tctatgaagttagcactaccgcgat

SEQ ID NO: 4305303 - DNA, 25 bp, Homo sapien
tagtggacagtagaccaggattcaa

SEQ ID NO: 4305304 - DNA, 25 bp, Homo sapien
gctaaacatttgatgagacgacctt

SEQ ID NO: 4305305 - DNA, 25 bp, Homo sapien
taaatccaaggtagtcagagagcat

SEQ ID NO: 4305306 - DNA, 25 bp, Homo sapien
cactcagctcagagtaattcaagcg

SEQ ID NO: 4305307 - DNA, 25 bp, Homo sapien
tacaatcaaaagaaggactacgtaa

SEQ ID NO: 4305308 - DNA, 25 bp, Homo sapien
tagaacagttgccagcataccatgg

SEQ ID NO: 4305309 - DNA, 25 bp, Homo sapien
tgtaaccatttcaccgggagcggag

SEQ ID NO: 4305310 - DNA, 25 bp, Homo sapien
gggaaggacgctgactgcctagctt

SEQ ID NO: 4305311 - DNA, 25 bp, Homo sapien
tagagcacgcttgcactcacaaggt

SEQ ID NO: 4305312 - DNA, 25 bp, Homo sapien
tcttctactgtctgcaaccctccac

SEQ ID NO: 4305313 - DNA, 25 bp, Homo sapien
acatcttctactgtctgcaaccctc

SEQ ID NO: 4305314 - DNA, 25 bp, Homo sapien
atcttctactgtctgcaaccctcca

SEQ ID NO: 4305315 - DNA, 25 bp, Homo sapien
catcttctactgtctgcaaccctcc

SEQ ID NO: 4305316 - DNA, 25 bp, Homo sapien
ttttcttcaaagcaacgtagcccag

SEQ ID NO: 4305317 - DNA, 25 bp, Homo sapien
cagttggctgaaagctcgctgggac

SEQ ID NO: 4305318 - DNA, 25 bp, Homo sapien
cgggtgattaaagaggaactggcct

SEQ ID NO: 4305319 - DNA, 25 bp, Homo sapien
gcaatccaaagggtgctcataaagg

SEQ ID NO: 4305320 - DNA, 25 bp, Homo sapien
tggccttgtccctgggcaaccgaca

SEQ ID NO: 4305321 - DNA, 25 bp, Homo sapien
atggccttcagcacatggccttgtc

SEQ ID NO: 4305322 - DNA, 25 bp, Homo sapien
catcattcccggaaaagctgctgag

SEQ ID NO: 4305323 - DNA, 25 bp, Homo sapien
ctgctgagcacatggccttcagcac

SEQ ID NO: 4305324 - DNA, 25 bp, Homo sapien
ctctgcttatctcttggccgacatt

SEQ ID NO: 4305325 - DNA, 25 bp, Homo sapien
tcttggtcgagttccctgagcatcg

SEQ ID NO: 4305326 - DNA, 25 bp, Homo sapien
tgacttaggaagaaggcttccatga

SEQ ID NO: 4305327 - DNA, 25 bp, Homo sapien
gcttccatgatcctctcagcctgag

SEQ ID NO: 4305328 - DNA, 25 bp, Homo sapien
gaaccaatgtttagtagtgctctcc

SEQ ID NO: 4305329 - DNA, 25 bp, Homo sapien
caaggggtttctcagaatagaggaa

SEQ ID NO: 4305330 - DNA, 25 bp, Homo sapien
aatttatttctctggtcttgccttc

SEQ ID NO: 4305331 - DNA, 25 bp, Homo sapien
agtaaaacttgtttgccttctgaca

SEQ ID NO: 4305332 - DNA, 25 bp, Homo sapien
cagttctctgtagtagcccttccta

SEQ ID NO: 4305333 - DNA, 25 bp, Homo sapien
ctgtgaggagcgagatagccatgac

SEQ ID NO: 4305334 - DNA, 25 bp, Homo sapien
gaccatgtgactggaaacatactga

SEQ ID NO: 4305335 - DNA, 25 bp, Homo sapien
ggtactgatgtcaaccccagtgttt

SEQ ID NO: 4305336 - DNA, 25 bp, Homo sapien
gaacaatggaagctctgctcacaag

SEQ ID NO: 4305337 - DNA, 25 bp, Homo sapien
gaaaagctggaaatgcacctgtctc

SEQ ID NO: 4305338 - DNA, 25 bp, Homo sapien
catagtggccagtttggtagcctga

SEQ ID NO: 4305339 - DNA, 25 bp, Homo sapien
tagttggtatacaggctcctccttg

SEQ ID NO: 4305340 - DNA, 25 bp, Homo sapien
gaaatgtcgtctggcaccttagaag

SEQ ID NO: 4305341 - DNA, 25 bp, Homo sapien
tgtgtgcaggccttaccaggatttc

SEQ ID NO: 4305342 - DNA, 25 bp, Homo sapien
tcaagggataccagtatagctacac

SEQ ID NO: 4305343 - DNA, 25 bp, Homo sapien
gattttaagcctacctgtcaaggga

SEQ ID NO: 4305344 - DNA, 25 bp, Homo sapien
gggcccaagcaattcgggactacag

SEQ ID NO: 4305345 - DNA, 25 bp, Homo sapien
agtccatcacgaattacatatcaaa

SEQ ID NO: 4305346 - DNA, 25 bp, Homo sapien
aaattagtgtggtaaagtccatcac

SEQ ID NO: 4305347 - DNA, 25 bp, Homo sapien
tgtaaataaattcaaggactgcccc

SEQ ID NO: 4305348 - DNA, 25 bp, Homo sapien
tgagatgaatttgtaataccagaca

SEQ ID NO: 4305349 - DNA, 25 bp, Homo sapien
ccaggagtggtacgtgagatgaatt

SEQ ID NO: 4305350 - DNA, 25 bp, Homo sapien
tataaacagtacatgagccaggagt

SEQ ID NO: 4305351 - DNA, 25 bp, Homo sapien
gaaccactgctataggtcaaagatt

SEQ ID NO: 4305352 - DNA, 25 bp, Homo sapien
catacactaactggcatataatagg

SEQ ID NO: 4305353 - DNA, 25 bp, Homo sapien
gcacagaaggtacctcatacactaa

SEQ ID NO: 4305354 - DNA, 25 bp, Homo sapien
cataacatcctcaagaagttgtagg

SEQ ID NO: 4305355 - DNA, 25 bp, Homo sapien
ggtcatgggtaagttaacctcacaa

SEQ ID NO: 4305356 - DNA, 25 bp, Homo sapien
tcctccagatccttgagtactagcc

SEQ ID NO: 4305357 - DNA, 25 bp, Homo sapien
tagtacaagtatttcctctactcct

SEQ ID NO: 4305358 - DNA, 25 bp, Homo sapien
gatccttgagtactagcctttattg

SEQ ID NO: 4305359 - DNA, 25 bp, Homo sapien
agacagtccttccatagattattta

SEQ ID NO: 4305360 - DNA, 25 bp, Homo sapien
tccatggactgaacccaaaaacttg

SEQ ID NO: 4305361 - DNA, 25 bp, Homo sapien
tgaggcttaaaatgacacctctgcc

SEQ ID NO: 4305362 - DNA, 25 bp, Homo sapien
tgaatgaaacttgatcacaagcctg

SEQ ID NO: 4305363 - DNA, 25 bp, Homo sapien
tgtagcctttacacccttgatacgc

SEQ ID NO: 4305364 - DNA, 25 bp, Homo sapien
caaagaccagtcatttgcagagagg

SEQ ID NO: 4305365 - DNA, 25 bp, Homo sapien
tagaatggctcagacagctgggtgc

SEQ ID NO: 4305366 - DNA, 25 bp, Homo sapien
cactcttaaagtggtgcacaagccc

SEQ ID NO: 4305367 - DNA, 25 bp, Homo sapien
ggaaccgtgatcctctgatgagtca

SEQ ID NO: 4305368 - DNA, 25 bp, Homo sapien
tcactcaaggtaagggctataaaag

SEQ ID NO: 4305369 - DNA, 25 bp, Homo sapien
gagagccactgtaaccacacagagt

SEQ ID NO: 4305370 - DNA, 25 bp, Homo sapien
cttttaagccacaataggacacacc

SEQ ID NO: 4305371 - DNA, 25 bp, Homo sapien
caaatacagcccagttcgagaagtc

SEQ ID NO: 4305372 - DNA, 25 bp, Homo sapien
gcctcaagtcttataagccccagtg

SEQ ID NO: 4305373 - DNA, 25 bp, Homo sapien
gaaacttacatgtccgtggccttaa

SEQ ID NO: 4305374 - DNA, 25 bp, Homo sapien
gcctttagaaaaacacggaagctga

SEQ ID NO: 4305375 - DNA, 25 bp, Homo sapien
gaggaggcaggtccgataattatcc

SEQ ID NO: 4305376 - DNA, 25 bp, Homo sapien
cagttgtgaccaaccagttgtaaac

SEQ ID NO: 4305377 - DNA, 25 bp, Homo sapien
ccagttgtgaccaaccagttgtaaa

SEQ ID NO: 4305378 - DNA, 25 bp, Homo sapien
accagttgtgaccaaccagttgtaa

SEQ ID NO: 4305379 - DNA, 25 bp, Homo sapien
ggtttagcggtcctctctttgaaga

SEQ ID NO: 4305380 - DNA, 25 bp, Homo sapien
agagatgcagtatcactctctcacc

SEQ ID NO: 4305381 - DNA, 25 bp, Homo sapien
aaggaggtttctaatgatgtcacat

SEQ ID NO: 4305382 - DNA, 25 bp, Homo sapien
tagaaacagagtcccacttcgttgc

SEQ ID NO: 4305383 - DNA, 25 bp, Homo sapien
tgttgctgatgcttccgaggaaaca

SEQ ID NO: 4305384 - DNA, 25 bp, Homo sapien
catttatcaagggaactggtagcag

SEQ ID NO: 4305385 - DNA, 25 bp, Homo sapien
gcttccgaggaaacatttcaggacc

SEQ ID NO: 4305386 - DNA, 25 bp, Homo sapien
ggatgggcttgactcaaacaagaaa

SEQ ID NO: 4305387 - DNA, 25 bp, Homo sapien
tatagttcataggaccagcatcagc

SEQ ID NO: 4305388 - DNA, 25 bp, Homo sapien
gaatttacaatgctgggccctacac

SEQ ID NO: 4305389 - DNA, 25 bp, Homo sapien
gataattcacaagcacagtcaacgt

SEQ ID NO: 4305390 - DNA, 25 bp, Homo sapien
tttgttagagatgcccaacctgggc

SEQ ID NO: 4305391 - DNA, 25 bp, Homo sapien
ttacaggaacgacaagagaacacca

SEQ ID NO: 4305392 - DNA, 25 bp, Homo sapien
agaaggtataggcagatcccaggaa

SEQ ID NO: 4305393 - DNA, 25 bp, Homo sapien
aaaataaagaatatccggccaggtg

SEQ ID NO: 4305394 - DNA, 25 bp, Homo sapien
taacccagggccgtatcaggcgtaa

SEQ ID NO: 4305395 - DNA, 25 bp, Homo sapien
caaacgttgcaacagtcctagagcg

SEQ ID NO: 4305396 - DNA, 25 bp, Homo sapien
gctgggccttggttgagacgacttc

SEQ ID NO: 4305397 - DNA, 25 bp, Homo sapien
gacttgagggtatacaagccttgcc

SEQ ID NO: 4305398 - DNA, 25 bp, Homo sapien
gataccagaggaagccaattcagct

SEQ ID NO: 4305399 - DNA, 25 bp, Homo sapien
agctgatggcgggaccgaagaacag

SEQ ID NO: 4305400 - DNA, 25 bp, Homo sapien
gtggaagggtcgactgggtcaaagc

SEQ ID NO: 4305401 - DNA, 25 bp, Homo sapien
tggaagggtcgactgggtcaaagct

SEQ ID NO: 4305402 - DNA, 25 bp, Homo sapien
actgggtcaaagctgatggcgggac

SEQ ID NO: 4305403 - DNA, 25 bp, Homo sapien
tccggagagacccagggaaagtcag

SEQ ID NO: 4305404 - DNA, 25 bp, Homo sapien
aaagaagcgacgaggacacgttgct

SEQ ID NO: 4305405 - DNA, 25 bp, Homo sapien
cacgttgctggcaaggctctactct

SEQ ID NO: 4305406 - DNA, 25 bp, Homo sapien
tgggtaagtggtgctccggagagac

SEQ ID NO: 4305407 - DNA, 25 bp, Homo sapien
gtcaaataggacaaggtggaaacaa

SEQ ID NO: 4305408 - DNA, 25 bp, Homo sapien
aattctgacacgctgcagcgtggat

SEQ ID NO: 4305409 - DNA, 25 bp, Homo sapien
gccagtcgcaaaagggtaaacactg

SEQ ID NO: 4305410 - DNA, 25 bp, Homo sapien
cacttttatgaggtatctggagtag

SEQ ID NO: 4305411 - DNA, 25 bp, Homo sapien
cactgtaaccagtaaactatcttgc

SEQ ID NO: 4305412 - DNA, 25 bp, Homo sapien
cggtgaaggaattgaaaataggcca

SEQ ID NO: 4305413 - DNA, 25 bp, Homo sapien
taaccagtaaactatcttgcctcac

SEQ ID NO: 4305414 - DNA, 25 bp, Homo sapien
cacacagccggtaagggccggtgaa

SEQ ID NO: 4305415 - DNA, 25 bp, Homo sapien
tcactcagcacagcatgggttggtc

SEQ ID NO: 4305416 - DNA, 25 bp, Homo sapien
caggtactgcctggccataaggaga

SEQ ID NO: 4305417 - DNA, 25 bp, Homo sapien
tttgcaagaatgagaactggctgtc

SEQ ID NO: 4305418 - DNA, 25 bp, Homo sapien
tcaaggcttccggtaaattctcgta

SEQ ID NO: 4305419 - DNA, 25 bp, Homo sapien
tcacattgcttaagaaagccagggc

SEQ ID NO: 4305420 - DNA, 25 bp, Homo sapien
agggcctttcttccctatggcagta

SEQ ID NO: 4305421 - DNA, 25 bp, Homo sapien
gagacatacctaggcaacagctaca

SEQ ID NO: 4305422 - DNA, 25 bp, Homo sapien
tcccacggagttgaagagacatacc

SEQ ID NO: 4305423 - DNA, 25 bp, Homo sapien
gatgcgttgctctgccagtctccat

SEQ ID NO: 4305424 - DNA, 25 bp, Homo sapien
tattttttggaagattggcagacac

SEQ ID NO: 4305425 - DNA, 25 bp, Homo sapien
aagtagggtgcttggttgcttgcca

SEQ ID NO: 4305426 - DNA, 25 bp, Homo sapien
tatgtgcgctgctcgagactcttga

SEQ ID NO: 4305427 - DNA, 25 bp, Homo sapien
tctttcatagctcttctgtattgat

SEQ ID NO: 4305428 - DNA, 25 bp, Homo sapien
tacattgtcaagagggttgacaatt

SEQ ID NO: 4305429 - DNA, 25 bp, Homo sapien
tgtcttttaccctcagtcacttctt

SEQ ID NO: 4305430 - DNA, 25 bp, Homo sapien
caagagggttgacaatttcatcctg

SEQ ID NO: 4305431 - DNA, 25 bp, Homo sapien
gataccaatagtatctgtgttcaca

SEQ ID NO: 4305432 - DNA, 25 bp, Homo sapien
tcacagtcagctatgctatgtttca

SEQ ID NO: 4305433 - DNA, 25 bp, Homo sapien
tgttcacagtcagctatgctatgtt

SEQ ID NO: 4305434 - DNA, 25 bp, Homo sapien
ctggtagaggataccaatagtatct

SEQ ID NO: 4305435 - DNA, 25 bp, Homo sapien
agtgtatgtgctgctggagccaacg

SEQ ID NO: 4305436 - DNA, 25 bp, Homo sapien
gtgtatgtgctgctggagccaacgc

SEQ ID NO: 4305437 - DNA, 25 bp, Homo sapien
aacagaaggcttgactggcgtaggc

SEQ ID NO: 4305438 - DNA, 25 bp, Homo sapien
taggccctgctccaacctagtgtag

SEQ ID NO: 4305439 - DNA, 25 bp, Homo sapien
caagagggtaagaactgagaagtcc

SEQ ID NO: 4305440 - DNA, 25 bp, Homo sapien
tttccacactccctgaacagaaggc

SEQ ID NO: 4305441 - DNA, 25 bp, Homo sapien
ggttgcctgccctggtagagtccgc

SEQ ID NO: 4305442 - DNA, 25 bp, Homo sapien
ttaatacggttgtggtgacagcttc

SEQ ID NO: 4305443 - DNA, 25 bp, Homo sapien
ggaaatgtccctgcaaagttctgag

SEQ ID NO: 4305444 - DNA, 25 bp, Homo sapien
tcgaaaggatattcctagcacagga

SEQ ID NO: 4305445 - DNA, 25 bp, Homo sapien
ttgtctccagatacttgtccagaac

SEQ ID NO: 4305446 - DNA, 25 bp, Homo sapien
gaggcttgtctccagatacttgtcc

SEQ ID NO: 4305447 - DNA, 25 bp, Homo sapien
tcaaagaggcttgtctccagatact

SEQ ID NO: 4305448 - DNA, 25 bp, Homo sapien
aaagaggcttgtctccagatacttg

SEQ ID NO: 4305449 - DNA, 25 bp, Homo sapien
acttgagctcacaacctgggcgaca

SEQ ID NO: 4305450 - DNA, 25 bp, Homo sapien
ctggcaaggcactctgtaatctggc

SEQ ID NO: 4305451 - DNA, 25 bp, Homo sapien
tattccttgctaaaacctgtcagtg

SEQ ID NO: 4305452 - DNA, 25 bp, Homo sapien
gagcttaagctctggctggcaaggc

SEQ ID NO: 4305453 - DNA, 25 bp, Homo sapien
tacagtatggaaagtatgtgcacga

SEQ ID NO: 4305454 - DNA, 25 bp, Homo sapien
cacaatagcttgatcaactacagta

SEQ ID NO: 4305455 - DNA, 25 bp, Homo sapien
tgtgcacgaaaatcattgtctcctg

SEQ ID NO: 4305456 - DNA, 25 bp, Homo sapien
tctggtggtaaactcacagcagtga

SEQ ID NO: 4305457 - DNA, 25 bp, Homo sapien
ctcatttgacttgtagaattgataa

SEQ ID NO: 4305458 - DNA, 25 bp, Homo sapien
tgacttgtagaattgataatcaaca

SEQ ID NO: 4305459 - DNA, 25 bp, Homo sapien
tatagtactctttattaatagactc

SEQ ID NO: 4305460 - DNA, 25 bp, Homo sapien
tgttgtcgtgattgagaaaacaaaa

SEQ ID NO: 4305461 - DNA, 25 bp, Homo sapien
ggcagcacagccggtgctccagtga

SEQ ID NO: 4305462 - DNA, 25 bp, Homo sapien
tgtggcagcacagccggtgctccag

SEQ ID NO: 4305463 - DNA, 25 bp, Homo sapien
ggagtgtggcagcacagccggtgct

SEQ ID NO: 4305464 - DNA, 25 bp, Homo sapien
cagcacagccggtgctccagtgatg

SEQ ID NO: 4305465 - DNA, 25 bp, Homo sapien
taaattggctaaatcattgcagatg

SEQ ID NO: 4305466 - DNA, 25 bp, Homo sapien
atccaaaaatgtcccgtgatcttgg

SEQ ID NO: 4305467 - DNA, 25 bp, Homo sapien
tgtaaactacttggcgcaaatatcc

SEQ ID NO: 4305468 - DNA, 25 bp, Homo sapien
gcagatgaaccattctgtgtgccat

SEQ ID NO: 4305469 - DNA, 25 bp, Homo sapien
ctatagaccagggtaccgattaagc

SEQ ID NO: 4305470 - DNA, 25 bp, Homo sapien
taccgattaagcgttttcgagtgcc

SEQ ID NO: 4305471 - DNA, 25 bp, Homo sapien
tatagaccagggtaccgattaagcg

SEQ ID NO: 4305472 - DNA, 25 bp, Homo sapien
gattaagcgttttcgagtgcctgct

SEQ ID NO: 4305473 - DNA, 25 bp, Homo sapien
cacccctctagacgtggcaaagaca

SEQ ID NO: 4305474 - DNA, 25 bp, Homo sapien
ggcaaagacaagaattacgctggca

SEQ ID NO: 4305475 - DNA, 25 bp, Homo sapien
tacgctggcaaaggtaagtggtgaa

SEQ ID NO: 4305476 - DNA, 25 bp, Homo sapien
tacaggtggatttgccgctgcagtc

SEQ ID NO: 4305477 - DNA, 25 bp, Homo sapien
tgtaaaaccaaactgccaaatttca

SEQ ID NO: 4305478 - DNA, 25 bp, Homo sapien
tattctacattgcaccttggctggt

SEQ ID NO: 4305479 - DNA, 25 bp, Homo sapien
agccacagcccatttgcctttcatg

SEQ ID NO: 4305480 - DNA, 25 bp, Homo sapien
taccaaggggactgtgcaggtggag

SEQ ID NO: 4305481 - DNA, 25 bp, Homo sapien
gcagcaccttctgtgataccaaggg

SEQ ID NO: 4305482 - DNA, 25 bp, Homo sapien
tacagatgagtgacgcttgaaccca

SEQ ID NO: 4305483 - DNA, 25 bp, Homo sapien
ggacagattctacgccttacagaca

SEQ ID NO: 4305484 - DNA, 25 bp, Homo sapien
tccagccatgcgttaaggcaccaga

SEQ ID NO: 4305485 - DNA, 25 bp, Homo sapien
cattcactgcaagtgtggatggcac

SEQ ID NO: 4305486 - DNA, 25 bp, Homo sapien
tagctttttggtgccaacagcagtg

SEQ ID NO: 4305487 - DNA, 25 bp, Homo sapien
gctttttggtgccaacagcagtggc

SEQ ID NO: 4305488 - DNA, 25 bp, Homo sapien
tttttggtgccaacagcagtggcac

SEQ ID NO: 4305489 - DNA, 25 bp, Homo sapien
ctagctttttggtgccaacagcagt

SEQ ID NO: 4305490 - DNA, 25 bp, Homo sapien
ctcgggactggcgtcacatgctttg

SEQ ID NO: 4305491 - DNA, 25 bp, Homo sapien
agtactgggcttccgcgcgctctgg

SEQ ID NO: 4305492 - DNA, 25 bp, Homo sapien
gctgtcctgtcagtggcgtggactc

SEQ ID NO: 4305493 - DNA, 25 bp, Homo sapien
gaaacaagcaagtactgggcttccg

SEQ ID NO: 4305494 - DNA, 25 bp, Homo sapien
ttaatgaagatgcaggctgtagctc

SEQ ID NO: 4305495 - DNA, 25 bp, Homo sapien
gctctgtggagtccgggtgatacaa

SEQ ID NO: 4305496 - DNA, 25 bp, Homo sapien
tgaagttaatgaagatgcaggctgt

SEQ ID NO: 4305497 - DNA, 25 bp, Homo sapien
tccgggtgatacaaccttgctaaag

SEQ ID NO: 4305498 - DNA, 25 bp, Homo sapien
aacagtccacttcggtgttgcagtc

SEQ ID NO: 4305499 - DNA, 25 bp, Homo sapien
gcttgtcccctggagtaacagtcca

SEQ ID NO: 4305500 - DNA, 25 bp, Homo sapien
ttgcagtcactgcatacgacccggc

SEQ ID NO: 4305501 - DNA, 25 bp, Homo sapien
tgtgcgctgtctctggacacaggct

SEQ ID NO: 4305502 - DNA, 25 bp, Homo sapien
gtgtcgggctctggaaagtggcttg

SEQ ID NO: 4305503 - DNA, 25 bp, Homo sapien
tgtgatacgcagacccagcacagag

SEQ ID NO: 4305504 - DNA, 25 bp, Homo sapien
caggcaacgctgtgagtgtcgggct

SEQ ID NO: 4305505 - DNA, 25 bp, Homo sapien
tccatcgctttccacggctctttgt

SEQ ID NO: 4305506 - DNA, 25 bp, Homo sapien
ggcacgttccccatgtaaggaatgg

SEQ ID NO: 4305507 - DNA, 25 bp, Homo sapien
tatcctgccagggagatgctaagcc

SEQ ID NO: 4305508 - DNA, 25 bp, Homo sapien
ggttggctgggttcatgcaccgtaa

SEQ ID NO: 4305509 - DNA, 25 bp, Homo sapien
tctacagtctcaggcaagtgctcag

SEQ ID NO: 4305510 - DNA, 25 bp, Homo sapien
tgccccatctaatgccaggtacctg

SEQ ID NO: 4305511 - DNA, 25 bp, Homo sapien
ttctacttcaccaagtttgccccat

SEQ ID NO: 4305512 - DNA, 25 bp, Homo sapien
ttcaccaagtttgccccatctaatg

SEQ ID NO: 4305513 - DNA, 25 bp, Homo sapien
caagtttgccccatctaatgccagg

SEQ ID NO: 4305514 - DNA, 25 bp, Homo sapien
ttgtcggtcagaaagggtcccctga

SEQ ID NO: 4305515 - DNA, 25 bp, Homo sapien
tcggtcctgaccacggtttcttgtc

SEQ ID NO: 4305516 - DNA, 25 bp, Homo sapien
acatctggtggcacgacggtttcat

SEQ ID NO: 4305517 - DNA, 25 bp, Homo sapien
agagaggtagcttggaacatctggt

SEQ ID NO: 4305518 - DNA, 25 bp, Homo sapien
attagtgggactaaaccctcaggag

SEQ ID NO: 4305519 - DNA, 25 bp, Homo sapien
tgaaagtcagctccgctggcagggc

SEQ ID NO: 4305520 - DNA, 25 bp, Homo sapien
tggaacccggcccagttccccagca

SEQ ID NO: 4305521 - DNA, 25 bp, Homo sapien
gtgcaattctttcaaaagccactgg

SEQ ID NO: 4305522 - DNA, 25 bp, Homo sapien
tcaggacgatgctgctcacgacagc

SEQ ID NO: 4305523 - DNA, 25 bp, Homo sapien
ggtgaagatgcctaccgtggtccca

SEQ ID NO: 4305524 - DNA, 25 bp, Homo sapien
tcctggtctggtagatgatgcacac

SEQ ID NO: 4305525 - DNA, 25 bp, Homo sapien
gacatctcacaggtatatcggcccg

SEQ ID NO: 4305526 - DNA, 25 bp, Homo sapien
acagataccacacggtcttccaagg

SEQ ID NO: 4305527 - DNA, 25 bp, Homo sapien
cacagataccacacggtcttccaag

SEQ ID NO: 4305528 - DNA, 25 bp, Homo sapien
cccacagataccacacggtcttcca

SEQ ID NO: 4305529 - DNA, 25 bp, Homo sapien
gataccacacggtcttccaagggga

SEQ ID NO: 4305530 - DNA, 25 bp, Homo sapien
gaaaaacacgtcgtcatccggcatg

SEQ ID NO: 4305531 - DNA, 25 bp, Homo sapien
catgacatgcatgcgtcgctcacgg

SEQ ID NO: 4305532 - DNA, 25 bp, Homo sapien
cagcacattcgaggcgggccatggt

SEQ ID NO: 4305533 - DNA, 25 bp, Homo sapien
aaccggctgagttctgagcagtaca

SEQ ID NO: 4305534 - DNA, 25 bp, Homo sapien
cagggtcgggttacgggacagctag

SEQ ID NO: 4305535 - DNA, 25 bp, Homo sapien
catacgtatacagggtcgggttacg

SEQ ID NO: 4305536 - DNA, 25 bp, Homo sapien
aactcattgtgaataacccttgaaa

SEQ ID NO: 4305537 - DNA, 25 bp, Homo sapien
caagtaactcattgtgaataaccct

SEQ ID NO: 4305538 - DNA, 25 bp, Homo sapien
cattgtgaataacccttgaaatctg

SEQ ID NO: 4305539 - DNA, 25 bp, Homo sapien
aaaacaagtaactcattgtgaataa

SEQ ID NO: 4305540 - DNA, 25 bp, Homo sapien
tgctgagcatgtaaaccggatgtcc

SEQ ID NO: 4305541 - DNA, 25 bp, Homo sapien
tcgtgcccgaaagtgacctgacgga

SEQ ID NO: 4305542 - DNA, 25 bp, Homo sapien
tgcgcgtggacgtggacaaagttct

SEQ ID NO: 4305543 - DNA, 25 bp, Homo sapien
tgatgacacattggtagcggccctc

SEQ ID NO: 4305544 - DNA, 25 bp, Homo sapien
agaagggtcaactgtaaagcgctgg

SEQ ID NO: 4305545 - DNA, 25 bp, Homo sapien
agggtcaactgtaaagcgctgggtt

SEQ ID NO: 4305546 - DNA, 25 bp, Homo sapien
gaagggtcaactgtaaagcgctggg

SEQ ID NO: 4305547 - DNA, 25 bp, Homo sapien
aagggtcaactgtaaagcgctgggt

SEQ ID NO: 4305548 - DNA, 25 bp, Homo sapien
tggctcacccagagggaaagcctgc

SEQ ID NO: 4305549 - DNA, 25 bp, Homo sapien
ggctcacccagagggaaagcctgcc

SEQ ID NO: 4305550 - DNA, 25 bp, Homo sapien
ctggctcacccagagggaaagcctg

SEQ ID NO: 4305551 - DNA, 25 bp, Homo sapien
gagaaaatgctctgacccttcagtg

SEQ ID NO: 4305552 - DNA, 25 bp, Homo sapien
gcagcatcctgccaattagccacgg

SEQ ID NO: 4305553 - DNA, 25 bp, Homo sapien
ttcagctggcagtcacacaggaagc

SEQ ID NO: 4305554 - DNA, 25 bp, Homo sapien
aggtggctgtcacaaaggcctgcag

SEQ ID NO: 4305555 - DNA, 25 bp, Homo sapien
actggacagatctgatcgcattccc

SEQ ID NO: 4305556 - DNA, 25 bp, Homo sapien
gcatcaaactggacagatctgatcg

SEQ ID NO: 4305557 - DNA, 25 bp, Homo sapien
gacagatctgatcgcattccctcca

SEQ ID NO: 4305558 - DNA, 25 bp, Homo sapien
agatctgatcgcattccctccaagg

SEQ ID NO: 4305559 - DNA, 25 bp, Homo sapien
agccccgagaatgctctcttagcca

SEQ ID NO: 4305560 - DNA, 25 bp, Homo sapien
tctcttagccacagacttgatcttg

SEQ ID NO: 4305561 - DNA, 25 bp, Homo sapien
ccaggccttccagccccgagaatgc

SEQ ID NO: 4305562 - DNA, 25 bp, Homo sapien
gacttgatcttgtttccaaacagag

SEQ ID NO: 4305563 - DNA, 25 bp, Homo sapien
tagtgctacctgataagtctgtcca

SEQ ID NO: 4305564 - DNA, 25 bp, Homo sapien
gctggaattgcatgtgccgtctggc

SEQ ID NO: 4305565 - DNA, 25 bp, Homo sapien
cctgcgctgagattacgggtttgag

SEQ ID NO: 4305566 - DNA, 25 bp, Homo sapien
caggtggaaagctgacctgcgctga

SEQ ID NO: 4305567 - DNA, 25 bp, Homo sapien
ggctgcctgaccctccgtttcatca

SEQ ID NO: 4305568 - DNA, 25 bp, Homo sapien
ctgggaaccgcttgggcaggtacca

SEQ ID NO: 4305569 - DNA, 25 bp, Homo sapien
ctgcttcttcctgactgcaacaggc

SEQ ID NO: 4305570 - DNA, 25 bp, Homo sapien
aggcaccaccagtccgtgtggccag

SEQ ID NO: 4305571 - DNA, 25 bp, Homo sapien
agcagactgggatggctctaataaa

SEQ ID NO: 4305572 - DNA, 25 bp, Homo sapien
gcagacatatggggctgggacgggg

SEQ ID NO: 4305573 - DNA, 25 bp, Homo sapien
cagcagactgggatggctctaataa

SEQ ID NO: 4305574 - DNA, 25 bp, Homo sapien
agcagacatatggggctgggacggg

SEQ ID NO: 4305575 - DNA, 25 bp, Homo sapien
tgggaggacactatttctgtaccac

SEQ ID NO: 4305576 - DNA, 25 bp, Homo sapien
gacactatttctgtaccacagccgg

SEQ ID NO: 4305577 - DNA, 25 bp, Homo sapien
gaggacactatttctgtaccacagc

SEQ ID NO: 4305578 - DNA, 25 bp, Homo sapien
tatttctgtaccacagccgggctcc

SEQ ID NO: 4305579 - DNA, 25 bp, Homo sapien
gctcacatgggtccttgtactcatg

SEQ ID NO: 4305580 - DNA, 25 bp, Homo sapien
tagcgcttgccaaatcaagtggcag

SEQ ID NO: 4305581 - DNA, 25 bp, Homo sapien
gggcaatgctcacatgggtccttgt

SEQ ID NO: 4305582 - DNA, 25 bp, Homo sapien
tccaaaggcctggttagcgcttgcc

SEQ ID NO: 4305583 - DNA, 25 bp, Homo sapien
tggatcctaacaggccggcactggg

SEQ ID NO: 4305584 - DNA, 25 bp, Homo sapien
tctgtggtcacttctctcagccagg

SEQ ID NO: 4305585 - DNA, 25 bp, Homo sapien
cccacttctcagtggatcctaacag

SEQ ID NO: 4305586 - DNA, 25 bp, Homo sapien
tctcagtggatcctaacaggccggc

SEQ ID NO: 4305587 - DNA, 25 bp, Homo sapien
acaacattatgtgagtgaggaaagc

SEQ ID NO: 4305588 - DNA, 25 bp, Homo sapien
caagttcccaggagtctcaggacca

SEQ ID NO: 4305589 - DNA, 25 bp, Homo sapien
tgaggcttcgattttaacaagttcc

SEQ ID NO: 4305590 - DNA, 25 bp, Homo sapien
gccccaagatgctgactcagtggct

SEQ ID NO: 4305591 - DNA, 25 bp, Homo sapien
tatttacttgacactcgcactctgc

SEQ ID NO: 4305592 - DNA, 25 bp, Homo sapien
tccgagctgctagtaaacagtaata

SEQ ID NO: 4305593 - DNA, 25 bp, Homo sapien
ctctatcatcgagctccactagggc

SEQ ID NO: 4305594 - DNA, 25 bp, Homo sapien
aataatgactctcgtccccttcctg

SEQ ID NO: 4305595 - DNA, 25 bp, Homo sapien
gtcctctattgtgcccgaaatctcg

SEQ ID NO: 4305596 - DNA, 25 bp, Homo sapien
tgctgaggctgtcgagccctgagaa

SEQ ID NO: 4305597 - DNA, 25 bp, Homo sapien
tgcccgaaatctcgttatggtccag

SEQ ID NO: 4305598 - DNA, 25 bp, Homo sapien
gagaaggcgccgctcgtgtcctcta

SEQ ID NO: 4305599 - DNA, 25 bp, Homo sapien
gctcggaagctgaagtcccctgggt

SEQ ID NO: 4305600 - DNA, 25 bp, Homo sapien
cagcctgctgctcggaagctgaagt

SEQ ID NO: 4305601 - DNA, 25 bp, Homo sapien
tgctgctcggaagctgaagtcccct

SEQ ID NO: 4305602 - DNA, 25 bp, Homo sapien
ctgctcggaagctgaagtcccctgg

SEQ ID NO: 4305603 - DNA, 25 bp, Homo sapien
catggccgatgactcaatggcttcc

SEQ ID NO: 4305604 - DNA, 25 bp, Homo sapien
caacaatgcaaatcccatggccgat

SEQ ID NO: 4305605 - DNA, 25 bp, Homo sapien
gcaggaatcaatgctgccagcagag

SEQ ID NO: 4305606 - DNA, 25 bp, Homo sapien
tgagtcagacttgtgacccactcgc

SEQ ID NO: 4305607 - DNA, 25 bp, Homo sapien
tcgtccagccgtgtcaggttgttga

SEQ ID NO: 4305608 - DNA, 25 bp, Homo sapien
cttgaaggcaccctccgcaatgtgg

SEQ ID NO: 4305609 - DNA, 25 bp, Homo sapien
gaattgtggctgagacgcaggacac

SEQ ID NO: 4305610 - DNA, 25 bp, Homo sapien
tctcctcgtccagccgtgtcaggtt

SEQ ID NO: 4305611 - DNA, 25 bp, Homo sapien
gtgacatattggtcatctatcgttg

SEQ ID NO: 4305612 - DNA, 25 bp, Homo sapien
gacatattggtcatctatcgttgaa

SEQ ID NO: 4305613 - DNA, 25 bp, Homo sapien
ggtcatctatcgttgaaaaattggg

SEQ ID NO: 4305614 - DNA, 25 bp, Homo sapien
tattggtcatctatcgttgaaaaat

SEQ ID NO: 4305615 - DNA, 25 bp, Homo sapien
cacacatctctgaactaagcacgca

SEQ ID NO: 4305616 - DNA, 25 bp, Homo sapien
catctctgaactaagcacgcacacg

SEQ ID NO: 4305617 - DNA, 25 bp, Homo sapien
tctgaactaagcacgcacacgactg

SEQ ID NO: 4305618 - DNA, 25 bp, Homo sapien
aagcacgcacacgactgcacaggag

SEQ ID NO: 4305619 - DNA, 25 bp, Homo sapien
tgcagggccgtgaggccgtagagcg

SEQ ID NO: 4305620 - DNA, 25 bp, Homo sapien
gaagctccagcccttgcggtgaatg

SEQ ID NO: 4305621 - DNA, 25 bp, Homo sapien
gaatgcgagcgatggaattgttgct

SEQ ID NO: 4305622 - DNA, 25 bp, Homo sapien
tgttcacttctaccaggctgttgta

SEQ ID NO: 4305623 - DNA, 25 bp, Homo sapien
ctgcaatgacagccatgcacaggat

SEQ ID NO: 4305624 - DNA, 25 bp, Homo sapien
atgaagaggagctttcactcccttc

SEQ ID NO: 4305625 - DNA, 25 bp, Homo sapien
caatgacagccatgcacaggatgaa

SEQ ID NO: 4305626 - DNA, 25 bp, Homo sapien
tgaagaggagctttcactcccttca

SEQ ID NO: 4305627 - DNA, 25 bp, Homo sapien
aatgagcagccacgctgtacctgac

SEQ ID NO: 4305628 - DNA, 25 bp, Homo sapien
cagcaaatgagcagccacgctgtac

SEQ ID NO: 4305629 - DNA, 25 bp, Homo sapien
caaatgagcagccacgctgtacctg

SEQ ID NO: 4305630 - DNA, 25 bp, Homo sapien
acagacagcaaatgagcagccacgc

SEQ ID NO: 4305631 - DNA, 25 bp, Homo sapien
gaaggaacttcctgtggtcaggagt

SEQ ID NO: 4305632 - DNA, 25 bp, Homo sapien
tatctgactcaatccgctgaaactt

SEQ ID NO: 4305633 - DNA, 25 bp, Homo sapien
catctccatcaaccaacttatctga

SEQ ID NO: 4305634 - DNA, 25 bp, Homo sapien
ccccaagtggatttcagtggatgtc

SEQ ID NO: 4305635 - DNA, 25 bp, Homo sapien
ttgctgatgttgtttcgctgaagct

SEQ ID NO: 4305636 - DNA, 25 bp, Homo sapien
ctgatgttgtttcgctgaagcttca

SEQ ID NO: 4305637 - DNA, 25 bp, Homo sapien
ctgaagcttcagcacctccaagctg

SEQ ID NO: 4305638 - DNA, 25 bp, Homo sapien
agcttcagcacctccaagctgttga

SEQ ID NO: 4305639 - DNA, 25 bp, Homo sapien
gaaggtgaggccctctatcagccga

SEQ ID NO: 4305640 - DNA, 25 bp, Homo sapien
ccgaatcctgttccgattgaggtcc

SEQ ID NO: 4305641 - DNA, 25 bp, Homo sapien
tctatcagccgaatcctgttccgat

SEQ ID NO: 4305642 - DNA, 25 bp, Homo sapien
gaggccctctatcagccgaatcctg

SEQ ID NO: 4305643 - DNA, 25 bp, Homo sapien
cagctgcacagaagagaacgcgtgt

SEQ ID NO: 4305644 - DNA, 25 bp, Homo sapien
gtctcctcccccagtagcaccagtg

SEQ ID NO: 4305645 - DNA, 25 bp, Homo sapien
cacagaagagaacgcgtgtgtgctc

SEQ ID NO: 4305646 - DNA, 25 bp, Homo sapien
gcgtgtgtgctcacgtctcctcccc

SEQ ID NO: 4305647 - DNA, 25 bp, Homo sapien
cagcctgggtagcttgaatgctctt

SEQ ID NO: 4305648 - DNA, 25 bp, Homo sapien
cgaagagttagcagcgaccgtgaca

SEQ ID NO: 4305649 - DNA, 25 bp, Homo sapien
gccaatccgattgcctgccaggttg

SEQ ID NO: 4305650 - DNA, 25 bp, Homo sapien
gaccgtgacagaccatcaaatgctc

SEQ ID NO: 4305651 - DNA, 25 bp, Homo sapien
tccacgctgcgaatcttgttgtgct

SEQ ID NO: 4305652 - DNA, 25 bp, Homo sapien
agctcctttataggcggtccgtgtg

SEQ ID NO: 4305653 - DNA, 25 bp, Homo sapien
gaaagcaggtgttccgcacttccgt

SEQ ID NO: 4305654 - DNA, 25 bp, Homo sapien
gcacttccgtgatgttgttcaaact

SEQ ID NO: 4305655 - DNA, 25 bp, Homo sapien
gtgcagccagacagctccagtccaa

SEQ ID NO: 4305656 - DNA, 25 bp, Homo sapien
ccataaaggatgtgccctgtcctgt

SEQ ID NO: 4305657 - DNA, 25 bp, Homo sapien
cactcaccataaaggatgtgccctg

SEQ ID NO: 4305658 - DNA, 25 bp, Homo sapien
cagaatccacggatgcactcaccat

SEQ ID NO: 4305659 - DNA, 25 bp, Homo sapien
agctgcaggcccaacatctctccca

SEQ ID NO: 4305660 - DNA, 25 bp, Homo sapien
tctgtggtccggtaccttttgctcc

SEQ ID NO: 4305661 - DNA, 25 bp, Homo sapien
tcagtcttttcattcgctgaatcaa

SEQ ID NO: 4305662 - DNA, 25 bp, Homo sapien
cgggccccactctgcataaaggacc

SEQ ID NO: 4305663 - DNA, 25 bp, Homo sapien
tgctgccctcgctcaacccggcatt

SEQ ID NO: 4305664 - DNA, 25 bp, Homo sapien
ctcaacccggcattccaccttcagg

SEQ ID NO: 4305665 - DNA, 25 bp, Homo sapien
tgccatggaaacgtgtctgctgccc

SEQ ID NO: 4305666 - DNA, 25 bp, Homo sapien
gagagttgatgccatggaaacgtgt

SEQ ID NO: 4305667 - DNA, 25 bp, Homo sapien
ttagttccatgtccacacggaggtc

SEQ ID NO: 4305668 - DNA, 25 bp, Homo sapien
agttagttccatgtccacacggagg

SEQ ID NO: 4305669 - DNA, 25 bp, Homo sapien
gttagttccatgtccacacggaggt

SEQ ID NO: 4305670 - DNA, 25 bp, Homo sapien
caattgtcagggcacatgtgtccct

SEQ ID NO: 4305671 - DNA, 25 bp, Homo sapien
cctttgagaagaaggctaaacatac

SEQ ID NO: 4305672 - DNA, 25 bp, Homo sapien
cagagcaccgggctatcaagctgtg

SEQ ID NO: 4305673 - DNA, 25 bp, Homo sapien
gtgtcatgtggagccagcaagcccg

SEQ ID NO: 4305674 - DNA, 25 bp, Homo sapien
cccaccaattcacatgactgtccct

SEQ ID NO: 4305675 - DNA, 25 bp, Homo sapien
caccaattcacatgactgtccctct

SEQ ID NO: 4305676 - DNA, 25 bp, Homo sapien
ccaccaattcacatgactgtccctc

SEQ ID NO: 4305677 - DNA, 25 bp, Homo sapien
gaagtgtggtggagagctgtgtagg

SEQ ID NO: 4305678 - DNA, 25 bp, Homo sapien
ctaatccttaagtgcagagcagact

SEQ ID NO: 4305679 - DNA, 25 bp, Homo sapien
tagggttggtacagcccagggtggc

SEQ ID NO: 4305680 - DNA, 25 bp, Homo sapien
tgcagagcagactaagaagtgtggt

SEQ ID NO: 4305681 - DNA, 25 bp, Homo sapien
agtggttccaatgctgcacagggcc

SEQ ID NO: 4305682 - DNA, 25 bp, Homo sapien
ccgacactctcatggcacaaaagcc

SEQ ID NO: 4305683 - DNA, 25 bp, Homo sapien
catggatgtccagggagcttgccct

SEQ ID NO: 4305684 - DNA, 25 bp, Homo sapien
ctttgtagccggagtctggaatgga

SEQ ID NO: 4305685 - DNA, 25 bp, Homo sapien
gaagaaagaatgacccagataaggg

SEQ ID NO: 4305686 - DNA, 25 bp, Homo sapien
gtgatctccaaataaggtgggcagg

SEQ ID NO: 4305687 - DNA, 25 bp, Homo sapien
ccatcatggtgggacatttctgaca

SEQ ID NO: 4305688 - DNA, 25 bp, Homo sapien
aacttcctcatcacgctgtggctaa

SEQ ID NO: 4305689 - DNA, 25 bp, Homo sapien
aactgcaacagcggcctgctggctc

SEQ ID NO: 4305690 - DNA, 25 bp, Homo sapien
agaactgcaacagcggcctgctggc

SEQ ID NO: 4305691 - DNA, 25 bp, Homo sapien
gcagttctaagaactgcaacagcgg

SEQ ID NO: 4305692 - DNA, 25 bp, Homo sapien
ctgctggctcttcataaaagcccgc

SEQ ID NO: 4305693 - DNA, 25 bp, Homo sapien
agccgtgcagaggaacccacggtct

SEQ ID NO: 4305694 - DNA, 25 bp, Homo sapien
ggtctccaccatgaaccagctgaga

SEQ ID NO: 4305695 - DNA, 25 bp, Homo sapien
gccgtgcagaggaacccacggtctc

SEQ ID NO: 4305696 - DNA, 25 bp, Homo sapien
ccacggtctccaccatgaaccagct

SEQ ID NO: 4305697 - DNA, 25 bp, Homo sapien
tcctgccacgttgggctgctcacga

SEQ ID NO: 4305698 - DNA, 25 bp, Homo sapien
gttgggctgctcacgaagcgctctc

SEQ ID NO: 4305699 - DNA, 25 bp, Homo sapien
ctgagagagtaacagggctcctgcc

SEQ ID NO: 4305700 - DNA, 25 bp, Homo sapien
agcacccaccggctgagagagtaac

SEQ ID NO: 4305701 - DNA, 25 bp, Homo sapien
taccagggccatagagccccactgt

SEQ ID NO: 4305702 - DNA, 25 bp, Homo sapien
cattaccagggccatagagccccac

SEQ ID NO: 4305703 - DNA, 25 bp, Homo sapien
cagaagccattaccagggccataga

SEQ ID NO: 4305704 - DNA, 25 bp, Homo sapien
aagccattaccagggccatagagcc

SEQ ID NO: 4305705 - DNA, 25 bp, Homo sapien
ggaagtcggctcaattctgcataag

SEQ ID NO: 4305706 - DNA, 25 bp, Homo sapien
ccataattataggtgtccaagctga

SEQ ID NO: 4305707 - DNA, 25 bp, Homo sapien
caacaacagtggttattggtcagag

SEQ ID NO: 4305708 - DNA, 25 bp, Homo sapien
gaagtctcttttgaagacctgacag

SEQ ID NO: 4305709 - DNA, 25 bp, Homo sapien
ttcatttccagtgtgctgtctagaa

SEQ ID NO: 4305710 - DNA, 25 bp, Homo sapien
tgtctagaacaaatagatcgcatct

SEQ ID NO: 4305711 - DNA, 25 bp, Homo sapien
gatcgcatcttatctaacacttgac

SEQ ID NO: 4305712 - DNA, 25 bp, Homo sapien
catagttttacgttgattccagagg

SEQ ID NO: 4305713 - DNA, 25 bp, Homo sapien
ggatggtaccgctgtcaactcatta

SEQ ID NO: 4305714 - DNA, 25 bp, Homo sapien
aagagagagacgacatgtgatgaag

SEQ ID NO: 4305715 - DNA, 25 bp, Homo sapien
aaagagagagacgacatgtgatgaa

SEQ ID NO: 4305716 - DNA, 25 bp, Homo sapien
tgtcaactcattattattgaggtac

SEQ ID NO: 4305717 - DNA, 25 bp, Homo sapien
tagaatgcctgtttcaatagcttca

SEQ ID NO: 4305718 - DNA, 25 bp, Homo sapien
ggctgtgggacatagaatgcctgtt

SEQ ID NO: 4305719 - DNA, 25 bp, Homo sapien
gacatagaatgcctgtttcaatagc

SEQ ID NO: 4305720 - DNA, 25 bp, Homo sapien
tgtgggacatagaatgcctgtttca

SEQ ID NO: 4305721 - DNA, 25 bp, Homo sapien
tctacagccctcagaagtaggtctc

SEQ ID NO: 4305722 - DNA, 25 bp, Homo sapien
gcttgcgatttcttctcaaacacag

SEQ ID NO: 4305723 - DNA, 25 bp, Homo sapien
cccaggttttatcagagcaagaaaa

SEQ ID NO: 4305724 - DNA, 25 bp, Homo sapien
gcaataagttgcagtggcccagggt

SEQ ID NO: 4305725 - DNA, 25 bp, Homo sapien
tattaatagaggagcctgctggcca

SEQ ID NO: 4305726 - DNA, 25 bp, Homo sapien
gccaggcggcagtactgtgatctga

SEQ ID NO: 4305727 - DNA, 25 bp, Homo sapien
tacagaggactgtataaatagcccc

SEQ ID NO: 4305728 - DNA, 25 bp, Homo sapien
tggccctggcaagcacacggcaaca

SEQ ID NO: 4305729 - DNA, 25 bp, Homo sapien
aagaccgtgtggcttggacgcagct

SEQ ID NO: 4305730 - DNA, 25 bp, Homo sapien
gtgtggcttggacgcagctgcacaa

SEQ ID NO: 4305731 - DNA, 25 bp, Homo sapien
tggacgcagctgcacaagcgtcctc

SEQ ID NO: 4305732 - DNA, 25 bp, Homo sapien
ctgtgggcagtgaagaccgtgtggc

SEQ ID NO: 4305733 - DNA, 25 bp, Homo sapien
cattctcaatgagggctccagactg

SEQ ID NO: 4305734 - DNA, 25 bp, Homo sapien
aaaaccactgctaaaccactgcctg

SEQ ID NO: 4305735 - DNA, 25 bp, Homo sapien
aggcctccagaataaaaccactgct

SEQ ID NO: 4305736 - DNA, 25 bp, Homo sapien
cagcctgtggctccattctcaatga

SEQ ID NO: 4305737 - DNA, 25 bp, Homo sapien
gaagttctactgttctaggcagcag

SEQ ID NO: 4305738 - DNA, 25 bp, Homo sapien
cactagggataggaggcacaatggt

SEQ ID NO: 4305739 - DNA, 25 bp, Homo sapien
taagacattcaaccagtcagcctgc

SEQ ID NO: 4305740 - DNA, 25 bp, Homo sapien
tcagtgagcctctcgcatgtgcaag

SEQ ID NO: 4305741 - DNA, 25 bp, Homo sapien
ccatgcctgcccctgatagataggg

SEQ ID NO: 4305742 - DNA, 25 bp, Homo sapien
ctccatcgtgcatgccaggcacagt

SEQ ID NO: 4305743 - DNA, 25 bp, Homo sapien
cttcttgaggctctgtacttgcagt

SEQ ID NO: 4305744 - DNA, 25 bp, Homo sapien
catgtaccatgcctgcccctgatag

SEQ ID NO: 4305745 - DNA, 25 bp, Homo sapien
cagcagggtcaatctcagagagttt

SEQ ID NO: 4305746 - DNA, 25 bp, Homo sapien
ttcctgtaggttcggcaagtcctca

SEQ ID NO: 4305747 - DNA, 25 bp, Homo sapien
tcagagagtttgttgtaactcaggt

SEQ ID NO: 4305748 - DNA, 25 bp, Homo sapien
gttcggcaagtcctcaaaaccagca

SEQ ID NO: 4305749 - DNA, 25 bp, Homo sapien
caacaacagtttgctcgctgagcac

SEQ ID NO: 4305750 - DNA, 25 bp, Homo sapien
tatccaggcgtgtctgaaaagcaaa

SEQ ID NO: 4305751 - DNA, 25 bp, Homo sapien
tgagcccagcaatagatgttctttc

SEQ ID NO: 4305752 - DNA, 25 bp, Homo sapien
caaagggtgcgcagatctctgaaca

SEQ ID NO: 4305753 - DNA, 25 bp, Homo sapien
tggcgtgcagcggtgcatctccgct

SEQ ID NO: 4305754 - DNA, 25 bp, Homo sapien
cagcccacattagctatatttcaag

SEQ ID NO: 4305755 - DNA, 25 bp, Homo sapien
tcaagtgttcaacagtaccacgtgg

SEQ ID NO: 4305756 - DNA, 25 bp, Homo sapien
gcgtgcagcggtgcatctccgctca

SEQ ID NO: 4305757 - DNA, 25 bp, Homo sapien
taagcagccacatattccctatggc

SEQ ID NO: 4305758 - DNA, 25 bp, Homo sapien
tgtatcttgaactggaatcattcct

SEQ ID NO: 4305759 - DNA, 25 bp, Homo sapien
tccactcaggagaaggttctgtact

SEQ ID NO: 4305760 - DNA, 25 bp, Homo sapien
cacaactgaacaagcggataatgca

SEQ ID NO: 4305761 - DNA, 25 bp, Homo sapien
taagggaaacctacagtgactcaaa

SEQ ID NO: 4305762 - DNA, 25 bp, Homo sapien
gaagaaactcatgcctacctctgtg

SEQ ID NO: 4305763 - DNA, 25 bp, Homo sapien
cgcccgtgacgttaactgagagaag

SEQ ID NO: 4305764 - DNA, 25 bp, Homo sapien
ggcctctgaagtctaacgcccgtga

SEQ ID NO: 4305765 - DNA, 25 bp, Homo sapien
tgcaaagcccaagcatccaaaatct

SEQ ID NO: 4305766 - DNA, 25 bp, Homo sapien
aaatctataaagctcatataaaaat

SEQ ID NO: 4305767 - DNA, 25 bp, Homo sapien
gcaaagcccaagcatccaaaatcta

SEQ ID NO: 4305768 - DNA, 25 bp, Homo sapien
aaagcccaagcatccaaaatctata

SEQ ID NO: 4305769 - DNA, 25 bp, Homo sapien
aggtccaggtcatttactcacaaag

SEQ ID NO: 4305770 - DNA, 25 bp, Homo sapien
cagggtggaccctagcggcaaattc

SEQ ID NO: 4305771 - DNA, 25 bp, Homo sapien
gcggcaaattccacttgctaaactg

SEQ ID NO: 4305772 - DNA, 25 bp, Homo sapien
cacaaaggatgtgtcttacagggtg

SEQ ID NO: 4305773 - DNA, 25 bp, Homo sapien
tctatgtcagcaataatccctgcag

SEQ ID NO: 4305774 - DNA, 25 bp, Homo sapien
aaatggcattgcaactgaggacaat

SEQ ID NO: 4305775 - DNA, 25 bp, Homo sapien
tcagaactacctatatcaaatggca

SEQ ID NO: 4305776 - DNA, 25 bp, Homo sapien
gcctgggaataaagcgtacaatgta

SEQ ID NO: 4305777 - DNA, 25 bp, Homo sapien
aaaacaggtaattctggcaaggcaa

SEQ ID NO: 4305778 - DNA, 25 bp, Homo sapien
cagtaggtagggctggaataacctc

SEQ ID NO: 4305779 - DNA, 25 bp, Homo sapien
caaatggacaatccccaaagatgcc

SEQ ID NO: 4305780 - DNA, 25 bp, Homo sapien
ggtatccaaactcctgtgcttaatg

SEQ ID NO: 4305781 - DNA, 25 bp, Homo sapien
taatctgcgctgattcctaccagct

SEQ ID NO: 4305782 - DNA, 25 bp, Homo sapien
tgcagcagtacaggatcaacagagc

SEQ ID NO: 4305783 - DNA, 25 bp, Homo sapien
ttcctaccagctgtaggtaccaggc

SEQ ID NO: 4305784 - DNA, 25 bp, Homo sapien
gctgcagcagtacaggatcaacaga

SEQ ID NO: 4305785 - DNA, 25 bp, Homo sapien
acagccaccagcaatccagcaggga

SEQ ID NO: 4305786 - DNA, 25 bp, Homo sapien
gacagccaccagcaatccagcaggg

SEQ ID NO: 4305787 - DNA, 25 bp, Homo sapien
gcagggacgaggcgcccgaggacct

SEQ ID NO: 4305788 - DNA, 25 bp, Homo sapien
ccagcagggacgaggcgcccgagga

SEQ ID NO: 4305789 - DNA, 25 bp, Homo sapien
gtctcagtctgcaaattatctaacg

SEQ ID NO: 4305790 - DNA, 25 bp, Homo sapien
ccatgactcgcccatcttttagatg

SEQ ID NO: 4305791 - DNA, 25 bp, Homo sapien
gggccttatcaccaaggctgtctgt

SEQ ID NO: 4305792 - DNA, 25 bp, Homo sapien
tgagctggttacacaaggctggacc

SEQ ID NO: 4305793 - DNA, 25 bp, Homo sapien
tgcatcctggttcataaggaaacca

SEQ ID NO: 4305794 - DNA, 25 bp, Homo sapien
tctgcttgtaagagagaccttcact

SEQ ID NO: 4305795 - DNA, 25 bp, Homo sapien
cgcacaatgggccttaccggttatg

SEQ ID NO: 4305796 - DNA, 25 bp, Homo sapien
tattaggacttgcagaaatgaacag

SEQ ID NO: 4305797 - DNA, 25 bp, Homo sapien
ggtagcatgagccttctagtctcag

SEQ ID NO: 4305798 - DNA, 25 bp, Homo sapien
tgttgcaactgttcatagcttcctg

SEQ ID NO: 4305799 - DNA, 25 bp, Homo sapien
aaatccatgggagaaggccgcttca

SEQ ID NO: 4305800 - DNA, 25 bp, Homo sapien
gaggttcacttgtggcacttcatac

SEQ ID NO: 4305801 - DNA, 25 bp, Homo sapien
ccgcgcccaccgcagtccagcgagt

SEQ ID NO: 4305802 - DNA, 25 bp, Homo sapien
aaggagaaggcaaggcgagcggcgc

SEQ ID NO: 4305803 - DNA, 25 bp, Homo sapien
caggtccccgggcaacgcagccagc

SEQ ID NO: 4305804 - DNA, 25 bp, Homo sapien
cagcgagtccccagcgcaagtgcag

SEQ ID NO: 4305805 - DNA, 25 bp, Homo sapien
ctgtgaggacccgaacggccgcaga

SEQ ID NO: 4305806 - DNA, 25 bp, Homo sapien
gtctggagcgcgctgcgaactccgg

SEQ ID NO: 4305807 - DNA, 25 bp, Homo sapien
gcgcgctgcgaactccgggcgcggg

SEQ ID NO: 4305808 - DNA, 25 bp, Homo sapien
ggggcgctccgctcggctctagact

SEQ ID NO: 4305809 - DNA, 25 bp, Homo sapien
ttcctctgggctcggagcgcaaagc

SEQ ID NO: 4305810 - DNA, 25 bp, Homo sapien
ggtgtacccagcctgcgctcttcgt

SEQ ID NO: 4305811 - DNA, 25 bp, Homo sapien
cgccgattcgggcaaggtgtaccca

SEQ ID NO: 4305812 - DNA, 25 bp, Homo sapien
agtgctgccgctgcgcctggaagac

SEQ ID NO: 4305813 - DNA, 25 bp, Homo sapien
cctccatgatttggcctcaacttgc

SEQ ID NO: 4305814 - DNA, 25 bp, Homo sapien
gcttctttagtgctacatccatggc

SEQ ID NO: 4305815 - DNA, 25 bp, Homo sapien
catggccctccatgatttggcctca

SEQ ID NO: 4305816 - DNA, 25 bp, Homo sapien
ctaaaggatcaaagactgcttcttt

SEQ ID NO: 4305817 - DNA, 25 bp, Homo sapien
gctcctctgtatcaggaaaagccat

SEQ ID NO: 4305818 - DNA, 25 bp, Homo sapien
cccggtgttagtgggaagcaatagc

SEQ ID NO: 4305819 - DNA, 25 bp, Homo sapien
aactgatgagcgcagtttctctggc

SEQ ID NO: 4305820 - DNA, 25 bp, Homo sapien
gacaactcagtaaccaacgctccat

SEQ ID NO: 4305821 - DNA, 25 bp, Homo sapien
tggtgcggagccagtcttcagcagc

SEQ ID NO: 4305822 - DNA, 25 bp, Homo sapien
tctgtcctttcacggcatggtcagg

SEQ ID NO: 4305823 - DNA, 25 bp, Homo sapien
cagctctgtcctttcacggcatggt

SEQ ID NO: 4305824 - DNA, 25 bp, Homo sapien
ggccagccgccctcttaatgctgtt

SEQ ID NO: 4305825 - DNA, 25 bp, Homo sapien
cagccgccctcttaatgctgttctt

SEQ ID NO: 4305826 - DNA, 25 bp, Homo sapien
tacatgtattgccagagtctaagct

SEQ ID NO: 4305827 - DNA, 25 bp, Homo sapien
taagctgtgcaaaaagggatgtcct

SEQ ID NO: 4305828 - DNA, 25 bp, Homo sapien
aatagccaagcctagattttttcct

SEQ ID NO: 4305829 - DNA, 25 bp, Homo sapien
attgttgggtcctagcaattagcca

SEQ ID NO: 4305830 - DNA, 25 bp, Homo sapien
ttttaaattctgtcacttggtttgc

SEQ ID NO: 4305831 - DNA, 25 bp, Homo sapien
gtggtttcctagctgtttcaacgcc

SEQ ID NO: 4305832 - DNA, 25 bp, Homo sapien
ttctgtcacttggtttgccaactgt

SEQ ID NO: 4305833 - DNA, 25 bp, Homo sapien
aaattctgtcacttggtttgccaac

SEQ ID NO: 4305834 - DNA, 25 bp, Homo sapien
gctggcttttaaggcgagtttgaaa

SEQ ID NO: 4305835 - DNA, 25 bp, Homo sapien
gctgggagccggcttcccgctctcc

SEQ ID NO: 4305836 - DNA, 25 bp, Homo sapien
cgtaaagctgggagccggcttcccg

SEQ ID NO: 4305837 - DNA, 25 bp, Homo sapien
aaagctgggagccggcttcccgctc

SEQ ID NO: 4305838 - DNA, 25 bp, Homo sapien
cgtatgctgtctgcttgtgcgccaa

SEQ ID NO: 4305839 - DNA, 25 bp, Homo sapien
ttacaaaacccgtgaagaccatcca

SEQ ID NO: 4305840 - DNA, 25 bp, Homo sapien
tgtgcgccaagaaggactgaagtat

SEQ ID NO: 4305841 - DNA, 25 bp, Homo sapien
ctgaagtatggctaagagtgtatta

SEQ ID NO: 4305842 - DNA, 25 bp, Homo sapien
ttatatcccaaggaaagatttgatg

SEQ ID NO: 4305843 - DNA, 25 bp, Homo sapien
tcccaaggaaagatttgatgttgca

SEQ ID NO: 4305844 - DNA, 25 bp, Homo sapien
tatcccaaggaaagatttgatgttg

SEQ ID NO: 4305845 - DNA, 25 bp, Homo sapien
cccaaggaaagatttgatgttgcaa

SEQ ID NO: 4305846 - DNA, 25 bp, Homo sapien
gacaaaaacttcttctgaagccgag

SEQ ID NO: 4305847 - DNA, 25 bp, Homo sapien
ccaatctgtccgggtctgggctgga

SEQ ID NO: 4305848 - DNA, 25 bp, Homo sapien
gcctggaactgatgggggccaatct

SEQ ID NO: 4305849 - DNA, 25 bp, Homo sapien
gaggacacgggaacgctttcagcgt

SEQ ID NO: 4305850 - DNA, 25 bp, Homo sapien
tgggggacacctttccaaggatgga

SEQ ID NO: 4305851 - DNA, 25 bp, Homo sapien
atggactccctcagcctttggcatg

SEQ ID NO: 4305852 - DNA, 25 bp, Homo sapien
cctgggggacacctttccaaggatg

SEQ ID NO: 4305853 - DNA, 25 bp, Homo sapien
gatggactccctcagcctttggcat

SEQ ID NO: 4305854 - DNA, 25 bp, Homo sapien
catctaaatattcccagatgctgta

SEQ ID NO: 4305855 - DNA, 25 bp, Homo sapien
ggaagcctctcacaacaatccgact

SEQ ID NO: 4305856 - DNA, 25 bp, Homo sapien
aatccgactccagcagggagagtca

SEQ ID NO: 4305857 - DNA, 25 bp, Homo sapien
agagtcagcccaacacgtcttgcat

SEQ ID NO: 4305858 - DNA, 25 bp, Homo sapien
gatctgcatagactgtctccagaag

SEQ ID NO: 4305859 - DNA, 25 bp, Homo sapien
aatccagaacaactcggtgacattg

SEQ ID NO: 4305860 - DNA, 25 bp, Homo sapien
gcttggatctgcatagactgtctcc

SEQ ID NO: 4305861 - DNA, 25 bp, Homo sapien
tctgcttggatctgcatagactgtc

SEQ ID NO: 4305862 - DNA, 25 bp, Homo sapien
atgaagatgatcctgattcctttac

SEQ ID NO: 4305863 - DNA, 25 bp, Homo sapien
gggatgaagtgacactgaggatagg

SEQ ID NO: 4305864 - DNA, 25 bp, Homo sapien
tagaaaacagaaggtacccacagaa

SEQ ID NO: 4305865 - DNA, 25 bp, Homo sapien
aatttatgaagatgatcctgattcc

SEQ ID NO: 4305866 - DNA, 25 bp, Homo sapien
gaaagagaagaggcactgatatatg

SEQ ID NO: 4305867 - DNA, 25 bp, Homo sapien
agatgatattgtagacaccaaagga

SEQ ID NO: 4305868 - DNA, 25 bp, Homo sapien
aggcactgatatatgttctccaggc

SEQ ID NO: 4305869 - DNA, 25 bp, Homo sapien
gaaagatgatattgtagacaccaaa

SEQ ID NO: 4305870 - DNA, 25 bp, Homo sapien
caaagtataaagaaagaggatgcac

SEQ ID NO: 4305871 - DNA, 25 bp, Homo sapien
taaagcccagacaccaaaactagac

SEQ ID NO: 4305872 - DNA, 25 bp, Homo sapien
tgattcagcagttagaaagtcttct

SEQ ID NO: 4305873 - DNA, 25 bp, Homo sapien
ataggcttgaggctagtcgtctgag

SEQ ID NO: 4305874 - DNA, 25 bp, Homo sapien
tgatgtggtcaacttttgcttgagt

SEQ ID NO: 4305875 - DNA, 25 bp, Homo sapien
gggttgatgtggtcaacttttgctt

SEQ ID NO: 4305876 - DNA, 25 bp, Homo sapien
cttgagttagccagagaaggtgcat

SEQ ID NO: 4305877 - DNA, 25 bp, Homo sapien
ttgcttgagttagccagagaaggtg

SEQ ID NO: 4305878 - DNA, 25 bp, Homo sapien
cgaacctggaatgatggtactgaca

SEQ ID NO: 4305879 - DNA, 25 bp, Homo sapien
gactgtgacgaacctggaatgatgg

SEQ ID NO: 4305880 - DNA, 25 bp, Homo sapien
ggtactgacactgtaaatatctcat

SEQ ID NO: 4305881 - DNA, 25 bp, Homo sapien
tggatattaaatggactgtgacgaa

SEQ ID NO: 4305882 - DNA, 25 bp, Homo sapien
gacatccccttgatcttgatgtcac

SEQ ID NO: 4305883 - DNA, 25 bp, Homo sapien
gtaattttcaccatctgctccgaca

SEQ ID NO: 4305884 - DNA, 25 bp, Homo sapien
ttgatgtcacattggaagagaactg

SEQ ID NO: 4305885 - DNA, 25 bp, Homo sapien
ggaagagaactgataaatcagtgcc

SEQ ID NO: 4305886 - DNA, 25 bp, Homo sapien
tgaaggaatcattgcgcaaagtgat

SEQ ID NO: 4305887 - DNA, 25 bp, Homo sapien
tgataggtttccaaaacacgaatga

SEQ ID NO: 4305888 - DNA, 25 bp, Homo sapien
ctctatgaaggaatcattgcgcaaa

SEQ ID NO: 4305889 - DNA, 25 bp, Homo sapien
tgcgcaaagtgatttgataggtttc

SEQ ID NO: 4305890 - DNA, 25 bp, Homo sapien
ctctgcctttaaatattctcttcat

SEQ ID NO: 4305891 - DNA, 25 bp, Homo sapien
cactctgcctttaaatattctcttc

SEQ ID NO: 4305892 - DNA, 25 bp, Homo sapien
actctgcctttaaatattctcttca

SEQ ID NO: 4305893 - DNA, 25 bp, Homo sapien
gctgtgcacattgtcggctctcgcc

SEQ ID NO: 4305894 - DNA, 25 bp, Homo sapien
gtgctgtgcacattgtcggctctcg

SEQ ID NO: 4305895 - DNA, 25 bp, Homo sapien
tctcgcccccgcgtctgcgtctgct

SEQ ID NO: 4305896 - DNA, 25 bp, Homo sapien
gtgtgctgtgcacattgtcggctct

SEQ ID NO: 4305897 - DNA, 25 bp, Homo sapien
cagttcttggatgagagacacactc

SEQ ID NO: 4305898 - DNA, 25 bp, Homo sapien
tcattccaaagcaatccgagaaagt

SEQ ID NO: 4305899 - DNA, 25 bp, Homo sapien
ccgagaaagttcttctcagccacaa

SEQ ID NO: 4305900 - DNA, 25 bp, Homo sapien
tggcaccagcaagtgtacaaagcac

SEQ ID NO: 4305901 - DNA, 25 bp, Homo sapien
gacaatagaccagatgagctctgac

SEQ ID NO: 4305902 - DNA, 25 bp, Homo sapien
tggaggtagcgaatctgattccagt

SEQ ID NO: 4305903 - DNA, 25 bp, Homo sapien
tttccatgagataaccgacaataga

SEQ ID NO: 4305904 - DNA, 25 bp, Homo sapien
gagataaccgacaatagaccagatg

SEQ ID NO: 4305905 - DNA, 25 bp, Homo sapien
gtggttacagatctcaaaatgccca

SEQ ID NO: 4305906 - DNA, 25 bp, Homo sapien
ttgtggttacagatctcaaaatgcc

SEQ ID NO: 4305907 - DNA, 25 bp, Homo sapien
ggttacagatctcaaaatgcccata

SEQ ID NO: 4305908 - DNA, 25 bp, Homo sapien
tctcaaaatgcccataaacttgatt

SEQ ID NO: 4305909 - DNA, 25 bp, Homo sapien
gctgaacaatgctaacagaaatcat

SEQ ID NO: 4305910 - DNA, 25 bp, Homo sapien
caaatcctggcttgggatgctgaac

SEQ ID NO: 4305911 - DNA, 25 bp, Homo sapien
aaatcctggcttgggatgctgaaca

SEQ ID NO: 4305912 - DNA, 25 bp, Homo sapien
tgggatgctgaacaatgctaacaga

SEQ ID NO: 4305913 - DNA, 25 bp, Homo sapien
agatgaagtaatttgccgaaggtca

SEQ ID NO: 4305914 - DNA, 25 bp, Homo sapien
gaaggtcacgcagttaattccacag

SEQ ID NO: 4305915 - DNA, 25 bp, Homo sapien
tgtatgttccataccgtttcactgt

SEQ ID NO: 4305916 - DNA, 25 bp, Homo sapien
ttatctaggattccgtacttccaaa

SEQ ID NO: 4305917 - DNA, 25 bp, Homo sapien
tagaacatatctgtactaggccatg

SEQ ID NO: 4305918 - DNA, 25 bp, Homo sapien
ggtgtggttgtcaggcttccctaaa

SEQ ID NO: 4305919 - DNA, 25 bp, Homo sapien
ttccctaaagtttcttcactgcact

SEQ ID NO: 4305920 - DNA, 25 bp, Homo sapien
tctaagcctcaatcataaccatttt

SEQ ID NO: 4305921 - DNA, 25 bp, Homo sapien
gcagactctttcaacaaggttgttt

SEQ ID NO: 4305922 - DNA, 25 bp, Homo sapien
tacagcaagcaaaccaaaggctttt

SEQ ID NO: 4305923 - DNA, 25 bp, Homo sapien
ggctttttagcattccaggtcatgc

SEQ ID NO: 4305924 - DNA, 25 bp, Homo sapien
caacgtgtgcgggattcaggagaat

SEQ ID NO: 4305925 - DNA, 25 bp, Homo sapien
tctgttgccagacacgccagttgtt

SEQ ID NO: 4305926 - DNA, 25 bp, Homo sapien
tgcttaagcctaccctgaaaatgac

SEQ ID NO: 4305927 - DNA, 25 bp, Homo sapien
ttgcttgcggtgacaaacatgagac

SEQ ID NO: 4305928 - DNA, 25 bp, Homo sapien
gagaccaaatctccttgccgaggtg

SEQ ID NO: 4305929 - DNA, 25 bp, Homo sapien
gtgtctggagttccgagctaaggaa

SEQ ID NO: 4305930 - DNA, 25 bp, Homo sapien
tgtgtctggagttccgagctaagga

SEQ ID NO: 4305931 - DNA, 25 bp, Homo sapien
gaaataatttggttacaccaattca

SEQ ID NO: 4305932 - DNA, 25 bp, Homo sapien
tttgcaaggaaaatccgcaaaataa

SEQ ID NO: 4305933 - DNA, 25 bp, Homo sapien
atttgcaaggaaaatccgcaaaata

SEQ ID NO: 4305934 - DNA, 25 bp, Homo sapien
attcagaaataatttggttacacca

SEQ ID NO: 4305935 - DNA, 25 bp, Homo sapien
gcaaatcaatactcgccatggcaga

SEQ ID NO: 4305936 - DNA, 25 bp, Homo sapien
gaaggctctggctgcgcaaatcaat

SEQ ID NO: 4305937 - DNA, 25 bp, Homo sapien
catacgaagaccaaagagagagaca

SEQ ID NO: 4305938 - DNA, 25 bp, Homo sapien
gctggcatattttgctgatcatgca

SEQ ID NO: 4305939 - DNA, 25 bp, Homo sapien
atccatctagatgttgccgtgaagg

SEQ ID NO: 4305940 - DNA, 25 bp, Homo sapien
gctgttcggtcaaacatccatctag

SEQ ID NO: 4305941 - DNA, 25 bp, Homo sapien
ggttaacctcatgtgtcaacttggc

SEQ ID NO: 4305942 - DNA, 25 bp, Homo sapien
aactaccatccataatgtaagtggg

SEQ ID NO: 4305943 - DNA, 25 bp, Homo sapien
agcctgcgtggctaacatgacggag

SEQ ID NO: 4305944 - DNA, 25 bp, Homo sapien
tgtaccattcccttgcatgcagctg

SEQ ID NO: 4305945 - DNA, 25 bp, Homo sapien
gaacagccatcacatcatgagttgg

SEQ ID NO: 4305946 - DNA, 25 bp, Homo sapien
tctgtggcccataagagcctgcgtg

SEQ ID NO: 4305947 - DNA, 25 bp, Homo sapien
taatgactctaattcaactgcctcg

SEQ ID NO: 4305948 - DNA, 25 bp, Homo sapien
cttgctgttgatcgggagcgctgcc

SEQ ID NO: 4305949 - DNA, 25 bp, Homo sapien
cccgatgcggataaagggctgtttc

SEQ ID NO: 4305950 - DNA, 25 bp, Homo sapien
ctctttggaatgcccggctgccttt

SEQ ID NO: 4305951 - DNA, 25 bp, Homo sapien
tcatgcaatattatacctaggtaac

SEQ ID NO: 4305952 - DNA, 25 bp, Homo sapien
aaaaacttgtctactgggtactatg

SEQ ID NO: 4305953 - DNA, 25 bp, Homo sapien
tatgttcactatctgagtgacccaa

SEQ ID NO: 4305954 - DNA, 25 bp, Homo sapien
tacaggtgtctattgacaggagaga

SEQ ID NO: 4305955 - DNA, 25 bp, Homo sapien
ttaaacttccaagtccagtgtgttc

SEQ ID NO: 4305956 - DNA, 25 bp, Homo sapien
aaacttccaagtccagtgtgttctt

SEQ ID NO: 4305957 - DNA, 25 bp, Homo sapien
taaacttccaagtccagtgtgttct

SEQ ID NO: 4305958 - DNA, 25 bp, Homo sapien
aaattccatcatatggcagagtctg

SEQ ID NO: 4305959 - DNA, 25 bp, Homo sapien
ggaagactccccctcagtgtgggta

SEQ ID NO: 4305960 - DNA, 25 bp, Homo sapien
tgatataatataaaatcccttccaa

SEQ ID NO: 4305961 - DNA, 25 bp, Homo sapien
ggcaccatccaatcaaaacaactag

SEQ ID NO: 4305962 - DNA, 25 bp, Homo sapien
catgagcgatctttcagattttcct

SEQ ID NO: 4305963 - DNA, 25 bp, Homo sapien
cttgtgaatgccatgagcgatcttt

SEQ ID NO: 4305964 - DNA, 25 bp, Homo sapien
aatgccatgagcgatctttcagatt

SEQ ID NO: 4305965 - DNA, 25 bp, Homo sapien
tgaatgccatgagcgatctttcaga

SEQ ID NO: 4305966 - DNA, 25 bp, Homo sapien
ttcaatgctcagacaggaagccgta

SEQ ID NO: 4305967 - DNA, 25 bp, Homo sapien
agggacttggcacaaaggaacctgg

SEQ ID NO: 4305968 - DNA, 25 bp, Homo sapien
caggtggaatacttagatctacgac

SEQ ID NO: 4305969 - DNA, 25 bp, Homo sapien
gcttgttgagaactcttggctaggg

SEQ ID NO: 4305970 - DNA, 25 bp, Homo sapien
ataagacccaaatccatgccactga

SEQ ID NO: 4305971 - DNA, 25 bp, Homo sapien
tgagcttgagacaggcacccctggt

SEQ ID NO: 4305972 - DNA, 25 bp, Homo sapien
ttcctgagcttgagacaggcacccc

SEQ ID NO: 4305973 - DNA, 25 bp, Homo sapien
tttcaactctgtttgcacgtctctg

SEQ ID NO: 4305974 - DNA, 25 bp, Homo sapien
tgctgtattattcaacgctttagta

SEQ ID NO: 4305975 - DNA, 25 bp, Homo sapien
gattcagtattttcaggatttggaa

SEQ ID NO: 4305976 - DNA, 25 bp, Homo sapien
ttcaacgctttagtaaatgatgaat

SEQ ID NO: 4305977 - DNA, 25 bp, Homo sapien
gctgctggttcttaggtctgctgta

SEQ ID NO: 4305978 - DNA, 25 bp, Homo sapien
aaactcttcagggatctctgaaaag

SEQ ID NO: 4305979 - DNA, 25 bp, Homo sapien
ctcttcagggatctctgaaaaggct

SEQ ID NO: 4305980 - DNA, 25 bp, Homo sapien
ctacaaactcttcagggatctctga

SEQ ID NO: 4305981 - DNA, 25 bp, Homo sapien
ttcagggatctctgaaaaggcttga

SEQ ID NO: 4305982 - DNA, 25 bp, Homo sapien
ataccagtgcctggacttggaaaga

SEQ ID NO: 4305983 - DNA, 25 bp, Homo sapien
tgccacataccagtgcctggacttg

SEQ ID NO: 4305984 - DNA, 25 bp, Homo sapien
actgccacataccagtgcctggact

SEQ ID NO: 4305985 - DNA, 25 bp, Homo sapien
tggaaagagtttccctggtctgttc

SEQ ID NO: 4305986 - DNA, 25 bp, Homo sapien
gcatagtgggtcaggcttgctctgc

SEQ ID NO: 4305987 - DNA, 25 bp, Homo sapien
tagtctcagggtagaactaattcta

SEQ ID NO: 4305988 - DNA, 25 bp, Homo sapien
tgctctgcactagtctcagggtaga

SEQ ID NO: 4305989 - DNA, 25 bp, Homo sapien
tacagccctctattgttctagagag

SEQ ID NO: 4305990 - DNA, 25 bp, Homo sapien
tgacgctaacgcctggctgctctca

SEQ ID NO: 4305991 - DNA, 25 bp, Homo sapien
gacagctgtggttgacgctaacgcc

SEQ ID NO: 4305992 - DNA, 25 bp, Homo sapien
tgtggttgacgctaacgcctggctg

SEQ ID NO: 4305993 - DNA, 25 bp, Homo sapien
ctgtcctggacagctgtggttgacg

SEQ ID NO: 4305994 - DNA, 25 bp, Homo sapien
actccgaggagatgtctggtcggat

SEQ ID NO: 4305995 - DNA, 25 bp, Homo sapien
agctgaaacagcccgcgagcttcat

SEQ ID NO: 4305996 - DNA, 25 bp, Homo sapien
aagctctgagatggcgcctgtcttt

SEQ ID NO: 4305997 - DNA, 25 bp, Homo sapien
cccgcaggaagaggtttcagctgaa

SEQ ID NO: 4305998 - DNA, 25 bp, Homo sapien
cagaattgatttgcagaagtgaagt

SEQ ID NO: 4305999 - DNA, 25 bp, Homo sapien
catttatctagccaatgcagaagtt

SEQ ID NO: 4306000 - DNA, 25 bp, Homo sapien
cagccccaaccagtactgaacaggg

SEQ ID NO: 4306001 - DNA, 25 bp, Homo sapien
gctctggtcaatttcacagccccaa

SEQ ID NO: 4306002 - DNA, 25 bp, Homo sapien
catatagtgactaaagagccagggc

SEQ ID NO: 4306003 - DNA, 25 bp, Homo sapien
ccaggcaccccgttagatgttagaa

SEQ ID NO: 4306004 - DNA, 25 bp, Homo sapien
gagttgaagatcctaagcagccgct

SEQ ID NO: 4306005 - DNA, 25 bp, Homo sapien
ttcagtaatcatccctggctccggg

SEQ ID NO: 4306006 - DNA, 25 bp, Homo sapien
cacgcagagcttgatttcataccgg

SEQ ID NO: 4306007 - DNA, 25 bp, Homo sapien
ttgcatttttggacaacagccctcc

SEQ ID NO: 4306008 - DNA, 25 bp, Homo sapien
agctctcacgcagagcttgatttca

SEQ ID NO: 4306009 - DNA, 25 bp, Homo sapien
catttttggacaacagccctcctgt

SEQ ID NO: 4306010 - DNA, 25 bp, Homo sapien
agcccctcagaatgacagttctcct

SEQ ID NO: 4306011 - DNA, 25 bp, Homo sapien
aaattcgcacttgaagagctttccc

SEQ ID NO: 4306012 - DNA, 25 bp, Homo sapien
tggggaaattcgcacttgaagagct

SEQ ID NO: 4306013 - DNA, 25 bp, Homo sapien
ctggcaggaagtttacggaagaaga

SEQ ID NO: 4306014 - DNA, 25 bp, Homo sapien
cagcgccaggaattcggaggctagg

SEQ ID NO: 4306015 - DNA, 25 bp, Homo sapien
atgtgctcgcgtcgtggccaatcag

SEQ ID NO: 4306016 - DNA, 25 bp, Homo sapien
caaactacatttcccgacacgcatg

SEQ ID NO: 4306017 - DNA, 25 bp, Homo sapien
tccatccgaatcagccaataggaat

SEQ ID NO: 4306018 - DNA, 25 bp, Homo sapien
ccacgaggtcgtgcgtatatccaca

SEQ ID NO: 4306019 - DNA, 25 bp, Homo sapien
tttgaacttgttccgccgatcgcgc

SEQ ID NO: 4306020 - DNA, 25 bp, Homo sapien
gtctcccagatccttaactcgcggt

SEQ ID NO: 4306021 - DNA, 25 bp, Homo sapien
ctctcctgggctgcgagcgcgtttc

SEQ ID NO: 4306022 - DNA, 25 bp, Homo sapien
aaaaatcccgcgatgccgtaactgg

SEQ ID NO: 4306023 - DNA, 25 bp, Homo sapien
taactggctcggcacttcttgtagt

SEQ ID NO: 4306024 - DNA, 25 bp, Homo sapien
tcttccccaacaccgaatgggattc

SEQ ID NO: 4306025 - DNA, 25 bp, Homo sapien
ttctcctcctagatttaagtaagtc

SEQ ID NO: 4306026 - DNA, 25 bp, Homo sapien
tatttgtcacacattgaaaactgga

SEQ ID NO: 4306027 - DNA, 25 bp, Homo sapien
caagctgattttattggtcatgaga

SEQ ID NO: 4306028 - DNA, 25 bp, Homo sapien
tggaattcaatgttcagtgctcagg

SEQ ID NO: 4306029 - DNA, 25 bp, Homo sapien
gaatcagattccctatgtaaagcag

SEQ ID NO: 4306030 - DNA, 25 bp, Homo sapien
gatgtcccaatggtcttagtcatga

SEQ ID NO: 4306031 - DNA, 25 bp, Homo sapien
gactgcagatgtcccaatggtctta

SEQ ID NO: 4306032 - DNA, 25 bp, Homo sapien
cttctttgactgcagatgtcccaat

SEQ ID NO: 4306033 - DNA, 25 bp, Homo sapien
gtcttagtcatgacgaaactgcccc

SEQ ID NO: 4306034 - DNA, 25 bp, Homo sapien
tagttggatacatttagcagcagga

SEQ ID NO: 4306035 - DNA, 25 bp, Homo sapien
tgatgaatccaactaccgaagtggt

SEQ ID NO: 4306036 - DNA, 25 bp, Homo sapien
agcctgtttccaccataaatgcgga

SEQ ID NO: 4306037 - DNA, 25 bp, Homo sapien
gaaacatccttaattgctaccagtg

SEQ ID NO: 4306038 - DNA, 25 bp, Homo sapien
tcccatcttacttatcacataggaa

SEQ ID NO: 4306039 - DNA, 25 bp, Homo sapien
cagttccaatatagctccccgttga

SEQ ID NO: 4306040 - DNA, 25 bp, Homo sapien
gccatatattgcaacttccagaaaa

SEQ ID NO: 4306041 - DNA, 25 bp, Homo sapien
aagcaacagccttgatagagttgat

SEQ ID NO: 4306042 - DNA, 25 bp, Homo sapien
gcacattttgcgcttctcccagaca

SEQ ID NO: 4306043 - DNA, 25 bp, Homo sapien
tttggaaacaggcagcatagttctc

SEQ ID NO: 4306044 - DNA, 25 bp, Homo sapien
tcctggttctgcagatctggcttca

SEQ ID NO: 4306045 - DNA, 25 bp, Homo sapien
gattcaatccagagctcatagaact

SEQ ID NO: 4306046 - DNA, 25 bp, Homo sapien
tctttgtacccattgtcttcagata

SEQ ID NO: 4306047 - DNA, 25 bp, Homo sapien
tttgtacccattgtcttcagatata

SEQ ID NO: 4306048 - DNA, 25 bp, Homo sapien
cctttctttgtacccattgtcttca

SEQ ID NO: 4306049 - DNA, 25 bp, Homo sapien
ttctttgtacccattgtcttcagat

SEQ ID NO: 4306050 - DNA, 25 bp, Homo sapien
gaacccgaggatgtgagaaaccgct

SEQ ID NO: 4306051 - DNA, 25 bp, Homo sapien
aaagaaatgatgagccactctgcgc

SEQ ID NO: 4306052 - DNA, 25 bp, Homo sapien
gaaaccgctgtgactcatggctaac

SEQ ID NO: 4306053 - DNA, 25 bp, Homo sapien
tgtttcagaacctaggacagcggca

SEQ ID NO: 4306054 - DNA, 25 bp, Homo sapien
tgtgttgcctcactgtggccctatg

SEQ ID NO: 4306055 - DNA, 25 bp, Homo sapien
tagatgtgttgcctcactgtggccc

SEQ ID NO: 4306056 - DNA, 25 bp, Homo sapien
tgttgcctcactgtggccctatgac

SEQ ID NO: 4306057 - DNA, 25 bp, Homo sapien
catagatgtgttgcctcactgtggc

SEQ ID NO: 4306058 - DNA, 25 bp, Homo sapien
ttccttcttctatggaaagccccat

SEQ ID NO: 4306059 - DNA, 25 bp, Homo sapien
ttatttccttcttctatggaaagcc

SEQ ID NO: 4306060 - DNA, 25 bp, Homo sapien
ctccttgacatgctggaaacccatt

SEQ ID NO: 4306061 - DNA, 25 bp, Homo sapien
cttgacatgctggaaacccattatt

SEQ ID NO: 4306062 - DNA, 25 bp, Homo sapien
caggtattccacaaacaggttaaca

SEQ ID NO: 4306063 - DNA, 25 bp, Homo sapien
ctgagtttcttcattagggactcct

SEQ ID NO: 4306064 - DNA, 25 bp, Homo sapien
ataacaggtattccacaaacaggtt

SEQ ID NO: 4306065 - DNA, 25 bp, Homo sapien
caaacaggttaacactgagtttctt

SEQ ID NO: 4306066 - DNA, 25 bp, Homo sapien
catctgggttattaccaagaacttt

SEQ ID NO: 4306067 - DNA, 25 bp, Homo sapien
tctgggttattaccaagaactttga

SEQ ID NO: 4306068 - DNA, 25 bp, Homo sapien
tgcatctgggttattaccaagaact

SEQ ID NO: 4306069 - DNA, 25 bp, Homo sapien
atgcatctgggttattaccaagaac

SEQ ID NO: 4306070 - DNA, 25 bp, Homo sapien
gtctttcaagtcagtgatcatactc

SEQ ID NO: 4306071 - DNA, 25 bp, Homo sapien
ctttcaagtcagtgatcatactcca

SEQ ID NO: 4306072 - DNA, 25 bp, Homo sapien
cgtctttcaagtcagtgatcatact

SEQ ID NO: 4306073 - DNA, 25 bp, Homo sapien
ttcaagtcagtgatcatactccaca

SEQ ID NO: 4306074 - DNA, 25 bp, Homo sapien
taaactatcggtggctggtttgcca

SEQ ID NO: 4306075 - DNA, 25 bp, Homo sapien
cactgtctacctggatcctgatggt

SEQ ID NO: 4306076 - DNA, 25 bp, Homo sapien
tccagggccatgtaatgatgtgctc

SEQ ID NO: 4306077 - DNA, 25 bp, Homo sapien
cagcagcttgagtcccaggttggga

SEQ ID NO: 4306078 - DNA, 25 bp, Homo sapien
caaggacaaaaaccaaacgctgcat

SEQ ID NO: 4306079 - DNA, 25 bp, Homo sapien
gcaaggacaaaaaccaaacgctgca

SEQ ID NO: 4306080 - DNA, 25 bp, Homo sapien
ggacaaaaaccaaacgctgcatgtt

SEQ ID NO: 4306081 - DNA, 25 bp, Homo sapien
ccaacctaaatgtctaacaacgata

SEQ ID NO: 4306082 - DNA, 25 bp, Homo sapien
acaggaagcgtgttctagtgtccag

SEQ ID NO: 4306083 - DNA, 25 bp, Homo sapien
gataaagaattcacagccacgggct

SEQ ID NO: 4306084 - DNA, 25 bp, Homo sapien
tgctggctcagccaacggcttcatt

SEQ ID NO: 4306085 - DNA, 25 bp, Homo sapien
cgtactcccttgaagcttgcacctg

SEQ ID NO: 4306086 - DNA, 25 bp, Homo sapien
agtagacatgggcaataatgttggg

SEQ ID NO: 4306087 - DNA, 25 bp, Homo sapien
actgtgtaacgtgcctcaaatgtga

SEQ ID NO: 4306088 - DNA, 25 bp, Homo sapien
caaatgtgatcttctgtaccgcctc

SEQ ID NO: 4306089 - DNA, 25 bp, Homo sapien
gtgaggtgacatcccgttattaagt

SEQ ID NO: 4306090 - DNA, 25 bp, Homo sapien
cacgtcatctatgaaggtgctgagc

SEQ ID NO: 4306091 - DNA, 25 bp, Homo sapien
gagtgaatatttcggcatgccctgg

SEQ ID NO: 4306092 - DNA, 25 bp, Homo sapien
cagttcagtcacaacattagtggca

SEQ ID NO: 4306093 - DNA, 25 bp, Homo sapien
caaaaccataggcatcaggagacac

SEQ ID NO: 4306094 - DNA, 25 bp, Homo sapien
caacaggtattgatttggttcagtc

SEQ ID NO: 4306095 - DNA, 25 bp, Homo sapien
agtgtaattattgtagtaacagtct

SEQ ID NO: 4306096 - DNA, 25 bp, Homo sapien
cacgatgcctatgtttaagtgtaat

SEQ ID NO: 4306097 - DNA, 25 bp, Homo sapien
tcattcttccatgtccccatctgaa

SEQ ID NO: 4306098 - DNA, 25 bp, Homo sapien
gagaagggctctggttaattgagtc

SEQ ID NO: 4306099 - DNA, 25 bp, Homo sapien
tggaggagaagggctctggttaatt

SEQ ID NO: 4306100 - DNA, 25 bp, Homo sapien
gaggagaagggctctggttaattga

SEQ ID NO: 4306101 - DNA, 25 bp, Homo sapien
tttggaggagaagggctctggttaa

SEQ ID NO: 4306102 - DNA, 25 bp, Homo sapien
tcccattgttggtagacattggaca

SEQ ID NO: 4306103 - DNA, 25 bp, Homo sapien
tgtaaggtagcttgggaagagaacc

SEQ ID NO: 4306104 - DNA, 25 bp, Homo sapien
gaagttgagggacagtcagagccat

SEQ ID NO: 4306105 - DNA, 25 bp, Homo sapien
ggaaccagggccttaggcttgagca

SEQ ID NO: 4306106 - DNA, 25 bp, Homo sapien
gctttatctgaagctgatttagcct

SEQ ID NO: 4306107 - DNA, 25 bp, Homo sapien
tatctgaagctgatttagcctaact

SEQ ID NO: 4306108 - DNA, 25 bp, Homo sapien
ttatctgaagctgatttagcctaac

SEQ ID NO: 4306109 - DNA, 25 bp, Homo sapien
tctgaagctgatttagcctaactgg

SEQ ID NO: 4306110 - DNA, 25 bp, Homo sapien
ttataaggactcagggtccagctgc

SEQ ID NO: 4306111 - DNA, 25 bp, Homo sapien
ctcagggtccagctgctgaatgtag

SEQ ID NO: 4306112 - DNA, 25 bp, Homo sapien
cagggtccagctgctgaatgtagac

SEQ ID NO: 4306113 - DNA, 25 bp, Homo sapien
gggtccagctgctgaatgtagacaa

SEQ ID NO: 4306114 - DNA, 25 bp, Homo sapien
tttaggatagaacaccaatgaaaag

SEQ ID NO: 4306115 - DNA, 25 bp, Homo sapien
ctcaaagtttcaatatcatagcgac

SEQ ID NO: 4306116 - DNA, 25 bp, Homo sapien
agacagctgaaactgcaaaattagt

SEQ ID NO: 4306117 - DNA, 25 bp, Homo sapien
caggtaagtttaaatggatctattc

SEQ ID NO: 4306118 - DNA, 25 bp, Homo sapien
gaaagatacaccacagatactaaaa

SEQ ID NO: 4306119 - DNA, 25 bp, Homo sapien
tacaccacagatactaaaaatgcaa

SEQ ID NO: 4306120 - DNA, 25 bp, Homo sapien
ataggcataaataaacaataacagc

SEQ ID NO: 4306121 - DNA, 25 bp, Homo sapien
aaggagaaagatacaccacagatac

SEQ ID NO: 4306122 - DNA, 25 bp, Homo sapien
tggtgggcgacgttctcttggatac

SEQ ID NO: 4306123 - DNA, 25 bp, Homo sapien
attttggtgggcgacgttctcttgg

SEQ ID NO: 4306124 - DNA, 25 bp, Homo sapien
tcagattttggtgggcgacgttctc

SEQ ID NO: 4306125 - DNA, 25 bp, Homo sapien
gtgggcgacgttctcttggatacca

SEQ ID NO: 4306126 - DNA, 25 bp, Homo sapien
caagactcccgagtgaatgcctaaa

SEQ ID NO: 4306127 - DNA, 25 bp, Homo sapien
gatagagtcatgcagttgggaaaca

SEQ ID NO: 4306128 - DNA, 25 bp, Homo sapien
gtttacaactgtcaatgggtccata

SEQ ID NO: 4306129 - DNA, 25 bp, Homo sapien
gcaccaattggcaaggtcacctgtt

SEQ ID NO: 4306130 - DNA, 25 bp, Homo sapien
taatatgataaaagtgcctccagcc

SEQ ID NO: 4306131 - DNA, 25 bp, Homo sapien
gaattagatccctagaaaatggccc

SEQ ID NO: 4306132 - DNA, 25 bp, Homo sapien
ttatgccttgtgcaagtcccggagg

SEQ ID NO: 4306133 - DNA, 25 bp, Homo sapien
cataaggtgcctaggaattgctcct

SEQ ID NO: 4306134 - DNA, 25 bp, Homo sapien
tttgcttgaatgtcttagcagtgcc

SEQ ID NO: 4306135 - DNA, 25 bp, Homo sapien
tactcacggatttttcaaacatatg

SEQ ID NO: 4306136 - DNA, 25 bp, Homo sapien
caatttgatcttcagtgttgtctca

SEQ ID NO: 4306137 - DNA, 25 bp, Homo sapien
cattatgtaggattagatgcccacc

SEQ ID NO: 4306138 - DNA, 25 bp, Homo sapien
gttgttgagtatcttctgggcctct

SEQ ID NO: 4306139 - DNA, 25 bp, Homo sapien
aagtaatggggagtccgctgttgtt

SEQ ID NO: 4306140 - DNA, 25 bp, Homo sapien
cttctgggcctcttggacgttggtt

SEQ ID NO: 4306141 - DNA, 25 bp, Homo sapien
tcctccaggtcaatggctgaagtaa

SEQ ID NO: 4306142 - DNA, 25 bp, Homo sapien
tatctcaagctgtggtccagctaga

SEQ ID NO: 4306143 - DNA, 25 bp, Homo sapien
ttatgaagtttgcacaaggacacac

SEQ ID NO: 4306144 - DNA, 25 bp, Homo sapien
gaatgaaactagaggtggcgcctta

SEQ ID NO: 4306145 - DNA, 25 bp, Homo sapien
gatttaatgcggttttggcccacac

SEQ ID NO: 4306146 - DNA, 25 bp, Homo sapien
gatttgagaaaggaagttccgagaa

SEQ ID NO: 4306147 - DNA, 25 bp, Homo sapien
cagaagtcacttgtcttaaagccct

SEQ ID NO: 4306148 - DNA, 25 bp, Homo sapien
taaagccctctcagacgtcatcagg

SEQ ID NO: 4306149 - DNA, 25 bp, Homo sapien
gaatctgcccagctatgtccacaaa

SEQ ID NO: 4306150 - DNA, 25 bp, Homo sapien
agcctctgatggcaatctcttgact

SEQ ID NO: 4306151 - DNA, 25 bp, Homo sapien
atgaaatgggctgagcccttcaaaa

SEQ ID NO: 4306152 - DNA, 25 bp, Homo sapien
tcaaaacgggcaaagcagcctctga

SEQ ID NO: 4306153 - DNA, 25 bp, Homo sapien
tcattcaaaggtgtgcttggggact

SEQ ID NO: 4306154 - DNA, 25 bp, Homo sapien
gctttctggagtgttcctagctggg

SEQ ID NO: 4306155 - DNA, 25 bp, Homo sapien
tctctgtaattataaacgctgcatg

SEQ ID NO: 4306156 - DNA, 25 bp, Homo sapien
tggctttgcaccacagactcctgct

SEQ ID NO: 4306157 - DNA, 25 bp, Homo sapien
gctagtctgcttacctacttgaaaa

SEQ ID NO: 4306158 - DNA, 25 bp, Homo sapien
ggacccacagccttacttctaatag

SEQ ID NO: 4306159 - DNA, 25 bp, Homo sapien
gaccttatgggaatgagaaagaccc

SEQ ID NO: 4306160 - DNA, 25 bp, Homo sapien
ccttgagtatgatctggacccacag

SEQ ID NO: 4306161 - DNA, 25 bp, Homo sapien
taataactctctggagccaagcatc

SEQ ID NO: 4306162 - DNA, 25 bp, Homo sapien
atggacacaggagcaaaccagtctt

SEQ ID NO: 4306163 - DNA, 25 bp, Homo sapien
tgactgtggcaggtgttagatagca

SEQ ID NO: 4306164 - DNA, 25 bp, Homo sapien
ccagtctttggaccagaaggtaaat

SEQ ID NO: 4306165 - DNA, 25 bp, Homo sapien
ggtaatttgttaagtgctgataggt

SEQ ID NO: 4306166 - DNA, 25 bp, Homo sapien
cccaatatccgttagctagcagtac

SEQ ID NO: 4306167 - DNA, 25 bp, Homo sapien
gctggtacaatgaacttctggagca

SEQ ID NO: 4306168 - DNA, 25 bp, Homo sapien
gacttgcttactggatacctcccaa

SEQ ID NO: 4306169 - DNA, 25 bp, Homo sapien
gatgacttactgatgcttccctcgt

SEQ ID NO: 4306170 - DNA, 25 bp, Homo sapien
gacggagcagtttcccagaaaacca

SEQ ID NO: 4306171 - DNA, 25 bp, Homo sapien
tgaggactccaagctgttaccactt

SEQ ID NO: 4306172 - DNA, 25 bp, Homo sapien
caggctaacactggtggacagggcc

SEQ ID NO: 4306173 - DNA, 25 bp, Homo sapien
tagcagcttcaagtgccccagtcaa

SEQ ID NO: 4306174 - DNA, 25 bp, Homo sapien
ctgcccttgtcgttaactaccactt

SEQ ID NO: 4306175 - DNA, 25 bp, Homo sapien
gtcgttaactaccacttgcttcctc

SEQ ID NO: 4306176 - DNA, 25 bp, Homo sapien
ttgtcgttaactaccacttgcttcc

SEQ ID NO: 4306177 - DNA, 25 bp, Homo sapien
gcccttgtcgttaactaccacttgc

SEQ ID NO: 4306178 - DNA, 25 bp, Homo sapien
tccatgtggcctcagtcgagatact

SEQ ID NO: 4306179 - DNA, 25 bp, Homo sapien
tgcctaatacctagcaccgtgcttg

SEQ ID NO: 4306180 - DNA, 25 bp, Homo sapien
cattgagaatcagaggcaaaacttc

SEQ ID NO: 4306181 - DNA, 25 bp, Homo sapien
taacatttactgagccaaggactat

SEQ ID NO: 4306182 - DNA, 25 bp, Homo sapien
tcagtcatcaagtaagtcatcatcc

SEQ ID NO: 4306183 - DNA, 25 bp, Homo sapien
cagtcatcaagtaagtcatcatcca

SEQ ID NO: 4306184 - DNA, 25 bp, Homo sapien
tcatcaagtaagtcatcatccatac

SEQ ID NO: 4306185 - DNA, 25 bp, Homo sapien
gtcatcaagtaagtcatcatccata

SEQ ID NO: 4306186 - DNA, 25 bp, Homo sapien
attgttctgggcagagtgaatgcag

SEQ ID NO: 4306187 - DNA, 25 bp, Homo sapien
tgttctgggcagagtgaatgcagat

SEQ ID NO: 4306188 - DNA, 25 bp, Homo sapien
tctgggcagagtgaatgcagatccc

SEQ ID NO: 4306189 - DNA, 25 bp, Homo sapien
ggcagagtgaatgcagatccccagc

SEQ ID NO: 4306190 - DNA, 25 bp, Homo sapien
tggatttaggcattctctccgctgc

SEQ ID NO: 4306191 - DNA, 25 bp, Homo sapien
tttccaacgtgtgttctgtacggag

SEQ ID NO: 4306192 - DNA, 25 bp, Homo sapien
gatgtttttgtcagtgcatgcccct

SEQ ID NO: 4306193 - DNA, 25 bp, Homo sapien
cccttgcaaggtaagatggacctgt

SEQ ID NO: 4306194 - DNA, 25 bp, Homo sapien
atggcacagttgacgataccaccaa

SEQ ID NO: 4306195 - DNA, 25 bp, Homo sapien
tggcacagttgacgataccaccaaa

SEQ ID NO: 4306196 - DNA, 25 bp, Homo sapien
caagatgcaactcccgtgtttggat

SEQ ID NO: 4306197 - DNA, 25 bp, Homo sapien
tcccaagatgcaactcccgtgtttg

SEQ ID NO: 4306198 - DNA, 25 bp, Homo sapien
catcccaagatgcaactcccgtgtt

SEQ ID NO: 4306199 - DNA, 25 bp, Homo sapien
tgcaactcccgtgtttggatcatct

SEQ ID NO: 4306200 - DNA, 25 bp, Homo sapien
aaacaaagattatgtattttcccat

SEQ ID NO: 4306201 - DNA, 25 bp, Homo sapien
cagacagctgatcccaaggcaagtt

SEQ ID NO: 4306202 - DNA, 25 bp, Homo sapien
gctttttctaattctcgggtgagaa

SEQ ID NO: 4306203 - DNA, 25 bp, Homo sapien
ttgaagtgccagatacagggcccgg

SEQ ID NO: 4306204 - DNA, 25 bp, Homo sapien
gactctcccggaagatcccaagtgc

SEQ ID NO: 4306205 - DNA, 25 bp, Homo sapien
cacatgcagggcagttaggaatagc

SEQ ID NO: 4306206 - DNA, 25 bp, Homo sapien
aactacttacccttgttgcagcatg

SEQ ID NO: 4306207 - DNA, 25 bp, Homo sapien
tatttacaacaacaagcggtgagcc

SEQ ID NO: 4306208 - DNA, 25 bp, Homo sapien
tcaccagggatcgacaacatcttgc

SEQ ID NO: 4306209 - DNA, 25 bp, Homo sapien
gtgagtccacgatcctgcctgaaaa

SEQ ID NO: 4306210 - DNA, 25 bp, Homo sapien
cactggcagccaacgaaggaaaata

SEQ ID NO: 4306211 - DNA, 25 bp, Homo sapien
tgaaattatggcaagctgctcaggc

SEQ ID NO: 4306212 - DNA, 25 bp, Homo sapien
tctgaactgatagcatggaaacgac

SEQ ID NO: 4306213 - DNA, 25 bp, Homo sapien
tattcagggaaactttcggatgtga

SEQ ID NO: 4306214 - DNA, 25 bp, Homo sapien
gcttgcaattggctgaaaggaacca

SEQ ID NO: 4306215 - DNA, 25 bp, Homo sapien
tttcggatgtgagccgtgatgccca

SEQ ID NO: 4306216 - DNA, 25 bp, Homo sapien
tcatctgtgcttgcaattggctgaa

SEQ ID NO: 4306217 - DNA, 25 bp, Homo sapien
gtaaactacagtaggacctctcctc

SEQ ID NO: 4306218 - DNA, 25 bp, Homo sapien
tgggtaaactacagtaggacctctc

SEQ ID NO: 4306219 - DNA, 25 bp, Homo sapien
taaactacagtaggacctctcctcc

SEQ ID NO: 4306220 - DNA, 25 bp, Homo sapien
aactacagtaggacctctcctccat

SEQ ID NO: 4306221 - DNA, 25 bp, Homo sapien
gtggaacccaggaacagcccataca

SEQ ID NO: 4306222 - DNA, 25 bp, Homo sapien
atttcatgtggaacccaggaacagc

SEQ ID NO: 4306223 - DNA, 25 bp, Homo sapien
ttcatgtggaacccaggaacagccc

SEQ ID NO: 4306224 - DNA, 25 bp, Homo sapien
gaacccaggaacagcccatacagcc

SEQ ID NO: 4306225 - DNA, 25 bp, Homo sapien
atgtgcaggtctttttaggcaaaac

SEQ ID NO: 4306226 - DNA, 25 bp, Homo sapien
catgtgcaggtctttttaggcaaaa

SEQ ID NO: 4306227 - DNA, 25 bp, Homo sapien
ccatgtgcaggtctttttaggcaaa

SEQ ID NO: 4306228 - DNA, 25 bp, Homo sapien
tgtgcaggtctttttaggcaaaaca

SEQ ID NO: 4306229 - DNA, 25 bp, Homo sapien
cattagaagccaggttaactgactc

SEQ ID NO: 4306230 - DNA, 25 bp, Homo sapien
catgagtattctgaggaccaggata

SEQ ID NO: 4306231 - DNA, 25 bp, Homo sapien
gaacctgatgtgtagtgtttgccaa

SEQ ID NO: 4306232 - DNA, 25 bp, Homo sapien
caaccccgtcaatgaaagcatgagt

SEQ ID NO: 4306233 - DNA, 25 bp, Homo sapien
caatgtaatcatagatgaaggtcta

SEQ ID NO: 4306234 - DNA, 25 bp, Homo sapien
ttttgcgtgcccaacatcttcagca

SEQ ID NO: 4306235 - DNA, 25 bp, Homo sapien
tgaaggtctaaagtagaccttccca

SEQ ID NO: 4306236 - DNA, 25 bp, Homo sapien
taattataaccctgaaatgcatctc

SEQ ID NO: 4306237 - DNA, 25 bp, Homo sapien
actttgagtaagtgagggtcttctg

SEQ ID NO: 4306238 - DNA, 25 bp, Homo sapien
catcctcctgcacatcaggcgttat

SEQ ID NO: 4306239 - DNA, 25 bp, Homo sapien
caggcgttatttcactcttgacata

SEQ ID NO: 4306240 - DNA, 25 bp, Homo sapien
ttgagtaagtgagggtcttctggtc

SEQ ID NO: 4306241 - DNA, 25 bp, Homo sapien
cacatagggaggctggttactttgc

SEQ ID NO: 4306242 - DNA, 25 bp, Homo sapien
tccctttggatcctggctgagtctg

SEQ ID NO: 4306243 - DNA, 25 bp, Homo sapien
cagtggtacatgcttgggatagtcc

SEQ ID NO: 4306244 - DNA, 25 bp, Homo sapien
tctcagatgcttaagggccacatag

SEQ ID NO: 4306245 - DNA, 25 bp, Homo sapien
cccaccagtcaggaagagacggctg

SEQ ID NO: 4306246 - DNA, 25 bp, Homo sapien
actctaaatgagtagccggtgctta

SEQ ID NO: 4306247 - DNA, 25 bp, Homo sapien
tcacacacactagcaaaggtcggag

SEQ ID NO: 4306248 - DNA, 25 bp, Homo sapien
tattaaaacactccaagtatgctgc

SEQ ID NO: 4306249 - DNA, 25 bp, Homo sapien
tttctgagcgaatcttcaatttgtc

SEQ ID NO: 4306250 - DNA, 25 bp, Homo sapien
tgagcgaatcttcaatttgtctaag

SEQ ID NO: 4306251 - DNA, 25 bp, Homo sapien
gttttctgagcgaatcttcaatttg

SEQ ID NO: 4306252 - DNA, 25 bp, Homo sapien
tctgagcgaatcttcaatttgtcta

SEQ ID NO: 4306253 - DNA, 25 bp, Homo sapien
gaaaacgggtacaaggtcaacatca

SEQ ID NO: 4306254 - DNA, 25 bp, Homo sapien
taaagaatacactaacaggtcaggc

SEQ ID NO: 4306255 - DNA, 25 bp, Homo sapien
caagtgcagcgataaaggtataaac

SEQ ID NO: 4306256 - DNA, 25 bp, Homo sapien
gagtagcagtaccaccagtctttaa

SEQ ID NO: 4306257 - DNA, 25 bp, Homo sapien
tcactcatgatgccaacaaggtgtg

SEQ ID NO: 4306258 - DNA, 25 bp, Homo sapien
gtgtccagctccaacccttatttcc

SEQ ID NO: 4306259 - DNA, 25 bp, Homo sapien
cactcatgatgccaacaaggtgtga

SEQ ID NO: 4306260 - DNA, 25 bp, Homo sapien
ttttatgtgttcacctcgcttccgc

SEQ ID NO: 4306261 - DNA, 25 bp, Homo sapien
tatgtgttcacctcgcttccgctgc

SEQ ID NO: 4306262 - DNA, 25 bp, Homo sapien
ttttcttttatgtgttcacctcgct

SEQ ID NO: 4306263 - DNA, 25 bp, Homo sapien
tcttttatgtgttcacctcgcttcc

SEQ ID NO: 4306264 - DNA, 25 bp, Homo sapien
ttgaaacactctattatcacgatgt

SEQ ID NO: 4306265 - DNA, 25 bp, Homo sapien
cacagataacaaatgaaggttgtac

SEQ ID NO: 4306266 - DNA, 25 bp, Homo sapien
tcaaagttgattcaacatctccatc

SEQ ID NO: 4306267 - DNA, 25 bp, Homo sapien
tactgaaagatctgaccactgtcct

SEQ ID NO: 4306268 - DNA, 25 bp, Homo sapien
taaatcaagaggcggaaagaaagcg

SEQ ID NO: 4306269 - DNA, 25 bp, Homo sapien
cttataaatcaagaggcggaaagaa

SEQ ID NO: 4306270 - DNA, 25 bp, Homo sapien
acttataaatcaagaggcggaaaga

SEQ ID NO: 4306271 - DNA, 25 bp, Homo sapien
tataaatcaagaggcggaaagaaag

SEQ ID NO: 4306272 - DNA, 25 bp, Homo sapien
taaactgaaaaactcggaaggtgca

SEQ ID NO: 4306273 - DNA, 25 bp, Homo sapien
aaactcggaaggtgcattcagccac

SEQ ID NO: 4306274 - DNA, 25 bp, Homo sapien
gaaggtgcattcagccacctctgga

SEQ ID NO: 4306275 - DNA, 25 bp, Homo sapien
ccacctctggaattcttaggtagtt

SEQ ID NO: 4306276 - DNA, 25 bp, Homo sapien
tacagcaatgatagccaagacatgg

SEQ ID NO: 4306277 - DNA, 25 bp, Homo sapien
tgatgttagccctctacaagtcctt

SEQ ID NO: 4306278 - DNA, 25 bp, Homo sapien
taaatgggcagtcaactcactgatg

SEQ ID NO: 4306279 - DNA, 25 bp, Homo sapien
aatgctacctctcctgttggtaaag

SEQ ID NO: 4306280 - DNA, 25 bp, Homo sapien
aatcccgaccttctgcccacttcgg

SEQ ID NO: 4306281 - DNA, 25 bp, Homo sapien
gctggaggttagatgatatgttcac

SEQ ID NO: 4306282 - DNA, 25 bp, Homo sapien
tactgttctgtatggagattatact

SEQ ID NO: 4306283 - DNA, 25 bp, Homo sapien
ggttagatgatatgttcactttgta

SEQ ID NO: 4306284 - DNA, 25 bp, Homo sapien
caagtgagctcttgacggtgagaaa

SEQ ID NO: 4306285 - DNA, 25 bp, Homo sapien
gaacaagtgagctcttgacggtgag

SEQ ID NO: 4306286 - DNA, 25 bp, Homo sapien
gagctcttgacggtgagaaattaaa

SEQ ID NO: 4306287 - DNA, 25 bp, Homo sapien
aagaacaagtgagctcttgacggtg

SEQ ID NO: 4306288 - DNA, 25 bp, Homo sapien
tgaatgcttgatatacttgagcttc

SEQ ID NO: 4306289 - DNA, 25 bp, Homo sapien
gcttgatatacttgagcttccttta

SEQ ID NO: 4306290 - DNA, 25 bp, Homo sapien
aatgcttgatatacttgagcttcct

SEQ ID NO: 4306291 - DNA, 25 bp, Homo sapien
ttgatatacttgagcttcctttaca

SEQ ID NO: 4306292 - DNA, 25 bp, Homo sapien
ttcctaaattctataagaatccaca

SEQ ID NO: 4306293 - DNA, 25 bp, Homo sapien
aattctataagaatccacaaagcat

SEQ ID NO: 4306294 - DNA, 25 bp, Homo sapien
taaattctataagaatccacaaagc

SEQ ID NO: 4306295 - DNA, 25 bp, Homo sapien
tctataagaatccacaaagcattct

SEQ ID NO: 4306296 - DNA, 25 bp, Homo sapien
ttctctgatttgtcgtccatagcaa

SEQ ID NO: 4306297 - DNA, 25 bp, Homo sapien
gtcctatgtattttagatcatattt

SEQ ID NO: 4306298 - DNA, 25 bp, Homo sapien
caaagcaggcaatgttcccatctag

SEQ ID NO: 4306299 - DNA, 25 bp, Homo sapien
aagcaggcaatgttcccatctagtc

SEQ ID NO: 4306300 - DNA, 25 bp, Homo sapien
tataatacattcatttgttttctca

SEQ ID NO: 4306301 - DNA, 25 bp, Homo sapien
atacattcatttgttttctcaattc

SEQ ID NO: 4306302 - DNA, 25 bp, Homo sapien
cattcatttgttttctcaattcttt

SEQ ID NO: 4306303 - DNA, 25 bp, Homo sapien
gtgcaatttatagtttgcataaata

SEQ ID NO: 4306304 - DNA, 25 bp, Homo sapien
ttctggagtttcaccaaagggattc

SEQ ID NO: 4306305 - DNA, 25 bp, Homo sapien
ccttctggagtttcaccaaagggat

SEQ ID NO: 4306306 - DNA, 25 bp, Homo sapien
acagcttcgtaatttgatctgcagc

SEQ ID NO: 4306307 - DNA, 25 bp, Homo sapien
tacagcttcgtaatttgatctgcag

SEQ ID NO: 4306308 - DNA, 25 bp, Homo sapien
cttctgtatacaaggtccagtaaca

SEQ ID NO: 4306309 - DNA, 25 bp, Homo sapien
tcctctaactgtccatcgaatcctg

SEQ ID NO: 4306310 - DNA, 25 bp, Homo sapien
ctctttgctagtctcagaaatggca

SEQ ID NO: 4306311 - DNA, 25 bp, Homo sapien
taactgtccatcgaatcctggccct

SEQ ID NO: 4306312 - DNA, 25 bp, Homo sapien
tttcctggcatctctttgctagtct

SEQ ID NO: 4306313 - DNA, 25 bp, Homo sapien
gtgtatgtgtccacatgcaatacac

SEQ ID NO: 4306314 - DNA, 25 bp, Homo sapien
tgtatgtgtccacatgcaatacaca

SEQ ID NO: 4306315 - DNA, 25 bp, Homo sapien
gtatgtgtccacatgcaatacacat

SEQ ID NO: 4306316 - DNA, 25 bp, Homo sapien
agtgtatgtgtccacatgcaataca

SEQ ID NO: 4306317 - DNA, 25 bp, Homo sapien
attcaaagacacatcataaacatcc

SEQ ID NO: 4306318 - DNA, 25 bp, Homo sapien
atcataaacatcctcttttaaaaca

SEQ ID NO: 4306319 - DNA, 25 bp, Homo sapien
caaaacacattcaaagacacatcat

SEQ ID NO: 4306320 - DNA, 25 bp, Homo sapien
cacatcataaacatcctcttttaaa

SEQ ID NO: 4306321 - DNA, 25 bp, Homo sapien
tttcaaaggcccaacgaagcctaga

SEQ ID NO: 4306322 - DNA, 25 bp, Homo sapien
ttcaaaggcccaacgaagcctagat

SEQ ID NO: 4306323 - DNA, 25 bp, Homo sapien
tggcttttcaaaggcccaacgaagc

SEQ ID NO: 4306324 - DNA, 25 bp, Homo sapien
ctggcttttcaaaggcccaacgaag

SEQ ID NO: 4306325 - DNA, 25 bp, Homo sapien
ggaaatatccaaggcttcagcaacc

SEQ ID NO: 4306326 - DNA, 25 bp, Homo sapien
taaaaatgagctccgggtttgaagc

SEQ ID NO: 4306327 - DNA, 25 bp, Homo sapien
caggaccggtccatcagaattgcca

SEQ ID NO: 4306328 - DNA, 25 bp, Homo sapien
tccgggtttgaagcagccacctctt

SEQ ID NO: 4306329 - DNA, 25 bp, Homo sapien
tgttttgtcgctagattgtacccaa

SEQ ID NO: 4306330 - DNA, 25 bp, Homo sapien
cgctagattgtacccaatcatctgt

SEQ ID NO: 4306331 - DNA, 25 bp, Homo sapien
tggagtttgttttgtcgctagattg

SEQ ID NO: 4306332 - DNA, 25 bp, Homo sapien
tgtcgctagattgtacccaatcatc

SEQ ID NO: 4306333 - DNA, 25 bp, Homo sapien
tcaaaccactattgaagacaccttt

SEQ ID NO: 4306334 - DNA, 25 bp, Homo sapien
gctaagatctgggcttttaaaacaa

SEQ ID NO: 4306335 - DNA, 25 bp, Homo sapien
tttcaaaccactattgaagacacct

SEQ ID NO: 4306336 - DNA, 25 bp, Homo sapien
ctaagatctgggcttttaaaacaat

SEQ ID NO: 4306337 - DNA, 25 bp, Homo sapien
tgttgtcaattaaacgtgtcgccat

SEQ ID NO: 4306338 - DNA, 25 bp, Homo sapien
cagaaagagttgtatcctcaatgaa

SEQ ID NO: 4306339 - DNA, 25 bp, Homo sapien
acagaaagagttgtatcctcaatga

SEQ ID NO: 4306340 - DNA, 25 bp, Homo sapien
gtgttgtcaattaaacgtgtcgcca

SEQ ID NO: 4306341 - DNA, 25 bp, Homo sapien
tataacttgggtctggataactcca

SEQ ID NO: 4306342 - DNA, 25 bp, Homo sapien
gaaaacactgtaagacatatctgac

SEQ ID NO: 4306343 - DNA, 25 bp, Homo sapien
gctatttttatacgcagtagcctaa

SEQ ID NO: 4306344 - DNA, 25 bp, Homo sapien
tagcctaagtatgcaacgtcttcac

SEQ ID NO: 4306345 - DNA, 25 bp, Homo sapien
tgctttcataaccgttaatacacat

SEQ ID NO: 4306346 - DNA, 25 bp, Homo sapien
gttgctattgctttggcgttttagt

SEQ ID NO: 4306347 - DNA, 25 bp, Homo sapien
ttgctattgctttggcgttttagtc

SEQ ID NO: 4306348 - DNA, 25 bp, Homo sapien
tgctattgctttggcgttttagtca

SEQ ID NO: 4306349 - DNA, 25 bp, Homo sapien
gctattgctttggcgttttagtcat

SEQ ID NO: 4306350 - DNA, 25 bp, Homo sapien
atgcccggccctcaacattcttaaa

SEQ ID NO: 4306351 - DNA, 25 bp, Homo sapien
cagaatttcatatccagccaaacta

SEQ ID NO: 4306352 - DNA, 25 bp, Homo sapien
accatgcccggccctcaacattctt

SEQ ID NO: 4306353 - DNA, 25 bp, Homo sapien
ccagaatttcatatccagccaaact

SEQ ID NO: 4306354 - DNA, 25 bp, Homo sapien
tttgctacaaggaacgtatattgta

SEQ ID NO: 4306355 - DNA, 25 bp, Homo sapien
tattagattaaatcagctgcctgag

SEQ ID NO: 4306356 - DNA, 25 bp, Homo sapien
taaataagcttattacgtattagat

SEQ ID NO: 4306357 - DNA, 25 bp, Homo sapien
acaaggaacgtatattgtatctgca

SEQ ID NO: 4306358 - DNA, 25 bp, Homo sapien
ttatgttttgatagtttgttttgac

SEQ ID NO: 4306359 - DNA, 25 bp, Homo sapien
gaacacaacacttgattccgtctgg

SEQ ID NO: 4306360 - DNA, 25 bp, Homo sapien
gtctcccttttgatatccatggctg

SEQ ID NO: 4306361 - DNA, 25 bp, Homo sapien
caacatcgatgcagggactgatcca

SEQ ID NO: 4306362 - DNA, 25 bp, Homo sapien
atatccatggctgccgctagtgctg

SEQ ID NO: 4306363 - DNA, 25 bp, Homo sapien
taaggagaccacatactcaccactg

SEQ ID NO: 4306364 - DNA, 25 bp, Homo sapien
cagacactgaagcttggctggcgtt

SEQ ID NO: 4306365 - DNA, 25 bp, Homo sapien
tcaccactggctatgcaccaggagc

SEQ ID NO: 4306366 - DNA, 25 bp, Homo sapien
gagcacaagatccagccagagctga

SEQ ID NO: 4306367 - DNA, 25 bp, Homo sapien
tgctggactgtcttagagcagctgt

SEQ ID NO: 4306368 - DNA, 25 bp, Homo sapien
tactgatccgtttccaaaaggcagt

SEQ ID NO: 4306369 - DNA, 25 bp, Homo sapien
aaacagatgatttccggtaatagaa

SEQ ID NO: 4306370 - DNA, 25 bp, Homo sapien
aaaaggcagtatctgaaacactggg

SEQ ID NO: 4306371 - DNA, 25 bp, Homo sapien
aagccaaggagaaaaataagcagtt

SEQ ID NO: 4306372 - DNA, 25 bp, Homo sapien
ctgcccaagccaaggagaaaaataa

SEQ ID NO: 4306373 - DNA, 25 bp, Homo sapien
tgcccaagccaaggagaaaaataag

SEQ ID NO: 4306374 - DNA, 25 bp, Homo sapien
ccaaggagaaaaataagcagttcca

SEQ ID NO: 4306375 - DNA, 25 bp, Homo sapien
cttgacttagactttcagcaacctg

SEQ ID NO: 4306376 - DNA, 25 bp, Homo sapien
cttagactttcagcaacctgcaaag

SEQ ID NO: 4306377 - DNA, 25 bp, Homo sapien
agactttcagcaacctgcaaagtaa

SEQ ID NO: 4306378 - DNA, 25 bp, Homo sapien
gacttagactttcagcaacctgcaa

SEQ ID NO: 4306379 - DNA, 25 bp, Homo sapien
caggtactgcagtggaaaggtatca

SEQ ID NO: 4306380 - DNA, 25 bp, Homo sapien
gagtgactctggtacctaacagact

SEQ ID NO: 4306381 - DNA, 25 bp, Homo sapien
tcagagcttgaaatccaggtactgc

SEQ ID NO: 4306382 - DNA, 25 bp, Homo sapien
caaccaagcatacattaagttttca

SEQ ID NO: 4306383 - DNA, 25 bp, Homo sapien
ggaaggattcacacacctgtccact

SEQ ID NO: 4306384 - DNA, 25 bp, Homo sapien
gctactcaagcatcaggcagctgat

SEQ ID NO: 4306385 - DNA, 25 bp, Homo sapien
tgcattcaacgacaagcacttgagt

SEQ ID NO: 4306386 - DNA, 25 bp, Homo sapien
gatttactgaggcacactctgttcc

SEQ ID NO: 4306387 - DNA, 25 bp, Homo sapien
gaaagaattaagtccaactaggaca

SEQ ID NO: 4306388 - DNA, 25 bp, Homo sapien
agaattaagtccaactaggacactc

SEQ ID NO: 4306389 - DNA, 25 bp, Homo sapien
tgatcgacccaggtagatggtctaa

SEQ ID NO: 4306390 - DNA, 25 bp, Homo sapien
ccaggtagatggtctaaggaaagaa

SEQ ID NO: 4306391 - DNA, 25 bp, Homo sapien
tactataaattgcatgaagatgaag

SEQ ID NO: 4306392 - DNA, 25 bp, Homo sapien
tataaattgcatgaagatgaagaca

SEQ ID NO: 4306393 - DNA, 25 bp, Homo sapien
ctataaattgcatgaagatgaagac

SEQ ID NO: 4306394 - DNA, 25 bp, Homo sapien
attactataaattgcatgaagatga

SEQ ID NO: 4306395 - DNA, 25 bp, Homo sapien
aaagatgtccaactgtctaagactt

SEQ ID NO: 4306396 - DNA, 25 bp, Homo sapien
cacaacagggtttggcttttcaccg

SEQ ID NO: 4306397 - DNA, 25 bp, Homo sapien
aaaagatgtccaactgtctaagact

SEQ ID NO: 4306398 - DNA, 25 bp, Homo sapien
aagagtgtctcaacgggatccaggt

SEQ ID NO: 4306399 - DNA, 25 bp, Homo sapien
gaattcaaggcgaactccagagtca

SEQ ID NO: 4306400 - DNA, 25 bp, Homo sapien
ggatgatcacctacaccgaagagac

SEQ ID NO: 4306401 - DNA, 25 bp, Homo sapien
ggatgggactatgcttcaaactaag

SEQ ID NO: 4306402 - DNA, 25 bp, Homo sapien
tatagcccataaagtaccctctgaa

SEQ ID NO: 4306403 - DNA, 25 bp, Homo sapien
tatcaaaataatgagcatgttcctt

SEQ ID NO: 4306404 - DNA, 25 bp, Homo sapien
tcggccaggcctataatcttcccaa

SEQ ID NO: 4306405 - DNA, 25 bp, Homo sapien
cagacagagcgatcacagcagtgag

SEQ ID NO: 4306406 - DNA, 25 bp, Homo sapien
ggcacatggtaaaggcccaaagctt

SEQ ID NO: 4306407 - DNA, 25 bp, Homo sapien
ggtgacactcagtaccagtccttaa

SEQ ID NO: 4306408 - DNA, 25 bp, Homo sapien
aggtctcctgcagagtggtattcag

SEQ ID NO: 4306409 - DNA, 25 bp, Homo sapien
tgaaaggaagctacatgtacactcc

SEQ ID NO: 4306410 - DNA, 25 bp, Homo sapien
gaatctttgaactctcactccgttg

SEQ ID NO: 4306411 - DNA, 25 bp, Homo sapien
tctttgaactctcactccgttgtca

SEQ ID NO: 4306412 - DNA, 25 bp, Homo sapien
tgaactctcactccgttgtcagaca

SEQ ID NO: 4306413 - DNA, 25 bp, Homo sapien
tttgaactctcactccgttgtcaga

SEQ ID NO: 4306414 - DNA, 25 bp, Homo sapien
atcttctggaggttaattgaactgc

SEQ ID NO: 4306415 - DNA, 25 bp, Homo sapien
catcttctggaggttaattgaactg

SEQ ID NO: 4306416 - DNA, 25 bp, Homo sapien
ccatcttctggaggttaattgaact

SEQ ID NO: 4306417 - DNA, 25 bp, Homo sapien
ggaaactggcagacctatactttgt

SEQ ID NO: 4306418 - DNA, 25 bp, Homo sapien
gtaatcagcacagacaagttctttg

SEQ ID NO: 4306419 - DNA, 25 bp, Homo sapien
tgacatccaagatctagcagtaatc

SEQ ID NO: 4306420 - DNA, 25 bp, Homo sapien
aactggcagacctatactttgttca

SEQ ID NO: 4306421 - DNA, 25 bp, Homo sapien
cagtgaaacgagaatgcaccattgg

SEQ ID NO: 4306422 - DNA, 25 bp, Homo sapien
gtgaaacgagaatgcaccattggac

SEQ ID NO: 4306423 - DNA, 25 bp, Homo sapien
tgaaacgagaatgcaccattggact

SEQ ID NO: 4306424 - DNA, 25 bp, Homo sapien
aaacgagaatgcaccattggactcc

SEQ ID NO: 4306425 - DNA, 25 bp, Homo sapien
taatctgttcggtacgctttggtgt

SEQ ID NO: 4306426 - DNA, 25 bp, Homo sapien
cgctttggtgtaagaacgttttctg

SEQ ID NO: 4306427 - DNA, 25 bp, Homo sapien
cagcataatctgttcggtacgcttt

SEQ ID NO: 4306428 - DNA, 25 bp, Homo sapien
tgttcggtacgctttggtgtaagaa

SEQ ID NO: 4306429 - DNA, 25 bp, Homo sapien
tccagttcagaaagggagcatccat

SEQ ID NO: 4306430 - DNA, 25 bp, Homo sapien
ctgatcttcatgctccagggaacca

SEQ ID NO: 4306431 - DNA, 25 bp, Homo sapien
gagcatccatgccagtaacttttga

SEQ ID NO: 4306432 - DNA, 25 bp, Homo sapien
tccgtaagttatctggtactctgcc

SEQ ID NO: 4306433 - DNA, 25 bp, Homo sapien
gggtaaaagctgaccatactcagta

SEQ ID NO: 4306434 - DNA, 25 bp, Homo sapien
tagaaagggtaaaagctgaccatac

SEQ ID NO: 4306435 - DNA, 25 bp, Homo sapien
aagctgaccatactcagtacactgg

SEQ ID NO: 4306436 - DNA, 25 bp, Homo sapien
catactcagtacactggtcaaagtc

SEQ ID NO: 4306437 - DNA, 25 bp, Homo sapien
cagtgaaagtcatgtccagttggcc

SEQ ID NO: 4306438 - DNA, 25 bp, Homo sapien
tcatgtccagttggccgttggttca

SEQ ID NO: 4306439 - DNA, 25 bp, Homo sapien
ctgagggcagtagtttgtgctaagc

SEQ ID NO: 4306440 - DNA, 25 bp, Homo sapien
gtagtttgtgctaagcacacagtga

SEQ ID NO: 4306441 - DNA, 25 bp, Homo sapien
tcatttagctgataagaacttgccc

SEQ ID NO: 4306442 - DNA, 25 bp, Homo sapien
cttgcccataacctttagtccttca

SEQ ID NO: 4306443 - DNA, 25 bp, Homo sapien
gctgataagaacttgcccataacct

SEQ ID NO: 4306444 - DNA, 25 bp, Homo sapien
tgcccataacctttagtccttcact

SEQ ID NO: 4306445 - DNA, 25 bp, Homo sapien
tccgtaaaggcagaaaattaggctg

SEQ ID NO: 4306446 - DNA, 25 bp, Homo sapien
caggggcatgggtttaagcagtttc

SEQ ID NO: 4306447 - DNA, 25 bp, Homo sapien
cacttccgtaaaggcagaaaattag

SEQ ID NO: 4306448 - DNA, 25 bp, Homo sapien
ttctttctgagtatacaacagcagg

SEQ ID NO: 4306449 - DNA, 25 bp, Homo sapien
aaagtctgcaaaagcaggtagcctg

SEQ ID NO: 4306450 - DNA, 25 bp, Homo sapien
ttctccttgacccacggatttgacc

SEQ ID NO: 4306451 - DNA, 25 bp, Homo sapien
actcaggcacattaaaagtctgcaa

SEQ ID NO: 4306452 - DNA, 25 bp, Homo sapien
ccttgacccacggatttgaccaact

SEQ ID NO: 4306453 - DNA, 25 bp, Homo sapien
acttttcttaaacttgcgtccagcg

SEQ ID NO: 4306454 - DNA, 25 bp, Homo sapien
gcgcctgcttcagcgccttcgccat

SEQ ID NO: 4306455 - DNA, 25 bp, Homo sapien
ctgcttcagcgccttcgccatgagt

SEQ ID NO: 4306456 - DNA, 25 bp, Homo sapien
ttaaacttgcgtccagcgcctgctt

SEQ ID NO: 4306457 - DNA, 25 bp, Homo sapien
gcagcgctagggctcgcagaagctt

SEQ ID NO: 4306458 - DNA, 25 bp, Homo sapien
cctgcgctgctacgggggacgccat

SEQ ID NO: 4306459 - DNA, 25 bp, Homo sapien
gggctcgcagaagcttcccggcctg

SEQ ID NO: 4306460 - DNA, 25 bp, Homo sapien
gggccgcagcgctagggctcgcaga

SEQ ID NO: 4306461 - DNA, 25 bp, Homo sapien
cactagatgtagcatcttttgatga

SEQ ID NO: 4306462 - DNA, 25 bp, Homo sapien
tggtggcaaagtggcaaggtctaac

SEQ ID NO: 4306463 - DNA, 25 bp, Homo sapien
tgaacggttcgccaatcgggcagct

SEQ ID NO: 4306464 - DNA, 25 bp, Homo sapien
aatcaattattgtcacgatggtggc

SEQ ID NO: 4306465 - DNA, 25 bp, Homo sapien
tttctggattcattgtgctggtagt

SEQ ID NO: 4306466 - DNA, 25 bp, Homo sapien
tgccaatgattcatttctggattca

SEQ ID NO: 4306467 - DNA, 25 bp, Homo sapien
ggattcattgtgctggtagtatgga

SEQ ID NO: 4306468 - DNA, 25 bp, Homo sapien
tacatatgccaatgattcatttctg

SEQ ID NO: 4306469 - DNA, 25 bp, Homo sapien
cactgttaggctgtctgatggttga

SEQ ID NO: 4306470 - DNA, 25 bp, Homo sapien
ttcaacagcaatgtacggtcagctc

SEQ ID NO: 4306471 - DNA, 25 bp, Homo sapien
gaatgtatattgtcgtttaccactg

SEQ ID NO: 4306472 - DNA, 25 bp, Homo sapien
ctgatggttgattgctttctgaaag

SEQ ID NO: 4306473 - DNA, 25 bp, Homo sapien
aatatctggttgtgtatcacttctg

SEQ ID NO: 4306474 - DNA, 25 bp, Homo sapien
tatctggttgtgtatcacttctgtc

SEQ ID NO: 4306475 - DNA, 25 bp, Homo sapien
gaaatatctggttgtgtatcacttc

SEQ ID NO: 4306476 - DNA, 25 bp, Homo sapien
ctggaaatatctggttgtgtatcac

SEQ ID NO: 4306477 - DNA, 25 bp, Homo sapien
ctcagcttcttagcccaatcttcat

SEQ ID NO: 4306478 - DNA, 25 bp, Homo sapien
ggtctcagcttcttagcccaatctt

SEQ ID NO: 4306479 - DNA, 25 bp, Homo sapien
tctcagcttcttagcccaatcttca

SEQ ID NO: 4306480 - DNA, 25 bp, Homo sapien
tggtctcagcttcttagcccaatct

SEQ ID NO: 4306481 - DNA, 25 bp, Homo sapien
tctattttcagtggctcttcatctg

SEQ ID NO: 4306482 - DNA, 25 bp, Homo sapien
tttttcatgtgatcgtttgttggag

SEQ ID NO: 4306483 - DNA, 25 bp, Homo sapien
tggagactcatatacagatgctctg

SEQ ID NO: 4306484 - DNA, 25 bp, Homo sapien
gatcgtttgttggagactcatatac

SEQ ID NO: 4306485 - DNA, 25 bp, Homo sapien
tcatgtgatcgtttgttggagactc

SEQ ID NO: 4306486 - DNA, 25 bp, Homo sapien
tggctctagaaggtttagctgttca

SEQ ID NO: 4306487 - DNA, 25 bp, Homo sapien
ggatggctctagaaggtttagctgt

SEQ ID NO: 4306488 - DNA, 25 bp, Homo sapien
agggatggctctagaaggtttagct

SEQ ID NO: 4306489 - DNA, 25 bp, Homo sapien
ccttgtaggagggatggctctagaa

SEQ ID NO: 4306490 - DNA, 25 bp, Homo sapien
ttgaagacacttgtttcagtggctc

SEQ ID NO: 4306491 - DNA, 25 bp, Homo sapien
gctccgataacattcaagtcttgcc

SEQ ID NO: 4306492 - DNA, 25 bp, Homo sapien
acttgccaagcaaagctcggcgtag

SEQ ID NO: 4306493 - DNA, 25 bp, Homo sapien
tgcttctggcagatcgataaagtac

SEQ ID NO: 4306494 - DNA, 25 bp, Homo sapien
cagtgaaaaggcttcggttcttggc

SEQ ID NO: 4306495 - DNA, 25 bp, Homo sapien
tgctttctaagctcctagtcattgg

SEQ ID NO: 4306496 - DNA, 25 bp, Homo sapien
tcaactacgcggtgtgaggagcagt

SEQ ID NO: 4306497 - DNA, 25 bp, Homo sapien
tcttcagttgtggagctatcttcac

SEQ ID NO: 4306498 - DNA, 25 bp, Homo sapien
ctgtgtgccttggtttttctagtct

SEQ ID NO: 4306499 - DNA, 25 bp, Homo sapien
gtcaccccgataagctgtgtgcctt

SEQ ID NO: 4306500 - DNA, 25 bp, Homo sapien
cgtcaccccgataagctgtgtgcct

SEQ ID NO: 4306501 - DNA, 25 bp, Homo sapien
tcaccccgataagctgtgtgccttg

SEQ ID NO: 4306502 - DNA, 25 bp, Homo sapien
tgctttgtcgctgaatactgagatc

SEQ ID NO: 4306503 - DNA, 25 bp, Homo sapien
ctaagcagaaggacaggcgttcttc

SEQ ID NO: 4306504 - DNA, 25 bp, Homo sapien
cacagagcctggtagatcacagtta

SEQ ID NO: 4306505 - DNA, 25 bp, Homo sapien
gatagagtctgatgtcccatttggc

SEQ ID NO: 4306506 - DNA, 25 bp, Homo sapien
agccagaacaaacagacaaaaataa

SEQ ID NO: 4306507 - DNA, 25 bp, Homo sapien
caaaaataaaatattctttatccat

SEQ ID NO: 4306508 - DNA, 25 bp, Homo sapien
cagacaaaaataaaatattctttat

SEQ ID NO: 4306509 - DNA, 25 bp, Homo sapien
gccagaacaaacagacaaaaataaa

SEQ ID NO: 4306510 - DNA, 25 bp, Homo sapien
ttctcctggattggttgcatcctac

SEQ ID NO: 4306511 - DNA, 25 bp, Homo sapien
gattataataatggccttcagcctc

SEQ ID NO: 4306512 - DNA, 25 bp, Homo sapien
atcacagtgaatctcttcctgatta

SEQ ID NO: 4306513 - DNA, 25 bp, Homo sapien
ctgctattctcctggattggttgca

SEQ ID NO: 4306514 - DNA, 25 bp, Homo sapien
ttttgtcggtatcataggcctctga

SEQ ID NO: 4306515 - DNA, 25 bp, Homo sapien
catttttgtcggtatcataggcctc

SEQ ID NO: 4306516 - DNA, 25 bp, Homo sapien
gtcggtatcataggcctctgattca

SEQ ID NO: 4306517 - DNA, 25 bp, Homo sapien
caccatttttgtcggtatcataggc

SEQ ID NO: 4306518 - DNA, 25 bp, Homo sapien
tggtctattcaagaatttgacttct

SEQ ID NO: 4306519 - DNA, 25 bp, Homo sapien
tattgtttggaatcatttcaggagg

SEQ ID NO: 4306520 - DNA, 25 bp, Homo sapien
tttggaatcatttcaggaggaatgg

SEQ ID NO: 4306521 - DNA, 25 bp, Homo sapien
tctattgtttggaatcatttcagga

SEQ ID NO: 4306522 - DNA, 25 bp, Homo sapien
tctcctctccctgttattggtgttg

SEQ ID NO: 4306523 - DNA, 25 bp, Homo sapien
tcttggtatacaggagacttgtcat

SEQ ID NO: 4306524 - DNA, 25 bp, Homo sapien
tggccccatcaggttggtctgagac

SEQ ID NO: 4306525 - DNA, 25 bp, Homo sapien
tgagacaggtgaagattcttggtat

SEQ ID NO: 4306526 - DNA, 25 bp, Homo sapien
tctagacacccgttgaaagctgctg

SEQ ID NO: 4306527 - DNA, 25 bp, Homo sapien
aagctgctgtaactctcaagagctc

SEQ ID NO: 4306528 - DNA, 25 bp, Homo sapien
gagctgttcagcatgccttgtaggg

SEQ ID NO: 4306529 - DNA, 25 bp, Homo sapien
tgcaggaatccctactgagctgttc

SEQ ID NO: 4306530 - DNA, 25 bp, Homo sapien
catgccagtgaaccaggcttcttac

SEQ ID NO: 4306531 - DNA, 25 bp, Homo sapien
aataggttgagatcgctttgaccct

SEQ ID NO: 4306532 - DNA, 25 bp, Homo sapien
gctttgaccctaagacctttaatca

SEQ ID NO: 4306533 - DNA, 25 bp, Homo sapien
tgaaccaggcttcttacgcatttaa

SEQ ID NO: 4306534 - DNA, 25 bp, Homo sapien
tccttcattcttgccaccatagtgg

SEQ ID NO: 4306535 - DNA, 25 bp, Homo sapien
gagcacattgctagatcccatgagg

SEQ ID NO: 4306536 - DNA, 25 bp, Homo sapien
ggatgagtcagcaaggtgtccttca

SEQ ID NO: 4306537 - DNA, 25 bp, Homo sapien
cagttttccaaatgcgatgcgagtt

SEQ ID NO: 4306538 - DNA, 25 bp, Homo sapien
tggcccaacccagatggcaaagagc

SEQ ID NO: 4306539 - DNA, 25 bp, Homo sapien
ctggcccaacccagatggcaaagag

SEQ ID NO: 4306540 - DNA, 25 bp, Homo sapien
cttcccctaatgcagcttctgccat

SEQ ID NO: 4306541 - DNA, 25 bp, Homo sapien
tcctctggttcaatttcttccccta

SEQ ID NO: 4306542 - DNA, 25 bp, Homo sapien
tggttcaatttcttcccctaatgca

SEQ ID NO: 4306543 - DNA, 25 bp, Homo sapien
ctccatgagccatttttcctctggt

SEQ ID NO: 4306544 - DNA, 25 bp, Homo sapien
aatacagcacaggttgtaagccaac

SEQ ID NO: 4306545 - DNA, 25 bp, Homo sapien
atacagcacaggttgtaagccaact

SEQ ID NO: 4306546 - DNA, 25 bp, Homo sapien
caatacagcacaggttgtaagccaa

SEQ ID NO: 4306547 - DNA, 25 bp, Homo sapien
tcaatacagcacaggttgtaagcca

SEQ ID NO: 4306548 - DNA, 25 bp, Homo sapien
tgagcactttggtatttagccccat

SEQ ID NO: 4306549 - DNA, 25 bp, Homo sapien
tctctgtgttcccgttgagcacttt

SEQ ID NO: 4306550 - DNA, 25 bp, Homo sapien
tctgtgttcccgttgagcactttgg

SEQ ID NO: 4306551 - DNA, 25 bp, Homo sapien
tgtgttcccgttgagcactttggta

SEQ ID NO: 4306552 - DNA, 25 bp, Homo sapien
tgctgtgtttgataaggtcatttgg

SEQ ID NO: 4306553 - DNA, 25 bp, Homo sapien
taccgatgattcattttagccaact

SEQ ID NO: 4306554 - DNA, 25 bp, Homo sapien
ttagccaactcttgatactcagttg

SEQ ID NO: 4306555 - DNA, 25 bp, Homo sapien
tttggttctgagattctcctatggg

SEQ ID NO: 4306556 - DNA, 25 bp, Homo sapien
ccagatgctctctagacaaaggttc

SEQ ID NO: 4306557 - DNA, 25 bp, Homo sapien
tcttaatttagattgtgccaaccag

SEQ ID NO: 4306558 - DNA, 25 bp, Homo sapien
tgagttttccgttgccgttctccaa

SEQ ID NO: 4306559 - DNA, 25 bp, Homo sapien
tgcggaaataaagtgtaggcatgct

SEQ ID NO: 4306560 - DNA, 25 bp, Homo sapien
gatggcaatggttttctgatacctg

SEQ ID NO: 4306561 - DNA, 25 bp, Homo sapien
ccatagttggatggcaatggttttc

SEQ ID NO: 4306562 - DNA, 25 bp, Homo sapien
gaaacccatagttggatggcaatgg

SEQ ID NO: 4306563 - DNA, 25 bp, Homo sapien
agggtgtagctctgaaacccatagt

SEQ ID NO: 4306564 - DNA, 25 bp, Homo sapien
catttctatgtctgcaacattgtag

SEQ ID NO: 4306565 - DNA, 25 bp, Homo sapien
aacattgtagccgaagtcatttgca

SEQ ID NO: 4306566 - DNA, 25 bp, Homo sapien
tttcaatatctgcaacatttctatg

SEQ ID NO: 4306567 - DNA, 25 bp, Homo sapien
tgctttagatttcaatatctgcaac

SEQ ID NO: 4306568 - DNA, 25 bp, Homo sapien
gatcaagaaatatggttgtacctca

SEQ ID NO: 4306569 - DNA, 25 bp, Homo sapien
tggaattctattgtagggatgtgcc

SEQ ID NO: 4306570 - DNA, 25 bp, Homo sapien
tgtacctcattttagcggcaacttg

SEQ ID NO: 4306571 - DNA, 25 bp, Homo sapien
gacttttgtctagatcaagaaatat

SEQ ID NO: 4306572 - DNA, 25 bp, Homo sapien
ctctctaccttggtattcaaaacct

SEQ ID NO: 4306573 - DNA, 25 bp, Homo sapien
ttctctctaccttggtattcaaaac

SEQ ID NO: 4306574 - DNA, 25 bp, Homo sapien
ccattctctctaccttggtattcaa

SEQ ID NO: 4306575 - DNA, 25 bp, Homo sapien
cattctctctaccttggtattcaaa

SEQ ID NO: 4306576 - DNA, 25 bp, Homo sapien
tggaagcaaatccattggactgcct

SEQ ID NO: 4306577 - DNA, 25 bp, Homo sapien
aatccaaattccttggaagcaaatc

SEQ ID NO: 4306578 - DNA, 25 bp, Homo sapien
aagcaaatccattggactgcctcat

SEQ ID NO: 4306579 - DNA, 25 bp, Homo sapien
cttggaagcaaatccattggactgc

SEQ ID NO: 4306580 - DNA, 25 bp, Homo sapien
gaatgcatgtatgttatcccaatag

SEQ ID NO: 4306581 - DNA, 25 bp, Homo sapien
cacagtaatccttttgagtggtagg

SEQ ID NO: 4306582 - DNA, 25 bp, Homo sapien
gtaaatacatccacagtcacctctg

SEQ ID NO: 4306583 - DNA, 25 bp, Homo sapien
tgcagggtattctgaaaaagtcccc

SEQ ID NO: 4306584 - DNA, 25 bp, Homo sapien
tagttccggacgcattttgctttct

SEQ ID NO: 4306585 - DNA, 25 bp, Homo sapien
cacggcctcgctcttcattctggat

SEQ ID NO: 4306586 - DNA, 25 bp, Homo sapien
gtccctcccagctcgattgtcctta

SEQ ID NO: 4306587 - DNA, 25 bp, Homo sapien
tgttcagtatcagccttcgcatcct

SEQ ID NO: 4306588 - DNA, 25 bp, Homo sapien
tctcgcgacggtcaagttcgggctc

SEQ ID NO: 4306589 - DNA, 25 bp, Homo sapien
tggacaccgatactaggctcttctg

SEQ ID NO: 4306590 - DNA, 25 bp, Homo sapien
agttgcgcgcccaagtttctgatgc

SEQ ID NO: 4306591 - DNA, 25 bp, Homo sapien
gatgctcagttctgaagtgctccca

SEQ ID NO: 4306592 - DNA, 25 bp, Homo sapien
tgggcagggaaaccgccctcttcag

SEQ ID NO: 4306593 - DNA, 25 bp, Homo sapien
ttcaggacgcgcttgtatttctgca

SEQ ID NO: 4306594 - DNA, 25 bp, Homo sapien
ccctggtctgacagggaaggcgagg

SEQ ID NO: 4306595 - DNA, 25 bp, Homo sapien
cgccctcttcaggacgcgcttgtat

SEQ ID NO: 4306596 - DNA, 25 bp, Homo sapien
taacgcagggaaggagtcaaaccaa

SEQ ID NO: 4306597 - DNA, 25 bp, Homo sapien
ttaacgcagggaaggagtcaaacca

SEQ ID NO: 4306598 - DNA, 25 bp, Homo sapien
agcagatctttctttaacgcaggga

SEQ ID NO: 4306599 - DNA, 25 bp, Homo sapien
gcagatctttctttaacgcagggaa

SEQ ID NO: 4306600 - DNA, 25 bp, Homo sapien
aaagagttgatttgcttgcaggtct

SEQ ID NO: 4306601 - DNA, 25 bp, Homo sapien
gcaaagagttgatttgcttgcaggt

SEQ ID NO: 4306602 - DNA, 25 bp, Homo sapien
agttgatttgcttgcaggtctttta

SEQ ID NO: 4306603 - DNA, 25 bp, Homo sapien
ctttggaaattgggcaaagagttga

SEQ ID NO: 4306604 - DNA, 25 bp, Homo sapien
ttgctaccagtgactctgggtctga

SEQ ID NO: 4306605 - DNA, 25 bp, Homo sapien
tgctaccagtgactctgggtctgag

SEQ ID NO: 4306606 - DNA, 25 bp, Homo sapien
ataaaagtgagcactcgtatttttc

SEQ ID NO: 4306607 - DNA, 25 bp, Homo sapien
tcattgtataaaagtgagcactcgt

SEQ ID NO: 4306608 - DNA, 25 bp, Homo sapien
attgacctagttgctatttcattgt

SEQ ID NO: 4306609 - DNA, 25 bp, Homo sapien
gacctagttgctatttcattgtata

SEQ ID NO: 4306610 - DNA, 25 bp, Homo sapien
ccttttctgccaacttgctcagctg

SEQ ID NO: 4306611 - DNA, 25 bp, Homo sapien
tgctcagctgtttcgatcttcacct

SEQ ID NO: 4306612 - DNA, 25 bp, Homo sapien
tatactttgactttcaacacctgac

SEQ ID NO: 4306613 - DNA, 25 bp, Homo sapien
tgtcctcacagttggggattatact

SEQ ID NO: 4306614 - DNA, 25 bp, Homo sapien
gaacatatccttcttgcatgtaaaa

SEQ ID NO: 4306615 - DNA, 25 bp, Homo sapien
gagattcttttacatgaacatatcc

SEQ ID NO: 4306616 - DNA, 25 bp, Homo sapien
tcttccaccttgtatgattgtttac

SEQ ID NO: 4306617 - DNA, 25 bp, Homo sapien
tttacattcccgaaagactctgtgt

SEQ ID NO: 4306618 - DNA, 25 bp, Homo sapien
catagaggacccaagaaggtatggc

SEQ ID NO: 4306619 - DNA, 25 bp, Homo sapien
cacataccatggcttgaaaatcatg

SEQ ID NO: 4306620 - DNA, 25 bp, Homo sapien
ctttatttcctatctgagctcttgg

SEQ ID NO: 4306621 - DNA, 25 bp, Homo sapien
gattcgaatgtatcttatctacagt

SEQ ID NO: 4306622 - DNA, 25 bp, Homo sapien
tctgagcttgattgattatgtctag

SEQ ID NO: 4306623 - DNA, 25 bp, Homo sapien
tacggttctgagcttgattgattat

SEQ ID NO: 4306624 - DNA, 25 bp, Homo sapien
ggacaaatacggttctgagcttgat

SEQ ID NO: 4306625 - DNA, 25 bp, Homo sapien
tgattgattatgtctagcttgggca

SEQ ID NO: 4306626 - DNA, 25 bp, Homo sapien
ttttgcaactgcagtgttggatgga

SEQ ID NO: 4306627 - DNA, 25 bp, Homo sapien
aactgcagtgttggatggaatatag

SEQ ID NO: 4306628 - DNA, 25 bp, Homo sapien
atatagtgattctggcggcggtttt

SEQ ID NO: 4306629 - DNA, 25 bp, Homo sapien
ttctggcggcggttttcaggatttg

SEQ ID NO: 4306630 - DNA, 25 bp, Homo sapien
atttcccagatagacacatagagtc

SEQ ID NO: 4306631 - DNA, 25 bp, Homo sapien
catttcccagatagacacatagagt

SEQ ID NO: 4306632 - DNA, 25 bp, Homo sapien
tgtcatggatgtcacgtacatatac

SEQ ID NO: 4306633 - DNA, 25 bp, Homo sapien
ctttgtcatggatgtcacgtacata

SEQ ID NO: 4306634 - DNA, 25 bp, Homo sapien
ttgtcatggatgtcacgtacatata

SEQ ID NO: 4306635 - DNA, 25 bp, Homo sapien
ttcctgtggcttacaggaattcagc

SEQ ID NO: 4306636 - DNA, 25 bp, Homo sapien
ctgtggcttacaggaattcagctgg

SEQ ID NO: 4306637 - DNA, 25 bp, Homo sapien
tcctgtggcttacaggaattcagct

SEQ ID NO: 4306638 - DNA, 25 bp, Homo sapien
cctgtggcttacaggaattcagctg

SEQ ID NO: 4306639 - DNA, 25 bp, Homo sapien
ctctttctttttcctctttatcttg

SEQ ID NO: 4306640 - DNA, 25 bp, Homo sapien
tgagtagtggtctatgaggtaaacc

SEQ ID NO: 4306641 - DNA, 25 bp, Homo sapien
tggtctatgaggtaaaccacctaag

SEQ ID NO: 4306642 - DNA, 25 bp, Homo sapien
tatgaggtaaaccacctaaggtcac

SEQ ID NO: 4306643 - DNA, 25 bp, Homo sapien
tgttctgatgtgagtagtggtctat

SEQ ID NO: 4306644 - DNA, 25 bp, Homo sapien
tcatccctcttcttaagaatcctcc

SEQ ID NO: 4306645 - DNA, 25 bp, Homo sapien
tccctcttcttaagaatcctccagc

SEQ ID NO: 4306646 - DNA, 25 bp, Homo sapien
ttcagatactctgctctgaaatcag

SEQ ID NO: 4306647 - DNA, 25 bp, Homo sapien
atccctcttcttaagaatcctccag

SEQ ID NO: 4306648 - DNA, 25 bp, Homo sapien
gttgtccaataaaaacacacggatg

SEQ ID NO: 4306649 - DNA, 25 bp, Homo sapien
tgtccaataaaaacacacggatgaa

SEQ ID NO: 4306650 - DNA, 25 bp, Homo sapien
atgttgtccaataaaaacacacgga

SEQ ID NO: 4306651 - DNA, 25 bp, Homo sapien
tggggaggagggatgttgtccaata

SEQ ID NO: 4306652 - DNA, 25 bp, Homo sapien
gactgagactcttgtaatacctgaa

SEQ ID NO: 4306653 - DNA, 25 bp, Homo sapien
aaaatcgtcatccacttggcgttga

SEQ ID NO: 4306654 - DNA, 25 bp, Homo sapien
gcagaacttctgctgtcttagagct

SEQ ID NO: 4306655 - DNA, 25 bp, Homo sapien
gtttccttggataagctctgcattt

SEQ ID NO: 4306656 - DNA, 25 bp, Homo sapien
cagtccatggatgccaaagtggcag

SEQ ID NO: 4306657 - DNA, 25 bp, Homo sapien
cacagtctttgccctcaaaaacctt

SEQ ID NO: 4306658 - DNA, 25 bp, Homo sapien
tagatattagggagcatggcagtcc

SEQ ID NO: 4306659 - DNA, 25 bp, Homo sapien
tattagggagcatggcagtccatgg

SEQ ID NO: 4306660 - DNA, 25 bp, Homo sapien
gaaaatgcagttttttaactgggca

SEQ ID NO: 4306661 - DNA, 25 bp, Homo sapien
cctggaaaatgcagttttttaactg

SEQ ID NO: 4306662 - DNA, 25 bp, Homo sapien
atctgtcagagagcctggaaaatgc

SEQ ID NO: 4306663 - DNA, 25 bp, Homo sapien
ggccacacatatctgtcagagagcc

SEQ ID NO: 4306664 - DNA, 25 bp, Homo sapien
tggaacggcttctccatggcaaccc

SEQ ID NO: 4306665 - DNA, 25 bp, Homo sapien
aaccccttcacagggcgcattcgtt

SEQ ID NO: 4306666 - DNA, 25 bp, Homo sapien
aaggaagtggaatatgtgtgtttga

SEQ ID NO: 4306667 - DNA, 25 bp, Homo sapien
cagggcgcattcgttgcttctctct

SEQ ID NO: 4306668 - DNA, 25 bp, Homo sapien
ggaccgtgcaatactgcatgataga

SEQ ID NO: 4306669 - DNA, 25 bp, Homo sapien
gaagtgggaccgtgcaatactgcat

SEQ ID NO: 4306670 - DNA, 25 bp, Homo sapien
gcaatactgcatgatagaaagttct

SEQ ID NO: 4306671 - DNA, 25 bp, Homo sapien
cagcagcagtaagaagtgggaccgt

SEQ ID NO: 4306672 - DNA, 25 bp, Homo sapien
tgtggccagaaagtgaaccataaac

SEQ ID NO: 4306673 - DNA, 25 bp, Homo sapien
catcttcacgtctggctggcactta

SEQ ID NO: 4306674 - DNA, 25 bp, Homo sapien
gattcctatcacacaagtcattgcc

SEQ ID NO: 4306675 - DNA, 25 bp, Homo sapien
gaacctgtggttgtgttggtcagct

SEQ ID NO: 4306676 - DNA, 25 bp, Homo sapien
tttagcccctttactgccctgctgc

SEQ ID NO: 4306677 - DNA, 25 bp, Homo sapien
atttagcccctttactgccctgctg

SEQ ID NO: 4306678 - DNA, 25 bp, Homo sapien
gatggcaagttgattccaccacaag

SEQ ID NO: 4306679 - DNA, 25 bp, Homo sapien
gagtctggcagagagatttccctgg

SEQ ID NO: 4306680 - DNA, 25 bp, Homo sapien
gagatgcaacaaggagacgcacctt

SEQ ID NO: 4306681 - DNA, 25 bp, Homo sapien
cagactgacggattatgtggctttc

SEQ ID NO: 4306682 - DNA, 25 bp, Homo sapien
cctctgaggattggctgtgatctcc

SEQ ID NO: 4306683 - DNA, 25 bp, Homo sapien
ttcagcatccctcggtgcatggttc

SEQ ID NO: 4306684 - DNA, 25 bp, Homo sapien
tggttctccctatcagactcatcct

SEQ ID NO: 4306685 - DNA, 25 bp, Homo sapien
tattcttgagtagatctctttcagc

SEQ ID NO: 4306686 - DNA, 25 bp, Homo sapien
tggctcaccaaagctctgcttggcc

SEQ ID NO: 4306687 - DNA, 25 bp, Homo sapien
caaaaagattggtttctgagtcatt

SEQ ID NO: 4306688 - DNA, 25 bp, Homo sapien
tagagtcgagtcatcactacccaca

SEQ ID NO: 4306689 - DNA, 25 bp, Homo sapien
ctgagtcattcccaagtgacactgc

SEQ ID NO: 4306690 - DNA, 25 bp, Homo sapien
ggtggccgtactttactctctccca

SEQ ID NO: 4306691 - DNA, 25 bp, Homo sapien
gttttgcacccaggcacactgaggc

SEQ ID NO: 4306692 - DNA, 25 bp, Homo sapien
cacttttgcaagttccttttggccg

SEQ ID NO: 4306693 - DNA, 25 bp, Homo sapien
ttttggccgcaatctgaatgcagtc

SEQ ID NO: 4306694 - DNA, 25 bp, Homo sapien
cttggaaagtctgtgcccctttctt

SEQ ID NO: 4306695 - DNA, 25 bp, Homo sapien
cccctttcttcaggctaaaaggcat

SEQ ID NO: 4306696 - DNA, 25 bp, Homo sapien
tgcccctttcttcaggctaaaaggc

SEQ ID NO: 4306697 - DNA, 25 bp, Homo sapien
ctgtgcccctttcttcaggctaaaa

SEQ ID NO: 4306698 - DNA, 25 bp, Homo sapien
gagaaagatgtcaggctctctctga

SEQ ID NO: 4306699 - DNA, 25 bp, Homo sapien
tccacggggctatccaagagaaaac

SEQ ID NO: 4306700 - DNA, 25 bp, Homo sapien
cactgaagtctagcgtggagagaaa

SEQ ID NO: 4306701 - DNA, 25 bp, Homo sapien
gaaaactgttggctgtgtgagacag

SEQ ID NO: 4306702 - DNA, 25 bp, Homo sapien
cttcctgaaaaaccgcgtgtgtaat

SEQ ID NO: 4306703 - DNA, 25 bp, Homo sapien
tgtaatggaaaagcggacacaagcc

SEQ ID NO: 4306704 - DNA, 25 bp, Homo sapien
tagcagcccaaatgtgactcccatt

SEQ ID NO: 4306705 - DNA, 25 bp, Homo sapien
acacaagccaaagtggaatatagca

SEQ ID NO: 4306706 - DNA, 25 bp, Homo sapien
ttgtgcatgaaaatcaccgtaaggg

SEQ ID NO: 4306707 - DNA, 25 bp, Homo sapien
ctggcaccctgtgagaaccttctca

SEQ ID NO: 4306708 - DNA, 25 bp, Homo sapien
tcccttaaagtccagaagcgtgcat

SEQ ID NO: 4306709 - DNA, 25 bp, Homo sapien
cctcagttttgcatcatttctcctc

SEQ ID NO: 4306710 - DNA, 25 bp, Homo sapien
ttctcaggtctggaggattttgctt

SEQ ID NO: 4306711 - DNA, 25 bp, Homo sapien
gagtaccctaaaatgattagatcca

SEQ ID NO: 4306712 - DNA, 25 bp, Homo sapien
tttctgagtaccctaaaatgattag

SEQ ID NO: 4306713 - DNA, 25 bp, Homo sapien
tctgagtaccctaaaatgattagat

SEQ ID NO: 4306714 - DNA, 25 bp, Homo sapien
gaattattctgatggcccttgcctc

SEQ ID NO: 4306715 - DNA, 25 bp, Homo sapien
tggccctaactggatggacttgtgt

SEQ ID NO: 4306716 - DNA, 25 bp, Homo sapien
ggaacttgaattattctgatggccc

SEQ ID NO: 4306717 - DNA, 25 bp, Homo sapien
aatcaatcactattactggaacttg

SEQ ID NO: 4306718 - DNA, 25 bp, Homo sapien
ggagttaaagtcaatttccatagaa

SEQ ID NO: 4306719 - DNA, 25 bp, Homo sapien
tcaggccctggagttaaagtcaatt

SEQ ID NO: 4306720 - DNA, 25 bp, Homo sapien
cctggagttaaagtcaatttccata

SEQ ID NO: 4306721 - DNA, 25 bp, Homo sapien
gccctggagttaaagtcaatttcca

SEQ ID NO: 4306722 - DNA, 25 bp, Homo sapien
gataatgtggttgacaaatgggttt

SEQ ID NO: 4306723 - DNA, 25 bp, Homo sapien
tgggcagtcgatgaaattcacctga

SEQ ID NO: 4306724 - DNA, 25 bp, Homo sapien
ggcagtcgatgaaattcacctgagg

SEQ ID NO: 4306725 - DNA, 25 bp, Homo sapien
actgataatgtggttgacaaatggg

SEQ ID NO: 4306726 - DNA, 25 bp, Homo sapien
aaggtgctaaggaggcgctgggcat

SEQ ID NO: 4306727 - DNA, 25 bp, Homo sapien
cttctcccctggtctgcagtcagat

SEQ ID NO: 4306728 - DNA, 25 bp, Homo sapien
ccctggtctgcagtcagatagactc

SEQ ID NO: 4306729 - DNA, 25 bp, Homo sapien
actccctcttcccaatgggacaaag

SEQ ID NO: 4306730 - DNA, 25 bp, Homo sapien
tccatttgccgatcttctctcttcc

SEQ ID NO: 4306731 - DNA, 25 bp, Homo sapien
ttccatttgccgatcttctctcttc

SEQ ID NO: 4306732 - DNA, 25 bp, Homo sapien
taaagggcagcatcttcctagggca

SEQ ID NO: 4306733 - DNA, 25 bp, Homo sapien
cctagggcatagtcgtctcatggtc

SEQ ID NO: 4306734 - DNA, 25 bp, Homo sapien
gtatgtaaagaaccgcagcagtgct

SEQ ID NO: 4306735 - DNA, 25 bp, Homo sapien
attagctaaagcaagtcgcatggcc

SEQ ID NO: 4306736 - DNA, 25 bp, Homo sapien
tggtgtgaaatttctggacaagagc

SEQ ID NO: 4306737 - DNA, 25 bp, Homo sapien
gaaatttctggacaagagcaccttt

SEQ ID NO: 4306738 - DNA, 25 bp, Homo sapien
tcatttatatggtcgttcagatccc

SEQ ID NO: 4306739 - DNA, 25 bp, Homo sapien
tttatatggtcgttcagatccctgt

SEQ ID NO: 4306740 - DNA, 25 bp, Homo sapien
tatcttttgagcatgtttcacacag

SEQ ID NO: 4306741 - DNA, 25 bp, Homo sapien
tttcctcattgaagcccttggcaaa

SEQ ID NO: 4306742 - DNA, 25 bp, Homo sapien
gacaccagcacgctctacaagtgta

SEQ ID NO: 4306743 - DNA, 25 bp, Homo sapien
atgtttcacacagcagacaccagca

SEQ ID NO: 4306744 - DNA, 25 bp, Homo sapien
ctcatcctcaatggcatcttccttc

SEQ ID NO: 4306745 - DNA, 25 bp, Homo sapien
catcctcaatggcatcttccttcat

SEQ ID NO: 4306746 - DNA, 25 bp, Homo sapien
tttcccttgctctcatcctcaatgg

SEQ ID NO: 4306747 - DNA, 25 bp, Homo sapien
cctttcccttgctctcatcctcaat

SEQ ID NO: 4306748 - DNA, 25 bp, Homo sapien
cttgaatgcaccggtgctcattgat

SEQ ID NO: 4306749 - DNA, 25 bp, Homo sapien
ttgaatgcaccggtgctcattgatt

SEQ ID NO: 4306750 - DNA, 25 bp, Homo sapien
tgacaagagagccattgcagactcc

SEQ ID NO: 4306751 - DNA, 25 bp, Homo sapien
gcagactcctttcacccttgtttaa

SEQ ID NO: 4306752 - DNA, 25 bp, Homo sapien
gatggcatatatatgggcttgaacc

SEQ ID NO: 4306753 - DNA, 25 bp, Homo sapien
aacactatcctcagcaagtctggag

SEQ ID NO: 4306754 - DNA, 25 bp, Homo sapien
acccaagagtccaacttggtaattg

SEQ ID NO: 4306755 - DNA, 25 bp, Homo sapien
tccaagtgttgatgcaccattgtca

SEQ ID NO: 4306756 - DNA, 25 bp, Homo sapien
ccaagtgttgatgcaccattgtcaa

SEQ ID NO: 4306757 - DNA, 25 bp, Homo sapien
acttggtaattgctgtcacattggc

SEQ ID NO: 4306758 - DNA, 25 bp, Homo sapien
tgcacagaggagtgtaccaataact

SEQ ID NO: 4306759 - DNA, 25 bp, Homo sapien
agttcttaaccacttcacttgctta

SEQ ID NO: 4306760 - DNA, 25 bp, Homo sapien
ccaataactagacttatcgatttac

SEQ ID NO: 4306761 - DNA, 25 bp, Homo sapien
taaatgcttcacgtgatgcacagag

SEQ ID NO: 4306762 - DNA, 25 bp, Homo sapien
caatatagaactgagatgcttccaa

SEQ ID NO: 4306763 - DNA, 25 bp, Homo sapien
gtatttgcttcccacaatatagaac

SEQ ID NO: 4306764 - DNA, 25 bp, Homo sapien
ttgcttcccacaatatagaactgag

SEQ ID NO: 4306765 - DNA, 25 bp, Homo sapien
tcccacaatatagaactgagatgct

SEQ ID NO: 4306766 - DNA, 25 bp, Homo sapien
tctgggcagcatctgatagatttct

SEQ ID NO: 4306767 - DNA, 25 bp, Homo sapien
aaagcagaactatggcccaggagga

SEQ ID NO: 4306768 - DNA, 25 bp, Homo sapien
caaatgctgaacaagcctcctctgg

SEQ ID NO: 4306769 - DNA, 25 bp, Homo sapien
aaagccgtgcaaatgtgtagtcaag

SEQ ID NO: 4306770 - DNA, 25 bp, Homo sapien
gcctgctctattaacacaacatatt

SEQ ID NO: 4306771 - DNA, 25 bp, Homo sapien
ttactaggggaagagcactttgctc

SEQ ID NO: 4306772 - DNA, 25 bp, Homo sapien
tgacaaaatgccagtaacctgtatt

SEQ ID NO: 4306773 - DNA, 25 bp, Homo sapien
gtaacctgtattgagaaactctgat

SEQ ID NO: 4306774 - DNA, 25 bp, Homo sapien
aaatgaggattcttaagggagccac

SEQ ID NO: 4306775 - DNA, 25 bp, Homo sapien
tggcccaaggaagcacatcgtcctg

SEQ ID NO: 4306776 - DNA, 25 bp, Homo sapien
gggagccactccaccatgctattaa

SEQ ID NO: 4306777 - DNA, 25 bp, Homo sapien
tctgcttctaccagatggcccaagg

SEQ ID NO: 4306778 - DNA, 25 bp, Homo sapien
tatttctggctccccccaattgaat

SEQ ID NO: 4306779 - DNA, 25 bp, Homo sapien
atatttctggctccccccaattgaa

SEQ ID NO: 4306780 - DNA, 25 bp, Homo sapien
tcatatttctggctccccccaattg

SEQ ID NO: 4306781 - DNA, 25 bp, Homo sapien
tttctggctccccccaattgaatgt

SEQ ID NO: 4306782 - DNA, 25 bp, Homo sapien
gcagatatacttgcctgatgacaat

SEQ ID NO: 4306783 - DNA, 25 bp, Homo sapien
aatttgggtatgcagatatacttgc

SEQ ID NO: 4306784 - DNA, 25 bp, Homo sapien
tctgggctacttgggatctatttct

SEQ ID NO: 4306785 - DNA, 25 bp, Homo sapien
caatgtggcagagatgggtaatgtt

SEQ ID NO: 4306786 - DNA, 25 bp, Homo sapien
caattgtgcattgcccggcagactc

SEQ ID NO: 4306787 - DNA, 25 bp, Homo sapien
tgcattgcccggcagactctcagca

SEQ ID NO: 4306788 - DNA, 25 bp, Homo sapien
aagcaattgtgcattgcccggcaga

SEQ ID NO: 4306789 - DNA, 25 bp, Homo sapien
caaagcaattgtgcattgcccggca

SEQ ID NO: 4306790 - DNA, 25 bp, Homo sapien
gagaatcccaagagtggaatacagg

SEQ ID NO: 4306791 - DNA, 25 bp, Homo sapien
gggccttggactgtcacaataacta

SEQ ID NO: 4306792 - DNA, 25 bp, Homo sapien
tggactgtcacaataactatagcag

SEQ ID NO: 4306793 - DNA, 25 bp, Homo sapien
aaggagtcatgcctacaaggacgat

SEQ ID NO: 4306794 - DNA, 25 bp, Homo sapien
aattcaagggatccaactcaaaact

SEQ ID NO: 4306795 - DNA, 25 bp, Homo sapien
taattcaagggatccaactcaaaac

SEQ ID NO: 4306796 - DNA, 25 bp, Homo sapien
ataattcaagggatccaactcaaaa

SEQ ID NO: 4306797 - DNA, 25 bp, Homo sapien
gataattcaagggatccaactcaaa

SEQ ID NO: 4306798 - DNA, 25 bp, Homo sapien
tccatgtcttcatcgtggagaccaa

SEQ ID NO: 4306799 - DNA, 25 bp, Homo sapien
ctttgccagatctgcacccctgggc

SEQ ID NO: 4306800 - DNA, 25 bp, Homo sapien
gctgagtgagagcaaccagtggatt

SEQ ID NO: 4306801 - DNA, 25 bp, Homo sapien
gagaccaactgaacctctcaccttg

SEQ ID NO: 4306802 - DNA, 25 bp, Homo sapien
gaattggccattgggtttctcaatc

SEQ ID NO: 4306803 - DNA, 25 bp, Homo sapien
aggccctcctccatgggttagagtg

SEQ ID NO: 4306804 - DNA, 25 bp, Homo sapien
tcaaggccctcctccatgggttaga

SEQ ID NO: 4306805 - DNA, 25 bp, Homo sapien
gggagaattggccattgggtttctc

SEQ ID NO: 4306806 - DNA, 25 bp, Homo sapien
catccatttgaggtgggctgctcaa

SEQ ID NO: 4306807 - DNA, 25 bp, Homo sapien
caaggtcggatgagatccactgcct

SEQ ID NO: 4306808 - DNA, 25 bp, Homo sapien
gctgctcaaaatgcgttcactggga

SEQ ID NO: 4306809 - DNA, 25 bp, Homo sapien
taacgttcagctgctcaccacagga

SEQ ID NO: 4306810 - DNA, 25 bp, Homo sapien
cacgaagtttaacctgaccagtgag

SEQ ID NO: 4306811 - DNA, 25 bp, Homo sapien
ccagtgagaatatgaccacaaattc

SEQ ID NO: 4306812 - DNA, 25 bp, Homo sapien
tttgaggtcacgaagtttaacctga

SEQ ID NO: 4306813 - DNA, 25 bp, Homo sapien
tcaacccgttcgattctgtttcacc

SEQ ID NO: 4306814 - DNA, 25 bp, Homo sapien
tttgaggatttgatagagtaggatc

SEQ ID NO: 4306815 - DNA, 25 bp, Homo sapien
tgtttgaggatttgatagagtagga

SEQ ID NO: 4306816 - DNA, 25 bp, Homo sapien
aaagcttaggtctaaattcagtttg

SEQ ID NO: 4306817 - DNA, 25 bp, Homo sapien
tcagtttgtagattaaatgtgttca

SEQ ID NO: 4306818 - DNA, 25 bp, Homo sapien
gtagatcagccaagaaggtcttgac

SEQ ID NO: 4306819 - DNA, 25 bp, Homo sapien
aggcaggtagatcagccaagaaggt

SEQ ID NO: 4306820 - DNA, 25 bp, Homo sapien
aggtagatcagccaagaaggtcttg

SEQ ID NO: 4306821 - DNA, 25 bp, Homo sapien
gcaggtagatcagccaagaaggtct

SEQ ID NO: 4306822 - DNA, 25 bp, Homo sapien
gacttctttgtacccgttgatgata

SEQ ID NO: 4306823 - DNA, 25 bp, Homo sapien
gacaaagccaggacttctttgtacc

SEQ ID NO: 4306824 - DNA, 25 bp, Homo sapien
ccaggacttctttgtacccgttgat

SEQ ID NO: 4306825 - DNA, 25 bp, Homo sapien
ctttgtacccgttgatgataaaatg

SEQ ID NO: 4306826 - DNA, 25 bp, Homo sapien
tcagacactggcttgatgatccgcc

SEQ ID NO: 4306827 - DNA, 25 bp, Homo sapien
tacgatttcaacgatgcccctggag

SEQ ID NO: 4306828 - DNA, 25 bp, Homo sapien
gacgttcagccgtatggcttcactg

SEQ ID NO: 4306829 - DNA, 25 bp, Homo sapien
gaagagaggatgcagagtgtcccct

SEQ ID NO: 4306830 - DNA, 25 bp, Homo sapien
ggccagcagtgtgtccctgaactca

SEQ ID NO: 4306831 - DNA, 25 bp, Homo sapien
ttggccagcagtgtgtccctgaact

SEQ ID NO: 4306832 - DNA, 25 bp, Homo sapien
gccagcagtgtgtccctgaactcag

SEQ ID NO: 4306833 - DNA, 25 bp, Homo sapien
ccagcagtgtgtccctgaactcaga

SEQ ID NO: 4306834 - DNA, 25 bp, Homo sapien
caactaagaattttgcctctctcct

SEQ ID NO: 4306835 - DNA, 25 bp, Homo sapien
ttgcctctctcctgtctgcaggcat

SEQ ID NO: 4306836 - DNA, 25 bp, Homo sapien
aactaagaattttgcctctctcctg

SEQ ID NO: 4306837 - DNA, 25 bp, Homo sapien
attttgcctctctcctgtctgcagg

SEQ ID NO: 4306838 - DNA, 25 bp, Homo sapien
ttagagagaattaaagactatcttc

SEQ ID NO: 4306839 - DNA, 25 bp, Homo sapien
aaaacaaagggaccagatgctgcca

SEQ ID NO: 4306840 - DNA, 25 bp, Homo sapien
gaaatatgaacctcctgtaccaact

SEQ ID NO: 4306841 - DNA, 25 bp, Homo sapien
ctcatggaggaagaattcattagaa

SEQ ID NO: 4306842 - DNA, 25 bp, Homo sapien
gaacatgcaccgtccatcgtgttta

SEQ ID NO: 4306843 - DNA, 25 bp, Homo sapien
cttattcagaagtacctaggtgatg

SEQ ID NO: 4306844 - DNA, 25 bp, Homo sapien
ggaattgttccgagttgctgaagaa

SEQ ID NO: 4306845 - DNA, 25 bp, Homo sapien
tgatgggcccaaactcgtacgggaa

SEQ ID NO: 4306846 - DNA, 25 bp, Homo sapien
tgtaaccctggacgacctgatcatg

SEQ ID NO: 4306847 - DNA, 25 bp, Homo sapien
cccctgcctgatgaaaagacgaaga

SEQ ID NO: 4306848 - DNA, 25 bp, Homo sapien
gattcacacaagcaggatgacgctg

SEQ ID NO: 4306849 - DNA, 25 bp, Homo sapien
ccaggccgcattgacaggaagattg

SEQ ID NO: 4306850 - DNA, 25 bp, Homo sapien
taagtacttgttgctgtaacacagc

SEQ ID NO: 4306851 - DNA, 25 bp, Homo sapien
gcttgggaagctgtccagattttct

SEQ ID NO: 4306852 - DNA, 25 bp, Homo sapien
agattttctcccaagagggctccag

SEQ ID NO: 4306853 - DNA, 25 bp, Homo sapien
ccagagttagataagtacttgttgc

SEQ ID NO: 4306854 - DNA, 25 bp, Homo sapien
gatactatgccagtttgttcaggct

SEQ ID NO: 4306855 - DNA, 25 bp, Homo sapien
tccatgggcacttgtaaattcaacg

SEQ ID NO: 4306856 - DNA, 25 bp, Homo sapien
caggctagactgcttcactaaatgg

SEQ ID NO: 4306857 - DNA, 25 bp, Homo sapien
taagagctgattacagtccatgggc

SEQ ID NO: 4306858 - DNA, 25 bp, Homo sapien
taaaatcacgaagcagagagggctg

SEQ ID NO: 4306859 - DNA, 25 bp, Homo sapien
tatgctccttgggaatccagagagg

SEQ ID NO: 4306860 - DNA, 25 bp, Homo sapien
gaacatgcccttagtggtgatccat

SEQ ID NO: 4306861 - DNA, 25 bp, Homo sapien
tgaggaccctttggaacatacatcc

SEQ ID NO: 4306862 - DNA, 25 bp, Homo sapien
tctccttccaaacacggattcatgt

SEQ ID NO: 4306863 - DNA, 25 bp, Homo sapien
ttgactttattgccactgctacagg

SEQ ID NO: 4306864 - DNA, 25 bp, Homo sapien
aaacacggattcatgtgacaccacc

SEQ ID NO: 4306865 - DNA, 25 bp, Homo sapien
gaccaacctgagtaatctggcagca

SEQ ID NO: 4306866 - DNA, 25 bp, Homo sapien
aagacaggagcgacagtgacggttc

SEQ ID NO: 4306867 - DNA, 25 bp, Homo sapien
cgacagtgacggttccacctggaag

SEQ ID NO: 4306868 - DNA, 25 bp, Homo sapien
ccagaggtccacaactgaagacagg

SEQ ID NO: 4306869 - DNA, 25 bp, Homo sapien
tggccagaggtccacaactgaagac

SEQ ID NO: 4306870 - DNA, 25 bp, Homo sapien
ctggacacccagattaggagggtgt

SEQ ID NO: 4306871 - DNA, 25 bp, Homo sapien
cccatggggacacaaggtacttctg

SEQ ID NO: 4306872 - DNA, 25 bp, Homo sapien
cacaaggtacttctgatgccaaaac

SEQ ID NO: 4306873 - DNA, 25 bp, Homo sapien
gggacacaaggtacttctgatgcca

SEQ ID NO: 4306874 - DNA, 25 bp, Homo sapien
tgaacccatggggacacaaggtact

SEQ ID NO: 4306875 - DNA, 25 bp, Homo sapien
tcaacacaagaaggttgagcccgag

SEQ ID NO: 4306876 - DNA, 25 bp, Homo sapien
ctgtcccgggaagcaagagcacttg

SEQ ID NO: 4306877 - DNA, 25 bp, Homo sapien
tattgcagcacctgtgcacggcgac

SEQ ID NO: 4306878 - DNA, 25 bp, Homo sapien
gaccgtttgtgaccgctcttctatg

SEQ ID NO: 4306879 - DNA, 25 bp, Homo sapien
gagtaattccactctgaacctgcca

SEQ ID NO: 4306880 - DNA, 25 bp, Homo sapien
gaactactctcatggctcgacctga

SEQ ID NO: 4306881 - DNA, 25 bp, Homo sapien
gctcgacctgagtgagtaattccac

SEQ ID NO: 4306882 - DNA, 25 bp, Homo sapien
cataagtggaactactctcatggct

SEQ ID NO: 4306883 - DNA, 25 bp, Homo sapien
gactcgtccttgagccacttacaca

SEQ ID NO: 4306884 - DNA, 25 bp, Homo sapien
gtccatcggcatcacgggactcgtc

SEQ ID NO: 4306885 - DNA, 25 bp, Homo sapien
tcggcatcacgggactcgtccttga

SEQ ID NO: 4306886 - DNA, 25 bp, Homo sapien
acgggactcgtccttgagccactta

SEQ ID NO: 4306887 - DNA, 25 bp, Homo sapien
ctgcagatgtcacagttggcatccc

SEQ ID NO: 4306888 - DNA, 25 bp, Homo sapien
ctgcctgcagcccaataagccaaga

SEQ ID NO: 4306889 - DNA, 25 bp, Homo sapien
gcagatgtcacagttggcatccctg

SEQ ID NO: 4306890 - DNA, 25 bp, Homo sapien
gcagcccaataagccaagaagacat

SEQ ID NO: 4306891 - DNA, 25 bp, Homo sapien
tagacatgtaggtttccaagtgaaa

SEQ ID NO: 4306892 - DNA, 25 bp, Homo sapien
gaatccctgtgaattttgctacagc

SEQ ID NO: 4306893 - DNA, 25 bp, Homo sapien
tgtctttgtctaactggccatcata

SEQ ID NO: 4306894 - DNA, 25 bp, Homo sapien
cctgggccaaaatatcggaagggat

SEQ ID NO: 4306895 - DNA, 25 bp, Homo sapien
ccaacaaaaataagaagagacaaag

SEQ ID NO: 4306896 - DNA, 25 bp, Homo sapien
agacctagaaagagatttagactgc

SEQ ID NO: 4306897 - DNA, 25 bp, Homo sapien
cagatcaacaagaccgaaagttaag

SEQ ID NO: 4306898 - DNA, 25 bp, Homo sapien
agaaagagatttagactgccacaca

SEQ ID NO: 4306899 - DNA, 25 bp, Homo sapien
ctcttaatataagtatcaagatctt

SEQ ID NO: 4306900 - DNA, 25 bp, Homo sapien
cttgactcttaatataagtatcaag

SEQ ID NO: 4306901 - DNA, 25 bp, Homo sapien
tcttaatataagtatcaagatcttc

SEQ ID NO: 4306902 - DNA, 25 bp, Homo sapien
ttagaggagttaactttgagatgag

SEQ ID NO: 4306903 - DNA, 25 bp, Homo sapien
cactacagaagtttgttgcaaagga

SEQ ID NO: 4306904 - DNA, 25 bp, Homo sapien
ttgagatgagttgatccttcactac

SEQ ID NO: 4306905 - DNA, 25 bp, Homo sapien
taatccattagaggagttaactttg

SEQ ID NO: 4306906 - DNA, 25 bp, Homo sapien
tttcccaatagtgttctgaagtaat

SEQ ID NO: 4306907 - DNA, 25 bp, Homo sapien
tcccaatagtgttctgaagtaattc

SEQ ID NO: 4306908 - DNA, 25 bp, Homo sapien
cccaatagtgttctgaagtaattcc

SEQ ID NO: 4306909 - DNA, 25 bp, Homo sapien
gtttcccaatagtgttctgaagtaa

SEQ ID NO: 4306910 - DNA, 25 bp, Homo sapien
tcaaggggtcaatgtaaatgacaga

SEQ ID NO: 4306911 - DNA, 25 bp, Homo sapien
cttgcagtttcaaggggtcaatgta

SEQ ID NO: 4306912 - DNA, 25 bp, Homo sapien
acaggcctgagggtgacatagagaa

SEQ ID NO: 4306913 - DNA, 25 bp, Homo sapien
tcagtgttgtgccaatttaggatta

SEQ ID NO: 4306914 - DNA, 25 bp, Homo sapien
cactgtgaagtattctgcagcaatt

SEQ ID NO: 4306915 - DNA, 25 bp, Homo sapien
catccttcactaccaaaaactaact

SEQ ID NO: 4306916 - DNA, 25 bp, Homo sapien
ggaatcttagtacatccttcactac

SEQ ID NO: 4306917 - DNA, 25 bp, Homo sapien
gtatatgaaaagctgagacgacagg

SEQ ID NO: 4306918 - DNA, 25 bp, Homo sapien
gcctgaactacaaacgtatttccaa

SEQ ID NO: 4306919 - DNA, 25 bp, Homo sapien
tatcaacagcatgattgagcagggt

SEQ ID NO: 4306920 - DNA, 25 bp, Homo sapien
tagtgatgtgcaccactctaccacc

SEQ ID NO: 4306921 - DNA, 25 bp, Homo sapien
cagggtgaggaccactgtcaagggc

SEQ ID NO: 4306922 - DNA, 25 bp, Homo sapien
aaaagcctgtaaaatgaccacagga

SEQ ID NO: 4306923 - DNA, 25 bp, Homo sapien
aaagcctgtaaaatgaccacaggac

SEQ ID NO: 4306924 - DNA, 25 bp, Homo sapien
atagtgcagtccaggttatattcaa

SEQ ID NO: 4306925 - DNA, 25 bp, Homo sapien
ccaggtgtgccccagtttttccagg

SEQ ID NO: 4306926 - DNA, 25 bp, Homo sapien
ttttccagggactttatgccaacag

SEQ ID NO: 4306927 - DNA, 25 bp, Homo sapien
gcaccacagcattttgtggaattga

SEQ ID NO: 4306928 - DNA, 25 bp, Homo sapien
tctcggtgcactgccccaattaatt

SEQ ID NO: 4306929 - DNA, 25 bp, Homo sapien
agtttctcaggatctcggtgcactg

SEQ ID NO: 4306930 - DNA, 25 bp, Homo sapien
cagagtttctcaggatctcggtgca

SEQ ID NO: 4306931 - DNA, 25 bp, Homo sapien
gcactgccccaattaattctggtga

SEQ ID NO: 4306932 - DNA, 25 bp, Homo sapien
tcataaagatgttctacttctaagg

SEQ ID NO: 4306933 - DNA, 25 bp, Homo sapien
taaagatgttctacttctaaggaag

SEQ ID NO: 4306934 - DNA, 25 bp, Homo sapien
tgtaagtgttagtttaagtttatca

SEQ ID NO: 4306935 - DNA, 25 bp, Homo sapien
gtttaagtttatcataaagatgttc

SEQ ID NO: 4306936 - DNA, 25 bp, Homo sapien
gcagtgcataatgagcttaaagggc

SEQ ID NO: 4306937 - DNA, 25 bp, Homo sapien
cagtgcataatgagcttaaagggct

SEQ ID NO: 4306938 - DNA, 25 bp, Homo sapien
tcagcagtgcataatgagcttaaag

SEQ ID NO: 4306939 - DNA, 25 bp, Homo sapien
tgcataatgagcttaaagggcttac

SEQ ID NO: 4306940 - DNA, 25 bp, Homo sapien
cacgtaggctagaaagagccagtgc

SEQ ID NO: 4306941 - DNA, 25 bp, Homo sapien
cagcaacactgacttagcacagact

SEQ ID NO: 4306942 - DNA, 25 bp, Homo sapien
tggcttgaggcggacatcagcttac

SEQ ID NO: 4306943 - DNA, 25 bp, Homo sapien
gcacaccattaacacgtaggctaga

SEQ ID NO: 4306944 - DNA, 25 bp, Homo sapien
ttgattaaaccaatctcaactcctc

SEQ ID NO: 4306945 - DNA, 25 bp, Homo sapien
tttctggtctggaagactaggttca

SEQ ID NO: 4306946 - DNA, 25 bp, Homo sapien
ggttcatagttgattaaaccaatct

SEQ ID NO: 4306947 - DNA, 25 bp, Homo sapien
tctggaagactaggttcatagttga

SEQ ID NO: 4306948 - DNA, 25 bp, Homo sapien
attccggtgctaataggttcttcct

SEQ ID NO: 4306949 - DNA, 25 bp, Homo sapien
ggtgctaataggttcttccttacac

SEQ ID NO: 4306950 - DNA, 25 bp, Homo sapien
ggcatctgaaattccggtgctaata

SEQ ID NO: 4306951 - DNA, 25 bp, Homo sapien
cgcatttggcatctgaaattccggt

SEQ ID NO: 4306952 - DNA, 25 bp, Homo sapien
caggatatatttcagagtgactcca

SEQ ID NO: 4306953 - DNA, 25 bp, Homo sapien
gagtgactccaaattcccatctgtt

SEQ ID NO: 4306954 - DNA, 25 bp, Homo sapien
tctgccgttccaaaaaattatcgta

SEQ ID NO: 4306955 - DNA, 25 bp, Homo sapien
gatgtggttctagtcaaacacactt

SEQ ID NO: 4306956 - DNA, 25 bp, Homo sapien
tcttcggtctgctacacccacctca

SEQ ID NO: 4306957 - DNA, 25 bp, Homo sapien
cactccacatatgaatctgcagggc

SEQ ID NO: 4306958 - DNA, 25 bp, Homo sapien
tatgaatctgcagggcatcacattt

SEQ ID NO: 4306959 - DNA, 25 bp, Homo sapien
cacatatgaatctgcagggcatcac

SEQ ID NO: 4306960 - DNA, 25 bp, Homo sapien
ccagaacatcatacatgaaggctaa

SEQ ID NO: 4306961 - DNA, 25 bp, Homo sapien
tgaaggctaaattacttcggttgat

SEQ ID NO: 4306962 - DNA, 25 bp, Homo sapien
gccagaacatcatacatgaaggcta

SEQ ID NO: 4306963 - DNA, 25 bp, Homo sapien
tttgtctgtgcatccactcaaactc

SEQ ID NO: 4306964 - DNA, 25 bp, Homo sapien
tctgtgcatccactcaaactcatct

SEQ ID NO: 4306965 - DNA, 25 bp, Homo sapien
actcaaactcatctcctaacacatt

SEQ ID NO: 4306966 - DNA, 25 bp, Homo sapien
ctatgaaggaattcagcaccaaaac

SEQ ID NO: 4306967 - DNA, 25 bp, Homo sapien
gaggtttggataattagctatttcc

SEQ ID NO: 4306968 - DNA, 25 bp, Homo sapien
ggataattagctatttccagactca

SEQ ID NO: 4306969 - DNA, 25 bp, Homo sapien
ccagagtgaggaggtttggataatt

SEQ ID NO: 4306970 - DNA, 25 bp, Homo sapien
taattagctatttccagactcacca

SEQ ID NO: 4306971 - DNA, 25 bp, Homo sapien
tcatggctgttcttttaagccccaa

SEQ ID NO: 4306972 - DNA, 25 bp, Homo sapien
tggctgttcttttaagccccaagag

SEQ ID NO: 4306973 - DNA, 25 bp, Homo sapien
tgcaaagccccaagaataccctctc

SEQ ID NO: 4306974 - DNA, 25 bp, Homo sapien
ctgtgatagcttgaaaattgcaaag

SEQ ID NO: 4306975 - DNA, 25 bp, Homo sapien
ccaaaccactgagtatctctccatt

SEQ ID NO: 4306976 - DNA, 25 bp, Homo sapien
cagtatctgtcttcgtagtatccat

SEQ ID NO: 4306977 - DNA, 25 bp, Homo sapien
caatttggaggattctctgatggct

SEQ ID NO: 4306978 - DNA, 25 bp, Homo sapien
tggcttttaatagccttgacagttt

SEQ ID NO: 4306979 - DNA, 25 bp, Homo sapien
atattttaaatatgcgcagaagccc

SEQ ID NO: 4306980 - DNA, 25 bp, Homo sapien
aatatgcgcagaagcccaaactctt

SEQ ID NO: 4306981 - DNA, 25 bp, Homo sapien
gatttctttgaaacataatgtatac

SEQ ID NO: 4306982 - DNA, 25 bp, Homo sapien
tcctgctcatgtttggatttctttg

SEQ ID NO: 4306983 - DNA, 25 bp, Homo sapien
tctaaaagcagatattgttcttaaa

SEQ ID NO: 4306984 - DNA, 25 bp, Homo sapien
gggccttcgtctgccactcaacttg

SEQ ID NO: 4306985 - DNA, 25 bp, Homo sapien
tagtcttccatagaagccatctcca

SEQ ID NO: 4306986 - DNA, 25 bp, Homo sapien
gatgcttctgctgtttagtcttcca

SEQ ID NO: 4306987 - DNA, 25 bp, Homo sapien
tcttctaactgtctggggttgagtg

SEQ ID NO: 4306988 - DNA, 25 bp, Homo sapien
tcatcttctaactgtctggggttga

SEQ ID NO: 4306989 - DNA, 25 bp, Homo sapien
catcttctaactgtctggggttgag

SEQ ID NO: 4306990 - DNA, 25 bp, Homo sapien
atcttctaactgtctggggttgagt

SEQ ID NO: 4306991 - DNA, 25 bp, Homo sapien
tgacagttgggcagagatgaccaat

SEQ ID NO: 4306992 - DNA, 25 bp, Homo sapien
ggccaaaagggtcggcagccaggga

SEQ ID NO: 4306993 - DNA, 25 bp, Homo sapien
cagccagggaggagaactgtagcat

SEQ ID NO: 4306994 - DNA, 25 bp, Homo sapien
gggcagagatgaccaatgtgaaaac

SEQ ID NO: 4306995 - DNA, 25 bp, Homo sapien
tatagtcaattgcttgtaagttcat

SEQ ID NO: 4306996 - DNA, 25 bp, Homo sapien
aagaactccctaatatttgatgcta

SEQ ID NO: 4306997 - DNA, 25 bp, Homo sapien
acaataccacaatctcataaaagga

SEQ ID NO: 4306998 - DNA, 25 bp, Homo sapien
tctttctaaatggtgtcttgtcatt

SEQ ID NO: 4306999 - DNA, 25 bp, Homo sapien
ttctggactaacaataccacaatct

SEQ ID NO: 4307000 - DNA, 25 bp, Homo sapien
aaagagcccttttgactgactgaag

SEQ ID NO: 4307001 - DNA, 25 bp, Homo sapien
gatggtgcaagaagccaatgtggcc

SEQ ID NO: 4307002 - DNA, 25 bp, Homo sapien
gcactgggctaggaattaggactcc

SEQ ID NO: 4307003 - DNA, 25 bp, Homo sapien
gtatacagctgtccaatccttgagg

SEQ ID NO: 4307004 - DNA, 25 bp, Homo sapien
taatgtggccaagatcgcttcacca

SEQ ID NO: 4307005 - DNA, 25 bp, Homo sapien
ggccaagatcgcttcaccaatacct

SEQ ID NO: 4307006 - DNA, 25 bp, Homo sapien
aagatcgcttcaccaatacctttgt

SEQ ID NO: 4307007 - DNA, 25 bp, Homo sapien
agtgattaatgtggccaagatcgct

SEQ ID NO: 4307008 - DNA, 25 bp, Homo sapien
tacgtggctatctctaggacaaaaa

SEQ ID NO: 4307009 - DNA, 25 bp, Homo sapien
ttatctttagcagggaaaagtggcc

SEQ ID NO: 4307010 - DNA, 25 bp, Homo sapien
taaaacccacgcgagctattgaaga

SEQ ID NO: 4307011 - DNA, 25 bp, Homo sapien
caactcactcggtcattttgggagg

SEQ ID NO: 4307012 - DNA, 25 bp, Homo sapien
cgtgaacccgtgcatgtacatactg

SEQ ID NO: 4307013 - DNA, 25 bp, Homo sapien
gattaggaagctaggccatcagtgt

SEQ ID NO: 4307014 - DNA, 25 bp, Homo sapien
gcagctacgagttatggtggacaag

SEQ ID NO: 4307015 - DNA, 25 bp, Homo sapien
gaaacagaccaaagcttcgaaggcg

SEQ ID NO: 4307016 - DNA, 25 bp, Homo sapien
ctaaacgttaaatgatgctgattcg

SEQ ID NO: 4307017 - DNA, 25 bp, Homo sapien
cgttaaatgatgctgattcgagaag

SEQ ID NO: 4307018 - DNA, 25 bp, Homo sapien
atgctgattcgagaagaaaacgcac

SEQ ID NO: 4307019 - DNA, 25 bp, Homo sapien
taaatgatgctgattcgagaagaaa

SEQ ID NO: 4307020 - DNA, 25 bp, Homo sapien
tcaagctttccagttccaatcctct

SEQ ID NO: 4307021 - DNA, 25 bp, Homo sapien
agctccttgcgtagggtcaaggatg

SEQ ID NO: 4307022 - DNA, 25 bp, Homo sapien
agcctcaccaggtgcaggagatcaa

SEQ ID NO: 4307023 - DNA, 25 bp, Homo sapien
tgcgtagggtcaaggatgccctctc

SEQ ID NO: 4307024 - DNA, 25 bp, Homo sapien
ggaaagagacgcaacttccagaccc

SEQ ID NO: 4307025 - DNA, 25 bp, Homo sapien
cagttctccacttgggcgggaagct

SEQ ID NO: 4307026 - DNA, 25 bp, Homo sapien
atctgagatgcctcccgcggaaaga

SEQ ID NO: 4307027 - DNA, 25 bp, Homo sapien
ctaggagcggattaacagggcaaag

SEQ ID NO: 4307028 - DNA, 25 bp, Homo sapien
gaaagatcctagctcagattaaagg

SEQ ID NO: 4307029 - DNA, 25 bp, Homo sapien
tataccaattcatcgagtggcctcc

SEQ ID NO: 4307030 - DNA, 25 bp, Homo sapien
tgtcagacatgaaccccgaaactgg

SEQ ID NO: 4307031 - DNA, 25 bp, Homo sapien
gaagcgctaaggtcgacttgtccag

SEQ ID NO: 4307032 - DNA, 25 bp, Homo sapien
ggttgcacgccgacctcagcacagg

SEQ ID NO: 4307033 - DNA, 25 bp, Homo sapien
ctgcaccgagctgagttaactcggt

SEQ ID NO: 4307034 - DNA, 25 bp, Homo sapien
taactcggtaccagccgagaggcag

SEQ ID NO: 4307035 - DNA, 25 bp, Homo sapien
cggcgccccagagagccgggatgag

SEQ ID NO: 4307036 - DNA, 25 bp, Homo sapien
tcctctcgcccctccttatcccttc

SEQ ID NO: 4307037 - DNA, 25 bp, Homo sapien
ccaccccatcctctcgcccctcctt

SEQ ID NO: 4307038 - DNA, 25 bp, Homo sapien
caccccatcctctcgcccctcctta

SEQ ID NO: 4307039 - DNA, 25 bp, Homo sapien
ccatcctctcgcccctccttatccc

SEQ ID NO: 4307040 - DNA, 25 bp, Homo sapien
cggcgcgtccggaactaggtactga

SEQ ID NO: 4307041 - DNA, 25 bp, Homo sapien
ctaggtactgatcgccgcaccggag

SEQ ID NO: 4307042 - DNA, 25 bp, Homo sapien
tagagccggcatccaagtcggaccg

SEQ ID NO: 4307043 - DNA, 25 bp, Homo sapien
atccaagtcggaccggcgcgtccgg

SEQ ID NO: 4307044 - DNA, 25 bp, Homo sapien
cgcgggagccccgggagcggcccat

SEQ ID NO: 4307045 - DNA, 25 bp, Homo sapien
tgaggcaggactcccgatgtttgcc

SEQ ID NO: 4307046 - DNA, 25 bp, Homo sapien
gcgcagctagcagtgcggagccgag

SEQ ID NO: 4307047 - DNA, 25 bp, Homo sapien
agaagcccgaagctcctgcgggaga

SEQ ID NO: 4307048 - DNA, 25 bp, Homo sapien
gttcccacgtctctaccaggagaag

SEQ ID NO: 4307049 - DNA, 25 bp, Homo sapien
gcccagagaacttgcaacagtgaaa

SEQ ID NO: 4307050 - DNA, 25 bp, Homo sapien
ttttagccgtaaaatgacttcctgc

SEQ ID NO: 4307051 - DNA, 25 bp, Homo sapien
tcaccttgcccaggaagtgggtagc

SEQ ID NO: 4307052 - DNA, 25 bp, Homo sapien
gacttctggaactcagacaaggtgt

SEQ ID NO: 4307053 - DNA, 25 bp, Homo sapien
gaagagcagcctattgtcaaatatc

SEQ ID NO: 4307054 - DNA, 25 bp, Homo sapien
aacagaaatgtacgtaatgtgtaaa

SEQ ID NO: 4307055 - DNA, 25 bp, Homo sapien
aaataccaccagagatgggctgatc

SEQ ID NO: 4307056 - DNA, 25 bp, Homo sapien
gataaacaagagatcattgcccaca

SEQ ID NO: 4307057 - DNA, 25 bp, Homo sapien
cacaattcaatttgaactctccatc

SEQ ID NO: 4307058 - DNA, 25 bp, Homo sapien
gaaggatcacaattcaatttgaact

SEQ ID NO: 4307059 - DNA, 25 bp, Homo sapien
tcctctgaaggatcacaattcaatt

SEQ ID NO: 4307060 - DNA, 25 bp, Homo sapien
atgttcctctgaaggatcacaattc

SEQ ID NO: 4307061 - DNA, 25 bp, Homo sapien
gagctgtcagttctaaagcacatac

SEQ ID NO: 4307062 - DNA, 25 bp, Homo sapien
aaagactactttgagctgtcagttc

SEQ ID NO: 4307063 - DNA, 25 bp, Homo sapien
gctgatagctgaaaagactactttg

SEQ ID NO: 4307064 - DNA, 25 bp, Homo sapien
caagatcttggcatgctgatagctg

SEQ ID NO: 4307065 - DNA, 25 bp, Homo sapien
caaatgctctccatggctaagaagg

SEQ ID NO: 4307066 - DNA, 25 bp, Homo sapien
tggtactgagaatcacaactctgcg

SEQ ID NO: 4307067 - DNA, 25 bp, Homo sapien
gaggtagacgcacacgcactggtat

SEQ ID NO: 4307068 - DNA, 25 bp, Homo sapien
tctcgatgcatataacctggaggtg

SEQ ID NO: 4307069 - DNA, 25 bp, Homo sapien
aattacagtcatatgatattctaca

SEQ ID NO: 4307070 - DNA, 25 bp, Homo sapien
tatttacaaattctaaagctgaaaa

SEQ ID NO: 4307071 - DNA, 25 bp, Homo sapien
attacagtcatatgatattctacaa

SEQ ID NO: 4307072 - DNA, 25 bp, Homo sapien
tgataaatagcaatgacacaaaaac

SEQ ID NO: 4307073 - DNA, 25 bp, Homo sapien
taattctaagtctgggtgttggagt

SEQ ID NO: 4307074 - DNA, 25 bp, Homo sapien
tatacaacacataacaatatcctga

SEQ ID NO: 4307075 - DNA, 25 bp, Homo sapien
aaaccacatgaaacacttaacatct

SEQ ID NO: 4307076 - DNA, 25 bp, Homo sapien
catcgaaagagtagttggtgaactt

SEQ ID NO: 4307077 - DNA, 25 bp, Homo sapien
taaattcttctacatcgaaagagta

SEQ ID NO: 4307078 - DNA, 25 bp, Homo sapien
tgcaatacgtggtctgcagcctgaa

SEQ ID NO: 4307079 - DNA, 25 bp, Homo sapien
ggccactttgggtgttgcaatacgt

SEQ ID NO: 4307080 - DNA, 25 bp, Homo sapien
ttctgccgtcgccaagtgatgtagt

SEQ ID NO: 4307081 - DNA, 25 bp, Homo sapien
ccaagtgatgtagtgaacgcctctc

SEQ ID NO: 4307082 - DNA, 25 bp, Homo sapien
gtctaagtaacagcgttcatcttca

SEQ ID NO: 4307083 - DNA, 25 bp, Homo sapien
agtgaacgcctctcagcctggccaa

SEQ ID NO: 4307084 - DNA, 25 bp, Homo sapien
attccaataaatatgtccgtgttgt

SEQ ID NO: 4307085 - DNA, 25 bp, Homo sapien
gatccttagttgatctaaaaaccca

SEQ ID NO: 4307086 - DNA, 25 bp, Homo sapien
tatgtccgtgttgtgtgtgatcctt

SEQ ID NO: 4307087 - DNA, 25 bp, Homo sapien
gtaaatgggtcagaccagctccatg

SEQ ID NO: 4307088 - DNA, 25 bp, Homo sapien
ttttggatctacgaagggaagctga

SEQ ID NO: 4307089 - DNA, 25 bp, Homo sapien
gctaacaacaaaaactccgcatagg

SEQ ID NO: 4307090 - DNA, 25 bp, Homo sapien
taagggtgacactctgaataaacag

SEQ ID NO: 4307091 - DNA, 25 bp, Homo sapien
gaaagaaatgagatctcccagcccc

SEQ ID NO: 4307092 - DNA, 25 bp, Homo sapien
caaaagttgacagtgtctgctgaga

SEQ ID NO: 4307093 - DNA, 25 bp, Homo sapien
tgacctcatccaagcaaaagttgac

SEQ ID NO: 4307094 - DNA, 25 bp, Homo sapien
tctgctgagattggctattacttac

SEQ ID NO: 4307095 - DNA, 25 bp, Homo sapien
aagcaaaagttgacagtgtctgctg

SEQ ID NO: 4307096 - DNA, 25 bp, Homo sapien
taatcaacaatctggacttcaaatg

SEQ ID NO: 4307097 - DNA, 25 bp, Homo sapien
ctccgtgcaagaatggtgactcgaa

SEQ ID NO: 4307098 - DNA, 25 bp, Homo sapien
cgtgcaagaatggtgactcgaattt

SEQ ID NO: 4307099 - DNA, 25 bp, Homo sapien
gaatggtgactcgaatttttccatc

SEQ ID NO: 4307100 - DNA, 25 bp, Homo sapien
caagaatggtgactcgaatttttcc

SEQ ID NO: 4307101 - DNA, 25 bp, Homo sapien
aataacactgcatatgcctgggtag

SEQ ID NO: 4307102 - DNA, 25 bp, Homo sapien
caccgaaggcaaaaaccagctcatt

SEQ ID NO: 4307103 - DNA, 25 bp, Homo sapien
aaaatgtatccacttcaaccaccga

SEQ ID NO: 4307104 - DNA, 25 bp, Homo sapien
gcttgattccttcaccactctcagg

SEQ ID NO: 4307105 - DNA, 25 bp, Homo sapien
gtagtacatgctgggcaaatgccct

SEQ ID NO: 4307106 - DNA, 25 bp, Homo sapien
aatagtccagtattttgacagccag

SEQ ID NO: 4307107 - DNA, 25 bp, Homo sapien
gtgtgatgtttagtctgtgtagtac

SEQ ID NO: 4307108 - DNA, 25 bp, Homo sapien
cctgaatagtccagtattttgacag

SEQ ID NO: 4307109 - DNA, 25 bp, Homo sapien
gcccatacctcatgcgggggagtaa

SEQ ID NO: 4307110 - DNA, 25 bp, Homo sapien
tagaacagcccatacctcatgcggg

SEQ ID NO: 4307111 - DNA, 25 bp, Homo sapien
tattatagaacagcccatacctcat

SEQ ID NO: 4307112 - DNA, 25 bp, Homo sapien
cagaggagtattatagaacagccca

SEQ ID NO: 4307113 - DNA, 25 bp, Homo sapien
ggctgcatgattaacaacactgagg

SEQ ID NO: 4307114 - DNA, 25 bp, Homo sapien
ccattttgcattgcttgaatagcac

SEQ ID NO: 4307115 - DNA, 25 bp, Homo sapien
gaaatcagtggtaatggctaatagg

SEQ ID NO: 4307116 - DNA, 25 bp, Homo sapien
aagaagatgtaatttgcacccttca

SEQ ID NO: 4307117 - DNA, 25 bp, Homo sapien
gtgtcggagaataggtcaccatatc

SEQ ID NO: 4307118 - DNA, 25 bp, Homo sapien
tccatgtgtcggagaataggtcacc

SEQ ID NO: 4307119 - DNA, 25 bp, Homo sapien
atgcattccatgtgtcggagaatag

SEQ ID NO: 4307120 - DNA, 25 bp, Homo sapien
tgtataacgtcataatcagtaaatg

SEQ ID NO: 4307121 - DNA, 25 bp, Homo sapien
agaaccatggcgggaggtgaaagac

SEQ ID NO: 4307122 - DNA, 25 bp, Homo sapien
cagaaccatggcgggaggtgaaaga

SEQ ID NO: 4307123 - DNA, 25 bp, Homo sapien
gaaccatggcgggaggtgaaagaca

SEQ ID NO: 4307124 - DNA, 25 bp, Homo sapien
tacacgtattgggtaattacagccg

SEQ ID NO: 4307125 - DNA, 25 bp, Homo sapien
tcctgcatggcagtcaaactttaaa

SEQ ID NO: 4307126 - DNA, 25 bp, Homo sapien
tcctagatacgatggggatacacgt

SEQ ID NO: 4307127 - DNA, 25 bp, Homo sapien
tgcccagggctctctaaatctcgtg

SEQ ID NO: 4307128 - DNA, 25 bp, Homo sapien
ccaatcgctgcttgctacccagttc

SEQ ID NO: 4307129 - DNA, 25 bp, Homo sapien
caaactgttccaatcgctgcttgct

SEQ ID NO: 4307130 - DNA, 25 bp, Homo sapien
aactgttccaatcgctgcttgctac

SEQ ID NO: 4307131 - DNA, 25 bp, Homo sapien
tccaatcgctgcttgctacccagtt

SEQ ID NO: 4307132 - DNA, 25 bp, Homo sapien
gatgggtccctctatgcatgtttgc

SEQ ID NO: 4307133 - DNA, 25 bp, Homo sapien
tgccacatgctgaagggagtaaact

SEQ ID NO: 4307134 - DNA, 25 bp, Homo sapien
tcatccaagaccatcaggactctgg

SEQ ID NO: 4307135 - DNA, 25 bp, Homo sapien
ccaccgggagggattcatgtcatag

SEQ ID NO: 4307136 - DNA, 25 bp, Homo sapien
tgaactgctagcactccctctggaa

SEQ ID NO: 4307137 - DNA, 25 bp, Homo sapien
tgtgaactgctagcactccctctgg

SEQ ID NO: 4307138 - DNA, 25 bp, Homo sapien
actgctagcactccctctggaagaa

SEQ ID NO: 4307139 - DNA, 25 bp, Homo sapien
ctgtgtgaactgctagcactccctc

SEQ ID NO: 4307140 - DNA, 25 bp, Homo sapien
cagaatgttgagtggaaccttatat

SEQ ID NO: 4307141 - DNA, 25 bp, Homo sapien
tgttgagtggaaccttatatgaccc

SEQ ID NO: 4307142 - DNA, 25 bp, Homo sapien
ctgaatagactcacaccaagagccg

SEQ ID NO: 4307143 - DNA, 25 bp, Homo sapien
catatgagtgtcgtgagtcagaatg

SEQ ID NO: 4307144 - DNA, 25 bp, Homo sapien
tgtcccagaggaacactaagccaaa

SEQ ID NO: 4307145 - DNA, 25 bp, Homo sapien
gagtcacacactgatacaagggaaa

SEQ ID NO: 4307146 - DNA, 25 bp, Homo sapien
gacagtactgaagcggagagcacat

SEQ ID NO: 4307147 - DNA, 25 bp, Homo sapien
gtacagatacattcgcacccatccg

SEQ ID NO: 4307148 - DNA, 25 bp, Homo sapien
cagaagtggtgatacatgttaacac

SEQ ID NO: 4307149 - DNA, 25 bp, Homo sapien
attaacgtgctgagtaatataaaga

SEQ ID NO: 4307150 - DNA, 25 bp, Homo sapien
gatgtacacgtcagtactgaatgag

SEQ ID NO: 4307151 - DNA, 25 bp, Homo sapien
ggtgtcccacatcacgatgtacacg

SEQ ID NO: 4307152 - DNA, 25 bp, Homo sapien
gttgagctgagtatagctttgtagc

SEQ ID NO: 4307153 - DNA, 25 bp, Homo sapien
gcttttgcgctgaccttcagacgtc

SEQ ID NO: 4307154 - DNA, 25 bp, Homo sapien
cgtcaatgtacggatgtcaagttta

SEQ ID NO: 4307155 - DNA, 25 bp, Homo sapien
tgtacggatgtcaagtttacagtgc

SEQ ID NO: 4307156 - DNA, 25 bp, Homo sapien
gaccttcagacgtcaatgtacggat

SEQ ID NO: 4307157 - DNA, 25 bp, Homo sapien
aatcaagatagagattggttgctct

SEQ ID NO: 4307158 - DNA, 25 bp, Homo sapien
tgctctgcagtactgaagataacgg

SEQ ID NO: 4307159 - DNA, 25 bp, Homo sapien
caagatagagattggttgctctgca

SEQ ID NO: 4307160 - DNA, 25 bp, Homo sapien
tgaagataacgggaacacaccagac

SEQ ID NO: 4307161 - DNA, 25 bp, Homo sapien
tctggcatatccaaagtcagcttgt

SEQ ID NO: 4307162 - DNA, 25 bp, Homo sapien
gtttccaaaatatgtcctcagctga

SEQ ID NO: 4307163 - DNA, 25 bp, Homo sapien
taggctgacagagcacatgcatctc

SEQ ID NO: 4307164 - DNA, 25 bp, Homo sapien
ttccttaggctgacagagcacatgc

SEQ ID NO: 4307165 - DNA, 25 bp, Homo sapien
aaacctgaactctggtttgcaggat

SEQ ID NO: 4307166 - DNA, 25 bp, Homo sapien
ccagcagtactttagcttctctagg

SEQ ID NO: 4307167 - DNA, 25 bp, Homo sapien
accccagcagtactttagcttctct

SEQ ID NO: 4307168 - DNA, 25 bp, Homo sapien
gtttgcaggatttctcataacccca

SEQ ID NO: 4307169 - DNA, 25 bp, Homo sapien
catagttatacagaggttcgcctgg

SEQ ID NO: 4307170 - DNA, 25 bp, Homo sapien
tgctcctctggcaagcggatgctgg

SEQ ID NO: 4307171 - DNA, 25 bp, Homo sapien
caatatgcctattgttgtgcaaaaa

SEQ ID NO: 4307172 - DNA, 25 bp, Homo sapien
ttcctacagacagtggcaatatgcc

SEQ ID NO: 4307173 - DNA, 25 bp, Homo sapien
cttcatgaagtaagactccaaagac

SEQ ID NO: 4307174 - DNA, 25 bp, Homo sapien
ctgtgagtattaggaggagcttcat

SEQ ID NO: 4307175 - DNA, 25 bp, Homo sapien
gtgagacttcatgaagtaagactcc

SEQ ID NO: 4307176 - DNA, 25 bp, Homo sapien
cattctgaccactcagtgagacttc

SEQ ID NO: 4307177 - DNA, 25 bp, Homo sapien
gaaccactcagaagcttctgtgatg

SEQ ID NO: 4307178 - DNA, 25 bp, Homo sapien
ctgtgatgtttcaggtctctaaaac

SEQ ID NO: 4307179 - DNA, 25 bp, Homo sapien
ttgaatcttcagaaccactcagaag

SEQ ID NO: 4307180 - DNA, 25 bp, Homo sapien
cactcagaagcttctgtgatgtttc

SEQ ID NO: 4307181 - DNA, 25 bp, Homo sapien
ggttatccaagtccattgtcctcca

SEQ ID NO: 4307182 - DNA, 25 bp, Homo sapien
taaagtcattgttatgaccaagccc

SEQ ID NO: 4307183 - DNA, 25 bp, Homo sapien
caagccctgacctttggttatccaa

SEQ ID NO: 4307184 - DNA, 25 bp, Homo sapien
ccaggccttcctattttttgactcg

SEQ ID NO: 4307185 - DNA, 25 bp, Homo sapien
gaagtaacgcttaggcgatggaaaa

SEQ ID NO: 4307186 - DNA, 25 bp, Homo sapien
gagaagtaacgcttaggcgatggaa

SEQ ID NO: 4307187 - DNA, 25 bp, Homo sapien
cagtggagaagtaacgcttaggcga

SEQ ID NO: 4307188 - DNA, 25 bp, Homo sapien
cgatcagtggagaagtaacgcttag

SEQ ID NO: 4307189 - DNA, 25 bp, Homo sapien
ctaaagacgcagatcagaaagctgg

SEQ ID NO: 4307190 - DNA, 25 bp, Homo sapien
taaagacgcagatcagaaagctggc

SEQ ID NO: 4307191 - DNA, 25 bp, Homo sapien
caaagccttcctggtgtcggtcgtc

SEQ ID NO: 4307192 - DNA, 25 bp, Homo sapien
gcctggcacaaagccttcctggtgt

SEQ ID NO: 4307193 - DNA, 25 bp, Homo sapien
gcacaaagccttcctggtgtcggtc

SEQ ID NO: 4307194 - DNA, 25 bp, Homo sapien
ccacttgcataaggcggctgggggt

SEQ ID NO: 4307195 - DNA, 25 bp, Homo sapien
aaggcccgccgggatgggtggctgc

SEQ ID NO: 4307196 - DNA, 25 bp, Homo sapien
gcaaggcccgccgggatgggtggct

SEQ ID NO: 4307197 - DNA, 25 bp, Homo sapien
ctgcaaggcccgccgggatgggtgg

SEQ ID NO: 4307198 - DNA, 25 bp, Homo sapien
tgcaaggcccgccgggatgggtggc

SEQ ID NO: 4307199 - DNA, 25 bp, Homo sapien
agaaacccttgattcgatttccaca

SEQ ID NO: 4307200 - DNA, 25 bp, Homo sapien
gaaacccttgattcgatttccacag

SEQ ID NO: 4307201 - DNA, 25 bp, Homo sapien
tcaaagcagctggaatcactccact

SEQ ID NO: 4307202 - DNA, 25 bp, Homo sapien
aaagcagctggaatcactccactcc

SEQ ID NO: 4307203 - DNA, 25 bp, Homo sapien
aggagacggcggctgttccagagga

SEQ ID NO: 4307204 - DNA, 25 bp, Homo sapien
ccagaggagggagtcgtcataaccg

SEQ ID NO: 4307205 - DNA, 25 bp, Homo sapien
gagtcgtcataaccggctactgccg

SEQ ID NO: 4307206 - DNA, 25 bp, Homo sapien
gagggagtcgtcataaccggctact

SEQ ID NO: 4307207 - DNA, 25 bp, Homo sapien
cagggggcgccaaggagcagctggg

SEQ ID NO: 4307208 - DNA, 25 bp, Homo sapien
aacctcgggcgcgggagctgggcca

SEQ ID NO: 4307209 - DNA, 25 bp, Homo sapien
cggaaacctcgggcgcgggagctgg

SEQ ID NO: 4307210 - DNA, 25 bp, Homo sapien
gctgggccagggggcgccaaggagc

SEQ ID NO: 4307211 - DNA, 25 bp, Homo sapien
aaagaccgacggcacgtgccggcgc

SEQ ID NO: 4307212 - DNA, 25 bp, Homo sapien
ccggaaagaccgacggcacgtgccg

SEQ ID NO: 4307213 - DNA, 25 bp, Homo sapien
ggccggaaagaccgacggcacgtgc

SEQ ID NO: 4307214 - DNA, 25 bp, Homo sapien
cagggccggaaagaccgacggcacg

SEQ ID NO: 4307215 - DNA, 25 bp, Homo sapien
caggaggcggaacacactaacaaaa

SEQ ID NO: 4307216 - DNA, 25 bp, Homo sapien
ccagatggagggaaactataggaca

SEQ ID NO: 4307217 - DNA, 25 bp, Homo sapien
tgcaggctttaccaccgaagtagat

SEQ ID NO: 4307218 - DNA, 25 bp, Homo sapien
tacatagccctatgtcagtgcagtg

SEQ ID NO: 4307219 - DNA, 25 bp, Homo sapien
tattttaaaatctttattcaatcag

SEQ ID NO: 4307220 - DNA, 25 bp, Homo sapien
attttaaaatctttattcaatcaga

SEQ ID NO: 4307221 - DNA, 25 bp, Homo sapien
aatggtagactcagtttagcctccc

SEQ ID NO: 4307222 - DNA, 25 bp, Homo sapien
cccaagaattggaaggacatctaca

SEQ ID NO: 4307223 - DNA, 25 bp, Homo sapien
gtttcctaggtcagaagttatccac

SEQ ID NO: 4307224 - DNA, 25 bp, Homo sapien
caaccacagtctgattacaggtgag

SEQ ID NO: 4307225 - DNA, 25 bp, Homo sapien
gaaggcatagctacttttaaaagct

SEQ ID NO: 4307226 - DNA, 25 bp, Homo sapien
caatcagagatccaatgacagaaac

SEQ ID NO: 4307227 - DNA, 25 bp, Homo sapien
cagcacctggccgtaaatgagagtt

SEQ ID NO: 4307228 - DNA, 25 bp, Homo sapien
tcttggaacgtatgtcccatgggta

SEQ ID NO: 4307229 - DNA, 25 bp, Homo sapien
tacagacttaattgtgaaagctggg

SEQ ID NO: 4307230 - DNA, 25 bp, Homo sapien
aaaggtaccacattttatacagact

SEQ ID NO: 4307231 - DNA, 25 bp, Homo sapien
tctctggataggtaccaaaaggtac

SEQ ID NO: 4307232 - DNA, 25 bp, Homo sapien
cagacagtgtcagtgtgactcttac

SEQ ID NO: 4307233 - DNA, 25 bp, Homo sapien
ttttacactctacagtaaatcccac

SEQ ID NO: 4307234 - DNA, 25 bp, Homo sapien
tcttctctagccatatttatatgag

SEQ ID NO: 4307235 - DNA, 25 bp, Homo sapien
taataaatctctgtgctattcaagg

SEQ ID NO: 4307236 - DNA, 25 bp, Homo sapien
caaagtttcagtatgttaacattac

SEQ ID NO: 4307237 - DNA, 25 bp, Homo sapien
gtttgatgggaattcaattttcaca

SEQ ID NO: 4307238 - DNA, 25 bp, Homo sapien
agtttgatgggaattcaattttcac

SEQ ID NO: 4307239 - DNA, 25 bp, Homo sapien
tacatcttcgagatctaatcgaagt

SEQ ID NO: 4307240 - DNA, 25 bp, Homo sapien
tttttacatcttcgagatctaatcg

SEQ ID NO: 4307241 - DNA, 25 bp, Homo sapien
cgagatctaatcgaagttcttctgc

SEQ ID NO: 4307242 - DNA, 25 bp, Homo sapien
cttcgagatctaatcgaagttcttc

SEQ ID NO: 4307243 - DNA, 25 bp, Homo sapien
ctgcagaatagtgttgtacctttga

SEQ ID NO: 4307244 - DNA, 25 bp, Homo sapien
cagaatagtgttgtacctttgatcc

SEQ ID NO: 4307245 - DNA, 25 bp, Homo sapien
tagtgttgtacctttgatccaaatc

SEQ ID NO: 4307246 - DNA, 25 bp, Homo sapien
gaatagtgttgtacctttgatccaa

SEQ ID NO: 4307247 - DNA, 25 bp, Homo sapien
gttctaagtttgggtatctccttca

SEQ ID NO: 4307248 - DNA, 25 bp, Homo sapien
gttgtttcctcccatgtacagggtg

SEQ ID NO: 4307249 - DNA, 25 bp, Homo sapien
cggtcccaactttcctgagaggtat

SEQ ID NO: 4307250 - DNA, 25 bp, Homo sapien
taggttgtatcgacagaggctttca

SEQ ID NO: 4307251 - DNA, 25 bp, Homo sapien
tgtgacagatcagccgaatatgcct

SEQ ID NO: 4307252 - DNA, 25 bp, Homo sapien
tttgctgatataggcattggtccaa

SEQ ID NO: 4307253 - DNA, 25 bp, Homo sapien
ttccccttcccttagctttagctga

SEQ ID NO: 4307254 - DNA, 25 bp, Homo sapien
caattatgcttgatcctgctcccat

SEQ ID NO: 4307255 - DNA, 25 bp, Homo sapien
gctgagactgtaggttttcaattat

SEQ ID NO: 4307256 - DNA, 25 bp, Homo sapien
catagcttgtcttccattaccaggt

SEQ ID NO: 4307257 - DNA, 25 bp, Homo sapien
taagaaagttcacacagttactcag

SEQ ID NO: 4307258 - DNA, 25 bp, Homo sapien
gcagaaaatcattcacgtgtttcct

SEQ ID NO: 4307259 - DNA, 25 bp, Homo sapien
catagaatggcaaggtcatgatgac

SEQ ID NO: 4307260 - DNA, 25 bp, Homo sapien
tgacatggtgggagtgctagaaaca

SEQ ID NO: 4307261 - DNA, 25 bp, Homo sapien
cctgccatatcaacaccacttattg

SEQ ID NO: 4307262 - DNA, 25 bp, Homo sapien
aaaagatgtctgtagtcctgccata

SEQ ID NO: 4307263 - DNA, 25 bp, Homo sapien
caccacttattgaacttgagcgtga

SEQ ID NO: 4307264 - DNA, 25 bp, Homo sapien
catttcctagggttaatgagaacaa

SEQ ID NO: 4307265 - DNA, 25 bp, Homo sapien
agaaagcaagaacatttcctagggt

SEQ ID NO: 4307266 - DNA, 25 bp, Homo sapien
aaaggaattcaatacaatcaaaaga

SEQ ID NO: 4307267 - DNA, 25 bp, Homo sapien
caaaggaattcaatacaatcaaaag

SEQ ID NO: 4307268 - DNA, 25 bp, Homo sapien
tcttgttcaactttcattctttcca

SEQ ID NO: 4307269 - DNA, 25 bp, Homo sapien
ttattgtttcttgagtaaaaatggc

SEQ ID NO: 4307270 - DNA, 25 bp, Homo sapien
attctttccatttctaactgactat

SEQ ID NO: 4307271 - DNA, 25 bp, Homo sapien
tttctaactgactattcaacaatgt

SEQ ID NO: 4307272 - DNA, 25 bp, Homo sapien
ttcctcgtctcttcaagtgttctta

SEQ ID NO: 4307273 - DNA, 25 bp, Homo sapien
tcttcaagtgttcttacatattcat

SEQ ID NO: 4307274 - DNA, 25 bp, Homo sapien
gtctcttcaagtgttcttacatatt

SEQ ID NO: 4307275 - DNA, 25 bp, Homo sapien
tttcctcgtctcttcaagtgttctt

SEQ ID NO: 4307276 - DNA, 25 bp, Homo sapien
aaatgaaaaagatgctagtatagac

SEQ ID NO: 4307277 - DNA, 25 bp, Homo sapien
tccagctacatattgagaaatcatt

SEQ ID NO: 4307278 - DNA, 25 bp, Homo sapien
tattaccagcttgacatcagtgatt

SEQ ID NO: 4307279 - DNA, 25 bp, Homo sapien
tgattttccaacagtgtgttccaga

SEQ ID NO: 4307280 - DNA, 25 bp, Homo sapien
tggtgcaatctcactgcaacctctg

SEQ ID NO: 4307281 - DNA, 25 bp, Homo sapien
tcgctctgctgcccgggctggggtg

SEQ ID NO: 4307282 - DNA, 25 bp, Homo sapien
ctctgctgcccgggctggggtgcaa

SEQ ID NO: 4307283 - DNA, 25 bp, Homo sapien
gtctcgctctgctgcccgggctggg

SEQ ID NO: 4307284 - DNA, 25 bp, Homo sapien
tctctgattctagctgggcttgaaa

SEQ ID NO: 4307285 - DNA, 25 bp, Homo sapien
tgtagctgcacgttctctctcaact

SEQ ID NO: 4307286 - DNA, 25 bp, Homo sapien
tcatcctccagtttacacagcctat

SEQ ID NO: 4307287 - DNA, 25 bp, Homo sapien
gaattttgttagcaaggagttcttc

SEQ ID NO: 4307288 - DNA, 25 bp, Homo sapien
tcccttgtgcagtgaatggttaaat

SEQ ID NO: 4307289 - DNA, 25 bp, Homo sapien
taaatatacgtggtacatactatgg

SEQ ID NO: 4307290 - DNA, 25 bp, Homo sapien
tttatctgtaatagccagagcttgg

SEQ ID NO: 4307291 - DNA, 25 bp, Homo sapien
cagagcttggaatcagcctggacgt

SEQ ID NO: 4307292 - DNA, 25 bp, Homo sapien
taatttctcccacgacgatgtctgg

SEQ ID NO: 4307293 - DNA, 25 bp, Homo sapien
tgaaacactttgactcagttcctgg

SEQ ID NO: 4307294 - DNA, 25 bp, Homo sapien
tctatttgtcgaagcaatggtcttg

SEQ ID NO: 4307295 - DNA, 25 bp, Homo sapien
cagttcctggtttcgattctctgct

SEQ ID NO: 4307296 - DNA, 25 bp, Homo sapien
tttgtgttttggaaacctgtgacag

SEQ ID NO: 4307297 - DNA, 25 bp, Homo sapien
ttgtgttttggaaacctgtgacagt

SEQ ID NO: 4307298 - DNA, 25 bp, Homo sapien
tgtgttttggaaacctgtgacagta

SEQ ID NO: 4307299 - DNA, 25 bp, Homo sapien
gtgttttggaaacctgtgacagtac

SEQ ID NO: 4307300 - DNA, 25 bp, Homo sapien
tcctttctggcagccgcttgttctg

SEQ ID NO: 4307301 - DNA, 25 bp, Homo sapien
gatctcatggcgtaaataatcctcc

SEQ ID NO: 4307302 - DNA, 25 bp, Homo sapien
gctgcaatgcaagcctaaggtcccc

SEQ ID NO: 4307303 - DNA, 25 bp, Homo sapien
ctgctgaagttcaccgatctcatgg

SEQ ID NO: 4307304 - DNA, 25 bp, Homo sapien
tcctgtgcctcactatcctttgcag

SEQ ID NO: 4307305 - DNA, 25 bp, Homo sapien
tcttgggccttctctaatgctgcag

SEQ ID NO: 4307306 - DNA, 25 bp, Homo sapien
tttcttgctgctgacgggcttcttc

SEQ ID NO: 4307307 - DNA, 25 bp, Homo sapien
ttagctttcatttcacggctcagag

SEQ ID NO: 4307308 - DNA, 25 bp, Homo sapien
cagggcagcctgaatacttcggttc

SEQ ID NO: 4307309 - DNA, 25 bp, Homo sapien
tgtatgcactatccagggcagcctg

SEQ ID NO: 4307310 - DNA, 25 bp, Homo sapien
cttggcgttctaccatggaatttag

SEQ ID NO: 4307311 - DNA, 25 bp, Homo sapien
catgtctacctgaagacggccaaga

SEQ ID NO: 4307312 - DNA, 25 bp, Homo sapien
tttagctcttaatttcttgatgatg

SEQ ID NO: 4307313 - DNA, 25 bp, Homo sapien
tctttagctcttaatttcttgatga

SEQ ID NO: 4307314 - DNA, 25 bp, Homo sapien
gatgatgttagaattgtgcagctgc

SEQ ID NO: 4307315 - DNA, 25 bp, Homo sapien
gatgttagaattgtgcagctgctgt

SEQ ID NO: 4307316 - DNA, 25 bp, Homo sapien
ttccattaaccctcggatctgctca

SEQ ID NO: 4307317 - DNA, 25 bp, Homo sapien
ttcactactatttaatctagtggca

SEQ ID NO: 4307318 - DNA, 25 bp, Homo sapien
gtctgcagtttcactactatttaat

SEQ ID NO: 4307319 - DNA, 25 bp, Homo sapien
taaccctcggatctgctcatctttc

SEQ ID NO: 4307320 - DNA, 25 bp, Homo sapien
ttttagcagcatctctctctttgca

SEQ ID NO: 4307321 - DNA, 25 bp, Homo sapien
ctttttagcagcatctctctctttg

SEQ ID NO: 4307322 - DNA, 25 bp, Homo sapien
tagcagcatctctctctttgcaggc

SEQ ID NO: 4307323 - DNA, 25 bp, Homo sapien
ttagcagcatctctctctttgcagg

SEQ ID NO: 4307324 - DNA, 25 bp, Homo sapien
ttctgcaattctttgagtaaactca

SEQ ID NO: 4307325 - DNA, 25 bp, Homo sapien
tcaaggaagaaatgctactgctttc

SEQ ID NO: 4307326 - DNA, 25 bp, Homo sapien
caaggaagaaatgctactgctttct

SEQ ID NO: 4307327 - DNA, 25 bp, Homo sapien
ttgagtaaactcatctttcaaggaa

SEQ ID NO: 4307328 - DNA, 25 bp, Homo sapien
agataataactgagcctcccttttt

SEQ ID NO: 4307329 - DNA, 25 bp, Homo sapien
ctttcaggttatcaaaagcttcttc

SEQ ID NO: 4307330 - DNA, 25 bp, Homo sapien
gaagtgctttttccttactaagaga

SEQ ID NO: 4307331 - DNA, 25 bp, Homo sapien
ttccttactaagagataataactga

SEQ ID NO: 4307332 - DNA, 25 bp, Homo sapien
cttattctaccataattgccttgga

SEQ ID NO: 4307333 - DNA, 25 bp, Homo sapien
tttttggcacatctatctgcaaagg

SEQ ID NO: 4307334 - DNA, 25 bp, Homo sapien
ggtacttaatgctacacagaaatgg

SEQ ID NO: 4307335 - DNA, 25 bp, Homo sapien
taataattgttcaacttcaaggtac

SEQ ID NO: 4307336 - DNA, 25 bp, Homo sapien
gctgactttcagcaggttcacactg

SEQ ID NO: 4307337 - DNA, 25 bp, Homo sapien
caccttgtctaacacagtctgtcct

SEQ ID NO: 4307338 - DNA, 25 bp, Homo sapien
catttattggtgtggaagaaaccaa

SEQ ID NO: 4307339 - DNA, 25 bp, Homo sapien
gaaaccaagatatcaggctgttcac

SEQ ID NO: 4307340 - DNA, 25 bp, Homo sapien
catcagttggcgagagaaaggcact

SEQ ID NO: 4307341 - DNA, 25 bp, Homo sapien
gaattgatttcacttacactccggc

SEQ ID NO: 4307342 - DNA, 25 bp, Homo sapien
tatattcaggacaagcagatgcaga

SEQ ID NO: 4307343 - DNA, 25 bp, Homo sapien
caatatcactggtggtagaagtacc

SEQ ID NO: 4307344 - DNA, 25 bp, Homo sapien
taaaacacggatataaaccaagctc

SEQ ID NO: 4307345 - DNA, 25 bp, Homo sapien
cattttccggctaatacctccggca

SEQ ID NO: 4307346 - DNA, 25 bp, Homo sapien
catccagaaatcttgggtcacacat

SEQ ID NO: 4307347 - DNA, 25 bp, Homo sapien
gacctagagcaagttacttggccat

SEQ ID NO: 4307348 - DNA, 25 bp, Homo sapien
gcaattcgaggttcaggttcgggaa

SEQ ID NO: 4307349 - DNA, 25 bp, Homo sapien
tttacgtacttcagaccttggatcc

SEQ ID NO: 4307350 - DNA, 25 bp, Homo sapien
tgttagcgattgttcttcccttccc

SEQ ID NO: 4307351 - DNA, 25 bp, Homo sapien
tgcccgagacgcgaagcaattcgag

SEQ ID NO: 4307352 - DNA, 25 bp, Homo sapien
cctggatgtccagaaccctgtcaat

SEQ ID NO: 4307353 - DNA, 25 bp, Homo sapien
ccggctctccatacggaatggtctc

SEQ ID NO: 4307354 - DNA, 25 bp, Homo sapien
acagggcctgcttagcgaagctgga

SEQ ID NO: 4307355 - DNA, 25 bp, Homo sapien
atggtctcggcccagatgctcggct

SEQ ID NO: 4307356 - DNA, 25 bp, Homo sapien
gcgagcccgggatgttaccctcggc

SEQ ID NO: 4307357 - DNA, 25 bp, Homo sapien
ttccactcggctggttctgtcagcg

SEQ ID NO: 4307358 - DNA, 25 bp, Homo sapien
ggtgcagaggaacggcttcgctccc

SEQ ID NO: 4307359 - DNA, 25 bp, Homo sapien
tgcgcatgcgcttgcttcttccacg

SEQ ID NO: 4307360 - DNA, 25 bp, Homo sapien
tattcctatattaccatggaactac

SEQ ID NO: 4307361 - DNA, 25 bp, Homo sapien
ggaactactgattacccttaatgta

SEQ ID NO: 4307362 - DNA, 25 bp, Homo sapien
aaaatttgatataactctgctacac

SEQ ID NO: 4307363 - DNA, 25 bp, Homo sapien
gctgtagcaaaagtattaagtgcaa

SEQ ID NO: 4307364 - DNA, 25 bp, Homo sapien
taataaatagtgcaaaagcatcagt

SEQ ID NO: 4307365 - DNA, 25 bp, Homo sapien
taaatagtgcaaaagcatcagtgat

SEQ ID NO: 4307366 - DNA, 25 bp, Homo sapien
tttattaataaatagtgcaaaagca

SEQ ID NO: 4307367 - DNA, 25 bp, Homo sapien
tattaataaatagtgcaaaagcatc

SEQ ID NO: 4307368 - DNA, 25 bp, Homo sapien
cctctatggcactacaagtaaacag

SEQ ID NO: 4307369 - DNA, 25 bp, Homo sapien
tgcacaggtattcagctataacacc

SEQ ID NO: 4307370 - DNA, 25 bp, Homo sapien
tgttcaatatactccagatgtcaga

SEQ ID NO: 4307371 - DNA, 25 bp, Homo sapien
tattgtgcatattggcctctatggc

SEQ ID NO: 4307372 - DNA, 25 bp, Homo sapien
aaatcgtggcaacactattgctaaa

SEQ ID NO: 4307373 - DNA, 25 bp, Homo sapien
ggaatgcattctttgaccataataa

SEQ ID NO: 4307374 - DNA, 25 bp, Homo sapien
caaaagaggttgtatgcttcctcct

SEQ ID NO: 4307375 - DNA, 25 bp, Homo sapien
aatgacatcgattcaacttcttagc

SEQ ID NO: 4307376 - DNA, 25 bp, Homo sapien
gaagtaaaatgaagtttgaatagta

SEQ ID NO: 4307377 - DNA, 25 bp, Homo sapien
agaagtaaaatgaagtttgaatagt

SEQ ID NO: 4307378 - DNA, 25 bp, Homo sapien
atcagcaaccgccagttcttgtcca

SEQ ID NO: 4307379 - DNA, 25 bp, Homo sapien
gggtggtgacatcagcaaccgccag

SEQ ID NO: 4307380 - DNA, 25 bp, Homo sapien
tgacatcagcaaccgccagttcttg

SEQ ID NO: 4307381 - DNA, 25 bp, Homo sapien
ggtgacatcagcaaccgccagttct

SEQ ID NO: 4307382 - DNA, 25 bp, Homo sapien
caaactacagagtattacggtctag

SEQ ID NO: 4307383 - DNA, 25 bp, Homo sapien
tctactaaaagagcaattaattcta

SEQ ID NO: 4307384 - DNA, 25 bp, Homo sapien
gaacaagcactgattactttcacca

SEQ ID NO: 4307385 - DNA, 25 bp, Homo sapien
tgaccatatacaaggcattaagagg

SEQ ID NO: 4307386 - DNA, 25 bp, Homo sapien
tggccttgttcgttcttcaatagag

SEQ ID NO: 4307387 - DNA, 25 bp, Homo sapien
gagagatttggccttgttcgttctt

SEQ ID NO: 4307388 - DNA, 25 bp, Homo sapien
ttcgttcttcaatagaggttaccga

SEQ ID NO: 4307389 - DNA, 25 bp, Homo sapien
tgttcgttcttcaatagaggttacc

SEQ ID NO: 4307390 - DNA, 25 bp, Homo sapien
attactttaatgtaagacacattaa

SEQ ID NO: 4307391 - DNA, 25 bp, Homo sapien
tactttaatgtaagacacattaaag

SEQ ID NO: 4307392 - DNA, 25 bp, Homo sapien
aataaaacttgatataattttctga

SEQ ID NO: 4307393 - DNA, 25 bp, Homo sapien
caaaattactttaatgtaagacaca

SEQ ID NO: 4307394 - DNA, 25 bp, Homo sapien
tgtgatggctggagatttcatttgc

SEQ ID NO: 4307395 - DNA, 25 bp, Homo sapien
tccctctagggtggctgtgatggct

SEQ ID NO: 4307396 - DNA, 25 bp, Homo sapien
attttttccctctagggtggctgtg

SEQ ID NO: 4307397 - DNA, 25 bp, Homo sapien
ggctgtgatggctggagatttcatt

SEQ ID NO: 4307398 - DNA, 25 bp, Homo sapien
ctaaagattatgatgagagagaagt

SEQ ID NO: 4307399 - DNA, 25 bp, Homo sapien
aagattatgatgagagagaagtatc

SEQ ID NO: 4307400 - DNA, 25 bp, Homo sapien
agagagaagtatcaaacataatttt

SEQ ID NO: 4307401 - DNA, 25 bp, Homo sapien
gagagagaagtatcaaacataattt

SEQ ID NO: 4307402 - DNA, 25 bp, Homo sapien
agtttagctgatggagaaaactgaa

SEQ ID NO: 4307403 - DNA, 25 bp, Homo sapien
tagataatccaaaacctcctgtagt

SEQ ID NO: 4307404 - DNA, 25 bp, Homo sapien
gaatattttgaggaagctggctaca

SEQ ID NO: 4307405 - DNA, 25 bp, Homo sapien
tccaaaacctcctgtagtttagctg

SEQ ID NO: 4307406 - DNA, 25 bp, Homo sapien
gtaattattcaagggaatgtatgca

SEQ ID NO: 4307407 - DNA, 25 bp, Homo sapien
atgtgtatgtatacagcccatctac

SEQ ID NO: 4307408 - DNA, 25 bp, Homo sapien
tgtatgtatacagcccatctacatc

SEQ ID NO: 4307409 - DNA, 25 bp, Homo sapien
tctacatcattaaacaccaagtaat

SEQ ID NO: 4307410 - DNA, 25 bp, Homo sapien
tgttcatctttatataattaaacca

SEQ ID NO: 4307411 - DNA, 25 bp, Homo sapien
tataattaaaccaagtcaaaacata

SEQ ID NO: 4307412 - DNA, 25 bp, Homo sapien
caaaacataaatttacatgcatatt

SEQ ID NO: 4307413 - DNA, 25 bp, Homo sapien
gtcaaaacataaatttacatgcata

SEQ ID NO: 4307414 - DNA, 25 bp, Homo sapien
cttgtggctattttaaaaacctcag

SEQ ID NO: 4307415 - DNA, 25 bp, Homo sapien
tattttaaaaacctcagtggcacac

SEQ ID NO: 4307416 - DNA, 25 bp, Homo sapien
tttaaaaacctcagtggcacacaca

SEQ ID NO: 4307417 - DNA, 25 bp, Homo sapien
ctattttaaaaacctcagtggcaca

SEQ ID NO: 4307418 - DNA, 25 bp, Homo sapien
taaaacgtctctttactgcaggtaa

SEQ ID NO: 4307419 - DNA, 25 bp, Homo sapien
agttacacaacccatccaagaagat

SEQ ID NO: 4307420 - DNA, 25 bp, Homo sapien
ttcctacaacacaaaaaagctgcag

SEQ ID NO: 4307421 - DNA, 25 bp, Homo sapien
gctgcagcaacgtcaaaaactaaag

SEQ ID NO: 4307422 - DNA, 25 bp, Homo sapien
gaagctactgcaggaatgattcttt

SEQ ID NO: 4307423 - DNA, 25 bp, Homo sapien
atttgtggaagctactgcaggaatg

SEQ ID NO: 4307424 - DNA, 25 bp, Homo sapien
tgtggaagctactgcaggaatgatt

SEQ ID NO: 4307425 - DNA, 25 bp, Homo sapien
gcaggaatgattctttttactaccc

SEQ ID NO: 4307426 - DNA, 25 bp, Homo sapien
gactccaagtatagtcaggtttcaa

SEQ ID NO: 4307427 - DNA, 25 bp, Homo sapien
tgtaagatgtgttcccaagactcca

SEQ ID NO: 4307428 - DNA, 25 bp, Homo sapien
tgaaagaaagacagttacgaaggct

SEQ ID NO: 4307429 - DNA, 25 bp, Homo sapien
tactctacaaccgaggctacacaaa

SEQ ID NO: 4307430 - DNA, 25 bp, Homo sapien
gggacaacagtcagaccaaactgaa

SEQ ID NO: 4307431 - DNA, 25 bp, Homo sapien
agatgcttttgccatgctcacacag

SEQ ID NO: 4307432 - DNA, 25 bp, Homo sapien
tcgtcatatgacatgccttgccatc

SEQ ID NO: 4307433 - DNA, 25 bp, Homo sapien
ctaactagggaggtttatggcactg

SEQ ID NO: 4307434 - DNA, 25 bp, Homo sapien
atgctctctctagggatttttggaa

SEQ ID NO: 4307435 - DNA, 25 bp, Homo sapien
tatattgtgatgctctctctaggga

SEQ ID NO: 4307436 - DNA, 25 bp, Homo sapien
tccattgtatatgttcaggatcatc

SEQ ID NO: 4307437 - DNA, 25 bp, Homo sapien
tgagcctatacgtaacacccctaat

SEQ ID NO: 4307438 - DNA, 25 bp, Homo sapien
cactgcaacatccttacatactcaa

SEQ ID NO: 4307439 - DNA, 25 bp, Homo sapien
tactcaatacagtgttctggtagcc

SEQ ID NO: 4307440 - DNA, 25 bp, Homo sapien
ttacatactcaatacagtgttctgg

SEQ ID NO: 4307441 - DNA, 25 bp, Homo sapien
acagtgttctggtagcctgggcata

SEQ ID NO: 4307442 - DNA, 25 bp, Homo sapien
agacaccatcttcataatttagaag

SEQ ID NO: 4307443 - DNA, 25 bp, Homo sapien
cgatacaagcagtcattccaggcag

SEQ ID NO: 4307444 - DNA, 25 bp, Homo sapien
ggataaagttccagcgtgcattcga

SEQ ID NO: 4307445 - DNA, 25 bp, Homo sapien
caatggagcttggatctaagacacc

SEQ ID NO: 4307446 - DNA, 25 bp, Homo sapien
agtccacatacaataatatgaaatt

SEQ ID NO: 4307447 - DNA, 25 bp, Homo sapien
ccagtccacatacaataatatgaaa

SEQ ID NO: 4307448 - DNA, 25 bp, Homo sapien
tccagtccacatacaataatatgaa

SEQ ID NO: 4307449 - DNA, 25 bp, Homo sapien
gtccagtccacatacaataatatga

SEQ ID NO: 4307450 - DNA, 25 bp, Homo sapien
gtcgatagaaagtgtcgttaaaatc

SEQ ID NO: 4307451 - DNA, 25 bp, Homo sapien
cgatagaaagtgtcgttaaaatctt

SEQ ID NO: 4307452 - DNA, 25 bp, Homo sapien
agaaagtgtcgttaaaatcttgaat

SEQ ID NO: 4307453 - DNA, 25 bp, Homo sapien
gaaagtgtcgttaaaatcttgaatc

SEQ ID NO: 4307454 - DNA, 25 bp, Homo sapien
cgtctatatcgacaattttgctggg

SEQ ID NO: 4307455 - DNA, 25 bp, Homo sapien
tcatctatatatccctctggtaacg

SEQ ID NO: 4307456 - DNA, 25 bp, Homo sapien
tctggtaacgccactgagtctggat

SEQ ID NO: 4307457 - DNA, 25 bp, Homo sapien
caatctttgaagatggactatctct

SEQ ID NO: 4307458 - DNA, 25 bp, Homo sapien
caacttcagccttaggtcttccaat

SEQ ID NO: 4307459 - DNA, 25 bp, Homo sapien
cagccttaggtcttccaatatcttt

SEQ ID NO: 4307460 - DNA, 25 bp, Homo sapien
tgcagcaacttcagccttaggtctt

SEQ ID NO: 4307461 - DNA, 25 bp, Homo sapien
ctgcagcaacttcagccttaggtct

SEQ ID NO: 4307462 - DNA, 25 bp, Homo sapien
caatggctccacacacagaaagctc

SEQ ID NO: 4307463 - DNA, 25 bp, Homo sapien
atttcagtattgcattcaatggctc

SEQ ID NO: 4307464 - DNA, 25 bp, Homo sapien
attcaatggctccacacacagaaag

SEQ ID NO: 4307465 - DNA, 25 bp, Homo sapien
ttcagtattgcattcaatggctcca

SEQ ID NO: 4307466 - DNA, 25 bp, Homo sapien
tatatgcctaaggtaaccatccctc

SEQ ID NO: 4307467 - DNA, 25 bp, Homo sapien
taactactatcaccaagatgcccaa

SEQ ID NO: 4307468 - DNA, 25 bp, Homo sapien
catcaactggaggaagagctaccgt

SEQ ID NO: 4307469 - DNA, 25 bp, Homo sapien
cactagggcctaatactccagcgag

SEQ ID NO: 4307470 - DNA, 25 bp, Homo sapien
aaactgcctatttagattggaaaca

SEQ ID NO: 4307471 - DNA, 25 bp, Homo sapien
aactgcctatttagattggaaacat

SEQ ID NO: 4307472 - DNA, 25 bp, Homo sapien
taaaaactgcctatttagattggaa

SEQ ID NO: 4307473 - DNA, 25 bp, Homo sapien
taacatgaatctgtctaaaaccaga

SEQ ID NO: 4307474 - DNA, 25 bp, Homo sapien
ataacatgaatctgtctaaaaccag

SEQ ID NO: 4307475 - DNA, 25 bp, Homo sapien
aacatgaatctgtctaaaaccagac

SEQ ID NO: 4307476 - DNA, 25 bp, Homo sapien
cttaactaagaactgatgacctgga

SEQ ID NO: 4307477 - DNA, 25 bp, Homo sapien
caaaccttaggtgtccacaatcgtc

SEQ ID NO: 4307478 - DNA, 25 bp, Homo sapien
gcagtgagaagcctagcatacaact

SEQ ID NO: 4307479 - DNA, 25 bp, Homo sapien
gattgaagacagagaccacgatgac

SEQ ID NO: 4307480 - DNA, 25 bp, Homo sapien
gccagaggaagcaccaaaagttgtt

SEQ ID NO: 4307481 - DNA, 25 bp, Homo sapien
ggctcaagagaaaaggttaagaatc

SEQ ID NO: 4307482 - DNA, 25 bp, Homo sapien
taaacttatctaacaaaggctcaag

SEQ ID NO: 4307483 - DNA, 25 bp, Homo sapien
tggaatttggcatgctaaacttatc

SEQ ID NO: 4307484 - DNA, 25 bp, Homo sapien
caatgactagaactttacatgtatc

SEQ ID NO: 4307485 - DNA, 25 bp, Homo sapien
ctaagccgccagctccaatgactag

SEQ ID NO: 4307486 - DNA, 25 bp, Homo sapien
tacatgtatctaacaagaactggag

SEQ ID NO: 4307487 - DNA, 25 bp, Homo sapien
taagccgccagctccaatgactaga

SEQ ID NO: 4307488 - DNA, 25 bp, Homo sapien
ttctcacagtagcactacaaaaggg

SEQ ID NO: 4307489 - DNA, 25 bp, Homo sapien
gaacacttgccttaagatagacact

SEQ ID NO: 4307490 - DNA, 25 bp, Homo sapien
gttattcacatgagacactgggcca

SEQ ID NO: 4307491 - DNA, 25 bp, Homo sapien
cagttctgcccagcattaaaggaga

SEQ ID NO: 4307492 - DNA, 25 bp, Homo sapien
tgctcggttcgaaatcagggtgtgt

SEQ ID NO: 4307493 - DNA, 25 bp, Homo sapien
ttacatggttccagcgaccttccca

SEQ ID NO: 4307494 - DNA, 25 bp, Homo sapien
gggtccagatcgctcgaggaacttc

SEQ ID NO: 4307495 - DNA, 25 bp, Homo sapien
agatcgctcgaggaacttctttaca

SEQ ID NO: 4307496 - DNA, 25 bp, Homo sapien
caactattatggtatccccaaatga

SEQ ID NO: 4307497 - DNA, 25 bp, Homo sapien
catttaaagttaagaactgcacgtt

SEQ ID NO: 4307498 - DNA, 25 bp, Homo sapien
gtttcctaaagcaatccaaggttca

SEQ ID NO: 4307499 - DNA, 25 bp, Homo sapien
gaacacagtaaattcagctgcaaag

SEQ ID NO: 4307500 - DNA, 25 bp, Homo sapien
gaatctcttaatgctgtgggacggc

SEQ ID NO: 4307501 - DNA, 25 bp, Homo sapien
catctgcaggccgttcatagctact

SEQ ID NO: 4307502 - DNA, 25 bp, Homo sapien
tacaacagaataaggtgggactcct

SEQ ID NO: 4307503 - DNA, 25 bp, Homo sapien
ggaccaagaagtattgcctagcaat

SEQ ID NO: 4307504 - DNA, 25 bp, Homo sapien
gattaaatctgtctcaccagcatag

SEQ ID NO: 4307505 - DNA, 25 bp, Homo sapien
tcggcacggaaatttacaaactcac

SEQ ID NO: 4307506 - DNA, 25 bp, Homo sapien
aaagcactgctactgggaatcggca

SEQ ID NO: 4307507 - DNA, 25 bp, Homo sapien
gagtaaattatgtggcgctggccag

SEQ ID NO: 4307508 - DNA, 25 bp, Homo sapien
caattattctgccaaaatgactgga

SEQ ID NO: 4307509 - DNA, 25 bp, Homo sapien
ggagtgcttagtacaatacctgaca

SEQ ID NO: 4307510 - DNA, 25 bp, Homo sapien
cactgctctgacaatttgggatgga

SEQ ID NO: 4307511 - DNA, 25 bp, Homo sapien
tgcaaaaggccacaaaacggtcttg

SEQ ID NO: 4307512 - DNA, 25 bp, Homo sapien
agccagcagctcctctattctcctt

SEQ ID NO: 4307513 - DNA, 25 bp, Homo sapien
agcagctcctctattctccttcttt

SEQ ID NO: 4307514 - DNA, 25 bp, Homo sapien
ctcagccagcagctcctctattctc

SEQ ID NO: 4307515 - DNA, 25 bp, Homo sapien
gcagctcctctattctccttctttt

SEQ ID NO: 4307516 - DNA, 25 bp, Homo sapien
tggcggcggcaaccgcccaccgccg

SEQ ID NO: 4307517 - DNA, 25 bp, Homo sapien
ggcggcggcaaccgcccaccgccgc

SEQ ID NO: 4307518 - DNA, 25 bp, Homo sapien
gtggcggcggcaaccgcccaccgcc

SEQ ID NO: 4307519 - DNA, 25 bp, Homo sapien
ccagcccggcgcgtctgcagagccc

SEQ ID NO: 4307520 - DNA, 25 bp, Homo sapien
gcccagcccggcgcgtctgcagagc

SEQ ID NO: 4307521 - DNA, 25 bp, Homo sapien
cccagcccggcgcgtctgcagagcc

SEQ ID NO: 4307522 - DNA, 25 bp, Homo sapien
cctcttcccaggtgcccacgcgcgg

SEQ ID NO: 4307523 - DNA, 25 bp, Homo sapien
ctcttcccaggtgcccacgcgcggc

SEQ ID NO: 4307524 - DNA, 25 bp, Homo sapien
gaatatattgtggtccctcagtgaa

SEQ ID NO: 4307525 - DNA, 25 bp, Homo sapien
tagttcactgcagacaactgtttgc

SEQ ID NO: 4307526 - DNA, 25 bp, Homo sapien
gatgacccttggaagcttagaagag

SEQ ID NO: 4307527 - DNA, 25 bp, Homo sapien
tatcagaatggcatagcagtccaac

SEQ ID NO: 4307528 - DNA, 25 bp, Homo sapien
taccagaccaactacctggtggtgg

SEQ ID NO: 4307529 - DNA, 25 bp, Homo sapien
tcagggacatttccaaatggaacaa

SEQ ID NO: 4307530 - DNA, 25 bp, Homo sapien
gaacaaccgcgtagtgagcaacctg

SEQ ID NO: 4307531 - DNA, 25 bp, Homo sapien
gagcaacctgctctattaccagacc

SEQ ID NO: 4307532 - DNA, 25 bp, Homo sapien
gaaaatctggaggttcctaaggcat

SEQ ID NO: 4307533 - DNA, 25 bp, Homo sapien
ttatttgaagctccgtcactgtggg

SEQ ID NO: 4307534 - DNA, 25 bp, Homo sapien
aaccatgggttgctaattgtgaaag

SEQ ID NO: 4307535 - DNA, 25 bp, Homo sapien
tctaatccgagtccaacctgttgtt

SEQ ID NO: 4307536 - DNA, 25 bp, Homo sapien
aaagatgggtggcatgtttatggaa

SEQ ID NO: 4307537 - DNA, 25 bp, Homo sapien
ctttcttactctaggactatcagta

SEQ ID NO: 4307538 - DNA, 25 bp, Homo sapien
ttactctaggactatcagtaagtga

SEQ ID NO: 4307539 - DNA, 25 bp, Homo sapien
agctgtctacatgaaagatgggtgg

SEQ ID NO: 4307540 - DNA, 25 bp, Homo sapien
gaactgagtaggagccctttgatgc

SEQ ID NO: 4307541 - DNA, 25 bp, Homo sapien
gttctatagaacttcaggctctgtt

SEQ ID NO: 4307542 - DNA, 25 bp, Homo sapien
tggaattgcttgagttaggcctgga

SEQ ID NO: 4307543 - DNA, 25 bp, Homo sapien
tgtcctggactttaggcactcaacc

SEQ ID NO: 4307544 - DNA, 25 bp, Homo sapien
gtcccttcaacatgatcctgggagg

SEQ ID NO: 4307545 - DNA, 25 bp, Homo sapien
tcccttcaacatgatcctgggagga

SEQ ID NO: 4307546 - DNA, 25 bp, Homo sapien
cccttcaacatgatcctgggaggaa

SEQ ID NO: 4307547 - DNA, 25 bp, Homo sapien
gaagaaggcatcaacagactcactg

SEQ ID NO: 4307548 - DNA, 25 bp, Homo sapien
taaacataacttacctgagctaggg

SEQ ID NO: 4307549 - DNA, 25 bp, Homo sapien
gcagcatgcatgtataggccgaact

SEQ ID NO: 4307550 - DNA, 25 bp, Homo sapien
ttttgaaacaggaggtgcacgtacc

SEQ ID NO: 4307551 - DNA, 25 bp, Homo sapien
gaaaaacgtctttagatgaccaagc

SEQ ID NO: 4307552 - DNA, 25 bp, Homo sapien
cagacatggtctagaatctgtaccc

SEQ ID NO: 4307553 - DNA, 25 bp, Homo sapien
cctgtattattctggacggacttat

SEQ ID NO: 4307554 - DNA, 25 bp, Homo sapien
ggcacaaggaggacaataatagctg

SEQ ID NO: 4307555 - DNA, 25 bp, Homo sapien
ccgcaccggcctagaatttcaacta

SEQ ID NO: 4307556 - DNA, 25 bp, Homo sapien
gatacatgccacttatgataacata

SEQ ID NO: 4307557 - DNA, 25 bp, Homo sapien
attagacctattctcccctagcctg

SEQ ID NO: 4307558 - DNA, 25 bp, Homo sapien
cttagatgtagtatgtgctagacac

SEQ ID NO: 4307559 - DNA, 25 bp, Homo sapien
gatactatgtgatgaattaccgcag

SEQ ID NO: 4307560 - DNA, 25 bp, Homo sapien
cacaggatctgacccgggagttgaa

SEQ ID NO: 4307561 - DNA, 25 bp, Homo sapien
gattaatgcgagcaaaggcacaagg

SEQ ID NO: 4307562 - DNA, 25 bp, Homo sapien
tccatttcaaagcatcagaagggcc

SEQ ID NO: 4307563 - DNA, 25 bp, Homo sapien
tccatgctgtaatccaagagtcact

SEQ ID NO: 4307564 - DNA, 25 bp, Homo sapien
tctgcttcgggaaatatgactctaa

SEQ ID NO: 4307565 - DNA, 25 bp, Homo sapien
cacgtggatcctaaagtattgctgc

SEQ ID NO: 4307566 - DNA, 25 bp, Homo sapien
gtattgctgctgacatagtctccat

SEQ ID NO: 4307567 - DNA, 25 bp, Homo sapien
ttacgccagttcttttggcagttgc

SEQ ID NO: 4307568 - DNA, 25 bp, Homo sapien
tacgccagttcttttggcagttgca

SEQ ID NO: 4307569 - DNA, 25 bp, Homo sapien
acgccagttcttttggcagttgcac

SEQ ID NO: 4307570 - DNA, 25 bp, Homo sapien
tcgttgttacagaagtcatataggc

SEQ ID NO: 4307571 - DNA, 25 bp, Homo sapien
gctacaggtgtacatccttagggat

SEQ ID NO: 4307572 - DNA, 25 bp, Homo sapien
tcatataggcgtacctagagatggg

SEQ ID NO: 4307573 - DNA, 25 bp, Homo sapien
gagtatccccttatgttaaaacaga

SEQ ID NO: 4307574 - DNA, 25 bp, Homo sapien
caccatttctccctccttctactta

SEQ ID NO: 4307575 - DNA, 25 bp, Homo sapien
tcaccatttctccctccttctactt

SEQ ID NO: 4307576 - DNA, 25 bp, Homo sapien
tccggcatccgagatttgcgctgga

SEQ ID NO: 4307577 - DNA, 25 bp, Homo sapien
gacgaatgtcgtttagcagctgatc

SEQ ID NO: 4307578 - DNA, 25 bp, Homo sapien
taagataggcgacactgctgtgacg

SEQ ID NO: 4307579 - DNA, 25 bp, Homo sapien
tctgggagtgatttccaccaatggg

SEQ ID NO: 4307580 - DNA, 25 bp, Homo sapien
catgtgcctctgattgtgaaaccga

SEQ ID NO: 4307581 - DNA, 25 bp, Homo sapien
tctgggacccggaagctcaaaatgg

SEQ ID NO: 4307582 - DNA, 25 bp, Homo sapien
tctggaatctggcttgggtcctccc

SEQ ID NO: 4307583 - DNA, 25 bp, Homo sapien
taaactggagacacctcatgatggc

SEQ ID NO: 4307584 - DNA, 25 bp, Homo sapien
tgtacttaccttcaaaaagctggtg

SEQ ID NO: 4307585 - DNA, 25 bp, Homo sapien
agctggtgtctagagctaacttctt

SEQ ID NO: 4307586 - DNA, 25 bp, Homo sapien
tggtgtctagagctaacttcttagg

SEQ ID NO: 4307587 - DNA, 25 bp, Homo sapien
tagagctaacttcttaggatctaat

SEQ ID NO: 4307588 - DNA, 25 bp, Homo sapien
tcctcttctctgttcgtttcttcac

SEQ ID NO: 4307589 - DNA, 25 bp, Homo sapien
gcagttgttctcacaatttctaatt

SEQ ID NO: 4307590 - DNA, 25 bp, Homo sapien
tgctggcagttgttctcacaatttc

SEQ ID NO: 4307591 - DNA, 25 bp, Homo sapien
ttctaatttgttcctttgctttgcc

SEQ ID NO: 4307592 - DNA, 25 bp, Homo sapien
tcttttatttgcaactatttcatta

SEQ ID NO: 4307593 - DNA, 25 bp, Homo sapien
atttgcaactatttcattattgagc

SEQ ID NO: 4307594 - DNA, 25 bp, Homo sapien
ctcttttatttgcaactatttcatt

SEQ ID NO: 4307595 - DNA, 25 bp, Homo sapien
tttgcaactatttcattattgagct

SEQ ID NO: 4307596 - DNA, 25 bp, Homo sapien
atttcttcatgctcttcttgagtct

SEQ ID NO: 4307597 - DNA, 25 bp, Homo sapien
ttctatttcttcatgctcttcttga

SEQ ID NO: 4307598 - DNA, 25 bp, Homo sapien
tctatttcttcatgctcttcttgag

SEQ ID NO: 4307599 - DNA, 25 bp, Homo sapien
cttcatgctcttcttgagtcttttc

SEQ ID NO: 4307600 - DNA, 25 bp, Homo sapien
atcccaggcagccatttctcggttg

SEQ ID NO: 4307601 - DNA, 25 bp, Homo sapien
catttctcggttgtacacaaatctc

SEQ ID NO: 4307602 - DNA, 25 bp, Homo sapien
gcagccatttctcggttgtacacaa

SEQ ID NO: 4307603 - DNA, 25 bp, Homo sapien
caggcagccatttctcggttgtaca

SEQ ID NO: 4307604 - DNA, 25 bp, Homo sapien
caggaactcgttcctcttccagcat

SEQ ID NO: 4307605 - DNA, 25 bp, Homo sapien
tcttccagcatgcgcctggatgcct

SEQ ID NO: 4307606 - DNA, 25 bp, Homo sapien
aaggtgacaggaactcgttcctctt

SEQ ID NO: 4307607 - DNA, 25 bp, Homo sapien
gacaggaactcgttcctcttccagc

SEQ ID NO: 4307608 - DNA, 25 bp, Homo sapien
cttccatttccgactgcagttcttt

SEQ ID NO: 4307609 - DNA, 25 bp, Homo sapien
gaagtttcctgtcggtggcttgtca

SEQ ID NO: 4307610 - DNA, 25 bp, Homo sapien
gaatcattcccacgggaaggctggg

SEQ ID NO: 4307611 - DNA, 25 bp, Homo sapien
taatctcctcatcgagaagttcttc

SEQ ID NO: 4307612 - DNA, 25 bp, Homo sapien
tgctgagcagctaggagtgatcaca

SEQ ID NO: 4307613 - DNA, 25 bp, Homo sapien
agttaacacacccttgagatatttt

SEQ ID NO: 4307614 - DNA, 25 bp, Homo sapien
taacgagtgtcccaagttaacacac

SEQ ID NO: 4307615 - DNA, 25 bp, Homo sapien
cagctaagctcttgccggatctata

SEQ ID NO: 4307616 - DNA, 25 bp, Homo sapien
actttagaacctaacttctcctctg

SEQ ID NO: 4307617 - DNA, 25 bp, Homo sapien
gatataacctgcagtgctattgaga

SEQ ID NO: 4307618 - DNA, 25 bp, Homo sapien
ctcctctgattctagattcatcttc

SEQ ID NO: 4307619 - DNA, 25 bp, Homo sapien
ggaaaagcaacagcatccttcaagt

SEQ ID NO: 4307620 - DNA, 25 bp, Homo sapien
aatagcagaaaccaactagagctag

SEQ ID NO: 4307621 - DNA, 25 bp, Homo sapien
gccctgggccttgtctgtattccag

SEQ ID NO: 4307622 - DNA, 25 bp, Homo sapien
catgccctgggccttgtctgtattc

SEQ ID NO: 4307623 - DNA, 25 bp, Homo sapien
tgccctgggccttgtctgtattcca

SEQ ID NO: 4307624 - DNA, 25 bp, Homo sapien
cagcatgccctgggccttgtctgta

SEQ ID NO: 4307625 - DNA, 25 bp, Homo sapien
ggaatttcacaagcagctccagaca

SEQ ID NO: 4307626 - DNA, 25 bp, Homo sapien
ttggggttcaccgacactacctgga

SEQ ID NO: 4307627 - DNA, 25 bp, Homo sapien
tccagacaatggcagggctctctca

SEQ ID NO: 4307628 - DNA, 25 bp, Homo sapien
gtacgtcaggatctccatgttccca

SEQ ID NO: 4307629 - DNA, 25 bp, Homo sapien
aaagagacgaagaaaaccgtgcagt

SEQ ID NO: 4307630 - DNA, 25 bp, Homo sapien
cgtgcagtaggattgctgaacttcc

SEQ ID NO: 4307631 - DNA, 25 bp, Homo sapien
tacagaggcccaagatatattaggc

SEQ ID NO: 4307632 - DNA, 25 bp, Homo sapien
tctgagagtgttcggctaatgggca

SEQ ID NO: 4307633 - DNA, 25 bp, Homo sapien
ctaaggcaactttattgtaagacac

SEQ ID NO: 4307634 - DNA, 25 bp, Homo sapien
tacttgaagtagagcactgcgacct

SEQ ID NO: 4307635 - DNA, 25 bp, Homo sapien
cgaagccttgcccaatatgattact

SEQ ID NO: 4307636 - DNA, 25 bp, Homo sapien
catgaacccctgacataaatggaag

SEQ ID NO: 4307637 - DNA, 25 bp, Homo sapien
tcttattgccatgggacatcctgaa

SEQ ID NO: 4307638 - DNA, 25 bp, Homo sapien
caatagctcatcacgcaattagtgg

SEQ ID NO: 4307639 - DNA, 25 bp, Homo sapien
tgagcaatgactccggagcttctgg

SEQ ID NO: 4307640 - DNA, 25 bp, Homo sapien
taaaacgaacatcctctcggaagac

SEQ ID NO: 4307641 - DNA, 25 bp, Homo sapien
aaagagtctctgctcactactctcc

SEQ ID NO: 4307642 - DNA, 25 bp, Homo sapien
ttccatctgtaccatccagttgact

SEQ ID NO: 4307643 - DNA, 25 bp, Homo sapien
ccatctgtaccatccagttgactga

SEQ ID NO: 4307644 - DNA, 25 bp, Homo sapien
atcttcatgccaaaagagtctctgc

SEQ ID NO: 4307645 - DNA, 25 bp, Homo sapien
ccagaaaagttactacttgtggcca

SEQ ID NO: 4307646 - DNA, 25 bp, Homo sapien
gaagggtgactgcatgttctttcaa

SEQ ID NO: 4307647 - DNA, 25 bp, Homo sapien
catactggagcattgtttaacaggc

SEQ ID NO: 4307648 - DNA, 25 bp, Homo sapien
taaagaagttagtaggaagcactgt

SEQ ID NO: 4307649 - DNA, 25 bp, Homo sapien
tttaagacccggatactctagggca

SEQ ID NO: 4307650 - DNA, 25 bp, Homo sapien
aaatacagttggcagcagtagagcc

SEQ ID NO: 4307651 - DNA, 25 bp, Homo sapien
gaagcaacacacagattggaggtac

SEQ ID NO: 4307652 - DNA, 25 bp, Homo sapien
gaggtactgtacttactacagctgg

SEQ ID NO: 4307653 - DNA, 25 bp, Homo sapien
tttcatgtacaacataagatgtaaa

SEQ ID NO: 4307654 - DNA, 25 bp, Homo sapien
catggttatgttatgatgttaagtt

SEQ ID NO: 4307655 - DNA, 25 bp, Homo sapien
gtacaatatcattataaccatgtta

SEQ ID NO: 4307656 - DNA, 25 bp, Homo sapien
tttgagtggaatatcatattggtca

SEQ ID NO: 4307657 - DNA, 25 bp, Homo sapien
gatatgagaactgagtaatgcacca

SEQ ID NO: 4307658 - DNA, 25 bp, Homo sapien
gaagtaaactgaaaaggctaggctc

SEQ ID NO: 4307659 - DNA, 25 bp, Homo sapien
tgtatgttatgacccctctgatccc

SEQ ID NO: 4307660 - DNA, 25 bp, Homo sapien
aaaaactcccactgaatgcggagga

SEQ ID NO: 4307661 - DNA, 25 bp, Homo sapien
ttcttaaaggccagatatttttggc

SEQ ID NO: 4307662 - DNA, 25 bp, Homo sapien
aatgtgctggagtctcgtaatccga

SEQ ID NO: 4307663 - DNA, 25 bp, Homo sapien
gacagccctatggttaactgggtcc

SEQ ID NO: 4307664 - DNA, 25 bp, Homo sapien
tagacattgccatagcagctggtgt

SEQ ID NO: 4307665 - DNA, 25 bp, Homo sapien
tgcttggagagggtaaaggattata

SEQ ID NO: 4307666 - DNA, 25 bp, Homo sapien
gagaacaaggtacttgcagccccgc

SEQ ID NO: 4307667 - DNA, 25 bp, Homo sapien
gaagagtacgaggatgcacgactgc

SEQ ID NO: 4307668 - DNA, 25 bp, Homo sapien
caaagctggtctgcgggctgtgtcc

SEQ ID NO: 4307669 - DNA, 25 bp, Homo sapien
gatcccctgtctgagtcaaagctgg

SEQ ID NO: 4307670 - DNA, 25 bp, Homo sapien
tgtagtaactggaagacggtggctc

SEQ ID NO: 4307671 - DNA, 25 bp, Homo sapien
gattggcttgtataagaagacccgt

SEQ ID NO: 4307672 - DNA, 25 bp, Homo sapien
tatcgctgtccatctcggagagcag

SEQ ID NO: 4307673 - DNA, 25 bp, Homo sapien
gacccgtcatcgaggatttctgtgc

SEQ ID NO: 4307674 - DNA, 25 bp, Homo sapien
gggccgcctctccagagttttgtaa

SEQ ID NO: 4307675 - DNA, 25 bp, Homo sapien
gtgggcatgcttcgtcctccctggg

SEQ ID NO: 4307676 - DNA, 25 bp, Homo sapien
ctgtaggcgtttcgggtaagaactg

SEQ ID NO: 4307677 - DNA, 25 bp, Homo sapien
taagaactggcgtggtgggcatgct

SEQ ID NO: 4307678 - DNA, 25 bp, Homo sapien
attgatggacgactttctgaaatgg

SEQ ID NO: 4307679 - DNA, 25 bp, Homo sapien
gagaatgaggtactgaacttgatcg

SEQ ID NO: 4307680 - DNA, 25 bp, Homo sapien
tctgaaatggattcgctcaatacca

SEQ ID NO: 4307681 - DNA, 25 bp, Homo sapien
tgcctggtatccacaaactgttcat

SEQ ID NO: 4307682 - DNA, 25 bp, Homo sapien
ccaggaaaagtgaaggcatcactgg

SEQ ID NO: 4307683 - DNA, 25 bp, Homo sapien
gcccaggaaaagtgaaggcatcact

SEQ ID NO: 4307684 - DNA, 25 bp, Homo sapien
ctgcccaggaaaagtgaaggcatca

SEQ ID NO: 4307685 - DNA, 25 bp, Homo sapien
tgcccaggaaaagtgaaggcatcac

SEQ ID NO: 4307686 - DNA, 25 bp, Homo sapien
cagacaaagagctactctctgaggg

SEQ ID NO: 4307687 - DNA, 25 bp, Homo sapien
ggtgtcagacaaagagctactctct

SEQ ID NO: 4307688 - DNA, 25 bp, Homo sapien
cataggtggtggtgtcagacaaaga

SEQ ID NO: 4307689 - DNA, 25 bp, Homo sapien
tggtggtgtcagacaaagagctact

SEQ ID NO: 4307690 - DNA, 25 bp, Homo sapien
tggccaagcttttcaacaggtttct

SEQ ID NO: 4307691 - DNA, 25 bp, Homo sapien
actggccaagcttttcaacaggttt

SEQ ID NO: 4307692 - DNA, 25 bp, Homo sapien
ctggccaagcttttcaacaggtttc

SEQ ID NO: 4307693 - DNA, 25 bp, Homo sapien
ggccaagcttttcaacaggtttctc

SEQ ID NO: 4307694 - DNA, 25 bp, Homo sapien
tagtcagctgttaggcatactttca

SEQ ID NO: 4307695 - DNA, 25 bp, Homo sapien
caaggtgccagtatagtcagctgtt

SEQ ID NO: 4307696 - DNA, 25 bp, Homo sapien
gagcttgaaggcaaggtgccagtat

SEQ ID NO: 4307697 - DNA, 25 bp, Homo sapien
ccagtatagtcagctgttaggcata

SEQ ID NO: 4307698 - DNA, 25 bp, Homo sapien
tcctttgatctctcatcaactggta

SEQ ID NO: 4307699 - DNA, 25 bp, Homo sapien
cctttgatctctcatcaactggtaa

SEQ ID NO: 4307700 - DNA, 25 bp, Homo sapien
gatctctcatcaactggtaactggt

SEQ ID NO: 4307701 - DNA, 25 bp, Homo sapien
tttgatctctcatcaactggtaact

SEQ ID NO: 4307702 - DNA, 25 bp, Homo sapien
gtaacactgttgctttctggctggg

SEQ ID NO: 4307703 - DNA, 25 bp, Homo sapien
ctttctggctgggtttctttccaca

SEQ ID NO: 4307704 - DNA, 25 bp, Homo sapien
tttctggctgggtttctttccacac

SEQ ID NO: 4307705 - DNA, 25 bp, Homo sapien
ctggtaacactgttgctttctggct

SEQ ID NO: 4307706 - DNA, 25 bp, Homo sapien
ttacaaaggtctggctcattggcaa

SEQ ID NO: 4307707 - DNA, 25 bp, Homo sapien
cattggcaagtttctttgcagcttc

SEQ ID NO: 4307708 - DNA, 25 bp, Homo sapien
gaagctttttcatcgcatctgtgta

SEQ ID NO: 4307709 - DNA, 25 bp, Homo sapien
tctccagttcttgcaaagcaggatc

SEQ ID NO: 4307710 - DNA, 25 bp, Homo sapien
aacgcagtacccacacgtcttctga

SEQ ID NO: 4307711 - DNA, 25 bp, Homo sapien
gtcatctaatttgaacgcagtaccc

SEQ ID NO: 4307712 - DNA, 25 bp, Homo sapien
cggcagcaagttgtcatctaatttg

SEQ ID NO: 4307713 - DNA, 25 bp, Homo sapien
ttcttcactcggcagcaagttgtca

SEQ ID NO: 4307714 - DNA, 25 bp, Homo sapien
tatgttcaggggatactcctttggc

SEQ ID NO: 4307715 - DNA, 25 bp, Homo sapien
gaggaggcttctcgcctatgttcag

SEQ ID NO: 4307716 - DNA, 25 bp, Homo sapien
tcgcctatgttcaggggatactcct

SEQ ID NO: 4307717 - DNA, 25 bp, Homo sapien
tgaggaggcttctcgcctatgttca

SEQ ID NO: 4307718 - DNA, 25 bp, Homo sapien
gatcttcttaagctcctcaactttt

SEQ ID NO: 4307719 - DNA, 25 bp, Homo sapien
gacagatcttcttaagctcctcaac

SEQ ID NO: 4307720 - DNA, 25 bp, Homo sapien
agcctcccgcagacagatcttctta

SEQ ID NO: 4307721 - DNA, 25 bp, Homo sapien
cgcagacagatcttcttaagctcct

SEQ ID NO: 4307722 - DNA, 25 bp, Homo sapien
attgcaatctcatctaaactcctgg

SEQ ID NO: 4307723 - DNA, 25 bp, Homo sapien
aaactgccattacttgccatgatga

SEQ ID NO: 4307724 - DNA, 25 bp, Homo sapien
ctgaggagattaaactgccattact

SEQ ID NO: 4307725 - DNA, 25 bp, Homo sapien
ctgacttttcgtctccagtgtcacc

SEQ ID NO: 4307726 - DNA, 25 bp, Homo sapien
ctgaaatagttggaagttaaacgca

SEQ ID NO: 4307727 - DNA, 25 bp, Homo sapien
ggcttatcttctgaacagaatgcaa

SEQ ID NO: 4307728 - DNA, 25 bp, Homo sapien
gtgagaaggcttatcttctgaacag

SEQ ID NO: 4307729 - DNA, 25 bp, Homo sapien
tctgtccctatagaaatgatgccag

SEQ ID NO: 4307730 - DNA, 25 bp, Homo sapien
cattacccaaatggacttgatgaga

SEQ ID NO: 4307731 - DNA, 25 bp, Homo sapien
gaagagttagcataccatgtttgca

SEQ ID NO: 4307732 - DNA, 25 bp, Homo sapien
gcttccggtccaagtaaaactgatg

SEQ ID NO: 4307733 - DNA, 25 bp, Homo sapien
gatgctgactaattgccattaccca

SEQ ID NO: 4307734 - DNA, 25 bp, Homo sapien
aatttggcttatctcttcaggtcac

SEQ ID NO: 4307735 - DNA, 25 bp, Homo sapien
tgaaaagtacccactaaggactgat

SEQ ID NO: 4307736 - DNA, 25 bp, Homo sapien
taaccatctcgggactgaaaagtac

SEQ ID NO: 4307737 - DNA, 25 bp, Homo sapien
aagcagccttgccattcctcagagg

SEQ ID NO: 4307738 - DNA, 25 bp, Homo sapien
cttcgtggatcatgaacttcaacag

SEQ ID NO: 4307739 - DNA, 25 bp, Homo sapien
tttctcacggaaatataagttctcc

SEQ ID NO: 4307740 - DNA, 25 bp, Homo sapien
acagcaaattttttctcacggaaat

SEQ ID NO: 4307741 - DNA, 25 bp, Homo sapien
tcgtggatcatgaacttcaacagca

SEQ ID NO: 4307742 - DNA, 25 bp, Homo sapien
gcagctccggtgagttctgaactga

SEQ ID NO: 4307743 - DNA, 25 bp, Homo sapien
caaggacgaatttcaccggaggctg

SEQ ID NO: 4307744 - DNA, 25 bp, Homo sapien
aatttcacaaactgagcctcccacg

SEQ ID NO: 4307745 - DNA, 25 bp, Homo sapien
gtttactcaccctggacatgaacag

SEQ ID NO: 4307746 - DNA, 25 bp, Homo sapien
ccaagtgaaccaagtcagattgcct

SEQ ID NO: 4307747 - DNA, 25 bp, Homo sapien
gtcagcaagtaatggacagagccct

SEQ ID NO: 4307748 - DNA, 25 bp, Homo sapien
tgtcggaagggatcagggaaactat

SEQ ID NO: 4307749 - DNA, 25 bp, Homo sapien
catggagggcagtcacttaatagca

SEQ ID NO: 4307750 - DNA, 25 bp, Homo sapien
gggatccctctgctattattacgtg

SEQ ID NO: 4307751 - DNA, 25 bp, Homo sapien
tatacatcagtgactcacacggtgg

SEQ ID NO: 4307752 - DNA, 25 bp, Homo sapien
taaaggcttcacaataggccaggac

SEQ ID NO: 4307753 - DNA, 25 bp, Homo sapien
tgatgaattgaaggtagatgccacc

SEQ ID NO: 4307754 - DNA, 25 bp, Homo sapien
cattgggggtatttcactggaggct

SEQ ID NO: 4307755 - DNA, 25 bp, Homo sapien
cacacctgactatatttctgtttat

SEQ ID NO: 4307756 - DNA, 25 bp, Homo sapien
tctgatctcgaccttctgagtagct

SEQ ID NO: 4307757 - DNA, 25 bp, Homo sapien
gacttctcgggctcgcgatcctctg

SEQ ID NO: 4307758 - DNA, 25 bp, Homo sapien
tatggaagcaaaatccattgtcaga

SEQ ID NO: 4307759 - DNA, 25 bp, Homo sapien
ccaggagagggacttgtaaaacagc

SEQ ID NO: 4307760 - DNA, 25 bp, Homo sapien
gcacagagtagacaccccccaaaaa

SEQ ID NO: 4307761 - DNA, 25 bp, Homo sapien
gctgtgctcatggtcctttaaatta

SEQ ID NO: 4307762 - DNA, 25 bp, Homo sapien
ccaggaaagctggatcagtattgga

SEQ ID NO: 4307763 - DNA, 25 bp, Homo sapien
caagctgcatggacacttagaagat

SEQ ID NO: 4307764 - DNA, 25 bp, Homo sapien
ttctagtaagaagcctcaacgccct

SEQ ID NO: 4307765 - DNA, 25 bp, Homo sapien
gactgtgtgcaatgattcaagctgc

SEQ ID NO: 4307766 - DNA, 25 bp, Homo sapien
agaaacctaatggtgtgtgcttgtg

SEQ ID NO: 4307767 - DNA, 25 bp, Homo sapien
aaaatagaaacctaatggtgtgtgc

SEQ ID NO: 4307768 - DNA, 25 bp, Homo sapien
tcatcctgttcatactaacataaaa

SEQ ID NO: 4307769 - DNA, 25 bp, Homo sapien
ttatatgtctaccatccaattcaaa

SEQ ID NO: 4307770 - DNA, 25 bp, Homo sapien
ttggccaattcccttatagcttatt

SEQ ID NO: 4307771 - DNA, 25 bp, Homo sapien
ttccgaggcttcaccttgtcttgta

SEQ ID NO: 4307772 - DNA, 25 bp, Homo sapien
cttgtcttgtatatcatattggcca

SEQ ID NO: 4307773 - DNA, 25 bp, Homo sapien
gccaattcccttatagcttattcca

SEQ ID NO: 4307774 - DNA, 25 bp, Homo sapien
ctttactgcataataatggacaccg

SEQ ID NO: 4307775 - DNA, 25 bp, Homo sapien
ccgtaagtcggtagagcttctacta

SEQ ID NO: 4307776 - DNA, 25 bp, Homo sapien
cataataatggacaccgtaagtcgg

SEQ ID NO: 4307777 - DNA, 25 bp, Homo sapien
taatggacaccgtaagtcggtagag

SEQ ID NO: 4307778 - DNA, 25 bp, Homo sapien
caggccagtaagtgttgttctcctc

SEQ ID NO: 4307779 - DNA, 25 bp, Homo sapien
agggccagcatccattagcactttt

SEQ ID NO: 4307780 - DNA, 25 bp, Homo sapien
agccctctcctgacaggccagtaag

SEQ ID NO: 4307781 - DNA, 25 bp, Homo sapien
tgtacctaacaaaccatcacctaga

SEQ ID NO: 4307782 - DNA, 25 bp, Homo sapien
gactcaaattcgaatcacaaactgg

SEQ ID NO: 4307783 - DNA, 25 bp, Homo sapien
gggacaaaacatggcttctagatag

SEQ ID NO: 4307784 - DNA, 25 bp, Homo sapien
caatatactatacactcgactcaaa

SEQ ID NO: 4307785 - DNA, 25 bp, Homo sapien
caatggcttgttgttagtagcatga

SEQ ID NO: 4307786 - DNA, 25 bp, Homo sapien
tgaaccacagcttgacctcgagtga

SEQ ID NO: 4307787 - DNA, 25 bp, Homo sapien
tttcaaataatgctcaattaccctg

SEQ ID NO: 4307788 - DNA, 25 bp, Homo sapien
caaataatgctcaattaccctgtcc

SEQ ID NO: 4307789 - DNA, 25 bp, Homo sapien
cctcgagtgagacctttgattttca

SEQ ID NO: 4307790 - DNA, 25 bp, Homo sapien
tggaaaggctggtaatgtctttaaa

SEQ ID NO: 4307791 - DNA, 25 bp, Homo sapien
tttggttggaaaggctggtaatgtc

SEQ ID NO: 4307792 - DNA, 25 bp, Homo sapien
tggttggaaaggctggtaatgtctt

SEQ ID NO: 4307793 - DNA, 25 bp, Homo sapien
gaaaggctggtaatgtctttaaatc

SEQ ID NO: 4307794 - DNA, 25 bp, Homo sapien
ctccaaagtagctagaatcacagct

SEQ ID NO: 4307795 - DNA, 25 bp, Homo sapien
tagaatcacagctgcgtgccaccat

SEQ ID NO: 4307796 - DNA, 25 bp, Homo sapien
aagtagctagaatcacagctgcgtg

SEQ ID NO: 4307797 - DNA, 25 bp, Homo sapien
agaatcacagctgcgtgccaccatg

SEQ ID NO: 4307798 - DNA, 25 bp, Homo sapien
gactataacactaaaagagaaagcc

SEQ ID NO: 4307799 - DNA, 25 bp, Homo sapien
gccagcagaataatcgaaagacgac

SEQ ID NO: 4307800 - DNA, 25 bp, Homo sapien
tatttgaagtggttgagctgtggac

SEQ ID NO: 4307801 - DNA, 25 bp, Homo sapien
cagcaagccatcaccgatatttgaa

SEQ ID NO: 4307802 - DNA, 25 bp, Homo sapien
ttacaggcgccctccgccacgcctg

SEQ ID NO: 4307803 - DNA, 25 bp, Homo sapien
agttggccaggctgatcttgaactc

SEQ ID NO: 4307804 - DNA, 25 bp, Homo sapien
aagttggccaggctgatcttgaact

SEQ ID NO: 4307805 - DNA, 25 bp, Homo sapien
attacaggcgccctccgccacgcct

SEQ ID NO: 4307806 - DNA, 25 bp, Homo sapien
gggctcgttgctcacctgtaatctg

SEQ ID NO: 4307807 - DNA, 25 bp, Homo sapien
gaagctgggtgttaatatactctca

SEQ ID NO: 4307808 - DNA, 25 bp, Homo sapien
tcttacaagtagaagcaccctaatc

SEQ ID NO: 4307809 - DNA, 25 bp, Homo sapien
gtaacttgtgaatattcccttccca

SEQ ID NO: 4307810 - DNA, 25 bp, Homo sapien
gccagtgaggcagttagaaccatta

SEQ ID NO: 4307811 - DNA, 25 bp, Homo sapien
tctatttgaagagcgaagagatctc

SEQ ID NO: 4307812 - DNA, 25 bp, Homo sapien
gaaccattaagtgtctccgcagcaa

SEQ ID NO: 4307813 - DNA, 25 bp, Homo sapien
tcaagtgtatgaagggtgaggcccc

SEQ ID NO: 4307814 - DNA, 25 bp, Homo sapien
gctaagaggcagtttgtccaatctt

SEQ ID NO: 4307815 - DNA, 25 bp, Homo sapien
gctgctaagaggcagtttgtccaat

SEQ ID NO: 4307816 - DNA, 25 bp, Homo sapien
tgctaagaggcagtttgtccaatct

SEQ ID NO: 4307817 - DNA, 25 bp, Homo sapien
taagaggcagtttgtccaatcttac

SEQ ID NO: 4307818 - DNA, 25 bp, Homo sapien
tgaagatggtttcgctctctacttc

SEQ ID NO: 4307819 - DNA, 25 bp, Homo sapien
gatggtttcgctctctacttcgatt

SEQ ID NO: 4307820 - DNA, 25 bp, Homo sapien
tttcgctctctacttcgatttgccc

SEQ ID NO: 4307821 - DNA, 25 bp, Homo sapien
acttgaagatggtttcgctctctac

SEQ ID NO: 4307822 - DNA, 25 bp, Homo sapien
caggccgcccttctgaaacctgagg

SEQ ID NO: 4307823 - DNA, 25 bp, Homo sapien
ggaattcaaagctcgcccataatct

SEQ ID NO: 4307824 - DNA, 25 bp, Homo sapien
gaggatctgcttcaaagtttattgc

SEQ ID NO: 4307825 - DNA, 25 bp, Homo sapien
tattgcctcaaaagctgacaggccc

SEQ ID NO: 4307826 - DNA, 25 bp, Homo sapien
ctgtggacttttccacctacacaag

SEQ ID NO: 4307827 - DNA, 25 bp, Homo sapien
acctacacaagtggccccaatacag

SEQ ID NO: 4307828 - DNA, 25 bp, Homo sapien
gacttttccacctacacaagtggcc

SEQ ID NO: 4307829 - DNA, 25 bp, Homo sapien
tggacttttccacctacacaagtgg

SEQ ID NO: 4307830 - DNA, 25 bp, Homo sapien
tgctgtcacccctgcctagtaggta

SEQ ID NO: 4307831 - DNA, 25 bp, Homo sapien
ttattgtctgatgccctacctgctg

SEQ ID NO: 4307832 - DNA, 25 bp, Homo sapien
tgggcagaccgcttctcagaaactt

SEQ ID NO: 4307833 - DNA, 25 bp, Homo sapien
gcattatgaccaaagtatctgggca

SEQ ID NO: 4307834 - DNA, 25 bp, Homo sapien
taaagctggacagttaggaatcccc

SEQ ID NO: 4307835 - DNA, 25 bp, Homo sapien
tgtcatgcatcaagccaaactatgg

SEQ ID NO: 4307836 - DNA, 25 bp, Homo sapien
aaactatggacggtctctccaaggg

SEQ ID NO: 4307837 - DNA, 25 bp, Homo sapien
tatattaatccatgggtcctgtgag

SEQ ID NO: 4307838 - DNA, 25 bp, Homo sapien
ttttattatcttgatgcagttttga

SEQ ID NO: 4307839 - DNA, 25 bp, Homo sapien
tttattatcttgatgcagttttgaa

SEQ ID NO: 4307840 - DNA, 25 bp, Homo sapien
ttattatcttgatgcagttttgaag

SEQ ID NO: 4307841 - DNA, 25 bp, Homo sapien
tcctgtcatcccagtcgctctggag

SEQ ID NO: 4307842 - DNA, 25 bp, Homo sapien
tgaacatgacaaacggggcacctac

SEQ ID NO: 4307843 - DNA, 25 bp, Homo sapien
aaaccatttcttcctgtcatcccag

SEQ ID NO: 4307844 - DNA, 25 bp, Homo sapien
atcccagtcgctctggaggcatcca

SEQ ID NO: 4307845 - DNA, 25 bp, Homo sapien
aaaaacgatatgctctcaatgtaaa

SEQ ID NO: 4307846 - DNA, 25 bp, Homo sapien
tttaaaaacgatatgctctcaatgt

SEQ ID NO: 4307847 - DNA, 25 bp, Homo sapien
tcctttaaaaacgatatgctctcaa

SEQ ID NO: 4307848 - DNA, 25 bp, Homo sapien
tttatcctttaaaaacgatatgctc

SEQ ID NO: 4307849 - DNA, 25 bp, Homo sapien
aatggatagccaggccagacgcagt

SEQ ID NO: 4307850 - DNA, 25 bp, Homo sapien
tactgccaaaactagctgcactggg

SEQ ID NO: 4307851 - DNA, 25 bp, Homo sapien
tttattcgctgtatggccttgggca

SEQ ID NO: 4307852 - DNA, 25 bp, Homo sapien
ccggaaactgcttgctactgccaaa

SEQ ID NO: 4307853 - DNA, 25 bp, Homo sapien
caagaactcggtgatctaactgcag

SEQ ID NO: 4307854 - DNA, 25 bp, Homo sapien
tgcaaaatggttgggcctggtttct

SEQ ID NO: 4307855 - DNA, 25 bp, Homo sapien
tgggcaaatcgtggtcaagaactcg

SEQ ID NO: 4307856 - DNA, 25 bp, Homo sapien
ctcacagcaaagtgcaaaatggttg

SEQ ID NO: 4307857 - DNA, 25 bp, Homo sapien
tgtgagccactcttaatgtaaatat

SEQ ID NO: 4307858 - DNA, 25 bp, Homo sapien
cactgtaatcgggaataacaaactc

SEQ ID NO: 4307859 - DNA, 25 bp, Homo sapien
agcaagtaggtagcccaggcaaaag

SEQ ID NO: 4307860 - DNA, 25 bp, Homo sapien
caacataaaatggacctaagtggta

SEQ ID NO: 4307861 - DNA, 25 bp, Homo sapien
cctttagctaagcaggacatgttct

SEQ ID NO: 4307862 - DNA, 25 bp, Homo sapien
gcaactctcttgctagaagtttggg

SEQ ID NO: 4307863 - DNA, 25 bp, Homo sapien
ggtccagcaactctcttgctagaag

SEQ ID NO: 4307864 - DNA, 25 bp, Homo sapien
tccagcaactctcttgctagaagtt

SEQ ID NO: 4307865 - DNA, 25 bp, Homo sapien
cagcaactctcttgctagaagtttg

SEQ ID NO: 4307866 - DNA, 25 bp, Homo sapien
taattgaagcctaagcatagtgggc

SEQ ID NO: 4307867 - DNA, 25 bp, Homo sapien
aaatatcatcgcttggctgggcgca

SEQ ID NO: 4307868 - DNA, 25 bp, Homo sapien
caggcagacatctagactaaaggtc

SEQ ID NO: 4307869 - DNA, 25 bp, Homo sapien
tctaggctagctgtaggtgtggccc

SEQ ID NO: 4307870 - DNA, 25 bp, Homo sapien
gcaacacacatgtgggccacaccta

SEQ ID NO: 4307871 - DNA, 25 bp, Homo sapien
ttatctgggcaacacacatgtgggc

SEQ ID NO: 4307872 - DNA, 25 bp, Homo sapien
tctgggcaacacacatgtgggccac

SEQ ID NO: 4307873 - DNA, 25 bp, Homo sapien
gacttatctgggcaacacacatgtg

SEQ ID NO: 4307874 - DNA, 25 bp, Homo sapien
ctcctatcatccaggaggtgcacct

SEQ ID NO: 4307875 - DNA, 25 bp, Homo sapien
ttgctccccagctggtaagagtcag

SEQ ID NO: 4307876 - DNA, 25 bp, Homo sapien
ctcggtctccagctggcctgtttgc

SEQ ID NO: 4307877 - DNA, 25 bp, Homo sapien
ctgtttgctccccagctggtaagag

SEQ ID NO: 4307878 - DNA, 25 bp, Homo sapien
tgtttgctccccagctggtaagagt

SEQ ID NO: 4307879 - DNA, 25 bp, Homo sapien
ctgatgaaatatgggcagctgctaa

SEQ ID NO: 4307880 - DNA, 25 bp, Homo sapien
ccagagttggctggttcaggccact

SEQ ID NO: 4307881 - DNA, 25 bp, Homo sapien
ccttgggcagtcaggatggaattaa

SEQ ID NO: 4307882 - DNA, 25 bp, Homo sapien
aattaatctccacctgttgggatgc

SEQ ID NO: 4307883 - DNA, 25 bp, Homo sapien
gaaagttctccagttgccttgtaga

SEQ ID NO: 4307884 - DNA, 25 bp, Homo sapien
agtgagtatgcaagcagcagacacc

SEQ ID NO: 4307885 - DNA, 25 bp, Homo sapien
tcatctgcagttcaggttaaccaga

SEQ ID NO: 4307886 - DNA, 25 bp, Homo sapien
tcaggttaaccagaaatgaaagttc

SEQ ID NO: 4307887 - DNA, 25 bp, Homo sapien
acaaatcacatacatcgtcctgaga

SEQ ID NO: 4307888 - DNA, 25 bp, Homo sapien
aacaaatcacatacatcgtcctgag

SEQ ID NO: 4307889 - DNA, 25 bp, Homo sapien
caaatcacatacatcgtcctgagaa

SEQ ID NO: 4307890 - DNA, 25 bp, Homo sapien
aaatcacatacatcgtcctgagaac

SEQ ID NO: 4307891 - DNA, 25 bp, Homo sapien
gaagccttttattagactgcagtca

SEQ ID NO: 4307892 - DNA, 25 bp, Homo sapien
gccagttcctgtatgcaatgcttca

SEQ ID NO: 4307893 - DNA, 25 bp, Homo sapien
catcgttatggtcttggctgcctcg

SEQ ID NO: 4307894 - DNA, 25 bp, Homo sapien
gcttttgggaatctgcagtgctcca

SEQ ID NO: 4307895 - DNA, 25 bp, Homo sapien
ttatttacagatcacgagacacgtc

SEQ ID NO: 4307896 - DNA, 25 bp, Homo sapien
gctatgatcaggtgtgtcagcctca

SEQ ID NO: 4307897 - DNA, 25 bp, Homo sapien
cctggttgtgatagccacgggagaa

SEQ ID NO: 4307898 - DNA, 25 bp, Homo sapien
gcctcagtggccttagacatttaat

SEQ ID NO: 4307899 - DNA, 25 bp, Homo sapien
aggagaccaaactggagtgggtgag

SEQ ID NO: 4307900 - DNA, 25 bp, Homo sapien
gtgaggagaccaaactggagtgggt

SEQ ID NO: 4307901 - DNA, 25 bp, Homo sapien
tgtgaggagaccaaactggagtggg

SEQ ID NO: 4307902 - DNA, 25 bp, Homo sapien
tgaggagaccaaactggagtgggtg

SEQ ID NO: 4307903 - DNA, 25 bp, Homo sapien
caagatggcccttaccaaattgagt

SEQ ID NO: 4307904 - DNA, 25 bp, Homo sapien
catgagaggatatagcaagatggcc

SEQ ID NO: 4307905 - DNA, 25 bp, Homo sapien
gcagttactctgttgtagcagcaca

SEQ ID NO: 4307906 - DNA, 25 bp, Homo sapien
tggactaagacaggcaacacacaca

SEQ ID NO: 4307907 - DNA, 25 bp, Homo sapien
tacccagggaatatgtgctgacttt

SEQ ID NO: 4307908 - DNA, 25 bp, Homo sapien
tatactccccaagagtgagttgcaa

SEQ ID NO: 4307909 - DNA, 25 bp, Homo sapien
taagccgaagcctgacacattgctg

SEQ ID NO: 4307910 - DNA, 25 bp, Homo sapien
tgctggtgcagtacatacccaggga

SEQ ID NO: 4307911 - DNA, 25 bp, Homo sapien
gaaagaataagtacaacgtctgcag

SEQ ID NO: 4307912 - DNA, 25 bp, Homo sapien
ctttatagacgaccagtttctggac

SEQ ID NO: 4307913 - DNA, 25 bp, Homo sapien
ggccattttaatctgtgccccaaat

SEQ ID NO: 4307914 - DNA, 25 bp, Homo sapien
agcccaccgagagtgagctgaagca

SEQ ID NO: 4307915 - DNA, 25 bp, Homo sapien
tacttgccagcaatgcaacaaagct

SEQ ID NO: 4307916 - DNA, 25 bp, Homo sapien
gaacgcagctacttgccagcaatgc

SEQ ID NO: 4307917 - DNA, 25 bp, Homo sapien
atgcacaagctccagtagcgattcg

SEQ ID NO: 4307918 - DNA, 25 bp, Homo sapien
ctccagtagcgattcgatcaagcgg

SEQ ID NO: 4307919 - DNA, 25 bp, Homo sapien
ctttacagcctgatctacaaaagct

SEQ ID NO: 4307920 - DNA, 25 bp, Homo sapien
ttacagcctgatctacaaaagcttc

SEQ ID NO: 4307921 - DNA, 25 bp, Homo sapien
tttacagcctgatctacaaaagctt

SEQ ID NO: 4307922 - DNA, 25 bp, Homo sapien
caggtcacaggactgcatttggata

SEQ ID NO: 4307923 - DNA, 25 bp, Homo sapien
gtcaccataatgtcactctgagaat

SEQ ID NO: 4307924 - DNA, 25 bp, Homo sapien
tccttttcactccttcggacattag

SEQ ID NO: 4307925 - DNA, 25 bp, Homo sapien
cataatgtcactctgagaatccagg

SEQ ID NO: 4307926 - DNA, 25 bp, Homo sapien
tccgaaccaccatgacctcggctca

SEQ ID NO: 4307927 - DNA, 25 bp, Homo sapien
cctcggctcatttaaaggaactgaa

SEQ ID NO: 4307928 - DNA, 25 bp, Homo sapien
gaactgaagagagtgcttaagacaa

SEQ ID NO: 4307929 - DNA, 25 bp, Homo sapien
gacaaaagacacacgtattaagcac

SEQ ID NO: 4307930 - DNA, 25 bp, Homo sapien
cagcaagttgggctagattaggcaa

SEQ ID NO: 4307931 - DNA, 25 bp, Homo sapien
tggagagtcgactgagagaactagt

SEQ ID NO: 4307932 - DNA, 25 bp, Homo sapien
ttttcactgttgaaggacaatcgga

SEQ ID NO: 4307933 - DNA, 25 bp, Homo sapien
gacaatcggaatgttgatagccagt

SEQ ID NO: 4307934 - DNA, 25 bp, Homo sapien
tgtccaggaaaaacaaccctgatgg

SEQ ID NO: 4307935 - DNA, 25 bp, Homo sapien
cacgtgcagttttttaggtgacgca

SEQ ID NO: 4307936 - DNA, 25 bp, Homo sapien
ggtagcataagtctccccagttggg

SEQ ID NO: 4307937 - DNA, 25 bp, Homo sapien
ggttttaccataaggcacgtgcagt

SEQ ID NO: 4307938 - DNA, 25 bp, Homo sapien
gtgagtgagagcctcttcaagccag

SEQ ID NO: 4307939 - DNA, 25 bp, Homo sapien
tcagcttccttgctaccagtagtat

SEQ ID NO: 4307940 - DNA, 25 bp, Homo sapien
tgtgcatttactactcaaaacctgg

SEQ ID NO: 4307941 - DNA, 25 bp, Homo sapien
ctttactgatattcagattgggcca

SEQ ID NO: 4307942 - DNA, 25 bp, Homo sapien
gcatctgtttaagcagtcacatggc

SEQ ID NO: 4307943 - DNA, 25 bp, Homo sapien
catttaaacccgacaacatcacgag

SEQ ID NO: 4307944 - DNA, 25 bp, Homo sapien
agttacccagccagtaaaggacgtg

SEQ ID NO: 4307945 - DNA, 25 bp, Homo sapien
cgtgggccagcattggaactcatac

SEQ ID NO: 4307946 - DNA, 25 bp, Homo sapien
gtcgttcttggacaggtgctttgca

SEQ ID NO: 4307947 - DNA, 25 bp, Homo sapien
ccccttgtcgttcttggacaggtgc

SEQ ID NO: 4307948 - DNA, 25 bp, Homo sapien
ttggacaggtgctttgcatacttct

SEQ ID NO: 4307949 - DNA, 25 bp, Homo sapien
cgttcttggacaggtgctttgcata

SEQ ID NO: 4307950 - DNA, 25 bp, Homo sapien
tagcccatggcatactcccacttca

SEQ ID NO: 4307951 - DNA, 25 bp, Homo sapien
aagccaataatgtgggagcttcagc

SEQ ID NO: 4307952 - DNA, 25 bp, Homo sapien
gccttacacttgatactcagtcctc

SEQ ID NO: 4307953 - DNA, 25 bp, Homo sapien
ttcacagacaagccaggcaagccaa

SEQ ID NO: 4307954 - DNA, 25 bp, Homo sapien
ttatcaaatccagctatgtttacag

SEQ ID NO: 4307955 - DNA, 25 bp, Homo sapien
tagatgtggcagttttaccgaccct

SEQ ID NO: 4307956 - DNA, 25 bp, Homo sapien
gagattagagactaggagagtgcta

SEQ ID NO: 4307957 - DNA, 25 bp, Homo sapien
taagtggcaaactaagttcatctca

SEQ ID NO: 4307958 - DNA, 25 bp, Homo sapien
tttcaagctgtgcaacaaaggttca

SEQ ID NO: 4307959 - DNA, 25 bp, Homo sapien
tcatttgaagagtccggagagtccg

SEQ ID NO: 4307960 - DNA, 25 bp, Homo sapien
taagatgccttaaacagtgctggga

SEQ ID NO: 4307961 - DNA, 25 bp, Homo sapien
tgttactcaagtcaagacagcaagg

SEQ ID NO: 4307962 - DNA, 25 bp, Homo sapien
tcagtgcaggctttggtcctagcac

SEQ ID NO: 4307963 - DNA, 25 bp, Homo sapien
ctgccagtggtatttctaaatcaac

SEQ ID NO: 4307964 - DNA, 25 bp, Homo sapien
ggatataaggcctgaaactgctgtg

SEQ ID NO: 4307965 - DNA, 25 bp, Homo sapien
gaaaccagctgaagataaagccaac

SEQ ID NO: 4307966 - DNA, 25 bp, Homo sapien
aagccaacacatcagcaagaccagg

SEQ ID NO: 4307967 - DNA, 25 bp, Homo sapien
tacccacggtcatacataggcaaag

SEQ ID NO: 4307968 - DNA, 25 bp, Homo sapien
catggtgcccaaccgttatcttttc

SEQ ID NO: 4307969 - DNA, 25 bp, Homo sapien
accacaggttcatgacgctatacct

SEQ ID NO: 4307970 - DNA, 25 bp, Homo sapien
gttcatgacgctatacctggctgat

SEQ ID NO: 4307971 - DNA, 25 bp, Homo sapien
ccatggtgcccaaccgttatctttt

SEQ ID NO: 4307972 - DNA, 25 bp, Homo sapien
gtcaaccttataaagaatccataag

SEQ ID NO: 4307973 - DNA, 25 bp, Homo sapien
aaattatcagtcaaccttataaaga

SEQ ID NO: 4307974 - DNA, 25 bp, Homo sapien
tcagtcaaccttataaagaatccat

SEQ ID NO: 4307975 - DNA, 25 bp, Homo sapien
aattatcagtcaaccttataaagaa

SEQ ID NO: 4307976 - DNA, 25 bp, Homo sapien
tacagataagccataaatcctctga

SEQ ID NO: 4307977 - DNA, 25 bp, Homo sapien
ttgaattggtcagtaacagtattac

SEQ ID NO: 4307978 - DNA, 25 bp, Homo sapien
tggctacaatatttgcgttcccttt

SEQ ID NO: 4307979 - DNA, 25 bp, Homo sapien
cagagtcactctggttggctacaat

SEQ ID NO: 4307980 - DNA, 25 bp, Homo sapien
cagagagctatgtaatgtggccaga

SEQ ID NO: 4307981 - DNA, 25 bp, Homo sapien
aaagccagagagctatgtaatgtgg

SEQ ID NO: 4307982 - DNA, 25 bp, Homo sapien
gctatgtaatgtggccagatgggat

SEQ ID NO: 4307983 - DNA, 25 bp, Homo sapien
aaggggcacttattctacagaccaa

SEQ ID NO: 4307984 - DNA, 25 bp, Homo sapien
ggacacggtcaagttccatacgaag

SEQ ID NO: 4307985 - DNA, 25 bp, Homo sapien
tcaagttccatacgaagcggctgcc

SEQ ID NO: 4307986 - DNA, 25 bp, Homo sapien
tccgcagcgtggacacggtcaagtt

SEQ ID NO: 4307987 - DNA, 25 bp, Homo sapien
tccgtgtaccatctccgcagcgtgg

SEQ ID NO: 4307988 - DNA, 25 bp, Homo sapien
cctgggctcccgacgccggcttctg

SEQ ID NO: 4307989 - DNA, 25 bp, Homo sapien
tcctccttcgctctgaacccgggcg

SEQ ID NO: 4307990 - DNA, 25 bp, Homo sapien
agccggggggtcaagcctgccacca

SEQ ID NO: 4307991 - DNA, 25 bp, Homo sapien
ggcgtcccggctctcgtacgtgcag

SEQ ID NO: 4307992 - DNA, 25 bp, Homo sapien
tcgtctttcaccgtgcgtcctggcc

SEQ ID NO: 4307993 - DNA, 25 bp, Homo sapien
gtctttcaccgtgcgtcctggccag

SEQ ID NO: 4307994 - DNA, 25 bp, Homo sapien
aggctccggcggcatgccctgggat

SEQ ID NO: 4307995 - DNA, 25 bp, Homo sapien
gcatgccctgggattgggtgcccgc

SEQ ID NO: 4307996 - DNA, 25 bp, Homo sapien
gccgagcaagctgtgctaagctcca

SEQ ID NO: 4307997 - DNA, 25 bp, Homo sapien
gggcagggacggaagcggagcaact

SEQ ID NO: 4307998 - DNA, 25 bp, Homo sapien
gctcgcagcgccgagcaagctgtgc

SEQ ID NO: 4307999 - DNA, 25 bp, Homo sapien
agctgtgctaagctccaccaagctg

SEQ ID NO: 4308000 - DNA, 25 bp, Homo sapien
gtgttctcggaaatgtcaggcagcc

SEQ ID NO: 4308001 - DNA, 25 bp, Homo sapien
tcaggcagccaagggaataccagaa

SEQ ID NO: 4308002 - DNA, 25 bp, Homo sapien
gaagagaggctctagaaacactctg

SEQ ID NO: 4308003 - DNA, 25 bp, Homo sapien
gagctttcagttggcctctggagga

SEQ ID NO: 4308004 - DNA, 25 bp, Homo sapien
caacttgtcccgtggactcagagaa

SEQ ID NO: 4308005 - DNA, 25 bp, Homo sapien
tgagcttgatcttccccactagagg

SEQ ID NO: 4308006 - DNA, 25 bp, Homo sapien
gttttcagggagcagttctgttgct

SEQ ID NO: 4308007 - DNA, 25 bp, Homo sapien
tttcctatgactttctgtttgctga

SEQ ID NO: 4308008 - DNA, 25 bp, Homo sapien
acaacatctggctcactccgatacc

SEQ ID NO: 4308009 - DNA, 25 bp, Homo sapien
ggaggaaccattgctaagccgtgac

SEQ ID NO: 4308010 - DNA, 25 bp, Homo sapien
taagccgtgacgttctagttctgcg

SEQ ID NO: 4308011 - DNA, 25 bp, Homo sapien
tctgcgatacgccacaacatctggc

SEQ ID NO: 4308012 - DNA, 25 bp, Homo sapien
ggtgggaagcttcacacgcaccagg

SEQ ID NO: 4308013 - DNA, 25 bp, Homo sapien
tgtggttacctattatcaccgatgg

SEQ ID NO: 4308014 - DNA, 25 bp, Homo sapien
tatactcttgatacgcagcacagtg

SEQ ID NO: 4308015 - DNA, 25 bp, Homo sapien
tcaccgatgggtctctgagttatca

SEQ ID NO: 4308016 - DNA, 25 bp, Homo sapien
ttagatcctgagactactaagaaat

SEQ ID NO: 4308017 - DNA, 25 bp, Homo sapien
tacactaggtagctcatacaagtaa

SEQ ID NO: 4308018 - DNA, 25 bp, Homo sapien
aagatcacactgtattcatcctttt

SEQ ID NO: 4308019 - DNA, 25 bp, Homo sapien
tgattgtcactaaaatgtattatgg

SEQ ID NO: 4308020 - DNA, 25 bp, Homo sapien
tgccagtctcataggtgacgagcat

SEQ ID NO: 4308021 - DNA, 25 bp, Homo sapien
aaatattcaaggtgatagacatccc

SEQ ID NO: 4308022 - DNA, 25 bp, Homo sapien
tagatatcccgacacaaagaaaaga

SEQ ID NO: 4308023 - DNA, 25 bp, Homo sapien
tatccctaaaacgtgcacaactatg

SEQ ID NO: 4308024 - DNA, 25 bp, Homo sapien
tgcagtgggtgcaaaaaatccaagt

SEQ ID NO: 4308025 - DNA, 25 bp, Homo sapien
gctcctttagtagagaagccagaga

SEQ ID NO: 4308026 - DNA, 25 bp, Homo sapien
tctgggaccaggtcaagtctagcct

SEQ ID NO: 4308027 - DNA, 25 bp, Homo sapien
tagccttacagattacagcaaagag

SEQ ID NO: 4308028 - DNA, 25 bp, Homo sapien
actagtaagtattctcttgcctttc

SEQ ID NO: 4308029 - DNA, 25 bp, Homo sapien
tttcttctggatttctcatcaaagc

SEQ ID NO: 4308030 - DNA, 25 bp, Homo sapien
tctttcttctggatttctcatcaaa

SEQ ID NO: 4308031 - DNA, 25 bp, Homo sapien
actctttcttctggatttctcatca

SEQ ID NO: 4308032 - DNA, 25 bp, Homo sapien
ctttcttctggatttctcatcaaag

SEQ ID NO: 4308033 - DNA, 25 bp, Homo sapien
catgtcactgaatacaccgttttag

SEQ ID NO: 4308034 - DNA, 25 bp, Homo sapien
tgtctctgtaggaggagattctgaa

SEQ ID NO: 4308035 - DNA, 25 bp, Homo sapien
gctcaaagttatctacactcagttg

SEQ ID NO: 4308036 - DNA, 25 bp, Homo sapien
tagacttctactgtctctgtaggag

SEQ ID NO: 4308037 - DNA, 25 bp, Homo sapien
gatggcaccttcagactctcagact

SEQ ID NO: 4308038 - DNA, 25 bp, Homo sapien
gatgcctggagctagccaaactctg

SEQ ID NO: 4308039 - DNA, 25 bp, Homo sapien
tatgtacagtgccttgtgttgcagc

SEQ ID NO: 4308040 - DNA, 25 bp, Homo sapien
tggtaccctctgacttggcaccgtg

SEQ ID NO: 4308041 - DNA, 25 bp, Homo sapien
tgttcagtgcgttttcaaaaaatcc

SEQ ID NO: 4308042 - DNA, 25 bp, Homo sapien
ggactccaagatatctcaaacttaa

SEQ ID NO: 4308043 - DNA, 25 bp, Homo sapien
taaaaataggtaagcgtcagaagaa

SEQ ID NO: 4308044 - DNA, 25 bp, Homo sapien
tttggttgagaacgggcttgagtac

SEQ ID NO: 4308045 - DNA, 25 bp, Homo sapien
gagttattgcctctctatagattcc

SEQ ID NO: 4308046 - DNA, 25 bp, Homo sapien
ctttgggggctctatttattctact

SEQ ID NO: 4308047 - DNA, 25 bp, Homo sapien
actccaaagagttattgcctctcta

SEQ ID NO: 4308048 - DNA, 25 bp, Homo sapien
caggtactaaggtcccgactgactc

SEQ ID NO: 4308049 - DNA, 25 bp, Homo sapien
gtcttccactagcttccaaaggact

SEQ ID NO: 4308050 - DNA, 25 bp, Homo sapien
ggaaagtcttccactagcttccaaa

SEQ ID NO: 4308051 - DNA, 25 bp, Homo sapien
ccatggaaagtcttccactagcttc

SEQ ID NO: 4308052 - DNA, 25 bp, Homo sapien
aagtcttccactagcttccaaagga

SEQ ID NO: 4308053 - DNA, 25 bp, Homo sapien
tgggattcttgttggatatatcaca

SEQ ID NO: 4308054 - DNA, 25 bp, Homo sapien
agcatgtccagccttccttgttggc

SEQ ID NO: 4308055 - DNA, 25 bp, Homo sapien
aactccctgggattcttgttggata

SEQ ID NO: 4308056 - DNA, 25 bp, Homo sapien
tattacagatgcaactccctgggat

SEQ ID NO: 4308057 - DNA, 25 bp, Homo sapien
cacttatgtattcttgggcttgaca

SEQ ID NO: 4308058 - DNA, 25 bp, Homo sapien
tatttttgactaattccctctgggc

SEQ ID NO: 4308059 - DNA, 25 bp, Homo sapien
ggatggcagaagaccaattattggc

SEQ ID NO: 4308060 - DNA, 25 bp, Homo sapien
gaggtcaggtgcaatcttctatcca

SEQ ID NO: 4308061 - DNA, 25 bp, Homo sapien
ccagccatatcaatctctcttttaa

SEQ ID NO: 4308062 - DNA, 25 bp, Homo sapien
tgtccattgaagatttaattggtgg

SEQ ID NO: 4308063 - DNA, 25 bp, Homo sapien
gaaactctgtcgttgctgaatatga

SEQ ID NO: 4308064 - DNA, 25 bp, Homo sapien
tggtggcttataatccatccatgtg

SEQ ID NO: 4308065 - DNA, 25 bp, Homo sapien
gatgacgctgagttaagttcctgag

SEQ ID NO: 4308066 - DNA, 25 bp, Homo sapien
tacaattctggtagagtaggaacca

SEQ ID NO: 4308067 - DNA, 25 bp, Homo sapien
gatagctcccagaattaaaggcaga

SEQ ID NO: 4308068 - DNA, 25 bp, Homo sapien
ttctgccccaaaagctacaagtcta

SEQ ID NO: 4308069 - DNA, 25 bp, Homo sapien
gacatttccctacaattcatgctgg

SEQ ID NO: 4308070 - DNA, 25 bp, Homo sapien
aaaattgttacggatctcttcgcca

SEQ ID NO: 4308071 - DNA, 25 bp, Homo sapien
gaaagagcagacactcggctaggca

SEQ ID NO: 4308072 - DNA, 25 bp, Homo sapien
tgttcccaacccatgtcagtgtgag

SEQ ID NO: 4308073 - DNA, 25 bp, Homo sapien
ccattaggattcttaagagactgga

SEQ ID NO: 4308074 - DNA, 25 bp, Homo sapien
gatgagggataattctcagcaacca

SEQ ID NO: 4308075 - DNA, 25 bp, Homo sapien
tcagtctcaggtgctccattaggat

SEQ ID NO: 4308076 - DNA, 25 bp, Homo sapien
cacttcatggctggtaaacgtttcc

SEQ ID NO: 4308077 - DNA, 25 bp, Homo sapien
tataaatctagagcacctatcatgg

SEQ ID NO: 4308078 - DNA, 25 bp, Homo sapien
ccacaaaagaatttcggacgactga

SEQ ID NO: 4308079 - DNA, 25 bp, Homo sapien
cccagttatatgcagtggtggtcaa

SEQ ID NO: 4308080 - DNA, 25 bp, Homo sapien
cattgttttagtattcgtggcccag

SEQ ID NO: 4308081 - DNA, 25 bp, Homo sapien
ctaacaatactggcctctccggcct

SEQ ID NO: 4308082 - DNA, 25 bp, Homo sapien
taacaatactggcctctccggcctt

SEQ ID NO: 4308083 - DNA, 25 bp, Homo sapien
caagaagactctgtgtacatgcact

SEQ ID NO: 4308084 - DNA, 25 bp, Homo sapien
gatctggaccgtggtcaaggacatc

SEQ ID NO: 4308085 - DNA, 25 bp, Homo sapien
tcctggatctggcttcacggcttgg

SEQ ID NO: 4308086 - DNA, 25 bp, Homo sapien
tgcactgacaacatgtgatgacaga

SEQ ID NO: 4308087 - DNA, 25 bp, Homo sapien
cattttctttattatatgaaaggat

SEQ ID NO: 4308088 - DNA, 25 bp, Homo sapien
attttctttattatatgaaaggatc

SEQ ID NO: 4308089 - DNA, 25 bp, Homo sapien
acattttctttattatatgaaagga

SEQ ID NO: 4308090 - DNA, 25 bp, Homo sapien
ttcacccctggacacgcttcctcca

SEQ ID NO: 4308091 - DNA, 25 bp, Homo sapien
cttcacccctggacacgcttcctcc

SEQ ID NO: 4308092 - DNA, 25 bp, Homo sapien
ccctggacacgcttcctccactgac

SEQ ID NO: 4308093 - DNA, 25 bp, Homo sapien
cacccctggacacgcttcctccact

SEQ ID NO: 4308094 - DNA, 25 bp, Homo sapien
tgtacaaagaccatccactgcaacc

SEQ ID NO: 4308095 - DNA, 25 bp, Homo sapien
tactccattctttgtacaaagacca

SEQ ID NO: 4308096 - DNA, 25 bp, Homo sapien
caaggcccttaatgttattatccgt

SEQ ID NO: 4308097 - DNA, 25 bp, Homo sapien
acttcctcttcagaacaacacgcat

SEQ ID NO: 4308098 - DNA, 25 bp, Homo sapien
acttgaggccagttgaacgggcaag

SEQ ID NO: 4308099 - DNA, 25 bp, Homo sapien
tgccatctaactctacgtcttcact

SEQ ID NO: 4308100 - DNA, 25 bp, Homo sapien
gaagcgatcgcttgcagtgccatct

SEQ ID NO: 4308101 - DNA, 25 bp, Homo sapien
cctggaacggaagcgatcgcttgca

SEQ ID NO: 4308102 - DNA, 25 bp, Homo sapien
cccatgccgtatggtttcaaagtag

SEQ ID NO: 4308103 - DNA, 25 bp, Homo sapien
ggttgctgaagctccggtcatggta

SEQ ID NO: 4308104 - DNA, 25 bp, Homo sapien
tcatgagcccatgccgtatggtttc

SEQ ID NO: 4308105 - DNA, 25 bp, Homo sapien
gaagctccggtcatggtatctgtgt

SEQ ID NO: 4308106 - DNA, 25 bp, Homo sapien
gagactgtccacttgatcatcagac

SEQ ID NO: 4308107 - DNA, 25 bp, Homo sapien
gacatatcctttgccccaactaact

SEQ ID NO: 4308108 - DNA, 25 bp, Homo sapien
gccccaactaactggattgcattct

SEQ ID NO: 4308109 - DNA, 25 bp, Homo sapien
gaaggcaccacccagcagagactgt

SEQ ID NO: 4308110 - DNA, 25 bp, Homo sapien
gacactgtcggctgttataagcacc

SEQ ID NO: 4308111 - DNA, 25 bp, Homo sapien
cagaaagaccttttgaatcaggagg

SEQ ID NO: 4308112 - DNA, 25 bp, Homo sapien
ggatgggctcagtcaggtgcaacaa

SEQ ID NO: 4308113 - DNA, 25 bp, Homo sapien
taagcaccagctagaagatggatgc

SEQ ID NO: 4308114 - DNA, 25 bp, Homo sapien
cattttcctgtggtccccagcatct

SEQ ID NO: 4308115 - DNA, 25 bp, Homo sapien
cactggaagggacctgcgtggcctt

SEQ ID NO: 4308116 - DNA, 25 bp, Homo sapien
tttgccttcctactaagcccgctgg

SEQ ID NO: 4308117 - DNA, 25 bp, Homo sapien
ccttgtctggcttaggggtgccttc

SEQ ID NO: 4308118 - DNA, 25 bp, Homo sapien
ttgcccgcgttaggaggatcctcct

SEQ ID NO: 4308119 - DNA, 25 bp, Homo sapien
cctcttgtgcttgggatctaatttg

SEQ ID NO: 4308120 - DNA, 25 bp, Homo sapien
acactgccttgcttgccggccttct

SEQ ID NO: 4308121 - DNA, 25 bp, Homo sapien
ggaggctgcggcacatgccagtggc

SEQ ID NO: 4308122 - DNA, 25 bp, Homo sapien
tgtagagcttgacggccaccgccaa

SEQ ID NO: 4308123 - DNA, 25 bp, Homo sapien
gagcttgacggccaccgccaacgtg

SEQ ID NO: 4308124 - DNA, 25 bp, Homo sapien
ggatgtagagcttgacggccaccgc

SEQ ID NO: 4308125 - DNA, 25 bp, Homo sapien
agagcttgacggccaccgccaacgt

SEQ ID NO: 4308126 - DNA, 25 bp, Homo sapien
agcgctactccccagcctgcagcgc

SEQ ID NO: 4308127 - DNA, 25 bp, Homo sapien
gcgctactccccagcctgcagcgcc

SEQ ID NO: 4308128 - DNA, 25 bp, Homo sapien
cgctactccccagcctgcagcgcct

SEQ ID NO: 4308129 - DNA, 25 bp, Homo sapien
ctagcgctactccccagcctgcagc

SEQ ID NO: 4308130 - DNA, 25 bp, Homo sapien
tgaggttaagtaaggcgaagctgct

SEQ ID NO: 4308131 - DNA, 25 bp, Homo sapien
cagatccattccctttaggacggga

SEQ ID NO: 4308132 - DNA, 25 bp, Homo sapien
gggatcgcgctataatcttgtacac

SEQ ID NO: 4308133 - DNA, 25 bp, Homo sapien
tgtacacatctttcgagttggctag

SEQ ID NO: 4308134 - DNA, 25 bp, Homo sapien
gcagccgtctgggtaccagcaaaca

SEQ ID NO: 4308135 - DNA, 25 bp, Homo sapien
ttcaaggatcaaccagcttcccgga

SEQ ID NO: 4308136 - DNA, 25 bp, Homo sapien
gaaaggcccagcctctagtcgcagc

SEQ ID NO: 4308137 - DNA, 25 bp, Homo sapien
ctgccatcagcaccctaaggtcttt

SEQ ID NO: 4308138 - DNA, 25 bp, Homo sapien
cttggctctggtatgtttacaagtc

SEQ ID NO: 4308139 - DNA, 25 bp, Homo sapien
aatcagttcgcgaagttcagaggac

SEQ ID NO: 4308140 - DNA, 25 bp, Homo sapien
gttcgcgaagttcagaggacttggc

SEQ ID NO: 4308141 - DNA, 25 bp, Homo sapien
ggacttggctctggtatgtttacaa

SEQ ID NO: 4308142 - DNA, 25 bp, Homo sapien
tagacggctactttattgtctcggc

SEQ ID NO: 4308143 - DNA, 25 bp, Homo sapien
ggctgtagacggctactttattgtc

SEQ ID NO: 4308144 - DNA, 25 bp, Homo sapien
gctccggggctgtagacggctactt

SEQ ID NO: 4308145 - DNA, 25 bp, Homo sapien
ctactttattgtctcggctgcgcac

SEQ ID NO: 4308146 - DNA, 25 bp, Homo sapien
ccggctctgcgccagtcctgcaagt

SEQ ID NO: 4308147 - DNA, 25 bp, Homo sapien
tgcaagtccactctgcgctgtgcct

SEQ ID NO: 4308148 - DNA, 25 bp, Homo sapien
ccaagctccagctcagcacgtgagc

SEQ ID NO: 4308149 - DNA, 25 bp, Homo sapien
agcacgtgagctacgcagcccgact

SEQ ID NO: 4308150 - DNA, 25 bp, Homo sapien
tcgctttgctccacacttacagctg

SEQ ID NO: 4308151 - DNA, 25 bp, Homo sapien
gcctttctcgcgtccttccgtcctg

SEQ ID NO: 4308152 - DNA, 25 bp, Homo sapien
tgatgcgctgttccggcccagtcat

SEQ ID NO: 4308153 - DNA, 25 bp, Homo sapien
gccaatgaggctcggctgatgcgct

SEQ ID NO: 4308154 - DNA, 25 bp, Homo sapien
tctccctctctcgagaacattttcc

SEQ ID NO: 4308155 - DNA, 25 bp, Homo sapien
tctggtgacctaaatgaggaaactg

SEQ ID NO: 4308156 - DNA, 25 bp, Homo sapien
tgggagcttcattcgcaggcagcca

SEQ ID NO: 4308157 - DNA, 25 bp, Homo sapien
tttggctgttgtaattgaaatatcc

SEQ ID NO: 4308158 - DNA, 25 bp, Homo sapien
cttagaaacctgtctactcagaggt

SEQ ID NO: 4308159 - DNA, 25 bp, Homo sapien
ggttagacctacaagcagaaggcct

SEQ ID NO: 4308160 - DNA, 25 bp, Homo sapien
gaagatagcatcagtcctgttgtcc

SEQ ID NO: 4308161 - DNA, 25 bp, Homo sapien
cctagggaggcttcatcgaaagaga

SEQ ID NO: 4308162 - DNA, 25 bp, Homo sapien
tgcccctccggctttacattggctt

SEQ ID NO: 4308163 - DNA, 25 bp, Homo sapien
gagtgggttgaggaacataatctcc

SEQ ID NO: 4308164 - DNA, 25 bp, Homo sapien
ccggctttacattggcttcactcat

SEQ ID NO: 4308165 - DNA, 25 bp, Homo sapien
aaagtggaaagtggtcgcctgagct

SEQ ID NO: 4308166 - DNA, 25 bp, Homo sapien
agtgccaattgcagggtcaatttgc

SEQ ID NO: 4308167 - DNA, 25 bp, Homo sapien
caatttgctccatcaggtatcaagt

SEQ ID NO: 4308168 - DNA, 25 bp, Homo sapien
ttgctccatcaggtatcaagttccc

SEQ ID NO: 4308169 - DNA, 25 bp, Homo sapien
aattcctgatcttcagtgccaattg

SEQ ID NO: 4308170 - DNA, 25 bp, Homo sapien
atacacaggttcaatttttgggcca

SEQ ID NO: 4308171 - DNA, 25 bp, Homo sapien
agctgccagaattgccagactgtga

SEQ ID NO: 4308172 - DNA, 25 bp, Homo sapien
ggagcagctgccagaattgccagac

SEQ ID NO: 4308173 - DNA, 25 bp, Homo sapien
cacaggttcaatttttgggccaaat

SEQ ID NO: 4308174 - DNA, 25 bp, Homo sapien
gctatgagccattgctggacagagt

SEQ ID NO: 4308175 - DNA, 25 bp, Homo sapien
ctatgagccattgctggacagagtg

SEQ ID NO: 4308176 - DNA, 25 bp, Homo sapien
tgctatgagccattgctggacagag

SEQ ID NO: 4308177 - DNA, 25 bp, Homo sapien
tgtttctctgacaggggtccaccaa

SEQ ID NO: 4308178 - DNA, 25 bp, Homo sapien
tagttctttcacatagccatgtcca

SEQ ID NO: 4308179 - DNA, 25 bp, Homo sapien
ccaattttactctggcagaacgtgg

SEQ ID NO: 4308180 - DNA, 25 bp, Homo sapien
atctctcagaaaggccaaaagagtc

SEQ ID NO: 4308181 - DNA, 25 bp, Homo sapien
caaaataagacagcatatcggcatg

SEQ ID NO: 4308182 - DNA, 25 bp, Homo sapien
aataagacagcatatcggcatggtc

SEQ ID NO: 4308183 - DNA, 25 bp, Homo sapien
taagacagcatatcggcatggtcta

SEQ ID NO: 4308184 - DNA, 25 bp, Homo sapien
aaatccaaaataagacagcatatcg

SEQ ID NO: 4308185 - DNA, 25 bp, Homo sapien
ctgtgataaagggagggtgagacac

SEQ ID NO: 4308186 - DNA, 25 bp, Homo sapien
tcctgtgtgactgtatccaatgacg

SEQ ID NO: 4308187 - DNA, 25 bp, Homo sapien
tgtgactgtatccaatgacgaaaag

SEQ ID NO: 4308188 - DNA, 25 bp, Homo sapien
ctgtatccaatgacgaaaaggattt

SEQ ID NO: 4308189 - DNA, 25 bp, Homo sapien
tccacaattcctgtgtgactgtatc

SEQ ID NO: 4308190 - DNA, 25 bp, Homo sapien
tcttccctttctgtggtcatcagtt

SEQ ID NO: 4308191 - DNA, 25 bp, Homo sapien
cttccctttctgtggtcatcagttg

SEQ ID NO: 4308192 - DNA, 25 bp, Homo sapien
gcatttctctggtgaaatgggaagg

SEQ ID NO: 4308193 - DNA, 25 bp, Homo sapien
catttctctggtgaaatgggaaggg

SEQ ID NO: 4308194 - DNA, 25 bp, Homo sapien
tgtcaaagtcatgtccattttcgca

SEQ ID NO: 4308195 - DNA, 25 bp, Homo sapien
gtcaaagtcatgtccattttcgcat

SEQ ID NO: 4308196 - DNA, 25 bp, Homo sapien
catgtcaaagtcatgtccattttcg

SEQ ID NO: 4308197 - DNA, 25 bp, Homo sapien
atgtcaaagtcatgtccattttcgc

SEQ ID NO: 4308198 - DNA, 25 bp, Homo sapien
caggcagcggatgaacctcagccac

SEQ ID NO: 4308199 - DNA, 25 bp, Homo sapien
ccccgccaggcagcggatgaacctc

SEQ ID NO: 4308200 - DNA, 25 bp, Homo sapien
ccaggcagcggatgaacctcagcca

SEQ ID NO: 4308201 - DNA, 25 bp, Homo sapien
cgccaggcagcggatgaacctcagc

SEQ ID NO: 4308202 - DNA, 25 bp, Homo sapien
cctccggaagcgatggctcctgaag

SEQ ID NO: 4308203 - DNA, 25 bp, Homo sapien
gaggacctccggaagcgatggctcc

SEQ ID NO: 4308204 - DNA, 25 bp, Homo sapien
gctggaggacctccggaagcgatgg

SEQ ID NO: 4308205 - DNA, 25 bp, Homo sapien
ggacctccggaagcgatggctcctg

SEQ ID NO: 4308206 - DNA, 25 bp, Homo sapien
tgtgacacacaagcgtggtgaaatg

SEQ ID NO: 4308207 - DNA, 25 bp, Homo sapien
ctgtgtgacacacaagcgtggtgaa

SEQ ID NO: 4308208 - DNA, 25 bp, Homo sapien
cacacaagcgtggtgaaatggaaac

SEQ ID NO: 4308209 - DNA, 25 bp, Homo sapien
caagcgtggtgaaatggaaacgtcc

SEQ ID NO: 4308210 - DNA, 25 bp, Homo sapien
cttctggataagtcagcagggggtt

SEQ ID NO: 4308211 - DNA, 25 bp, Homo sapien
gttgataacagctcacttctggata

SEQ ID NO: 4308212 - DNA, 25 bp, Homo sapien
ctgttgataacagctcacttctgga

SEQ ID NO: 4308213 - DNA, 25 bp, Homo sapien
ctcacttctggataagtcagcaggg

SEQ ID NO: 4308214 - DNA, 25 bp, Homo sapien
taatatatcaaatacggttctaaag

SEQ ID NO: 4308215 - DNA, 25 bp, Homo sapien
tatacaagtccacatgtatgcgctg

SEQ ID NO: 4308216 - DNA, 25 bp, Homo sapien
gttactacattatacaagtccacat

SEQ ID NO: 4308217 - DNA, 25 bp, Homo sapien
gcacgagcaattgttgttactacat

SEQ ID NO: 4308218 - DNA, 25 bp, Homo sapien
tgggagtcactgtgcagtaattgtg

SEQ ID NO: 4308219 - DNA, 25 bp, Homo sapien
tgtgcagtaattgtgagggctgtcc

SEQ ID NO: 4308220 - DNA, 25 bp, Homo sapien
cactgtgcagtaattgtgagggctg

SEQ ID NO: 4308221 - DNA, 25 bp, Homo sapien
gagtcactgtgcagtaattgtgagg

SEQ ID NO: 4308222 - DNA, 25 bp, Homo sapien
agacagtgagtaagtggcttggcag

SEQ ID NO: 4308223 - DNA, 25 bp, Homo sapien
gcaaacatcggggtatttatttgcc

SEQ ID NO: 4308224 - DNA, 25 bp, Homo sapien
ccagagcccgtttcatagcaaacat

SEQ ID NO: 4308225 - DNA, 25 bp, Homo sapien
ctccccagagcccgtttcatagcaa

SEQ ID NO: 4308226 - DNA, 25 bp, Homo sapien
catagcaaacatcggggtatttatt

SEQ ID NO: 4308227 - DNA, 25 bp, Homo sapien
tgggggccttaaaagtatgacatgt

SEQ ID NO: 4308228 - DNA, 25 bp, Homo sapien
tatgacatgtttttatgggtcctgg

SEQ ID NO: 4308229 - DNA, 25 bp, Homo sapien
ggaaggaagctggacaaggtcttat

SEQ ID NO: 4308230 - DNA, 25 bp, Homo sapien
gctggacaaggtcttatcctcaggg

SEQ ID NO: 4308231 - DNA, 25 bp, Homo sapien
tctatgggataagccccagccaaac

SEQ ID NO: 4308232 - DNA, 25 bp, Homo sapien
cgggttggcgtgaatattctggact

SEQ ID NO: 4308233 - DNA, 25 bp, Homo sapien
tctggactggacttttcccgatttc

SEQ ID NO: 4308234 - DNA, 25 bp, Homo sapien
ccagccaaacgggttggcgtgaata

SEQ ID NO: 4308235 - DNA, 25 bp, Homo sapien
tgaagacggtatgcatcaaccacac

SEQ ID NO: 4308236 - DNA, 25 bp, Homo sapien
ggtaaaggactcaaaccatcatggt

SEQ ID NO: 4308237 - DNA, 25 bp, Homo sapien
tggtatgccactttcacacttaggt

SEQ ID NO: 4308238 - DNA, 25 bp, Homo sapien
cataaacccttgtacccatggcaga

SEQ ID NO: 4308239 - DNA, 25 bp, Homo sapien
tagaagtggctacttggataaaggg

SEQ ID NO: 4308240 - DNA, 25 bp, Homo sapien
aaaggaacgcacaagaacaatttct

SEQ ID NO: 4308241 - DNA, 25 bp, Homo sapien
gccattcaactgatgaatactattg

SEQ ID NO: 4308242 - DNA, 25 bp, Homo sapien
agtccagacttagttctagaaaagg

SEQ ID NO: 4308243 - DNA, 25 bp, Homo sapien
tccagcagtggaaggacgggaagcg

SEQ ID NO: 4308244 - DNA, 25 bp, Homo sapien
gatcgtgccggatttcgaagtcggg

SEQ ID NO: 4308245 - DNA, 25 bp, Homo sapien
ggaggagtttcatgaagagcccaaa

SEQ ID NO: 4308246 - DNA, 25 bp, Homo sapien
cgggagccatgcagtccgaatcggg

SEQ ID NO: 4308247 - DNA, 25 bp, Homo sapien
tggtgacagctgggcagaggcgcac

SEQ ID NO: 4308248 - DNA, 25 bp, Homo sapien
tgagtggtgacagctgggcagaggc

SEQ ID NO: 4308249 - DNA, 25 bp, Homo sapien
agtggtgacagctgggcagaggcgc

SEQ ID NO: 4308250 - DNA, 25 bp, Homo sapien
ctgaagagcaggtgagtggtgacag

SEQ ID NO: 4308251 - DNA, 25 bp, Homo sapien
agagggcgaactgcccctcgcagtt

SEQ ID NO: 4308252 - DNA, 25 bp, Homo sapien
tgcccggcccaagtgcgcctttagg

SEQ ID NO: 4308253 - DNA, 25 bp, Homo sapien
aagctcggatggagcgcacttcgcg

SEQ ID NO: 4308254 - DNA, 25 bp, Homo sapien
ggaccctcggccgaggatgccagct

SEQ ID NO: 4308255 - DNA, 25 bp, Homo sapien
gcctcgtacttctcgtttacaatgt

SEQ ID NO: 4308256 - DNA, 25 bp, Homo sapien
cacttgtctgtcgaaatggattggg

SEQ ID NO: 4308257 - DNA, 25 bp, Homo sapien
tgtcttccgttctctctgtccggca

SEQ ID NO: 4308258 - DNA, 25 bp, Homo sapien
actctggacgcctcgtacttctcgt

SEQ ID NO: 4308259 - DNA, 25 bp, Homo sapien
tttctttaagctctttcttgtggtc

SEQ ID NO: 4308260 - DNA, 25 bp, Homo sapien
gaaacttgaagcatactgcagtcac

SEQ ID NO: 4308261 - DNA, 25 bp, Homo sapien
gaattccagacagtttgtagagtgt

SEQ ID NO: 4308262 - DNA, 25 bp, Homo sapien
aatactactgtcagcctgttttcct

SEQ ID NO: 4308263 - DNA, 25 bp, Homo sapien
gttttcctgtcttaatgaattccag

SEQ ID NO: 4308264 - DNA, 25 bp, Homo sapien
caagctgttcacttctctgatcatg

SEQ ID NO: 4308265 - DNA, 25 bp, Homo sapien
tcacttctctgatcatgaagtacag

SEQ ID NO: 4308266 - DNA, 25 bp, Homo sapien
cacttctctgatcatgaagtacaga

SEQ ID NO: 4308267 - DNA, 25 bp, Homo sapien
tgttcacttctctgatcatgaagta

SEQ ID NO: 4308268 - DNA, 25 bp, Homo sapien
gacttgaatttctagttttagacac

SEQ ID NO: 4308269 - DNA, 25 bp, Homo sapien
cagcatcaacaaggtttttgacttg

SEQ ID NO: 4308270 - DNA, 25 bp, Homo sapien
tcacagcatcaacaaggtttttgac

SEQ ID NO: 4308271 - DNA, 25 bp, Homo sapien
gcatcaacaaggtttttgacttgaa

SEQ ID NO: 4308272 - DNA, 25 bp, Homo sapien
tcctgtactatgattattgctctct

SEQ ID NO: 4308273 - DNA, 25 bp, Homo sapien
actgctgttttgtgctactactggt

SEQ ID NO: 4308274 - DNA, 25 bp, Homo sapien
tatgattattgctctctgcctactg

SEQ ID NO: 4308275 - DNA, 25 bp, Homo sapien
ctgttttgtgctactactggtgtca

SEQ ID NO: 4308276 - DNA, 25 bp, Homo sapien
actgtttatctttggcatgccagag

SEQ ID NO: 4308277 - DNA, 25 bp, Homo sapien
tctggactgtttatctttggcatgc

SEQ ID NO: 4308278 - DNA, 25 bp, Homo sapien
cattctggactgtttatctttggca

SEQ ID NO: 4308279 - DNA, 25 bp, Homo sapien
ggactgtttatctttggcatgccag

SEQ ID NO: 4308280 - DNA, 25 bp, Homo sapien
gcagccctggtgagtgttttcagct

SEQ ID NO: 4308281 - DNA, 25 bp, Homo sapien
cctagtgttgagagaaggtgcacgt

SEQ ID NO: 4308282 - DNA, 25 bp, Homo sapien
tcaatgttccgccaaagggccaagg

SEQ ID NO: 4308283 - DNA, 25 bp, Homo sapien
cacgtaagcgtgtggcagaacgtct

SEQ ID NO: 4308284 - DNA, 25 bp, Homo sapien
tattgattgaactgcagtcccgtgg

SEQ ID NO: 4308285 - DNA, 25 bp, Homo sapien
ggaatgcttagctctgtcctcatca

SEQ ID NO: 4308286 - DNA, 25 bp, Homo sapien
ttgttttaacagtgggagtctgggc

SEQ ID NO: 4308287 - DNA, 25 bp, Homo sapien
aagccatctggaagtgtgcacacag

SEQ ID NO: 4308288 - DNA, 25 bp, Homo sapien
caccgtagatacaagagttaaaact

SEQ ID NO: 4308289 - DNA, 25 bp, Homo sapien
taagtatgtgggattgtgttgctcc

SEQ ID NO: 4308290 - DNA, 25 bp, Homo sapien
gaatttagtgcatcaggctcccatg

SEQ ID NO: 4308291 - DNA, 25 bp, Homo sapien
tacggtagatattgccaactgtcac

SEQ ID NO: 4308292 - DNA, 25 bp, Homo sapien
ctggtttacccttctttatgcacct

SEQ ID NO: 4308293 - DNA, 25 bp, Homo sapien
tcattgcactcaccagatcagcaaa

SEQ ID NO: 4308294 - DNA, 25 bp, Homo sapien
ttgatgccgaactcattgcactcac

SEQ ID NO: 4308295 - DNA, 25 bp, Homo sapien
ggctggtttacccttctttatgcac

SEQ ID NO: 4308296 - DNA, 25 bp, Homo sapien
ttgtcttcaggcctccagtatgaac

SEQ ID NO: 4308297 - DNA, 25 bp, Homo sapien
tgttgggagtcacgtggagccctag

SEQ ID NO: 4308298 - DNA, 25 bp, Homo sapien
gggagtcacgtggagccctagtcat

SEQ ID NO: 4308299 - DNA, 25 bp, Homo sapien
tgtcttcaggcctccagtatgaact

SEQ ID NO: 4308300 - DNA, 25 bp, Homo sapien
agattctggaagcaactttccaaga

SEQ ID NO: 4308301 - DNA, 25 bp, Homo sapien
ccagactttccccttcaactgaggc

SEQ ID NO: 4308302 - DNA, 25 bp, Homo sapien
gcaactttccaagaggtagaagggc

SEQ ID NO: 4308303 - DNA, 25 bp, Homo sapien
tctggaagcaactttccaagaggta

SEQ ID NO: 4308304 - DNA, 25 bp, Homo sapien
ccttagtttccaagactggtggagc

SEQ ID NO: 4308305 - DNA, 25 bp, Homo sapien
ggaaaatgcagtttcatgctttgaa

SEQ ID NO: 4308306 - DNA, 25 bp, Homo sapien
tagtgaacaacagtagaggaggcct

SEQ ID NO: 4308307 - DNA, 25 bp, Homo sapien
tcattggtgcagtagaacttggaaa

SEQ ID NO: 4308308 - DNA, 25 bp, Homo sapien
agtatgctcttagggtaaactgttt

SEQ ID NO: 4308309 - DNA, 25 bp, Homo sapien
tagtatgctcttagggtaaactgtt

SEQ ID NO: 4308310 - DNA, 25 bp, Homo sapien
gtatgctcttagggtaaactgtttc

SEQ ID NO: 4308311 - DNA, 25 bp, Homo sapien
ttagtatgctcttagggtaaactgt

SEQ ID NO: 4308312 - DNA, 25 bp, Homo sapien
ttaggatgccagaacaataatcttc

SEQ ID NO: 4308313 - DNA, 25 bp, Homo sapien
taataccctggtgccttgaaggagt

SEQ ID NO: 4308314 - DNA, 25 bp, Homo sapien
caattagccttttggacagcaggtc

SEQ ID NO: 4308315 - DNA, 25 bp, Homo sapien
cctgcatcttagactttgggcccaa

SEQ ID NO: 4308316 - DNA, 25 bp, Homo sapien
ggaagatcactgctacttgtagatc

SEQ ID NO: 4308317 - DNA, 25 bp, Homo sapien
ctggagttacgcagcttttgtatat

SEQ ID NO: 4308318 - DNA, 25 bp, Homo sapien
tcatattgctttagtggaaaaggaa

SEQ ID NO: 4308319 - DNA, 25 bp, Homo sapien
cttgtagatctgacattggaacaca

SEQ ID NO: 4308320 - DNA, 25 bp, Homo sapien
ttggattctgatggcctggtaaaac

SEQ ID NO: 4308321 - DNA, 25 bp, Homo sapien
tttttggattctgatggcctggtaa

SEQ ID NO: 4308322 - DNA, 25 bp, Homo sapien
tggattctgatggcctggtaaaact

SEQ ID NO: 4308323 - DNA, 25 bp, Homo sapien
tttggattctgatggcctggtaaaa

SEQ ID NO: 4308324 - DNA, 25 bp, Homo sapien
gtttcctctagggatatcattaaag

SEQ ID NO: 4308325 - DNA, 25 bp, Homo sapien
caggagggaccgtgatgtgatcttc

SEQ ID NO: 4308326 - DNA, 25 bp, Homo sapien
gaattcactgccacgtatcactgtt

SEQ ID NO: 4308327 - DNA, 25 bp, Homo sapien
gagagagttccatctgtgtgtttct

SEQ ID NO: 4308328 - DNA, 25 bp, Homo sapien
gtacactgtatgtggttccttccct

SEQ ID NO: 4308329 - DNA, 25 bp, Homo sapien
ttttctatttatgccgtatgtggtt

SEQ ID NO: 4308330 - DNA, 25 bp, Homo sapien
tacactgtatgtggttccttccccg

SEQ ID NO: 4308331 - DNA, 25 bp, Homo sapien
gtacactgtatgtggttccttcccc

SEQ ID NO: 4308332 - DNA, 25 bp, Homo sapien
tactgagcctgtactctcaagaggc

SEQ ID NO: 4308333 - DNA, 25 bp, Homo sapien
ccaaaacttgatctaactgggagaa

SEQ ID NO: 4308334 - DNA, 25 bp, Homo sapien
tggcagaattacctgacctgaagtg

SEQ ID NO: 4308335 - DNA, 25 bp, Homo sapien
taatgtgcccacagagtactgagcc

SEQ ID NO: 4308336 - DNA, 25 bp, Homo sapien
tccaaaatcatgcagtagacaacac

SEQ ID NO: 4308337 - DNA, 25 bp, Homo sapien
cagtagacaacacacgatgtatagg

SEQ ID NO: 4308338 - DNA, 25 bp, Homo sapien
aacacacgatgtataggaaaaatgg

SEQ ID NO: 4308339 - DNA, 25 bp, Homo sapien
tcaggctactccaaaatcatgcagt

SEQ ID NO: 4308340 - DNA, 25 bp, Homo sapien
aaacatgttctactctttggcaggc

SEQ ID NO: 4308341 - DNA, 25 bp, Homo sapien
tggcaggcactgaattggcttttct

SEQ ID NO: 4308342 - DNA, 25 bp, Homo sapien
cacccaagctgatcctgctgtcaaa

SEQ ID NO: 4308343 - DNA, 25 bp, Homo sapien
ttaatgtccctcttagagccgcgag

SEQ ID NO: 4308344 - DNA, 25 bp, Homo sapien
agtttctacccagtgccaagtctag

SEQ ID NO: 4308345 - DNA, 25 bp, Homo sapien
tactgccttgcctaatggtgtgaac

SEQ ID NO: 4308346 - DNA, 25 bp, Homo sapien
caatgagagtaaaatcctgaaggag

SEQ ID NO: 4308347 - DNA, 25 bp, Homo sapien
tggaccatgtctgggaactcatctc

SEQ ID NO: 4308348 - DNA, 25 bp, Homo sapien
tcttagtacttccctgctgccccat

SEQ ID NO: 4308349 - DNA, 25 bp, Homo sapien
cttcctcttagtacttccctgctgc

SEQ ID NO: 4308350 - DNA, 25 bp, Homo sapien
ctcttagtacttccctgctgcccca

SEQ ID NO: 4308351 - DNA, 25 bp, Homo sapien
tcctcttagtacttccctgctgccc

SEQ ID NO: 4308352 - DNA, 25 bp, Homo sapien
caggtttatgtggggtcatcttagt

SEQ ID NO: 4308353 - DNA, 25 bp, Homo sapien
tcaggtttatgtggggtcatcttag

SEQ ID NO: 4308354 - DNA, 25 bp, Homo sapien
gctgcatcccaatcaggtttatgtg

SEQ ID NO: 4308355 - DNA, 25 bp, Homo sapien
ctgcatcccaatcaggtttatgtgg

SEQ ID NO: 4308356 - DNA, 25 bp, Homo sapien
cttcccattggcatgtgagtgtgag

SEQ ID NO: 4308357 - DNA, 25 bp, Homo sapien
ataaaagcactggtcgctctcatcc

SEQ ID NO: 4308358 - DNA, 25 bp, Homo sapien
cccaagatgggctttgacggttgaa

SEQ ID NO: 4308359 - DNA, 25 bp, Homo sapien
ctcatcctggactaagttcatcagg

SEQ ID NO: 4308360 - DNA, 25 bp, Homo sapien
taagttcatcaggatttcttcccct

SEQ ID NO: 4308361 - DNA, 25 bp, Homo sapien
tgcacggcactgagtggcagcccct

SEQ ID NO: 4308362 - DNA, 25 bp, Homo sapien
gagagcagtttaattggttcaatgt

SEQ ID NO: 4308363 - DNA, 25 bp, Homo sapien
cctgtgtcttgagagcagtttaatt

SEQ ID NO: 4308364 - DNA, 25 bp, Homo sapien
ggttcaatgtgtaagtatgtaccag

SEQ ID NO: 4308365 - DNA, 25 bp, Homo sapien
ctggtggacacttgactagtagcta

SEQ ID NO: 4308366 - DNA, 25 bp, Homo sapien
tgagcccctttgcaatcactgaatt

SEQ ID NO: 4308367 - DNA, 25 bp, Homo sapien
catggcgctctctctttaagtagga

SEQ ID NO: 4308368 - DNA, 25 bp, Homo sapien
tggcagatacgcaacatggcgctct

SEQ ID NO: 4308369 - DNA, 25 bp, Homo sapien
tctggctgtggagatcggtgcctta

SEQ ID NO: 4308370 - DNA, 25 bp, Homo sapien
gtggagatcggtgccttaattagcc

SEQ ID NO: 4308371 - DNA, 25 bp, Homo sapien
tggctgtggagatcggtgccttaat

SEQ ID NO: 4308372 - DNA, 25 bp, Homo sapien
acttctggctgtggagatcggtgcc

SEQ ID NO: 4308373 - DNA, 25 bp, Homo sapien
tagacgtacattgacttagcacacg

SEQ ID NO: 4308374 - DNA, 25 bp, Homo sapien
tagcacacgccgctaagtaattcat

SEQ ID NO: 4308375 - DNA, 25 bp, Homo sapien
aaaattggggatcaagccgtagacg

SEQ ID NO: 4308376 - DNA, 25 bp, Homo sapien
gggatcaagccgtagacgtacattg

SEQ ID NO: 4308377 - DNA, 25 bp, Homo sapien
tggccctttcagagtctgcagaccc

SEQ ID NO: 4308378 - DNA, 25 bp, Homo sapien
caaaatggccctttcagagtctgca

SEQ ID NO: 4308379 - DNA, 25 bp, Homo sapien
aattggatttagataaatggtagca

SEQ ID NO: 4308380 - DNA, 25 bp, Homo sapien
tggatttagataaatggtagcacaa

SEQ ID NO: 4308381 - DNA, 25 bp, Homo sapien
gacatcaaaggtctttctactgacg

SEQ ID NO: 4308382 - DNA, 25 bp, Homo sapien
tactgacgtggctgtagtcttggct

SEQ ID NO: 4308383 - DNA, 25 bp, Homo sapien
ctgtctctgacatcaaaggtctttc

SEQ ID NO: 4308384 - DNA, 25 bp, Homo sapien
caaaggtctttctactgacgtggct

SEQ ID NO: 4308385 - DNA, 25 bp, Homo sapien
cagtatatccagtgcatgtggccat

SEQ ID NO: 4308386 - DNA, 25 bp, Homo sapien
ggcagtatatccagtgcatgtggcc

SEQ ID NO: 4308387 - DNA, 25 bp, Homo sapien
gtatatccagtgcatgtggccatcc

SEQ ID NO: 4308388 - DNA, 25 bp, Homo sapien
tatatccagtgcatgtggccatcct

SEQ ID NO: 4308389 - DNA, 25 bp, Homo sapien
tgttctttgtgctcatcctgattga

SEQ ID NO: 4308390 - DNA, 25 bp, Homo sapien
acacctcccacgtctttgttctttg

SEQ ID NO: 4308391 - DNA, 25 bp, Homo sapien
tgattgactcatgaggtgacactgg

SEQ ID NO: 4308392 - DNA, 25 bp, Homo sapien
ctttttgagctagagttgacaaaac

SEQ ID NO: 4308393 - DNA, 25 bp, Homo sapien
ttgagcaccagaagctgtcctatgt

SEQ ID NO: 4308394 - DNA, 25 bp, Homo sapien
tgagcaccagaagctgtcctatgtt

SEQ ID NO: 4308395 - DNA, 25 bp, Homo sapien
cttgagcaccagaagctgtcctatg

SEQ ID NO: 4308396 - DNA, 25 bp, Homo sapien
tgttaggtcctgtccttgttgaccc

SEQ ID NO: 4308397 - DNA, 25 bp, Homo sapien
tctccgttgttaggtcctgtccttg

SEQ ID NO: 4308398 - DNA, 25 bp, Homo sapien
catattgactttctccgttgttagg

SEQ ID NO: 4308399 - DNA, 25 bp, Homo sapien
aatgtccatattgactttctccgtt

SEQ ID NO: 4308400 - DNA, 25 bp, Homo sapien
tcatctctgacaaacttgaccactg

SEQ ID NO: 4308401 - DNA, 25 bp, Homo sapien
gcttaggcccaaggcaatgttttca

SEQ ID NO: 4308402 - DNA, 25 bp, Homo sapien
tatgagaaggagttgttctgcctgt

SEQ ID NO: 4308403 - DNA, 25 bp, Homo sapien
gccagtttcttaagagtgtcggtac

SEQ ID NO: 4308404 - DNA, 25 bp, Homo sapien
tctgcggacagaataatggagacat

SEQ ID NO: 4308405 - DNA, 25 bp, Homo sapien
agggagcttctctagttcgcctctg

SEQ ID NO: 4308406 - DNA, 25 bp, Homo sapien
tctctagttcgcctctgcggacaga

SEQ ID NO: 4308407 - DNA, 25 bp, Homo sapien
tcgcctctgcggacagaataatgga

SEQ ID NO: 4308408 - DNA, 25 bp, Homo sapien
gacatcctgatggacgacacccttt

SEQ ID NO: 4308409 - DNA, 25 bp, Homo sapien
tccaaaacaagcagccggaggagca

SEQ ID NO: 4308410 - DNA, 25 bp, Homo sapien
tatgagcatggaagagacggagcac

SEQ ID NO: 4308411 - DNA, 25 bp, Homo sapien
gactgaggccaaccaagcctatagt

SEQ ID NO: 4308412 - DNA, 25 bp, Homo sapien
gaatggaatttctcagtagcagcct

SEQ ID NO: 4308413 - DNA, 25 bp, Homo sapien
gtgttacatgtatcaagcctagatg

SEQ ID NO: 4308414 - DNA, 25 bp, Homo sapien
catagcattaatacgcccattatgg

SEQ ID NO: 4308415 - DNA, 25 bp, Homo sapien
ccatatagtgttatgagccaggctg

SEQ ID NO: 4308416 - DNA, 25 bp, Homo sapien
cctagaatagtgacgcaaatctgca

SEQ ID NO: 4308417 - DNA, 25 bp, Homo sapien
tgcatagttcccatgcacgctgggc

SEQ ID NO: 4308418 - DNA, 25 bp, Homo sapien
cacgctgggcaatgagaatccttgg

SEQ ID NO: 4308419 - DNA, 25 bp, Homo sapien
ggaaacattggtgatgctatcagtt

SEQ ID NO: 4308420 - DNA, 25 bp, Homo sapien
taatagtcacctgctgttggatgca

SEQ ID NO: 4308421 - DNA, 25 bp, Homo sapien
aaatgactgtctcttgcggatgctt

SEQ ID NO: 4308422 - DNA, 25 bp, Homo sapien
caataatttctgtatggtccatagc

SEQ ID NO: 4308423 - DNA, 25 bp, Homo sapien
aaagcatacaagcaacctggtcata

SEQ ID NO: 4308424 - DNA, 25 bp, Homo sapien
taatttagagacgaagtttttgctc

SEQ ID NO: 4308425 - DNA, 25 bp, Homo sapien
ttcaagcgcttctcccacctaaacc

SEQ ID NO: 4308426 - DNA, 25 bp, Homo sapien
actgcgcccagtctttttcccttct

SEQ ID NO: 4308427 - DNA, 25 bp, Homo sapien
cgaagtttttgctcctattacccag

SEQ ID NO: 4308428 - DNA, 25 bp, Homo sapien
catgagaaattctaatggctccttc

SEQ ID NO: 4308429 - DNA, 25 bp, Homo sapien
gcttcctcgatgtcaacaatgcaag

SEQ ID NO: 4308430 - DNA, 25 bp, Homo sapien
aagcagggtcatgagaaattctaat

SEQ ID NO: 4308431 - DNA, 25 bp, Homo sapien
cgatgtcaacaatgcaagatttgtg

SEQ ID NO: 4308432 - DNA, 25 bp, Homo sapien
ctgcgggcaattggagtagaatcag

SEQ ID NO: 4308433 - DNA, 25 bp, Homo sapien
cgggcaattggagtagaatcagctt

SEQ ID NO: 4308434 - DNA, 25 bp, Homo sapien
gcaattggagtagaatcagcttcct

SEQ ID NO: 4308435 - DNA, 25 bp, Homo sapien
tgagagccaagttctttgacttccc

SEQ ID NO: 4308436 - DNA, 25 bp, Homo sapien
gaaacttgtactaaagccataagaa

SEQ ID NO: 4308437 - DNA, 25 bp, Homo sapien
gccataagaagattgtattatagat

SEQ ID NO: 4308438 - DNA, 25 bp, Homo sapien
tgaaattgttgagattgtttaaacc

SEQ ID NO: 4308439 - DNA, 25 bp, Homo sapien
gggacttctgttagcagaaaagaaa

SEQ ID NO: 4308440 - DNA, 25 bp, Homo sapien
tttcagccaaatccatatgcatcgg

SEQ ID NO: 4308441 - DNA, 25 bp, Homo sapien
acatttcagccaaatccatatgcat

SEQ ID NO: 4308442 - DNA, 25 bp, Homo sapien
caaatccatatgcatcggatcagtt

SEQ ID NO: 4308443 - DNA, 25 bp, Homo sapien
cagccaaatccatatgcatcggatc

SEQ ID NO: 4308444 - DNA, 25 bp, Homo sapien
gggctttgactacaaacctcatcgt

SEQ ID NO: 4308445 - DNA, 25 bp, Homo sapien
ttgactacaaacctcatcgtagaag

SEQ ID NO: 4308446 - DNA, 25 bp, Homo sapien
ttgacaggggctttgactacaaacc

SEQ ID NO: 4308447 - DNA, 25 bp, Homo sapien
ttcctttgttgacaggggctttgac

SEQ ID NO: 4308448 - DNA, 25 bp, Homo sapien
tgccaaagtgtccagtgtaaaaagt

SEQ ID NO: 4308449 - DNA, 25 bp, Homo sapien
ttttgttgtatgctcctaggcctcg

SEQ ID NO: 4308450 - DNA, 25 bp, Homo sapien
ttaaagacctttgccaaagtgtcca

SEQ ID NO: 4308451 - DNA, 25 bp, Homo sapien
cctcgtattatccacaggtttggaa

SEQ ID NO: 4308452 - DNA, 25 bp, Homo sapien
ctctttccactagccccatcaacca

SEQ ID NO: 4308453 - DNA, 25 bp, Homo sapien
actagccccatcaaccatctctcac

SEQ ID NO: 4308454 - DNA, 25 bp, Homo sapien
tttccactagccccatcaaccatct

SEQ ID NO: 4308455 - DNA, 25 bp, Homo sapien
tccactagccccatcaaccatctct

SEQ ID NO: 4308456 - DNA, 25 bp, Homo sapien
cagaaagaataggtgaagaggttga

SEQ ID NO: 4308457 - DNA, 25 bp, Homo sapien
tgtgaagtctgccaacagaatccac

SEQ ID NO: 4308458 - DNA, 25 bp, Homo sapien
caaggactgtgcgtttaatgttgaa

SEQ ID NO: 4308459 - DNA, 25 bp, Homo sapien
gagttgtagatctcatttctcctgt

SEQ ID NO: 4308460 - DNA, 25 bp, Homo sapien
attatgcatgaaattgtgccggagt

SEQ ID NO: 4308461 - DNA, 25 bp, Homo sapien
ttatgcatgaaattgtgccggagtc

SEQ ID NO: 4308462 - DNA, 25 bp, Homo sapien
tatgcatgaaattgtgccggagtct

SEQ ID NO: 4308463 - DNA, 25 bp, Homo sapien
aattatgcatgaaattgtgccggag

SEQ ID NO: 4308464 - DNA, 25 bp, Homo sapien
atgtatatcatgcaccccaaggaag

SEQ ID NO: 4308465 - DNA, 25 bp, Homo sapien
cactgttgtgagctgttattactag

SEQ ID NO: 4308466 - DNA, 25 bp, Homo sapien
ttaggagtaacaagagtgtatgtcc

SEQ ID NO: 4308467 - DNA, 25 bp, Homo sapien
gcagaattgctccttttgatatgaa

SEQ ID NO: 4308468 - DNA, 25 bp, Homo sapien
gcagaacagatgtgctctcttgcct

SEQ ID NO: 4308469 - DNA, 25 bp, Homo sapien
tgtgctaccggctgtgaatacaatg

SEQ ID NO: 4308470 - DNA, 25 bp, Homo sapien
gtgctaccggctgtgaatacaatga

SEQ ID NO: 4308471 - DNA, 25 bp, Homo sapien
aattttcttacgttgagtatgaagc

SEQ ID NO: 4308472 - DNA, 25 bp, Homo sapien
tttcttacgttgagtatgaagcatt

SEQ ID NO: 4308473 - DNA, 25 bp, Homo sapien
attttcttacgttgagtatgaagca

SEQ ID NO: 4308474 - DNA, 25 bp, Homo sapien
tgcatcctctcttgttcggtccttg

SEQ ID NO: 4308475 - DNA, 25 bp, Homo sapien
ctcttggatcctgtgtctgttgact

SEQ ID NO: 4308476 - DNA, 25 bp, Homo sapien
tggatcctgtgtctgttgactttgc

SEQ ID NO: 4308477 - DNA, 25 bp, Homo sapien
tctcttgttcggtccttggtttgac

SEQ ID NO: 4308478 - DNA, 25 bp, Homo sapien
caagtctagcaggctaaacttgacc

SEQ ID NO: 4308479 - DNA, 25 bp, Homo sapien
tcaagtctagcaggctaaacttgac

SEQ ID NO: 4308480 - DNA, 25 bp, Homo sapien
agtctagcaggctaaacttgaccat

SEQ ID NO: 4308481 - DNA, 25 bp, Homo sapien
aagtctagcaggctaaacttgacca

SEQ ID NO: 4308482 - DNA, 25 bp, Homo sapien
tttgtctgcagggaccctcttcctt

SEQ ID NO: 4308483 - DNA, 25 bp, Homo sapien
ccccgccgcattgactttccttgaa

SEQ ID NO: 4308484 - DNA, 25 bp, Homo sapien
cgccgcattgactttccttgaaatg

SEQ ID NO: 4308485 - DNA, 25 bp, Homo sapien
ttgtctgcagggaccctcttccttc

SEQ ID NO: 4308486 - DNA, 25 bp, Homo sapien
tgattaatgctagagccttttatct

SEQ ID NO: 4308487 - DNA, 25 bp, Homo sapien
ttatctcactgcttcgtaccttttc

SEQ ID NO: 4308488 - DNA, 25 bp, Homo sapien
tatctcactgcttcgtaccttttcc

SEQ ID NO: 4308489 - DNA, 25 bp, Homo sapien
gacaaatatcttgattaatgctaga

SEQ ID NO: 4308490 - DNA, 25 bp, Homo sapien
ctgcaactttgtgaatattttggtc

SEQ ID NO: 4308491 - DNA, 25 bp, Homo sapien
caactttgtgaatattttggtcttt

SEQ ID NO: 4308492 - DNA, 25 bp, Homo sapien
tgtgaatattttggtctttttccag

SEQ ID NO: 4308493 - DNA, 25 bp, Homo sapien
tgaatattttggtctttttccagcc

SEQ ID NO: 4308494 - DNA, 25 bp, Homo sapien
tctccaaccccattggattccttgc

SEQ ID NO: 4308495 - DNA, 25 bp, Homo sapien
gatgccttctgaaccgcttagctct

SEQ ID NO: 4308496 - DNA, 25 bp, Homo sapien
gctcttgcttgaagatgcagcacat

SEQ ID NO: 4308497 - DNA, 25 bp, Homo sapien
ctgtgatgccttctgaaccgcttag

SEQ ID NO: 4308498 - DNA, 25 bp, Homo sapien
ttcttttaggtaggatccgtgtgcc

SEQ ID NO: 4308499 - DNA, 25 bp, Homo sapien
gttctgggaggctagcccttcttga

SEQ ID NO: 4308500 - DNA, 25 bp, Homo sapien
cttttaggtaggatccgtgtgcctc

SEQ ID NO: 4308501 - DNA, 25 bp, Homo sapien
gaggctagcccttcttgagatcccc

SEQ ID NO: 4308502 - DNA, 25 bp, Homo sapien
gaaactccaaatcgactactcagat

SEQ ID NO: 4308503 - DNA, 25 bp, Homo sapien
tctgggtttactgaaactccaaatc

SEQ ID NO: 4308504 - DNA, 25 bp, Homo sapien
caattagtgaagtctaaggtattct

SEQ ID NO: 4308505 - DNA, 25 bp, Homo sapien
cagatcaaaacaattagtgaagtct

SEQ ID NO: 4308506 - DNA, 25 bp, Homo sapien
tcttacttatcttttcaggtctggt

SEQ ID NO: 4308507 - DNA, 25 bp, Homo sapien
ccagtgtcgtctatggtgtgattca

SEQ ID NO: 4308508 - DNA, 25 bp, Homo sapien
aaatgcctttccctgtcgggatgaa

SEQ ID NO: 4308509 - DNA, 25 bp, Homo sapien
gcttgtgtggtctgatcagcctgaa

SEQ ID NO: 4308510 - DNA, 25 bp, Homo sapien
tgcaataaaactggtcccttctttg

SEQ ID NO: 4308511 - DNA, 25 bp, Homo sapien
cctcgtatgtgatggctgtttgagc

SEQ ID NO: 4308512 - DNA, 25 bp, Homo sapien
tcccaatacccctgggtgcaataaa

SEQ ID NO: 4308513 - DNA, 25 bp, Homo sapien
gttcctctcctcgtatgtgatggct

SEQ ID NO: 4308514 - DNA, 25 bp, Homo sapien
tcatttgcaagaggcaattcttcca

SEQ ID NO: 4308515 - DNA, 25 bp, Homo sapien
catatttatcactagcttgtttgct

SEQ ID NO: 4308516 - DNA, 25 bp, Homo sapien
tgggtgcctcaatgggccactgatt

SEQ ID NO: 4308517 - DNA, 25 bp, Homo sapien
ccagctaactgggtgcctcaatggg

SEQ ID NO: 4308518 - DNA, 25 bp, Homo sapien
ggattgtatcgcttgccatttggtt

SEQ ID NO: 4308519 - DNA, 25 bp, Homo sapien
tatttaagagctcagtattgtgatc

SEQ ID NO: 4308520 - DNA, 25 bp, Homo sapien
tcagtattgtgatcatttgccagaa

SEQ ID NO: 4308521 - DNA, 25 bp, Homo sapien
ccagaattggccgtcttgaaaggat

SEQ ID NO: 4308522 - DNA, 25 bp, Homo sapien
tatccccgacttctagcaactcagg

SEQ ID NO: 4308523 - DNA, 25 bp, Homo sapien
gttccaccttatcccatctgtataa

SEQ ID NO: 4308524 - DNA, 25 bp, Homo sapien
taagtcaccaaatcttggccatgac

SEQ ID NO: 4308525 - DNA, 25 bp, Homo sapien
ttctatgtcacctctatccccgact

SEQ ID NO: 4308526 - DNA, 25 bp, Homo sapien
taaaatcctgcttgtagtcaccttg

SEQ ID NO: 4308527 - DNA, 25 bp, Homo sapien
tttatcagtagggactgacttcctg

SEQ ID NO: 4308528 - DNA, 25 bp, Homo sapien
ttgatgaggcatcttgaaagtaacc

SEQ ID NO: 4308529 - DNA, 25 bp, Homo sapien
ccaagaatgctgacgtatatggaca

SEQ ID NO: 4308530 - DNA, 25 bp, Homo sapien
tctttcaccaatgagctgggtggca

SEQ ID NO: 4308531 - DNA, 25 bp, Homo sapien
tagtctccagttcaggccacttctt

SEQ ID NO: 4308532 - DNA, 25 bp, Homo sapien
gaatcccacttcgtagttgaatgga

SEQ ID NO: 4308533 - DNA, 25 bp, Homo sapien
tttctagggacgtctgggatctttc

SEQ ID NO: 4308534 - DNA, 25 bp, Homo sapien
ctccaggccttcgtttttcacatat

SEQ ID NO: 4308535 - DNA, 25 bp, Homo sapien
gccttcgtttttcacatatggatct

SEQ ID NO: 4308536 - DNA, 25 bp, Homo sapien
caggccttcgtttttcacatatgga

SEQ ID NO: 4308537 - DNA, 25 bp, Homo sapien
cgtttttcacatatggatctcccat

SEQ ID NO: 4308538 - DNA, 25 bp, Homo sapien
cgagatctttccagcacgaggtgca

SEQ ID NO: 4308539 - DNA, 25 bp, Homo sapien
ggcatttttagcaaattggacccca

SEQ ID NO: 4308540 - DNA, 25 bp, Homo sapien
tccctctgaaagtgcaaagaccctg

SEQ ID NO: 4308541 - DNA, 25 bp, Homo sapien
aaagaccctgaagcgtgactgctcc

SEQ ID NO: 4308542 - DNA, 25 bp, Homo sapien
tctatctgtctcaattctaaatacc

SEQ ID NO: 4308543 - DNA, 25 bp, Homo sapien
taggtccagccacaactcgaattct

SEQ ID NO: 4308544 - DNA, 25 bp, Homo sapien
tatacctctcaggtttagatactgt

SEQ ID NO: 4308545 - DNA, 25 bp, Homo sapien
gaatccagtcaccttatacctctca

SEQ ID NO: 4308546 - DNA, 25 bp, Homo sapien
gtctgaaagatttttccatagttgg

SEQ ID NO: 4308547 - DNA, 25 bp, Homo sapien
taagagaaatcttcaattaagaggt

SEQ ID NO: 4308548 - DNA, 25 bp, Homo sapien
cttcaattaagaggttattgttgtc

SEQ ID NO: 4308549 - DNA, 25 bp, Homo sapien
gttggtagctgaaaatgtgatcttc

SEQ ID NO: 4308550 - DNA, 25 bp, Homo sapien
tcaattcacgtcaaagtttggtttc

SEQ ID NO: 4308551 - DNA, 25 bp, Homo sapien
atgatggcccgccatgatgacagaa

SEQ ID NO: 4308552 - DNA, 25 bp, Homo sapien
ggcccgccatgatgacagaagctgc

SEQ ID NO: 4308553 - DNA, 25 bp, Homo sapien
ctgcttcacgcatgtactctggagt

SEQ ID NO: 4308554 - DNA, 25 bp, Homo sapien
catgtactctggagtgttgctctca

SEQ ID NO: 4308555 - DNA, 25 bp, Homo sapien
gaggagctcttgcactcatgtgaga

SEQ ID NO: 4308556 - DNA, 25 bp, Homo sapien
caggaggagctcttgcactcatgtg

SEQ ID NO: 4308557 - DNA, 25 bp, Homo sapien
gctcttgcactcatgtgagaactga

SEQ ID NO: 4308558 - DNA, 25 bp, Homo sapien
ttgcactcatgtgagaactgaagtc

SEQ ID NO: 4308559 - DNA, 25 bp, Homo sapien
aaagcacatatccattagcttcctt

SEQ ID NO: 4308560 - DNA, 25 bp, Homo sapien
aaaagcacatatccattagcttcct

SEQ ID NO: 4308561 - DNA, 25 bp, Homo sapien
ctttcatcaaacgtatatcaaacat

SEQ ID NO: 4308562 - DNA, 25 bp, Homo sapien
tttccaattcccttctagaaataca

SEQ ID NO: 4308563 - DNA, 25 bp, Homo sapien
tcagtaacaggtagatcattatttt

SEQ ID NO: 4308564 - DNA, 25 bp, Homo sapien
cagtaacaggtagatcattattttt

SEQ ID NO: 4308565 - DNA, 25 bp, Homo sapien
cttcagtaacaggtagatcattatt

SEQ ID NO: 4308566 - DNA, 25 bp, Homo sapien
ttcagtaacaggtagatcattattt

SEQ ID NO: 4308567 - DNA, 25 bp, Homo sapien
gctggcatgtcggtagatatatgga

SEQ ID NO: 4308568 - DNA, 25 bp, Homo sapien
gcatgtcggtagatatatggaattc

SEQ ID NO: 4308569 - DNA, 25 bp, Homo sapien
atgcagctggcatgtcggtagatat

SEQ ID NO: 4308570 - DNA, 25 bp, Homo sapien
gcagctggcatgtcggtagatatat

SEQ ID NO: 4308571 - DNA, 25 bp, Homo sapien
cagcactagatgtaaactgttttgt

SEQ ID NO: 4308572 - DNA, 25 bp, Homo sapien
gttttgtgaaggacacgaaagtatg

SEQ ID NO: 4308573 - DNA, 25 bp, Homo sapien
gacacgaaagtatgttcaacatatc

SEQ ID NO: 4308574 - DNA, 25 bp, Homo sapien
taacagcactagatgtaaactgttt

SEQ ID NO: 4308575 - DNA, 25 bp, Homo sapien
cagtaattgatctaaaagctgtggg

SEQ ID NO: 4308576 - DNA, 25 bp, Homo sapien
cgcagtaattgatctaaaagctgtg

SEQ ID NO: 4308577 - DNA, 25 bp, Homo sapien
caatggcatatggtcttcatagatg

SEQ ID NO: 4308578 - DNA, 25 bp, Homo sapien
aatggcatatggtcttcatagatgg

SEQ ID NO: 4308579 - DNA, 25 bp, Homo sapien
ctgtacatagaacttaggcacgctt

SEQ ID NO: 4308580 - DNA, 25 bp, Homo sapien
tacatagaacttaggcacgcttgcc

SEQ ID NO: 4308581 - DNA, 25 bp, Homo sapien
tgtacatagaacttaggcacgcttg

SEQ ID NO: 4308582 - DNA, 25 bp, Homo sapien
acatagaacttaggcacgcttgcca

SEQ ID NO: 4308583 - DNA, 25 bp, Homo sapien
gcccatggtttggtgtaattacatt

SEQ ID NO: 4308584 - DNA, 25 bp, Homo sapien
tagggaatgtggcaaaagctgtatg

SEQ ID NO: 4308585 - DNA, 25 bp, Homo sapien
agggaatgtggcaaaagctgtatgt

SEQ ID NO: 4308586 - DNA, 25 bp, Homo sapien
gggaatgtggcaaaagctgtatgtt

SEQ ID NO: 4308587 - DNA, 25 bp, Homo sapien
ttagggaatgtggcaaaagctgtat

SEQ ID NO: 4308588 - DNA, 25 bp, Homo sapien
ctcagcggtcagctcagctggcagg

SEQ ID NO: 4308589 - DNA, 25 bp, Homo sapien
tcagcggtcagctcagctggcaggt

SEQ ID NO: 4308590 - DNA, 25 bp, Homo sapien
tcggtcggccgaggcagggaaagtg

SEQ ID NO: 4308591 - DNA, 25 bp, Homo sapien
tggcaggtgcctcaccagaagagtt

SEQ ID NO: 4308592 - DNA, 25 bp, Homo sapien
cctgctttgctcccttcttcttcat

SEQ ID NO: 4308593 - DNA, 25 bp, Homo sapien
ctcctgctttgctcccttcttcttc

SEQ ID NO: 4308594 - DNA, 25 bp, Homo sapien
tcctgctttgctcccttcttcttca

SEQ ID NO: 4308595 - DNA, 25 bp, Homo sapien
gtttccatggccaaagacgtctccg

SEQ ID NO: 4308596 - DNA, 25 bp, Homo sapien
caggtggtgccgatgctgtccttat

SEQ ID NO: 4308597 - DNA, 25 bp, Homo sapien
tggagagctgacctcacagggaaaa

SEQ ID NO: 4308598 - DNA, 25 bp, Homo sapien
gacgtctccgtgaaagactcgcata

SEQ ID NO: 4308599 - DNA, 25 bp, Homo sapien
tgttctctatatgtacttgctggga

SEQ ID NO: 4308600 - DNA, 25 bp, Homo sapien
tctataaacactccctgcccatatg

SEQ ID NO: 4308601 - DNA, 25 bp, Homo sapien
tatgtgcgtgtttgtatgtctgcaa

SEQ ID NO: 4308602 - DNA, 25 bp, Homo sapien
cttgctgggaaaatgtatggtgtat

SEQ ID NO: 4308603 - DNA, 25 bp, Homo sapien
ggctgtcctattgtcttatgagggc

SEQ ID NO: 4308604 - DNA, 25 bp, Homo sapien
tcaaaacagttccaggctcttctct

SEQ ID NO: 4308605 - DNA, 25 bp, Homo sapien
gccagcatttctgtagccaatggat

SEQ ID NO: 4308606 - DNA, 25 bp, Homo sapien
cagggccatcctaggagcagttgct

SEQ ID NO: 4308607 - DNA, 25 bp, Homo sapien
taggcacttctacatttcttggagc

SEQ ID NO: 4308608 - DNA, 25 bp, Homo sapien
tgttaggtgactttacacagaatcc

SEQ ID NO: 4308609 - DNA, 25 bp, Homo sapien
tgtttgttgaatgcgtgttaggtga

SEQ ID NO: 4308610 - DNA, 25 bp, Homo sapien
cagaatcctacgtgggactgcagta

SEQ ID NO: 4308611 - DNA, 25 bp, Homo sapien
gctgaaaacgtctggcagagctcac

SEQ ID NO: 4308612 - DNA, 25 bp, Homo sapien
cacttggcacaggtgcaagaaagct

SEQ ID NO: 4308613 - DNA, 25 bp, Homo sapien
agaaagctgaaaacgtctggcagag

SEQ ID NO: 4308614 - DNA, 25 bp, Homo sapien
tggcacaggtgcaagaaagctgaaa

SEQ ID NO: 4308615 - DNA, 25 bp, Homo sapien
ccactcggcaccaaatgttttacag

SEQ ID NO: 4308616 - DNA, 25 bp, Homo sapien
ctgagaaaaggctccacgctgcagc

SEQ ID NO: 4308617 - DNA, 25 bp, Homo sapien
gcttctgcccagtcgtttgtttgaa

SEQ ID NO: 4308618 - DNA, 25 bp, Homo sapien
tgttttacagtcttcgtgagcccat

SEQ ID NO: 4308619 - DNA, 25 bp, Homo sapien
taattaagggggcatgtcaggtctg

SEQ ID NO: 4308620 - DNA, 25 bp, Homo sapien
tcttccctataattaagggggcatg

SEQ ID NO: 4308621 - DNA, 25 bp, Homo sapien
gggcatgtcaggtctggggcccaga

SEQ ID NO: 4308622 - DNA, 25 bp, Homo sapien
ccctataattaagggggcatgtcag

SEQ ID NO: 4308623 - DNA, 25 bp, Homo sapien
tgatactcttatagcattgtggcat

SEQ ID NO: 4308624 - DNA, 25 bp, Homo sapien
tactcttatagcattgtggcatatt

SEQ ID NO: 4308625 - DNA, 25 bp, Homo sapien
tctaatttgattgatactcttatag

SEQ ID NO: 4308626 - DNA, 25 bp, Homo sapien
aaagcttctaatttgattgatactc

SEQ ID NO: 4308627 - DNA, 25 bp, Homo sapien
taatcaagaatagacatcagctcca

SEQ ID NO: 4308628 - DNA, 25 bp, Homo sapien
catgataaacttttaggaatatatc

SEQ ID NO: 4308629 - DNA, 25 bp, Homo sapien
ctagggtaatcaagaatagacatca

SEQ ID NO: 4308630 - DNA, 25 bp, Homo sapien
cacatttgactttaatacaccatga

SEQ ID NO: 4308631 - DNA, 25 bp, Homo sapien
gagtttgagaaaggactaatggtcc

SEQ ID NO: 4308632 - DNA, 25 bp, Homo sapien
atatgtgatagacagtaggcaatat

SEQ ID NO: 4308633 - DNA, 25 bp, Homo sapien
gacagtaggcaatatttgagtttta

SEQ ID NO: 4308634 - DNA, 25 bp, Homo sapien
tgatagacagtaggcaatatttgag

SEQ ID NO: 4308635 - DNA, 25 bp, Homo sapien
tatttaacaccaatatggcatggcc

SEQ ID NO: 4308636 - DNA, 25 bp, Homo sapien
cctttagtgactagaccacgggtag

SEQ ID NO: 4308637 - DNA, 25 bp, Homo sapien
gcatggcctcaccaatgataccagg

SEQ ID NO: 4308638 - DNA, 25 bp, Homo sapien
aaagatcttgtagtgttctgaccac

SEQ ID NO: 4308639 - DNA, 25 bp, Homo sapien
tcatccgaggtgtggtgataccggc

SEQ ID NO: 4308640 - DNA, 25 bp, Homo sapien
tacacaccgtttcgcaggtgccggg

SEQ ID NO: 4308641 - DNA, 25 bp, Homo sapien
gcagctgcaatcattccgagagtgg

SEQ ID NO: 4308642 - DNA, 25 bp, Homo sapien
caagattcaaaaaggctgcagtcca

SEQ ID NO: 4308643 - DNA, 25 bp, Homo sapien
tagagatgggttgaattctgagaaa

SEQ ID NO: 4308644 - DNA, 25 bp, Homo sapien
atttagagatgggttgaattctgag

SEQ ID NO: 4308645 - DNA, 25 bp, Homo sapien
atgggttgaattctgagaaacatac

SEQ ID NO: 4308646 - DNA, 25 bp, Homo sapien
gagatgggttgaattctgagaaaca

SEQ ID NO: 4308647 - DNA, 25 bp, Homo sapien
caatagcattaatgggtttctcatc

SEQ ID NO: 4308648 - DNA, 25 bp, Homo sapien
cattcttcaagggaggacagtgatg

SEQ ID NO: 4308649 - DNA, 25 bp, Homo sapien
ggtccatctgtgatattgaagtcag

SEQ ID NO: 4308650 - DNA, 25 bp, Homo sapien
gcatgctttgcattcgtgagttgcg

SEQ ID NO: 4308651 - DNA, 25 bp, Homo sapien
tgtatttcctgagcagaaacaattt

SEQ ID NO: 4308652 - DNA, 25 bp, Homo sapien
ggtactgcgatgtatttcctgagca

SEQ ID NO: 4308653 - DNA, 25 bp, Homo sapien
ccaaaaccatctaagcataagcgtt

SEQ ID NO: 4308654 - DNA, 25 bp, Homo sapien
cataagcgttgttcaaagatggtac

SEQ ID NO: 4308655 - DNA, 25 bp, Homo sapien
tttggctgttgtcccaatccttggg

SEQ ID NO: 4308656 - DNA, 25 bp, Homo sapien
gtataattcccctgaatgacaagtg

SEQ ID NO: 4308657 - DNA, 25 bp, Homo sapien
tccttgggaccgtgattatatcgag

SEQ ID NO: 4308658 - DNA, 25 bp, Homo sapien
gacaagtgactggtcaatgatgcca

SEQ ID NO: 4308659 - DNA, 25 bp, Homo sapien
cgacacacttggaagaataaatatt

SEQ ID NO: 4308660 - DNA, 25 bp, Homo sapien
gaggtgccccaaccgtacactcgac

SEQ ID NO: 4308661 - DNA, 25 bp, Homo sapien
aaccgtacactcgacacacttggaa

SEQ ID NO: 4308662 - DNA, 25 bp, Homo sapien
ctcgaggtgccccaaccgtacactc

SEQ ID NO: 4308663 - DNA, 25 bp, Homo sapien
tgtgtcttcatcaaccgtcgttctc

SEQ ID NO: 4308664 - DNA, 25 bp, Homo sapien
ccacaaaagatgtgtcttcatcaac

SEQ ID NO: 4308665 - DNA, 25 bp, Homo sapien
tcatcaaccgtcgttctctttcctt

SEQ ID NO: 4308666 - DNA, 25 bp, Homo sapien
aaagatgtgtcttcatcaaccgtcg

SEQ ID NO: 4308667 - DNA, 25 bp, Homo sapien
caggatctccaagaggatttagaat

SEQ ID NO: 4308668 - DNA, 25 bp, Homo sapien
gatctccaagaggatttagaattga

SEQ ID NO: 4308669 - DNA, 25 bp, Homo sapien
tctccaagaggatttagaattgagg

SEQ ID NO: 4308670 - DNA, 25 bp, Homo sapien
ctccaagaggatttagaattgaggt

SEQ ID NO: 4308671 - DNA, 25 bp, Homo sapien
ttacttggacaagcatgatagcttc

SEQ ID NO: 4308672 - DNA, 25 bp, Homo sapien
tagcaacttgtctggtggaattaca

SEQ ID NO: 4308673 - DNA, 25 bp, Homo sapien
cctgttgttcttggcctcattgcaa

SEQ ID NO: 4308674 - DNA, 25 bp, Homo sapien
gctgcttttagctgtgcatgtacat

SEQ ID NO: 4308675 - DNA, 25 bp, Homo sapien
gccagtgacccaagttttgtctggg

SEQ ID NO: 4308676 - DNA, 25 bp, Homo sapien
tcagccagtgacccaagttttgtct

SEQ ID NO: 4308677 - DNA, 25 bp, Homo sapien
ctgttgtcaagggaagttcagccag

SEQ ID NO: 4308678 - DNA, 25 bp, Homo sapien
gttgtcaagggaagttcagccagtg

SEQ ID NO: 4308679 - DNA, 25 bp, Homo sapien
ttattggcttttagtgctattactg

SEQ ID NO: 4308680 - DNA, 25 bp, Homo sapien
gaccgcttttattggcttttagtgc

SEQ ID NO: 4308681 - DNA, 25 bp, Homo sapien
cataaaagctgatctctgaacgaac

SEQ ID NO: 4308682 - DNA, 25 bp, Homo sapien
tgaacgaacagaccgcttttattgg

SEQ ID NO: 4308683 - DNA, 25 bp, Homo sapien
agatggtgttagcttggtttttgcc

SEQ ID NO: 4308684 - DNA, 25 bp, Homo sapien
tgggtgccacagtgatataagatgg

SEQ ID NO: 4308685 - DNA, 25 bp, Homo sapien
tggtgttagcttggtttttgccacc

SEQ ID NO: 4308686 - DNA, 25 bp, Homo sapien
cacagtgatataagatggtgttagc

SEQ ID NO: 4308687 - DNA, 25 bp, Homo sapien
tttcataactaagtcctctttctcg

SEQ ID NO: 4308688 - DNA, 25 bp, Homo sapien
tgaagctcgtgtttagggaatccaa

SEQ ID NO: 4308689 - DNA, 25 bp, Homo sapien
tctttctcgttaaaatcaccatgac

SEQ ID NO: 4308690 - DNA, 25 bp, Homo sapien
tgtgatctacagataagttggcttc

SEQ ID NO: 4308691 - DNA, 25 bp, Homo sapien
ctctcattgtgtgtagcattatggt

SEQ ID NO: 4308692 - DNA, 25 bp, Homo sapien
tggtgctggcagtcaagttttcttg

SEQ ID NO: 4308693 - DNA, 25 bp, Homo sapien
caggagtcagactcatggccaaagt

SEQ ID NO: 4308694 - DNA, 25 bp, Homo sapien
agttttcttggcttgctaacccagg

SEQ ID NO: 4308695 - DNA, 25 bp, Homo sapien
actgatgtgaacaggcccatgaccc

SEQ ID NO: 4308696 - DNA, 25 bp, Homo sapien
ctagatctctttgacaccaccactg

SEQ ID NO: 4308697 - DNA, 25 bp, Homo sapien
gaaagtcaagggcaattaggagcct

SEQ ID NO: 4308698 - DNA, 25 bp, Homo sapien
caagggcaattaggagcctctttgc

SEQ ID NO: 4308699 - DNA, 25 bp, Homo sapien
tttatcttttccagctcagtttctg

SEQ ID NO: 4308700 - DNA, 25 bp, Homo sapien
tttatccatttcacctcgtttccta

SEQ ID NO: 4308701 - DNA, 25 bp, Homo sapien
atttcacctcgtttcctaacttcat

SEQ ID NO: 4308702 - DNA, 25 bp, Homo sapien
catttcacctcgtttcctaacttca

SEQ ID NO: 4308703 - DNA, 25 bp, Homo sapien
atccatttcacctcgtttcctaact

SEQ ID NO: 4308704 - DNA, 25 bp, Homo sapien
gagttagtatggtgacaccaggatg

SEQ ID NO: 4308705 - DNA, 25 bp, Homo sapien
tgagttagtatggtgacaccaggat

SEQ ID NO: 4308706 - DNA, 25 bp, Homo sapien
ctgagttagtatggtgacaccagga

SEQ ID NO: 4308707 - DNA, 25 bp, Homo sapien
tctgagttagtatggtgacaccagg

SEQ ID NO: 4308708 - DNA, 25 bp, Homo sapien
gtatgtacgtgtatttcattttctg

SEQ ID NO: 4308709 - DNA, 25 bp, Homo sapien
ctgccccaagtgagttgcttctctg

SEQ ID NO: 4308710 - DNA, 25 bp, Homo sapien
ttctctgttgagatacactgtaagt

SEQ ID NO: 4308711 - DNA, 25 bp, Homo sapien
cactgtaagtatgtacgtgtatttc

SEQ ID NO: 4308712 - DNA, 25 bp, Homo sapien
gtccagtggccatctcttatattct

SEQ ID NO: 4308713 - DNA, 25 bp, Homo sapien
agctctgaggtccatagccctcggc

SEQ ID NO: 4308714 - DNA, 25 bp, Homo sapien
tccagtggccatctcttatattctg

SEQ ID NO: 4308715 - DNA, 25 bp, Homo sapien
ccagtggccatctcttatattctga

SEQ ID NO: 4308716 - DNA, 25 bp, Homo sapien
ggttgcaagttgcagttcctgtcca

SEQ ID NO: 4308717 - DNA, 25 bp, Homo sapien
tggttgcaagttgcagttcctgtcc

SEQ ID NO: 4308718 - DNA, 25 bp, Homo sapien
atggttattggagccttgatgtaaa

SEQ ID NO: 4308719 - DNA, 25 bp, Homo sapien
tggagccttgatgtaaaactgtcct

SEQ ID NO: 4308720 - DNA, 25 bp, Homo sapien
tgtccttgtactctcaatcctcaaa

SEQ ID NO: 4308721 - DNA, 25 bp, Homo sapien
tgtaaaactgtccttgtactctcaa

SEQ ID NO: 4308722 - DNA, 25 bp, Homo sapien
cttttaatagaaatgccttattctg

SEQ ID NO: 4308723 - DNA, 25 bp, Homo sapien
gaaatgccttattctgtttatacca

SEQ ID NO: 4308724 - DNA, 25 bp, Homo sapien
taacaaagcgtagtctgaatatagc

SEQ ID NO: 4308725 - DNA, 25 bp, Homo sapien
tttcacagcaagagtaacaaagcgt

SEQ ID NO: 4308726 - DNA, 25 bp, Homo sapien
tctttttgtctaggtctctttcatc

SEQ ID NO: 4308727 - DNA, 25 bp, Homo sapien
attattggtgatgccggcatttcca

SEQ ID NO: 4308728 - DNA, 25 bp, Homo sapien
tcattattggtgatgccggcatttc

SEQ ID NO: 4308729 - DNA, 25 bp, Homo sapien
ttgtggcagttaagagtaaagaggt

SEQ ID NO: 4308730 - DNA, 25 bp, Homo sapien
gagaaatagagatcaccacccaaca

SEQ ID NO: 4308731 - DNA, 25 bp, Homo sapien
ccaacacatgaattgggtcattagg

SEQ ID NO: 4308732 - DNA, 25 bp, Homo sapien
tgcaacatgctaaaataagatccac

SEQ ID NO: 4308733 - DNA, 25 bp, Homo sapien
ggtcattaggtggattgcaacatgc

SEQ ID NO: 4308734 - DNA, 25 bp, Homo sapien
cgttcaagccatagtaatttttcgg

SEQ ID NO: 4308735 - DNA, 25 bp, Homo sapien
tagagtcttcgttcaagccatagta

SEQ ID NO: 4308736 - DNA, 25 bp, Homo sapien
gccatagtaatttttcggaactggc

SEQ ID NO: 4308737 - DNA, 25 bp, Homo sapien
cttaaatgtattagagtcttcgttc

SEQ ID NO: 4308738 - DNA, 25 bp, Homo sapien
taaagacgtattgcatcagtgatgt

SEQ ID NO: 4308739 - DNA, 25 bp, Homo sapien
tctctttgaaaacccctgtagtctc

SEQ ID NO: 4308740 - DNA, 25 bp, Homo sapien
ttaaagacgtattgcatcagtgatg

SEQ ID NO: 4308741 - DNA, 25 bp, Homo sapien
aaagacgtattgcatcagtgatgtc

SEQ ID NO: 4308742 - DNA, 25 bp, Homo sapien
gtcacatccgacatttctagattac

SEQ ID NO: 4308743 - DNA, 25 bp, Homo sapien
cagtcacatccgacatttctagatt

SEQ ID NO: 4308744 - DNA, 25 bp, Homo sapien
acatccgacatttctagattaccaa

SEQ ID NO: 4308745 - DNA, 25 bp, Homo sapien
ctaactgaatgcagtcacatccgac

SEQ ID NO: 4308746 - DNA, 25 bp, Homo sapien
tctctgggccgtcatctttgttcat

SEQ ID NO: 4308747 - DNA, 25 bp, Homo sapien
tgtctctgggccgtcatctttgttc

SEQ ID NO: 4308748 - DNA, 25 bp, Homo sapien
atttctgttgtctctgggccgtcat

SEQ ID NO: 4308749 - DNA, 25 bp, Homo sapien
tctgttgtctctgggccgtcatctt

SEQ ID NO: 4308750 - DNA, 25 bp, Homo sapien
ttccttggaatcagagaggtaaata

SEQ ID NO: 4308751 - DNA, 25 bp, Homo sapien
ccttggaatcagagaggtaaatata

SEQ ID NO: 4308752 - DNA, 25 bp, Homo sapien
tccttggaatcagagaggtaaatat

SEQ ID NO: 4308753 - DNA, 25 bp, Homo sapien
cttggaatcagagaggtaaatatag

SEQ ID NO: 4308754 - DNA, 25 bp, Homo sapien
tgaggccagtctttagttgaggtat

SEQ ID NO: 4308755 - DNA, 25 bp, Homo sapien
ttttgctctcctccggacataaaac

SEQ ID NO: 4308756 - DNA, 25 bp, Homo sapien
ccagtctttagttgaggtattttga

SEQ ID NO: 4308757 - DNA, 25 bp, Homo sapien
tagttttgctctcctccggacataa

SEQ ID NO: 4308758 - DNA, 25 bp, Homo sapien
tgtttctggtttgagaaccatcccc

SEQ ID NO: 4308759 - DNA, 25 bp, Homo sapien
agcagctttgctgtggaccaagcat

SEQ ID NO: 4308760 - DNA, 25 bp, Homo sapien
ctgtggaccaagcatctctcagaaa

SEQ ID NO: 4308761 - DNA, 25 bp, Homo sapien
agctttgctgtggaccaagcatctc

SEQ ID NO: 4308762 - DNA, 25 bp, Homo sapien
tgcttttgagcctctctaatcctgc

SEQ ID NO: 4308763 - DNA, 25 bp, Homo sapien
cctgttgcttttgagcctctctaat

SEQ ID NO: 4308764 - DNA, 25 bp, Homo sapien
caaaggtctctattgtccgctccat

SEQ ID NO: 4308765 - DNA, 25 bp, Homo sapien
ctctaatcctgccaaaggtctctat

SEQ ID NO: 4308766 - DNA, 25 bp, Homo sapien
agggaggaataagaacccactcact

SEQ ID NO: 4308767 - DNA, 25 bp, Homo sapien
gaggaataagaacccactcactgca

SEQ ID NO: 4308768 - DNA, 25 bp, Homo sapien
aatgcaagtcaaggtagggaggaat

SEQ ID NO: 4308769 - DNA, 25 bp, Homo sapien
caagtcaaggtagggaggaataaga

SEQ ID NO: 4308770 - DNA, 25 bp, Homo sapien
ctctccatttgcctcatgctgtcgg

SEQ ID NO: 4308771 - DNA, 25 bp, Homo sapien
ccatttgcctcatgctgtcggcatc

SEQ ID NO: 4308772 - DNA, 25 bp, Homo sapien
tttgcctcatgctgtcggcatccat

SEQ ID NO: 4308773 - DNA, 25 bp, Homo sapien
tctccatttgcctcatgctgtcggc

SEQ ID NO: 4308774 - DNA, 25 bp, Homo sapien
tctctaaactttcctttttgcttca

SEQ ID NO: 4308775 - DNA, 25 bp, Homo sapien
ctctaaactttcctttttgcttcat

SEQ ID NO: 4308776 - DNA, 25 bp, Homo sapien
taagcacttctctctattggttatt

SEQ ID NO: 4308777 - DNA, 25 bp, Homo sapien
catcaatcagacctagatttggtct

SEQ ID NO: 4308778 - DNA, 25 bp, Homo sapien
cacggcatctgagcagaaccacaag

SEQ ID NO: 4308779 - DNA, 25 bp, Homo sapien
gatgtcgacatccttcattccacgg

SEQ ID NO: 4308780 - DNA, 25 bp, Homo sapien
ccacaagatgacaactttaggatca

SEQ ID NO: 4308781 - DNA, 25 bp, Homo sapien
tttgcactctcccagctgatgtcga

SEQ ID NO: 4308782 - DNA, 25 bp, Homo sapien
taatacacgaactgctttgttgagt

SEQ ID NO: 4308783 - DNA, 25 bp, Homo sapien
cttggctttacaatggctccatttt

SEQ ID NO: 4308784 - DNA, 25 bp, Homo sapien
ttccttgactattgctaaactgttg

SEQ ID NO: 4308785 - DNA, 25 bp, Homo sapien
taagatttccagttctagacttggc

SEQ ID NO: 4308786 - DNA, 25 bp, Homo sapien
tagataagaataccatgctgacatc

SEQ ID NO: 4308787 - DNA, 25 bp, Homo sapien
gctgacatcaatcatctggatagtc

SEQ ID NO: 4308788 - DNA, 25 bp, Homo sapien
aaattcccattcaaggtggatagat

SEQ ID NO: 4308789 - DNA, 25 bp, Homo sapien
catcaatcatctggatagtcagcat

SEQ ID NO: 4308790 - DNA, 25 bp, Homo sapien
agggaagttttctcgtctcgttctg

SEQ ID NO: 4308791 - DNA, 25 bp, Homo sapien
ctcgttctgtgcgattcaggctttc

SEQ ID NO: 4308792 - DNA, 25 bp, Homo sapien
tctgcgtcccgtagttcatcagaga

SEQ ID NO: 4308793 - DNA, 25 bp, Homo sapien
attctcttctgcgtcccgtagttca

SEQ ID NO: 4308794 - DNA, 25 bp, Homo sapien
catgctgagggacatagtactgttt

SEQ ID NO: 4308795 - DNA, 25 bp, Homo sapien
cagaatcgacgctatcactcatgat

SEQ ID NO: 4308796 - DNA, 25 bp, Homo sapien
catccatagtagatctgtcattgcc

SEQ ID NO: 4308797 - DNA, 25 bp, Homo sapien
agtcattcctggcatcaatcaaggc

SEQ ID NO: 4308798 - DNA, 25 bp, Homo sapien
tatttattgccgacttgacatcaag

SEQ ID NO: 4308799 - DNA, 25 bp, Homo sapien
gccacgtatgtgaacaatcctaact

SEQ ID NO: 4308800 - DNA, 25 bp, Homo sapien
gaattataaacagctagccacgtat

SEQ ID NO: 4308801 - DNA, 25 bp, Homo sapien
aatgagtggtttggactaacctacg

SEQ ID NO: 4308802 - DNA, 25 bp, Homo sapien
caggacgtctctattgccattccca

SEQ ID NO: 4308803 - DNA, 25 bp, Homo sapien
tacaaattccaccaggacgtctcta

SEQ ID NO: 4308804 - DNA, 25 bp, Homo sapien
attccaccaggacgtctctattgcc

SEQ ID NO: 4308805 - DNA, 25 bp, Homo sapien
tcctaggctacaaattccaccagga

SEQ ID NO: 4308806 - DNA, 25 bp, Homo sapien
tctgcacatggcaggggaattgagc

SEQ ID NO: 4308807 - DNA, 25 bp, Homo sapien
atgttatgtggtgtttttcacagaa

SEQ ID NO: 4308808 - DNA, 25 bp, Homo sapien
tggaagctcaagacctgtgtcagtg

SEQ ID NO: 4308809 - DNA, 25 bp, Homo sapien
cagaaggactgtttatgaacagatg

SEQ ID NO: 4308810 - DNA, 25 bp, Homo sapien
cgtgggcgcacttcccattgtaatg

SEQ ID NO: 4308811 - DNA, 25 bp, Homo sapien
caaggtacacccaatgttctgatcc

SEQ ID NO: 4308812 - DNA, 25 bp, Homo sapien
gattcaacctcttgtcgtgggcgca

SEQ ID NO: 4308813 - DNA, 25 bp, Homo sapien
ctttgtctcaacgaggattcaacct

SEQ ID NO: 4308814 - DNA, 25 bp, Homo sapien
gatggaattatctccaacagccaca

SEQ ID NO: 4308815 - DNA, 25 bp, Homo sapien
ttcagggccagcactccagagatgg

SEQ ID NO: 4308816 - DNA, 25 bp, Homo sapien
tggaggtccagaatgcttcagggcc

SEQ ID NO: 4308817 - DNA, 25 bp, Homo sapien
gcactccagagatggaattatctcc

SEQ ID NO: 4308818 - DNA, 25 bp, Homo sapien
gcgcaagctgcaaaaacctgccaca

SEQ ID NO: 4308819 - DNA, 25 bp, Homo sapien
ccatatacagttgccttttgggtcc

SEQ ID NO: 4308820 - DNA, 25 bp, Homo sapien
ggtgggcaatagacagccagcttat

SEQ ID NO: 4308821 - DNA, 25 bp, Homo sapien
ggagcactggttccatatacagttg

SEQ ID NO: 4308822 - DNA, 25 bp, Homo sapien
aaaacatgctgaacagggtgctcgc

SEQ ID NO: 4308823 - DNA, 25 bp, Homo sapien
acagggtgctcgctgtgaaacatgg

SEQ ID NO: 4308824 - DNA, 25 bp, Homo sapien
gctgaacagggtgctcgctgtgaaa

SEQ ID NO: 4308825 - DNA, 25 bp, Homo sapien
gtgctcgctgtgaaacatgggtagc

SEQ ID NO: 4308826 - DNA, 25 bp, Homo sapien
tgtccggagtccttgttgtgatctt

SEQ ID NO: 4308827 - DNA, 25 bp, Homo sapien
tatgtccggagtccttgttgtgatc

SEQ ID NO: 4308828 - DNA, 25 bp, Homo sapien
ttatgtccggagtccttgttgtgat

SEQ ID NO: 4308829 - DNA, 25 bp, Homo sapien
gtccggagtccttgttgtgatctta

SEQ ID NO: 4308830 - DNA, 25 bp, Homo sapien
gagcaatggttgccctgagggcgag

SEQ ID NO: 4308831 - DNA, 25 bp, Homo sapien
cagagcaatggttgccctgagggcg

SEQ ID NO: 4308832 - DNA, 25 bp, Homo sapien
gcacctctggcataatctgtcatcc

SEQ ID NO: 4308833 - DNA, 25 bp, Homo sapien
aatggttgccctgagggcgagaagc

SEQ ID NO: 4308834 - DNA, 25 bp, Homo sapien
ttgaattgttgaataaccacctttc

SEQ ID NO: 4308835 - DNA, 25 bp, Homo sapien
taaggttaagtcgtccttgacagta

SEQ ID NO: 4308836 - DNA, 25 bp, Homo sapien
gtcgtccttgacagtattaaaagaa

SEQ ID NO: 4308837 - DNA, 25 bp, Homo sapien
caatatgctctcaatcaatagctct

SEQ ID NO: 4308838 - DNA, 25 bp, Homo sapien
gtgactgcatctcgtcttcaaccat

SEQ ID NO: 4308839 - DNA, 25 bp, Homo sapien
gacatttgggttgtgatgtgactgc

SEQ ID NO: 4308840 - DNA, 25 bp, Homo sapien
aaaggtcaaagacatttgggttgtg

SEQ ID NO: 4308841 - DNA, 25 bp, Homo sapien
tctccagaataaaggtcaaagacat

SEQ ID NO: 4308842 - DNA, 25 bp, Homo sapien
gaacaggctgctcttcgagatggga

SEQ ID NO: 4308843 - DNA, 25 bp, Homo sapien
tgaaggccactcctttatgttctcg

SEQ ID NO: 4308844 - DNA, 25 bp, Homo sapien
ccacctaatggttcaagttgtcctt

SEQ ID NO: 4308845 - DNA, 25 bp, Homo sapien
cttttgattgtcaagtgaaggccac

SEQ ID NO: 4308846 - DNA, 25 bp, Homo sapien
tacttaggtcagttgtatactttgc

SEQ ID NO: 4308847 - DNA, 25 bp, Homo sapien
tatggcggtattgtatcccatgttg

SEQ ID NO: 4308848 - DNA, 25 bp, Homo sapien
gatttcagggttgaatggtacttcc

SEQ ID NO: 4308849 - DNA, 25 bp, Homo sapien
tctgactagtatgaaacggtatctc

SEQ ID NO: 4308850 - DNA, 25 bp, Homo sapien
ggtgtgttgatgacccctggaccaa

SEQ ID NO: 4308851 - DNA, 25 bp, Homo sapien
tgtgccaaagctctctccgttttgc

SEQ ID NO: 4308852 - DNA, 25 bp, Homo sapien
tggcagataaataggcacaacatag

SEQ ID NO: 4308853 - DNA, 25 bp, Homo sapien
gagcaaggtggcagataaataggca

SEQ ID NO: 4308854 - DNA, 25 bp, Homo sapien
caaagacgccaaggcaagtactgca

SEQ ID NO: 4308855 - DNA, 25 bp, Homo sapien
caaggcaagtactgcaattggattg

SEQ ID NO: 4308856 - DNA, 25 bp, Homo sapien
cattatcaaagacgccaaggcaagt

SEQ ID NO: 4308857 - DNA, 25 bp, Homo sapien
actccattatcaaagacgccaaggc

SEQ ID NO: 4308858 - DNA, 25 bp, Homo sapien
tttttgaaggctagcaccagatagg

SEQ ID NO: 4308859 - DNA, 25 bp, Homo sapien
caccagatagggacaaaaggaatat

SEQ ID NO: 4308860 - DNA, 25 bp, Homo sapien
gaaggctagcaccagatagggacaa

SEQ ID NO: 4308861 - DNA, 25 bp, Homo sapien
ttcctttttgaaggctagcaccaga

SEQ ID NO: 4308862 - DNA, 25 bp, Homo sapien
tctgagtagagcaagtatctgtgat

SEQ ID NO: 4308863 - DNA, 25 bp, Homo sapien
ccatagcaacctgtaatttttattg

SEQ ID NO: 4308864 - DNA, 25 bp, Homo sapien
ctctgagtagagcaagtatctgtga

SEQ ID NO: 4308865 - DNA, 25 bp, Homo sapien
tcatgtttccatagcaacctgtaat

SEQ ID NO: 4308866 - DNA, 25 bp, Homo sapien
gttatctcttgaaaacacccaagtc

SEQ ID NO: 4308867 - DNA, 25 bp, Homo sapien
cccaagtctcttaggtagacttctt

SEQ ID NO: 4308868 - DNA, 25 bp, Homo sapien
taatggcgttatctcttgaaaacac

SEQ ID NO: 4308869 - DNA, 25 bp, Homo sapien
gggcttaaactgtaatggcgttatc

SEQ ID NO: 4308870 - DNA, 25 bp, Homo sapien
agtattggcatttcccaagacttcc

SEQ ID NO: 4308871 - DNA, 25 bp, Homo sapien
gaaagcaagattctttggactatca

SEQ ID NO: 4308872 - DNA, 25 bp, Homo sapien
tcttaaagaagtattggcatttccc

SEQ ID NO: 4308873 - DNA, 25 bp, Homo sapien
tcacaaagctcaatgccagcatgaa

SEQ ID NO: 4308874 - DNA, 25 bp, Homo sapien
tcgtttggctgttaggactcgtgca

SEQ ID NO: 4308875 - DNA, 25 bp, Homo sapien
gttctgaatcaacatggtcagtctg

SEQ ID NO: 4308876 - DNA, 25 bp, Homo sapien
cacaccttttgggagcacagtcaga

SEQ ID NO: 4308877 - DNA, 25 bp, Homo sapien
aatgtcagcatattagtcgtttggc

SEQ ID NO: 4308878 - DNA, 25 bp, Homo sapien
ttgagtttatagaatgagacaccta

SEQ ID NO: 4308879 - DNA, 25 bp, Homo sapien
gtttatagaatgagacacctatgaa

SEQ ID NO: 4308880 - DNA, 25 bp, Homo sapien
aaaacacttaaattcacagagttgc

SEQ ID NO: 4308881 - DNA, 25 bp, Homo sapien
acacttaaattcacagagttgcttt

SEQ ID NO: 4308882 - DNA, 25 bp, Homo sapien
atatctccactgaagcataaaatct

SEQ ID NO: 4308883 - DNA, 25 bp, Homo sapien
agcataaaatctttggcctggagcc

SEQ ID NO: 4308884 - DNA, 25 bp, Homo sapien
ctggcaaaaatatctccactgaagc

SEQ ID NO: 4308885 - DNA, 25 bp, Homo sapien
ctgaagcataaaatctttggcctgg

SEQ ID NO: 4308886 - DNA, 25 bp, Homo sapien
acatctccacaatgaatgaacagct

SEQ ID NO: 4308887 - DNA, 25 bp, Homo sapien
cacatctccacaatgaatgaacagc

SEQ ID NO: 4308888 - DNA, 25 bp, Homo sapien
ccacatctccacaatgaatgaacag

SEQ ID NO: 4308889 - DNA, 25 bp, Homo sapien
acccacatctccacaatgaatgaac

SEQ ID NO: 4308890 - DNA, 25 bp, Homo sapien
tgcagacataacgtagccaagccct

SEQ ID NO: 4308891 - DNA, 25 bp, Homo sapien
gagtgcatgctgtcaacgagtctac

SEQ ID NO: 4308892 - DNA, 25 bp, Homo sapien
tacaagaggtgaactcccaaggcct

SEQ ID NO: 4308893 - DNA, 25 bp, Homo sapien
cacagcagacggacaatgatcggga

SEQ ID NO: 4308894 - DNA, 25 bp, Homo sapien
tgtttgcgctttcgcagacccaccg

SEQ ID NO: 4308895 - DNA, 25 bp, Homo sapien
ccttacggctcgaggtgagctttca

SEQ ID NO: 4308896 - DNA, 25 bp, Homo sapien
ggtcctctctttttgtatgggagct

SEQ ID NO: 4308897 - DNA, 25 bp, Homo sapien
tgtccaccactcctgtttgcgcttt

SEQ ID NO: 4308898 - DNA, 25 bp, Homo sapien
cactcattttattgtccgagttagt

SEQ ID NO: 4308899 - DNA, 25 bp, Homo sapien
tcattttattgtccgagttagtcag

SEQ ID NO: 4308900 - DNA, 25 bp, Homo sapien
ttattgtccgagttagtcagagtca

SEQ ID NO: 4308901 - DNA, 25 bp, Homo sapien
tcaaaacactcattttattgtccga

SEQ ID NO: 4308902 - DNA, 25 bp, Homo sapien
ggagagtcgaagatacaatagaagg

SEQ ID NO: 4308903 - DNA, 25 bp, Homo sapien
atagaaggcaatggattcacgggtt

SEQ ID NO: 4308904 - DNA, 25 bp, Homo sapien
tagaaggcaatggattcacgggttt

SEQ ID NO: 4308905 - DNA, 25 bp, Homo sapien
gtcgaagatacaatagaaggcaatg

SEQ ID NO: 4308906 - DNA, 25 bp, Homo sapien
cttgaaggattgtggtctcttcatc

SEQ ID NO: 4308907 - DNA, 25 bp, Homo sapien
ctgacttgaaggattgtggtctctt

SEQ ID NO: 4308908 - DNA, 25 bp, Homo sapien
gacttgaaggattgtggtctcttca

SEQ ID NO: 4308909 - DNA, 25 bp, Homo sapien
tgaaggattgtggtctcttcatcac

SEQ ID NO: 4308910 - DNA, 25 bp, Homo sapien
tcccgtttatccaataccaccatcc

SEQ ID NO: 4308911 - DNA, 25 bp, Homo sapien
cttcccgtttatccaataccaccat

SEQ ID NO: 4308912 - DNA, 25 bp, Homo sapien
tgccaacacagcagttttcactact

SEQ ID NO: 4308913 - DNA, 25 bp, Homo sapien
ttcactactatgttcatccttcttc

SEQ ID NO: 4308914 - DNA, 25 bp, Homo sapien
agaacattttcgtcagttctttgca

SEQ ID NO: 4308915 - DNA, 25 bp, Homo sapien
gaacattttcgtcagttctttgcag

SEQ ID NO: 4308916 - DNA, 25 bp, Homo sapien
tccctgcttgctttttattatgcct

SEQ ID NO: 4308917 - DNA, 25 bp, Homo sapien
tcttggaagcaattagagccaaaat

SEQ ID NO: 4308918 - DNA, 25 bp, Homo sapien
gccccagaattgagtcagattctgt

SEQ ID NO: 4308919 - DNA, 25 bp, Homo sapien
ttgccccagaattgagtcagattct

SEQ ID NO: 4308920 - DNA, 25 bp, Homo sapien
tgtagttgctcttgtacaattaccg

SEQ ID NO: 4308921 - DNA, 25 bp, Homo sapien
gggtctgtagttgctcttgtacaat

SEQ ID NO: 4308922 - DNA, 25 bp, Homo sapien
tcttgtacaattaccgagaatataa

SEQ ID NO: 4308923 - DNA, 25 bp, Homo sapien
catcgtcattgcttcgtggggtctg

SEQ ID NO: 4308924 - DNA, 25 bp, Homo sapien
tcagcacgttcaatgtcttggaggc

SEQ ID NO: 4308925 - DNA, 25 bp, Homo sapien
gaggcattacccatcaagccagtgt

SEQ ID NO: 4308926 - DNA, 25 bp, Homo sapien
taattgatccagtatgaagtaagtc

SEQ ID NO: 4308927 - DNA, 25 bp, Homo sapien
tcctgtagcagatgagcactctggg

SEQ ID NO: 4308928 - DNA, 25 bp, Homo sapien
tcacaaaatgactgatatctctgtg

SEQ ID NO: 4308929 - DNA, 25 bp, Homo sapien
acaaaatgactgatatctctgtgag

SEQ ID NO: 4308930 - DNA, 25 bp, Homo sapien
cacaaaatgactgatatctctgtga

SEQ ID NO: 4308931 - DNA, 25 bp, Homo sapien
caaaatgactgatatctctgtgagt

SEQ ID NO: 4308932 - DNA, 25 bp, Homo sapien
tcaaaggaatttcactcagggccgc

SEQ ID NO: 4308933 - DNA, 25 bp, Homo sapien
tgtcggccatagacaacacaggtag

SEQ ID NO: 4308934 - DNA, 25 bp, Homo sapien
tttccagaggaagagtgtcggccat

SEQ ID NO: 4308935 - DNA, 25 bp, Homo sapien
gggatgcagacaccacatatatatc

SEQ ID NO: 4308936 - DNA, 25 bp, Homo sapien
tattctcttccattttctccctcat

SEQ ID NO: 4308937 - DNA, 25 bp, Homo sapien
caaaagaaaggctattctcttccat

SEQ ID NO: 4308938 - DNA, 25 bp, Homo sapien
aaaagaaaggctattctcttccatt

SEQ ID NO: 4308939 - DNA, 25 bp, Homo sapien
ggctattctcttccattttctccct

SEQ ID NO: 4308940 - DNA, 25 bp, Homo sapien
tgcacaagaacagctgaaagcagtt

SEQ ID NO: 4308941 - DNA, 25 bp, Homo sapien
tgaactttattggatgcaccttgct

SEQ ID NO: 4308942 - DNA, 25 bp, Homo sapien
taagaggcccgagatttcccaacat

SEQ ID NO: 4308943 - DNA, 25 bp, Homo sapien
cttgcttcccagaactgcagtaaag

SEQ ID NO: 4308944 - DNA, 25 bp, Homo sapien
gggcactactaagttctttgtgctg

SEQ ID NO: 4308945 - DNA, 25 bp, Homo sapien
ctactaagttctttgtgctgagctg

SEQ ID NO: 4308946 - DNA, 25 bp, Homo sapien
cactactaagttctttgtgctgagc

SEQ ID NO: 4308947 - DNA, 25 bp, Homo sapien
tactaagttctttgtgctgagctga

SEQ ID NO: 4308948 - DNA, 25 bp, Homo sapien
aacatagctaatatggtgtgatctg

SEQ ID NO: 4308949 - DNA, 25 bp, Homo sapien
acctccagatgccatatggtttaca

SEQ ID NO: 4308950 - DNA, 25 bp, Homo sapien
agctttgatgcagggactttgcaaa

SEQ ID NO: 4308951 - DNA, 25 bp, Homo sapien
aagtctgtggttaccttcctgattc

SEQ ID NO: 4308952 - DNA, 25 bp, Homo sapien
gtttgtttttctcctctgtgtacat

SEQ ID NO: 4308953 - DNA, 25 bp, Homo sapien
ctgccagcagcacccagctctgtgt

SEQ ID NO: 4308954 - DNA, 25 bp, Homo sapien
gcagcacccagctctgtgtttgttt

SEQ ID NO: 4308955 - DNA, 25 bp, Homo sapien
gccagcagcacccagctctgtgttt

SEQ ID NO: 4308956 - DNA, 25 bp, Homo sapien
tggtcagcacctaggaaaggtggct

SEQ ID NO: 4308957 - DNA, 25 bp, Homo sapien
agccctggtcagcacctaggaaagg

SEQ ID NO: 4308958 - DNA, 25 bp, Homo sapien
cacctaggaaaggtggctctatcat

SEQ ID NO: 4308959 - DNA, 25 bp, Homo sapien
tcagcacctaggaaaggtggctcta

SEQ ID NO: 4308960 - DNA, 25 bp, Homo sapien
taaggattgcggcatgtggttccct

SEQ ID NO: 4308961 - DNA, 25 bp, Homo sapien
atgtggttccctaaaatagaaagct

SEQ ID NO: 4308962 - DNA, 25 bp, Homo sapien
cacatttaaggattgcggcatgtgg

SEQ ID NO: 4308963 - DNA, 25 bp, Homo sapien
taagttttatcagaaactccacatt

SEQ ID NO: 4308964 - DNA, 25 bp, Homo sapien
gttgcaaattggcaaggaagactaa

SEQ ID NO: 4308965 - DNA, 25 bp, Homo sapien
cacgaaacaattgtcactctgtgac

SEQ ID NO: 4308966 - DNA, 25 bp, Homo sapien
caaggaagactaaaacaggttctcg

SEQ ID NO: 4308967 - DNA, 25 bp, Homo sapien
tctctgatgcaatttacacgaaaca

SEQ ID NO: 4308968 - DNA, 25 bp, Homo sapien
actgctcccgtgaagtccatcattt

SEQ ID NO: 4308969 - DNA, 25 bp, Homo sapien
ggcttcactgctcccgtgaagtcca

SEQ ID NO: 4308970 - DNA, 25 bp, Homo sapien
atcatttgttgaactaagggcttca

SEQ ID NO: 4308971 - DNA, 25 bp, Homo sapien
ttgttgaactaagggcttcactgct

SEQ ID NO: 4308972 - DNA, 25 bp, Homo sapien
gggacatagagtgaatgacagattt

SEQ ID NO: 4308973 - DNA, 25 bp, Homo sapien
ttgttttgcttgggtttatgcaaaa

SEQ ID NO: 4308974 - DNA, 25 bp, Homo sapien
tgttttgcttgggtttatgcaaaaa

SEQ ID NO: 4308975 - DNA, 25 bp, Homo sapien
ttgggacatagagtgaatgacagat

SEQ ID NO: 4308976 - DNA, 25 bp, Homo sapien
ttttgatacaatttcattatttgtc

SEQ ID NO: 4308977 - DNA, 25 bp, Homo sapien
ttgatacaatttcattatttgtcat

SEQ ID NO: 4308978 - DNA, 25 bp, Homo sapien
ttttctttttgatacaatttcatta

SEQ ID NO: 4308979 - DNA, 25 bp, Homo sapien
ctttttgatacaatttcattatttg

SEQ ID NO: 4308980 - DNA, 25 bp, Homo sapien
tctctcgtctgttgtgattttcttc

SEQ ID NO: 4308981 - DNA, 25 bp, Homo sapien
atctctcgtctgttgtgattttctt

SEQ ID NO: 4308982 - DNA, 25 bp, Homo sapien
tctgttccttaattggtctggtgtt

SEQ ID NO: 4308983 - DNA, 25 bp, Homo sapien
ggtctggtgttttctgaatataaaa

SEQ ID NO: 4308984 - DNA, 25 bp, Homo sapien
aattggtctggtgttttctgaatat

SEQ ID NO: 4308985 - DNA, 25 bp, Homo sapien
ctctgttccttaattggtctggtgt

SEQ ID NO: 4308986 - DNA, 25 bp, Homo sapien
ctgcattgatagggccatggtcttg

SEQ ID NO: 4308987 - DNA, 25 bp, Homo sapien
ccacgaactcagatttgcattccat

SEQ ID NO: 4308988 - DNA, 25 bp, Homo sapien
cattgatagggccatggtcttggtg

SEQ ID NO: 4308989 - DNA, 25 bp, Homo sapien
gggctgatgtccacgaactcagatt

SEQ ID NO: 4308990 - DNA, 25 bp, Homo sapien
ctccaggggagaattactgatgtgg

SEQ ID NO: 4308991 - DNA, 25 bp, Homo sapien
agtggtttcgatgtcatggtgtgca

SEQ ID NO: 4308992 - DNA, 25 bp, Homo sapien
tcatggtgtgcaatgagaagtgttg

SEQ ID NO: 4308993 - DNA, 25 bp, Homo sapien
tcagtgttggacaagaggagtggtt

SEQ ID NO: 4308994 - DNA, 25 bp, Homo sapien
gtaattagaagtggccgtgaccttg

SEQ ID NO: 4308995 - DNA, 25 bp, Homo sapien
cattagaattgtaattagaagtggc

SEQ ID NO: 4308996 - DNA, 25 bp, Homo sapien
aaaattaccaagtaatgatctcctg

SEQ ID NO: 4308997 - DNA, 25 bp, Homo sapien
aaacctctaagtttcctctactcat

SEQ ID NO: 4308998 - DNA, 25 bp, Homo sapien
tgccctctcttgatcttgaaatatt

SEQ ID NO: 4308999 - DNA, 25 bp, Homo sapien
gccctctcttgatcttgaaatattt

SEQ ID NO: 4309000 - DNA, 25 bp, Homo sapien
tcatcagtttcctcggacaatttct

SEQ ID NO: 4309001 - DNA, 25 bp, Homo sapien
gtttcctcggacaatttcttatcat

SEQ ID NO: 4309002 - DNA, 25 bp, Homo sapien
gtggaaatattcttatctccagaca

SEQ ID NO: 4309003 - DNA, 25 bp, Homo sapien
tgttgtggaaatattcttatctcca

SEQ ID NO: 4309004 - DNA, 25 bp, Homo sapien
cagacacaaagatatttatatgaaa

SEQ ID NO: 4309005 - DNA, 25 bp, Homo sapien
tgtggaaatattcttatctccagac

SEQ ID NO: 4309006 - DNA, 25 bp, Homo sapien
gagccagttttttgactggacaact

SEQ ID NO: 4309007 - DNA, 25 bp, Homo sapien
caagtgtgatctattttataaagcc

SEQ ID NO: 4309008 - DNA, 25 bp, Homo sapien
aagaccagtgaataactgtcactga

SEQ ID NO: 4309009 - DNA, 25 bp, Homo sapien
gacttggagccagttttttgactgg

SEQ ID NO: 4309010 - DNA, 25 bp, Homo sapien
gctcttcggcataacgtaaacacag

SEQ ID NO: 4309011 - DNA, 25 bp, Homo sapien
cataacgtaaacacagcctgcaagt

SEQ ID NO: 4309012 - DNA, 25 bp, Homo sapien
ttttgcttcagctcttcggcataac

SEQ ID NO: 4309013 - DNA, 25 bp, Homo sapien
catctgggtgatgaattggaatttc

SEQ ID NO: 4309014 - DNA, 25 bp, Homo sapien
tagagataaatgggagagttggaaa

SEQ ID NO: 4309015 - DNA, 25 bp, Homo sapien
ctagagataaatgggagagttggaa

SEQ ID NO: 4309016 - DNA, 25 bp, Homo sapien
cactaaggaagtctggtatgcattt

SEQ ID NO: 4309017 - DNA, 25 bp, Homo sapien
tgggccagaattctccctgtacaag

SEQ ID NO: 4309018 - DNA, 25 bp, Homo sapien
atataagaggaaatgaatactgtga

SEQ ID NO: 4309019 - DNA, 25 bp, Homo sapien
tacaagtcactgtctggaccactaa

SEQ ID NO: 4309020 - DNA, 25 bp, Homo sapien
ccccgacatgagcacaagtgaaaac

SEQ ID NO: 4309021 - DNA, 25 bp, Homo sapien
ttttcactgtaatgttcttggtatc

SEQ ID NO: 4309022 - DNA, 25 bp, Homo sapien
gctgctttgtgaataccatctctaa

SEQ ID NO: 4309023 - DNA, 25 bp, Homo sapien
taaatcatgcatgctctgtcctttc

SEQ ID NO: 4309024 - DNA, 25 bp, Homo sapien
cattggttggttgttttaatttcat

SEQ ID NO: 4309025 - DNA, 25 bp, Homo sapien
gatgacccacattggttggttgttt

SEQ ID NO: 4309026 - DNA, 25 bp, Homo sapien
tgaggatcaatgaggctcctctttc

SEQ ID NO: 4309027 - DNA, 25 bp, Homo sapien
tgttgatgacccacattggttggtt

SEQ ID NO: 4309028 - DNA, 25 bp, Homo sapien
tccagccggctcttgcctccttggt

SEQ ID NO: 4309029 - DNA, 25 bp, Homo sapien
gggtaatacttcaccgatagagcac

SEQ ID NO: 4309030 - DNA, 25 bp, Homo sapien
tcaagaatccagccggctcttgcct

SEQ ID NO: 4309031 - DNA, 25 bp, Homo sapien
gatagagcaccgttacccgtgctgc

SEQ ID NO: 4309032 - DNA, 25 bp, Homo sapien
acattgaagagccgttcctgggctc

SEQ ID NO: 4309033 - DNA, 25 bp, Homo sapien
gcacacattgaagagccgttcctgg

SEQ ID NO: 4309034 - DNA, 25 bp, Homo sapien
acacattgaagagccgttcctgggc

SEQ ID NO: 4309035 - DNA, 25 bp, Homo sapien
cacacattgaagagccgttcctggg

SEQ ID NO: 4309036 - DNA, 25 bp, Homo sapien
acccacagattgagtgggaaatact

SEQ ID NO: 4309037 - DNA, 25 bp, Homo sapien
aagtcctcgtagcaacttcacaacc

SEQ ID NO: 4309038 - DNA, 25 bp, Homo sapien
aaagtcctcgtagcaacttcacaac

SEQ ID NO: 4309039 - DNA, 25 bp, Homo sapien
aattagcacggtaaacagctggctc

SEQ ID NO: 4309040 - DNA, 25 bp, Homo sapien
tttcattttgtttcgaattagcacg

SEQ ID NO: 4309041 - DNA, 25 bp, Homo sapien
cattttgtttcgaattagcacggta

SEQ ID NO: 4309042 - DNA, 25 bp, Homo sapien
gtttcgaattagcacggtaaacagc

SEQ ID NO: 4309043 - DNA, 25 bp, Homo sapien
ttgtcagctaccatcccattaatag

SEQ ID NO: 4309044 - DNA, 25 bp, Homo sapien
ttaatagcatccaataccacttccc

SEQ ID NO: 4309045 - DNA, 25 bp, Homo sapien
gacatttttgtcagctaccatccca

SEQ ID NO: 4309046 - DNA, 25 bp, Homo sapien
taccatcccattaatagcatccaat

SEQ ID NO: 4309047 - DNA, 25 bp, Homo sapien
gattctgacccatgagcataagagg

SEQ ID NO: 4309048 - DNA, 25 bp, Homo sapien
tcggacggattctgacccatgagca

SEQ ID NO: 4309049 - DNA, 25 bp, Homo sapien
gcataagaggtgccttgatacccat

SEQ ID NO: 4309050 - DNA, 25 bp, Homo sapien
tgtagtcggacggattctgacccat

SEQ ID NO: 4309051 - DNA, 25 bp, Homo sapien
tacatgtaggaagcatagacgtctc

SEQ ID NO: 4309052 - DNA, 25 bp, Homo sapien
agtgatgaaaatttgtattccacaa

SEQ ID NO: 4309053 - DNA, 25 bp, Homo sapien
tgtaggaagcatagacgtctctctt

SEQ ID NO: 4309054 - DNA, 25 bp, Homo sapien
tgtattccacaatcgactccgaagg

SEQ ID NO: 4309055 - DNA, 25 bp, Homo sapien
gaacctggtgtttggaaaatgtgaa

SEQ ID NO: 4309056 - DNA, 25 bp, Homo sapien
tctcactatcttggaacagatcacc

SEQ ID NO: 4309057 - DNA, 25 bp, Homo sapien
gcccaaggtggccagtttttctcac

SEQ ID NO: 4309058 - DNA, 25 bp, Homo sapien
ttttctcccaagtatgcccaaggtg

SEQ ID NO: 4309059 - DNA, 25 bp, Homo sapien
ggaaagcccatactatgaaattctt

SEQ ID NO: 4309060 - DNA, 25 bp, Homo sapien
gcatgagacagtggcacctgggaac

SEQ ID NO: 4309061 - DNA, 25 bp, Homo sapien
ctcctagtctgcagtagtaagcagg

SEQ ID NO: 4309062 - DNA, 25 bp, Homo sapien
cctgggaacagagtctgactgaggc

SEQ ID NO: 4309063 - DNA, 25 bp, Homo sapien
tcatgattcattatttcctcctctt

SEQ ID NO: 4309064 - DNA, 25 bp, Homo sapien
atgattcattatttcctcctctttc

SEQ ID NO: 4309065 - DNA, 25 bp, Homo sapien
ctctttctttgttaaatggcctaat

SEQ ID NO: 4309066 - DNA, 25 bp, Homo sapien
ctcctctttctttgttaaatggcct

SEQ ID NO: 4309067 - DNA, 25 bp, Homo sapien
tccatactccctaagcagtagtttt

SEQ ID NO: 4309068 - DNA, 25 bp, Homo sapien
ttatcaatggctttgcatatggttc

SEQ ID NO: 4309069 - DNA, 25 bp, Homo sapien
tatggttccaaagtagttcttataa

SEQ ID NO: 4309070 - DNA, 25 bp, Homo sapien
tgattctggtaaggctggcaaatat

SEQ ID NO: 4309071 - DNA, 25 bp, Homo sapien
tctggtaaggctggcaaatatatgt

SEQ ID NO: 4309072 - DNA, 25 bp, Homo sapien
caatgtgattctggtaaggctggca

SEQ ID NO: 4309073 - DNA, 25 bp, Homo sapien
ccgcactcaatgtgattctggtaag

SEQ ID NO: 4309074 - DNA, 25 bp, Homo sapien
tggaagacacacccttccccactgt

SEQ ID NO: 4309075 - DNA, 25 bp, Homo sapien
ggccacttggaagacacacccttcc

SEQ ID NO: 4309076 - DNA, 25 bp, Homo sapien
cacacccttccccactgttgttggt

SEQ ID NO: 4309077 - DNA, 25 bp, Homo sapien
acccttccccactgttgttggtcat

SEQ ID NO: 4309078 - DNA, 25 bp, Homo sapien
tttagtctcccttcttggctttcca

SEQ ID NO: 4309079 - DNA, 25 bp, Homo sapien
ctctgtttcttgtttccaacttggg

SEQ ID NO: 4309080 - DNA, 25 bp, Homo sapien
ttagtctcccttcttggctttccat

SEQ ID NO: 4309081 - DNA, 25 bp, Homo sapien
tcctgcttgagaacaattcctgaaa

SEQ ID NO: 4309082 - DNA, 25 bp, Homo sapien
taatttaatgtttgagtaccggcac

SEQ ID NO: 4309083 - DNA, 25 bp, Homo sapien
gcctcgtttatgagagtgacaagcc

SEQ ID NO: 4309084 - DNA, 25 bp, Homo sapien
cattaaatgaaggtttgagacaccc

SEQ ID NO: 4309085 - DNA, 25 bp, Homo sapien
ggatgactaatcttgcagatgtgaa

SEQ ID NO: 4309086 - DNA, 25 bp, Homo sapien
agaaacagcacatttcctaaatgca

SEQ ID NO: 4309087 - DNA, 25 bp, Homo sapien
ttgatgagaatattatagacggtgc

SEQ ID NO: 4309088 - DNA, 25 bp, Homo sapien
tctggaatatttaggtactgaagtt

SEQ ID NO: 4309089 - DNA, 25 bp, Homo sapien
tactaccagcgtgaacaaccagcat

SEQ ID NO: 4309090 - DNA, 25 bp, Homo sapien
tacaagacggactctagggacaggt

SEQ ID NO: 4309091 - DNA, 25 bp, Homo sapien
tactggcagcacatatacatgaagc

SEQ ID NO: 4309092 - DNA, 25 bp, Homo sapien
agattgcgtgagctacactgggccc

SEQ ID NO: 4309093 - DNA, 25 bp, Homo sapien
tactgctgcgtggaatgaatcggca

SEQ ID NO: 4309094 - DNA, 25 bp, Homo sapien
cacgtctgtgtgagagggccttcat

SEQ ID NO: 4309095 - DNA, 25 bp, Homo sapien
actcagtttagaagcacagggcccc

SEQ ID NO: 4309096 - DNA, 25 bp, Homo sapien
cttaggtgcacaagctctgtcgggc

SEQ ID NO: 4309097 - DNA, 25 bp, Homo sapien
tcactccatgtcctcgtttactggt

SEQ ID NO: 4309098 - DNA, 25 bp, Homo sapien
tcgtttactggttcatcttcgtaat

SEQ ID NO: 4309099 - DNA, 25 bp, Homo sapien
gggctcttctttgacgtgtacagga

SEQ ID NO: 4309100 - DNA, 25 bp, Homo sapien
ttcgtaatctctgtcatggtcaaaa

SEQ ID NO: 4309101 - DNA, 25 bp, Homo sapien
ttcagtgagggtacttcccagccca

SEQ ID NO: 4309102 - DNA, 25 bp, Homo sapien
ggttcagtgagggtacttcccagcc

SEQ ID NO: 4309103 - DNA, 25 bp, Homo sapien
gaggttcagtgagggtacttcccag

SEQ ID NO: 4309104 - DNA, 25 bp, Homo sapien
gttcagtgagggtacttcccagccc

SEQ ID NO: 4309105 - DNA, 25 bp, Homo sapien
cagcacagagacagacggaacattt

SEQ ID NO: 4309106 - DNA, 25 bp, Homo sapien
tattgttaccattagccacacgtgg

SEQ ID NO: 4309107 - DNA, 25 bp, Homo sapien
gactagcggttaattctggccagca

SEQ ID NO: 4309108 - DNA, 25 bp, Homo sapien
cagtttctgagttgtgctagccaca

SEQ ID NO: 4309109 - DNA, 25 bp, Homo sapien
ctgcgcccggctgctaaaaaaataa

SEQ ID NO: 4309110 - DNA, 25 bp, Homo sapien
cattttatgtatggctctccagcta

SEQ ID NO: 4309111 - DNA, 25 bp, Homo sapien
tgtatggctctccagctattttatt

SEQ ID NO: 4309112 - DNA, 25 bp, Homo sapien
tgtagcaaagttgcattacattaca

SEQ ID NO: 4309113 - DNA, 25 bp, Homo sapien
tgggtgatacagtaagacccctatc

SEQ ID NO: 4309114 - DNA, 25 bp, Homo sapien
tgtgactgcatgtcacacacctgtg

SEQ ID NO: 4309115 - DNA, 25 bp, Homo sapien
cacctgtgaaccagctctgctaaaa

SEQ ID NO: 4309116 - DNA, 25 bp, Homo sapien
cagtgtccttttaggcatgagatcc

SEQ ID NO: 4309117 - DNA, 25 bp, Homo sapien
ggacatttcttgatgccggcagata

SEQ ID NO: 4309118 - DNA, 25 bp, Homo sapien
taatgatcctgtcatgcctgtaggc

SEQ ID NO: 4309119 - DNA, 25 bp, Homo sapien
tatttactatccacaagacagaggt

SEQ ID NO: 4309120 - DNA, 25 bp, Homo sapien
ggctagatctactgtgtgaccacct

SEQ ID NO: 4309121 - DNA, 25 bp, Homo sapien
gaagttagggctgtgtatgatgcac

SEQ ID NO: 4309122 - DNA, 25 bp, Homo sapien
ggaagttagggctgtgtatgatgca

SEQ ID NO: 4309123 - DNA, 25 bp, Homo sapien
tggaagttagggctgtgtatgatgc

SEQ ID NO: 4309124 - DNA, 25 bp, Homo sapien
ctggaagttagggctgtgtatgatg

SEQ ID NO: 4309125 - DNA, 25 bp, Homo sapien
acatctgagtaattcctttgtttag

SEQ ID NO: 4309126 - DNA, 25 bp, Homo sapien
cctacttccgaaagggctaccgctg

SEQ ID NO: 4309127 - DNA, 25 bp, Homo sapien
gaataactgtgtgcaaaaccacaca

SEQ ID NO: 4309128 - DNA, 25 bp, Homo sapien
tccgaaagggctaccgctgaataac

SEQ ID NO: 4309129 - DNA, 25 bp, Homo sapien
aacaaggtccttcaagccgtgccgt

SEQ ID NO: 4309130 - DNA, 25 bp, Homo sapien
tattacacagatagcaggcgcaggg

SEQ ID NO: 4309131 - DNA, 25 bp, Homo sapien
cgaacgaaacgtagtggtatctgac

SEQ ID NO: 4309132 - DNA, 25 bp, Homo sapien
aacactcaatattagctaggccgcc

SEQ ID NO: 4309133 - DNA, 25 bp, Homo sapien
ggtatgctccattgccccgttcagc

SEQ ID NO: 4309134 - DNA, 25 bp, Homo sapien
tgcgctggctaagttgcccagagtg

SEQ ID NO: 4309135 - DNA, 25 bp, Homo sapien
gttggtatgctccattgccccgttc

SEQ ID NO: 4309136 - DNA, 25 bp, Homo sapien
cgttcagctcttcccgtattgcgct

SEQ ID NO: 4309137 - DNA, 25 bp, Homo sapien
ggaagcggtagtgtatagaggtata

SEQ ID NO: 4309138 - DNA, 25 bp, Homo sapien
gagttaattgtagcatggctggcaa

SEQ ID NO: 4309139 - DNA, 25 bp, Homo sapien
tatgggtgtactcgataatcttcag

SEQ ID NO: 4309140 - DNA, 25 bp, Homo sapien
taaaaacgactcgtggcacctgtcc

SEQ ID NO: 4309141 - DNA, 25 bp, Homo sapien
cacagggtatgtaagacaaggaaac

SEQ ID NO: 4309142 - DNA, 25 bp, Homo sapien
taatggactgtttcaaagctcggcc

SEQ ID NO: 4309143 - DNA, 25 bp, Homo sapien
gaactctggcaaagggaagctctaa

SEQ ID NO: 4309144 - DNA, 25 bp, Homo sapien
tgtacaaaccgcaaagccagggctt

SEQ ID NO: 4309145 - DNA, 25 bp, Homo sapien
tcatccaggtggtgattacgaccca

SEQ ID NO: 4309146 - DNA, 25 bp, Homo sapien
gataagctctcataagacaatttca

SEQ ID NO: 4309147 - DNA, 25 bp, Homo sapien
caaggtcagaatgtggcaaaagtgg

SEQ ID NO: 4309148 - DNA, 25 bp, Homo sapien
cttttatctgagagaggtgtgacca

SEQ ID NO: 4309149 - DNA, 25 bp, Homo sapien
gaccactgttgtctcagtcacagaa

SEQ ID NO: 4309150 - DNA, 25 bp, Homo sapien
tgatcagagcaacccacccaaggtt

SEQ ID NO: 4309151 - DNA, 25 bp, Homo sapien
gctgcagagagatcccagtgcctga

SEQ ID NO: 4309152 - DNA, 25 bp, Homo sapien
gatcatagaacatgggctgagaccc

SEQ ID NO: 4309153 - DNA, 25 bp, Homo sapien
taagtgatgaaaaccagccttgtcc

SEQ ID NO: 4309154 - DNA, 25 bp, Homo sapien
tagaaggtcatgtgacgcagtggcc

SEQ ID NO: 4309155 - DNA, 25 bp, Homo sapien
ctctgctgcatattcgggacggccg

SEQ ID NO: 4309156 - DNA, 25 bp, Homo sapien
gggtggtaatctcgctcctgctcaa

SEQ ID NO: 4309157 - DNA, 25 bp, Homo sapien
ggaccactggccaaaaggatactgc

SEQ ID NO: 4309158 - DNA, 25 bp, Homo sapien
tgcagtaggcgtggctgctctgcat

SEQ ID NO: 4309159 - DNA, 25 bp, Homo sapien
ctgcattgagaggtgtgcagtaggc

SEQ ID NO: 4309160 - DNA, 25 bp, Homo sapien
taaagctgcattgagaggtgtgcag

SEQ ID NO: 4309161 - DNA, 25 bp, Homo sapien
ctgtaaagctgcattgagaggtgtg

SEQ ID NO: 4309162 - DNA, 25 bp, Homo sapien
cagaaaatctctagcctcgtaagga

SEQ ID NO: 4309163 - DNA, 25 bp, Homo sapien
taagcttgctggtgcccttccaaat

SEQ ID NO: 4309164 - DNA, 25 bp, Homo sapien
taaggaatatccacaaggcacgttt

SEQ ID NO: 4309165 - DNA, 25 bp, Homo sapien
ttacagtgactgctagagggatggc

SEQ ID NO: 4309166 - DNA, 25 bp, Homo sapien
caagctcgtcaaagttttcatcggg

SEQ ID NO: 4309167 - DNA, 25 bp, Homo sapien
caaaaggacccaaactcatcctcta

SEQ ID NO: 4309168 - DNA, 25 bp, Homo sapien
gcagtatttgcgaggacggcctcgt

SEQ ID NO: 4309169 - DNA, 25 bp, Homo sapien
gcctcgttgaatatggcggccacgt

SEQ ID NO: 4309170 - DNA, 25 bp, Homo sapien
cagtgagaggttggtgcgaatggca

SEQ ID NO: 4309171 - DNA, 25 bp, Homo sapien
cacttatgcagtgagaggttggtgc

SEQ ID NO: 4309172 - DNA, 25 bp, Homo sapien
aagcacttatgcagtgagaggttgg

SEQ ID NO: 4309173 - DNA, 25 bp, Homo sapien
gtgagaggttggtgcgaatggcacc

SEQ ID NO: 4309174 - DNA, 25 bp, Homo sapien
caaaggagatggagtggcaacaaaa

SEQ ID NO: 4309175 - DNA, 25 bp, Homo sapien
aggagatggagtggcaacaaaagga

SEQ ID NO: 4309176 - DNA, 25 bp, Homo sapien
cagcaaaggagatggagtggcaaca

SEQ ID NO: 4309177 - DNA, 25 bp, Homo sapien
ctgggataggagcagcagcaaagga

SEQ ID NO: 4309178 - DNA, 25 bp, Homo sapien
ccttaactgagacaacgtgaaacca

SEQ ID NO: 4309179 - DNA, 25 bp, Homo sapien
tgcattgccacctaaaagctactag

SEQ ID NO: 4309180 - DNA, 25 bp, Homo sapien
caagctaggctaagaagttcaaaca

SEQ ID NO: 4309181 - DNA, 25 bp, Homo sapien
tgtgatgcaacaaagaccagcaagc

SEQ ID NO: 4309182 - DNA, 25 bp, Homo sapien
tgtggccttcgtttttggaattcta

SEQ ID NO: 4309183 - DNA, 25 bp, Homo sapien
cttgtgaagactaagattatgacgc

SEQ ID NO: 4309184 - DNA, 25 bp, Homo sapien
aagactaagattatgacgcactgca

SEQ ID NO: 4309185 - DNA, 25 bp, Homo sapien
actgtccatactgcccctttaacgt

SEQ ID NO: 4309186 - DNA, 25 bp, Homo sapien
tgaagactaagattatgacgcactg

SEQ ID NO: 4309187 - DNA, 25 bp, Homo sapien
ctgcagcaagtataaaagagagaac

SEQ ID NO: 4309188 - DNA, 25 bp, Homo sapien
cgtggaggaccttctcatggttaag

SEQ ID NO: 4309189 - DNA, 25 bp, Homo sapien
taaaaccatccccaagagctgtagc

SEQ ID NO: 4309190 - DNA, 25 bp, Homo sapien
ggcattttcgtctagtctctggtaa

SEQ ID NO: 4309191 - DNA, 25 bp, Homo sapien
gcatacaagcccaaaataggttcca

SEQ ID NO: 4309192 - DNA, 25 bp, Homo sapien
atccagactcaacgctggacatgaa

SEQ ID NO: 4309193 - DNA, 25 bp, Homo sapien
cagactcaacgctggacatgaagac

SEQ ID NO: 4309194 - DNA, 25 bp, Homo sapien
ggatccagactcaacgctggacatg

SEQ ID NO: 4309195 - DNA, 25 bp, Homo sapien
ccagactcaacgctggacatgaaga

SEQ ID NO: 4309196 - DNA, 25 bp, Homo sapien
gaaaatgtctgcctcatgcttcgac

SEQ ID NO: 4309197 - DNA, 25 bp, Homo sapien
gcccaaaggcatacaatagaaggtc

SEQ ID NO: 4309198 - DNA, 25 bp, Homo sapien
taagcagaaagcgacgagaagtcaa

SEQ ID NO: 4309199 - DNA, 25 bp, Homo sapien
gggccataatggatattcacagctc

SEQ ID NO: 4309200 - DNA, 25 bp, Homo sapien
caaacattcgtgtgaaccagttata

SEQ ID NO: 4309201 - DNA, 25 bp, Homo sapien
ctcatttagtgttagctgcttttct

SEQ ID NO: 4309202 - DNA, 25 bp, Homo sapien
gccgcgttgcgtcggaagtaagcaa

SEQ ID NO: 4309203 - DNA, 25 bp, Homo sapien
gcttttctggagattcgagaatggc

SEQ ID NO: 4309204 - DNA, 25 bp, Homo sapien
catatgtaaatggtggtctaacttc

SEQ ID NO: 4309205 - DNA, 25 bp, Homo sapien
gatgcatatgtaaatggtggtctaa

SEQ ID NO: 4309206 - DNA, 25 bp, Homo sapien
taacttctgcgttcttataaaattc

SEQ ID NO: 4309207 - DNA, 25 bp, Homo sapien
tggtctaacttctgcgttcttataa

SEQ ID NO: 4309208 - DNA, 25 bp, Homo sapien
tgtggagaagcctccgatgcggact

SEQ ID NO: 4309209 - DNA, 25 bp, Homo sapien
gagagtgacacttgataccagattc

SEQ ID NO: 4309210 - DNA, 25 bp, Homo sapien
tttgtctgagtaccgcctgcggatg

SEQ ID NO: 4309211 - DNA, 25 bp, Homo sapien
tgggtcccaccgtgtgcatgctggt

SEQ ID NO: 4309212 - DNA, 25 bp, Homo sapien
ctgacacacatttgcaaactaagtg

SEQ ID NO: 4309213 - DNA, 25 bp, Homo sapien
gcagatgccatgagcgggtttttct

SEQ ID NO: 4309214 - DNA, 25 bp, Homo sapien
caaactaagtgtgaacagttcagag

SEQ ID NO: 4309215 - DNA, 25 bp, Homo sapien
ttttctctataatgttggaaacctg

SEQ ID NO: 4309216 - DNA, 25 bp, Homo sapien
tgacctcttcttcacctcgggcctt

SEQ ID NO: 4309217 - DNA, 25 bp, Homo sapien
gggctgacctcttcttcacctcggg

SEQ ID NO: 4309218 - DNA, 25 bp, Homo sapien
ctgagaagccaaggggggaagagtt

SEQ ID NO: 4309219 - DNA, 25 bp, Homo sapien
tcttcttcacctcgggccttaatca

SEQ ID NO: 4309220 - DNA, 25 bp, Homo sapien
cttgtaagtattcccataagaactc

SEQ ID NO: 4309221 - DNA, 25 bp, Homo sapien
taaagatgatgagtcactcacatta

SEQ ID NO: 4309222 - DNA, 25 bp, Homo sapien
tgtaaacccctgacagaaacagact

SEQ ID NO: 4309223 - DNA, 25 bp, Homo sapien
tgctcttgcctcacatgaaaacaga

SEQ ID NO: 4309224 - DNA, 25 bp, Homo sapien
tagtagggactttcgggctcacaga

SEQ ID NO: 4309225 - DNA, 25 bp, Homo sapien
caactgcgtagtagggactttcggg

SEQ ID NO: 4309226 - DNA, 25 bp, Homo sapien
caaacaccaagggacacaactgcgt

SEQ ID NO: 4309227 - DNA, 25 bp, Homo sapien
ttcgggctcacagaacttgtttttc

SEQ ID NO: 4309228 - DNA, 25 bp, Homo sapien
gggcaggacaatgggtggcagcctt

SEQ ID NO: 4309229 - DNA, 25 bp, Homo sapien
agggacgttaccaggccgtgcggag

SEQ ID NO: 4309230 - DNA, 25 bp, Homo sapien
ttaccaggccgtgcggagggcagga

SEQ ID NO: 4309231 - DNA, 25 bp, Homo sapien
atcactgagttcagagacggccttt

SEQ ID NO: 4309232 - DNA, 25 bp, Homo sapien
tcgtcaagaagaatataccacctac

SEQ ID NO: 4309233 - DNA, 25 bp, Homo sapien
tacactgtaattacgtgcccaccaa

SEQ ID NO: 4309234 - DNA, 25 bp, Homo sapien
tttgtgtattgtgcctaagaatccc

SEQ ID NO: 4309235 - DNA, 25 bp, Homo sapien
aactctaaagcaaggacccaggcag

SEQ ID NO: 4309236 - DNA, 25 bp, Homo sapien
gaaaagaaggcaggttcactccgac

SEQ ID NO: 4309237 - DNA, 25 bp, Homo sapien
caatggtccttttgtggcccacagg

SEQ ID NO: 4309238 - DNA, 25 bp, Homo sapien
gacaatggcaaacctcacacagacg

SEQ ID NO: 4309239 - DNA, 25 bp, Homo sapien
gctgctctagctgtcaaaggtttga

SEQ ID NO: 4309240 - DNA, 25 bp, Homo sapien
tccccttggtggggatcaatactta

SEQ ID NO: 4309241 - DNA, 25 bp, Homo sapien
gctgaggggcggctttgggttctgt

SEQ ID NO: 4309242 - DNA, 25 bp, Homo sapien
gaggggcggctttgggttctgtaga

SEQ ID NO: 4309243 - DNA, 25 bp, Homo sapien
ggctttgggttctgtagacttcaca

SEQ ID NO: 4309244 - DNA, 25 bp, Homo sapien
ggcggctttgggttctgtagacttc

SEQ ID NO: 4309245 - DNA, 25 bp, Homo sapien
catggcttgcaggcgttctttgtct

SEQ ID NO: 4309246 - DNA, 25 bp, Homo sapien
tggcaagaagaaaatgctttgttat

SEQ ID NO: 4309247 - DNA, 25 bp, Homo sapien
tttctctgaataaagatgcatggct

SEQ ID NO: 4309248 - DNA, 25 bp, Homo sapien
tgttatttctctgaataaagatgca

SEQ ID NO: 4309249 - DNA, 25 bp, Homo sapien
ttatttctctgaataaagatgcatg

SEQ ID NO: 4309250 - DNA, 25 bp, Homo sapien
gatttctcaacacaagatgcattag

SEQ ID NO: 4309251 - DNA, 25 bp, Homo sapien
cgaagtaaccggaggtgttggtgtg

SEQ ID NO: 4309252 - DNA, 25 bp, Homo sapien
cattgccaaactcgaagtaaccgga

SEQ ID NO: 4309253 - DNA, 25 bp, Homo sapien
gatgcattagactttaactgggaag

SEQ ID NO: 4309254 - DNA, 25 bp, Homo sapien
catcaattttcacggcatcctttca

SEQ ID NO: 4309255 - DNA, 25 bp, Homo sapien
gagacattcaatccgaaggcccact

SEQ ID NO: 4309256 - DNA, 25 bp, Homo sapien
taatactaactgctccttccaaaag

SEQ ID NO: 4309257 - DNA, 25 bp, Homo sapien
tcccagtgggtatggaatgagtatc

SEQ ID NO: 4309258 - DNA, 25 bp, Homo sapien
ctttggccgaaataggtcatctcct

SEQ ID NO: 4309259 - DNA, 25 bp, Homo sapien
caatttggcagttctcactcgtgag

SEQ ID NO: 4309260 - DNA, 25 bp, Homo sapien
gaatttgtgtattgcacccgagcca

SEQ ID NO: 4309261 - DNA, 25 bp, Homo sapien
caatggagtttgcagttgggctaac

SEQ ID NO: 4309262 - DNA, 25 bp, Homo sapien
tcaaacagggttagacagggccaaa

SEQ ID NO: 4309263 - DNA, 25 bp, Homo sapien
tctaggaggctggtgtgattacaaa

SEQ ID NO: 4309264 - DNA, 25 bp, Homo sapien
gaggccgctagtataggaactgtcc

SEQ ID NO: 4309265 - DNA, 25 bp, Homo sapien
tgtgcagggcatatcaggaggctct

SEQ ID NO: 4309266 - DNA, 25 bp, Homo sapien
tgccaggcagatcaaccttggtttg

SEQ ID NO: 4309267 - DNA, 25 bp, Homo sapien
tcgcctgccaggcagatcaaccttg

SEQ ID NO: 4309268 - DNA, 25 bp, Homo sapien
cccgtcgcctgccaggcagatcaac

SEQ ID NO: 4309269 - DNA, 25 bp, Homo sapien
ctgaggggttgtagggagcctgtcc

SEQ ID NO: 4309270 - DNA, 25 bp, Homo sapien
ccccgatgacacatgatgaaaacat

SEQ ID NO: 4309271 - DNA, 25 bp, Homo sapien
tgccccgatgacacatgatgaaaac

SEQ ID NO: 4309272 - DNA, 25 bp, Homo sapien
gccccgatgacacatgatgaaaaca

SEQ ID NO: 4309273 - DNA, 25 bp, Homo sapien
cccgatgacacatgatgaaaacatc

SEQ ID NO: 4309274 - DNA, 25 bp, Homo sapien
cccaatatcgcggaagcttcaagtg

SEQ ID NO: 4309275 - DNA, 25 bp, Homo sapien
tcatatgaatgtcccacctaagagg

SEQ ID NO: 4309276 - DNA, 25 bp, Homo sapien
aaagccatgtatgtcatcgacccaa

SEQ ID NO: 4309277 - DNA, 25 bp, Homo sapien
tgtttccttacaatcctggccatgg

SEQ ID NO: 4309278 - DNA, 25 bp, Homo sapien
caggggagatttgtcctcctactct

SEQ ID NO: 4309279 - DNA, 25 bp, Homo sapien
gatttgtcctcctactctaatacag

SEQ ID NO: 4309280 - DNA, 25 bp, Homo sapien
tacagtgatcatccccctttggaaa

SEQ ID NO: 4309281 - DNA, 25 bp, Homo sapien
ctactctaatacagtgatcatcccc

SEQ ID NO: 4309282 - DNA, 25 bp, Homo sapien
tgacttaactcagtaaaattccaaa

SEQ ID NO: 4309283 - DNA, 25 bp, Homo sapien
tgtacttagcctagggctctccata

SEQ ID NO: 4309284 - DNA, 25 bp, Homo sapien
taattatcttctgtacttagcctag

SEQ ID NO: 4309285 - DNA, 25 bp, Homo sapien
tctccatatatctcagcatcgctgt

SEQ ID NO: 4309286 - DNA, 25 bp, Homo sapien
ccagcgcatgctcactgttgagatg

SEQ ID NO: 4309287 - DNA, 25 bp, Homo sapien
tgtacttctatcgtccagcgcatgc

SEQ ID NO: 4309288 - DNA, 25 bp, Homo sapien
tgcatttgtactctacattgggctg

SEQ ID NO: 4309289 - DNA, 25 bp, Homo sapien
taactgctgtacaacctgcatttgt

SEQ ID NO: 4309290 - DNA, 25 bp, Homo sapien
tcagaaatcgaggttcaagagatcc

SEQ ID NO: 4309291 - DNA, 25 bp, Homo sapien
aaccacgtgggtaatcagtgcccca

SEQ ID NO: 4309292 - DNA, 25 bp, Homo sapien
aagagacttgcctcaaaccacgtgg

SEQ ID NO: 4309293 - DNA, 25 bp, Homo sapien
taagaacccaaacgacatgccagat

SEQ ID NO: 4309294 - DNA, 25 bp, Homo sapien
gctggctgcggaaaaacaagatcat

SEQ ID NO: 4309295 - DNA, 25 bp, Homo sapien
gagagacggagagcatttcaacagc

SEQ ID NO: 4309296 - DNA, 25 bp, Homo sapien
gataatgaaacgcagtgagagcctg

SEQ ID NO: 4309297 - DNA, 25 bp, Homo sapien
taaataagtagcttgccggcagaca

SEQ ID NO: 4309298 - DNA, 25 bp, Homo sapien
tattaataatgtcctcactacccag

SEQ ID NO: 4309299 - DNA, 25 bp, Homo sapien
taaccaggctgtataatgcagcagt

SEQ ID NO: 4309300 - DNA, 25 bp, Homo sapien
ggctcagatgacatgtggctagttc

SEQ ID NO: 4309301 - DNA, 25 bp, Homo sapien
cacatgtgctgatactgaggctcag

SEQ ID NO: 4309302 - DNA, 25 bp, Homo sapien
atgggggtgctcctcatgggacaaa

SEQ ID NO: 4309303 - DNA, 25 bp, Homo sapien
aatgattggaaatcttcgcacactg

SEQ ID NO: 4309304 - DNA, 25 bp, Homo sapien
gattggaaatcttcgcacactgctt

SEQ ID NO: 4309305 - DNA, 25 bp, Homo sapien
gaaatcttcgcacactgcttcacag

SEQ ID NO: 4309306 - DNA, 25 bp, Homo sapien
catattaaactgcagtggttcccga

SEQ ID NO: 4309307 - DNA, 25 bp, Homo sapien
tggaaacatcctgtacacactgttg

SEQ ID NO: 4309308 - DNA, 25 bp, Homo sapien
gcagaggtgcctcgatagcatcttt

SEQ ID NO: 4309309 - DNA, 25 bp, Homo sapien
ctaagaaactggaacaactgttgcc

SEQ ID NO: 4309310 - DNA, 25 bp, Homo sapien
ggtatcgacaacagctaaccaggtt

SEQ ID NO: 4309311 - DNA, 25 bp, Homo sapien
tgaacttcggtagaatgccacacca

SEQ ID NO: 4309312 - DNA, 25 bp, Homo sapien
ggttctcttacagaagtgctcgcca

SEQ ID NO: 4309313 - DNA, 25 bp, Homo sapien
tttggagcagctacaggtatcgaca

SEQ ID NO: 4309314 - DNA, 25 bp, Homo sapien
ggattattccagctcttggtgtcaa

SEQ ID NO: 4309315 - DNA, 25 bp, Homo sapien
cagacatgaaagtagagtcacagac

SEQ ID NO: 4309316 - DNA, 25 bp, Homo sapien
tgatctttaacacgagacatcttgt

SEQ ID NO: 4309317 - DNA, 25 bp, Homo sapien
tctaatttattcaaacgccactgga

SEQ ID NO: 4309318 - DNA, 25 bp, Homo sapien
gccatagtacatcttcaaacactca

SEQ ID NO: 4309319 - DNA, 25 bp, Homo sapien
acacaatacacaaaagctccttcaa

SEQ ID NO: 4309320 - DNA, 25 bp, Homo sapien
ctttccttctgccatagtacatctt

SEQ ID NO: 4309321 - DNA, 25 bp, Homo sapien
tacacaaaagctccttcaaagacat

SEQ ID NO: 4309322 - DNA, 25 bp, Homo sapien
gaggcctgctcttcacactacattg

SEQ ID NO: 4309323 - DNA, 25 bp, Homo sapien
ccagccagaaaggtccatgtggatg

SEQ ID NO: 4309324 - DNA, 25 bp, Homo sapien
tgtgtgtgcgtcataactcagatct

SEQ ID NO: 4309325 - DNA, 25 bp, Homo sapien
cctgctgagttaaccacgtgcttca

SEQ ID NO: 4309326 - DNA, 25 bp, Homo sapien
cattagacacggaatagcctgtggc

SEQ ID NO: 4309327 - DNA, 25 bp, Homo sapien
tcggaaagacctatggagccaggcc

SEQ ID NO: 4309328 - DNA, 25 bp, Homo sapien
tgtaaaactcttggcgacatgtgcc

SEQ ID NO: 4309329 - DNA, 25 bp, Homo sapien
cagagaacctgtatcagcggcagcg

SEQ ID NO: 4309330 - DNA, 25 bp, Homo sapien
caattctcatcaaaagtctgggctg

SEQ ID NO: 4309331 - DNA, 25 bp, Homo sapien
cagtggaggctaccatctggacttg

SEQ ID NO: 4309332 - DNA, 25 bp, Homo sapien
tctggccccaagctacaaccagtgg

SEQ ID NO: 4309333 - DNA, 25 bp, Homo sapien
gacttgatccggagcttaacccact

SEQ ID NO: 4309334 - DNA, 25 bp, Homo sapien
aactagctatgtgacgtgtgcaagc

SEQ ID NO: 4309335 - DNA, 25 bp, Homo sapien
tgtgcaagcgataacatcattctgg

SEQ ID NO: 4309336 - DNA, 25 bp, Homo sapien
gagggtcagggaaatctcaggtcta

SEQ ID NO: 4309337 - DNA, 25 bp, Homo sapien
tccctgtatggtcactaactagcta

SEQ ID NO: 4309338 - DNA, 25 bp, Homo sapien
tctgttggctcacgtaagaatggca

SEQ ID NO: 4309339 - DNA, 25 bp, Homo sapien
tcacagagccaaggagtgggtctca

SEQ ID NO: 4309340 - DNA, 25 bp, Homo sapien
gtgggtctcaagtcaaggtctcgtg

SEQ ID NO: 4309341 - DNA, 25 bp, Homo sapien
ggtctcgtggtagctcctaaggaaa

SEQ ID NO: 4309342 - DNA, 25 bp, Homo sapien
tccagggtatgtagggcaaatgcaa

SEQ ID NO: 4309343 - DNA, 25 bp, Homo sapien
catgtattccaaacccctgaggctc

SEQ ID NO: 4309344 - DNA, 25 bp, Homo sapien
tctcagaccaagaaagtccaggttt

SEQ ID NO: 4309345 - DNA, 25 bp, Homo sapien
tgccattgtagtgtcaaagtagccg

SEQ ID NO: 4309346 - DNA, 25 bp, Homo sapien
aagtagcagttaacaattttgaaga

SEQ ID NO: 4309347 - DNA, 25 bp, Homo sapien
tgaagacaatttggtggaatttgac

SEQ ID NO: 4309348 - DNA, 25 bp, Homo sapien
gacaatttggtggaatttgaccaca

SEQ ID NO: 4309349 - DNA, 25 bp, Homo sapien
agtagcagttaacaattttgaagac

SEQ ID NO: 4309350 - DNA, 25 bp, Homo sapien
aataactagcttgctcagtatttca

SEQ ID NO: 4309351 - DNA, 25 bp, Homo sapien
tggaacagttctgaaaactaacttc

SEQ ID NO: 4309352 - DNA, 25 bp, Homo sapien
aacaggtcctacatatcacagaaca

SEQ ID NO: 4309353 - DNA, 25 bp, Homo sapien
aataatgggagctagagtttactgc

SEQ ID NO: 4309354 - DNA, 25 bp, Homo sapien
tgaaaataacaaggcctgtaaacac

SEQ ID NO: 4309355 - DNA, 25 bp, Homo sapien
catgtacatgtttcaaagttccttg

SEQ ID NO: 4309356 - DNA, 25 bp, Homo sapien
tgtctataagtacactagccaggcg

SEQ ID NO: 4309357 - DNA, 25 bp, Homo sapien
aaatgcaacactagacatgtacatg

SEQ ID NO: 4309358 - DNA, 25 bp, Homo sapien
gactatcgtgactgaagagagcata

SEQ ID NO: 4309359 - DNA, 25 bp, Homo sapien
tacttagaacagctatgaatccgag

SEQ ID NO: 4309360 - DNA, 25 bp, Homo sapien
tcatagagtaaagcgcccagtgtgc

SEQ ID NO: 4309361 - DNA, 25 bp, Homo sapien
taaatgatgagaacgaggcaaggac

SEQ ID NO: 4309362 - DNA, 25 bp, Homo sapien
tgcgccattgaacttgatccccacc

SEQ ID NO: 4309363 - DNA, 25 bp, Homo sapien
ttaaattgtcggagaaaatcaaagc

SEQ ID NO: 4309364 - DNA, 25 bp, Homo sapien
tatacaatcagcacaataaacatta

SEQ ID NO: 4309365 - DNA, 25 bp, Homo sapien
ggcactgacaacacaggcatgttta

SEQ ID NO: 4309366 - DNA, 25 bp, Homo sapien
accactgtaccaggcctaattgatt

SEQ ID NO: 4309367 - DNA, 25 bp, Homo sapien
taatggaaattggggtccctctatg

SEQ ID NO: 4309368 - DNA, 25 bp, Homo sapien
atggaaattggggtccctctatgtt

SEQ ID NO: 4309369 - DNA, 25 bp, Homo sapien
tgaaccactgtaccaggcctaattg

SEQ ID NO: 4309370 - DNA, 25 bp, Homo sapien
gagcacagcgcatctaaacaagaag

SEQ ID NO: 4309371 - DNA, 25 bp, Homo sapien
tgctaatctatcacctgactgcaga

SEQ ID NO: 4309372 - DNA, 25 bp, Homo sapien
tccacaacagccgatgagattgcca

SEQ ID NO: 4309373 - DNA, 25 bp, Homo sapien
gagattgccacaaataccttaagtg

SEQ ID NO: 4309374 - DNA, 25 bp, Homo sapien
gatgtaattcaatcgctctgcagca

SEQ ID NO: 4309375 - DNA, 25 bp, Homo sapien
gtaattcaatcgctctgcagcaaat

SEQ ID NO: 4309376 - DNA, 25 bp, Homo sapien
agatgtaattcaatcgctctgcagc

SEQ ID NO: 4309377 - DNA, 25 bp, Homo sapien
atgtaattcaatcgctctgcagcaa

SEQ ID NO: 4309378 - DNA, 25 bp, Homo sapien
gcctagaaccttttctttaatgctc

SEQ ID NO: 4309379 - DNA, 25 bp, Homo sapien
cataagagattgtaaagcaagagct

SEQ ID NO: 4309380 - DNA, 25 bp, Homo sapien
agcaagagctaagattggcttccag

SEQ ID NO: 4309381 - DNA, 25 bp, Homo sapien
tagcaaaggacaacagcctagaacc

SEQ ID NO: 4309382 - DNA, 25 bp, Homo sapien
tcttcggtgtctgcctcagaaattc

SEQ ID NO: 4309383 - DNA, 25 bp, Homo sapien
tttagttcttcggtgtctgcctcag

SEQ ID NO: 4309384 - DNA, 25 bp, Homo sapien
catgcttaatgcatcttttagttct

SEQ ID NO: 4309385 - DNA, 25 bp, Homo sapien
cttccaaaccaacatgcttaatgca

SEQ ID NO: 4309386 - DNA, 25 bp, Homo sapien
gtttctttacctctgtgtgtggaag

SEQ ID NO: 4309387 - DNA, 25 bp, Homo sapien
tgtcacatactacttttacggtttc

SEQ ID NO: 4309388 - DNA, 25 bp, Homo sapien
aatggcatttactgtcacatactac

SEQ ID NO: 4309389 - DNA, 25 bp, Homo sapien
caatacagaatttgctttctcctga

SEQ ID NO: 4309390 - DNA, 25 bp, Homo sapien
tacatacgggaaagaccatgtgctc

SEQ ID NO: 4309391 - DNA, 25 bp, Homo sapien
cactcagaatacatacgggaaagac

SEQ ID NO: 4309392 - DNA, 25 bp, Homo sapien
tacgggaaagaccatgtgctccagg

SEQ ID NO: 4309393 - DNA, 25 bp, Homo sapien
aaaccttcactcagaatacatacgg

SEQ ID NO: 4309394 - DNA, 25 bp, Homo sapien
cattggtagaggcatgtgggttcat

SEQ ID NO: 4309395 - DNA, 25 bp, Homo sapien
ctgagagctgtccattggtagaggc

SEQ ID NO: 4309396 - DNA, 25 bp, Homo sapien
tccattggtagaggcatgtgggttc

SEQ ID NO: 4309397 - DNA, 25 bp, Homo sapien
agctgtccattggtagaggcatgtg

SEQ ID NO: 4309398 - DNA, 25 bp, Homo sapien
tgtcgtggtcagatccaaactgctg

SEQ ID NO: 4309399 - DNA, 25 bp, Homo sapien
gaggagacacatgtcgtggtcagat

SEQ ID NO: 4309400 - DNA, 25 bp, Homo sapien
tattaaggaggtcttggaaggtgca

SEQ ID NO: 4309401 - DNA, 25 bp, Homo sapien
tcttctgcagtatgagcacttgtca

SEQ ID NO: 4309402 - DNA, 25 bp, Homo sapien
aggtgaaagtgactcaaaacacagt

SEQ ID NO: 4309403 - DNA, 25 bp, Homo sapien
tcaaaacacagttactttgccacaa

SEQ ID NO: 4309404 - DNA, 25 bp, Homo sapien
caaaacacagttactttgccacaac

SEQ ID NO: 4309405 - DNA, 25 bp, Homo sapien
aagtgactcaaaacacagttacttt

SEQ ID NO: 4309406 - DNA, 25 bp, Homo sapien
ccagagaatccgagtggttaagaac

SEQ ID NO: 4309407 - DNA, 25 bp, Homo sapien
tctaatgaggcgatggactccagag

SEQ ID NO: 4309408 - DNA, 25 bp, Homo sapien
caccgtggatcgtttgcatatcaaa

SEQ ID NO: 4309409 - DNA, 25 bp, Homo sapien
gagtaaattattgcacagcagacca

SEQ ID NO: 4309410 - DNA, 25 bp, Homo sapien
tgcccgggctgaattgtcagaaggc

SEQ ID NO: 4309411 - DNA, 25 bp, Homo sapien
gctgcccgggctgaattgtcagaag

SEQ ID NO: 4309412 - DNA, 25 bp, Homo sapien
cccgggctgaattgtcagaaggcct

SEQ ID NO: 4309413 - DNA, 25 bp, Homo sapien
aaggccttggcgctgcaaagacagg

SEQ ID NO: 4309414 - DNA, 25 bp, Homo sapien
taaaagtatacaaggcccattgtcc

SEQ ID NO: 4309415 - DNA, 25 bp, Homo sapien
taccaaacacaggatacgggtccat

SEQ ID NO: 4309416 - DNA, 25 bp, Homo sapien
gcaacaccggttgccaaactgcgct

SEQ ID NO: 4309417 - DNA, 25 bp, Homo sapien
ccacccagttaccaaacacaggata

SEQ ID NO: 4309418 - DNA, 25 bp, Homo sapien
tctttgtccagagtgatgcctgcaa

SEQ ID NO: 4309419 - DNA, 25 bp, Homo sapien
ttgaacttcttttgaccgcacaata

SEQ ID NO: 4309420 - DNA, 25 bp, Homo sapien
aatcccagagtcattaacgcgcatt

SEQ ID NO: 4309421 - DNA, 25 bp, Homo sapien
cattaacgcgcattgaactgccact

SEQ ID NO: 4309422 - DNA, 25 bp, Homo sapien
ctgaattagaaaaacagccagcaaa

SEQ ID NO: 4309423 - DNA, 25 bp, Homo sapien
ccagcaaaacaaagctgagagcctt

SEQ ID NO: 4309424 - DNA, 25 bp, Homo sapien
tgaattagaaaaacagccagcaaaa

SEQ ID NO: 4309425 - DNA, 25 bp, Homo sapien
cagccagcaaaacaaagctgagagc

SEQ ID NO: 4309426 - DNA, 25 bp, Homo sapien
tacattttagacactttttaatctg

SEQ ID NO: 4309427 - DNA, 25 bp, Homo sapien
tcctttagatttacattttagacac

SEQ ID NO: 4309428 - DNA, 25 bp, Homo sapien
ctttagatttacattttagacactt

SEQ ID NO: 4309429 - DNA, 25 bp, Homo sapien
tagtcctttagatttacattttaga

SEQ ID NO: 4309430 - DNA, 25 bp, Homo sapien
tttaggctgttttccagcatgttgt

SEQ ID NO: 4309431 - DNA, 25 bp, Homo sapien
ctctttaggctgttttccagcatgt

SEQ ID NO: 4309432 - DNA, 25 bp, Homo sapien
ttaggctgttttccagcatgttgtt

SEQ ID NO: 4309433 - DNA, 25 bp, Homo sapien
ctttaggctgttttccagcatgttg

SEQ ID NO: 4309434 - DNA, 25 bp, Homo sapien
gttgtaaaagttgaagctgcaactg

SEQ ID NO: 4309435 - DNA, 25 bp, Homo sapien
gaagctgcaactgttcctgttgttt

SEQ ID NO: 4309436 - DNA, 25 bp, Homo sapien
ttgaagctgcaactgttcctgttgt

SEQ ID NO: 4309437 - DNA, 25 bp, Homo sapien
agctgcaactgttcctgttgttttt

SEQ ID NO: 4309438 - DNA, 25 bp, Homo sapien
cgcacactgactattcttggcatta

SEQ ID NO: 4309439 - DNA, 25 bp, Homo sapien
tcgacaataaattcagcgcacactg

SEQ ID NO: 4309440 - DNA, 25 bp, Homo sapien
gtaagtaacagagggtagcgccaat

SEQ ID NO: 4309441 - DNA, 25 bp, Homo sapien
tgtaatggcctgacctttagtttga

SEQ ID NO: 4309442 - DNA, 25 bp, Homo sapien
tactcttcactgagcaaaggagctg

SEQ ID NO: 4309443 - DNA, 25 bp, Homo sapien
gctttactcttcactgagcaaagga

SEQ ID NO: 4309444 - DNA, 25 bp, Homo sapien
tggtggaggggagattgcgaatgga

SEQ ID NO: 4309445 - DNA, 25 bp, Homo sapien
gggagattgcgaatggagtgatggg

SEQ ID NO: 4309446 - DNA, 25 bp, Homo sapien
ctggggagtgataacttgaggtgtc

SEQ ID NO: 4309447 - DNA, 25 bp, Homo sapien
ctgagggctcagcacttgttgctgg

SEQ ID NO: 4309448 - DNA, 25 bp, Homo sapien
gcacttgttgctggaggatctgctg

SEQ ID NO: 4309449 - DNA, 25 bp, Homo sapien
gcatttgctggggagtgataacttg

SEQ ID NO: 4309450 - DNA, 25 bp, Homo sapien
cattaaaacccgctttccatgacat

SEQ ID NO: 4309451 - DNA, 25 bp, Homo sapien
attaaaacccgctttccatgacatt

SEQ ID NO: 4309452 - DNA, 25 bp, Homo sapien
taaaacccgctttccatgacatttc

SEQ ID NO: 4309453 - DNA, 25 bp, Homo sapien
tgttaacacgtttctgcacgggcat

SEQ ID NO: 4309454 - DNA, 25 bp, Homo sapien
tcaagcggatacctaatgacaatgc

SEQ ID NO: 4309455 - DNA, 25 bp, Homo sapien
gaacctgcacactgtatctgaaagg

SEQ ID NO: 4309456 - DNA, 25 bp, Homo sapien
gcacgggcatctttgcaaggaacct

SEQ ID NO: 4309457 - DNA, 25 bp, Homo sapien
atttcacagtcattatgcactgatg

SEQ ID NO: 4309458 - DNA, 25 bp, Homo sapien
ttatgcactgatgtcccgatttctc

SEQ ID NO: 4309459 - DNA, 25 bp, Homo sapien
tttttcacatgatttgtcctgtcat

SEQ ID NO: 4309460 - DNA, 25 bp, Homo sapien
gcatagcgagctctcattcctaatt

SEQ ID NO: 4309461 - DNA, 25 bp, Homo sapien
ctcagtggagtttcaagaggaaatc

SEQ ID NO: 4309462 - DNA, 25 bp, Homo sapien
taaagaatgctagcatacaaaactg

SEQ ID NO: 4309463 - DNA, 25 bp, Homo sapien
ctgtaactaccttaactgtttgagt

SEQ ID NO: 4309464 - DNA, 25 bp, Homo sapien
ggttcatgccttaactgggagttca

SEQ ID NO: 4309465 - DNA, 25 bp, Homo sapien
ggtgcacccaaacctgcgggaatgg

SEQ ID NO: 4309466 - DNA, 25 bp, Homo sapien
tgctaaaagcccatacacactgctg

SEQ ID NO: 4309467 - DNA, 25 bp, Homo sapien
tagtatgggcctgctgctaccttaa

SEQ ID NO: 4309468 - DNA, 25 bp, Homo sapien
taccaactgggtgtggtcgatccca

SEQ ID NO: 4309469 - DNA, 25 bp, Homo sapien
taaattttgcacgttgggtatcatc

SEQ ID NO: 4309470 - DNA, 25 bp, Homo sapien
actgaccaggtttggcagtgtcacc

SEQ ID NO: 4309471 - DNA, 25 bp, Homo sapien
tgaaccaaccaggtaccatgcaagt

SEQ ID NO: 4309472 - DNA, 25 bp, Homo sapien
tatgaccatatacaagctagcctgt

SEQ ID NO: 4309473 - DNA, 25 bp, Homo sapien
attaagctgccacaactgtaacagg

SEQ ID NO: 4309474 - DNA, 25 bp, Homo sapien
gagaaatcacagaagccgacctttt

SEQ ID NO: 4309475 - DNA, 25 bp, Homo sapien
taaccggatttgaaaatgaggcaca

SEQ ID NO: 4309476 - DNA, 25 bp, Homo sapien
gtgcagacccgcctcatgaagtggt

SEQ ID NO: 4309477 - DNA, 25 bp, Homo sapien
agagggactcaatgaagagcattcc

SEQ ID NO: 4309478 - DNA, 25 bp, Homo sapien
agtctccacaatctgcaaaggcttg

SEQ ID NO: 4309479 - DNA, 25 bp, Homo sapien
gaggcccagattagctcttctcaga

SEQ ID NO: 4309480 - DNA, 25 bp, Homo sapien
tacaatccaaaagtagaggcccaga

SEQ ID NO: 4309481 - DNA, 25 bp, Homo sapien
aaggctgaatgcaaaatgtcacttg

SEQ ID NO: 4309482 - DNA, 25 bp, Homo sapien
aggctgaatgcaaaatgtcacttgg

SEQ ID NO: 4309483 - DNA, 25 bp, Homo sapien
ggctgaatgcaaaatgtcacttggt

SEQ ID NO: 4309484 - DNA, 25 bp, Homo sapien
ccaacaccgtacttggggaggagag

SEQ ID NO: 4309485 - DNA, 25 bp, Homo sapien
caacaccgtacttggggaggagagg

SEQ ID NO: 4309486 - DNA, 25 bp, Homo sapien
gctacattcagagccggttcagctg

SEQ ID NO: 4309487 - DNA, 25 bp, Homo sapien
tgagttagctacattcagagccggt

SEQ ID NO: 4309488 - DNA, 25 bp, Homo sapien
cagttgagttagctacattcagagc

SEQ ID NO: 4309489 - DNA, 25 bp, Homo sapien
cagttctgacagttgagttagctac

SEQ ID NO: 4309490 - DNA, 25 bp, Homo sapien
gtggggtccggcggcctcggcgtgc

SEQ ID NO: 4309491 - DNA, 25 bp, Homo sapien
acactctccatgtagccgccaggcg

SEQ ID NO: 4309492 - DNA, 25 bp, Homo sapien
actctccatgtagccgccaggcgcg

SEQ ID NO: 4309493 - DNA, 25 bp, Homo sapien
ctgacactctccatgtagccgccag

SEQ ID NO: 4309494 - DNA, 25 bp, Homo sapien
tccaccaatcacaacccgcctctaa

SEQ ID NO: 4309495 - DNA, 25 bp, Homo sapien
ctgctccaccaatcacaacccgcct

SEQ ID NO: 4309496 - DNA, 25 bp, Homo sapien
gccgcgccgcgccccacacaatggg

SEQ ID NO: 4309497 - DNA, 25 bp, Homo sapien
caccaatcacaacccgcctctaaac

SEQ ID NO: 4309498 - DNA, 25 bp, Homo sapien
cttcgggagggtacgcaggtctcct

SEQ ID NO: 4309499 - DNA, 25 bp, Homo sapien
tccgagcaactgttcggcttcggga

SEQ ID NO: 4309500 - DNA, 25 bp, Homo sapien
cctaggcagcgcagaaaagcgcttt

SEQ ID NO: 4309501 - DNA, 25 bp, Homo sapien
gactgctccgagcaactgttcggct

SEQ ID NO: 4309502 - DNA, 25 bp, Homo sapien
cagttccaacgaaaggcctgctttg

SEQ ID NO: 4309503 - DNA, 25 bp, Homo sapien
tcagttccaacgaaaggcctgcttt

SEQ ID NO: 4309504 - DNA, 25 bp, Homo sapien
cctgtattactgttgggcatcttgc

SEQ ID NO: 4309505 - DNA, 25 bp, Homo sapien
caacctgtattactgttgggcatct

SEQ ID NO: 4309506 - DNA, 25 bp, Homo sapien
ctaagagaacaacctgtattactgt

SEQ ID NO: 4309507 - DNA, 25 bp, Homo sapien
gaacaacctgtattactgttgggca

SEQ ID NO: 4309508 - DNA, 25 bp, Homo sapien
cagtggtccctaaggtttcacgata

SEQ ID NO: 4309509 - DNA, 25 bp, Homo sapien
ctcgcagttcgagttttcttctggc

SEQ ID NO: 4309510 - DNA, 25 bp, Homo sapien
ttagcagtaatgggccactgttccc

SEQ ID NO: 4309511 - DNA, 25 bp, Homo sapien
gatacagtatatttggctgactcgc

SEQ ID NO: 4309512 - DNA, 25 bp, Homo sapien
tcaggaagtagcactcttgacagcg

SEQ ID NO: 4309513 - DNA, 25 bp, Homo sapien
tgacagcgctttagatgccgagtaa

SEQ ID NO: 4309514 - DNA, 25 bp, Homo sapien
gaagcttagcagttgcaacctcaaa

SEQ ID NO: 4309515 - DNA, 25 bp, Homo sapien
ccaagacgggaaaatgaagcttagc

SEQ ID NO: 4309516 - DNA, 25 bp, Homo sapien
agctttgaaatcagggcgcgctgtg

SEQ ID NO: 4309517 - DNA, 25 bp, Homo sapien
cactgcacatagagaaggctacctg

SEQ ID NO: 4309518 - DNA, 25 bp, Homo sapien
tcacaacccaacaggccagagcttt

SEQ ID NO: 4309519 - DNA, 25 bp, Homo sapien
catcagcaatgtaggtgagtcacaa

SEQ ID NO: 4309520 - DNA, 25 bp, Homo sapien
ggttcagtcttactcccatggaaaa

SEQ ID NO: 4309521 - DNA, 25 bp, Homo sapien
caagtgtcaccgattagtcagcatg

SEQ ID NO: 4309522 - DNA, 25 bp, Homo sapien
tgaatgactccaaaacaaggcttct

SEQ ID NO: 4309523 - DNA, 25 bp, Homo sapien
tcagtatcttgaagccggtcagtgg

SEQ ID NO: 4309524 - DNA, 25 bp, Homo sapien
gaacatcgagggagtgagaccaggg

SEQ ID NO: 4309525 - DNA, 25 bp, Homo sapien
cagtgacaacccacaactgggctgg

SEQ ID NO: 4309526 - DNA, 25 bp, Homo sapien
gcagtttcttatactcccatctcca

SEQ ID NO: 4309527 - DNA, 25 bp, Homo sapien
gagttacttctccttgattaagcag

SEQ ID NO: 4309528 - DNA, 25 bp, Homo sapien
tgaaacatcagggtggtggagctta

SEQ ID NO: 4309529 - DNA, 25 bp, Homo sapien
caaaatttaactcagcagcggcaga

SEQ ID NO: 4309530 - DNA, 25 bp, Homo sapien
caatgttttgttactcacggtggag

SEQ ID NO: 4309531 - DNA, 25 bp, Homo sapien
gagacactgccatcggttctgatcc

SEQ ID NO: 4309532 - DNA, 25 bp, Homo sapien
gaataagacaagagttatgctgaag

SEQ ID NO: 4309533 - DNA, 25 bp, Homo sapien
gacaagagttatgctgaagatgaaa

SEQ ID NO: 4309534 - DNA, 25 bp, Homo sapien
taagacaagagttatgctgaagatg

SEQ ID NO: 4309535 - DNA, 25 bp, Homo sapien
agacaagagttatgctgaagatgaa

SEQ ID NO: 4309536 - DNA, 25 bp, Homo sapien
tacctgtaccaagagaggtccggcc

SEQ ID NO: 4309537 - DNA, 25 bp, Homo sapien
catacacacgaggagaagaggtcac

SEQ ID NO: 4309538 - DNA, 25 bp, Homo sapien
taagaagacctgttcacgtcagggc

SEQ ID NO: 4309539 - DNA, 25 bp, Homo sapien
tctgagctactggaatggcacgtgc

SEQ ID NO: 4309540 - DNA, 25 bp, Homo sapien
cagacaaaaattgtaagtttattat

SEQ ID NO: 4309541 - DNA, 25 bp, Homo sapien
gcagtggtgtgatcttggctcactg

SEQ ID NO: 4309542 - DNA, 25 bp, Homo sapien
tctcactgtgttgccagactggagt

SEQ ID NO: 4309543 - DNA, 25 bp, Homo sapien
cagtggtgtgatcttggctcactgc

SEQ ID NO: 4309544 - DNA, 25 bp, Homo sapien
gtgccaccacacccagctatttttt

SEQ ID NO: 4309545 - DNA, 25 bp, Homo sapien
gaatctatctatgcacaaccatgga

SEQ ID NO: 4309546 - DNA, 25 bp, Homo sapien
ggcagggactgaaatcccaagttct

SEQ ID NO: 4309547 - DNA, 25 bp, Homo sapien
gctggtccagagataacggctccca

SEQ ID NO: 4309548 - DNA, 25 bp, Homo sapien
aatttccccaagtctgtcaatgaga

SEQ ID NO: 4309549 - DNA, 25 bp, Homo sapien
cttggatttcctcgggacagtccac

SEQ ID NO: 4309550 - DNA, 25 bp, Homo sapien
ggatttcctcgggacagtccacacc

SEQ ID NO: 4309551 - DNA, 25 bp, Homo sapien
ctcgggacagtccacaccattcaag

SEQ ID NO: 4309552 - DNA, 25 bp, Homo sapien
tttcctcgggacagtccacaccatt

SEQ ID NO: 4309553 - DNA, 25 bp, Homo sapien
gggaaatacacactagactaggcca

SEQ ID NO: 4309554 - DNA, 25 bp, Homo sapien
ccagggctgtaagactatggtcaaa

SEQ ID NO: 4309555 - DNA, 25 bp, Homo sapien
tccctagatagacgcaagactcagt

SEQ ID NO: 4309556 - DNA, 25 bp, Homo sapien
tgacggtcaaccataagcagtgcag

SEQ ID NO: 4309557 - DNA, 25 bp, Homo sapien
tacagagacccttgtgggaccctaa

SEQ ID NO: 4309558 - DNA, 25 bp, Homo sapien
cataagaatgtaatctcccggctgc

SEQ ID NO: 4309559 - DNA, 25 bp, Homo sapien
tctgtggaaccgaagcaaaccttag

SEQ ID NO: 4309560 - DNA, 25 bp, Homo sapien
aaaacagtatctagcctgcgggcca

SEQ ID NO: 4309561 - DNA, 25 bp, Homo sapien
ttcatgtttcatgaaatattattcg

SEQ ID NO: 4309562 - DNA, 25 bp, Homo sapien
catgcccggctaatataattttcat

SEQ ID NO: 4309563 - DNA, 25 bp, Homo sapien
gcccggctaatataattttcatgtt

SEQ ID NO: 4309564 - DNA, 25 bp, Homo sapien
ccatgcccggctaatataattttca

SEQ ID NO: 4309565 - DNA, 25 bp, Homo sapien
tatctgggcctcacacggttggtct

SEQ ID NO: 4309566 - DNA, 25 bp, Homo sapien
tggtataagccaactgtagccctgc

SEQ ID NO: 4309567 - DNA, 25 bp, Homo sapien
taaatatacacatgcttgggcccca

SEQ ID NO: 4309568 - DNA, 25 bp, Homo sapien
caagttagcgatctggtgagacaca

SEQ ID NO: 4309569 - DNA, 25 bp, Homo sapien
cagaatgcgccttgcaggacttgca

SEQ ID NO: 4309570 - DNA, 25 bp, Homo sapien
cacagggcattagggtagtctaacc

SEQ ID NO: 4309571 - DNA, 25 bp, Homo sapien
taacagggctctggtgacgtaacat

SEQ ID NO: 4309572 - DNA, 25 bp, Homo sapien
gagtgccacctttgactatccaaga

SEQ ID NO: 4309573 - DNA, 25 bp, Homo sapien
gtgtctatgctttatgtcaggaatg

SEQ ID NO: 4309574 - DNA, 25 bp, Homo sapien
tatgtcaggaatggtgcggaatgtc

SEQ ID NO: 4309575 - DNA, 25 bp, Homo sapien
cattcatcactcagttattcactaa

SEQ ID NO: 4309576 - DNA, 25 bp, Homo sapien
ttcactaactcattcatgaataagt

SEQ ID NO: 4309577 - DNA, 25 bp, Homo sapien
cagataggtctatggcaagcttggc

SEQ ID NO: 4309578 - DNA, 25 bp, Homo sapien
tagacttcccagagaaaaagacctc

SEQ ID NO: 4309579 - DNA, 25 bp, Homo sapien
tgcccagtctcatttaaggttacag

SEQ ID NO: 4309580 - DNA, 25 bp, Homo sapien
ggcagacatacctaatcaatcgtgg

SEQ ID NO: 4309581 - DNA, 25 bp, Homo sapien
gggacagcccttcacatcatgtggt

SEQ ID NO: 4309582 - DNA, 25 bp, Homo sapien
tggagaacttaggaacgggacagcc

SEQ ID NO: 4309583 - DNA, 25 bp, Homo sapien
cagacaagggagtgtctcgccttaa

SEQ ID NO: 4309584 - DNA, 25 bp, Homo sapien
cattaagtctgacaaagcggctctc

SEQ ID NO: 4309585 - DNA, 25 bp, Homo sapien
taccagcggaaggaaaaatggcaca

SEQ ID NO: 4309586 - DNA, 25 bp, Homo sapien
cagctctagaataaggtggcagcag

SEQ ID NO: 4309587 - DNA, 25 bp, Homo sapien
aataccagcggaaggaaaaatggca

SEQ ID NO: 4309588 - DNA, 25 bp, Homo sapien
gaagggacagctctagaataaggtg

SEQ ID NO: 4309589 - DNA, 25 bp, Homo sapien
atcggtacacaaatttcccaaactg

SEQ ID NO: 4309590 - DNA, 25 bp, Homo sapien
ttagacaattacttgcagagctgtc

SEQ ID NO: 4309591 - DNA, 25 bp, Homo sapien
gtctgcaggctttgagtaatacccg

SEQ ID NO: 4309592 - DNA, 25 bp, Homo sapien
gcttctcaatttcaacggctgcctt

SEQ ID NO: 4309593 - DNA, 25 bp, Homo sapien
gccaggggagtgcgactacctccat

SEQ ID NO: 4309594 - DNA, 25 bp, Homo sapien
gtgccaggggagtgcgactacctcc

SEQ ID NO: 4309595 - DNA, 25 bp, Homo sapien
gctggctttcctgaccgggcagggt

SEQ ID NO: 4309596 - DNA, 25 bp, Homo sapien
tgccaggggagtgcgactacctcca

SEQ ID NO: 4309597 - DNA, 25 bp, Homo sapien
ttgattgcttgcagttctgaattct

SEQ ID NO: 4309598 - DNA, 25 bp, Homo sapien
gattgcttgcagttctgaattctgt

SEQ ID NO: 4309599 - DNA, 25 bp, Homo sapien
taaaattgattgcttgcagttctga

SEQ ID NO: 4309600 - DNA, 25 bp, Homo sapien
tcagatggtgtcaataaaattgatt

SEQ ID NO: 4309601 - DNA, 25 bp, Homo sapien
tgtggctctcataattagttacctg

SEQ ID NO: 4309602 - DNA, 25 bp, Homo sapien
tggctctcataattagttacctggg

SEQ ID NO: 4309603 - DNA, 25 bp, Homo sapien
ttgatcctgtggctctcataattag

SEQ ID NO: 4309604 - DNA, 25 bp, Homo sapien
tcctgtggctctcataattagttac

SEQ ID NO: 4309605 - DNA, 25 bp, Homo sapien
gataccttcaagagtgggaattatg

SEQ ID NO: 4309606 - DNA, 25 bp, Homo sapien
ggtgcatgtaatcagaaaggcttaa

SEQ ID NO: 4309607 - DNA, 25 bp, Homo sapien
caccaaaattttggaggcaaggaca

SEQ ID NO: 4309608 - DNA, 25 bp, Homo sapien
cagttgcacctggttcaaataggga

SEQ ID NO: 4309609 - DNA, 25 bp, Homo sapien
gggtcagtacttcaaaaccattcca

SEQ ID NO: 4309610 - DNA, 25 bp, Homo sapien
tccttactaatcagtgcatagggct

SEQ ID NO: 4309611 - DNA, 25 bp, Homo sapien
gcatagggctatttcttaagggtca

SEQ ID NO: 4309612 - DNA, 25 bp, Homo sapien
ccattccatttcactatcaacaaca

SEQ ID NO: 4309613 - DNA, 25 bp, Homo sapien
acttatagcctcctctaactttcca

SEQ ID NO: 4309614 - DNA, 25 bp, Homo sapien
ttttatgatctctatcgagtaacca

SEQ ID NO: 4309615 - DNA, 25 bp, Homo sapien
tctatcgagtaaccacttatagcct

SEQ ID NO: 4309616 - DNA, 25 bp, Homo sapien
gatctctatcgagtaaccacttata

SEQ ID NO: 4309617 - DNA, 25 bp, Homo sapien
ggttgtttgtcattcctcttgggag

SEQ ID NO: 4309618 - DNA, 25 bp, Homo sapien
gaagagctggttgtttgtcattcct

SEQ ID NO: 4309619 - DNA, 25 bp, Homo sapien
attcctcttgggagattttaatcca

SEQ ID NO: 4309620 - DNA, 25 bp, Homo sapien
ctgaagagctggttgtttgtcattc

SEQ ID NO: 4309621 - DNA, 25 bp, Homo sapien
aaggagctgtcttgccacctgaagt

SEQ ID NO: 4309622 - DNA, 25 bp, Homo sapien
ggagctgtcttgccacctgaagtgc

SEQ ID NO: 4309623 - DNA, 25 bp, Homo sapien
agaaggagctgtcttgccacctgaa

SEQ ID NO: 4309624 - DNA, 25 bp, Homo sapien
ctgctgaagaaggagctgtcttgcc

SEQ ID NO: 4309625 - DNA, 25 bp, Homo sapien
aagatggcactaggaccagcaacag

SEQ ID NO: 4309626 - DNA, 25 bp, Homo sapien
aaagatggcactaggaccagcaaca

SEQ ID NO: 4309627 - DNA, 25 bp, Homo sapien
gatggcactaggaccagcaacagaa

SEQ ID NO: 4309628 - DNA, 25 bp, Homo sapien
tggcactaggaccagcaacagaaaa

SEQ ID NO: 4309629 - DNA, 25 bp, Homo sapien
gacgctcagtacatgcgtaggtgta

SEQ ID NO: 4309630 - DNA, 25 bp, Homo sapien
tccttgtctccttggagacgctcag

SEQ ID NO: 4309631 - DNA, 25 bp, Homo sapien
tacatgcgtaggtgtaaaagtgggc

SEQ ID NO: 4309632 - DNA, 25 bp, Homo sapien
aaatagtcccctttgcaaggtgcct

SEQ ID NO: 4309633 - DNA, 25 bp, Homo sapien
gacagccaagtcttacatcaactgg

SEQ ID NO: 4309634 - DNA, 25 bp, Homo sapien
tactctatgatactgcaaataaggg

SEQ ID NO: 4309635 - DNA, 25 bp, Homo sapien
caaataagggtgtggactctgaaca

SEQ ID NO: 4309636 - DNA, 25 bp, Homo sapien
gggtaatgaccattcacagacagcc

SEQ ID NO: 4309637 - DNA, 25 bp, Homo sapien
tactcccattaacatagggccctat

SEQ ID NO: 4309638 - DNA, 25 bp, Homo sapien
gccagtgccagacgctgaatcacta

SEQ ID NO: 4309639 - DNA, 25 bp, Homo sapien
tgaatcactacaccaagtctccggc

SEQ ID NO: 4309640 - DNA, 25 bp, Homo sapien
tataaccaccttgctgaggcactgg

SEQ ID NO: 4309641 - DNA, 25 bp, Homo sapien
gcaaatggctatgcagacctccgga

SEQ ID NO: 4309642 - DNA, 25 bp, Homo sapien
tagaccaaagatggccacgggtaat

SEQ ID NO: 4309643 - DNA, 25 bp, Homo sapien
gacctccggagctaaaaatgcatga

SEQ ID NO: 4309644 - DNA, 25 bp, Homo sapien
tgtgggcccttttgcctccagaatg

SEQ ID NO: 4309645 - DNA, 25 bp, Homo sapien
ttctcagctcttcctcaagccccat

SEQ ID NO: 4309646 - DNA, 25 bp, Homo sapien
gattctcagctcttcctcaagcccc

SEQ ID NO: 4309647 - DNA, 25 bp, Homo sapien
ttgattctcagctcttcctcaagcc

SEQ ID NO: 4309648 - DNA, 25 bp, Homo sapien
cttgattctcagctcttcctcaagc

SEQ ID NO: 4309649 - DNA, 25 bp, Homo sapien
taccataccaggttaacagcaggtt

SEQ ID NO: 4309650 - DNA, 25 bp, Homo sapien
ggcccacggcactccagaattgaag

SEQ ID NO: 4309651 - DNA, 25 bp, Homo sapien
tttgcagcgcccataagcagtactg

SEQ ID NO: 4309652 - DNA, 25 bp, Homo sapien
cactgtgctttagaaacccaggaag

SEQ ID NO: 4309653 - DNA, 25 bp, Homo sapien
catctgagtaaataccttcagtcac

SEQ ID NO: 4309654 - DNA, 25 bp, Homo sapien
ctcctactgttaaacaaattgtcct

SEQ ID NO: 4309655 - DNA, 25 bp, Homo sapien
ctaacatctgagtaaataccttcag

SEQ ID NO: 4309656 - DNA, 25 bp, Homo sapien
attttccctgcaattactcctactg

SEQ ID NO: 4309657 - DNA, 25 bp, Homo sapien
cctttgtaggcaacctcagggaggt

SEQ ID NO: 4309658 - DNA, 25 bp, Homo sapien
caggaagtactgtgcggctgaagca

SEQ ID NO: 4309659 - DNA, 25 bp, Homo sapien
tggatttccgtcttcttgctgtaga

SEQ ID NO: 4309660 - DNA, 25 bp, Homo sapien
cgtactgtctgcctttggatttccg

SEQ ID NO: 4309661 - DNA, 25 bp, Homo sapien
tcaaagttgcatttagcacttaaag

SEQ ID NO: 4309662 - DNA, 25 bp, Homo sapien
cttcactttcaaagttgaaagatca

SEQ ID NO: 4309663 - DNA, 25 bp, Homo sapien
tcactttcaaagttgaaagatcagt

SEQ ID NO: 4309664 - DNA, 25 bp, Homo sapien
agttgcatttagcacttaaagaaat

SEQ ID NO: 4309665 - DNA, 25 bp, Homo sapien
tctgaaagcaaatccagacgctgaa

SEQ ID NO: 4309666 - DNA, 25 bp, Homo sapien
aagcaacggcagcttgatagacatt

SEQ ID NO: 4309667 - DNA, 25 bp, Homo sapien
caacggcagcttgatagacattcaa

SEQ ID NO: 4309668 - DNA, 25 bp, Homo sapien
cagacgctgaagataaaccgccaga

SEQ ID NO: 4309669 - DNA, 25 bp, Homo sapien
gcattttattagcatcccctgcagc

SEQ ID NO: 4309670 - DNA, 25 bp, Homo sapien
ggcacacagcctgggcgccatgaaa

SEQ ID NO: 4309671 - DNA, 25 bp, Homo sapien
tctgcgttgcagtatcaaaaggcac

SEQ ID NO: 4309672 - DNA, 25 bp, Homo sapien
tcctgcattttattagcatcccctg

SEQ ID NO: 4309673 - DNA, 25 bp, Homo sapien
tagttcaatctgtgaaagtcgccac

SEQ ID NO: 4309674 - DNA, 25 bp, Homo sapien
gttttttcaagacacctctgccatg

SEQ ID NO: 4309675 - DNA, 25 bp, Homo sapien
gagaaattgtctgctcagggccatg

SEQ ID NO: 4309676 - DNA, 25 bp, Homo sapien
catggaatagtcgtctcgctctggg

SEQ ID NO: 4309677 - DNA, 25 bp, Homo sapien
tagagaccaagaacaacacggaatg

SEQ ID NO: 4309678 - DNA, 25 bp, Homo sapien
gaaatggcttcacgctaattgctgt

SEQ ID NO: 4309679 - DNA, 25 bp, Homo sapien
gcaggtgaaacctgatccccgtggc

SEQ ID NO: 4309680 - DNA, 25 bp, Homo sapien
cagaagggctgagtttaagacagca

SEQ ID NO: 4309681 - DNA, 25 bp, Homo sapien
ttgcacctgacattttatacccgaa

SEQ ID NO: 4309682 - DNA, 25 bp, Homo sapien
tggagttgagtacacgttacattgc

SEQ ID NO: 4309683 - DNA, 25 bp, Homo sapien
aaaggcaacatcctaaataccaagg

SEQ ID NO: 4309684 - DNA, 25 bp, Homo sapien
catcctaaataccaaggttatttgc

SEQ ID NO: 4309685 - DNA, 25 bp, Homo sapien
tagtatttcctagtaagtgcattca

SEQ ID NO: 4309686 - DNA, 25 bp, Homo sapien
cctagtaagtgcattcatttaaatt

SEQ ID NO: 4309687 - DNA, 25 bp, Homo sapien
caaacagattatgactctatagtat

SEQ ID NO: 4309688 - DNA, 25 bp, Homo sapien
tatatgtcagtcacctcacaaacag

SEQ ID NO: 4309689 - DNA, 25 bp, Homo sapien
ttacaatttcgaatggacaccaagg

SEQ ID NO: 4309690 - DNA, 25 bp, Homo sapien
taaggtggccgttagagcagccaaa

SEQ ID NO: 4309691 - DNA, 25 bp, Homo sapien
caaggtttaatgatggctccccagg

SEQ ID NO: 4309692 - DNA, 25 bp, Homo sapien
tattcaaaaacggtggctattctcc

SEQ ID NO: 4309693 - DNA, 25 bp, Homo sapien
gaacagagaagcacgaaatagccca

SEQ ID NO: 4309694 - DNA, 25 bp, Homo sapien
gtattgtctaactgctgctctgcca

SEQ ID NO: 4309695 - DNA, 25 bp, Homo sapien
gggaaaagccctcttaaagctatga

SEQ ID NO: 4309696 - DNA, 25 bp, Homo sapien
taagctgggcaattaaagccaaaga

SEQ ID NO: 4309697 - DNA, 25 bp, Homo sapien
tacagcaggccagaactttgtttgg

SEQ ID NO: 4309698 - DNA, 25 bp, Homo sapien
ccagtgaaccagcttaaggccaagg

SEQ ID NO: 4309699 - DNA, 25 bp, Homo sapien
tgggagcgcaggaccaaattgtctc

SEQ ID NO: 4309700 - DNA, 25 bp, Homo sapien
tctgaaccaatgtgccaaaccaggg

SEQ ID NO: 4309701 - DNA, 25 bp, Homo sapien
ataaacgcttaagcagtgacctcat

SEQ ID NO: 4309702 - DNA, 25 bp, Homo sapien
tcaaacaataaacgcttaagcagtg

SEQ ID NO: 4309703 - DNA, 25 bp, Homo sapien
ctttgtgactgtcaatcaggtgctt

SEQ ID NO: 4309704 - DNA, 25 bp, Homo sapien
gagctttgtgactgtcaatcaggtg

SEQ ID NO: 4309705 - DNA, 25 bp, Homo sapien
cgcaagcagattagaagtatcgctt

SEQ ID NO: 4309706 - DNA, 25 bp, Homo sapien
tatcgcttgtaatagagttttcctc

SEQ ID NO: 4309707 - DNA, 25 bp, Homo sapien
tattccccaggatactggccctgtg

SEQ ID NO: 4309708 - DNA, 25 bp, Homo sapien
catggcggtgttttgttgtctaccc

SEQ ID NO: 4309709 - DNA, 25 bp, Homo sapien
tataccagcaggaataccccagtga

SEQ ID NO: 4309710 - DNA, 25 bp, Homo sapien
ttcaaagagggtcggaggctgttcc

SEQ ID NO: 4309711 - DNA, 25 bp, Homo sapien
tgaaaccgctttgtggaggaggccc

SEQ ID NO: 4309712 - DNA, 25 bp, Homo sapien
taccgaccagttaaaggcacagagg

SEQ ID NO: 4309713 - DNA, 25 bp, Homo sapien
gaaatctcctctttcagcaattttg

SEQ ID NO: 4309714 - DNA, 25 bp, Homo sapien
tgcggtcaccatgctgcacaacaat

SEQ ID NO: 4309715 - DNA, 25 bp, Homo sapien
ttaactgcggtcaccatgctgcaca

SEQ ID NO: 4309716 - DNA, 25 bp, Homo sapien
ccatgctgcacaacaatttactaaa

SEQ ID NO: 4309717 - DNA, 25 bp, Homo sapien
aacataacaggagccaaagggtggg

SEQ ID NO: 4309718 - DNA, 25 bp, Homo sapien
aatttaagatgctgagaggcaagcc

SEQ ID NO: 4309719 - DNA, 25 bp, Homo sapien
tacacagtggaggaacttaagattc

SEQ ID NO: 4309720 - DNA, 25 bp, Homo sapien
tgtctcttgcctaaccacagtgagg

SEQ ID NO: 4309721 - DNA, 25 bp, Homo sapien
caagttgcagacaaagttaggaggc

SEQ ID NO: 4309722 - DNA, 25 bp, Homo sapien
tgcagacaaagttaggaggcccctg

SEQ ID NO: 4309723 - DNA, 25 bp, Homo sapien
aagacaagttgcagacaaagttagg

SEQ ID NO: 4309724 - DNA, 25 bp, Homo sapien
aaagggaaagacaagttgcagacaa

SEQ ID NO: 4309725 - DNA, 25 bp, Homo sapien
aaagcaagctggtgttccatctaaa

SEQ ID NO: 4309726 - DNA, 25 bp, Homo sapien
tagagaactttgacggtaactagga

SEQ ID NO: 4309727 - DNA, 25 bp, Homo sapien
caaaggagtggacaaataagtcagc

SEQ ID NO: 4309728 - DNA, 25 bp, Homo sapien
ggtttcaaccaaaacgatgcacgtg

SEQ ID NO: 4309729 - DNA, 25 bp, Homo sapien
aatatgtcagtcttgccaccgaggc

SEQ ID NO: 4309730 - DNA, 25 bp, Homo sapien
cacaatggcgactgtgagaagatca

SEQ ID NO: 4309731 - DNA, 25 bp, Homo sapien
gcagtcccacagtttagagcggtag

SEQ ID NO: 4309732 - DNA, 25 bp, Homo sapien
tttcatagaagccatgcacttgccc

SEQ ID NO: 4309733 - DNA, 25 bp, Homo sapien
gagcctctggcggtccatgggtaca

SEQ ID NO: 4309734 - DNA, 25 bp, Homo sapien
tttaatgggagcctctggcggtcca

SEQ ID NO: 4309735 - DNA, 25 bp, Homo sapien
cggtccatgggtacaatgattagat

SEQ ID NO: 4309736 - DNA, 25 bp, Homo sapien
tctggcggtccatgggtacaatgat

SEQ ID NO: 4309737 - DNA, 25 bp, Homo sapien
gccaaatggccggtagacaaaacac

SEQ ID NO: 4309738 - DNA, 25 bp, Homo sapien
aaattgtgccttgtcggttcccttg

SEQ ID NO: 4309739 - DNA, 25 bp, Homo sapien
tatgagaaatatatgtgcaatggcc

SEQ ID NO: 4309740 - DNA, 25 bp, Homo sapien
tgaagtacttctatagaaccaaggg

SEQ ID NO: 4309741 - DNA, 25 bp, Homo sapien
tacctccagggagagcctaatgcaa

SEQ ID NO: 4309742 - DNA, 25 bp, Homo sapien
cataaactgaggtggtgccgtgact

SEQ ID NO: 4309743 - DNA, 25 bp, Homo sapien
tataaaacagggtctaaaatgagcc

SEQ ID NO: 4309744 - DNA, 25 bp, Homo sapien
tttgcctggcagtaaatggacgcct

SEQ ID NO: 4309745 - DNA, 25 bp, Homo sapien
taaactgtgaaagtcgctcggatcc

SEQ ID NO: 4309746 - DNA, 25 bp, Homo sapien
taatcacgagataggccccatttcc

SEQ ID NO: 4309747 - DNA, 25 bp, Homo sapien
taagctgttaagcaggcctcccaga

SEQ ID NO: 4309748 - DNA, 25 bp, Homo sapien
tatggtcatgtcgacaacagcttgc

SEQ ID NO: 4309749 - DNA, 25 bp, Homo sapien
tgcacatattttcgctattcctggg

SEQ ID NO: 4309750 - DNA, 25 bp, Homo sapien
caatatctgaagagagcgtgctaac

SEQ ID NO: 4309751 - DNA, 25 bp, Homo sapien
taaatcattgttcgcgctgcacata

SEQ ID NO: 4309752 - DNA, 25 bp, Homo sapien
taacaaatgcaatcccgtaaacagg

SEQ ID NO: 4309753 - DNA, 25 bp, Homo sapien
tcttcacagatcatggaagggtcca

SEQ ID NO: 4309754 - DNA, 25 bp, Homo sapien
ggagcaaagcgaatacacaatgtat

SEQ ID NO: 4309755 - DNA, 25 bp, Homo sapien
gagcccagctgcctctaaatagcca

SEQ ID NO: 4309756 - DNA, 25 bp, Homo sapien
gttttactagaacacagacagatcc

SEQ ID NO: 4309757 - DNA, 25 bp, Homo sapien
gcgcagttgcttaagagtaaaatta

SEQ ID NO: 4309758 - DNA, 25 bp, Homo sapien
catctgctacaaataagggctccat

SEQ ID NO: 4309759 - DNA, 25 bp, Homo sapien
taagagtaaaattaggtacatctgc

SEQ ID NO: 4309760 - DNA, 25 bp, Homo sapien
agttacaaggcgcagttgcttaaga

SEQ ID NO: 4309761 - DNA, 25 bp, Homo sapien
cagcaagaaaagttgggttgaagtg

SEQ ID NO: 4309762 - DNA, 25 bp, Homo sapien
ggaaaagctgctgtctatgggaata

SEQ ID NO: 4309763 - DNA, 25 bp, Homo sapien
gctgctgtctatgggaatacttagt

SEQ ID NO: 4309764 - DNA, 25 bp, Homo sapien
aaaagttgggttgaagtggaatgat

SEQ ID NO: 4309765 - DNA, 25 bp, Homo sapien
cccaagatgattggattttaatata

SEQ ID NO: 4309766 - DNA, 25 bp, Homo sapien
gatgaggtgggctaaaaaatggaac

SEQ ID NO: 4309767 - DNA, 25 bp, Homo sapien
gccatatctacaatgacccaagatg

SEQ ID NO: 4309768 - DNA, 25 bp, Homo sapien
gggttctccttggaggtctccaaca

SEQ ID NO: 4309769 - DNA, 25 bp, Homo sapien
ttacaatagatttgagttcaaagac

SEQ ID NO: 4309770 - DNA, 25 bp, Homo sapien
cttccttcttgtggctcagtgtacc

SEQ ID NO: 4309771 - DNA, 25 bp, Homo sapien
taacatggggttcaattccctacat

SEQ ID NO: 4309772 - DNA, 25 bp, Homo sapien
cagtatttagcaaagggtctctgga

SEQ ID NO: 4309773 - DNA, 25 bp, Homo sapien
tggagagattaatgacacataactg

SEQ ID NO: 4309774 - DNA, 25 bp, Homo sapien
tacaaggctcaaatcacaagttaca

SEQ ID NO: 4309775 - DNA, 25 bp, Homo sapien
cagggtgaaatatgccttttctaga

SEQ ID NO: 4309776 - DNA, 25 bp, Homo sapien
ggtggcattgattcctacacaaaat

SEQ ID NO: 4309777 - DNA, 25 bp, Homo sapien
tttacctactagcaagggaaggtgc

SEQ ID NO: 4309778 - DNA, 25 bp, Homo sapien
cctggccccatgaaagcattcaata

SEQ ID NO: 4309779 - DNA, 25 bp, Homo sapien
ctggaagttccccttctaggacaca

SEQ ID NO: 4309780 - DNA, 25 bp, Homo sapien
tccagcagctacaacgggaaaggcc

SEQ ID NO: 4309781 - DNA, 25 bp, Homo sapien
gcttgtctccaagttgcatcccaaa

SEQ ID NO: 4309782 - DNA, 25 bp, Homo sapien
taccagtcactcacaggtacccagg

SEQ ID NO: 4309783 - DNA, 25 bp, Homo sapien
gaacactatttcttgggtcgcctgt

SEQ ID NO: 4309784 - DNA, 25 bp, Homo sapien
gaaaatggtttgagcactttgtccc

SEQ ID NO: 4309785 - DNA, 25 bp, Homo sapien
gaagcagcttcctacagtgatgccc

SEQ ID NO: 4309786 - DNA, 25 bp, Homo sapien
gccacaaacccagtgctgcatgaat

SEQ ID NO: 4309787 - DNA, 25 bp, Homo sapien
gggaggcaccaataagagctaattt

SEQ ID NO: 4309788 - DNA, 25 bp, Homo sapien
tcctactcgtagagggaagcagctt

SEQ ID NO: 4309789 - DNA, 25 bp, Homo sapien
ccaagggcttgaaattagtctctta

SEQ ID NO: 4309790 - DNA, 25 bp, Homo sapien
aagggttaggctgacacacaggtcc

SEQ ID NO: 4309791 - DNA, 25 bp, Homo sapien
caggacttccaactcccaagggctt

SEQ ID NO: 4309792 - DNA, 25 bp, Homo sapien
ggtccactcatcttcgtctcagcaa

SEQ ID NO: 4309793 - DNA, 25 bp, Homo sapien
ggacagacaggtgaacacaaaacac

SEQ ID NO: 4309794 - DNA, 25 bp, Homo sapien
atggacagacaggtgaacacaaaac

SEQ ID NO: 4309795 - DNA, 25 bp, Homo sapien
agatggacagacaggtgaacacaaa

SEQ ID NO: 4309796 - DNA, 25 bp, Homo sapien
acagacaggtgaacacaaaacactg

SEQ ID NO: 4309797 - DNA, 25 bp, Homo sapien
cagtaaaattcgcacccaccacctc

SEQ ID NO: 4309798 - DNA, 25 bp, Homo sapien
agcagtaaaattcgcacccaccacc

SEQ ID NO: 4309799 - DNA, 25 bp, Homo sapien
gcagtaaaattcgcacccaccacct

SEQ ID NO: 4309800 - DNA, 25 bp, Homo sapien
cagcagtaaaattcgcacccaccac

SEQ ID NO: 4309801 - DNA, 25 bp, Homo sapien
ctctagtaagtggttgctgccgccc

SEQ ID NO: 4309802 - DNA, 25 bp, Homo sapien
ggctgaaccgttactttttgtctca

SEQ ID NO: 4309803 - DNA, 25 bp, Homo sapien
tgggcgaggtcagctgccccgatgt

SEQ ID NO: 4309804 - DNA, 25 bp, Homo sapien
cacggccggcgtctctccgttggac

SEQ ID NO: 4309805 - DNA, 25 bp, Homo sapien
ggttcctttgctcaaaaaccagcaa

SEQ ID NO: 4309806 - DNA, 25 bp, Homo sapien
cctatagagcatattaggtataaac

SEQ ID NO: 4309807 - DNA, 25 bp, Homo sapien
acatgtgcaggcactatttgttggt

SEQ ID NO: 4309808 - DNA, 25 bp, Homo sapien
aaccagcaagtcatcctatagagca

SEQ ID NO: 4309809 - DNA, 25 bp, Homo sapien
gtcttcaggagaaaatgctgatgat

SEQ ID NO: 4309810 - DNA, 25 bp, Homo sapien
tgtcctgtcttcaggagaaaatgct

SEQ ID NO: 4309811 - DNA, 25 bp, Homo sapien
tcctgtcttcaggagaaaatgctga

SEQ ID NO: 4309812 - DNA, 25 bp, Homo sapien
ctgtcttcaggagaaaatgctgatg

SEQ ID NO: 4309813 - DNA, 25 bp, Homo sapien
catattactaatgagcggaggtgac

SEQ ID NO: 4309814 - DNA, 25 bp, Homo sapien
aaacttgcatagcactgcacctggg

SEQ ID NO: 4309815 - DNA, 25 bp, Homo sapien
taaactttgatgacacaagacactg

SEQ ID NO: 4309816 - DNA, 25 bp, Homo sapien
tccaacaagtaggttcgccaatcat

SEQ ID NO: 4309817 - DNA, 25 bp, Homo sapien
tacgaagatggcgaagcaaaaggga

SEQ ID NO: 4309818 - DNA, 25 bp, Homo sapien
ccactgttctagaggcacattccag

SEQ ID NO: 4309819 - DNA, 25 bp, Homo sapien
gacagaagacttagaagggagtttc

SEQ ID NO: 4309820 - DNA, 25 bp, Homo sapien
tattgtgaaacgtgcatgagaggga

SEQ ID NO: 4309821 - DNA, 25 bp, Homo sapien
gtgcgctgttcaccggccaagaaga

SEQ ID NO: 4309822 - DNA, 25 bp, Homo sapien
ccaaagcacgcaggatgtcagacgg

SEQ ID NO: 4309823 - DNA, 25 bp, Homo sapien
gagcgcacaggacgactctggtttg

SEQ ID NO: 4309824 - DNA, 25 bp, Homo sapien
cggttctagcgatgcagtggttctc

SEQ ID NO: 4309825 - DNA, 25 bp, Homo sapien
ttagtgactaacagagaaaattggc

SEQ ID NO: 4309826 - DNA, 25 bp, Homo sapien
tttctcgttgaagggcaatgccaca

SEQ ID NO: 4309827 - DNA, 25 bp, Homo sapien
aacacccgagatttatgtagccaat

SEQ ID NO: 4309828 - DNA, 25 bp, Homo sapien
aatggaaaaagctttctcgttgaag

SEQ ID NO: 4309829 - DNA, 25 bp, Homo sapien
taagcaaagacgacaccagtttttc

SEQ ID NO: 4309830 - DNA, 25 bp, Homo sapien
gacttcttgcagacaggtagccata

SEQ ID NO: 4309831 - DNA, 25 bp, Homo sapien
gcttgaagcgtaaccctatggagtg

SEQ ID NO: 4309832 - DNA, 25 bp, Homo sapien
cagttttagccgagataccagtttc

SEQ ID NO: 4309833 - DNA, 25 bp, Homo sapien
tctcttgagccctggcaatggaagt

SEQ ID NO: 4309834 - DNA, 25 bp, Homo sapien
aatttagccaattgcagtgatgcac

SEQ ID NO: 4309835 - DNA, 25 bp, Homo sapien
tatcgattatcagtggctggcactc

SEQ ID NO: 4309836 - DNA, 25 bp, Homo sapien
taatgatgtcttctttacggcagga

SEQ ID NO: 4309837 - DNA, 25 bp, Homo sapien
ggacattccttttagcccaaatcaa

SEQ ID NO: 4309838 - DNA, 25 bp, Homo sapien
tctggaattgccgttattatctggg

SEQ ID NO: 4309839 - DNA, 25 bp, Homo sapien
gatgtttctcgcatgcccatttggg

SEQ ID NO: 4309840 - DNA, 25 bp, Homo sapien
cacactgacctttggtggtgcaaac

SEQ ID NO: 4309841 - DNA, 25 bp, Homo sapien
tcaaagagtgacattaggccaactg

SEQ ID NO: 4309842 - DNA, 25 bp, Homo sapien
ggcacaagttgcaccgcctacagaa

SEQ ID NO: 4309843 - DNA, 25 bp, Homo sapien
aatcatatccaggagccagtggccc

SEQ ID NO: 4309844 - DNA, 25 bp, Homo sapien
gatgctcttcaaatccttggaggca

SEQ ID NO: 4309845 - DNA, 25 bp, Homo sapien
ttccatgtgctcattccagtgaagg

SEQ ID NO: 4309846 - DNA, 25 bp, Homo sapien
ataatttccatgtgctcattccagt

SEQ ID NO: 4309847 - DNA, 25 bp, Homo sapien
ccatgtgctcattccagtgaaggct

SEQ ID NO: 4309848 - DNA, 25 bp, Homo sapien
tccatgtgctcattccagtgaaggc

SEQ ID NO: 4309849 - DNA, 25 bp, Homo sapien
tctgtactaggtaaagaacatatat

SEQ ID NO: 4309850 - DNA, 25 bp, Homo sapien
actatacttacacaatactgtaagg

SEQ ID NO: 4309851 - DNA, 25 bp, Homo sapien
ctatacttacacaatactgtaaggt

SEQ ID NO: 4309852 - DNA, 25 bp, Homo sapien
attctgtactaggtaaagaacatat

SEQ ID NO: 4309853 - DNA, 25 bp, Homo sapien
gattctagagcttcattgtcccaca

SEQ ID NO: 4309854 - DNA, 25 bp, Homo sapien
tgctatgggccaagttctctgtaac

SEQ ID NO: 4309855 - DNA, 25 bp, Homo sapien
tctagcagccacgtataaacaagca

SEQ ID NO: 4309856 - DNA, 25 bp, Homo sapien
tgtcccacaggcatataatgagagc

SEQ ID NO: 4309857 - DNA, 25 bp, Homo sapien
gaagcatttcaagatcctggcctgg

SEQ ID NO: 4309858 - DNA, 25 bp, Homo sapien
tagctaccatagcagacagtgcagg

SEQ ID NO: 4309859 - DNA, 25 bp, Homo sapien
gattgcagagctatggagccaagga

SEQ ID NO: 4309860 - DNA, 25 bp, Homo sapien
ctaggaaaggagtatcaggaagcac

SEQ ID NO: 4309861 - DNA, 25 bp, Homo sapien
gacctaacagctgtctgacctggga

SEQ ID NO: 4309862 - DNA, 25 bp, Homo sapien
gacaagcgttcacaacagttctaga

SEQ ID NO: 4309863 - DNA, 25 bp, Homo sapien
caaattacagttaccttgccaggcc

SEQ ID NO: 4309864 - DNA, 25 bp, Homo sapien
taggctgctacctggaacactactg

SEQ ID NO: 4309865 - DNA, 25 bp, Homo sapien
gggagaatccgttcacgatgtagaa

SEQ ID NO: 4309866 - DNA, 25 bp, Homo sapien
acgatgtagaagagtttagtgatgc

SEQ ID NO: 4309867 - DNA, 25 bp, Homo sapien
cagtgtactggccaaaggccatgaa

SEQ ID NO: 4309868 - DNA, 25 bp, Homo sapien
tcccactggcttcggcgagagccat

SEQ ID NO: 4309869 - DNA, 25 bp, Homo sapien
tattgtattgccacccagcaaggca

SEQ ID NO: 4309870 - DNA, 25 bp, Homo sapien
tagcctgtaatatccctcaccaagg

SEQ ID NO: 4309871 - DNA, 25 bp, Homo sapien
gaaaaagtacatagccagtcaccca

SEQ ID NO: 4309872 - DNA, 25 bp, Homo sapien
tttcaattatgaagctgcaccactc

SEQ ID NO: 4309873 - DNA, 25 bp, Homo sapien
aatgttcctagtaaaaggctccagg

SEQ ID NO: 4309874 - DNA, 25 bp, Homo sapien
catatacagagctcagtggcagaag

SEQ ID NO: 4309875 - DNA, 25 bp, Homo sapien
cagaagcgagagttccgtaggattt

SEQ ID NO: 4309876 - DNA, 25 bp, Homo sapien
tccagagccctcagatgaagtgagg

SEQ ID NO: 4309877 - DNA, 25 bp, Homo sapien
ctgagctgcgaccttctgcctggaa

SEQ ID NO: 4309878 - DNA, 25 bp, Homo sapien
ttggctgagctgcgaccttctgcct

SEQ ID NO: 4309879 - DNA, 25 bp, Homo sapien
tgagctgcgaccttctgcctggaat

SEQ ID NO: 4309880 - DNA, 25 bp, Homo sapien
ggctgagctgcgaccttctgcctgg

SEQ ID NO: 4309881 - DNA, 25 bp, Homo sapien
gcagctgacaccatgagcaggcaag

SEQ ID NO: 4309882 - DNA, 25 bp, Homo sapien
catgagcaggcaagggtgtcgcttc

SEQ ID NO: 4309883 - DNA, 25 bp, Homo sapien
aatgcagctgacaccatgagcaggc

SEQ ID NO: 4309884 - DNA, 25 bp, Homo sapien
aagggtgtcgcttcatggctatctg

SEQ ID NO: 4309885 - DNA, 25 bp, Homo sapien
tgtggctttcgaatctgaaaagaac

SEQ ID NO: 4309886 - DNA, 25 bp, Homo sapien
aggcaagaatttgtggctttcgaat

SEQ ID NO: 4309887 - DNA, 25 bp, Homo sapien
aagaatttgtggctttcgaatctga

SEQ ID NO: 4309888 - DNA, 25 bp, Homo sapien
gaatttgtggctttcgaatctgaaa

SEQ ID NO: 4309889 - DNA, 25 bp, Homo sapien
ctttctaatacgtagggaaggctcg

SEQ ID NO: 4309890 - DNA, 25 bp, Homo sapien
tgtggatgccacctgctagttacgt

SEQ ID NO: 4309891 - DNA, 25 bp, Homo sapien
taaagtcccttaagacaagtgagcc

SEQ ID NO: 4309892 - DNA, 25 bp, Homo sapien
gaggctcagcgtggtacccagttag

SEQ ID NO: 4309893 - DNA, 25 bp, Homo sapien
atctgacccggtagatcttgagccg

SEQ ID NO: 4309894 - DNA, 25 bp, Homo sapien
ggactccattggcaaaacggctagc

SEQ ID NO: 4309895 - DNA, 25 bp, Homo sapien
tgggactgagtcttcgggtggcctt

SEQ ID NO: 4309896 - DNA, 25 bp, Homo sapien
agccgttgcaaaggtgctccactaa

SEQ ID NO: 4309897 - DNA, 25 bp, Homo sapien
gtgcaatggagtgattcacggctca

SEQ ID NO: 4309898 - DNA, 25 bp, Homo sapien
taagaagcatgtaaccattgtaccc

SEQ ID NO: 4309899 - DNA, 25 bp, Homo sapien
tgacttgtaagtccagagttttagg

SEQ ID NO: 4309900 - DNA, 25 bp, Homo sapien
gctcaatgtagtttggtggctccaa

SEQ ID NO: 4309901 - DNA, 25 bp, Homo sapien
tatcaccctgtagttcagctggagg

SEQ ID NO: 4309902 - DNA, 25 bp, Homo sapien
aacagtcttgtattgggtactccca

SEQ ID NO: 4309903 - DNA, 25 bp, Homo sapien
cacaagatcacatagcgagaaaggt

SEQ ID NO: 4309904 - DNA, 25 bp, Homo sapien
gagatagttacagaggtcaggcagc

SEQ ID NO: 4309905 - DNA, 25 bp, Homo sapien
gagatttcagagatccagttctcag

SEQ ID NO: 4309906 - DNA, 25 bp, Homo sapien
gaatcccgccaaagtgcaacatgta

SEQ ID NO: 4309907 - DNA, 25 bp, Homo sapien
aactctcagtctggaatcagcccac

SEQ ID NO: 4309908 - DNA, 25 bp, Homo sapien
ccatcttgaagaacccagttgattc

SEQ ID NO: 4309909 - DNA, 25 bp, Homo sapien
caaagtctgagtttccgagtgctgg

SEQ ID NO: 4309910 - DNA, 25 bp, Homo sapien
tatattctccctcccaaggtgcaag

SEQ ID NO: 4309911 - DNA, 25 bp, Homo sapien
caagtggagtggacaccttggccaa

SEQ ID NO: 4309912 - DNA, 25 bp, Homo sapien
aaaatgatgtgcctctacgacaagg

SEQ ID NO: 4309913 - DNA, 25 bp, Homo sapien
aattgctgcccaccaattcggtgtg

SEQ ID NO: 4309914 - DNA, 25 bp, Homo sapien
gaaaaaagcaatctaaagctgtcaa

SEQ ID NO: 4309915 - DNA, 25 bp, Homo sapien
aatctggaattaccagatttcagga

SEQ ID NO: 4309916 - DNA, 25 bp, Homo sapien
ggtgtgatcacttgaaaacacaact

SEQ ID NO: 4309917 - DNA, 25 bp, Homo sapien
tgtactcactgaagctgtctgttgc

SEQ ID NO: 4309918 - DNA, 25 bp, Homo sapien
gatcactggtacatatgattatctc

SEQ ID NO: 4309919 - DNA, 25 bp, Homo sapien
tagcatctactgacggatcactggt

SEQ ID NO: 4309920 - DNA, 25 bp, Homo sapien
taaaagaaccacacgggtaatagca

SEQ ID NO: 4309921 - DNA, 25 bp, Homo sapien
acagagagacagaggctgctcacgt

SEQ ID NO: 4309922 - DNA, 25 bp, Homo sapien
tacagagagacagaggctgctcacg

SEQ ID NO: 4309923 - DNA, 25 bp, Homo sapien
cagagagacagaggctgctcacgta

SEQ ID NO: 4309924 - DNA, 25 bp, Homo sapien
ctacagagagacagaggctgctcac

SEQ ID NO: 4309925 - DNA, 25 bp, Homo sapien
tcaacttcgatgtcctcctgaggct

SEQ ID NO: 4309926 - DNA, 25 bp, Homo sapien
ccatgggtcttgcaatatactaggg

SEQ ID NO: 4309927 - DNA, 25 bp, Homo sapien
ggcatcccgggtgggtcaacttcga

SEQ ID NO: 4309928 - DNA, 25 bp, Homo sapien
cctgaggctccgtgtagaattatac

SEQ ID NO: 4309929 - DNA, 25 bp, Homo sapien
tcccctctcttgtacaacgagcaga

SEQ ID NO: 4309930 - DNA, 25 bp, Homo sapien
ctctcttgtacaacgagcagaggca

SEQ ID NO: 4309931 - DNA, 25 bp, Homo sapien
tcaatcccctctcttgtacaacgag

SEQ ID NO: 4309932 - DNA, 25 bp, Homo sapien
ctgttcaatcccctctcttgtacaa

SEQ ID NO: 4309933 - DNA, 25 bp, Homo sapien
cgaagaatcaggacttagaagccta

SEQ ID NO: 4309934 - DNA, 25 bp, Homo sapien
taagctatagggttactttctctgc

SEQ ID NO: 4309935 - DNA, 25 bp, Homo sapien
ccaagcaatttctgcagacttgtga

SEQ ID NO: 4309936 - DNA, 25 bp, Homo sapien
gaagcctaagtcgttctgagtacaa

SEQ ID NO: 4309937 - DNA, 25 bp, Homo sapien
gcatcgctggacagttttaaagact

SEQ ID NO: 4309938 - DNA, 25 bp, Homo sapien
gactggacattagttgctgcttcga

SEQ ID NO: 4309939 - DNA, 25 bp, Homo sapien
ttcaagcatgccaagttcactccca

SEQ ID NO: 4309940 - DNA, 25 bp, Homo sapien
tcttgccacatgcatcagtctgatg

SEQ ID NO: 4309941 - DNA, 25 bp, Homo sapien
tttgcgactggccaagaaatcttga

SEQ ID NO: 4309942 - DNA, 25 bp, Homo sapien
tcctggatgcttgaggatttgcgac

SEQ ID NO: 4309943 - DNA, 25 bp, Homo sapien
aatgttcaactgtgtttcacaagtt

SEQ ID NO: 4309944 - DNA, 25 bp, Homo sapien
gagaaagctagaatctgtgatgctc

SEQ ID NO: 4309945 - DNA, 25 bp, Homo sapien
gactttctggttcacaatctcagag

SEQ ID NO: 4309946 - DNA, 25 bp, Homo sapien
ggttcacaatctcagagttttcatc

SEQ ID NO: 4309947 - DNA, 25 bp, Homo sapien
tctggttcacaatctcagagttttc

SEQ ID NO: 4309948 - DNA, 25 bp, Homo sapien
cttgatgactttctggttcacaatc

SEQ ID NO: 4309949 - DNA, 25 bp, Homo sapien
taaaagtcttgggtacaagccacta

SEQ ID NO: 4309950 - DNA, 25 bp, Homo sapien
gttccaacggccactttgaaaatga

SEQ ID NO: 4309951 - DNA, 25 bp, Homo sapien
catggcaagccatagactgcaataa

SEQ ID NO: 4309952 - DNA, 25 bp, Homo sapien
gaaagagtgagcatgtaagctacca

SEQ ID NO: 4309953 - DNA, 25 bp, Homo sapien
gatctgcccagacaagctacattgg

SEQ ID NO: 4309954 - DNA, 25 bp, Homo sapien
tacattggtctggttgtttcacgag

SEQ ID NO: 4309955 - DNA, 25 bp, Homo sapien
aaaattgcttgctttggacatctcc

SEQ ID NO: 4309956 - DNA, 25 bp, Homo sapien
ggacatctccatagtgcggcaacaa

SEQ ID NO: 4309957 - DNA, 25 bp, Homo sapien
aagcaatcttcagttatagtcacct

SEQ ID NO: 4309958 - DNA, 25 bp, Homo sapien
ttcagttatagtcacctcaaaaggt

SEQ ID NO: 4309959 - DNA, 25 bp, Homo sapien
tcttcagttatagtcacctcaaaag

SEQ ID NO: 4309960 - DNA, 25 bp, Homo sapien
caatcttcagttatagtcacctcaa

SEQ ID NO: 4309961 - DNA, 25 bp, Homo sapien
cagcagcctcactgttaataaatgc

SEQ ID NO: 4309962 - DNA, 25 bp, Homo sapien
gcagcctcactgttaataaatgctt

SEQ ID NO: 4309963 - DNA, 25 bp, Homo sapien
agcagcctcactgttaataaatgct

SEQ ID NO: 4309964 - DNA, 25 bp, Homo sapien
tacaggcgcttggaagcctgctggc

SEQ ID NO: 4309965 - DNA, 25 bp, Homo sapien
cacacaacggaagaaagttgagagt

SEQ ID NO: 4309966 - DNA, 25 bp, Homo sapien
gggagaggcaattttcacacaacgg

SEQ ID NO: 4309967 - DNA, 25 bp, Homo sapien
tttgtaagggagaaactacaggcgc

SEQ ID NO: 4309968 - DNA, 25 bp, Homo sapien
aagggatccatgcattgcggcccag

SEQ ID NO: 4309969 - DNA, 25 bp, Homo sapien
caagctttagatgctgagtgacaca

SEQ ID NO: 4309970 - DNA, 25 bp, Homo sapien
tccttgctgaaagagcgccggattc

SEQ ID NO: 4309971 - DNA, 25 bp, Homo sapien
taaagacgacaatccaggtaaggga

SEQ ID NO: 4309972 - DNA, 25 bp, Homo sapien
ccctgaaaaccttaatctctgccat

SEQ ID NO: 4309973 - DNA, 25 bp, Homo sapien
atggacatatctgttcagcctcaag

SEQ ID NO: 4309974 - DNA, 25 bp, Homo sapien
agtctccctgaaaaccttaatctct

SEQ ID NO: 4309975 - DNA, 25 bp, Homo sapien
tgttctcacatggacatatctgttc

SEQ ID NO: 4309976 - DNA, 25 bp, Homo sapien
ttttcccctcaatagtagttggaga

SEQ ID NO: 4309977 - DNA, 25 bp, Homo sapien
cagtggaggcaagtcattagttaca

SEQ ID NO: 4309978 - DNA, 25 bp, Homo sapien
aattacaagcgggaataaggctggg

SEQ ID NO: 4309979 - DNA, 25 bp, Homo sapien
taaggctgggtaaaaggttcagtga

SEQ ID NO: 4309980 - DNA, 25 bp, Homo sapien
tggcccctgggaacatcagtcatgt

SEQ ID NO: 4309981 - DNA, 25 bp, Homo sapien
gacccagactactaagtggaaggaa

SEQ ID NO: 4309982 - DNA, 25 bp, Homo sapien
gctaaaatgtgcctctgagaggtcc

SEQ ID NO: 4309983 - DNA, 25 bp, Homo sapien
gcctgtgactcccaattcatagaga

SEQ ID NO: 4309984 - DNA, 25 bp, Homo sapien
tcatttcattaggaggcaagagagg

SEQ ID NO: 4309985 - DNA, 25 bp, Homo sapien
cacacttccgttaagaggcagcaaa

SEQ ID NO: 4309986 - DNA, 25 bp, Homo sapien
caactctggtttgaagtaagtggaa

SEQ ID NO: 4309987 - DNA, 25 bp, Homo sapien
gctggacttgaacaagctttacttt

SEQ ID NO: 4309988 - DNA, 25 bp, Homo sapien
caggctcgtcactggtacaaggtgg

SEQ ID NO: 4309989 - DNA, 25 bp, Homo sapien
cagatccaggctcgtcactggtaca

SEQ ID NO: 4309990 - DNA, 25 bp, Homo sapien
cactggtacaaggtggggtactcag

SEQ ID NO: 4309991 - DNA, 25 bp, Homo sapien
tccaggctcgtcactggtacaaggt

SEQ ID NO: 4309992 - DNA, 25 bp, Homo sapien
ccagtgacaggcatacaagaggctc

SEQ ID NO: 4309993 - DNA, 25 bp, Homo sapien
tttaaggaaacagatacggcgtggc

SEQ ID NO: 4309994 - DNA, 25 bp, Homo sapien
taaatgggaattcgcacaggcgggc

SEQ ID NO: 4309995 - DNA, 25 bp, Homo sapien
gaaggccgtaccactctaactgcaa

SEQ ID NO: 4309996 - DNA, 25 bp, Homo sapien
taaatatatgatcgagcctgctgtg

SEQ ID NO: 4309997 - DNA, 25 bp, Homo sapien
ctgtaaagagctgctatactccctg

SEQ ID NO: 4309998 - DNA, 25 bp, Homo sapien
gaaacttctatgctaaattcccaaa

SEQ ID NO: 4309999 - DNA, 25 bp, Homo sapien
ttcccaaagcctctaagttgctact

SEQ ID NO: 4310000 - DNA, 25 bp, Homo sapien
ttaaaagacagggaggaccatccca

SEQ ID NO: 4310001 - DNA, 25 bp, Homo sapien
tatagtcagggttgaaaaccagtgg

SEQ ID NO: 4310002 - DNA, 25 bp, Homo sapien
tctactgccatgaccctattaaaag

SEQ ID NO: 4310003 - DNA, 25 bp, Homo sapien
gtggagatgacaaagaactgagact

SEQ ID NO: 4310004 - DNA, 25 bp, Homo sapien
cgctggaagaattcgcagcatacat

SEQ ID NO: 4310005 - DNA, 25 bp, Homo sapien
gaattcgcagcatacatgttccaaa

SEQ ID NO: 4310006 - DNA, 25 bp, Homo sapien
gaagaattcgcagcatacatgttcc

SEQ ID NO: 4310007 - DNA, 25 bp, Homo sapien
cgcagcatacatgttccaaaacagt

SEQ ID NO: 4310008 - DNA, 25 bp, Homo sapien
tactgaagacaggtaaaggagatcc

SEQ ID NO: 4310009 - DNA, 25 bp, Homo sapien
tcaaaactgggctgtgaggtctcca

SEQ ID NO: 4310010 - DNA, 25 bp, Homo sapien
ggtcagagcaaagggcccgtattaa

SEQ ID NO: 4310011 - DNA, 25 bp, Homo sapien
tacagaatagtagcacctaggtggg

SEQ ID NO: 4310012 - DNA, 25 bp, Homo sapien
tgcccaaattggtttatttcacatt

SEQ ID NO: 4310013 - DNA, 25 bp, Homo sapien
gtgcccaaattggtttatttcacat

SEQ ID NO: 4310014 - DNA, 25 bp, Homo sapien
tgtgcccaaattggtttatttcaca

SEQ ID NO: 4310015 - DNA, 25 bp, Homo sapien
taatcaactggttaacagatccacc

SEQ ID NO: 4310016 - DNA, 25 bp, Homo sapien
tggtagaacatgcatgagtcgcttc

SEQ ID NO: 4310017 - DNA, 25 bp, Homo sapien
tagagcttgactctccagtcgtaag

SEQ ID NO: 4310018 - DNA, 25 bp, Homo sapien
gtaagactgaacgacttctacagca

SEQ ID NO: 4310019 - DNA, 25 bp, Homo sapien
ctaccctggtgttatgcaagatccc

SEQ ID NO: 4310020 - DNA, 25 bp, Homo sapien
agaagagccacccagagttctccat

SEQ ID NO: 4310021 - DNA, 25 bp, Homo sapien
gagcaggcggcattcttcagtgcag

SEQ ID NO: 4310022 - DNA, 25 bp, Homo sapien
cctgcttattttggcgatgaaaaca

SEQ ID NO: 4310023 - DNA, 25 bp, Homo sapien
attctttatgtgacctaaaagacat

SEQ ID NO: 4310024 - DNA, 25 bp, Homo sapien
tttatgtgacctaaaagacatatgc

SEQ ID NO: 4310025 - DNA, 25 bp, Homo sapien
tatgtgacctaaaagacatatgcat

SEQ ID NO: 4310026 - DNA, 25 bp, Homo sapien
tctttatgtgacctaaaagacatat

SEQ ID NO: 4310027 - DNA, 25 bp, Homo sapien
aactgggtcatccatgagtactgct

SEQ ID NO: 4310028 - DNA, 25 bp, Homo sapien
caactgggtcatccatgagtactgc

SEQ ID NO: 4310029 - DNA, 25 bp, Homo sapien
tgacattctttgccacggacctgtg

SEQ ID NO: 4310030 - DNA, 25 bp, Homo sapien
ccatgagtactgctgacattctttg

SEQ ID NO: 4310031 - DNA, 25 bp, Homo sapien
aagaggatctgtgggggactaggac

SEQ ID NO: 4310032 - DNA, 25 bp, Homo sapien
tgtgcagatgacacagtcctttgag

SEQ ID NO: 4310033 - DNA, 25 bp, Homo sapien
agggccattcccaagaggatctgtg

SEQ ID NO: 4310034 - DNA, 25 bp, Homo sapien
tgagggccattcccaagaggatctg

SEQ ID NO: 4310035 - DNA, 25 bp, Homo sapien
cactcccacggtaagctttcagcag

SEQ ID NO: 4310036 - DNA, 25 bp, Homo sapien
ggagagttctgtcccgtccttgagt

SEQ ID NO: 4310037 - DNA, 25 bp, Homo sapien
tggagagttctgtcccgtccttgag

SEQ ID NO: 4310038 - DNA, 25 bp, Homo sapien
tcccacggtaagctttcagcagaga

SEQ ID NO: 4310039 - DNA, 25 bp, Homo sapien
cctgaaattttaacgtgtctcacag

SEQ ID NO: 4310040 - DNA, 25 bp, Homo sapien
ttaacgtgtctcacagccataaaaa

SEQ ID NO: 4310041 - DNA, 25 bp, Homo sapien
tgggagggggcatgcataatgccac

SEQ ID NO: 4310042 - DNA, 25 bp, Homo sapien
acagccataaaaagcctggggtcac

SEQ ID NO: 4310043 - DNA, 25 bp, Homo sapien
ttcatgtgctgagactgcaaagctt

SEQ ID NO: 4310044 - DNA, 25 bp, Homo sapien
catgtgctgagactgcaaagctttc

SEQ ID NO: 4310045 - DNA, 25 bp, Homo sapien
tgtgctgagactgcaaagctttcat

SEQ ID NO: 4310046 - DNA, 25 bp, Homo sapien
tcatgtgctgagactgcaaagcttt

SEQ ID NO: 4310047 - DNA, 25 bp, Homo sapien
caaacacagtttccaagggatgtgg

SEQ ID NO: 4310048 - DNA, 25 bp, Homo sapien
ggataatttgtaggtccggcttctc

SEQ ID NO: 4310049 - DNA, 25 bp, Homo sapien
gggacactaactaatttgacacagt

SEQ ID NO: 4310050 - DNA, 25 bp, Homo sapien
taatttgctcacactcgattgcagg

SEQ ID NO: 4310051 - DNA, 25 bp, Homo sapien
gtgtataccgcattaggatctacct

SEQ ID NO: 4310052 - DNA, 25 bp, Homo sapien
cacagcagctaacacattgtgagtg

SEQ ID NO: 4310053 - DNA, 25 bp, Homo sapien
taccaaaatctctgtgttagtcaca

SEQ ID NO: 4310054 - DNA, 25 bp, Homo sapien
tgccctcattaagatctacctcaaa

SEQ ID NO: 4310055 - DNA, 25 bp, Homo sapien
ggcaccactttgctatagcccttta

SEQ ID NO: 4310056 - DNA, 25 bp, Homo sapien
ggcaccggggcaccactttgctata

SEQ ID NO: 4310057 - DNA, 25 bp, Homo sapien
aagacgcaggttccgatcggcaccg

SEQ ID NO: 4310058 - DNA, 25 bp, Homo sapien
gaacagagtcacaagacgcaggttc

SEQ ID NO: 4310059 - DNA, 25 bp, Homo sapien
tcagaagtcactgcctccaactgct

SEQ ID NO: 4310060 - DNA, 25 bp, Homo sapien
agtcactgcctccaactgcttcgca

SEQ ID NO: 4310061 - DNA, 25 bp, Homo sapien
actgcctccaactgcttcgcatcca

SEQ ID NO: 4310062 - DNA, 25 bp, Homo sapien
ctgaatcagaagtcactgcctccaa

SEQ ID NO: 4310063 - DNA, 25 bp, Homo sapien
ccacagttcgtaattttgtcacagg

SEQ ID NO: 4310064 - DNA, 25 bp, Homo sapien
agccttttaagatagtacacccata

SEQ ID NO: 4310065 - DNA, 25 bp, Homo sapien
ctggacgactccgaaaaaccacttg

SEQ ID NO: 4310066 - DNA, 25 bp, Homo sapien
ttccggaccacacctaaaagctgac

SEQ ID NO: 4310067 - DNA, 25 bp, Homo sapien
gaccaccataattaaagcacccgtc

SEQ ID NO: 4310068 - DNA, 25 bp, Homo sapien
ttaaagcacccgtctgttccacaaa

SEQ ID NO: 4310069 - DNA, 25 bp, Homo sapien
caagtaaggtaattaatgtagcaaa

SEQ ID NO: 4310070 - DNA, 25 bp, Homo sapien
caatgtgtgtaaatttagaccacca

SEQ ID NO: 4310071 - DNA, 25 bp, Homo sapien
gaaacctgagacatgaggttctctc

SEQ ID NO: 4310072 - DNA, 25 bp, Homo sapien
tctgcacaacatttgacctggtcgt

SEQ ID NO: 4310073 - DNA, 25 bp, Homo sapien
tgttgttgagtcatagacgctatcg

SEQ ID NO: 4310074 - DNA, 25 bp, Homo sapien
tggttctgctaacaacaatttctgt

SEQ ID NO: 4310075 - DNA, 25 bp, Homo sapien
tcttaagactgcaaatagggccact

SEQ ID NO: 4310076 - DNA, 25 bp, Homo sapien
aattctgcgtgttggcctgaaccac

SEQ ID NO: 4310077 - DNA, 25 bp, Homo sapien
tatgagatacccatgctggctgaca

SEQ ID NO: 4310078 - DNA, 25 bp, Homo sapien
gagctctgtgtaccaaccaaaggaa

SEQ ID NO: 4310079 - DNA, 25 bp, Homo sapien
ggtctttcgcttgtgcgggcctcaa

SEQ ID NO: 4310080 - DNA, 25 bp, Homo sapien
aggttgctgccaatgtccttgcagc

SEQ ID NO: 4310081 - DNA, 25 bp, Homo sapien
acagacacacacttcggtctttcgc

SEQ ID NO: 4310082 - DNA, 25 bp, Homo sapien
tcaattctccaatgccaggttgctg

SEQ ID NO: 4310083 - DNA, 25 bp, Homo sapien
gcaagattgtttgggcccaagaggt

SEQ ID NO: 4310084 - DNA, 25 bp, Homo sapien
gaattccaagtatgataaaactgcc

SEQ ID NO: 4310085 - DNA, 25 bp, Homo sapien
ggcgatggcctacagataattacct

SEQ ID NO: 4310086 - DNA, 25 bp, Homo sapien
taaaggatccgagaaatgatggaat

SEQ ID NO: 4310087 - DNA, 25 bp, Homo sapien
ccaggccggcctgtattgggttatt

SEQ ID NO: 4310088 - DNA, 25 bp, Homo sapien
gaataccattttaccccacacagag

SEQ ID NO: 4310089 - DNA, 25 bp, Homo sapien
gattagactaaacggcagacagagg

SEQ ID NO: 4310090 - DNA, 25 bp, Homo sapien
tcccagagccaaagcacaagttttc

SEQ ID NO: 4310091 - DNA, 25 bp, Homo sapien
tgagtattttacctgcccctgcaac

SEQ ID NO: 4310092 - DNA, 25 bp, Homo sapien
gaaagtgggtctcagtatacaagcc

SEQ ID NO: 4310093 - DNA, 25 bp, Homo sapien
ggatcgcaggcaaaaatgacacatt

SEQ ID NO: 4310094 - DNA, 25 bp, Homo sapien
gattccactgggttcgccgagatac

SEQ ID NO: 4310095 - DNA, 25 bp, Homo sapien
tatggcctgaggattgtaaatgaca

SEQ ID NO: 4310096 - DNA, 25 bp, Homo sapien
tcaagccagagttacattatgcacc

SEQ ID NO: 4310097 - DNA, 25 bp, Homo sapien
taagtctgagtaaacatatggcctg

SEQ ID NO: 4310098 - DNA, 25 bp, Homo sapien
tacaatactcccttcggaaaggcca

SEQ ID NO: 4310099 - DNA, 25 bp, Homo sapien
aagttattccggaggctcccagcag

SEQ ID NO: 4310100 - DNA, 25 bp, Homo sapien
gggtctgacaacgtccctattatca

SEQ ID NO: 4310101 - DNA, 25 bp, Homo sapien
taagacctcctttgagaccctgtgc

SEQ ID NO: 4310102 - DNA, 25 bp, Homo sapien
cccagcagtgtgtggcttagttaag

SEQ ID NO: 4310103 - DNA, 25 bp, Homo sapien
ttcagagaccattcaaactgaaatc

SEQ ID NO: 4310104 - DNA, 25 bp, Homo sapien
tgggtttctgatgcctttatgctcc

SEQ ID NO: 4310105 - DNA, 25 bp, Homo sapien
tgtgttgagggatatcagaaatgaa

SEQ ID NO: 4310106 - DNA, 25 bp, Homo sapien
tgcctttatgctccccttaactaga

SEQ ID NO: 4310107 - DNA, 25 bp, Homo sapien
ggcaaagcctctcgtagaaaaggac

SEQ ID NO: 4310108 - DNA, 25 bp, Homo sapien
gcaggcaaagcctctcgtagaaaag

SEQ ID NO: 4310109 - DNA, 25 bp, Homo sapien
gcaaagcctctcgtagaaaaggacc

SEQ ID NO: 4310110 - DNA, 25 bp, Homo sapien
aagcctctcgtagaaaaggacccat

SEQ ID NO: 4310111 - DNA, 25 bp, Homo sapien
tttctaggactgaagtattagtcat

SEQ ID NO: 4310112 - DNA, 25 bp, Homo sapien
tactatcaatcaccatttgctgaag

SEQ ID NO: 4310113 - DNA, 25 bp, Homo sapien
gacttcggcatctttcgtcacagga

SEQ ID NO: 4310114 - DNA, 25 bp, Homo sapien
ccaggtattgtactcagagaccaaa

SEQ ID NO: 4310115 - DNA, 25 bp, Homo sapien
gaacctcagccctgtaacataaagg

SEQ ID NO: 4310116 - DNA, 25 bp, Homo sapien
cttccctaggtgctattaagcccat

SEQ ID NO: 4310117 - DNA, 25 bp, Homo sapien
tatgaatccacacagcacctacaag

SEQ ID NO: 4310118 - DNA, 25 bp, Homo sapien
tgccaatgtctctggttcaacaggt

SEQ ID NO: 4310119 - DNA, 25 bp, Homo sapien
tgctacaggcaacccagtaagatgc

SEQ ID NO: 4310120 - DNA, 25 bp, Homo sapien
ggccctgaagcggtgttcctttggc

SEQ ID NO: 4310121 - DNA, 25 bp, Homo sapien
cctgaagcggtgttcctttggcaaa

SEQ ID NO: 4310122 - DNA, 25 bp, Homo sapien
acaggccctgaagcggtgttccttt

SEQ ID NO: 4310123 - DNA, 25 bp, Homo sapien
cacaggccctgaagcggtgttcctt

SEQ ID NO: 4310124 - DNA, 25 bp, Homo sapien
gatatccgggattagaccagcttct

SEQ ID NO: 4310125 - DNA, 25 bp, Homo sapien
tcataggccatagaaccagaattag

SEQ ID NO: 4310126 - DNA, 25 bp, Homo sapien
cattagtcctaaaggcgtgtcctct

SEQ ID NO: 4310127 - DNA, 25 bp, Homo sapien
cagaattagagaggtagctggccat

SEQ ID NO: 4310128 - DNA, 25 bp, Homo sapien
tccgcactccaattttgccactaat

SEQ ID NO: 4310129 - DNA, 25 bp, Homo sapien
ggccttcaagaatccaatgttccca

SEQ ID NO: 4310130 - DNA, 25 bp, Homo sapien
ccaaaacaaggttggtgtcactgcc

SEQ ID NO: 4310131 - DNA, 25 bp, Homo sapien
caactgctgcctatgctgggctggc

SEQ ID NO: 4310132 - DNA, 25 bp, Homo sapien
tggtgtataaccgtctcctcagctc

SEQ ID NO: 4310133 - DNA, 25 bp, Homo sapien
tttggtcaaggcaatcaaaccactt

SEQ ID NO: 4310134 - DNA, 25 bp, Homo sapien
acttctcagagctggaactccctca

SEQ ID NO: 4310135 - DNA, 25 bp, Homo sapien
gacattcatccaacatgaagggcca

SEQ ID NO: 4310136 - DNA, 25 bp, Homo sapien
tagctgaaccacatcaatcaatagt

SEQ ID NO: 4310137 - DNA, 25 bp, Homo sapien
gaaccacatcaatcaatagtgtggc

SEQ ID NO: 4310138 - DNA, 25 bp, Homo sapien
cgtatagctgaaccacatcaatcaa

SEQ ID NO: 4310139 - DNA, 25 bp, Homo sapien
ccacgtatagctgaaccacatcaat

SEQ ID NO: 4310140 - DNA, 25 bp, Homo sapien
cacgcgcaggagagtgtcagtgata

SEQ ID NO: 4310141 - DNA, 25 bp, Homo sapien
ttagaggtatcctacggagagggtc

SEQ ID NO: 4310142 - DNA, 25 bp, Homo sapien
tatatctaatatgtagcccagggtc

SEQ ID NO: 4310143 - DNA, 25 bp, Homo sapien
gagaactggaaaccatgccgcagat

SEQ ID NO: 4310144 - DNA, 25 bp, Homo sapien
tctgagcatttcaggaatcaaaggc

SEQ ID NO: 4310145 - DNA, 25 bp, Homo sapien
ctctgagcatttcaggaatcaaagg

SEQ ID NO: 4310146 - DNA, 25 bp, Homo sapien
cacaacctcgacagagaaagaccac

SEQ ID NO: 4310147 - DNA, 25 bp, Homo sapien
ggcaactttcggaaatgaagattcc

SEQ ID NO: 4310148 - DNA, 25 bp, Homo sapien
cacaggaagtgatacgagaggtttt

SEQ ID NO: 4310149 - DNA, 25 bp, Homo sapien
tacaatgaccacaacctcgacagag

SEQ ID NO: 4310150 - DNA, 25 bp, Homo sapien
cagtaaaatgagcaggcgcaaatct

SEQ ID NO: 4310151 - DNA, 25 bp, Homo sapien
caagccgaatgaataatagtacaaa

SEQ ID NO: 4310152 - DNA, 25 bp, Homo sapien
ttataacagatgacaaattggtagc

SEQ ID NO: 4310153 - DNA, 25 bp, Homo sapien
tctggtgcagtattgcaagccgaat

SEQ ID NO: 4310154 - DNA, 25 bp, Homo sapien
ccagcacagacgcagaatattccct

SEQ ID NO: 4310155 - DNA, 25 bp, Homo sapien
ctgcacccatcgagttgatttttcc

SEQ ID NO: 4310156 - DNA, 25 bp, Homo sapien
tttcctgcacccatcgagttgattt

SEQ ID NO: 4310157 - DNA, 25 bp, Homo sapien
tgtcgtggccgggaacggcagccca

SEQ ID NO: 4310158 - DNA, 25 bp, Homo sapien
aacttccctcaatacaggagtccag

SEQ ID NO: 4310159 - DNA, 25 bp, Homo sapien
gatgacagcttcagaagacacctcc

SEQ ID NO: 4310160 - DNA, 25 bp, Homo sapien
cgaagacttgttcccccgcagtcag

SEQ ID NO: 4310161 - DNA, 25 bp, Homo sapien
tgttcccccgcagtcaggatgacag

SEQ ID NO: 4310162 - DNA, 25 bp, Homo sapien
tccgagtctgtgatcatcataatgc

SEQ ID NO: 4310163 - DNA, 25 bp, Homo sapien
tggaggagcatgaacttccgagtct

SEQ ID NO: 4310164 - DNA, 25 bp, Homo sapien
gaagaaggtatcacagacactcagc

SEQ ID NO: 4310165 - DNA, 25 bp, Homo sapien
cataaaacgcaagcccaaagggtgg

SEQ ID NO: 4310166 - DNA, 25 bp, Homo sapien
tcacataattttggtctccaaacat

SEQ ID NO: 4310167 - DNA, 25 bp, Homo sapien
tccaggctcccctccactcacataa

SEQ ID NO: 4310168 - DNA, 25 bp, Homo sapien
caggctcccctccactcacataatt

SEQ ID NO: 4310169 - DNA, 25 bp, Homo sapien
ccactcacataattttggtctccaa

SEQ ID NO: 4310170 - DNA, 25 bp, Homo sapien
cccactcagactgcagaagaatgtt

SEQ ID NO: 4310171 - DNA, 25 bp, Homo sapien
gggcaccagtgctcaacaagacacg

SEQ ID NO: 4310172 - DNA, 25 bp, Homo sapien
tggcactgggaactgttagccaagt

SEQ ID NO: 4310173 - DNA, 25 bp, Homo sapien
caagacacgctatagagaacactgg

SEQ ID NO: 4310174 - DNA, 25 bp, Homo sapien
caaggctcagaggagtgcggcttct

SEQ ID NO: 4310175 - DNA, 25 bp, Homo sapien
caactgatgtttgcgagggatgctc

SEQ ID NO: 4310176 - DNA, 25 bp, Homo sapien
gcagcacttccgtcaactgtcaggg

SEQ ID NO: 4310177 - DNA, 25 bp, Homo sapien
taattgtattattacgggccagccc

SEQ ID NO: 4310178 - DNA, 25 bp, Homo sapien
caagctagtttatgaggcaccccaa

SEQ ID NO: 4310179 - DNA, 25 bp, Homo sapien
gatgggatgcacagcttccagcagg

SEQ ID NO: 4310180 - DNA, 25 bp, Homo sapien
tataatatgttgttggcagcccagg

SEQ ID NO: 4310181 - DNA, 25 bp, Homo sapien
ggacacgctttccatcagggttgca

SEQ ID NO: 4310182 - DNA, 25 bp, Homo sapien
tctgaaagggcatcactccagctgg

SEQ ID NO: 4310183 - DNA, 25 bp, Homo sapien
ttccacaggtctgcataccaacctg

SEQ ID NO: 4310184 - DNA, 25 bp, Homo sapien
tggaaggaagtaggtcagtggccta

SEQ ID NO: 4310185 - DNA, 25 bp, Homo sapien
tctggacagatgaaaccatcgaggc

SEQ ID NO: 4310186 - DNA, 25 bp, Homo sapien
ttaaaggaagctcatccacgtccag

SEQ ID NO: 4310187 - DNA, 25 bp, Homo sapien
taaacaacgcttccctgccgaggaa

SEQ ID NO: 4310188 - DNA, 25 bp, Homo sapien
tgaggttcacgctagcagcatggtt

SEQ ID NO: 4310189 - DNA, 25 bp, Homo sapien
gaaactgagaggacccactaaggga

SEQ ID NO: 4310190 - DNA, 25 bp, Homo sapien
ttaagtctgcgaaaacagtatgggc

SEQ ID NO: 4310191 - DNA, 25 bp, Homo sapien
cctgctccattaagtctgcgaaaac

SEQ ID NO: 4310192 - DNA, 25 bp, Homo sapien
cagtatgggcactaaatgctttcct

SEQ ID NO: 4310193 - DNA, 25 bp, Homo sapien
caaaatcctgctccattaagtctgc

SEQ ID NO: 4310194 - DNA, 25 bp, Homo sapien
taagatcactggtattaagagcact

SEQ ID NO: 4310195 - DNA, 25 bp, Homo sapien
gaaagaaattctggtacctctccca

SEQ ID NO: 4310196 - DNA, 25 bp, Homo sapien
tagtaggtaataatggtacccgcaa

SEQ ID NO: 4310197 - DNA, 25 bp, Homo sapien
ccctggacaattaatggaacatagc

SEQ ID NO: 4310198 - DNA, 25 bp, Homo sapien
tcatatgcctgagccttgtgtaagg

SEQ ID NO: 4310199 - DNA, 25 bp, Homo sapien
gaaatcattcacttactggccggcc

SEQ ID NO: 4310200 - DNA, 25 bp, Homo sapien
tggacacaagtattgcccaccaggc

SEQ ID NO: 4310201 - DNA, 25 bp, Homo sapien
ataaaactttatggcactacaggcg

SEQ ID NO: 4310202 - DNA, 25 bp, Homo sapien
taatgacgtggcaactcaaagagcc

SEQ ID NO: 4310203 - DNA, 25 bp, Homo sapien
tgatgagattcaggcttactgaccc

SEQ ID NO: 4310204 - DNA, 25 bp, Homo sapien
ttcactcagtggagtcccaatggat

SEQ ID NO: 4310205 - DNA, 25 bp, Homo sapien
ttttttaccgaggatgctgctttgg

SEQ ID NO: 4310206 - DNA, 25 bp, Homo sapien
tgagcaacttcaaatgtgcatctcc

SEQ ID NO: 4310207 - DNA, 25 bp, Homo sapien
accatgtcatagctttgtatatgcc

SEQ ID NO: 4310208 - DNA, 25 bp, Homo sapien
tactgttaaactgatcgacatttgg

SEQ ID NO: 4310209 - DNA, 25 bp, Homo sapien
ggagctggtttcaatatactgttaa

SEQ ID NO: 4310210 - DNA, 25 bp, Homo sapien
caaaattagcaatccaataaaatca

SEQ ID NO: 4310211 - DNA, 25 bp, Homo sapien
taatatacttgtggattaataccat

SEQ ID NO: 4310212 - DNA, 25 bp, Homo sapien
ttcaaaattagcaatccaataaaat

SEQ ID NO: 4310213 - DNA, 25 bp, Homo sapien
aaattagcaatccaataaaatcaaa

SEQ ID NO: 4310214 - DNA, 25 bp, Homo sapien
ctggattgcaagaagcacatttgca

SEQ ID NO: 4310215 - DNA, 25 bp, Homo sapien
tcaaggtgctagtaggaattaaagc

SEQ ID NO: 4310216 - DNA, 25 bp, Homo sapien
taaagtgctgtcataaatgggtgac

SEQ ID NO: 4310217 - DNA, 25 bp, Homo sapien
gcttctcttaaaaggcgtctttatg

SEQ ID NO: 4310218 - DNA, 25 bp, Homo sapien
tcatcattctgagtggcaaccatgt

SEQ ID NO: 4310219 - DNA, 25 bp, Homo sapien
ggcaaccatgtaagcttagcaaaat

SEQ ID NO: 4310220 - DNA, 25 bp, Homo sapien
tgattgtacaccgtatctagctgaa

SEQ ID NO: 4310221 - DNA, 25 bp, Homo sapien
tcttacattatacactggtagctga

SEQ ID NO: 4310222 - DNA, 25 bp, Homo sapien
agtgcgtacagaccccttggaaaca

SEQ ID NO: 4310223 - DNA, 25 bp, Homo sapien
tggcaaccaggcacaagtgcgtaca

SEQ ID NO: 4310224 - DNA, 25 bp, Homo sapien
tctgaacaggcgagctgctaacttt

SEQ ID NO: 4310225 - DNA, 25 bp, Homo sapien
catgctggacagataaaacgaaaca

SEQ ID NO: 4310226 - DNA, 25 bp, Homo sapien
tgtcctgttccagagtcgggctacc

SEQ ID NO: 4310227 - DNA, 25 bp, Homo sapien
cgtgaaggtgaaggaccccaacatt

SEQ ID NO: 4310228 - DNA, 25 bp, Homo sapien
catgttctcacatcacacagggatc

SEQ ID NO: 4310229 - DNA, 25 bp, Homo sapien
tcgggctaccttgaaagactcttgc

SEQ ID NO: 4310230 - DNA, 25 bp, Homo sapien
gaaaaaccgtctcccatgattctgg

SEQ ID NO: 4310231 - DNA, 25 bp, Homo sapien
tatcatgtgcaaggaacacccaagc

SEQ ID NO: 4310232 - DNA, 25 bp, Homo sapien
ttatgaagccctacatgggtgggac

SEQ ID NO: 4310233 - DNA, 25 bp, Homo sapien
gaaagatactgaacatgccctggca

SEQ ID NO: 4310234 - DNA, 25 bp, Homo sapien
ggtgtgcagttacacatcagttatg

SEQ ID NO: 4310235 - DNA, 25 bp, Homo sapien
gaggtggtgtgcagttacacatcag

SEQ ID NO: 4310236 - DNA, 25 bp, Homo sapien
ccaaactagtctgagccataatttg

SEQ ID NO: 4310237 - DNA, 25 bp, Homo sapien
tctgagccataatttggttaactat

SEQ ID NO: 4310238 - DNA, 25 bp, Homo sapien
gcaagtgagcgagcagaaacaccag

SEQ ID NO: 4310239 - DNA, 25 bp, Homo sapien
cttggcaaactataggcgcgtgggc

SEQ ID NO: 4310240 - DNA, 25 bp, Homo sapien
tagttgtaacagaccaggtggcttg

SEQ ID NO: 4310241 - DNA, 25 bp, Homo sapien
tacagaaaagattcgctgatccctg

SEQ ID NO: 4310242 - DNA, 25 bp, Homo sapien
taacagcgtggagagattgacagga

SEQ ID NO: 4310243 - DNA, 25 bp, Homo sapien
ccaaaggagacagtacattgatcag

SEQ ID NO: 4310244 - DNA, 25 bp, Homo sapien
gaaggaacctacctccatattagga

SEQ ID NO: 4310245 - DNA, 25 bp, Homo sapien
gggcaacgactagaagcacagacac

SEQ ID NO: 4310246 - DNA, 25 bp, Homo sapien
gaagttatcctatgtcctattatgc

SEQ ID NO: 4310247 - DNA, 25 bp, Homo sapien
ggtgggcaactgtcttgaaggactt

SEQ ID NO: 4310248 - DNA, 25 bp, Homo sapien
cagaaaacaatgacagagtttgtcc

SEQ ID NO: 4310249 - DNA, 25 bp, Homo sapien
aacaagccaacagaggaagttatcc

SEQ ID NO: 4310250 - DNA, 25 bp, Homo sapien
ctggaattgtcaacaaaagcttctg

SEQ ID NO: 4310251 - DNA, 25 bp, Homo sapien
cgaagccctcaccattgccgaaatg

SEQ ID NO: 4310252 - DNA, 25 bp, Homo sapien
cttttggctagcaggcatcacatcc

SEQ ID NO: 4310253 - DNA, 25 bp, Homo sapien
caaatcagagaagggatcgaagccc

SEQ ID NO: 4310254 - DNA, 25 bp, Homo sapien
catattgtggtacccagtgccctga

SEQ ID NO: 4310255 - DNA, 25 bp, Homo sapien
gaaaaccctggtatccctcaagatg

SEQ ID NO: 4310256 - DNA, 25 bp, Homo sapien
tatatcctggatggtggcacgacag

SEQ ID NO: 4310257 - DNA, 25 bp, Homo sapien
tctttcgcagagtgagatcagcaag

SEQ ID NO: 4310258 - DNA, 25 bp, Homo sapien
gctactacgtctgcccttgacttag

SEQ ID NO: 4310259 - DNA, 25 bp, Homo sapien
cagtaccaggcagctactacgtctg

SEQ ID NO: 4310260 - DNA, 25 bp, Homo sapien
tgctagctcttgcatccagatttcc

SEQ ID NO: 4310261 - DNA, 25 bp, Homo sapien
ccttgacttaggctcgctgctagct

SEQ ID NO: 4310262 - DNA, 25 bp, Homo sapien
gggcaacagctcatagctcacagga

SEQ ID NO: 4310263 - DNA, 25 bp, Homo sapien
tacccagtggttagaggtccaggtg

SEQ ID NO: 4310264 - DNA, 25 bp, Homo sapien
caggtatgtacagggcttggatcag

SEQ ID NO: 4310265 - DNA, 25 bp, Homo sapien
tttaaaagctcaaatggcagccacc

SEQ ID NO: 4310266 - DNA, 25 bp, Homo sapien
tctccgtatggatttcgccagtcat

SEQ ID NO: 4310267 - DNA, 25 bp, Homo sapien
ggcattttctgatacagctccactc

SEQ ID NO: 4310268 - DNA, 25 bp, Homo sapien
gctccactctccgtatggatttcgc

SEQ ID NO: 4310269 - DNA, 25 bp, Homo sapien
tttctgatacagctccactctccgt

SEQ ID NO: 4310270 - DNA, 25 bp, Homo sapien
gaagatcaaggtatccacagggtgg

SEQ ID NO: 4310271 - DNA, 25 bp, Homo sapien
ggtggcttgaaccacaggcattcat

SEQ ID NO: 4310272 - DNA, 25 bp, Homo sapien
aagcatgcccttgtgcagattctga

SEQ ID NO: 4310273 - DNA, 25 bp, Homo sapien
tagagaatagagatgaagcatgccc

SEQ ID NO: 4310274 - DNA, 25 bp, Homo sapien
ctggcttaaaggctggtggtttatg

SEQ ID NO: 4310275 - DNA, 25 bp, Homo sapien
aatagtgtatgttaaataagcccat

SEQ ID NO: 4310276 - DNA, 25 bp, Homo sapien
gcttatctactgagcactctggctt

SEQ ID NO: 4310277 - DNA, 25 bp, Homo sapien
taagcccataagtccttttgtatga

SEQ ID NO: 4310278 - DNA, 25 bp, Homo sapien
aaaacactgctgctaccagggtagt

SEQ ID NO: 4310279 - DNA, 25 bp, Homo sapien
gctaccagggtagtgagaccaggaa

SEQ ID NO: 4310280 - DNA, 25 bp, Homo sapien
taccagggtagtgagaccaggaaga

SEQ ID NO: 4310281 - DNA, 25 bp, Homo sapien
ctaccagggtagtgagaccaggaag

SEQ ID NO: 4310282 - DNA, 25 bp, Homo sapien
aaatgtcagcgtgagactgccctcg

SEQ ID NO: 4310283 - DNA, 25 bp, Homo sapien
tatcagatgagaaccacttggcggc

SEQ ID NO: 4310284 - DNA, 25 bp, Homo sapien
caaagatttgtttcgcttgggccag

SEQ ID NO: 4310285 - DNA, 25 bp, Homo sapien
gaaacaatgcttgcaagagaggcct

SEQ ID NO: 4310286 - DNA, 25 bp, Homo sapien
tccataatattctcaggagccgcag

SEQ ID NO: 4310287 - DNA, 25 bp, Homo sapien
cctgccaagagttccgagagagaca

SEQ ID NO: 4310288 - DNA, 25 bp, Homo sapien
gaggcaacgctcctacaagtcaagg

SEQ ID NO: 4310289 - DNA, 25 bp, Homo sapien
gatgggcctaccgtaaagtcaagag

SEQ ID NO: 4310290 - DNA, 25 bp, Homo sapien
cacggataacaatcctcacagcgat

SEQ ID NO: 4310291 - DNA, 25 bp, Homo sapien
cacagcgattaagaattaaagcccc

SEQ ID NO: 4310292 - DNA, 25 bp, Homo sapien
ggcccacttgggagcaattacttcc

SEQ ID NO: 4310293 - DNA, 25 bp, Homo sapien
gattgaataccactaagacagctca

SEQ ID NO: 4310294 - DNA, 25 bp, Homo sapien
catacattttcaggaggcgaggcgg

SEQ ID NO: 4310295 - DNA, 25 bp, Homo sapien
taacaaatacttctgcagcggccag

SEQ ID NO: 4310296 - DNA, 25 bp, Homo sapien
taggaccctggttgatacatcttgc

SEQ ID NO: 4310297 - DNA, 25 bp, Homo sapien
gaaagtgccgtaagcaacaactaag

SEQ ID NO: 4310298 - DNA, 25 bp, Homo sapien
caaccccattattgttctgtgaaca

SEQ ID NO: 4310299 - DNA, 25 bp, Homo sapien
tacacccagattttcgactgtgtgg

SEQ ID NO: 4310300 - DNA, 25 bp, Homo sapien
gcctactcaatgtaaagaacgatga

SEQ ID NO: 4310301 - DNA, 25 bp, Homo sapien
gactgtgtggaaaattggcgtcccc

SEQ ID NO: 4310302 - DNA, 25 bp, Homo sapien
tgacggccacgcagagatgtagaag

SEQ ID NO: 4310303 - DNA, 25 bp, Homo sapien
tttgagcaatgaactggatcctagc

SEQ ID NO: 4310304 - DNA, 25 bp, Homo sapien
tgcagaatagcagcgatgacggcca

SEQ ID NO: 4310305 - DNA, 25 bp, Homo sapien
cagacggttgaaatgatgcacagcc

SEQ ID NO: 4310306 - DNA, 25 bp, Homo sapien
tggtccgccagacaatgatgtaaac

SEQ ID NO: 4310307 - DNA, 25 bp, Homo sapien
caagaatactgtatgtgctgcaggg

SEQ ID NO: 4310308 - DNA, 25 bp, Homo sapien
gttgaaactcaaggctaaatatggc

SEQ ID NO: 4310309 - DNA, 25 bp, Homo sapien
tgtaaacaacgtctaatgacaccca

SEQ ID NO: 4310310 - DNA, 25 bp, Homo sapien
cattggttaaaccaacaccataggt

SEQ ID NO: 4310311 - DNA, 25 bp, Homo sapien
tacaaaatggctcaacaatgaacat

SEQ ID NO: 4310312 - DNA, 25 bp, Homo sapien
gcagtttccaatacaaacatgggct

SEQ ID NO: 4310313 - DNA, 25 bp, Homo sapien
tgtttgcacccaatgtaataagctt

SEQ ID NO: 4310314 - DNA, 25 bp, Homo sapien
gcctcggtataactgggctgtggtc

SEQ ID NO: 4310315 - DNA, 25 bp, Homo sapien
tgcagcttcgctctccgagcctcgg

SEQ ID NO: 4310316 - DNA, 25 bp, Homo sapien
ggagcaggcggtgtagcatcctcaa

SEQ ID NO: 4310317 - DNA, 25 bp, Homo sapien
cagataacacaaaagcatggaggca

SEQ ID NO: 4310318 - DNA, 25 bp, Homo sapien
cttcggctctgtaaccaagtgggcg

SEQ ID NO: 4310319 - DNA, 25 bp, Homo sapien
tagtgtctgccgagttattccccgc

SEQ ID NO: 4310320 - DNA, 25 bp, Homo sapien
caagtgggcggcatgcgaataccat

SEQ ID NO: 4310321 - DNA, 25 bp, Homo sapien
cacttattgaaaactggcagtcgct

SEQ ID NO: 4310322 - DNA, 25 bp, Homo sapien
caaattgtactacgcacgctgcaga

SEQ ID NO: 4310323 - DNA, 25 bp, Homo sapien
cagaagtcgacttgcaaaatttcca

SEQ ID NO: 4310324 - DNA, 25 bp, Homo sapien
gaaactgctgtcagccaaattgtac

SEQ ID NO: 4310325 - DNA, 25 bp, Homo sapien
gctttgcggctgttaaaaaaccatg

SEQ ID NO: 4310326 - DNA, 25 bp, Homo sapien
tctggctgttagcagtggcgactcc

SEQ ID NO: 4310327 - DNA, 25 bp, Homo sapien
tcatcccaaatgtagttgacaccaa

SEQ ID NO: 4310328 - DNA, 25 bp, Homo sapien
gcagtggcgactcctgctgcacagt

SEQ ID NO: 4310329 - DNA, 25 bp, Homo sapien
ttgacaccaagccctggttagccac

SEQ ID NO: 4310330 - DNA, 25 bp, Homo sapien
gacatttaaagaccactccatttta

SEQ ID NO: 4310331 - DNA, 25 bp, Homo sapien
gaatggctaaacaatctttcaaagc

SEQ ID NO: 4310332 - DNA, 25 bp, Homo sapien
cttgggaaggaatggctaaacaatc

SEQ ID NO: 4310333 - DNA, 25 bp, Homo sapien
aagcacttgggaaggaatggctaaa

SEQ ID NO: 4310334 - DNA, 25 bp, Homo sapien
cccactttggcctcattagcagcag

SEQ ID NO: 4310335 - DNA, 25 bp, Homo sapien
gagagtgaaggtaactggtccacaa

SEQ ID NO: 4310336 - DNA, 25 bp, Homo sapien
caacatccaactgcagacattcaca

SEQ ID NO: 4310337 - DNA, 25 bp, Homo sapien
ttcacaagccagctggcgagggtta

SEQ ID NO: 4310338 - DNA, 25 bp, Homo sapien
tgctcatttctaagaggctcctgga

SEQ ID NO: 4310339 - DNA, 25 bp, Homo sapien
aacggacgatgatttgctgatggtg

SEQ ID NO: 4310340 - DNA, 25 bp, Homo sapien
tccttgctcatttctaagaggctcc

SEQ ID NO: 4310341 - DNA, 25 bp, Homo sapien
cagcccactctaaacggacgatgat

SEQ ID NO: 4310342 - DNA, 25 bp, Homo sapien
taatggaggcaagcgctggcttgtt

SEQ ID NO: 4310343 - DNA, 25 bp, Homo sapien
ctgcaaggactacccagagccacta

SEQ ID NO: 4310344 - DNA, 25 bp, Homo sapien
caaggactacccagagccactaatg

SEQ ID NO: 4310345 - DNA, 25 bp, Homo sapien
gccactaatggaggcaagcgctggc

SEQ ID NO: 4310346 - DNA, 25 bp, Homo sapien
gatcagtccattagacaccagctca

SEQ ID NO: 4310347 - DNA, 25 bp, Homo sapien
caaacccttaagatcagtccattag

SEQ ID NO: 4310348 - DNA, 25 bp, Homo sapien
ttagacaccagctcatatattcggg

SEQ ID NO: 4310349 - DNA, 25 bp, Homo sapien
ccagctcatatattcgggtaaaaaa

SEQ ID NO: 4310350 - DNA, 25 bp, Homo sapien
agcaggcttgccatgccattgccgc

SEQ ID NO: 4310351 - DNA, 25 bp, Homo sapien
cactccgcagcatacagctgaggta

SEQ ID NO: 4310352 - DNA, 25 bp, Homo sapien
tgaggtaaaaagcagcaggcttgcc

SEQ ID NO: 4310353 - DNA, 25 bp, Homo sapien
tcaaacagaaggcactctctgcggc

SEQ ID NO: 4310354 - DNA, 25 bp, Homo sapien
caaaaattcatgctcacttcaataa

SEQ ID NO: 4310355 - DNA, 25 bp, Homo sapien
cagacttcacggagttgggtttcac

SEQ ID NO: 4310356 - DNA, 25 bp, Homo sapien
tcaataatattaccaggaaacactg

SEQ ID NO: 4310357 - DNA, 25 bp, Homo sapien
tttccttccagacttcacggagttg

SEQ ID NO: 4310358 - DNA, 25 bp, Homo sapien
catgtaactacaatttagagtgcac

SEQ ID NO: 4310359 - DNA, 25 bp, Homo sapien
tcttcccactggtgagaggcttcca

SEQ ID NO: 4310360 - DNA, 25 bp, Homo sapien
tttccaacagagtctgaacaacatg

SEQ ID NO: 4310361 - DNA, 25 bp, Homo sapien
taacatcaatggaacacttacactg

SEQ ID NO: 4310362 - DNA, 25 bp, Homo sapien
caccctttgacctagtaaattcact

SEQ ID NO: 4310363 - DNA, 25 bp, Homo sapien
aagagaatatcaatgttcaccaccc

SEQ ID NO: 4310364 - DNA, 25 bp, Homo sapien
ccataacaaataggtgacatagtca

SEQ ID NO: 4310365 - DNA, 25 bp, Homo sapien
gtaactcttcttactagcattcccc

SEQ ID NO: 4310366 - DNA, 25 bp, Homo sapien
tgaggttccctcaggccacttaagg

SEQ ID NO: 4310367 - DNA, 25 bp, Homo sapien
ctcaggccacttaaggtttcacttc

SEQ ID NO: 4310368 - DNA, 25 bp, Homo sapien
catttgaatgaggttccctcaggcc

SEQ ID NO: 4310369 - DNA, 25 bp, Homo sapien
ttggcaccatttgaatgaggttccc

SEQ ID NO: 4310370 - DNA, 25 bp, Homo sapien
agccttgggtcaaccacatctctac

SEQ ID NO: 4310371 - DNA, 25 bp, Homo sapien
cacatctctacttgatggggctcga

SEQ ID NO: 4310372 - DNA, 25 bp, Homo sapien
ttctgtaagccttgggtcaaccaca

SEQ ID NO: 4310373 - DNA, 25 bp, Homo sapien
tgatggggctcgattagcttgcaat

SEQ ID NO: 4310374 - DNA, 25 bp, Homo sapien
tgacacacggtgcatggtccagctc

SEQ ID NO: 4310375 - DNA, 25 bp, Homo sapien
ttcatggacaaaggcgtggctcagc

SEQ ID NO: 4310376 - DNA, 25 bp, Homo sapien
cacttggcctgggtaaagaaacact

SEQ ID NO: 4310377 - DNA, 25 bp, Homo sapien
gaaagggaagccgtttgtcgagcca

SEQ ID NO: 4310378 - DNA, 25 bp, Homo sapien
tggtactgctggtaagagccaacgt

SEQ ID NO: 4310379 - DNA, 25 bp, Homo sapien
tggtaagagccaacgtggacggaca

SEQ ID NO: 4310380 - DNA, 25 bp, Homo sapien
tactgctggtaagagccaacgtgga

SEQ ID NO: 4310381 - DNA, 25 bp, Homo sapien
ctgctggtaagagccaacgtggacg

SEQ ID NO: 4310382 - DNA, 25 bp, Homo sapien
aactgctgtctaatgggtgataccg

SEQ ID NO: 4310383 - DNA, 25 bp, Homo sapien
tgataccgactttaatagcccctgg

SEQ ID NO: 4310384 - DNA, 25 bp, Homo sapien
gcagcgtcttctctcttaagccggg

SEQ ID NO: 4310385 - DNA, 25 bp, Homo sapien
taaacatttctagatggcccaagtc

SEQ ID NO: 4310386 - DNA, 25 bp, Homo sapien
caacaacatgcctgatggagcccat

SEQ ID NO: 4310387 - DNA, 25 bp, Homo sapien
tatgtgtcctctaccattgcgccgt

SEQ ID NO: 4310388 - DNA, 25 bp, Homo sapien
caaacaaggcggaatgacttcgcat

SEQ ID NO: 4310389 - DNA, 25 bp, Homo sapien
tacggctgcgcgtttactgtcaaca

SEQ ID NO: 4310390 - DNA, 25 bp, Homo sapien
ccttgctgcttgatcgaatagtcca

SEQ ID NO: 4310391 - DNA, 25 bp, Homo sapien
aaataacttgtttcgcgactcggca

SEQ ID NO: 4310392 - DNA, 25 bp, Homo sapien
gctatccctgggtagaaaacacctg

SEQ ID NO: 4310393 - DNA, 25 bp, Homo sapien
aatagtccagggttctccgtgtagc

SEQ ID NO: 4310394 - DNA, 25 bp, Homo sapien
acggagaacccctagtgccgcctgg

SEQ ID NO: 4310395 - DNA, 25 bp, Homo sapien
tggggctctccggtgtccctggacc

SEQ ID NO: 4310396 - DNA, 25 bp, Homo sapien
tgaggatgggcacattcctcgctcc

SEQ ID NO: 4310397 - DNA, 25 bp, Homo sapien
gtgccttatcgctaggctcgcgcca

SEQ ID NO: 4310398 - DNA, 25 bp, Homo sapien
gagggagtaggagcgccgccttcac

SEQ ID NO: 4310399 - DNA, 25 bp, Homo sapien
cggggagggagtaggagcgccgcct

SEQ ID NO: 4310400 - DNA, 25 bp, Homo sapien
gggagggagtaggagcgccgccttc

SEQ ID NO: 4310401 - DNA, 25 bp, Homo sapien
ggagtaggagcgccgccttcacgcc

SEQ ID NO: 4310402 - DNA, 25 bp, Homo sapien
tcgccgcgcgctctcttcctcttac

SEQ ID NO: 4310403 - DNA, 25 bp, Homo sapien
ctcgccgcgcgctctcttcctctta

SEQ ID NO: 4310404 - DNA, 25 bp, Homo sapien
gctcgccgcgcgctctcttcctctt

SEQ ID NO: 4310405 - DNA, 25 bp, Homo sapien
gctgcaggcagcgatttcgaagcaa

SEQ ID NO: 4310406 - DNA, 25 bp, Homo sapien
aaatcggcccgagccaaagtctcag

SEQ ID NO: 4310407 - DNA, 25 bp, Homo sapien
tgcaaggatccagagaccgggaaat

SEQ ID NO: 4310408 - DNA, 25 bp, Homo sapien
tccccaggatctcacaaagttgcaa

SEQ ID NO: 4310409 - DNA, 25 bp, Homo sapien
gaggcggcttgggaaaaagtggagc

SEQ ID NO: 4310410 - DNA, 25 bp, Homo sapien
gcggcttgggaaaaagtggagcaga

SEQ ID NO: 4310411 - DNA, 25 bp, Homo sapien
tgtttaaagtggcggaaacaagaca

SEQ ID NO: 4310412 - DNA, 25 bp, Homo sapien
taaagtggcggaaacaagacaggag

SEQ ID NO: 4310413 - DNA, 25 bp, Homo sapien
gtctctcggtgcaaactaaggtgtt

SEQ ID NO: 4310414 - DNA, 25 bp, Homo sapien
aatggtctctcggtgcaaactaagg

SEQ ID NO: 4310415 - DNA, 25 bp, Homo sapien
tgcaaatggtctctcggtgcaaact

SEQ ID NO: 4310416 - DNA, 25 bp, Homo sapien
ctcggtgcaaactaaggtgttttcg

SEQ ID NO: 4310417 - DNA, 25 bp, Homo sapien
gcgagtacagcgtgcaaccgccaca

SEQ ID NO: 4310418 - DNA, 25 bp, Homo sapien
ggccgccgcgagtacagcgtgcaac

SEQ ID NO: 4310419 - DNA, 25 bp, Homo sapien
cacacacgcactcccgggcgagggc

SEQ ID NO: 4310420 - DNA, 25 bp, Homo sapien
tacagcgtgcaaccgccacacaata

SEQ ID NO: 4310421 - DNA, 25 bp, Homo sapien
aggggtcccctctccgcttcacgca

SEQ ID NO: 4310422 - DNA, 25 bp, Homo sapien
tccggactagcttcccggagcccag

SEQ ID NO: 4310423 - DNA, 25 bp, Homo sapien
cgcaggggtcccctctccgcttcac

SEQ ID NO: 4310424 - DNA, 25 bp, Homo sapien
ctccggactagcttcccggagccca

SEQ ID NO: 4310425 - DNA, 25 bp, Homo sapien
ggagcggctccctctttgccgttcg

SEQ ID NO: 4310426 - DNA, 25 bp, Homo sapien
tgttgtgcgtccctgacgtcacatc

SEQ ID NO: 4310427 - DNA, 25 bp, Homo sapien
ataaggcgcgcgagagaggccaaca

SEQ ID NO: 4310428 - DNA, 25 bp, Homo sapien
tgctgggtaaacaaccgggctccca

SEQ ID NO: 4310429 - DNA, 25 bp, Homo sapien
tgtccaatgaaagaaggcgagttcg

SEQ ID NO: 4310430 - DNA, 25 bp, Homo sapien
gcaggaatgtgcaatcgagtccact

SEQ ID NO: 4310431 - DNA, 25 bp, Homo sapien
taactagggacgaagatgggaatgc

SEQ ID NO: 4310432 - DNA, 25 bp, Homo sapien
cagagcagtccctggcaacagaggg

SEQ ID NO: 4310433 - DNA, 25 bp, Homo sapien
cagggatttcatttgccctccaagg

SEQ ID NO: 4310434 - DNA, 25 bp, Homo sapien
tgttatgccatcctagtgccaaggt

SEQ ID NO: 4310435 - DNA, 25 bp, Homo sapien
gacccctttacagatctgggagaaa

SEQ ID NO: 4310436 - DNA, 25 bp, Homo sapien
taagaatatcgcattacagatgagg

SEQ ID NO: 4310437 - DNA, 25 bp, Homo sapien
tttttctaactggagagtgagacct

SEQ ID NO: 4310438 - DNA, 25 bp, Homo sapien
gagaccttagttaccaagactgcac

SEQ ID NO: 4310439 - DNA, 25 bp, Homo sapien
catgtccctatatgtccacaccgga

SEQ ID NO: 4310440 - DNA, 25 bp, Homo sapien
tatacaatattaacaggcacactct

SEQ ID NO: 4310441 - DNA, 25 bp, Homo sapien
ctacaaggctccgattggcacaaca

SEQ ID NO: 4310442 - DNA, 25 bp, Homo sapien
gggccaatccaatcttctctggtcg

SEQ ID NO: 4310443 - DNA, 25 bp, Homo sapien
gattggcacaacaaaaccagccgtt

SEQ ID NO: 4310444 - DNA, 25 bp, Homo sapien
ggtagaaggggccaatccaatcttc

SEQ ID NO: 4310445 - DNA, 25 bp, Homo sapien
gatgttgggcaaggcacgctatgcc

SEQ ID NO: 4310446 - DNA, 25 bp, Homo sapien
gaacatcaagctcatagccccagtg

SEQ ID NO: 4310447 - DNA, 25 bp, Homo sapien
taacaattgaatggcacgaggaaca

SEQ ID NO: 4310448 - DNA, 25 bp, Homo sapien
tttcagtcggtcataagcaagatca

SEQ ID NO: 4310449 - DNA, 25 bp, Homo sapien
taagtcaaagcctataactctgccg

SEQ ID NO: 4310450 - DNA, 25 bp, Homo sapien
gggatggaaccgaattcttgtctct

SEQ ID NO: 4310451 - DNA, 25 bp, Homo sapien
tcactctgctttggccttcgtgagc

SEQ ID NO: 4310452 - DNA, 25 bp, Homo sapien
tatatgttgacagctcatagtgcac

SEQ ID NO: 4310453 - DNA, 25 bp, Homo sapien
gtttttatccacacatgttctgcca

SEQ ID NO: 4310454 - DNA, 25 bp, Homo sapien
tttttatccacacatgttctgccat

SEQ ID NO: 4310455 - DNA, 25 bp, Homo sapien
ggtttttatccacacatgttctgcc

SEQ ID NO: 4310456 - DNA, 25 bp, Homo sapien
acctgtgtggatggcttgcagaagt

SEQ ID NO: 4310457 - DNA, 25 bp, Homo sapien
cagaagtcaaccttcgggaaccact

SEQ ID NO: 4310458 - DNA, 25 bp, Homo sapien
tcattatcacaaagcaggttcctgg

SEQ ID NO: 4310459 - DNA, 25 bp, Homo sapien
ccctcaaaggtaaaagtggagatca

SEQ ID NO: 4310460 - DNA, 25 bp, Homo sapien
tccgctgtctcctcctttattaaaa

SEQ ID NO: 4310461 - DNA, 25 bp, Homo sapien
cacaggctcttcgacctgcccttcc

SEQ ID NO: 4310462 - DNA, 25 bp, Homo sapien
tggcacaggctcttcgacctgccct

SEQ ID NO: 4310463 - DNA, 25 bp, Homo sapien
ggctcttcgacctgcccttcctcat

SEQ ID NO: 4310464 - DNA, 25 bp, Homo sapien
aggctcttcgacctgcccttcctca

SEQ ID NO: 4310465 - DNA, 25 bp, Homo sapien
aaatgcaggcatccttctaccaggg

SEQ ID NO: 4310466 - DNA, 25 bp, Homo sapien
tctaccagggtctgcttaagtggga

SEQ ID NO: 4310467 - DNA, 25 bp, Homo sapien
tggtagatatgtactgcagctcccc

SEQ ID NO: 4310468 - DNA, 25 bp, Homo sapien
tcccagttatccacaaggtagcaag

SEQ ID NO: 4310469 - DNA, 25 bp, Homo sapien
taaaagcttttggttcgatgtgaat

SEQ ID NO: 4310470 - DNA, 25 bp, Homo sapien
tttggttcgatgtgaatgtaagtca

SEQ ID NO: 4310471 - DNA, 25 bp, Homo sapien
agcttttggttcgatgtgaatgtaa

SEQ ID NO: 4310472 - DNA, 25 bp, Homo sapien
ccttaaaagcttttggttcgatgtg

SEQ ID NO: 4310473 - DNA, 25 bp, Homo sapien
ctccatgctccaagtactccaaatc

SEQ ID NO: 4310474 - DNA, 25 bp, Homo sapien
tccatgctccaagtactccaaatct

SEQ ID NO: 4310475 - DNA, 25 bp, Homo sapien
catgctccaagtactccaaatctcc

SEQ ID NO: 4310476 - DNA, 25 bp, Homo sapien
ccatgctccaagtactccaaatctc

SEQ ID NO: 4310477 - DNA, 25 bp, Homo sapien
gggacatcaaagccacagtggaaat

SEQ ID NO: 4310478 - DNA, 25 bp, Homo sapien
ctggccataggtgtcaggatcgtgc

SEQ ID NO: 4310479 - DNA, 25 bp, Homo sapien
aacacctggccataggtgtcaggat

SEQ ID NO: 4310480 - DNA, 25 bp, Homo sapien
agaaccagggacaaaccgcttagag

SEQ ID NO: 4310481 - DNA, 25 bp, Homo sapien
ttgccgaaaacactagccaagcctg

SEQ ID NO: 4310482 - DNA, 25 bp, Homo sapien
caaatagaagtcaggctctgcaggc

SEQ ID NO: 4310483 - DNA, 25 bp, Homo sapien
tattacccttgcatgggcattccag

SEQ ID NO: 4310484 - DNA, 25 bp, Homo sapien
aattgaggcttaacccactccggag

SEQ ID NO: 4310485 - DNA, 25 bp, Homo sapien
gattctgaagttatccaattaatct

SEQ ID NO: 4310486 - DNA, 25 bp, Homo sapien
atgattctgaagttatccaattaat

SEQ ID NO: 4310487 - DNA, 25 bp, Homo sapien
tgattctgaagttatccaattaatc

SEQ ID NO: 4310488 - DNA, 25 bp, Homo sapien
aatgattctgaagttatccaattaa

SEQ ID NO: 4310489 - DNA, 25 bp, Homo sapien
cacccgtgtcggagaagagtgggag

SEQ ID NO: 4310490 - DNA, 25 bp, Homo sapien
agcatggcagcatccggagccgctc

SEQ ID NO: 4310491 - DNA, 25 bp, Homo sapien
ctaactctcggggtattgtgctcat

SEQ ID NO: 4310492 - DNA, 25 bp, Homo sapien
gctggccgcggcttggagcacccgt

SEQ ID NO: 4310493 - DNA, 25 bp, Homo sapien
tgagagagccacgagggctgaaccc

SEQ ID NO: 4310494 - DNA, 25 bp, Homo sapien
gaacccggtgtcagcacgtgcttct

SEQ ID NO: 4310495 - DNA, 25 bp, Homo sapien
gaataatcggaaggggtctccagct

SEQ ID NO: 4310496 - DNA, 25 bp, Homo sapien
tacaatcttaaaagaccactgtgag

SEQ ID NO: 4310497 - DNA, 25 bp, Homo sapien
tggccgggctggtcttgaactccca

SEQ ID NO: 4310498 - DNA, 25 bp, Homo sapien
tatttttagtattgatggggtttca

SEQ ID NO: 4310499 - DNA, 25 bp, Homo sapien
tggaattacagtcgtgcaccaccat

SEQ ID NO: 4310500 - DNA, 25 bp, Homo sapien
accaccatgcccaactaatttttgt

SEQ ID NO: 4310501 - DNA, 25 bp, Homo sapien
ttctttggagaagagtgttaggcat

SEQ ID NO: 4310502 - DNA, 25 bp, Homo sapien
gttattcttgtacattctttggaga

SEQ ID NO: 4310503 - DNA, 25 bp, Homo sapien
ctgccatccacaccagcaaatgtgt

SEQ ID NO: 4310504 - DNA, 25 bp, Homo sapien
gcaaatgtgttattcttgtacattc

SEQ ID NO: 4310505 - DNA, 25 bp, Homo sapien
tagtgtgtcattttgcactcatcat

SEQ ID NO: 4310506 - DNA, 25 bp, Homo sapien
gggtatcaattgcttatagtgtgtc

SEQ ID NO: 4310507 - DNA, 25 bp, Homo sapien
ataagttttctgaaccaacgttcat

SEQ ID NO: 4310508 - DNA, 25 bp, Homo sapien
gcttatagtgtgtcattttgcactc

SEQ ID NO: 4310509 - DNA, 25 bp, Homo sapien
tgctggcccttgcaaatgctactgt

SEQ ID NO: 4310510 - DNA, 25 bp, Homo sapien
tagtgttatgccctgctcttcaacg

SEQ ID NO: 4310511 - DNA, 25 bp, Homo sapien
aaggcatgcatggtcttggcttcca

SEQ ID NO: 4310512 - DNA, 25 bp, Homo sapien
gcagttactgcagcgaaaggatcac

SEQ ID NO: 4310513 - DNA, 25 bp, Homo sapien
gccttcattaaaagttgcttatttg

SEQ ID NO: 4310514 - DNA, 25 bp, Homo sapien
tagaaaactcagaaacactcaattt

SEQ ID NO: 4310515 - DNA, 25 bp, Homo sapien
agccttcattaaaagttgcttattt

SEQ ID NO: 4310516 - DNA, 25 bp, Homo sapien
cactcaatttacttcatgttcagtt

SEQ ID NO: 4310517 - DNA, 25 bp, Homo sapien
tctccaagagcgatctgagcaccat

SEQ ID NO: 4310518 - DNA, 25 bp, Homo sapien
tatcatacattggaatcaggtcacc

SEQ ID NO: 4310519 - DNA, 25 bp, Homo sapien
caaagggacttttcgttgcctctca

SEQ ID NO: 4310520 - DNA, 25 bp, Homo sapien
gcttatcactcacatcgtttaggga

SEQ ID NO: 4310521 - DNA, 25 bp, Homo sapien
gatcctctaagagttgggcaactaa

SEQ ID NO: 4310522 - DNA, 25 bp, Homo sapien
tctaaagacacaagctgggatcctc

SEQ ID NO: 4310523 - DNA, 25 bp, Homo sapien
ggcaactaatagcaaaagcccactt

SEQ ID NO: 4310524 - DNA, 25 bp, Homo sapien
catgcgatcgttccaaaggctgtca

SEQ ID NO: 4310525 - DNA, 25 bp, Homo sapien
cctgcaccgggatacaacttgccga

SEQ ID NO: 4310526 - DNA, 25 bp, Homo sapien
gattacggagttacaccagtggcca

SEQ ID NO: 4310527 - DNA, 25 bp, Homo sapien
aagggacaagttcggccaaggctca

SEQ ID NO: 4310528 - DNA, 25 bp, Homo sapien
tggctagccctacgtctttaacaag

SEQ ID NO: 4310529 - DNA, 25 bp, Homo sapien
ccaagatgggtaaactgccttaaca

SEQ ID NO: 4310530 - DNA, 25 bp, Homo sapien
caagcacttggatgaaaagaccggg

SEQ ID NO: 4310531 - DNA, 25 bp, Homo sapien
catggttctttgcagactacaaggc

SEQ ID NO: 4310532 - DNA, 25 bp, Homo sapien
cagcaagtgcttacgaaagacagtc

SEQ ID NO: 4310533 - DNA, 25 bp, Homo sapien
ggctacatacatgcaaaagttgaac

SEQ ID NO: 4310534 - DNA, 25 bp, Homo sapien
tatttttacttcaaaggctacatac

SEQ ID NO: 4310535 - DNA, 25 bp, Homo sapien
ggaaatatacatgacaattagagtg

SEQ ID NO: 4310536 - DNA, 25 bp, Homo sapien
aattagagtgaagtcaattatatcc

SEQ ID NO: 4310537 - DNA, 25 bp, Homo sapien
cctaggcttttgctaactggatctg

SEQ ID NO: 4310538 - DNA, 25 bp, Homo sapien
atggctgaggtggttactaaccaag

SEQ ID NO: 4310539 - DNA, 25 bp, Homo sapien
ctatgatggtaagtattatggctga

SEQ ID NO: 4310540 - DNA, 25 bp, Homo sapien
aagggcacaacttccataagcagat

SEQ ID NO: 4310541 - DNA, 25 bp, Homo sapien
taaattgaccagcatcggcttcggc

SEQ ID NO: 4310542 - DNA, 25 bp, Homo sapien
caagtaatgtgacggtagaaaccca

SEQ ID NO: 4310543 - DNA, 25 bp, Homo sapien
tagtctccatggtccagaggatgac

SEQ ID NO: 4310544 - DNA, 25 bp, Homo sapien
tcaggagagggaaatcagcgtattc

SEQ ID NO: 4310545 - DNA, 25 bp, Homo sapien
cacgtccaccttcaaaagcatgatg

SEQ ID NO: 4310546 - DNA, 25 bp, Homo sapien
tttccacgtccaccttcaaaagcat

SEQ ID NO: 4310547 - DNA, 25 bp, Homo sapien
tagtgttttccacgtccaccttcaa

SEQ ID NO: 4310548 - DNA, 25 bp, Homo sapien
ccaccttcaaaagcatgatgctctt

SEQ ID NO: 4310549 - DNA, 25 bp, Homo sapien
aggaagcaacgtctgataaaggtgg

SEQ ID NO: 4310550 - DNA, 25 bp, Homo sapien
tcccggatctggttaaccattacca

SEQ ID NO: 4310551 - DNA, 25 bp, Homo sapien
cgctacccacacttagcagtgaatg

SEQ ID NO: 4310552 - DNA, 25 bp, Homo sapien
gggtgctttgatccccaacacgcta

SEQ ID NO: 4310553 - DNA, 25 bp, Homo sapien
catgcctgacctctgtatcaattac

SEQ ID NO: 4310554 - DNA, 25 bp, Homo sapien
gcagctataggtaatacggaaacaa

SEQ ID NO: 4310555 - DNA, 25 bp, Homo sapien
aacaaatgggtattgctctatgctg

SEQ ID NO: 4310556 - DNA, 25 bp, Homo sapien
tgccattgtagcactaaagcagcta

SEQ ID NO: 4310557 - DNA, 25 bp, Homo sapien
cacctggcttatgtaaacttgggaa

SEQ ID NO: 4310558 - DNA, 25 bp, Homo sapien
catggaaaatctacagtcacctggc

SEQ ID NO: 4310559 - DNA, 25 bp, Homo sapien
taagttatcaatggcccaatgccca

SEQ ID NO: 4310560 - DNA, 25 bp, Homo sapien
gaagaacttagcagaattggccagg

SEQ ID NO: 4310561 - DNA, 25 bp, Homo sapien
aatgggttactgactccaggaacag

SEQ ID NO: 4310562 - DNA, 25 bp, Homo sapien
taactctgttaaatgtgtgacctgc

SEQ ID NO: 4310563 - DNA, 25 bp, Homo sapien
tgcagtctgatctaccaaacattgg

SEQ ID NO: 4310564 - DNA, 25 bp, Homo sapien
tcatacatgtgtagggctgtcgtcc

SEQ ID NO: 4310565 - DNA, 25 bp, Homo sapien
gaggcatttacattccagacttgga

SEQ ID NO: 4310566 - DNA, 25 bp, Homo sapien
gtcgcttcacccactaaagaggcat

SEQ ID NO: 4310567 - DNA, 25 bp, Homo sapien
tggacgacgtcttctcggtcccgaa

SEQ ID NO: 4310568 - DNA, 25 bp, Homo sapien
gacactaactcctattacttcatca

SEQ ID NO: 4310569 - DNA, 25 bp, Homo sapien
cagattgtgcattctcgactgctca

SEQ ID NO: 4310570 - DNA, 25 bp, Homo sapien
gcggtttacttgtctgctcctttcc

SEQ ID NO: 4310571 - DNA, 25 bp, Homo sapien
ccttggagtggtcagcgctatctgc

SEQ ID NO: 4310572 - DNA, 25 bp, Homo sapien
tgatgcctccctctagaaatccctt

SEQ ID NO: 4310573 - DNA, 25 bp, Homo sapien
ctggggctatgggtgtatgtcacta

SEQ ID NO: 4310574 - DNA, 25 bp, Homo sapien
gggctatgggtgtatgtcactatgc

SEQ ID NO: 4310575 - DNA, 25 bp, Homo sapien
gctatgggtgtatgtcactatgccc

SEQ ID NO: 4310576 - DNA, 25 bp, Homo sapien
tggggctatgggtgtatgtcactat

SEQ ID NO: 4310577 - DNA, 25 bp, Homo sapien
gtctgtgaactgttccccgatggtt

SEQ ID NO: 4310578 - DNA, 25 bp, Homo sapien
agtctgtgaactgttccccgatggt

SEQ ID NO: 4310579 - DNA, 25 bp, Homo sapien
tctgtgaactgttccccgatggttg

SEQ ID NO: 4310580 - DNA, 25 bp, Homo sapien
ctgtgaactgttccccgatggttgc

SEQ ID NO: 4310581 - DNA, 25 bp, Homo sapien
tagccagggaactgaaaagtgacct

SEQ ID NO: 4310582 - DNA, 25 bp, Homo sapien
taaccaaggccatggcagttagcca

SEQ ID NO: 4310583 - DNA, 25 bp, Homo sapien
taataggtccgaccttccagggctg

SEQ ID NO: 4310584 - DNA, 25 bp, Homo sapien
ggaagattcagtgcacgctccggtc

SEQ ID NO: 4310585 - DNA, 25 bp, Homo sapien
tgaaaagtaggctaaactgcctggg

SEQ ID NO: 4310586 - DNA, 25 bp, Homo sapien
ggcccacaagactcccactggttga

SEQ ID NO: 4310587 - DNA, 25 bp, Homo sapien
gaattcagacaggattggcccacaa

SEQ ID NO: 4310588 - DNA, 25 bp, Homo sapien
tattatttgtgacccaacgcagcca

SEQ ID NO: 4310589 - DNA, 25 bp, Homo sapien
ctttcatcttccatacgccaccctt

SEQ ID NO: 4310590 - DNA, 25 bp, Homo sapien
aaagtggtcgcctctctcctctcat

SEQ ID NO: 4310591 - DNA, 25 bp, Homo sapien
caaagtggtcgcctctctcctctca

SEQ ID NO: 4310592 - DNA, 25 bp, Homo sapien
atgataactacatctcaaaggcagg

SEQ ID NO: 4310593 - DNA, 25 bp, Homo sapien
gggatattattgtatacactccaaa

SEQ ID NO: 4310594 - DNA, 25 bp, Homo sapien
catctcaaaggcaggctagtcacag

SEQ ID NO: 4310595 - DNA, 25 bp, Homo sapien
caggctagtcacaggagggatatta

SEQ ID NO: 4310596 - DNA, 25 bp, Homo sapien
aggatacagctatttcactggaaaa

SEQ ID NO: 4310597 - DNA, 25 bp, Homo sapien
gttgcctcctctgtataaggataca

SEQ ID NO: 4310598 - DNA, 25 bp, Homo sapien
ggatttaagacctaggttctcagca

SEQ ID NO: 4310599 - DNA, 25 bp, Homo sapien
acaggtcatgtagcccgtgaaaccc

SEQ ID NO: 4310600 - DNA, 25 bp, Homo sapien
tcacgctccacactatcctgctctc

SEQ ID NO: 4310601 - DNA, 25 bp, Homo sapien
catgtgacctctaaacctttagtaa

SEQ ID NO: 4310602 - DNA, 25 bp, Homo sapien
aggcgccactgcctctcactgatgg

SEQ ID NO: 4310603 - DNA, 25 bp, Homo sapien
ctctaaacctttagtaaccctgcag

SEQ ID NO: 4310604 - DNA, 25 bp, Homo sapien
gagtttgaacaggaacacagataaa

SEQ ID NO: 4310605 - DNA, 25 bp, Homo sapien
actgcagtctgccttttgtgcgggt

SEQ ID NO: 4310606 - DNA, 25 bp, Homo sapien
ggagtttgaacaggaacacagataa

SEQ ID NO: 4310607 - DNA, 25 bp, Homo sapien
acactgcagtctgccttttgtgcgg

SEQ ID NO: 4310608 - DNA, 25 bp, Homo sapien
gtgccaacctggacccgagagccaa

SEQ ID NO: 4310609 - DNA, 25 bp, Homo sapien
gctgtgccaacctggacccgagagc

SEQ ID NO: 4310610 - DNA, 25 bp, Homo sapien
agccaactccagagcagaaccctgg

SEQ ID NO: 4310611 - DNA, 25 bp, Homo sapien
agctgtgccaacctggacccgagag

SEQ ID NO: 4310612 - DNA, 25 bp, Homo sapien
tcttcagatttgatgcgcactcagc

SEQ ID NO: 4310613 - DNA, 25 bp, Homo sapien
cttcagatttgatgcgcactcagct

SEQ ID NO: 4310614 - DNA, 25 bp, Homo sapien
ttcagatttgatgcgcactcagctg

SEQ ID NO: 4310615 - DNA, 25 bp, Homo sapien
ctgtactgtctgtactgtgtagatt

SEQ ID NO: 4310616 - DNA, 25 bp, Homo sapien
cagtttcattatccaggttttttga

SEQ ID NO: 4310617 - DNA, 25 bp, Homo sapien
ccagtgcaggagataattgtaccaa

SEQ ID NO: 4310618 - DNA, 25 bp, Homo sapien
tgtaccaagttacataggtcccctc

SEQ ID NO: 4310619 - DNA, 25 bp, Homo sapien
gaaatcacgtttccagaggccctaa

SEQ ID NO: 4310620 - DNA, 25 bp, Homo sapien
ccaaaagggttacactcaacaagag

SEQ ID NO: 4310621 - DNA, 25 bp, Homo sapien
gggttacactcaacaagagctctat

SEQ ID NO: 4310622 - DNA, 25 bp, Homo sapien
gatagggtagggaagatcttcacaa

SEQ ID NO: 4310623 - DNA, 25 bp, Homo sapien
tattttaacagtctaacacctgatg

SEQ ID NO: 4310624 - DNA, 25 bp, Homo sapien
aatccatatgtatgcctagagatgc

SEQ ID NO: 4310625 - DNA, 25 bp, Homo sapien
catatgtatgcctagagatgcttct

SEQ ID NO: 4310626 - DNA, 25 bp, Homo sapien
ccatatgtatgcctagagatgcttc

SEQ ID NO: 4310627 - DNA, 25 bp, Homo sapien
atccatatgtatgcctagagatgct

SEQ ID NO: 4310628 - DNA, 25 bp, Homo sapien
aaggcagagttatatcttctaaatg

SEQ ID NO: 4310629 - DNA, 25 bp, Homo sapien
tcctgttggatttacaacatcgggc

SEQ ID NO: 4310630 - DNA, 25 bp, Homo sapien
gttggatttacaacatcgggctcag

SEQ ID NO: 4310631 - DNA, 25 bp, Homo sapien
tatatcttctaaatgccagtcttcc

SEQ ID NO: 4310632 - DNA, 25 bp, Homo sapien
agtgttgccgaaacttttcgggctg

SEQ ID NO: 4310633 - DNA, 25 bp, Homo sapien
agcacgccgcgttccgatcggaagg

SEQ ID NO: 4310634 - DNA, 25 bp, Homo sapien
cgaagctggcttccgacccggcggg

SEQ ID NO: 4310635 - DNA, 25 bp, Homo sapien
aaacttttcgggctgcgctgtcctc

SEQ ID NO: 4310636 - DNA, 25 bp, Homo sapien
cagaaggtccaggacgagtgcagcg

SEQ ID NO: 4310637 - DNA, 25 bp, Homo sapien
tgcagcgccgacagctgctgcaggc

SEQ ID NO: 4310638 - DNA, 25 bp, Homo sapien
aaggtccaggacgagtgcagcggga

SEQ ID NO: 4310639 - DNA, 25 bp, Homo sapien
tccaggacgagtgcagcgggacccc

SEQ ID NO: 4310640 - DNA, 25 bp, Homo sapien
gagactgacggcctggcctggagtg

SEQ ID NO: 4310641 - DNA, 25 bp, Homo sapien
ggccgatcccgctcaggcgcgggcc

SEQ ID NO: 4310642 - DNA, 25 bp, Homo sapien
gggaacggtctgcgggctggctctg

SEQ ID NO: 4310643 - DNA, 25 bp, Homo sapien
ggcgcgggcccagcgtgggagactg

SEQ ID NO: 4310644 - DNA, 25 bp, Homo sapien
ggaccaacgtgctgtcccactgcat

SEQ ID NO: 4310645 - DNA, 25 bp, Homo sapien
caacacagacgacttggggtggcag

SEQ ID NO: 4310646 - DNA, 25 bp, Homo sapien
cagaggcgggactagaacgtgggta

SEQ ID NO: 4310647 - DNA, 25 bp, Homo sapien
gaacgtgggtagcttgaggtccgga

SEQ ID NO: 4310648 - DNA, 25 bp, Homo sapien
ccacagtgcctagcctgctcttcct

SEQ ID NO: 4310649 - DNA, 25 bp, Homo sapien
agccacagtgcctagcctgctcttc

SEQ ID NO: 4310650 - DNA, 25 bp, Homo sapien
cttccccagtagctacaagcacatg

SEQ ID NO: 4310651 - DNA, 25 bp, Homo sapien
gctcttccttctttattcccactgg

SEQ ID NO: 4310652 - DNA, 25 bp, Homo sapien
ctttcattgtcaaagttatgacttc

SEQ ID NO: 4310653 - DNA, 25 bp, Homo sapien
cactttcattgtcaaagttatgact

SEQ ID NO: 4310654 - DNA, 25 bp, Homo sapien
tgtcaaagttatgacttcgtcccat

SEQ ID NO: 4310655 - DNA, 25 bp, Homo sapien
ttgtcaaagttatgacttcgtccca

SEQ ID NO: 4310656 - DNA, 25 bp, Homo sapien
ggggccaaacgcgacttgtcgccac

SEQ ID NO: 4310657 - DNA, 25 bp, Homo sapien
acttgtcgccaccttgcgtcctggg

SEQ ID NO: 4310658 - DNA, 25 bp, Homo sapien
ggccaaacgcgacttgtcgccacct

SEQ ID NO: 4310659 - DNA, 25 bp, Homo sapien
aacgcgacttgtcgccaccttgcgt

SEQ ID NO: 4310660 - DNA, 25 bp, Homo sapien
caggcggtgcgggatgcctcggcgg

SEQ ID NO: 4310661 - DNA, 25 bp, Homo sapien
gcggtgcgggatgcctcggcggggc

SEQ ID NO: 4310662 - DNA, 25 bp, Homo sapien
aggcggtgcgggatgcctcggcggg

SEQ ID NO: 4310663 - DNA, 25 bp, Homo sapien
cccaggcggtgcgggatgcctcggc

SEQ ID NO: 4310664 - DNA, 25 bp, Homo sapien
tgcgcgcgctcgcctgcctcccggc

SEQ ID NO: 4310665 - DNA, 25 bp, Homo sapien
ctgcctcccggccgtcatgctggcg

SEQ ID NO: 4310666 - DNA, 25 bp, Homo sapien
tgctgctcgacctgtgcctggccga

SEQ ID NO: 4310667 - DNA, 25 bp, Homo sapien
ctgctgctcgacctgtgcctggccg

SEQ ID NO: 4310668 - DNA, 25 bp, Homo sapien
cttcccgccagtgctggacggcggt

SEQ ID NO: 4310669 - DNA, 25 bp, Homo sapien
gtggtgggcgccacgcacctcgtct

SEQ ID NO: 4310670 - DNA, 25 bp, Homo sapien
gccgccaactggacggcgggcttcg

SEQ ID NO: 4310671 - DNA, 25 bp, Homo sapien
caccgcttctatgcagagcgcctgg

SEQ ID NO: 4310672 - DNA, 25 bp, Homo sapien
tgttctacgccgtcacgctgctctt

SEQ ID NO: 4310673 - DNA, 25 bp, Homo sapien
gaagaggctgtgcaagatgttctac

SEQ ID NO: 4310674 - DNA, 25 bp, Homo sapien
tggaagaattcaagacggagaagag

SEQ ID NO: 4310675 - DNA, 25 bp, Homo sapien
gccgcctcctcgtgctggaagaatt

SEQ ID NO: 4310676 - DNA, 25 bp, Homo sapien
ctccgtgtggctgaccttcgcgcag

SEQ ID NO: 4310677 - DNA, 25 bp, Homo sapien
ggcatcaaccccgtcgtgtgcttcc

SEQ ID NO: 4310678 - DNA, 25 bp, Homo sapien
tgaccttcgcgcaggccggcatcaa

SEQ ID NO: 4310679 - DNA, 25 bp, Homo sapien
agctgagggactgcttcagggccca

SEQ ID NO: 4310680 - DNA, 25 bp, Homo sapien
gctcggacggtgacgttgtatcttt

SEQ ID NO: 4310681 - DNA, 25 bp, Homo sapien
ccttcaaaatgactcgaagtggaca

SEQ ID NO: 4310682 - DNA, 25 bp, Homo sapien
ctgcgacctgaaaggcattggttta

SEQ ID NO: 4310683 - DNA, 25 bp, Homo sapien
cagcctttccctttggctcggacgg

SEQ ID NO: 4310684 - DNA, 25 bp, Homo sapien
gaagttgtccgaaatgccctctgaa

SEQ ID NO: 4310685 - DNA, 25 bp, Homo sapien
ccttgtgctgcgctggttctttgaa

SEQ ID NO: 4310686 - DNA, 25 bp, Homo sapien
tgacaacctcaagtggcattacatt

SEQ ID NO: 4310687 - DNA, 25 bp, Homo sapien
tgaattgccggctgcagggtccttg

SEQ ID NO: 4310688 - DNA, 25 bp, Homo sapien
tggttcccggtttactttctgctgc

SEQ ID NO: 4310689 - DNA, 25 bp, Homo sapien
tgctgctaaaaaccacgtcagtgac

SEQ ID NO: 4310690 - DNA, 25 bp, Homo sapien
aaatggcttgtgctttgagaagccc

SEQ ID NO: 4310691 - DNA, 25 bp, Homo sapien
aaatgtttgctaggttaagctgtgc

SEQ ID NO: 4310692 - DNA, 25 bp, Homo sapien
cctcaggccgtgtgacatgcttcag

SEQ ID NO: 4310693 - DNA, 25 bp, Homo sapien
cgtctggtgcatcccatcagctgct

SEQ ID NO: 4310694 - DNA, 25 bp, Homo sapien
gccgtgtgacatgcttcaggcactc

SEQ ID NO: 4310695 - DNA, 25 bp, Homo sapien
ctccttgaagtctgcactcctgcgt

SEQ ID NO: 4310696 - DNA, 25 bp, Homo sapien
ctgaatattgaccaacgtgtatggc

SEQ ID NO: 4310697 - DNA, 25 bp, Homo sapien
gaatattgaccaacgtgtatggcaa

SEQ ID NO: 4310698 - DNA, 25 bp, Homo sapien
attgaccaacgtgtatggcaatgtc

SEQ ID NO: 4310699 - DNA, 25 bp, Homo sapien
ttcctgaatattgaccaacgtgtat

SEQ ID NO: 4310700 - DNA, 25 bp, Homo sapien
tgagctagcccaccctggtaagaac

SEQ ID NO: 4310701 - DNA, 25 bp, Homo sapien
gcttcctggtcacaacaaaactgaa

SEQ ID NO: 4310702 - DNA, 25 bp, Homo sapien
ggttctcattaaggtatcgggacca

SEQ ID NO: 4310703 - DNA, 25 bp, Homo sapien
gactgatcccactctctgcatggca

SEQ ID NO: 4310704 - DNA, 25 bp, Homo sapien
caatactgatacaggtacaaacggc

SEQ ID NO: 4310705 - DNA, 25 bp, Homo sapien
caagggaccaaaagctgtaggtgta

SEQ ID NO: 4310706 - DNA, 25 bp, Homo sapien
gagctgaagtcctcttgagtgacag

SEQ ID NO: 4310707 - DNA, 25 bp, Homo sapien
tagcttccgtgccatgacaggagtt

SEQ ID NO: 4310708 - DNA, 25 bp, Homo sapien
agtgtgatgcatcctccgcccaaaa

SEQ ID NO: 4310709 - DNA, 25 bp, Homo sapien
atgcatcctccgcccaaaaaatgga

SEQ ID NO: 4310710 - DNA, 25 bp, Homo sapien
tgtgatgcatcctccgcccaaaaaa

SEQ ID NO: 4310711 - DNA, 25 bp, Homo sapien
gtgatgcatcctccgcccaaaaaat

SEQ ID NO: 4310712 - DNA, 25 bp, Homo sapien
agggtcaaccgacagcgagcatggt

SEQ ID NO: 4310713 - DNA, 25 bp, Homo sapien
gcctgtcttacaagttatacggaga

SEQ ID NO: 4310714 - DNA, 25 bp, Homo sapien
gaagaaggcaagctcaatttgcata

SEQ ID NO: 4310715 - DNA, 25 bp, Homo sapien
aaaggtctgcttcattcgagagtca

SEQ ID NO: 4310716 - DNA, 25 bp, Homo sapien
ggtggtaccacattcgcattcttct

SEQ ID NO: 4310717 - DNA, 25 bp, Homo sapien
ccaacaatgtaaaggctaattcttc

SEQ ID NO: 4310718 - DNA, 25 bp, Homo sapien
aatgtaaaggctaattcttctgggc

SEQ ID NO: 4310719 - DNA, 25 bp, Homo sapien
tcttctgggcatgtctttcggtggt

SEQ ID NO: 4310720 - DNA, 25 bp, Homo sapien
cttctttcctgccttccatttccaa

SEQ ID NO: 4310721 - DNA, 25 bp, Homo sapien
tttcttctttcctgccttccatttc

SEQ ID NO: 4310722 - DNA, 25 bp, Homo sapien
tcctgccttccatttccaaaattgt

SEQ ID NO: 4310723 - DNA, 25 bp, Homo sapien
ctttcctgccttccatttccaaaat

SEQ ID NO: 4310724 - DNA, 25 bp, Homo sapien
tgaactggcggagcaagatacagcc

SEQ ID NO: 4310725 - DNA, 25 bp, Homo sapien
tatgtcatgacttcccaggttctaa

SEQ ID NO: 4310726 - DNA, 25 bp, Homo sapien
tcaccactggattaatagagacttg

SEQ ID NO: 4310727 - DNA, 25 bp, Homo sapien
tcaaagggaacactgagagccggct

SEQ ID NO: 4310728 - DNA, 25 bp, Homo sapien
gagcttccttacttctgccttatca

SEQ ID NO: 4310729 - DNA, 25 bp, Homo sapien
ttctatactcagatttctgcaaaga

SEQ ID NO: 4310730 - DNA, 25 bp, Homo sapien
gagtaattgtataatcgattttcta

SEQ ID NO: 4310731 - DNA, 25 bp, Homo sapien
tgcaaagatgcatactagagtataa

SEQ ID NO: 4310732 - DNA, 25 bp, Homo sapien
catgtgttgcaaattatattggtaa

SEQ ID NO: 4310733 - DNA, 25 bp, Homo sapien
aacaccatgagagcagtaacatgaa

SEQ ID NO: 4310734 - DNA, 25 bp, Homo sapien
gagcagtaacatgaaaactatcact

SEQ ID NO: 4310735 - DNA, 25 bp, Homo sapien
aaaatgcttctaacaccatgagagc

SEQ ID NO: 4310736 - DNA, 25 bp, Homo sapien
ggtagttttacactgttatccttgc

SEQ ID NO: 4310737 - DNA, 25 bp, Homo sapien
gttaccacagtagaaccaccatgaa

SEQ ID NO: 4310738 - DNA, 25 bp, Homo sapien
tgtttgtcgagcacgttacccagtc

SEQ ID NO: 4310739 - DNA, 25 bp, Homo sapien
catgtcatacagaccctgctcagag

SEQ ID NO: 4310740 - DNA, 25 bp, Homo sapien
caaatccttatgctcttgacccaga

SEQ ID NO: 4310741 - DNA, 25 bp, Homo sapien
atgcctccaccacattgggagtcct

SEQ ID NO: 4310742 - DNA, 25 bp, Homo sapien
tgcctccaccacattgggagtcctt

SEQ ID NO: 4310743 - DNA, 25 bp, Homo sapien
ccttatgctcttgacccagatactg

SEQ ID NO: 4310744 - DNA, 25 bp, Homo sapien
gactgtaggattaagactctgggca

SEQ ID NO: 4310745 - DNA, 25 bp, Homo sapien
gggagcaaactctttgactgtagga

SEQ ID NO: 4310746 - DNA, 25 bp, Homo sapien
tttgcatttcaggaaggggccgtca

SEQ ID NO: 4310747 - DNA, 25 bp, Homo sapien
taaggttcgaggttggagagcctcc

SEQ ID NO: 4310748 - DNA, 25 bp, Homo sapien
aggagcaggagtggggcgcagcaca

SEQ ID NO: 4310749 - DNA, 25 bp, Homo sapien
cccggtgatcacggcggcgtcccca

SEQ ID NO: 4310750 - DNA, 25 bp, Homo sapien
ggtgatcacggcggcgtccccagcg

SEQ ID NO: 4310751 - DNA, 25 bp, Homo sapien
tgatcacggcggcgtccccagcgcg

SEQ ID NO: 4310752 - DNA, 25 bp, Homo sapien
ggactgggcggccgccggaggcagt

SEQ ID NO: 4310753 - DNA, 25 bp, Homo sapien
ctcgggactgggcggccgccggagg

SEQ ID NO: 4310754 - DNA, 25 bp, Homo sapien
actgggcggccgccggaggcagttg

SEQ ID NO: 4310755 - DNA, 25 bp, Homo sapien
tgggcggccgccggaggcagttggg

SEQ ID NO: 4310756 - DNA, 25 bp, Homo sapien
tatactgggcgcccgctgcgtgcca

SEQ ID NO: 4310757 - DNA, 25 bp, Homo sapien
ctatactgggcgcccgctgcgtgcc

SEQ ID NO: 4310758 - DNA, 25 bp, Homo sapien
aatcatgaacaggaagtgggagttt

SEQ ID NO: 4310759 - DNA, 25 bp, Homo sapien
agtgggagtttctccatgaccagca

SEQ ID NO: 4310760 - DNA, 25 bp, Homo sapien
tcaatcatgaacaggaagtgggagt

SEQ ID NO: 4310761 - DNA, 25 bp, Homo sapien
gagtttctccatgaccagcagcagg

SEQ ID NO: 4310762 - DNA, 25 bp, Homo sapien
cagcatggtgcttattacttcttat

SEQ ID NO: 4310763 - DNA, 25 bp, Homo sapien
tcatgagcagcatggtgcttattac

SEQ ID NO: 4310764 - DNA, 25 bp, Homo sapien
gcagcatggtgcttattacttctta

SEQ ID NO: 4310765 - DNA, 25 bp, Homo sapien
tgagcagcatggtgcttattacttc

SEQ ID NO: 4310766 - DNA, 25 bp, Homo sapien
aagccacccgccgagagatcaaggt

SEQ ID NO: 4310767 - DNA, 25 bp, Homo sapien
aggtctcccatacggaggagaaaag

SEQ ID NO: 4310768 - DNA, 25 bp, Homo sapien
caagccaaggatacagctaagccac

SEQ ID NO: 4310769 - DNA, 25 bp, Homo sapien
ttccctagcttcttatcattcccag

SEQ ID NO: 4310770 - DNA, 25 bp, Homo sapien
gcctgtcttgaccatcttcaaaatc

SEQ ID NO: 4310771 - DNA, 25 bp, Homo sapien
ctgtcttgaccatcttcaaaatcac

SEQ ID NO: 4310772 - DNA, 25 bp, Homo sapien
ttgcctgtcttgaccatcttcaaaa

SEQ ID NO: 4310773 - DNA, 25 bp, Homo sapien
ctgttgcctgtcttgaccatcttca

SEQ ID NO: 4310774 - DNA, 25 bp, Homo sapien
gctggtggtccctgtctccaggctc

SEQ ID NO: 4310775 - DNA, 25 bp, Homo sapien
ttaagagctggtggtccctgtctcc

SEQ ID NO: 4310776 - DNA, 25 bp, Homo sapien
tctctctcctagctggctgcctctg

SEQ ID NO: 4310777 - DNA, 25 bp, Homo sapien
tcccaggctgccatagaaaaggctt

SEQ ID NO: 4310778 - DNA, 25 bp, Homo sapien
attctttaaagtggtagatttccat

SEQ ID NO: 4310779 - DNA, 25 bp, Homo sapien
tattctttaaagtggtagatttcca

SEQ ID NO: 4310780 - DNA, 25 bp, Homo sapien
ttctttaaagtggtagatttccatc

SEQ ID NO: 4310781 - DNA, 25 bp, Homo sapien
ttgctccatctctaacttttttctt

SEQ ID NO: 4310782 - DNA, 25 bp, Homo sapien
tttgaccaccttgtcaatggccaga

SEQ ID NO: 4310783 - DNA, 25 bp, Homo sapien
tctttttgaccaccttgtcaatggc

SEQ ID NO: 4310784 - DNA, 25 bp, Homo sapien
caccttgtcaatggccagagtgagt

SEQ ID NO: 4310785 - DNA, 25 bp, Homo sapien
tgtgatgcattggttgggtgcacct

SEQ ID NO: 4310786 - DNA, 25 bp, Homo sapien
gcattggttgggtgcacctttcatg

SEQ ID NO: 4310787 - DNA, 25 bp, Homo sapien
tcctggttgtgcagagaagaacttt

SEQ ID NO: 4310788 - DNA, 25 bp, Homo sapien
ttcatgagctctaccactgttcctg

SEQ ID NO: 4310789 - DNA, 25 bp, Homo sapien
gtattacaaggcagctattcacgga

SEQ ID NO: 4310790 - DNA, 25 bp, Homo sapien
ggcagctattcacggattcttcact

SEQ ID NO: 4310791 - DNA, 25 bp, Homo sapien
caagcattgacgagtattacaaggc

SEQ ID NO: 4310792 - DNA, 25 bp, Homo sapien
tattcacggattcttcactggcagc

SEQ ID NO: 4310793 - DNA, 25 bp, Homo sapien
cgcctgatcagcaagcgccttgtca

SEQ ID NO: 4310794 - DNA, 25 bp, Homo sapien
gagtgtctgggtagtcaccacccgc

SEQ ID NO: 4310795 - DNA, 25 bp, Homo sapien
tgtgacagtggaggctgcgctgatg

SEQ ID NO: 4310796 - DNA, 25 bp, Homo sapien
gatggatgccgaatcatcaaaggcc

SEQ ID NO: 4310797 - DNA, 25 bp, Homo sapien
acctccccgtgattactgcactgtg

SEQ ID NO: 4310798 - DNA, 25 bp, Homo sapien
aataacctccccgtgattactgcac

SEQ ID NO: 4310799 - DNA, 25 bp, Homo sapien
gagaataacctccccgtgattactg

SEQ ID NO: 4310800 - DNA, 25 bp, Homo sapien
ccccgtgattactgcactgtgaaca

SEQ ID NO: 4310801 - DNA, 25 bp, Homo sapien
gagtgctggccgtggttttagatcc

SEQ ID NO: 4310802 - DNA, 25 bp, Homo sapien
acaggattattgtctgttgggcctg

SEQ ID NO: 4310803 - DNA, 25 bp, Homo sapien
tgggcctgtggcaaacccataagaa

SEQ ID NO: 4310804 - DNA, 25 bp, Homo sapien
cataagaagaacccactcctccaga

SEQ ID NO: 4310805 - DNA, 25 bp, Homo sapien
gaacaagcaaatcgatggtgaagga

SEQ ID NO: 4310806 - DNA, 25 bp, Homo sapien
agcaaatcgatggtgaaggaaagcc

SEQ ID NO: 4310807 - DNA, 25 bp, Homo sapien
ctgggaacaagcaaatcgatggtga

SEQ ID NO: 4310808 - DNA, 25 bp, Homo sapien
caagcaaatcgatggtgaaggaaag

SEQ ID NO: 4310809 - DNA, 25 bp, Homo sapien
tgatgtgtctccaagtgaggagcag

SEQ ID NO: 4310810 - DNA, 25 bp, Homo sapien
aggcggcagggcttccaaccagaac

SEQ ID NO: 4310811 - DNA, 25 bp, Homo sapien
gcaagccgatgacggggccagaggc

SEQ ID NO: 4310812 - DNA, 25 bp, Homo sapien
cagaggccaggaatgatgtgtctcc

SEQ ID NO: 4310813 - DNA, 25 bp, Homo sapien
atttggcagagatcctgcatccctg

SEQ ID NO: 4310814 - DNA, 25 bp, Homo sapien
acaagtgggaaatgaggctgtccaa

SEQ ID NO: 4310815 - DNA, 25 bp, Homo sapien
tgtccaaggattaagacccagaccc

SEQ ID NO: 4310816 - DNA, 25 bp, Homo sapien
cccacggatgcgggaagcacaagtg

SEQ ID NO: 4310817 - DNA, 25 bp, Homo sapien
ttagtttgatctttgggatgattca

SEQ ID NO: 4310818 - DNA, 25 bp, Homo sapien
tttgggatgattcaggctcaagttt

SEQ ID NO: 4310819 - DNA, 25 bp, Homo sapien
catctttagtttgatctttgggatg

SEQ ID NO: 4310820 - DNA, 25 bp, Homo sapien
tctttagtttgatctttgggatgat

SEQ ID NO: 4310821 - DNA, 25 bp, Homo sapien
taataacagcttagagcagacagct

SEQ ID NO: 4310822 - DNA, 25 bp, Homo sapien
ggtctcctgaaataattgttccttc

SEQ ID NO: 4310823 - DNA, 25 bp, Homo sapien
tcagctcctgtgtcttcaggagtgg

SEQ ID NO: 4310824 - DNA, 25 bp, Homo sapien
ccttccccttccttctgcagatcat

SEQ ID NO: 4310825 - DNA, 25 bp, Homo sapien
tgcacatgatttttgaagcccaaca

SEQ ID NO: 4310826 - DNA, 25 bp, Homo sapien
aggtcttggtacacagcctgtttcc

SEQ ID NO: 4310827 - DNA, 25 bp, Homo sapien
tcttaaccacctgcaaatctgcagg

SEQ ID NO: 4310828 - DNA, 25 bp, Homo sapien
cccgtgtgcacatgatttttgaagc

SEQ ID NO: 4310829 - DNA, 25 bp, Homo sapien
tcaagtgacacgtgcagtcccaggt

SEQ ID NO: 4310830 - DNA, 25 bp, Homo sapien
gggcgaaggtaatttgtagctgaca

SEQ ID NO: 4310831 - DNA, 25 bp, Homo sapien
cagatcaagtgacacgtgcagtccc

SEQ ID NO: 4310832 - DNA, 25 bp, Homo sapien
ccagcagatcaagtgacacgtgcag

SEQ ID NO: 4310833 - DNA, 25 bp, Homo sapien
gacatctcacagtgccaacctgttg

SEQ ID NO: 4310834 - DNA, 25 bp, Homo sapien
ctccaactggccacagtccacaact

SEQ ID NO: 4310835 - DNA, 25 bp, Homo sapien
tgcctagacatctcacagtgccaac

SEQ ID NO: 4310836 - DNA, 25 bp, Homo sapien
cagatctgcctagacatctcacagt

SEQ ID NO: 4310837 - DNA, 25 bp, Homo sapien
cccaaggagtggttaatggatcttt

SEQ ID NO: 4310838 - DNA, 25 bp, Homo sapien
ggcccaaggagtggttaatggatct

SEQ ID NO: 4310839 - DNA, 25 bp, Homo sapien
aaggcccaaggagtggttaatggat

SEQ ID NO: 4310840 - DNA, 25 bp, Homo sapien
aggagtggttaatggatctttttca

SEQ ID NO: 4310841 - DNA, 25 bp, Homo sapien
ggaagatacatagttaggtggaatg

SEQ ID NO: 4310842 - DNA, 25 bp, Homo sapien
catagttaggtggaatgtttggttc

SEQ ID NO: 4310843 - DNA, 25 bp, Homo sapien
aggtggaatgtttggttcagtgtcc

SEQ ID NO: 4310844 - DNA, 25 bp, Homo sapien
ctgtccccgaggaaggaagatacat

SEQ ID NO: 4310845 - DNA, 25 bp, Homo sapien
gtaattggcagatcctcgacactgg

SEQ ID NO: 4310846 - DNA, 25 bp, Homo sapien
gatcctcgacactggacacttgcag

SEQ ID NO: 4310847 - DNA, 25 bp, Homo sapien
tggcagatcctcgacactggacact

SEQ ID NO: 4310848 - DNA, 25 bp, Homo sapien
acactggacacttgcagcgcttggg

SEQ ID NO: 4310849 - DNA, 25 bp, Homo sapien
cccggcattcatcaggttaaatccc

SEQ ID NO: 4310850 - DNA, 25 bp, Homo sapien
ccggcattcatcaggttaaatccca

SEQ ID NO: 4310851 - DNA, 25 bp, Homo sapien
cggcattcatcaggttaaatcccac

SEQ ID NO: 4310852 - DNA, 25 bp, Homo sapien
gaagaatgagttcctgtgaatggct

SEQ ID NO: 4310853 - DNA, 25 bp, Homo sapien
gcttcacggtcgtggctctcaggta

SEQ ID NO: 4310854 - DNA, 25 bp, Homo sapien
tggtcctggtcatttccgttgctga

SEQ ID NO: 4310855 - DNA, 25 bp, Homo sapien
cagatttgtatctcttctggtcctg

SEQ ID NO: 4310856 - DNA, 25 bp, Homo sapien
tagcagaacattccctagcaaagaa

SEQ ID NO: 4310857 - DNA, 25 bp, Homo sapien
agtgtcccgacctagcagaacattc

SEQ ID NO: 4310858 - DNA, 25 bp, Homo sapien
ggcctgacataactcccttccacac

SEQ ID NO: 4310859 - DNA, 25 bp, Homo sapien
cctagcaaagaacagggcctgacat

SEQ ID NO: 4310860 - DNA, 25 bp, Homo sapien
aaaatggcaaagcaaggttgtacat

SEQ ID NO: 4310861 - DNA, 25 bp, Homo sapien
tccacaggtccctgccgtccacgga

SEQ ID NO: 4310862 - DNA, 25 bp, Homo sapien
aatggcaaagcaaggttgtacatcc

SEQ ID NO: 4310863 - DNA, 25 bp, Homo sapien
tggcaaagcaaggttgtacatccac

SEQ ID NO: 4310864 - DNA, 25 bp, Homo sapien
gacaaaggggctgcatgatagcaga

SEQ ID NO: 4310865 - DNA, 25 bp, Homo sapien
aactattgcaaagacggacaaaggg

SEQ ID NO: 4310866 - DNA, 25 bp, Homo sapien
aggtaaggaccctggaactattgca

SEQ ID NO: 4310867 - DNA, 25 bp, Homo sapien
tgcatgatagcagacctccagagcc

SEQ ID NO: 4310868 - DNA, 25 bp, Homo sapien
tagatcacctgcagacaaccgtagg

SEQ ID NO: 4310869 - DNA, 25 bp, Homo sapien
ctggcaataactttgaaaggagggt

SEQ ID NO: 4310870 - DNA, 25 bp, Homo sapien
tgactgtgcatccaagctcatttgt

SEQ ID NO: 4310871 - DNA, 25 bp, Homo sapien
gtttgccagagagaagccaacgtcg

SEQ ID NO: 4310872 - DNA, 25 bp, Homo sapien
ggcgtgcctggatcttcaccatgca

SEQ ID NO: 4310873 - DNA, 25 bp, Homo sapien
agagagttgttcttgtggcgtgcct

SEQ ID NO: 4310874 - DNA, 25 bp, Homo sapien
cattcctgatagctatgagggggag

SEQ ID NO: 4310875 - DNA, 25 bp, Homo sapien
tgagggggagtatttttcaccaaga

SEQ ID NO: 4310876 - DNA, 25 bp, Homo sapien
cccatgcagcacctgaaaaggagct

SEQ ID NO: 4310877 - DNA, 25 bp, Homo sapien
tggtggcttccactacagctgtggt

SEQ ID NO: 4310878 - DNA, 25 bp, Homo sapien
tccggtagagggattctgcatggct

SEQ ID NO: 4310879 - DNA, 25 bp, Homo sapien
agtgcatcaacaagggtcccctgag

SEQ ID NO: 4310880 - DNA, 25 bp, Homo sapien
caggcagatccagtgaatgatgatg

SEQ ID NO: 4310881 - DNA, 25 bp, Homo sapien
tagcaggatgaagtatcagccctgg

SEQ ID NO: 4310882 - DNA, 25 bp, Homo sapien
gggtgctacaggcagatccagtgaa

SEQ ID NO: 4310883 - DNA, 25 bp, Homo sapien
tcacatcttggaagtcacccaaagc

SEQ ID NO: 4310884 - DNA, 25 bp, Homo sapien
cagcccgtaggatcaacctctcagg

SEQ ID NO: 4310885 - DNA, 25 bp, Homo sapien
gaaaaccacacacgttcataacaca

SEQ ID NO: 4310886 - DNA, 25 bp, Homo sapien
tttttgtcacgttgtgagaaaacag

SEQ ID NO: 4310887 - DNA, 25 bp, Homo sapien
tgcgctcaaaaacatgctccaagaa

SEQ ID NO: 4310888 - DNA, 25 bp, Homo sapien
gattgtcgagtgatgcagtctgatg

SEQ ID NO: 4310889 - DNA, 25 bp, Homo sapien
tcttattgctattctgacacttggg

SEQ ID NO: 4310890 - DNA, 25 bp, Homo sapien
tacccaagaactgtgttaatggccc

SEQ ID NO: 4310891 - DNA, 25 bp, Homo sapien
gacacttgggaacacggcattttcc

SEQ ID NO: 4310892 - DNA, 25 bp, Homo sapien
caggctcttcctccttagtaaccat

SEQ ID NO: 4310893 - DNA, 25 bp, Homo sapien
agccgccagatgatgcaggctcttc

SEQ ID NO: 4310894 - DNA, 25 bp, Homo sapien
tagcagccgccagatgatgcaggct

SEQ ID NO: 4310895 - DNA, 25 bp, Homo sapien
tgtagcagccgccagatgatgcagg

SEQ ID NO: 4310896 - DNA, 25 bp, Homo sapien
cgcaacgggctcagttctgtagcag

SEQ ID NO: 4310897 - DNA, 25 bp, Homo sapien
tttgggctctcgcaacttccctgga

SEQ ID NO: 4310898 - DNA, 25 bp, Homo sapien
tgagggttttgccactccgcaacgg

SEQ ID NO: 4310899 - DNA, 25 bp, Homo sapien
cagaatgagagtacaagccccggtt

SEQ ID NO: 4310900 - DNA, 25 bp, Homo sapien
ttattagcagaagcgtgggctgtgc

SEQ ID NO: 4310901 - DNA, 25 bp, Homo sapien
ggctgtgccgggaacatttctaatc

SEQ ID NO: 4310902 - DNA, 25 bp, Homo sapien
aatcatttattagcagaagcgtggg

SEQ ID NO: 4310903 - DNA, 25 bp, Homo sapien
gggctgtgccgggaacatttctaat

SEQ ID NO: 4310904 - DNA, 25 bp, Homo sapien
ccttaatgctgccactagagacaga

SEQ ID NO: 4310905 - DNA, 25 bp, Homo sapien
caaagcaggcttgatgacacaatct

SEQ ID NO: 4310906 - DNA, 25 bp, Homo sapien
gatgacacaatctcccttaatgctg

SEQ ID NO: 4310907 - DNA, 25 bp, Homo sapien
cttaatgctgccactagagacagaa

SEQ ID NO: 4310908 - DNA, 25 bp, Homo sapien
tgtggaggtggtttcactccgtcat

SEQ ID NO: 4310909 - DNA, 25 bp, Homo sapien
ttgtgtggaggtggtttcactccgt

SEQ ID NO: 4310910 - DNA, 25 bp, Homo sapien
ggtggtttcactccgtcatttctgt

SEQ ID NO: 4310911 - DNA, 25 bp, Homo sapien
tttcactccgtcatttctgtgctgg

SEQ ID NO: 4310912 - DNA, 25 bp, Homo sapien
gagactgagtcacagtattaggcca

SEQ ID NO: 4310913 - DNA, 25 bp, Homo sapien
agactgagtcacagtattaggccaa

SEQ ID NO: 4310914 - DNA, 25 bp, Homo sapien
gaaagtccagtgacagagctagctg

SEQ ID NO: 4310915 - DNA, 25 bp, Homo sapien
cagtctgcagtcatctttaggaagg

SEQ ID NO: 4310916 - DNA, 25 bp, Homo sapien
tgctaagcctcagttgcccgctgtg

SEQ ID NO: 4310917 - DNA, 25 bp, Homo sapien
tgatcttttcattacacagggcaga

SEQ ID NO: 4310918 - DNA, 25 bp, Homo sapien
cagaagcaggtaagattttcagcag

SEQ ID NO: 4310919 - DNA, 25 bp, Homo sapien
gaagcaggtaagattttcagcagcc

SEQ ID NO: 4310920 - DNA, 25 bp, Homo sapien
aagcaggtaagattttcagcagccc

SEQ ID NO: 4310921 - DNA, 25 bp, Homo sapien
agcaggtaagattttcagcagcccc

SEQ ID NO: 4310922 - DNA, 25 bp, Homo sapien
tcagaccctcttctttaggaaccac

SEQ ID NO: 4310923 - DNA, 25 bp, Homo sapien
ggatcctgcagtttcagaccctctt

SEQ ID NO: 4310924 - DNA, 25 bp, Homo sapien
ttcagaccctcttctttaggaacca

SEQ ID NO: 4310925 - DNA, 25 bp, Homo sapien
cagtttcagaccctcttctttagga

SEQ ID NO: 4310926 - DNA, 25 bp, Homo sapien
gattaacagagacgatttcaaggcc

SEQ ID NO: 4310927 - DNA, 25 bp, Homo sapien
tggtcatgtcttcctactgtggcaa

SEQ ID NO: 4310928 - DNA, 25 bp, Homo sapien
gcaaatccctgggttacctcacagt

SEQ ID NO: 4310929 - DNA, 25 bp, Homo sapien
ggttggaccttgacagatacacaca

SEQ ID NO: 4310930 - DNA, 25 bp, Homo sapien
gataaccagatagaaccaagccact

SEQ ID NO: 4310931 - DNA, 25 bp, Homo sapien
catgccttagtactggcaggagaca

SEQ ID NO: 4310932 - DNA, 25 bp, Homo sapien
acatgcttcgttttcaagggaggaa

SEQ ID NO: 4310933 - DNA, 25 bp, Homo sapien
cccaattttaggttgtcaggccaca

SEQ ID NO: 4310934 - DNA, 25 bp, Homo sapien
agcacctggtcaattgttgattgca

SEQ ID NO: 4310935 - DNA, 25 bp, Homo sapien
cactcattcattatgtactaagcac

SEQ ID NO: 4310936 - DNA, 25 bp, Homo sapien
tacttacagaattgaatttgttcat

SEQ ID NO: 4310937 - DNA, 25 bp, Homo sapien
gccgtgtaaggagatgataaatact

SEQ ID NO: 4310938 - DNA, 25 bp, Homo sapien
aattctgattgcctcgggtctcctg

SEQ ID NO: 4310939 - DNA, 25 bp, Homo sapien
tgaggaggtcctcagtagctccccg

SEQ ID NO: 4310940 - DNA, 25 bp, Homo sapien
cagggcagaaacgagggcactttga

SEQ ID NO: 4310941 - DNA, 25 bp, Homo sapien
gaacaggtaggaactgcaaatggcc

SEQ ID NO: 4310942 - DNA, 25 bp, Homo sapien
gcttatgttccagcaaggaagcctg

SEQ ID NO: 4310943 - DNA, 25 bp, Homo sapien
ccagaaatctttgctgaagctacag

SEQ ID NO: 4310944 - DNA, 25 bp, Homo sapien
aggacgtgaaccttccatggtggaa

SEQ ID NO: 4310945 - DNA, 25 bp, Homo sapien
tggtgaggaccaagtcattagactc

SEQ ID NO: 4310946 - DNA, 25 bp, Homo sapien
tacagcctgcccaaccatatgggag

SEQ ID NO: 4310947 - DNA, 25 bp, Homo sapien
tatcacaaagtatggccattgcctg

SEQ ID NO: 4310948 - DNA, 25 bp, Homo sapien
taatgtctatgatgtgactggctcc

SEQ ID NO: 4310949 - DNA, 25 bp, Homo sapien
ctatgtttggatccccaggacctag

SEQ ID NO: 4310950 - DNA, 25 bp, Homo sapien
tgaataagccccagtggtcagcctg

SEQ ID NO: 4310951 - DNA, 25 bp, Homo sapien
tcagcagcttcatgcaagagcgggc

SEQ ID NO: 4310952 - DNA, 25 bp, Homo sapien
tcatgtgagcagtggccttgtggtc

SEQ ID NO: 4310953 - DNA, 25 bp, Homo sapien
tgcctctggttaccgacactgggaa

SEQ ID NO: 4310954 - DNA, 25 bp, Homo sapien
tgcagaccataaaggagacagatag

SEQ ID NO: 4310955 - DNA, 25 bp, Homo sapien
taaaaggacttagcccagagctggg

SEQ ID NO: 4310956 - DNA, 25 bp, Homo sapien
taagctacagataaggtacagcatg

SEQ ID NO: 4310957 - DNA, 25 bp, Homo sapien
tagtgacaagtcagtagtggctgct

SEQ ID NO: 4310958 - DNA, 25 bp, Homo sapien
gcagagcggtcccaatgagccatat

SEQ ID NO: 4310959 - DNA, 25 bp, Homo sapien
ttccagagaaaatcacccagcaggc

SEQ ID NO: 4310960 - DNA, 25 bp, Homo sapien
ggaatggcccaagtccacatgtcat

SEQ ID NO: 4310961 - DNA, 25 bp, Homo sapien
tcccatgccccagaaaagtccaagt

SEQ ID NO: 4310962 - DNA, 25 bp, Homo sapien
gttattgacacgaccgtttgccagg

SEQ ID NO: 4310963 - DNA, 25 bp, Homo sapien
gaagtgttgaccactcatgtctctg

SEQ ID NO: 4310964 - DNA, 25 bp, Homo sapien
ggaaggcgccctcaagcttatgatg

SEQ ID NO: 4310965 - DNA, 25 bp, Homo sapien
ttagtcgtagcaaacacctggccct

SEQ ID NO: 4310966 - DNA, 25 bp, Homo sapien
attcttttgtagatttaatgtcgcc

SEQ ID NO: 4310967 - DNA, 25 bp, Homo sapien
gcgtccaatgtgtacaaggtctaca

SEQ ID NO: 4310968 - DNA, 25 bp, Homo sapien
tagatttaatgtcgcctaagcgtcc

SEQ ID NO: 4310969 - DNA, 25 bp, Homo sapien
caaggtctacagtagcgtacaataa

SEQ ID NO: 4310970 - DNA, 25 bp, Homo sapien
caatcagacagaaggactgaggctc

SEQ ID NO: 4310971 - DNA, 25 bp, Homo sapien
tctgctgtcagataaattaagactc

SEQ ID NO: 4310972 - DNA, 25 bp, Homo sapien
agtgccacatggctgcccagtttgt

SEQ ID NO: 4310973 - DNA, 25 bp, Homo sapien
gctttagccactgtctgaccatgca

SEQ ID NO: 4310974 - DNA, 25 bp, Homo sapien
tcaaagacatccagcgacgcattct

SEQ ID NO: 4310975 - DNA, 25 bp, Homo sapien
tcccattatgtgaagagaaggctct

SEQ ID NO: 4310976 - DNA, 25 bp, Homo sapien
ccttgcatgtcccattatgtgaaga

SEQ ID NO: 4310977 - DNA, 25 bp, Homo sapien
gacgcattctacacttttgatttgg

SEQ ID NO: 4310978 - DNA, 25 bp, Homo sapien
cacagcttcagatgcgatggaaaat

SEQ ID NO: 4310979 - DNA, 25 bp, Homo sapien
ttcagatgcgatggaaaatacaact

SEQ ID NO: 4310980 - DNA, 25 bp, Homo sapien
tccattaggactagcccatagccac

SEQ ID NO: 4310981 - DNA, 25 bp, Homo sapien
tgttagagcacatgtccattaggac

SEQ ID NO: 4310982 - DNA, 25 bp, Homo sapien
gcagaatttcaagttcccgccagga

SEQ ID NO: 4310983 - DNA, 25 bp, Homo sapien
tagtcagtttgagaagcgctgctct

SEQ ID NO: 4310984 - DNA, 25 bp, Homo sapien
aacagcactggacattcaccttgga

SEQ ID NO: 4310985 - DNA, 25 bp, Homo sapien
tggaccttggtcaaaatgcagaatt

SEQ ID NO: 4310986 - DNA, 25 bp, Homo sapien
tcaatcttgggctcctttttgcctg

SEQ ID NO: 4310987 - DNA, 25 bp, Homo sapien
atgacacttgcattatctgcttctg

SEQ ID NO: 4310988 - DNA, 25 bp, Homo sapien
ttgggctcctttttgcctggattcc

SEQ ID NO: 4310989 - DNA, 25 bp, Homo sapien
aatcttgggctcctttttgcctgga

SEQ ID NO: 4310990 - DNA, 25 bp, Homo sapien
ggaaggcaaaacgcaggtctcacat

SEQ ID NO: 4310991 - DNA, 25 bp, Homo sapien
tggtggaaggcaaaacgcaggtctc

SEQ ID NO: 4310992 - DNA, 25 bp, Homo sapien
ggtggaaggcaaaacgcaggtctca

SEQ ID NO: 4310993 - DNA, 25 bp, Homo sapien
tggaaggcaaaacgcaggtctcaca

SEQ ID NO: 4310994 - DNA, 25 bp, Homo sapien
aaagcctttcattctgattcgtcca

SEQ ID NO: 4310995 - DNA, 25 bp, Homo sapien
gcctttcattctgattcgtccattt

SEQ ID NO: 4310996 - DNA, 25 bp, Homo sapien
ttcattctgattcgtccattttcca

SEQ ID NO: 4310997 - DNA, 25 bp, Homo sapien
tttcattctgattcgtccattttcc

SEQ ID NO: 4310998 - DNA, 25 bp, Homo sapien
taagggaaacttgaaaccatctcac

SEQ ID NO: 4310999 - DNA, 25 bp, Homo sapien
ggtcttcctcacaatggtagctaca

SEQ ID NO: 4311000 - DNA, 25 bp, Homo sapien
gcaagctagcttcaaccaggcactt

SEQ ID NO: 4311001 - DNA, 25 bp, Homo sapien
tctgactttgggattgcaagctagc

SEQ ID NO: 4311002 - DNA, 25 bp, Homo sapien
gaaagcacgattgctgctgcaccca

SEQ ID NO: 4311003 - DNA, 25 bp, Homo sapien
cactgagatgctttggctagggtat

SEQ ID NO: 4311004 - DNA, 25 bp, Homo sapien
tatgagtaaacccacctgaatgtag

SEQ ID NO: 4311005 - DNA, 25 bp, Homo sapien
tgtagcatgcatcacaatgacctgg

SEQ ID NO: 4311006 - DNA, 25 bp, Homo sapien
tatattatttgctgcacggctctag

SEQ ID NO: 4311007 - DNA, 25 bp, Homo sapien
tgtgggagcccgcatttatcagatg

SEQ ID NO: 4311008 - DNA, 25 bp, Homo sapien
tacagtaactcacataaactctggg

SEQ ID NO: 4311009 - DNA, 25 bp, Homo sapien
gctctcagttgggagtgaagccctg

SEQ ID NO: 4311010 - DNA, 25 bp, Homo sapien
gccccattatacatccctctgactg

SEQ ID NO: 4311011 - DNA, 25 bp, Homo sapien
tccacaaggcggaaacctcgcctgg

SEQ ID NO: 4311012 - DNA, 25 bp, Homo sapien
tctgactgcaactaaacggtccaca

SEQ ID NO: 4311013 - DNA, 25 bp, Homo sapien
ggcttgtcattatcatattgttcag

SEQ ID NO: 4311014 - DNA, 25 bp, Homo sapien
cgaagcccatttccgagaattcaat

SEQ ID NO: 4311015 - DNA, 25 bp, Homo sapien
tgtggaatgaatccactcactgggc

SEQ ID NO: 4311016 - DNA, 25 bp, Homo sapien
cctgaaataggcactcgaagcccat

SEQ ID NO: 4311017 - DNA, 25 bp, Homo sapien
acacagatcacaaactctatggcag

SEQ ID NO: 4311018 - DNA, 25 bp, Homo sapien
caggcatcttgtacccatctcagag

SEQ ID NO: 4311019 - DNA, 25 bp, Homo sapien
gatactgcccagtgaatggctccag

SEQ ID NO: 4311020 - DNA, 25 bp, Homo sapien
tcagccagtgcatatgtgaagccca

SEQ ID NO: 4311021 - DNA, 25 bp, Homo sapien
ccacaggttgggttctctgcaagga

SEQ ID NO: 4311022 - DNA, 25 bp, Homo sapien
tggagggtgatttacaacctccact

SEQ ID NO: 4311023 - DNA, 25 bp, Homo sapien
ccattgcatggagggtgatttacaa

SEQ ID NO: 4311024 - DNA, 25 bp, Homo sapien
cctttatgatgaaccattgcatgga

SEQ ID NO: 4311025 - DNA, 25 bp, Homo sapien
tgctccatatcctttatgatgaacc

SEQ ID NO: 4311026 - DNA, 25 bp, Homo sapien
gactcctcggccattggtctgcttg

SEQ ID NO: 4311027 - DNA, 25 bp, Homo sapien
gactctgcggccgtctaacgggcag

SEQ ID NO: 4311028 - DNA, 25 bp, Homo sapien
ggtcccaggctcaaatgccgacggg

SEQ ID NO: 4311029 - DNA, 25 bp, Homo sapien
ggtggccccgtcctcagattggcag

SEQ ID NO: 4311030 - DNA, 25 bp, Homo sapien
cgaatgagctccttttacgtgtgag

SEQ ID NO: 4311031 - DNA, 25 bp, Homo sapien
cctgcctccgaatgagctcctttta

SEQ ID NO: 4311032 - DNA, 25 bp, Homo sapien
ttctggggacaagcgcgtgcccctg

SEQ ID NO: 4311033 - DNA, 25 bp, Homo sapien
ccttttacgtgtgagtcctgggcac

SEQ ID NO: 4311034 - DNA, 25 bp, Homo sapien
ctgccaggatagagtgccacgatta

SEQ ID NO: 4311035 - DNA, 25 bp, Homo sapien
tagctggctgtaaataccgcctgca

SEQ ID NO: 4311036 - DNA, 25 bp, Homo sapien
ccgcctgcaactatatggtttaata

SEQ ID NO: 4311037 - DNA, 25 bp, Homo sapien
gtgataacgggcatttgtagcttac

SEQ ID NO: 4311038 - DNA, 25 bp, Homo sapien
ggactggggaagtggcccttgacca

SEQ ID NO: 4311039 - DNA, 25 bp, Homo sapien
tggactggggaagtggcccttgacc

SEQ ID NO: 4311040 - DNA, 25 bp, Homo sapien
gcttggactggggaagtggcccttg

SEQ ID NO: 4311041 - DNA, 25 bp, Homo sapien
cttggactggggaagtggcccttga

SEQ ID NO: 4311042 - DNA, 25 bp, Homo sapien
ggtgatgattgtttaggcaagtgat

SEQ ID NO: 4311043 - DNA, 25 bp, Homo sapien
tgattgtttaggcaagtgatttact

SEQ ID NO: 4311044 - DNA, 25 bp, Homo sapien
gattgtttaggcaagtgatttactg

SEQ ID NO: 4311045 - DNA, 25 bp, Homo sapien
gatgattgtttaggcaagtgattta

SEQ ID NO: 4311046 - DNA, 25 bp, Homo sapien
gcctggaagattatctttcatggca

SEQ ID NO: 4311047 - DNA, 25 bp, Homo sapien
catgtgcgtgagtcttagattgtac

SEQ ID NO: 4311048 - DNA, 25 bp, Homo sapien
taaatccaatgttagtagggcctgt

SEQ ID NO: 4311049 - DNA, 25 bp, Homo sapien
tattcaccagggcttcatgtgcgtg

SEQ ID NO: 4311050 - DNA, 25 bp, Homo sapien
ctctttaacgaggaaattgtgatag

SEQ ID NO: 4311051 - DNA, 25 bp, Homo sapien
taacgaggaaattgtgatagagcat

SEQ ID NO: 4311052 - DNA, 25 bp, Homo sapien
ttctctttaacgaggaaattgtgat

SEQ ID NO: 4311053 - DNA, 25 bp, Homo sapien
ccatctttctctttaacgaggaaat

SEQ ID NO: 4311054 - DNA, 25 bp, Homo sapien
catcggctccataaagcactgaagt

SEQ ID NO: 4311055 - DNA, 25 bp, Homo sapien
ggaagcattcattacccatcggctc

SEQ ID NO: 4311056 - DNA, 25 bp, Homo sapien
ccaagtgcctgacccgtaattggag

SEQ ID NO: 4311057 - DNA, 25 bp, Homo sapien
tgacccgtaattggagactcagccc

SEQ ID NO: 4311058 - DNA, 25 bp, Homo sapien
tgtttagcaatctcacatttttgga

SEQ ID NO: 4311059 - DNA, 25 bp, Homo sapien
tcacgccttccccttgtgtttagca

SEQ ID NO: 4311060 - DNA, 25 bp, Homo sapien
atttttggagatgttgttggagcat

SEQ ID NO: 4311061 - DNA, 25 bp, Homo sapien
ccccttgtgtttagcaatctcacat

SEQ ID NO: 4311062 - DNA, 25 bp, Homo sapien
taactcaccgggtgtgtcagcccag

SEQ ID NO: 4311063 - DNA, 25 bp, Homo sapien
tatcaatgccgttccctgaggatga

SEQ ID NO: 4311064 - DNA, 25 bp, Homo sapien
taataggaacgatcgttgctcgagc

SEQ ID NO: 4311065 - DNA, 25 bp, Homo sapien
cataagggatgatttgcttgaccaa

SEQ ID NO: 4311066 - DNA, 25 bp, Homo sapien
tctgtggtcttggtgtacctgttgt

SEQ ID NO: 4311067 - DNA, 25 bp, Homo sapien
tggtgtacctgttgtgtttttgcac

SEQ ID NO: 4311068 - DNA, 25 bp, Homo sapien
tgtttttgcacaggccttctagcac

SEQ ID NO: 4311069 - DNA, 25 bp, Homo sapien
cataagtaatctgtggtcttggtgt

SEQ ID NO: 4311070 - DNA, 25 bp, Homo sapien
tctccatctttccacaggtgtaaga

SEQ ID NO: 4311071 - DNA, 25 bp, Homo sapien
ttctccatctttccacaggtgtaag

SEQ ID NO: 4311072 - DNA, 25 bp, Homo sapien
ttttctccatctttccacaggtgta

SEQ ID NO: 4311073 - DNA, 25 bp, Homo sapien
ctccatctttccacaggtgtaagag

SEQ ID NO: 4311074 - DNA, 25 bp, Homo sapien
gattacttggcgtttggctctgtgc

SEQ ID NO: 4311075 - DNA, 25 bp, Homo sapien
ggtcctgatccctgattaattgaga

SEQ ID NO: 4311076 - DNA, 25 bp, Homo sapien
gtaggaaagctcttggccgtggcct

SEQ ID NO: 4311077 - DNA, 25 bp, Homo sapien
gggatggctgcgcaagcccacagaa

SEQ ID NO: 4311078 - DNA, 25 bp, Homo sapien
gaaataacaagtgcagttaactggc

SEQ ID NO: 4311079 - DNA, 25 bp, Homo sapien
caagtgcagttaactggccactgct

SEQ ID NO: 4311080 - DNA, 25 bp, Homo sapien
agtgcagttaactggccactgctga

SEQ ID NO: 4311081 - DNA, 25 bp, Homo sapien
taacaagtgcagttaactggccact

SEQ ID NO: 4311082 - DNA, 25 bp, Homo sapien
cccttggagaacagatgctcccatt

SEQ ID NO: 4311083 - DNA, 25 bp, Homo sapien
ccttggagaacagatgctcccattc

SEQ ID NO: 4311084 - DNA, 25 bp, Homo sapien
cattccagaaccaccgatactgctg

SEQ ID NO: 4311085 - DNA, 25 bp, Homo sapien
gaaccaccgatactgctgggagttt

SEQ ID NO: 4311086 - DNA, 25 bp, Homo sapien
ataattcatagctcagcctaaacat

SEQ ID NO: 4311087 - DNA, 25 bp, Homo sapien
tttggctcctttgtataattcatag

SEQ ID NO: 4311088 - DNA, 25 bp, Homo sapien
ttggctcctttgtataattcatagc

SEQ ID NO: 4311089 - DNA, 25 bp, Homo sapien
gtataattcatagctcagcctaaac

SEQ ID NO: 4311090 - DNA, 25 bp, Homo sapien
ggtcagatccgtccgtttgcggtca

SEQ ID NO: 4311091 - DNA, 25 bp, Homo sapien
caagtggttagttacctggctcacc

SEQ ID NO: 4311092 - DNA, 25 bp, Homo sapien
caggcccaagtggttagttacctgg

SEQ ID NO: 4311093 - DNA, 25 bp, Homo sapien
cctcttttcgtaagacaggcccaag

SEQ ID NO: 4311094 - DNA, 25 bp, Homo sapien
gacatgaacgtaacccaaactggct

SEQ ID NO: 4311095 - DNA, 25 bp, Homo sapien
gaacattttagtctctctgctgcaa

SEQ ID NO: 4311096 - DNA, 25 bp, Homo sapien
ggagacttgctacctctgaggaaga

SEQ ID NO: 4311097 - DNA, 25 bp, Homo sapien
ggactctgaactgcagtgacatgaa

SEQ ID NO: 4311098 - DNA, 25 bp, Homo sapien
gctctcggcatggtaatctacagcc

SEQ ID NO: 4311099 - DNA, 25 bp, Homo sapien
accagatgtcctgctatagttcttg

SEQ ID NO: 4311100 - DNA, 25 bp, Homo sapien
tgctctacgctgtccctaaccagta

SEQ ID NO: 4311101 - DNA, 25 bp, Homo sapien
tcgtgtaacggacatattcacaggt

SEQ ID NO: 4311102 - DNA, 25 bp, Homo sapien
gctgccttgccagaatatgggagac

SEQ ID NO: 4311103 - DNA, 25 bp, Homo sapien
tattcccagagccacggcctttcta

SEQ ID NO: 4311104 - DNA, 25 bp, Homo sapien
gacaaggagataccacagtgaagct

SEQ ID NO: 4311105 - DNA, 25 bp, Homo sapien
gacagccttggagggctccttcatg

SEQ ID NO: 4311106 - DNA, 25 bp, Homo sapien
gctacattttctcagggatctgtcc

SEQ ID NO: 4311107 - DNA, 25 bp, Homo sapien
cctcctgagagagcctgctacattt

SEQ ID NO: 4311108 - DNA, 25 bp, Homo sapien
aacttgaacccaagtgctccactgg

SEQ ID NO: 4311109 - DNA, 25 bp, Homo sapien
caaggcctcatagtcaggtagtaac

SEQ ID NO: 4311110 - DNA, 25 bp, Homo sapien
gtctccaaccctcggtccgcagcaa

SEQ ID NO: 4311111 - DNA, 25 bp, Homo sapien
ggtgggcccgtccacttgtcggcat

SEQ ID NO: 4311112 - DNA, 25 bp, Homo sapien
aggcagcaagagcaacgagccctaa

SEQ ID NO: 4311113 - DNA, 25 bp, Homo sapien
gagcaacgagccctaagaacatgaa

SEQ ID NO: 4311114 - DNA, 25 bp, Homo sapien
cccagctttccagcatcccggattc

SEQ ID NO: 4311115 - DNA, 25 bp, Homo sapien
agcatcccggattcccctgcacgga

SEQ ID NO: 4311116 - DNA, 25 bp, Homo sapien
tatctcccccttactcacagagagc

SEQ ID NO: 4311117 - DNA, 25 bp, Homo sapien
gattcccctgcacggagcttctcct

SEQ ID NO: 4311118 - DNA, 25 bp, Homo sapien
actactttggtcagcatgttttgca

SEQ ID NO: 4311119 - DNA, 25 bp, Homo sapien
gagaagagactactttggtcagcat

SEQ ID NO: 4311120 - DNA, 25 bp, Homo sapien
tgggcaggaagcattatggagcatg

SEQ ID NO: 4311121 - DNA, 25 bp, Homo sapien
gaagcattatggagcatggagaaga

SEQ ID NO: 4311122 - DNA, 25 bp, Homo sapien
tagtaagcgtacagtgaatgtcagt

SEQ ID NO: 4311123 - DNA, 25 bp, Homo sapien
tacagctgcccacgagtgattccag

SEQ ID NO: 4311124 - DNA, 25 bp, Homo sapien
aatgggaatcagagcagtgcctgca

SEQ ID NO: 4311125 - DNA, 25 bp, Homo sapien
caaagctcatatttccaggccacaa

SEQ ID NO: 4311126 - DNA, 25 bp, Homo sapien
gatcgtttggcgatcaccaggcccc

SEQ ID NO: 4311127 - DNA, 25 bp, Homo sapien
aaagtccacagaaaccaaatcctgg

SEQ ID NO: 4311128 - DNA, 25 bp, Homo sapien
cagggccagagtccctaatggagtt

SEQ ID NO: 4311129 - DNA, 25 bp, Homo sapien
tcctggtcaccagattgaaattgaa

SEQ ID NO: 4311130 - DNA, 25 bp, Homo sapien
gacagacagactgaccacatggcag

SEQ ID NO: 4311131 - DNA, 25 bp, Homo sapien
gctgtaacaagagatctgggagatg

SEQ ID NO: 4311132 - DNA, 25 bp, Homo sapien
gacagactgaccacatggcaggtgc

SEQ ID NO: 4311133 - DNA, 25 bp, Homo sapien
catggcaggtgctgtaacaagagat

SEQ ID NO: 4311134 - DNA, 25 bp, Homo sapien
tccaaattaacaagaatttccagct

SEQ ID NO: 4311135 - DNA, 25 bp, Homo sapien
gaatttccagcttttccagtgttcc

SEQ ID NO: 4311136 - DNA, 25 bp, Homo sapien
cttccaaattaacaagaatttccag

SEQ ID NO: 4311137 - DNA, 25 bp, Homo sapien
tttccagcttttccagtgttcccat

SEQ ID NO: 4311138 - DNA, 25 bp, Homo sapien
tatcggattcgtcagcagggaggca

SEQ ID NO: 4311139 - DNA, 25 bp, Homo sapien
cctcctctgatatgttggatcctga

SEQ ID NO: 4311140 - DNA, 25 bp, Homo sapien
caaatatcggattcgtcagcaggga

SEQ ID NO: 4311141 - DNA, 25 bp, Homo sapien
cagaggtggtagaatgacttcctgg

SEQ ID NO: 4311142 - DNA, 25 bp, Homo sapien
gtagaagtgctgagggaccctgtcc

SEQ ID NO: 4311143 - DNA, 25 bp, Homo sapien
aaaggtggagttggagccagtcctc

SEQ ID NO: 4311144 - DNA, 25 bp, Homo sapien
gagaagtcgaaggtgccagacaagc

SEQ ID NO: 4311145 - DNA, 25 bp, Homo sapien
tctccacagtttgcagatggcctgc

SEQ ID NO: 4311146 - DNA, 25 bp, Homo sapien
ccataacagacactgttggggcctg

SEQ ID NO: 4311147 - DNA, 25 bp, Homo sapien
ataacagacactgttggggcctgcc

SEQ ID NO: 4311148 - DNA, 25 bp, Homo sapien
gcttccataacagacactgttgggg

SEQ ID NO: 4311149 - DNA, 25 bp, Homo sapien
ttccataacagacactgttggggcc

SEQ ID NO: 4311150 - DNA, 25 bp, Homo sapien
aagatcgaggcattgacaggtccag

SEQ ID NO: 4311151 - DNA, 25 bp, Homo sapien
cacgtggttactgtactgggcggca

SEQ ID NO: 4311152 - DNA, 25 bp, Homo sapien
tgtcaactggatgggaggtacaccc

SEQ ID NO: 4311153 - DNA, 25 bp, Homo sapien
tgattcacaacatcgcaggaggcca

SEQ ID NO: 4311154 - DNA, 25 bp, Homo sapien
taattcagcaggcaggccgtttgga

SEQ ID NO: 4311155 - DNA, 25 bp, Homo sapien
gcgggtgtcctctaagagcatttca

SEQ ID NO: 4311156 - DNA, 25 bp, Homo sapien
tcaccccagcgggtgtcctctaaga

SEQ ID NO: 4311157 - DNA, 25 bp, Homo sapien
cgtttggatgtcatccgagggcagt

SEQ ID NO: 4311158 - DNA, 25 bp, Homo sapien
tcaaaaagtgtcatcactgccaagt

SEQ ID NO: 4311159 - DNA, 25 bp, Homo sapien
tccaaataaagagacgccttcgcag

SEQ ID NO: 4311160 - DNA, 25 bp, Homo sapien
ataaagagacgccttcgcagagcca

SEQ ID NO: 4311161 - DNA, 25 bp, Homo sapien
caattccaaataaagagacgccttc

SEQ ID NO: 4311162 - DNA, 25 bp, Homo sapien
aagctggagtcctctcgccaccagc

SEQ ID NO: 4311163 - DNA, 25 bp, Homo sapien
ggctgctcacaggaatctctcctag

SEQ ID NO: 4311164 - DNA, 25 bp, Homo sapien
actgggtggaatccttatgttgtta

SEQ ID NO: 4311165 - DNA, 25 bp, Homo sapien
tgcgaggccctcgagggctgctcac

SEQ ID NO: 4311166 - DNA, 25 bp, Homo sapien
ctctctccatggccgtcagccccat

SEQ ID NO: 4311167 - DNA, 25 bp, Homo sapien
ctgagaaaaccctcatggggcatcc

SEQ ID NO: 4311168 - DNA, 25 bp, Homo sapien
cctctctccatggccgtcagcccca

SEQ ID NO: 4311169 - DNA, 25 bp, Homo sapien
agaaaaccctcatggggcatccagg

SEQ ID NO: 4311170 - DNA, 25 bp, Homo sapien
tcacacataggccttggtggggaca

SEQ ID NO: 4311171 - DNA, 25 bp, Homo sapien
tccaggaacgcccagagtctcaggc

SEQ ID NO: 4311172 - DNA, 25 bp, Homo sapien
gcctcttccaggaacgcccagagtc

SEQ ID NO: 4311173 - DNA, 25 bp, Homo sapien
cacacataggccttggtggggacag

SEQ ID NO: 4311174 - DNA, 25 bp, Homo sapien
ttcagcccatgaagagcatgcttct

SEQ ID NO: 4311175 - DNA, 25 bp, Homo sapien
cccatgaagagcatgcttctgagaa

SEQ ID NO: 4311176 - DNA, 25 bp, Homo sapien
gaagagcatgcttctgagaaccaca

SEQ ID NO: 4311177 - DNA, 25 bp, Homo sapien
ctcttgcttcagcccatgaagagca

SEQ ID NO: 4311178 - DNA, 25 bp, Homo sapien
tcctgccactaagggcctgcagttc

SEQ ID NO: 4311179 - DNA, 25 bp, Homo sapien
gcacagccgcattccaaggtacaga

SEQ ID NO: 4311180 - DNA, 25 bp, Homo sapien
aagctgaaggagtctctagggcccc

SEQ ID NO: 4311181 - DNA, 25 bp, Homo sapien
gatttccctccaagaaagctgaagg

SEQ ID NO: 4311182 - DNA, 25 bp, Homo sapien
gctcggagcccgtgccaaccccggc

SEQ ID NO: 4311183 - DNA, 25 bp, Homo sapien
agagctcggagcccgtgccaacccc

SEQ ID NO: 4311184 - DNA, 25 bp, Homo sapien
agctcggagcccgtgccaaccccgg

SEQ ID NO: 4311185 - DNA, 25 bp, Homo sapien
gagctcggagcccgtgccaaccccg

SEQ ID NO: 4311186 - DNA, 25 bp, Homo sapien
gacagatgcggagatcaagactcct

SEQ ID NO: 4311187 - DNA, 25 bp, Homo sapien
tcaaaggcagcatgactattcccat

SEQ ID NO: 4311188 - DNA, 25 bp, Homo sapien
gaggctcccagcttatatactagaa

SEQ ID NO: 4311189 - DNA, 25 bp, Homo sapien
caaatatggctaccagaggctccca

SEQ ID NO: 4311190 - DNA, 25 bp, Homo sapien
tgataagttatcagtttgaccatct

SEQ ID NO: 4311191 - DNA, 25 bp, Homo sapien
caccctttgctgataagttatcagt

SEQ ID NO: 4311192 - DNA, 25 bp, Homo sapien
gctgataagttatcagtttgaccat

SEQ ID NO: 4311193 - DNA, 25 bp, Homo sapien
agtgtcaccctttgctgataagtta

SEQ ID NO: 4311194 - DNA, 25 bp, Homo sapien
catctatgagaggtcaaatgctagc

SEQ ID NO: 4311195 - DNA, 25 bp, Homo sapien
caactccatgggttcacctgggacc

SEQ ID NO: 4311196 - DNA, 25 bp, Homo sapien
tactcaaacccagggctacaggagg

SEQ ID NO: 4311197 - DNA, 25 bp, Homo sapien
ggacccgggcttctgtcgttcagct

SEQ ID NO: 4311198 - DNA, 25 bp, Homo sapien
actatcttgcaactatgtcctttga

SEQ ID NO: 4311199 - DNA, 25 bp, Homo sapien
ggtgagggtattgactaggtcacta

SEQ ID NO: 4311200 - DNA, 25 bp, Homo sapien
gcagcagaggctagacgcagtggct

SEQ ID NO: 4311201 - DNA, 25 bp, Homo sapien
caagaggacagtgaggtaggacagg

SEQ ID NO: 4311202 - DNA, 25 bp, Homo sapien
tacatgcaggctttaaccaactttg

SEQ ID NO: 4311203 - DNA, 25 bp, Homo sapien
aagcaggtgtcaaaaatcccactgg

SEQ ID NO: 4311204 - DNA, 25 bp, Homo sapien
gagcactgcgccatgattccttgga

SEQ ID NO: 4311205 - DNA, 25 bp, Homo sapien
tagacatagaaacgtcaagcaggtg

SEQ ID NO: 4311206 - DNA, 25 bp, Homo sapien
caatgtcacttactctaggtctagg

SEQ ID NO: 4311207 - DNA, 25 bp, Homo sapien
tggagagaggcactatcaggcagaa

SEQ ID NO: 4311208 - DNA, 25 bp, Homo sapien
tagggactcgatgccttacagtaag

SEQ ID NO: 4311209 - DNA, 25 bp, Homo sapien
gcactgatgcacaattgggactgta

SEQ ID NO: 4311210 - DNA, 25 bp, Homo sapien
aactacaagcagaattcataaatag

SEQ ID NO: 4311211 - DNA, 25 bp, Homo sapien
taaagtggcttctaataacatagtc

SEQ ID NO: 4311212 - DNA, 25 bp, Homo sapien
aataacatagtcgtgcacatgccag

SEQ ID NO: 4311213 - DNA, 25 bp, Homo sapien
ggcttctaataacatagtcgtgcac

SEQ ID NO: 4311214 - DNA, 25 bp, Homo sapien
ggaaacttgcaagcgtaacactgtg

SEQ ID NO: 4311215 - DNA, 25 bp, Homo sapien
ttatcctggcagcatcactaagagg

SEQ ID NO: 4311216 - DNA, 25 bp, Homo sapien
gagagagtcaagttcccacatggat

SEQ ID NO: 4311217 - DNA, 25 bp, Homo sapien
gactagcttcctggatggaccaaaa

SEQ ID NO: 4311218 - DNA, 25 bp, Homo sapien
catcattgactgctgacatgtcgcc

SEQ ID NO: 4311219 - DNA, 25 bp, Homo sapien
aactgctgtgcagtgctcctgtcca

SEQ ID NO: 4311220 - DNA, 25 bp, Homo sapien
catgtcgccctttggcgtggaggaa

SEQ ID NO: 4311221 - DNA, 25 bp, Homo sapien
taatgacggtgacgttgcccacagt

SEQ ID NO: 4311222 - DNA, 25 bp, Homo sapien
ggaagagccaattaagtaagttatg

SEQ ID NO: 4311223 - DNA, 25 bp, Homo sapien
tgttgtagcatttgcagactgtatg

SEQ ID NO: 4311224 - DNA, 25 bp, Homo sapien
tttgtttcgctggtctttgttgtag

SEQ ID NO: 4311225 - DNA, 25 bp, Homo sapien
tcactaggaggatctttcagaatgt

SEQ ID NO: 4311226 - DNA, 25 bp, Homo sapien
cttgaggtgtgatttgtttcgctgg

SEQ ID NO: 4311227 - DNA, 25 bp, Homo sapien
gggtggcatactgttgtgccacttg

SEQ ID NO: 4311228 - DNA, 25 bp, Homo sapien
caccagctgagaattgatccgaggt

SEQ ID NO: 4311229 - DNA, 25 bp, Homo sapien
tgtgccacttgttgtgccaccagct

SEQ ID NO: 4311230 - DNA, 25 bp, Homo sapien
ccagctgagaattgatccgaggttt

SEQ ID NO: 4311231 - DNA, 25 bp, Homo sapien
tcattgtgccataaaccattatgtc

SEQ ID NO: 4311232 - DNA, 25 bp, Homo sapien
tctccaactgacactggctcttagc

SEQ ID NO: 4311233 - DNA, 25 bp, Homo sapien
tatgtctgtgccaatctccaactga

SEQ ID NO: 4311234 - DNA, 25 bp, Homo sapien
ggctcttagcactattgttcacaaa

SEQ ID NO: 4311235 - DNA, 25 bp, Homo sapien
cacacaggaccccctaggtgaaagg

SEQ ID NO: 4311236 - DNA, 25 bp, Homo sapien
acacacaggaccccctaggtgaaag

SEQ ID NO: 4311237 - DNA, 25 bp, Homo sapien
cacaggaccccctaggtgaaaggtg

SEQ ID NO: 4311238 - DNA, 25 bp, Homo sapien
gaaacacacaggaccccctaggtga

SEQ ID NO: 4311239 - DNA, 25 bp, Homo sapien
tctacaaggagctactaggtgacct

SEQ ID NO: 4311240 - DNA, 25 bp, Homo sapien
gactttatccacacctgctactgag

SEQ ID NO: 4311241 - DNA, 25 bp, Homo sapien
tagctcttgcaacaggacatgtaga

SEQ ID NO: 4311242 - DNA, 25 bp, Homo sapien
tcttcacaggtaatagggaaacgga

SEQ ID NO: 4311243 - DNA, 25 bp, Homo sapien
gccagtttttctgcgtatttcggag

SEQ ID NO: 4311244 - DNA, 25 bp, Homo sapien
tgcttggttagaaataactggctcc

SEQ ID NO: 4311245 - DNA, 25 bp, Homo sapien
caaactctcaccagatactgcttgg

SEQ ID NO: 4311246 - DNA, 25 bp, Homo sapien
tggctccacacgactaacaggtatc

SEQ ID NO: 4311247 - DNA, 25 bp, Homo sapien
tagatgatttttaggaacagatgtt

SEQ ID NO: 4311248 - DNA, 25 bp, Homo sapien
cacgcctggcttattaactaattaa

SEQ ID NO: 4311249 - DNA, 25 bp, Homo sapien
agatgatttttaggaacagatgttt

SEQ ID NO: 4311250 - DNA, 25 bp, Homo sapien
attaactaattaattgtagggatag

SEQ ID NO: 4311251 - DNA, 25 bp, Homo sapien
tactgacatggccaatgcttgcaca

SEQ ID NO: 4311252 - DNA, 25 bp, Homo sapien
gcccaggaataaggatttaagagcc

SEQ ID NO: 4311253 - DNA, 25 bp, Homo sapien
gaacaggtgctgcagtttactgaca

SEQ ID NO: 4311254 - DNA, 25 bp, Homo sapien
caaacagcctgtagtagaggaaagc

SEQ ID NO: 4311255 - DNA, 25 bp, Homo sapien
taaaaatgaagcactgacctagatg

SEQ ID NO: 4311256 - DNA, 25 bp, Homo sapien
cctagatgagtaagagtgtatgcac

SEQ ID NO: 4311257 - DNA, 25 bp, Homo sapien
gacaagcgacgtctactggaaagga

SEQ ID NO: 4311258 - DNA, 25 bp, Homo sapien
gctgcactttggatgagacaaccaa

SEQ ID NO: 4311259 - DNA, 25 bp, Homo sapien
tcagacaggtacgtgtgcgcacatg

SEQ ID NO: 4311260 - DNA, 25 bp, Homo sapien
tccacaggctcgtacagcgaagtca

SEQ ID NO: 4311261 - DNA, 25 bp, Homo sapien
cagttcagggcaaaagcagacccca

SEQ ID NO: 4311262 - DNA, 25 bp, Homo sapien
gaccccaaaagtagagatatggcct

SEQ ID NO: 4311263 - DNA, 25 bp, Homo sapien
tatcctactcatgtctcacacacag

SEQ ID NO: 4311264 - DNA, 25 bp, Homo sapien
taaacccataggcaacacggtagaa

SEQ ID NO: 4311265 - DNA, 25 bp, Homo sapien
tagtaatttccaaaaagcccagaga

SEQ ID NO: 4311266 - DNA, 25 bp, Homo sapien
aaagaacgaacaagtagtctgcctg

SEQ ID NO: 4311267 - DNA, 25 bp, Homo sapien
aaagcttggtctaataagggagcca

SEQ ID NO: 4311268 - DNA, 25 bp, Homo sapien
tacttagggatcacgtatgtactca

SEQ ID NO: 4311269 - DNA, 25 bp, Homo sapien
cactaaaagaagactagggtggcta

SEQ ID NO: 4311270 - DNA, 25 bp, Homo sapien
catggaaaacgaccctgtggtagga

SEQ ID NO: 4311271 - DNA, 25 bp, Homo sapien
gaagcttcgcagtaaagcaccaatg

SEQ ID NO: 4311272 - DNA, 25 bp, Homo sapien
tgcagcagagcttatatgttaatcc

SEQ ID NO: 4311273 - DNA, 25 bp, Homo sapien
ccatcttaccaccagtttagggaag

SEQ ID NO: 4311274 - DNA, 25 bp, Homo sapien
aaggcacaactaattctctgatggg

SEQ ID NO: 4311275 - DNA, 25 bp, Homo sapien
gatcaatcgccctcaagaacatgga

SEQ ID NO: 4311276 - DNA, 25 bp, Homo sapien
tttttggtcaaaactagctggtgat

SEQ ID NO: 4311277 - DNA, 25 bp, Homo sapien
gttacaagcattaccagaacatcag

SEQ ID NO: 4311278 - DNA, 25 bp, Homo sapien
tataaagtaaccacagatcacacag

SEQ ID NO: 4311279 - DNA, 25 bp, Homo sapien
taagagtcaatggaacacagtccag

SEQ ID NO: 4311280 - DNA, 25 bp, Homo sapien
tatgccaatcaactcaatggagaag

SEQ ID NO: 4311281 - DNA, 25 bp, Homo sapien
tggtattggcaaaaagtcagacact

SEQ ID NO: 4311282 - DNA, 25 bp, Homo sapien
gccatagacagctagtgactaccac

SEQ ID NO: 4311283 - DNA, 25 bp, Homo sapien
tgtcatcataggacttaaattcatc

SEQ ID NO: 4311284 - DNA, 25 bp, Homo sapien
tcacagaacctatacagcaaaaagg

SEQ ID NO: 4311285 - DNA, 25 bp, Homo sapien
aaattgtggcaaaaaatctgaactc

SEQ ID NO: 4311286 - DNA, 25 bp, Homo sapien
gaaaactctagaaactcagtaataa

SEQ ID NO: 4311287 - DNA, 25 bp, Homo sapien
tccacttcagccaaaatgctccagg

SEQ ID NO: 4311288 - DNA, 25 bp, Homo sapien
aagataagctgactggatgttccat

SEQ ID NO: 4311289 - DNA, 25 bp, Homo sapien
gaatgtacaaccaatcagataagct

SEQ ID NO: 4311290 - DNA, 25 bp, Homo sapien
tagaaaattcctcttgaacgccaga

SEQ ID NO: 4311291 - DNA, 25 bp, Homo sapien
tacaaagaccgtcgaataaccaata

SEQ ID NO: 4311292 - DNA, 25 bp, Homo sapien
caaagaccgtcgaataaccaatatg

SEQ ID NO: 4311293 - DNA, 25 bp, Homo sapien
ctacaaagaccgtcgaataaccaat

SEQ ID NO: 4311294 - DNA, 25 bp, Homo sapien
aaagaccgtcgaataaccaatatga

SEQ ID NO: 4311295 - DNA, 25 bp, Homo sapien
aaatacacatgagtctaccatagtt

SEQ ID NO: 4311296 - DNA, 25 bp, Homo sapien
ggtccagaggagtatccctggtcat

SEQ ID NO: 4311297 - DNA, 25 bp, Homo sapien
aaggaatctaaaatatagagcacag

SEQ ID NO: 4311298 - DNA, 25 bp, Homo sapien
tctaaaatatagagcacagcagcag

SEQ ID NO: 4311299 - DNA, 25 bp, Homo sapien
cagggtccagaggagtatccctggt

SEQ ID NO: 4311300 - DNA, 25 bp, Homo sapien
tcttcttggccagataggctatggc

SEQ ID NO: 4311301 - DNA, 25 bp, Homo sapien
gacccaagggtagaccaagagtcca

SEQ ID NO: 4311302 - DNA, 25 bp, Homo sapien
aagatacagtagcaaccaagggcaa

SEQ ID NO: 4311303 - DNA, 25 bp, Homo sapien
caagagtccagtgcaggctctatta

SEQ ID NO: 4311304 - DNA, 25 bp, Homo sapien
tactaacgcaactaaaataactggc

SEQ ID NO: 4311305 - DNA, 25 bp, Homo sapien
tattacaatagcagcacaaaggcca

SEQ ID NO: 4311306 - DNA, 25 bp, Homo sapien
agatgtgtaataccacttaaaggca

SEQ ID NO: 4311307 - DNA, 25 bp, Homo sapien
tgaacccagattgccttacttcaca

SEQ ID NO: 4311308 - DNA, 25 bp, Homo sapien
tattcgaaacaaagctggagtggtt

SEQ ID NO: 4311309 - DNA, 25 bp, Homo sapien
gggatgccatgctaacactattcga

SEQ ID NO: 4311310 - DNA, 25 bp, Homo sapien
ggaaaatcctcacgtatctagtaac

SEQ ID NO: 4311311 - DNA, 25 bp, Homo sapien
cagagcaaatactattacgagggac

SEQ ID NO: 4311312 - DNA, 25 bp, Homo sapien
gttcacggattggaatactgagtcc

SEQ ID NO: 4311313 - DNA, 25 bp, Homo sapien
taaaaggtgtccacattggaaggaa

SEQ ID NO: 4311314 - DNA, 25 bp, Homo sapien
gctagcacaacaggcaagcgaaaga

SEQ ID NO: 4311315 - DNA, 25 bp, Homo sapien
tgcagagatacctatgttcacggat

SEQ ID NO: 4311316 - DNA, 25 bp, Homo sapien
aagtgattctgataacatgctaaag

SEQ ID NO: 4311317 - DNA, 25 bp, Homo sapien
gggactcagcaatgtgttgaagaag

SEQ ID NO: 4311318 - DNA, 25 bp, Homo sapien
aattttctgaacctctgggaatggg

SEQ ID NO: 4311319 - DNA, 25 bp, Homo sapien
catggttcctataaatgcagaccac

SEQ ID NO: 4311320 - DNA, 25 bp, Homo sapien
gatttgggcaaagttaattatgcta

SEQ ID NO: 4311321 - DNA, 25 bp, Homo sapien
tgctatagatattaagaatccaatg

SEQ ID NO: 4311322 - DNA, 25 bp, Homo sapien
caggccagaatacacgcctttaaaa

SEQ ID NO: 4311323 - DNA, 25 bp, Homo sapien
caaaatgaactctatcaaccaacag

SEQ ID NO: 4311324 - DNA, 25 bp, Homo sapien
ttatgagacccaatacaccgatgat

SEQ ID NO: 4311325 - DNA, 25 bp, Homo sapien
tctagggactagtcaagtgacagga

SEQ ID NO: 4311326 - DNA, 25 bp, Homo sapien
cttaaggtagtttgagctagattcc

SEQ ID NO: 4311327 - DNA, 25 bp, Homo sapien
gaagggcaagaacagttaaaccaca

SEQ ID NO: 4311328 - DNA, 25 bp, Homo sapien
tcatggtccacggttggaaaacacc

SEQ ID NO: 4311329 - DNA, 25 bp, Homo sapien
tcagacaaacaggagtcagcctgga

SEQ ID NO: 4311330 - DNA, 25 bp, Homo sapien
ggaacggaaaggcttcctgagacac

SEQ ID NO: 4311331 - DNA, 25 bp, Homo sapien
ggtgacaacctaaaagagacagatt

SEQ ID NO: 4311332 - DNA, 25 bp, Homo sapien
aaaggtaacacagatcttcaagtac

SEQ ID NO: 4311333 - DNA, 25 bp, Homo sapien
aacaaaaggtaacacagatcttcaa

SEQ ID NO: 4311334 - DNA, 25 bp, Homo sapien
caaaaggtaacacagatcttcaagt

SEQ ID NO: 4311335 - DNA, 25 bp, Homo sapien
ttaacaaaaggtaacacagatcttc

SEQ ID NO: 4311336 - DNA, 25 bp, Homo sapien
catttaaaggcttcagcactgtttc

SEQ ID NO: 4311337 - DNA, 25 bp, Homo sapien
catcgcagatgctgcatttaaaggc

SEQ ID NO: 4311338 - DNA, 25 bp, Homo sapien
ccaaaacccttcgtctgcggcaggt

SEQ ID NO: 4311339 - DNA, 25 bp, Homo sapien
ggtgcagacgctacaatcccaaaac

SEQ ID NO: 4311340 - DNA, 25 bp, Homo sapien
gccgcgggagcttgcaacagcctca

SEQ ID NO: 4311341 - DNA, 25 bp, Homo sapien
cggggaagtagttccacgcagtttg

SEQ ID NO: 4311342 - DNA, 25 bp, Homo sapien
agttccacgcagtttgcgcgcgccg

SEQ ID NO: 4311343 - DNA, 25 bp, Homo sapien
gcgccgcgggagcttgcaacagcct

SEQ ID NO: 4311344 - DNA, 25 bp, Homo sapien
ccacattcattgtcagctgcctcaa

SEQ ID NO: 4311345 - DNA, 25 bp, Homo sapien
aggatcacagcacggctcactatag

SEQ ID NO: 4311346 - DNA, 25 bp, Homo sapien
caggtctttacgcaaaagtcaattc

SEQ ID NO: 4311347 - DNA, 25 bp, Homo sapien
ctgagattttccctggtcacgcaat

SEQ ID NO: 4311348 - DNA, 25 bp, Homo sapien
ctgtgctcggctactggcagcttgt

SEQ ID NO: 4311349 - DNA, 25 bp, Homo sapien
actgcgcctagccagttctgcaatg

SEQ ID NO: 4311350 - DNA, 25 bp, Homo sapien
tagccagttctgcaatgtttattaa

SEQ ID NO: 4311351 - DNA, 25 bp, Homo sapien
cactgtgctcggctactggcagctt

SEQ ID NO: 4311352 - DNA, 25 bp, Homo sapien
ctgggctgagacttgaaccgaggca

SEQ ID NO: 4311353 - DNA, 25 bp, Homo sapien
ctgagacttgaaccgaggcagcttg

SEQ ID NO: 4311354 - DNA, 25 bp, Homo sapien
actgggctgagacttgaaccgaggc

SEQ ID NO: 4311355 - DNA, 25 bp, Homo sapien
gggctgagacttgaaccgaggcagc

SEQ ID NO: 4311356 - DNA, 25 bp, Homo sapien
gtcagtgacccaagttcatcacctt

SEQ ID NO: 4311357 - DNA, 25 bp, Homo sapien
aagagggcagcgcacactctctcac

SEQ ID NO: 4311358 - DNA, 25 bp, Homo sapien
tgactctggcgaagaaagtgggctt

SEQ ID NO: 4311359 - DNA, 25 bp, Homo sapien
tctcaccgtcagtgacccaagttca

SEQ ID NO: 4311360 - DNA, 25 bp, Homo sapien
tagtcttacattgtactccagggac

SEQ ID NO: 4311361 - DNA, 25 bp, Homo sapien
agctttgcacccttgttaacaagct

SEQ ID NO: 4311362 - DNA, 25 bp, Homo sapien
caaaagctgtcttggatgttcaaca

SEQ ID NO: 4311363 - DNA, 25 bp, Homo sapien
ccccaacaaaagagtacaaaagctg

SEQ ID NO: 4311364 - DNA, 25 bp, Homo sapien
tgaggggattcacactgaggaaaca

SEQ ID NO: 4311365 - DNA, 25 bp, Homo sapien
gttctccttggttggagcagccaca

SEQ ID NO: 4311366 - DNA, 25 bp, Homo sapien
gcaacattattttgctattgccagc

SEQ ID NO: 4311367 - DNA, 25 bp, Homo sapien
taaatatcctgagctcgctggtaca

SEQ ID NO: 4311368 - DNA, 25 bp, Homo sapien
tattgccagcacctctaaaacttaa

SEQ ID NO: 4311369 - DNA, 25 bp, Homo sapien
gcccgtacatcaattggcatcttgg

SEQ ID NO: 4311370 - DNA, 25 bp, Homo sapien
tcaaagtgctagtggatgcattttg

SEQ ID NO: 4311371 - DNA, 25 bp, Homo sapien
agcaccaagagccactttgataaga

SEQ ID NO: 4311372 - DNA, 25 bp, Homo sapien
cattttgatggggaaagaagttgcc

SEQ ID NO: 4311373 - DNA, 25 bp, Homo sapien
aataagagagcctgaagcaccaaga

SEQ ID NO: 4311374 - DNA, 25 bp, Homo sapien
tcagtgggggttacgccctcggtca

SEQ ID NO: 4311375 - DNA, 25 bp, Homo sapien
tctcctggtcagtgggggttacgcc

SEQ ID NO: 4311376 - DNA, 25 bp, Homo sapien
accactgtcatctggtccttagcca

SEQ ID NO: 4311377 - DNA, 25 bp, Homo sapien
ggtccttagccatcatcctctgttc

SEQ ID NO: 4311378 - DNA, 25 bp, Homo sapien
ttccgaacggtctggaatccaggta

SEQ ID NO: 4311379 - DNA, 25 bp, Homo sapien
gttgaatgtagagttccgaacggtc

SEQ ID NO: 4311380 - DNA, 25 bp, Homo sapien
caggtattaatctgttggtccgtca

SEQ ID NO: 4311381 - DNA, 25 bp, Homo sapien
ccagtaaaatgaaaaacgttgaatg

SEQ ID NO: 4311382 - DNA, 25 bp, Homo sapien
gagatttcccccaaagttagcaagc

SEQ ID NO: 4311383 - DNA, 25 bp, Homo sapien
cccaaagttagcaagctcctgtgag

SEQ ID NO: 4311384 - DNA, 25 bp, Homo sapien
tcaagcacgagatttcccccaaagt

SEQ ID NO: 4311385 - DNA, 25 bp, Homo sapien
acaaatcaagcacgagatttccccc

SEQ ID NO: 4311386 - DNA, 25 bp, Homo sapien
aaacaaaatgcctgtgcgaaccgat

SEQ ID NO: 4311387 - DNA, 25 bp, Homo sapien
cttgctgttcacagaatagtctcct

SEQ ID NO: 4311388 - DNA, 25 bp, Homo sapien
gctgttcacagaatagtctcctctc

SEQ ID NO: 4311389 - DNA, 25 bp, Homo sapien
cctgtgcgaaccgatgctgtggttt

SEQ ID NO: 4311390 - DNA, 25 bp, Homo sapien
ggagttctcatcattacaattgtat

SEQ ID NO: 4311391 - DNA, 25 bp, Homo sapien
tcattacaattgtatggggatccca

SEQ ID NO: 4311392 - DNA, 25 bp, Homo sapien
tcatcattacaattgtatggggatc

SEQ ID NO: 4311393 - DNA, 25 bp, Homo sapien
cattacaattgtatggggatcccat

SEQ ID NO: 4311394 - DNA, 25 bp, Homo sapien
tttgccatgtcccagctctagggct

SEQ ID NO: 4311395 - DNA, 25 bp, Homo sapien
aaccgtacctctttgccatgtccca

SEQ ID NO: 4311396 - DNA, 25 bp, Homo sapien
ctttaaaccgtacctctttgccatg

SEQ ID NO: 4311397 - DNA, 25 bp, Homo sapien
ttgccatgtcccagctctagggctg

SEQ ID NO: 4311398 - DNA, 25 bp, Homo sapien
gcagaaatgccccaaacatgctcat

SEQ ID NO: 4311399 - DNA, 25 bp, Homo sapien
gagttttgccatttgcagaaatgcc

SEQ ID NO: 4311400 - DNA, 25 bp, Homo sapien
gttttgccatttgcagaaatgcccc

SEQ ID NO: 4311401 - DNA, 25 bp, Homo sapien
agatccttgagttttgccatttgca

SEQ ID NO: 4311402 - DNA, 25 bp, Homo sapien
ggttaagcaccatgtatccccaggc

SEQ ID NO: 4311403 - DNA, 25 bp, Homo sapien
tgtggatagaggaatctgagaaaga

SEQ ID NO: 4311404 - DNA, 25 bp, Homo sapien
ctctggttaagcaccatgtatcccc

SEQ ID NO: 4311405 - DNA, 25 bp, Homo sapien
tccatggcctgtgcatggactgtgg

SEQ ID NO: 4311406 - DNA, 25 bp, Homo sapien
cacccaagtggtgatggaacactga

SEQ ID NO: 4311407 - DNA, 25 bp, Homo sapien
ggaacactgatgcaccttggtggct

SEQ ID NO: 4311408 - DNA, 25 bp, Homo sapien
ggcagcattcggactcaggtattat

SEQ ID NO: 4311409 - DNA, 25 bp, Homo sapien
tattatacatgcaagacagcccgcg

SEQ ID NO: 4311410 - DNA, 25 bp, Homo sapien
tgtgttcagtgttcccaccttggtc

SEQ ID NO: 4311411 - DNA, 25 bp, Homo sapien
tcttgcccttgtcaacaaagtcagc

SEQ ID NO: 4311412 - DNA, 25 bp, Homo sapien
tgcaggtggaacacggttggtccct

SEQ ID NO: 4311413 - DNA, 25 bp, Homo sapien
caaagtcagccttggagttggtact

SEQ ID NO: 4311414 - DNA, 25 bp, Homo sapien
ctacaatgtgtcacttgttactccc

SEQ ID NO: 4311415 - DNA, 25 bp, Homo sapien
tcatctctgtcaacctgagaggacc

SEQ ID NO: 4311416 - DNA, 25 bp, Homo sapien
aggtctcctcaggagacagacagct

SEQ ID NO: 4311417 - DNA, 25 bp, Homo sapien
ctgggtgaatgcacaagcaggtctc

SEQ ID NO: 4311418 - DNA, 25 bp, Homo sapien
aaagtttatggccagagcctggacc

SEQ ID NO: 4311419 - DNA, 25 bp, Homo sapien
tgtgctgtcaaatcaggattcttaa

SEQ ID NO: 4311420 - DNA, 25 bp, Homo sapien
ttgtttgttggagaatagtttctgc

SEQ ID NO: 4311421 - DNA, 25 bp, Homo sapien
ttgatccccttagcccgtgggacac

SEQ ID NO: 4311422 - DNA, 25 bp, Homo sapien
aagaaattgatccccttagcccgtg

SEQ ID NO: 4311423 - DNA, 25 bp, Homo sapien
tgtttgttggagaatagtttctgct

SEQ ID NO: 4311424 - DNA, 25 bp, Homo sapien
tcatgaaaaacttgggaagctctgc

SEQ ID NO: 4311425 - DNA, 25 bp, Homo sapien
ccagtgagccatacagacattatca

SEQ ID NO: 4311426 - DNA, 25 bp, Homo sapien
gagcctctccttcgtaccattttct

SEQ ID NO: 4311427 - DNA, 25 bp, Homo sapien
tcttggcagctgtgagtaactttga

SEQ ID NO: 4311428 - DNA, 25 bp, Homo sapien
ttagcaaagcttccaccatgaagtg

SEQ ID NO: 4311429 - DNA, 25 bp, Homo sapien
tcttagagttcaaatccttgaggaa

SEQ ID NO: 4311430 - DNA, 25 bp, Homo sapien
gaatcgataagctgacctttggtca

SEQ ID NO: 4311431 - DNA, 25 bp, Homo sapien
catgaagtgccaatcgtctctgtgt

SEQ ID NO: 4311432 - DNA, 25 bp, Homo sapien
gttcaccagtcctcttagcctttca

SEQ ID NO: 4311433 - DNA, 25 bp, Homo sapien
tgacctggacgtctctctcagccat

SEQ ID NO: 4311434 - DNA, 25 bp, Homo sapien
tctggttcaccagtcctcttagcct

SEQ ID NO: 4311435 - DNA, 25 bp, Homo sapien
ggtcctaagggcctgttgacctgga

SEQ ID NO: 4311436 - DNA, 25 bp, Homo sapien
caccagtgggataatctgagcatca

SEQ ID NO: 4311437 - DNA, 25 bp, Homo sapien
gcatcaataagactcaccacaaagg

SEQ ID NO: 4311438 - DNA, 25 bp, Homo sapien
gactgattccaatctaaggcaagac

SEQ ID NO: 4311439 - DNA, 25 bp, Homo sapien
tagaggctctcattggacaccagtg

SEQ ID NO: 4311440 - DNA, 25 bp, Homo sapien
gcgtctggttgaagcatggtctcca

SEQ ID NO: 4311441 - DNA, 25 bp, Homo sapien
ggacagggaattcgctgctcctctc

SEQ ID NO: 4311442 - DNA, 25 bp, Homo sapien
tctctcggccaaggtgcagacctcg

SEQ ID NO: 4311443 - DNA, 25 bp, Homo sapien
gacctcgaagaaagtggtgatcagc

SEQ ID NO: 4311444 - DNA, 25 bp, Homo sapien
agttgggcccaagcatcaggatgtt

SEQ ID NO: 4311445 - DNA, 25 bp, Homo sapien
ttcaaaagatcctcattggctccag

SEQ ID NO: 4311446 - DNA, 25 bp, Homo sapien
tattgcatgtgacaaccttgggagg

SEQ ID NO: 4311447 - DNA, 25 bp, Homo sapien
tgagaggctaggatcgtcatcccca

SEQ ID NO: 4311448 - DNA, 25 bp, Homo sapien
tgactaagacattgccggttcgtgg

SEQ ID NO: 4311449 - DNA, 25 bp, Homo sapien
gttcgtggccgacattctgggacct

SEQ ID NO: 4311450 - DNA, 25 bp, Homo sapien
tgggacctggtcctacattcaatgg

SEQ ID NO: 4311451 - DNA, 25 bp, Homo sapien
cctacattcaatggctgacaggagc

SEQ ID NO: 4311452 - DNA, 25 bp, Homo sapien
tctgctttgtaagatggcacgcggc

SEQ ID NO: 4311453 - DNA, 25 bp, Homo sapien
tggcacgcggcttcatgacatctct

SEQ ID NO: 4311454 - DNA, 25 bp, Homo sapien
tgtaagatggcacgcggcttcatga

SEQ ID NO: 4311455 - DNA, 25 bp, Homo sapien
ttttctctgctttgtaagatggcac

SEQ ID NO: 4311456 - DNA, 25 bp, Homo sapien
gggttctgagccttaccaaccactg

SEQ ID NO: 4311457 - DNA, 25 bp, Homo sapien
tctgagccttaccaaccactgagct

SEQ ID NO: 4311458 - DNA, 25 bp, Homo sapien
tgagccttaccaaccactgagctct

SEQ ID NO: 4311459 - DNA, 25 bp, Homo sapien
gttctgagccttaccaaccactgag

SEQ ID NO: 4311460 - DNA, 25 bp, Homo sapien
tgaataacgaccagggaagagccac

SEQ ID NO: 4311461 - DNA, 25 bp, Homo sapien
gaataacgaccagggaagagccacc

SEQ ID NO: 4311462 - DNA, 25 bp, Homo sapien
ctgaataacgaccagggaagagcca

SEQ ID NO: 4311463 - DNA, 25 bp, Homo sapien
tccgcgaagacaatgcctgtacagc

SEQ ID NO: 4311464 - DNA, 25 bp, Homo sapien
tccttttaatgtgaggtcgcagcag

SEQ ID NO: 4311465 - DNA, 25 bp, Homo sapien
gtcgcagcaggtgcatccgcgaaga

SEQ ID NO: 4311466 - DNA, 25 bp, Homo sapien
gatcagcgtccgtttctccttttaa

SEQ ID NO: 4311467 - DNA, 25 bp, Homo sapien
tgtctctgggtgtcatgtctccgtc

SEQ ID NO: 4311468 - DNA, 25 bp, Homo sapien
catagcaagtcaccacaaactgggt

SEQ ID NO: 4311469 - DNA, 25 bp, Homo sapien
tgtgcctctgcttcgattttctctc

SEQ ID NO: 4311470 - DNA, 25 bp, Homo sapien
atctttacatggccccgccgctgtg

SEQ ID NO: 4311471 - DNA, 25 bp, Homo sapien
atgttaggggaagtgcggacaactt

SEQ ID NO: 4311472 - DNA, 25 bp, Homo sapien
tatgttaggggaagtgcggacaact

SEQ ID NO: 4311473 - DNA, 25 bp, Homo sapien
ctatgttaggggaagtgcggacaac

SEQ ID NO: 4311474 - DNA, 25 bp, Homo sapien
agtcataaactctgaagcaaaatcc

SEQ ID NO: 4311475 - DNA, 25 bp, Homo sapien
atccatggtatgaaccatgccaaag

SEQ ID NO: 4311476 - DNA, 25 bp, Homo sapien
ccagggaaggctttagtcataaact

SEQ ID NO: 4311477 - DNA, 25 bp, Homo sapien
ccatggtatgaaccatgccaaagag

SEQ ID NO: 4311478 - DNA, 25 bp, Homo sapien
tgtcagttcgaagcctaggacttaa

SEQ ID NO: 4311479 - DNA, 25 bp, Homo sapien
ggtctcactattcttgttgctcctt

SEQ ID NO: 4311480 - DNA, 25 bp, Homo sapien
caacatgcaaacaagcctgggctag

SEQ ID NO: 4311481 - DNA, 25 bp, Homo sapien
aagtggcggatgtgacaacgtgtca

SEQ ID NO: 4311482 - DNA, 25 bp, Homo sapien
gaatccatttccctgcctttcacag

SEQ ID NO: 4311483 - DNA, 25 bp, Homo sapien
cacagcttccaaaggctgcctgcat

SEQ ID NO: 4311484 - DNA, 25 bp, Homo sapien
ggaggcttctggagagaatccattt

SEQ ID NO: 4311485 - DNA, 25 bp, Homo sapien
ttctggaggcttctggagagaatcc

SEQ ID NO: 4311486 - DNA, 25 bp, Homo sapien
cgagctagaccggaggaagacacaa

SEQ ID NO: 4311487 - DNA, 25 bp, Homo sapien
ctttgagaaccaccgagctagaccg

SEQ ID NO: 4311488 - DNA, 25 bp, Homo sapien
tctacaagctcgtattttgggcact

SEQ ID NO: 4311489 - DNA, 25 bp, Homo sapien
ttgtcgttcccagggtgtgcaaagc

SEQ ID NO: 4311490 - DNA, 25 bp, Homo sapien
tcccgttactggacactgtgtatgt

SEQ ID NO: 4311491 - DNA, 25 bp, Homo sapien
tgtgtatgtataccgcacagcctgc

SEQ ID NO: 4311492 - DNA, 25 bp, Homo sapien
ccgtcagttgggctcaacgtgaagt

SEQ ID NO: 4311493 - DNA, 25 bp, Homo sapien
tttaaaatatcgtgaacatctttcc

SEQ ID NO: 4311494 - DNA, 25 bp, Homo sapien
catccgtgtcgaaaaggaccaaggc

SEQ ID NO: 4311495 - DNA, 25 bp, Homo sapien
gattctgctgataccgcttctgcaa

SEQ ID NO: 4311496 - DNA, 25 bp, Homo sapien
gggatgggcaatctcaacttctgat

SEQ ID NO: 4311497 - DNA, 25 bp, Homo sapien
tctgcaatgttccatgcggtgtgag

SEQ ID NO: 4311498 - DNA, 25 bp, Homo sapien
ccatcaagggatgggagcggggtgc

SEQ ID NO: 4311499 - DNA, 25 bp, Homo sapien
ggatgggagcggggtgcagcttgcc

SEQ ID NO: 4311500 - DNA, 25 bp, Homo sapien
aagggggccatcaagggatgggagc

SEQ ID NO: 4311501 - DNA, 25 bp, Homo sapien
ctgaagggggccatcaagggatggg

SEQ ID NO: 4311502 - DNA, 25 bp, Homo sapien
tgcgtgaatgatatgtggatgagta

SEQ ID NO: 4311503 - DNA, 25 bp, Homo sapien
atgagtatgcggatggacgtttgct

SEQ ID NO: 4311504 - DNA, 25 bp, Homo sapien
cacaggctcgataaatgcgtgaatg

SEQ ID NO: 4311505 - DNA, 25 bp, Homo sapien
tggacgtttgctaggcactcggttg

SEQ ID NO: 4311506 - DNA, 25 bp, Homo sapien
gagggtctgattgctggtctctctc

SEQ ID NO: 4311507 - DNA, 25 bp, Homo sapien
tgggagggtctgattgctggtctct

SEQ ID NO: 4311508 - DNA, 25 bp, Homo sapien
ggagggtctgattgctggtctctct

SEQ ID NO: 4311509 - DNA, 25 bp, Homo sapien
gggagggtctgattgctggtctctc

SEQ ID NO: 4311510 - DNA, 25 bp, Homo sapien
actgtggtagtttccgtagagggtg

SEQ ID NO: 4311511 - DNA, 25 bp, Homo sapien
ctgtggtagtttccgtagagggtgt

SEQ ID NO: 4311512 - DNA, 25 bp, Homo sapien
tccgtagagggtgttagaaagaatc

SEQ ID NO: 4311513 - DNA, 25 bp, Homo sapien
tagagggtgttagaaagaatctatt

SEQ ID NO: 4311514 - DNA, 25 bp, Homo sapien
gttggtaaatatccaccggcctgag

SEQ ID NO: 4311515 - DNA, 25 bp, Homo sapien
tgtgcactgatatggccaccatcgt

SEQ ID NO: 4311516 - DNA, 25 bp, Homo sapien
cacaggctagccactgaagggttaa

SEQ ID NO: 4311517 - DNA, 25 bp, Homo sapien
gcactatttccgtcacctgttggta

SEQ ID NO: 4311518 - DNA, 25 bp, Homo sapien
gcaatgtcagctactttgcctgtgc

SEQ ID NO: 4311519 - DNA, 25 bp, Homo sapien
catgcaatgtcagctactttgcctg

SEQ ID NO: 4311520 - DNA, 25 bp, Homo sapien
aagggctccatgcaatgtcagctac

SEQ ID NO: 4311521 - DNA, 25 bp, Homo sapien
gctccatgcaatgtcagctactttg

SEQ ID NO: 4311522 - DNA, 25 bp, Homo sapien
gaatctggctagagtgtcatccctc

SEQ ID NO: 4311523 - DNA, 25 bp, Homo sapien
ggtcatatttccctagtcacagtga

SEQ ID NO: 4311524 - DNA, 25 bp, Homo sapien
taactcagcaaatagggttctagga

SEQ ID NO: 4311525 - DNA, 25 bp, Homo sapien
tcctaactcgaatggcctatttgta

SEQ ID NO: 4311526 - DNA, 25 bp, Homo sapien
tgcccggctctatgcccctgagcag

SEQ ID NO: 4311527 - DNA, 25 bp, Homo sapien
agcagctcctattggctgtccctgg

SEQ ID NO: 4311528 - DNA, 25 bp, Homo sapien
ccctggtcagggttgcatgctggtc

SEQ ID NO: 4311529 - DNA, 25 bp, Homo sapien
gggttgcatgctggtccaatcatcc

SEQ ID NO: 4311530 - DNA, 25 bp, Homo sapien
aaggagaggccgtggacatgaaagg

SEQ ID NO: 4311531 - DNA, 25 bp, Homo sapien
gagaggccgtggacatgaaaggaag

SEQ ID NO: 4311532 - DNA, 25 bp, Homo sapien
gaggccgtggacatgaaaggaagga

SEQ ID NO: 4311533 - DNA, 25 bp, Homo sapien
caaaggagaggccgtggacatgaaa

SEQ ID NO: 4311534 - DNA, 25 bp, Homo sapien
taatagtgaacgcatagcacttact

SEQ ID NO: 4311535 - DNA, 25 bp, Homo sapien
ttctggctccccctaacaagttcag

SEQ ID NO: 4311536 - DNA, 25 bp, Homo sapien
catgtgatcgtaacaactacagcaa

SEQ ID NO: 4311537 - DNA, 25 bp, Homo sapien
tagagtagagtacacctggtctgtc

SEQ ID NO: 4311538 - DNA, 25 bp, Homo sapien
ctctcctgttcacccatacatcatc

SEQ ID NO: 4311539 - DNA, 25 bp, Homo sapien
tccccacccgctaactctgctatgg

SEQ ID NO: 4311540 - DNA, 25 bp, Homo sapien
cacccgctaactctgctatggccag

SEQ ID NO: 4311541 - DNA, 25 bp, Homo sapien
taactctgctatggccagcccaaac

SEQ ID NO: 4311542 - DNA, 25 bp, Homo sapien
aaaaacattccatcaaagttcacat

SEQ ID NO: 4311543 - DNA, 25 bp, Homo sapien
ctgaaaaacattccatcaaagttca

SEQ ID NO: 4311544 - DNA, 25 bp, Homo sapien
aacattccatcaaagttcacattgc

SEQ ID NO: 4311545 - DNA, 25 bp, Homo sapien
cattccatcaaagttcacattgctc

SEQ ID NO: 4311546 - DNA, 25 bp, Homo sapien
tgtaagactgaagcgttctttttct

SEQ ID NO: 4311547 - DNA, 25 bp, Homo sapien
atagttcatgcgtgccccagggcaa

SEQ ID NO: 4311548 - DNA, 25 bp, Homo sapien
aggaaaaggctttctatccaatgta

SEQ ID NO: 4311549 - DNA, 25 bp, Homo sapien
aattacagaatccagctgaattact

SEQ ID NO: 4311550 - DNA, 25 bp, Homo sapien
ctgactccagagcctgggtgcttag

SEQ ID NO: 4311551 - DNA, 25 bp, Homo sapien
cagagcctgggtgcttagctaatcc

SEQ ID NO: 4311552 - DNA, 25 bp, Homo sapien
tgactccagagcctgggtgcttagc

SEQ ID NO: 4311553 - DNA, 25 bp, Homo sapien
ctccagagcctgggtgcttagctaa

SEQ ID NO: 4311554 - DNA, 25 bp, Homo sapien
tccagttttttgacaactaaagtga

SEQ ID NO: 4311555 - DNA, 25 bp, Homo sapien
ttgacaactaaagtgaatttcttta

SEQ ID NO: 4311556 - DNA, 25 bp, Homo sapien
ccccgtgagcaccgccgggcctcgt

SEQ ID NO: 4311557 - DNA, 25 bp, Homo sapien
cttggccccccgtgagcaccgccgg

SEQ ID NO: 4311558 - DNA, 25 bp, Homo sapien
gggcagcccttggccccccgtgagc

SEQ ID NO: 4311559 - DNA, 25 bp, Homo sapien
gtgagcaccgccgggcctcgtccat

SEQ ID NO: 4311560 - DNA, 25 bp, Homo sapien
gtcaattcgatgctcagtgaagtct

SEQ ID NO: 4311561 - DNA, 25 bp, Homo sapien
tctgataatgatgtatgagcactgc

SEQ ID NO: 4311562 - DNA, 25 bp, Homo sapien
tagcctgtcaattcgatgctcagtg

SEQ ID NO: 4311563 - DNA, 25 bp, Homo sapien
gttgtagcctgtcaattcgatgctc

SEQ ID NO: 4311564 - DNA, 25 bp, Homo sapien
gagtctggcaggtgagtcaacattt

SEQ ID NO: 4311565 - DNA, 25 bp, Homo sapien
agcagcatccccgagtctggcaggt

SEQ ID NO: 4311566 - DNA, 25 bp, Homo sapien
aggccccacaatgggccagccctgc

SEQ ID NO: 4311567 - DNA, 25 bp, Homo sapien
caggtgagtcaacatttggcttctc

SEQ ID NO: 4311568 - DNA, 25 bp, Homo sapien
ggggatggagttaggtggcatagac

SEQ ID NO: 4311569 - DNA, 25 bp, Homo sapien
ttttgatacagtcagtagtgggaga

SEQ ID NO: 4311570 - DNA, 25 bp, Homo sapien
ggatggagttaggtggcatagacat

SEQ ID NO: 4311571 - DNA, 25 bp, Homo sapien
gggatggagttaggtggcatagaca

SEQ ID NO: 4311572 - DNA, 25 bp, Homo sapien
tccttaatccaccagatagaagcag

SEQ ID NO: 4311573 - DNA, 25 bp, Homo sapien
atagaagcagagcaacagcagaggc

SEQ ID NO: 4311574 - DNA, 25 bp, Homo sapien
tagtgaagccaagcgcctgttgctg

SEQ ID NO: 4311575 - DNA, 25 bp, Homo sapien
ccttgtccaggttaatagtgaagcc

SEQ ID NO: 4311576 - DNA, 25 bp, Homo sapien
gcagctggcataaggaaatcaaatt

SEQ ID NO: 4311577 - DNA, 25 bp, Homo sapien
gagctttgcagtcatatgagcctca

SEQ ID NO: 4311578 - DNA, 25 bp, Homo sapien
ttaaagagtttgaatatcacccctg

SEQ ID NO: 4311579 - DNA, 25 bp, Homo sapien
tatggcagctctgattggtcagccc

SEQ ID NO: 4311580 - DNA, 25 bp, Homo sapien
tcttgggtaagacctgccatcaggc

SEQ ID NO: 4311581 - DNA, 25 bp, Homo sapien
tcatggcatgattgtgaaggttaca

SEQ ID NO: 4311582 - DNA, 25 bp, Homo sapien
gaaaggaccctctctctagtaggtg

SEQ ID NO: 4311583 - DNA, 25 bp, Homo sapien
gaattcaacacaaagagagctgatg

SEQ ID NO: 4311584 - DNA, 25 bp, Homo sapien
ggaatctgtgataattgttccctct

SEQ ID NO: 4311585 - DNA, 25 bp, Homo sapien
ccctctcttcgatgagggaaaacac

SEQ ID NO: 4311586 - DNA, 25 bp, Homo sapien
tgtgacctccacaaaattctggttt

SEQ ID NO: 4311587 - DNA, 25 bp, Homo sapien
caattcatgctattaaattctcctc

SEQ ID NO: 4311588 - DNA, 25 bp, Homo sapien
ccaggccaaccatgcttagctttgg

SEQ ID NO: 4311589 - DNA, 25 bp, Homo sapien
caggccaaccatgcttagctttgga

SEQ ID NO: 4311590 - DNA, 25 bp, Homo sapien
agtcgttgcgggggccaagggctgt

SEQ ID NO: 4311591 - DNA, 25 bp, Homo sapien
tggagtcgttgcgggggccaagggc

SEQ ID NO: 4311592 - DNA, 25 bp, Homo sapien
gctgtggaacgcaggcacagctggg

SEQ ID NO: 4311593 - DNA, 25 bp, Homo sapien
agcctggagtcgttgcgggggccaa

SEQ ID NO: 4311594 - DNA, 25 bp, Homo sapien
gctgactgagcaaatttcccatggg

SEQ ID NO: 4311595 - DNA, 25 bp, Homo sapien
gagatcagcagcccaagtgtttccc

SEQ ID NO: 4311596 - DNA, 25 bp, Homo sapien
ctgagcaaatttcccatgggctcca

SEQ ID NO: 4311597 - DNA, 25 bp, Homo sapien
caagtgtttccctcggcgcaggcct

SEQ ID NO: 4311598 - DNA, 25 bp, Homo sapien
gaacgcaggtaacagcgtagctgtg

SEQ ID NO: 4311599 - DNA, 25 bp, Homo sapien
tctgagaacgcaggtaacagcgtag

SEQ ID NO: 4311600 - DNA, 25 bp, Homo sapien
gggatcaatctgagaacgcaggtaa

SEQ ID NO: 4311601 - DNA, 25 bp, Homo sapien
ggtaacagcgtagctgtgatgacca

SEQ ID NO: 4311602 - DNA, 25 bp, Homo sapien
gggacatgtggccattagacttcct

SEQ ID NO: 4311603 - DNA, 25 bp, Homo sapien
tggccattagacttcctgcaagcat

SEQ ID NO: 4311604 - DNA, 25 bp, Homo sapien
ggggacatgtggccattagacttcc

SEQ ID NO: 4311605 - DNA, 25 bp, Homo sapien
tttggctttctgtctgttattggtg

SEQ ID NO: 4311606 - DNA, 25 bp, Homo sapien
aggattgtcttggaaatgtgggctc

SEQ ID NO: 4311607 - DNA, 25 bp, Homo sapien
atgatttggctttctgtctgttatt

SEQ ID NO: 4311608 - DNA, 25 bp, Homo sapien
tcctaactgaatactctttatttct

SEQ ID NO: 4311609 - DNA, 25 bp, Homo sapien
aggtattcaacagaattatgaaaga

SEQ ID NO: 4311610 - DNA, 25 bp, Homo sapien
ttccaatctgaagtgactcaccctc

SEQ ID NO: 4311611 - DNA, 25 bp, Homo sapien
gaacttccaatctgaagtgactcac

SEQ ID NO: 4311612 - DNA, 25 bp, Homo sapien
tctcgaacttccaatctgaagtgac

SEQ ID NO: 4311613 - DNA, 25 bp, Homo sapien
gtcagtctgacgaattcccacacca

SEQ ID NO: 4311614 - DNA, 25 bp, Homo sapien
ggcccgaggcagctatagacacatc

SEQ ID NO: 4311615 - DNA, 25 bp, Homo sapien
taggtgacatgtgggctcgatttca

SEQ ID NO: 4311616 - DNA, 25 bp, Homo sapien
tttgccctgcactagaggcccgagg

SEQ ID NO: 4311617 - DNA, 25 bp, Homo sapien
tatactgagtaaaatatgcctgacc

SEQ ID NO: 4311618 - DNA, 25 bp, Homo sapien
gatgggtccgttcctcacttcagtt

SEQ ID NO: 4311619 - DNA, 25 bp, Homo sapien
cccaggtgtccatcgataggtcaat

SEQ ID NO: 4311620 - DNA, 25 bp, Homo sapien
taggacatgcaaactaataacaggg

SEQ ID NO: 4311621 - DNA, 25 bp, Homo sapien
tgtcataaagttgtccccgtatctg

SEQ ID NO: 4311622 - DNA, 25 bp, Homo sapien
tgggctctacattctggagacacgg

SEQ ID NO: 4311623 - DNA, 25 bp, Homo sapien
tatcttcacagtcgcggcaaggaaa

SEQ ID NO: 4311624 - DNA, 25 bp, Homo sapien
tacagtgggctgactatatactaag

SEQ ID NO: 4311625 - DNA, 25 bp, Homo sapien
atattgctgcggtttacagcagtgg

SEQ ID NO: 4311626 - DNA, 25 bp, Homo sapien
cgtttccagatgacacgctgctgtc

SEQ ID NO: 4311627 - DNA, 25 bp, Homo sapien
gagtcttcgtttccagatgacacgc

SEQ ID NO: 4311628 - DNA, 25 bp, Homo sapien
tgacagccgtctctctcctgaatat

SEQ ID NO: 4311629 - DNA, 25 bp, Homo sapien
tgaatgggctgcttttaatgcagtt

SEQ ID NO: 4311630 - DNA, 25 bp, Homo sapien
actgaatgggctgcttttaatgcag

SEQ ID NO: 4311631 - DNA, 25 bp, Homo sapien
ctgctgcccagaaactgaatgggct

SEQ ID NO: 4311632 - DNA, 25 bp, Homo sapien
aatgggctgcttttaatgcagtttc

SEQ ID NO: 4311633 - DNA, 25 bp, Homo sapien
agggagacttcctttaaggcttctg

SEQ ID NO: 4311634 - DNA, 25 bp, Homo sapien
gacttcctttaaggcttctgcaaga

SEQ ID NO: 4311635 - DNA, 25 bp, Homo sapien
tttaaggcttctgcaagagctgcca

SEQ ID NO: 4311636 - DNA, 25 bp, Homo sapien
ttcctttaaggcttctgcaagagct

SEQ ID NO: 4311637 - DNA, 25 bp, Homo sapien
cctctaaattacctgctagatttat

SEQ ID NO: 4311638 - DNA, 25 bp, Homo sapien
tacattgtatcgagtaaataaactt

SEQ ID NO: 4311639 - DNA, 25 bp, Homo sapien
ccatgaccagccgaagacgcttttc

SEQ ID NO: 4311640 - DNA, 25 bp, Homo sapien
ccattattaacttggatgcatttag

SEQ ID NO: 4311641 - DNA, 25 bp, Homo sapien
cactcagccaacaaggggcggtcac

SEQ ID NO: 4311642 - DNA, 25 bp, Homo sapien
ctgagcaagttctgacttgcacaaa

SEQ ID NO: 4311643 - DNA, 25 bp, Homo sapien
accaaagggcctcccatgaatatac

SEQ ID NO: 4311644 - DNA, 25 bp, Homo sapien
ggcggtcacgactggaaacccaagc

SEQ ID NO: 4311645 - DNA, 25 bp, Homo sapien
taggctagttcatgtccaaaagctt

SEQ ID NO: 4311646 - DNA, 25 bp, Homo sapien
ctagttcatgtccaaaagcttggtc

SEQ ID NO: 4311647 - DNA, 25 bp, Homo sapien
gctagttcatgtccaaaagcttggt

SEQ ID NO: 4311648 - DNA, 25 bp, Homo sapien
ggctagttcatgtccaaaagcttgg

SEQ ID NO: 4311649 - DNA, 25 bp, Homo sapien
atatttattatagaatgaagagacg

SEQ ID NO: 4311650 - DNA, 25 bp, Homo sapien
tatatttattatagaatgaagagac

SEQ ID NO: 4311651 - DNA, 25 bp, Homo sapien
agaatatatttattatagaatgaag

SEQ ID NO: 4311652 - DNA, 25 bp, Homo sapien
aatatatttattatagaatgaagag

SEQ ID NO: 4311653 - DNA, 25 bp, Homo sapien
tttgtagcagaatcagagaaggtaa

SEQ ID NO: 4311654 - DNA, 25 bp, Homo sapien
caatatgtaggttaaaactgcaacc

SEQ ID NO: 4311655 - DNA, 25 bp, Homo sapien
catcagtttcctcaagggcctctca

SEQ ID NO: 4311656 - DNA, 25 bp, Homo sapien
tcatgtgatgctcaaatcaatcttt

SEQ ID NO: 4311657 - DNA, 25 bp, Homo sapien
cactctcaatattgtggattcttgg

SEQ ID NO: 4311658 - DNA, 25 bp, Homo sapien
tgtggattcttggatctgatcaaac

SEQ ID NO: 4311659 - DNA, 25 bp, Homo sapien
cctgggtcaactgttgtggtgaggc

SEQ ID NO: 4311660 - DNA, 25 bp, Homo sapien
tgtggtgaggcattgctgacttcac

SEQ ID NO: 4311661 - DNA, 25 bp, Homo sapien
tccctataaaaagtcctgatgatga

SEQ ID NO: 4311662 - DNA, 25 bp, Homo sapien
caagtaagagcttgatggtgcacct

SEQ ID NO: 4311663 - DNA, 25 bp, Homo sapien
tcttgatggagtgcctttggatgca

SEQ ID NO: 4311664 - DNA, 25 bp, Homo sapien
gaattcctattgatgctactcccgt

SEQ ID NO: 4311665 - DNA, 25 bp, Homo sapien
aaaaagctttctcgtgactccattg

SEQ ID NO: 4311666 - DNA, 25 bp, Homo sapien
tgaaagaatgctcttgacaaagctc

SEQ ID NO: 4311667 - DNA, 25 bp, Homo sapien
tgttaagactattcaagcacagtga

SEQ ID NO: 4311668 - DNA, 25 bp, Homo sapien
ttaaggcagcaactccctgttggct

SEQ ID NO: 4311669 - DNA, 25 bp, Homo sapien
tgtgaatatccaggagacactttaa

SEQ ID NO: 4311670 - DNA, 25 bp, Homo sapien
gtgaatatccaggagacactttaaa

SEQ ID NO: 4311671 - DNA, 25 bp, Homo sapien
gaaagctccactgctagactgactg

SEQ ID NO: 4311672 - DNA, 25 bp, Homo sapien
tacagggccactgagttgagggacc

SEQ ID NO: 4311673 - DNA, 25 bp, Homo sapien
tcaaatgattagtgtggatcacccc

SEQ ID NO: 4311674 - DNA, 25 bp, Homo sapien
tcttaatggctccagaggctaccca

SEQ ID NO: 4311675 - DNA, 25 bp, Homo sapien
gacatgcctaaagtgaggctgccct

SEQ ID NO: 4311676 - DNA, 25 bp, Homo sapien
cagacatgcctaaagtgaggctgcc

SEQ ID NO: 4311677 - DNA, 25 bp, Homo sapien
catgcctaaagtgaggctgccctct

SEQ ID NO: 4311678 - DNA, 25 bp, Homo sapien
tgcctaaagtgaggctgccctcttg

SEQ ID NO: 4311679 - DNA, 25 bp, Homo sapien
cagatgaatctaatttcataagcct

SEQ ID NO: 4311680 - DNA, 25 bp, Homo sapien
gatgaatctaatttcataagcctct

SEQ ID NO: 4311681 - DNA, 25 bp, Homo sapien
gctgccagatgaatctaatttcata

SEQ ID NO: 4311682 - DNA, 25 bp, Homo sapien
gaatctaatttcataagcctctcac

SEQ ID NO: 4311683 - DNA, 25 bp, Homo sapien
cggctccaatgccaaactcttcagt

SEQ ID NO: 4311684 - DNA, 25 bp, Homo sapien
tgccaaactcttcagtggttcctcc

SEQ ID NO: 4311685 - DNA, 25 bp, Homo sapien
aatgccaaactcttcagtggttcct

SEQ ID NO: 4311686 - DNA, 25 bp, Homo sapien
gctccaatgccaaactcttcagtgg

SEQ ID NO: 4311687 - DNA, 25 bp, Homo sapien
tgaataactcttctgagtgggccag

SEQ ID NO: 4311688 - DNA, 25 bp, Homo sapien
aatgaataactcttctgagtgggcc

SEQ ID NO: 4311689 - DNA, 25 bp, Homo sapien
atgaataactcttctgagtgggcca

SEQ ID NO: 4311690 - DNA, 25 bp, Homo sapien
aaatgaataactcttctgagtgggc

SEQ ID NO: 4311691 - DNA, 25 bp, Homo sapien
gttgcaatatctttatagtgtccct

SEQ ID NO: 4311692 - DNA, 25 bp, Homo sapien
agttgcaatatctttatagtgtccc

SEQ ID NO: 4311693 - DNA, 25 bp, Homo sapien
tagagtgggtaacacaacacccttc

SEQ ID NO: 4311694 - DNA, 25 bp, Homo sapien
tggcgatagagtgggtaacacaaca

SEQ ID NO: 4311695 - DNA, 25 bp, Homo sapien
aaggtgttgtatcttgaacggtatc

SEQ ID NO: 4311696 - DNA, 25 bp, Homo sapien
cctctattatatgctgatcatggca

SEQ ID NO: 4311697 - DNA, 25 bp, Homo sapien
tgctaacacagaaaccgattcctct

SEQ ID NO: 4311698 - DNA, 25 bp, Homo sapien
tagagagcagcactttttgtcttca

SEQ ID NO: 4311699 - DNA, 25 bp, Homo sapien
ccagcatagtgttggactcagtttc

SEQ ID NO: 4311700 - DNA, 25 bp, Homo sapien
catagtgttggactcagtttcctga

SEQ ID NO: 4311701 - DNA, 25 bp, Homo sapien
cagtttcctgatattccatgcagat

SEQ ID NO: 4311702 - DNA, 25 bp, Homo sapien
ctcaaaccagcatagtgttggactc

SEQ ID NO: 4311703 - DNA, 25 bp, Homo sapien
agctgcagggccacactaactagaa

SEQ ID NO: 4311704 - DNA, 25 bp, Homo sapien
gctgcagggccacactaactagaaa

SEQ ID NO: 4311705 - DNA, 25 bp, Homo sapien
tcaatggtacaggtgaaaaggaagt

SEQ ID NO: 4311706 - DNA, 25 bp, Homo sapien
atatacaatcaatggtacaggtgaa

SEQ ID NO: 4311707 - DNA, 25 bp, Homo sapien
gacaaattttcgtagctgatacttc

SEQ ID NO: 4311708 - DNA, 25 bp, Homo sapien
attttcgtagctgatacttctcttc

SEQ ID NO: 4311709 - DNA, 25 bp, Homo sapien
attgacaaattttcgtagctgatac

SEQ ID NO: 4311710 - DNA, 25 bp, Homo sapien
caaattttcgtagctgatacttctc

SEQ ID NO: 4311711 - DNA, 25 bp, Homo sapien
aagacaacatgggaaatgcggtgag

SEQ ID NO: 4311712 - DNA, 25 bp, Homo sapien
catcctcatgaaaccagagctcagg

SEQ ID NO: 4311713 - DNA, 25 bp, Homo sapien
aaaagtctccctgttgtaactcagg

SEQ ID NO: 4311714 - DNA, 25 bp, Homo sapien
gaagcacggcgtttaacacttccat

SEQ ID NO: 4311715 - DNA, 25 bp, Homo sapien
ctgcactgttgtatctgcctggcga

SEQ ID NO: 4311716 - DNA, 25 bp, Homo sapien
ggtgttaaacagacaacagcccacg

SEQ ID NO: 4311717 - DNA, 25 bp, Homo sapien
tctgcctggcgacacctgatgagga

SEQ ID NO: 4311718 - DNA, 25 bp, Homo sapien
cacctgatgaggaggtgttaaacag

SEQ ID NO: 4311719 - DNA, 25 bp, Homo sapien
aatatttgtcagtccaccaaggatt

SEQ ID NO: 4311720 - DNA, 25 bp, Homo sapien
agaaaagccgtgtggtataggtggg

SEQ ID NO: 4311721 - DNA, 25 bp, Homo sapien
tgtaaaacgtgagcagggagtggca

SEQ ID NO: 4311722 - DNA, 25 bp, Homo sapien
cacagagaaattgcgatgacacaca

SEQ ID NO: 4311723 - DNA, 25 bp, Homo sapien
aaaagtgaagctacagaggtaggca

SEQ ID NO: 4311724 - DNA, 25 bp, Homo sapien
gcgcttctgtcttcgttcagctgca

SEQ ID NO: 4311725 - DNA, 25 bp, Homo sapien
tctggatccttaatatcaataacat

SEQ ID NO: 4311726 - DNA, 25 bp, Homo sapien
agctcagcggccaggcgcttctgtc

SEQ ID NO: 4311727 - DNA, 25 bp, Homo sapien
ggatccttaatatcaataacatcac

SEQ ID NO: 4311728 - DNA, 25 bp, Homo sapien
caataatgtcggtttcctttctctc

SEQ ID NO: 4311729 - DNA, 25 bp, Homo sapien
actgctgctccctgttactcactgg

SEQ ID NO: 4311730 - DNA, 25 bp, Homo sapien
cactggcaaacttcctactgagtac

SEQ ID NO: 4311731 - DNA, 25 bp, Homo sapien
gggacagttttctgtactacaggct

SEQ ID NO: 4311732 - DNA, 25 bp, Homo sapien
cacttgttacggctgccataaacag

SEQ ID NO: 4311733 - DNA, 25 bp, Homo sapien
cttgttacggctgccataaacagca

SEQ ID NO: 4311734 - DNA, 25 bp, Homo sapien
aaccacttgttacggctgccataaa

SEQ ID NO: 4311735 - DNA, 25 bp, Homo sapien
ttgaaccacttgttacggctgccat

SEQ ID NO: 4311736 - DNA, 25 bp, Homo sapien
ctgtaaccgttgcaacactcctgat

SEQ ID NO: 4311737 - DNA, 25 bp, Homo sapien
tgtaaccgttgcaacactcctgatc

SEQ ID NO: 4311738 - DNA, 25 bp, Homo sapien
gtcctggattttcttggtgccagaa

SEQ ID NO: 4311739 - DNA, 25 bp, Homo sapien
tggattttcttggtgccagaagagc

SEQ ID NO: 4311740 - DNA, 25 bp, Homo sapien
cacaagtggttttgctgtcctggat

SEQ ID NO: 4311741 - DNA, 25 bp, Homo sapien
tatttcttccacaagtggttttgct

SEQ ID NO: 4311742 - DNA, 25 bp, Homo sapien
tttctttgggcaggcgaatggtaaa

SEQ ID NO: 4311743 - DNA, 25 bp, Homo sapien
ttctttgggcaggcgaatggtaaaa

SEQ ID NO: 4311744 - DNA, 25 bp, Homo sapien
ggtttctttgggcaggcgaatggta

SEQ ID NO: 4311745 - DNA, 25 bp, Homo sapien
gtttctttgggcaggcgaatggtaa

SEQ ID NO: 4311746 - DNA, 25 bp, Homo sapien
tcataggacccttgctcacttccat

SEQ ID NO: 4311747 - DNA, 25 bp, Homo sapien
tgcatcataggacccttgctcactt

SEQ ID NO: 4311748 - DNA, 25 bp, Homo sapien
ctttatctgcatcataggacccttg

SEQ ID NO: 4311749 - DNA, 25 bp, Homo sapien
tatctgcatcataggacccttgctc

SEQ ID NO: 4311750 - DNA, 25 bp, Homo sapien
tctacaattcttccaggaagggtta

SEQ ID NO: 4311751 - DNA, 25 bp, Homo sapien
cagatttaacacaggtctcatgaag

SEQ ID NO: 4311752 - DNA, 25 bp, Homo sapien
ctgcagatttaacacaggtctcatg

SEQ ID NO: 4311753 - DNA, 25 bp, Homo sapien
gcagatttaacacaggtctcatgaa

SEQ ID NO: 4311754 - DNA, 25 bp, Homo sapien
gatttaacacaggtctcatgaagtc

SEQ ID NO: 4311755 - DNA, 25 bp, Homo sapien
atggggcctccgcagctacagtctc

SEQ ID NO: 4311756 - DNA, 25 bp, Homo sapien
cagtctccattcttcaaggagaggg

SEQ ID NO: 4311757 - DNA, 25 bp, Homo sapien
cgcagctacagtctccattcttcaa

SEQ ID NO: 4311758 - DNA, 25 bp, Homo sapien
gctacagtctccattcttcaaggag

SEQ ID NO: 4311759 - DNA, 25 bp, Homo sapien
taacgaatgcgcctttcctgcggcc

SEQ ID NO: 4311760 - DNA, 25 bp, Homo sapien
ctaacgaatgcgcctttcctgcggc

SEQ ID NO: 4311761 - DNA, 25 bp, Homo sapien
aacgaatgcgcctttcctgcggcca

SEQ ID NO: 4311762 - DNA, 25 bp, Homo sapien
tgagaaagtatggcttggcgtagaa

SEQ ID NO: 4311763 - DNA, 25 bp, Homo sapien
gagaaagtatggcttggcgtagaac

SEQ ID NO: 4311764 - DNA, 25 bp, Homo sapien
ctgagaaagtatggcttggcgtaga

SEQ ID NO: 4311765 - DNA, 25 bp, Homo sapien
agtagacgtcgaactcggagacccg

SEQ ID NO: 4311766 - DNA, 25 bp, Homo sapien
tggcgatagtcaggaagtccggatc

SEQ ID NO: 4311767 - DNA, 25 bp, Homo sapien
gacccgggcgtagggcacgcggatg

SEQ ID NO: 4311768 - DNA, 25 bp, Homo sapien
gatggcgatagtcaggaagtccgga

SEQ ID NO: 4311769 - DNA, 25 bp, Homo sapien
gctgaggtcgaacgccggggtcagc

SEQ ID NO: 4311770 - DNA, 25 bp, Homo sapien
tggctgaggtcgaacgccggggtca

SEQ ID NO: 4311771 - DNA, 25 bp, Homo sapien
tgaggtcgaacgccggggtcagcat

SEQ ID NO: 4311772 - DNA, 25 bp, Homo sapien
ctggctgaggtcgaacgccggggtc

SEQ ID NO: 4311773 - DNA, 25 bp, Homo sapien
cacgcgcaggaactctcggtgtgag

SEQ ID NO: 4311774 - DNA, 25 bp, Homo sapien
tcggtgtgagggacggagcttccgg

SEQ ID NO: 4311775 - DNA, 25 bp, Homo sapien
gctcgcgcgtaaggcaggaagtctc

SEQ ID NO: 4311776 - DNA, 25 bp, Homo sapien
gctcgaggcggaagtgctcgcgcgt

SEQ ID NO: 4311777 - DNA, 25 bp, Homo sapien
tctggaagttgttaattcctgctaa

SEQ ID NO: 4311778 - DNA, 25 bp, Homo sapien
atttggatccttgggtctctggaag

SEQ ID NO: 4311779 - DNA, 25 bp, Homo sapien
ggtctctggaagttgttaattcctg

SEQ ID NO: 4311780 - DNA, 25 bp, Homo sapien
gaagttgttaattcctgctaatctg

SEQ ID NO: 4311781 - DNA, 25 bp, Homo sapien
tccgagtataatacttggccattat

SEQ ID NO: 4311782 - DNA, 25 bp, Homo sapien
taatacttggccattattctaatat

SEQ ID NO: 4311783 - DNA, 25 bp, Homo sapien
tggtcttgttaactactagatttga

SEQ ID NO: 4311784 - DNA, 25 bp, Homo sapien
actactagatttgagagaaaggctt

SEQ ID NO: 4311785 - DNA, 25 bp, Homo sapien
tcagttgcaggactgccaacggaac

SEQ ID NO: 4311786 - DNA, 25 bp, Homo sapien
gcatcagttgcaggactgccaacgg

SEQ ID NO: 4311787 - DNA, 25 bp, Homo sapien
tgcaggactgccaacggaacctttt

SEQ ID NO: 4311788 - DNA, 25 bp, Homo sapien
caggactgccaacggaaccttttct

SEQ ID NO: 4311789 - DNA, 25 bp, Homo sapien
tatattgctctgtagtgcttacaaa

SEQ ID NO: 4311790 - DNA, 25 bp, Homo sapien
tattgctctgtagtgcttacaaata

SEQ ID NO: 4311791 - DNA, 25 bp, Homo sapien
atattgctctgtagtgcttacaaat

SEQ ID NO: 4311792 - DNA, 25 bp, Homo sapien
atatattgctctgtagtgcttacaa

SEQ ID NO: 4311793 - DNA, 25 bp, Homo sapien
tcttttacattgatccataggtttc

SEQ ID NO: 4311794 - DNA, 25 bp, Homo sapien
cttttacattgatccataggtttcc

SEQ ID NO: 4311795 - DNA, 25 bp, Homo sapien
ttcttttacattgatccataggttt

SEQ ID NO: 4311796 - DNA, 25 bp, Homo sapien
ttttacattgatccataggtttcca

SEQ ID NO: 4311797 - DNA, 25 bp, Homo sapien
ctcctataaacggaggctgcctctt

SEQ ID NO: 4311798 - DNA, 25 bp, Homo sapien
tcctataaacggaggctgcctcttt

SEQ ID NO: 4311799 - DNA, 25 bp, Homo sapien
tagctcctataaacggaggctgcct

SEQ ID NO: 4311800 - DNA, 25 bp, Homo sapien
ctgtagctcctataaacggaggctg

SEQ ID NO: 4311801 - DNA, 25 bp, Homo sapien
aagtttgataggaaggtctgtgatt

SEQ ID NO: 4311802 - DNA, 25 bp, Homo sapien
gaagtttgataggaaggtctgtgat

SEQ ID NO: 4311803 - DNA, 25 bp, Homo sapien
tgataggaaggtctgtgatttcctc

SEQ ID NO: 4311804 - DNA, 25 bp, Homo sapien
ttggcaacagcttgtattaactgac

SEQ ID NO: 4311805 - DNA, 25 bp, Homo sapien
ttttggcaacagcttgtattaactg

SEQ ID NO: 4311806 - DNA, 25 bp, Homo sapien
tattgaaccattttggcaacagctt

SEQ ID NO: 4311807 - DNA, 25 bp, Homo sapien
cattttggcaacagcttgtattaac

SEQ ID NO: 4311808 - DNA, 25 bp, Homo sapien
gcagtacgagtctgtttttccaaag

SEQ ID NO: 4311809 - DNA, 25 bp, Homo sapien
gatgttgaccccatatcagaagcag

SEQ ID NO: 4311810 - DNA, 25 bp, Homo sapien
cattttgaatatgcgcccgtcagcc

SEQ ID NO: 4311811 - DNA, 25 bp, Homo sapien
taggcactgatctaccgtggcgttg

SEQ ID NO: 4311812 - DNA, 25 bp, Homo sapien
tctgcctgagtgtcccttgctgtcc

SEQ ID NO: 4311813 - DNA, 25 bp, Homo sapien
ctctgcctgagtgtcccttgctgtc

SEQ ID NO: 4311814 - DNA, 25 bp, Homo sapien
cttgctgtccccctgctttggccac

SEQ ID NO: 4311815 - DNA, 25 bp, Homo sapien
tttggccaccactcatcacccacac

SEQ ID NO: 4311816 - DNA, 25 bp, Homo sapien
gaatacatacgacaactgcctccga

SEQ ID NO: 4311817 - DNA, 25 bp, Homo sapien
gaataccttggttgcaatcactgtg

SEQ ID NO: 4311818 - DNA, 25 bp, Homo sapien
gagcatacaagcaacacatagccta

SEQ ID NO: 4311819 - DNA, 25 bp, Homo sapien
cactgtgcttgtttatccaaacggc

SEQ ID NO: 4311820 - DNA, 25 bp, Homo sapien
ctgtgaatggtgctgccaaggagcc

SEQ ID NO: 4311821 - DNA, 25 bp, Homo sapien
cagcaatgacactgcccctgtatga

SEQ ID NO: 4311822 - DNA, 25 bp, Homo sapien
gctgttttggaactgctatcaatgc

SEQ ID NO: 4311823 - DNA, 25 bp, Homo sapien
gatgtcctgacttacattaccagca

SEQ ID NO: 4311824 - DNA, 25 bp, Homo sapien
gcaacgtccttgtttgctgggctcc

SEQ ID NO: 4311825 - DNA, 25 bp, Homo sapien
acaatccccttgtcttgtagcgagt

SEQ ID NO: 4311826 - DNA, 25 bp, Homo sapien
tgtagcgagtctgtttcatctgccc

SEQ ID NO: 4311827 - DNA, 25 bp, Homo sapien
actgttgtttctaactgccattgca

SEQ ID NO: 4311828 - DNA, 25 bp, Homo sapien
ataggagtcaccaaatgatttgctg

SEQ ID NO: 4311829 - DNA, 25 bp, Homo sapien
tagattagctcataggagtcaccaa

SEQ ID NO: 4311830 - DNA, 25 bp, Homo sapien
acagtagattagctcataggagtca

SEQ ID NO: 4311831 - DNA, 25 bp, Homo sapien
gatttgctgttctgggtactattat

SEQ ID NO: 4311832 - DNA, 25 bp, Homo sapien
gcatgtacggaagcaactgcagaga

SEQ ID NO: 4311833 - DNA, 25 bp, Homo sapien
tgacgataagcaaccaacgttcaga

SEQ ID NO: 4311834 - DNA, 25 bp, Homo sapien
gagcactctatgaagcaatacggga

SEQ ID NO: 4311835 - DNA, 25 bp, Homo sapien
gaaaccgaggcgtctaccatgacga

SEQ ID NO: 4311836 - DNA, 25 bp, Homo sapien
gagactgtgcacactttatgtggac

SEQ ID NO: 4311837 - DNA, 25 bp, Homo sapien
atgtattacccccttcagctgaagt

SEQ ID NO: 4311838 - DNA, 25 bp, Homo sapien
tatgtggacgaatcccgcaagtttt

SEQ ID NO: 4311839 - DNA, 25 bp, Homo sapien
aagacaatctctttcaatccatgta

SEQ ID NO: 4311840 - DNA, 25 bp, Homo sapien
gaaaagggcttatgagaaacacgtc

SEQ ID NO: 4311841 - DNA, 25 bp, Homo sapien
tactaatctctaagctgcctgggtc

SEQ ID NO: 4311842 - DNA, 25 bp, Homo sapien
gaaacacgtcatcatccatgttggc

SEQ ID NO: 4311843 - DNA, 25 bp, Homo sapien
tcttgttgcaagtcaattaggtgtc

SEQ ID NO: 4311844 - DNA, 25 bp, Homo sapien
tttatttcctaagcaagctaacaca

SEQ ID NO: 4311845 - DNA, 25 bp, Homo sapien
gacatattctcacttaatagaatta

SEQ ID NO: 4311846 - DNA, 25 bp, Homo sapien
caagctaacacaggacatattctct

SEQ ID NO: 4311847 - DNA, 25 bp, Homo sapien
gctaacacaggacatattctctctt

SEQ ID NO: 4311848 - DNA, 25 bp, Homo sapien
ttttgcctttccgtttctgtctatg

SEQ ID NO: 4311849 - DNA, 25 bp, Homo sapien
ccgtttctgtctatgatgtaggctt

SEQ ID NO: 4311850 - DNA, 25 bp, Homo sapien
tttccgtttctgtctatgatgtagg

SEQ ID NO: 4311851 - DNA, 25 bp, Homo sapien
gcctttccgtttctgtctatgatgt

SEQ ID NO: 4311852 - DNA, 25 bp, Homo sapien
ggtagaatgacagaacttagggatc

SEQ ID NO: 4311853 - DNA, 25 bp, Homo sapien
aatgacagaacttagggatcccttg

SEQ ID NO: 4311854 - DNA, 25 bp, Homo sapien
tggctttagtggtagaatgacagaa

SEQ ID NO: 4311855 - DNA, 25 bp, Homo sapien
tagtggtagaatgacagaacttagg

SEQ ID NO: 4311856 - DNA, 25 bp, Homo sapien
cctctttcatcacaatctcatattt

SEQ ID NO: 4311857 - DNA, 25 bp, Homo sapien
tctttcatcacaatctcatatttct

SEQ ID NO: 4311858 - DNA, 25 bp, Homo sapien
tcatatttctcttccttctccttct

SEQ ID NO: 4311859 - DNA, 25 bp, Homo sapien
atttctcttccttctccttcttcat

SEQ ID NO: 4311860 - DNA, 25 bp, Homo sapien
tgttctgcagcttgtttagactgga

SEQ ID NO: 4311861 - DNA, 25 bp, Homo sapien
tgtagtggtattgtaacccagtctg

SEQ ID NO: 4311862 - DNA, 25 bp, Homo sapien
gaaggacagccaagctccagtactt

SEQ ID NO: 4311863 - DNA, 25 bp, Homo sapien
tcaaagaacgtctaaagctttgtgt

SEQ ID NO: 4311864 - DNA, 25 bp, Homo sapien
acaagccttgattatctgaagacca

SEQ ID NO: 4311865 - DNA, 25 bp, Homo sapien
ccttgattatctgaagaccaggtgg

SEQ ID NO: 4311866 - DNA, 25 bp, Homo sapien
gaagtggtgtttaagtagagatctg

SEQ ID NO: 4311867 - DNA, 25 bp, Homo sapien
tttgcagaggaatgtagcaaagtgc

SEQ ID NO: 4311868 - DNA, 25 bp, Homo sapien
gggagagtgcttcccgggctcccat

SEQ ID NO: 4311869 - DNA, 25 bp, Homo sapien
tctcctttcagggcggatggttccg

SEQ ID NO: 4311870 - DNA, 25 bp, Homo sapien
ggtgctcgctctgtcggtcttgctc

SEQ ID NO: 4311871 - DNA, 25 bp, Homo sapien
cggtcgcctgcgtgccggagtgtgt

SEQ ID NO: 4311872 - DNA, 25 bp, Homo sapien
tctggtttcacccatgagcagtcct

SEQ ID NO: 4311873 - DNA, 25 bp, Homo sapien
catccctatcggataccttgggtaa

SEQ ID NO: 4311874 - DNA, 25 bp, Homo sapien
tcattttcaccagctctctgatgtg

SEQ ID NO: 4311875 - DNA, 25 bp, Homo sapien
ggaaatctacatgtaaccacttgca

SEQ ID NO: 4311876 - DNA, 25 bp, Homo sapien
gccactaaattgttgtagcaccact

SEQ ID NO: 4311877 - DNA, 25 bp, Homo sapien
ttaaggtggttggccgctggccact

SEQ ID NO: 4311878 - DNA, 25 bp, Homo sapien
atacctttagcctttagagaattgt

SEQ ID NO: 4311879 - DNA, 25 bp, Homo sapien
acctttagcctttagagaattgtga

SEQ ID NO: 4311880 - DNA, 25 bp, Homo sapien
ctgggatcccatacctcttgtctgg

SEQ ID NO: 4311881 - DNA, 25 bp, Homo sapien
taatgtgctttttttggaccgcaaa

SEQ ID NO: 4311882 - DNA, 25 bp, Homo sapien
tctggctgttcccattaatgtgctt

SEQ ID NO: 4311883 - DNA, 25 bp, Homo sapien
gctttttttggaccgcaaacatgtc

SEQ ID NO: 4311884 - DNA, 25 bp, Homo sapien
aatcagtgatacatcaagatttttc

SEQ ID NO: 4311885 - DNA, 25 bp, Homo sapien
tgagggtttgtccattcttatacac

SEQ ID NO: 4311886 - DNA, 25 bp, Homo sapien
tggtatgttgaaacatgtttacaaa

SEQ ID NO: 4311887 - DNA, 25 bp, Homo sapien
ttccaccagtttgagggtttgtcca

SEQ ID NO: 4311888 - DNA, 25 bp, Homo sapien
caagcagtgcttgtagtgagcatcc

SEQ ID NO: 4311889 - DNA, 25 bp, Homo sapien
gagcatccttccacgtatcttttgt

SEQ ID NO: 4311890 - DNA, 25 bp, Homo sapien
ttttttggctgttaacaagcagtgc

SEQ ID NO: 4311891 - DNA, 25 bp, Homo sapien
cctgtcctgattgatggtaggcatt

SEQ ID NO: 4311892 - DNA, 25 bp, Homo sapien
gcaatatgttacagtagtcatacca

SEQ ID NO: 4311893 - DNA, 25 bp, Homo sapien
tttactgggaagatcataaatatat

SEQ ID NO: 4311894 - DNA, 25 bp, Homo sapien
caggtgccctgcctttaaatcaggg

SEQ ID NO: 4311895 - DNA, 25 bp, Homo sapien
aatgcaaaacacttactgtgactca

SEQ ID NO: 4311896 - DNA, 25 bp, Homo sapien
tggatgcattggaaccccaacccag

SEQ ID NO: 4311897 - DNA, 25 bp, Homo sapien
gtctcatctaagaaaggactcacag

SEQ ID NO: 4311898 - DNA, 25 bp, Homo sapien
ccttcaaggaagatttgagctatct

SEQ ID NO: 4311899 - DNA, 25 bp, Homo sapien
ggagtgggctccctgaccttcaagg

SEQ ID NO: 4311900 - DNA, 25 bp, Homo sapien
catatttgatgggttacaccaggca

SEQ ID NO: 4311901 - DNA, 25 bp, Homo sapien
gagacgattcaaggcaatgatggca

SEQ ID NO: 4311902 - DNA, 25 bp, Homo sapien
gataagatttgcaccagcagtctcc

SEQ ID NO: 4311903 - DNA, 25 bp, Homo sapien
cattgcggctggatcaagtgataag

SEQ ID NO: 4311904 - DNA, 25 bp, Homo sapien
gagctgtcaccacgaatgttcccaa

SEQ ID NO: 4311905 - DNA, 25 bp, Homo sapien
tctagatcagtgcatggatggctcc

SEQ ID NO: 4311906 - DNA, 25 bp, Homo sapien
catctaccccgtaagatcttgaggg

SEQ ID NO: 4311907 - DNA, 25 bp, Homo sapien
tagcaacagcggcaaactactgggc

SEQ ID NO: 4311908 - DNA, 25 bp, Homo sapien
tctcagaagaaccaagtaggttcct

SEQ ID NO: 4311909 - DNA, 25 bp, Homo sapien
tatgaagctgatatgagaccatctc

SEQ ID NO: 4311910 - DNA, 25 bp, Homo sapien
tatgaaacaccactgtactggaaga

SEQ ID NO: 4311911 - DNA, 25 bp, Homo sapien
tctgaggtgcctgagaaaaagactt

SEQ ID NO: 4311912 - DNA, 25 bp, Homo sapien
cactgcctttgtgaagcggtatata

SEQ ID NO: 4311913 - DNA, 25 bp, Homo sapien
gtgtaaactgaatgcttgggctttc

SEQ ID NO: 4311914 - DNA, 25 bp, Homo sapien
gaacatgcttcttcgacagccagtg

SEQ ID NO: 4311915 - DNA, 25 bp, Homo sapien
tactggctgccaaatttatacctgt

SEQ ID NO: 4311916 - DNA, 25 bp, Homo sapien
aggcttggatgttctgtgcaactca

SEQ ID NO: 4311917 - DNA, 25 bp, Homo sapien
catgtcattcagttgctttatgaag

SEQ ID NO: 4311918 - DNA, 25 bp, Homo sapien
aaacatggcactccaagcaggcttg

SEQ ID NO: 4311919 - DNA, 25 bp, Homo sapien
tcaacaaagtctaaaagcaggtcct

SEQ ID NO: 4311920 - DNA, 25 bp, Homo sapien
tgctaatcttgcctatattgttcca

SEQ ID NO: 4311921 - DNA, 25 bp, Homo sapien
taatcttgcctatattgttccaatt

SEQ ID NO: 4311922 - DNA, 25 bp, Homo sapien
ggccatgctaatcttgcctatattg

SEQ ID NO: 4311923 - DNA, 25 bp, Homo sapien
ccatgctaatcttgcctatattgtt

SEQ ID NO: 4311924 - DNA, 25 bp, Homo sapien
gaattcatgcacttagctttccagc

SEQ ID NO: 4311925 - DNA, 25 bp, Homo sapien
gaagtgggtcatagacatatccagc

SEQ ID NO: 4311926 - DNA, 25 bp, Homo sapien
gccacgaagacagcttgggaattca

SEQ ID NO: 4311927 - DNA, 25 bp, Homo sapien
tcatagacatatccagccacgaaga

SEQ ID NO: 4311928 - DNA, 25 bp, Homo sapien
taaggtggacttttcggcactccca

SEQ ID NO: 4311929 - DNA, 25 bp, Homo sapien
cggacataaggtggacttttcggca

SEQ ID NO: 4311930 - DNA, 25 bp, Homo sapien
tcctggtctgcggacataaggtgga

SEQ ID NO: 4311931 - DNA, 25 bp, Homo sapien
tctgcggacataaggtggacttttc

SEQ ID NO: 4311932 - DNA, 25 bp, Homo sapien
cgtccaagggccgaagggatccagt

SEQ ID NO: 4311933 - DNA, 25 bp, Homo sapien
aagggatccagtggcatgaggagtg

SEQ ID NO: 4311934 - DNA, 25 bp, Homo sapien
cctgattgtcgtccaagggccgaag

SEQ ID NO: 4311935 - DNA, 25 bp, Homo sapien
tcaaggtgaggcctgattgtcgtcc

SEQ ID NO: 4311936 - DNA, 25 bp, Homo sapien
tgatggttgggccaaatagtctgag

SEQ ID NO: 4311937 - DNA, 25 bp, Homo sapien
cattgaccatgatggttgggccaaa

SEQ ID NO: 4311938 - DNA, 25 bp, Homo sapien
ccattgaccatgatggttgggccaa

SEQ ID NO: 4311939 - DNA, 25 bp, Homo sapien
gttgggccaaatagtctgagtgtct

SEQ ID NO: 4311940 - DNA, 25 bp, Homo sapien
agagaattcgctgtcatcccggcgg

SEQ ID NO: 4311941 - DNA, 25 bp, Homo sapien
aacagttggaaatatcaggggtgta

SEQ ID NO: 4311942 - DNA, 25 bp, Homo sapien
tggaaatactgaagccatgtgagct

SEQ ID NO: 4311943 - DNA, 25 bp, Homo sapien
tgtagggagagaattcgctgtcatc

SEQ ID NO: 4311944 - DNA, 25 bp, Homo sapien
cccacagaaggccacggctctgtca

SEQ ID NO: 4311945 - DNA, 25 bp, Homo sapien
tggcagaaagcgaactgctgggagc

SEQ ID NO: 4311946 - DNA, 25 bp, Homo sapien
tgagggccgtttgctttcagatggc

SEQ ID NO: 4311947 - DNA, 25 bp, Homo sapien
cattttcttcccgacttgttctgct

SEQ ID NO: 4311948 - DNA, 25 bp, Homo sapien
cacataaccggccattttaccaagt

SEQ ID NO: 4311949 - DNA, 25 bp, Homo sapien
agtcatcatttatgaatatagctcg

SEQ ID NO: 4311950 - DNA, 25 bp, Homo sapien
gatgtagaggcgcaataaaaagtga

SEQ ID NO: 4311951 - DNA, 25 bp, Homo sapien
aatttgtttagtcagatgtagaggc

SEQ ID NO: 4311952 - DNA, 25 bp, Homo sapien
tcttctgatcctaaattcgtggtgc

SEQ ID NO: 4311953 - DNA, 25 bp, Homo sapien
gacgcttcttagagggattcctgta

SEQ ID NO: 4311954 - DNA, 25 bp, Homo sapien
tgaactgtcttctgccatagggtgg

SEQ ID NO: 4311955 - DNA, 25 bp, Homo sapien
cgtggtgctgctgttatactgggtc

SEQ ID NO: 4311956 - DNA, 25 bp, Homo sapien
gaatgcaagatgaggcacacaggta

SEQ ID NO: 4311957 - DNA, 25 bp, Homo sapien
gaggttgctgactcacttggctggc

SEQ ID NO: 4311958 - DNA, 25 bp, Homo sapien
aaaagtaacagctgcaatggaatgc

SEQ ID NO: 4311959 - DNA, 25 bp, Homo sapien
gagcctcctggagatattgagctat

SEQ ID NO: 4311960 - DNA, 25 bp, Homo sapien
gagtttcctagagcttgatgttaat

SEQ ID NO: 4311961 - DNA, 25 bp, Homo sapien
cctgatgaattgctccaactttaat

SEQ ID NO: 4311962 - DNA, 25 bp, Homo sapien
tgggagaatagaagttgggatcccc

SEQ ID NO: 4311963 - DNA, 25 bp, Homo sapien
tagtccatcgaaattcatcctgatg

SEQ ID NO: 4311964 - DNA, 25 bp, Homo sapien
tgggaataatcttagtcatgatctg

SEQ ID NO: 4311965 - DNA, 25 bp, Homo sapien
ttattgggaataatcttagtcatga

SEQ ID NO: 4311966 - DNA, 25 bp, Homo sapien
attgggaataatcttagtcatgatc

SEQ ID NO: 4311967 - DNA, 25 bp, Homo sapien
gggaataatcttagtcatgatctgc

SEQ ID NO: 4311968 - DNA, 25 bp, Homo sapien
ctgggtgtccaattgttgacagact

SEQ ID NO: 4311969 - DNA, 25 bp, Homo sapien
ggtgtccaattgttgacagacttgc

SEQ ID NO: 4311970 - DNA, 25 bp, Homo sapien
tttctgggtgtccaattgttgacag

SEQ ID NO: 4311971 - DNA, 25 bp, Homo sapien
tctgggtgtccaattgttgacagac

SEQ ID NO: 4311972 - DNA, 25 bp, Homo sapien
taatgatgccttatgaccaaatgcc

SEQ ID NO: 4311973 - DNA, 25 bp, Homo sapien
tcagcttggttattcatcatgtgaa

SEQ ID NO: 4311974 - DNA, 25 bp, Homo sapien
ttcttcagcttggttattcatcatg

SEQ ID NO: 4311975 - DNA, 25 bp, Homo sapien
atgatgccttatgaccaaatgccac

SEQ ID NO: 4311976 - DNA, 25 bp, Homo sapien
tattgagaggaatgggttcaacaat

SEQ ID NO: 4311977 - DNA, 25 bp, Homo sapien
gaggaatgggttcaacaataccacc

SEQ ID NO: 4311978 - DNA, 25 bp, Homo sapien
tgttttgatattgagaggaatgggt

SEQ ID NO: 4311979 - DNA, 25 bp, Homo sapien
ttttgatattgagaggaatgggttc

SEQ ID NO: 4311980 - DNA, 25 bp, Homo sapien
tctgcctatgtttcaagttagcttc

SEQ ID NO: 4311981 - DNA, 25 bp, Homo sapien
aaactcttctgcctatgtttcaagt

SEQ ID NO: 4311982 - DNA, 25 bp, Homo sapien
gcctatgtttcaagttagcttcctg

SEQ ID NO: 4311983 - DNA, 25 bp, Homo sapien
tcttctgcctatgtttcaagttagc

SEQ ID NO: 4311984 - DNA, 25 bp, Homo sapien
ctatagcatctgacagctctctact

SEQ ID NO: 4311985 - DNA, 25 bp, Homo sapien
ctgacagctctctactcaccctggt

SEQ ID NO: 4311986 - DNA, 25 bp, Homo sapien
tgacagctctctactcaccctggtt

SEQ ID NO: 4311987 - DNA, 25 bp, Homo sapien
tagcatctgacagctctctactcac

SEQ ID NO: 4311988 - DNA, 25 bp, Homo sapien
tgaggcagaaatagcgccaacccag

SEQ ID NO: 4311989 - DNA, 25 bp, Homo sapien
aaatagcgccaacccagctcttcga

SEQ ID NO: 4311990 - DNA, 25 bp, Homo sapien
ctgaggcagaaatagcgccaaccca

SEQ ID NO: 4311991 - DNA, 25 bp, Homo sapien
cagaaatagcgccaacccagctctt

SEQ ID NO: 4311992 - DNA, 25 bp, Homo sapien
gttctgggagagtcacttgctcaag

SEQ ID NO: 4311993 - DNA, 25 bp, Homo sapien
ggttctgggagagtcacttgctcaa

SEQ ID NO: 4311994 - DNA, 25 bp, Homo sapien
aggttctgggagagtcacttgctca

SEQ ID NO: 4311995 - DNA, 25 bp, Homo sapien
catgagatgtttcacacgcaattat

SEQ ID NO: 4311996 - DNA, 25 bp, Homo sapien
tcaaaacccaactgctaaatgctcc

SEQ ID NO: 4311997 - DNA, 25 bp, Homo sapien
gagctgtggcgacttggaaacatga

SEQ ID NO: 4311998 - DNA, 25 bp, Homo sapien
ttaacaatgctgcttgacttgatgg

SEQ ID NO: 4311999 - DNA, 25 bp, Homo sapien
tttcgaatgtggatgtgctctgtct

SEQ ID NO: 4312000 - DNA, 25 bp, Homo sapien
tcaacacaacagtaggggtgggatt

SEQ ID NO: 4312001 - DNA, 25 bp, Homo sapien
cctgcttgctttgtagcacatttcg

SEQ ID NO: 4312002 - DNA, 25 bp, Homo sapien
atccatgaatcataaaggacatttt

SEQ ID NO: 4312003 - DNA, 25 bp, Homo sapien
tctgagggaattactcctcccttct

SEQ ID NO: 4312004 - DNA, 25 bp, Homo sapien
cagctcttcttgcattatgtctttc

SEQ ID NO: 4312005 - DNA, 25 bp, Homo sapien
acagagacccctgtctcctttctgg

SEQ ID NO: 4312006 - DNA, 25 bp, Homo sapien
ctttctggtctgagggaattactcc

SEQ ID NO: 4312007 - DNA, 25 bp, Homo sapien
tacgaagcatgccttactagtgtaa

SEQ ID NO: 4312008 - DNA, 25 bp, Homo sapien
ttgctggaaagctacgaagcatgcc

SEQ ID NO: 4312009 - DNA, 25 bp, Homo sapien
tgatctggaaagtccaggggcctct

SEQ ID NO: 4312010 - DNA, 25 bp, Homo sapien
tagtgtaactaagtctgatctggaa

SEQ ID NO: 4312011 - DNA, 25 bp, Homo sapien
tttctaatgatctcaggacaaaacc

SEQ ID NO: 4312012 - DNA, 25 bp, Homo sapien
taatgatctcaggacaaaacctggg

SEQ ID NO: 4312013 - DNA, 25 bp, Homo sapien
tgatctcaggacaaaacctgggact

SEQ ID NO: 4312014 - DNA, 25 bp, Homo sapien
ggcatttctaatgatctcaggacaa

SEQ ID NO: 4312015 - DNA, 25 bp, Homo sapien
tgtgatcccccaccccttatcttct

SEQ ID NO: 4312016 - DNA, 25 bp, Homo sapien
ttgtttcatttgtgatcccccaccc

SEQ ID NO: 4312017 - DNA, 25 bp, Homo sapien
ccaccccttatcttctctttgaaag

SEQ ID NO: 4312018 - DNA, 25 bp, Homo sapien
tgtttcatttgtgatcccccacccc

SEQ ID NO: 4312019 - DNA, 25 bp, Homo sapien
aggcttgcttgcgttgtgacatgcc

SEQ ID NO: 4312020 - DNA, 25 bp, Homo sapien
ggtagaactcgatctgaggcttgct

SEQ ID NO: 4312021 - DNA, 25 bp, Homo sapien
gcttgcttgcgttgtgacatgccac

SEQ ID NO: 4312022 - DNA, 25 bp, Homo sapien
ccataaatgattgatggtatggtag

SEQ ID NO: 4312023 - DNA, 25 bp, Homo sapien
tgaggagcctgtaactctcaatcac

SEQ ID NO: 4312024 - DNA, 25 bp, Homo sapien
accaaaagagcttgacgactggtca

SEQ ID NO: 4312025 - DNA, 25 bp, Homo sapien
ccaaaagagcttgacgactggtcat

SEQ ID NO: 4312026 - DNA, 25 bp, Homo sapien
tggctttggtcgtattacaagagag

SEQ ID NO: 4312027 - DNA, 25 bp, Homo sapien
gccacttggctttggtcgtattaca

SEQ ID NO: 4312028 - DNA, 25 bp, Homo sapien
tttggtcgtattacaagagagcaac

SEQ ID NO: 4312029 - DNA, 25 bp, Homo sapien
tggtcgtattacaagagagcaacag

SEQ ID NO: 4312030 - DNA, 25 bp, Homo sapien
gccacagttggcgatgatgatggta

SEQ ID NO: 4312031 - DNA, 25 bp, Homo sapien
cacagttggcgatgatgatggtaga

SEQ ID NO: 4312032 - DNA, 25 bp, Homo sapien
cagttggcgatgatgatggtagaga

SEQ ID NO: 4312033 - DNA, 25 bp, Homo sapien
taaagccacagttggcgatgatgat

SEQ ID NO: 4312034 - DNA, 25 bp, Homo sapien
gcatttccatattgtcattgatcag

SEQ ID NO: 4312035 - DNA, 25 bp, Homo sapien
gtcacagatgcacaaagggaccctg

SEQ ID NO: 4312036 - DNA, 25 bp, Homo sapien
gggctcctggaattcgggcagacga

SEQ ID NO: 4312037 - DNA, 25 bp, Homo sapien
ttcgggcagacgagggcgggttgtc

SEQ ID NO: 4312038 - DNA, 25 bp, Homo sapien
cttccctgtatcatcccaaatttta

SEQ ID NO: 4312039 - DNA, 25 bp, Homo sapien
aatcttccctgtatcatcccaaatt

SEQ ID NO: 4312040 - DNA, 25 bp, Homo sapien
tttgtgtgtcgtccttgcatagggg

SEQ ID NO: 4312041 - DNA, 25 bp, Homo sapien
ctaatcttccctgtatcatcccaaa

SEQ ID NO: 4312042 - DNA, 25 bp, Homo sapien
tgtctgacagcctcagaacccgaaa

SEQ ID NO: 4312043 - DNA, 25 bp, Homo sapien
catgttcccttagtagcgaggttgg

SEQ ID NO: 4312044 - DNA, 25 bp, Homo sapien
tcttcctggtggaatacaagtttgc

SEQ ID NO: 4312045 - DNA, 25 bp, Homo sapien
tactcctagaaatgctgtcctgggc

SEQ ID NO: 4312046 - DNA, 25 bp, Homo sapien
ccgcttggctagaggccagactttg

SEQ ID NO: 4312047 - DNA, 25 bp, Homo sapien
tagaggccagactttggattccagt

SEQ ID NO: 4312048 - DNA, 25 bp, Homo sapien
tggctagaggccagactttggattc

SEQ ID NO: 4312049 - DNA, 25 bp, Homo sapien
cgcttggctagaggccagactttgg

SEQ ID NO: 4312050 - DNA, 25 bp, Homo sapien
ctcataaacgttgtaagtggcaatt

SEQ ID NO: 4312051 - DNA, 25 bp, Homo sapien
cataaacgttgtaagtggcaatttc

SEQ ID NO: 4312052 - DNA, 25 bp, Homo sapien
tactcataaacgttgtaagtggcaa

SEQ ID NO: 4312053 - DNA, 25 bp, Homo sapien
ttactcataaacgttgtaagtggca

SEQ ID NO: 4312054 - DNA, 25 bp, Homo sapien
tgagtaatgccgaagaaacatcgat

SEQ ID NO: 4312055 - DNA, 25 bp, Homo sapien
cactttgagtaatgccgaagaaaca

SEQ ID NO: 4312056 - DNA, 25 bp, Homo sapien
atgccgaagaaacatcgattgagtg

SEQ ID NO: 4312057 - DNA, 25 bp, Homo sapien
agctgcactttgagtaatgccgaag

SEQ ID NO: 4312058 - DNA, 25 bp, Homo sapien
cactagctctttggtagacctgaaa

SEQ ID NO: 4312059 - DNA, 25 bp, Homo sapien
gagaatcatgaaagcgcttcgagca

SEQ ID NO: 4312060 - DNA, 25 bp, Homo sapien
gcttctaagagttcagggtttgttg

SEQ ID NO: 4312061 - DNA, 25 bp, Homo sapien
aaacaagtagagaaagccggctgaa

SEQ ID NO: 4312062 - DNA, 25 bp, Homo sapien
catgcggtgacgtaaataaggcaag

SEQ ID NO: 4312063 - DNA, 25 bp, Homo sapien
gaaacagttctgactgtagctctca

SEQ ID NO: 4312064 - DNA, 25 bp, Homo sapien
caaacatgcggtgacgtaaataagg

SEQ ID NO: 4312065 - DNA, 25 bp, Homo sapien
tgtcaatcagggatcgaaggaaaca

SEQ ID NO: 4312066 - DNA, 25 bp, Homo sapien
gctccaagccccattagttgactgg

SEQ ID NO: 4312067 - DNA, 25 bp, Homo sapien
caacctccaggaagatatcattttc

SEQ ID NO: 4312068 - DNA, 25 bp, Homo sapien
tcatggagccagttcacttctgggt

SEQ ID NO: 4312069 - DNA, 25 bp, Homo sapien
tttccagtgacctaatgatggctcc

SEQ ID NO: 4312070 - DNA, 25 bp, Homo sapien
ttcgtagatgggtgccgagctcgtt

SEQ ID NO: 4312071 - DNA, 25 bp, Homo sapien
caatacattcgtagatgggtgccga

SEQ ID NO: 4312072 - DNA, 25 bp, Homo sapien
tacattcgtagatgggtgccgagct

SEQ ID NO: 4312073 - DNA, 25 bp, Homo sapien
cttagcaatacattcgtagatgggt

SEQ ID NO: 4312074 - DNA, 25 bp, Homo sapien
ctgcagtgggtgagctccacagagc

SEQ ID NO: 4312075 - DNA, 25 bp, Homo sapien
tgggtgagctccacagagcacagct

SEQ ID NO: 4312076 - DNA, 25 bp, Homo sapien
cagtgggtgagctccacagagcaca

SEQ ID NO: 4312077 - DNA, 25 bp, Homo sapien
gggtgagctccacagagcacagctc

SEQ ID NO: 4312078 - DNA, 25 bp, Homo sapien
aggtctgagctcaatacatctgatg

SEQ ID NO: 4312079 - DNA, 25 bp, Homo sapien
tctgatggagagtcagccaggtccc

SEQ ID NO: 4312080 - DNA, 25 bp, Homo sapien
tgatggagagtcagccaggtccctt

SEQ ID NO: 4312081 - DNA, 25 bp, Homo sapien
tgcaggtctgagctcaatacatctg

SEQ ID NO: 4312082 - DNA, 25 bp, Homo sapien
cttctccgtggatgcatgattcaga

SEQ ID NO: 4312083 - DNA, 25 bp, Homo sapien
tccttactgctgtctgctggaatag

SEQ ID NO: 4312084 - DNA, 25 bp, Homo sapien
taaagctcatggacatccttactgc

SEQ ID NO: 4312085 - DNA, 25 bp, Homo sapien
tgctggaatagcaccaatgggctct

SEQ ID NO: 4312086 - DNA, 25 bp, Homo sapien
ttgacactgaacttgatgctgctgg

SEQ ID NO: 4312087 - DNA, 25 bp, Homo sapien
tcattatgtttgacactgttgacac

SEQ ID NO: 4312088 - DNA, 25 bp, Homo sapien
gaaatgccaaaaggacaggttaggc

SEQ ID NO: 4312089 - DNA, 25 bp, Homo sapien
atttccctcgaatgctccgcttctt

SEQ ID NO: 4312090 - DNA, 25 bp, Homo sapien
gacgctggcatgaggtggttttggt

SEQ ID NO: 4312091 - DNA, 25 bp, Homo sapien
tagaggagcttctatagcgatgacc

SEQ ID NO: 4312092 - DNA, 25 bp, Homo sapien
tacttgtgttcacaggttgaaaact

SEQ ID NO: 4312093 - DNA, 25 bp, Homo sapien
ttattgatggactgcgacgctggca

SEQ ID NO: 4312094 - DNA, 25 bp, Homo sapien
caggaaccttcttttgtgggccaga

SEQ ID NO: 4312095 - DNA, 25 bp, Homo sapien
tcttgattccagtaagcaggaacct

SEQ ID NO: 4312096 - DNA, 25 bp, Homo sapien
gggtcatcacggcataaaaggcagc

SEQ ID NO: 4312097 - DNA, 25 bp, Homo sapien
aagagctgagttggtcagataaggc

SEQ ID NO: 4312098 - DNA, 25 bp, Homo sapien
ttgagtagagctccggttttcacgt

SEQ ID NO: 4312099 - DNA, 25 bp, Homo sapien
tgatgttgagtagagctccggtttt

SEQ ID NO: 4312100 - DNA, 25 bp, Homo sapien
tgttgagtagagctccggttttcac

SEQ ID NO: 4312101 - DNA, 25 bp, Homo sapien
agtagagctccggttttcacgtgaa

SEQ ID NO: 4312102 - DNA, 25 bp, Homo sapien
cagatatggcctggtaaataatggc

SEQ ID NO: 4312103 - DNA, 25 bp, Homo sapien
gcagtgtgatttgtaatcagacacc

SEQ ID NO: 4312104 - DNA, 25 bp, Homo sapien
gggtgctcagatatggcctggtaaa

SEQ ID NO: 4312105 - DNA, 25 bp, Homo sapien
tgtttgcctgccttcgtaatttgag

SEQ ID NO: 4312106 - DNA, 25 bp, Homo sapien
caactgtcgggattcacaagagtcc

SEQ ID NO: 4312107 - DNA, 25 bp, Homo sapien
catcgcaactgtcgggattcacaag

SEQ ID NO: 4312108 - DNA, 25 bp, Homo sapien
ggattcacaagagtcccttcgcatc

SEQ ID NO: 4312109 - DNA, 25 bp, Homo sapien
tcccttcgcatctggggtggtgctg

SEQ ID NO: 4312110 - DNA, 25 bp, Homo sapien
gctccagcgttatctactaacacct

SEQ ID NO: 4312111 - DNA, 25 bp, Homo sapien
gcgttatctactaacacctcctttc

SEQ ID NO: 4312112 - DNA, 25 bp, Homo sapien
tgttactgctccagcgttatctact

SEQ ID NO: 4312113 - DNA, 25 bp, Homo sapien
tctgttgttactgctccagcgttat

SEQ ID NO: 4312114 - DNA, 25 bp, Homo sapien
tatcaatttatagcctagagccctg

SEQ ID NO: 4312115 - DNA, 25 bp, Homo sapien
caggcacagatccagtgatgaggcc

SEQ ID NO: 4312116 - DNA, 25 bp, Homo sapien
tctggcctcaaactgggtactaact

SEQ ID NO: 4312117 - DNA, 25 bp, Homo sapien
gaaatcttgcttgtgagatggcctg

SEQ ID NO: 4312118 - DNA, 25 bp, Homo sapien
tgtctcctgggatgtctatagatgt

SEQ ID NO: 4312119 - DNA, 25 bp, Homo sapien
acatgacagattataaaactcaggc

SEQ ID NO: 4312120 - DNA, 25 bp, Homo sapien
ctatagatgtctaattcttggcttg

SEQ ID NO: 4312121 - DNA, 25 bp, Homo sapien
ttgacagtcccccagtagatctttg

SEQ ID NO: 4312122 - DNA, 25 bp, Homo sapien
tcttactccttgtgattcttcctga

SEQ ID NO: 4312123 - DNA, 25 bp, Homo sapien
gactgaaacaatggagtgacagaga

SEQ ID NO: 4312124 - DNA, 25 bp, Homo sapien
cactggcagactttgtttgcaatta

SEQ ID NO: 4312125 - DNA, 25 bp, Homo sapien
attcctcaacttgtagacaacagtg

SEQ ID NO: 4312126 - DNA, 25 bp, Homo sapien
agtggtatctggttgaggagcaggc

SEQ ID NO: 4312127 - DNA, 25 bp, Homo sapien
aggagcaggctaaccacctcacggg

SEQ ID NO: 4312128 - DNA, 25 bp, Homo sapien
tgggtgatgggagaccctctgtgcc

SEQ ID NO: 4312129 - DNA, 25 bp, Homo sapien
tgggctgggctgtcgttctggtgaa

SEQ ID NO: 4312130 - DNA, 25 bp, Homo sapien
catacttctctcaaaggggtgaagg

SEQ ID NO: 4312131 - DNA, 25 bp, Homo sapien
atacttctctcaaaggggtgaaggg

SEQ ID NO: 4312132 - DNA, 25 bp, Homo sapien
cccatacttctctcaaaggggtgaa

SEQ ID NO: 4312133 - DNA, 25 bp, Homo sapien
ttcccatacttctctcaaaggggtg

SEQ ID NO: 4312134 - DNA, 25 bp, Homo sapien
ctgggctaaaagaattcttagctca

SEQ ID NO: 4312135 - DNA, 25 bp, Homo sapien
aaaactctgctttatcatttcgaga

SEQ ID NO: 4312136 - DNA, 25 bp, Homo sapien
gctttatcatttcgagagctctttg

SEQ ID NO: 4312137 - DNA, 25 bp, Homo sapien
catcctcagcatcataaaactctgc

SEQ ID NO: 4312138 - DNA, 25 bp, Homo sapien
ctgcttttacaaccatcctcagcat

SEQ ID NO: 4312139 - DNA, 25 bp, Homo sapien
aggctctggccccaaccttactcct

SEQ ID NO: 4312140 - DNA, 25 bp, Homo sapien
tccttgtcgcaaagctttggagatc

SEQ ID NO: 4312141 - DNA, 25 bp, Homo sapien
aaccttactccttgtcgcaaagctt

SEQ ID NO: 4312142 - DNA, 25 bp, Homo sapien
tactccttgtcgcaaagctttggag

SEQ ID NO: 4312143 - DNA, 25 bp, Homo sapien
ttattttataggcaccactgcaaaa

SEQ ID NO: 4312144 - DNA, 25 bp, Homo sapien
tattttataggcaccactgcaaaat

SEQ ID NO: 4312145 - DNA, 25 bp, Homo sapien
ttttataggcaccactgcaaaatga

SEQ ID NO: 4312146 - DNA, 25 bp, Homo sapien
tttataggcaccactgcaaaatgag

SEQ ID NO: 4312147 - DNA, 25 bp, Homo sapien
ccgcattgaacgaggcaggaatttc

SEQ ID NO: 4312148 - DNA, 25 bp, Homo sapien
aatagacctatgacacccagagttg

SEQ ID NO: 4312149 - DNA, 25 bp, Homo sapien
cactctcttgggaaccttaaccagg

SEQ ID NO: 4312150 - DNA, 25 bp, Homo sapien
tatatcccaactctaaacgctgccg

SEQ ID NO: 4312151 - DNA, 25 bp, Homo sapien
tcctgtcatcggctgcttgctgctc

SEQ ID NO: 4312152 - DNA, 25 bp, Homo sapien
taagagttcttggatcgtcatccag

SEQ ID NO: 4312153 - DNA, 25 bp, Homo sapien
aattgtatactctagtgccgtccgg

SEQ ID NO: 4312154 - DNA, 25 bp, Homo sapien
ctcttggtgatgtagcgcgtcccgt

SEQ ID NO: 4312155 - DNA, 25 bp, Homo sapien
gccgctagggtagtacaggccgtaa

SEQ ID NO: 4312156 - DNA, 25 bp, Homo sapien
gaagccgctgttgtgcagcatccag

SEQ ID NO: 4312157 - DNA, 25 bp, Homo sapien
tatctgagagctcgtgtctgcgcac

SEQ ID NO: 4312158 - DNA, 25 bp, Homo sapien
gcagattcttggaggctggcccgta

SEQ ID NO: 4312159 - DNA, 25 bp, Homo sapien
tcattacgggtgctctcgtcggtcc

SEQ ID NO: 4312160 - DNA, 25 bp, Homo sapien
tgctccgagctctcgtcattacggg

SEQ ID NO: 4312161 - DNA, 25 bp, Homo sapien
aatgaaagactcgttgctgaagggc

SEQ ID NO: 4312162 - DNA, 25 bp, Homo sapien
cgtccgtgcagtcggccgaaatgaa

SEQ ID NO: 4312163 - DNA, 25 bp, Homo sapien
cagcttgcatttcactggtctggtg

SEQ ID NO: 4312164 - DNA, 25 bp, Homo sapien
cactggtctggtgctcaaatagaaa

SEQ ID NO: 4312165 - DNA, 25 bp, Homo sapien
gcatttcactggtctggtgctcaaa

SEQ ID NO: 4312166 - DNA, 25 bp, Homo sapien
gtctggtgctcaaatagaaaagtac

SEQ ID NO: 4312167 - DNA, 25 bp, Homo sapien
ccagctcagcagggcagagtgtcag

SEQ ID NO: 4312168 - DNA, 25 bp, Homo sapien
tcagggactggtgcgtgggcgttac

SEQ ID NO: 4312169 - DNA, 25 bp, Homo sapien
gtcagggactggtgcgtgggcgtta

SEQ ID NO: 4312170 - DNA, 25 bp, Homo sapien
tgcagcacgctagctgtgaattgca

SEQ ID NO: 4312171 - DNA, 25 bp, Homo sapien
tgctgcagcacgctagctgtgaatt

SEQ ID NO: 4312172 - DNA, 25 bp, Homo sapien
tgcaggtcatccagaaagtcgttcc

SEQ ID NO: 4312173 - DNA, 25 bp, Homo sapien
gaaagtcgttcctgtcatcatccat

SEQ ID NO: 4312174 - DNA, 25 bp, Homo sapien
cattaatgaacgtcgtgggcctgca

SEQ ID NO: 4312175 - DNA, 25 bp, Homo sapien
catatgtcaggccttgggaagtcaa

SEQ ID NO: 4312176 - DNA, 25 bp, Homo sapien
tgtgtaaagtgctccacggagggcc

SEQ ID NO: 4312177 - DNA, 25 bp, Homo sapien
tcaaatgtcttgacgtgaccccggt

SEQ ID NO: 4312178 - DNA, 25 bp, Homo sapien
gagttcaggccttgcaatcagcaat

SEQ ID NO: 4312179 - DNA, 25 bp, Homo sapien
aggccttgcaatcagcaatgaaaag

SEQ ID NO: 4312180 - DNA, 25 bp, Homo sapien
gttcaggccttgcaatcagcaatga

SEQ ID NO: 4312181 - DNA, 25 bp, Homo sapien
tggagttcaggccttgcaatcagca

SEQ ID NO: 4312182 - DNA, 25 bp, Homo sapien
gatccctgttctttaaccgcttctg

SEQ ID NO: 4312183 - DNA, 25 bp, Homo sapien
tagacctatcattagaaccagtttg

SEQ ID NO: 4312184 - DNA, 25 bp, Homo sapien
gataggcccatcatgaggccattgt

SEQ ID NO: 4312185 - DNA, 25 bp, Homo sapien
catctgcgtttgtgatccctgttct

SEQ ID NO: 4312186 - DNA, 25 bp, Homo sapien
taatgcggtctccttctcggatgcg

SEQ ID NO: 4312187 - DNA, 25 bp, Homo sapien
tctcggatgcgcccatccttggctg

SEQ ID NO: 4312188 - DNA, 25 bp, Homo sapien
gataatgcggtctccttctcggatg

SEQ ID NO: 4312189 - DNA, 25 bp, Homo sapien
ctggataatgcggtctccttctcgg

SEQ ID NO: 4312190 - DNA, 25 bp, Homo sapien
tcgtcttcatcgtccgtccggtagc

SEQ ID NO: 4312191 - DNA, 25 bp, Homo sapien
gatataaatcccaatgtcgtcttca

SEQ ID NO: 4312192 - DNA, 25 bp, Homo sapien
gtccggtagcacacagtgaggccca

SEQ ID NO: 4312193 - DNA, 25 bp, Homo sapien
tgttcattctgtagaggtccacttc

SEQ ID NO: 4312194 - DNA, 25 bp, Homo sapien
cactgcagtgaatgaaaggcaccac

SEQ ID NO: 4312195 - DNA, 25 bp, Homo sapien
aaaagcctcgctggtgtgactcaag

SEQ ID NO: 4312196 - DNA, 25 bp, Homo sapien
taatgggcaccgaggtacctaggaa

SEQ ID NO: 4312197 - DNA, 25 bp, Homo sapien
gcaggcacccttattgagcaccagg

SEQ ID NO: 4312198 - DNA, 25 bp, Homo sapien
tgcaagctctcacagacaggagcat

SEQ ID NO: 4312199 - DNA, 25 bp, Homo sapien
gcagtgtcgtcccataaagattacg

SEQ ID NO: 4312200 - DNA, 25 bp, Homo sapien
tacgaaatagccctctgtttggaga

SEQ ID NO: 4312201 - DNA, 25 bp, Homo sapien
tgttccagagaactgtagactgagg

SEQ ID NO: 4312202 - DNA, 25 bp, Homo sapien
ggatgtctccaatgtagtcatttgg

SEQ ID NO: 4312203 - DNA, 25 bp, Homo sapien
atcgtagtattcatgggctgaggga

SEQ ID NO: 4312204 - DNA, 25 bp, Homo sapien
tctcctgatggatgtctccaatgta

SEQ ID NO: 4312205 - DNA, 25 bp, Homo sapien
caatgtagtcatttggatcgtagta

SEQ ID NO: 4312206 - DNA, 25 bp, Homo sapien
taagatgcaaagtgcaagcctgatg

SEQ ID NO: 4312207 - DNA, 25 bp, Homo sapien
ggagcctgccagtcacgtgattcag

SEQ ID NO: 4312208 - DNA, 25 bp, Homo sapien
tcagcgtgactgatttctaactcca

SEQ ID NO: 4312209 - DNA, 25 bp, Homo sapien
tcagcacggtcaggacctccatcat

SEQ ID NO: 4312210 - DNA, 25 bp, Homo sapien
cgcctggccttgaaaagctatgtta

SEQ ID NO: 4312211 - DNA, 25 bp, Homo sapien
tgaaaagctatgttaaaagctatgt

SEQ ID NO: 4312212 - DNA, 25 bp, Homo sapien
tggccttgaaaagctatgttaaaag

SEQ ID NO: 4312213 - DNA, 25 bp, Homo sapien
cacgcctggccttgaaaagctatgt

SEQ ID NO: 4312214 - DNA, 25 bp, Homo sapien
gctctggataagtctctgccgttga

SEQ ID NO: 4312215 - DNA, 25 bp, Homo sapien
gagactctgatggaggcgtgaacat

SEQ ID NO: 4312216 - DNA, 25 bp, Homo sapien
gagaggacatcttagtgagggccat

SEQ ID NO: 4312217 - DNA, 25 bp, Homo sapien
tcctctggcaagagatagggatcca

SEQ ID NO: 4312218 - DNA, 25 bp, Homo sapien
aaagcagggtttaacactacgactg

SEQ ID NO: 4312219 - DNA, 25 bp, Homo sapien
ggtttaacactacgactgttgccat

SEQ ID NO: 4312220 - DNA, 25 bp, Homo sapien
taaggaactgtctgaaccaccaaac

SEQ ID NO: 4312221 - DNA, 25 bp, Homo sapien
aataaggaactgtctgaaccaccaa

SEQ ID NO: 4312222 - DNA, 25 bp, Homo sapien
ttttagtagcccatgcagttttcaa

SEQ ID NO: 4312223 - DNA, 25 bp, Homo sapien
caattttagtagcccatgcagtttt

SEQ ID NO: 4312224 - DNA, 25 bp, Homo sapien
attttagtagcccatgcagttttca

SEQ ID NO: 4312225 - DNA, 25 bp, Homo sapien
acaattttagtagcccatgcagttt

SEQ ID NO: 4312226 - DNA, 25 bp, Homo sapien
gaagccagcgttggaatcctggctg

SEQ ID NO: 4312227 - DNA, 25 bp, Homo sapien
ataagcccctccacaagccagatga

SEQ ID NO: 4312228 - DNA, 25 bp, Homo sapien
caaataagcccctccacaagccaga

SEQ ID NO: 4312229 - DNA, 25 bp, Homo sapien
aagcccctccacaagccagatgacc

SEQ ID NO: 4312230 - DNA, 25 bp, Homo sapien
gctgtaaagcaaaggaggccgaggt

SEQ ID NO: 4312231 - DNA, 25 bp, Homo sapien
tcaccggtgactgtaggatgccaag

SEQ ID NO: 4312232 - DNA, 25 bp, Homo sapien
ggatacttgccaaaggagaacgttc

SEQ ID NO: 4312233 - DNA, 25 bp, Homo sapien
ggcagtcatcaacaagagggagagg

SEQ ID NO: 4312234 - DNA, 25 bp, Homo sapien
ccatggcaagggcacgtgcgcttta

SEQ ID NO: 4312235 - DNA, 25 bp, Homo sapien
atggcaagggcacgtgcgctttacc

SEQ ID NO: 4312236 - DNA, 25 bp, Homo sapien
gccatggcaagggcacgtgcgcttt

SEQ ID NO: 4312237 - DNA, 25 bp, Homo sapien
catggcaagggcacgtgcgctttac

SEQ ID NO: 4312238 - DNA, 25 bp, Homo sapien
tgaacatatttaagggaggctagga

SEQ ID NO: 4312239 - DNA, 25 bp, Homo sapien
gttaaggaacacctgtacatatgtg

SEQ ID NO: 4312240 - DNA, 25 bp, Homo sapien
aaactgcactttcggtatccacata

SEQ ID NO: 4312241 - DNA, 25 bp, Homo sapien
caggctatgctgactcttggaggct

SEQ ID NO: 4312242 - DNA, 25 bp, Homo sapien
gcctcctgatggcatgcgccatcag

SEQ ID NO: 4312243 - DNA, 25 bp, Homo sapien
catcgtaagttaaggaacatcaaca

SEQ ID NO: 4312244 - DNA, 25 bp, Homo sapien
aactccatcgtaagttaaggaacat

SEQ ID NO: 4312245 - DNA, 25 bp, Homo sapien
gatggcatgcgccatcaggcccagc

SEQ ID NO: 4312246 - DNA, 25 bp, Homo sapien
cctttaccagtctgtcaccttgaca

SEQ ID NO: 4312247 - DNA, 25 bp, Homo sapien
gtgactgatataatcctgtgagtta

SEQ ID NO: 4312248 - DNA, 25 bp, Homo sapien
gatataatcctgtgagttaaaaaca

SEQ ID NO: 4312249 - DNA, 25 bp, Homo sapien
tcctttaccagtctgtcaccttgac

SEQ ID NO: 4312250 - DNA, 25 bp, Homo sapien
accttgcccaaatggcagcgtctgc

SEQ ID NO: 4312251 - DNA, 25 bp, Homo sapien
caaatatagcgtcaaaagtctgtaa

SEQ ID NO: 4312252 - DNA, 25 bp, Homo sapien
cacttgtttcctgcctgcgtgctgg

SEQ ID NO: 4312253 - DNA, 25 bp, Homo sapien
gtctgtaacagaaccaccttgccca

SEQ ID NO: 4312254 - DNA, 25 bp, Homo sapien
ttttgccgcgtctccctgtgtctct

SEQ ID NO: 4312255 - DNA, 25 bp, Homo sapien
ccctgtgtctctttaagcatatcac

SEQ ID NO: 4312256 - DNA, 25 bp, Homo sapien
ctttaagcatatcaccccctggtgg

SEQ ID NO: 4312257 - DNA, 25 bp, Homo sapien
tgtgtctctttaagcatatcacccc

SEQ ID NO: 4312258 - DNA, 25 bp, Homo sapien
ggaaaagcagctcccttacagtgca

SEQ ID NO: 4312259 - DNA, 25 bp, Homo sapien
tatccttggagagcctcaggtgagt

SEQ ID NO: 4312260 - DNA, 25 bp, Homo sapien
tacagtgcaggcattgaaggtatcc

SEQ ID NO: 4312261 - DNA, 25 bp, Homo sapien
aggaaggcttccgttctcgccagca

SEQ ID NO: 4312262 - DNA, 25 bp, Homo sapien
ttctcagacaccgaagacgaggcac

SEQ ID NO: 4312263 - DNA, 25 bp, Homo sapien
tgatggccagcagatgcctctggac

SEQ ID NO: 4312264 - DNA, 25 bp, Homo sapien
ggcacagtgacttggcttacaccag

SEQ ID NO: 4312265 - DNA, 25 bp, Homo sapien
gagacgtgaataaaccagtcccaat

SEQ ID NO: 4312266 - DNA, 25 bp, Homo sapien
gcatccctttgttaggcaccggcca

SEQ ID NO: 4312267 - DNA, 25 bp, Homo sapien
cacgggatagattcttcctctctca

SEQ ID NO: 4312268 - DNA, 25 bp, Homo sapien
tgtgtggagcaatggcatccctttg

SEQ ID NO: 4312269 - DNA, 25 bp, Homo sapien
gctatgaacttccagtccagccata

SEQ ID NO: 4312270 - DNA, 25 bp, Homo sapien
caacttgcacagagtgtgggaaatt

SEQ ID NO: 4312271 - DNA, 25 bp, Homo sapien
cacagcctcttaggaacttggtttc

SEQ ID NO: 4312272 - DNA, 25 bp, Homo sapien
ttcacagcctcttaggaacttggtt

SEQ ID NO: 4312273 - DNA, 25 bp, Homo sapien
cagtccctcagaacaacttgcacag

SEQ ID NO: 4312274 - DNA, 25 bp, Homo sapien
aacagtcgggcagtcctccgaccag

SEQ ID NO: 4312275 - DNA, 25 bp, Homo sapien
cagtcgggcagtcctccgaccaggg

SEQ ID NO: 4312276 - DNA, 25 bp, Homo sapien
tcgggcagtcctccgaccaggggga

SEQ ID NO: 4312277 - DNA, 25 bp, Homo sapien
ctaacagtcgggcagtcctccgacc

SEQ ID NO: 4312278 - DNA, 25 bp, Homo sapien
agccttgaaaggtattgaagcacag

SEQ ID NO: 4312279 - DNA, 25 bp, Homo sapien
gaaagccttgaaaggtattgaagca

SEQ ID NO: 4312280 - DNA, 25 bp, Homo sapien
gagagaaagccttgaaaggtattga

SEQ ID NO: 4312281 - DNA, 25 bp, Homo sapien
gagaaagccttgaaaggtattgaag

SEQ ID NO: 4312282 - DNA, 25 bp, Homo sapien
tgctgaggcgggcaaacaggctttc

SEQ ID NO: 4312283 - DNA, 25 bp, Homo sapien
gctgaggcgggcaaacaggctttca

SEQ ID NO: 4312284 - DNA, 25 bp, Homo sapien
atcttcattaggaatgctgaggcgg

SEQ ID NO: 4312285 - DNA, 25 bp, Homo sapien
ttaggaatgctgaggcgggcaaaca

SEQ ID NO: 4312286 - DNA, 25 bp, Homo sapien
aatccaggaaacacaatgtactcgt

SEQ ID NO: 4312287 - DNA, 25 bp, Homo sapien
aacatacagagtctgtaaatgactg

SEQ ID NO: 4312288 - DNA, 25 bp, Homo sapien
gatgccgatcaacatacagagtctg

SEQ ID NO: 4312289 - DNA, 25 bp, Homo sapien
tactcgtgaggatgccgatcaacat

SEQ ID NO: 4312290 - DNA, 25 bp, Homo sapien
taccaaatggcctgatcacaaagtc

SEQ ID NO: 4312291 - DNA, 25 bp, Homo sapien
agctaccaaatggcctgatcacaaa

SEQ ID NO: 4312292 - DNA, 25 bp, Homo sapien
atggcctgatcacaaagtccctgct

SEQ ID NO: 4312293 - DNA, 25 bp, Homo sapien
aatggcctgatcacaaagtccctgc

SEQ ID NO: 4312294 - DNA, 25 bp, Homo sapien
tcattggcctgggtgactttccaca

SEQ ID NO: 4312295 - DNA, 25 bp, Homo sapien
tctaagttcgcagatggcttcccag

SEQ ID NO: 4312296 - DNA, 25 bp, Homo sapien
ccggctgcagggaactaccatgatt

SEQ ID NO: 4312297 - DNA, 25 bp, Homo sapien
ttcagctggagtacactaaggtgcc

SEQ ID NO: 4312298 - DNA, 25 bp, Homo sapien
atcagaattgatctctagctcccag

SEQ ID NO: 4312299 - DNA, 25 bp, Homo sapien
tgttatgctaagtgtctaggacaga

SEQ ID NO: 4312300 - DNA, 25 bp, Homo sapien
tcttgagggcatgtccatctgtcct

SEQ ID NO: 4312301 - DNA, 25 bp, Homo sapien
tactcctttcatttaagcaggtgaa

SEQ ID NO: 4312302 - DNA, 25 bp, Homo sapien
gcatctgtgctacacatcgtcccag

SEQ ID NO: 4312303 - DNA, 25 bp, Homo sapien
tatactcaagcagctgatgatgtct

SEQ ID NO: 4312304 - DNA, 25 bp, Homo sapien
gtaaagcctgtctctatactcaagc

SEQ ID NO: 4312305 - DNA, 25 bp, Homo sapien
tattgagcatctgtgctacacatcg

SEQ ID NO: 4312306 - DNA, 25 bp, Homo sapien
tatgaaatggcgagagggtgacact

SEQ ID NO: 4312307 - DNA, 25 bp, Homo sapien
tgaggaaacgcagaaagagctctct

SEQ ID NO: 4312308 - DNA, 25 bp, Homo sapien
catgaatggcggtcttgagggcaaa

SEQ ID NO: 4312309 - DNA, 25 bp, Homo sapien
tgtggaaaaggcacaatctgagctg

SEQ ID NO: 4312310 - DNA, 25 bp, Homo sapien
tgtacaaggattcagttgctggcgg

SEQ ID NO: 4312311 - DNA, 25 bp, Homo sapien
tatctgcctgactctctgtacaagg

SEQ ID NO: 4312312 - DNA, 25 bp, Homo sapien
gagagcaacatgtcccagggaagct

SEQ ID NO: 4312313 - DNA, 25 bp, Homo sapien
tggatggaaaacagactgcttctgg

SEQ ID NO: 4312314 - DNA, 25 bp, Homo sapien
acactactatagctgtcccatctgg

SEQ ID NO: 4312315 - DNA, 25 bp, Homo sapien
ccaattgccgcaaccaagagcttgt

SEQ ID NO: 4312316 - DNA, 25 bp, Homo sapien
catctggggtcataatgacctccca

SEQ ID NO: 4312317 - DNA, 25 bp, Homo sapien
tccatagccgaacacacactactat

SEQ ID NO: 4312318 - DNA, 25 bp, Homo sapien
gtggccccagccttctgttaaccat

SEQ ID NO: 4312319 - DNA, 25 bp, Homo sapien
agatgtggccccagccttctgttaa

SEQ ID NO: 4312320 - DNA, 25 bp, Homo sapien
cggcggaactgagatgtggccccag

SEQ ID NO: 4312321 - DNA, 25 bp, Homo sapien
gatgtggccccagccttctgttaac

SEQ ID NO: 4312322 - DNA, 25 bp, Homo sapien
tcgggcactggatgctctgatttaa

SEQ ID NO: 4312323 - DNA, 25 bp, Homo sapien
tgatttaagtcccaacggctgtagt

SEQ ID NO: 4312324 - DNA, 25 bp, Homo sapien
taatattcatattcgggcactggat

SEQ ID NO: 4312325 - DNA, 25 bp, Homo sapien
tcaaactcggcgaggaactccatgg

SEQ ID NO: 4312326 - DNA, 25 bp, Homo sapien
catgatgaggacttgtatattgaac

SEQ ID NO: 4312327 - DNA, 25 bp, Homo sapien
gatttctgaatcatgatgaggactt

SEQ ID NO: 4312328 - DNA, 25 bp, Homo sapien
aatccacagtgcgagcaaatcctcc

SEQ ID NO: 4312329 - DNA, 25 bp, Homo sapien
tcctccgtggatgcatattgatttc

SEQ ID NO: 4312330 - DNA, 25 bp, Homo sapien
ccttaggaggcactggatggactgt

SEQ ID NO: 4312331 - DNA, 25 bp, Homo sapien
cactggatggactgtgccttttcct

SEQ ID NO: 4312332 - DNA, 25 bp, Homo sapien
aggacgatgatgagaagggtcctta

SEQ ID NO: 4312333 - DNA, 25 bp, Homo sapien
cttttcctttactctcagttctctt

SEQ ID NO: 4312334 - DNA, 25 bp, Homo sapien
caccatgagtaatgaccagagtatt

SEQ ID NO: 4312335 - DNA, 25 bp, Homo sapien
taccctaaccttctcaggattacag

SEQ ID NO: 4312336 - DNA, 25 bp, Homo sapien
tatttcctggagtattgaaccctta

SEQ ID NO: 4312337 - DNA, 25 bp, Homo sapien
tacaaggtaagaactcttgccaaca

SEQ ID NO: 4312338 - DNA, 25 bp, Homo sapien
gcccagcgtggtataaaatttagcc

SEQ ID NO: 4312339 - DNA, 25 bp, Homo sapien
cctaaacaaagtcccaagtgagcca

SEQ ID NO: 4312340 - DNA, 25 bp, Homo sapien
tatctgaccctgatatcacaggagc

SEQ ID NO: 4312341 - DNA, 25 bp, Homo sapien
ttcctggaccaacgttcaagactag

SEQ ID NO: 4312342 - DNA, 25 bp, Homo sapien
ctcttcctcggtatctggcctggtc

SEQ ID NO: 4312343 - DNA, 25 bp, Homo sapien
tcctcggtatctggcctggtcctgt

SEQ ID NO: 4312344 - DNA, 25 bp, Homo sapien
tcttcctcggtatctggcctggtcc

SEQ ID NO: 4312345 - DNA, 25 bp, Homo sapien
ctcggtatctggcctggtcctgttt

SEQ ID NO: 4312346 - DNA, 25 bp, Homo sapien
taaataaacaaacaccggagagatc

SEQ ID NO: 4312347 - DNA, 25 bp, Homo sapien
cgaatgaatcagtagagaccagcac

SEQ ID NO: 4312348 - DNA, 25 bp, Homo sapien
tatgcctgaaaagaaccattagcca

SEQ ID NO: 4312349 - DNA, 25 bp, Homo sapien
tagtggaagttgatctcagaacgaa

SEQ ID NO: 4312350 - DNA, 25 bp, Homo sapien
gcctttcaattgactgaattttgca

SEQ ID NO: 4312351 - DNA, 25 bp, Homo sapien
tctggcctttcaattgactgaattt

SEQ ID NO: 4312352 - DNA, 25 bp, Homo sapien
ttgctgaatgactttggaatatgtc

SEQ ID NO: 4312353 - DNA, 25 bp, Homo sapien
aattctggcctttcaattgactgaa

SEQ ID NO: 4312354 - DNA, 25 bp, Homo sapien
agcctgctgtaattggcagttccat

SEQ ID NO: 4312355 - DNA, 25 bp, Homo sapien
ggagcctgctgtaattggcagttcc

SEQ ID NO: 4312356 - DNA, 25 bp, Homo sapien
caggagcctgctgtaattggcagtt

SEQ ID NO: 4312357 - DNA, 25 bp, Homo sapien
gagcctgctgtaattggcagttcca

SEQ ID NO: 4312358 - DNA, 25 bp, Homo sapien
attgttttgatgtggatccaaaaag

SEQ ID NO: 4312359 - DNA, 25 bp, Homo sapien
tcccttaacacgcagaaactctaga

SEQ ID NO: 4312360 - DNA, 25 bp, Homo sapien
tgcttaaaaccatacacccccaatg

SEQ ID NO: 4312361 - DNA, 25 bp, Homo sapien
tgtagaaagggtcaaattgttttga

SEQ ID NO: 4312362 - DNA, 25 bp, Homo sapien
catccaagtggtgcctgccatatgc

SEQ ID NO: 4312363 - DNA, 25 bp, Homo sapien
ggtttcacaaggaacgtggccctga

SEQ ID NO: 4312364 - DNA, 25 bp, Homo sapien
tatgactgtaaagcaaaccaagtgt

SEQ ID NO: 4312365 - DNA, 25 bp, Homo sapien
aggaacgccaaagcttgccggcaaa

SEQ ID NO: 4312366 - DNA, 25 bp, Homo sapien
gaaatgcgggtagacagggataagt

SEQ ID NO: 4312367 - DNA, 25 bp, Homo sapien
cgggtagacagggataagttagtgg

SEQ ID NO: 4312368 - DNA, 25 bp, Homo sapien
ctgaaatgcgggtagacagggataa

SEQ ID NO: 4312369 - DNA, 25 bp, Homo sapien
aatgcgggtagacagggataagtta

SEQ ID NO: 4312370 - DNA, 25 bp, Homo sapien
tttaaataggcctttgggatctcac

SEQ ID NO: 4312371 - DNA, 25 bp, Homo sapien
cttcagactcttttaaataggcctt

SEQ ID NO: 4312372 - DNA, 25 bp, Homo sapien
ttttaaataggcctttgggatctca

SEQ ID NO: 4312373 - DNA, 25 bp, Homo sapien
gaatcttcagactcttttaaatagg

SEQ ID NO: 4312374 - DNA, 25 bp, Homo sapien
cagggacacgttgctgggtgttcct

SEQ ID NO: 4312375 - DNA, 25 bp, Homo sapien
agggacacgttgctgggtgttcctt

SEQ ID NO: 4312376 - DNA, 25 bp, Homo sapien
catttatcaaactcggaccacagca

SEQ ID NO: 4312377 - DNA, 25 bp, Homo sapien
aaattgctgtaacccgtatatgccc

SEQ ID NO: 4312378 - DNA, 25 bp, Homo sapien
tatgccctcggtctgaagcttctaa

SEQ ID NO: 4312379 - DNA, 25 bp, Homo sapien
tctggccctcaacacatatggctga

SEQ ID NO: 4312380 - DNA, 25 bp, Homo sapien
caaatgctatggttgtggcaagggt

SEQ ID NO: 4312381 - DNA, 25 bp, Homo sapien
gcagcctgcaggtccgcagtttcat

SEQ ID NO: 4312382 - DNA, 25 bp, Homo sapien
cgatctaagcttggtttatgttgag

SEQ ID NO: 4312383 - DNA, 25 bp, Homo sapien
gttgagagtactgagcaaatgctat

SEQ ID NO: 4312384 - DNA, 25 bp, Homo sapien
cagcaggagccccatccatttcagg

SEQ ID NO: 4312385 - DNA, 25 bp, Homo sapien
cccatccatttcaggccctgggaaa

SEQ ID NO: 4312386 - DNA, 25 bp, Homo sapien
gccccatccatttcaggccctggga

SEQ ID NO: 4312387 - DNA, 25 bp, Homo sapien
aggagccccatccatttcaggccct

SEQ ID NO: 4312388 - DNA, 25 bp, Homo sapien
agcaagctgtgaaatgaaccaaggg

SEQ ID NO: 4312389 - DNA, 25 bp, Homo sapien
gaaaggagcaagctgtgaaatgaac

SEQ ID NO: 4312390 - DNA, 25 bp, Homo sapien
cataaggtattaagaaaggagcaag

SEQ ID NO: 4312391 - DNA, 25 bp, Homo sapien
gaaaatgggccataaggtattaaga

SEQ ID NO: 4312392 - DNA, 25 bp, Homo sapien
ctggctcatctgaggcttttgttgt

SEQ ID NO: 4312393 - DNA, 25 bp, Homo sapien
aatctctgacagtcttcaactccat

SEQ ID NO: 4312394 - DNA, 25 bp, Homo sapien
gctcatctgaggcttttgttgttat

SEQ ID NO: 4312395 - DNA, 25 bp, Homo sapien
ttaaatctctgacagtcttcaactc

SEQ ID NO: 4312396 - DNA, 25 bp, Homo sapien
gaaggtaagtggataaagctgacag

SEQ ID NO: 4312397 - DNA, 25 bp, Homo sapien
tcttcatcagaggaaggtaagtgga

SEQ ID NO: 4312398 - DNA, 25 bp, Homo sapien
tcagaggaaggtaagtggataaagc

SEQ ID NO: 4312399 - DNA, 25 bp, Homo sapien
catcagaggaaggtaagtggataaa

SEQ ID NO: 4312400 - DNA, 25 bp, Homo sapien
tgctctttgccagaagcggggcctt

SEQ ID NO: 4312401 - DNA, 25 bp, Homo sapien
ttcttgctctttgccagaagcgggg

SEQ ID NO: 4312402 - DNA, 25 bp, Homo sapien
tctttgccagaagcggggcctttgg

SEQ ID NO: 4312403 - DNA, 25 bp, Homo sapien
cttgctctttgccagaagcggggcc

SEQ ID NO: 4312404 - DNA, 25 bp, Homo sapien
acccaaaacggtgatggttcagaag

SEQ ID NO: 4312405 - DNA, 25 bp, Homo sapien
gcacccaaaacggtgatggttcaga

SEQ ID NO: 4312406 - DNA, 25 bp, Homo sapien
ctcacaggcacccaaaacggtgatg

SEQ ID NO: 4312407 - DNA, 25 bp, Homo sapien
caggcacccaaaacggtgatggttc

SEQ ID NO: 4312408 - DNA, 25 bp, Homo sapien
tatttgactgaaaaagcctcccagc

SEQ ID NO: 4312409 - DNA, 25 bp, Homo sapien
tctacatcacggcaaatgtgggcaa

SEQ ID NO: 4312410 - DNA, 25 bp, Homo sapien
taagtgcaggcacagcagtccttca

SEQ ID NO: 4312411 - DNA, 25 bp, Homo sapien
ttcaagtgacctagaccagctggct

SEQ ID NO: 4312412 - DNA, 25 bp, Homo sapien
caagctcataagtgcgaccctctgg

SEQ ID NO: 4312413 - DNA, 25 bp, Homo sapien
aggaagaattcttgcagcccatgtc

SEQ ID NO: 4312414 - DNA, 25 bp, Homo sapien
tgcataagcccttgtaccacgcaag

SEQ ID NO: 4312415 - DNA, 25 bp, Homo sapien
ttcagggagtgtactaagattagcc

SEQ ID NO: 4312416 - DNA, 25 bp, Homo sapien
atgagcgaccatgaagccagaaggt

SEQ ID NO: 4312417 - DNA, 25 bp, Homo sapien
cactgtgtatggctaatatttaact

SEQ ID NO: 4312418 - DNA, 25 bp, Homo sapien
cagaggtgcagggttcacacgtctc

SEQ ID NO: 4312419 - DNA, 25 bp, Homo sapien
gccagaaggttcttgattggaccag

SEQ ID NO: 4312420 - DNA, 25 bp, Homo sapien
tgacctcacgtacatggagcacggt

SEQ ID NO: 4312421 - DNA, 25 bp, Homo sapien
ggagaattccctagcacctgactga

SEQ ID NO: 4312422 - DNA, 25 bp, Homo sapien
tctttcaagcccagatggagcctca

SEQ ID NO: 4312423 - DNA, 25 bp, Homo sapien
agcacggtgaccatgaactgtaaca

SEQ ID NO: 4312424 - DNA, 25 bp, Homo sapien
taacttacggaagagtatttgccaa

SEQ ID NO: 4312425 - DNA, 25 bp, Homo sapien
taaagctactcctgaaaagttgtgt

SEQ ID NO: 4312426 - DNA, 25 bp, Homo sapien
gaccaatcaacgttggatgaccaga

SEQ ID NO: 4312427 - DNA, 25 bp, Homo sapien
ttcaccatgtttgagaagaacgtgc

SEQ ID NO: 4312428 - DNA, 25 bp, Homo sapien
tctgccacatttcactttgggccct

SEQ ID NO: 4312429 - DNA, 25 bp, Homo sapien
ccatggctccactctatataagtgt

SEQ ID NO: 4312430 - DNA, 25 bp, Homo sapien
caggactgctgaatgctaatcacca

SEQ ID NO: 4312431 - DNA, 25 bp, Homo sapien
tctgtcactaagattgaacttggcc

SEQ ID NO: 4312432 - DNA, 25 bp, Homo sapien
ggagaaccacctgtgcaaatacggg

SEQ ID NO: 4312433 - DNA, 25 bp, Homo sapien
caattcggccctgacatgcatctga

SEQ ID NO: 4312434 - DNA, 25 bp, Homo sapien
cataaaggcgccattcaggaagaat

SEQ ID NO: 4312435 - DNA, 25 bp, Homo sapien
gacaagcagggtttttatgggacca

SEQ ID NO: 4312436 - DNA, 25 bp, Homo sapien
agcttcgtgcataaactcagtcctg

SEQ ID NO: 4312437 - DNA, 25 bp, Homo sapien
gagcttcgtgcataaactcagtcct

SEQ ID NO: 4312438 - DNA, 25 bp, Homo sapien
gcttcgtgcataaactcagtcctgc

SEQ ID NO: 4312439 - DNA, 25 bp, Homo sapien
cagagcttcgtgcataaactcagtc

SEQ ID NO: 4312440 - DNA, 25 bp, Homo sapien
gctctggcattagcagggaagctgc

SEQ ID NO: 4312441 - DNA, 25 bp, Homo sapien
tatttacatgaacggcttccaaccg

SEQ ID NO: 4312442 - DNA, 25 bp, Homo sapien
gctgacagttaaatcacaacggccc

SEQ ID NO: 4312443 - DNA, 25 bp, Homo sapien
tgcagaagttaacgcgctcctttgg

SEQ ID NO: 4312444 - DNA, 25 bp, Homo sapien
ccaaagattgctacgagtgagctgc

SEQ ID NO: 4312445 - DNA, 25 bp, Homo sapien
cagcacactgctcccggtaaatgaa

SEQ ID NO: 4312446 - DNA, 25 bp, Homo sapien
gacaaacccttctggaggcttagaa

SEQ ID NO: 4312447 - DNA, 25 bp, Homo sapien
gatagagtcatactgaaggccttgt

SEQ ID NO: 4312448 - DNA, 25 bp, Homo sapien
gcccaatcagcccttcttaaacacc

SEQ ID NO: 4312449 - DNA, 25 bp, Homo sapien
cccaatcagcccttcttaaacacct

SEQ ID NO: 4312450 - DNA, 25 bp, Homo sapien
cggcccaatcagcccttcttaaaca

SEQ ID NO: 4312451 - DNA, 25 bp, Homo sapien
ttcctataaggaaatgacctcatcc

SEQ ID NO: 4312452 - DNA, 25 bp, Homo sapien
catatgaaaatcacagatccgattc

SEQ ID NO: 4312453 - DNA, 25 bp, Homo sapien
taaaagtgaacataatcctagttta

SEQ ID NO: 4312454 - DNA, 25 bp, Homo sapien
gaaacataccacagaagggcaggag

SEQ ID NO: 4312455 - DNA, 25 bp, Homo sapien
ttcagtgtgtctcaggaggtgaaac

SEQ ID NO: 4312456 - DNA, 25 bp, Homo sapien
tcagctctgctgtgcacggactacg

SEQ ID NO: 4312457 - DNA, 25 bp, Homo sapien
gacttctgttttctaagccccagcc

SEQ ID NO: 4312458 - DNA, 25 bp, Homo sapien
cggactacgtgatctcggcaagtta

SEQ ID NO: 4312459 - DNA, 25 bp, Homo sapien
ggaaagcacttaatacgctctctgg

SEQ ID NO: 4312460 - DNA, 25 bp, Homo sapien
tataggtgtgttactgggtgttcca

SEQ ID NO: 4312461 - DNA, 25 bp, Homo sapien
tatcacttagtaccaccggatgtct

SEQ ID NO: 4312462 - DNA, 25 bp, Homo sapien
tcttcagtgaggttagcctgaccac

SEQ ID NO: 4312463 - DNA, 25 bp, Homo sapien
attttgtaacaagagtggcctaggg

SEQ ID NO: 4312464 - DNA, 25 bp, Homo sapien
tcttgcagagaacacgcatgcacta

SEQ ID NO: 4312465 - DNA, 25 bp, Homo sapien
caggcctgggccattacctgaagat

SEQ ID NO: 4312466 - DNA, 25 bp, Homo sapien
gagtgaaccgttgtgcctggtacaa

SEQ ID NO: 4312467 - DNA, 25 bp, Homo sapien
cctgaagattaggacacccaatgat

SEQ ID NO: 4312468 - DNA, 25 bp, Homo sapien
taggcagtcacctcacatctgggtc

SEQ ID NO: 4312469 - DNA, 25 bp, Homo sapien
gcaagtccgcatgagaccagcagaa

SEQ ID NO: 4312470 - DNA, 25 bp, Homo sapien
tgagaaacaatgaatcctgggtgct

SEQ ID NO: 4312471 - DNA, 25 bp, Homo sapien
gatttcctcagtgcaaacctgggca

SEQ ID NO: 4312472 - DNA, 25 bp, Homo sapien
tgtggtgccgagatattcagcttta

SEQ ID NO: 4312473 - DNA, 25 bp, Homo sapien
taacatatccgtcacttcatatgct

SEQ ID NO: 4312474 - DNA, 25 bp, Homo sapien
ctgaaaagactgagctgatgagatg

SEQ ID NO: 4312475 - DNA, 25 bp, Homo sapien
cattgactaccctgaatttccacta

SEQ ID NO: 4312476 - DNA, 25 bp, Homo sapien
cattaaagcctccataggtgataat

SEQ ID NO: 4312477 - DNA, 25 bp, Homo sapien
tggtgctgaattcaagtctgcttta

SEQ ID NO: 4312478 - DNA, 25 bp, Homo sapien
ggtgctgaattcaagtctgctttat

SEQ ID NO: 4312479 - DNA, 25 bp, Homo sapien
agcctccataggtgataataacagc

SEQ ID NO: 4312480 - DNA, 25 bp, Homo sapien
gcaaatgtcacggtctgcactatga

SEQ ID NO: 4312481 - DNA, 25 bp, Homo sapien
ggcaaatgtcacggtctgcactatg

SEQ ID NO: 4312482 - DNA, 25 bp, Homo sapien
caaatgtcacggtctgcactatgag

SEQ ID NO: 4312483 - DNA, 25 bp, Homo sapien
gtctgcactatgaggaattgccaat

SEQ ID NO: 4312484 - DNA, 25 bp, Homo sapien
aacagcccaagtaaggaatactaag

SEQ ID NO: 4312485 - DNA, 25 bp, Homo sapien
tactaagctcttgaatggctttcca

SEQ ID NO: 4312486 - DNA, 25 bp, Homo sapien
gcccaagtaaggaatactaagctct

SEQ ID NO: 4312487 - DNA, 25 bp, Homo sapien
ccaagtaaggaatactaagctcttg

SEQ ID NO: 4312488 - DNA, 25 bp, Homo sapien
tccaagagatgctgtgagcccaaac

SEQ ID NO: 4312489 - DNA, 25 bp, Homo sapien
agagatgctgtgagcccaaactcac

SEQ ID NO: 4312490 - DNA, 25 bp, Homo sapien
gctggaaataactacatagagtcaa

SEQ ID NO: 4312491 - DNA, 25 bp, Homo sapien
aataactacatagagtcaagtggct

SEQ ID NO: 4312492 - DNA, 25 bp, Homo sapien
taagtgggattagtgcctacttcca

SEQ ID NO: 4312493 - DNA, 25 bp, Homo sapien
aagtgggattagtgcctacttccat

SEQ ID NO: 4312494 - DNA, 25 bp, Homo sapien
gggtgtaagtgggattagtgcctac

SEQ ID NO: 4312495 - DNA, 25 bp, Homo sapien
tgtaagtgggattagtgcctacttc

SEQ ID NO: 4312496 - DNA, 25 bp, Homo sapien
cacaaacctgtagggagaatcctaa

SEQ ID NO: 4312497 - DNA, 25 bp, Homo sapien
gaagctctcggaagaaacacctttg

SEQ ID NO: 4312498 - DNA, 25 bp, Homo sapien
gaagaaaatttgagtgtgaggccct

SEQ ID NO: 4312499 - DNA, 25 bp, Homo sapien
gccatgtcacttgggacgaggaaga

SEQ ID NO: 4312500 - DNA, 25 bp, Homo sapien
tcagacacagaaatgtgaatgagca

SEQ ID NO: 4312501 - DNA, 25 bp, Homo sapien
tgttcggtcccgctccctgggtcag

SEQ ID NO: 4312502 - DNA, 25 bp, Homo sapien
agaaatgtgaatgagcaaactcccc

SEQ ID NO: 4312503 - DNA, 25 bp, Homo sapien
atgtgaatgagcaaactccccttcc

SEQ ID NO: 4312504 - DNA, 25 bp, Homo sapien
cagaatagaaaagcctaaatcccca

SEQ ID NO: 4312505 - DNA, 25 bp, Homo sapien
gtgctgtgtcaacacttactaggaa

SEQ ID NO: 4312506 - DNA, 25 bp, Homo sapien
taggaattcatgtgagcttcctgaa

SEQ ID NO: 4312507 - DNA, 25 bp, Homo sapien
tgtcaacacttactaggaaattcat

SEQ ID NO: 4312508 - DNA, 25 bp, Homo sapien
ggagccatgtacctactttgcagag

SEQ ID NO: 4312509 - DNA, 25 bp, Homo sapien
gcccaggctcataaccacaaggtaa

SEQ ID NO: 4312510 - DNA, 25 bp, Homo sapien
aatgtgtctgataatcctgggagcc

SEQ ID NO: 4312511 - DNA, 25 bp, Homo sapien
gaaagctaagcagacccgtagaagg

SEQ ID NO: 4312512 - DNA, 25 bp, Homo sapien
tggatacttccacatcgagcagaca

SEQ ID NO: 4312513 - DNA, 25 bp, Homo sapien
aacatggacatctatccttcctggg

SEQ ID NO: 4312514 - DNA, 25 bp, Homo sapien
taaagtaatagagttgacccagtgg

SEQ ID NO: 4312515 - DNA, 25 bp, Homo sapien
taaggatgaccacaaacaacttgga

SEQ ID NO: 4312516 - DNA, 25 bp, Homo sapien
gatccaaagggctatgtctctaaac

SEQ ID NO: 4312517 - DNA, 25 bp, Homo sapien
cagcctttgagatacctggagatcc

SEQ ID NO: 4312518 - DNA, 25 bp, Homo sapien
gagtcgctctcctacaaaactgtgg

SEQ ID NO: 4312519 - DNA, 25 bp, Homo sapien
tcccctaaaaaagcaggtggcttga

SEQ ID NO: 4312520 - DNA, 25 bp, Homo sapien
caggtgaaccaggagaataagcagg

SEQ ID NO: 4312521 - DNA, 25 bp, Homo sapien
catgtcacgttctcttaagccccga

SEQ ID NO: 4312522 - DNA, 25 bp, Homo sapien
gaggagcccgaagaatgtcgtatga

SEQ ID NO: 4312523 - DNA, 25 bp, Homo sapien
tgccgcatacctgtacaagagtaca

SEQ ID NO: 4312524 - DNA, 25 bp, Homo sapien
cataaatcgtgcctttgtgacaaaa

SEQ ID NO: 4312525 - DNA, 25 bp, Homo sapien
tcaaaaacagatagcgtcaaccatt

SEQ ID NO: 4312526 - DNA, 25 bp, Homo sapien
gcagaagacacattcgcagcaaatg

SEQ ID NO: 4312527 - DNA, 25 bp, Homo sapien
ttggttgaagtcagctccagagggc

SEQ ID NO: 4312528 - DNA, 25 bp, Homo sapien
agagttgacctctaagacggctgct

SEQ ID NO: 4312529 - DNA, 25 bp, Homo sapien
tgtgtcccgagcaccgttttgaaaa

SEQ ID NO: 4312530 - DNA, 25 bp, Homo sapien
acggctgctcagaaccggaagagca

SEQ ID NO: 4312531 - DNA, 25 bp, Homo sapien
agagcctggagacctctacctttat

SEQ ID NO: 4312532 - DNA, 25 bp, Homo sapien
gaaatctaatcaggtttgtgacaac

SEQ ID NO: 4312533 - DNA, 25 bp, Homo sapien
cttgagcaagggacagtatgatact

SEQ ID NO: 4312534 - DNA, 25 bp, Homo sapien
gaacatggcattgggtttagaaaaa

SEQ ID NO: 4312535 - DNA, 25 bp, Homo sapien
ggcaattttgtacttaacttgagca

SEQ ID NO: 4312536 - DNA, 25 bp, Homo sapien
ggcctctctgaggtcctacagtgac

SEQ ID NO: 4312537 - DNA, 25 bp, Homo sapien
ctctctgaggtcctacagtgaccct

SEQ ID NO: 4312538 - DNA, 25 bp, Homo sapien
ctctgaggtcctacagtgaccctct

SEQ ID NO: 4312539 - DNA, 25 bp, Homo sapien
gcctctctgaggtcctacagtgacc

SEQ ID NO: 4312540 - DNA, 25 bp, Homo sapien
tcccaggtccacgcgattctcctgc

SEQ ID NO: 4312541 - DNA, 25 bp, Homo sapien
atctcagctcactacaagctccacc

SEQ ID NO: 4312542 - DNA, 25 bp, Homo sapien
gctggagtgcgagtgcagtggcacg

SEQ ID NO: 4312543 - DNA, 25 bp, Homo sapien
aggctggagtgcgagtgcagtggca

SEQ ID NO: 4312544 - DNA, 25 bp, Homo sapien
gaacatttcagctaatgaagtggaa

SEQ ID NO: 4312545 - DNA, 25 bp, Homo sapien
tgtgaaaaattacgcaggcacttgg

SEQ ID NO: 4312546 - DNA, 25 bp, Homo sapien
tctccattcttgaactgtgtgaaaa

SEQ ID NO: 4312547 - DNA, 25 bp, Homo sapien
taaacacagttcctcttagccggtc

SEQ ID NO: 4312548 - DNA, 25 bp, Homo sapien
tgagagaagtaagaagcccgccact

SEQ ID NO: 4312549 - DNA, 25 bp, Homo sapien
taacagaggttcacgaatggtccca

SEQ ID NO: 4312550 - DNA, 25 bp, Homo sapien
gaaggcctttcacatccccaagaag

SEQ ID NO: 4312551 - DNA, 25 bp, Homo sapien
tattttgtaaatcacggcaccactg

SEQ ID NO: 4312552 - DNA, 25 bp, Homo sapien
cctggtgtgtgctgttcctctctgt

SEQ ID NO: 4312553 - DNA, 25 bp, Homo sapien
ggtggtttgcggcacctgttgacct

SEQ ID NO: 4312554 - DNA, 25 bp, Homo sapien
ttgcggcacctgttgacctgtcctc

SEQ ID NO: 4312555 - DNA, 25 bp, Homo sapien
tcaatattcaactcctactcatgag

SEQ ID NO: 4312556 - DNA, 25 bp, Homo sapien
gatatatcagaaggactgacttcct

SEQ ID NO: 4312557 - DNA, 25 bp, Homo sapien
cctgtgatatatcagaaggactgac

SEQ ID NO: 4312558 - DNA, 25 bp, Homo sapien
ctgtgatatatcagaaggactgact

SEQ ID NO: 4312559 - DNA, 25 bp, Homo sapien
tgtgatatatcagaaggactgactt

SEQ ID NO: 4312560 - DNA, 25 bp, Homo sapien
tttaaaagatcacctagaactggga

SEQ ID NO: 4312561 - DNA, 25 bp, Homo sapien
gccacaaatggctcttattactgaa

SEQ ID NO: 4312562 - DNA, 25 bp, Homo sapien
gcaacgaacacttgttatgggctta

SEQ ID NO: 4312563 - DNA, 25 bp, Homo sapien
tgtatttgtcacaagcaacgtgctt

SEQ ID NO: 4312564 - DNA, 25 bp, Homo sapien
tggcataattgcaaatcagtgcttg

SEQ ID NO: 4312565 - DNA, 25 bp, Homo sapien
agctgccattctgcccttgcgtctt

SEQ ID NO: 4312566 - DNA, 25 bp, Homo sapien
tttccgcctgttcatagcaccctgg

SEQ ID NO: 4312567 - DNA, 25 bp, Homo sapien
tgcgtcttcctatttgcaattacca

SEQ ID NO: 4312568 - DNA, 25 bp, Homo sapien
tctttttgtgttacagcaacagatg

SEQ ID NO: 4312569 - DNA, 25 bp, Homo sapien
tttttgtgttacagcaacagatgaa

SEQ ID NO: 4312570 - DNA, 25 bp, Homo sapien
ctttttgtgttacagcaacagatga

SEQ ID NO: 4312571 - DNA, 25 bp, Homo sapien
ctgtgttagagtcttctgttgctgt

SEQ ID NO: 4312572 - DNA, 25 bp, Homo sapien
gttagagtcttctgttgctgtagta

SEQ ID NO: 4312573 - DNA, 25 bp, Homo sapien
tgtgttagagtcttctgttgctgta

SEQ ID NO: 4312574 - DNA, 25 bp, Homo sapien
gtgttagagtcttctgttgctgtag

SEQ ID NO: 4312575 - DNA, 25 bp, Homo sapien
agcaatgaaattccattacttagag

SEQ ID NO: 4312576 - DNA, 25 bp, Homo sapien
tacttagagaaactggctgttccac

SEQ ID NO: 4312577 - DNA, 25 bp, Homo sapien
tggatacaaagattccttcactgga

SEQ ID NO: 4312578 - DNA, 25 bp, Homo sapien
caactatcttggatacaaagattcc

SEQ ID NO: 4312579 - DNA, 25 bp, Homo sapien
cactgtcaactatcttggatacaaa

SEQ ID NO: 4312580 - DNA, 25 bp, Homo sapien
aggcccactgtcaactatcttggat

SEQ ID NO: 4312581 - DNA, 25 bp, Homo sapien
gacaagagtcagacttttggtttct

SEQ ID NO: 4312582 - DNA, 25 bp, Homo sapien
agccggagtcccgatgcaggacaag

SEQ ID NO: 4312583 - DNA, 25 bp, Homo sapien
ggagtcccgatgcaggacaagagtc

SEQ ID NO: 4312584 - DNA, 25 bp, Homo sapien
actcggccggccaccaataatattg

SEQ ID NO: 4312585 - DNA, 25 bp, Homo sapien
ggaatctcagattggcgcaacatca

SEQ ID NO: 4312586 - DNA, 25 bp, Homo sapien
gaaatgtgttttgggcattgtctta

SEQ ID NO: 4312587 - DNA, 25 bp, Homo sapien
tgtcccttgagagagattctctgag

SEQ ID NO: 4312588 - DNA, 25 bp, Homo sapien
tcagggctggacttaagatgtcttc

SEQ ID NO: 4312589 - DNA, 25 bp, Homo sapien
ctataaaggaccacagtgttccacc

SEQ ID NO: 4312590 - DNA, 25 bp, Homo sapien
agcaaggatgttcccgggaagctcg

SEQ ID NO: 4312591 - DNA, 25 bp, Homo sapien
gaggaagcaaggatgttcccgggaa

SEQ ID NO: 4312592 - DNA, 25 bp, Homo sapien
ggaagcaaggatgttcccgggaagc

SEQ ID NO: 4312593 - DNA, 25 bp, Homo sapien
gaagcaaggatgttcccgggaagct

SEQ ID NO: 4312594 - DNA, 25 bp, Homo sapien
cctgggtccccagggatcctggctg

SEQ ID NO: 4312595 - DNA, 25 bp, Homo sapien
ctggctggaggtcggggcgggcagc

SEQ ID NO: 4312596 - DNA, 25 bp, Homo sapien
gatcctggctggaggtcggggcggg

SEQ ID NO: 4312597 - DNA, 25 bp, Homo sapien
ccagggatcctggctggaggtcggg

SEQ ID NO: 4312598 - DNA, 25 bp, Homo sapien
ggcgcgcgctgtattcggtgaattt

SEQ ID NO: 4312599 - DNA, 25 bp, Homo sapien
ttcttgagcgccttgtgcagcgcgc

SEQ ID NO: 4312600 - DNA, 25 bp, Homo sapien
tgctcgccgtgcgtcaagggtagcc

SEQ ID NO: 4312601 - DNA, 25 bp, Homo sapien
tttcttctggtagcgcagcgcggtc

SEQ ID NO: 4312602 - DNA, 25 bp, Homo sapien
gcgcacttcaggtccgggtccacgt

SEQ ID NO: 4312603 - DNA, 25 bp, Homo sapien
tccagcttgaggataaggcgcttga

SEQ ID NO: 4312604 - DNA, 25 bp, Homo sapien
caggacgtggttgagctctttggcc

SEQ ID NO: 4312605 - DNA, 25 bp, Homo sapien
ggaccttgtggcacagcgcgcactt

SEQ ID NO: 4312606 - DNA, 25 bp, Homo sapien
ctccccacgaggcggcccagacagg

SEQ ID NO: 4312607 - DNA, 25 bp, Homo sapien
cggcccagacaggccggctacgccg

SEQ ID NO: 4312608 - DNA, 25 bp, Homo sapien
ccagacaggccggctacgccgcccg

SEQ ID NO: 4312609 - DNA, 25 bp, Homo sapien
tccccacgaggcggcccagacaggc

SEQ ID NO: 4312610 - DNA, 25 bp, Homo sapien
aagtggaatccagaaagatgaaagg

SEQ ID NO: 4312611 - DNA, 25 bp, Homo sapien
gaagtggaatccagaaagatgaaag

SEQ ID NO: 4312612 - DNA, 25 bp, Homo sapien
agaagtggaatccagaaagatgaaa

SEQ ID NO: 4312613 - DNA, 25 bp, Homo sapien
tagaagtggaatccagaaagatgaa

SEQ ID NO: 4312614 - DNA, 25 bp, Homo sapien
tagacagattgtgaagccacatcag

SEQ ID NO: 4312615 - DNA, 25 bp, Homo sapien
cttggaataagaagacggcatagac

SEQ ID NO: 4312616 - DNA, 25 bp, Homo sapien
gctagaattgttttttggtcatgga

SEQ ID NO: 4312617 - DNA, 25 bp, Homo sapien
gaaggtgtgcataacagctgaaaga

SEQ ID NO: 4312618 - DNA, 25 bp, Homo sapien
tcgttaacactcagacatgccaccg

SEQ ID NO: 4312619 - DNA, 25 bp, Homo sapien
acactcagacatgccaccgctggga

SEQ ID NO: 4312620 - DNA, 25 bp, Homo sapien
ttggccctcaaagccccagcctgct

SEQ ID NO: 4312621 - DNA, 25 bp, Homo sapien
gggctaaaggcttgaggaactccaa

SEQ ID NO: 4312622 - DNA, 25 bp, Homo sapien
agggatggcatttcccaccttgatt

SEQ ID NO: 4312623 - DNA, 25 bp, Homo sapien
gccatggctgccgtggctgtgctga

SEQ ID NO: 4312624 - DNA, 25 bp, Homo sapien
catggctgccgtggctgtgctgaaa

SEQ ID NO: 4312625 - DNA, 25 bp, Homo sapien
gatggcatttcccaccttgattggg

SEQ ID NO: 4312626 - DNA, 25 bp, Homo sapien
ccctccttcacgtagctgtcttggt

SEQ ID NO: 4312627 - DNA, 25 bp, Homo sapien
acccaccctccttcacgtagctgtc

SEQ ID NO: 4312628 - DNA, 25 bp, Homo sapien
ttcacgtagctgtcttggtgccact

SEQ ID NO: 4312629 - DNA, 25 bp, Homo sapien
tcacgtagctgtcttggtgccactg

SEQ ID NO: 4312630 - DNA, 25 bp, Homo sapien
ccaatggcttcagtggtagtgacaa

SEQ ID NO: 4312631 - DNA, 25 bp, Homo sapien
gggcatgaagggagccatcaatgcc

SEQ ID NO: 4312632 - DNA, 25 bp, Homo sapien
gccatcgggtgccaagtcttggtga

SEQ ID NO: 4312633 - DNA, 25 bp, Homo sapien
tgaagacacaaaggctcagtatcag

SEQ ID NO: 4312634 - DNA, 25 bp, Homo sapien
tcctggtgatgttctgctacacgac

SEQ ID NO: 4312635 - DNA, 25 bp, Homo sapien
gatgttctgctacacgacggaccat

SEQ ID NO: 4312636 - DNA, 25 bp, Homo sapien
tacttccaattcatgcctagacttt

SEQ ID NO: 4312637 - DNA, 25 bp, Homo sapien
gcctagacttttgtgtatccccaaa

SEQ ID NO: 4312638 - DNA, 25 bp, Homo sapien
tggtttcaatcctcccagagataag

SEQ ID NO: 4312639 - DNA, 25 bp, Homo sapien
aagaaacgttcagctgtgacaggag

SEQ ID NO: 4312640 - DNA, 25 bp, Homo sapien
aacagtcctgggccctttgagggca

SEQ ID NO: 4312641 - DNA, 25 bp, Homo sapien
tcccagagataagaaacgttcagct

SEQ ID NO: 4312642 - DNA, 25 bp, Homo sapien
tggagtctaatgaccaggcccagtg

SEQ ID NO: 4312643 - DNA, 25 bp, Homo sapien
cctagcaacttttggcctggagtct

SEQ ID NO: 4312644 - DNA, 25 bp, Homo sapien
tccagcagcgaaccctgtagatggg

SEQ ID NO: 4312645 - DNA, 25 bp, Homo sapien
gaagagtctaacttgcagctgtggc

SEQ ID NO: 4312646 - DNA, 25 bp, Homo sapien
ccccagtggattctggctgtagctg

SEQ ID NO: 4312647 - DNA, 25 bp, Homo sapien
tcccccagtggattctggctgtagc

SEQ ID NO: 4312648 - DNA, 25 bp, Homo sapien
agtggattctggctgtagctgtgtc

SEQ ID NO: 4312649 - DNA, 25 bp, Homo sapien
ccagtggattctggctgtagctgtg

SEQ ID NO: 4312650 - DNA, 25 bp, Homo sapien
tcaacttctttcactcctgcgtaca

SEQ ID NO: 4312651 - DNA, 25 bp, Homo sapien
catcaacttctttcactcctgcgta

SEQ ID NO: 4312652 - DNA, 25 bp, Homo sapien
gatccccagtagaacacatcaactt

SEQ ID NO: 4312653 - DNA, 25 bp, Homo sapien
cattggctcctcaaacccgacagat

SEQ ID NO: 4312654 - DNA, 25 bp, Homo sapien
cttggggataaatatggataataga

SEQ ID NO: 4312655 - DNA, 25 bp, Homo sapien
ttggggataaatatggataatagaa

SEQ ID NO: 4312656 - DNA, 25 bp, Homo sapien
tggggataaatatggataatagaaa

SEQ ID NO: 4312657 - DNA, 25 bp, Homo sapien
ggggataaatatggataatagaaac

SEQ ID NO: 4312658 - DNA, 25 bp, Homo sapien
cacaagtacatgtcacactcaggtg

SEQ ID NO: 4312659 - DNA, 25 bp, Homo sapien
gaaaccacaagtacatgtcacactc

SEQ ID NO: 4312660 - DNA, 25 bp, Homo sapien
aaccacaagtacatgtcacactcag

SEQ ID NO: 4312661 - DNA, 25 bp, Homo sapien
caagtacatgtcacactcaggtggg

SEQ ID NO: 4312662 - DNA, 25 bp, Homo sapien
cccagaatgtgattgtctccatgta

SEQ ID NO: 4312663 - DNA, 25 bp, Homo sapien
taagcagctgaaatcgtctactctt

SEQ ID NO: 4312664 - DNA, 25 bp, Homo sapien
cagatgccagggtaattagagccca

SEQ ID NO: 4312665 - DNA, 25 bp, Homo sapien
tgaaaatacgaagtgaaggcaaccc

SEQ ID NO: 4312666 - DNA, 25 bp, Homo sapien
tatgtcttcattaaaaacccagtga

SEQ ID NO: 4312667 - DNA, 25 bp, Homo sapien
atgtcttcattaaaaacccagtgaa

SEQ ID NO: 4312668 - DNA, 25 bp, Homo sapien
gtatgtcttcattaaaaacccagtg

SEQ ID NO: 4312669 - DNA, 25 bp, Homo sapien
gaatccagttgcctgttgggttcct

SEQ ID NO: 4312670 - DNA, 25 bp, Homo sapien
gataagccttctccaccgtatgggt

SEQ ID NO: 4312671 - DNA, 25 bp, Homo sapien
taaagaagggttctgatggaaaggc

SEQ ID NO: 4312672 - DNA, 25 bp, Homo sapien
ctttgttagttggttggaatctgac

SEQ ID NO: 4312673 - DNA, 25 bp, Homo sapien
gatgttatctgagttgagctgcttt

SEQ ID NO: 4312674 - DNA, 25 bp, Homo sapien
tctgatgttatctgagttgagctgc

SEQ ID NO: 4312675 - DNA, 25 bp, Homo sapien
gaactccaacacagggatcttactt

SEQ ID NO: 4312676 - DNA, 25 bp, Homo sapien
aaaccaggaactccaacacagggat

SEQ ID NO: 4312677 - DNA, 25 bp, Homo sapien
gctgtaagtaatatggtaacctggt

SEQ ID NO: 4312678 - DNA, 25 bp, Homo sapien
cattaacgcctttgcatgaagtctt

SEQ ID NO: 4312679 - DNA, 25 bp, Homo sapien
tagctgagctgttcaagaggtggac

SEQ ID NO: 4312680 - DNA, 25 bp, Homo sapien
tggctaccacgctgaaggagactgt

SEQ ID NO: 4312681 - DNA, 25 bp, Homo sapien
cctcgaggaactgcattcaaatgcc

SEQ ID NO: 4312682 - DNA, 25 bp, Homo sapien
ctacgaaatccaatttgaaggaagc

SEQ ID NO: 4312683 - DNA, 25 bp, Homo sapien
ttagctcatcggaaagcctcgagga

SEQ ID NO: 4312684 - DNA, 25 bp, Homo sapien
ccagcatcagcctccataagactgt

SEQ ID NO: 4312685 - DNA, 25 bp, Homo sapien
gggtcatgctttaacgtggcagtca

SEQ ID NO: 4312686 - DNA, 25 bp, Homo sapien
tacagggtcatgctttaacgtggca

SEQ ID NO: 4312687 - DNA, 25 bp, Homo sapien
gaaaatacagggtcatgctttaacg

SEQ ID NO: 4312688 - DNA, 25 bp, Homo sapien
atgctttaacgtggcagtcatgttc

SEQ ID NO: 4312689 - DNA, 25 bp, Homo sapien
ttactcataaaagctcatgatggga

SEQ ID NO: 4312690 - DNA, 25 bp, Homo sapien
aaattcagccatactaagcatagtg

SEQ ID NO: 4312691 - DNA, 25 bp, Homo sapien
taagcatagtgtcatgggctttgtg

SEQ ID NO: 4312692 - DNA, 25 bp, Homo sapien
taaaagctcatgatgggaaattcag

SEQ ID NO: 4312693 - DNA, 25 bp, Homo sapien
ctgtgcgaagatttctgccatcgcc

SEQ ID NO: 4312694 - DNA, 25 bp, Homo sapien
taataggcctcttatctctcttttg

SEQ ID NO: 4312695 - DNA, 25 bp, Homo sapien
caaacaactgatatcttatggacaa

SEQ ID NO: 4312696 - DNA, 25 bp, Homo sapien
ctctaataggcctcttatctctctt

SEQ ID NO: 4312697 - DNA, 25 bp, Homo sapien
actgatatcttatggacaactctaa

SEQ ID NO: 4312698 - DNA, 25 bp, Homo sapien
ctagagatcttggtgggaagccata

SEQ ID NO: 4312699 - DNA, 25 bp, Homo sapien
agaagcaaattcgaggttagactag

SEQ ID NO: 4312700 - DNA, 25 bp, Homo sapien
cctcaattctgcttcgggtgtgagt

SEQ ID NO: 4312701 - DNA, 25 bp, Homo sapien
tctgcttcgggtgtgagtgtcatca

SEQ ID NO: 4312702 - DNA, 25 bp, Homo sapien
tctgctggtatcgtgggctgtatga

SEQ ID NO: 4312703 - DNA, 25 bp, Homo sapien
aactggcatggtgattgattaaccc

SEQ ID NO: 4312704 - DNA, 25 bp, Homo sapien
ggctgtatgaagaagtgacacttca

SEQ ID NO: 4312705 - DNA, 25 bp, Homo sapien
gccttgttcaatgagctctgggagt

SEQ ID NO: 4312706 - DNA, 25 bp, Homo sapien
cagttactgactgtgagagtgggaa

SEQ ID NO: 4312707 - DNA, 25 bp, Homo sapien
gtccagcatttacagttactgactg

SEQ ID NO: 4312708 - DNA, 25 bp, Homo sapien
ctataggtccagcatttacagttac

SEQ ID NO: 4312709 - DNA, 25 bp, Homo sapien
taggtccagcatttacagttactga

SEQ ID NO: 4312710 - DNA, 25 bp, Homo sapien
aacatagacaccctgtagatttgtg

SEQ ID NO: 4312711 - DNA, 25 bp, Homo sapien
ttaacatagacaccctgtagatttg

SEQ ID NO: 4312712 - DNA, 25 bp, Homo sapien
catagacaccctgtagatttgtggg

SEQ ID NO: 4312713 - DNA, 25 bp, Homo sapien
ctttaacatagacaccctgtagatt

SEQ ID NO: 4312714 - DNA, 25 bp, Homo sapien
ggtgtattgcaggcctttctgcttt

SEQ ID NO: 4312715 - DNA, 25 bp, Homo sapien
cagggacaagggtgtattgcaggcc

SEQ ID NO: 4312716 - DNA, 25 bp, Homo sapien
gattttatggtcagaagcaaggaga

SEQ ID NO: 4312717 - DNA, 25 bp, Homo sapien
aagattttatggtcagaagcaagga

SEQ ID NO: 4312718 - DNA, 25 bp, Homo sapien
tctccggatatccagagggctggac

SEQ ID NO: 4312719 - DNA, 25 bp, Homo sapien
acttggaaaatgggccagaatccag

SEQ ID NO: 4312720 - DNA, 25 bp, Homo sapien
agacttggaaaatgggccagaatcc

SEQ ID NO: 4312721 - DNA, 25 bp, Homo sapien
gacttggaaaatgggccagaatcca

SEQ ID NO: 4312722 - DNA, 25 bp, Homo sapien
ttgggacatgggcttcagtatttct

SEQ ID NO: 4312723 - DNA, 25 bp, Homo sapien
tgttttgggacatgggcttcagtat

SEQ ID NO: 4312724 - DNA, 25 bp, Homo sapien
gttttgggacatgggcttcagtatt

SEQ ID NO: 4312725 - DNA, 25 bp, Homo sapien
gttgttttgggacatgggcttcagt

SEQ ID NO: 4312726 - DNA, 25 bp, Homo sapien
tggatactgagaggaaagtttggcc

SEQ ID NO: 4312727 - DNA, 25 bp, Homo sapien
catagtatcgatgcctctgaccatg

SEQ ID NO: 4312728 - DNA, 25 bp, Homo sapien
aagtttggccagaagattatcatag

SEQ ID NO: 4312729 - DNA, 25 bp, Homo sapien
gaagattatcatagtatcgatgcct

SEQ ID NO: 4312730 - DNA, 25 bp, Homo sapien
gttcttcggtaaactcagattctcc

SEQ ID NO: 4312731 - DNA, 25 bp, Homo sapien
tttgctacttccatgcttcgggaag

SEQ ID NO: 4312732 - DNA, 25 bp, Homo sapien
tctgccagaccgtccttcttttggg

SEQ ID NO: 4312733 - DNA, 25 bp, Homo sapien
tccctggtccacattggtaagcaca

SEQ ID NO: 4312734 - DNA, 25 bp, Homo sapien
ctgccaggcaagtctctctggtgtg

SEQ ID NO: 4312735 - DNA, 25 bp, Homo sapien
tgccaggcaagtctctctggtgtgt

SEQ ID NO: 4312736 - DNA, 25 bp, Homo sapien
tctctggtgtgtgccaggaaccaac

SEQ ID NO: 4312737 - DNA, 25 bp, Homo sapien
ctggtgtgtgccaggaaccaaccct

SEQ ID NO: 4312738 - DNA, 25 bp, Homo sapien
cgactagaatagtaggaagactttc

SEQ ID NO: 4312739 - DNA, 25 bp, Homo sapien
gcaggtcaggctcattttggccaaa

SEQ ID NO: 4312740 - DNA, 25 bp, Homo sapien
caaatgagtgcttgcccatgagaca

SEQ ID NO: 4312741 - DNA, 25 bp, Homo sapien
tctaaatttactggtggatccgaag

SEQ ID NO: 4312742 - DNA, 25 bp, Homo sapien
ctgggtctcttgacttttatctcat

SEQ ID NO: 4312743 - DNA, 25 bp, Homo sapien
gggtctcttgacttttatctcattg

SEQ ID NO: 4312744 - DNA, 25 bp, Homo sapien
tgtccccgggctgggtctcttgact

SEQ ID NO: 4312745 - DNA, 25 bp, Homo sapien
tttgtccccgggctgggtctcttga

SEQ ID NO: 4312746 - DNA, 25 bp, Homo sapien
atcatgacaatccttatttctagag

SEQ ID NO: 4312747 - DNA, 25 bp, Homo sapien
ttaaatcatgacaatccttatttct

SEQ ID NO: 4312748 - DNA, 25 bp, Homo sapien
catgacaatccttatttctagagga

SEQ ID NO: 4312749 - DNA, 25 bp, Homo sapien
aaatcatgacaatccttatttctag

SEQ ID NO: 4312750 - DNA, 25 bp, Homo sapien
gaacatttcagtgacaaattctaaa

SEQ ID NO: 4312751 - DNA, 25 bp, Homo sapien
tgttacctggagctttattctttta

SEQ ID NO: 4312752 - DNA, 25 bp, Homo sapien
cttctgttacctggagctttattct

SEQ ID NO: 4312753 - DNA, 25 bp, Homo sapien
cattttcaagtcagtgaacatttca

SEQ ID NO: 4312754 - DNA, 25 bp, Homo sapien
tccatttccaggtgcagttgacttg

SEQ ID NO: 4312755 - DNA, 25 bp, Homo sapien
taggcctgaaaagaccccacagttc

SEQ ID NO: 4312756 - DNA, 25 bp, Homo sapien
ctctaaaaatgtccctaggcctgaa

SEQ ID NO: 4312757 - DNA, 25 bp, Homo sapien
gattcctgagggcaatccttgacag

SEQ ID NO: 4312758 - DNA, 25 bp, Homo sapien
aatattctcccttgtctaaatggga

SEQ ID NO: 4312759 - DNA, 25 bp, Homo sapien
atattctcccttgtctaaatgggac

SEQ ID NO: 4312760 - DNA, 25 bp, Homo sapien
tccttggtaactttagaggaccaga

SEQ ID NO: 4312761 - DNA, 25 bp, Homo sapien
tgtgggagttacaagggagcacacc

SEQ ID NO: 4312762 - DNA, 25 bp, Homo sapien
caagggagcacacctttgcagttca

SEQ ID NO: 4312763 - DNA, 25 bp, Homo sapien
gagttacaagggagcacacctttgc

SEQ ID NO: 4312764 - DNA, 25 bp, Homo sapien
tacaagggagcacacctttgcagtt

SEQ ID NO: 4312765 - DNA, 25 bp, Homo sapien
cacactataattcagaactccttgg

SEQ ID NO: 4312766 - DNA, 25 bp, Homo sapien
gtgtagaattccagtcagcatagca

SEQ ID NO: 4312767 - DNA, 25 bp, Homo sapien
ttgatccacctgcgagttttgacct

SEQ ID NO: 4312768 - DNA, 25 bp, Homo sapien
caccctcttaagcaatctagtggtc

SEQ ID NO: 4312769 - DNA, 25 bp, Homo sapien
tattttcgtggttgcctgtttcttc

SEQ ID NO: 4312770 - DNA, 25 bp, Homo sapien
ttttcgtggttgcctgtttcttctg

SEQ ID NO: 4312771 - DNA, 25 bp, Homo sapien
attttcgtggttgcctgtttcttct

SEQ ID NO: 4312772 - DNA, 25 bp, Homo sapien
tttcgtggttgcctgtttcttctgc

SEQ ID NO: 4312773 - DNA, 25 bp, Homo sapien
tgtcctctgacatctgaatggccat

SEQ ID NO: 4312774 - DNA, 25 bp, Homo sapien
ttttgcactgtttgctttgtcctct

SEQ ID NO: 4312775 - DNA, 25 bp, Homo sapien
ctttgtcctctgacatctgaatggc

SEQ ID NO: 4312776 - DNA, 25 bp, Homo sapien
ctgtttgctttgtcctctgacatct

SEQ ID NO: 4312777 - DNA, 25 bp, Homo sapien
tgttgggctgctcgtggatttgtaa

SEQ ID NO: 4312778 - DNA, 25 bp, Homo sapien
gctcgtggatttgtaaatagggaaa

SEQ ID NO: 4312779 - DNA, 25 bp, Homo sapien
cagtgtgaatgggactccaaggccc

SEQ ID NO: 4312780 - DNA, 25 bp, Homo sapien
gagtgatagacactcagtgctgagc

SEQ ID NO: 4312781 - DNA, 25 bp, Homo sapien
tttccccagccaagggacttggaga

SEQ ID NO: 4312782 - DNA, 25 bp, Homo sapien
gacttggagatgctttgacgctggc

SEQ ID NO: 4312783 - DNA, 25 bp, Homo sapien
ctataaaggttaagtccctggatct

SEQ ID NO: 4312784 - DNA, 25 bp, Homo sapien
aacactgtctcctgattgctggctg

SEQ ID NO: 4312785 - DNA, 25 bp, Homo sapien
ggaagaataacctctccggagaaga

SEQ ID NO: 4312786 - DNA, 25 bp, Homo sapien
taggcgcggcttcactgaccttaag

SEQ ID NO: 4312787 - DNA, 25 bp, Homo sapien
cagaaagtattcctacactgggtgg

SEQ ID NO: 4312788 - DNA, 25 bp, Homo sapien
gaaaaggatctaggccgacagaaca

SEQ ID NO: 4312789 - DNA, 25 bp, Homo sapien
caatgttgtccaagaggacaacatc

SEQ ID NO: 4312790 - DNA, 25 bp, Homo sapien
aggtcaatgttgtccaagaggacaa

SEQ ID NO: 4312791 - DNA, 25 bp, Homo sapien
gtcaatgttgtccaagaggacaaca

SEQ ID NO: 4312792 - DNA, 25 bp, Homo sapien
tgaggtcaatgttgtccaagaggac

SEQ ID NO: 4312793 - DNA, 25 bp, Homo sapien
tcatggttcattaacatggatggac

SEQ ID NO: 4312794 - DNA, 25 bp, Homo sapien
ggttcattaacatggatggacataa

SEQ ID NO: 4312795 - DNA, 25 bp, Homo sapien
catggttcattaacatggatggaca

SEQ ID NO: 4312796 - DNA, 25 bp, Homo sapien
tccttcatggttcattaacatggat

SEQ ID NO: 4312797 - DNA, 25 bp, Homo sapien
tgatcgaatgcagtgagtctaaagc

SEQ ID NO: 4312798 - DNA, 25 bp, Homo sapien
cagtaaactactgacactcacaggg

SEQ ID NO: 4312799 - DNA, 25 bp, Homo sapien
aaattactggctagtgcttgagccc

SEQ ID NO: 4312800 - DNA, 25 bp, Homo sapien
atgtaactcacaaacacctgtgcgg

SEQ ID NO: 4312801 - DNA, 25 bp, Homo sapien
ttgccagaaacataagcacatgctg

SEQ ID NO: 4312802 - DNA, 25 bp, Homo sapien
agcacatgctgtagtcgtaaacacg

SEQ ID NO: 4312803 - DNA, 25 bp, Homo sapien
acattgccagaaacataagcacatg

SEQ ID NO: 4312804 - DNA, 25 bp, Homo sapien
taaacacgaacactcaacaaaagca

SEQ ID NO: 4312805 - DNA, 25 bp, Homo sapien
gcctttgatgtcctcgtataggaag

SEQ ID NO: 4312806 - DNA, 25 bp, Homo sapien
caaggtcacccatctatcacaagca

SEQ ID NO: 4312807 - DNA, 25 bp, Homo sapien
gcagtacccagatcatagcctttga

SEQ ID NO: 4312808 - DNA, 25 bp, Homo sapien
tttctaaacctctgcgacagcaagg

SEQ ID NO: 4312809 - DNA, 25 bp, Homo sapien
ctcttctagaaaaggggcggcagaa

SEQ ID NO: 4312810 - DNA, 25 bp, Homo sapien
cctcttctagaaaaggggcggcaga

SEQ ID NO: 4312811 - DNA, 25 bp, Homo sapien
gccagactcactcagatagatggtg

SEQ ID NO: 4312812 - DNA, 25 bp, Homo sapien
aaagaaattctcatgcgtgtgtgtg

SEQ ID NO: 4312813 - DNA, 25 bp, Homo sapien
tgtgagtctttatccataggcagtg

SEQ ID NO: 4312814 - DNA, 25 bp, Homo sapien
tctgccatccaaaaagagagggtcc

SEQ ID NO: 4312815 - DNA, 25 bp, Homo sapien
caggacatatacaattaagaacagt

SEQ ID NO: 4312816 - DNA, 25 bp, Homo sapien
catagggtggacattcgagatggct

SEQ ID NO: 4312817 - DNA, 25 bp, Homo sapien
tataggcatataacttgacataggg

SEQ ID NO: 4312818 - DNA, 25 bp, Homo sapien
caattaagaacagtactataggcat

SEQ ID NO: 4312819 - DNA, 25 bp, Homo sapien
atggcggatagtaacactgatgtca

SEQ ID NO: 4312820 - DNA, 25 bp, Homo sapien
tatggcggatagtaacactgatgtc

SEQ ID NO: 4312821 - DNA, 25 bp, Homo sapien
tggcggatagtaacactgatgtcaa

SEQ ID NO: 4312822 - DNA, 25 bp, Homo sapien
ggcggatagtaacactgatgtcaat

SEQ ID NO: 4312823 - DNA, 25 bp, Homo sapien
ggaatcctgatctgttcactactgg

SEQ ID NO: 4312824 - DNA, 25 bp, Homo sapien
tttgactgctagtcctatagaaaac

SEQ ID NO: 4312825 - DNA, 25 bp, Homo sapien
gtggccttgacttcaataatgtagt

SEQ ID NO: 4312826 - DNA, 25 bp, Homo sapien
tttaatgggcagcacaagttcagct

SEQ ID NO: 4312827 - DNA, 25 bp, Homo sapien
gctttaacttgctcccaattaagta

SEQ ID NO: 4312828 - DNA, 25 bp, Homo sapien
ccaattaagtaacactttagtgtct

SEQ ID NO: 4312829 - DNA, 25 bp, Homo sapien
aagtaacactttagtgtctgtggca

SEQ ID NO: 4312830 - DNA, 25 bp, Homo sapien
ccatggctttaacttgctcccaatt

SEQ ID NO: 4312831 - DNA, 25 bp, Homo sapien
tagcaacacagatagggcactggaa

SEQ ID NO: 4312832 - DNA, 25 bp, Homo sapien
tatgagtctaatgacaccaaacgag

SEQ ID NO: 4312833 - DNA, 25 bp, Homo sapien
cagctgaacttacagataggaagaa

SEQ ID NO: 4312834 - DNA, 25 bp, Homo sapien
cacaatgagtttaggtcagctaaga

SEQ ID NO: 4312835 - DNA, 25 bp, Homo sapien
cccagaataggatgattgagttcca

SEQ ID NO: 4312836 - DNA, 25 bp, Homo sapien
ctggacctaaactggtaagtagtct

SEQ ID NO: 4312837 - DNA, 25 bp, Homo sapien
catgattagatgaaactgggaaggt

SEQ ID NO: 4312838 - DNA, 25 bp, Homo sapien
tgttgttccttaagcatccatcatg

SEQ ID NO: 4312839 - DNA, 25 bp, Homo sapien
tctagaagattcacaggcaagtggg

SEQ ID NO: 4312840 - DNA, 25 bp, Homo sapien
caccctcctgaatctgaggaatgca

SEQ ID NO: 4312841 - DNA, 25 bp, Homo sapien
acacttacaattgtctagagcaggg

SEQ ID NO: 4312842 - DNA, 25 bp, Homo sapien
ctaggaataactttgctgaagccca

SEQ ID NO: 4312843 - DNA, 25 bp, Homo sapien
taactgtggcgctaaaaggcccagc

SEQ ID NO: 4312844 - DNA, 25 bp, Homo sapien
cagccgtgtaataggccaggttgct

SEQ ID NO: 4312845 - DNA, 25 bp, Homo sapien
tcttcaggccccgtagtctggctga

SEQ ID NO: 4312846 - DNA, 25 bp, Homo sapien
cagcgccggcactgttgtaagcccg

SEQ ID NO: 4312847 - DNA, 25 bp, Homo sapien
taagctgttcaacaaccaccagtga

SEQ ID NO: 4312848 - DNA, 25 bp, Homo sapien
tacaagttacgactaggtcaagaat

SEQ ID NO: 4312849 - DNA, 25 bp, Homo sapien
gcactctgttcggtttggaatccca

SEQ ID NO: 4312850 - DNA, 25 bp, Homo sapien
tggaatcccacaagccattcatgta

SEQ ID NO: 4312851 - DNA, 25 bp, Homo sapien
ccatgaaacctcaatttctgaggaa

SEQ ID NO: 4312852 - DNA, 25 bp, Homo sapien
aatgtccattgctcaacttccaagg

SEQ ID NO: 4312853 - DNA, 25 bp, Homo sapien
tagcccagtaaatgtccattgctca

SEQ ID NO: 4312854 - DNA, 25 bp, Homo sapien
acttccaaggaatggtgttccatga

SEQ ID NO: 4312855 - DNA, 25 bp, Homo sapien
ctatttgcagagacttgagatgggg

SEQ ID NO: 4312856 - DNA, 25 bp, Homo sapien
tatttgcagagacttgagatggggc

SEQ ID NO: 4312857 - DNA, 25 bp, Homo sapien
gaattcctggtctaaggctgggccc

SEQ ID NO: 4312858 - DNA, 25 bp, Homo sapien
gagtcgaggagtacttggagcccac

SEQ ID NO: 4312859 - DNA, 25 bp, Homo sapien
ggctgggccccttagattttctctc

SEQ ID NO: 4312860 - DNA, 25 bp, Homo sapien
gcttgatgctaagacgaattcctgg

SEQ ID NO: 4312861 - DNA, 25 bp, Homo sapien
agcggtcatgagacaaaatgtagat

SEQ ID NO: 4312862 - DNA, 25 bp, Homo sapien
tttctaaagcggtcatgagacaaaa

SEQ ID NO: 4312863 - DNA, 25 bp, Homo sapien
tctaaagcggtcatgagacaaaatg

SEQ ID NO: 4312864 - DNA, 25 bp, Homo sapien
attattttctaaagcggtcatgaga

SEQ ID NO: 4312865 - DNA, 25 bp, Homo sapien
taggcggaactgatatacagtcatg

SEQ ID NO: 4312866 - DNA, 25 bp, Homo sapien
gtcaaaacgagactccaaatcagtt

SEQ ID NO: 4312867 - DNA, 25 bp, Homo sapien
caaatcagtttttggagcacaaata

SEQ ID NO: 4312868 - DNA, 25 bp, Homo sapien
taattattattaggcggaactgata

SEQ ID NO: 4312869 - DNA, 25 bp, Homo sapien
tgtcactgggctaaatggtccttca

SEQ ID NO: 4312870 - DNA, 25 bp, Homo sapien
gagggcggaaagcaacaacataccc

SEQ ID NO: 4312871 - DNA, 25 bp, Homo sapien
gatgtcaccactgtctggatccagg

SEQ ID NO: 4312872 - DNA, 25 bp, Homo sapien
tcatatggtgaatatggcacgatgc

SEQ ID NO: 4312873 - DNA, 25 bp, Homo sapien
tccattgacttcagaaggaggcact

SEQ ID NO: 4312874 - DNA, 25 bp, Homo sapien
tatcacaagttcagaccggcttccg

SEQ ID NO: 4312875 - DNA, 25 bp, Homo sapien
ggcttccgcctcctccattgacttc

SEQ ID NO: 4312876 - DNA, 25 bp, Homo sapien
atcccaggttatcacaagttcagac

SEQ ID NO: 4312877 - DNA, 25 bp, Homo sapien
cacccatgggtttaactcaactaca

SEQ ID NO: 4312878 - DNA, 25 bp, Homo sapien
caactacagtggctgtgtgcgtctt

SEQ ID NO: 4312879 - DNA, 25 bp, Homo sapien
tactggctacaacccgaaattcata

SEQ ID NO: 4312880 - DNA, 25 bp, Homo sapien
tgttactggctacaacccgaaattc

SEQ ID NO: 4312881 - DNA, 25 bp, Homo sapien
atatgtgtgcagatgacatctgcct

SEQ ID NO: 4312882 - DNA, 25 bp, Homo sapien
tcagaggtaagagtctgcctgcttt

SEQ ID NO: 4312883 - DNA, 25 bp, Homo sapien
gctttagcattgacttgaaatccat

SEQ ID NO: 4312884 - DNA, 25 bp, Homo sapien
gtgcagatgacatctgcctctcctg

SEQ ID NO: 4312885 - DNA, 25 bp, Homo sapien
caacccacggagaaaggtgtccgag

SEQ ID NO: 4312886 - DNA, 25 bp, Homo sapien
taccttctttccaagagagttgggc

SEQ ID NO: 4312887 - DNA, 25 bp, Homo sapien
tgtccgagcctggatagaataggat

SEQ ID NO: 4312888 - DNA, 25 bp, Homo sapien
tgttgtgacggtttgccaacccacg

SEQ ID NO: 4312889 - DNA, 25 bp, Homo sapien
ccatacaaacatatttcccactgtg

SEQ ID NO: 4312890 - DNA, 25 bp, Homo sapien
tgtgtttcagctgaatgtttctgat

SEQ ID NO: 4312891 - DNA, 25 bp, Homo sapien
tactatgaggtcagcagcagatgaa

SEQ ID NO: 4312892 - DNA, 25 bp, Homo sapien
tgtttctgatcattaaatcaccaga

SEQ ID NO: 4312893 - DNA, 25 bp, Homo sapien
aaagatgatgtctaacagcgggtca

SEQ ID NO: 4312894 - DNA, 25 bp, Homo sapien
gcaatatgacgctttcaccaacaga

SEQ ID NO: 4312895 - DNA, 25 bp, Homo sapien
gccccattgaaataccaggtaaaga

SEQ ID NO: 4312896 - DNA, 25 bp, Homo sapien
catccatgttagatggtgccaaagt

SEQ ID NO: 4312897 - DNA, 25 bp, Homo sapien
gcatcagctttagtcacattggcta

SEQ ID NO: 4312898 - DNA, 25 bp, Homo sapien
tccagcatcagctttagtcacattg

SEQ ID NO: 4312899 - DNA, 25 bp, Homo sapien
catcagctttagtcacattggctat

SEQ ID NO: 4312900 - DNA, 25 bp, Homo sapien
cagcatcagctttagtcacattggc

SEQ ID NO: 4312901 - DNA, 25 bp, Homo sapien
tctcgtgggaccctgaaggttgtaa

SEQ ID NO: 4312902 - DNA, 25 bp, Homo sapien
ctgattcttctcgtgggaccctgaa

SEQ ID NO: 4312903 - DNA, 25 bp, Homo sapien
tcttctcgtgggaccctgaaggttg

SEQ ID NO: 4312904 - DNA, 25 bp, Homo sapien
tgggaccctgaaggttgtaatgcat

SEQ ID NO: 4312905 - DNA, 25 bp, Homo sapien
tgaatttggatagcttgtgactcac

SEQ ID NO: 4312906 - DNA, 25 bp, Homo sapien
tcagagcctagggaattcagcttcc

SEQ ID NO: 4312907 - DNA, 25 bp, Homo sapien
ctggtcaccagtggaatgcagggaa

SEQ ID NO: 4312908 - DNA, 25 bp, Homo sapien
ggaaagtgatggtgtcttcagagcc

SEQ ID NO: 4312909 - DNA, 25 bp, Homo sapien
tagagtatgggagttattggcaaag

SEQ ID NO: 4312910 - DNA, 25 bp, Homo sapien
agtatgggagttattggcaaaggac

SEQ ID NO: 4312911 - DNA, 25 bp, Homo sapien
gtatgggagttattggcaaaggacc

SEQ ID NO: 4312912 - DNA, 25 bp, Homo sapien
tcatagagtatgggagttattggca

SEQ ID NO: 4312913 - DNA, 25 bp, Homo sapien
tagaccacggatgtagaagaagatt

SEQ ID NO: 4312914 - DNA, 25 bp, Homo sapien
gggaacaactgttttgatgggtaga

SEQ ID NO: 4312915 - DNA, 25 bp, Homo sapien
ctgacagttgcgagggaacaactgt

SEQ ID NO: 4312916 - DNA, 25 bp, Homo sapien
gaccacggatgtagaagaagattaa

SEQ ID NO: 4312917 - DNA, 25 bp, Homo sapien
ttgaacagtatgaagaaaagtggac

SEQ ID NO: 4312918 - DNA, 25 bp, Homo sapien
agagatgggagtggcattttgaaca

SEQ ID NO: 4312919 - DNA, 25 bp, Homo sapien
gcattttgaacagtatgaagaaaag

SEQ ID NO: 4312920 - DNA, 25 bp, Homo sapien
gagtggcattttgaacagtatgaag

SEQ ID NO: 4312921 - DNA, 25 bp, Homo sapien
gacttggagaaggttcaagtccgca

SEQ ID NO: 4312922 - DNA, 25 bp, Homo sapien
tgcggccactctgatttcccgtgga

SEQ ID NO: 4312923 - DNA, 25 bp, Homo sapien
ggctttcgttgccaagtgatgactg

SEQ ID NO: 4312924 - DNA, 25 bp, Homo sapien
tgaagcctgcagaccaagttaagag

SEQ ID NO: 4312925 - DNA, 25 bp, Homo sapien
ctctgggtttacaatccaagctgac

SEQ ID NO: 4312926 - DNA, 25 bp, Homo sapien
ttcttccaggaagagagtgcccttg

SEQ ID NO: 4312927 - DNA, 25 bp, Homo sapien
tttcatgctcctgcacgctcacatc

SEQ ID NO: 4312928 - DNA, 25 bp, Homo sapien
gggaggctctgggtttacaatccaa

SEQ ID NO: 4312929 - DNA, 25 bp, Homo sapien
ttctttgaaaaatctggagcagaag

SEQ ID NO: 4312930 - DNA, 25 bp, Homo sapien
ttggattctttgaaaaatctggagc

SEQ ID NO: 4312931 - DNA, 25 bp, Homo sapien
gaaccaacttcttcattggattctt

SEQ ID NO: 4312932 - DNA, 25 bp, Homo sapien
ctgcacctgaaccaacttcttcatt

SEQ ID NO: 4312933 - DNA, 25 bp, Homo sapien
cacacttaggtttgatattgtaagg

SEQ ID NO: 4312934 - DNA, 25 bp, Homo sapien
gctcagcactggaataaacaaggcc

SEQ ID NO: 4312935 - DNA, 25 bp, Homo sapien
ttgatattgtaagggcaccattttc

SEQ ID NO: 4312936 - DNA, 25 bp, Homo sapien
catgccagaatcagtcacacttagg

SEQ ID NO: 4312937 - DNA, 25 bp, Homo sapien
gaaggcttgggcttgccgcttgccc

SEQ ID NO: 4312938 - DNA, 25 bp, Homo sapien
gctccatttttcagccatcggtagg

SEQ ID NO: 4312939 - DNA, 25 bp, Homo sapien
tcctttatgagttgaacccaatggg

SEQ ID NO: 4312940 - DNA, 25 bp, Homo sapien
caataaagactgtcctccacggcta

SEQ ID NO: 4312941 - DNA, 25 bp, Homo sapien
tctccaattaatctgaggtatggga

SEQ ID NO: 4312942 - DNA, 25 bp, Homo sapien
gggatttcaagcacaccactgaact

SEQ ID NO: 4312943 - DNA, 25 bp, Homo sapien
catagtaagtgagacgccctctggc

SEQ ID NO: 4312944 - DNA, 25 bp, Homo sapien
tggaaaatggcagcccatcacttct

SEQ ID NO: 4312945 - DNA, 25 bp, Homo sapien
agaagaaaatcgtcaagttgtctgc

SEQ ID NO: 4312946 - DNA, 25 bp, Homo sapien
cagtcgaacctttagctgctggaag

SEQ ID NO: 4312947 - DNA, 25 bp, Homo sapien
ttcacagtcgaacctttagctgctg

SEQ ID NO: 4312948 - DNA, 25 bp, Homo sapien
tccaatttcacagtcgaacctttag

SEQ ID NO: 4312949 - DNA, 25 bp, Homo sapien
tcgaacctttagctgctggaagagt

SEQ ID NO: 4312950 - DNA, 25 bp, Homo sapien
tgcttttgtttgcagcctcagcacc

SEQ ID NO: 4312951 - DNA, 25 bp, Homo sapien
tcagcaccatttacgctcagaagtg

SEQ ID NO: 4312952 - DNA, 25 bp, Homo sapien
cctcagcaccatttacgctcagaag

SEQ ID NO: 4312953 - DNA, 25 bp, Homo sapien
caccatttacgctcagaagtgcact

SEQ ID NO: 4312954 - DNA, 25 bp, Homo sapien
catcagaacgtagcaccaaaggagt

SEQ ID NO: 4312955 - DNA, 25 bp, Homo sapien
caccaaaggagttggagagcccagc

SEQ ID NO: 4312956 - DNA, 25 bp, Homo sapien
ggagagcccagcactcgggcatttg

SEQ ID NO: 4312957 - DNA, 25 bp, Homo sapien
gagcccagcactcgggcatttgtca

SEQ ID NO: 4312958 - DNA, 25 bp, Homo sapien
gactatcttcttcaacaaacgatgg

SEQ ID NO: 4312959 - DNA, 25 bp, Homo sapien
cattgaagatccaagcatatgacag

SEQ ID NO: 4312960 - DNA, 25 bp, Homo sapien
gatatgtagaggtgccctgtctcct

SEQ ID NO: 4312961 - DNA, 25 bp, Homo sapien
gacggctccaccttagatatgtaga

SEQ ID NO: 4312962 - DNA, 25 bp, Homo sapien
tttgcttgcattctgtatcctttct

SEQ ID NO: 4312963 - DNA, 25 bp, Homo sapien
agagcaactctggaagctagtttgt

SEQ ID NO: 4312964 - DNA, 25 bp, Homo sapien
tatttttgcttgcattctgtatcct

SEQ ID NO: 4312965 - DNA, 25 bp, Homo sapien
caactctggaagctagtttgtattt

SEQ ID NO: 4312966 - DNA, 25 bp, Homo sapien
gtcatttacactttggcagttcata

SEQ ID NO: 4312967 - DNA, 25 bp, Homo sapien
tcatttacactttggcagttcatat

SEQ ID NO: 4312968 - DNA, 25 bp, Homo sapien
catttacactttggcagttcatatt

SEQ ID NO: 4312969 - DNA, 25 bp, Homo sapien
tgtcatttacactttggcagttcat

SEQ ID NO: 4312970 - DNA, 25 bp, Homo sapien
ctatgtcagtgttcttccttccatc

SEQ ID NO: 4312971 - DNA, 25 bp, Homo sapien
tcagtgttcttccttccatcaggcc

SEQ ID NO: 4312972 - DNA, 25 bp, Homo sapien
atcaggccccagaaagctttgagct

SEQ ID NO: 4312973 - DNA, 25 bp, Homo sapien
ccatcaggccccagaaagctttgag

SEQ ID NO: 4312974 - DNA, 25 bp, Homo sapien
ttggatttggcagccccataaaaca

SEQ ID NO: 4312975 - DNA, 25 bp, Homo sapien
tggatttggcagccccataaaacat

SEQ ID NO: 4312976 - DNA, 25 bp, Homo sapien
actttggatttggcagccccataaa

SEQ ID NO: 4312977 - DNA, 25 bp, Homo sapien
tttggatttggcagccccataaaac

SEQ ID NO: 4312978 - DNA, 25 bp, Homo sapien
aactatgtatgtgtaggtatgcaca

SEQ ID NO: 4312979 - DNA, 25 bp, Homo sapien
tatgcaatggcaactgtacaccagt

SEQ ID NO: 4312980 - DNA, 25 bp, Homo sapien
caagagaaaggcttcggttcattct

SEQ ID NO: 4312981 - DNA, 25 bp, Homo sapien
agacatataggagacttcagcagag

SEQ ID NO: 4312982 - DNA, 25 bp, Homo sapien
gtgaatctgagactcagaaccacag

SEQ ID NO: 4312983 - DNA, 25 bp, Homo sapien
tgtgaatctgagactcagaaccaca

SEQ ID NO: 4312984 - DNA, 25 bp, Homo sapien
ctgtgaatctgagactcagaaccac

SEQ ID NO: 4312985 - DNA, 25 bp, Homo sapien
taaagcagaaaacatcggtcaggac

SEQ ID NO: 4312986 - DNA, 25 bp, Homo sapien
catgctgctgtgagaacaatgtaag

SEQ ID NO: 4312987 - DNA, 25 bp, Homo sapien
tgggataggagacaaagcctttacc

SEQ ID NO: 4312988 - DNA, 25 bp, Homo sapien
gaagcactatctctcgaacagtaga

SEQ ID NO: 4312989 - DNA, 25 bp, Homo sapien
ggccttcacgcacagacactgtact

SEQ ID NO: 4312990 - DNA, 25 bp, Homo sapien
aactccctggccttcacgcacagac

SEQ ID NO: 4312991 - DNA, 25 bp, Homo sapien
tccctggccttcacgcacagacact

SEQ ID NO: 4312992 - DNA, 25 bp, Homo sapien
agcacaactccctggccttcacgca

SEQ ID NO: 4312993 - DNA, 25 bp, Homo sapien
gatctcttgaatcgccaacttaaag

SEQ ID NO: 4312994 - DNA, 25 bp, Homo sapien
gctacagatctcttgaatcgccaac

SEQ ID NO: 4312995 - DNA, 25 bp, Homo sapien
cttgcatagttgatttctgttctcc

SEQ ID NO: 4312996 - DNA, 25 bp, Homo sapien
tttctgttctcctgctacagatctc

SEQ ID NO: 4312997 - DNA, 25 bp, Homo sapien
tgggaagacatcctctttattgtat

SEQ ID NO: 4312998 - DNA, 25 bp, Homo sapien
ttgaacaggcatatagcaattgctg

SEQ ID NO: 4312999 - DNA, 25 bp, Homo sapien
tagcaattgctgcttggagacttag

SEQ ID NO: 4313000 - DNA, 25 bp, Homo sapien
gggtgggaagacatcctctttattg

SEQ ID NO: 4313001 - DNA, 25 bp, Homo sapien
atgtgctggtgaaagtacccgacat

SEQ ID NO: 4313002 - DNA, 25 bp, Homo sapien
tttacccatgaaggacacagaagta

SEQ ID NO: 4313003 - DNA, 25 bp, Homo sapien
ttactcatttacccatgaaggacac

SEQ ID NO: 4313004 - DNA, 25 bp, Homo sapien
cccatgaaggacacagaagtacttt

SEQ ID NO: 4313005 - DNA, 25 bp, Homo sapien
ggacacagaagtactttctccatag

SEQ ID NO: 4313006 - DNA, 25 bp, Homo sapien
ttttctaatgttggatttgctagac

SEQ ID NO: 4313007 - DNA, 25 bp, Homo sapien
tgttgcaaaacattggtaagttcct

SEQ ID NO: 4313008 - DNA, 25 bp, Homo sapien
tctgttgggattaataaccacaaga

SEQ ID NO: 4313009 - DNA, 25 bp, Homo sapien
gatttcctccattcaacttataacg

SEQ ID NO: 4313010 - DNA, 25 bp, Homo sapien
caatatcacttccattcagctgcca

SEQ ID NO: 4313011 - DNA, 25 bp, Homo sapien
tatgtctgattaatggaactagttc

SEQ ID NO: 4313012 - DNA, 25 bp, Homo sapien
ttagaatgccttacaaaaatgctgg

SEQ ID NO: 4313013 - DNA, 25 bp, Homo sapien
tggcattacaataggcacctgttat

SEQ ID NO: 4313014 - DNA, 25 bp, Homo sapien
aattattcgtaagataaacaccagg

SEQ ID NO: 4313015 - DNA, 25 bp, Homo sapien
tgaattttcaaacttttcactgtac

SEQ ID NO: 4313016 - DNA, 25 bp, Homo sapien
ttgaattttcaaacttttcactgta

SEQ ID NO: 4313017 - DNA, 25 bp, Homo sapien
atttgaattttcaaacttttcactg

SEQ ID NO: 4313018 - DNA, 25 bp, Homo sapien
acagggccttgtaagagaagctcac

SEQ ID NO: 4313019 - DNA, 25 bp, Homo sapien
ttctgaaccaacagggaaaatgctg

SEQ ID NO: 4313020 - DNA, 25 bp, Homo sapien
ctgtaatgaggtgatggattgcctc

SEQ ID NO: 4313021 - DNA, 25 bp, Homo sapien
gcctcttgcttcacaatgcaaagtt

SEQ ID NO: 4313022 - DNA, 25 bp, Homo sapien
gtactgctccatttgcatacaaagc

SEQ ID NO: 4313023 - DNA, 25 bp, Homo sapien
tacattccagtattgaagaaaacaa

SEQ ID NO: 4313024 - DNA, 25 bp, Homo sapien
taataatcagtaaaaggcattgtaa

SEQ ID NO: 4313025 - DNA, 25 bp, Homo sapien
ggcattgtaaaaagttacattccag

SEQ ID NO: 4313026 - DNA, 25 bp, Homo sapien
cgcagacgatcaattctaatggtca

SEQ ID NO: 4313027 - DNA, 25 bp, Homo sapien
tgtcatgtaaaagatcaaaccgcag

SEQ ID NO: 4313028 - DNA, 25 bp, Homo sapien
actgcctttgaatgtaagtacaagc

SEQ ID NO: 4313029 - DNA, 25 bp, Homo sapien
gagctcctaaggtaatgtcatgtaa

SEQ ID NO: 4313030 - DNA, 25 bp, Homo sapien
gcaagagtaactcttgtccagtctc

SEQ ID NO: 4313031 - DNA, 25 bp, Homo sapien
tgaatgaaagcaggatcaactgttt

SEQ ID NO: 4313032 - DNA, 25 bp, Homo sapien
tgtccagtctctgatgaatagaatg

SEQ ID NO: 4313033 - DNA, 25 bp, Homo sapien
cagccaatgaatgaaagcaggatca

SEQ ID NO: 4313034 - DNA, 25 bp, Homo sapien
caatggacaaacagggtgaatgccg

SEQ ID NO: 4313035 - DNA, 25 bp, Homo sapien
tggacaaacagggtgaatgccggct

SEQ ID NO: 4313036 - DNA, 25 bp, Homo sapien
ccacagaacaatggacaaacagggt

SEQ ID NO: 4313037 - DNA, 25 bp, Homo sapien
tgtgttgaccacagaacaatggaca

SEQ ID NO: 4313038 - DNA, 25 bp, Homo sapien
tgggtggggctacctgagttttcat

SEQ ID NO: 4313039 - DNA, 25 bp, Homo sapien
taagcattatcagaagtggagtggg

SEQ ID NO: 4313040 - DNA, 25 bp, Homo sapien
ggtggggctacctgagttttcatct

SEQ ID NO: 4313041 - DNA, 25 bp, Homo sapien
caggaaaggagctaagagaagaact

SEQ ID NO: 4313042 - DNA, 25 bp, Homo sapien
cagtcgatgatgcttctgggtacct

SEQ ID NO: 4313043 - DNA, 25 bp, Homo sapien
tacagatttgctactagggagcagg

SEQ ID NO: 4313044 - DNA, 25 bp, Homo sapien
ttgcatatcctccaagaagggacct

SEQ ID NO: 4313045 - DNA, 25 bp, Homo sapien
tgggtacctgttttcaagatgctca

SEQ ID NO: 4313046 - DNA, 25 bp, Homo sapien
taaagccataactcaagcaggaccc

SEQ ID NO: 4313047 - DNA, 25 bp, Homo sapien
tacataattcaggtgggacttgccc

SEQ ID NO: 4313048 - DNA, 25 bp, Homo sapien
cctgccttgacttgactatggtgaa

SEQ ID NO: 4313049 - DNA, 25 bp, Homo sapien
tctaattagggaacaccgaggtatc

SEQ ID NO: 4313050 - DNA, 25 bp, Homo sapien
caattgagttcaacatcagggctta

SEQ ID NO: 4313051 - DNA, 25 bp, Homo sapien
catcagggcttatttgtttacaaat

SEQ ID NO: 4313052 - DNA, 25 bp, Homo sapien
aaggatagatacaaaggaagcccaa

SEQ ID NO: 4313053 - DNA, 25 bp, Homo sapien
caaaggaagcccaattgagttcaac

SEQ ID NO: 4313054 - DNA, 25 bp, Homo sapien
tacgtcattacaagactggaagcac

SEQ ID NO: 4313055 - DNA, 25 bp, Homo sapien
tacaggcacagttatccgaaaacca

SEQ ID NO: 4313056 - DNA, 25 bp, Homo sapien
tgtgtaactacaatgggcagattcc

SEQ ID NO: 4313057 - DNA, 25 bp, Homo sapien
gattccatctgccacttatggtgga

SEQ ID NO: 4313058 - DNA, 25 bp, Homo sapien
actccactcagttacatctatcctg

SEQ ID NO: 4313059 - DNA, 25 bp, Homo sapien
tacatctatcctgaacttttcaata

SEQ ID NO: 4313060 - DNA, 25 bp, Homo sapien
cactcagttacatctatcctgaact

SEQ ID NO: 4313061 - DNA, 25 bp, Homo sapien
cagttacatctatcctgaacttttc

SEQ ID NO: 4313062 - DNA, 25 bp, Homo sapien
cctctgaaaggaggtttgctgtcct

SEQ ID NO: 4313063 - DNA, 25 bp, Homo sapien
taaataatacctctggacacatctc

SEQ ID NO: 4313064 - DNA, 25 bp, Homo sapien
ttacctactcaccatatgagctggg

SEQ ID NO: 4313065 - DNA, 25 bp, Homo sapien
catcttgggttgaggttagcagact

SEQ ID NO: 4313066 - DNA, 25 bp, Homo sapien
caaccaggggaatggcagtggagat

SEQ ID NO: 4313067 - DNA, 25 bp, Homo sapien
gagattctttgcctaattggaagtt

SEQ ID NO: 4313068 - DNA, 25 bp, Homo sapien
ggaatggcagtggagattctttgcc

SEQ ID NO: 4313069 - DNA, 25 bp, Homo sapien
aattggaagttatgagtttcagtca

SEQ ID NO: 4313070 - DNA, 25 bp, Homo sapien
ccccaaagtggataacggaagtatg

SEQ ID NO: 4313071 - DNA, 25 bp, Homo sapien
tatgtcatgtactcccccaaagtgg

SEQ ID NO: 4313072 - DNA, 25 bp, Homo sapien
aaagcagatatgtcatgtactcccc

SEQ ID NO: 4313073 - DNA, 25 bp, Homo sapien
gataacggaagtatgtgtataatat

SEQ ID NO: 4313074 - DNA, 25 bp, Homo sapien
cattccaggcaatccaaaatatttc

SEQ ID NO: 4313075 - DNA, 25 bp, Homo sapien
tccatatgggaagattctgacacag

SEQ ID NO: 4313076 - DNA, 25 bp, Homo sapien
tatgggaagattctgacacagactt

SEQ ID NO: 4313077 - DNA, 25 bp, Homo sapien
gatccatatgggaagattctgacac

SEQ ID NO: 4313078 - DNA, 25 bp, Homo sapien
ttaaggatccatatgggaagattct

SEQ ID NO: 4313079 - DNA, 25 bp, Homo sapien
cttcagaattgtcccagatggaggc

SEQ ID NO: 4313080 - DNA, 25 bp, Homo sapien
ggccatcagctgaccctatagggag

SEQ ID NO: 4313081 - DNA, 25 bp, Homo sapien
tacattgtgatgtggttggaacaaa

SEQ ID NO: 4313082 - DNA, 25 bp, Homo sapien
tgaagtaagattccacagagggaaa

SEQ ID NO: 4313083 - DNA, 25 bp, Homo sapien
ccacataagaatactttggtgaagt

SEQ ID NO: 4313084 - DNA, 25 bp, Homo sapien
cttcccatcttgtcatcaactccct

SEQ ID NO: 4313085 - DNA, 25 bp, Homo sapien
gctggctgtcccaagctatttgcat

SEQ ID NO: 4313086 - DNA, 25 bp, Homo sapien
catcttgtcatcaactccctcattg

SEQ ID NO: 4313087 - DNA, 25 bp, Homo sapien
ttgtcatcaactccctcattgcctg

SEQ ID NO: 4313088 - DNA, 25 bp, Homo sapien
gacttgacgtactggtgggttgaaa

SEQ ID NO: 4313089 - DNA, 25 bp, Homo sapien
tcaaccctggctgcgtctattccat

SEQ ID NO: 4313090 - DNA, 25 bp, Homo sapien
ttggcattttgtgccccatcaaccc

SEQ ID NO: 4313091 - DNA, 25 bp, Homo sapien
cggcctgtagagagttagagcagac

SEQ ID NO: 4313092 - DNA, 25 bp, Homo sapien
cctagcatctctgatgatattcccc

SEQ ID NO: 4313093 - DNA, 25 bp, Homo sapien
tttgcagctgcttcatagactcatg

SEQ ID NO: 4313094 - DNA, 25 bp, Homo sapien
ttttcagggcattgatacaacgccc

SEQ ID NO: 4313095 - DNA, 25 bp, Homo sapien
tctatcttctttgatcctcctagca

SEQ ID NO: 4313096 - DNA, 25 bp, Homo sapien
cacttgaggacagattgaatatggc

SEQ ID NO: 4313097 - DNA, 25 bp, Homo sapien
ccaatttgctgaatgttaagtcacc

SEQ ID NO: 4313098 - DNA, 25 bp, Homo sapien
catccactccctatcaatggcaaaa

SEQ ID NO: 4313099 - DNA, 25 bp, Homo sapien
ttattctcataaacacaagacacag

SEQ ID NO: 4313100 - DNA, 25 bp, Homo sapien
tcacgttgtcgttctctaaaatatt

SEQ ID NO: 4313101 - DNA, 25 bp, Homo sapien
ttcacgttgtcgttctctaaaatat

SEQ ID NO: 4313102 - DNA, 25 bp, Homo sapien
cttcacgttgtcgttctctaaaata

SEQ ID NO: 4313103 - DNA, 25 bp, Homo sapien
tgttctctgagcagaactaatcagt

SEQ ID NO: 4313104 - DNA, 25 bp, Homo sapien
atcaaatcggcattctaaaaatgag

SEQ ID NO: 4313105 - DNA, 25 bp, Homo sapien
gagacattgctcacattgattccta

SEQ ID NO: 4313106 - DNA, 25 bp, Homo sapien
cagtaatttggaatcaaatcggcat

SEQ ID NO: 4313107 - DNA, 25 bp, Homo sapien
tcttctttagtatgttatcatccat

SEQ ID NO: 4313108 - DNA, 25 bp, Homo sapien
tattgatcatcgtgctaccacagct

SEQ ID NO: 4313109 - DNA, 25 bp, Homo sapien
gatggctttgaagctaatgttattg

SEQ ID NO: 4313110 - DNA, 25 bp, Homo sapien
atgttattgatcatcgtgctaccac

SEQ ID NO: 4313111 - DNA, 25 bp, Homo sapien
gctttgaagctaatgttattgatca

SEQ ID NO: 4313112 - DNA, 25 bp, Homo sapien
tgaatctactgtcttgtgtaaaata

SEQ ID NO: 4313113 - DNA, 25 bp, Homo sapien
ttgcacacaaatcttgatctccatt

SEQ ID NO: 4313114 - DNA, 25 bp, Homo sapien
gttcaatgaatctactgtcttgtgt

SEQ ID NO: 4313115 - DNA, 25 bp, Homo sapien
ccggttttgctttctattgcacaca

SEQ ID NO: 4313116 - DNA, 25 bp, Homo sapien
caacttcgatccttttatgctgacg

SEQ ID NO: 4313117 - DNA, 25 bp, Homo sapien
tatgctgacggtaatgtaggtaaca

SEQ ID NO: 4313118 - DNA, 25 bp, Homo sapien
actatgccccaaatttaaagtctgg

SEQ ID NO: 4313119 - DNA, 25 bp, Homo sapien
ccttcatctgtagtgtcgggcctgt

SEQ ID NO: 4313120 - DNA, 25 bp, Homo sapien
ccaggtagcattctgatgtgtttag

SEQ ID NO: 4313121 - DNA, 25 bp, Homo sapien
tgtgtttagttgtttcccagaagca

SEQ ID NO: 4313122 - DNA, 25 bp, Homo sapien
gctttccaggtagcattctgatgtg

SEQ ID NO: 4313123 - DNA, 25 bp, Homo sapien
taataatgtctaaatctccattctc

SEQ ID NO: 4313124 - DNA, 25 bp, Homo sapien
aaaagttgatatccccaagtccttg

SEQ ID NO: 4313125 - DNA, 25 bp, Homo sapien
gaaatttctgtatttggaataacta

SEQ ID NO: 4313126 - DNA, 25 bp, Homo sapien
ctaaacaaaagttgatatccccaag

SEQ ID NO: 4313127 - DNA, 25 bp, Homo sapien
tggaataactagagacaccaaaacc

SEQ ID NO: 4313128 - DNA, 25 bp, Homo sapien
tgtagactgaaaattttggcctctg

SEQ ID NO: 4313129 - DNA, 25 bp, Homo sapien
attggactctgcataccgcctgagc

SEQ ID NO: 4313130 - DNA, 25 bp, Homo sapien
ccgcctgagcaattgttacatgtag

SEQ ID NO: 4313131 - DNA, 25 bp, Homo sapien
ttttggcctctggaaagattctcat

SEQ ID NO: 4313132 - DNA, 25 bp, Homo sapien
gagcctgaatgataacggatataat

SEQ ID NO: 4313133 - DNA, 25 bp, Homo sapien
gcacttttgtacttggactttcaga

SEQ ID NO: 4313134 - DNA, 25 bp, Homo sapien
accttgaactcatgtagcacttttg

SEQ ID NO: 4313135 - DNA, 25 bp, Homo sapien
cggatataataataccttgaactca

SEQ ID NO: 4313136 - DNA, 25 bp, Homo sapien
tggttattcacaggggcatccacca

SEQ ID NO: 4313137 - DNA, 25 bp, Homo sapien
tattcacaggggcatccaccactga

SEQ ID NO: 4313138 - DNA, 25 bp, Homo sapien
tccacactctctaggcaacctgatg

SEQ ID NO: 4313139 - DNA, 25 bp, Homo sapien
ccacactctctaggcaacctgatgg

SEQ ID NO: 4313140 - DNA, 25 bp, Homo sapien
gagtccggtctcaaaatggaggtaa

SEQ ID NO: 4313141 - DNA, 25 bp, Homo sapien
cgagtccggtctcaaaatggaggta

SEQ ID NO: 4313142 - DNA, 25 bp, Homo sapien
aactcgagttggaagaggcgagtcc

SEQ ID NO: 4313143 - DNA, 25 bp, Homo sapien
cttcctctcggtcccatattgaact

SEQ ID NO: 4313144 - DNA, 25 bp, Homo sapien
cctgatgtacaaagacacctgggca

SEQ ID NO: 4313145 - DNA, 25 bp, Homo sapien
tcatagatgacattcctctgaaggc

SEQ ID NO: 4313146 - DNA, 25 bp, Homo sapien
taactggcactgagaaaattggcat

SEQ ID NO: 4313147 - DNA, 25 bp, Homo sapien
caagcctttgtgattgacgtggagc

SEQ ID NO: 4313148 - DNA, 25 bp, Homo sapien
catgggcttagattggcacttgcag

SEQ ID NO: 4313149 - DNA, 25 bp, Homo sapien
ttttccaacactcccatgggcttag

SEQ ID NO: 4313150 - DNA, 25 bp, Homo sapien
cacttgcaggggctttgctttggaa

SEQ ID NO: 4313151 - DNA, 25 bp, Homo sapien
ccaccacgattgtctaaagaaggca

SEQ ID NO: 4313152 - DNA, 25 bp, Homo sapien
cagaaactgccggtgtatccctcca

SEQ ID NO: 4313153 - DNA, 25 bp, Homo sapien
tttttaaatgtgagtcaattgggcg

SEQ ID NO: 4313154 - DNA, 25 bp, Homo sapien
aaactgccggtgtatccctccacat

SEQ ID NO: 4313155 - DNA, 25 bp, Homo sapien
ctgccggtgtatccctccacatttg

SEQ ID NO: 4313156 - DNA, 25 bp, Homo sapien
caaagagggctgagaacctgaagat

SEQ ID NO: 4313157 - DNA, 25 bp, Homo sapien
ttggtcctttcttgtcacttgctgc

SEQ ID NO: 4313158 - DNA, 25 bp, Homo sapien
aggatgcctggcagatcctcctagt

SEQ ID NO: 4313159 - DNA, 25 bp, Homo sapien
tcatcataacttccctgtttctcac

SEQ ID NO: 4313160 - DNA, 25 bp, Homo sapien
acttgctgcatgacatgtcctccag

SEQ ID NO: 4313161 - DNA, 25 bp, Homo sapien
gagtgatgctgatattcttctggct

SEQ ID NO: 4313162 - DNA, 25 bp, Homo sapien
tctgagtgatgctgatattcttctg

SEQ ID NO: 4313163 - DNA, 25 bp, Homo sapien
tcagctttttagctatgcacagccg

SEQ ID NO: 4313164 - DNA, 25 bp, Homo sapien
ttttagctatgcacagccgctccat

SEQ ID NO: 4313165 - DNA, 25 bp, Homo sapien
tttggagcggtttctaaatacacag

SEQ ID NO: 4313166 - DNA, 25 bp, Homo sapien
tccatcttgtcccatcctgtccatt

SEQ ID NO: 4313167 - DNA, 25 bp, Homo sapien
gggtatgtgtcaagatgcctttgga

SEQ ID NO: 4313168 - DNA, 25 bp, Homo sapien
gacataaacatagctcttcccttcc

SEQ ID NO: 4313169 - DNA, 25 bp, Homo sapien
ttgccagcgttgtgagtgtacccct

SEQ ID NO: 4313170 - DNA, 25 bp, Homo sapien
gaggcttgtgttctgagtcaagatc

SEQ ID NO: 4313171 - DNA, 25 bp, Homo sapien
ccaaggacggcccaaggttgccagc

SEQ ID NO: 4313172 - DNA, 25 bp, Homo sapien
tgttcctgaggcttgtgttctgagt

SEQ ID NO: 4313173 - DNA, 25 bp, Homo sapien
gaaggctcagggaattcaggaagct

SEQ ID NO: 4313174 - DNA, 25 bp, Homo sapien
gctgagctcagatggcccaaatggg

SEQ ID NO: 4313175 - DNA, 25 bp, Homo sapien
ttagccctctgcttttgtgagttgc

SEQ ID NO: 4313176 - DNA, 25 bp, Homo sapien
tcaggaagctttttcaggtagcagc

SEQ ID NO: 4313177 - DNA, 25 bp, Homo sapien
tgaactacttggtgatctctgtgcc

SEQ ID NO: 4313178 - DNA, 25 bp, Homo sapien
gaactacttggtgatctctgtgcct

SEQ ID NO: 4313179 - DNA, 25 bp, Homo sapien
ctacttggtgatctctgtgcctttg

SEQ ID NO: 4313180 - DNA, 25 bp, Homo sapien
aactacttggtgatctctgtgcctt

SEQ ID NO: 4313181 - DNA, 25 bp, Homo sapien
aaaacaccgggctcttgaagtcttg

SEQ ID NO: 4313182 - DNA, 25 bp, Homo sapien
tggtgactgatagacaaggccttaa

SEQ ID NO: 4313183 - DNA, 25 bp, Homo sapien
caaggcaggtccattgcaaggtctg

SEQ ID NO: 4313184 - DNA, 25 bp, Homo sapien
tgcactctcctgtattgaaacaagg

SEQ ID NO: 4313185 - DNA, 25 bp, Homo sapien
actcggatttgacaggacctgtcca

SEQ ID NO: 4313186 - DNA, 25 bp, Homo sapien
tgactcggatttgacaggacctgtc

SEQ ID NO: 4313187 - DNA, 25 bp, Homo sapien
tcagctgactcggatttgacaggac

SEQ ID NO: 4313188 - DNA, 25 bp, Homo sapien
gctgactcggatttgacaggacctg

SEQ ID NO: 4313189 - DNA, 25 bp, Homo sapien
aggacgatgaacttggtggtcttga

SEQ ID NO: 4313190 - DNA, 25 bp, Homo sapien
ttcctgggagaggacgatgaacttg

SEQ ID NO: 4313191 - DNA, 25 bp, Homo sapien
ccattcagcgtccaggtgatggtgg

SEQ ID NO: 4313192 - DNA, 25 bp, Homo sapien
ttggtggtcttgagggtctttccat

SEQ ID NO: 4313193 - DNA, 25 bp, Homo sapien
ttgctagtggatttcagggtctcag

SEQ ID NO: 4313194 - DNA, 25 bp, Homo sapien
tgctagtggatttcagggtctcagc

SEQ ID NO: 4313195 - DNA, 25 bp, Homo sapien
acccagcactgagtgaaaatccggg

SEQ ID NO: 4313196 - DNA, 25 bp, Homo sapien
cttgccacccagcactgagtgaaaa

SEQ ID NO: 4313197 - DNA, 25 bp, Homo sapien
gggtggtaggttttggcagtggcac

SEQ ID NO: 4313198 - DNA, 25 bp, Homo sapien
cactgagtgaaaatccggggtggta

SEQ ID NO: 4313199 - DNA, 25 bp, Homo sapien
aggcatggggtcttggagtcccctt

SEQ ID NO: 4313200 - DNA, 25 bp, Homo sapien
cttctcaggcatggggtcttggagt

SEQ ID NO: 4313201 - DNA, 25 bp, Homo sapien
tcaggcatggggtcttggagtcccc

SEQ ID NO: 4313202 - DNA, 25 bp, Homo sapien
tctcaggcatggggtcttggagtcc

SEQ ID NO: 4313203 - DNA, 25 bp, Homo sapien
cttggccaggacagagcagaaatcg

SEQ ID NO: 4313204 - DNA, 25 bp, Homo sapien
tggccaggacagagcagaaatcgac

SEQ ID NO: 4313205 - DNA, 25 bp, Homo sapien
ttggccaggacagagcagaaatcga

SEQ ID NO: 4313206 - DNA, 25 bp, Homo sapien
catcttccgatagtgtcttggtact

SEQ ID NO: 4313207 - DNA, 25 bp, Homo sapien
tcttcctggtggatcgcctcctcag

SEQ ID NO: 4313208 - DNA, 25 bp, Homo sapien
aggtcatcttccgatagtgtcttgg

SEQ ID NO: 4313209 - DNA, 25 bp, Homo sapien
tcatcttccgatagtgtcttggtac

SEQ ID NO: 4313210 - DNA, 25 bp, Homo sapien
agggctgttctctagcatcagtgac

SEQ ID NO: 4313211 - DNA, 25 bp, Homo sapien
gacatctggcaactgcatttgccaa

SEQ ID NO: 4313212 - DNA, 25 bp, Homo sapien
gcaactgcatttgccaacccggttc

SEQ ID NO: 4313213 - DNA, 25 bp, Homo sapien
gggctgttctctagcatcagtgaca

SEQ ID NO: 4313214 - DNA, 25 bp, Homo sapien
tacaaagttcatagtggcctcctgc

SEQ ID NO: 4313215 - DNA, 25 bp, Homo sapien
aaccatgggttcatttgcagcctac

SEQ ID NO: 4313216 - DNA, 25 bp, Homo sapien
catacacttaaatctctgctgggcc

SEQ ID NO: 4313217 - DNA, 25 bp, Homo sapien
catgtcagatcacctaagctgctgg

SEQ ID NO: 4313218 - DNA, 25 bp, Homo sapien
gaagtccaagccccacattggtttg

SEQ ID NO: 4313219 - DNA, 25 bp, Homo sapien
agtccaagccccacattggtttgtg

SEQ ID NO: 4313220 - DNA, 25 bp, Homo sapien
gtccaagccccacattggtttgtgc

SEQ ID NO: 4313221 - DNA, 25 bp, Homo sapien
ctggaagtccaagccccacattggt

SEQ ID NO: 4313222 - DNA, 25 bp, Homo sapien
ttgtctttggagacggctttgccat

SEQ ID NO: 4313223 - DNA, 25 bp, Homo sapien
attgtctttggagacggctttgcca

SEQ ID NO: 4313224 - DNA, 25 bp, Homo sapien
cactgagcgaggcttactgatgaac

SEQ ID NO: 4313225 - DNA, 25 bp, Homo sapien
ggctgtcactgagcgaggcttactg

SEQ ID NO: 4313226 - DNA, 25 bp, Homo sapien
aggcttactgatgaaccagggctgg

SEQ ID NO: 4313227 - DNA, 25 bp, Homo sapien
tgagcgaggcttactgatgaaccag

SEQ ID NO: 4313228 - DNA, 25 bp, Homo sapien
ggatctcattcccattgtgcagcca

SEQ ID NO: 4313229 - DNA, 25 bp, Homo sapien
tctctgttcaaagtggaagtcctct

SEQ ID NO: 4313230 - DNA, 25 bp, Homo sapien
ccgggaacacttcctggatacaaag

SEQ ID NO: 4313231 - DNA, 25 bp, Homo sapien
gtgtcctccgggaacacttcctgga

SEQ ID NO: 4313232 - DNA, 25 bp, Homo sapien
ctctgatataagagctgagctgtta

SEQ ID NO: 4313233 - DNA, 25 bp, Homo sapien
tataagagctgagctgttaggcact

SEQ ID NO: 4313234 - DNA, 25 bp, Homo sapien
tcctctgatataagagctgagctgt

SEQ ID NO: 4313235 - DNA, 25 bp, Homo sapien
tgatataagagctgagctgttaggc

SEQ ID NO: 4313236 - DNA, 25 bp, Homo sapien
atctgagcgggtcctcggagagcaa

SEQ ID NO: 4313237 - DNA, 25 bp, Homo sapien
tcaaggatctgagcgggtcctcgga

SEQ ID NO: 4313238 - DNA, 25 bp, Homo sapien
tctggtggatcaaggatctgagcgg

SEQ ID NO: 4313239 - DNA, 25 bp, Homo sapien
tgagcgggtcctcggagagcaatac

SEQ ID NO: 4313240 - DNA, 25 bp, Homo sapien
acttgggccatcatagtgacctggc

SEQ ID NO: 4313241 - DNA, 25 bp, Homo sapien
cacttgggccatcatagtgacctgg

SEQ ID NO: 4313242 - DNA, 25 bp, Homo sapien
gactttgagatcagagaggccctgc

SEQ ID NO: 4313243 - DNA, 25 bp, Homo sapien
ggccctgcaggaagatgggtgcatt

SEQ ID NO: 4313244 - DNA, 25 bp, Homo sapien
caggaagatgggtgcattgggcttg

SEQ ID NO: 4313245 - DNA, 25 bp, Homo sapien
actttgagatcagagaggccctgca

SEQ ID NO: 4313246 - DNA, 25 bp, Homo sapien
gcagaaggtactcgctcttcccgct

SEQ ID NO: 4313247 - DNA, 25 bp, Homo sapien
caggcagaaggtactcgctcttccc

SEQ ID NO: 4313248 - DNA, 25 bp, Homo sapien
gccacaggcagaaggtactcgctct

SEQ ID NO: 4313249 - DNA, 25 bp, Homo sapien
gaaggtactcgctcttcccgctact

SEQ ID NO: 4313250 - DNA, 25 bp, Homo sapien
ccacatctcacagggaacaatcctg

SEQ ID NO: 4313251 - DNA, 25 bp, Homo sapien
aaagccaagccaccctgtgggtctc

SEQ ID NO: 4313252 - DNA, 25 bp, Homo sapien
ccttctggcgacaaggctgggatgt

SEQ ID NO: 4313253 - DNA, 25 bp, Homo sapien
gagaccagaatagaattaaggggaa

SEQ ID NO: 4313254 - DNA, 25 bp, Homo sapien
gagccttctggcgacaaggctggga

SEQ ID NO: 4313255 - DNA, 25 bp, Homo sapien
ttctggcgacaaggctgggatgtta

SEQ ID NO: 4313256 - DNA, 25 bp, Homo sapien
gtgctgccatgcggccgctgcacga

SEQ ID NO: 4313257 - DNA, 25 bp, Homo sapien
tgccatgcggccgctgcacgacact

SEQ ID NO: 4313258 - DNA, 25 bp, Homo sapien
atgcggccgctgcacgacactttta

SEQ ID NO: 4313259 - DNA, 25 bp, Homo sapien
ccatgcggccgctgcacgacacttt

SEQ ID NO: 4313260 - DNA, 25 bp, Homo sapien
gactctgctgtgagattggattcca

SEQ ID NO: 4313261 - DNA, 25 bp, Homo sapien
actctgctgtgagattggattccac

SEQ ID NO: 4313262 - DNA, 25 bp, Homo sapien
gaccgtggtggaggtgaaaccgatg

SEQ ID NO: 4313263 - DNA, 25 bp, Homo sapien
aatcatcttggggaccgtggtggag

SEQ ID NO: 4313264 - DNA, 25 bp, Homo sapien
gaaaccgatgtcaggcaaggacagg

SEQ ID NO: 4313265 - DNA, 25 bp, Homo sapien
tcttggggaccgtggtggaggtgaa

SEQ ID NO: 4313266 - DNA, 25 bp, Homo sapien
ccccagcaccttgaccaggcacatg

SEQ ID NO: 4313267 - DNA, 25 bp, Homo sapien
aggttccccagcaccttgaccaggc

SEQ ID NO: 4313268 - DNA, 25 bp, Homo sapien
gacaggaacagcccagcgaggaccg

SEQ ID NO: 4313269 - DNA, 25 bp, Homo sapien
acaggaacagcccagcgaggaccgg

SEQ ID NO: 4313270 - DNA, 25 bp, Homo sapien
tgcagttctggatcctctgagagtt

SEQ ID NO: 4313271 - DNA, 25 bp, Homo sapien
ctgcagttctggatcctctgagagt

SEQ ID NO: 4313272 - DNA, 25 bp, Homo sapien
ctagaagcagtttataaagaaattc

SEQ ID NO: 4313273 - DNA, 25 bp, Homo sapien
gcagtttataaagaaattccacatg

SEQ ID NO: 4313274 - DNA, 25 bp, Homo sapien
cagtttataaagaaattccacatga

SEQ ID NO: 4313275 - DNA, 25 bp, Homo sapien
gaagcagtttataaagaaattccac

SEQ ID NO: 4313276 - DNA, 25 bp, Homo sapien
caactgttgtgctgcgcagcctcca

SEQ ID NO: 4313277 - DNA, 25 bp, Homo sapien
actgttgtgctgcgcagcctccacg

SEQ ID NO: 4313278 - DNA, 25 bp, Homo sapien
aagagatcatgagattcaactgttg

SEQ ID NO: 4313279 - DNA, 25 bp, Homo sapien
tgttgtgctgcgcagcctccacggg

SEQ ID NO: 4313280 - DNA, 25 bp, Homo sapien
caccattgccggaaggtggtgacac

SEQ ID NO: 4313281 - DNA, 25 bp, Homo sapien
acaccattgccggaaggtggtgaca

SEQ ID NO: 4313282 - DNA, 25 bp, Homo sapien
ccacaccattgccggaaggtggtga

SEQ ID NO: 4313283 - DNA, 25 bp, Homo sapien
gccaaaaattggtcataggacatca

SEQ ID NO: 4313284 - DNA, 25 bp, Homo sapien
tggccaaaaattggtcataggacat

SEQ ID NO: 4313285 - DNA, 25 bp, Homo sapien
gatggccaaaaattggtcataggac

SEQ ID NO: 4313286 - DNA, 25 bp, Homo sapien
agatggccaaaaattggtcatagga

SEQ ID NO: 4313287 - DNA, 25 bp, Homo sapien
acccagcgcaggttggagaggacga

SEQ ID NO: 4313288 - DNA, 25 bp, Homo sapien
aacccagcgcaggttggagaggacg

SEQ ID NO: 4313289 - DNA, 25 bp, Homo sapien
acagggtcagcccagcgaggacggg

SEQ ID NO: 4313290 - DNA, 25 bp, Homo sapien
ggacagggtcagcccagcgaggacg

SEQ ID NO: 4313291 - DNA, 25 bp, Homo sapien
gacagggtcagcccagcgaggacgg

SEQ ID NO: 4313292 - DNA, 25 bp, Homo sapien
tattatcatccttaggttttctgac

SEQ ID NO: 4313293 - DNA, 25 bp, Homo sapien
tttattatcatccttaggttttctg

SEQ ID NO: 4313294 - DNA, 25 bp, Homo sapien
attatcatccttaggttttctgaca

SEQ ID NO: 4313295 - DNA, 25 bp, Homo sapien
tatttattatcatccttaggttttc

SEQ ID NO: 4313296 - DNA, 25 bp, Homo sapien
gtgcggctgccgcaggacactttta

SEQ ID NO: 4313297 - DNA, 25 bp, Homo sapien
cgcaggacacttttaatatccccgt

SEQ ID NO: 4313298 - DNA, 25 bp, Homo sapien
ttagactgtgctgccgtgcggctgc

SEQ ID NO: 4313299 - DNA, 25 bp, Homo sapien
cactgcaccctttctcggggaagat

SEQ ID NO: 4313300 - DNA, 25 bp, Homo sapien
ggaaatacaggttgatgttcctggt

SEQ ID NO: 4313301 - DNA, 25 bp, Homo sapien
acaggttgatgttcctggtgaagat

SEQ ID NO: 4313302 - DNA, 25 bp, Homo sapien
gttcctggtgaagatgtcacaacat

SEQ ID NO: 4313303 - DNA, 25 bp, Homo sapien
gcagggaaatacaggttgatgttcc

SEQ ID NO: 4313304 - DNA, 25 bp, Homo sapien
gaaacaggggtttaagatggctgaa

SEQ ID NO: 4313305 - DNA, 25 bp, Homo sapien
agaaacaggggtttaagatggctga

SEQ ID NO: 4313306 - DNA, 25 bp, Homo sapien
aacaggggtttaagatggctgaacg

SEQ ID NO: 4313307 - DNA, 25 bp, Homo sapien
acaggggtttaagatggctgaacga

SEQ ID NO: 4313308 - DNA, 25 bp, Homo sapien
cacactcaggaacatgtctctcttc

SEQ ID NO: 4313309 - DNA, 25 bp, Homo sapien
tcttccatgtctccaaaaatggcaa

SEQ ID NO: 4313310 - DNA, 25 bp, Homo sapien
catgtctccaaaaatggcaaagaga

SEQ ID NO: 4313311 - DNA, 25 bp, Homo sapien
tcaggaacatgtctctcttccatgt

SEQ ID NO: 4313312 - DNA, 25 bp, Homo sapien
tgactctgctgtgagactggatgtc

SEQ ID NO: 4313313 - DNA, 25 bp, Homo sapien
aacagcccagcgaggaccggctgca

SEQ ID NO: 4313314 - DNA, 25 bp, Homo sapien
tcctgagcaccgtgaccaggcacat

SEQ ID NO: 4313315 - DNA, 25 bp, Homo sapien
gactgtggtggaggtgaaaccgatg

SEQ ID NO: 4313316 - DNA, 25 bp, Homo sapien
tcgtttggatacaaccctcttttgc

SEQ ID NO: 4313317 - DNA, 25 bp, Homo sapien
aaaccaatacccagcattgtgtctg

SEQ ID NO: 4313318 - DNA, 25 bp, Homo sapien
tgtgggtctgtatcgtttggataca

SEQ ID NO: 4313319 - DNA, 25 bp, Homo sapien
gatacaaccctcttttgcctggaaa

SEQ ID NO: 4313320 - DNA, 25 bp, Homo sapien
tggaagccaaactccgaattgatga

SEQ ID NO: 4313321 - DNA, 25 bp, Homo sapien
ggaatggaagccaaactccgaattg

SEQ ID NO: 4313322 - DNA, 25 bp, Homo sapien
aatggaagccaaactccgaattgat

SEQ ID NO: 4313323 - DNA, 25 bp, Homo sapien
aataggaatggaagccaaactccga

SEQ ID NO: 4313324 - DNA, 25 bp, Homo sapien
tgtccagataagacacccagaggcc

SEQ ID NO: 4313325 - DNA, 25 bp, Homo sapien
cagggcccgagggttgtccagaaga

SEQ ID NO: 4313326 - DNA, 25 bp, Homo sapien
ccaaatccacatctccgtgacaagg

SEQ ID NO: 4313327 - DNA, 25 bp, Homo sapien
ggagaccgtgggaacacatccaaat

SEQ ID NO: 4313328 - DNA, 25 bp, Homo sapien
gcattctaggaagctttgattcatt

SEQ ID NO: 4313329 - DNA, 25 bp, Homo sapien
cagcattctaggaagctttgattca

SEQ ID NO: 4313330 - DNA, 25 bp, Homo sapien
tcagcattctaggaagctttgattc

SEQ ID NO: 4313331 - DNA, 25 bp, Homo sapien
ttctaggaagctttgattcattgac

SEQ ID NO: 4313332 - DNA, 25 bp, Homo sapien
gattcgcttgggtcaaagttcatac

SEQ ID NO: 4313333 - DNA, 25 bp, Homo sapien
cagaaacttcgattcgcttgggtca

SEQ ID NO: 4313334 - DNA, 25 bp, Homo sapien
ctttcctcagaaacttcgattcgct

SEQ ID NO: 4313335 - DNA, 25 bp, Homo sapien
ggctgccagagagtcgctaacaaga

SEQ ID NO: 4313336 - DNA, 25 bp, Homo sapien
tcaaaggttttagattaacaatggc

SEQ ID NO: 4313337 - DNA, 25 bp, Homo sapien
aactgaccctaagaataagccctgg

SEQ ID NO: 4313338 - DNA, 25 bp, Homo sapien
gaggacggcagcgtgaccgactcct

SEQ ID NO: 4313339 - DNA, 25 bp, Homo sapien
gcagcgtgaccgactcctttgaagg

SEQ ID NO: 4313340 - DNA, 25 bp, Homo sapien
cctttgaaggtggtttaagactctg

SEQ ID NO: 4313341 - DNA, 25 bp, Homo sapien
ggtcattctaggatgcactttgcag

SEQ ID NO: 4313342 - DNA, 25 bp, Homo sapien
aaaggtgaaattggctgtgtatgac

SEQ ID NO: 4313343 - DNA, 25 bp, Homo sapien
gccagaggctttatagtttgagaaa

SEQ ID NO: 4313344 - DNA, 25 bp, Homo sapien
gaggaaggtcattctaggatgcact

SEQ ID NO: 4313345 - DNA, 25 bp, Homo sapien
aatccatcctggttgtactttgcta

SEQ ID NO: 4313346 - DNA, 25 bp, Homo sapien
catcctggttgtactttgctatact

SEQ ID NO: 4313347 - DNA, 25 bp, Homo sapien
tccatcctggttgtactttgctata

SEQ ID NO: 4313348 - DNA, 25 bp, Homo sapien
ccatcctggttgtactttgctatac

SEQ ID NO: 4313349 - DNA, 25 bp, Homo sapien
tgggatttttcatggatcagttttg

SEQ ID NO: 4313350 - DNA, 25 bp, Homo sapien
aagttgggatttttcatggatcagt

SEQ ID NO: 4313351 - DNA, 25 bp, Homo sapien
ataagttgggatttttcatggatca

SEQ ID NO: 4313352 - DNA, 25 bp, Homo sapien
gttgggatttttcatggatcagttt

SEQ ID NO: 4313353 - DNA, 25 bp, Homo sapien
agattcagatagtccccatcacagt

SEQ ID NO: 4313354 - DNA, 25 bp, Homo sapien
cttatcgtagaatgccgagggcact

SEQ ID NO: 4313355 - DNA, 25 bp, Homo sapien
tggatgccacacaggttaagctatc

SEQ ID NO: 4313356 - DNA, 25 bp, Homo sapien
ttaagctatcttccttctgggaggc

SEQ ID NO: 4313357 - DNA, 25 bp, Homo sapien
cagtcgggttacaagaggcccagga

SEQ ID NO: 4313358 - DNA, 25 bp, Homo sapien
gaaaatattcagtcgggttacaaga

SEQ ID NO: 4313359 - DNA, 25 bp, Homo sapien
atattcagtcgggttacaagaggcc

SEQ ID NO: 4313360 - DNA, 25 bp, Homo sapien
ctggaaaatattcagtcgggttaca

SEQ ID NO: 4313361 - DNA, 25 bp, Homo sapien
tcatccagaacgtggatccccttcc

SEQ ID NO: 4313362 - DNA, 25 bp, Homo sapien
ttctcacacctcacaaggtcacagc

SEQ ID NO: 4313363 - DNA, 25 bp, Homo sapien
acacctcacaaggtcacagcgaggt

SEQ ID NO: 4313364 - DNA, 25 bp, Homo sapien
tcacacctcacaaggtcacagcgag

SEQ ID NO: 4313365 - DNA, 25 bp, Homo sapien
ggagacgggtgaggtacaggctcag

SEQ ID NO: 4313366 - DNA, 25 bp, Homo sapien
gacgggtgaggtacaggctcagtct

SEQ ID NO: 4313367 - DNA, 25 bp, Homo sapien
gagacgggtgaggtacaggctcagt

SEQ ID NO: 4313368 - DNA, 25 bp, Homo sapien
agacgggtgaggtacaggctcagtc

SEQ ID NO: 4313369 - DNA, 25 bp, Homo sapien
taatgtggtattggggaaatgagaa

SEQ ID NO: 4313370 - DNA, 25 bp, Homo sapien
gggaaatgagaagccatctgagcac

SEQ ID NO: 4313371 - DNA, 25 bp, Homo sapien
tgagcacaagcgctccctgagggtg

SEQ ID NO: 4313372 - DNA, 25 bp, Homo sapien
gagaagccatctgagcacaagcgct

SEQ ID NO: 4313373 - DNA, 25 bp, Homo sapien
cactctggctcgtcttccataatcg

SEQ ID NO: 4313374 - DNA, 25 bp, Homo sapien
cggcgacccctgctcaatgtggcgg

SEQ ID NO: 4313375 - DNA, 25 bp, Homo sapien
ctgctcctgactggcacccagagag

SEQ ID NO: 4313376 - DNA, 25 bp, Homo sapien
tgaggctgagcactggttctcggcc

SEQ ID NO: 4313377 - DNA, 25 bp, Homo sapien
acccctgctcaatgtggcggctgca

SEQ ID NO: 4313378 - DNA, 25 bp, Homo sapien
gccaccccaaccgttgggagtctgc

SEQ ID NO: 4313379 - DNA, 25 bp, Homo sapien
gagtctgcaggcctcgccatggcaa

SEQ ID NO: 4313380 - DNA, 25 bp, Homo sapien
tctgcaggcctcgccatggcaagag

SEQ ID NO: 4313381 - DNA, 25 bp, Homo sapien
ccaccccaaccgttgggagtctgca

SEQ ID NO: 4313382 - DNA, 25 bp, Homo sapien
gatgctgggagtaggctggtgacac

SEQ ID NO: 4313383 - DNA, 25 bp, Homo sapien
tcagcagcacaagctggacaggtct

SEQ ID NO: 4313384 - DNA, 25 bp, Homo sapien
tggacaggtctgcatgacccctggg

SEQ ID NO: 4313385 - DNA, 25 bp, Homo sapien
gtgacacgtctccacgagcggccag

SEQ ID NO: 4313386 - DNA, 25 bp, Homo sapien
gactcttcatggacacaactttcct

SEQ ID NO: 4313387 - DNA, 25 bp, Homo sapien
ctgggaccctgggtgtctgtttcgt

SEQ ID NO: 4313388 - DNA, 25 bp, Homo sapien
cttcatggacacaactttccttctc

SEQ ID NO: 4313389 - DNA, 25 bp, Homo sapien
aactgactcttcatggacacaactt

SEQ ID NO: 4313390 - DNA, 25 bp, Homo sapien
ttttggtcaacctcacgtgctgggt

SEQ ID NO: 4313391 - DNA, 25 bp, Homo sapien
gaaagttaggacacaacgccacctg

SEQ ID NO: 4313392 - DNA, 25 bp, Homo sapien
cagtacagtaggctcgggaaagtta

SEQ ID NO: 4313393 - DNA, 25 bp, Homo sapien
taggtgcatgggctaagggaacttc

SEQ ID NO: 4313394 - DNA, 25 bp, Homo sapien
tgtagtttgtgatccttgattcaga

SEQ ID NO: 4313395 - DNA, 25 bp, Homo sapien
ggctgtagtttgtgatccttgattc

SEQ ID NO: 4313396 - DNA, 25 bp, Homo sapien
gcaggctgtagtttgtgatccttga

SEQ ID NO: 4313397 - DNA, 25 bp, Homo sapien
caggctgtagtttgtgatccttgat

SEQ ID NO: 4313398 - DNA, 25 bp, Homo sapien
cagcttcttggagtgtcagggcaaa

SEQ ID NO: 4313399 - DNA, 25 bp, Homo sapien
cccgcagcttcttggagtgtcaggg

SEQ ID NO: 4313400 - DNA, 25 bp, Homo sapien
agcttcttggagtgtcagggcaaac

SEQ ID NO: 4313401 - DNA, 25 bp, Homo sapien
cgcagcttcttggagtgtcagggca

SEQ ID NO: 4313402 - DNA, 25 bp, Homo sapien
acttttttatctgcacaaagccaga

SEQ ID NO: 4313403 - DNA, 25 bp, Homo sapien
cttttttatctgcacaaagccagaa

SEQ ID NO: 4313404 - DNA, 25 bp, Homo sapien
ctggaaacagagcacgtgcttgagg

SEQ ID NO: 4313405 - DNA, 25 bp, Homo sapien
tggaaacagagcacgtgcttgagga

SEQ ID NO: 4313406 - DNA, 25 bp, Homo sapien
gaaacagagcacgtgcttgaggatg

SEQ ID NO: 4313407 - DNA, 25 bp, Homo sapien
aacagagcacgtgcttgaggatggc

SEQ ID NO: 4313408 - DNA, 25 bp, Homo sapien
ggctctgtagttaacgggctgcccc

SEQ ID NO: 4313409 - DNA, 25 bp, Homo sapien
catgtgctggcttgtttgttggctc

SEQ ID NO: 4313410 - DNA, 25 bp, Homo sapien
ggacaggcactgggttgtctgtgtc

SEQ ID NO: 4313411 - DNA, 25 bp, Homo sapien
aggcactgggttgtctgtgtctctg

SEQ ID NO: 4313412 - DNA, 25 bp, Homo sapien
ggtgtggtggatcagcctgtacagc

SEQ ID NO: 4313413 - DNA, 25 bp, Homo sapien
agtggtgtggtggatcagcctgtac

SEQ ID NO: 4313414 - DNA, 25 bp, Homo sapien
aggacagtggtgtggtggatcagcc

SEQ ID NO: 4313415 - DNA, 25 bp, Homo sapien
gacagtggtgtggtggatcagcctg

SEQ ID NO: 4313416 - DNA, 25 bp, Homo sapien
tcaggagactgctggtgctcccagc

SEQ ID NO: 4313417 - DNA, 25 bp, Homo sapien
tgtggacggtaaaggccacgtagac

SEQ ID NO: 4313418 - DNA, 25 bp, Homo sapien
agactgctggtgctcccagcaggca

SEQ ID NO: 4313419 - DNA, 25 bp, Homo sapien
cacgtagacctcaggagactgctgg

SEQ ID NO: 4313420 - DNA, 25 bp, Homo sapien
aagggccctgtcctcatctcagaag

SEQ ID NO: 4313421 - DNA, 25 bp, Homo sapien
cagagctctgttccaccagagaggg

SEQ ID NO: 4313422 - DNA, 25 bp, Homo sapien
gaaagcctgaccctgccgtgaactt

SEQ ID NO: 4313423 - DNA, 25 bp, Homo sapien
taaaaaaccagctctggttctcggc

SEQ ID NO: 4313424 - DNA, 25 bp, Homo sapien
atcatgtccattcccgacagcgtcc

SEQ ID NO: 4313425 - DNA, 25 bp, Homo sapien
tggacaccacctgcacaggatgcct

SEQ ID NO: 4313426 - DNA, 25 bp, Homo sapien
tgtccattcccgacagcgtccattg

SEQ ID NO: 4313427 - DNA, 25 bp, Homo sapien
ccatcatgtccattcccgacagcgt

SEQ ID NO: 4313428 - DNA, 25 bp, Homo sapien
tgaatgcccgggggcggtacatctt

SEQ ID NO: 4313429 - DNA, 25 bp, Homo sapien
gagagctgatggaccgtcgctacgt

SEQ ID NO: 4313430 - DNA, 25 bp, Homo sapien
agtcactgaagatgaatgcccgggg

SEQ ID NO: 4313431 - DNA, 25 bp, Homo sapien
gacagtcactgaagatgaatgcccg

SEQ ID NO: 4313432 - DNA, 25 bp, Homo sapien
ggtagagggtggcatcccatgtgac

SEQ ID NO: 4313433 - DNA, 25 bp, Homo sapien
tgaccaggcctgtggtaccatggga

SEQ ID NO: 4313434 - DNA, 25 bp, Homo sapien
agagggtggcatcccatgtgaccag

SEQ ID NO: 4313435 - DNA, 25 bp, Homo sapien
gcctgtggtaccatgggagatgatg

SEQ ID NO: 4313436 - DNA, 25 bp, Homo sapien
gggtctctgccagtgcctcatacag

SEQ ID NO: 4313437 - DNA, 25 bp, Homo sapien
gtctctgccagtgcctcatacagct

SEQ ID NO: 4313438 - DNA, 25 bp, Homo sapien
cagggtctctgccagtgcctcatac

SEQ ID NO: 4313439 - DNA, 25 bp, Homo sapien
tctgccagtgcctcatacagctcgt

SEQ ID NO: 4313440 - DNA, 25 bp, Homo sapien
aagcaccgggctttcttgactgacg

SEQ ID NO: 4313441 - DNA, 25 bp, Homo sapien
accgggctttcttgactgacggcgg

SEQ ID NO: 4313442 - DNA, 25 bp, Homo sapien
gagaaagcaccgggctttcttgact

SEQ ID NO: 4313443 - DNA, 25 bp, Homo sapien
caccgggctttcttgactgacggcg

SEQ ID NO: 4313444 - DNA, 25 bp, Homo sapien
cagaacgttggttgctcgagagccc

SEQ ID NO: 4313445 - DNA, 25 bp, Homo sapien
acagaacgttggttgctcgagagcc

SEQ ID NO: 4313446 - DNA, 25 bp, Homo sapien
cagcaactgctctcttggagcgtgt

SEQ ID NO: 4313447 - DNA, 25 bp, Homo sapien
ggtttgctgtaaggacagtcgccaa

SEQ ID NO: 4313448 - DNA, 25 bp, Homo sapien
tgtgaaccagggtttgctgtaagga

SEQ ID NO: 4313449 - DNA, 25 bp, Homo sapien
gaaccagggtttgctgtaaggacag

SEQ ID NO: 4313450 - DNA, 25 bp, Homo sapien
tattgccccgaaagtcttccctgct

SEQ ID NO: 4313451 - DNA, 25 bp, Homo sapien
tgtattgccccgaaagtcttccctg

SEQ ID NO: 4313452 - DNA, 25 bp, Homo sapien
tgccccgaaagtcttccctgctgtg

SEQ ID NO: 4313453 - DNA, 25 bp, Homo sapien
ttgccccgaaagtcttccctgctgt

SEQ ID NO: 4313454 - DNA, 25 bp, Homo sapien
catgcagatgcacttgagtccaaac

SEQ ID NO: 4313455 - DNA, 25 bp, Homo sapien
tgcagatgcacttgagtccaaaccc

SEQ ID NO: 4313456 - DNA, 25 bp, Homo sapien
gcatgcagatgcacttgagtccaaa

SEQ ID NO: 4313457 - DNA, 25 bp, Homo sapien
agatgcacttgagtccaaaccccac

SEQ ID NO: 4313458 - DNA, 25 bp, Homo sapien
tctgcaaaatatcccgcagcagctc

SEQ ID NO: 4313459 - DNA, 25 bp, Homo sapien
cttctgcaaaatatcccgcagcagc

SEQ ID NO: 4313460 - DNA, 25 bp, Homo sapien
cgcagcagctcagaatctgatgagt

SEQ ID NO: 4313461 - DNA, 25 bp, Homo sapien
atctgatgagtctcttaactttgct

SEQ ID NO: 4313462 - DNA, 25 bp, Homo sapien
gcaaagcgctatgtgatccctccct

SEQ ID NO: 4313463 - DNA, 25 bp, Homo sapien
aatagaatgtgttggcaaagcgcta

SEQ ID NO: 4313464 - DNA, 25 bp, Homo sapien
tgtgttggcaaagcgctatgtgatc

SEQ ID NO: 4313465 - DNA, 25 bp, Homo sapien
aagcgctatgtgatccctccctggg

SEQ ID NO: 4313466 - DNA, 25 bp, Homo sapien
ggtgcaattggatgagtcacaggaa

SEQ ID NO: 4313467 - DNA, 25 bp, Homo sapien
tcgctgggtgcaattggatgagtca

SEQ ID NO: 4313468 - DNA, 25 bp, Homo sapien
cagatgtcgctgggtgcaattggat

SEQ ID NO: 4313469 - DNA, 25 bp, Homo sapien
gatgtcgctgggtgcaattggatga

SEQ ID NO: 4313470 - DNA, 25 bp, Homo sapien
tgactaaaattgatctctgagtgct

SEQ ID NO: 4313471 - DNA, 25 bp, Homo sapien
aagtcgtgaaaatgatcgtgaactg

SEQ ID NO: 4313472 - DNA, 25 bp, Homo sapien
tcgtgaaaatgatcgtgaactgtac

SEQ ID NO: 4313473 - DNA, 25 bp, Homo sapien
taaaaagtcgtgaaaatgatcgtga

SEQ ID NO: 4313474 - DNA, 25 bp, Homo sapien
ttaaaaagtcgtgaaaatgatcgtg

SEQ ID NO: 4313475 - DNA, 25 bp, Homo sapien
aaggcggtggagacgccctcatctt

SEQ ID NO: 4313476 - DNA, 25 bp, Homo sapien
ccaaggcggtggagacgccctcatc

SEQ ID NO: 4313477 - DNA, 25 bp, Homo sapien
accgagcacgcgtctgcccccccaa

SEQ ID NO: 4313478 - DNA, 25 bp, Homo sapien
gagcacgcgtctgcccccccaaggc

SEQ ID NO: 4313479 - DNA, 25 bp, Homo sapien
gtttcagcacggagacccatcccgt

SEQ ID NO: 4313480 - DNA, 25 bp, Homo sapien
gcaggagcgccgggggtttcagcac

SEQ ID NO: 4313481 - DNA, 25 bp, Homo sapien
cccgcgggcctctccgctcgcccgc

SEQ ID NO: 4313482 - DNA, 25 bp, Homo sapien
ctggactcccgcgagccccgcgggc

SEQ ID NO: 4313483 - DNA, 25 bp, Homo sapien
tcggtccccgcattctcctcgggcg

SEQ ID NO: 4313484 - DNA, 25 bp, Homo sapien
tgcagcaagagttcggtccccgcat

SEQ ID NO: 4313485 - DNA, 25 bp, Homo sapien
gcaagagttcggtccccgcattctc

SEQ ID NO: 4313486 - DNA, 25 bp, Homo sapien
aaggagcgcagcgtgcgcgccgcca

SEQ ID NO: 4313487 - DNA, 25 bp, Homo sapien
cggggccgcagcgttgccgggagac

SEQ ID NO: 4313488 - DNA, 25 bp, Homo sapien
ggccgcagcgttgccgggagaccgg

SEQ ID NO: 4313489 - DNA, 25 bp, Homo sapien
cagcgttgccgggagaccgggcgga

SEQ ID NO: 4313490 - DNA, 25 bp, Homo sapien
cgcagcgttgccgggagaccgggcg

SEQ ID NO: 4313491 - DNA, 25 bp, Homo sapien
gtagggtcaggaggagcgtcctggg

SEQ ID NO: 4313492 - DNA, 25 bp, Homo sapien
agggtcaggaggagcgtcctggggg

SEQ ID NO: 4313493 - DNA, 25 bp, Homo sapien
gggtcaggaggagcgtcctgggggc

SEQ ID NO: 4313494 - DNA, 25 bp, Homo sapien
tagggtcaggaggagcgtcctgggg

SEQ ID NO: 4313495 - DNA, 25 bp, Homo sapien
ggtagggccaggataagcgtcgttg

SEQ ID NO: 4313496 - DNA, 25 bp, Homo sapien
tagggccaggataagcgtcgttggg

SEQ ID NO: 4313497 - DNA, 25 bp, Homo sapien
ggcggggccaggatgagcgttagga

SEQ ID NO: 4313498 - DNA, 25 bp, Homo sapien
gatgagcgttaggagggcgaggcct

SEQ ID NO: 4313499 - DNA, 25 bp, Homo sapien
gactttattcattttagaatgaact

SEQ ID NO: 4313500 - DNA, 25 bp, Homo sapien
tttattcattttagaatgaacttac

SEQ ID NO: 4313501 - DNA, 25 bp, Homo sapien
ggtgactttattcattttagaatga

SEQ ID NO: 4313502 - DNA, 25 bp, Homo sapien
tgactttattcattttagaatgaac

SEQ ID NO: 4313503 - DNA, 25 bp, Homo sapien
tagatgtggaggtgagggtacgcat

SEQ ID NO: 4313504 - DNA, 25 bp, Homo sapien
ttgtagatgtggaggtgagggtacg

SEQ ID NO: 4313505 - DNA, 25 bp, Homo sapien
gatgtggaggtgagggtacgcattc

SEQ ID NO: 4313506 - DNA, 25 bp, Homo sapien
tggaaacccctccttcttgtagatg

SEQ ID NO: 4313507 - DNA, 25 bp, Homo sapien
caagtccataaacttgatgtagttg

SEQ ID NO: 4313508 - DNA, 25 bp, Homo sapien
aaacttgaccaagtccataaacttg

SEQ ID NO: 4313509 - DNA, 25 bp, Homo sapien
aacttgaccaagtccataaacttga

SEQ ID NO: 4313510 - DNA, 25 bp, Homo sapien
tgaccaagtccataaacttgatgta

SEQ ID NO: 4313511 - DNA, 25 bp, Homo sapien
tcatgacagtatcgatgttcgcact

SEQ ID NO: 4313512 - DNA, 25 bp, Homo sapien
acagtatcgatgttcgcactccgct

SEQ ID NO: 4313513 - DNA, 25 bp, Homo sapien
tgacagtatcgatgttcgcactccg

SEQ ID NO: 4313514 - DNA, 25 bp, Homo sapien
catgacagtatcgatgttcgcactc

SEQ ID NO: 4313515 - DNA, 25 bp, Homo sapien
atacctttctcacaatcagcaaagc

SEQ ID NO: 4313516 - DNA, 25 bp, Homo sapien
caagagatggcaggaggttacaccc

SEQ ID NO: 4313517 - DNA, 25 bp, Homo sapien
caacaggaaaagggccattgctatc

SEQ ID NO: 4313518 - DNA, 25 bp, Homo sapien
ctatcccacaggttgccataggagg

SEQ ID NO: 4313519 - DNA, 25 bp, Homo sapien
gcaggaggttacacccaacaggaaa

SEQ ID NO: 4313520 - DNA, 25 bp, Homo sapien
aggagccgcgaatggcagagcgaca

SEQ ID NO: 4313521 - DNA, 25 bp, Homo sapien
ggagccgcgaatggcagagcgacat

SEQ ID NO: 4313522 - DNA, 25 bp, Homo sapien
caggagccgcgaatggcagagcgac

SEQ ID NO: 4313523 - DNA, 25 bp, Homo sapien
cagtcgcctggatctgtgcccaact

SEQ ID NO: 4313524 - DNA, 25 bp, Homo sapien
gcctggatctgtgcccaacttcttt

SEQ ID NO: 4313525 - DNA, 25 bp, Homo sapien
tggatctgtgcccaacttctttttg

SEQ ID NO: 4313526 - DNA, 25 bp, Homo sapien
gtcgcctggatctgtgcccaacttc

SEQ ID NO: 4313527 - DNA, 25 bp, Homo sapien
cgattgtctcagcaatgggtcttct

SEQ ID NO: 4313528 - DNA, 25 bp, Homo sapien
tgagtcttgaaggagcacttccaga

SEQ ID NO: 4313529 - DNA, 25 bp, Homo sapien
agctcttcgaatggatgttgccggg

SEQ ID NO: 4313530 - DNA, 25 bp, Homo sapien
gggtctccggaagtccttgtctctg

SEQ ID NO: 4313531 - DNA, 25 bp, Homo sapien
caatctctggtttctttgctcagtg

SEQ ID NO: 4313532 - DNA, 25 bp, Homo sapien
tcaatctctggtttctttgctcagt

SEQ ID NO: 4313533 - DNA, 25 bp, Homo sapien
aatctctggtttctttgctcagtgc

SEQ ID NO: 4313534 - DNA, 25 bp, Homo sapien
tctctggtttctttgctcagtgcac

SEQ ID NO: 4313535 - DNA, 25 bp, Homo sapien
gcctttttcagcagtgttgtccctg

SEQ ID NO: 4313536 - DNA, 25 bp, Homo sapien
ggcctttttcagcagtgttgtccct

SEQ ID NO: 4313537 - DNA, 25 bp, Homo sapien
tttcagcagtgttgtccctggagag

SEQ ID NO: 4313538 - DNA, 25 bp, Homo sapien
cagcagtgttgtccctggagagcat

SEQ ID NO: 4313539 - DNA, 25 bp, Homo sapien
gatggcagctgatggcttctcagca

SEQ ID NO: 4313540 - DNA, 25 bp, Homo sapien
gctgatggcttctcagcatctttta

SEQ ID NO: 4313541 - DNA, 25 bp, Homo sapien
tggcagctgatggcttctcagcatc

SEQ ID NO: 4313542 - DNA, 25 bp, Homo sapien
gcagctgatggcttctcagcatctt

SEQ ID NO: 4313543 - DNA, 25 bp, Homo sapien
tcagaattgcttttcttcttggtgg

SEQ ID NO: 4313544 - DNA, 25 bp, Homo sapien
agaattgcttttcttcttggtggga

SEQ ID NO: 4313545 - DNA, 25 bp, Homo sapien
cagaattgcttttcttcttggtggg

SEQ ID NO: 4313546 - DNA, 25 bp, Homo sapien
gaattgcttttcttcttggtgggaa

SEQ ID NO: 4313547 - DNA, 25 bp, Homo sapien
aaccgccattctcaagacatcgagg

SEQ ID NO: 4313548 - DNA, 25 bp, Homo sapien
cattctcaagacatcgaggcccagg

SEQ ID NO: 4313549 - DNA, 25 bp, Homo sapien
tcatcagactgcaaaccgccattct

SEQ ID NO: 4313550 - DNA, 25 bp, Homo sapien
tgggtcatcagactgcaaaccgcca

SEQ ID NO: 4313551 - DNA, 25 bp, Homo sapien
aggagtcactagtgccccagggcat

SEQ ID NO: 4313552 - DNA, 25 bp, Homo sapien
tctaacgacagttcccgattttcca

SEQ ID NO: 4313553 - DNA, 25 bp, Homo sapien
caggagatacatcgcagtgtgtcag

SEQ ID NO: 4313554 - DNA, 25 bp, Homo sapien
tcctctctaacgacagttcccgatt

SEQ ID NO: 4313555 - DNA, 25 bp, Homo sapien
ctgcatgtcaatatccttccacctc

SEQ ID NO: 4313556 - DNA, 25 bp, Homo sapien
cctgcatgtcaatatccttccacct

SEQ ID NO: 4313557 - DNA, 25 bp, Homo sapien
gcctgcatgtcaatatccttccacc

SEQ ID NO: 4313558 - DNA, 25 bp, Homo sapien
agcctgcatgtcaatatccttccac

SEQ ID NO: 4313559 - DNA, 25 bp, Homo sapien
gagagacaatcttggaaatttcatg

SEQ ID NO: 4313560 - DNA, 25 bp, Homo sapien
ggagagacaatcttggaaatttcat

SEQ ID NO: 4313561 - DNA, 25 bp, Homo sapien
gaagcagattagccaaaggagagac

SEQ ID NO: 4313562 - DNA, 25 bp, Homo sapien
gagactggaccattattctggaggc

SEQ ID NO: 4313563 - DNA, 25 bp, Homo sapien
tcctgctgcgttggctctgggctca

SEQ ID NO: 4313564 - DNA, 25 bp, Homo sapien
gcccaaagctcctgctgcgttggct

SEQ ID NO: 4313565 - DNA, 25 bp, Homo sapien
aagccagtccccatgtgcgcccaaa

SEQ ID NO: 4313566 - DNA, 25 bp, Homo sapien
ctctccccggcctgacggtccagtt

SEQ ID NO: 4313567 - DNA, 25 bp, Homo sapien
gctctccccggcctgacggtccagt

SEQ ID NO: 4313568 - DNA, 25 bp, Homo sapien
gcagcagctggagagccccgagccc

SEQ ID NO: 4313569 - DNA, 25 bp, Homo sapien
gcagctggagagccccgagccctgt

SEQ ID NO: 4313570 - DNA, 25 bp, Homo sapien
agctggagagccccgagccctgtca

SEQ ID NO: 4313571 - DNA, 25 bp, Homo sapien
ccagtaggacaggcggcagcagcag

SEQ ID NO: 4313572 - DNA, 25 bp, Homo sapien
tagcacctgttatgcactcctcaca

SEQ ID NO: 4313573 - DNA, 25 bp, Homo sapien
cccggagtgtagcaaggtgccgcat

SEQ ID NO: 4313574 - DNA, 25 bp, Homo sapien
tccctctttagtccgttgttgaaca

SEQ ID NO: 4313575 - DNA, 25 bp, Homo sapien
ttgtgagacaaacaacccggagtgt

SEQ ID NO: 4313576 - DNA, 25 bp, Homo sapien
gacctcggggtcacaagttgaggac

SEQ ID NO: 4313577 - DNA, 25 bp, Homo sapien
gtcaaaagagggacgtcgtcatcag

SEQ ID NO: 4313578 - DNA, 25 bp, Homo sapien
cctacctgacctcggggtcacaagt

SEQ ID NO: 4313579 - DNA, 25 bp, Homo sapien
agggacgtcgtcatcagggccgctt

SEQ ID NO: 4313580 - DNA, 25 bp, Homo sapien
atacacactgttggaaaccctggca

SEQ ID NO: 4313581 - DNA, 25 bp, Homo sapien
agaattctgggcatacacactgttg

SEQ ID NO: 4313582 - DNA, 25 bp, Homo sapien
acacactgttggaaaccctggcagg

SEQ ID NO: 4313583 - DNA, 25 bp, Homo sapien
gaaaccctggcaggaactacatccc

SEQ ID NO: 4313584 - DNA, 25 bp, Homo sapien
cagaggccgaatcccatttgtggag

SEQ ID NO: 4313585 - DNA, 25 bp, Homo sapien
cttgcagtcagctcaactacatact

SEQ ID NO: 4313586 - DNA, 25 bp, Homo sapien
catacttttgggattcgttgcagag

SEQ ID NO: 4313587 - DNA, 25 bp, Homo sapien
ttgcgtctcaagcaccttgcagtca

SEQ ID NO: 4313588 - DNA, 25 bp, Homo sapien
ctggatttggcagactgttggtgct

SEQ ID NO: 4313589 - DNA, 25 bp, Homo sapien
atttggcagactgttggtgctgagc

SEQ ID NO: 4313590 - DNA, 25 bp, Homo sapien
tcttcttctggatttggcagactgt

SEQ ID NO: 4313591 - DNA, 25 bp, Homo sapien
tcttctggatttggcagactgttgg

SEQ ID NO: 4313592 - DNA, 25 bp, Homo sapien
gtcacaggtaagaaccatgccatag

SEQ ID NO: 4313593 - DNA, 25 bp, Homo sapien
caggtaagaaccatgccatagaagt

SEQ ID NO: 4313594 - DNA, 25 bp, Homo sapien
gcttcaatcattgttgaacattttt

SEQ ID NO: 4313595 - DNA, 25 bp, Homo sapien
cacaggtaagaaccatgccatagaa

SEQ ID NO: 4313596 - DNA, 25 bp, Homo sapien
gactcatttcaaacacaagaccctt

SEQ ID NO: 4313597 - DNA, 25 bp, Homo sapien
actcatttcaaacacaagacccttg

SEQ ID NO: 4313598 - DNA, 25 bp, Homo sapien
atttcaaacacaagacccttgagac

SEQ ID NO: 4313599 - DNA, 25 bp, Homo sapien
tcatttcaaacacaagacccttgag

SEQ ID NO: 4313600 - DNA, 25 bp, Homo sapien
tatattgaacatagcaggtgctttc

SEQ ID NO: 4313601 - DNA, 25 bp, Homo sapien
tattgaacatagcaggtgctttcac

SEQ ID NO: 4313602 - DNA, 25 bp, Homo sapien
ttatattgaacatagcaggtgcttt

SEQ ID NO: 4313603 - DNA, 25 bp, Homo sapien
cttatattgaacatagcaggtgctt

SEQ ID NO: 4313604 - DNA, 25 bp, Homo sapien
ggcacttgttcttaacaaccgccat

SEQ ID NO: 4313605 - DNA, 25 bp, Homo sapien
tcttagaaaatggatcaactgtttt

SEQ ID NO: 4313606 - DNA, 25 bp, Homo sapien
cataaggcacttgttcttaacaacc

SEQ ID NO: 4313607 - DNA, 25 bp, Homo sapien
agaaaatggatcaactgttttcttc

SEQ ID NO: 4313608 - DNA, 25 bp, Homo sapien
taaaaagaggcttttctctcggaca

SEQ ID NO: 4313609 - DNA, 25 bp, Homo sapien
tcatgcgtggttgagttagtggaaa

SEQ ID NO: 4313610 - DNA, 25 bp, Homo sapien
caccccttcatatgaggaattcaga

SEQ ID NO: 4313611 - DNA, 25 bp, Homo sapien
ttcctccagcattggtatcccatgg

SEQ ID NO: 4313612 - DNA, 25 bp, Homo sapien
gaagtttcagcagaatagcaccaaa

SEQ ID NO: 4313613 - DNA, 25 bp, Homo sapien
caagtgatgacaatacaagacggag

SEQ ID NO: 4313614 - DNA, 25 bp, Homo sapien
tgagcccctaatcatcagactggga

SEQ ID NO: 4313615 - DNA, 25 bp, Homo sapien
caagacggagtcaaagagcccaact

SEQ ID NO: 4313616 - DNA, 25 bp, Homo sapien
tctgcaggtcccttgcagaaggagc

SEQ ID NO: 4313617 - DNA, 25 bp, Homo sapien
tctaaagcagcattcagaggtggct

SEQ ID NO: 4313618 - DNA, 25 bp, Homo sapien
caggagggagaagcttctaaagcag

SEQ ID NO: 4313619 - DNA, 25 bp, Homo sapien
tgcagccatctgcacactgtttgcc

SEQ ID NO: 4313620 - DNA, 25 bp, Homo sapien
ccaagttaatggtctacgcagaaaa

SEQ ID NO: 4313621 - DNA, 25 bp, Homo sapien
ttaccaagttaatggtctacgcaga

SEQ ID NO: 4313622 - DNA, 25 bp, Homo sapien
aaagaaacggctgctgatcctcaca

SEQ ID NO: 4313623 - DNA, 25 bp, Homo sapien
caagttaatggtctacgcagaaaaa

SEQ ID NO: 4313624 - DNA, 25 bp, Homo sapien
aaccttccagagaactgtcctcctt

SEQ ID NO: 4313625 - DNA, 25 bp, Homo sapien
cttctcatcctttccgtgatcggcc

SEQ ID NO: 4313626 - DNA, 25 bp, Homo sapien
tcccgggatctcagagaaaattcac

SEQ ID NO: 4313627 - DNA, 25 bp, Homo sapien
tgatcggccctggaaaaccttccag

SEQ ID NO: 4313628 - DNA, 25 bp, Homo sapien
gttcagtgtccaggtgacccaagct

SEQ ID NO: 4313629 - DNA, 25 bp, Homo sapien
ctgagttcagtgtccaggtgaccca

SEQ ID NO: 4313630 - DNA, 25 bp, Homo sapien
gagttcagtgtccaggtgacccaag

SEQ ID NO: 4313631 - DNA, 25 bp, Homo sapien
tgagttcagtgtccaggtgacccaa

SEQ ID NO: 4313632 - DNA, 25 bp, Homo sapien
cagagagcatccaggggcaacccca

SEQ ID NO: 4313633 - DNA, 25 bp, Homo sapien
caagcctcccagagagcatccaggg

SEQ ID NO: 4313634 - DNA, 25 bp, Homo sapien
catgagcaagcctcccagagagcat

SEQ ID NO: 4313635 - DNA, 25 bp, Homo sapien
cagtaaagtgcacggggagatgagg

SEQ ID NO: 4313636 - DNA, 25 bp, Homo sapien
gcaaggaactttgcctctctgtccc

SEQ ID NO: 4313637 - DNA, 25 bp, Homo sapien
atgcaaggaactttgcctctctgtc

SEQ ID NO: 4313638 - DNA, 25 bp, Homo sapien
ccgggggatgcaaggaactttgcct

SEQ ID NO: 4313639 - DNA, 25 bp, Homo sapien
agcgccccgggggatgcaaggaact

SEQ ID NO: 4313640 - DNA, 25 bp, Homo sapien
cctctccgtcctcgcagtcctcggg

SEQ ID NO: 4313641 - DNA, 25 bp, Homo sapien
cctgcccggccgcggcgcgtcctct

SEQ ID NO: 4313642 - DNA, 25 bp, Homo sapien
cggccgcggcgcgtcctctccgtcc

SEQ ID NO: 4313643 - DNA, 25 bp, Homo sapien
ggcgcgtcctctccgtcctcgcagt

SEQ ID NO: 4313644 - DNA, 25 bp, Homo sapien
ctgccggaaggactggccatggctc

SEQ ID NO: 4313645 - DNA, 25 bp, Homo sapien
ttcccccctccctccagcaacagcc

SEQ ID NO: 4313646 - DNA, 25 bp, Homo sapien
ccctccctccagcaacagccgcagc

SEQ ID NO: 4313647 - DNA, 25 bp, Homo sapien
tcttgccagtggcttcggagctgcc

SEQ ID NO: 4313648 - DNA, 25 bp, Homo sapien
ctgcccggcctaggcggtcgctgtc

SEQ ID NO: 4313649 - DNA, 25 bp, Homo sapien
cgctccggccaagccttgcacctcc

SEQ ID NO: 4313650 - DNA, 25 bp, Homo sapien
ctccggccaagccttgcacctcctc

SEQ ID NO: 4313651 - DNA, 25 bp, Homo sapien
gcccgctccggccaagccttgcacc

SEQ ID NO: 4313652 - DNA, 25 bp, Homo sapien
caataatgagcttgtgtatgtcaac

SEQ ID NO: 4313653 - DNA, 25 bp, Homo sapien
tgtaatgcaataatgagcttgtgta

SEQ ID NO: 4313654 - DNA, 25 bp, Homo sapien
tttgttggataaaatgtaatgcaat

SEQ ID NO: 4313655 - DNA, 25 bp, Homo sapien
tgcaataatgagcttgtgtatgtca

SEQ ID NO: 4313656 - DNA, 25 bp, Homo sapien
agcctggatctgccgcaccatgtct

SEQ ID NO: 4313657 - DNA, 25 bp, Homo sapien
tggatctgccgcaccatgtctgtct

SEQ ID NO: 4313658 - DNA, 25 bp, Homo sapien
tccgggtcgaaatgcgccccgttca

SEQ ID NO: 4313659 - DNA, 25 bp, Homo sapien
cctggatctgccgcaccatgtctgt

SEQ ID NO: 4313660 - DNA, 25 bp, Homo sapien
tccgccgtcgctccgtgaggctccc

SEQ ID NO: 4313661 - DNA, 25 bp, Homo sapien
gccgtcgctccgtgaggctccccct

SEQ ID NO: 4313662 - DNA, 25 bp, Homo sapien
gtcgctccgtgaggctccccctcgg

SEQ ID NO: 4313663 - DNA, 25 bp, Homo sapien
ccttcagagaggccgtagtaaagct

SEQ ID NO: 4313664 - DNA, 25 bp, Homo sapien
taggcccagcggcagctgccaccac

SEQ ID NO: 4313665 - DNA, 25 bp, Homo sapien
ctaggcccagcggcagctgccacca

SEQ ID NO: 4313666 - DNA, 25 bp, Homo sapien
gcccagcggcagctgccaccaccat

SEQ ID NO: 4313667 - DNA, 25 bp, Homo sapien
aggcccagcggcagctgccaccacc

SEQ ID NO: 4313668 - DNA, 25 bp, Homo sapien
acactttgtatatccctctttccta

SEQ ID NO: 4313669 - DNA, 25 bp, Homo sapien
caggacactttgtatatccctcttt

SEQ ID NO: 4313670 - DNA, 25 bp, Homo sapien
tatatccctctttcctaggctgtag

SEQ ID NO: 4313671 - DNA, 25 bp, Homo sapien
ccctctttcctaggctgtagatgaa

SEQ ID NO: 4313672 - DNA, 25 bp, Homo sapien
tccacattcttgatgatggtgaata

SEQ ID NO: 4313673 - DNA, 25 bp, Homo sapien
gagagggttcacagacaaaattagt

SEQ ID NO: 4313674 - DNA, 25 bp, Homo sapien
gagggttcacagacaaaattagtga

SEQ ID NO: 4313675 - DNA, 25 bp, Homo sapien
tgatggtgaatagtaacacaatcca

SEQ ID NO: 4313676 - DNA, 25 bp, Homo sapien
ggacaaagaaagacatccgtgtcag

SEQ ID NO: 4313677 - DNA, 25 bp, Homo sapien
acatccgtgtcaggcagccctcata

SEQ ID NO: 4313678 - DNA, 25 bp, Homo sapien
aaggacaaagaaagacatccgtgtc

SEQ ID NO: 4313679 - DNA, 25 bp, Homo sapien
tccgtgtcaggcagccctcataaga

SEQ ID NO: 4313680 - DNA, 25 bp, Homo sapien
tgctcgaaaagagccagcctgctga

SEQ ID NO: 4313681 - DNA, 25 bp, Homo sapien
tgagctcttctcctgctcgaaaaga

SEQ ID NO: 4313682 - DNA, 25 bp, Homo sapien
tcttctcctgctcgaaaagagccag

SEQ ID NO: 4313683 - DNA, 25 bp, Homo sapien
tctcctgctcgaaaagagccagcct

SEQ ID NO: 4313684 - DNA, 25 bp, Homo sapien
gcatggagcctggaggtacagacga

SEQ ID NO: 4313685 - DNA, 25 bp, Homo sapien
gcctggaggtacagacgagggcctc

SEQ ID NO: 4313686 - DNA, 25 bp, Homo sapien
ctgggagaatccatagagcgatgct

SEQ ID NO: 4313687 - DNA, 25 bp, Homo sapien
tccatagagcgatgctgaggcaggc

SEQ ID NO: 4313688 - DNA, 25 bp, Homo sapien
gcctccggagtctgtcgcgccctca

SEQ ID NO: 4313689 - DNA, 25 bp, Homo sapien
ctccggagtctgtcgcgccctcagg

SEQ ID NO: 4313690 - DNA, 25 bp, Homo sapien
tctcctggctgggattggcaaaggc

SEQ ID NO: 4313691 - DNA, 25 bp, Homo sapien
tcctggctgggattggcaaaggcag

SEQ ID NO: 4313692 - DNA, 25 bp, Homo sapien
gcgtcgctctcgtccgagttgtcct

SEQ ID NO: 4313693 - DNA, 25 bp, Homo sapien
tccgcgtcgctctcgtccgagttgt

SEQ ID NO: 4313694 - DNA, 25 bp, Homo sapien
ccctccgcgtcgctctcgtccgagt

SEQ ID NO: 4313695 - DNA, 25 bp, Homo sapien
tcgccctccgcgtcgctctcgtccg

SEQ ID NO: 4313696 - DNA, 25 bp, Homo sapien
cttctgctccatccgcaggtaggag

SEQ ID NO: 4313697 - DNA, 25 bp, Homo sapien
catccgcaggtaggagaccgtggcc

SEQ ID NO: 4313698 - DNA, 25 bp, Homo sapien
tgccgcggggccacgccccgccgca

SEQ ID NO: 4313699 - DNA, 25 bp, Homo sapien
gctccatccgcaggtaggagaccgt

SEQ ID NO: 4313700 - DNA, 25 bp, Homo sapien
ccacagcctgccaccagtggtagat

SEQ ID NO: 4313701 - DNA, 25 bp, Homo sapien
caggagtgaggtggctgaggcgccc

SEQ ID NO: 4313702 - DNA, 25 bp, Homo sapien
gcggctgccacatagaggatccagc

SEQ ID NO: 4313703 - DNA, 25 bp, Homo sapien
cttgttcagggagctgcccacaacc

SEQ ID NO: 4313704 - DNA, 25 bp, Homo sapien
agctgcccacaacccaaagggcggc

SEQ ID NO: 4313705 - DNA, 25 bp, Homo sapien
taaggcacgaggaggtaagccagcc

SEQ ID NO: 4313706 - DNA, 25 bp, Homo sapien
ggcacgaggaggtaagccagccact

SEQ ID NO: 4313707 - DNA, 25 bp, Homo sapien
acgaggaggtaagccagccactcca

SEQ ID NO: 4313708 - DNA, 25 bp, Homo sapien
ctgtaaggcacgaggaggtaagcca

SEQ ID NO: 4313709 - DNA, 25 bp, Homo sapien
gtgaaaagatacacatatatttaga

SEQ ID NO: 4313710 - DNA, 25 bp, Homo sapien
tacacatatatttagagttagccag

SEQ ID NO: 4313711 - DNA, 25 bp, Homo sapien
tggtgaaaagatacacatatattta

SEQ ID NO: 4313712 - DNA, 25 bp, Homo sapien
gatacacatatatttagagttagcc

SEQ ID NO: 4313713 - DNA, 25 bp, Homo sapien
tttttctctttatcaggacaaatca

SEQ ID NO: 4313714 - DNA, 25 bp, Homo sapien
tcgaacatatgcctttttctcttta

SEQ ID NO: 4313715 - DNA, 25 bp, Homo sapien
tttctctttatcaggacaaatcagg

SEQ ID NO: 4313716 - DNA, 25 bp, Homo sapien
tgcctttttctctttatcaggacaa

SEQ ID NO: 4313717 - DNA, 25 bp, Homo sapien
ctgggggtgttcttccgaggatatc

SEQ ID NO: 4313718 - DNA, 25 bp, Homo sapien
aacacaagtgtgtagttttcttctg

SEQ ID NO: 4313719 - DNA, 25 bp, Homo sapien
tcttctgtcttcttcacggccgact

SEQ ID NO: 4313720 - DNA, 25 bp, Homo sapien
atgaacacaagtgtgtagttttctt

SEQ ID NO: 4313721 - DNA, 25 bp, Homo sapien
ctggagtcacagtgtcttgggccac

SEQ ID NO: 4313722 - DNA, 25 bp, Homo sapien
agcttccttcgcttttggtgccatc

SEQ ID NO: 4313723 - DNA, 25 bp, Homo sapien
gcttccttcgcttttggtgccatct

SEQ ID NO: 4313724 - DNA, 25 bp, Homo sapien
tgacatgtggatcttctttttgcat

SEQ ID NO: 4313725 - DNA, 25 bp, Homo sapien
catgtggatcttctttttgcatgtg

SEQ ID NO: 4313726 - DNA, 25 bp, Homo sapien
gctggaacccactccctgagagctt

SEQ ID NO: 4313727 - DNA, 25 bp, Homo sapien
ttcaagaagcatgggtacctcttgt

SEQ ID NO: 4313728 - DNA, 25 bp, Homo sapien
caagaagcatgggtacctcttgtac

SEQ ID NO: 4313729 - DNA, 25 bp, Homo sapien
agcttcaagaagcatgggtacctct

SEQ ID NO: 4313730 - DNA, 25 bp, Homo sapien
tgtttgtaattacagccaaggacca

SEQ ID NO: 4313731 - DNA, 25 bp, Homo sapien
ctgtttgtaattacagccaaggacc

SEQ ID NO: 4313732 - DNA, 25 bp, Homo sapien
tgggcttggtggctgaacatctccc

SEQ ID NO: 4313733 - DNA, 25 bp, Homo sapien
cagaaccacccattcaagagggtca

SEQ ID NO: 4313734 - DNA, 25 bp, Homo sapien
gggcccagaaccacccattcaagag

SEQ ID NO: 4313735 - DNA, 25 bp, Homo sapien
ttggtggctgaacatctccctctct

SEQ ID NO: 4313736 - DNA, 25 bp, Homo sapien
gcctgtttgtcggtaagcttcagag

SEQ ID NO: 4313737 - DNA, 25 bp, Homo sapien
tctcagcctgtttgtcggtaagctt

SEQ ID NO: 4313738 - DNA, 25 bp, Homo sapien
ggtaagcttcagagctataatccca

SEQ ID NO: 4313739 - DNA, 25 bp, Homo sapien
tactctcagcctgtttgtcggtaag

SEQ ID NO: 4313740 - DNA, 25 bp, Homo sapien
caaactgcgtgaaaaatttcctgat

SEQ ID NO: 4313741 - DNA, 25 bp, Homo sapien
ccaaactgcgtgaaaaatttcctga

SEQ ID NO: 4313742 - DNA, 25 bp, Homo sapien
ggtcactttcaatggcgcctttttc

SEQ ID NO: 4313743 - DNA, 25 bp, Homo sapien
aatggcgcctttttcacgaatgtga

SEQ ID NO: 4313744 - DNA, 25 bp, Homo sapien
tggaaaggtcactttcaatggcgcc

SEQ ID NO: 4313745 - DNA, 25 bp, Homo sapien
cttcctggaaaggtcactttcaatg

SEQ ID NO: 4313746 - DNA, 25 bp, Homo sapien
tcgataaatacgctaaccacatggg

SEQ ID NO: 4313747 - DNA, 25 bp, Homo sapien
gaaccaaggtattacatcagccatc

SEQ ID NO: 4313748 - DNA, 25 bp, Homo sapien
tcagtttccctttacttgcagtgaa

SEQ ID NO: 4313749 - DNA, 25 bp, Homo sapien
gactacctggttaactatcgctgct

SEQ ID NO: 4313750 - DNA, 25 bp, Homo sapien
ttcagatcttttggcttcaacggcc

SEQ ID NO: 4313751 - DNA, 25 bp, Homo sapien
gattcagatcttttggcttcaacgg

SEQ ID NO: 4313752 - DNA, 25 bp, Homo sapien
cagatcttttggcttcaacggccat

SEQ ID NO: 4313753 - DNA, 25 bp, Homo sapien
tggattcagatcttttggcttcaac

SEQ ID NO: 4313754 - DNA, 25 bp, Homo sapien
caatgattcatcttttttatcaagg

SEQ ID NO: 4313755 - DNA, 25 bp, Homo sapien
ccttcttagttagtgatggaccaac

SEQ ID NO: 4313756 - DNA, 25 bp, Homo sapien
aacacagctattactgccagggtga

SEQ ID NO: 4313757 - DNA, 25 bp, Homo sapien
gccagggtgaatgtaataagataac

SEQ ID NO: 4313758 - DNA, 25 bp, Homo sapien
gactgcctgatccaaaaggacataa

SEQ ID NO: 4313759 - DNA, 25 bp, Homo sapien
attttgactgcctgatccaaaagga

SEQ ID NO: 4313760 - DNA, 25 bp, Homo sapien
tttgactgcctgatccaaaaggaca

SEQ ID NO: 4313761 - DNA, 25 bp, Homo sapien
ttgactgcctgatccaaaaggacat

SEQ ID NO: 4313762 - DNA, 25 bp, Homo sapien
atttcttcatgaaacttatactaac

SEQ ID NO: 4313763 - DNA, 25 bp, Homo sapien
agtcatggtcaaaataaatttcttc

SEQ ID NO: 4313764 - DNA, 25 bp, Homo sapien
ctttgtaagtcatggtcaaaataaa

SEQ ID NO: 4313765 - DNA, 25 bp, Homo sapien
ataaatttcttcatgaaacttatac

SEQ ID NO: 4313766 - DNA, 25 bp, Homo sapien
ttcgaagagtatgctccatgtcatt

SEQ ID NO: 4313767 - DNA, 25 bp, Homo sapien
gggattcgaagagtatgctccatgt

SEQ ID NO: 4313768 - DNA, 25 bp, Homo sapien
cgaagagtatgctccatgtcatttt

SEQ ID NO: 4313769 - DNA, 25 bp, Homo sapien
gattcgaagagtatgctccatgtca

SEQ ID NO: 4313770 - DNA, 25 bp, Homo sapien
ttaaaaatgaattgagatgttttca

SEQ ID NO: 4313771 - DNA, 25 bp, Homo sapien
taaaaatgaattgagatgttttcat

SEQ ID NO: 4313772 - DNA, 25 bp, Homo sapien
cttaaaaatgaattgagatgttttc

SEQ ID NO: 4313773 - DNA, 25 bp, Homo sapien
attatctccatttttcccacagcgg

SEQ ID NO: 4313774 - DNA, 25 bp, Homo sapien
ctccatttttcccacagcggagtac

SEQ ID NO: 4313775 - DNA, 25 bp, Homo sapien
ctacatcagacttttattatctcca

SEQ ID NO: 4313776 - DNA, 25 bp, Homo sapien
tatctccatttttcccacagcggag

SEQ ID NO: 4313777 - DNA, 25 bp, Homo sapien
gcgctcccgctgttccctagttgag

SEQ ID NO: 4313778 - DNA, 25 bp, Homo sapien
cctgcctgatctgtgcggcctggaa

SEQ ID NO: 4313779 - DNA, 25 bp, Homo sapien
cgctggtggcgggtacgggcccgag

SEQ ID NO: 4313780 - DNA, 25 bp, Homo sapien
tgggaacgactgtaccttccccagc

SEQ ID NO: 4313781 - DNA, 25 bp, Homo sapien
cgagtttccgtgtggctagatatta

SEQ ID NO: 4313782 - DNA, 25 bp, Homo sapien
aatcgagtttccgtgtggctagata

SEQ ID NO: 4313783 - DNA, 25 bp, Homo sapien
taaatcgagtttccgtgtggctaga

SEQ ID NO: 4313784 - DNA, 25 bp, Homo sapien
tcgagtttccgtgtggctagatatt

SEQ ID NO: 4313785 - DNA, 25 bp, Homo sapien
cccagggatccggagcaccccgtgg

SEQ ID NO: 4313786 - DNA, 25 bp, Homo sapien
tcgcctctgcccagggttctgcggg

SEQ ID NO: 4313787 - DNA, 25 bp, Homo sapien
cccaaggtcagtgtggagaaaggga

SEQ ID NO: 4313788 - DNA, 25 bp, Homo sapien
cttcgcctctgcccagggttctgcg

SEQ ID NO: 4313789 - DNA, 25 bp, Homo sapien
ttcgcctctgcccagggttctgcgg

SEQ ID NO: 4313790 - DNA, 25 bp, Homo sapien
cgtgcagcgggccttccgggagacc

SEQ ID NO: 4313791 - DNA, 25 bp, Homo sapien
gcccgtgcagcgggccttccgggag

SEQ ID NO: 4313792 - DNA, 25 bp, Homo sapien
gcagcgggccttccgggagaccagt

SEQ ID NO: 4313793 - DNA, 25 bp, Homo sapien
gacagcgccctggacacgcccttcc

SEQ ID NO: 4313794 - DNA, 25 bp, Homo sapien
ggctggaatttaagctccggcagac

SEQ ID NO: 4313795 - DNA, 25 bp, Homo sapien
tgaggctggaatttaagctccggca

SEQ ID NO: 4313796 - DNA, 25 bp, Homo sapien
tgtgaggctggaatttaagctccgg

SEQ ID NO: 4313797 - DNA, 25 bp, Homo sapien
gaggctggaatttaagctccggcag

SEQ ID NO: 4313798 - DNA, 25 bp, Homo sapien
gcgtcaaactggaatgtgaggataa

SEQ ID NO: 4313799 - DNA, 25 bp, Homo sapien
ctccagaggcgcagactcggcggga

SEQ ID NO: 4313800 - DNA, 25 bp, Homo sapien
tgaggataaggttctgggcaggatg

SEQ ID NO: 4313801 - DNA, 25 bp, Homo sapien
gctgccctccagaggcgcagactcg

SEQ ID NO: 4313802 - DNA, 25 bp, Homo sapien
agcggagcccagcactgaatcgcat

SEQ ID NO: 4313803 - DNA, 25 bp, Homo sapien
tgcttccctgcacagttcgccttct

SEQ ID NO: 4313804 - DNA, 25 bp, Homo sapien
caggaggccgggtgcagccgggcgg

SEQ ID NO: 4313805 - DNA, 25 bp, Homo sapien
ggcgggcggtgaggaccccacagct

SEQ ID NO: 4313806 - DNA, 25 bp, Homo sapien
tagagagtacaaatgcagctccctt

SEQ ID NO: 4313807 - DNA, 25 bp, Homo sapien
gctcccttacagaagcatgttgcat

SEQ ID NO: 4313808 - DNA, 25 bp, Homo sapien
gggcttttggtgtgacaatcatctg

SEQ ID NO: 4313809 - DNA, 25 bp, Homo sapien
tattttctcattcctaaaccctctc

SEQ ID NO: 4313810 - DNA, 25 bp, Homo sapien
gatagtcccgtccattcaagagtca

SEQ ID NO: 4313811 - DNA, 25 bp, Homo sapien
aatgaacgagttccacaccactgcg

SEQ ID NO: 4313812 - DNA, 25 bp, Homo sapien
cattgccgccttcacggagagggca

SEQ ID NO: 4313813 - DNA, 25 bp, Homo sapien
aaaatgttgggtgcccagtgcaggc

SEQ ID NO: 4313814 - DNA, 25 bp, Homo sapien
tgccctagctcctccggaagtggga

SEQ ID NO: 4313815 - DNA, 25 bp, Homo sapien
gaggcctctgcgtcaagcacagatg

SEQ ID NO: 4313816 - DNA, 25 bp, Homo sapien
cgcaccccagtaaatgacaggagga

SEQ ID NO: 4313817 - DNA, 25 bp, Homo sapien
tgccccggcactcgggactttgtgt

SEQ ID NO: 4313818 - DNA, 25 bp, Homo sapien
cagcctgttagatgagctcccgtca

SEQ ID NO: 4313819 - DNA, 25 bp, Homo sapien
cggtgaacctctggctcggtatgga

SEQ ID NO: 4313820 - DNA, 25 bp, Homo sapien
tgatcccaggacaaaggtactgacg

SEQ ID NO: 4313821 - DNA, 25 bp, Homo sapien
tcagtccgcgaaacactgggtcggg

SEQ ID NO: 4313822 - DNA, 25 bp, Homo sapien
agggagctagagagggggagcaaca

SEQ ID NO: 4313823 - DNA, 25 bp, Homo sapien
ccggcggccagcctcgcgcaggacc

SEQ ID NO: 4313824 - DNA, 25 bp, Homo sapien
taagcctaagcaccgccagtcgcgg

SEQ ID NO: 4313825 - DNA, 25 bp, Homo sapien
acctcccagagcgtcccgccgtcgc

SEQ ID NO: 4313826 - DNA, 25 bp, Homo sapien
gcggcgctgcgctttccgccgacct

SEQ ID NO: 4313827 - DNA, 25 bp, Homo sapien
ggcatgcagcaccatatgagaggtt

SEQ ID NO: 4313828 - DNA, 25 bp, Homo sapien
cactgtctgggcttatttgtagctg

SEQ ID NO: 4313829 - DNA, 25 bp, Homo sapien
tgtagctgtctttcttgggaagact

SEQ ID NO: 4313830 - DNA, 25 bp, Homo sapien
acatatttgaaaagacttgggtcaa

SEQ ID NO: 4313831 - DNA, 25 bp, Homo sapien
gatacaataaacaaattgtaatggg

SEQ ID NO: 4313832 - DNA, 25 bp, Homo sapien
acaagtatatggcaatatagatata

SEQ ID NO: 4313833 - DNA, 25 bp, Homo sapien
cacaagtatatggcaatatagatat

SEQ ID NO: 4313834 - DNA, 25 bp, Homo sapien
caataaacaaattgtaatgggaagg

SEQ ID NO: 4313835 - DNA, 25 bp, Homo sapien
ttgttttacactcgccagactatgg

SEQ ID NO: 4313836 - DNA, 25 bp, Homo sapien
gttgtttgtcaggaggcccggtcat

SEQ ID NO: 4313837 - DNA, 25 bp, Homo sapien
ttgaccagtagtccgtgcacagacg

SEQ ID NO: 4313838 - DNA, 25 bp, Homo sapien
tcaataactagttctccgaaacagc

SEQ ID NO: 4313839 - DNA, 25 bp, Homo sapien
gcaactgccattaattcatttcctc

SEQ ID NO: 4313840 - DNA, 25 bp, Homo sapien
cattgtgcatatataccacggtttc

SEQ ID NO: 4313841 - DNA, 25 bp, Homo sapien
tattgtgtcattcttaagcttttgc

SEQ ID NO: 4313842 - DNA, 25 bp, Homo sapien
caactcatctgtatacactgaaccc

SEQ ID NO: 4313843 - DNA, 25 bp, Homo sapien
gtcacatggttcttatctttcgttt

SEQ ID NO: 4313844 - DNA, 25 bp, Homo sapien
gaagcatgtgcctgagaacatcttc

SEQ ID NO: 4313845 - DNA, 25 bp, Homo sapien
tcagaagcatgtgcctgagaacatc

SEQ ID NO: 4313846 - DNA, 25 bp, Homo sapien
catgtgcctgagaacatcttcctga

SEQ ID NO: 4313847 - DNA, 25 bp, Homo sapien
cttcagaagcatgtgcctgagaaca

SEQ ID NO: 4313848 - DNA, 25 bp, Homo sapien
gaaactatctgacactccaaggcat

SEQ ID NO: 4313849 - DNA, 25 bp, Homo sapien
tatatattcaaccatgtatccctag

SEQ ID NO: 4313850 - DNA, 25 bp, Homo sapien
ccttttttacaaatgggatcgatct

SEQ ID NO: 4313851 - DNA, 25 bp, Homo sapien
tactgcatgagccatttacgtgaaa

SEQ ID NO: 4313852 - DNA, 25 bp, Homo sapien
cagacctttactacaggaaatgcca

SEQ ID NO: 4313853 - DNA, 25 bp, Homo sapien
aaatgccaaagggacttctagacct

SEQ ID NO: 4313854 - DNA, 25 bp, Homo sapien
gaacgcactagcaatagcacatgga

SEQ ID NO: 4313855 - DNA, 25 bp, Homo sapien
gggagactggcgtgacatattaaaa

SEQ ID NO: 4313856 - DNA, 25 bp, Homo sapien
gccctgaggcctaaaagaagagaat

SEQ ID NO: 4313857 - DNA, 25 bp, Homo sapien
gctgaatttctgtcatgccctaggg

SEQ ID NO: 4313858 - DNA, 25 bp, Homo sapien
gagaatagtttctgggatcaggccc

SEQ ID NO: 4313859 - DNA, 25 bp, Homo sapien
aaaggtcacgcatgttgtcttagca

SEQ ID NO: 4313860 - DNA, 25 bp, Homo sapien
atggcctaatacatccaccaaaaaa

SEQ ID NO: 4313861 - DNA, 25 bp, Homo sapien
atatgccaagagtcaacaaactgaa

SEQ ID NO: 4313862 - DNA, 25 bp, Homo sapien
tatatgccaagagtcaacaaactga

SEQ ID NO: 4313863 - DNA, 25 bp, Homo sapien
ataaattaaccagtcactgattatt

SEQ ID NO: 4313864 - DNA, 25 bp, Homo sapien
catgacatcagttggtttggtgcac

SEQ ID NO: 4313865 - DNA, 25 bp, Homo sapien
ttctaatgacctgggaaaatcggca

SEQ ID NO: 4313866 - DNA, 25 bp, Homo sapien
atcttaaagtttttgggcctgccag

SEQ ID NO: 4313867 - DNA, 25 bp, Homo sapien
gttctcatcccacattgaggcaggg

SEQ ID NO: 4313868 - DNA, 25 bp, Homo sapien
gccaaagcttaatccttagaaagac

SEQ ID NO: 4313869 - DNA, 25 bp, Homo sapien
agcacaatgttatgcctttttaggc

SEQ ID NO: 4313870 - DNA, 25 bp, Homo sapien
gttatcacctcagccaagcacaatg

SEQ ID NO: 4313871 - DNA, 25 bp, Homo sapien
tcaccatcaggacataacagcagag

SEQ ID NO: 4313872 - DNA, 25 bp, Homo sapien
ttctgattgtaaccaacttggtcac

SEQ ID NO: 4313873 - DNA, 25 bp, Homo sapien
ctgattgtaaccaacttggtcacat

SEQ ID NO: 4313874 - DNA, 25 bp, Homo sapien
tgattgtaaccaacttggtcacatg

SEQ ID NO: 4313875 - DNA, 25 bp, Homo sapien
tctgattgtaaccaacttggtcaca

SEQ ID NO: 4313876 - DNA, 25 bp, Homo sapien
gtagcttatccaaaccagttcccaa

SEQ ID NO: 4313877 - DNA, 25 bp, Homo sapien
cattaaggtagcttatccaaaccag

SEQ ID NO: 4313878 - DNA, 25 bp, Homo sapien
tctaccaaaaggagggaggcttagc

SEQ ID NO: 4313879 - DNA, 25 bp, Homo sapien
ctggagggatgtgtcgtccttcatt

SEQ ID NO: 4313880 - DNA, 25 bp, Homo sapien
tccaaaggatccacctcacacaagt

SEQ ID NO: 4313881 - DNA, 25 bp, Homo sapien
ttagttagggagaacatctgtgggc

SEQ ID NO: 4313882 - DNA, 25 bp, Homo sapien
tgggttaaaggaccactgacatgaa

SEQ ID NO: 4313883 - DNA, 25 bp, Homo sapien
ttcattcacagagaggattcccttc

SEQ ID NO: 4313884 - DNA, 25 bp, Homo sapien
tgatatggagatcagtgtgagtgcc

SEQ ID NO: 4313885 - DNA, 25 bp, Homo sapien
gacattgactctccacaatgatatg

SEQ ID NO: 4313886 - DNA, 25 bp, Homo sapien
aagggcagagggtcttgacattgac

SEQ ID NO: 4313887 - DNA, 25 bp, Homo sapien
ccacaatgatatggagatcagtgtg

SEQ ID NO: 4313888 - DNA, 25 bp, Homo sapien
gagggtgcacatcccagccattgga

SEQ ID NO: 4313889 - DNA, 25 bp, Homo sapien
ggacaacggaactgaggcatgcatt

SEQ ID NO: 4313890 - DNA, 25 bp, Homo sapien
gccaagtgggttctagctgcagaga

SEQ ID NO: 4313891 - DNA, 25 bp, Homo sapien
tgcttactcccatgacagaactctg

SEQ ID NO: 4313892 - DNA, 25 bp, Homo sapien
atagaaaagaatattaaggccaggc

SEQ ID NO: 4313893 - DNA, 25 bp, Homo sapien
gtgagttgtgattgcaccagcctgg

SEQ ID NO: 4313894 - DNA, 25 bp, Homo sapien
ggcaaaaccctctgtgtacaagaaa

SEQ ID NO: 4313895 - DNA, 25 bp, Homo sapien
aaatactaaaatacaccaggtgtgg

SEQ ID NO: 4313896 - DNA, 25 bp, Homo sapien
aatgattatgagggttccaaattta

SEQ ID NO: 4313897 - DNA, 25 bp, Homo sapien
aaatgattatgagggttccaaattt

SEQ ID NO: 4313898 - DNA, 25 bp, Homo sapien
aaagggtgaaatattgagaaataca

SEQ ID NO: 4313899 - DNA, 25 bp, Homo sapien
agggtgaaatattgagaaatacagt

SEQ ID NO: 4313900 - DNA, 25 bp, Homo sapien
cagtgagaatacagaatagggaagc

SEQ ID NO: 4313901 - DNA, 25 bp, Homo sapien
ccatacgtagggatgtccaattgac

SEQ ID NO: 4313902 - DNA, 25 bp, Homo sapien
tacagttccagagttcacaagagag

SEQ ID NO: 4313903 - DNA, 25 bp, Homo sapien
tatgatggccagaagtgatacagac

SEQ ID NO: 4313904 - DNA, 25 bp, Homo sapien
ccagtgctggagtagaaaatcttga

SEQ ID NO: 4313905 - DNA, 25 bp, Homo sapien
tccatatggacaactcaaggaggta

SEQ ID NO: 4313906 - DNA, 25 bp, Homo sapien
gaatttatggcttacaggaacagag

SEQ ID NO: 4313907 - DNA, 25 bp, Homo sapien
gaaaccaccttaggaaccagtgctg

SEQ ID NO: 4313908 - DNA, 25 bp, Homo sapien
accaggctcctgtggcaaatacctg

SEQ ID NO: 4313909 - DNA, 25 bp, Homo sapien
ctgagaaaacttgcttcttgcttcc

SEQ ID NO: 4313910 - DNA, 25 bp, Homo sapien
gctcctgtggcaaatacctgagaaa

SEQ ID NO: 4313911 - DNA, 25 bp, Homo sapien
tacctgagaaaacttgcttcttgct

SEQ ID NO: 4313912 - DNA, 25 bp, Homo sapien
caatgaggcccagtcgtaagactcc

SEQ ID NO: 4313913 - DNA, 25 bp, Homo sapien
tgaaaccgagtctccaatgcactag

SEQ ID NO: 4313914 - DNA, 25 bp, Homo sapien
tagtgcacttatgaaacaggccaaa

SEQ ID NO: 4313915 - DNA, 25 bp, Homo sapien
tgaagttcatagtccaaaagcagag

SEQ ID NO: 4313916 - DNA, 25 bp, Homo sapien
gtctatactgcaaactccagggcaa

SEQ ID NO: 4313917 - DNA, 25 bp, Homo sapien
gtggctcttgccaaggtagaaagat

SEQ ID NO: 4313918 - DNA, 25 bp, Homo sapien
tagagactatcctgagcaatacagt

SEQ ID NO: 4313919 - DNA, 25 bp, Homo sapien
ctattagaaggcagtcgaagtaact

SEQ ID NO: 4313920 - DNA, 25 bp, Homo sapien
gaatgtcaatggtctaaatgcaccc

SEQ ID NO: 4313921 - DNA, 25 bp, Homo sapien
gcaacgagaggaaacaaaaatcgta

SEQ ID NO: 4313922 - DNA, 25 bp, Homo sapien
aaagacaaattgttagagcccatca

SEQ ID NO: 4313923 - DNA, 25 bp, Homo sapien
gagcccatcaaaatagaggcacatc

SEQ ID NO: 4313924 - DNA, 25 bp, Homo sapien
tatggaagatagcaaacgtgatgga

SEQ ID NO: 4313925 - DNA, 25 bp, Homo sapien
aatcaaaaggtagaaatcatcgagc

SEQ ID NO: 4313926 - DNA, 25 bp, Homo sapien
aagcatgttggaagctaagacaggc

SEQ ID NO: 4313927 - DNA, 25 bp, Homo sapien
tcatcgagcttagtgaagaaagcat

SEQ ID NO: 4313928 - DNA, 25 bp, Homo sapien
agggaacacatagcctgcctcagct

SEQ ID NO: 4313929 - DNA, 25 bp, Homo sapien
gggaacacatagcctgcctcagcta

SEQ ID NO: 4313930 - DNA, 25 bp, Homo sapien
ggaacacatagcctgcctcagctac

SEQ ID NO: 4313931 - DNA, 25 bp, Homo sapien
gttgatgcctgctgaggtgtgactt

SEQ ID NO: 4313932 - DNA, 25 bp, Homo sapien
agatttctctcctatatgggtttgt

SEQ ID NO: 4313933 - DNA, 25 bp, Homo sapien
tctctcctatatgggtttgttgatg

SEQ ID NO: 4313934 - DNA, 25 bp, Homo sapien
ctcctatatgggtttgttgatgcct

SEQ ID NO: 4313935 - DNA, 25 bp, Homo sapien
tcccctgatgcgtactgaggtttga

SEQ ID NO: 4313936 - DNA, 25 bp, Homo sapien
tgagtgagtcccctgatgcgtactg

SEQ ID NO: 4313937 - DNA, 25 bp, Homo sapien
gtgagtcccctgatgcgtactgagg

SEQ ID NO: 4313938 - DNA, 25 bp, Homo sapien
cccctgatgcgtactgaggtttgac

SEQ ID NO: 4313939 - DNA, 25 bp, Homo sapien
ttcatagggtttctcccccgtgtga

SEQ ID NO: 4313940 - DNA, 25 bp, Homo sapien
acattcatagggtttctcccccgtg

SEQ ID NO: 4313941 - DNA, 25 bp, Homo sapien
tcatagggtttctcccccgtgtgaa

SEQ ID NO: 4313942 - DNA, 25 bp, Homo sapien
cacatttgctacattcatagggttt

SEQ ID NO: 4313943 - DNA, 25 bp, Homo sapien
tgagaagtgacttacagtgaaaagt

SEQ ID NO: 4313944 - DNA, 25 bp, Homo sapien
tctcttgtgtatcccaaggtttaac

SEQ ID NO: 4313945 - DNA, 25 bp, Homo sapien
tgaagtcagactttctacagcaagt

SEQ ID NO: 4313946 - DNA, 25 bp, Homo sapien
agtcagactttctacagcaagttgg

SEQ ID NO: 4313947 - DNA, 25 bp, Homo sapien
tttgctaatggagggtttctcacat

SEQ ID NO: 4313948 - DNA, 25 bp, Homo sapien
gaagtcagactttctacagcaagtt

SEQ ID NO: 4313949 - DNA, 25 bp, Homo sapien
agctgagttattacaggctttctca

SEQ ID NO: 4313950 - DNA, 25 bp, Homo sapien
atgaaccctcttatgtataaagaac

SEQ ID NO: 4313951 - DNA, 25 bp, Homo sapien
ttcattatatttaccaaaggtctgt

SEQ ID NO: 4313952 - DNA, 25 bp, Homo sapien
tgagttattacaggctttctcatat

SEQ ID NO: 4313953 - DNA, 25 bp, Homo sapien
ccccaggcttaatagggaaaagcat

SEQ ID NO: 4313954 - DNA, 25 bp, Homo sapien
aaagtggtgaaaacaagataacact

SEQ ID NO: 4313955 - DNA, 25 bp, Homo sapien
tgctccttgctctagcttgaagatc

SEQ ID NO: 4313956 - DNA, 25 bp, Homo sapien
ctctgctccttgctctagcttgaag

SEQ ID NO: 4313957 - DNA, 25 bp, Homo sapien
tccttgctctagcttgaagatcatc

SEQ ID NO: 4313958 - DNA, 25 bp, Homo sapien
tctgctccttgctctagcttgaaga

SEQ ID NO: 4313959 - DNA, 25 bp, Homo sapien
ctcccaggtgaagtgcacagctacc

SEQ ID NO: 4313960 - DNA, 25 bp, Homo sapien
ccaatgataccaggctgctgtaggt

SEQ ID NO: 4313961 - DNA, 25 bp, Homo sapien
cagctacctcctcaaaggacaccaa

SEQ ID NO: 4313962 - DNA, 25 bp, Homo sapien
ccaggtgaagtgcacagctacctcc

SEQ ID NO: 4313963 - DNA, 25 bp, Homo sapien
tgtaatgataccaggctgttgtagg

SEQ ID NO: 4313964 - DNA, 25 bp, Homo sapien
ctgtaatgataccaggctgttgtag

SEQ ID NO: 4313965 - DNA, 25 bp, Homo sapien
gtaatgataccaggctgttgtaggt

SEQ ID NO: 4313966 - DNA, 25 bp, Homo sapien
tatgtgagggaaaaagtacgcatac

SEQ ID NO: 4313967 - DNA, 25 bp, Homo sapien
gagactctcgcagtagtgtcctgga

SEQ ID NO: 4313968 - DNA, 25 bp, Homo sapien
gtagcgttctggcatcctatgtaag

SEQ ID NO: 4313969 - DNA, 25 bp, Homo sapien
cattcagaccaatgcagtagcgttc

SEQ ID NO: 4313970 - DNA, 25 bp, Homo sapien
tctagaaatctgctacacaacactg

SEQ ID NO: 4313971 - DNA, 25 bp, Homo sapien
tatacttacaactggttatgatggt

SEQ ID NO: 4313972 - DNA, 25 bp, Homo sapien
tacttacaactggttatgatggtaa

SEQ ID NO: 4313973 - DNA, 25 bp, Homo sapien
atacttacaactggttatgatggta

SEQ ID NO: 4313974 - DNA, 25 bp, Homo sapien
aaacccaaaacaatgggagtgacat

SEQ ID NO: 4313975 - DNA, 25 bp, Homo sapien
aacccaaaacaatgggagtgacatg

SEQ ID NO: 4313976 - DNA, 25 bp, Homo sapien
tgtagctcttggaaacagccagaga

SEQ ID NO: 4313977 - DNA, 25 bp, Homo sapien
tagctcttggaaacagccagagaac

SEQ ID NO: 4313978 - DNA, 25 bp, Homo sapien
gtagctcttggaaacagccagagaa

SEQ ID NO: 4313979 - DNA, 25 bp, Homo sapien
cactactcctctgggaatggggaac

SEQ ID NO: 4313980 - DNA, 25 bp, Homo sapien
taagactgaagtacccttaaggctg

SEQ ID NO: 4313981 - DNA, 25 bp, Homo sapien
aaactaggtctcgtataaacttctg

SEQ ID NO: 4313982 - DNA, 25 bp, Homo sapien
ccaggaggactaggcaggtcacaca

SEQ ID NO: 4313983 - DNA, 25 bp, Homo sapien
cgcccacgcgtctgctcccacaact

SEQ ID NO: 4313984 - DNA, 25 bp, Homo sapien
gcaccgacccgcagggacatagaac

SEQ ID NO: 4313985 - DNA, 25 bp, Homo sapien
ccacgggttcctcttcgccctcgca

SEQ ID NO: 4313986 - DNA, 25 bp, Homo sapien
ccgcgatgcgcccacgcgtctgctc

SEQ ID NO: 4313987 - DNA, 25 bp, Homo sapien
gaatgcaaaaatctactcataattt

SEQ ID NO: 4313988 - DNA, 25 bp, Homo sapien
aaaaatctactcataatttggccca

SEQ ID NO: 4313989 - DNA, 25 bp, Homo sapien
cctgtttaggcccactggcttcctg

SEQ ID NO: 4313990 - DNA, 25 bp, Homo sapien
tgtgtggcctgtttaggcccactgg

SEQ ID NO: 4313991 - DNA, 25 bp, Homo sapien
taaggctgggaatgccatagccatc

SEQ ID NO: 4313992 - DNA, 25 bp, Homo sapien
cattcagttgtaaggctgggaatgc

SEQ ID NO: 4313993 - DNA, 25 bp, Homo sapien
ctttcctgccattggattttgtcac

SEQ ID NO: 4313994 - DNA, 25 bp, Homo sapien
taaagttccaaaacgctctcactta

SEQ ID NO: 4313995 - DNA, 25 bp, Homo sapien
tcaagtgcctgcgctcctgttataa

SEQ ID NO: 4313996 - DNA, 25 bp, Homo sapien
atcaagtgcctgcgctcctgttata

SEQ ID NO: 4313997 - DNA, 25 bp, Homo sapien
caagtgcctgcgctcctgttataac

SEQ ID NO: 4313998 - DNA, 25 bp, Homo sapien
catttggcttagtccctatccttgc

SEQ ID NO: 4313999 - DNA, 25 bp, Homo sapien
gtaaacccatcatttggcttagtcc

SEQ ID NO: 4314000 - DNA, 25 bp, Homo sapien
aacccatcatttggcttagtcccta

SEQ ID NO: 4314001 - DNA, 25 bp, Homo sapien
ccatcatttggcttagtccctatcc

SEQ ID NO: 4314002 - DNA, 25 bp, Homo sapien
gctcatcattcgagccttttcctat

SEQ ID NO: 4314003 - DNA, 25 bp, Homo sapien
ttgcaccatatgctcatcattcgag

SEQ ID NO: 4314004 - DNA, 25 bp, Homo sapien
agcagttggtgacacttgcaccata

SEQ ID NO: 4314005 - DNA, 25 bp, Homo sapien
tggtgacacttgcaccatatgctca

SEQ ID NO: 4314006 - DNA, 25 bp, Homo sapien
gagaccacgtctagtacatcaagca

SEQ ID NO: 4314007 - DNA, 25 bp, Homo sapien
gtacatcaagcatccaggcctggtg

SEQ ID NO: 4314008 - DNA, 25 bp, Homo sapien
tgtgaaatcgtactcatttaatgag

SEQ ID NO: 4314009 - DNA, 25 bp, Homo sapien
catttaatgagaccacgtctagtac

SEQ ID NO: 4314010 - DNA, 25 bp, Homo sapien
ctgagaaggacgatcgatgctcttt

SEQ ID NO: 4314011 - DNA, 25 bp, Homo sapien
gaaggacgatcgatgctctttgtct

SEQ ID NO: 4314012 - DNA, 25 bp, Homo sapien
acgatcgatgctctttgtcttgtct

SEQ ID NO: 4314013 - DNA, 25 bp, Homo sapien
ggacgatcgatgctctttgtcttgt

SEQ ID NO: 4314014 - DNA, 25 bp, Homo sapien
cctgcgaactcgtttctggcgtggg

SEQ ID NO: 4314015 - DNA, 25 bp, Homo sapien
gtgtgagatgctggatgcctcctcc

SEQ ID NO: 4314016 - DNA, 25 bp, Homo sapien
cgcacaaggcatatccacagctctg

SEQ ID NO: 4314017 - DNA, 25 bp, Homo sapien
tcctgtctccagtggccgcacaagg

SEQ ID NO: 4314018 - DNA, 25 bp, Homo sapien
gggaggagcctcgagcctgctcatt

SEQ ID NO: 4314019 - DNA, 25 bp, Homo sapien
gaggagcctcgagcctgctcattag

SEQ ID NO: 4314020 - DNA, 25 bp, Homo sapien
gctcattagtagcacgggcagctcg

SEQ ID NO: 4314021 - DNA, 25 bp, Homo sapien
gagcctcgagcctgctcattagtag

SEQ ID NO: 4314022 - DNA, 25 bp, Homo sapien
gagggaggcggaaggacagcgctgc

SEQ ID NO: 4314023 - DNA, 25 bp, Homo sapien
ggaaggacagcgctgcgccaccacc

SEQ ID NO: 4314024 - DNA, 25 bp, Homo sapien
gccaccacccggaggagggagcgcg

SEQ ID NO: 4314025 - DNA, 25 bp, Homo sapien
aggcggaaggacagcgctgcgccac

SEQ ID NO: 4314026 - DNA, 25 bp, Homo sapien
gagttcggcaaagaggtgaaccgag

SEQ ID NO: 4314027 - DNA, 25 bp, Homo sapien
tggaggctgccgtctaaacctgact

SEQ ID NO: 4314028 - DNA, 25 bp, Homo sapien
tattcacacggacgctgcggagctt

SEQ ID NO: 4314029 - DNA, 25 bp, Homo sapien
tcgaaccagagacgtggcattggcg

SEQ ID NO: 4314030 - DNA, 25 bp, Homo sapien
tttaagtggccgactgacaggaaat

SEQ ID NO: 4314031 - DNA, 25 bp, Homo sapien
agtggccgactgacaggaaatattt

SEQ ID NO: 4314032 - DNA, 25 bp, Homo sapien
aaatttaagtggccgactgacagga

SEQ ID NO: 4314033 - DNA, 25 bp, Homo sapien
taagtggccgactgacaggaaatat

SEQ ID NO: 4314034 - DNA, 25 bp, Homo sapien
gattccgtggcaacactggcagata

SEQ ID NO: 4314035 - DNA, 25 bp, Homo sapien
gattcacagggagactcaattttta

SEQ ID NO: 4314036 - DNA, 25 bp, Homo sapien
tcaggataaagacaggccacattta

SEQ ID NO: 4314037 - DNA, 25 bp, Homo sapien
tgccagcttcgcagtgaatagtctt

SEQ ID NO: 4314038 - DNA, 25 bp, Homo sapien
tacaacaaatggtcctttcctgctg

SEQ ID NO: 4314039 - DNA, 25 bp, Homo sapien
cccagtttcagagatacagtagttg

SEQ ID NO: 4314040 - DNA, 25 bp, Homo sapien
agcacttccaccgagttttcagcaa

SEQ ID NO: 4314041 - DNA, 25 bp, Homo sapien
gataggctgcgtgtacatgtggccc

SEQ ID NO: 4314042 - DNA, 25 bp, Homo sapien
gcattctgataagaaggcaaggcta

SEQ ID NO: 4314043 - DNA, 25 bp, Homo sapien
ggtggctctagaattacatagcggg

SEQ ID NO: 4314044 - DNA, 25 bp, Homo sapien
tagcggggctttcgagctgcattct

SEQ ID NO: 4314045 - DNA, 25 bp, Homo sapien
tatttttcagtggtggctctagaat

SEQ ID NO: 4314046 - DNA, 25 bp, Homo sapien
tgttcttcaacgtggcccaaatatt

SEQ ID NO: 4314047 - DNA, 25 bp, Homo sapien
tccttctatctttagccttccgtgg

SEQ ID NO: 4314048 - DNA, 25 bp, Homo sapien
cttccgtggtttctcacatggacta

SEQ ID NO: 4314049 - DNA, 25 bp, Homo sapien
cttgttcttcaacgtggcccaaata

SEQ ID NO: 4314050 - DNA, 25 bp, Homo sapien
tttccatacggtatttatagtgcat

SEQ ID NO: 4314051 - DNA, 25 bp, Homo sapien
atttccatacggtatttatagtgca

SEQ ID NO: 4314052 - DNA, 25 bp, Homo sapien
gtttggaacaccactacatttggac

SEQ ID NO: 4314053 - DNA, 25 bp, Homo sapien
ttagtttggaacaccactacatttg

SEQ ID NO: 4314054 - DNA, 25 bp, Homo sapien
tgtgattaattagtttggaacacca

SEQ ID NO: 4314055 - DNA, 25 bp, Homo sapien
ggaacaccactacatttggactagc

SEQ ID NO: 4314056 - DNA, 25 bp, Homo sapien
gtaatcccagaagtaatctgtataa

SEQ ID NO: 4314057 - DNA, 25 bp, Homo sapien
gtataaaggcaattggcggctggcc

SEQ ID NO: 4314058 - DNA, 25 bp, Homo sapien
tgtataaaggcaattggcagctggc

SEQ ID NO: 4314059 - DNA, 25 bp, Homo sapien
tgtaatcccagaagtaatctgtata

SEQ ID NO: 4314060 - DNA, 25 bp, Homo sapien
aatactgtgtattccttcgaattgg

SEQ ID NO: 4314061 - DNA, 25 bp, Homo sapien
tgtactccttggaattgtctaatat

SEQ ID NO: 4314062 - DNA, 25 bp, Homo sapien
ttgcattatggcctccccacatggt

SEQ ID NO: 4314063 - DNA, 25 bp, Homo sapien
tctgagaatactgtgtattccttgg

SEQ ID NO: 4314064 - DNA, 25 bp, Homo sapien
aggggtcttcttgagcctaaagctt

SEQ ID NO: 4314065 - DNA, 25 bp, Homo sapien
ctcttttcacatactgtgccctgga

SEQ ID NO: 4314066 - DNA, 25 bp, Homo sapien
catctcctcttttcacatactgtgc

SEQ ID NO: 4314067 - DNA, 25 bp, Homo sapien
ttgagcctaaagcttttattgggcc

SEQ ID NO: 4314068 - DNA, 25 bp, Homo sapien
tttgctgctttgttccttcaccagt

SEQ ID NO: 4314069 - DNA, 25 bp, Homo sapien
ccttcaccagttctgggcctttttg

SEQ ID NO: 4314070 - DNA, 25 bp, Homo sapien
ttgttccttcaccagttctgggcct

SEQ ID NO: 4314071 - DNA, 25 bp, Homo sapien
gttctgggcctttttgctgagttga

SEQ ID NO: 4314072 - DNA, 25 bp, Homo sapien
cattaaactcctctgtaacctcttt

SEQ ID NO: 4314073 - DNA, 25 bp, Homo sapien
cagcattaaactcctctgtaacctc

SEQ ID NO: 4314074 - DNA, 25 bp, Homo sapien
agcattaaactcctctgtaacctct

SEQ ID NO: 4314075 - DNA, 25 bp, Homo sapien
gcattaaactcctctgtaacctctt

SEQ ID NO: 4314076 - DNA, 25 bp, Homo sapien
gatacagagattgccgtcagtggag

SEQ ID NO: 4314077 - DNA, 25 bp, Homo sapien
catgtgtgtgacattaatagatgtt

SEQ ID NO: 4314078 - DNA, 25 bp, Homo sapien
taatagatgttagtgatacagagat

SEQ ID NO: 4314079 - DNA, 25 bp, Homo sapien
ttgccgtcagtggagattgacagca

SEQ ID NO: 4314080 - DNA, 25 bp, Homo sapien
tctccatcgagttctgcaacggctg

SEQ ID NO: 4314081 - DNA, 25 bp, Homo sapien
tccatcgagttctgcaacggctgtg

SEQ ID NO: 4314082 - DNA, 25 bp, Homo sapien
catcgagttctgcaacggctgtgtc

SEQ ID NO: 4314083 - DNA, 25 bp, Homo sapien
ccatcgagttctgcaacggctgtgt

SEQ ID NO: 4314084 - DNA, 25 bp, Homo sapien
ggcagatagcccacatatgctagtt

SEQ ID NO: 4314085 - DNA, 25 bp, Homo sapien
taaatacttgccattaatctggagg

SEQ ID NO: 4314086 - DNA, 25 bp, Homo sapien
gaatacgaacagaaatggaagacat

SEQ ID NO: 4314087 - DNA, 25 bp, Homo sapien
tctgtttcagatatggcccttcaaa

SEQ ID NO: 4314088 - DNA, 25 bp, Homo sapien
tgctttctgtgccagggccaccttg

SEQ ID NO: 4314089 - DNA, 25 bp, Homo sapien
ggtacactggtaatagctacagcct

SEQ ID NO: 4314090 - DNA, 25 bp, Homo sapien
gaaacgacattgcttccctgcatga

SEQ ID NO: 4314091 - DNA, 25 bp, Homo sapien
tacagcctgaatgtgacagaatgca

SEQ ID NO: 4314092 - DNA, 25 bp, Homo sapien
cacatctgggagtttctgtacgctc

SEQ ID NO: 4314093 - DNA, 25 bp, Homo sapien
tccacatctgggagtttctgtacgc

SEQ ID NO: 4314094 - DNA, 25 bp, Homo sapien
ggagtttctgtacgctcttcctctg

SEQ ID NO: 4314095 - DNA, 25 bp, Homo sapien
tctgggagtttctgtacgctcttcc

SEQ ID NO: 4314096 - DNA, 25 bp, Homo sapien
gttttaagtgaagagcatagatctg

SEQ ID NO: 4314097 - DNA, 25 bp, Homo sapien
ctctgtggactccttgacttctaag

SEQ ID NO: 4314098 - DNA, 25 bp, Homo sapien
tatatttagtccttgtagtgtctct

SEQ ID NO: 4314099 - DNA, 25 bp, Homo sapien
tttaagtgaagagcatagatctgca

SEQ ID NO: 4314100 - DNA, 25 bp, Homo sapien
aacaccaagaatagcaaagccagtg

SEQ ID NO: 4314101 - DNA, 25 bp, Homo sapien
ataacaccaagaatagcaaagccag

SEQ ID NO: 4314102 - DNA, 25 bp, Homo sapien
taacaccaagaatagcaaagccagt

SEQ ID NO: 4314103 - DNA, 25 bp, Homo sapien
caccaagaatagcaaagccagtgat

SEQ ID NO: 4314104 - DNA, 25 bp, Homo sapien
tcaactgagacctgtcagcagctga

SEQ ID NO: 4314105 - DNA, 25 bp, Homo sapien
agcaagaggctgaaccacggtaggt

SEQ ID NO: 4314106 - DNA, 25 bp, Homo sapien
gggcaggaatcaactgagacctgtc

SEQ ID NO: 4314107 - DNA, 25 bp, Homo sapien
gaatcaactgagacctgtcagcagc

SEQ ID NO: 4314108 - DNA, 25 bp, Homo sapien
gatgaccattatctgcagctacaag

SEQ ID NO: 4314109 - DNA, 25 bp, Homo sapien
tgaccattatctgcagctacaagct

SEQ ID NO: 4314110 - DNA, 25 bp, Homo sapien
ttttagtgcattttgacttggtgaa

SEQ ID NO: 4314111 - DNA, 25 bp, Homo sapien
gtagtaattttagtgcattttgact

SEQ ID NO: 4314112 - DNA, 25 bp, Homo sapien
caatgtccctctggattaaatttat

SEQ ID NO: 4314113 - DNA, 25 bp, Homo sapien
cccttgaccatgtccctagacaatg

SEQ ID NO: 4314114 - DNA, 25 bp, Homo sapien
taaatttatcttcttcggtgtccat

SEQ ID NO: 4314115 - DNA, 25 bp, Homo sapien
gaaccagccgttctgttaagccttc

SEQ ID NO: 4314116 - DNA, 25 bp, Homo sapien
catggcctcatctcttcatacgtga

SEQ ID NO: 4314117 - DNA, 25 bp, Homo sapien
caggtttattctcaatgacaggttt

SEQ ID NO: 4314118 - DNA, 25 bp, Homo sapien
ctttgtgatcaatacgcgtcccagg

SEQ ID NO: 4314119 - DNA, 25 bp, Homo sapien
catacgtgaaactccctttgtgatc

SEQ ID NO: 4314120 - DNA, 25 bp, Homo sapien
agtccacttccccttgactcaccag

SEQ ID NO: 4314121 - DNA, 25 bp, Homo sapien
acttccccttgactcaccagggctg

SEQ ID NO: 4314122 - DNA, 25 bp, Homo sapien
tccccttgactcaccagggctgaat

SEQ ID NO: 4314123 - DNA, 25 bp, Homo sapien
tccacttccccttgactcaccaggg

SEQ ID NO: 4314124 - DNA, 25 bp, Homo sapien
tctaaacattgcaagatacattaac

SEQ ID NO: 4314125 - DNA, 25 bp, Homo sapien
aaaaaactctaaacattgcaagata

SEQ ID NO: 4314126 - DNA, 25 bp, Homo sapien
gcctgaaactatcagttttttaagc

SEQ ID NO: 4314127 - DNA, 25 bp, Homo sapien
gatgacagagggattccttgtctcc

SEQ ID NO: 4314128 - DNA, 25 bp, Homo sapien
tcctttcccagtatatttcaactct

SEQ ID NO: 4314129 - DNA, 25 bp, Homo sapien
cagaagatctaaaagatcttcacat

SEQ ID NO: 4314130 - DNA, 25 bp, Homo sapien
agaagatctaaaagatcttcacatc

SEQ ID NO: 4314131 - DNA, 25 bp, Homo sapien
tttcccagtatatttcaactctgga

SEQ ID NO: 4314132 - DNA, 25 bp, Homo sapien
taaaactttgtgctgacaaaatcat

SEQ ID NO: 4314133 - DNA, 25 bp, Homo sapien
aaaactttgtgctgacaaaatcatt

SEQ ID NO: 4314134 - DNA, 25 bp, Homo sapien
caatgagtgatcgttcttgctgggt

SEQ ID NO: 4314135 - DNA, 25 bp, Homo sapien
tgtgggtctgcctcaatgagtgatc

SEQ ID NO: 4314136 - DNA, 25 bp, Homo sapien
cagattgtgggtctgcctcaatgag

SEQ ID NO: 4314137 - DNA, 25 bp, Homo sapien
cgttcttgctgggtatcaaatccca

SEQ ID NO: 4314138 - DNA, 25 bp, Homo sapien
ccttctgggagctagtcttggggca

SEQ ID NO: 4314139 - DNA, 25 bp, Homo sapien
ggcgacatacactgggtaccttcat

SEQ ID NO: 4314140 - DNA, 25 bp, Homo sapien
tcaggcgacatacactgggtacctt

SEQ ID NO: 4314141 - DNA, 25 bp, Homo sapien
gcaggtcaggcgacatacactgggt

SEQ ID NO: 4314142 - DNA, 25 bp, Homo sapien
ctgtaattctctggactatatgcag

SEQ ID NO: 4314143 - DNA, 25 bp, Homo sapien
tctctggactatatgcagttcttct

SEQ ID NO: 4314144 - DNA, 25 bp, Homo sapien
cagttcttcttttagcgtattattc

SEQ ID NO: 4314145 - DNA, 25 bp, Homo sapien
tgcagttcttcttttagcgtattat

SEQ ID NO: 4314146 - DNA, 25 bp, Homo sapien
gaaatagtttgtattcagccctgga

SEQ ID NO: 4314147 - DNA, 25 bp, Homo sapien
gtcactgatgagcaaagggttttcc

SEQ ID NO: 4314148 - DNA, 25 bp, Homo sapien
cagccctggagatggtcaagaaatt

SEQ ID NO: 4314149 - DNA, 25 bp, Homo sapien
catgtataagaagaagtgaactgac

SEQ ID NO: 4314150 - DNA, 25 bp, Homo sapien
gaagacctcataagttccatctgcc

SEQ ID NO: 4314151 - DNA, 25 bp, Homo sapien
taggctccagacattcacactgaac

SEQ ID NO: 4314152 - DNA, 25 bp, Homo sapien
aaatatagaagacctcataagttcc

SEQ ID NO: 4314153 - DNA, 25 bp, Homo sapien
catacctgatttcgagtcttccaat

SEQ ID NO: 4314154 - DNA, 25 bp, Homo sapien
ctactgaagctggttcctcgacctt

SEQ ID NO: 4314155 - DNA, 25 bp, Homo sapien
actgaagctggttcctcgaccttac

SEQ ID NO: 4314156 - DNA, 25 bp, Homo sapien
tactgaagctggttcctcgacctta

SEQ ID NO: 4314157 - DNA, 25 bp, Homo sapien
taacccttctgagctgccgacagtc

SEQ ID NO: 4314158 - DNA, 25 bp, Homo sapien
ttaacccttctgagctgccgacagt

SEQ ID NO: 4314159 - DNA, 25 bp, Homo sapien
aacccttctgagctgccgacagtca

SEQ ID NO: 4314160 - DNA, 25 bp, Homo sapien
acccttctgagctgccgacagtcat

SEQ ID NO: 4314161 - DNA, 25 bp, Homo sapien
taactggagtttgaaggatttccta

SEQ ID NO: 4314162 - DNA, 25 bp, Homo sapien
gtttgaaggatttcctagagctgct

SEQ ID NO: 4314163 - DNA, 25 bp, Homo sapien
ctagagctgctgaacgtgcatggtt

SEQ ID NO: 4314164 - DNA, 25 bp, Homo sapien
tggttgattggcaactctctagcta

SEQ ID NO: 4314165 - DNA, 25 bp, Homo sapien
cttggaccaggtttccggagactgt

SEQ ID NO: 4314166 - DNA, 25 bp, Homo sapien
agactgtatctttaagacggtggtc

SEQ ID NO: 4314167 - DNA, 25 bp, Homo sapien
caggtttccggagactgtatcttta

SEQ ID NO: 4314168 - DNA, 25 bp, Homo sapien
tctttaagacggtggtcagattcca

SEQ ID NO: 4314169 - DNA, 25 bp, Homo sapien
cggtgctttgaacgccctacttcca

SEQ ID NO: 4314170 - DNA, 25 bp, Homo sapien
caaacggtgctttgaacgccctact

SEQ ID NO: 4314171 - DNA, 25 bp, Homo sapien
gataacaagcccaaccaaacggtgc

SEQ ID NO: 4314172 - DNA, 25 bp, Homo sapien
tggcaacgtcagaaacgcaagataa

SEQ ID NO: 4314173 - DNA, 25 bp, Homo sapien
ctctctgatgatgtcggaaacaaca

SEQ ID NO: 4314174 - DNA, 25 bp, Homo sapien
gtcggaaacaacacctgtctgttga

SEQ ID NO: 4314175 - DNA, 25 bp, Homo sapien
tctctgatgatgtcggaaacaacac

SEQ ID NO: 4314176 - DNA, 25 bp, Homo sapien
tcggaaacaacacctgtctgttgaa

SEQ ID NO: 4314177 - DNA, 25 bp, Homo sapien
tatcctcctcatataaattctgaga

SEQ ID NO: 4314178 - DNA, 25 bp, Homo sapien
cactctcctagaatagtgatatcct

SEQ ID NO: 4314179 - DNA, 25 bp, Homo sapien
tggttgaatgagctctgggtgtcct

SEQ ID NO: 4314180 - DNA, 25 bp, Homo sapien
aattctgagaatactcctctttaag

SEQ ID NO: 4314181 - DNA, 25 bp, Homo sapien
ctacaacatcttgagcaagccatct

SEQ ID NO: 4314182 - DNA, 25 bp, Homo sapien
tccggtccagtaattataagattgt

SEQ ID NO: 4314183 - DNA, 25 bp, Homo sapien
tacaacatcttgagcaagccatctt

SEQ ID NO: 4314184 - DNA, 25 bp, Homo sapien
cctccatctccggtccagtaattat

SEQ ID NO: 4314185 - DNA, 25 bp, Homo sapien
gccacaggggcattgtcaagatgat

SEQ ID NO: 4314186 - DNA, 25 bp, Homo sapien
tgtcaagatgatgttggaactgctt

SEQ ID NO: 4314187 - DNA, 25 bp, Homo sapien
gggcattgtcaagatgatgttggaa

SEQ ID NO: 4314188 - DNA, 25 bp, Homo sapien
tgggaaggacttagcagccacaggg

SEQ ID NO: 4314189 - DNA, 25 bp, Homo sapien
tatgtgttcgctccttttgaccatg

SEQ ID NO: 4314190 - DNA, 25 bp, Homo sapien
ctgtttatgtgttcgctccttttga

SEQ ID NO: 4314191 - DNA, 25 bp, Homo sapien
gtgttcgctccttttgaccatgcat

SEQ ID NO: 4314192 - DNA, 25 bp, Homo sapien
tttatgtgttcgctccttttgacca

SEQ ID NO: 4314193 - DNA, 25 bp, Homo sapien
gaatatgagcacctgcattcttcac

SEQ ID NO: 4314194 - DNA, 25 bp, Homo sapien
tatgagcacctgcattcttcactga

SEQ ID NO: 4314195 - DNA, 25 bp, Homo sapien
ctgaatatgagcacctgcattcttc

SEQ ID NO: 4314196 - DNA, 25 bp, Homo sapien
atatgagcacctgcattcttcactg

SEQ ID NO: 4314197 - DNA, 25 bp, Homo sapien
caagcgtaaccagggactgtgtgga

SEQ ID NO: 4314198 - DNA, 25 bp, Homo sapien
tcaagcgtaaccagggactgtgtgg

SEQ ID NO: 4314199 - DNA, 25 bp, Homo sapien
gcgtaaccagggactgtgtggacac

SEQ ID NO: 4314200 - DNA, 25 bp, Homo sapien
agcgtaaccagggactgtgtggaca

SEQ ID NO: 4314201 - DNA, 25 bp, Homo sapien
tgagaattggcataggagagcccac

SEQ ID NO: 4314202 - DNA, 25 bp, Homo sapien
cacacgtaagagaggaggcgcttcc

SEQ ID NO: 4314203 - DNA, 25 bp, Homo sapien
tgtgctagtctataccagtcaggtc

SEQ ID NO: 4314204 - DNA, 25 bp, Homo sapien
cagtcaggtcctgttataagggcca

SEQ ID NO: 4314205 - DNA, 25 bp, Homo sapien
cacttaagtgcagtacttcatcccc

SEQ ID NO: 4314206 - DNA, 25 bp, Homo sapien
cctcctctctgccactaaagtgccc

SEQ ID NO: 4314207 - DNA, 25 bp, Homo sapien
ttctctcttgtagtttagactcttt

SEQ ID NO: 4314208 - DNA, 25 bp, Homo sapien
cactaaagtgcccacttaagtgcag

SEQ ID NO: 4314209 - DNA, 25 bp, Homo sapien
gcctacattgtaattgcgtgtctaa

SEQ ID NO: 4314210 - DNA, 25 bp, Homo sapien
taattgcgtgtctaaaggcaaacag

SEQ ID NO: 4314211 - DNA, 25 bp, Homo sapien
cattgtaattgcgtgtctaaaggca

SEQ ID NO: 4314212 - DNA, 25 bp, Homo sapien
ccacttcgttgcctacattgtaatt

SEQ ID NO: 4314213 - DNA, 25 bp, Homo sapien
cagctggcactgatcactgaactcc

SEQ ID NO: 4314214 - DNA, 25 bp, Homo sapien
gcacactcatcatcgtagccaacgg

SEQ ID NO: 4314215 - DNA, 25 bp, Homo sapien
aacgggtattgcctggtactctgcc

SEQ ID NO: 4314216 - DNA, 25 bp, Homo sapien
tgaatgaccatgtcaactcccatag

SEQ ID NO: 4314217 - DNA, 25 bp, Homo sapien
agaaatcaaagtctcttctccagaa

SEQ ID NO: 4314218 - DNA, 25 bp, Homo sapien
acttggggagaaatcaaagtctctt

SEQ ID NO: 4314219 - DNA, 25 bp, Homo sapien
ctgtgagcatgtacttggggagaaa

SEQ ID NO: 4314220 - DNA, 25 bp, Homo sapien
tgtgagcatgtacttggggagaaat

SEQ ID NO: 4314221 - DNA, 25 bp, Homo sapien
tatttccatagactttgtccatcat

SEQ ID NO: 4314222 - DNA, 25 bp, Homo sapien
ctatttccatagactttgtccatca

SEQ ID NO: 4314223 - DNA, 25 bp, Homo sapien
gaaagtcacttatgtgcacggctga

SEQ ID NO: 4314224 - DNA, 25 bp, Homo sapien
actctgttgcgattttcagtccttg

SEQ ID NO: 4314225 - DNA, 25 bp, Homo sapien
taaagaaatatccaaatcattagaa

SEQ ID NO: 4314226 - DNA, 25 bp, Homo sapien
catcatgtataggaatgaacaggag

SEQ ID NO: 4314227 - DNA, 25 bp, Homo sapien
tgttgcaatcttggcaattgcactg

SEQ ID NO: 4314228 - DNA, 25 bp, Homo sapien
catccaggttcccttgaaaccaaca

SEQ ID NO: 4314229 - DNA, 25 bp, Homo sapien
atcttggcaattgcactgactgtgc

SEQ ID NO: 4314230 - DNA, 25 bp, Homo sapien
tctcatccaggttcccttgaaacca

SEQ ID NO: 4314231 - DNA, 25 bp, Homo sapien
ctgagaattctggaggttgccaatg

SEQ ID NO: 4314232 - DNA, 25 bp, Homo sapien
ggaggttgccaatgccatgatgaca

SEQ ID NO: 4314233 - DNA, 25 bp, Homo sapien
catgatgacatgcttgctgtgcctc

SEQ ID NO: 4314234 - DNA, 25 bp, Homo sapien
tgccatgatgacatgcttgctgtgc

SEQ ID NO: 4314235 - DNA, 25 bp, Homo sapien
tggcacccgttccctgagtagttgt

SEQ ID NO: 4314236 - DNA, 25 bp, Homo sapien
ccccgcttggctgactttggtttgc

SEQ ID NO: 4314237 - DNA, 25 bp, Homo sapien
ctccccgcttggctgactttggttt

SEQ ID NO: 4314238 - DNA, 25 bp, Homo sapien
ctcttttgacatagaatcaggtggc

SEQ ID NO: 4314239 - DNA, 25 bp, Homo sapien
cacaattattgttaaacctggcttc

SEQ ID NO: 4314240 - DNA, 25 bp, Homo sapien
tcagatgtctcttcttaatggcaac

SEQ ID NO: 4314241 - DNA, 25 bp, Homo sapien
gcaactggctatagggcattggaaa

SEQ ID NO: 4314242 - DNA, 25 bp, Homo sapien
tcttggtcggttgattagcaatccc

SEQ ID NO: 4314243 - DNA, 25 bp, Homo sapien
ccctttcaaagacttcaaagacctg

SEQ ID NO: 4314244 - DNA, 25 bp, Homo sapien
tgagaatggaaccctttcaaagact

SEQ ID NO: 4314245 - DNA, 25 bp, Homo sapien
gaatggaaccctttcaaagacttca

SEQ ID NO: 4314246 - DNA, 25 bp, Homo sapien
tttcaaagacttcaaagacctgcat

SEQ ID NO: 4314247 - DNA, 25 bp, Homo sapien
gggtgatatctgtgatgtactgcat

SEQ ID NO: 4314248 - DNA, 25 bp, Homo sapien
caagcactggggtgatatctgtgat

SEQ ID NO: 4314249 - DNA, 25 bp, Homo sapien
tccctgcctgtcaagcactggggtg

SEQ ID NO: 4314250 - DNA, 25 bp, Homo sapien
cactggggtgatatctgtgatgtac

SEQ ID NO: 4314251 - DNA, 25 bp, Homo sapien
ttaatacttttggtggccacataat

SEQ ID NO: 4314252 - DNA, 25 bp, Homo sapien
ccgtaggactaacttgaagtcttca

SEQ ID NO: 4314253 - DNA, 25 bp, Homo sapien
aatacttttggtggccacataatcc

SEQ ID NO: 4314254 - DNA, 25 bp, Homo sapien
tacttttggtggccacataatccat

SEQ ID NO: 4314255 - DNA, 25 bp, Homo sapien
tacctttgtcttaccaaatggagga

SEQ ID NO: 4314256 - DNA, 25 bp, Homo sapien
tccctgcaggatatcttacagacca

SEQ ID NO: 4314257 - DNA, 25 bp, Homo sapien
tctggaggagatggttctgatacct

SEQ ID NO: 4314258 - DNA, 25 bp, Homo sapien
aaatggaggatgtcgctccctgcag

SEQ ID NO: 4314259 - DNA, 25 bp, Homo sapien
attttggcaaagagaccgtacaaca

SEQ ID NO: 4314260 - DNA, 25 bp, Homo sapien
aagagaccgtacaacaggaagtcca

SEQ ID NO: 4314261 - DNA, 25 bp, Homo sapien
ggcaaagagaccgtacaacaggaag

SEQ ID NO: 4314262 - DNA, 25 bp, Homo sapien
agaccgtacaacaggaagtccaagg

SEQ ID NO: 4314263 - DNA, 25 bp, Homo sapien
catcaaccggggacggggaccatag

SEQ ID NO: 4314264 - DNA, 25 bp, Homo sapien
atggacctccatcaaccggggacgg

SEQ ID NO: 4314265 - DNA, 25 bp, Homo sapien
ggatggacctccatcaaccggggac

SEQ ID NO: 4314266 - DNA, 25 bp, Homo sapien
gatggacctccatcaaccggggacg

SEQ ID NO: 4314267 - DNA, 25 bp, Homo sapien
ctttctcatcctcagacagtttaca

SEQ ID NO: 4314268 - DNA, 25 bp, Homo sapien
gtatctctttctcatcctcagacag

SEQ ID NO: 4314269 - DNA, 25 bp, Homo sapien
gaagtatctctttctcatcctcaga

SEQ ID NO: 4314270 - DNA, 25 bp, Homo sapien
ctctttctcatcctcagacagttta

SEQ ID NO: 4314271 - DNA, 25 bp, Homo sapien
agcaacgccttcacacctaggcttt

SEQ ID NO: 4314272 - DNA, 25 bp, Homo sapien
tagcaacgccttcacacctaggctt

SEQ ID NO: 4314273 - DNA, 25 bp, Homo sapien
gcaacgccttcacacctaggctttg

SEQ ID NO: 4314274 - DNA, 25 bp, Homo sapien
ttcacacctaggctttgtttttgag

SEQ ID NO: 4314275 - DNA, 25 bp, Homo sapien
ttttagagtgattaggaatgtagat

SEQ ID NO: 4314276 - DNA, 25 bp, Homo sapien
agtgattaggaatgtagatgtagac

SEQ ID NO: 4314277 - DNA, 25 bp, Homo sapien
gagtgattaggaatgtagatgtaga

SEQ ID NO: 4314278 - DNA, 25 bp, Homo sapien
tagagtgattaggaatgtagatgta

SEQ ID NO: 4314279 - DNA, 25 bp, Homo sapien
ttgctgtgaacttaaaactgttcta

SEQ ID NO: 4314280 - DNA, 25 bp, Homo sapien
tctatactttccactaattttgctg

SEQ ID NO: 4314281 - DNA, 25 bp, Homo sapien
tactttccactaattttgctgtgaa

SEQ ID NO: 4314282 - DNA, 25 bp, Homo sapien
ggattgaaggcgtgagccacggtgc

SEQ ID NO: 4314283 - DNA, 25 bp, Homo sapien
aatagaaggttcatacacagttgga

SEQ ID NO: 4314284 - DNA, 25 bp, Homo sapien
catacacagttggaacttgtaactg

SEQ ID NO: 4314285 - DNA, 25 bp, Homo sapien
gaacttgtaactggagcctgaatat

SEQ ID NO: 4314286 - DNA, 25 bp, Homo sapien
ggttcatacacagttggaacttgta

SEQ ID NO: 4314287 - DNA, 25 bp, Homo sapien
ccaaattctttgtccaatttctgac

SEQ ID NO: 4314288 - DNA, 25 bp, Homo sapien
agttctgtctaccaaattctttgtc

SEQ ID NO: 4314289 - DNA, 25 bp, Homo sapien
tcagttctgtctaccaaattctttg

SEQ ID NO: 4314290 - DNA, 25 bp, Homo sapien
taccaaattctttgtccaatttctg

SEQ ID NO: 4314291 - DNA, 25 bp, Homo sapien
ttgattactcccacaataggtgaaa

SEQ ID NO: 4314292 - DNA, 25 bp, Homo sapien
taaggtgccacaagaatacattgca

SEQ ID NO: 4314293 - DNA, 25 bp, Homo sapien
acctggtcgttgaaattgattactc

SEQ ID NO: 4314294 - DNA, 25 bp, Homo sapien
catgtaacataaccttccctcggaa

SEQ ID NO: 4314295 - DNA, 25 bp, Homo sapien
caatatggagtcagttctatgagca

SEQ ID NO: 4314296 - DNA, 25 bp, Homo sapien
cttgttgtttggcattgcaatatgg

SEQ ID NO: 4314297 - DNA, 25 bp, Homo sapien
tttccatctgtactatgttagcttg

SEQ ID NO: 4314298 - DNA, 25 bp, Homo sapien
tcagttctatgagcacgccagtgag

SEQ ID NO: 4314299 - DNA, 25 bp, Homo sapien
atctaactctatgcttgaagatgtg

SEQ ID NO: 4314300 - DNA, 25 bp, Homo sapien
ggtttctctgtaacactatggatat

SEQ ID NO: 4314301 - DNA, 25 bp, Homo sapien
cactatggatattgctgctaaatga

SEQ ID NO: 4314302 - DNA, 25 bp, Homo sapien
tgctgagagctgccatgggtttctc

SEQ ID NO: 4314303 - DNA, 25 bp, Homo sapien
aaatgcaacttatggcctcatgtcc

SEQ ID NO: 4314304 - DNA, 25 bp, Homo sapien
cagagcatggtaaatgcaacttatg

SEQ ID NO: 4314305 - DNA, 25 bp, Homo sapien
ggtaaatgcaacttatggcctcatg

SEQ ID NO: 4314306 - DNA, 25 bp, Homo sapien
catggtaaatgcaacttatggcctc

SEQ ID NO: 4314307 - DNA, 25 bp, Homo sapien
cacagtgaattgttttagagggtta

SEQ ID NO: 4314308 - DNA, 25 bp, Homo sapien
aatgcacagtgaattgttttagagg

SEQ ID NO: 4314309 - DNA, 25 bp, Homo sapien
tgcacagtgaattgttttagagggt

SEQ ID NO: 4314310 - DNA, 25 bp, Homo sapien
caaaatgcacagtgaattgttttag

SEQ ID NO: 4314311 - DNA, 25 bp, Homo sapien
caggttaatagtaatgcctctggaa

SEQ ID NO: 4314312 - DNA, 25 bp, Homo sapien
taggtttccaggttaatagtaatgc

SEQ ID NO: 4314313 - DNA, 25 bp, Homo sapien
actgaatgaaataggtttccaggtt

SEQ ID NO: 4314314 - DNA, 25 bp, Homo sapien
taatagtaatgcctctggaaatgtt

SEQ ID NO: 4314315 - DNA, 25 bp, Homo sapien
ccctgagtcaacgtagtcatatttt

SEQ ID NO: 4314316 - DNA, 25 bp, Homo sapien
agtccctgagtcaacgtagtcatat

SEQ ID NO: 4314317 - DNA, 25 bp, Homo sapien
gagtcaacgtagtcatattttggcc

SEQ ID NO: 4314318 - DNA, 25 bp, Homo sapien
tgagtcaacgtagtcatattttggc

SEQ ID NO: 4314319 - DNA, 25 bp, Homo sapien
tccaccaactctgtaaggtcccaag

SEQ ID NO: 4314320 - DNA, 25 bp, Homo sapien
tattgaggagcctcactcctaccat

SEQ ID NO: 4314321 - DNA, 25 bp, Homo sapien
tttttttcatgtcgagtgagtcctc

SEQ ID NO: 4314322 - DNA, 25 bp, Homo sapien
tctgcatctgcttcgtattgaggag

SEQ ID NO: 4314323 - DNA, 25 bp, Homo sapien
gtctacaggaagacacgccctgcct

SEQ ID NO: 4314324 - DNA, 25 bp, Homo sapien
gattacgagcaaatctgtctacagg

SEQ ID NO: 4314325 - DNA, 25 bp, Homo sapien
gttctttaaattgcaacagcagcag

SEQ ID NO: 4314326 - DNA, 25 bp, Homo sapien
ccacagggcttcgttgaacgaagta

SEQ ID NO: 4314327 - DNA, 25 bp, Homo sapien
ctttttgaggattgcaccaacccat

SEQ ID NO: 4314328 - DNA, 25 bp, Homo sapien
tctctggtgctttaagagatcaagc

SEQ ID NO: 4314329 - DNA, 25 bp, Homo sapien
tttcaaataagtgcccttgaaatct

SEQ ID NO: 4314330 - DNA, 25 bp, Homo sapien
cagctgtaatggttatcccacctct

SEQ ID NO: 4314331 - DNA, 25 bp, Homo sapien
ttacacagtgcacacttctttacag

SEQ ID NO: 4314332 - DNA, 25 bp, Homo sapien
tacacagtgcacacttctttacaga

SEQ ID NO: 4314333 - DNA, 25 bp, Homo sapien
acacagtgcacacttctttacagac

SEQ ID NO: 4314334 - DNA, 25 bp, Homo sapien
tctgcggaagacagtttagaataat

SEQ ID NO: 4314335 - DNA, 25 bp, Homo sapien
ttctcaaagactccggagttttgcc

SEQ ID NO: 4314336 - DNA, 25 bp, Homo sapien
gaattcgaccgccttttctcaaaga

SEQ ID NO: 4314337 - DNA, 25 bp, Homo sapien
ctttacgaggtcagttttctgcgga

SEQ ID NO: 4314338 - DNA, 25 bp, Homo sapien
cttcaatgtgtccactcttgaattt

SEQ ID NO: 4314339 - DNA, 25 bp, Homo sapien
tctttgtgacactgcttatcttacc

SEQ ID NO: 4314340 - DNA, 25 bp, Homo sapien
gaattttttggaccaccaaatgctg

SEQ ID NO: 4314341 - DNA, 25 bp, Homo sapien
gctgaaatcactcagttgtactttg

SEQ ID NO: 4314342 - DNA, 25 bp, Homo sapien
acttgccaccaagccaaaggaattg

SEQ ID NO: 4314343 - DNA, 25 bp, Homo sapien
cagtaacctggcgatattcttggta

SEQ ID NO: 4314344 - DNA, 25 bp, Homo sapien
aggacaattataggaacttgccacc

SEQ ID NO: 4314345 - DNA, 25 bp, Homo sapien
gttgcagagtacgttttcagaagcc

SEQ ID NO: 4314346 - DNA, 25 bp, Homo sapien
catccatcatcgttttgctgcttgg

SEQ ID NO: 4314347 - DNA, 25 bp, Homo sapien
aatttttggctgagcgtaagcctgc

SEQ ID NO: 4314348 - DNA, 25 bp, Homo sapien
aataatctaaggcacacactagggc

SEQ ID NO: 4314349 - DNA, 25 bp, Homo sapien
gaaatcttcaagcatgggcattgca

SEQ ID NO: 4314350 - DNA, 25 bp, Homo sapien
gcagagatatggttgtagtagtcat

SEQ ID NO: 4314351 - DNA, 25 bp, Homo sapien
ctgcagagatatggttgtagtagtc

SEQ ID NO: 4314352 - DNA, 25 bp, Homo sapien
tgcagagatatggttgtagtagtca

SEQ ID NO: 4314353 - DNA, 25 bp, Homo sapien
cttgccttctggtctacatccatga

SEQ ID NO: 4314354 - DNA, 25 bp, Homo sapien
tggtctacatccatgattctttcct

SEQ ID NO: 4314355 - DNA, 25 bp, Homo sapien
taaactgccctttacagttcagcat

SEQ ID NO: 4314356 - DNA, 25 bp, Homo sapien
ccttaaactgccctttacagttcag

SEQ ID NO: 4314357 - DNA, 25 bp, Homo sapien
tacagaatttaaggagtaaatagct

SEQ ID NO: 4314358 - DNA, 25 bp, Homo sapien
aatagctatagcacatctatataga

SEQ ID NO: 4314359 - DNA, 25 bp, Homo sapien
ttgtagaaacattgtcttgctcgtt

SEQ ID NO: 4314360 - DNA, 25 bp, Homo sapien
acattgtcttgctcgttgatcaggc

SEQ ID NO: 4314361 - DNA, 25 bp, Homo sapien
aaggcgcagtatgtaccagctgaag

SEQ ID NO: 4314362 - DNA, 25 bp, Homo sapien
gccgatcagactccaaggcgcagta

SEQ ID NO: 4314363 - DNA, 25 bp, Homo sapien
gctgcagctgatgccgatcagactc

SEQ ID NO: 4314364 - DNA, 25 bp, Homo sapien
cagaagttgtctatttgctgcagct

SEQ ID NO: 4314365 - DNA, 25 bp, Homo sapien
catccattatgtctctagggtagaa

SEQ ID NO: 4314366 - DNA, 25 bp, Homo sapien
tcatgagaatcccatcgtttctgca

SEQ ID NO: 4314367 - DNA, 25 bp, Homo sapien
tttcttactcccagcatgtgccttt

SEQ ID NO: 4314368 - DNA, 25 bp, Homo sapien
tagggtagaattgccagaaactcaa

SEQ ID NO: 4314369 - DNA, 25 bp, Homo sapien
tcagcagtatggcggtgtgaagaat

SEQ ID NO: 4314370 - DNA, 25 bp, Homo sapien
agcagtatggcggtgtgaagaatca

SEQ ID NO: 4314371 - DNA, 25 bp, Homo sapien
cttcagcagtatggcggtgtgaaga

SEQ ID NO: 4314372 - DNA, 25 bp, Homo sapien
gcagtatggcggtgtgaagaatcat

SEQ ID NO: 4314373 - DNA, 25 bp, Homo sapien
taaaacagtctctaaagcagacagt

SEQ ID NO: 4314374 - DNA, 25 bp, Homo sapien
cataaaacagtctctaaagcagaca

SEQ ID NO: 4314375 - DNA, 25 bp, Homo sapien
gcagacagtctgggaaacaataaat

SEQ ID NO: 4314376 - DNA, 25 bp, Homo sapien
aacagtctctaaagcagacagtctg

SEQ ID NO: 4314377 - DNA, 25 bp, Homo sapien
aatgttccgctgtggaaagctgatc

SEQ ID NO: 4314378 - DNA, 25 bp, Homo sapien
acggctccccgccattctgcttctg

SEQ ID NO: 4314379 - DNA, 25 bp, Homo sapien
tctgaacaccgttatcatcctttct

SEQ ID NO: 4314380 - DNA, 25 bp, Homo sapien
taatgttccctcataatgttccgct

SEQ ID NO: 4314381 - DNA, 25 bp, Homo sapien
ctcccaagttcagatctaaaagatg

SEQ ID NO: 4314382 - DNA, 25 bp, Homo sapien
catttcttcttaactcattgttcgg

SEQ ID NO: 4314383 - DNA, 25 bp, Homo sapien
tagcatgaactaaataatgtgaata

SEQ ID NO: 4314384 - DNA, 25 bp, Homo sapien
tatgcgtttgtgttaccgggaagtg

SEQ ID NO: 4314385 - DNA, 25 bp, Homo sapien
catctgacagcttcattgatagctg

SEQ ID NO: 4314386 - DNA, 25 bp, Homo sapien
aattgctttctcattgccttgttat

SEQ ID NO: 4314387 - DNA, 25 bp, Homo sapien
ggattgcagttcagctctaaaagct

SEQ ID NO: 4314388 - DNA, 25 bp, Homo sapien
gttttgagaaagacgattggacatc

SEQ ID NO: 4314389 - DNA, 25 bp, Homo sapien
tgtcacgtttaatctttgtaacgaa

SEQ ID NO: 4314390 - DNA, 25 bp, Homo sapien
tgagagatgagctacttttgtcacg

SEQ ID NO: 4314391 - DNA, 25 bp, Homo sapien
agtaaacaccacaagtgaaggtggg

SEQ ID NO: 4314392 - DNA, 25 bp, Homo sapien
gatgagctacttttgtcacgtttaa

SEQ ID NO: 4314393 - DNA, 25 bp, Homo sapien
ggtcttgttcagaaaggttggatct

SEQ ID NO: 4314394 - DNA, 25 bp, Homo sapien
tgtaccacaggtggctagccagctg

SEQ ID NO: 4314395 - DNA, 25 bp, Homo sapien
tatggagctcaatcagtggacatct

SEQ ID NO: 4314396 - DNA, 25 bp, Homo sapien
ctagaaattgatagaaggccagctc

SEQ ID NO: 4314397 - DNA, 25 bp, Homo sapien
cacaataggcatccatcggcagagt

SEQ ID NO: 4314398 - DNA, 25 bp, Homo sapien
aataggcatccatcggcagagttcc

SEQ ID NO: 4314399 - DNA, 25 bp, Homo sapien
caataggcatccatcggcagagttc

SEQ ID NO: 4314400 - DNA, 25 bp, Homo sapien
ataggcatccatcggcagagttcca

SEQ ID NO: 4314401 - DNA, 25 bp, Homo sapien
tccttttcatctttcaatccagcag

SEQ ID NO: 4314402 - DNA, 25 bp, Homo sapien
gttttcatttgcaaagcacacctca

SEQ ID NO: 4314403 - DNA, 25 bp, Homo sapien
tttttatcaccccagtggaatgcct

SEQ ID NO: 4314404 - DNA, 25 bp, Homo sapien
ccagcagctccaactttgacatttt

SEQ ID NO: 4314405 - DNA, 25 bp, Homo sapien
tgctttcgcaagctgacctctggaa

SEQ ID NO: 4314406 - DNA, 25 bp, Homo sapien
gagctgtgctttcgcaagctgacct

SEQ ID NO: 4314407 - DNA, 25 bp, Homo sapien
gctgtgctttcgcaagctgacctct

SEQ ID NO: 4314408 - DNA, 25 bp, Homo sapien
gatatcacaacttggatatctctgc

SEQ ID NO: 4314409 - DNA, 25 bp, Homo sapien
taatgctgtttctacgggaaagcac

SEQ ID NO: 4314410 - DNA, 25 bp, Homo sapien
ggcttgtgaacttgattatttctaa

SEQ ID NO: 4314411 - DNA, 25 bp, Homo sapien
tagctacattaatgatcacatagga

SEQ ID NO: 4314412 - DNA, 25 bp, Homo sapien
tcacataggactttgtgtactggct

SEQ ID NO: 4314413 - DNA, 25 bp, Homo sapien
tcttcatagctcttttggttgcttt

SEQ ID NO: 4314414 - DNA, 25 bp, Homo sapien
atcttcatagctcttttggttgctt

SEQ ID NO: 4314415 - DNA, 25 bp, Homo sapien
cttcatagctcttttggttgctttc

SEQ ID NO: 4314416 - DNA, 25 bp, Homo sapien
ggatgttttgcaccatattgtttct

SEQ ID NO: 4314417 - DNA, 25 bp, Homo sapien
gcaccatattgtttcttaagaggta

SEQ ID NO: 4314418 - DNA, 25 bp, Homo sapien
tttagctggatgttttgcaccatat

SEQ ID NO: 4314419 - DNA, 25 bp, Homo sapien
ctacatcattccttgagaggtattt

SEQ ID NO: 4314420 - DNA, 25 bp, Homo sapien
ctttttcctggtcctatgcacacag

SEQ ID NO: 4314421 - DNA, 25 bp, Homo sapien
tcctatgcacacaggacttttcact

SEQ ID NO: 4314422 - DNA, 25 bp, Homo sapien
cctggtcctatgcacacaggacttt

SEQ ID NO: 4314423 - DNA, 25 bp, Homo sapien
tttcctggtcctatgcacacaggac

SEQ ID NO: 4314424 - DNA, 25 bp, Homo sapien
gcagtttttaccacatccttgggga

SEQ ID NO: 4314425 - DNA, 25 bp, Homo sapien
ttttgcagtttttaccacatccttg

SEQ ID NO: 4314426 - DNA, 25 bp, Homo sapien
ttgcagtttttaccacatccttggg

SEQ ID NO: 4314427 - DNA, 25 bp, Homo sapien
tttgcagtttttaccacatccttgg

SEQ ID NO: 4314428 - DNA, 25 bp, Homo sapien
tcgcaagactatttcattaccgtaa

SEQ ID NO: 4314429 - DNA, 25 bp, Homo sapien
attaccgtaattttcaagcatgccg

SEQ ID NO: 4314430 - DNA, 25 bp, Homo sapien
gccgaggtgtcctaatgtctcttct

SEQ ID NO: 4314431 - DNA, 25 bp, Homo sapien
taatgctttacaagaagagtggttg

SEQ ID NO: 4314432 - DNA, 25 bp, Homo sapien
gacctgcgtgagttcctataagccg

SEQ ID NO: 4314433 - DNA, 25 bp, Homo sapien
tcatcatccccggtcctgaatggca

SEQ ID NO: 4314434 - DNA, 25 bp, Homo sapien
taccagcgagcctgtgatcacacgt

SEQ ID NO: 4314435 - DNA, 25 bp, Homo sapien
catccagcatttagctcggctcggg

SEQ ID NO: 4314436 - DNA, 25 bp, Homo sapien
gccactgtgagggtctgattagctt

SEQ ID NO: 4314437 - DNA, 25 bp, Homo sapien
tgagagcaaatttaccagatggagg

SEQ ID NO: 4314438 - DNA, 25 bp, Homo sapien
cagcgggttctataggccactgtga

SEQ ID NO: 4314439 - DNA, 25 bp, Homo sapien
tgtggaagacaatcgcagaggcatc

SEQ ID NO: 4314440 - DNA, 25 bp, Homo sapien
taggatcgcgtcttcgccaggagga

SEQ ID NO: 4314441 - DNA, 25 bp, Homo sapien
tggtatcgccctatcctgcaaagga

SEQ ID NO: 4314442 - DNA, 25 bp, Homo sapien
ccgatgtcatcgtctctaagggcga

SEQ ID NO: 4314443 - DNA, 25 bp, Homo sapien
tcttctagctgcttgctgacgtggc

SEQ ID NO: 4314444 - DNA, 25 bp, Homo sapien
tggcaaatagatgacagcagcttga

SEQ ID NO: 4314445 - DNA, 25 bp, Homo sapien
tgatctatcgaccagggtaagaggg

SEQ ID NO: 4314446 - DNA, 25 bp, Homo sapien
acagcagcttgatctatcgaccagg

SEQ ID NO: 4314447 - DNA, 25 bp, Homo sapien
gcagcttgatctatcgaccagggta

SEQ ID NO: 4314448 - DNA, 25 bp, Homo sapien
tgaccccttcgtggccctgactcct

SEQ ID NO: 4314449 - DNA, 25 bp, Homo sapien
ctggtgtcttgggtgatgtagttaa

SEQ ID NO: 4314450 - DNA, 25 bp, Homo sapien
tgtagttaatgagatctagcgacat

SEQ ID NO: 4314451 - DNA, 25 bp, Homo sapien
gatctagcgacatcatgaccctgac

SEQ ID NO: 4314452 - DNA, 25 bp, Homo sapien
ggctgccagtgcatggcagtagcaa

SEQ ID NO: 4314453 - DNA, 25 bp, Homo sapien
tgcaagtcagtgtgtagaatcagga

SEQ ID NO: 4314454 - DNA, 25 bp, Homo sapien
ataaacaagttcaagagttttctgc

SEQ ID NO: 4314455 - DNA, 25 bp, Homo sapien
gcatggcagtagcaaagtaagacac

SEQ ID NO: 4314456 - DNA, 25 bp, Homo sapien
gaaatgctctttgtgcacctccacg

SEQ ID NO: 4314457 - DNA, 25 bp, Homo sapien
ctgaaatgctctttgtgcacctcca

SEQ ID NO: 4314458 - DNA, 25 bp, Homo sapien
tgctctttgtgcacctccacgaatc

SEQ ID NO: 4314459 - DNA, 25 bp, Homo sapien
aatgctctttgtgcacctccacgaa

SEQ ID NO: 4314460 - DNA, 25 bp, Homo sapien
ggtcagcgtagtgcgtctaatctcc

SEQ ID NO: 4314461 - DNA, 25 bp, Homo sapien
tagtgcgtctaatctcctcagttcg

SEQ ID NO: 4314462 - DNA, 25 bp, Homo sapien
taatgtttgtggtcagcgtagtgcg

SEQ ID NO: 4314463 - DNA, 25 bp, Homo sapien
tgtttgtggtcagcgtagtgcgtct

SEQ ID NO: 4314464 - DNA, 25 bp, Homo sapien
ggacagtgatggcagttggtcttta

SEQ ID NO: 4314465 - DNA, 25 bp, Homo sapien
ctggacagtgatggcagttggtctt

SEQ ID NO: 4314466 - DNA, 25 bp, Homo sapien
acagtgatggcagttggtctttata

SEQ ID NO: 4314467 - DNA, 25 bp, Homo sapien
tcctggacagtgatggcagttggtc

SEQ ID NO: 4314468 - DNA, 25 bp, Homo sapien
tgtaattctttcgtctaaacattgc

SEQ ID NO: 4314469 - DNA, 25 bp, Homo sapien
gtgctatgcttggcaagtctttcgc

SEQ ID NO: 4314470 - DNA, 25 bp, Homo sapien
tgcctttggctacggttcttgtctt

SEQ ID NO: 4314471 - DNA, 25 bp, Homo sapien
gatttccaattaagtctgtgttccc

SEQ ID NO: 4314472 - DNA, 25 bp, Homo sapien
ggcaatccatttagttgttactagg

SEQ ID NO: 4314473 - DNA, 25 bp, Homo sapien
cattctaattgaaagattgatggca

SEQ ID NO: 4314474 - DNA, 25 bp, Homo sapien
cagacagatgcagagtaacctcatt

SEQ ID NO: 4314475 - DNA, 25 bp, Homo sapien
taacctcattacagtcagaattgtg

SEQ ID NO: 4314476 - DNA, 25 bp, Homo sapien
tatggtatctgccgttcactgcgct

SEQ ID NO: 4314477 - DNA, 25 bp, Homo sapien
aatatggtatctgccgttcactgcg

SEQ ID NO: 4314478 - DNA, 25 bp, Homo sapien
cgttcactgcgctccccgggcccac

SEQ ID NO: 4314479 - DNA, 25 bp, Homo sapien
tggtatctgccgttcactgcgctcc

SEQ ID NO: 4314480 - DNA, 25 bp, Homo sapien
tgtccatctgtttgcaggacggcag

SEQ ID NO: 4314481 - DNA, 25 bp, Homo sapien
tctgtttgcaggacggcaggtaaac

SEQ ID NO: 4314482 - DNA, 25 bp, Homo sapien
catctgtttgcaggacggcaggtaa

SEQ ID NO: 4314483 - DNA, 25 bp, Homo sapien
tccatctgtttgcaggacggcaggt

SEQ ID NO: 4314484 - DNA, 25 bp, Homo sapien
catcacagtggaatttgatgattat

SEQ ID NO: 4314485 - DNA, 25 bp, Homo sapien
tattgcagagtctactctcctttaa

SEQ ID NO: 4314486 - DNA, 25 bp, Homo sapien
agacagggtgttattatgctaccca

SEQ ID NO: 4314487 - DNA, 25 bp, Homo sapien
tattctcacgactcttattgcagag

SEQ ID NO: 4314488 - DNA, 25 bp, Homo sapien
ggtcccactcttgaagaccattgct

SEQ ID NO: 4314489 - DNA, 25 bp, Homo sapien
tgctctggtccattgccttgttgcc

SEQ ID NO: 4314490 - DNA, 25 bp, Homo sapien
cccactcttgaagaccattgctttg

SEQ ID NO: 4314491 - DNA, 25 bp, Homo sapien
gccttgttgcctacattccagttgt

SEQ ID NO: 4314492 - DNA, 25 bp, Homo sapien
gagtttctgaggtgatgctgtcatg

SEQ ID NO: 4314493 - DNA, 25 bp, Homo sapien
tgctgtttgttggttgaacattggc

SEQ ID NO: 4314494 - DNA, 25 bp, Homo sapien
gagacgcctggtatcttgagtttct

SEQ ID NO: 4314495 - DNA, 25 bp, Homo sapien
tcatgttaacaatctaacagcatgc

SEQ ID NO: 4314496 - DNA, 25 bp, Homo sapien
cccttgcctcttcattagtctggaa

SEQ ID NO: 4314497 - DNA, 25 bp, Homo sapien
ccccttgcctcttcattagtctgga

SEQ ID NO: 4314498 - DNA, 25 bp, Homo sapien
tctggcccgtaggaggtaccaaatg

SEQ ID NO: 4314499 - DNA, 25 bp, Homo sapien
ccgtaggaggtaccaaatggtgata

SEQ ID NO: 4314500 - DNA, 25 bp, Homo sapien
gcccgtaggaggtaccaaatggtga

SEQ ID NO: 4314501 - DNA, 25 bp, Homo sapien
agcatctggcccgtaggaggtacca

SEQ ID NO: 4314502 - DNA, 25 bp, Homo sapien
cagcccggtgacaattaccagtgat

SEQ ID NO: 4314503 - DNA, 25 bp, Homo sapien
gggatgtcaaggctgtcaccctttt

SEQ ID NO: 4314504 - DNA, 25 bp, Homo sapien
ttttctcctcgtcactgacagacag

SEQ ID NO: 4314505 - DNA, 25 bp, Homo sapien
gtgacaattaccagtgatgggacat

SEQ ID NO: 4314506 - DNA, 25 bp, Homo sapien
tcagtgaaaatactcggacggattt

SEQ ID NO: 4314507 - DNA, 25 bp, Homo sapien
gtcagtgaaaatactcggacggatt

SEQ ID NO: 4314508 - DNA, 25 bp, Homo sapien
agtcagtgaaaatactcggacggat

SEQ ID NO: 4314509 - DNA, 25 bp, Homo sapien
cagtgaaaatactcggacggatttt

SEQ ID NO: 4314510 - DNA, 25 bp, Homo sapien
ttccttctttttgctaattgggcca

SEQ ID NO: 4314511 - DNA, 25 bp, Homo sapien
atttcacagacaaatttccttcttt

SEQ ID NO: 4314512 - DNA, 25 bp, Homo sapien
ttaaccaagtaatttcacagacaaa

SEQ ID NO: 4314513 - DNA, 25 bp, Homo sapien
tccttctttttgctaattgggccat

SEQ ID NO: 4314514 - DNA, 25 bp, Homo sapien
gaattgtccgtgagtatccgagggc

SEQ ID NO: 4314515 - DNA, 25 bp, Homo sapien
cgcgtgggcactaaagatgtcttct

SEQ ID NO: 4314516 - DNA, 25 bp, Homo sapien
tgatggattcgctcccactgtggga

SEQ ID NO: 4314517 - DNA, 25 bp, Homo sapien
taaaggatctatcctgagcgctctc

SEQ ID NO: 4314518 - DNA, 25 bp, Homo sapien
tgtcagcatggacctgatttagcca

SEQ ID NO: 4314519 - DNA, 25 bp, Homo sapien
ttagccatgtaacatttggctgctg

SEQ ID NO: 4314520 - DNA, 25 bp, Homo sapien
catgtaacatttggctgctgaaaaa

SEQ ID NO: 4314521 - DNA, 25 bp, Homo sapien
gcatggacctgatttagccatgtaa

SEQ ID NO: 4314522 - DNA, 25 bp, Homo sapien
gatgatgtgttttttgctcctggtc

SEQ ID NO: 4314523 - DNA, 25 bp, Homo sapien
atgatgtgttttttgctcctggtca

SEQ ID NO: 4314524 - DNA, 25 bp, Homo sapien
tgatgtgttttttgctcctggtcat

SEQ ID NO: 4314525 - DNA, 25 bp, Homo sapien
tgtggtctactcctaatttcatttt

SEQ ID NO: 4314526 - DNA, 25 bp, Homo sapien
taagaagacccattaaaaagcagac

SEQ ID NO: 4314527 - DNA, 25 bp, Homo sapien
taaagctgtagctcccaaggagtgc

SEQ ID NO: 4314528 - DNA, 25 bp, Homo sapien
aaagcagacatctggtgtacaaagc

SEQ ID NO: 4314529 - DNA, 25 bp, Homo sapien
tcatggctttgctactatagtcccc

SEQ ID NO: 4314530 - DNA, 25 bp, Homo sapien
gactattctggacacggtcatggct

SEQ ID NO: 4314531 - DNA, 25 bp, Homo sapien
gagatgcattggtgcttcgcaaagc

SEQ ID NO: 4314532 - DNA, 25 bp, Homo sapien
tcgcaaagctgtgcagtcattgaag

SEQ ID NO: 4314533 - DNA, 25 bp, Homo sapien
tcattggaatgcactgccttcttgt

SEQ ID NO: 4314534 - DNA, 25 bp, Homo sapien
ggcgcctgtcatatctgcctcaagg

SEQ ID NO: 4314535 - DNA, 25 bp, Homo sapien
tttggaatttaataaggcgcctgtc

SEQ ID NO: 4314536 - DNA, 25 bp, Homo sapien
ggtgtctcattggaatgcactgcct

SEQ ID NO: 4314537 - DNA, 25 bp, Homo sapien
ctggttaacgggtaatgacattgcc

SEQ ID NO: 4314538 - DNA, 25 bp, Homo sapien
gtagatttgactcagaaaaccaggg

SEQ ID NO: 4314539 - DNA, 25 bp, Homo sapien
tgatagattctggtacagtgccaca

SEQ ID NO: 4314540 - DNA, 25 bp, Homo sapien
tctaaaggccttgtgctggttaacg

SEQ ID NO: 4314541 - DNA, 25 bp, Homo sapien
tggaggcatttctctcgagttcctt

SEQ ID NO: 4314542 - DNA, 25 bp, Homo sapien
gtttgtcaactggatccttctagag

SEQ ID NO: 4314543 - DNA, 25 bp, Homo sapien
tctactttactcagccatcagagga

SEQ ID NO: 4314544 - DNA, 25 bp, Homo sapien
ccacactggttttgtgcgattgcca

SEQ ID NO: 4314545 - DNA, 25 bp, Homo sapien
ttgaaatggcatgttaaatactaaa

SEQ ID NO: 4314546 - DNA, 25 bp, Homo sapien
taggattgaaatggcatgttaaata

SEQ ID NO: 4314547 - DNA, 25 bp, Homo sapien
catttgaagattgctgttggttttt

SEQ ID NO: 4314548 - DNA, 25 bp, Homo sapien
tgacatttgaagattgctgttggtt

SEQ ID NO: 4314549 - DNA, 25 bp, Homo sapien
tacacttccctgcagagtgtacaaa

SEQ ID NO: 4314550 - DNA, 25 bp, Homo sapien
ttagcgtgcttctttgagtggtgga

SEQ ID NO: 4314551 - DNA, 25 bp, Homo sapien
gcctgctgcatgaatacacttccct

SEQ ID NO: 4314552 - DNA, 25 bp, Homo sapien
agcacttaatttcgagcttttcatt

SEQ ID NO: 4314553 - DNA, 25 bp, Homo sapien
aagaagcttctaggccattataccg

SEQ ID NO: 4314554 - DNA, 25 bp, Homo sapien
gaggcgtgtgcaacatgagactgaa

SEQ ID NO: 4314555 - DNA, 25 bp, Homo sapien
aaaggttacttgctgctcctgcagg

SEQ ID NO: 4314556 - DNA, 25 bp, Homo sapien
gactgaatagctggccaagaagaag

SEQ ID NO: 4314557 - DNA, 25 bp, Homo sapien
cagagtaaatatcgctgtcatattg

SEQ ID NO: 4314558 - DNA, 25 bp, Homo sapien
ccccttttgtataacgcatgtgcat

SEQ ID NO: 4314559 - DNA, 25 bp, Homo sapien
tcagattagcaattggagcagagta

SEQ ID NO: 4314560 - DNA, 25 bp, Homo sapien
aagaaccccttttgtataacgcatg

SEQ ID NO: 4314561 - DNA, 25 bp, Homo sapien
ggttggctggtcgttgtacctctag

SEQ ID NO: 4314562 - DNA, 25 bp, Homo sapien
gtcgttgtacctctagcagagtggc

SEQ ID NO: 4314563 - DNA, 25 bp, Homo sapien
agaaggttggctggtcgttgtacct

SEQ ID NO: 4314564 - DNA, 25 bp, Homo sapien
gctggtcgttgtacctctagcagag

SEQ ID NO: 4314565 - DNA, 25 bp, Homo sapien
cttactctggtgcaaggacaaaaaa

SEQ ID NO: 4314566 - DNA, 25 bp, Homo sapien
tattcaagtttctgtaagtgatgtt

SEQ ID NO: 4314567 - DNA, 25 bp, Homo sapien
gtgattacaatcacgcagactcttc

SEQ ID NO: 4314568 - DNA, 25 bp, Homo sapien
cacaatacaggaaggaataagtcct

SEQ ID NO: 4314569 - DNA, 25 bp, Homo sapien
tgaaatttcagtcctagaccaagct

SEQ ID NO: 4314570 - DNA, 25 bp, Homo sapien
agcttgtggccaccagccttgacgt

SEQ ID NO: 4314571 - DNA, 25 bp, Homo sapien
gtggccaccagccttgacgttcttg

SEQ ID NO: 4314572 - DNA, 25 bp, Homo sapien
tcagtcctagaccaagcttgtggcc

SEQ ID NO: 4314573 - DNA, 25 bp, Homo sapien
gagaagcaggcatgagggtcagtct

SEQ ID NO: 4314574 - DNA, 25 bp, Homo sapien
agaagcaggcatgagggtcagtctg

SEQ ID NO: 4314575 - DNA, 25 bp, Homo sapien
cacagtagtgtgaagctggaattca

SEQ ID NO: 4314576 - DNA, 25 bp, Homo sapien
tctgtcccgtcattcacagtagtgt

SEQ ID NO: 4314577 - DNA, 25 bp, Homo sapien
ctggtaaatggagccgccaaactct

SEQ ID NO: 4314578 - DNA, 25 bp, Homo sapien
aaatggagccgccaaactctgtccc

SEQ ID NO: 4314579 - DNA, 25 bp, Homo sapien
tcaaaacgcatctggtacccagcca

SEQ ID NO: 4314580 - DNA, 25 bp, Homo sapien
agtctcaaaacgcatctggtaccca

SEQ ID NO: 4314581 - DNA, 25 bp, Homo sapien
tgtggaaatccacgtcacagcccag

SEQ ID NO: 4314582 - DNA, 25 bp, Homo sapien
agccctgtaacccggcactagagca

SEQ ID NO: 4314583 - DNA, 25 bp, Homo sapien
tgttaggtgacgaggatgaatgcaa

SEQ ID NO: 4314584 - DNA, 25 bp, Homo sapien
gtgttaggtgacgaggatgaatgca

SEQ ID NO: 4314585 - DNA, 25 bp, Homo sapien
gttaggtgacgaggatgaatgcaag

SEQ ID NO: 4314586 - DNA, 25 bp, Homo sapien
ttaggtgacgaggatgaatgcaagg

SEQ ID NO: 4314587 - DNA, 25 bp, Homo sapien
ttccatttctccgtagacctcgagc

SEQ ID NO: 4314588 - DNA, 25 bp, Homo sapien
gtcagtccatcggtacctggtttcc

SEQ ID NO: 4314589 - DNA, 25 bp, Homo sapien
tagacctcgagccatagtcagtcca

SEQ ID NO: 4314590 - DNA, 25 bp, Homo sapien
gagccatagtcagtccatcggtacc

SEQ ID NO: 4314591 - DNA, 25 bp, Homo sapien
ctgagcttgtaaactccgatccatc

SEQ ID NO: 4314592 - DNA, 25 bp, Homo sapien
gagcttgtaaactccgatccatcct

SEQ ID NO: 4314593 - DNA, 25 bp, Homo sapien
tgtaaactccgatccatcctcagat

SEQ ID NO: 4314594 - DNA, 25 bp, Homo sapien
tccgatccatcctcagatttcgttt

SEQ ID NO: 4314595 - DNA, 25 bp, Homo sapien
atacgtgggtggcacagccgtcttc

SEQ ID NO: 4314596 - DNA, 25 bp, Homo sapien
tcggcatacgtgggtggcacagccg

SEQ ID NO: 4314597 - DNA, 25 bp, Homo sapien
acgtgggtggcacagccgtcttctg

SEQ ID NO: 4314598 - DNA, 25 bp, Homo sapien
gatttgccaagatcggcatacgtgg

SEQ ID NO: 4314599 - DNA, 25 bp, Homo sapien
tcttgatttctagcaattgctggct

SEQ ID NO: 4314600 - DNA, 25 bp, Homo sapien
cattttcaagttcttaggagccctc

SEQ ID NO: 4314601 - DNA, 25 bp, Homo sapien
catggccttatactggaagacattt

SEQ ID NO: 4314602 - DNA, 25 bp, Homo sapien
gaataagattgcactttggcgctgc

SEQ ID NO: 4314603 - DNA, 25 bp, Homo sapien
tagagggacgcaaattgcagttgcc

SEQ ID NO: 4314604 - DNA, 25 bp, Homo sapien
ccagttatatggttctttgtttctc

SEQ ID NO: 4314605 - DNA, 25 bp, Homo sapien
ctagagggacgcaaattgcagttgc

SEQ ID NO: 4314606 - DNA, 25 bp, Homo sapien
attgcagttgccagttatatggttc

SEQ ID NO: 4314607 - DNA, 25 bp, Homo sapien
tggggatttgacaactctgccacac

SEQ ID NO: 4314608 - DNA, 25 bp, Homo sapien
gacgcaactggggatttgacaactc

SEQ ID NO: 4314609 - DNA, 25 bp, Homo sapien
caactggggatttgacaactctgcc

SEQ ID NO: 4314610 - DNA, 25 bp, Homo sapien
cagagcagacgcaactggggatttg

SEQ ID NO: 4314611 - DNA, 25 bp, Homo sapien
catttccttagcagtaacaagctgc

SEQ ID NO: 4314612 - DNA, 25 bp, Homo sapien
ctgacatttccttagcagtaacaag

SEQ ID NO: 4314613 - DNA, 25 bp, Homo sapien
gactggactgacatttccttagcag

SEQ ID NO: 4314614 - DNA, 25 bp, Homo sapien
tttgactggactgacatttccttag

SEQ ID NO: 4314615 - DNA, 25 bp, Homo sapien
gggcttgatttagtagcactgacat

SEQ ID NO: 4314616 - DNA, 25 bp, Homo sapien
cctgggcttgatttagtagcactga

SEQ ID NO: 4314617 - DNA, 25 bp, Homo sapien
ggccctgggcttgatttagtagcac

SEQ ID NO: 4314618 - DNA, 25 bp, Homo sapien
gggccctgggcttgatttagtagca

SEQ ID NO: 4314619 - DNA, 25 bp, Homo sapien
cttccttactgcgttctatttgaat

SEQ ID NO: 4314620 - DNA, 25 bp, Homo sapien
cttactgcgttctatttgaattcct

SEQ ID NO: 4314621 - DNA, 25 bp, Homo sapien
tttcttccttactgcgttctatttg

SEQ ID NO: 4314622 - DNA, 25 bp, Homo sapien
tactgcgttctatttgaattcctct

SEQ ID NO: 4314623 - DNA, 25 bp, Homo sapien
caatgttctggattcaatatcggga

SEQ ID NO: 4314624 - DNA, 25 bp, Homo sapien
ctagtacaagttctgcatagcggca

SEQ ID NO: 4314625 - DNA, 25 bp, Homo sapien
cagtgtatgtcatttcgagggtcgg

SEQ ID NO: 4314626 - DNA, 25 bp, Homo sapien
catagcggcagttctatgagaatac

SEQ ID NO: 4314627 - DNA, 25 bp, Homo sapien
gagcagatgcgtgttgtgaagatta

SEQ ID NO: 4314628 - DNA, 25 bp, Homo sapien
gattaagcttatgtttatctgacaa

SEQ ID NO: 4314629 - DNA, 25 bp, Homo sapien
aaaaggagcagatgcgtgttgtgaa

SEQ ID NO: 4314630 - DNA, 25 bp, Homo sapien
gttgtgaagattaagcttatgttta

SEQ ID NO: 4314631 - DNA, 25 bp, Homo sapien
aagtgtggtgagcttgaaagttcca

SEQ ID NO: 4314632 - DNA, 25 bp, Homo sapien
tgccaaactggtcaggtgataaaga

SEQ ID NO: 4314633 - DNA, 25 bp, Homo sapien
gaaaagtgtggtgagcttgaaagtt

SEQ ID NO: 4314634 - DNA, 25 bp, Homo sapien
agatgccaaactggtcaggtgataa

SEQ ID NO: 4314635 - DNA, 25 bp, Homo sapien
gctgaacaggaaatttcgatgcaac

SEQ ID NO: 4314636 - DNA, 25 bp, Homo sapien
gaaatttcgatgcaacttgcatctg

SEQ ID NO: 4314637 - DNA, 25 bp, Homo sapien
atgtgctgaacaggaaatttcgatg

SEQ ID NO: 4314638 - DNA, 25 bp, Homo sapien
acaggaaatttcgatgcaacttgca

SEQ ID NO: 4314639 - DNA, 25 bp, Homo sapien
aatgagatgccccaagttgcaagct

SEQ ID NO: 4314640 - DNA, 25 bp, Homo sapien
gctgatattccgataaagatttcat

SEQ ID NO: 4314641 - DNA, 25 bp, Homo sapien
ccaagttgcaagctttccataaaca

SEQ ID NO: 4314642 - DNA, 25 bp, Homo sapien
ctggccctttgcctgctgatattcc

SEQ ID NO: 4314643 - DNA, 25 bp, Homo sapien
catttgctgccactgtggtattgtc

SEQ ID NO: 4314644 - DNA, 25 bp, Homo sapien
gtggtattgtccttttgatgaacat

SEQ ID NO: 4314645 - DNA, 25 bp, Homo sapien
ctaggaggcttcttggagtcagaga

SEQ ID NO: 4314646 - DNA, 25 bp, Homo sapien
aaactgcgtctgaatatctttttcc

SEQ ID NO: 4314647 - DNA, 25 bp, Homo sapien
ctttgaaattatgcccttgggccac

SEQ ID NO: 4314648 - DNA, 25 bp, Homo sapien
tgaattgcactttgaaattatgccc

SEQ ID NO: 4314649 - DNA, 25 bp, Homo sapien
aattatgcccttgggccacattgag

SEQ ID NO: 4314650 - DNA, 25 bp, Homo sapien
tttactgaattgcactttgaaatta

SEQ ID NO: 4314651 - DNA, 25 bp, Homo sapien
tgaagaacaccattacctgtgagtc

SEQ ID NO: 4314652 - DNA, 25 bp, Homo sapien
gcaatcatcattgtgtagtgagcct

SEQ ID NO: 4314653 - DNA, 25 bp, Homo sapien
aatatgtgcctttccagagtacttg

SEQ ID NO: 4314654 - DNA, 25 bp, Homo sapien
tacttgcaatcatcattgtgtagtg

SEQ ID NO: 4314655 - DNA, 25 bp, Homo sapien
cgttcacatagctggtaacaaagtg

SEQ ID NO: 4314656 - DNA, 25 bp, Homo sapien
taccaccagttaagttcagcagaag

SEQ ID NO: 4314657 - DNA, 25 bp, Homo sapien
tatttcagatttcttggcaaaccgt

SEQ ID NO: 4314658 - DNA, 25 bp, Homo sapien
tgtaccaccagttaagttcagcaga

SEQ ID NO: 4314659 - DNA, 25 bp, Homo sapien
gcatttttgtaattattggatccca

SEQ ID NO: 4314660 - DNA, 25 bp, Homo sapien
tttggtagctgcatttttgtaatta

SEQ ID NO: 4314661 - DNA, 25 bp, Homo sapien
taattattggatcccatagaaccat

SEQ ID NO: 4314662 - DNA, 25 bp, Homo sapien
ttgtaattattggatcccatagaac

SEQ ID NO: 4314663 - DNA, 25 bp, Homo sapien
aaattgcgagtgagtacaaagagca

SEQ ID NO: 4314664 - DNA, 25 bp, Homo sapien
attgcgagtgagtacaaagagcatc

SEQ ID NO: 4314665 - DNA, 25 bp, Homo sapien
tcaaaattgcgagtgagtacaaaga

SEQ ID NO: 4314666 - DNA, 25 bp, Homo sapien
aaaattgcgagtgagtacaaagagc

SEQ ID NO: 4314667 - DNA, 25 bp, Homo sapien
atcctccattagaccgcaagtccat

SEQ ID NO: 4314668 - DNA, 25 bp, Homo sapien
ttaagcatcttttacccctgcatcc

SEQ ID NO: 4314669 - DNA, 25 bp, Homo sapien
aagcatcttttacccctgcatcctc

SEQ ID NO: 4314670 - DNA, 25 bp, Homo sapien
gcatcctccattagaccgcaagtcc

SEQ ID NO: 4314671 - DNA, 25 bp, Homo sapien
ttctgcatagatgcccgaaaaaatc

SEQ ID NO: 4314672 - DNA, 25 bp, Homo sapien
tacttaagatccattcaattcgtgt

SEQ ID NO: 4314673 - DNA, 25 bp, Homo sapien
aaatctttacttaagatccattcaa

SEQ ID NO: 4314674 - DNA, 25 bp, Homo sapien
catagatgcccgaaaaaatctttac

SEQ ID NO: 4314675 - DNA, 25 bp, Homo sapien
tgggactatcatgcccctggtgggt

SEQ ID NO: 4314676 - DNA, 25 bp, Homo sapien
gctaatgagcgttggcagaccaccg

SEQ ID NO: 4314677 - DNA, 25 bp, Homo sapien
tagagtgaaatcttcagcctcggcc

SEQ ID NO: 4314678 - DNA, 25 bp, Homo sapien
taagccgctcacattcccaaatttg

SEQ ID NO: 4314679 - DNA, 25 bp, Homo sapien
gggaccttgttagatgctttcatgt

SEQ ID NO: 4314680 - DNA, 25 bp, Homo sapien
aaaaaagcaatcgtgcttttccctg

SEQ ID NO: 4314681 - DNA, 25 bp, Homo sapien
ctttcatgtgaagaccatttgaccc

SEQ ID NO: 4314682 - DNA, 25 bp, Homo sapien
gacccatttctgattagtgtgcagg

SEQ ID NO: 4314683 - DNA, 25 bp, Homo sapien
gaaacctcttgatgccctcctgtgt

SEQ ID NO: 4314684 - DNA, 25 bp, Homo sapien
gtgtgaatgcgattagttactttca

SEQ ID NO: 4314685 - DNA, 25 bp, Homo sapien
gaagccttgtaagtgtgaatgcgat

SEQ ID NO: 4314686 - DNA, 25 bp, Homo sapien
cattaaaagatcctcagtaagaaac

SEQ ID NO: 4314687 - DNA, 25 bp, Homo sapien
ccctgtcatcaaggatttagctgtt

SEQ ID NO: 4314688 - DNA, 25 bp, Homo sapien
tgagtgccccgagagaatacatgcg

SEQ ID NO: 4314689 - DNA, 25 bp, Homo sapien
aaatgttcaccagatccatgaccag

SEQ ID NO: 4314690 - DNA, 25 bp, Homo sapien
tacatgcgccggctttatgagggtc

SEQ ID NO: 4314691 - DNA, 25 bp, Homo sapien
gctgcttgatactgaaggctctcag

SEQ ID NO: 4314692 - DNA, 25 bp, Homo sapien
tgctgcttgatactgaaggctctca

SEQ ID NO: 4314693 - DNA, 25 bp, Homo sapien
ctctcagtggatgacgtataaaatc

SEQ ID NO: 4314694 - DNA, 25 bp, Homo sapien
ctacaatgcattccagttccagtac

SEQ ID NO: 4314695 - DNA, 25 bp, Homo sapien
cgtatggctctttttcggcaaataa

SEQ ID NO: 4314696 - DNA, 25 bp, Homo sapien
tccgtttggtgacgtcaactgccat

SEQ ID NO: 4314697 - DNA, 25 bp, Homo sapien
gcaagtgattgatgtgccacatccg

SEQ ID NO: 4314698 - DNA, 25 bp, Homo sapien
tcttgaaatggcgtatggctctttt

SEQ ID NO: 4314699 - DNA, 25 bp, Homo sapien
gacagcaatgccacgtgaacaattc

SEQ ID NO: 4314700 - DNA, 25 bp, Homo sapien
ctatgtttggacacaatctctaact

SEQ ID NO: 4314701 - DNA, 25 bp, Homo sapien
ctttgagctttctgtgatttcggag

SEQ ID NO: 4314702 - DNA, 25 bp, Homo sapien
taacttgatctggtttctttgagct

SEQ ID NO: 4314703 - DNA, 25 bp, Homo sapien
gaatttcgttgtcaagtccaaggag

SEQ ID NO: 4314704 - DNA, 25 bp, Homo sapien
caaccaactgtgaggtggaaaaagg

SEQ ID NO: 4314705 - DNA, 25 bp, Homo sapien
ttgccaagaggaaggtaagaccaac

SEQ ID NO: 4314706 - DNA, 25 bp, Homo sapien
tctcaggaggccaattaaccaggtg

SEQ ID NO: 4314707 - DNA, 25 bp, Homo sapien
cacactgattaggttggctggtaaa

SEQ ID NO: 4314708 - DNA, 25 bp, Homo sapien
gctggtaaagactgggcaagtgaaa

SEQ ID NO: 4314709 - DNA, 25 bp, Homo sapien
tcagctacccttaggaggcaatggg

SEQ ID NO: 4314710 - DNA, 25 bp, Homo sapien
catacagtgtatgcatcaaggacat

SEQ ID NO: 4314711 - DNA, 25 bp, Homo sapien
ttgttaaaaagccggtactgattca

SEQ ID NO: 4314712 - DNA, 25 bp, Homo sapien
taataacattctttggccagtcctt

SEQ ID NO: 4314713 - DNA, 25 bp, Homo sapien
gatgatggacctgaactgataataa

SEQ ID NO: 4314714 - DNA, 25 bp, Homo sapien
tcatcccggtgattggtttagccaa

SEQ ID NO: 4314715 - DNA, 25 bp, Homo sapien
aaactatcggctggagagagtggct

SEQ ID NO: 4314716 - DNA, 25 bp, Homo sapien
tcatgaaacgaacagccagaattgg

SEQ ID NO: 4314717 - DNA, 25 bp, Homo sapien
ccacatacatgggtaaaggcagtca

SEQ ID NO: 4314718 - DNA, 25 bp, Homo sapien
catacagttctaaatttcccgaggg

SEQ ID NO: 4314719 - DNA, 25 bp, Homo sapien
tatgttgcatatgacacggcataca

SEQ ID NO: 4314720 - DNA, 25 bp, Homo sapien
ttctttgtagttctgctagactcac

SEQ ID NO: 4314721 - DNA, 25 bp, Homo sapien
tgaattcagcattctttgtagttct

SEQ ID NO: 4314722 - DNA, 25 bp, Homo sapien
ctatgaattcagcattctttgtagt

SEQ ID NO: 4314723 - DNA, 25 bp, Homo sapien
aattcagcattctttgtagttctgc

SEQ ID NO: 4314724 - DNA, 25 bp, Homo sapien
ttccagacctcgtcatcagcatggt

SEQ ID NO: 4314725 - DNA, 25 bp, Homo sapien
atcagcatggtccactttctgtctg

SEQ ID NO: 4314726 - DNA, 25 bp, Homo sapien
gacttccagacctcgtcatcagcat

SEQ ID NO: 4314727 - DNA, 25 bp, Homo sapien
cattgacttccagacctcgtcatca

SEQ ID NO: 4314728 - DNA, 25 bp, Homo sapien
ttatagtacgtctgatttactagcg

SEQ ID NO: 4314729 - DNA, 25 bp, Homo sapien
tatttaagggcttatagtacgtctg

SEQ ID NO: 4314730 - DNA, 25 bp, Homo sapien
gatttactagcgtttcatcctccat

SEQ ID NO: 4314731 - DNA, 25 bp, Homo sapien
cgtctgatttactagcgtttcatcc

SEQ ID NO: 4314732 - DNA, 25 bp, Homo sapien
ggtgtgtccaaggaattactggccc

SEQ ID NO: 4314733 - DNA, 25 bp, Homo sapien
ccaaggaattactggccctactatt

SEQ ID NO: 4314734 - DNA, 25 bp, Homo sapien
tgcacatagagggtgtgtccaagga

SEQ ID NO: 4314735 - DNA, 25 bp, Homo sapien
ttttcactaaagtgggtgcacatag

SEQ ID NO: 4314736 - DNA, 25 bp, Homo sapien
cattcactctaattccagcagccaa

SEQ ID NO: 4314737 - DNA, 25 bp, Homo sapien
caattccattcactctaattccagc

SEQ ID NO: 4314738 - DNA, 25 bp, Homo sapien
tcactctaattccagcagccaaaac

SEQ ID NO: 4314739 - DNA, 25 bp, Homo sapien
ttccattcactctaattccagcagc

SEQ ID NO: 4314740 - DNA, 25 bp, Homo sapien
agcctgagaaggtgacgatgacatg

SEQ ID NO: 4314741 - DNA, 25 bp, Homo sapien
gaaggtgacgatgacatgctctaca

SEQ ID NO: 4314742 - DNA, 25 bp, Homo sapien
tatctcaggtctacaaccaagcctg

SEQ ID NO: 4314743 - DNA, 25 bp, Homo sapien
ttatctcaggtctacaaccaagcct

SEQ ID NO: 4314744 - DNA, 25 bp, Homo sapien
tttagaagcaaattaccttggctcc

SEQ ID NO: 4314745 - DNA, 25 bp, Homo sapien
tctttcccgttaaatgagcatctct

SEQ ID NO: 4314746 - DNA, 25 bp, Homo sapien
caaggagggcccaaaacagtatgtc

SEQ ID NO: 4314747 - DNA, 25 bp, Homo sapien
cagtgttctcaaagttccatgtgca

SEQ ID NO: 4314748 - DNA, 25 bp, Homo sapien
gtagccaacaatgggctgcaccagc

SEQ ID NO: 4314749 - DNA, 25 bp, Homo sapien
cagtgccaagttaaagatgtagcca

SEQ ID NO: 4314750 - DNA, 25 bp, Homo sapien
gtgccaagttaaagatgtagccaac

SEQ ID NO: 4314751 - DNA, 25 bp, Homo sapien
aagatgtagccaacaatgggctgca

SEQ ID NO: 4314752 - DNA, 25 bp, Homo sapien
agccacctggaaaagccgaggcgag

SEQ ID NO: 4314753 - DNA, 25 bp, Homo sapien
gcctttccaaatgtgttcctatcag

SEQ ID NO: 4314754 - DNA, 25 bp, Homo sapien
aaagccgaggcgagaggtgctcctt

SEQ ID NO: 4314755 - DNA, 25 bp, Homo sapien
cgcacaccacgtgaaccgagagcag

SEQ ID NO: 4314756 - DNA, 25 bp, Homo sapien
acaaaaggtgacaaacagtgctaat

SEQ ID NO: 4314757 - DNA, 25 bp, Homo sapien
caaaaggtgacaaacagtgctaatt

SEQ ID NO: 4314758 - DNA, 25 bp, Homo sapien
aaaggtgacaaacagtgctaattct

SEQ ID NO: 4314759 - DNA, 25 bp, Homo sapien
aaaaggtgacaaacagtgctaattc

SEQ ID NO: 4314760 - DNA, 25 bp, Homo sapien
ctgattctgattgtccccgatcatt

SEQ ID NO: 4314761 - DNA, 25 bp, Homo sapien
tgattctgattgtccccgatcattt

SEQ ID NO: 4314762 - DNA, 25 bp, Homo sapien
cagtatttttccttggtcctcttat

SEQ ID NO: 4314763 - DNA, 25 bp, Homo sapien
atttttccttggtcctcttatctct

SEQ ID NO: 4314764 - DNA, 25 bp, Homo sapien
tggtcctcttatctcttttgttcat

SEQ ID NO: 4314765 - DNA, 25 bp, Homo sapien
tattggcccactcccagtatttttc

SEQ ID NO: 4314766 - DNA, 25 bp, Homo sapien
ccactgtgggtacctgtcaaaggct

SEQ ID NO: 4314767 - DNA, 25 bp, Homo sapien
aagcaacattgggtctgttgggtca

SEQ ID NO: 4314768 - DNA, 25 bp, Homo sapien
gcacccagttcgtgataggcctttc

SEQ ID NO: 4314769 - DNA, 25 bp, Homo sapien
gcagccatttgggtcattacataaa

SEQ ID NO: 4314770 - DNA, 25 bp, Homo sapien
catccaaaactaccggcaggcagca

SEQ ID NO: 4314771 - DNA, 25 bp, Homo sapien
caaaactaccggcaggcagcaaaag

SEQ ID NO: 4314772 - DNA, 25 bp, Homo sapien
aaatcatccaaaactaccggcaggc

SEQ ID NO: 4314773 - DNA, 25 bp, Homo sapien
ctaaatcatccaaaactaccggcag

SEQ ID NO: 4314774 - DNA, 25 bp, Homo sapien
gaatcatcggtgaagcagtttccca

SEQ ID NO: 4314775 - DNA, 25 bp, Homo sapien
caaacatctgtgaacttgctccagt

SEQ ID NO: 4314776 - DNA, 25 bp, Homo sapien
ccagttttgaatcatcggtgaagca

SEQ ID NO: 4314777 - DNA, 25 bp, Homo sapien
tatcagagagcaaacatctgtgaac

SEQ ID NO: 4314778 - DNA, 25 bp, Homo sapien
tcttatgatattggagcttttgccc

SEQ ID NO: 4314779 - DNA, 25 bp, Homo sapien
gaaagatttctgatattacctctga

SEQ ID NO: 4314780 - DNA, 25 bp, Homo sapien
tttcccacttatcggcagtgtccgg

SEQ ID NO: 4314781 - DNA, 25 bp, Homo sapien
catggtgcactggtacattacaaat

SEQ ID NO: 4314782 - DNA, 25 bp, Homo sapien
ccttttctgtcaagttgcacacgca

SEQ ID NO: 4314783 - DNA, 25 bp, Homo sapien
ctggccatgtgagaaatacgggcac

SEQ ID NO: 4314784 - DNA, 25 bp, Homo sapien
cgagctagggctttgtttaatgcaa

SEQ ID NO: 4314785 - DNA, 25 bp, Homo sapien
tctgtgccagcgttgcccttttctg

SEQ ID NO: 4314786 - DNA, 25 bp, Homo sapien
ggaatgactgtctactcttccactg

SEQ ID NO: 4314787 - DNA, 25 bp, Homo sapien
aagctgcagtttacataattccagg

SEQ ID NO: 4314788 - DNA, 25 bp, Homo sapien
cacaatggaagcaatatttacaagc

SEQ ID NO: 4314789 - DNA, 25 bp, Homo sapien
tccactgaagagaattcccttggca

SEQ ID NO: 4314790 - DNA, 25 bp, Homo sapien
ttgcgcagaggctatgctaatctcc

SEQ ID NO: 4314791 - DNA, 25 bp, Homo sapien
gaggctatgctaatctccatatcat

SEQ ID NO: 4314792 - DNA, 25 bp, Homo sapien
cagaggctatgctaatctccatatc

SEQ ID NO: 4314793 - DNA, 25 bp, Homo sapien
gagaaatctgcaatgcttcacgaat

SEQ ID NO: 4314794 - DNA, 25 bp, Homo sapien
ctatcctccttctgtccctttatgg

SEQ ID NO: 4314795 - DNA, 25 bp, Homo sapien
tcctccttctgtccctttatggcct

SEQ ID NO: 4314796 - DNA, 25 bp, Homo sapien
ctccttctgtccctttatggccttt

SEQ ID NO: 4314797 - DNA, 25 bp, Homo sapien
ctgtccctttatggcctttttcttg

SEQ ID NO: 4314798 - DNA, 25 bp, Homo sapien
taaaatatttggtattgaagcacag

SEQ ID NO: 4314799 - DNA, 25 bp, Homo sapien
atatttggtattgaagcacagttca

SEQ ID NO: 4314800 - DNA, 25 bp, Homo sapien
tttggtattgaagcacagttcattt

SEQ ID NO: 4314801 - DNA, 25 bp, Homo sapien
ctaaaatatttggtattgaagcaca

SEQ ID NO: 4314802 - DNA, 25 bp, Homo sapien
tcgtactcttgattgaaaaacagca

SEQ ID NO: 4314803 - DNA, 25 bp, Homo sapien
cagcagttccggtgtagacacatgt

SEQ ID NO: 4314804 - DNA, 25 bp, Homo sapien
cagaactccccaagaattcgtactc

SEQ ID NO: 4314805 - DNA, 25 bp, Homo sapien
catgttcatctaggatagtgtatac

SEQ ID NO: 4314806 - DNA, 25 bp, Homo sapien
cagtaacctgacatgcctgttcatc

SEQ ID NO: 4314807 - DNA, 25 bp, Homo sapien
tttggcaaggatgcttttctcagta

SEQ ID NO: 4314808 - DNA, 25 bp, Homo sapien
gacatgcctgttcatctacaaccca

SEQ ID NO: 4314809 - DNA, 25 bp, Homo sapien
tgcttttctcagtaacctgacatgc

SEQ ID NO: 4314810 - DNA, 25 bp, Homo sapien
gaagtgaaagtcgtattgcaaagtc

SEQ ID NO: 4314811 - DNA, 25 bp, Homo sapien
gagacgctgatgaagtgaaagtcgt

SEQ ID NO: 4314812 - DNA, 25 bp, Homo sapien
tgtaatttccaatttccgcagagac

SEQ ID NO: 4314813 - DNA, 25 bp, Homo sapien
tccaatttccgcagagacgctgatg

SEQ ID NO: 4314814 - DNA, 25 bp, Homo sapien
agcttgtttgtaggatttaaatttg

SEQ ID NO: 4314815 - DNA, 25 bp, Homo sapien
ggagacaccagtgatcaatgacctt

SEQ ID NO: 4314816 - DNA, 25 bp, Homo sapien
ctggagacaccagtgatcaatgacc

SEQ ID NO: 4314817 - DNA, 25 bp, Homo sapien
cactggagacaccagtgatcaatga

SEQ ID NO: 4314818 - DNA, 25 bp, Homo sapien
ctatattgagggtttatcactggag

SEQ ID NO: 4314819 - DNA, 25 bp, Homo sapien
tccactgagtctttgaacctctcta

SEQ ID NO: 4314820 - DNA, 25 bp, Homo sapien
tatttggttgccagataccgctgct

SEQ ID NO: 4314821 - DNA, 25 bp, Homo sapien
gggctaaaccagatgtagtcctggc

SEQ ID NO: 4314822 - DNA, 25 bp, Homo sapien
tctctactgcctgctgcagcaaaaa

SEQ ID NO: 4314823 - DNA, 25 bp, Homo sapien
aagctgagctagaagtcccaggatc

SEQ ID NO: 4314824 - DNA, 25 bp, Homo sapien
gcggtaccatttgtgcaaattcttg

SEQ ID NO: 4314825 - DNA, 25 bp, Homo sapien
gcaaattcttgtttgttctggttat

SEQ ID NO: 4314826 - DNA, 25 bp, Homo sapien
gaggaggaggcggtaccatttgtgc

SEQ ID NO: 4314827 - DNA, 25 bp, Homo sapien
gaggaggcggtaccatttgtgcaaa

SEQ ID NO: 4314828 - DNA, 25 bp, Homo sapien
catttctagtctaaggtcaggctca

SEQ ID NO: 4314829 - DNA, 25 bp, Homo sapien
tgttcactgaagcttctgacccgaa

SEQ ID NO: 4314830 - DNA, 25 bp, Homo sapien
tattgccacatcactatggagagcc

SEQ ID NO: 4314831 - DNA, 25 bp, Homo sapien
taataggtaggcgtcaagtgctgac

SEQ ID NO: 4314832 - DNA, 25 bp, Homo sapien
gtggccctctgaaaatgggaaccat

SEQ ID NO: 4314833 - DNA, 25 bp, Homo sapien
tatatctccggacttttgctctcca

SEQ ID NO: 4314834 - DNA, 25 bp, Homo sapien
taatgcaggacagatttcagagaag

SEQ ID NO: 4314835 - DNA, 25 bp, Homo sapien
cattgcagtgtcaaaggtggccctc

SEQ ID NO: 4314836 - DNA, 25 bp, Homo sapien
ctgcagagccctaggaaatgccaag

SEQ ID NO: 4314837 - DNA, 25 bp, Homo sapien
gaaatgccaagagaaggtagagcct

SEQ ID NO: 4314838 - DNA, 25 bp, Homo sapien
agagcctggaatgatttctactggg

SEQ ID NO: 4314839 - DNA, 25 bp, Homo sapien
atgccaagagaaggtagagcctgga

SEQ ID NO: 4314840 - DNA, 25 bp, Homo sapien
gtttacgtgaacaacatcttgcttg

SEQ ID NO: 4314841 - DNA, 25 bp, Homo sapien
tagtgctaggagatgttcttcagtg

SEQ ID NO: 4314842 - DNA, 25 bp, Homo sapien
tagttcaattggtgaggtgaggtca

SEQ ID NO: 4314843 - DNA, 25 bp, Homo sapien
gagcattgaaggtttacgtgaacaa

SEQ ID NO: 4314844 - DNA, 25 bp, Homo sapien
tcttagctatcgtgcctgggtcacc

SEQ ID NO: 4314845 - DNA, 25 bp, Homo sapien
ggatggctgcaaagatgcctaaaca

SEQ ID NO: 4314846 - DNA, 25 bp, Homo sapien
tctaggcccaaggactgtcatggaa

SEQ ID NO: 4314847 - DNA, 25 bp, Homo sapien
agatgcgaccctctctcatttggca

SEQ ID NO: 4314848 - DNA, 25 bp, Homo sapien
tccctctggctgcagcagcacaggt

SEQ ID NO: 4314849 - DNA, 25 bp, Homo sapien
ctctggctgcagcagcacaggttac

SEQ ID NO: 4314850 - DNA, 25 bp, Homo sapien
cttttagagcaatccctctggctgc

SEQ ID NO: 4314851 - DNA, 25 bp, Homo sapien
ttttagagcaatccctctggctgca

SEQ ID NO: 4314852 - DNA, 25 bp, Homo sapien
cccacccaatggaaaggtacaacag

SEQ ID NO: 4314853 - DNA, 25 bp, Homo sapien
tacctggcacattgaacagagttgg

SEQ ID NO: 4314854 - DNA, 25 bp, Homo sapien
atggaggactccctgcaaaagctct

SEQ ID NO: 4314855 - DNA, 25 bp, Homo sapien
caaatggactggcttctgcctaaag

SEQ ID NO: 4314856 - DNA, 25 bp, Homo sapien
tttgatggggtaagaaagtattcag

SEQ ID NO: 4314857 - DNA, 25 bp, Homo sapien
ttctcacgttattcttcggcaaaga

SEQ ID NO: 4314858 - DNA, 25 bp, Homo sapien
gacataattccttctcacgttattc

SEQ ID NO: 4314859 - DNA, 25 bp, Homo sapien
tattcttcggcaaagagcttatcca

SEQ ID NO: 4314860 - DNA, 25 bp, Homo sapien
gatacctggttacctcaaaaagaga

SEQ ID NO: 4314861 - DNA, 25 bp, Homo sapien
caagataaaggctgttcttatgtct

SEQ ID NO: 4314862 - DNA, 25 bp, Homo sapien
catgtgatgataaccaagggtagcg

SEQ ID NO: 4314863 - DNA, 25 bp, Homo sapien
tagcgtgattaacctggatacctgg

SEQ ID NO: 4314864 - DNA, 25 bp, Homo sapien
gatttgtcttagagctcttgattct

SEQ ID NO: 4314865 - DNA, 25 bp, Homo sapien
gataggtgcataaagtgatttgtct

SEQ ID NO: 4314866 - DNA, 25 bp, Homo sapien
catgtatgcaaagactgtagagata

SEQ ID NO: 4314867 - DNA, 25 bp, Homo sapien
caaagactgtagagataggtgcata

SEQ ID NO: 4314868 - DNA, 25 bp, Homo sapien
gctccaagctcttgatctccgtggg

SEQ ID NO: 4314869 - DNA, 25 bp, Homo sapien
tttctgctccaagctcttgatctcc

SEQ ID NO: 4314870 - DNA, 25 bp, Homo sapien
tgtctttttgtgaggagagctatta

SEQ ID NO: 4314871 - DNA, 25 bp, Homo sapien
ctttttgtgaggagagctattattt

SEQ ID NO: 4314872 - DNA, 25 bp, Homo sapien
ccataggcaggtctcagcaaatata

SEQ ID NO: 4314873 - DNA, 25 bp, Homo sapien
tataggttggcttgggtttatctcc

SEQ ID NO: 4314874 - DNA, 25 bp, Homo sapien
tactacctggggtcgtttctgagag

SEQ ID NO: 4314875 - DNA, 25 bp, Homo sapien
agaactcgccgcgaatcctctggac

SEQ ID NO: 4314876 - DNA, 25 bp, Homo sapien
tcatattctgtatcaaagacgggtt

SEQ ID NO: 4314877 - DNA, 25 bp, Homo sapien
catattctgtatcaaagacgggttt

SEQ ID NO: 4314878 - DNA, 25 bp, Homo sapien
tattctgtatcaaagacgggtttga

SEQ ID NO: 4314879 - DNA, 25 bp, Homo sapien
tctgtatcaaagacgggtttgaggt

SEQ ID NO: 4314880 - DNA, 25 bp, Homo sapien
tgcagtctttctattgtcacgtcaa

SEQ ID NO: 4314881 - DNA, 25 bp, Homo sapien
cttgcagtctttctattgtcacgtc

SEQ ID NO: 4314882 - DNA, 25 bp, Homo sapien
cagtctttctattgtcacgtcaata

SEQ ID NO: 4314883 - DNA, 25 bp, Homo sapien
ctattgtcacgtcaatatttatgaa

SEQ ID NO: 4314884 - DNA, 25 bp, Homo sapien
aaagaccctcctagctccagtcagc

SEQ ID NO: 4314885 - DNA, 25 bp, Homo sapien
gccaaagaccctcctagctccagtc

SEQ ID NO: 4314886 - DNA, 25 bp, Homo sapien
caaagaccctcctagctccagtcag

SEQ ID NO: 4314887 - DNA, 25 bp, Homo sapien
ccaaagaccctcctagctccagtca

SEQ ID NO: 4314888 - DNA, 25 bp, Homo sapien
ctgggaggaactgccctttcaggaa

SEQ ID NO: 4314889 - DNA, 25 bp, Homo sapien
gcgcacttggttcacatgagactaa

SEQ ID NO: 4314890 - DNA, 25 bp, Homo sapien
tcttaagagatgtggagctaactca

SEQ ID NO: 4314891 - DNA, 25 bp, Homo sapien
ggtgaactgaagaaagcgcacttgg

SEQ ID NO: 4314892 - DNA, 25 bp, Homo sapien
tgagtaaacgatctttctttaggac

SEQ ID NO: 4314893 - DNA, 25 bp, Homo sapien
ggacttggtgtaagatcacttcttg

SEQ ID NO: 4314894 - DNA, 25 bp, Homo sapien
ctgagtaaacgatctttctttagga

SEQ ID NO: 4314895 - DNA, 25 bp, Homo sapien
gacttggtgtaagatcacttcttgg

SEQ ID NO: 4314896 - DNA, 25 bp, Homo sapien
agatgcttctagattggagctttca

SEQ ID NO: 4314897 - DNA, 25 bp, Homo sapien
cagatgcttctagattggagctttc

SEQ ID NO: 4314898 - DNA, 25 bp, Homo sapien
tcagatgcttctagattggagcttt

SEQ ID NO: 4314899 - DNA, 25 bp, Homo sapien
atcagatgcttctagattggagctt

SEQ ID NO: 4314900 - DNA, 25 bp, Homo sapien
ccttctgggtactctcctgagttgc

SEQ ID NO: 4314901 - DNA, 25 bp, Homo sapien
atcactcactttaaagagggccttc

SEQ ID NO: 4314902 - DNA, 25 bp, Homo sapien
tcactcactttaaagagggccttct

SEQ ID NO: 4314903 - DNA, 25 bp, Homo sapien
ggccttctgggtactctcctgagtt

SEQ ID NO: 4314904 - DNA, 25 bp, Homo sapien
tctatttcaattcggcacatcaagt

SEQ ID NO: 4314905 - DNA, 25 bp, Homo sapien
tcagagcaagcgaagttctgaatag

SEQ ID NO: 4314906 - DNA, 25 bp, Homo sapien
gaatagcctgcctcaaaacttcctg

SEQ ID NO: 4314907 - DNA, 25 bp, Homo sapien
gaagttctgaatagcctgcctcaaa

SEQ ID NO: 4314908 - DNA, 25 bp, Homo sapien
tttctttccacccaggcacaggtcc

SEQ ID NO: 4314909 - DNA, 25 bp, Homo sapien
agttaccagcaccattccctttctt

SEQ ID NO: 4314910 - DNA, 25 bp, Homo sapien
tctttccacccaggcacaggtccat

SEQ ID NO: 4314911 - DNA, 25 bp, Homo sapien
ctgagttaccagcaccattcccttt

SEQ ID NO: 4314912 - DNA, 25 bp, Homo sapien
caatgttggcaatccctatgtctag

SEQ ID NO: 4314913 - DNA, 25 bp, Homo sapien
ctgcttctatgcttaaggcgtgaat

SEQ ID NO: 4314914 - DNA, 25 bp, Homo sapien
gttatcagtacaaggttctttatcc

SEQ ID NO: 4314915 - DNA, 25 bp, Homo sapien
gcttaaggcgtgaatttttgttaca

SEQ ID NO: 4314916 - DNA, 25 bp, Homo sapien
aacaatggtatatccaactgttctg

SEQ ID NO: 4314917 - DNA, 25 bp, Homo sapien
aatcaacaatggtatatccaactgt

SEQ ID NO: 4314918 - DNA, 25 bp, Homo sapien
tcaacaatggtatatccaactgttc

SEQ ID NO: 4314919 - DNA, 25 bp, Homo sapien
caatggtatatccaactgttctgct

SEQ ID NO: 4314920 - DNA, 25 bp, Homo sapien
tgtcaagctgcttattaagatggta

SEQ ID NO: 4314921 - DNA, 25 bp, Homo sapien
tcaagctgcttattaagatggtaaa

SEQ ID NO: 4314922 - DNA, 25 bp, Homo sapien
tgatgtcaagctgcttattaagatg

SEQ ID NO: 4314923 - DNA, 25 bp, Homo sapien
catcttggaacaatgatgtcaagct

SEQ ID NO: 4314924 - DNA, 25 bp, Homo sapien
taagattacttgcagtatgagctgc

SEQ ID NO: 4314925 - DNA, 25 bp, Homo sapien
tatgcataaatgttagccagggaaa

SEQ ID NO: 4314926 - DNA, 25 bp, Homo sapien
gaaccagtcctgaaagttgtgctac

SEQ ID NO: 4314927 - DNA, 25 bp, Homo sapien
ttaagtcagtttgactcagggttgc

SEQ ID NO: 4314928 - DNA, 25 bp, Homo sapien
tgggcatattcaggcatctctacaa

SEQ ID NO: 4314929 - DNA, 25 bp, Homo sapien
aggatacaatgtcattctctctcaa

SEQ ID NO: 4314930 - DNA, 25 bp, Homo sapien
ttctctctcaatttgcccttagcag

SEQ ID NO: 4314931 - DNA, 25 bp, Homo sapien
tgcacacttcacagtatctctttga

SEQ ID NO: 4314932 - DNA, 25 bp, Homo sapien
agagaagcaggatcaatattggtaa

SEQ ID NO: 4314933 - DNA, 25 bp, Homo sapien
ggtccagttagggcctaagcaaatc

SEQ ID NO: 4314934 - DNA, 25 bp, Homo sapien
caggatcaatattggtaaaatgcaa

SEQ ID NO: 4314935 - DNA, 25 bp, Homo sapien
tccagttagggcctaagcaaatctg

SEQ ID NO: 4314936 - DNA, 25 bp, Homo sapien
cagtaaactacagccagttctgagt

SEQ ID NO: 4314937 - DNA, 25 bp, Homo sapien
tgctgtctgatgttttgttcagctg

SEQ ID NO: 4314938 - DNA, 25 bp, Homo sapien
ggtgctgaacagtaaactacagcca

SEQ ID NO: 4314939 - DNA, 25 bp, Homo sapien
cttctaatggtgctgaacagtaaac

SEQ ID NO: 4314940 - DNA, 25 bp, Homo sapien
ctgggataaacatgtgcccatctaa

SEQ ID NO: 4314941 - DNA, 25 bp, Homo sapien
tctaagtctatccagaggccatctc

SEQ ID NO: 4314942 - DNA, 25 bp, Homo sapien
ataaacatgtgcccatctaagtcta

SEQ ID NO: 4314943 - DNA, 25 bp, Homo sapien
ctaagtctatccagaggccatctcc

SEQ ID NO: 4314944 - DNA, 25 bp, Homo sapien
ttccaagctatcagaagaccgcctt

SEQ ID NO: 4314945 - DNA, 25 bp, Homo sapien
tatatggttagcactcggaggtaac

SEQ ID NO: 4314946 - DNA, 25 bp, Homo sapien
cactgctactgccaggtatatggtt

SEQ ID NO: 4314947 - DNA, 25 bp, Homo sapien
tccaagctatcagaagaccgccttc

SEQ ID NO: 4314948 - DNA, 25 bp, Homo sapien
cgttctagccttccatttcttttca

SEQ ID NO: 4314949 - DNA, 25 bp, Homo sapien
gaaaacagcaccatggtatatgaag

SEQ ID NO: 4314950 - DNA, 25 bp, Homo sapien
ggaatcctgaaagctacgttctagc

SEQ ID NO: 4314951 - DNA, 25 bp, Homo sapien
tatgaagcactagagctggaatcct

SEQ ID NO: 4314952 - DNA, 25 bp, Homo sapien
ccagaagctctgaagaagaaggcat

SEQ ID NO: 4314953 - DNA, 25 bp, Homo sapien
atgacaacccggctgtaaggtggag

SEQ ID NO: 4314954 - DNA, 25 bp, Homo sapien
taagaaaacgctatgacaacccggc

SEQ ID NO: 4314955 - DNA, 25 bp, Homo sapien
gactgagtgtcagactggcaaccag

SEQ ID NO: 4314956 - DNA, 25 bp, Homo sapien
aaggagaaggacgtggatgtttttg

SEQ ID NO: 4314957 - DNA, 25 bp, Homo sapien
gaaggacgtggatgtttttggagag

SEQ ID NO: 4314958 - DNA, 25 bp, Homo sapien
gatgtttttggagaggtagagtgga

SEQ ID NO: 4314959 - DNA, 25 bp, Homo sapien
cgtggatgtttttggagaggtagag

SEQ ID NO: 4314960 - DNA, 25 bp, Homo sapien
gagccttaggccaagagtccagtct

SEQ ID NO: 4314961 - DNA, 25 bp, Homo sapien
gccagcttgaagactgtaacccaga

SEQ ID NO: 4314962 - DNA, 25 bp, Homo sapien
taacccagaaagcaacgagccttag

SEQ ID NO: 4314963 - DNA, 25 bp, Homo sapien
taggactctctaatctctctagtga

SEQ ID NO: 4314964 - DNA, 25 bp, Homo sapien
aggagttggtgaagttaggtatatt

SEQ ID NO: 4314965 - DNA, 25 bp, Homo sapien
tataggagttggtgaagttaggtat

SEQ ID NO: 4314966 - DNA, 25 bp, Homo sapien
tatatttaccataaacagttcaccc

SEQ ID NO: 4314967 - DNA, 25 bp, Homo sapien
taggagttggtgaagttaggtatat

SEQ ID NO: 4314968 - DNA, 25 bp, Homo sapien
tctgattcttctctccttataccca

SEQ ID NO: 4314969 - DNA, 25 bp, Homo sapien
ctgattcttctctccttatacccat

SEQ ID NO: 4314970 - DNA, 25 bp, Homo sapien
aactctgattcttctctccttatac

SEQ ID NO: 4314971 - DNA, 25 bp, Homo sapien
gatcccaaactctgattcttctctc

SEQ ID NO: 4314972 - DNA, 25 bp, Homo sapien
tatcctgtcatggttacagctttat

SEQ ID NO: 4314973 - DNA, 25 bp, Homo sapien
taatatatcctgtcatggttacagc

SEQ ID NO: 4314974 - DNA, 25 bp, Homo sapien
aatatatcctgtcatggttacagct

SEQ ID NO: 4314975 - DNA, 25 bp, Homo sapien
tatatcctgtcatggttacagcttt

SEQ ID NO: 4314976 - DNA, 25 bp, Homo sapien
gaagccgcagttgaagatgagtcac

SEQ ID NO: 4314977 - DNA, 25 bp, Homo sapien
cagctttggtaaaagaagccgcagt

SEQ ID NO: 4314978 - DNA, 25 bp, Homo sapien
ttggtaaaagaagccgcagttgaag

SEQ ID NO: 4314979 - DNA, 25 bp, Homo sapien
taaaagaagccgcagttgaagatga

SEQ ID NO: 4314980 - DNA, 25 bp, Homo sapien
gcattggccccagctgggtcatcca

SEQ ID NO: 4314981 - DNA, 25 bp, Homo sapien
tgtcaagccagaggcccctcctgct

SEQ ID NO: 4314982 - DNA, 25 bp, Homo sapien
ctgctccagcattggccccagctgg

SEQ ID NO: 4314983 - DNA, 25 bp, Homo sapien
ttggccccagctgggtcatccagca

SEQ ID NO: 4314984 - DNA, 25 bp, Homo sapien
ttacactggtttggcgtcctggata

SEQ ID NO: 4314985 - DNA, 25 bp, Homo sapien
acctaatacattcgcaaaaggccca

SEQ ID NO: 4314986 - DNA, 25 bp, Homo sapien
caacctaatacattcgcaaaaggcc

SEQ ID NO: 4314987 - DNA, 25 bp, Homo sapien
gcgtcctggatataatgttctgcca

SEQ ID NO: 4314988 - DNA, 25 bp, Homo sapien
catggcctttcactgatacttaggt

SEQ ID NO: 4314989 - DNA, 25 bp, Homo sapien
cactgatacttaggttttcgacatt

SEQ ID NO: 4314990 - DNA, 25 bp, Homo sapien
cctttcactgatacttaggttttcg

SEQ ID NO: 4314991 - DNA, 25 bp, Homo sapien
tcatggcctttcactgatacttagg

SEQ ID NO: 4314992 - DNA, 25 bp, Homo sapien
ctttggcattttgctaagatcccaa

SEQ ID NO: 4314993 - DNA, 25 bp, Homo sapien
taatgaacacagcttcgtcctcctc

SEQ ID NO: 4314994 - DNA, 25 bp, Homo sapien
ccataatgaacacagcttcgtcctc

SEQ ID NO: 4314995 - DNA, 25 bp, Homo sapien
cctttggcattttgctaagatccca

SEQ ID NO: 4314996 - DNA, 25 bp, Homo sapien
gcaagtgctgccatttagacacatg

SEQ ID NO: 4314997 - DNA, 25 bp, Homo sapien
caattggattagatgacgtgatgcc

SEQ ID NO: 4314998 - DNA, 25 bp, Homo sapien
cgtgatgccaagagccattaatcca

SEQ ID NO: 4314999 - DNA, 25 bp, Homo sapien
ttccagtcacatctggccacttggg

SEQ ID NO: 4315000 - DNA, 25 bp, Homo sapien
ctgttgattgctcatgttcaggcat

SEQ ID NO: 4315001 - DNA, 25 bp, Homo sapien
caatctagctccaggcttttgaact

SEQ ID NO: 4315002 - DNA, 25 bp, Homo sapien
gattgctcatgttcaggcattgatt

SEQ ID NO: 4315003 - DNA, 25 bp, Homo sapien
ttctgaatagcttcaatctagctcc

SEQ ID NO: 4315004 - DNA, 25 bp, Homo sapien
ccttcctgtatagctagatttctca

SEQ ID NO: 4315005 - DNA, 25 bp, Homo sapien
tgccttcctgtatagctagatttct

SEQ ID NO: 4315006 - DNA, 25 bp, Homo sapien
gtttgccttcctgtatagctagatt

SEQ ID NO: 4315007 - DNA, 25 bp, Homo sapien
cctgtatagctagatttctcacagt

SEQ ID NO: 4315008 - DNA, 25 bp, Homo sapien
aatgccatgccccagtagtactgct

SEQ ID NO: 4315009 - DNA, 25 bp, Homo sapien
gttggcattgctaaggtttacatct

SEQ ID NO: 4315010 - DNA, 25 bp, Homo sapien
gccccagtagtactgctaacaccat

SEQ ID NO: 4315011 - DNA, 25 bp, Homo sapien
gccatggtcaccaatgctgctgcca

SEQ ID NO: 4315012 - DNA, 25 bp, Homo sapien
ttgtcttttcgatcctgcaatatgg

SEQ ID NO: 4315013 - DNA, 25 bp, Homo sapien
acctgtttgtcttttcgatcctgca

SEQ ID NO: 4315014 - DNA, 25 bp, Homo sapien
tttcgatcctgcaatatggaggact

SEQ ID NO: 4315015 - DNA, 25 bp, Homo sapien
ctgcaatatggaggactgatggctt

SEQ ID NO: 4315016 - DNA, 25 bp, Homo sapien
gaagtgatcggaaagcaatccttga

SEQ ID NO: 4315017 - DNA, 25 bp, Homo sapien
tagcctctaaccacctaagttgttc

SEQ ID NO: 4315018 - DNA, 25 bp, Homo sapien
gagccatttctaggctatcgtccaa

SEQ ID NO: 4315019 - DNA, 25 bp, Homo sapien
gaaacagctctcgaaatatgttctc

SEQ ID NO: 4315020 - DNA, 25 bp, Homo sapien
gaggctgaaagtagttatgtgtcgt

SEQ ID NO: 4315021 - DNA, 25 bp, Homo sapien
cgtgtcgtgtcatcgatgacgcttc

SEQ ID NO: 4315022 - DNA, 25 bp, Homo sapien
tcagttctttagaggctgaaagtag

SEQ ID NO: 4315023 - DNA, 25 bp, Homo sapien
catcgatgacgcttccatgtccatt

SEQ ID NO: 4315024 - DNA, 25 bp, Homo sapien
atcgctgtgggaagcttgagtgtac

SEQ ID NO: 4315025 - DNA, 25 bp, Homo sapien
aactcattgtagcagcagtagactc

SEQ ID NO: 4315026 - DNA, 25 bp, Homo sapien
tgataaaaactcattgtagcagcag

SEQ ID NO: 4315027 - DNA, 25 bp, Homo sapien
gcagtagactcttacaagctgatcg

SEQ ID NO: 4315028 - DNA, 25 bp, Homo sapien
gattaagtctaacacttcatttttc

SEQ ID NO: 4315029 - DNA, 25 bp, Homo sapien
gatgtttttcatcaacgattgatac

SEQ ID NO: 4315030 - DNA, 25 bp, Homo sapien
tagccagattcttctctcgaggatg

SEQ ID NO: 4315031 - DNA, 25 bp, Homo sapien
cgattgatacatagatctctgacag

SEQ ID NO: 4315032 - DNA, 25 bp, Homo sapien
tgtatccatatgtagtacctatggc

SEQ ID NO: 4315033 - DNA, 25 bp, Homo sapien
cgtttctgcaaatctctgtgtatcc

SEQ ID NO: 4315034 - DNA, 25 bp, Homo sapien
aaatcagcccagtcgtcgtttctgc

SEQ ID NO: 4315035 - DNA, 25 bp, Homo sapien
ggtgctagcacaaacactggcatcc

SEQ ID NO: 4315036 - DNA, 25 bp, Homo sapien
caccacagttttctgcaaaacagcc

SEQ ID NO: 4315037 - DNA, 25 bp, Homo sapien
ccacagttttctgcaaaacagccag

SEQ ID NO: 4315038 - DNA, 25 bp, Homo sapien
cagttttctgcaaaacagccagcag

SEQ ID NO: 4315039 - DNA, 25 bp, Homo sapien
gttttctgcaaaacagccagcagca

SEQ ID NO: 4315040 - DNA, 25 bp, Homo sapien
acaaagaaagctgggacatatagtc

SEQ ID NO: 4315041 - DNA, 25 bp, Homo sapien
taaccacacttcgatacaaagaaag

SEQ ID NO: 4315042 - DNA, 25 bp, Homo sapien
ggacatatagtccaaagccaagcag

SEQ ID NO: 4315043 - DNA, 25 bp, Homo sapien
cacacttcgatacaaagaaagctgg

SEQ ID NO: 4315044 - DNA, 25 bp, Homo sapien
gcccttcagtaatataccaatttcc

SEQ ID NO: 4315045 - DNA, 25 bp, Homo sapien
cttcagtaatataccaatttcccct

SEQ ID NO: 4315046 - DNA, 25 bp, Homo sapien
gtagcccttcagtaatataccaatt

SEQ ID NO: 4315047 - DNA, 25 bp, Homo sapien
tcatgtagcccttcagtaatatacc

SEQ ID NO: 4315048 - DNA, 25 bp, Homo sapien
tatgacaatgactagacaaccagag

SEQ ID NO: 4315049 - DNA, 25 bp, Homo sapien
tcttgtaggtttcgacattggccac

SEQ ID NO: 4315050 - DNA, 25 bp, Homo sapien
gattgttcccttagtactgcacgcc

SEQ ID NO: 4315051 - DNA, 25 bp, Homo sapien
gattatactttgagagcccttgtga

SEQ ID NO: 4315052 - DNA, 25 bp, Homo sapien
tgccccggtgttgcgtggtgggaca

SEQ ID NO: 4315053 - DNA, 25 bp, Homo sapien
cagtgccccggtgttgcgtggtggg

SEQ ID NO: 4315054 - DNA, 25 bp, Homo sapien
cccggtgttgcgtggtgggacacag

SEQ ID NO: 4315055 - DNA, 25 bp, Homo sapien
tgcacagtgccccggtgttgcgtgg

SEQ ID NO: 4315056 - DNA, 25 bp, Homo sapien
tcctccaagtacctgcatttctgca

SEQ ID NO: 4315057 - DNA, 25 bp, Homo sapien
tatttcttcgacctacatttgcttg

SEQ ID NO: 4315058 - DNA, 25 bp, Homo sapien
gatgttggaaaagtaggtctacaat

SEQ ID NO: 4315059 - DNA, 25 bp, Homo sapien
actgggatctctgggattatttgat

SEQ ID NO: 4315060 - DNA, 25 bp, Homo sapien
atttgctgcttgattggatgagtac

SEQ ID NO: 4315061 - DNA, 25 bp, Homo sapien
tatttatttgctgcttgattggatg

SEQ ID NO: 4315062 - DNA, 25 bp, Homo sapien
tttatttgctgcttgattggatgag

SEQ ID NO: 4315063 - DNA, 25 bp, Homo sapien
tatttgctgcttgattggatgagta

SEQ ID NO: 4315064 - DNA, 25 bp, Homo sapien
tagaagggagttttggcaccactac

SEQ ID NO: 4315065 - DNA, 25 bp, Homo sapien
tacaggtcgtacttccagctgtgtc

SEQ ID NO: 4315066 - DNA, 25 bp, Homo sapien
tgactttatagcaggtggcggcaca

SEQ ID NO: 4315067 - DNA, 25 bp, Homo sapien
cacctggatttgttcgcatgtcaac

SEQ ID NO: 4315068 - DNA, 25 bp, Homo sapien
cactcatgttgctgtctgtagacac

SEQ ID NO: 4315069 - DNA, 25 bp, Homo sapien
gcctagggcactgagacgcatgaaa

SEQ ID NO: 4315070 - DNA, 25 bp, Homo sapien
ctgtagacacgggacttgtgggcct

SEQ ID NO: 4315071 - DNA, 25 bp, Homo sapien
gttttctgcattacggcggcactca

SEQ ID NO: 4315072 - DNA, 25 bp, Homo sapien
cgttgatcatggaccccgtgacaga

SEQ ID NO: 4315073 - DNA, 25 bp, Homo sapien
ggcgcatccgtatccatatctgaga

SEQ ID NO: 4315074 - DNA, 25 bp, Homo sapien
gaagaactaacactggagcgtccgc

SEQ ID NO: 4315075 - DNA, 25 bp, Homo sapien
gcatcagtgaaaaaggagccgtccg

SEQ ID NO: 4315076 - DNA, 25 bp, Homo sapien
atggctataggacacggcagctgga

SEQ ID NO: 4315077 - DNA, 25 bp, Homo sapien
cagtctcctctggacaatcctgtaa

SEQ ID NO: 4315078 - DNA, 25 bp, Homo sapien
ttgcaaatacatccttgctggtggc

SEQ ID NO: 4315079 - DNA, 25 bp, Homo sapien
ctggtggcacgggacatggcatttc

SEQ ID NO: 4315080 - DNA, 25 bp, Homo sapien
gaggaagcaggtctgcccagttcat

SEQ ID NO: 4315081 - DNA, 25 bp, Homo sapien
ttcatctacagaaatgttgtactct

SEQ ID NO: 4315082 - DNA, 25 bp, Homo sapien
tgttgtactcttcgctattgctgtg

SEQ ID NO: 4315083 - DNA, 25 bp, Homo sapien
agcaggtctgcccagttcatgccac

SEQ ID NO: 4315084 - DNA, 25 bp, Homo sapien
cctcctgtgttctggtcgtatgatt

SEQ ID NO: 4315085 - DNA, 25 bp, Homo sapien
ttggttgtatgggatagttggagga

SEQ ID NO: 4315086 - DNA, 25 bp, Homo sapien
cagatgtactactgccccggtctga

SEQ ID NO: 4315087 - DNA, 25 bp, Homo sapien
agatgtactactgccccggtctgag

SEQ ID NO: 4315088 - DNA, 25 bp, Homo sapien
gctgccctgatggattgacaaaacg

SEQ ID NO: 4315089 - DNA, 25 bp, Homo sapien
cgatgttgtactgaactggtgccac

SEQ ID NO: 4315090 - DNA, 25 bp, Homo sapien
taaacagttgactcagggagcatca

SEQ ID NO: 4315091 - DNA, 25 bp, Homo sapien
tttccagtgcttctcgccagagtcc

SEQ ID NO: 4315092 - DNA, 25 bp, Homo sapien
tgtgcaatggagaggaaaaggaaaa

SEQ ID NO: 4315093 - DNA, 25 bp, Homo sapien
ctatgtgcaatggagaggaaaagga

SEQ ID NO: 4315094 - DNA, 25 bp, Homo sapien
tatgtgcaatggagaggaaaaggaa

SEQ ID NO: 4315095 - DNA, 25 bp, Homo sapien
gtgcaatggagaggaaaaggaaaaa

SEQ ID NO: 4315096 - DNA, 25 bp, Homo sapien
gggtaattgaatcaaataagcctga

SEQ ID NO: 4315097 - DNA, 25 bp, Homo sapien
attaaataactgaatatacatacat

SEQ ID NO: 4315098 - DNA, 25 bp, Homo sapien
ggtaattgaatcaaataagcctgaa

SEQ ID NO: 4315099 - DNA, 25 bp, Homo sapien
cgtggccactgagcactagaaatgt

SEQ ID NO: 4315100 - DNA, 25 bp, Homo sapien
gcatttcaaccatgaaccgtcaggg

SEQ ID NO: 4315101 - DNA, 25 bp, Homo sapien
gacactcaggattcgctttaagggc

SEQ ID NO: 4315102 - DNA, 25 bp, Homo sapien
gacttggtcacatggatacgtcaca

SEQ ID NO: 4315103 - DNA, 25 bp, Homo sapien
tgtcctcaggatttgctactatacc

SEQ ID NO: 4315104 - DNA, 25 bp, Homo sapien
tcctacttgctattgattgtagaat

SEQ ID NO: 4315105 - DNA, 25 bp, Homo sapien
tttcctacttgctattgattgtaga

SEQ ID NO: 4315106 - DNA, 25 bp, Homo sapien
ctacttgctattgattgtagaattt

SEQ ID NO: 4315107 - DNA, 25 bp, Homo sapien
cctacttgctattgattgtagaatt

SEQ ID NO: 4315108 - DNA, 25 bp, Homo sapien
gctaaacaatagtcagcattggata

SEQ ID NO: 4315109 - DNA, 25 bp, Homo sapien
taaatcaggctattttgctaaacaa

SEQ ID NO: 4315110 - DNA, 25 bp, Homo sapien
tatctttcccatgtagggagaggga

SEQ ID NO: 4315111 - DNA, 25 bp, Homo sapien
aaaagcttatacatatcaggctctc

SEQ ID NO: 4315112 - DNA, 25 bp, Homo sapien
cagtattaggccacgtgtctgccag

SEQ ID NO: 4315113 - DNA, 25 bp, Homo sapien
ctgtaggtagtgaggttgctgtcgc

SEQ ID NO: 4315114 - DNA, 25 bp, Homo sapien
cagcagctgatggagcagtcattgt

SEQ ID NO: 4315115 - DNA, 25 bp, Homo sapien
tttccattgcctgccgtgcagcagc

SEQ ID NO: 4315116 - DNA, 25 bp, Homo sapien
cagagccagggactcaaactggagt

SEQ ID NO: 4315117 - DNA, 25 bp, Homo sapien
catcagcgattattaatgggagcct

SEQ ID NO: 4315118 - DNA, 25 bp, Homo sapien
gggagccttggaccaacagagccag

SEQ ID NO: 4315119 - DNA, 25 bp, Homo sapien
tctgataaaacagagatgtccacta

SEQ ID NO: 4315120 - DNA, 25 bp, Homo sapien
caagaaatctgatatttcaccttcc

SEQ ID NO: 4315121 - DNA, 25 bp, Homo sapien
gaagcaagaaatctgatatttcacc

SEQ ID NO: 4315122 - DNA, 25 bp, Homo sapien
ctgggaagcaagaaatctgatattt

SEQ ID NO: 4315123 - DNA, 25 bp, Homo sapien
aagaaatctgatatttcaccttcca

SEQ ID NO: 4315124 - DNA, 25 bp, Homo sapien
ggcttcccaagccatagagcttatt

SEQ ID NO: 4315125 - DNA, 25 bp, Homo sapien
tgccaatgtggctcaaacacagtca

SEQ ID NO: 4315126 - DNA, 25 bp, Homo sapien
tatccaccaggagttgccaaacgtt

SEQ ID NO: 4315127 - DNA, 25 bp, Homo sapien
tccaggaatagccacatttgcaatg

SEQ ID NO: 4315128 - DNA, 25 bp, Homo sapien
gcttcgcctcctctctggtaagtta

SEQ ID NO: 4315129 - DNA, 25 bp, Homo sapien
tgacagcttcgcctcctctctggta

SEQ ID NO: 4315130 - DNA, 25 bp, Homo sapien
gacagcttcgcctcctctctggtaa

SEQ ID NO: 4315131 - DNA, 25 bp, Homo sapien
cagcttcgcctcctctctggtaagt

SEQ ID NO: 4315132 - DNA, 25 bp, Homo sapien
ctgttggtgtgaaggtaaaagacgg

SEQ ID NO: 4315133 - DNA, 25 bp, Homo sapien
gaaaatgtgccaacaggacaaagtg

SEQ ID NO: 4315134 - DNA, 25 bp, Homo sapien
caaaacagagttcatgatggaggtc

SEQ ID NO: 4315135 - DNA, 25 bp, Homo sapien
gaaacacaggattccactgactggc

SEQ ID NO: 4315136 - DNA, 25 bp, Homo sapien
tataatcacgtagctatggcacttc

SEQ ID NO: 4315137 - DNA, 25 bp, Homo sapien
tttcacaggcgggaatattgacata

SEQ ID NO: 4315138 - DNA, 25 bp, Homo sapien
gtatacataatgagcaccagttctc

SEQ ID NO: 4315139 - DNA, 25 bp, Homo sapien
cttttcagtaacctccaagccctca

SEQ ID NO: 4315140 - DNA, 25 bp, Homo sapien
acaggcgggaatattgacatactgc

SEQ ID NO: 4315141 - DNA, 25 bp, Homo sapien
tagggacattcaagttctagctaac

SEQ ID NO: 4315142 - DNA, 25 bp, Homo sapien
caatctggccaacacatgtaagaaa

SEQ ID NO: 4315143 - DNA, 25 bp, Homo sapien
tactgttttggtctatgcataggga

SEQ ID NO: 4315144 - DNA, 25 bp, Homo sapien
taagtccccttgtgacggacaacac

SEQ ID NO: 4315145 - DNA, 25 bp, Homo sapien
catgaggatgatccaacaggctgct

SEQ ID NO: 4315146 - DNA, 25 bp, Homo sapien
tgcggtgtcgataaagccagatgct

SEQ ID NO: 4315147 - DNA, 25 bp, Homo sapien
catctgaaatctgctgagcgaggct

SEQ ID NO: 4315148 - DNA, 25 bp, Homo sapien
tccaatacctgctatgaaggccggc

SEQ ID NO: 4315149 - DNA, 25 bp, Homo sapien
aggtggaaccatccactgttttgtt

SEQ ID NO: 4315150 - DNA, 25 bp, Homo sapien
gtggtatcgagtttcattgcccaga

SEQ ID NO: 4315151 - DNA, 25 bp, Homo sapien
tgaccacggaaaaggtggaaccatc

SEQ ID NO: 4315152 - DNA, 25 bp, Homo sapien
tttgttgatgtggtatcgagtttca

SEQ ID NO: 4315153 - DNA, 25 bp, Homo sapien
cttggaccattccattttgagtgtc

SEQ ID NO: 4315154 - DNA, 25 bp, Homo sapien
gtggctgccaactaactagaattgc

SEQ ID NO: 4315155 - DNA, 25 bp, Homo sapien
tagaattgcagttccgtttccatca

SEQ ID NO: 4315156 - DNA, 25 bp, Homo sapien
tatactcttggaccattccattttg

SEQ ID NO: 4315157 - DNA, 25 bp, Homo sapien
tcaatgctaattcactgccacggtg

SEQ ID NO: 4315158 - DNA, 25 bp, Homo sapien
catttacacatttgaggtaggccac

SEQ ID NO: 4315159 - DNA, 25 bp, Homo sapien
gaaaatgctaatcccacgaagtcct

SEQ ID NO: 4315160 - DNA, 25 bp, Homo sapien
gaagtcctgggcaaatcaacacatt

SEQ ID NO: 4315161 - DNA, 25 bp, Homo sapien
atggaaatcaaacgcttcatcatac

SEQ ID NO: 4315162 - DNA, 25 bp, Homo sapien
gcatggaaatcaaacgcttcatcat

SEQ ID NO: 4315163 - DNA, 25 bp, Homo sapien
aatgcatggaaatcaaacgcttcat

SEQ ID NO: 4315164 - DNA, 25 bp, Homo sapien
tgcatggaaatcaaacgcttcatca

SEQ ID NO: 4315165 - DNA, 25 bp, Homo sapien
aaaagggcgagccttaatttcatag

SEQ ID NO: 4315166 - DNA, 25 bp, Homo sapien
tctgagatcagggattaccacactg

SEQ ID NO: 4315167 - DNA, 25 bp, Homo sapien
ccttgtatatactgagactgttgat

SEQ ID NO: 4315168 - DNA, 25 bp, Homo sapien
aactaaccagtctgattctccgtgg

SEQ ID NO: 4315169 - DNA, 25 bp, Homo sapien
tgacattgcatgtaggacatccctg

SEQ ID NO: 4315170 - DNA, 25 bp, Homo sapien
aaatgtgaggcctgatggcagctct

SEQ ID NO: 4315171 - DNA, 25 bp, Homo sapien
taaaatgcacaaaattctgtctggc

SEQ ID NO: 4315172 - DNA, 25 bp, Homo sapien
tctatgcttcatgcagaaatgtgag

SEQ ID NO: 4315173 - DNA, 25 bp, Homo sapien
ggaggtgcagaacagcatttcccag

SEQ ID NO: 4315174 - DNA, 25 bp, Homo sapien
caccccctgacttgttggtaggaca

SEQ ID NO: 4315175 - DNA, 25 bp, Homo sapien
tgtccagtgcacttcgatggaagag

SEQ ID NO: 4315176 - DNA, 25 bp, Homo sapien
tgcttgtggtccaccccctgacttg

SEQ ID NO: 4315177 - DNA, 25 bp, Homo sapien
taggtttgagtcctttaatggcaga

SEQ ID NO: 4315178 - DNA, 25 bp, Homo sapien
cattctctgctacggtctgccagct

SEQ ID NO: 4315179 - DNA, 25 bp, Homo sapien
tatttggcttggatcactaattcca

SEQ ID NO: 4315180 - DNA, 25 bp, Homo sapien
tatgcattagctgccctcacaagga

SEQ ID NO: 4315181 - DNA, 25 bp, Homo sapien
tgaaggcttctataatataagatgt

SEQ ID NO: 4315182 - DNA, 25 bp, Homo sapien
taaatttgggtcagtaggtcttgga

SEQ ID NO: 4315183 - DNA, 25 bp, Homo sapien
tggagttgctcctgaattcaaattt

SEQ ID NO: 4315184 - DNA, 25 bp, Homo sapien
ggttgccacgataatgtgactgtat

SEQ ID NO: 4315185 - DNA, 25 bp, Homo sapien
catgttgcttcaccactgggggttg

SEQ ID NO: 4315186 - DNA, 25 bp, Homo sapien
ggttgatgcaatgcaggtgtaccga

SEQ ID NO: 4315187 - DNA, 25 bp, Homo sapien
aggtgtaccgaccagtatcacccag

SEQ ID NO: 4315188 - DNA, 25 bp, Homo sapien
cttcaatgtaagcactccatgttgc

SEQ ID NO: 4315189 - DNA, 25 bp, Homo sapien
tccacagaatggtgggcactggact

SEQ ID NO: 4315190 - DNA, 25 bp, Homo sapien
cacacagctgaggacgaaagtgcca

SEQ ID NO: 4315191 - DNA, 25 bp, Homo sapien
tcttgggttgaaacgaggactccat

SEQ ID NO: 4315192 - DNA, 25 bp, Homo sapien
cacaggaccttgtcgaataactggg

SEQ ID NO: 4315193 - DNA, 25 bp, Homo sapien
ctggaagcaattttctaatcatcca

SEQ ID NO: 4315194 - DNA, 25 bp, Homo sapien
tccaagcaacagcagttgttctagg

SEQ ID NO: 4315195 - DNA, 25 bp, Homo sapien
catccaagcaacagcagttgttcta

SEQ ID NO: 4315196 - DNA, 25 bp, Homo sapien
caagcaacagcagttgttctaggct

SEQ ID NO: 4315197 - DNA, 25 bp, Homo sapien
taaatattagttttgtgcatgcaaa

SEQ ID NO: 4315198 - DNA, 25 bp, Homo sapien
ccaaatatgcctttgtgatgatgct

SEQ ID NO: 4315199 - DNA, 25 bp, Homo sapien
tcagatcgctggacattagtaattg

SEQ ID NO: 4315200 - DNA, 25 bp, Homo sapien
gtctggcagatgtaataaccaacat

SEQ ID NO: 4315201 - DNA, 25 bp, Homo sapien
taattgtgaggtcgccagtctggga

SEQ ID NO: 4315202 - DNA, 25 bp, Homo sapien
gtggttgatatgagaaaagtagatt

SEQ ID NO: 4315203 - DNA, 25 bp, Homo sapien
ggtggttgatatgagaaaagtagat

SEQ ID NO: 4315204 - DNA, 25 bp, Homo sapien
tggtggttgatatgagaaaagtaga

SEQ ID NO: 4315205 - DNA, 25 bp, Homo sapien
tgtggtggttgatatgagaaaagta

SEQ ID NO: 4315206 - DNA, 25 bp, Homo sapien
gatttccggttgcttcacactgaaa

SEQ ID NO: 4315207 - DNA, 25 bp, Homo sapien
tggttgaggatttccggttgcttca

SEQ ID NO: 4315208 - DNA, 25 bp, Homo sapien
aggatttccggttgcttcacactga

SEQ ID NO: 4315209 - DNA, 25 bp, Homo sapien
tgaggatttccggttgcttcacact

SEQ ID NO: 4315210 - DNA, 25 bp, Homo sapien
tcacggggtttcacaacaaaatgtg

SEQ ID NO: 4315211 - DNA, 25 bp, Homo sapien
cacggggtttcacaacaaaatgtgg

SEQ ID NO: 4315212 - DNA, 25 bp, Homo sapien
cggggtttcacaacaaaatgtggag

SEQ ID NO: 4315213 - DNA, 25 bp, Homo sapien
ctttactcttttcacagttacccat

SEQ ID NO: 4315214 - DNA, 25 bp, Homo sapien
tcagacattgaaatcccattaaggg

SEQ ID NO: 4315215 - DNA, 25 bp, Homo sapien
cccattaagggcagtagtagcatcc

SEQ ID NO: 4315216 - DNA, 25 bp, Homo sapien
aatacctaactctcactcggatggg

SEQ ID NO: 4315217 - DNA, 25 bp, Homo sapien
atggggagtgtctgaaaagcttgct

SEQ ID NO: 4315218 - DNA, 25 bp, Homo sapien
ttcaaaaattgacccattctgtgag

SEQ ID NO: 4315219 - DNA, 25 bp, Homo sapien
aaaaattgacccattctgtgagaag

SEQ ID NO: 4315220 - DNA, 25 bp, Homo sapien
cttcaaaaattgacccattctgtga

SEQ ID NO: 4315221 - DNA, 25 bp, Homo sapien
caaaaattgacccattctgtgagaa

SEQ ID NO: 4315222 - DNA, 25 bp, Homo sapien
acttggatttgacacctcttatatt

SEQ ID NO: 4315223 - DNA, 25 bp, Homo sapien
cttggatttgacacctcttatattt

SEQ ID NO: 4315224 - DNA, 25 bp, Homo sapien
tgctaatgttagaccccaaaacaag

SEQ ID NO: 4315225 - DNA, 25 bp, Homo sapien
gatgacagcatcaagtgttgctaat

SEQ ID NO: 4315226 - DNA, 25 bp, Homo sapien
tagaacagacagtgttcagaaaaga

SEQ ID NO: 4315227 - DNA, 25 bp, Homo sapien
ccaaaacaagctaaatggtttatgg

SEQ ID NO: 4315228 - DNA, 25 bp, Homo sapien
caagtgtatgaacccatgtcaccag

SEQ ID NO: 4315229 - DNA, 25 bp, Homo sapien
caaggtatgatcatctcggatttca

SEQ ID NO: 4315230 - DNA, 25 bp, Homo sapien
ttctgcaacacaagtgtatgaaccc

SEQ ID NO: 4315231 - DNA, 25 bp, Homo sapien
tatgaacccatgtcaccagctgtca

SEQ ID NO: 4315232 - DNA, 25 bp, Homo sapien
ggtggcagagtcgaaatttgaaccc

SEQ ID NO: 4315233 - DNA, 25 bp, Homo sapien
ggtcctcatctagttcggtggcaga

SEQ ID NO: 4315234 - DNA, 25 bp, Homo sapien
ttagacatcacatcccataggcacc

SEQ ID NO: 4315235 - DNA, 25 bp, Homo sapien
ggtattcctctaagtcagctggcag

SEQ ID NO: 4315236 - DNA, 25 bp, Homo sapien
gacagaaggctcaacacatgtttgc

SEQ ID NO: 4315237 - DNA, 25 bp, Homo sapien
gaatggcacattccctaaggctccc

SEQ ID NO: 4315238 - DNA, 25 bp, Homo sapien
gtgaacataatggagaagacggccc

SEQ ID NO: 4315239 - DNA, 25 bp, Homo sapien
gaatggactattctaatggcccgga

SEQ ID NO: 4315240 - DNA, 25 bp, Homo sapien
cacagttactgccaagttactgggt

SEQ ID NO: 4315241 - DNA, 25 bp, Homo sapien
cctcgggcctcacatttaaattctg

SEQ ID NO: 4315242 - DNA, 25 bp, Homo sapien
tactgtaggtacagggtcacctcgg

SEQ ID NO: 4315243 - DNA, 25 bp, Homo sapien
catctttcctccatcgtactgtagg

SEQ ID NO: 4315244 - DNA, 25 bp, Homo sapien
ctaagacagtcagctcggctacttc

SEQ ID NO: 4315245 - DNA, 25 bp, Homo sapien
agtcagctcggctacttcactctca

SEQ ID NO: 4315246 - DNA, 25 bp, Homo sapien
agacagtcagctcggctacttcact

SEQ ID NO: 4315247 - DNA, 25 bp, Homo sapien
cagtcagctcggctacttcactctc

SEQ ID NO: 4315248 - DNA, 25 bp, Homo sapien
tatttgccagcgtcacttttacggg

SEQ ID NO: 4315249 - DNA, 25 bp, Homo sapien
gccagcgtcacttttacgggtgtaa

SEQ ID NO: 4315250 - DNA, 25 bp, Homo sapien
cacttttacgggtgtaagtgatcat

SEQ ID NO: 4315251 - DNA, 25 bp, Homo sapien
aacacaaacatatttgccagcgtca

SEQ ID NO: 4315252 - DNA, 25 bp, Homo sapien
taattgcacgtaagtgggagccacc

SEQ ID NO: 4315253 - DNA, 25 bp, Homo sapien
gcagaagcacacctatgataatttg

SEQ ID NO: 4315254 - DNA, 25 bp, Homo sapien
ttatagactacatcaggaagagctg

SEQ ID NO: 4315255 - DNA, 25 bp, Homo sapien
aaattggtagttggctgtttgctgc

SEQ ID NO: 4315256 - DNA, 25 bp, Homo sapien
ccaacaaatgtcctctgctgttgaa

SEQ ID NO: 4315257 - DNA, 25 bp, Homo sapien
accaacaaatgtcctctgctgttga

SEQ ID NO: 4315258 - DNA, 25 bp, Homo sapien
tttatcatccagtggagagccatct

SEQ ID NO: 4315259 - DNA, 25 bp, Homo sapien
cgaagggttttgtctgaagtcatcc

SEQ ID NO: 4315260 - DNA, 25 bp, Homo sapien
tgcaaccatgacatccgaagggttt

SEQ ID NO: 4315261 - DNA, 25 bp, Homo sapien
cttccatgaaatggtgggctcagga

SEQ ID NO: 4315262 - DNA, 25 bp, Homo sapien
tgatagatacagtcctaatctctga

SEQ ID NO: 4315263 - DNA, 25 bp, Homo sapien
gatatttgaccttaaacatacacag

SEQ ID NO: 4315264 - DNA, 25 bp, Homo sapien
taccactaatagctcttgcaataca

SEQ ID NO: 4315265 - DNA, 25 bp, Homo sapien
gccagcaggcgcgtgtattccgctg

SEQ ID NO: 4315266 - DNA, 25 bp, Homo sapien
gccattacattgaaactcattgtgt

SEQ ID NO: 4315267 - DNA, 25 bp, Homo sapien
tagacatatctacaaagccattaca

SEQ ID NO: 4315268 - DNA, 25 bp, Homo sapien
tactgagactgttagaaggcaccaa

SEQ ID NO: 4315269 - DNA, 25 bp, Homo sapien
ccaatatggataacagcagtgctac

SEQ ID NO: 4315270 - DNA, 25 bp, Homo sapien
tgatggacactaacactgctttgca

SEQ ID NO: 4315271 - DNA, 25 bp, Homo sapien
ctgcgtggcctaggaaggcattgct

SEQ ID NO: 4315272 - DNA, 25 bp, Homo sapien
cattgctgcgagagctgtgatggac

SEQ ID NO: 4315273 - DNA, 25 bp, Homo sapien
gagcgccttcatccatgagggcctg

SEQ ID NO: 4315274 - DNA, 25 bp, Homo sapien
caaggttaaacttaatcatctgctg

SEQ ID NO: 4315275 - DNA, 25 bp, Homo sapien
catcccttgctgatagatagtaagc

SEQ ID NO: 4315276 - DNA, 25 bp, Homo sapien
tgtacagaaattcccagtgaaataa

SEQ ID NO: 4315277 - DNA, 25 bp, Homo sapien
tgccaattaaaatgtgtccgagtaa

SEQ ID NO: 4315278 - DNA, 25 bp, Homo sapien
gaatagggagtttattcccattgct

SEQ ID NO: 4315279 - DNA, 25 bp, Homo sapien
aaaaaatctgtaatccaccttgagt

SEQ ID NO: 4315280 - DNA, 25 bp, Homo sapien
agatggctgtaggtgcacggcttta

SEQ ID NO: 4315281 - DNA, 25 bp, Homo sapien
gggaatgttgcttccacctgtggtc

SEQ ID NO: 4315282 - DNA, 25 bp, Homo sapien
taaatcacatctcccaaggttgctt

SEQ ID NO: 4315283 - DNA, 25 bp, Homo sapien
tattaagtggctttgaactagcagg

SEQ ID NO: 4315284 - DNA, 25 bp, Homo sapien
attcatagaagtcaagggtttcacc

SEQ ID NO: 4315285 - DNA, 25 bp, Homo sapien
tccttagactatgccaaagtggctt

SEQ ID NO: 4315286 - DNA, 25 bp, Homo sapien
gttgactttcatgtaggatggtttc

SEQ ID NO: 4315287 - DNA, 25 bp, Homo sapien
gatggcatgagtcctgggacctcat

SEQ ID NO: 4315288 - DNA, 25 bp, Homo sapien
ttcaacttctcaggatggcatgagt

SEQ ID NO: 4315289 - DNA, 25 bp, Homo sapien
gactttcatgtaggatggtttcaac

SEQ ID NO: 4315290 - DNA, 25 bp, Homo sapien
catccaagggactagagaatgagct

SEQ ID NO: 4315291 - DNA, 25 bp, Homo sapien
caaatgtacggtgttggttcagggc

SEQ ID NO: 4315292 - DNA, 25 bp, Homo sapien
gattatcattgtagacaacgggcca

SEQ ID NO: 4315293 - DNA, 25 bp, Homo sapien
ggctttgagggccatcacctgtaga

SEQ ID NO: 4315294 - DNA, 25 bp, Homo sapien
tgtgccttattgttaatgaaagaca

SEQ ID NO: 4315295 - DNA, 25 bp, Homo sapien
tcagctcttgggatgctcttcatca

SEQ ID NO: 4315296 - DNA, 25 bp, Homo sapien
atcgtttctgcgatgcctttgtgcc

SEQ ID NO: 4315297 - DNA, 25 bp, Homo sapien
tcatcacattttcccatcgtttctg

SEQ ID NO: 4315298 - DNA, 25 bp, Homo sapien
tacgtgtggcggaaagcatgtgtcc

SEQ ID NO: 4315299 - DNA, 25 bp, Homo sapien
cattccttgaggttgcatcacacta

SEQ ID NO: 4315300 - DNA, 25 bp, Homo sapien
taacaagtctcagatctaagaggga

SEQ ID NO: 4315301 - DNA, 25 bp, Homo sapien
tatgagcacgacatgtgagtttcca

SEQ ID NO: 4315302 - DNA, 25 bp, Homo sapien
tatatgagccatatatatatttata

SEQ ID NO: 4315303 - DNA, 25 bp, Homo sapien
tatatatttatatgagccatatata

SEQ ID NO: 4315304 - DNA, 25 bp, Homo sapien
tatatatatttatatgagccatata

SEQ ID NO: 4315305 - DNA, 25 bp, Homo sapien
tatttttatatatatgagccatata

SEQ ID NO: 4315306 - DNA, 25 bp, Homo sapien
tatatttatatatatgagccattta

SEQ ID NO: 4315307 - DNA, 25 bp, Homo sapien
tatatgagccatatatatttttata

SEQ ID NO: 4315308 - DNA, 25 bp, Homo sapien
tatatttatatatatgagccatata

SEQ ID NO: 4315309 - DNA, 25 bp, Homo sapien
tgacaagatggttcgctggtaaatc

SEQ ID NO: 4315310 - DNA, 25 bp, Homo sapien
caaaagatttatgagcaaagggcaa

SEQ ID NO: 4315311 - DNA, 25 bp, Homo sapien
caaaaggtcaaaggacctgagccca

SEQ ID NO: 4315312 - DNA, 25 bp, Homo sapien
tcatttagagggttcagggataccg

SEQ ID NO: 4315313 - DNA, 25 bp, Homo sapien
taaattggcgcaacagtaattgcat

SEQ ID NO: 4315314 - DNA, 25 bp, Homo sapien
gaaatatgttagttcaaactggcct

SEQ ID NO: 4315315 - DNA, 25 bp, Homo sapien
gaaaacaaactgcagtaacactgag

SEQ ID NO: 4315316 - DNA, 25 bp, Homo sapien
ccaaactgtgtgctttgatgctaag

SEQ ID NO: 4315317 - DNA, 25 bp, Homo sapien
tacaattacctacggtgttccatac

SEQ ID NO: 4315318 - DNA, 25 bp, Homo sapien
caattacctacggtgttccatacag

SEQ ID NO: 4315319 - DNA, 25 bp, Homo sapien
attacctacggtgttccatacagta

SEQ ID NO: 4315320 - DNA, 25 bp, Homo sapien
ttacaattacctacggtgttccata

SEQ ID NO: 4315321 - DNA, 25 bp, Homo sapien
taataggtaaatcagtcattgctgt

SEQ ID NO: 4315322 - DNA, 25 bp, Homo sapien
catttatgggccatttatggccagt

SEQ ID NO: 4315323 - DNA, 25 bp, Homo sapien
tgtacatcagtactgtcaagtaaca

SEQ ID NO: 4315324 - DNA, 25 bp, Homo sapien
caaaataatgtatagactgtcagcc

SEQ ID NO: 4315325 - DNA, 25 bp, Homo sapien
ggctgaacctcatccaaccagttga

SEQ ID NO: 4315326 - DNA, 25 bp, Homo sapien
ggtacccagtcatttgttcaaacag

SEQ ID NO: 4315327 - DNA, 25 bp, Homo sapien
gatagcggaaggcaaaaaggacatc

SEQ ID NO: 4315328 - DNA, 25 bp, Homo sapien
accagttgaacgctgtattagtcca

SEQ ID NO: 4315329 - DNA, 25 bp, Homo sapien
cagaagttttattgggattaaacat

SEQ ID NO: 4315330 - DNA, 25 bp, Homo sapien
tccaactatgatccactgaagagta

SEQ ID NO: 4315331 - DNA, 25 bp, Homo sapien
tcttgaaaaggatgtgagttggtca

SEQ ID NO: 4315332 - DNA, 25 bp, Homo sapien
tgtacttcgatagaatgatataacc

SEQ ID NO: 4315333 - DNA, 25 bp, Homo sapien
ccaggaaacgttatcaggatcaaaa

SEQ ID NO: 4315334 - DNA, 25 bp, Homo sapien
tctgtattactgtttctaggcctca

SEQ ID NO: 4315335 - DNA, 25 bp, Homo sapien
caaaatatagtcaattccaagggaa

SEQ ID NO: 4315336 - DNA, 25 bp, Homo sapien
actggagctaaacttgagaggtaca

SEQ ID NO: 4315337 - DNA, 25 bp, Homo sapien
gtctacctgtgagtaaagactttct

SEQ ID NO: 4315338 - DNA, 25 bp, Homo sapien
gagactaagagagatgaccaaaaca

SEQ ID NO: 4315339 - DNA, 25 bp, Homo sapien
gattcctcaatgtaagtaactagtc

SEQ ID NO: 4315340 - DNA, 25 bp, Homo sapien
cactgcttcaagaatcaaatgatgt

SEQ ID NO: 4315341 - DNA, 25 bp, Homo sapien
ggtacatttttagcccatgcgagaa

SEQ ID NO: 4315342 - DNA, 25 bp, Homo sapien
ttttccttgcccagatcccatgtgg

SEQ ID NO: 4315343 - DNA, 25 bp, Homo sapien
gacatggctgaaaccagtactgggc

SEQ ID NO: 4315344 - DNA, 25 bp, Homo sapien
ggcttcggctccaccagaggtacat

SEQ ID NO: 4315345 - DNA, 25 bp, Homo sapien
caattttcactaaggatttcttttg

SEQ ID NO: 4315346 - DNA, 25 bp, Homo sapien
tttcactaaggatttcttttgcttg

SEQ ID NO: 4315347 - DNA, 25 bp, Homo sapien
cactaaggatttcttttgcttgagg

SEQ ID NO: 4315348 - DNA, 25 bp, Homo sapien
cttatcaattttcactaaggatttc

SEQ ID NO: 4315349 - DNA, 25 bp, Homo sapien
acctgtgaggctattatttctgggc

SEQ ID NO: 4315350 - DNA, 25 bp, Homo sapien
gtccacaaatagtctgaagcactgc

SEQ ID NO: 4315351 - DNA, 25 bp, Homo sapien
tgggtactagtcagaaaagcctttg

SEQ ID NO: 4315352 - DNA, 25 bp, Homo sapien
aagaaatacgatctgtttcccagga

SEQ ID NO: 4315353 - DNA, 25 bp, Homo sapien
tctggagtccttgataaataccagc

SEQ ID NO: 4315354 - DNA, 25 bp, Homo sapien
caacctctggagtccttgataaata

SEQ ID NO: 4315355 - DNA, 25 bp, Homo sapien
tctcaacctctggagtccttgataa

SEQ ID NO: 4315356 - DNA, 25 bp, Homo sapien
atccatctcaacctctggagtcctt

SEQ ID NO: 4315357 - DNA, 25 bp, Homo sapien
actgacttggcctttatgatgcagc

SEQ ID NO: 4315358 - DNA, 25 bp, Homo sapien
tgtatgggccgttatttcttcactt

SEQ ID NO: 4315359 - DNA, 25 bp, Homo sapien
gaaatagacagtatacgagtttacc

SEQ ID NO: 4315360 - DNA, 25 bp, Homo sapien
caatcaacatcctatttgggctcca

SEQ ID NO: 4315361 - DNA, 25 bp, Homo sapien
ccaaatttcaatgaatggccacaag

SEQ ID NO: 4315362 - DNA, 25 bp, Homo sapien
gaggaacgtgccttctggaaacagg

SEQ ID NO: 4315363 - DNA, 25 bp, Homo sapien
tagtagatcatgaggtctgcccacc

SEQ ID NO: 4315364 - DNA, 25 bp, Homo sapien
tattgaaggcatgtacaggcagtca

SEQ ID NO: 4315365 - DNA, 25 bp, Homo sapien
catccaggaatgtacttaagcagtt

SEQ ID NO: 4315366 - DNA, 25 bp, Homo sapien
ctgcactgaggtctacccttgttat

SEQ ID NO: 4315367 - DNA, 25 bp, Homo sapien
gcactgaggtctacccttgttataa

SEQ ID NO: 4315368 - DNA, 25 bp, Homo sapien
tctgcactgaggtctacccttgtta

SEQ ID NO: 4315369 - DNA, 25 bp, Homo sapien
tgcactgaggtctacccttgttata

SEQ ID NO: 4315370 - DNA, 25 bp, Homo sapien
ttagtttggacacccaatggacatg

SEQ ID NO: 4315371 - DNA, 25 bp, Homo sapien
caatggacatggtgcagtacagccc

SEQ ID NO: 4315372 - DNA, 25 bp, Homo sapien
caccgtactgacaccaaacttagtt

SEQ ID NO: 4315373 - DNA, 25 bp, Homo sapien
cgtactgacaccaaacttagtttgg

SEQ ID NO: 4315374 - DNA, 25 bp, Homo sapien
gagtttatcctcaggtaaggcctga

SEQ ID NO: 4315375 - DNA, 25 bp, Homo sapien
tcacatacaaagctagagtttatcc

SEQ ID NO: 4315376 - DNA, 25 bp, Homo sapien
tgatcaaacaaatgacgccactctg

SEQ ID NO: 4315377 - DNA, 25 bp, Homo sapien
ggcctgagatacaaattcgactttt

SEQ ID NO: 4315378 - DNA, 25 bp, Homo sapien
gatccactcggcagcaacattcggt

SEQ ID NO: 4315379 - DNA, 25 bp, Homo sapien
cacagacatagactccttcatcagg

SEQ ID NO: 4315380 - DNA, 25 bp, Homo sapien
caacaatgcgaggtggaaaatcttc

SEQ ID NO: 4315381 - DNA, 25 bp, Homo sapien
tggctacttccagcgatgcattgtg

SEQ ID NO: 4315382 - DNA, 25 bp, Homo sapien
ctgcagaagaattcacaaaatatct

SEQ ID NO: 4315383 - DNA, 25 bp, Homo sapien
gaattcacaaaatatcttcgtatat

SEQ ID NO: 4315384 - DNA, 25 bp, Homo sapien
attcacaaaatatcttcgtatatca

SEQ ID NO: 4315385 - DNA, 25 bp, Homo sapien
cagaagaattcacaaaatatcttcg

SEQ ID NO: 4315386 - DNA, 25 bp, Homo sapien
gagtctccactcagaaacttctctc

SEQ ID NO: 4315387 - DNA, 25 bp, Homo sapien
tccttttgagtctccactcagaaac

SEQ ID NO: 4315388 - DNA, 25 bp, Homo sapien
attgcctgtgcaaatcctgtcctca

SEQ ID NO: 4315389 - DNA, 25 bp, Homo sapien
ttctctcgcttacacattgcctgtg

SEQ ID NO: 4315390 - DNA, 25 bp, Homo sapien
ggaagtaatgaccaattacagaatc

SEQ ID NO: 4315391 - DNA, 25 bp, Homo sapien
ttttaagtctagagagatgatgtac

SEQ ID NO: 4315392 - DNA, 25 bp, Homo sapien
acaggaagtaatgaccaattacaga

SEQ ID NO: 4315393 - DNA, 25 bp, Homo sapien
ctggatgtcacccaggcgccactaa

SEQ ID NO: 4315394 - DNA, 25 bp, Homo sapien
ctgagactctcagctgtcattcagc

SEQ ID NO: 4315395 - DNA, 25 bp, Homo sapien
gaaaaccactactaattatccacca

SEQ ID NO: 4315396 - DNA, 25 bp, Homo sapien
tggcagtgctggaattcaatcacag

SEQ ID NO: 4315397 - DNA, 25 bp, Homo sapien
atccaccatcttctgtattacaaca

SEQ ID NO: 4315398 - DNA, 25 bp, Homo sapien
tgtaattgtgcatccgtaacactca

SEQ ID NO: 4315399 - DNA, 25 bp, Homo sapien
ttcagctgttagaaccaatcagacg

SEQ ID NO: 4315400 - DNA, 25 bp, Homo sapien
tatatggtactgcaatcaatgtgaa

SEQ ID NO: 4315401 - DNA, 25 bp, Homo sapien
tgttcactgacaaaggagtttggac

SEQ ID NO: 4315402 - DNA, 25 bp, Homo sapien
agcagattcctctattgaagtggca

SEQ ID NO: 4315403 - DNA, 25 bp, Homo sapien
tcctctattgaagtggcaacttaaa

SEQ ID NO: 4315404 - DNA, 25 bp, Homo sapien
tattgaagtggcaacttaaaagtac

SEQ ID NO: 4315405 - DNA, 25 bp, Homo sapien
tgaagtggcaacttaaaagtactct

SEQ ID NO: 4315406 - DNA, 25 bp, Homo sapien
actgagaaatccctataggaatgct

SEQ ID NO: 4315407 - DNA, 25 bp, Homo sapien
gagttactaatgtctgcaagatagc

SEQ ID NO: 4315408 - DNA, 25 bp, Homo sapien
caaccagtacttctgacatgagtaa

SEQ ID NO: 4315409 - DNA, 25 bp, Homo sapien
gcattaggcaatcatacttgtgtta

SEQ ID NO: 4315410 - DNA, 25 bp, Homo sapien
ggcagtagattcatagtcacagtac

SEQ ID NO: 4315411 - DNA, 25 bp, Homo sapien
tgttgtatgtggtagttgggaggag

SEQ ID NO: 4315412 - DNA, 25 bp, Homo sapien
gattcatagtcacagtacttgggct

SEQ ID NO: 4315413 - DNA, 25 bp, Homo sapien
tagtcacagtacttgggcttttctt

SEQ ID NO: 4315414 - DNA, 25 bp, Homo sapien
ctctaccctcagttactgggtcggt

SEQ ID NO: 4315415 - DNA, 25 bp, Homo sapien
tctctaccctcagttactgggtcgg

SEQ ID NO: 4315416 - DNA, 25 bp, Homo sapien
tgtttcactctgagaacgcaaaaaa

SEQ ID NO: 4315417 - DNA, 25 bp, Homo sapien
tatttcaaggactatatgtttcaca

SEQ ID NO: 4315418 - DNA, 25 bp, Homo sapien
ccaacttgaggttcaatagatgata

SEQ ID NO: 4315419 - DNA, 25 bp, Homo sapien
taggaaaattctaccaaactagcac

SEQ ID NO: 4315420 - DNA, 25 bp, Homo sapien
gaaagctattagattgtgagatgcc

SEQ ID NO: 4315421 - DNA, 25 bp, Homo sapien
agcatcatgtttgctcttgcacaga

SEQ ID NO: 4315422 - DNA, 25 bp, Homo sapien
gtgagatgccaagcatcatgtttgc

SEQ ID NO: 4315423 - DNA, 25 bp, Homo sapien
tggcaggggaaagctattagattgt

SEQ ID NO: 4315424 - DNA, 25 bp, Homo sapien
gagtgtcctctaaatggcacatcag

SEQ ID NO: 4315425 - DNA, 25 bp, Homo sapien
tacttgcccttattgaacgaacaga

SEQ ID NO: 4315426 - DNA, 25 bp, Homo sapien
tgtgtcccaagctgatcaaatgcag

SEQ ID NO: 4315427 - DNA, 25 bp, Homo sapien
tctccatctggtgcacaaactctgc

SEQ ID NO: 4315428 - DNA, 25 bp, Homo sapien
tattgtttaggcatccatggctacc

SEQ ID NO: 4315429 - DNA, 25 bp, Homo sapien
tacaaatacccttggagttgtggcc

SEQ ID NO: 4315430 - DNA, 25 bp, Homo sapien
gagggtttcctctcactattgctga

SEQ ID NO: 4315431 - DNA, 25 bp, Homo sapien
tatttgacaaagaacgtggtgccat

SEQ ID NO: 4315432 - DNA, 25 bp, Homo sapien
ggtggttaatgacgccagcaagcat

SEQ ID NO: 4315433 - DNA, 25 bp, Homo sapien
cagggtggttaatgacgccagcaag

SEQ ID NO: 4315434 - DNA, 25 bp, Homo sapien
cacagggtggttaatgacgccagca

SEQ ID NO: 4315435 - DNA, 25 bp, Homo sapien
ggttaatgacgccagcaagcatgat

SEQ ID NO: 4315436 - DNA, 25 bp, Homo sapien
agaagtaagaggatttgtagcagcc

SEQ ID NO: 4315437 - DNA, 25 bp, Homo sapien
gtcataagacatttggaagccaagt

SEQ ID NO: 4315438 - DNA, 25 bp, Homo sapien
gagctctcccatgaagcaagcaaca

SEQ ID NO: 4315439 - DNA, 25 bp, Homo sapien
cacctttcggtgttagaaatagcct

SEQ ID NO: 4315440 - DNA, 25 bp, Homo sapien
tatgaaatcgagcttgcagggcagt

SEQ ID NO: 4315441 - DNA, 25 bp, Homo sapien
gaaactagccagatcgtatcggaac

SEQ ID NO: 4315442 - DNA, 25 bp, Homo sapien
tgtagtctatagattaccttaggcc

SEQ ID NO: 4315443 - DNA, 25 bp, Homo sapien
tatcggaactacacaacaatcttac

SEQ ID NO: 4315444 - DNA, 25 bp, Homo sapien
acaggtaaaagtgagcgggctccgc

SEQ ID NO: 4315445 - DNA, 25 bp, Homo sapien
acatattaatccaaacaggtaaaag

SEQ ID NO: 4315446 - DNA, 25 bp, Homo sapien
catattaatccaaacaggtaaaagt

SEQ ID NO: 4315447 - DNA, 25 bp, Homo sapien
tattaatccaaacaggtaaaagtga

SEQ ID NO: 4315448 - DNA, 25 bp, Homo sapien
tatacagtctcatgccaagaggagg

SEQ ID NO: 4315449 - DNA, 25 bp, Homo sapien
cccaaatgtatgaagccacacacca

SEQ ID NO: 4315450 - DNA, 25 bp, Homo sapien
ggtccccaaatgtatgaagccacac

SEQ ID NO: 4315451 - DNA, 25 bp, Homo sapien
ctcgggtggatcctgtatacagtct

SEQ ID NO: 4315452 - DNA, 25 bp, Homo sapien
ttttcagggcaattactcgtcgacc

SEQ ID NO: 4315453 - DNA, 25 bp, Homo sapien
tataagcaacgtgggtcaattagcc

SEQ ID NO: 4315454 - DNA, 25 bp, Homo sapien
gacctttccggacgcttgtcagtat

SEQ ID NO: 4315455 - DNA, 25 bp, Homo sapien
cggccccaggatttccgaggaggct

SEQ ID NO: 4315456 - DNA, 25 bp, Homo sapien
ccaaagcgaacaacaaagagccgag

SEQ ID NO: 4315457 - DNA, 25 bp, Homo sapien
tcaagaaccatccaaagcgaacaac

SEQ ID NO: 4315458 - DNA, 25 bp, Homo sapien
tgcctccacggtcttgcggagcctc

SEQ ID NO: 4315459 - DNA, 25 bp, Homo sapien
aacaaagagccgaggcagaagcgca

SEQ ID NO: 4315460 - DNA, 25 bp, Homo sapien
ggtgccgggagtgtgactgggtgac

SEQ ID NO: 4315461 - DNA, 25 bp, Homo sapien
cggcggcgatagcagccaaagtaga

SEQ ID NO: 4315462 - DNA, 25 bp, Homo sapien
ggcgagcccagtcagcagcgggcca

SEQ ID NO: 4315463 - DNA, 25 bp, Homo sapien
caaaaagtgcttctccgtctcccgg

SEQ ID NO: 4315464 - DNA, 25 bp, Homo sapien
gggcggtgcggcgacagcggctgcc

SEQ ID NO: 4315465 - DNA, 25 bp, Homo sapien
tccgcgcgcagagagcgagcgaggg

SEQ ID NO: 4315466 - DNA, 25 bp, Homo sapien
ggtgcggcgacagcggctgcctggg

SEQ ID NO: 4315467 - DNA, 25 bp, Homo sapien
gcggtgcggcgacagcggctgcctg

SEQ ID NO: 4315468 - DNA, 25 bp, Homo sapien
agacagcagcaggaccgcggacact

SEQ ID NO: 4315469 - DNA, 25 bp, Homo sapien
ggacactcgcacgtcttctgggcgc

SEQ ID NO: 4315470 - DNA, 25 bp, Homo sapien
gggggatgcggagggtactggagac

SEQ ID NO: 4315471 - DNA, 25 bp, Homo sapien
agcaggaccgcggacactcgcacgt

SEQ ID NO: 4315472 - DNA, 25 bp, Homo sapien
aggcacccctaaactacgcagaagc

SEQ ID NO: 4315473 - DNA, 25 bp, Homo sapien
ctgcacccctggctcgtggaagctg

SEQ ID NO: 4315474 - DNA, 25 bp, Homo sapien
cagaagcccaaacttcctgggggca

SEQ ID NO: 4315475 - DNA, 25 bp, Homo sapien
tggaagctgtaaagaggcagctccc

SEQ ID NO: 4315476 - DNA, 25 bp, Homo sapien
ggatgtacgtcgcatcaatggtgtg

SEQ ID NO: 4315477 - DNA, 25 bp, Homo sapien
tggggatgtacgtcgcatcaatggt

SEQ ID NO: 4315478 - DNA, 25 bp, Homo sapien
tcactggggatgtacgtcgcatcaa

SEQ ID NO: 4315479 - DNA, 25 bp, Homo sapien
atcttcactggggatgtacgtcgca

SEQ ID NO: 4315480 - DNA, 25 bp, Homo sapien
gggataatagttcaaaatgtgcttt

SEQ ID NO: 4315481 - DNA, 25 bp, Homo sapien
ctggtcaaatgggataatagttcaa

SEQ ID NO: 4315482 - DNA, 25 bp, Homo sapien
tcaaatgggataatagttcaaaatg

SEQ ID NO: 4315483 - DNA, 25 bp, Homo sapien
aatgggataatagttcaaaatgtgc

SEQ ID NO: 4315484 - DNA, 25 bp, Homo sapien
tcatgagccttggcagaacaatcag

SEQ ID NO: 4315485 - DNA, 25 bp, Homo sapien
gaaggttacttaatctccacatttg

SEQ ID NO: 4315486 - DNA, 25 bp, Homo sapien
ggtggtgccagtgaaccgttatgca

SEQ ID NO: 4315487 - DNA, 25 bp, Homo sapien
tgtactgaatacacaataccgagct

SEQ ID NO: 4315488 - DNA, 25 bp, Homo sapien
cactttgtaaactcgaatctttgag

SEQ ID NO: 4315489 - DNA, 25 bp, Homo sapien
aattgtggttgttagctggaagcag

SEQ ID NO: 4315490 - DNA, 25 bp, Homo sapien
agcagggatgattcgattaatttta

SEQ ID NO: 4315491 - DNA, 25 bp, Homo sapien
tgatatgaacagaatgaagtttgaa

SEQ ID NO: 4315492 - DNA, 25 bp, Homo sapien
ttatacaggtggttgatggttgatg

SEQ ID NO: 4315493 - DNA, 25 bp, Homo sapien
tatagcccagcgaattgtcatcgtt

SEQ ID NO: 4315494 - DNA, 25 bp, Homo sapien
ctgtatagcccagcgaattgtcatc

SEQ ID NO: 4315495 - DNA, 25 bp, Homo sapien
cagcgaattgtcatcgttatcagag

SEQ ID NO: 4315496 - DNA, 25 bp, Homo sapien
aattgtcatcgttatcagaggtggg

SEQ ID NO: 4315497 - DNA, 25 bp, Homo sapien
ctgtcggaaacaacaccagagctgc

SEQ ID NO: 4315498 - DNA, 25 bp, Homo sapien
tcacagtagtaacagtagttgccat

SEQ ID NO: 4315499 - DNA, 25 bp, Homo sapien
gctgctgatggggtcacagtagtaa

SEQ ID NO: 4315500 - DNA, 25 bp, Homo sapien
tcggaaacaacaccagagctgctga

SEQ ID NO: 4315501 - DNA, 25 bp, Homo sapien
aaggacaacacacagcacgcttcat

SEQ ID NO: 4315502 - DNA, 25 bp, Homo sapien
caaggacaacacacagcacgcttca

SEQ ID NO: 4315503 - DNA, 25 bp, Homo sapien
acagcacgcttcatccttgcccctc

SEQ ID NO: 4315504 - DNA, 25 bp, Homo sapien
acacacagcacgcttcatccttgcc

SEQ ID NO: 4315505 - DNA, 25 bp, Homo sapien
acactaagccctgcgaaggtctcag

SEQ ID NO: 4315506 - DNA, 25 bp, Homo sapien
ctaagccctgcgaaggtctcagcat

SEQ ID NO: 4315507 - DNA, 25 bp, Homo sapien
ctgcggcacactaagccctgcgaag

SEQ ID NO: 4315508 - DNA, 25 bp, Homo sapien
gcggcacactaagccctgcgaaggt

SEQ ID NO: 4315509 - DNA, 25 bp, Homo sapien
atgagtccacttggttttttcatgc

SEQ ID NO: 4315510 - DNA, 25 bp, Homo sapien
ctccttcccgtaagtgtcgcgtaat

SEQ ID NO: 4315511 - DNA, 25 bp, Homo sapien
tttttcatgcggcatatttcccccc

SEQ ID NO: 4315512 - DNA, 25 bp, Homo sapien
taagtgtcgcgtaattataataacc

SEQ ID NO: 4315513 - DNA, 25 bp, Homo sapien
aaatcaaatcctcaataatatctga

SEQ ID NO: 4315514 - DNA, 25 bp, Homo sapien
caataatatctgatgtgacagatac

SEQ ID NO: 4315515 - DNA, 25 bp, Homo sapien
cctcaataatatctgatgtgacaga

SEQ ID NO: 4315516 - DNA, 25 bp, Homo sapien
caaatcctcaataatatctgatgtg

SEQ ID NO: 4315517 - DNA, 25 bp, Homo sapien
tgggttggaatttaatctgcagaga

SEQ ID NO: 4315518 - DNA, 25 bp, Homo sapien
cttgctgggttggaatttaatctgc

SEQ ID NO: 4315519 - DNA, 25 bp, Homo sapien
tctgtgagagttaatttccggtcca

SEQ ID NO: 4315520 - DNA, 25 bp, Homo sapien
gatttgctgccttgaactttatctg

SEQ ID NO: 4315521 - DNA, 25 bp, Homo sapien
tgcttagcatctgctactgttccac

SEQ ID NO: 4315522 - DNA, 25 bp, Homo sapien
aatacttctggctctctccgtctgt

SEQ ID NO: 4315523 - DNA, 25 bp, Homo sapien
ttgtgcttagcatctgctactgttc

SEQ ID NO: 4315524 - DNA, 25 bp, Homo sapien
ggctctctccgtctgttgacttttt

SEQ ID NO: 4315525 - DNA, 25 bp, Homo sapien
ccaatgcagggagttgactggtcat

SEQ ID NO: 4315526 - DNA, 25 bp, Homo sapien
gtttagaaaccaactgggcattcag

SEQ ID NO: 4315527 - DNA, 25 bp, Homo sapien
aactgggcattcagtaatgagacca

SEQ ID NO: 4315528 - DNA, 25 bp, Homo sapien
cagttacagatccttgtttagaaac

SEQ ID NO: 4315529 - DNA, 25 bp, Homo sapien
cagatccttgtttagaaaccaactg

SEQ ID NO: 4315530 - DNA, 25 bp, Homo sapien
ctcagtatcccctccaagagacttt

SEQ ID NO: 4315531 - DNA, 25 bp, Homo sapien
tgctgagtgaactcagtatcccctc

SEQ ID NO: 4315532 - DNA, 25 bp, Homo sapien
gtgctgagtgaactcagtatcccct

SEQ ID NO: 4315533 - DNA, 25 bp, Homo sapien
tatcccctccaagagacttttccat

SEQ ID NO: 4315534 - DNA, 25 bp, Homo sapien
acaaaggaagttctggcaatgttct

SEQ ID NO: 4315535 - DNA, 25 bp, Homo sapien
tacgctgatcaactggctaccctgg

SEQ ID NO: 4315536 - DNA, 25 bp, Homo sapien
ggcaatgttctggttatcttctact

SEQ ID NO: 4315537 - DNA, 25 bp, Homo sapien
actttcatactcaaccccttgaagg

SEQ ID NO: 4315538 - DNA, 25 bp, Homo sapien
tacaagatcatgtggccaattaaca

SEQ ID NO: 4315539 - DNA, 25 bp, Homo sapien
tactgtgtacaagatcatgtggcca

SEQ ID NO: 4315540 - DNA, 25 bp, Homo sapien
gtgtacaagatcatgtggccaatta

SEQ ID NO: 4315541 - DNA, 25 bp, Homo sapien
gatcatgtggccaattaacaagctc

SEQ ID NO: 4315542 - DNA, 25 bp, Homo sapien
cttccatgtggacttaaaattatta

SEQ ID NO: 4315543 - DNA, 25 bp, Homo sapien
attattaagtcgcagttgatattca

SEQ ID NO: 4315544 - DNA, 25 bp, Homo sapien
ttaaaattattaagtcgcagttgat

SEQ ID NO: 4315545 - DNA, 25 bp, Homo sapien
tattaagtcgcagttgatattcact

SEQ ID NO: 4315546 - DNA, 25 bp, Homo sapien
gctctttagcatctatagctctgtc

SEQ ID NO: 4315547 - DNA, 25 bp, Homo sapien
ccctcttagcatttgtcttgtgagc

SEQ ID NO: 4315548 - DNA, 25 bp, Homo sapien
gctgattgccactgactgactgcca

SEQ ID NO: 4315549 - DNA, 25 bp, Homo sapien
tttgggtggagacagattccacagc

SEQ ID NO: 4315550 - DNA, 25 bp, Homo sapien
ggggaagagctgtattaatggtaaa

SEQ ID NO: 4315551 - DNA, 25 bp, Homo sapien
ttccttcaaaatgaccaagattggg

SEQ ID NO: 4315552 - DNA, 25 bp, Homo sapien
gtaaaaggattttgtgctcaagttg

SEQ ID NO: 4315553 - DNA, 25 bp, Homo sapien
atggtaaaaggattttgtgctcaag

SEQ ID NO: 4315554 - DNA, 25 bp, Homo sapien
acagttggagctctggaaaggatcc

SEQ ID NO: 4315555 - DNA, 25 bp, Homo sapien
tctggtcttgtgaagtttccagaca

SEQ ID NO: 4315556 - DNA, 25 bp, Homo sapien
taaggaaaggaatctctctggtctt

SEQ ID NO: 4315557 - DNA, 25 bp, Homo sapien
ttccagacagttggagctctggaaa

SEQ ID NO: 4315558 - DNA, 25 bp, Homo sapien
cacgccctgctaagttttatatttt

SEQ ID NO: 4315559 - DNA, 25 bp, Homo sapien
cctagcagctgggattacgggtgcg

SEQ ID NO: 4315560 - DNA, 25 bp, Homo sapien
tacgggtgcgcaccaccacgccctg

SEQ ID NO: 4315561 - DNA, 25 bp, Homo sapien
agactctgttgtgttctccacaatc

SEQ ID NO: 4315562 - DNA, 25 bp, Homo sapien
tgttgtgttctccacaatcagatca

SEQ ID NO: 4315563 - DNA, 25 bp, Homo sapien
gactctgttgtgttctccacaatca

SEQ ID NO: 4315564 - DNA, 25 bp, Homo sapien
ctctgttgtgttctccacaatcaga

SEQ ID NO: 4315565 - DNA, 25 bp, Homo sapien
cgcattcttttctcattggtatcca

SEQ ID NO: 4315566 - DNA, 25 bp, Homo sapien
gcattcttttctcattggtatccat

SEQ ID NO: 4315567 - DNA, 25 bp, Homo sapien
ccgcattcttttctcattggtatcc

SEQ ID NO: 4315568 - DNA, 25 bp, Homo sapien
taacctgtgctagtcttctaaccat

SEQ ID NO: 4315569 - DNA, 25 bp, Homo sapien
tgtgtttgactgacataacctgtgc

SEQ ID NO: 4315570 - DNA, 25 bp, Homo sapien
ccttgcatcattgtgtttgactgac

SEQ ID NO: 4315571 - DNA, 25 bp, Homo sapien
tggttccaaaccttgcatcattgtg

SEQ ID NO: 4315572 - DNA, 25 bp, Homo sapien
cggcctatccatgaattcttaaaaa

SEQ ID NO: 4315573 - DNA, 25 bp, Homo sapien
ttctgggtcgctggtggatttttct

SEQ ID NO: 4315574 - DNA, 25 bp, Homo sapien
tgtaagttctgggtcgctggtggat

SEQ ID NO: 4315575 - DNA, 25 bp, Homo sapien
catctgataggcctatatgtatata

SEQ ID NO: 4315576 - DNA, 25 bp, Homo sapien
gacatagagatctaggtcctataga

SEQ ID NO: 4315577 - DNA, 25 bp, Homo sapien
catagagatctaggtcctatagatg

SEQ ID NO: 4315578 - DNA, 25 bp, Homo sapien
aatctacaaggtatggtcctacccg

SEQ ID NO: 4315579 - DNA, 25 bp, Homo sapien
aaagccacctaaaagtgtctacagg

SEQ ID NO: 4315580 - DNA, 25 bp, Homo sapien
aatattgctatactccagggctaca

SEQ ID NO: 4315581 - DNA, 25 bp, Homo sapien
tacaggtctctatatccatcccaga

SEQ ID NO: 4315582 - DNA, 25 bp, Homo sapien
tttgctgaagcacacctttcagctt

SEQ ID NO: 4315583 - DNA, 25 bp, Homo sapien
tacattccagggtaatgaacaattt

SEQ ID NO: 4315584 - DNA, 25 bp, Homo sapien
tgaagcacacctttcagctttgaac

SEQ ID NO: 4315585 - DNA, 25 bp, Homo sapien
tttgaacagtttataagctgtcctc

SEQ ID NO: 4315586 - DNA, 25 bp, Homo sapien
tgtcttgctgcaatgatcaatacat

SEQ ID NO: 4315587 - DNA, 25 bp, Homo sapien
catctgtcgtattggacaaagcttt

SEQ ID NO: 4315588 - DNA, 25 bp, Homo sapien
caggatgctctagttctggcaaagc

SEQ ID NO: 4315589 - DNA, 25 bp, Homo sapien
acatctcagcatctgtcgtattgga

SEQ ID NO: 4315590 - DNA, 25 bp, Homo sapien
catctggcatttgtattcaccctga

SEQ ID NO: 4315591 - DNA, 25 bp, Homo sapien
gtattcaccctgagacgacaagcat

SEQ ID NO: 4315592 - DNA, 25 bp, Homo sapien
taaagttcttatctgtcatctggca

SEQ ID NO: 4315593 - DNA, 25 bp, Homo sapien
gagacgacaagcatagcaatgtgaa

SEQ ID NO: 4315594 - DNA, 25 bp, Homo sapien
ccacctctcccagccatcaacacat

SEQ ID NO: 4315595 - DNA, 25 bp, Homo sapien
ggcaccagctaccatgccttgctaa

SEQ ID NO: 4315596 - DNA, 25 bp, Homo sapien
cacctctcggattcaaacgattctt

SEQ ID NO: 4315597 - DNA, 25 bp, Homo sapien
cctgagccacctctcccagccatca

SEQ ID NO: 4315598 - DNA, 25 bp, Homo sapien
cttttctgaacattcagcaacattt

SEQ ID NO: 4315599 - DNA, 25 bp, Homo sapien
cctctctccaaactgattcctacgt

SEQ ID NO: 4315600 - DNA, 25 bp, Homo sapien
tctccaaactgattcctacgtccat

SEQ ID NO: 4315601 - DNA, 25 bp, Homo sapien
tctctccaaactgattcctacgtcc

SEQ ID NO: 4315602 - DNA, 25 bp, Homo sapien
tattcttgccagttagttcagaggc

SEQ ID NO: 4315603 - DNA, 25 bp, Homo sapien
tttccacctgtgatgacctataggg

SEQ ID NO: 4315604 - DNA, 25 bp, Homo sapien
tcagaggcaggcaaacaacaaattc

SEQ ID NO: 4315605 - DNA, 25 bp, Homo sapien
tcagtcctaaagactaaaatagtgg

SEQ ID NO: 4315606 - DNA, 25 bp, Homo sapien
caccaaatatggctgcaagtgccct

SEQ ID NO: 4315607 - DNA, 25 bp, Homo sapien
tgaaagcaaatggaagcaccaaata

SEQ ID NO: 4315608 - DNA, 25 bp, Homo sapien
gcaccaaatatggctgcaagtgccc

SEQ ID NO: 4315609 - DNA, 25 bp, Homo sapien
taccaccttccaaatcatttccagt

SEQ ID NO: 4315610 - DNA, 25 bp, Homo sapien
ataccaccttccaaatcatttccag

SEQ ID NO: 4315611 - DNA, 25 bp, Homo sapien
cagaatgtaatgtgtacttccagtt

SEQ ID NO: 4315612 - DNA, 25 bp, Homo sapien
cctgccagtagaactgatgagccat

SEQ ID NO: 4315613 - DNA, 25 bp, Homo sapien
ttcattactgttctctacctgccag

SEQ ID NO: 4315614 - DNA, 25 bp, Homo sapien
tctctacctgccagtagaactgatg

SEQ ID NO: 4315615 - DNA, 25 bp, Homo sapien
tactgttctctacctgccagtagaa

SEQ ID NO: 4315616 - DNA, 25 bp, Homo sapien
tttgcttagtgctttataacaggct

SEQ ID NO: 4315617 - DNA, 25 bp, Homo sapien
ctttgcttagtgctttataacaggc

SEQ ID NO: 4315618 - DNA, 25 bp, Homo sapien
gcttagtgctttataacaggctttc

SEQ ID NO: 4315619 - DNA, 25 bp, Homo sapien
agctttgcttagtgctttataacag

SEQ ID NO: 4315620 - DNA, 25 bp, Homo sapien
aaattgagagcacaagtcaacactg

SEQ ID NO: 4315621 - DNA, 25 bp, Homo sapien
aatcactctaacatgaatgtttaag

SEQ ID NO: 4315622 - DNA, 25 bp, Homo sapien
gctttattaattaagagatttggca

SEQ ID NO: 4315623 - DNA, 25 bp, Homo sapien
tcccatagcagtcatatcaaatcag

SEQ ID NO: 4315624 - DNA, 25 bp, Homo sapien
tcagcaggcaggatgaactttttcc

SEQ ID NO: 4315625 - DNA, 25 bp, Homo sapien
aaataactggttgtctaattcagtt

SEQ ID NO: 4315626 - DNA, 25 bp, Homo sapien
tttctactattctcgaaggatatgc

SEQ ID NO: 4315627 - DNA, 25 bp, Homo sapien
taactggttgtctaattcagttctc

SEQ ID NO: 4315628 - DNA, 25 bp, Homo sapien
actattctcgaaggatatgcatttt

SEQ ID NO: 4315629 - DNA, 25 bp, Homo sapien
tgtaggattttaatgcaagccgttg

SEQ ID NO: 4315630 - DNA, 25 bp, Homo sapien
cttttcttccataatgcagaaagca

SEQ ID NO: 4315631 - DNA, 25 bp, Homo sapien
ggattttaatgcaagccgttgaaaa

SEQ ID NO: 4315632 - DNA, 25 bp, Homo sapien
aatgcaagccgttgaaaaatatgaa

SEQ ID NO: 4315633 - DNA, 25 bp, Homo sapien
tgaaaaatagcccaaaccagtgctc

SEQ ID NO: 4315634 - DNA, 25 bp, Homo sapien
aacacaagcggctgaaaaatagccc

SEQ ID NO: 4315635 - DNA, 25 bp, Homo sapien
gctcatgcattatgaaagccagcag

SEQ ID NO: 4315636 - DNA, 25 bp, Homo sapien
tcctgcactgttgaacaatgctcac

SEQ ID NO: 4315637 - DNA, 25 bp, Homo sapien
aatgttcgccaatgctctgtgttgc

SEQ ID NO: 4315638 - DNA, 25 bp, Homo sapien
cgggcattctgaatgttcgccaatg

SEQ ID NO: 4315639 - DNA, 25 bp, Homo sapien
cagtcctcgggcattctgaatgttc

SEQ ID NO: 4315640 - DNA, 25 bp, Homo sapien
ccaatgaatccagtcctcgggcatt

SEQ ID NO: 4315641 - DNA, 25 bp, Homo sapien
tagaagataagaatagcttgaatag

SEQ ID NO: 4315642 - DNA, 25 bp, Homo sapien
tgagctggcatgtgaaaggagctct

SEQ ID NO: 4315643 - DNA, 25 bp, Homo sapien
ttcctattcttactaggcagtattc

SEQ ID NO: 4315644 - DNA, 25 bp, Homo sapien
gaatttcctattcttactaggcagt

SEQ ID NO: 4315645 - DNA, 25 bp, Homo sapien
attgctgtctgagtggccttctaat

SEQ ID NO: 4315646 - DNA, 25 bp, Homo sapien
agcggaaggaatgtgtgaagaatcc

SEQ ID NO: 4315647 - DNA, 25 bp, Homo sapien
catctggtggtaagagagcggaagg

SEQ ID NO: 4315648 - DNA, 25 bp, Homo sapien
tattgaccacgttggcttggagagc

SEQ ID NO: 4315649 - DNA, 25 bp, Homo sapien
cattgtctgggaggtcatacctata

SEQ ID NO: 4315650 - DNA, 25 bp, Homo sapien
aatcatcgccttgtctgaaatcctg

SEQ ID NO: 4315651 - DNA, 25 bp, Homo sapien
gattcctacggtgcatatagtaatg

SEQ ID NO: 4315652 - DNA, 25 bp, Homo sapien
tgtgcatttccatccacccaaggag

SEQ ID NO: 4315653 - DNA, 25 bp, Homo sapien
tacatacgtcatttgacttccataa

SEQ ID NO: 4315654 - DNA, 25 bp, Homo sapien
ctgtgacctgaatacatacgtcatt

SEQ ID NO: 4315655 - DNA, 25 bp, Homo sapien
taaatggcaccatgcatcatacatt

SEQ ID NO: 4315656 - DNA, 25 bp, Homo sapien
tttaaatggcaccatgcatcataca

SEQ ID NO: 4315657 - DNA, 25 bp, Homo sapien
gttttgcatccagttgaagttcagc

SEQ ID NO: 4315658 - DNA, 25 bp, Homo sapien
ctctaaaatagaatttgtgggtttg

SEQ ID NO: 4315659 - DNA, 25 bp, Homo sapien
gaagaattgatcctttaaaccatta

SEQ ID NO: 4315660 - DNA, 25 bp, Homo sapien
gagaagaattgatcctttaaaccat

SEQ ID NO: 4315661 - DNA, 25 bp, Homo sapien
cttggagaagaattgatcctttaaa

SEQ ID NO: 4315662 - DNA, 25 bp, Homo sapien
agggtggagacgaattttattgtat

SEQ ID NO: 4315663 - DNA, 25 bp, Homo sapien
ctgcaaccgaaaaggtacatggcag

SEQ ID NO: 4315664 - DNA, 25 bp, Homo sapien
ggcagaccctggcacatcaacaata

SEQ ID NO: 4315665 - DNA, 25 bp, Homo sapien
ccgaaaaggtacatggcagaccctg

SEQ ID NO: 4315666 - DNA, 25 bp, Homo sapien
catcaacaatagcaaggccacccat

SEQ ID NO: 4315667 - DNA, 25 bp, Homo sapien
tatttatccgtgtaaatacagagaa

SEQ ID NO: 4315668 - DNA, 25 bp, Homo sapien
ttatctgcagatatcaagtatttga

SEQ ID NO: 4315669 - DNA, 25 bp, Homo sapien
tagtttgactatcatcttcattcac

SEQ ID NO: 4315670 - DNA, 25 bp, Homo sapien
aattcttgcctgtctcgatacccat

SEQ ID NO: 4315671 - DNA, 25 bp, Homo sapien
gctgaggagtgatatcatgaccaaa

SEQ ID NO: 4315672 - DNA, 25 bp, Homo sapien
ctgaggagtgatatcatgaccaaaa

SEQ ID NO: 4315673 - DNA, 25 bp, Homo sapien
ataagctgaggagtgatatcatgac

SEQ ID NO: 4315674 - DNA, 25 bp, Homo sapien
aagctgaggagtgatatcatgacca

SEQ ID NO: 4315675 - DNA, 25 bp, Homo sapien
tcccttccttgcattacaaccagcc

SEQ ID NO: 4315676 - DNA, 25 bp, Homo sapien
ttgtcccttccttgcattacaacca

SEQ ID NO: 4315677 - DNA, 25 bp, Homo sapien
tttgtcccttccttgcattacaacc

SEQ ID NO: 4315678 - DNA, 25 bp, Homo sapien
tgtcccttccttgcattacaaccag

SEQ ID NO: 4315679 - DNA, 25 bp, Homo sapien
ttcttgtttggtaaaagctccagct

SEQ ID NO: 4315680 - DNA, 25 bp, Homo sapien
ccactgaagctgtgtccatctctgt

SEQ ID NO: 4315681 - DNA, 25 bp, Homo sapien
cagcttcagccactgaagctgtgtc

SEQ ID NO: 4315682 - DNA, 25 bp, Homo sapien
cttgtttggtaaaagctccagcttc

SEQ ID NO: 4315683 - DNA, 25 bp, Homo sapien
ggcaattctgaaggacaggacctgc

SEQ ID NO: 4315684 - DNA, 25 bp, Homo sapien
gacacaggagcttctttgttgggaa

SEQ ID NO: 4315685 - DNA, 25 bp, Homo sapien
gcaattctgaaggacaggacctgca

SEQ ID NO: 4315686 - DNA, 25 bp, Homo sapien
agcagacacaggagcttctttgttg

SEQ ID NO: 4315687 - DNA, 25 bp, Homo sapien
atgccagtagtctttctcgccacca

SEQ ID NO: 4315688 - DNA, 25 bp, Homo sapien
tttgccacttctgttacgtttgtta

SEQ ID NO: 4315689 - DNA, 25 bp, Homo sapien
tgccagtagtctttctcgccaccat

SEQ ID NO: 4315690 - DNA, 25 bp, Homo sapien
tgttacgtttgttatgccagtagtc

SEQ ID NO: 4315691 - DNA, 25 bp, Homo sapien
taagacaaacattggaagggcagcc

SEQ ID NO: 4315692 - DNA, 25 bp, Homo sapien
ggcatagggcatataacagaggatt

SEQ ID NO: 4315693 - DNA, 25 bp, Homo sapien
gatgatacgttttgatatgcaggcc

SEQ ID NO: 4315694 - DNA, 25 bp, Homo sapien
aagcagcctgattttccctacagtg

SEQ ID NO: 4315695 - DNA, 25 bp, Homo sapien
tagagcttgactaatactgatgaaa

SEQ ID NO: 4315696 - DNA, 25 bp, Homo sapien
aacctgacaagcagattaatttctg

SEQ ID NO: 4315697 - DNA, 25 bp, Homo sapien
aagaagagaatcaaggactgtctga

SEQ ID NO: 4315698 - DNA, 25 bp, Homo sapien
cactccaatctaagttgaacaacac

SEQ ID NO: 4315699 - DNA, 25 bp, Homo sapien
tacacttggaatgagaattagcagc

SEQ ID NO: 4315700 - DNA, 25 bp, Homo sapien
ttcacattgaaaaacgatcaaagca

SEQ ID NO: 4315701 - DNA, 25 bp, Homo sapien
caagcaggaaaatgaactggcgatc

SEQ ID NO: 4315702 - DNA, 25 bp, Homo sapien
gcagctttgaaagatttaacttcac

SEQ ID NO: 4315703 - DNA, 25 bp, Homo sapien
tttttcctgccaactgatgcttcca

SEQ ID NO: 4315704 - DNA, 25 bp, Homo sapien
gattgagatctccaatgtttttcct

SEQ ID NO: 4315705 - DNA, 25 bp, Homo sapien
gtttttcctgccaactgatgcttcc

SEQ ID NO: 4315706 - DNA, 25 bp, Homo sapien
ttttcctgccaactgatgcttccaa

SEQ ID NO: 4315707 - DNA, 25 bp, Homo sapien
taatcctactcgtggcttctggcca

SEQ ID NO: 4315708 - DNA, 25 bp, Homo sapien
tactcgtggcttctggccacaactt

SEQ ID NO: 4315709 - DNA, 25 bp, Homo sapien
tgagtctgctcttaatcctactcgt

SEQ ID NO: 4315710 - DNA, 25 bp, Homo sapien
tctgctcttaatcctactcgtggct

SEQ ID NO: 4315711 - DNA, 25 bp, Homo sapien
tatggtattagatgacctgatacca

SEQ ID NO: 4315712 - DNA, 25 bp, Homo sapien
gaagatgtagcaaatatggtattag

SEQ ID NO: 4315713 - DNA, 25 bp, Homo sapien
tgttggtcctcagccagtaatacca

SEQ ID NO: 4315714 - DNA, 25 bp, Homo sapien
gatgacctgataccaactatgttgg

SEQ ID NO: 4315715 - DNA, 25 bp, Homo sapien
ggtgcttttagttaagccaaataca

SEQ ID NO: 4315716 - DNA, 25 bp, Homo sapien
tgtttcgccaacagcaaggctttgc

SEQ ID NO: 4315717 - DNA, 25 bp, Homo sapien
tattccatttgtttcgccaacagca

SEQ ID NO: 4315718 - DNA, 25 bp, Homo sapien
tacctatatttctcatgaggcgaaa

SEQ ID NO: 4315719 - DNA, 25 bp, Homo sapien
cccatcccatgatttctctgtgaaa

SEQ ID NO: 4315720 - DNA, 25 bp, Homo sapien
tggcccatcccatgatttctctgtg

SEQ ID NO: 4315721 - DNA, 25 bp, Homo sapien
ggcccatcccatgatttctctgtga

SEQ ID NO: 4315722 - DNA, 25 bp, Homo sapien
gcccatcccatgatttctctgtgaa

SEQ ID NO: 4315723 - DNA, 25 bp, Homo sapien
tcatggtataggagtatttttgctg

SEQ ID NO: 4315724 - DNA, 25 bp, Homo sapien
caaacattctccttgactaatcaca

SEQ ID NO: 4315725 - DNA, 25 bp, Homo sapien
tgtaggtctggatgtcagtttttcc

SEQ ID NO: 4315726 - DNA, 25 bp, Homo sapien
catcctcttcacttcaggtgtaggt

SEQ ID NO: 4315727 - DNA, 25 bp, Homo sapien
gaaggaataggatgaaatataaagt

SEQ ID NO: 4315728 - DNA, 25 bp, Homo sapien
cctggaccgcagaaaaacaggcaag

SEQ ID NO: 4315729 - DNA, 25 bp, Homo sapien
gtgcctggaccgcagaaaaacaggc

SEQ ID NO: 4315730 - DNA, 25 bp, Homo sapien
tggagaaggaataggatgaaatata

SEQ ID NO: 4315731 - DNA, 25 bp, Homo sapien
cattgtgatcatttagtgagatgac

SEQ ID NO: 4315732 - DNA, 25 bp, Homo sapien
tcacccacattgtagttgtagtgtg

SEQ ID NO: 4315733 - DNA, 25 bp, Homo sapien
tatttccacagtgcctgtaccactt

SEQ ID NO: 4315734 - DNA, 25 bp, Homo sapien
accagcaatacataatccgattttg

SEQ ID NO: 4315735 - DNA, 25 bp, Homo sapien
ttgatcaggctgagattatctgtct

SEQ ID NO: 4315736 - DNA, 25 bp, Homo sapien
ccaacacaatcattagtataataca

SEQ ID NO: 4315737 - DNA, 25 bp, Homo sapien
ttcttgatcaggctgagattatctg

SEQ ID NO: 4315738 - DNA, 25 bp, Homo sapien
aatacaactctgtggcagctatcca

SEQ ID NO: 4315739 - DNA, 25 bp, Homo sapien
tagagtagagcccagaagatggtaa

SEQ ID NO: 4315740 - DNA, 25 bp, Homo sapien
gatggtaacactggttcaaggacag

SEQ ID NO: 4315741 - DNA, 25 bp, Homo sapien
ttcatagagtagagcccagaagatg

SEQ ID NO: 4315742 - DNA, 25 bp, Homo sapien
gcccagaagatggtaacactggttc

SEQ ID NO: 4315743 - DNA, 25 bp, Homo sapien
tcattgtgcttcaattctgcagctc

SEQ ID NO: 4315744 - DNA, 25 bp, Homo sapien
gtcattgtgcttcaattctgcagct

SEQ ID NO: 4315745 - DNA, 25 bp, Homo sapien
actggatatctgctccgagctgctg

SEQ ID NO: 4315746 - DNA, 25 bp, Homo sapien
caactggatatctgctccgagctgc

SEQ ID NO: 4315747 - DNA, 25 bp, Homo sapien
tccgagctgctgctgcttcctcttc

SEQ ID NO: 4315748 - DNA, 25 bp, Homo sapien
gctccgagctgctgctgcttcctct

SEQ ID NO: 4315749 - DNA, 25 bp, Homo sapien
ggaacatctaccaacactgcctctt

SEQ ID NO: 4315750 - DNA, 25 bp, Homo sapien
gcaaatattgatggaacatctacca

SEQ ID NO: 4315751 - DNA, 25 bp, Homo sapien
aagggcaaatattgatggaacatct

SEQ ID NO: 4315752 - DNA, 25 bp, Homo sapien
tattgatggaacatctaccaacact

SEQ ID NO: 4315753 - DNA, 25 bp, Homo sapien
catctgcgtgggacacagtgactcc

SEQ ID NO: 4315754 - DNA, 25 bp, Homo sapien
gaaatgcaagtgtcaaaagtcccca

SEQ ID NO: 4315755 - DNA, 25 bp, Homo sapien
aacgctggaaccgaaggctcatgga

SEQ ID NO: 4315756 - DNA, 25 bp, Homo sapien
taaactaccctgtgaaatgagcctc

SEQ ID NO: 4315757 - DNA, 25 bp, Homo sapien
actacaccgctgatgctcgccgcat

SEQ ID NO: 4315758 - DNA, 25 bp, Homo sapien
gattaggctgcaaagttgcccggcc

SEQ ID NO: 4315759 - DNA, 25 bp, Homo sapien
tcacgaacaacggtgcggtcagcgg

SEQ ID NO: 4315760 - DNA, 25 bp, Homo sapien
acaacggtgcggtcagcggcactga

SEQ ID NO: 4315761 - DNA, 25 bp, Homo sapien
tctttgttaagcagccgcagcctac

SEQ ID NO: 4315762 - DNA, 25 bp, Homo sapien
acttctttgttaagcagccgcagcc

SEQ ID NO: 4315763 - DNA, 25 bp, Homo sapien
cggcacgaaacctactccaacaagg

SEQ ID NO: 4315764 - DNA, 25 bp, Homo sapien
caagaagccaaaagcggcacgaaac

SEQ ID NO: 4315765 - DNA, 25 bp, Homo sapien
gaacggacactctgcacaactggca

SEQ ID NO: 4315766 - DNA, 25 bp, Homo sapien
gcaatttccgatttagcctgaaggt

SEQ ID NO: 4315767 - DNA, 25 bp, Homo sapien
aaacttgttgaatccctcccgatcg

SEQ ID NO: 4315768 - DNA, 25 bp, Homo sapien
gagtcctctcggcaaccattctgca

SEQ ID NO: 4315769 - DNA, 25 bp, Homo sapien
caaatcaaaagccagctgtcacttc

SEQ ID NO: 4315770 - DNA, 25 bp, Homo sapien
ccaagcgaaaggtgacagactttta

SEQ ID NO: 4315771 - DNA, 25 bp, Homo sapien
aggctccgtagtgcagacgcagccc

SEQ ID NO: 4315772 - DNA, 25 bp, Homo sapien
ttttcagcaatctagaggctccgta

SEQ ID NO: 4315773 - DNA, 25 bp, Homo sapien
gcaactttgctgtgcactgagacct

SEQ ID NO: 4315774 - DNA, 25 bp, Homo sapien
gagagagtgaagtcgggtttcttct

SEQ ID NO: 4315775 - DNA, 25 bp, Homo sapien
caatccttcttcagtagagaattct

SEQ ID NO: 4315776 - DNA, 25 bp, Homo sapien
tcagcaccctggaaaaattcaatcc

SEQ ID NO: 4315777 - DNA, 25 bp, Homo sapien
gtgaagtcgggtttcttctctgtat

SEQ ID NO: 4315778 - DNA, 25 bp, Homo sapien
ctattaatgcgcagagcagaaggca

SEQ ID NO: 4315779 - DNA, 25 bp, Homo sapien
tgggtcctactgctccggtctaaac

SEQ ID NO: 4315780 - DNA, 25 bp, Homo sapien
ggcattgcatacaaataggtccaag

SEQ ID NO: 4315781 - DNA, 25 bp, Homo sapien
caagtgtgcgcttctattggtggct

SEQ ID NO: 4315782 - DNA, 25 bp, Homo sapien
gattgcatccttgtaggaaacagag

SEQ ID NO: 4315783 - DNA, 25 bp, Homo sapien
cagagttaactcttacacgactgag

SEQ ID NO: 4315784 - DNA, 25 bp, Homo sapien
tacacgactgagaggtgaaagaaga

SEQ ID NO: 4315785 - DNA, 25 bp, Homo sapien
tgcaaagtttgcaccaaacacatat

SEQ ID NO: 4315786 - DNA, 25 bp, Homo sapien
tctctgagcctctgagttctgggct

SEQ ID NO: 4315787 - DNA, 25 bp, Homo sapien
caatgtaggttctatctttcagtgt

SEQ ID NO: 4315788 - DNA, 25 bp, Homo sapien
ctttcagtgtttgttcttgtccatg

SEQ ID NO: 4315789 - DNA, 25 bp, Homo sapien
tgggctgggcagagttccttctttt

SEQ ID NO: 4315790 - DNA, 25 bp, Homo sapien
cgcaggaatccaggggatatttgct

SEQ ID NO: 4315791 - DNA, 25 bp, Homo sapien
tccgcaggaatccaggggatatttg

SEQ ID NO: 4315792 - DNA, 25 bp, Homo sapien
tcacttccgcaggaatccaggggat

SEQ ID NO: 4315793 - DNA, 25 bp, Homo sapien
gaatccaggggatatttgctgtctt

SEQ ID NO: 4315794 - DNA, 25 bp, Homo sapien
ctcttcccaggatctaagcatgtca

SEQ ID NO: 4315795 - DNA, 25 bp, Homo sapien
tcttctataggcaaaagctcatcat

SEQ ID NO: 4315796 - DNA, 25 bp, Homo sapien
ttttccactcaataccttctcctta

SEQ ID NO: 4315797 - DNA, 25 bp, Homo sapien
gatctaagcatgtcacacaaatggg

SEQ ID NO: 4315798 - DNA, 25 bp, Homo sapien
cagcactggtgctaaatttaagggt

SEQ ID NO: 4315799 - DNA, 25 bp, Homo sapien
tcacaatacagcagcactggtgcta

SEQ ID NO: 4315800 - DNA, 25 bp, Homo sapien
cacaatacagcagcactggtgctaa

SEQ ID NO: 4315801 - DNA, 25 bp, Homo sapien
cactggtgctaaatttaagggtcac

SEQ ID NO: 4315802 - DNA, 25 bp, Homo sapien
gtagtattccacacaatcttcaggt

SEQ ID NO: 4315803 - DNA, 25 bp, Homo sapien
cctccaaatccactctccagcaagc

SEQ ID NO: 4315804 - DNA, 25 bp, Homo sapien
caaatccactctccagcaagcttga

SEQ ID NO: 4315805 - DNA, 25 bp, Homo sapien
tccaaatccactctccagcaagctt

SEQ ID NO: 4315806 - DNA, 25 bp, Homo sapien
ccaaatccactctccagcaagcttg

SEQ ID NO: 4315807 - DNA, 25 bp, Homo sapien
ttcctctggatatatgaatgtttca

SEQ ID NO: 4315808 - DNA, 25 bp, Homo sapien
gatattgagtatggacctctgaaaa

SEQ ID NO: 4315809 - DNA, 25 bp, Homo sapien
agcgtgtgccacaaagaaatcagca

SEQ ID NO: 4315810 - DNA, 25 bp, Homo sapien
gtccactttagccaaggagatattg

SEQ ID NO: 4315811 - DNA, 25 bp, Homo sapien
gaaacgtaaatttatcctgagagtg

SEQ ID NO: 4315812 - DNA, 25 bp, Homo sapien
cttgggcccaacataaggtgcatcc

SEQ ID NO: 4315813 - DNA, 25 bp, Homo sapien
tgggcccaacataaggtgcatcctc

SEQ ID NO: 4315814 - DNA, 25 bp, Homo sapien
caacataaggtgcatcctcccgctt

SEQ ID NO: 4315815 - DNA, 25 bp, Homo sapien
cataaggtgcatcctcccgctttct

SEQ ID NO: 4315816 - DNA, 25 bp, Homo sapien
tccactaaccttctctccccttgtc

SEQ ID NO: 4315817 - DNA, 25 bp, Homo sapien
cactaaccttctctccccttgtcag

SEQ ID NO: 4315818 - DNA, 25 bp, Homo sapien
ctaaccttctctccccttgtcagca

SEQ ID NO: 4315819 - DNA, 25 bp, Homo sapien
gatccttccactaaccttctctccc

SEQ ID NO: 4315820 - DNA, 25 bp, Homo sapien
tacaagggagagtaagcttgaagca

SEQ ID NO: 4315821 - DNA, 25 bp, Homo sapien
catccaaaatatagtgaggaagagc

SEQ ID NO: 4315822 - DNA, 25 bp, Homo sapien
gaaacattgcaaagagggccactct

SEQ ID NO: 4315823 - DNA, 25 bp, Homo sapien
ggccactctggttaggcatcgtgca

SEQ ID NO: 4315824 - DNA, 25 bp, Homo sapien
ctttccttgaatacacgaagcttac

SEQ ID NO: 4315825 - DNA, 25 bp, Homo sapien
ttcatgcaaaagctttccttgaata

SEQ ID NO: 4315826 - DNA, 25 bp, Homo sapien
catgcaaaagctttccttgaataca

SEQ ID NO: 4315827 - DNA, 25 bp, Homo sapien
aagctttccttgaatacacgaagct

SEQ ID NO: 4315828 - DNA, 25 bp, Homo sapien
cagtgataaaacgtgtgtcatgcca

SEQ ID NO: 4315829 - DNA, 25 bp, Homo sapien
taaaacgtgtgtcatgccacatgag

SEQ ID NO: 4315830 - DNA, 25 bp, Homo sapien
tctttctctacttgcccacaagctg

SEQ ID NO: 4315831 - DNA, 25 bp, Homo sapien
ttcccagtgataaaacgtgtgtcat

SEQ ID NO: 4315832 - DNA, 25 bp, Homo sapien
gctgcccaccaagtgactcacatag

SEQ ID NO: 4315833 - DNA, 25 bp, Homo sapien
tagctgggcttgtacttccaaacct

SEQ ID NO: 4315834 - DNA, 25 bp, Homo sapien
cacatagctgagtgctagctgggct

SEQ ID NO: 4315835 - DNA, 25 bp, Homo sapien
ggcaatatgatcaaatatgctgcca

SEQ ID NO: 4315836 - DNA, 25 bp, Homo sapien
gctggtgatgggttggatggttctc

SEQ ID NO: 4315837 - DNA, 25 bp, Homo sapien
tgttaactctgtttatgctggtgat

SEQ ID NO: 4315838 - DNA, 25 bp, Homo sapien
ttcctcgagcaggaatatcattcct

SEQ ID NO: 4315839 - DNA, 25 bp, Homo sapien
gttctctgttttcctcgagcaggaa

SEQ ID NO: 4315840 - DNA, 25 bp, Homo sapien
cccaggttcgtcacaacatcaccaa

SEQ ID NO: 4315841 - DNA, 25 bp, Homo sapien
tctcccaggttcgtcacaacatcac

SEQ ID NO: 4315842 - DNA, 25 bp, Homo sapien
ttctcccaggttcgtcacaacatca

SEQ ID NO: 4315843 - DNA, 25 bp, Homo sapien
tcccaggttcgtcacaacatcacca

SEQ ID NO: 4315844 - DNA, 25 bp, Homo sapien
ctccactgggattctcctttataat

SEQ ID NO: 4315845 - DNA, 25 bp, Homo sapien
ctgggattctcctttataatgggct

SEQ ID NO: 4315846 - DNA, 25 bp, Homo sapien
tgggattctcctttataatgggctt

SEQ ID NO: 4315847 - DNA, 25 bp, Homo sapien
cactgggattctcctttataatggg

SEQ ID NO: 4315848 - DNA, 25 bp, Homo sapien
tctagtttttctttcttgctggaaa

SEQ ID NO: 4315849 - DNA, 25 bp, Homo sapien
gtcttctagtttttctttcttgctg

SEQ ID NO: 4315850 - DNA, 25 bp, Homo sapien
tcttctagtttttctttcttgctgg

SEQ ID NO: 4315851 - DNA, 25 bp, Homo sapien
cttctagtttttctttcttgctgga

SEQ ID NO: 4315852 - DNA, 25 bp, Homo sapien
aggatcatcctccagagggtagacc

SEQ ID NO: 4315853 - DNA, 25 bp, Homo sapien
caggatcatcctccagagggtagac

SEQ ID NO: 4315854 - DNA, 25 bp, Homo sapien
ccaggatcatcctccagagggtaga

SEQ ID NO: 4315855 - DNA, 25 bp, Homo sapien
tattcacaataacacagacttggaa

SEQ ID NO: 4315856 - DNA, 25 bp, Homo sapien
ccaacccaaatgtccaacaatgata

SEQ ID NO: 4315857 - DNA, 25 bp, Homo sapien
gaagaggaacatcacacactggggc

SEQ ID NO: 4315858 - DNA, 25 bp, Homo sapien
tgcacacgtttgtttattgtggcac

SEQ ID NO: 4315859 - DNA, 25 bp, Homo sapien
ttttgatgctagcagcaatagcagc

SEQ ID NO: 4315860 - DNA, 25 bp, Homo sapien
caatagcagcaagcagatgagctct

SEQ ID NO: 4315861 - DNA, 25 bp, Homo sapien
catccaaataattcacgtccagtac

SEQ ID NO: 4315862 - DNA, 25 bp, Homo sapien
ctttctgaatttgaccatccaaata

SEQ ID NO: 4315863 - DNA, 25 bp, Homo sapien
aataccgcgaactctaaactaagag

SEQ ID NO: 4315864 - DNA, 25 bp, Homo sapien
cttgccattcatagacgtctgggaa

SEQ ID NO: 4315865 - DNA, 25 bp, Homo sapien
gaaattttgagtgctcttgccattc

SEQ ID NO: 4315866 - DNA, 25 bp, Homo sapien
cttagcaagaagaaattttgagtgc

SEQ ID NO: 4315867 - DNA, 25 bp, Homo sapien
caccatgggcctttctgctgagcac

SEQ ID NO: 4315868 - DNA, 25 bp, Homo sapien
accatgggcctttctgctgagcacc

SEQ ID NO: 4315869 - DNA, 25 bp, Homo sapien
gccaccatgggcctttctgctgagc

SEQ ID NO: 4315870 - DNA, 25 bp, Homo sapien
catgggcctttctgctgagcaccat

SEQ ID NO: 4315871 - DNA, 25 bp, Homo sapien
catgtgtaaatggaaaccacatctt

SEQ ID NO: 4315872 - DNA, 25 bp, Homo sapien
gctacctgttcatctacgttgaatg

SEQ ID NO: 4315873 - DNA, 25 bp, Homo sapien
tcacttcttgcgagatgaacatgtg

SEQ ID NO: 4315874 - DNA, 25 bp, Homo sapien
cacatcttttgctacctgttcatct

SEQ ID NO: 4315875 - DNA, 25 bp, Homo sapien
acactttggcattgtgcgtttttct

SEQ ID NO: 4315876 - DNA, 25 bp, Homo sapien
actttggcattgtgcgtttttctac

SEQ ID NO: 4315877 - DNA, 25 bp, Homo sapien
ctactgtaactgaaacatctacact

SEQ ID NO: 4315878 - DNA, 25 bp, Homo sapien
tactgtaactgaaacatctacactg

SEQ ID NO: 4315879 - DNA, 25 bp, Homo sapien
cctaatcgctggaacctgtaactat

SEQ ID NO: 4315880 - DNA, 25 bp, Homo sapien
aagatacacacatcctaatcgctgg

SEQ ID NO: 4315881 - DNA, 25 bp, Homo sapien
caataacatatgaagtaggctgaat

SEQ ID NO: 4315882 - DNA, 25 bp, Homo sapien
tcagcaaacaagtgtacaaatcaat

SEQ ID NO: 4315883 - DNA, 25 bp, Homo sapien
agagtctctggagagtcatttagaa

SEQ ID NO: 4315884 - DNA, 25 bp, Homo sapien
aaagtcactatcttgcttccaaaaa

SEQ ID NO: 4315885 - DNA, 25 bp, Homo sapien
aaactccaaatttagagtctctgga

SEQ ID NO: 4315886 - DNA, 25 bp, Homo sapien
agaaatgcaaatatgataaagtcac

SEQ ID NO: 4315887 - DNA, 25 bp, Homo sapien
acttttacaggtcttttgacggcat

SEQ ID NO: 4315888 - DNA, 25 bp, Homo sapien
ttttacaggtcttttgacggcattc

SEQ ID NO: 4315889 - DNA, 25 bp, Homo sapien
gacttttacaggtcttttgacggca

SEQ ID NO: 4315890 - DNA, 25 bp, Homo sapien
caggacttttacaggtcttttgacg

SEQ ID NO: 4315891 - DNA, 25 bp, Homo sapien
ttaaccttgtgcaaaatatgattta

SEQ ID NO: 4315892 - DNA, 25 bp, Homo sapien
taaccttgtgcaaaatatgatttat

SEQ ID NO: 4315893 - DNA, 25 bp, Homo sapien
caatctactaagcaagaggatgact

SEQ ID NO: 4315894 - DNA, 25 bp, Homo sapien
aattaccactgatgcctattagaag

SEQ ID NO: 4315895 - DNA, 25 bp, Homo sapien
tagaatattaagcatgcaggaccac

SEQ ID NO: 4315896 - DNA, 25 bp, Homo sapien
gcaggaccacatcctatttatctgt

SEQ ID NO: 4315897 - DNA, 25 bp, Homo sapien
taagcacgtgagaggtaaagctgct

SEQ ID NO: 4315898 - DNA, 25 bp, Homo sapien
aaataggtgtaaagctatggagccc

SEQ ID NO: 4315899 - DNA, 25 bp, Homo sapien
ttttctactaacagttggagcgtca

SEQ ID NO: 4315900 - DNA, 25 bp, Homo sapien
tatggagcccatggtgtaagcacgt

SEQ ID NO: 4315901 - DNA, 25 bp, Homo sapien
gcttcacccttcttactacatgcca

SEQ ID NO: 4315902 - DNA, 25 bp, Homo sapien
ggcttcacccttcttactacatgcc

SEQ ID NO: 4315903 - DNA, 25 bp, Homo sapien
cattacattgaagttgcgtcttgtg

SEQ ID NO: 4315904 - DNA, 25 bp, Homo sapien
ttgcgtcttgtgcaagggctgattt

SEQ ID NO: 4315905 - DNA, 25 bp, Homo sapien
ttgaagttgcgtcttgtgcaagggc

SEQ ID NO: 4315906 - DNA, 25 bp, Homo sapien
tttctcattacattgaagttgcgtc

SEQ ID NO: 4315907 - DNA, 25 bp, Homo sapien
cagtggaaccaaagcaatggcatta

SEQ ID NO: 4315908 - DNA, 25 bp, Homo sapien
aactctgaatctaacagtggtccag

SEQ ID NO: 4315909 - DNA, 25 bp, Homo sapien
tcttaagtttgagcatatcccagta

SEQ ID NO: 4315910 - DNA, 25 bp, Homo sapien
acatttttaacatagcggctagctc

SEQ ID NO: 4315911 - DNA, 25 bp, Homo sapien
ctagaatatgatgagcactacactt

SEQ ID NO: 4315912 - DNA, 25 bp, Homo sapien
tcacattcccctgtggttatggaag

SEQ ID NO: 4315913 - DNA, 25 bp, Homo sapien
tatggaaggtttatcctcacagtgc

SEQ ID NO: 4315914 - DNA, 25 bp, Homo sapien
tatgatgagcactacactttcacat

SEQ ID NO: 4315915 - DNA, 25 bp, Homo sapien
ttagggagagaatgcaacattaaat

SEQ ID NO: 4315916 - DNA, 25 bp, Homo sapien
agggagagaatgcaacattaaatgt

SEQ ID NO: 4315917 - DNA, 25 bp, Homo sapien
gggagagaatgcaacattaaatgtt

SEQ ID NO: 4315918 - DNA, 25 bp, Homo sapien
tagggagagaatgcaacattaaatg

SEQ ID NO: 4315919 - DNA, 25 bp, Homo sapien
aactgggctatagcgtcttctacac

SEQ ID NO: 4315920 - DNA, 25 bp, Homo sapien
tgggctatagcgtcttctacacttt

SEQ ID NO: 4315921 - DNA, 25 bp, Homo sapien
caaactgggctatagcgtcttctac

SEQ ID NO: 4315922 - DNA, 25 bp, Homo sapien
tcaaactgggctatagcgtcttcta

SEQ ID NO: 4315923 - DNA, 25 bp, Homo sapien
gactgaattgcaggtgcactcggac

SEQ ID NO: 4315924 - DNA, 25 bp, Homo sapien
gcactcggacttttacaatatcaaa

SEQ ID NO: 4315925 - DNA, 25 bp, Homo sapien
attgcaggtgcactcggacttttac

SEQ ID NO: 4315926 - DNA, 25 bp, Homo sapien
taataggactgaattgcaggtgcac

SEQ ID NO: 4315927 - DNA, 25 bp, Homo sapien
actgctgccttgataaatctttggg

SEQ ID NO: 4315928 - DNA, 25 bp, Homo sapien
ccagggaatagactgctgccttgat

SEQ ID NO: 4315929 - DNA, 25 bp, Homo sapien
ggccccagggaatagactgctgcct

SEQ ID NO: 4315930 - DNA, 25 bp, Homo sapien
gctgccttgataaatctttgggtca

SEQ ID NO: 4315931 - DNA, 25 bp, Homo sapien
tccttgagagccacttagaattttc

SEQ ID NO: 4315932 - DNA, 25 bp, Homo sapien
tctgaccctgagttgcctctgaagt

SEQ ID NO: 4315933 - DNA, 25 bp, Homo sapien
ttttgtgaccttctgagactgctcc

SEQ ID NO: 4315934 - DNA, 25 bp, Homo sapien
gatggcaggtctattttccttgaga

SEQ ID NO: 4315935 - DNA, 25 bp, Homo sapien
gagagagggcatttctacgagtatt

SEQ ID NO: 4315936 - DNA, 25 bp, Homo sapien
gaagagagagggcatttctacgagt

SEQ ID NO: 4315937 - DNA, 25 bp, Homo sapien
gagggcatttctacgagtattatag

SEQ ID NO: 4315938 - DNA, 25 bp, Homo sapien
gcatttctacgagtattatagctca

SEQ ID NO: 4315939 - DNA, 25 bp, Homo sapien
cctcatggtggtagacatgaaggca

SEQ ID NO: 4315940 - DNA, 25 bp, Homo sapien
cagtgtcgctgaaccaattgtcatg

SEQ ID NO: 4315941 - DNA, 25 bp, Homo sapien
tggtactcccacgtcaagtgttaac

SEQ ID NO: 4315942 - DNA, 25 bp, Homo sapien
caggttttttaggtccctcatggtg

SEQ ID NO: 4315943 - DNA, 25 bp, Homo sapien
tttgctattttccgcagagttttca

SEQ ID NO: 4315944 - DNA, 25 bp, Homo sapien
atattttgctattttccgcagagtt

SEQ ID NO: 4315945 - DNA, 25 bp, Homo sapien
tattttgctattttccgcagagttt

SEQ ID NO: 4315946 - DNA, 25 bp, Homo sapien
ttttgctattttccgcagagttttc

SEQ ID NO: 4315947 - DNA, 25 bp, Homo sapien
cattccatgaaaggagcaaagccat

SEQ ID NO: 4315948 - DNA, 25 bp, Homo sapien
ccattactctgttgtctgaataggg

SEQ ID NO: 4315949 - DNA, 25 bp, Homo sapien
caaagccatgaacaggaacacaggt

SEQ ID NO: 4315950 - DNA, 25 bp, Homo sapien
taaccaaaacgaccttcagtatctg

SEQ ID NO: 4315951 - DNA, 25 bp, Homo sapien
ccatctctcgccttcttatgttcat

SEQ ID NO: 4315952 - DNA, 25 bp, Homo sapien
atccatctctcgccttcttatgttc

SEQ ID NO: 4315953 - DNA, 25 bp, Homo sapien
tccatctctcgccttcttatgttca

SEQ ID NO: 4315954 - DNA, 25 bp, Homo sapien
ctgccaagtgttgtgaggttctggc

SEQ ID NO: 4315955 - DNA, 25 bp, Homo sapien
tgttgtgaggttctggctacagccc

SEQ ID NO: 4315956 - DNA, 25 bp, Homo sapien
aacttgtaactgtgtgcctgcatgg

SEQ ID NO: 4315957 - DNA, 25 bp, Homo sapien
taaagcagatagtttaacttgggca

SEQ ID NO: 4315958 - DNA, 25 bp, Homo sapien
aggtcagatgtgtttcagtaaaggt

SEQ ID NO: 4315959 - DNA, 25 bp, Homo sapien
tgaccacacgaacagttgaggcaag

SEQ ID NO: 4315960 - DNA, 25 bp, Homo sapien
taaaggtgaccacacgaacagttga

SEQ ID NO: 4315961 - DNA, 25 bp, Homo sapien
tgtttcagtaaaggtgaccacacga

SEQ ID NO: 4315962 - DNA, 25 bp, Homo sapien
tgaatattccagaggttcccgggta

SEQ ID NO: 4315963 - DNA, 25 bp, Homo sapien
tattccagaggttcccgggtatctg

SEQ ID NO: 4315964 - DNA, 25 bp, Homo sapien
gaggttcccgggtatctgtccatag

SEQ ID NO: 4315965 - DNA, 25 bp, Homo sapien
gtctgaatattccagaggttcccgg

SEQ ID NO: 4315966 - DNA, 25 bp, Homo sapien
tctgttcctgccgtagaaatttcaa

SEQ ID NO: 4315967 - DNA, 25 bp, Homo sapien
tgttcctgccgtagaaatttcaatg

SEQ ID NO: 4315968 - DNA, 25 bp, Homo sapien
ggtctgttcctgccgtagaaatttc

SEQ ID NO: 4315969 - DNA, 25 bp, Homo sapien
aggtctgttcctgccgtagaaattt

SEQ ID NO: 4315970 - DNA, 25 bp, Homo sapien
tttccactgcgacagaacacagttc

SEQ ID NO: 4315971 - DNA, 25 bp, Homo sapien
catatatgatgcgtggtgaggacct

SEQ ID NO: 4315972 - DNA, 25 bp, Homo sapien
ttccctctgaaggtaacaatatcct

SEQ ID NO: 4315973 - DNA, 25 bp, Homo sapien
tctttctgattcatagacagtgcct

SEQ ID NO: 4315974 - DNA, 25 bp, Homo sapien
tcacgacactagcaatcaactgcat

SEQ ID NO: 4315975 - DNA, 25 bp, Homo sapien
tctgcggcatcgcttcacgacacta

SEQ ID NO: 4315976 - DNA, 25 bp, Homo sapien
ttgtatccagaaattaatcactctg

SEQ ID NO: 4315977 - DNA, 25 bp, Homo sapien
gaaattaatcactctgcggcatcgc

SEQ ID NO: 4315978 - DNA, 25 bp, Homo sapien
tctctaaagtagcatcatcactgtg

SEQ ID NO: 4315979 - DNA, 25 bp, Homo sapien
catcatcactgtgtaagtgtacccg

SEQ ID NO: 4315980 - DNA, 25 bp, Homo sapien
taagtgtacccggatgactactggg

SEQ ID NO: 4315981 - DNA, 25 bp, Homo sapien
gggaattcagcagaaacatcattca

SEQ ID NO: 4315982 - DNA, 25 bp, Homo sapien
gctaggaaagacaggatgaatgaaa

SEQ ID NO: 4315983 - DNA, 25 bp, Homo sapien
cgaaggaagtgaattatgtgcagca

SEQ ID NO: 4315984 - DNA, 25 bp, Homo sapien
gaattatgtgcagcatggctaggaa

SEQ ID NO: 4315985 - DNA, 25 bp, Homo sapien
aacctctgcttcacacgaaggaagt

SEQ ID NO: 4315986 - DNA, 25 bp, Homo sapien
gattatgtctttgagggctaggaaa

SEQ ID NO: 4315987 - DNA, 25 bp, Homo sapien
ctacataatgtgcttcaggattatg

SEQ ID NO: 4315988 - DNA, 25 bp, Homo sapien
tattggttgaatgttgttcccagac

SEQ ID NO: 4315989 - DNA, 25 bp, Homo sapien
tccttattggttgaatgttgttccc

SEQ ID NO: 4315990 - DNA, 25 bp, Homo sapien
cagggaactgaaccttgaacttcct

SEQ ID NO: 4315991 - DNA, 25 bp, Homo sapien
ccaaagcctgactgtaagtcattaa

SEQ ID NO: 4315992 - DNA, 25 bp, Homo sapien
tccaaagcctgactgtaagtcatta

SEQ ID NO: 4315993 - DNA, 25 bp, Homo sapien
caaagcctgactgtaagtcattaat

SEQ ID NO: 4315994 - DNA, 25 bp, Homo sapien
ccagcttttgaggtacggttaccat

SEQ ID NO: 4315995 - DNA, 25 bp, Homo sapien
tgaaggaactaatagcaccctttgg

SEQ ID NO: 4315996 - DNA, 25 bp, Homo sapien
gtcgcagatgaaaaccatgtccctt

SEQ ID NO: 4315997 - DNA, 25 bp, Homo sapien
ctctaaaagaagaatggcagtcgca

SEQ ID NO: 4315998 - DNA, 25 bp, Homo sapien
cattattgatacctcttggttggta

SEQ ID NO: 4315999 - DNA, 25 bp, Homo sapien
ttctcaatgcatgcactagaatata

SEQ ID NO: 4316000 - DNA, 25 bp, Homo sapien
ctcatgttctcaatgcatgcactag

SEQ ID NO: 4316001 - DNA, 25 bp, Homo sapien
tgatacctcttggttggtataccat

SEQ ID NO: 4316002 - DNA, 25 bp, Homo sapien
ggccagttatcatactctttctaaa

SEQ ID NO: 4316003 - DNA, 25 bp, Homo sapien
atgagaatcctttttataacttggc

SEQ ID NO: 4316004 - DNA, 25 bp, Homo sapien
gattgtccttactatgaagttttct

SEQ ID NO: 4316005 - DNA, 25 bp, Homo sapien
ttgatgaagcaagctaaatacatgc

SEQ ID NO: 4316006 - DNA, 25 bp, Homo sapien
cacttggttgggcaggctgcgctca

SEQ ID NO: 4316007 - DNA, 25 bp, Homo sapien
gcttgtgctaactgcttggatccca

SEQ ID NO: 4316008 - DNA, 25 bp, Homo sapien
tggctggaccagatgtaacacaagc

SEQ ID NO: 4316009 - DNA, 25 bp, Homo sapien
ggatcccatgtctgcaaagggtgag

SEQ ID NO: 4316010 - DNA, 25 bp, Homo sapien
aaacactgtcgtcctccttggtggg

SEQ ID NO: 4316011 - DNA, 25 bp, Homo sapien
aaaaggtctgctcgggtgtagccac

SEQ ID NO: 4316012 - DNA, 25 bp, Homo sapien
taggttccttccctctggcaaccag

SEQ ID NO: 4316013 - DNA, 25 bp, Homo sapien
catacacaaatggtcacgggaggct

SEQ ID NO: 4316014 - DNA, 25 bp, Homo sapien
cataagaagctagcaagtatccatc

SEQ ID NO: 4316015 - DNA, 25 bp, Homo sapien
caatgatttcaataggacagcccgt

SEQ ID NO: 4316016 - DNA, 25 bp, Homo sapien
cagcccgtttgaatgttgtgcacac

SEQ ID NO: 4316017 - DNA, 25 bp, Homo sapien
tgcacaccaggtctgaactccaaat

SEQ ID NO: 4316018 - DNA, 25 bp, Homo sapien
cttggcaatacttgtatgaagtcac

SEQ ID NO: 4316019 - DNA, 25 bp, Homo sapien
tcctagtgatagttcggaaaatcgc

SEQ ID NO: 4316020 - DNA, 25 bp, Homo sapien
gaatagagtctgagagagacttcac

SEQ ID NO: 4316021 - DNA, 25 bp, Homo sapien
gattgtgaattatgtattacctgcc

SEQ ID NO: 4316022 - DNA, 25 bp, Homo sapien
tcctgacagaaatctatcagccata

SEQ ID NO: 4316023 - DNA, 25 bp, Homo sapien
tgaccatgaatcagcattgaacacc

SEQ ID NO: 4316024 - DNA, 25 bp, Homo sapien
tctgaagtccttgcactaatgacag

SEQ ID NO: 4316025 - DNA, 25 bp, Homo sapien
ctgaagtccttgcactaatgacagt

SEQ ID NO: 4316026 - DNA, 25 bp, Homo sapien
taataacatgtattccacaataaac

SEQ ID NO: 4316027 - DNA, 25 bp, Homo sapien
ccacaataaacatgggtcaagtatt

SEQ ID NO: 4316028 - DNA, 25 bp, Homo sapien
aaatagataataacatgtattccac

SEQ ID NO: 4316029 - DNA, 25 bp, Homo sapien
taaacatgggtcaagtattactttg

SEQ ID NO: 4316030 - DNA, 25 bp, Homo sapien
catccaggacagcagaacagcctag

SEQ ID NO: 4316031 - DNA, 25 bp, Homo sapien
tactcagcttatctatgctgggcag

SEQ ID NO: 4316032 - DNA, 25 bp, Homo sapien
ttttggcgagtacatgaaacagctc

SEQ ID NO: 4316033 - DNA, 25 bp, Homo sapien
gaagatggcaagagttgtactacca

SEQ ID NO: 4316034 - DNA, 25 bp, Homo sapien
gacttagtcccaaaagctgcataca

SEQ ID NO: 4316035 - DNA, 25 bp, Homo sapien
taagatcaccaattcaaagagcatg

SEQ ID NO: 4316036 - DNA, 25 bp, Homo sapien
tcaacacagtgaagggtggttactc

SEQ ID NO: 4316037 - DNA, 25 bp, Homo sapien
tcaatattgacagcctgcaacctgt

SEQ ID NO: 4316038 - DNA, 25 bp, Homo sapien
aatgtgcaacatctatgtgccctga

SEQ ID NO: 4316039 - DNA, 25 bp, Homo sapien
tgtatactcccttcactcgtctgta

SEQ ID NO: 4316040 - DNA, 25 bp, Homo sapien
catgccagaagatgatacgggctgt

SEQ ID NO: 4316041 - DNA, 25 bp, Homo sapien
caacatgcattgtggcatgccagaa

SEQ ID NO: 4316042 - DNA, 25 bp, Homo sapien
taccttgtcctccagaagacatctg

SEQ ID NO: 4316043 - DNA, 25 bp, Homo sapien
tagctccagtccaaaagtaatctgc

SEQ ID NO: 4316044 - DNA, 25 bp, Homo sapien
gaagaagtcatgttgtagctccagt

SEQ ID NO: 4316045 - DNA, 25 bp, Homo sapien
tggagtctggcaagtcacaaatctg

SEQ ID NO: 4316046 - DNA, 25 bp, Homo sapien
tacatcagaaaggtgggtgacactc

SEQ ID NO: 4316047 - DNA, 25 bp, Homo sapien
tcagaagggaagcagcatatcatta

SEQ ID NO: 4316048 - DNA, 25 bp, Homo sapien
catcctgctgttaacgtaatttcca

SEQ ID NO: 4316049 - DNA, 25 bp, Homo sapien
atgttctcattagcagcaaccctgc

SEQ ID NO: 4316050 - DNA, 25 bp, Homo sapien
tgattggttggcaggagatgaaacc

SEQ ID NO: 4316051 - DNA, 25 bp, Homo sapien
gattggttggcaggagatgaaacca

SEQ ID NO: 4316052 - DNA, 25 bp, Homo sapien
gttttcacgctcatgagagaacaca

SEQ ID NO: 4316053 - DNA, 25 bp, Homo sapien
caaacgctgttttcacgctcatgag

SEQ ID NO: 4316054 - DNA, 25 bp, Homo sapien
aacaccaaacgctgttttcacgctc

SEQ ID NO: 4316055 - DNA, 25 bp, Homo sapien
aacgctgttttcacgctcatgagag

SEQ ID NO: 4316056 - DNA, 25 bp, Homo sapien
tccttcatgaatagcgatccggcag

SEQ ID NO: 4316057 - DNA, 25 bp, Homo sapien
tccggcagccatctaaaacaactag

SEQ ID NO: 4316058 - DNA, 25 bp, Homo sapien
ttaacctgggctcaatgtcatcacc

SEQ ID NO: 4316059 - DNA, 25 bp, Homo sapien
ctgaagtcagtagcgggtctccatc

SEQ ID NO: 4316060 - DNA, 25 bp, Homo sapien
caagggtagtagtcaaagcctggca

SEQ ID NO: 4316061 - DNA, 25 bp, Homo sapien
tctctgctcatgtgacattccctgt

SEQ ID NO: 4316062 - DNA, 25 bp, Homo sapien
aagttctgaggttgttactgcatca

SEQ ID NO: 4316063 - DNA, 25 bp, Homo sapien
tacaaccctgtataggaaggccaag

SEQ ID NO: 4316064 - DNA, 25 bp, Homo sapien
acataagccttcaattagctgatac

SEQ ID NO: 4316065 - DNA, 25 bp, Homo sapien
ataagccttcaattagctgatacat

SEQ ID NO: 4316066 - DNA, 25 bp, Homo sapien
cataagccttcaattagctgataca

SEQ ID NO: 4316067 - DNA, 25 bp, Homo sapien
taaactttttgctggtgaatggtca

SEQ ID NO: 4316068 - DNA, 25 bp, Homo sapien
tggtcatgacttcacgttattggct

SEQ ID NO: 4316069 - DNA, 25 bp, Homo sapien
gctggtgaatggtcatgacttcacg

SEQ ID NO: 4316070 - DNA, 25 bp, Homo sapien
ctttttgctggtgaatggtcatgac

SEQ ID NO: 4316071 - DNA, 25 bp, Homo sapien
aagtgtgccaattaattacttttca

SEQ ID NO: 4316072 - DNA, 25 bp, Homo sapien
cagctgaaagtgtgccaattaatta

SEQ ID NO: 4316073 - DNA, 25 bp, Homo sapien
tattttcataacctcatgctaattt

SEQ ID NO: 4316074 - DNA, 25 bp, Homo sapien
tcattttagttcacaatgagttttt

SEQ ID NO: 4316075 - DNA, 25 bp, Homo sapien
ctcatgattatatttgggacccacc

SEQ ID NO: 4316076 - DNA, 25 bp, Homo sapien
tctaccacagtggattaaggaggta

SEQ ID NO: 4316077 - DNA, 25 bp, Homo sapien
tgttgatatacagtcacaggtacct

SEQ ID NO: 4316078 - DNA, 25 bp, Homo sapien
tggaagggagtagcattattcagtc

SEQ ID NO: 4316079 - DNA, 25 bp, Homo sapien
caggtggcaccacactcagcaaatt

SEQ ID NO: 4316080 - DNA, 25 bp, Homo sapien
ggtggcaccacactcagcaaatttc

SEQ ID NO: 4316081 - DNA, 25 bp, Homo sapien
tgcctcaaacttacaaagtgctggc

SEQ ID NO: 4316082 - DNA, 25 bp, Homo sapien
ctcaaacttacaaagtgctggcatt

SEQ ID NO: 4316083 - DNA, 25 bp, Homo sapien
tcagacaaattagtgttataagtcc

SEQ ID NO: 4316084 - DNA, 25 bp, Homo sapien
gtatattcaccattgcttgacatct

SEQ ID NO: 4316085 - DNA, 25 bp, Homo sapien
catagaagaaagttataggacagag

SEQ ID NO: 4316086 - DNA, 25 bp, Homo sapien
taattcccttgattatatttcagac

SEQ ID NO: 4316087 - DNA, 25 bp, Homo sapien
gggatagtctctaataatgctttca

SEQ ID NO: 4316088 - DNA, 25 bp, Homo sapien
cagatgaacattgaaggagttcgcc

SEQ ID NO: 4316089 - DNA, 25 bp, Homo sapien
ccaaattcgtaaaaaaggtcatcat

SEQ ID NO: 4316090 - DNA, 25 bp, Homo sapien
aaaaagggttgcaggtcataagctt

SEQ ID NO: 4316091 - DNA, 25 bp, Homo sapien
tggtagcaggagagaaaagtgccaa

SEQ ID NO: 4316092 - DNA, 25 bp, Homo sapien
tcttgagaacatcatgggagtaact

SEQ ID NO: 4316093 - DNA, 25 bp, Homo sapien
cgtatcatatggtcaaagtaagctc

SEQ ID NO: 4316094 - DNA, 25 bp, Homo sapien
aagtaagctctagtatttgggaaca

SEQ ID NO: 4316095 - DNA, 25 bp, Homo sapien
caacataaactaaaatggttccagg

SEQ ID NO: 4316096 - DNA, 25 bp, Homo sapien
cctagtcttatgcaagtagtaagcc

SEQ ID NO: 4316097 - DNA, 25 bp, Homo sapien
gatatctgaaacgaagtatagctag

SEQ ID NO: 4316098 - DNA, 25 bp, Homo sapien
atacatagattacatgaacacccag

SEQ ID NO: 4316099 - DNA, 25 bp, Homo sapien
caccttcaatagctgatagttgttg

SEQ ID NO: 4316100 - DNA, 25 bp, Homo sapien
ttttacatggttgaagagagacggg

SEQ ID NO: 4316101 - DNA, 25 bp, Homo sapien
tatatgcatgctttaagagtctttg

SEQ ID NO: 4316102 - DNA, 25 bp, Homo sapien
aacagacatgccagtttcaccttca

SEQ ID NO: 4316103 - DNA, 25 bp, Homo sapien
gtagtcccagtactaggcaggctga

SEQ ID NO: 4316104 - DNA, 25 bp, Homo sapien
gcattcagcctgggtcactgagtga

SEQ ID NO: 4316105 - DNA, 25 bp, Homo sapien
ggattgcttaagccctcaaggtcaa

SEQ ID NO: 4316106 - DNA, 25 bp, Homo sapien
ttaagccctcaaggtcaaggctaca

SEQ ID NO: 4316107 - DNA, 25 bp, Homo sapien
gataaagcttctaaatacctcacca

SEQ ID NO: 4316108 - DNA, 25 bp, Homo sapien
tgattacctaacatgcaacataaga

SEQ ID NO: 4316109 - DNA, 25 bp, Homo sapien
taggtggattagattaagatctctc

SEQ ID NO: 4316110 - DNA, 25 bp, Homo sapien
catgcgtagtgaacttcataaaaac

SEQ ID NO: 4316111 - DNA, 25 bp, Homo sapien
tcgcagggcgtacgatggaggtgtg

SEQ ID NO: 4316112 - DNA, 25 bp, Homo sapien
tcctcgcagggcgtacgatggaggt

SEQ ID NO: 4316113 - DNA, 25 bp, Homo sapien
agacccttagccagagcaggcaaac

SEQ ID NO: 4316114 - DNA, 25 bp, Homo sapien
tcaagacccttagccagagcaggca

SEQ ID NO: 4316115 - DNA, 25 bp, Homo sapien
tctgttcacatcatcagttcttctg

SEQ ID NO: 4316116 - DNA, 25 bp, Homo sapien
aactggcacaattccactggctctc

SEQ ID NO: 4316117 - DNA, 25 bp, Homo sapien
tgcttttgaacttcaactggcacaa

SEQ ID NO: 4316118 - DNA, 25 bp, Homo sapien
acttcaactggcacaattccactgg

SEQ ID NO: 4316119 - DNA, 25 bp, Homo sapien
acacctacaggcttagcacaaaata

SEQ ID NO: 4316120 - DNA, 25 bp, Homo sapien
cctacaggcttagcacaaaatagcc

SEQ ID NO: 4316121 - DNA, 25 bp, Homo sapien
aggcttagcacaaaatagccaagaa

SEQ ID NO: 4316122 - DNA, 25 bp, Homo sapien
ttagcacaaaatagccaagaactcc

SEQ ID NO: 4316123 - DNA, 25 bp, Homo sapien
tgcacctacgaggacattattaaat

SEQ ID NO: 4316124 - DNA, 25 bp, Homo sapien
tctaatgtgattaagaacctcctga

SEQ ID NO: 4316125 - DNA, 25 bp, Homo sapien
tgtgattaagaacctcctgaacatc

SEQ ID NO: 4316126 - DNA, 25 bp, Homo sapien
ttatgcacctacgaggacattatta

SEQ ID NO: 4316127 - DNA, 25 bp, Homo sapien
ggacttcggaattcagagtgtttag

SEQ ID NO: 4316128 - DNA, 25 bp, Homo sapien
gatgggacttcggaattcagagtgt

SEQ ID NO: 4316129 - DNA, 25 bp, Homo sapien
tttgatgggacttcggaattcagag

SEQ ID NO: 4316130 - DNA, 25 bp, Homo sapien
gaggtttgatgggacttcggaattc

SEQ ID NO: 4316131 - DNA, 25 bp, Homo sapien
tgtttctaatccagtactcagaagt

SEQ ID NO: 4316132 - DNA, 25 bp, Homo sapien
gtttctaatccagtactcagaagta

SEQ ID NO: 4316133 - DNA, 25 bp, Homo sapien
tctaatccagtactcagaagtaaat

SEQ ID NO: 4316134 - DNA, 25 bp, Homo sapien
aatgtttctaatccagtactcagaa

SEQ ID NO: 4316135 - DNA, 25 bp, Homo sapien
gcattccagagttttgtggacaaga

SEQ ID NO: 4316136 - DNA, 25 bp, Homo sapien
cattccagagttttgtggacaagaa

SEQ ID NO: 4316137 - DNA, 25 bp, Homo sapien
tgtggtctgctagatcacatggctc

SEQ ID NO: 4316138 - DNA, 25 bp, Homo sapien
tccactgaaacttgccgtaatgtcc

SEQ ID NO: 4316139 - DNA, 25 bp, Homo sapien
caagttgcagggctaactgtagcac

SEQ ID NO: 4316140 - DNA, 25 bp, Homo sapien
gacacatcaaacctcatgtggtctg

SEQ ID NO: 4316141 - DNA, 25 bp, Homo sapien
ggttttcaatattctcctgttttca

SEQ ID NO: 4316142 - DNA, 25 bp, Homo sapien
aaagcattgtattcattcccctcat

SEQ ID NO: 4316143 - DNA, 25 bp, Homo sapien
ctcttgccatctgcttgccacagtt

SEQ ID NO: 4316144 - DNA, 25 bp, Homo sapien
tcttgccatctgcttgccacagttt

SEQ ID NO: 4316145 - DNA, 25 bp, Homo sapien
tctcatcagaaagcattgtattcat

SEQ ID NO: 4316146 - DNA, 25 bp, Homo sapien
gttcacgagttgcagctctgactga

SEQ ID NO: 4316147 - DNA, 25 bp, Homo sapien
tgcaactgcatttgtccaacatgat

SEQ ID NO: 4316148 - DNA, 25 bp, Homo sapien
gatgagcccagtaatatctagttca

SEQ ID NO: 4316149 - DNA, 25 bp, Homo sapien
acagtcaggtgctcaggctccacta

SEQ ID NO: 4316150 - DNA, 25 bp, Homo sapien
ccatgagaatatgaatcatgggctg

SEQ ID NO: 4316151 - DNA, 25 bp, Homo sapien
aatcatgggctgttgaccatcttcc

SEQ ID NO: 4316152 - DNA, 25 bp, Homo sapien
ctatgccatgagaatatgaatcatg

SEQ ID NO: 4316153 - DNA, 25 bp, Homo sapien
gaatatgaatcatgggctgttgacc

SEQ ID NO: 4316154 - DNA, 25 bp, Homo sapien
aagtcatctaaggttcttcccaagt

SEQ ID NO: 4316155 - DNA, 25 bp, Homo sapien
agtcatctaaggttcttcccaagtt

SEQ ID NO: 4316156 - DNA, 25 bp, Homo sapien
tgaaagaaagtcccgtttggctgga

SEQ ID NO: 4316157 - DNA, 25 bp, Homo sapien
atacaagtgtctacctgatttggtg

SEQ ID NO: 4316158 - DNA, 25 bp, Homo sapien
agtgggaccctaatagatgaaagaa

SEQ ID NO: 4316159 - DNA, 25 bp, Homo sapien
gaaagaagatccctcatggagtgtt

SEQ ID NO: 4316160 - DNA, 25 bp, Homo sapien
ctgaaatgtcctgtagtagagtcta

SEQ ID NO: 4316161 - DNA, 25 bp, Homo sapien
tttccttacgggcttcaatgggctc

SEQ ID NO: 4316162 - DNA, 25 bp, Homo sapien
atgaacctcattcggctcacatatg

SEQ ID NO: 4316163 - DNA, 25 bp, Homo sapien
ggtaaatccacagatcccaaacatt

SEQ ID NO: 4316164 - DNA, 25 bp, Homo sapien
agctcatggtaacgaagagtgtttt

SEQ ID NO: 4316165 - DNA, 25 bp, Homo sapien
gagctcatggtaacgaagagtgttt

SEQ ID NO: 4316166 - DNA, 25 bp, Homo sapien
agagctcatggtaacgaagagtgtt

SEQ ID NO: 4316167 - DNA, 25 bp, Homo sapien
aaactctgagattgacaatgcttaa

SEQ ID NO: 4316168 - DNA, 25 bp, Homo sapien
tctgagattgacaatgcttaatgtg

SEQ ID NO: 4316169 - DNA, 25 bp, Homo sapien
actctgagattgacaatgcttaatg

SEQ ID NO: 4316170 - DNA, 25 bp, Homo sapien
caaactctgagattgacaatgctta

SEQ ID NO: 4316171 - DNA, 25 bp, Homo sapien
ctggcaatgccttccatcgctgcag

SEQ ID NO: 4316172 - DNA, 25 bp, Homo sapien
gctggcaatgccttccatcgctgca

SEQ ID NO: 4316173 - DNA, 25 bp, Homo sapien
ctgccaaagcagctggcaatgcctt

SEQ ID NO: 4316174 - DNA, 25 bp, Homo sapien
aagcagctggcaatgccttccatcg

SEQ ID NO: 4316175 - DNA, 25 bp, Homo sapien
gtaatgttttcttgtcaaatagcag

SEQ ID NO: 4316176 - DNA, 25 bp, Homo sapien
gcgcatacctaatcagttcttccat

SEQ ID NO: 4316177 - DNA, 25 bp, Homo sapien
tagagtaatttaacaggtggaaata

SEQ ID NO: 4316178 - DNA, 25 bp, Homo sapien
attagaacaaattctagtctgcgca

SEQ ID NO: 4316179 - DNA, 25 bp, Homo sapien
cctaagcaactgtggtatttacttc

SEQ ID NO: 4316180 - DNA, 25 bp, Homo sapien
cattaacttcccaagtcatgagtgt

SEQ ID NO: 4316181 - DNA, 25 bp, Homo sapien
tgtggaaccaaacatatgtgacagg

SEQ ID NO: 4316182 - DNA, 25 bp, Homo sapien
caggataaattcaacagtgtctctg

SEQ ID NO: 4316183 - DNA, 25 bp, Homo sapien
ttgtggctgcattctataacaccat

SEQ ID NO: 4316184 - DNA, 25 bp, Homo sapien
tataacaccataatttggggcatct

SEQ ID NO: 4316185 - DNA, 25 bp, Homo sapien
gcattgctattctctcagtgtcaaa

SEQ ID NO: 4316186 - DNA, 25 bp, Homo sapien
cagtgtcaaatacatcattgtggct

SEQ ID NO: 4316187 - DNA, 25 bp, Homo sapien
tacccttcaactctaaccagctgaa

SEQ ID NO: 4316188 - DNA, 25 bp, Homo sapien
ctacccttcaactctaaccagctga

SEQ ID NO: 4316189 - DNA, 25 bp, Homo sapien
tattcaggatttccatgagcatcat

SEQ ID NO: 4316190 - DNA, 25 bp, Homo sapien
atttccatgagcatcatccttcatt

SEQ ID NO: 4316191 - DNA, 25 bp, Homo sapien
tcattaaggtgtccctcagcttcaa

SEQ ID NO: 4316192 - DNA, 25 bp, Homo sapien
actaaaggaaaccagacagcccatg

SEQ ID NO: 4316193 - DNA, 25 bp, Homo sapien
cagccggcaagtaaactagtcatta

SEQ ID NO: 4316194 - DNA, 25 bp, Homo sapien
ggtactacggctggaactctgcaaa

SEQ ID NO: 4316195 - DNA, 25 bp, Homo sapien
aactcttagaaccagcctcatgaaa

SEQ ID NO: 4316196 - DNA, 25 bp, Homo sapien
ccaaactcttagaaccagcctcatg

SEQ ID NO: 4316197 - DNA, 25 bp, Homo sapien
actcttagaaccagcctcatgaaac

SEQ ID NO: 4316198 - DNA, 25 bp, Homo sapien
caaactcttagaaccagcctcatga

SEQ ID NO: 4316199 - DNA, 25 bp, Homo sapien
gcatgcccatgtcattgccacattg

SEQ ID NO: 4316200 - DNA, 25 bp, Homo sapien
taccgtctggccaaaagctttggca

SEQ ID NO: 4316201 - DNA, 25 bp, Homo sapien
ttgccacattgctctaccgtctggc

SEQ ID NO: 4316202 - DNA, 25 bp, Homo sapien
gtgcgcatgcccatgtcattgccac

SEQ ID NO: 4316203 - DNA, 25 bp, Homo sapien
tttgaaggaaatgctgaaggaacca

SEQ ID NO: 4316204 - DNA, 25 bp, Homo sapien
taacctggcaaaaactctcaccgtc

SEQ ID NO: 4316205 - DNA, 25 bp, Homo sapien
cgattttcagctgtaggtttcactg

SEQ ID NO: 4316206 - DNA, 25 bp, Homo sapien
cactgagtataaaccaggcctttaa

SEQ ID NO: 4316207 - DNA, 25 bp, Homo sapien
tttttccacttgctgtctccaaatc

SEQ ID NO: 4316208 - DNA, 25 bp, Homo sapien
atcaagagtccttttatgctcccta

SEQ ID NO: 4316209 - DNA, 25 bp, Homo sapien
ttccacttgctgtctccaaatcaag

SEQ ID NO: 4316210 - DNA, 25 bp, Homo sapien
aagagtccttttatgctccctatct

SEQ ID NO: 4316211 - DNA, 25 bp, Homo sapien
cttctttgcaacttaacttcactgt

SEQ ID NO: 4316212 - DNA, 25 bp, Homo sapien
tattccaagacagatatgcgataca

SEQ ID NO: 4316213 - DNA, 25 bp, Homo sapien
gtattccaagacagatatgcgatac

SEQ ID NO: 4316214 - DNA, 25 bp, Homo sapien
tttgacatttaggtgcttcggtttg

SEQ ID NO: 4316215 - DNA, 25 bp, Homo sapien
ctagaatttgacatttaggtgcttc

SEQ ID NO: 4316216 - DNA, 25 bp, Homo sapien
ttaggtgcttcggtttgttcatctc

SEQ ID NO: 4316217 - DNA, 25 bp, Homo sapien
tttgctagaatttgacatttaggtg

SEQ ID NO: 4316218 - DNA, 25 bp, Homo sapien
atttccaactgggaacgatctacaa

SEQ ID NO: 4316219 - DNA, 25 bp, Homo sapien
gaacataagctcttgatatttccaa

SEQ ID NO: 4316220 - DNA, 25 bp, Homo sapien
tcaaacttgatatttcatggaacgg

SEQ ID NO: 4316221 - DNA, 25 bp, Homo sapien
caactgggaacgatctacaaagacg

SEQ ID NO: 4316222 - DNA, 25 bp, Homo sapien
gaaagcccagtttcaacagtgagta

SEQ ID NO: 4316223 - DNA, 25 bp, Homo sapien
aagcccagtttcaacagtgagtatc

SEQ ID NO: 4316224 - DNA, 25 bp, Homo sapien
cccagtttcaacagtgagtatcagt

SEQ ID NO: 4316225 - DNA, 25 bp, Homo sapien
gcccagtttcaacagtgagtatcag

SEQ ID NO: 4316226 - DNA, 25 bp, Homo sapien
tcagtttcttatgatcagcgggtct

SEQ ID NO: 4316227 - DNA, 25 bp, Homo sapien
tcgtcccacagtcgacacaggagat

SEQ ID NO: 4316228 - DNA, 25 bp, Homo sapien
atgacttgcacgcacccgtcttggg

SEQ ID NO: 4316229 - DNA, 25 bp, Homo sapien
atgatcagcgggtctcgtcccacag

SEQ ID NO: 4316230 - DNA, 25 bp, Homo sapien
tgagtcactccagatggtaggacct

SEQ ID NO: 4316231 - DNA, 25 bp, Homo sapien
gatggcctttcgcagcaatatttat

SEQ ID NO: 4316232 - DNA, 25 bp, Homo sapien
tatactggaaaggtacatggaagca

SEQ ID NO: 4316233 - DNA, 25 bp, Homo sapien
catggaagcatactacacctcaaaa

SEQ ID NO: 4316234 - DNA, 25 bp, Homo sapien
gtatacaacttgatcaaagctacag

SEQ ID NO: 4316235 - DNA, 25 bp, Homo sapien
gttgatgaacaagtggcaaatccct

SEQ ID NO: 4316236 - DNA, 25 bp, Homo sapien
gctataaaatatgttaggaacctct

SEQ ID NO: 4316237 - DNA, 25 bp, Homo sapien
tctcatttgggaccggataatactt

SEQ ID NO: 4316238 - DNA, 25 bp, Homo sapien
cccaagctgtgatcttagtctgaag

SEQ ID NO: 4316239 - DNA, 25 bp, Homo sapien
tcttagtctgaagagagctgaatct

SEQ ID NO: 4316240 - DNA, 25 bp, Homo sapien
cacacccaagctgtgatcttagtct

SEQ ID NO: 4316241 - DNA, 25 bp, Homo sapien
gctgtgatcttagtctgaagagagc

SEQ ID NO: 4316242 - DNA, 25 bp, Homo sapien
catgccattggctaagatactgaat

SEQ ID NO: 4316243 - DNA, 25 bp, Homo sapien
cagtgatggtctcataagattttaa

SEQ ID NO: 4316244 - DNA, 25 bp, Homo sapien
ggaggaacctactatttcctggatc

SEQ ID NO: 4316245 - DNA, 25 bp, Homo sapien
atactgaatgggcttccggcctcgg

SEQ ID NO: 4316246 - DNA, 25 bp, Homo sapien
ttcagtgaactgagattgtgctcca

SEQ ID NO: 4316247 - DNA, 25 bp, Homo sapien
agtgaactgagattgtgctccagcc

SEQ ID NO: 4316248 - DNA, 25 bp, Homo sapien
gaactgagattgtgctccagcctgg

SEQ ID NO: 4316249 - DNA, 25 bp, Homo sapien
tgaactgagattgtgctccagcctg

SEQ ID NO: 4316250 - DNA, 25 bp, Homo sapien
gtgctttcaaatcaacaggacagtt

SEQ ID NO: 4316251 - DNA, 25 bp, Homo sapien
tcattgaaatgacgcaagagcatca

SEQ ID NO: 4316252 - DNA, 25 bp, Homo sapien
ctcaaggatttgctcagtataggaa

SEQ ID NO: 4316253 - DNA, 25 bp, Homo sapien
taggaatttgatgtgagagccaagg

SEQ ID NO: 4316254 - DNA, 25 bp, Homo sapien
caagtgagggtgatgaccaccacct

SEQ ID NO: 4316255 - DNA, 25 bp, Homo sapien
caacaagtgagggtgatgaccacca

SEQ ID NO: 4316256 - DNA, 25 bp, Homo sapien
acaacaagtgagggtgatgaccacc

SEQ ID NO: 4316257 - DNA, 25 bp, Homo sapien
acaagtgagggtgatgaccaccacc

SEQ ID NO: 4316258 - DNA, 25 bp, Homo sapien
atagccttgctctgtaccaccatcc

SEQ ID NO: 4316259 - DNA, 25 bp, Homo sapien
gctcaggagagattatccagaactt

SEQ ID NO: 4316260 - DNA, 25 bp, Homo sapien
gccttgctctgtaccaccatccatt

SEQ ID NO: 4316261 - DNA, 25 bp, Homo sapien
tatccagaacttgttgagtaaaaca

SEQ ID NO: 4316262 - DNA, 25 bp, Homo sapien
ctgttctgagggagcaccagataat

SEQ ID NO: 4316263 - DNA, 25 bp, Homo sapien
tgagggagcaccagataatggctct

SEQ ID NO: 4316264 - DNA, 25 bp, Homo sapien
gggagcaccagataatggctctgaa

SEQ ID NO: 4316265 - DNA, 25 bp, Homo sapien
gcaccagataatggctctgaagagc

SEQ ID NO: 4316266 - DNA, 25 bp, Homo sapien
gagagtgacactggaaacgtgagca

SEQ ID NO: 4316267 - DNA, 25 bp, Homo sapien
tcagccactcagtaatgacgctctg

SEQ ID NO: 4316268 - DNA, 25 bp, Homo sapien
aattcaagagccagcacaggatgga

SEQ ID NO: 4316269 - DNA, 25 bp, Homo sapien
cagacccactttgcctatgacagca

SEQ ID NO: 4316270 - DNA, 25 bp, Homo sapien
ggaattgaggacaccatccagacgt

SEQ ID NO: 4316271 - DNA, 25 bp, Homo sapien
cagctgagattcaatagctaaaggg

SEQ ID NO: 4316272 - DNA, 25 bp, Homo sapien
cagttcttgattgcagacagctgag

SEQ ID NO: 4316273 - DNA, 25 bp, Homo sapien
tgctgcatcagtgtgtctgcgtatt

SEQ ID NO: 4316274 - DNA, 25 bp, Homo sapien
gcttgtggcacgtttctcttgatcc

SEQ ID NO: 4316275 - DNA, 25 bp, Homo sapien
ccctaaatgggagctccgctggctc

SEQ ID NO: 4316276 - DNA, 25 bp, Homo sapien
cttgatcctgtgacccctaaatggg

SEQ ID NO: 4316277 - DNA, 25 bp, Homo sapien
ggctcagagcacaacttgctctgca

SEQ ID NO: 4316278 - DNA, 25 bp, Homo sapien
tagcaaagagtaatcatcaaaggga

SEQ ID NO: 4316279 - DNA, 25 bp, Homo sapien
taccattttaatccgacaggctgag

SEQ ID NO: 4316280 - DNA, 25 bp, Homo sapien
gagctcttgcagtaaaaggtctctt

SEQ ID NO: 4316281 - DNA, 25 bp, Homo sapien
gaaatgtgcagcatgtttctcaaca

SEQ ID NO: 4316282 - DNA, 25 bp, Homo sapien
atccccaaggcccaattatatttct

SEQ ID NO: 4316283 - DNA, 25 bp, Homo sapien
cttagtccagtgaatcgtggctgag

SEQ ID NO: 4316284 - DNA, 25 bp, Homo sapien
ttagtccagtgaatcgtggctgagg

SEQ ID NO: 4316285 - DNA, 25 bp, Homo sapien
tagtccagtgaatcgtggctgaggg

SEQ ID NO: 4316286 - DNA, 25 bp, Homo sapien
gtccagtgaatcgtggctgagggat

SEQ ID NO: 4316287 - DNA, 25 bp, Homo sapien
tagcttgggcaagcttgtcaaccag

SEQ ID NO: 4316288 - DNA, 25 bp, Homo sapien
ttgggcaagcttgtcaaccaggtca

SEQ ID NO: 4316289 - DNA, 25 bp, Homo sapien
tatagttagcttgggcaagcttgtc

SEQ ID NO: 4316290 - DNA, 25 bp, Homo sapien
agcataaatatagttagcttgggca

SEQ ID NO: 4316291 - DNA, 25 bp, Homo sapien
aaatgtcatcctgaggctaacatac

SEQ ID NO: 4316292 - DNA, 25 bp, Homo sapien
acttctcatcagataatggactttg

SEQ ID NO: 4316293 - DNA, 25 bp, Homo sapien
ctgatagctgtcagtacagtaacct

SEQ ID NO: 4316294 - DNA, 25 bp, Homo sapien
gacccattgttatgtccaaaggaaa

SEQ ID NO: 4316295 - DNA, 25 bp, Homo sapien
cagcaacaggtgaatggcacaaaac

SEQ ID NO: 4316296 - DNA, 25 bp, Homo sapien
taaatctgactttgtgcataccatc

SEQ ID NO: 4316297 - DNA, 25 bp, Homo sapien
tgcagcctcacacaaagaggtaatt

SEQ ID NO: 4316298 - DNA, 25 bp, Homo sapien
tgcatggagagaaagccacgtttta

SEQ ID NO: 4316299 - DNA, 25 bp, Homo sapien
gttatgggtcgtgtcaacatccaag

SEQ ID NO: 4316300 - DNA, 25 bp, Homo sapien
cagcattctaggattcatctgtaga

SEQ ID NO: 4316301 - DNA, 25 bp, Homo sapien
ttcagcattctaggattcatctgta

SEQ ID NO: 4316302 - DNA, 25 bp, Homo sapien
taataaagaagttatgggtcgtgtc

SEQ ID NO: 4316303 - DNA, 25 bp, Homo sapien
gacccttgccattaatcattttaga

SEQ ID NO: 4316304 - DNA, 25 bp, Homo sapien
taaaggacaatgaccattggtcctc

SEQ ID NO: 4316305 - DNA, 25 bp, Homo sapien
tcattttagaagttatgccactaaa

SEQ ID NO: 4316306 - DNA, 25 bp, Homo sapien
cattggtcctctgacccttgccatt

SEQ ID NO: 4316307 - DNA, 25 bp, Homo sapien
cattaaatgtgagccttcctactag

SEQ ID NO: 4316308 - DNA, 25 bp, Homo sapien
cggtcaatcccgtggcccttggttg

SEQ ID NO: 4316309 - DNA, 25 bp, Homo sapien
aattcaaaagtgttgtgccagccac

SEQ ID NO: 4316310 - DNA, 25 bp, Homo sapien
tctaatggatcctgagtgagagtca

SEQ ID NO: 4316311 - DNA, 25 bp, Homo sapien
gcaggtgtttaaagatgctggcatc

SEQ ID NO: 4316312 - DNA, 25 bp, Homo sapien
tctgctttatgctgacaaagtcctc

SEQ ID NO: 4316313 - DNA, 25 bp, Homo sapien
tgctggcatcaaagtagtttctctt

SEQ ID NO: 4316314 - DNA, 25 bp, Homo sapien
caaacttcatcaatggcaggtgttt

SEQ ID NO: 4316315 - DNA, 25 bp, Homo sapien
aactcaatgtgagcccttataagcc

SEQ ID NO: 4316316 - DNA, 25 bp, Homo sapien
gagatggaggatataatgcagcttc

SEQ ID NO: 4316317 - DNA, 25 bp, Homo sapien
caaagaatatagactggcttcttcc

SEQ ID NO: 4316318 - DNA, 25 bp, Homo sapien
gcagcttcagtaatcctgcctttag

SEQ ID NO: 4316319 - DNA, 25 bp, Homo sapien
gtttttcctgacctactgtttggca

SEQ ID NO: 4316320 - DNA, 25 bp, Homo sapien
catgaggttgtatacccatgaagtt

SEQ ID NO: 4316321 - DNA, 25 bp, Homo sapien
actgactctggtcatagcagtactc

SEQ ID NO: 4316322 - DNA, 25 bp, Homo sapien
ttgtatacccatgaagtttttcctg

SEQ ID NO: 4316323 - DNA, 25 bp, Homo sapien
ggtagccatggttcacgtagtcccc

SEQ ID NO: 4316324 - DNA, 25 bp, Homo sapien
tcctcatcataagatcttggtactg

SEQ ID NO: 4316325 - DNA, 25 bp, Homo sapien
cgtagtccccaaacactgatgagca

SEQ ID NO: 4316326 - DNA, 25 bp, Homo sapien
tgagcacagagattgagctatcttc

SEQ ID NO: 4316327 - DNA, 25 bp, Homo sapien
tgacaaagcatgaataatggcagca

SEQ ID NO: 4316328 - DNA, 25 bp, Homo sapien
cctcttgacaaagcatgaataatgg

SEQ ID NO: 4316329 - DNA, 25 bp, Homo sapien
ctcctcttgacaaagcatgaataat

SEQ ID NO: 4316330 - DNA, 25 bp, Homo sapien
tcttgacaaagcatgaataatggca

SEQ ID NO: 4316331 - DNA, 25 bp, Homo sapien
aaggacacccgcaataagaaagatg

SEQ ID NO: 4316332 - DNA, 25 bp, Homo sapien
ggcagagggtcttcaatagtcaaag

SEQ ID NO: 4316333 - DNA, 25 bp, Homo sapien
ctgctcttgatgatagttattacca

SEQ ID NO: 4316334 - DNA, 25 bp, Homo sapien
aattcgtgaaccagagagggcagag

SEQ ID NO: 4316335 - DNA, 25 bp, Homo sapien
gctgctaacaaattggcattagcac

SEQ ID NO: 4316336 - DNA, 25 bp, Homo sapien
ctgctaacaaattggcattagcaca

SEQ ID NO: 4316337 - DNA, 25 bp, Homo sapien
tgctaacaaattggcattagcacac

SEQ ID NO: 4316338 - DNA, 25 bp, Homo sapien
tgctgctaacaaattggcattagca

SEQ ID NO: 4316339 - DNA, 25 bp, Homo sapien
gtctgagctgtagggtttcattttt

SEQ ID NO: 4316340 - DNA, 25 bp, Homo sapien
attctccacacaagttgacagtctg

SEQ ID NO: 4316341 - DNA, 25 bp, Homo sapien
tgagcgttgtggtacttgatgtccc

SEQ ID NO: 4316342 - DNA, 25 bp, Homo sapien
tcatttttagtgagcgttgtggtac

SEQ ID NO: 4316343 - DNA, 25 bp, Homo sapien
ttccccaaatgtacccagagtgaaa

SEQ ID NO: 4316344 - DNA, 25 bp, Homo sapien
cccaaatgtacccagagtgaaaagt

SEQ ID NO: 4316345 - DNA, 25 bp, Homo sapien
catccatgacctgttcaattgattc

SEQ ID NO: 4316346 - DNA, 25 bp, Homo sapien
catttttcaccacgttgaagggcag

SEQ ID NO: 4316347 - DNA, 25 bp, Homo sapien
gagaactcctgatgactgctgcagt

SEQ ID NO: 4316348 - DNA, 25 bp, Homo sapien
tgagaactcctgatgactgctgcag

SEQ ID NO: 4316349 - DNA, 25 bp, Homo sapien
agaactcctgatgactgctgcagtc

SEQ ID NO: 4316350 - DNA, 25 bp, Homo sapien
gatgagaactcctgatgactgctgc

SEQ ID NO: 4316351 - DNA, 25 bp, Homo sapien
gctgagcttgcaacccacttgcgat

SEQ ID NO: 4316352 - DNA, 25 bp, Homo sapien
gcttgcaacccacttgcgatattgg

SEQ ID NO: 4316353 - DNA, 25 bp, Homo sapien
agggtgctgagcttgcaacccactt

SEQ ID NO: 4316354 - DNA, 25 bp, Homo sapien
caacccacttgcgatattgggtcat

SEQ ID NO: 4316355 - DNA, 25 bp, Homo sapien
tgttacatccaagcaaatgataaac

SEQ ID NO: 4316356 - DNA, 25 bp, Homo sapien
ctgactagataattgtgaatgagtt

SEQ ID NO: 4316357 - DNA, 25 bp, Homo sapien
atccaccaagattgctccgggcact

SEQ ID NO: 4316358 - DNA, 25 bp, Homo sapien
ccttggattttatgggatccaccaa

SEQ ID NO: 4316359 - DNA, 25 bp, Homo sapien
ttcttgactccattgaatgaaaaca

SEQ ID NO: 4316360 - DNA, 25 bp, Homo sapien
aaatcaattcatatgctgccttcat

SEQ ID NO: 4316361 - DNA, 25 bp, Homo sapien
tcttgactccattgaatgaaaacaa

SEQ ID NO: 4316362 - DNA, 25 bp, Homo sapien
gtactgcttacagctttgtctcaag

SEQ ID NO: 4316363 - DNA, 25 bp, Homo sapien
caggtctcctctaaaagctaccacg

SEQ ID NO: 4316364 - DNA, 25 bp, Homo sapien
tccacattctcaatttggaagagcc

SEQ ID NO: 4316365 - DNA, 25 bp, Homo sapien
gcaacaagtcccaccaactagaaaa

SEQ ID NO: 4316366 - DNA, 25 bp, Homo sapien
tggagccaggagcttcaggagactc

SEQ ID NO: 4316367 - DNA, 25 bp, Homo sapien
cttggagccaggagcttcaggagac

SEQ ID NO: 4316368 - DNA, 25 bp, Homo sapien
gagccaggagcttcaggagactcat

SEQ ID NO: 4316369 - DNA, 25 bp, Homo sapien
ggagccaggagcttcaggagactca

SEQ ID NO: 4316370 - DNA, 25 bp, Homo sapien
aaagcaccataatgtagcctgaaaa

SEQ ID NO: 4316371 - DNA, 25 bp, Homo sapien
tttctcattaagaattgtattccct

SEQ ID NO: 4316372 - DNA, 25 bp, Homo sapien
tttaaaagcaccataatgtagcctg

SEQ ID NO: 4316373 - DNA, 25 bp, Homo sapien
tccctttaaaagcaccataatgtag

SEQ ID NO: 4316374 - DNA, 25 bp, Homo sapien
taatagccacagaatttaggtttaa

SEQ ID NO: 4316375 - DNA, 25 bp, Homo sapien
tagccacagaatttaggtttaattg

SEQ ID NO: 4316376 - DNA, 25 bp, Homo sapien
agtaatagccacagaatttaggttt

SEQ ID NO: 4316377 - DNA, 25 bp, Homo sapien
gccacagaatttaggtttaattggc

SEQ ID NO: 4316378 - DNA, 25 bp, Homo sapien
tatggtgacttctactatcatttag

SEQ ID NO: 4316379 - DNA, 25 bp, Homo sapien
tgctttgaagatcaaggcctgggcc

SEQ ID NO: 4316380 - DNA, 25 bp, Homo sapien
tggtgacttctactatcatttagac

SEQ ID NO: 4316381 - DNA, 25 bp, Homo sapien
tgaggtgtgctttgaagatcaaggc

SEQ ID NO: 4316382 - DNA, 25 bp, Homo sapien
tcaggtttaaattggagtagtctgg

SEQ ID NO: 4316383 - DNA, 25 bp, Homo sapien
ttccaaatgattcaggtttaaattg

SEQ ID NO: 4316384 - DNA, 25 bp, Homo sapien
aatgattcaggtttaaattggagta

SEQ ID NO: 4316385 - DNA, 25 bp, Homo sapien
gtttaaattggagtagtctggacat

SEQ ID NO: 4316386 - DNA, 25 bp, Homo sapien
gctgaagggaagtttcgccgttggc

SEQ ID NO: 4316387 - DNA, 25 bp, Homo sapien
agtttcgccgttggctttcagccat

SEQ ID NO: 4316388 - DNA, 25 bp, Homo sapien
ctgaagggaagtttcgccgttggct

SEQ ID NO: 4316389 - DNA, 25 bp, Homo sapien
ggaagtttcgccgttggctttcagc

SEQ ID NO: 4316390 - DNA, 25 bp, Homo sapien
aagctggagagtccaagtgacttgg

SEQ ID NO: 4316391 - DNA, 25 bp, Homo sapien
gacaagaaagcgatgagcacaagga

SEQ ID NO: 4316392 - DNA, 25 bp, Homo sapien
gtgaagctggagagtccaagtgact

SEQ ID NO: 4316393 - DNA, 25 bp, Homo sapien
ggagagtccaagtgacttggaaaag

SEQ ID NO: 4316394 - DNA, 25 bp, Homo sapien
ggcttggctagacaactgtattctg

SEQ ID NO: 4316395 - DNA, 25 bp, Homo sapien
cacaaaatgagacacggatgagttc

SEQ ID NO: 4316396 - DNA, 25 bp, Homo sapien
gatatcagaacaaatagagccacca

SEQ ID NO: 4316397 - DNA, 25 bp, Homo sapien
catttgagaatcctagctgctaaga

SEQ ID NO: 4316398 - DNA, 25 bp, Homo sapien
cacattctgaaggatgagggccact

SEQ ID NO: 4316399 - DNA, 25 bp, Homo sapien
ggatgagggccactctgcttggaat

SEQ ID NO: 4316400 - DNA, 25 bp, Homo sapien
tcaattcggcagatccacattctga

SEQ ID NO: 4316401 - DNA, 25 bp, Homo sapien
gagggccactctgcttggaatgtac

SEQ ID NO: 4316402 - DNA, 25 bp, Homo sapien
tacgtcaaaacaattatgtcagtgc

SEQ ID NO: 4316403 - DNA, 25 bp, Homo sapien
tgtcagtgcaattgaagaaagtacc

SEQ ID NO: 4316404 - DNA, 25 bp, Homo sapien
caaacggcctgtcattatgtcaaag

SEQ ID NO: 4316405 - DNA, 25 bp, Homo sapien
gaaacataggcatgacgcagtctca

SEQ ID NO: 4316406 - DNA, 25 bp, Homo sapien
ttttacaagctcttagaaggctcaa

SEQ ID NO: 4316407 - DNA, 25 bp, Homo sapien
caattttacaagctcttagaaggct

SEQ ID NO: 4316408 - DNA, 25 bp, Homo sapien
aattttacaagctcttagaaggctc

SEQ ID NO: 4316409 - DNA, 25 bp, Homo sapien
tacaattttacaagctcttagaagg

SEQ ID NO: 4316410 - DNA, 25 bp, Homo sapien
gacttaatgaaaaccaatgctcctt

SEQ ID NO: 4316411 - DNA, 25 bp, Homo sapien
caagaatgacgtgaatggccctgtt

SEQ ID NO: 4316412 - DNA, 25 bp, Homo sapien
ccctgttactgccatgttgaggctg

SEQ ID NO: 4316413 - DNA, 25 bp, Homo sapien
tagagggcgccatacgacttaatga

SEQ ID NO: 4316414 - DNA, 25 bp, Homo sapien
gcccattatgttcaaaagcctcaga

SEQ ID NO: 4316415 - DNA, 25 bp, Homo sapien
tgatgccctccatattccgctgcat

SEQ ID NO: 4316416 - DNA, 25 bp, Homo sapien
aaagagaatagggacgcccattatg

SEQ ID NO: 4316417 - DNA, 25 bp, Homo sapien
aaaagtcagtgctgtggtccagtct

SEQ ID NO: 4316418 - DNA, 25 bp, Homo sapien
caacagttgaggagttgaatgagac

SEQ ID NO: 4316419 - DNA, 25 bp, Homo sapien
attcacaacagttgaggagttgaat

SEQ ID NO: 4316420 - DNA, 25 bp, Homo sapien
cacaacagttgaggagttgaatgag

SEQ ID NO: 4316421 - DNA, 25 bp, Homo sapien
ttcacaacagttgaggagttgaatg

SEQ ID NO: 4316422 - DNA, 25 bp, Homo sapien
cccagttctgtgtctacattgccca

SEQ ID NO: 4316423 - DNA, 25 bp, Homo sapien
tagcttcctttagaaaatgtggcct

SEQ ID NO: 4316424 - DNA, 25 bp, Homo sapien
gtgtccaattgtgcaatcacccagt

SEQ ID NO: 4316425 - DNA, 25 bp, Homo sapien
gaaaggtaatgcgtgtgaaagagct

SEQ ID NO: 4316426 - DNA, 25 bp, Homo sapien
aacagacggcggaaagactaagtcg

SEQ ID NO: 4316427 - DNA, 25 bp, Homo sapien
taagtatggctaatctctgactgtg

SEQ ID NO: 4316428 - DNA, 25 bp, Homo sapien
tgagggacgagccatatatgaagac

SEQ ID NO: 4316429 - DNA, 25 bp, Homo sapien
actaagtcgggaaaagcagtcagga

SEQ ID NO: 4316430 - DNA, 25 bp, Homo sapien
tgatatatctatcaacaggttgaag

SEQ ID NO: 4316431 - DNA, 25 bp, Homo sapien
tgaagtagataagttttcagccatt

SEQ ID NO: 4316432 - DNA, 25 bp, Homo sapien
tttgatatatctatcaacaggttga

SEQ ID NO: 4316433 - DNA, 25 bp, Homo sapien
tatcaacaggttgaagtagataagt

SEQ ID NO: 4316434 - DNA, 25 bp, Homo sapien
tttttctctgccatataggacctag

SEQ ID NO: 4316435 - DNA, 25 bp, Homo sapien
gagcttttggtgacaatcctacctg

SEQ ID NO: 4316436 - DNA, 25 bp, Homo sapien
ctattctgattggtatgagccttga

SEQ ID NO: 4316437 - DNA, 25 bp, Homo sapien
gttgacatggatacatgattccagg

SEQ ID NO: 4316438 - DNA, 25 bp, Homo sapien
gatttgtagcaacgctgcatccagc

SEQ ID NO: 4316439 - DNA, 25 bp, Homo sapien
gggcaccacaaatcatgcacatatg

SEQ ID NO: 4316440 - DNA, 25 bp, Homo sapien
gcatccagcaagtgtattcgtgcca

SEQ ID NO: 4316441 - DNA, 25 bp, Homo sapien
ctgtgaccagtgatccttgttacta

SEQ ID NO: 4316442 - DNA, 25 bp, Homo sapien
gcttccattgaaagatgccatctgg

SEQ ID NO: 4316443 - DNA, 25 bp, Homo sapien
ggatattgataaacgtgactacact

SEQ ID NO: 4316444 - DNA, 25 bp, Homo sapien
tctgggactttcataactactggga

SEQ ID NO: 4316445 - DNA, 25 bp, Homo sapien
aaacctatgcccttatgaattatgc

SEQ ID NO: 4316446 - DNA, 25 bp, Homo sapien
ggtgattatgcactgtcttctttaa

SEQ ID NO: 4316447 - DNA, 25 bp, Homo sapien
tattactaggtgattatgcactgtc

SEQ ID NO: 4316448 - DNA, 25 bp, Homo sapien
tatgcactgtcttctttaaaggtta

SEQ ID NO: 4316449 - DNA, 25 bp, Homo sapien
cactgtcttctttaaaggttatgac

SEQ ID NO: 4316450 - DNA, 25 bp, Homo sapien
ttccaacagtttttgggatggcagt

SEQ ID NO: 4316451 - DNA, 25 bp, Homo sapien
cttccaacagtttttgggatggcag

SEQ ID NO: 4316452 - DNA, 25 bp, Homo sapien
ccttccaacagtttttgggatggca

SEQ ID NO: 4316453 - DNA, 25 bp, Homo sapien
gatagatccttatagcttgacccag

SEQ ID NO: 4316454 - DNA, 25 bp, Homo sapien
gggtcacagtaatacactatgctat

SEQ ID NO: 4316455 - DNA, 25 bp, Homo sapien
tatcaaactatgcttttgtagccat

SEQ ID NO: 4316456 - DNA, 25 bp, Homo sapien
aatttttagcttccataaatgagtg

SEQ ID NO: 4316457 - DNA, 25 bp, Homo sapien
tcagaatgaatggtaccagcttgtc

SEQ ID NO: 4316458 - DNA, 25 bp, Homo sapien
ttttctggattatttgcgcagaggt

SEQ ID NO: 4316459 - DNA, 25 bp, Homo sapien
attatttgcgcagaggtgtttctag

SEQ ID NO: 4316460 - DNA, 25 bp, Homo sapien
cagaatgaatggtaccagcttgtcc

SEQ ID NO: 4316461 - DNA, 25 bp, Homo sapien
catgggtcagccttgtttatactga

SEQ ID NO: 4316462 - DNA, 25 bp, Homo sapien
gggtgatgcaagcaagttcattgcc

SEQ ID NO: 4316463 - DNA, 25 bp, Homo sapien
gggctccactcttgttgactcatag

SEQ ID NO: 4316464 - DNA, 25 bp, Homo sapien
cattgcagtggtatccgtattaagg

SEQ ID NO: 4316465 - DNA, 25 bp, Homo sapien
cccagggtaggtctaggaatgccat

SEQ ID NO: 4316466 - DNA, 25 bp, Homo sapien
ggtggcacccacattgcaagcaatg

SEQ ID NO: 4316467 - DNA, 25 bp, Homo sapien
tgctgaagctatggcctggcactag

SEQ ID NO: 4316468 - DNA, 25 bp, Homo sapien
aagtggtgcatcctgccaggcctgg

SEQ ID NO: 4316469 - DNA, 25 bp, Homo sapien
tcttttaggtgtactgcaatttctc

SEQ ID NO: 4316470 - DNA, 25 bp, Homo sapien
gtagctccctagtcaaaaacctgca

SEQ ID NO: 4316471 - DNA, 25 bp, Homo sapien
cacactggtacatgagaacttttac

SEQ ID NO: 4316472 - DNA, 25 bp, Homo sapien
gtccatttcccaagtctaggcttaa

SEQ ID NO: 4316473 - DNA, 25 bp, Homo sapien
tttggacattgctggcaccctgaga

SEQ ID NO: 4316474 - DNA, 25 bp, Homo sapien
ggagccaccctgacacataggactt

SEQ ID NO: 4316475 - DNA, 25 bp, Homo sapien
gctcaggtggcagatgctaatcatt

SEQ ID NO: 4316476 - DNA, 25 bp, Homo sapien
ttctttattgtagctggagccaccc

SEQ ID NO: 4316477 - DNA, 25 bp, Homo sapien
tagagtaaaactacaatcgtctccc

SEQ ID NO: 4316478 - DNA, 25 bp, Homo sapien
gcagggctccatagtgaaaccttca

SEQ ID NO: 4316479 - DNA, 25 bp, Homo sapien
aactgagtcgagcaaagatttatcc

SEQ ID NO: 4316480 - DNA, 25 bp, Homo sapien
cctttgatgtgaaccacgtctgcac

SEQ ID NO: 4316481 - DNA, 25 bp, Homo sapien
agtcagtgtagctcttgcttggatg

SEQ ID NO: 4316482 - DNA, 25 bp, Homo sapien
gtagctcttgcttggatggaagttg

SEQ ID NO: 4316483 - DNA, 25 bp, Homo sapien
aaaagcaatgatcttattgccttca

SEQ ID NO: 4316484 - DNA, 25 bp, Homo sapien
tcagtgtagctcttgcttggatgga

SEQ ID NO: 4316485 - DNA, 25 bp, Homo sapien
taggaacttgtagcgaagaaggtcg

SEQ ID NO: 4316486 - DNA, 25 bp, Homo sapien
ggagctgcaagccaaccatatcttt

SEQ ID NO: 4316487 - DNA, 25 bp, Homo sapien
gaaactgccgcctggcataatggta

SEQ ID NO: 4316488 - DNA, 25 bp, Homo sapien
gaaggtcgtcgtcagttaaatgaaa

SEQ ID NO: 4316489 - DNA, 25 bp, Homo sapien
gtccagcttcagtttggctgctcat

SEQ ID NO: 4316490 - DNA, 25 bp, Homo sapien
ccttgtgattcaccctcctcagcct

SEQ ID NO: 4316491 - DNA, 25 bp, Homo sapien
gtgtccaccaccatgccgagctaat

SEQ ID NO: 4316492 - DNA, 25 bp, Homo sapien
ctgaccttgtgattcaccctcctca

SEQ ID NO: 4316493 - DNA, 25 bp, Homo sapien
gaccttgtgattcaccctcctcagc

SEQ ID NO: 4316494 - DNA, 25 bp, Homo sapien
gatgcttctattgctccaggttcct

SEQ ID NO: 4316495 - DNA, 25 bp, Homo sapien
tgccaacagctagttagccttgtct

SEQ ID NO: 4316496 - DNA, 25 bp, Homo sapien
tgcttccctgctatcagctcttgct

SEQ ID NO: 4316497 - DNA, 25 bp, Homo sapien
tgcctttggatgatgcttctattgc

SEQ ID NO: 4316498 - DNA, 25 bp, Homo sapien
gcacagtccaggtcaatctgtctct

SEQ ID NO: 4316499 - DNA, 25 bp, Homo sapien
aggacattctctcgcctggcttcca

SEQ ID NO: 4316500 - DNA, 25 bp, Homo sapien
acagtccaggtcaatctgtctctct

SEQ ID NO: 4316501 - DNA, 25 bp, Homo sapien
gggctgaggacattctctcgcctgg

SEQ ID NO: 4316502 - DNA, 25 bp, Homo sapien
acttcctgtgtatcaggaaatgaaa

SEQ ID NO: 4316503 - DNA, 25 bp, Homo sapien
aaatgaaattggagactggtgtaat

SEQ ID NO: 4316504 - DNA, 25 bp, Homo sapien
tgtaattgtaacttagtactcaaga

SEQ ID NO: 4316505 - DNA, 25 bp, Homo sapien
ttacttcctgtgtatcaggaaatga

SEQ ID NO: 4316506 - DNA, 25 bp, Homo sapien
ccaagcccatgcgtaatgagtcgaa

SEQ ID NO: 4316507 - DNA, 25 bp, Homo sapien
caaaatgccagcgacttatccccaa

SEQ ID NO: 4316508 - DNA, 25 bp, Homo sapien
gctgtattccacgatcaataactgg

SEQ ID NO: 4316509 - DNA, 25 bp, Homo sapien
taactggagtaaaaggagtcaggac

SEQ ID NO: 4316510 - DNA, 25 bp, Homo sapien
ccagtcttcatctttaaactcttta

SEQ ID NO: 4316511 - DNA, 25 bp, Homo sapien
ttgtgagcgtgtatactatatcgcc

SEQ ID NO: 4316512 - DNA, 25 bp, Homo sapien
caaggtagcgcctgtttgtgagcgt

SEQ ID NO: 4316513 - DNA, 25 bp, Homo sapien
ctatatcgcccatgttccagtcttc

SEQ ID NO: 4316514 - DNA, 25 bp, Homo sapien
ccatggctagtcgatagtcaaaacc

SEQ ID NO: 4316515 - DNA, 25 bp, Homo sapien
tctggaattgccatggctagtcgat

SEQ ID NO: 4316516 - DNA, 25 bp, Homo sapien
gctagtcgatagtcaaaaccacccc

SEQ ID NO: 4316517 - DNA, 25 bp, Homo sapien
ctgaatccacttatctggaattgcc

SEQ ID NO: 4316518 - DNA, 25 bp, Homo sapien
gcacagagctggcattcctgataca

SEQ ID NO: 4316519 - DNA, 25 bp, Homo sapien
acagagctggcattcctgatacatc

SEQ ID NO: 4316520 - DNA, 25 bp, Homo sapien
ctgggaaattggagagcacagagct

SEQ ID NO: 4316521 - DNA, 25 bp, Homo sapien
agagcacagagctggcattcctgat

SEQ ID NO: 4316522 - DNA, 25 bp, Homo sapien
catatcttatgagacagtccgctcc

SEQ ID NO: 4316523 - DNA, 25 bp, Homo sapien
tactgcttgcctagaccatatccaa

SEQ ID NO: 4316524 - DNA, 25 bp, Homo sapien
tgttgttcaccgatataccctaaga

SEQ ID NO: 4316525 - DNA, 25 bp, Homo sapien
tccctgttatagtgtaagatccatg

SEQ ID NO: 4316526 - DNA, 25 bp, Homo sapien
catgaggtaagtcaaggcatcttca

SEQ ID NO: 4316527 - DNA, 25 bp, Homo sapien
cagcgtgtgaaccaaatgatttgcc

SEQ ID NO: 4316528 - DNA, 25 bp, Homo sapien
tacttgtagtccgaaatattcactg

SEQ ID NO: 4316529 - DNA, 25 bp, Homo sapien
tatagaatcgggacacagcgtgtga

SEQ ID NO: 4316530 - DNA, 25 bp, Homo sapien
taagcatcagcaaatatactgactt

SEQ ID NO: 4316531 - DNA, 25 bp, Homo sapien
gtgaaatcatactaaagggaattct

SEQ ID NO: 4316532 - DNA, 25 bp, Homo sapien
tacatgtcaacattcagagttcaga

SEQ ID NO: 4316533 - DNA, 25 bp, Homo sapien
tagtttgtattagatccctctgagg

SEQ ID NO: 4316534 - DNA, 25 bp, Homo sapien
caaagcgatattcttccaaccacca

SEQ ID NO: 4316535 - DNA, 25 bp, Homo sapien
aaatccatcaaagcgatattcttcc

SEQ ID NO: 4316536 - DNA, 25 bp, Homo sapien
ccatcaaaacgaaatccatcaaagc

SEQ ID NO: 4316537 - DNA, 25 bp, Homo sapien
gcatggacgtaacaccatcaaaacg

SEQ ID NO: 4316538 - DNA, 25 bp, Homo sapien
cagaaggaatcttaaaatttcccag

SEQ ID NO: 4316539 - DNA, 25 bp, Homo sapien
cttatgtttgacagaaggaatctta

SEQ ID NO: 4316540 - DNA, 25 bp, Homo sapien
atgtttgacagaaggaatcttaaaa

SEQ ID NO: 4316541 - DNA, 25 bp, Homo sapien
tatgtttgacagaaggaatcttaaa

SEQ ID NO: 4316542 - DNA, 25 bp, Homo sapien
aatgtcatccattatgcaattggta

SEQ ID NO: 4316543 - DNA, 25 bp, Homo sapien
atcgttttatttgaccttagtcaag

SEQ ID NO: 4316544 - DNA, 25 bp, Homo sapien
tatgcaattggtaacaatttaattc

SEQ ID NO: 4316545 - DNA, 25 bp, Homo sapien
ttaattctgctaactattcgtcttg

SEQ ID NO: 4316546 - DNA, 25 bp, Homo sapien
gactgcaggtggctctacttgaaaa

SEQ ID NO: 4316547 - DNA, 25 bp, Homo sapien
ggtgaccagggtgctttcaagttta

SEQ ID NO: 4316548 - DNA, 25 bp, Homo sapien
ggtactgtcatcacaatggctggca

SEQ ID NO: 4316549 - DNA, 25 bp, Homo sapien
gcttgcggagaacacctgtgactgc

SEQ ID NO: 4316550 - DNA, 25 bp, Homo sapien
tccccaagcagtgcgaacactggtg

SEQ ID NO: 4316551 - DNA, 25 bp, Homo sapien
caaatttgggatgttggcgatcagt

SEQ ID NO: 4316552 - DNA, 25 bp, Homo sapien
ggatcaccacgctcattaggatgaa

SEQ ID NO: 4316553 - DNA, 25 bp, Homo sapien
ttaatgtttcgtcaaatccattcca

SEQ ID NO: 4316554 - DNA, 25 bp, Homo sapien
ccttcctgtctgaactatatggaat

SEQ ID NO: 4316555 - DNA, 25 bp, Homo sapien
tatatggaatcaacacccccaagct

SEQ ID NO: 4316556 - DNA, 25 bp, Homo sapien
aacctgctcccttcacgctactgga

SEQ ID NO: 4316557 - DNA, 25 bp, Homo sapien
tcccttcacgctactggaatctgga

SEQ ID NO: 4316558 - DNA, 25 bp, Homo sapien
tttctctcacggttcagaaatttca

SEQ ID NO: 4316559 - DNA, 25 bp, Homo sapien
ttctctcacggttcagaaatttcat

SEQ ID NO: 4316560 - DNA, 25 bp, Homo sapien
gaatagtgccacatgcttcaaagag

SEQ ID NO: 4316561 - DNA, 25 bp, Homo sapien
gtgaatagtgccacatgcttcaaag

SEQ ID NO: 4316562 - DNA, 25 bp, Homo sapien
tgaatagtgccacatgcttcaaaga

SEQ ID NO: 4316563 - DNA, 25 bp, Homo sapien
aatagtgccacatgcttcaaagaga

SEQ ID NO: 4316564 - DNA, 25 bp, Homo sapien
taataccaggaacaaagtttataca

SEQ ID NO: 4316565 - DNA, 25 bp, Homo sapien
cgaggcagataataccaggaacaaa

SEQ ID NO: 4316566 - DNA, 25 bp, Homo sapien
ttgtggggaataaacgaggcagata

SEQ ID NO: 4316567 - DNA, 25 bp, Homo sapien
gaataaacgaggcagataataccag

SEQ ID NO: 4316568 - DNA, 25 bp, Homo sapien
tcctgtgctacactctgcatcaaca

SEQ ID NO: 4316569 - DNA, 25 bp, Homo sapien
tctgctagactgagtaatctcataa

SEQ ID NO: 4316570 - DNA, 25 bp, Homo sapien
ctgtgctacactctgcatcaacaga

SEQ ID NO: 4316571 - DNA, 25 bp, Homo sapien
agaaacttttctgctagactgagta

SEQ ID NO: 4316572 - DNA, 25 bp, Homo sapien
tctccttaatcaagctgaaataaga

SEQ ID NO: 4316573 - DNA, 25 bp, Homo sapien
taacaaatggtttcaacactaagcc

SEQ ID NO: 4316574 - DNA, 25 bp, Homo sapien
tattacactgtcttatctggcatga

SEQ ID NO: 4316575 - DNA, 25 bp, Homo sapien
ctggcatgagtgattcctgaatggc

SEQ ID NO: 4316576 - DNA, 25 bp, Homo sapien
ccagagtgagtctaggccaggaacc

SEQ ID NO: 4316577 - DNA, 25 bp, Homo sapien
ccacaaatacatgtgctatacaaaa

SEQ ID NO: 4316578 - DNA, 25 bp, Homo sapien
ttaagaacattaagtaccagtgaga

SEQ ID NO: 4316579 - DNA, 25 bp, Homo sapien
caaatacatgtgctatacaaaacaa

SEQ ID NO: 4316580 - DNA, 25 bp, Homo sapien
ataccacaaatacatgtgctataca

SEQ ID NO: 4316581 - DNA, 25 bp, Homo sapien
tgctatcccaaagatcatgagtccc

SEQ ID NO: 4316582 - DNA, 25 bp, Homo sapien
tatgatacccatggaatgagctgtg

SEQ ID NO: 4316583 - DNA, 25 bp, Homo sapien
tagctcttcaggtgttccataacgg

SEQ ID NO: 4316584 - DNA, 25 bp, Homo sapien
tgagtccctctaggtccagaatgaa

SEQ ID NO: 4316585 - DNA, 25 bp, Homo sapien
agaagcttgtgatttggtaaccaaa

SEQ ID NO: 4316586 - DNA, 25 bp, Homo sapien
ggtaaccaaagctggcatagtaagc

SEQ ID NO: 4316587 - DNA, 25 bp, Homo sapien
aagctggcatagtaagcatgctcca

SEQ ID NO: 4316588 - DNA, 25 bp, Homo sapien
tgtgatttggtaaccaaagctggca

SEQ ID NO: 4316589 - DNA, 25 bp, Homo sapien
gattgccatcaactgaatgcagttg

SEQ ID NO: 4316590 - DNA, 25 bp, Homo sapien
atgtttataagaagctacttttcct

SEQ ID NO: 4316591 - DNA, 25 bp, Homo sapien
catactttgcccacggtgaaatacg

SEQ ID NO: 4316592 - DNA, 25 bp, Homo sapien
tcaccttcacgaaccacatactttg

SEQ ID NO: 4316593 - DNA, 25 bp, Homo sapien
tgaaatacgatacaagatctctccg

SEQ ID NO: 4316594 - DNA, 25 bp, Homo sapien
tcatatgagtgttctggatcccagt

SEQ ID NO: 4316595 - DNA, 25 bp, Homo sapien
tcctttaatagctgagttgtcccga

SEQ ID NO: 4316596 - DNA, 25 bp, Homo sapien
tgagttgtcccgagttctggaagtt

SEQ ID NO: 4316597 - DNA, 25 bp, Homo sapien
tctaccaatcagatgagatgatggc

SEQ ID NO: 4316598 - DNA, 25 bp, Homo sapien
gccacagagtatttgccagctgtta

SEQ ID NO: 4316599 - DNA, 25 bp, Homo sapien
ctgaacaaaaaccttacaaagtgag

SEQ ID NO: 4316600 - DNA, 25 bp, Homo sapien
tgatttgtatactccgacgtgcctg

SEQ ID NO: 4316601 - DNA, 25 bp, Homo sapien
gatttgtatactccgacgtgcctgg

SEQ ID NO: 4316602 - DNA, 25 bp, Homo sapien
ttgatttgtatactccgacgtgcct

SEQ ID NO: 4316603 - DNA, 25 bp, Homo sapien
ggaataaggttcacatgagcaaagc

SEQ ID NO: 4316604 - DNA, 25 bp, Homo sapien
ggcagaacctggattgaaggcttaa

SEQ ID NO: 4316605 - DNA, 25 bp, Homo sapien
taatttgacttaacctaggacctca

SEQ ID NO: 4316606 - DNA, 25 bp, Homo sapien
tagtacagatatgtccaaacctgag

SEQ ID NO: 4316607 - DNA, 25 bp, Homo sapien
ttaatttggatccatgaggcacgag

SEQ ID NO: 4316608 - DNA, 25 bp, Homo sapien
tgggtacgaaaatggattccaacca

SEQ ID NO: 4316609 - DNA, 25 bp, Homo sapien
cataatccagttttttgtatgggta

SEQ ID NO: 4316610 - DNA, 25 bp, Homo sapien
ggtgggatatacagctcccattttc

SEQ ID NO: 4316611 - DNA, 25 bp, Homo sapien
ggagcactgtacacaggaagctctt

SEQ ID NO: 4316612 - DNA, 25 bp, Homo sapien
gctcttcctatatggccgatgatga

SEQ ID NO: 4316613 - DNA, 25 bp, Homo sapien
tctgcttgcaacaagggactccaat

SEQ ID NO: 4316614 - DNA, 25 bp, Homo sapien
taaagtccagaggaggataatccat

SEQ ID NO: 4316615 - DNA, 25 bp, Homo sapien
ttaacaactctataatgttgcaatt

SEQ ID NO: 4316616 - DNA, 25 bp, Homo sapien
atgagaaaagattaacaactctata

SEQ ID NO: 4316617 - DNA, 25 bp, Homo sapien
gaatctcgatcttaaatgagaaaag

SEQ ID NO: 4316618 - DNA, 25 bp, Homo sapien
gagatttcaatttgtgattcctcac

SEQ ID NO: 4316619 - DNA, 25 bp, Homo sapien
tctgtaaacctctccacaatgcaaa

SEQ ID NO: 4316620 - DNA, 25 bp, Homo sapien
taccacatttctgtaaacctctcca

SEQ ID NO: 4316621 - DNA, 25 bp, Homo sapien
cctctccacaatgcaaaacgatact

SEQ ID NO: 4316622 - DNA, 25 bp, Homo sapien
agctttgacagatttaccacatttc

SEQ ID NO: 4316623 - DNA, 25 bp, Homo sapien
tgagtgatggaggttacaccccaga

SEQ ID NO: 4316624 - DNA, 25 bp, Homo sapien
gaatgctagcggagctttatgccaa

SEQ ID NO: 4316625 - DNA, 25 bp, Homo sapien
cagccagccaggtgtgaatgctagc

SEQ ID NO: 4316626 - DNA, 25 bp, Homo sapien
tataaggctatacagaggatccaag

SEQ ID NO: 4316627 - DNA, 25 bp, Homo sapien
cgccaaatgattcatagcctctgga

SEQ ID NO: 4316628 - DNA, 25 bp, Homo sapien
cagcacatctgtggacgccaaatga

SEQ ID NO: 4316629 - DNA, 25 bp, Homo sapien
gggcccattctttgcagtataaacc

SEQ ID NO: 4316630 - DNA, 25 bp, Homo sapien
tcttcaaaatttggctaaactgctt

SEQ ID NO: 4316631 - DNA, 25 bp, Homo sapien
ttaagagaatcaggggtagctgata

SEQ ID NO: 4316632 - DNA, 25 bp, Homo sapien
tttaagagaatcaggggtagctgat

SEQ ID NO: 4316633 - DNA, 25 bp, Homo sapien
caggggtagctgatattagctttat

SEQ ID NO: 4316634 - DNA, 25 bp, Homo sapien
agaatcaggggtagctgatattagc

SEQ ID NO: 4316635 - DNA, 25 bp, Homo sapien
aaagctctccaactcagtctttaaa

SEQ ID NO: 4316636 - DNA, 25 bp, Homo sapien
gcatgtgtctcacagaaactttctt

SEQ ID NO: 4316637 - DNA, 25 bp, Homo sapien
ttaaaaagactgcatgtgtctcaca

SEQ ID NO: 4316638 - DNA, 25 bp, Homo sapien
gactgcatgtgtctcacagaaactt

SEQ ID NO: 4316639 - DNA, 25 bp, Homo sapien
acaagatccttcttgtaagatgttc

SEQ ID NO: 4316640 - DNA, 25 bp, Homo sapien
aaacaagatccttcttgtaagatgt

SEQ ID NO: 4316641 - DNA, 25 bp, Homo sapien
gaaacaagatccttcttgtaagatg

SEQ ID NO: 4316642 - DNA, 25 bp, Homo sapien
gtgaaacaagatccttcttgtaaga

SEQ ID NO: 4316643 - DNA, 25 bp, Homo sapien
tgtgcaatgggaaacaatgtccaac

SEQ ID NO: 4316644 - DNA, 25 bp, Homo sapien
caatgggaaacaatgtccaactcat

SEQ ID NO: 4316645 - DNA, 25 bp, Homo sapien
tgcaatgggaaacaatgtccaactc

SEQ ID NO: 4316646 - DNA, 25 bp, Homo sapien
ctgtgcaatgggaaacaatgtccaa

SEQ ID NO: 4316647 - DNA, 25 bp, Homo sapien
tgtcatcaaatcaccaaatgcatct

SEQ ID NO: 4316648 - DNA, 25 bp, Homo sapien
gaaatgaaactgagcaaaggtgaca

SEQ ID NO: 4316649 - DNA, 25 bp, Homo sapien
taaacgattaagcacagatattggc

SEQ ID NO: 4316650 - DNA, 25 bp, Homo sapien
tcttagacaagagtgagcaatgaaa

SEQ ID NO: 4316651 - DNA, 25 bp, Homo sapien
gagaccgcctgttccaggagtgaaa

SEQ ID NO: 4316652 - DNA, 25 bp, Homo sapien
gatgtgatgacccagtggagaccgc

SEQ ID NO: 4316653 - DNA, 25 bp, Homo sapien
caaactttgaccattacgggacaga

SEQ ID NO: 4316654 - DNA, 25 bp, Homo sapien
agaattcaatgcatcagctcaggtg

SEQ ID NO: 4316655 - DNA, 25 bp, Homo sapien
aagggcaatgctgtaactgttcaac

SEQ ID NO: 4316656 - DNA, 25 bp, Homo sapien
tggtcaactaacttgctgagaagca

SEQ ID NO: 4316657 - DNA, 25 bp, Homo sapien
taggtcctctgcaaggtggaccaca

SEQ ID NO: 4316658 - DNA, 25 bp, Homo sapien
gacagacagaagctttaggtcctct

SEQ ID NO: 4316659 - DNA, 25 bp, Homo sapien
gagccatggatgttagccttgtgaa

SEQ ID NO: 4316660 - DNA, 25 bp, Homo sapien
gaatcagttatcactttgacaatgg

SEQ ID NO: 4316661 - DNA, 25 bp, Homo sapien
ttaaatatagccagagagccatgga

SEQ ID NO: 4316662 - DNA, 25 bp, Homo sapien
aaagatctatcaaacactctgacag

SEQ ID NO: 4316663 - DNA, 25 bp, Homo sapien
cttcataaagaaccccgtgtagcca

SEQ ID NO: 4316664 - DNA, 25 bp, Homo sapien
aacacagccgaagactgagatcctg

SEQ ID NO: 4316665 - DNA, 25 bp, Homo sapien
gatcctgtaggaatgaaactcttaa

SEQ ID NO: 4316666 - DNA, 25 bp, Homo sapien
tacggaggcagctgtgattacaaac

SEQ ID NO: 4316667 - DNA, 25 bp, Homo sapien
tcccactgctattcctccccccttc

SEQ ID NO: 4316668 - DNA, 25 bp, Homo sapien
ctcccactgctattcctcccccctt

SEQ ID NO: 4316669 - DNA, 25 bp, Homo sapien
tctcaagagcactgggacctaggaa

SEQ ID NO: 4316670 - DNA, 25 bp, Homo sapien
gaagacaacatattgcctggcaaat

SEQ ID NO: 4316671 - DNA, 25 bp, Homo sapien
caaatattgagtgagttaacgcctg

SEQ ID NO: 4316672 - DNA, 25 bp, Homo sapien
gtcagcctacccagcagtgatttta

SEQ ID NO: 4316673 - DNA, 25 bp, Homo sapien
tcattatgagtatgaggttaactat

SEQ ID NO: 4316674 - DNA, 25 bp, Homo sapien
aaaacaacattccactggaagaatg

SEQ ID NO: 4316675 - DNA, 25 bp, Homo sapien
gaagaatgtgactgattgctcatga

SEQ ID NO: 4316676 - DNA, 25 bp, Homo sapien
tcagtgagtcagcacgtactaaaca

SEQ ID NO: 4316677 - DNA, 25 bp, Homo sapien
ctcctccccggtccaagcgattctt

SEQ ID NO: 4316678 - DNA, 25 bp, Homo sapien
ctccccggtccaagcgattcttctt

SEQ ID NO: 4316679 - DNA, 25 bp, Homo sapien
cggtccaagcgattcttcttcctca

SEQ ID NO: 4316680 - DNA, 25 bp, Homo sapien
cccggtccaagcgattcttcttcct

SEQ ID NO: 4316681 - DNA, 25 bp, Homo sapien
gccactgaaagccttgatgatccag

SEQ ID NO: 4316682 - DNA, 25 bp, Homo sapien
gatgtgattttagaggactacagca

SEQ ID NO: 4316683 - DNA, 25 bp, Homo sapien
cctgggaagttgtgatggatgagac

SEQ ID NO: 4316684 - DNA, 25 bp, Homo sapien
tttagaggactacagcatgatctca

SEQ ID NO: 4316685 - DNA, 25 bp, Homo sapien
tgtcaaggtaccgggttcctgttgc

SEQ ID NO: 4316686 - DNA, 25 bp, Homo sapien
tgttcatctaccctagtaatccaga

SEQ ID NO: 4316687 - DNA, 25 bp, Homo sapien
tctagtaactactcctgttccctgt

SEQ ID NO: 4316688 - DNA, 25 bp, Homo sapien
tcacatgaaacctctagtaactact

SEQ ID NO: 4316689 - DNA, 25 bp, Homo sapien
tccaggtgaattgaccatagactca

SEQ ID NO: 4316690 - DNA, 25 bp, Homo sapien
ttcacatcccttacaatccctagag

SEQ ID NO: 4316691 - DNA, 25 bp, Homo sapien
gacgattatgcactaagtttctctg

SEQ ID NO: 4316692 - DNA, 25 bp, Homo sapien
caaatccaaccttaaacctatgacg

SEQ ID NO: 4316693 - DNA, 25 bp, Homo sapien
gaggcctcattcactactatataca

SEQ ID NO: 4316694 - DNA, 25 bp, Homo sapien
tctggggaataagtgttggagccac

SEQ ID NO: 4316695 - DNA, 25 bp, Homo sapien
cagcagcactctggggaataagtgt

SEQ ID NO: 4316696 - DNA, 25 bp, Homo sapien
gaataagtgttggagccacagcacg

SEQ ID NO: 4316697 - DNA, 25 bp, Homo sapien
cactctggggaataagtgttggagc

SEQ ID NO: 4316698 - DNA, 25 bp, Homo sapien
gtacgggtcgatctccaggagtctg

SEQ ID NO: 4316699 - DNA, 25 bp, Homo sapien
gagtctggccagttcgggcacgtca

SEQ ID NO: 4316700 - DNA, 25 bp, Homo sapien
ccagttcgggcacgtcagccagggc

SEQ ID NO: 4316701 - DNA, 25 bp, Homo sapien
agtccacggcgtagggcttcaagta

SEQ ID NO: 4316702 - DNA, 25 bp, Homo sapien
gcgtgtcgaggcaagccgaggcgag

SEQ ID NO: 4316703 - DNA, 25 bp, Homo sapien
atagccgggacggaaggcctcctgc

SEQ ID NO: 4316704 - DNA, 25 bp, Homo sapien
ctgagcgggcgctggagctctagct

SEQ ID NO: 4316705 - DNA, 25 bp, Homo sapien
tccaagtagccgaggcccgagaggt

SEQ ID NO: 4316706 - DNA, 25 bp, Homo sapien
tgaacgactttaagacgtgccttgt

SEQ ID NO: 4316707 - DNA, 25 bp, Homo sapien
agtgaaggacttgaacgactttaag

SEQ ID NO: 4316708 - DNA, 25 bp, Homo sapien
catagacttgaaagataagtggata

SEQ ID NO: 4316709 - DNA, 25 bp, Homo sapien
tatgaagacagacctcagtgtgaaa

SEQ ID NO: 4316710 - DNA, 25 bp, Homo sapien
cccacgtactgtggataaatgataa

SEQ ID NO: 4316711 - DNA, 25 bp, Homo sapien
atttattgaagtcccatgtgccggc

SEQ ID NO: 4316712 - DNA, 25 bp, Homo sapien
gataagacaagtcccagttgtcata

SEQ ID NO: 4316713 - DNA, 25 bp, Homo sapien
ttcaccattgagcacatatttattg

SEQ ID NO: 4316714 - DNA, 25 bp, Homo sapien
tgtccacaggtttggttctttctgg

SEQ ID NO: 4316715 - DNA, 25 bp, Homo sapien
aaaaatcaaggtgtccacaggtttg

SEQ ID NO: 4316716 - DNA, 25 bp, Homo sapien
ctagttctaggggctaaaaatcaag

SEQ ID NO: 4316717 - DNA, 25 bp, Homo sapien
tcaaggtgtccacaggtttggttct

SEQ ID NO: 4316718 - DNA, 25 bp, Homo sapien
taaatgcctcgaggcaaacagcaca

SEQ ID NO: 4316719 - DNA, 25 bp, Homo sapien
gagtgtctatgatccaggtgctttt

SEQ ID NO: 4316720 - DNA, 25 bp, Homo sapien
tcattttgtgagaagtcatcgacca

SEQ ID NO: 4316721 - DNA, 25 bp, Homo sapien
tacctctaatgaccctgctacagtt

SEQ ID NO: 4316722 - DNA, 25 bp, Homo sapien
tcatgagcttattcctcaaagtgtg

SEQ ID NO: 4316723 - DNA, 25 bp, Homo sapien
tataaactggcataaattctggcta

SEQ ID NO: 4316724 - DNA, 25 bp, Homo sapien
tggtattatctccttcttactaggg

SEQ ID NO: 4316725 - DNA, 25 bp, Homo sapien
cttgttctagaattgcacacccttt

SEQ ID NO: 4316726 - DNA, 25 bp, Homo sapien
tcccgtgtattgacagaactgcaga

SEQ ID NO: 4316727 - DNA, 25 bp, Homo sapien
tttctggcaggatctggatagacag

SEQ ID NO: 4316728 - DNA, 25 bp, Homo sapien
agaagctttcccgtgtattgacaga

SEQ ID NO: 4316729 - DNA, 25 bp, Homo sapien
gatctggatagacagaagctttccc

SEQ ID NO: 4316730 - DNA, 25 bp, Homo sapien
ccctcaaggattgggcagtacgtac

SEQ ID NO: 4316731 - DNA, 25 bp, Homo sapien
gtttatacctgttgcttgggagtca

SEQ ID NO: 4316732 - DNA, 25 bp, Homo sapien
ttatacctgttgcttgggagtcagt

SEQ ID NO: 4316733 - DNA, 25 bp, Homo sapien
tgggcagtacgtacagttattaacc

SEQ ID NO: 4316734 - DNA, 25 bp, Homo sapien
gaataccagatccttgatgttgatg

SEQ ID NO: 4316735 - DNA, 25 bp, Homo sapien
gaggtatcggccaccacttaaggta

SEQ ID NO: 4316736 - DNA, 25 bp, Homo sapien
atgttgatggtgaggtatcggccac

SEQ ID NO: 4316737 - DNA, 25 bp, Homo sapien
agtctgaataccagatccttgatgt

SEQ ID NO: 4316738 - DNA, 25 bp, Homo sapien
tcttgactcatttttgtggcaggaa

SEQ ID NO: 4316739 - DNA, 25 bp, Homo sapien
gaacactgcgtctactctttgttgg

SEQ ID NO: 4316740 - DNA, 25 bp, Homo sapien
gctaaactggtcagagtcccaaaag

SEQ ID NO: 4316741 - DNA, 25 bp, Homo sapien
gagttctgaactctttgccttgtga

SEQ ID NO: 4316742 - DNA, 25 bp, Homo sapien
tccagatccaggttctgtattacaa

SEQ ID NO: 4316743 - DNA, 25 bp, Homo sapien
taagagcaaaagttgcctttagcat

SEQ ID NO: 4316744 - DNA, 25 bp, Homo sapien
ctgatataagagcaaaagttgcctt

SEQ ID NO: 4316745 - DNA, 25 bp, Homo sapien
tcttccagatccaggttctgtatta

SEQ ID NO: 4316746 - DNA, 25 bp, Homo sapien
gacattatccatcagttctattttg

SEQ ID NO: 4316747 - DNA, 25 bp, Homo sapien
gttgtatgagttatcatctgcctga

SEQ ID NO: 4316748 - DNA, 25 bp, Homo sapien
aagctccagatggttgatggtcttc

SEQ ID NO: 4316749 - DNA, 25 bp, Homo sapien
tacttcatttgtcctagaagctcca

SEQ ID NO: 4316750 - DNA, 25 bp, Homo sapien
taactgtaatgttgtgcttggcagg

SEQ ID NO: 4316751 - DNA, 25 bp, Homo sapien
tggctttgactagtaaaatttcatg

SEQ ID NO: 4316752 - DNA, 25 bp, Homo sapien
atttcatgaattgtcgtgactttac

SEQ ID NO: 4316753 - DNA, 25 bp, Homo sapien
gcttggcaggtaccattaggaagta

SEQ ID NO: 4316754 - DNA, 25 bp, Homo sapien
ctttcttaagtcagagtaaaactgc

SEQ ID NO: 4316755 - DNA, 25 bp, Homo sapien
atctgtcatcctaagagagtctgta

SEQ ID NO: 4316756 - DNA, 25 bp, Homo sapien
gattcctagttggtttggaagaaga

SEQ ID NO: 4316757 - DNA, 25 bp, Homo sapien
catctgcatattgattcctagttgg

SEQ ID NO: 4316758 - DNA, 25 bp, Homo sapien
tgagaaatggctccggaatttaggg

SEQ ID NO: 4316759 - DNA, 25 bp, Homo sapien
catcctcctcaacctgaaacttaga

SEQ ID NO: 4316760 - DNA, 25 bp, Homo sapien
ggaactgacctaatgtctgacacat

SEQ ID NO: 4316761 - DNA, 25 bp, Homo sapien
cctcctcaacctgaaacttagaaag

SEQ ID NO: 4316762 - DNA, 25 bp, Homo sapien
ttcttcaggggaaggccatgacttc

SEQ ID NO: 4316763 - DNA, 25 bp, Homo sapien
attcttcaggggaaggccatgactt

SEQ ID NO: 4316764 - DNA, 25 bp, Homo sapien
tcttcaggggaaggccatgacttct

SEQ ID NO: 4316765 - DNA, 25 bp, Homo sapien
aaatctgttaagctccctttgctct

SEQ ID NO: 4316766 - DNA, 25 bp, Homo sapien
tacaaggtttatctgaccctggctg

SEQ ID NO: 4316767 - DNA, 25 bp, Homo sapien
cacatgggctggtacaaggtttatc

SEQ ID NO: 4316768 - DNA, 25 bp, Homo sapien
atctgttaagctccctttgctctcg

SEQ ID NO: 4316769 - DNA, 25 bp, Homo sapien
tgggcttttgtccctttccctatga

SEQ ID NO: 4316770 - DNA, 25 bp, Homo sapien
gataaaattatgtttgccactgacg

SEQ ID NO: 4316771 - DNA, 25 bp, Homo sapien
aaaattatgtttgccactgacgtcc

SEQ ID NO: 4316772 - DNA, 25 bp, Homo sapien
ggcttttgtccctttccctatgata

SEQ ID NO: 4316773 - DNA, 25 bp, Homo sapien
catgggatttgagtgttgctaaggc

SEQ ID NO: 4316774 - DNA, 25 bp, Homo sapien
ccaaatcagggtaaacagtttcaca

SEQ ID NO: 4316775 - DNA, 25 bp, Homo sapien
gcaccccagttagggttgtgcacct

SEQ ID NO: 4316776 - DNA, 25 bp, Homo sapien
tgtgcacctgcagatctgtgtgcca

SEQ ID NO: 4316777 - DNA, 25 bp, Homo sapien
cccagaggcagcagattcactggct

SEQ ID NO: 4316778 - DNA, 25 bp, Homo sapien
actggctctatttcctctaacctcc

SEQ ID NO: 4316779 - DNA, 25 bp, Homo sapien
gcttcacccctagtcttataacctc

SEQ ID NO: 4316780 - DNA, 25 bp, Homo sapien
tatttcctctaacctcctttcctga

SEQ ID NO: 4316781 - DNA, 25 bp, Homo sapien
actgcttttgcaattgactcgtaga

SEQ ID NO: 4316782 - DNA, 25 bp, Homo sapien
atagtcgagtaagcgggaaatgagc

SEQ ID NO: 4316783 - DNA, 25 bp, Homo sapien
gaatatcttgatatagtcgagtaag

SEQ ID NO: 4316784 - DNA, 25 bp, Homo sapien
ttgcaattgactcgtagatatgatc

SEQ ID NO: 4316785 - DNA, 25 bp, Homo sapien
tgaacatcattataaccttcgggct

SEQ ID NO: 4316786 - DNA, 25 bp, Homo sapien
caatccacagttgggtagtgtaaaa

SEQ ID NO: 4316787 - DNA, 25 bp, Homo sapien
ccttcgggcttctggataatttgaa

SEQ ID NO: 4316788 - DNA, 25 bp, Homo sapien
taaaaggagcctctgacggccgtag

SEQ ID NO: 4316789 - DNA, 25 bp, Homo sapien
tttgagcggcacattatgttttgtg

SEQ ID NO: 4316790 - DNA, 25 bp, Homo sapien
cttttgagcggcacattatgttttg

SEQ ID NO: 4316791 - DNA, 25 bp, Homo sapien
gagcggcacattatgttttgtgata

SEQ ID NO: 4316792 - DNA, 25 bp, Homo sapien
gcggcacattatgttttgtgataca

SEQ ID NO: 4316793 - DNA, 25 bp, Homo sapien
tggtccaaaaagggttccatggcca

SEQ ID NO: 4316794 - DNA, 25 bp, Homo sapien
ggtgatggactatacctgtgattga

SEQ ID NO: 4316795 - DNA, 25 bp, Homo sapien
accccttggctcagtcgtattagat

SEQ ID NO: 4316796 - DNA, 25 bp, Homo sapien
tgacagcctggatcaagtgctcatc

SEQ ID NO: 4316797 - DNA, 25 bp, Homo sapien
ttgcagaggaaacaatgctggaaat

SEQ ID NO: 4316798 - DNA, 25 bp, Homo sapien
cctaaatgtgtagaaggagcagatg

SEQ ID NO: 4316799 - DNA, 25 bp, Homo sapien
aacatctgtgttcctggtatcctaa

SEQ ID NO: 4316800 - DNA, 25 bp, Homo sapien
tgctggaaatggctagaagccaaga

SEQ ID NO: 4316801 - DNA, 25 bp, Homo sapien
tattgtgtgctgtctattatttggg

SEQ ID NO: 4316802 - DNA, 25 bp, Homo sapien
gtttttgctattgtgtgctgtctat

SEQ ID NO: 4316803 - DNA, 25 bp, Homo sapien
ctgaaacagttctagcatcagtttt

SEQ ID NO: 4316804 - DNA, 25 bp, Homo sapien
tttgggtttctgtcaaacagacaag

SEQ ID NO: 4316805 - DNA, 25 bp, Homo sapien
gaacagtaactttggaggccaaatg

SEQ ID NO: 4316806 - DNA, 25 bp, Homo sapien
gagtgcagcacttctgagattctcc

SEQ ID NO: 4316807 - DNA, 25 bp, Homo sapien
caagaggattggtttggccagaaga

SEQ ID NO: 4316808 - DNA, 25 bp, Homo sapien
tgtcaatcgccgtgcttttcttgag

SEQ ID NO: 4316809 - DNA, 25 bp, Homo sapien
tacagtgccataatgcagggaaaat

SEQ ID NO: 4316810 - DNA, 25 bp, Homo sapien
gatcttttcgtacagtgccataatg

SEQ ID NO: 4316811 - DNA, 25 bp, Homo sapien
ttttcgtacagtgccataatgcagg

SEQ ID NO: 4316812 - DNA, 25 bp, Homo sapien
ctcacagatcttttcgtacagtgcc

SEQ ID NO: 4316813 - DNA, 25 bp, Homo sapien
ccgttttctcaacagccctttggat

SEQ ID NO: 4316814 - DNA, 25 bp, Homo sapien
cagccctttggattgaaactcttgc

SEQ ID NO: 4316815 - DNA, 25 bp, Homo sapien
ttgcctggagcattaagaacttggg

SEQ ID NO: 4316816 - DNA, 25 bp, Homo sapien
aaactcttgcctggagcattaagaa

SEQ ID NO: 4316817 - DNA, 25 bp, Homo sapien
tggactagcgcttgcagaaactgag

SEQ ID NO: 4316818 - DNA, 25 bp, Homo sapien
gctttgctcgcaattctcatttgga

SEQ ID NO: 4316819 - DNA, 25 bp, Homo sapien
tgagctgaactttccgcactgttat

SEQ ID NO: 4316820 - DNA, 25 bp, Homo sapien
gcctaaacttgttgagccaatcgga

SEQ ID NO: 4316821 - DNA, 25 bp, Homo sapien
gagtgggcagaaatctgttcatctt

SEQ ID NO: 4316822 - DNA, 25 bp, Homo sapien
aaggaacaaggcacaggtctactaa

SEQ ID NO: 4316823 - DNA, 25 bp, Homo sapien
atcttcacaaacccaaggaacaagg

SEQ ID NO: 4316824 - DNA, 25 bp, Homo sapien
cagaaatctgttcatcttcacaaac

SEQ ID NO: 4316825 - DNA, 25 bp, Homo sapien
cattgtgtttagcacttcccttttc

SEQ ID NO: 4316826 - DNA, 25 bp, Homo sapien
tttaagaagatcatttgatgcaacc

SEQ ID NO: 4316827 - DNA, 25 bp, Homo sapien
gatcatttgatgcaacctctaattt

SEQ ID NO: 4316828 - DNA, 25 bp, Homo sapien
taaaccattgtgtttagcacttccc

SEQ ID NO: 4316829 - DNA, 25 bp, Homo sapien
ctggttttggcaggaagtaagtgac

SEQ ID NO: 4316830 - DNA, 25 bp, Homo sapien
ggttttggcaggaagtaagtgacat

SEQ ID NO: 4316831 - DNA, 25 bp, Homo sapien
tggttttggcaggaagtaagtgaca

SEQ ID NO: 4316832 - DNA, 25 bp, Homo sapien
ttccctctggccgttgtggtccctg

SEQ ID NO: 4316833 - DNA, 25 bp, Homo sapien
tttcttgttgtactctatggaccat

SEQ ID NO: 4316834 - DNA, 25 bp, Homo sapien
gttttcttgttgtactctatggacc

SEQ ID NO: 4316835 - DNA, 25 bp, Homo sapien
tctggccgttgtggtccctgttttc

SEQ ID NO: 4316836 - DNA, 25 bp, Homo sapien
tcagtgcccatatcgtagaaaggtc

SEQ ID NO: 4316837 - DNA, 25 bp, Homo sapien
tcaccatctggcactggattgtaaa

SEQ ID NO: 4316838 - DNA, 25 bp, Homo sapien
catggtttccccattgagtaggcta

SEQ ID NO: 4316839 - DNA, 25 bp, Homo sapien
tcaaaagcggtcttcaacataactc

SEQ ID NO: 4316840 - DNA, 25 bp, Homo sapien
gctcagggcagagtcgtgctcggtc

SEQ ID NO: 4316841 - DNA, 25 bp, Homo sapien
gtgctcggtcccagctgaagtttcc

SEQ ID NO: 4316842 - DNA, 25 bp, Homo sapien
tgaagtttcccaagctaggtgagct

SEQ ID NO: 4316843 - DNA, 25 bp, Homo sapien
gaagtttcccaagctaggtgagctt

SEQ ID NO: 4316844 - DNA, 25 bp, Homo sapien
gaacgccttgttcctggcgtattgt

SEQ ID NO: 4316845 - DNA, 25 bp, Homo sapien
gttcctggcgtattgttacatggca

SEQ ID NO: 4316846 - DNA, 25 bp, Homo sapien
cccgcagtccttggaacgccttgtt

SEQ ID NO: 4316847 - DNA, 25 bp, Homo sapien
tccttggaacgccttgttcctggcg

SEQ ID NO: 4316848 - DNA, 25 bp, Homo sapien
tcttctccaatagtaggagggaaaa

SEQ ID NO: 4316849 - DNA, 25 bp, Homo sapien
gaccctcttctccaatagtaggagg

SEQ ID NO: 4316850 - DNA, 25 bp, Homo sapien
cctcttctccaatagtaggagggaa

SEQ ID NO: 4316851 - DNA, 25 bp, Homo sapien
agaccctcttctccaatagtaggag

SEQ ID NO: 4316852 - DNA, 25 bp, Homo sapien
gagacctgcttcccagaatgctcat

SEQ ID NO: 4316853 - DNA, 25 bp, Homo sapien
tgagaaagtacaattaggtaatacc

SEQ ID NO: 4316854 - DNA, 25 bp, Homo sapien
gtacaattaggtaataccagcatct

SEQ ID NO: 4316855 - DNA, 25 bp, Homo sapien
gaaagtacaattaggtaataccagc

SEQ ID NO: 4316856 - DNA, 25 bp, Homo sapien
cctgagaaagtacaattaggtaata

SEQ ID NO: 4316857 - DNA, 25 bp, Homo sapien
tttcctcatcagttgctccctcact

SEQ ID NO: 4316858 - DNA, 25 bp, Homo sapien
tcctcatcagttgctccctcactcc

SEQ ID NO: 4316859 - DNA, 25 bp, Homo sapien
gcttttcctcatcagttgctccctc

SEQ ID NO: 4316860 - DNA, 25 bp, Homo sapien
tcatcagttgctccctcactccaca

SEQ ID NO: 4316861 - DNA, 25 bp, Homo sapien
cagaaagttcttgcccttgagcagg

SEQ ID NO: 4316862 - DNA, 25 bp, Homo sapien
catcctgatcagtgatgcaaccaga

SEQ ID NO: 4316863 - DNA, 25 bp, Homo sapien
tgcaaccagaaacttgaacactgat

SEQ ID NO: 4316864 - DNA, 25 bp, Homo sapien
gatgggtgtgcctcctgttttagaa

SEQ ID NO: 4316865 - DNA, 25 bp, Homo sapien
ctagcagttgtttaacgtggctgac

SEQ ID NO: 4316866 - DNA, 25 bp, Homo sapien
aatatttgaagcagtcacctagcag

SEQ ID NO: 4316867 - DNA, 25 bp, Homo sapien
gttgtttaacgtggctgactatgcc

SEQ ID NO: 4316868 - DNA, 25 bp, Homo sapien
gcagtcacctagcagttgtttaacg

SEQ ID NO: 4316869 - DNA, 25 bp, Homo sapien
acagcacatgcaatcggagagttcc

SEQ ID NO: 4316870 - DNA, 25 bp, Homo sapien
cacatgcaatcggagagttcctgca

SEQ ID NO: 4316871 - DNA, 25 bp, Homo sapien
agcacatgcaatcggagagttcctg

SEQ ID NO: 4316872 - DNA, 25 bp, Homo sapien
tgacagcacatgcaatcggagagtt

SEQ ID NO: 4316873 - DNA, 25 bp, Homo sapien
tatcatcatcccaaagtgtagccat

SEQ ID NO: 4316874 - DNA, 25 bp, Homo sapien
ttatcatcatcccaaagtgtagcca

SEQ ID NO: 4316875 - DNA, 25 bp, Homo sapien
cttatcatcatcccaaagtgtagcc

SEQ ID NO: 4316876 - DNA, 25 bp, Homo sapien
gaggattttcagtgtgatagttttg

SEQ ID NO: 4316877 - DNA, 25 bp, Homo sapien
ctgtagacgtcagctgtcttgggct

SEQ ID NO: 4316878 - DNA, 25 bp, Homo sapien
ttaacgctgttccttgaagtagtga

SEQ ID NO: 4316879 - DNA, 25 bp, Homo sapien
gctgtcttgggcttcagacaccaga

SEQ ID NO: 4316880 - DNA, 25 bp, Homo sapien
aatgaagatagaggacagctccagg

SEQ ID NO: 4316881 - DNA, 25 bp, Homo sapien
ttctggacagctaaaatgaagatag

SEQ ID NO: 4316882 - DNA, 25 bp, Homo sapien
gatgagaaagcttggatgtcctgtc

SEQ ID NO: 4316883 - DNA, 25 bp, Homo sapien
ggccagcagaaagtaacacaatgac

SEQ ID NO: 4316884 - DNA, 25 bp, Homo sapien
tccattttcgttgcaggagaatgaa

SEQ ID NO: 4316885 - DNA, 25 bp, Homo sapien
gaatgaagtgagtgaaagtagtttc

SEQ ID NO: 4316886 - DNA, 25 bp, Homo sapien
gagaatgaagtgagtgaaagtagtt

SEQ ID NO: 4316887 - DNA, 25 bp, Homo sapien
ttcttttccattttcgttgcaggag

SEQ ID NO: 4316888 - DNA, 25 bp, Homo sapien
caagaagacccctcttgcttatgtg

SEQ ID NO: 4316889 - DNA, 25 bp, Homo sapien
gaagatcttgccgtttttcagtgta

SEQ ID NO: 4316890 - DNA, 25 bp, Homo sapien
gaagacccctcttgcttatgtgtga

SEQ ID NO: 4316891 - DNA, 25 bp, Homo sapien
tgtaattatcctcttgggtacaggg

SEQ ID NO: 4316892 - DNA, 25 bp, Homo sapien
cttgtatttgtagttgaacagttca

SEQ ID NO: 4316893 - DNA, 25 bp, Homo sapien
cttacagctttaaatgaagaaatga

SEQ ID NO: 4316894 - DNA, 25 bp, Homo sapien
ttgcctccatcctcatccaaacttt

SEQ ID NO: 4316895 - DNA, 25 bp, Homo sapien
gttcttttcttgtatttgtagttga

SEQ ID NO: 4316896 - DNA, 25 bp, Homo sapien
ttgggtccagatgccaatgccctgt

SEQ ID NO: 4316897 - DNA, 25 bp, Homo sapien
tcagtaaacttgggtccagatgcca

SEQ ID NO: 4316898 - DNA, 25 bp, Homo sapien
tgggtccagatgccaatgccctgtc

SEQ ID NO: 4316899 - DNA, 25 bp, Homo sapien
tgctgacataaggaggtaattgcct

SEQ ID NO: 4316900 - DNA, 25 bp, Homo sapien
actgttacatggaatccagtagtca

SEQ ID NO: 4316901 - DNA, 25 bp, Homo sapien
cctttggtatggacgttggtgttct

SEQ ID NO: 4316902 - DNA, 25 bp, Homo sapien
ttttttctactgttacatggaatcc

SEQ ID NO: 4316903 - DNA, 25 bp, Homo sapien
tgaacaaaagtttgagtagcgaaag

SEQ ID NO: 4316904 - DNA, 25 bp, Homo sapien
cacccgaggagactgtagctgagag

SEQ ID NO: 4316905 - DNA, 25 bp, Homo sapien
gaaagacacccgaggagactgtagc

SEQ ID NO: 4316906 - DNA, 25 bp, Homo sapien
tttgagtagcgaaagacacccgagg

SEQ ID NO: 4316907 - DNA, 25 bp, Homo sapien
tgaatgaggatattggtgaactcag

SEQ ID NO: 4316908 - DNA, 25 bp, Homo sapien
acagggtgacagcttgaatgaggat

SEQ ID NO: 4316909 - DNA, 25 bp, Homo sapien
tgacagcttgaatgaggatattggt

SEQ ID NO: 4316910 - DNA, 25 bp, Homo sapien
cagcttgaatgaggatattggtgaa

SEQ ID NO: 4316911 - DNA, 25 bp, Homo sapien
gggtgaacctagtttcatccacagc

SEQ ID NO: 4316912 - DNA, 25 bp, Homo sapien
agggtgaacctagtttcatccacag

SEQ ID NO: 4316913 - DNA, 25 bp, Homo sapien
ttaagggtgaacctagtttcatcca

SEQ ID NO: 4316914 - DNA, 25 bp, Homo sapien
taagggtgaacctagtttcatccac

SEQ ID NO: 4316915 - DNA, 25 bp, Homo sapien
agttcagcacacttgaaacctgtta

SEQ ID NO: 4316916 - DNA, 25 bp, Homo sapien
cttgaaacctgttaaggacctctgc

SEQ ID NO: 4316917 - DNA, 25 bp, Homo sapien
ttgaaacctgttaaggacctctgct

SEQ ID NO: 4316918 - DNA, 25 bp, Homo sapien
tcctttgattctctgcctatattct

SEQ ID NO: 4316919 - DNA, 25 bp, Homo sapien
ttgattctctgcctatattctcctc

SEQ ID NO: 4316920 - DNA, 25 bp, Homo sapien
gattctctgcctatattctcctcca

SEQ ID NO: 4316921 - DNA, 25 bp, Homo sapien
tctgcctatattctcctccatctgg

SEQ ID NO: 4316922 - DNA, 25 bp, Homo sapien
ctgcttcctcagttccaggccccat

SEQ ID NO: 4316923 - DNA, 25 bp, Homo sapien
agtccagctgcttcctcagttccag

SEQ ID NO: 4316924 - DNA, 25 bp, Homo sapien
ccagctgcttcctcagttccaggcc

SEQ ID NO: 4316925 - DNA, 25 bp, Homo sapien
agctgcttcctcagttccaggcccc

SEQ ID NO: 4316926 - DNA, 25 bp, Homo sapien
tttcttccttgattgactgcggttc

SEQ ID NO: 4316927 - DNA, 25 bp, Homo sapien
gccacttcgattggctgctgaatca

SEQ ID NO: 4316928 - DNA, 25 bp, Homo sapien
tgattgactgcggttctttcctccc

SEQ ID NO: 4316929 - DNA, 25 bp, Homo sapien
tgtgcccaatttgcctgtttaactt

SEQ ID NO: 4316930 - DNA, 25 bp, Homo sapien
catagaattcctgaagtttgattct

SEQ ID NO: 4316931 - DNA, 25 bp, Homo sapien
atattcactttcatagaattcctga

SEQ ID NO: 4316932 - DNA, 25 bp, Homo sapien
ctttcatagaattcctgaagtttga

SEQ ID NO: 4316933 - DNA, 25 bp, Homo sapien
ttcactttcatagaattcctgaagt

SEQ ID NO: 4316934 - DNA, 25 bp, Homo sapien
acacgaagttctcctgttgtgttct

SEQ ID NO: 4316935 - DNA, 25 bp, Homo sapien
tactacacgaagttctcctgttgtg

SEQ ID NO: 4316936 - DNA, 25 bp, Homo sapien
tgtatactacacgaagttctcctgt

SEQ ID NO: 4316937 - DNA, 25 bp, Homo sapien
tgttttatcaatttggctttgatac

SEQ ID NO: 4316938 - DNA, 25 bp, Homo sapien
aataaaaagaaggtatggtgccagt

SEQ ID NO: 4316939 - DNA, 25 bp, Homo sapien
gccaaagtccctcttggggcaaata

SEQ ID NO: 4316940 - DNA, 25 bp, Homo sapien
ggacatcatcaaggcccaggaatga

SEQ ID NO: 4316941 - DNA, 25 bp, Homo sapien
gccagtagttgaagaggacatcatc

SEQ ID NO: 4316942 - DNA, 25 bp, Homo sapien
aaccttccatcgcttttcagcttgg

SEQ ID NO: 4316943 - DNA, 25 bp, Homo sapien
cttccatcgcttttcagcttggtga

SEQ ID NO: 4316944 - DNA, 25 bp, Homo sapien
aaaccttccatcgcttttcagcttg

SEQ ID NO: 4316945 - DNA, 25 bp, Homo sapien
ccttccatcgcttttcagcttggtg

SEQ ID NO: 4316946 - DNA, 25 bp, Homo sapien
tcgggaccttgcctccgctgtgatg

SEQ ID NO: 4316947 - DNA, 25 bp, Homo sapien
cagatttagagctcgggaccttgcc

SEQ ID NO: 4316948 - DNA, 25 bp, Homo sapien
cagtgtgggccacagatttagagct

SEQ ID NO: 4316949 - DNA, 25 bp, Homo sapien
accttgcctccgctgtgatggcaga

SEQ ID NO: 4316950 - DNA, 25 bp, Homo sapien
gaaaacaactggctcgatgggatct

SEQ ID NO: 4316951 - DNA, 25 bp, Homo sapien
tgtgcaatcatcacaagctgaaact

SEQ ID NO: 4316952 - DNA, 25 bp, Homo sapien
cctgtgatagtttggtaatggaccc

SEQ ID NO: 4316953 - DNA, 25 bp, Homo sapien
tcgatgggatctgtgtcatgtgcaa

SEQ ID NO: 4316954 - DNA, 25 bp, Homo sapien
gtggggacatcctctttgccagcaa

SEQ ID NO: 4316955 - DNA, 25 bp, Homo sapien
ttgccagcaactttcttctcagccc

SEQ ID NO: 4316956 - DNA, 25 bp, Homo sapien
tgctcaaaggacaagtgatctctta

SEQ ID NO: 4316957 - DNA, 25 bp, Homo sapien
tgatctcttagtggggacatcctct

SEQ ID NO: 4316958 - DNA, 25 bp, Homo sapien
agcagaatgacagctggtcgaaggc

SEQ ID NO: 4316959 - DNA, 25 bp, Homo sapien
ccagcttaagcagcagaatgacagc

SEQ ID NO: 4316960 - DNA, 25 bp, Homo sapien
gccagcttaagcagcagaatgacag

SEQ ID NO: 4316961 - DNA, 25 bp, Homo sapien
agcagcagaatgacagctggtcgaa

SEQ ID NO: 4316962 - DNA, 25 bp, Homo sapien
tcttcgtgacaccaggggtcagtcc

SEQ ID NO: 4316963 - DNA, 25 bp, Homo sapien
ttcgtgacaccaggggtcagtccca

SEQ ID NO: 4316964 - DNA, 25 bp, Homo sapien
gcttcttcgtgacaccaggggtcag

SEQ ID NO: 4316965 - DNA, 25 bp, Homo sapien
ctgcttcttcgtgacaccaggggtc

SEQ ID NO: 4316966 - DNA, 25 bp, Homo sapien
catcattcaacttatgtctactgaa

SEQ ID NO: 4316967 - DNA, 25 bp, Homo sapien
tccatcatcattcaacttatgtcta

SEQ ID NO: 4316968 - DNA, 25 bp, Homo sapien
atttttagctattcgacaggcagca

SEQ ID NO: 4316969 - DNA, 25 bp, Homo sapien
ctattcgacaggcagcaaatcttat

SEQ ID NO: 4316970 - DNA, 25 bp, Homo sapien
tgcaggagtgcaatacacacttgct

SEQ ID NO: 4316971 - DNA, 25 bp, Homo sapien
cacacttgctgatggattagctgaa

SEQ ID NO: 4316972 - DNA, 25 bp, Homo sapien
tttatatctgtggttattcccacaa

SEQ ID NO: 4316973 - DNA, 25 bp, Homo sapien
cggtcctatcagagaagtttatatc

SEQ ID NO: 4316974 - DNA, 25 bp, Homo sapien
accttatcgctgagaatatcccaca

SEQ ID NO: 4316975 - DNA, 25 bp, Homo sapien
tgacagggatgatatgtgatggcct

SEQ ID NO: 4316976 - DNA, 25 bp, Homo sapien
cagtagaatgagtgatagtaaccag

SEQ ID NO: 4316977 - DNA, 25 bp, Homo sapien
tccacaataaagatagagcattcag

SEQ ID NO: 4316978 - DNA, 25 bp, Homo sapien
ttagcggcaatagatctccatgctc

SEQ ID NO: 4316979 - DNA, 25 bp, Homo sapien
caatcttagcggcaatagatctcca

SEQ ID NO: 4316980 - DNA, 25 bp, Homo sapien
agagcaatcttagcggcaatagatc

SEQ ID NO: 4316981 - DNA, 25 bp, Homo sapien
tcttagcggcaatagatctccatgc

SEQ ID NO: 4316982 - DNA, 25 bp, Homo sapien
aacatctgttcaattaccatattct

SEQ ID NO: 4316983 - DNA, 25 bp, Homo sapien
gttcaattaccatattcttaacaca

SEQ ID NO: 4316984 - DNA, 25 bp, Homo sapien
tcaattaccatattcttaacacaca

SEQ ID NO: 4316985 - DNA, 25 bp, Homo sapien
tctgttcaattaccatattcttaac

SEQ ID NO: 4316986 - DNA, 25 bp, Homo sapien
tgtggataccagctgagacaaaatg

SEQ ID NO: 4316987 - DNA, 25 bp, Homo sapien
ctataatgtatgctgccctgtggat

SEQ ID NO: 4316988 - DNA, 25 bp, Homo sapien
ccatgtgggtcgtgatgctgtctcc

SEQ ID NO: 4316989 - DNA, 25 bp, Homo sapien
tgcccatgtgggtcgtgatgctgtc

SEQ ID NO: 4316990 - DNA, 25 bp, Homo sapien
ccaaattgtagaacattgcagacag

SEQ ID NO: 4316991 - DNA, 25 bp, Homo sapien
gacaaggtaggcttagacacaaaca

SEQ ID NO: 4316992 - DNA, 25 bp, Homo sapien
ttgcagacagtgacaaggtaggctt

SEQ ID NO: 4316993 - DNA, 25 bp, Homo sapien
acaaacatccgttgacatgtcgttg

SEQ ID NO: 4316994 - DNA, 25 bp, Homo sapien
caacctgctactataccactggaag

SEQ ID NO: 4316995 - DNA, 25 bp, Homo sapien
tcagctgcaacattgctcacaaggt

SEQ ID NO: 4316996 - DNA, 25 bp, Homo sapien
ccatggatgttgtgcttcttagtac

SEQ ID NO: 4316997 - DNA, 25 bp, Homo sapien
tttgcactctggcagtgagatatgc

SEQ ID NO: 4316998 - DNA, 25 bp, Homo sapien
tcttattgggctgtttaagatgatc

SEQ ID NO: 4316999 - DNA, 25 bp, Homo sapien
tgctctggaacttcttattgggctg

SEQ ID NO: 4317000 - DNA, 25 bp, Homo sapien
aaggacgacccacttctgcccaatg

SEQ ID NO: 4317001 - DNA, 25 bp, Homo sapien
caatgccggactcttctgttgggca

SEQ ID NO: 4317002 - DNA, 25 bp, Homo sapien
tcctttgccccacctgagtggtttg

SEQ ID NO: 4317003 - DNA, 25 bp, Homo sapien
ggcggttcccatcacagcatagcct

SEQ ID NO: 4317004 - DNA, 25 bp, Homo sapien
agaaccacgtgtccccgtatctatg

SEQ ID NO: 4317005 - DNA, 25 bp, Homo sapien
ggtttgctggcagcctgtgaacagt

SEQ ID NO: 4317006 - DNA, 25 bp, Homo sapien
gacaaatccgctggcctacgaccat

SEQ ID NO: 4317007 - DNA, 25 bp, Homo sapien
ggacaaatccgctggcctacgacca

SEQ ID NO: 4317008 - DNA, 25 bp, Homo sapien
tgagaggcccgaggacaaatccgct

SEQ ID NO: 4317009 - DNA, 25 bp, Homo sapien
aggacaaatccgctggcctacgacc

SEQ ID NO: 4317010 - DNA, 25 bp, Homo sapien
tgtgcaacagtcttgtcttgaaaag

SEQ ID NO: 4317011 - DNA, 25 bp, Homo sapien
atgggcaataatagatgatgaggtc

SEQ ID NO: 4317012 - DNA, 25 bp, Homo sapien
ctcacagctggagggtgtgtgcttc

SEQ ID NO: 4317013 - DNA, 25 bp, Homo sapien
ttctctaccacaacctcattttctg

SEQ ID NO: 4317014 - DNA, 25 bp, Homo sapien
cactccaggactccggtagggataa

SEQ ID NO: 4317015 - DNA, 25 bp, Homo sapien
tccactccaggactccggtagggat

SEQ ID NO: 4317016 - DNA, 25 bp, Homo sapien
catccactccaggactccggtaggg

SEQ ID NO: 4317017 - DNA, 25 bp, Homo sapien
agaattccatccactccaggactcc

SEQ ID NO: 4317018 - DNA, 25 bp, Homo sapien
caatgtgtgctgcatgacgataacc

SEQ ID NO: 4317019 - DNA, 25 bp, Homo sapien
aggctgctgatagagcaatgtgtgc

SEQ ID NO: 4317020 - DNA, 25 bp, Homo sapien
cacttcctttggacctttagagtga

SEQ ID NO: 4317021 - DNA, 25 bp, Homo sapien
tacagcaccactctttgaaagaaga

SEQ ID NO: 4317022 - DNA, 25 bp, Homo sapien
gataacaatccaagctctgtattgg

SEQ ID NO: 4317023 - DNA, 25 bp, Homo sapien
tcaagtcgttgttacactgataaca

SEQ ID NO: 4317024 - DNA, 25 bp, Homo sapien
caagctctgtattggttatattcta

SEQ ID NO: 4317025 - DNA, 25 bp, Homo sapien
ttggttatattctattcttccatgg

SEQ ID NO: 4317026 - DNA, 25 bp, Homo sapien
gatcgtgatgcatgtttaggcttca

SEQ ID NO: 4317027 - DNA, 25 bp, Homo sapien
agcagcaccagcagatcatctgatg

SEQ ID NO: 4317028 - DNA, 25 bp, Homo sapien
cagatcatctgatgatcgtgatgca

SEQ ID NO: 4317029 - DNA, 25 bp, Homo sapien
tctgatgatcgtgatgcatgtttag

SEQ ID NO: 4317030 - DNA, 25 bp, Homo sapien
tttccgggcccattcttagtcactc

SEQ ID NO: 4317031 - DNA, 25 bp, Homo sapien
cacagctaagcaaaagatggtcagt

SEQ ID NO: 4317032 - DNA, 25 bp, Homo sapien
tgtagccacccaaattgcagctgca

SEQ ID NO: 4317033 - DNA, 25 bp, Homo sapien
agacaagctacctgctctgccgaga

SEQ ID NO: 4317034 - DNA, 25 bp, Homo sapien
tcctctagagtgtgtcctgaatcac

SEQ ID NO: 4317035 - DNA, 25 bp, Homo sapien
gaaggttaaacttgcacccacagtc

SEQ ID NO: 4317036 - DNA, 25 bp, Homo sapien
cctgcacaggtcactggaacttgga

SEQ ID NO: 4317037 - DNA, 25 bp, Homo sapien
tgcacaaaggtgtacccaaatcgtg

SEQ ID NO: 4317038 - DNA, 25 bp, Homo sapien
caaacagaaatgtccagggctccat

SEQ ID NO: 4317039 - DNA, 25 bp, Homo sapien
tgaagcaggatggacgatgatcccg

SEQ ID NO: 4317040 - DNA, 25 bp, Homo sapien
catgtggcagaataggagcatcaac

SEQ ID NO: 4317041 - DNA, 25 bp, Homo sapien
tcccgtaagggtagaggattagcac

SEQ ID NO: 4317042 - DNA, 25 bp, Homo sapien
tcagtctaaaccgtgcaacagtctg

SEQ ID NO: 4317043 - DNA, 25 bp, Homo sapien
cttctaaaattagagcagggattga

SEQ ID NO: 4317044 - DNA, 25 bp, Homo sapien
gcagggattgagtctgatttcttca

SEQ ID NO: 4317045 - DNA, 25 bp, Homo sapien
tctaaaccgtgcaacagtctgcctt

SEQ ID NO: 4317046 - DNA, 25 bp, Homo sapien
ggtccccaatcaaatgccgtatctt

SEQ ID NO: 4317047 - DNA, 25 bp, Homo sapien
ggaaagccatgtattgacattgatt

SEQ ID NO: 4317048 - DNA, 25 bp, Homo sapien
gacattgattttactcggtccccaa

SEQ ID NO: 4317049 - DNA, 25 bp, Homo sapien
cttgacataggattgagttatggtc

SEQ ID NO: 4317050 - DNA, 25 bp, Homo sapien
tccaaagcaacatggcaactgattt

SEQ ID NO: 4317051 - DNA, 25 bp, Homo sapien
cctatccaaagcaacatggcaactg

SEQ ID NO: 4317052 - DNA, 25 bp, Homo sapien
catggcaactgattttacacaaaac

SEQ ID NO: 4317053 - DNA, 25 bp, Homo sapien
agcaacatggcaactgattttacac

SEQ ID NO: 4317054 - DNA, 25 bp, Homo sapien
gaggagaccaagaagcttaactaat

SEQ ID NO: 4317055 - DNA, 25 bp, Homo sapien
caaaggaatagaccgttacataaat

SEQ ID NO: 4317056 - DNA, 25 bp, Homo sapien
aggagaccaagaagcttaactaatt

SEQ ID NO: 4317057 - DNA, 25 bp, Homo sapien
ggagaccaagaagcttaactaattc

SEQ ID NO: 4317058 - DNA, 25 bp, Homo sapien
attgtacttggtagcctttgatctc

SEQ ID NO: 4317059 - DNA, 25 bp, Homo sapien
tagcctttgatctccgatgaaattt

SEQ ID NO: 4317060 - DNA, 25 bp, Homo sapien
tgatctccgatgaaatttatattca

SEQ ID NO: 4317061 - DNA, 25 bp, Homo sapien
ccgatgaaatttatattcatggcag

SEQ ID NO: 4317062 - DNA, 25 bp, Homo sapien
gacagtcacaacgttgttattgttg

SEQ ID NO: 4317063 - DNA, 25 bp, Homo sapien
tggtcgacagtcacaacgttgttat

SEQ ID NO: 4317064 - DNA, 25 bp, Homo sapien
catgtttttggtcgacagtcacaac

SEQ ID NO: 4317065 - DNA, 25 bp, Homo sapien
ttagccatgtttttggtcgacagtc

SEQ ID NO: 4317066 - DNA, 25 bp, Homo sapien
ttttgtttgtccataaactccgcag

SEQ ID NO: 4317067 - DNA, 25 bp, Homo sapien
cattttagggacttcaaggtgagga

SEQ ID NO: 4317068 - DNA, 25 bp, Homo sapien
aaactgcatttaacactgagggtca

SEQ ID NO: 4317069 - DNA, 25 bp, Homo sapien
ttttgataagctgccaaatagcctc

SEQ ID NO: 4317070 - DNA, 25 bp, Homo sapien
tttaggaaacatgatttagcatcca

SEQ ID NO: 4317071 - DNA, 25 bp, Homo sapien
atcctttaggaaacatgatttagca

SEQ ID NO: 4317072 - DNA, 25 bp, Homo sapien
cctttaggaaacatgatttagcatc

SEQ ID NO: 4317073 - DNA, 25 bp, Homo sapien
ctgaaatttctgcatcctttaggaa

SEQ ID NO: 4317074 - DNA, 25 bp, Homo sapien
ttttccccagtacaaccatgatgcc

SEQ ID NO: 4317075 - DNA, 25 bp, Homo sapien
attttccccagtacaaccatgatgc

SEQ ID NO: 4317076 - DNA, 25 bp, Homo sapien
tttccccagtacaaccatgatgccc

SEQ ID NO: 4317077 - DNA, 25 bp, Homo sapien
tacagcgatcaagtaaatttagatc

SEQ ID NO: 4317078 - DNA, 25 bp, Homo sapien
gatcaagtaaatttagatccttgag

SEQ ID NO: 4317079 - DNA, 25 bp, Homo sapien
ttatacagcgatcaagtaaatttag

SEQ ID NO: 4317080 - DNA, 25 bp, Homo sapien
tttcttttatacagcgatcaagtaa

SEQ ID NO: 4317081 - DNA, 25 bp, Homo sapien
ataacatttttcttgaagtgttttg

SEQ ID NO: 4317082 - DNA, 25 bp, Homo sapien
acatttttcttgaagtgttttgtct

SEQ ID NO: 4317083 - DNA, 25 bp, Homo sapien
ctaaataacatttttcttgaagtgt

SEQ ID NO: 4317084 - DNA, 25 bp, Homo sapien
gtaatccagtaagcatccctgctac

SEQ ID NO: 4317085 - DNA, 25 bp, Homo sapien
ttgaggatgtatgctgctctgccaa

SEQ ID NO: 4317086 - DNA, 25 bp, Homo sapien
tagttgaggatgtatgctgctctgc

SEQ ID NO: 4317087 - DNA, 25 bp, Homo sapien
tgctctgccaagagtaatccagtaa

SEQ ID NO: 4317088 - DNA, 25 bp, Homo sapien
tttggagaatgtcatcaattttttc

SEQ ID NO: 4317089 - DNA, 25 bp, Homo sapien
ttcttgagactgtctgcgtttctgg

SEQ ID NO: 4317090 - DNA, 25 bp, Homo sapien
atgtagcatctagtaaagtttggag

SEQ ID NO: 4317091 - DNA, 25 bp, Homo sapien
ttctggattgccttatagaaaatat

SEQ ID NO: 4317092 - DNA, 25 bp, Homo sapien
catacagctgtgctaccttttcatt

SEQ ID NO: 4317093 - DNA, 25 bp, Homo sapien
caaaggcagccaacctggtaagagc

SEQ ID NO: 4317094 - DNA, 25 bp, Homo sapien
aaggcagccaacctggtaagagcca

SEQ ID NO: 4317095 - DNA, 25 bp, Homo sapien
gcatggctgaaacctccatccaaat

SEQ ID NO: 4317096 - DNA, 25 bp, Homo sapien
ctgttaaaattatgagctcagaaag

SEQ ID NO: 4317097 - DNA, 25 bp, Homo sapien
tttctccccaactctcaaagtattc

SEQ ID NO: 4317098 - DNA, 25 bp, Homo sapien
ttaaaattatgagctcagaaagagc

SEQ ID NO: 4317099 - DNA, 25 bp, Homo sapien
tcagaaagagctgcaaacacatttt

SEQ ID NO: 4317100 - DNA, 25 bp, Homo sapien
tttctttttcaattatagaaacatg

SEQ ID NO: 4317101 - DNA, 25 bp, Homo sapien
ttaggcacatcgtatgcaactccct

SEQ ID NO: 4317102 - DNA, 25 bp, Homo sapien
ggattaggcacatcgtatgcaactc

SEQ ID NO: 4317103 - DNA, 25 bp, Homo sapien
gattaggcacatcgtatgcaactcc

SEQ ID NO: 4317104 - DNA, 25 bp, Homo sapien
tggattaggcacatcgtatgcaact

SEQ ID NO: 4317105 - DNA, 25 bp, Homo sapien
ccaaacacaggtgttgtcaggcgac

SEQ ID NO: 4317106 - DNA, 25 bp, Homo sapien
cagcagcatcactacccagaaggta

SEQ ID NO: 4317107 - DNA, 25 bp, Homo sapien
gaaggtaagtaaatgccttgcctac

SEQ ID NO: 4317108 - DNA, 25 bp, Homo sapien
gcatcactacccagaaggtaagtaa

SEQ ID NO: 4317109 - DNA, 25 bp, Homo sapien
atcttctgcattcaggacttcattt

SEQ ID NO: 4317110 - DNA, 25 bp, Homo sapien
aattcccatatgcattttctagaaa

SEQ ID NO: 4317111 - DNA, 25 bp, Homo sapien
gataaaactaaatacaggtccataa

SEQ ID NO: 4317112 - DNA, 25 bp, Homo sapien
aaatacaggtccataattcccatat

SEQ ID NO: 4317113 - DNA, 25 bp, Homo sapien
cataattcccatatgcattttctag

SEQ ID NO: 4317114 - DNA, 25 bp, Homo sapien
tcccaaatgctatggcatgcccaag

SEQ ID NO: 4317115 - DNA, 25 bp, Homo sapien
ttttcccaaatgctatggcatgccc

SEQ ID NO: 4317116 - DNA, 25 bp, Homo sapien
atgctatggcatgcccaaggaaagg

SEQ ID NO: 4317117 - DNA, 25 bp, Homo sapien
caaatgctatggcatgcccaaggaa

SEQ ID NO: 4317118 - DNA, 25 bp, Homo sapien
gcagcgagacggaacaagtagacca

SEQ ID NO: 4317119 - DNA, 25 bp, Homo sapien
caggtggccggcagcgagacggaac

SEQ ID NO: 4317120 - DNA, 25 bp, Homo sapien
ccggcagcgagacggaacaagtaga

SEQ ID NO: 4317121 - DNA, 25 bp, Homo sapien
agcgagacggaacaagtagaccagg

SEQ ID NO: 4317122 - DNA, 25 bp, Homo sapien
aagaggttgccgcctgccacctcct

SEQ ID NO: 4317123 - DNA, 25 bp, Homo sapien
agaggttgccgcctgccacctcctc

SEQ ID NO: 4317124 - DNA, 25 bp, Homo sapien
ggacaagaggttgccgcctgccacc

SEQ ID NO: 4317125 - DNA, 25 bp, Homo sapien
acaagaggttgccgcctgccacctc

SEQ ID NO: 4317126 - DNA, 25 bp, Homo sapien
gcctgtagcaagcccagcagcatca

SEQ ID NO: 4317127 - DNA, 25 bp, Homo sapien
cctgtagcaagcccagcagcatcat

SEQ ID NO: 4317128 - DNA, 25 bp, Homo sapien
ccgcctgtagcaagcccagcagcat

SEQ ID NO: 4317129 - DNA, 25 bp, Homo sapien
cgcctgtagcaagcccagcagcatc

SEQ ID NO: 4317130 - DNA, 25 bp, Homo sapien
cactgaaggccgaggtcgccaccga

SEQ ID NO: 4317131 - DNA, 25 bp, Homo sapien
ttcactctgtcggagacactgaagg

SEQ ID NO: 4317132 - DNA, 25 bp, Homo sapien
tctgtcggagacactgaaggccgag

SEQ ID NO: 4317133 - DNA, 25 bp, Homo sapien
gaaggccgaggtcgccaccgatcct

SEQ ID NO: 4317134 - DNA, 25 bp, Homo sapien
agagaagctggcagatggtcgtcca

SEQ ID NO: 4317135 - DNA, 25 bp, Homo sapien
ctaatcgacggagcaagagaagctg

SEQ ID NO: 4317136 - DNA, 25 bp, Homo sapien
gcaagagaagctggcagatggtcgt

SEQ ID NO: 4317137 - DNA, 25 bp, Homo sapien
taatcgacggagcaagagaagctgg

SEQ ID NO: 4317138 - DNA, 25 bp, Homo sapien
ggcctttcacttgaagtacttcttg

SEQ ID NO: 4317139 - DNA, 25 bp, Homo sapien
caatggtcttgtgttcagtatggcc

SEQ ID NO: 4317140 - DNA, 25 bp, Homo sapien
tcttgtttcttagcgatatctatgg

SEQ ID NO: 4317141 - DNA, 25 bp, Homo sapien
tatgggatcaatagtcccttgtgtc

SEQ ID NO: 4317142 - DNA, 25 bp, Homo sapien
tagtgtcaatctttccatcgacatc

SEQ ID NO: 4317143 - DNA, 25 bp, Homo sapien
gacatagtgtcaatctttccatcga

SEQ ID NO: 4317144 - DNA, 25 bp, Homo sapien
catagtgtcaatctttccatcgaca

SEQ ID NO: 4317145 - DNA, 25 bp, Homo sapien
ctgggacatagtgtcaatctttcca

SEQ ID NO: 4317146 - DNA, 25 bp, Homo sapien
ccttttcgaagagtctccgttgtga

SEQ ID NO: 4317147 - DNA, 25 bp, Homo sapien
cgaagagtctccgttgtgatctagc

SEQ ID NO: 4317148 - DNA, 25 bp, Homo sapien
gaatctctgccttttcgaagagtct

SEQ ID NO: 4317149 - DNA, 25 bp, Homo sapien
agtctccgttgtgatctagccagca

SEQ ID NO: 4317150 - DNA, 25 bp, Homo sapien
cttagcttcactgacttgatctccc

SEQ ID NO: 4317151 - DNA, 25 bp, Homo sapien
ttagcttcactgacttgatctccca

SEQ ID NO: 4317152 - DNA, 25 bp, Homo sapien
tagcttcactgacttgatctcccat

SEQ ID NO: 4317153 - DNA, 25 bp, Homo sapien
tctgttacagtagttggaatagtaa

SEQ ID NO: 4317154 - DNA, 25 bp, Homo sapien
tcagaggtaacctgaaaaacgacac

SEQ ID NO: 4317155 - DNA, 25 bp, Homo sapien
acctgttagtgtagaaataacagca

SEQ ID NO: 4317156 - DNA, 25 bp, Homo sapien
ttgaggctctgatgagtcctcagag

SEQ ID NO: 4317157 - DNA, 25 bp, Homo sapien
gcaggatcagcgtgattagggtatc

SEQ ID NO: 4317158 - DNA, 25 bp, Homo sapien
ggcgatcagatgcagcacagctgta

SEQ ID NO: 4317159 - DNA, 25 bp, Homo sapien
tatttgcgctaacatcatatgggaa

SEQ ID NO: 4317160 - DNA, 25 bp, Homo sapien
tatcgtaggccaattctacttggcg

SEQ ID NO: 4317161 - DNA, 25 bp, Homo sapien
acattcgctgaacaatcatgcggaa

SEQ ID NO: 4317162 - DNA, 25 bp, Homo sapien
ttacattcgctgaacaatcatgcgg

SEQ ID NO: 4317163 - DNA, 25 bp, Homo sapien
tcgctgaacaatcatgcggaagaaa

SEQ ID NO: 4317164 - DNA, 25 bp, Homo sapien
gctgaacaatcatgcggaagaaatg

SEQ ID NO: 4317165 - DNA, 25 bp, Homo sapien
tggaaattcccgctggctgcaatgg

SEQ ID NO: 4317166 - DNA, 25 bp, Homo sapien
cgctggctgcaatgggatcaagatc

SEQ ID NO: 4317167 - DNA, 25 bp, Homo sapien
aaatctggaaattcccgctggctgc

SEQ ID NO: 4317168 - DNA, 25 bp, Homo sapien
tgaaatttgacatggcaaatctgga

SEQ ID NO: 4317169 - DNA, 25 bp, Homo sapien
caaacaggctggtaagggcagctct

SEQ ID NO: 4317170 - DNA, 25 bp, Homo sapien
agctctcggtccttcccaagtgatg

SEQ ID NO: 4317171 - DNA, 25 bp, Homo sapien
ctgtcatgtttcttggacaaacagg

SEQ ID NO: 4317172 - DNA, 25 bp, Homo sapien
gaaacaagctcaagatgataagccc

SEQ ID NO: 4317173 - DNA, 25 bp, Homo sapien
gctgcaactagagccatgtggcgca

SEQ ID NO: 4317174 - DNA, 25 bp, Homo sapien
tagaaatcacagtgaactcgtggct

SEQ ID NO: 4317175 - DNA, 25 bp, Homo sapien
tagcatgtacgggatcgcagatcag

SEQ ID NO: 4317176 - DNA, 25 bp, Homo sapien
ggcgcacaggccgttaaatccatgc

SEQ ID NO: 4317177 - DNA, 25 bp, Homo sapien
gaatcttccctaccgccatcagaat

SEQ ID NO: 4317178 - DNA, 25 bp, Homo sapien
aagaatcttccctaccgccatcaga

SEQ ID NO: 4317179 - DNA, 25 bp, Homo sapien
ccgccatcagaattgcttcagctgt

SEQ ID NO: 4317180 - DNA, 25 bp, Homo sapien
aatcttccctaccgccatcagaatt

SEQ ID NO: 4317181 - DNA, 25 bp, Homo sapien
tctgcttctcctccgatttttctga

SEQ ID NO: 4317182 - DNA, 25 bp, Homo sapien
tgcttctcctccgatttttctgaga

SEQ ID NO: 4317183 - DNA, 25 bp, Homo sapien
gcttctcctccgatttttctgagat

SEQ ID NO: 4317184 - DNA, 25 bp, Homo sapien
ttctcctccgatttttctgagatac

SEQ ID NO: 4317185 - DNA, 25 bp, Homo sapien
tgccccaggcaatatgaaaaatgtc

SEQ ID NO: 4317186 - DNA, 25 bp, Homo sapien
gactcatgtcaattcgagggttctt

SEQ ID NO: 4317187 - DNA, 25 bp, Homo sapien
tcctcctagcgagtaatcattcaca

SEQ ID NO: 4317188 - DNA, 25 bp, Homo sapien
cctagcgagtaatcattcacataat

SEQ ID NO: 4317189 - DNA, 25 bp, Homo sapien
ccactggtggggcacactctacata

SEQ ID NO: 4317190 - DNA, 25 bp, Homo sapien
atattttttccgtgatgtccatgaa

SEQ ID NO: 4317191 - DNA, 25 bp, Homo sapien
ttttttccgtgatgtccatgaaagt

SEQ ID NO: 4317192 - DNA, 25 bp, Homo sapien
agtacataggtgtaacagccactgg

SEQ ID NO: 4317193 - DNA, 25 bp, Homo sapien
tgtagctatttcataatttcccttt

SEQ ID NO: 4317194 - DNA, 25 bp, Homo sapien
ctgtagctatttcataatttccctt

SEQ ID NO: 4317195 - DNA, 25 bp, Homo sapien
gctcttgggtgatcccaaacaaatt

SEQ ID NO: 4317196 - DNA, 25 bp, Homo sapien
agtgagctgaatggctgatgctctt

SEQ ID NO: 4317197 - DNA, 25 bp, Homo sapien
gatcccaaacaaatttcactccaca

SEQ ID NO: 4317198 - DNA, 25 bp, Homo sapien
ttcttgctgatgtccgtcaacccca

SEQ ID NO: 4317199 - DNA, 25 bp, Homo sapien
cgtgaggatgatataacacctgcca

SEQ ID NO: 4317200 - DNA, 25 bp, Homo sapien
gctaagccgtgaggatgatataaca

SEQ ID NO: 4317201 - DNA, 25 bp, Homo sapien
caataaatcaaaggggctaagccgt

SEQ ID NO: 4317202 - DNA, 25 bp, Homo sapien
gtacatgggtgtgcaataaatcaaa

SEQ ID NO: 4317203 - DNA, 25 bp, Homo sapien
caatgtttataaatgggtatttcca

SEQ ID NO: 4317204 - DNA, 25 bp, Homo sapien
tggctggctgtcttccacaatgttt

SEQ ID NO: 4317205 - DNA, 25 bp, Homo sapien
tgtcttccacaatgtttataaatgg

SEQ ID NO: 4317206 - DNA, 25 bp, Homo sapien
cttccacaatgtttataaatgggta

SEQ ID NO: 4317207 - DNA, 25 bp, Homo sapien
ccttacactgattgggagttgtcat

SEQ ID NO: 4317208 - DNA, 25 bp, Homo sapien
ctgcgttccttacactgattgggag

SEQ ID NO: 4317209 - DNA, 25 bp, Homo sapien
ttccttacactgattgggagttgtc

SEQ ID NO: 4317210 - DNA, 25 bp, Homo sapien
cgttccttacactgattgggagttg

SEQ ID NO: 4317211 - DNA, 25 bp, Homo sapien
tagtttcagagtcaaaatattacag

SEQ ID NO: 4317212 - DNA, 25 bp, Homo sapien
gagtcaaaatattacaggcatcatt

SEQ ID NO: 4317213 - DNA, 25 bp, Homo sapien
ttatattgaccccaatagtttcaga

SEQ ID NO: 4317214 - DNA, 25 bp, Homo sapien
aaatatttatattgaccccaatagt

SEQ ID NO: 4317215 - DNA, 25 bp, Homo sapien
cgtggaaaacctgaactggctaagt

SEQ ID NO: 4317216 - DNA, 25 bp, Homo sapien
tccatttgtcttccatgctgcgtgc

SEQ ID NO: 4317217 - DNA, 25 bp, Homo sapien
cgccaccaaggagatagtagggaag

SEQ ID NO: 4317218 - DNA, 25 bp, Homo sapien
tcatcattcgtcagcatggccagaa

SEQ ID NO: 4317219 - DNA, 25 bp, Homo sapien
cacatgataagtatgccactaaagc

SEQ ID NO: 4317220 - DNA, 25 bp, Homo sapien
ctcaaatctgaaggatgacatgaca

SEQ ID NO: 4317221 - DNA, 25 bp, Homo sapien
tcttctctaaatcaggcatgtgaca

SEQ ID NO: 4317222 - DNA, 25 bp, Homo sapien
tacgctgattttggacaaatcgcca

SEQ ID NO: 4317223 - DNA, 25 bp, Homo sapien
gcagaagcagaaggagaagcagcat

SEQ ID NO: 4317224 - DNA, 25 bp, Homo sapien
cttggagaagcagaagcagaaggag

SEQ ID NO: 4317225 - DNA, 25 bp, Homo sapien
agaagcagaagcagaaggagaagca

SEQ ID NO: 4317226 - DNA, 25 bp, Homo sapien
ttggagaagcagaagcagaaggaga

SEQ ID NO: 4317227 - DNA, 25 bp, Homo sapien
ctagaattcatagacattgaaaatg

SEQ ID NO: 4317228 - DNA, 25 bp, Homo sapien
tagaattcatagacattgaaaatgt

SEQ ID NO: 4317229 - DNA, 25 bp, Homo sapien
tctgtcaaaatcactacttagttcc

SEQ ID NO: 4317230 - DNA, 25 bp, Homo sapien
ctgtatattgatataactttttctt

SEQ ID NO: 4317231 - DNA, 25 bp, Homo sapien
ttggaaggcaccagaagtaaaatag

SEQ ID NO: 4317232 - DNA, 25 bp, Homo sapien
gtatattgatataactttttcttaa

SEQ ID NO: 4317233 - DNA, 25 bp, Homo sapien
tttggaaggcaccagaagtaaaata

SEQ ID NO: 4317234 - DNA, 25 bp, Homo sapien
agggctttcagttgacttggtaata

SEQ ID NO: 4317235 - DNA, 25 bp, Homo sapien
gggctttcagttgacttggtaatat

SEQ ID NO: 4317236 - DNA, 25 bp, Homo sapien
gaacaaaggttgagaaggttgatga

SEQ ID NO: 4317237 - DNA, 25 bp, Homo sapien
acaaaggttgagaaggttgatgatt

SEQ ID NO: 4317238 - DNA, 25 bp, Homo sapien
ctggaacaaaggttgagaaggttga

SEQ ID NO: 4317239 - DNA, 25 bp, Homo sapien
tctggaacaaaggttgagaaggttg

SEQ ID NO: 4317240 - DNA, 25 bp, Homo sapien
agacactatcctaatctccataatg

SEQ ID NO: 4317241 - DNA, 25 bp, Homo sapien
gacactatcctaatctccataatgt

SEQ ID NO: 4317242 - DNA, 25 bp, Homo sapien
cagacactatcctaatctccataat

SEQ ID NO: 4317243 - DNA, 25 bp, Homo sapien
agacacttttctcagtttgctcagg

SEQ ID NO: 4317244 - DNA, 25 bp, Homo sapien
cagtttgctcaggctccaacgccat

SEQ ID NO: 4317245 - DNA, 25 bp, Homo sapien
cagacacttttctcagtttgctcag

SEQ ID NO: 4317246 - DNA, 25 bp, Homo sapien
tcagtttgctcaggctccaacgcca

SEQ ID NO: 4317247 - DNA, 25 bp, Homo sapien
attgatcagatagaatgagaggatg

SEQ ID NO: 4317248 - DNA, 25 bp, Homo sapien
tttgtgctgtatttcaaggcaggca

SEQ ID NO: 4317249 - DNA, 25 bp, Homo sapien
gccaaaagttacagctagttcaaaa

SEQ ID NO: 4317250 - DNA, 25 bp, Homo sapien
aggcaggcattattgtgttaggaca

SEQ ID NO: 4317251 - DNA, 25 bp, Homo sapien
aaccagaggttcagtcacaaacacc

SEQ ID NO: 4317252 - DNA, 25 bp, Homo sapien
gctcccaaagacaacacctagaacc

SEQ ID NO: 4317253 - DNA, 25 bp, Homo sapien
gatactacatcttcttactatttgc

SEQ ID NO: 4317254 - DNA, 25 bp, Homo sapien
cacaagagcttgttgctgatactac

SEQ ID NO: 4317255 - DNA, 25 bp, Homo sapien
gtggatttgacactgaataaggcta

SEQ ID NO: 4317256 - DNA, 25 bp, Homo sapien
ggctattcgaatgttttctatgatc

SEQ ID NO: 4317257 - DNA, 25 bp, Homo sapien
taaaaattgaaagcttaacgacata

SEQ ID NO: 4317258 - DNA, 25 bp, Homo sapien
ttcatgacggtcactttaaaagtgg

SEQ ID NO: 4317259 - DNA, 25 bp, Homo sapien
tctttagaagaaacatgcacatttt

SEQ ID NO: 4317260 - DNA, 25 bp, Homo sapien
aaacaatatctgtttgcatatggac

SEQ ID NO: 4317261 - DNA, 25 bp, Homo sapien
acattttcaaacaatatctgtttgc

SEQ ID NO: 4317262 - DNA, 25 bp, Homo sapien
acaatatctgtttgcatatggacat

SEQ ID NO: 4317263 - DNA, 25 bp, Homo sapien
gtaattacttccaggtgcttgccta

SEQ ID NO: 4317264 - DNA, 25 bp, Homo sapien
aattacttccaggtgcttgcctata

SEQ ID NO: 4317265 - DNA, 25 bp, Homo sapien
taattacttccaggtgcttgcctat

SEQ ID NO: 4317266 - DNA, 25 bp, Homo sapien
gctctgtgtggccagattgcattct

SEQ ID NO: 4317267 - DNA, 25 bp, Homo sapien
tgaggatgcaggcacatattctctt

SEQ ID NO: 4317268 - DNA, 25 bp, Homo sapien
tgggtcattagaccttttggctcct

SEQ ID NO: 4317269 - DNA, 25 bp, Homo sapien
caggcacatattctcttcaggatct

SEQ ID NO: 4317270 - DNA, 25 bp, Homo sapien
cattctgtttcctcagtatgctgcc

SEQ ID NO: 4317271 - DNA, 25 bp, Homo sapien
tctgtttcctcagtatgctgcccca

SEQ ID NO: 4317272 - DNA, 25 bp, Homo sapien
cagagcattctgtttcctcagtatg

SEQ ID NO: 4317273 - DNA, 25 bp, Homo sapien
gagcattctgtttcctcagtatgct

SEQ ID NO: 4317274 - DNA, 25 bp, Homo sapien
ttaggcattcctgctgagattgcgg

SEQ ID NO: 4317275 - DNA, 25 bp, Homo sapien
gagattgcggattggctactttgaa

SEQ ID NO: 4317276 - DNA, 25 bp, Homo sapien
tattgtggtcagtagctgtgggcta

SEQ ID NO: 4317277 - DNA, 25 bp, Homo sapien
gatcacctgtgagtctatggctata

SEQ ID NO: 4317278 - DNA, 25 bp, Homo sapien
tttccccagagactttagcaagcat

SEQ ID NO: 4317279 - DNA, 25 bp, Homo sapien
tttttccccagagactttagcaagc

SEQ ID NO: 4317280 - DNA, 25 bp, Homo sapien
tctttttccccagagactttagcaa

SEQ ID NO: 4317281 - DNA, 25 bp, Homo sapien
ttctttttccccagagactttagca

SEQ ID NO: 4317282 - DNA, 25 bp, Homo sapien
attttgagatcaagtcaggaagaac

SEQ ID NO: 4317283 - DNA, 25 bp, Homo sapien
tcaggaagaaccatacacttcagac

SEQ ID NO: 4317284 - DNA, 25 bp, Homo sapien
agtcaggaagaaccatacacttcag

SEQ ID NO: 4317285 - DNA, 25 bp, Homo sapien
gaagaaccatacacttcagactaag

SEQ ID NO: 4317286 - DNA, 25 bp, Homo sapien
tcaagcttcttcactgactttctca

SEQ ID NO: 4317287 - DNA, 25 bp, Homo sapien
caagcttcttcactgactttctcac

SEQ ID NO: 4317288 - DNA, 25 bp, Homo sapien
gcttcttcactgactttctcaccct

SEQ ID NO: 4317289 - DNA, 25 bp, Homo sapien
aagcttcttcactgactttctcacc

SEQ ID NO: 4317290 - DNA, 25 bp, Homo sapien
aattgcttattatacttgctctcca

SEQ ID NO: 4317291 - DNA, 25 bp, Homo sapien
cttgacattccataggctttaggag

SEQ ID NO: 4317292 - DNA, 25 bp, Homo sapien
tggcaattgcttattatacttgctc

SEQ ID NO: 4317293 - DNA, 25 bp, Homo sapien
tgcttcttgacattccataggcttt

SEQ ID NO: 4317294 - DNA, 25 bp, Homo sapien
cactgaggagttagcaacaggcact

SEQ ID NO: 4317295 - DNA, 25 bp, Homo sapien
tagacagatctaaaagggagccagc

SEQ ID NO: 4317296 - DNA, 25 bp, Homo sapien
tccgtttcgtgccagtagacagatc

SEQ ID NO: 4317297 - DNA, 25 bp, Homo sapien
tagagcatacattcagactttggca

SEQ ID NO: 4317298 - DNA, 25 bp, Homo sapien
tattagcttgaaggctttcatttgc

SEQ ID NO: 4317299 - DNA, 25 bp, Homo sapien
gctagattgagcttcaggcctccag

SEQ ID NO: 4317300 - DNA, 25 bp, Homo sapien
tgcagttaacaaaacccgaaaggca

SEQ ID NO: 4317301 - DNA, 25 bp, Homo sapien
tccagttcccactttgagagggtct

SEQ ID NO: 4317302 - DNA, 25 bp, Homo sapien
gtagcaacccacatgcttcttcctt

SEQ ID NO: 4317303 - DNA, 25 bp, Homo sapien
gtgccgtgaattcttttatgatggc

SEQ ID NO: 4317304 - DNA, 25 bp, Homo sapien
attagctgtgccgtgaattctttta

SEQ ID NO: 4317305 - DNA, 25 bp, Homo sapien
agcaacccacatgcttcttccttta

SEQ ID NO: 4317306 - DNA, 25 bp, Homo sapien
caaggatgccttaggtctgacacta

SEQ ID NO: 4317307 - DNA, 25 bp, Homo sapien
gaagaacctttctcatagtgctaca

SEQ ID NO: 4317308 - DNA, 25 bp, Homo sapien
tgaccagatgtaattcccaatgctg

SEQ ID NO: 4317309 - DNA, 25 bp, Homo sapien
tatgctttgatggaccaagtgacct

SEQ ID NO: 4317310 - DNA, 25 bp, Homo sapien
catacagaatgtgatgtgttgccat

SEQ ID NO: 4317311 - DNA, 25 bp, Homo sapien
tcatacagaatgtgatgtgttgcca

SEQ ID NO: 4317312 - DNA, 25 bp, Homo sapien
ttgcttcatacagaatgtgatgtgt

SEQ ID NO: 4317313 - DNA, 25 bp, Homo sapien
cttttgcttcatacagaatgtgatg

SEQ ID NO: 4317314 - DNA, 25 bp, Homo sapien
tataacataggctctaaatcatcaa

SEQ ID NO: 4317315 - DNA, 25 bp, Homo sapien
ataacataggctctaaatcatcaaa

SEQ ID NO: 4317316 - DNA, 25 bp, Homo sapien
ttataacataggctctaaatcatca

SEQ ID NO: 4317317 - DNA, 25 bp, Homo sapien
taacataggctctaaatcatcaaat

SEQ ID NO: 4317318 - DNA, 25 bp, Homo sapien
cagcaatgattgtccattaaataaa

SEQ ID NO: 4317319 - DNA, 25 bp, Homo sapien
gcaatgattgtccattaaataaatc

SEQ ID NO: 4317320 - DNA, 25 bp, Homo sapien
ttacagcaatgattgtccattaaat

SEQ ID NO: 4317321 - DNA, 25 bp, Homo sapien
acagcaatgattgtccattaaataa

SEQ ID NO: 4317322 - DNA, 25 bp, Homo sapien
ccatggagaagtctttgtttgcttg

SEQ ID NO: 4317323 - DNA, 25 bp, Homo sapien
gctttgagggattagcatcaataag

SEQ ID NO: 4317324 - DNA, 25 bp, Homo sapien
taaagttctaatctactcatatcag

SEQ ID NO: 4317325 - DNA, 25 bp, Homo sapien
aattgtgctttgagggattagcatc

SEQ ID NO: 4317326 - DNA, 25 bp, Homo sapien
gggcatgaaaaagtacgcgaataca

SEQ ID NO: 4317327 - DNA, 25 bp, Homo sapien
ttgtatactgtatttgtagccaaga

SEQ ID NO: 4317328 - DNA, 25 bp, Homo sapien
aaagtacgcgaatacatatcttaat

SEQ ID NO: 4317329 - DNA, 25 bp, Homo sapien
tcctctgtctgagagatcagttacc

SEQ ID NO: 4317330 - DNA, 25 bp, Homo sapien
ggcagttgtgtttcatagtcctcta

SEQ ID NO: 4317331 - DNA, 25 bp, Homo sapien
tagtcctctattaataagtcactcc

SEQ ID NO: 4317332 - DNA, 25 bp, Homo sapien
gagtctattaagctgaaccaagaaa

SEQ ID NO: 4317333 - DNA, 25 bp, Homo sapien
tgtctaaacacagcaaagttctgtg

SEQ ID NO: 4317334 - DNA, 25 bp, Homo sapien
aacttttggtggtcatggcactgga

SEQ ID NO: 4317335 - DNA, 25 bp, Homo sapien
tggcactggagccaaccgattggac

SEQ ID NO: 4317336 - DNA, 25 bp, Homo sapien
cactggagccaaccgattggactgc

SEQ ID NO: 4317337 - DNA, 25 bp, Homo sapien
tggagccaaccgattggactgccat

SEQ ID NO: 4317338 - DNA, 25 bp, Homo sapien
tgtactgtatttccccatgttctgg

SEQ ID NO: 4317339 - DNA, 25 bp, Homo sapien
tggttgacggtagcaccatgcttct

SEQ ID NO: 4317340 - DNA, 25 bp, Homo sapien
tgtggacaacctgacactgtagtgg

SEQ ID NO: 4317341 - DNA, 25 bp, Homo sapien
ttgtgctcaggtgttagagccttgt

SEQ ID NO: 4317342 - DNA, 25 bp, Homo sapien
gattttaccaacagaacttttctgc

SEQ ID NO: 4317343 - DNA, 25 bp, Homo sapien
gcctcaccttttctggccctaggta

SEQ ID NO: 4317344 - DNA, 25 bp, Homo sapien
gtgttcaccctctcaattccgcaag

SEQ ID NO: 4317345 - DNA, 25 bp, Homo sapien
taggaggatcatgcaactgtttgtc

SEQ ID NO: 4317346 - DNA, 25 bp, Homo sapien
ctcatctcttggcataactacaatg

SEQ ID NO: 4317347 - DNA, 25 bp, Homo sapien
tctcttggcataactacaatgcaca

SEQ ID NO: 4317348 - DNA, 25 bp, Homo sapien
gagtggtcatcccaaagactctgaa

SEQ ID NO: 4317349 - DNA, 25 bp, Homo sapien
gcataactacaatgcacatagacat

SEQ ID NO: 4317350 - DNA, 25 bp, Homo sapien
accaagctcgcagatttggaaggga

SEQ ID NO: 4317351 - DNA, 25 bp, Homo sapien
acaatcagttgggtcacagatgttg

SEQ ID NO: 4317352 - DNA, 25 bp, Homo sapien
catctttgaccaagctcgcagattt

SEQ ID NO: 4317353 - DNA, 25 bp, Homo sapien
gctgaatcaagcgtgacaatcagtt

SEQ ID NO: 4317354 - DNA, 25 bp, Homo sapien
aataagtttccagcacgggagcaga

SEQ ID NO: 4317355 - DNA, 25 bp, Homo sapien
taagtttccagcacgggagcagaaa

SEQ ID NO: 4317356 - DNA, 25 bp, Homo sapien
tcaataagtttccagcacgggagca

SEQ ID NO: 4317357 - DNA, 25 bp, Homo sapien
aagtttccagcacgggagcagaaat

SEQ ID NO: 4317358 - DNA, 25 bp, Homo sapien
cctgaataagagctagcagaattgc

SEQ ID NO: 4317359 - DNA, 25 bp, Homo sapien
agagctagcagaattgcaactttca

SEQ ID NO: 4317360 - DNA, 25 bp, Homo sapien
ctgggtagatactgcctgaataaga

SEQ ID NO: 4317361 - DNA, 25 bp, Homo sapien
tcagcactaactgggtagatactgc

SEQ ID NO: 4317362 - DNA, 25 bp, Homo sapien
atgttgttctgtagccagtttagag

SEQ ID NO: 4317363 - DNA, 25 bp, Homo sapien
tgctcttttcgctgtaatgttcgtt

SEQ ID NO: 4317364 - DNA, 25 bp, Homo sapien
tatttcttgctgctcttttcgctgt

SEQ ID NO: 4317365 - DNA, 25 bp, Homo sapien
ctgtctttccgcagaatgttgttct

SEQ ID NO: 4317366 - DNA, 25 bp, Homo sapien
tgaaggaatactcttggcttggtgc

SEQ ID NO: 4317367 - DNA, 25 bp, Homo sapien
gggttgaaggaatactcttggcttg

SEQ ID NO: 4317368 - DNA, 25 bp, Homo sapien
ctttctcaaatccaatggggttgaa

SEQ ID NO: 4317369 - DNA, 25 bp, Homo sapien
tccaatggggttgaaggaatactct

SEQ ID NO: 4317370 - DNA, 25 bp, Homo sapien
ggtgcattacacctcgtagaataat

SEQ ID NO: 4317371 - DNA, 25 bp, Homo sapien
tcaatctggaggtgcattacacctc

SEQ ID NO: 4317372 - DNA, 25 bp, Homo sapien
gatatttaggtggaggtttctgctg

SEQ ID NO: 4317373 - DNA, 25 bp, Homo sapien
ttacacctcgtagaataatttgtgt

SEQ ID NO: 4317374 - DNA, 25 bp, Homo sapien
ctgatggctattcagcacgcagcca

SEQ ID NO: 4317375 - DNA, 25 bp, Homo sapien
tgatggctattcagcacgcagccat

SEQ ID NO: 4317376 - DNA, 25 bp, Homo sapien
gatggctattcagcacgcagccatc

SEQ ID NO: 4317377 - DNA, 25 bp, Homo sapien
agagtactagtatttgcatgggaca

SEQ ID NO: 4317378 - DNA, 25 bp, Homo sapien
catgggacattgcacaaactgagac

SEQ ID NO: 4317379 - DNA, 25 bp, Homo sapien
ggaccgctgttttaagtgaactctg

SEQ ID NO: 4317380 - DNA, 25 bp, Homo sapien
ttctagaatggtgggttttggcgtc

SEQ ID NO: 4317381 - DNA, 25 bp, Homo sapien
caaactcattgtgaatattccggac

SEQ ID NO: 4317382 - DNA, 25 bp, Homo sapien
gcccaaggagtagcacaaactcatt

SEQ ID NO: 4317383 - DNA, 25 bp, Homo sapien
tcaagggcagagacccatgagcaac

SEQ ID NO: 4317384 - DNA, 25 bp, Homo sapien
gatggccaatgaaaaccttcatctg

SEQ ID NO: 4317385 - DNA, 25 bp, Homo sapien
catgtcagttgcattattactgttg

SEQ ID NO: 4317386 - DNA, 25 bp, Homo sapien
tcaccacaagataagataagcagtc

SEQ ID NO: 4317387 - DNA, 25 bp, Homo sapien
cataaaagtatgtcatgtcagttgc

SEQ ID NO: 4317388 - DNA, 25 bp, Homo sapien
aagtttcagtgtagcaggttttagc

SEQ ID NO: 4317389 - DNA, 25 bp, Homo sapien
agtgcaaggtcaaagtcgatcttta

SEQ ID NO: 4317390 - DNA, 25 bp, Homo sapien
ttaagtgcaaggtcaaagtcgatct

SEQ ID NO: 4317391 - DNA, 25 bp, Homo sapien
tgcaaggtcaaagtcgatctttata

SEQ ID NO: 4317392 - DNA, 25 bp, Homo sapien
tcttaagtgcaaggtcaaagtcgat

SEQ ID NO: 4317393 - DNA, 25 bp, Homo sapien
gtcttcattcaatgcatttctctct

SEQ ID NO: 4317394 - DNA, 25 bp, Homo sapien
tgtgtcttcattcaatgcatttctc

SEQ ID NO: 4317395 - DNA, 25 bp, Homo sapien
ctgtgtcttcattcaatgcatttct

SEQ ID NO: 4317396 - DNA, 25 bp, Homo sapien
atttctctcttgcatttcctttaaa

SEQ ID NO: 4317397 - DNA, 25 bp, Homo sapien
gggctttctctcagcgtcagccatt

SEQ ID NO: 4317398 - DNA, 25 bp, Homo sapien
cagatctgaaagaaatagtggacag

SEQ ID NO: 4317399 - DNA, 25 bp, Homo sapien
gaatcaggagaaatccaatatcctt

SEQ ID NO: 4317400 - DNA, 25 bp, Homo sapien
gcgtcagccattggatataccagat

SEQ ID NO: 4317401 - DNA, 25 bp, Homo sapien
cttggaactctaacccacttaagag

SEQ ID NO: 4317402 - DNA, 25 bp, Homo sapien
tctaacccacttaagagcatttctc

SEQ ID NO: 4317403 - DNA, 25 bp, Homo sapien
gaactctaacccacttaagagcatt

SEQ ID NO: 4317404 - DNA, 25 bp, Homo sapien
ttggaactctaacccacttaagagc

SEQ ID NO: 4317405 - DNA, 25 bp, Homo sapien
gactttgagaaaacatggaataacc

SEQ ID NO: 4317406 - DNA, 25 bp, Homo sapien
tgcaaacaactaattgacaaacttt

SEQ ID NO: 4317407 - DNA, 25 bp, Homo sapien
gatatagtgtgattggcattgttgt

SEQ ID NO: 4317408 - DNA, 25 bp, Homo sapien
aattattattctaaccagtgcaaac

SEQ ID NO: 4317409 - DNA, 25 bp, Homo sapien
tcatgtctcagataggtcagagcac

SEQ ID NO: 4317410 - DNA, 25 bp, Homo sapien
gagtgaacctcaagagatatccatg

SEQ ID NO: 4317411 - DNA, 25 bp, Homo sapien
tagctatgaagtcactaacaggtgg

SEQ ID NO: 4317412 - DNA, 25 bp, Homo sapien
tgaatccaataagctgagtgaacct

SEQ ID NO: 4317413 - DNA, 25 bp, Homo sapien
aaatatgcagcattgccttttcttg

SEQ ID NO: 4317414 - DNA, 25 bp, Homo sapien
gagaggaagcttgtctaataagaac

SEQ ID NO: 4317415 - DNA, 25 bp, Homo sapien
tcttgttctgtcctccgtaagtgtt

SEQ ID NO: 4317416 - DNA, 25 bp, Homo sapien
aaattccagctggtagttggagagg

SEQ ID NO: 4317417 - DNA, 25 bp, Homo sapien
gaatatagttcaagtaataattcat

SEQ ID NO: 4317418 - DNA, 25 bp, Homo sapien
tgtcctctatatgtacaatctttgg

SEQ ID NO: 4317419 - DNA, 25 bp, Homo sapien
caaagctgtcctctatatgtacaat

SEQ ID NO: 4317420 - DNA, 25 bp, Homo sapien
caatctttggatgaatatagttcaa

SEQ ID NO: 4317421 - DNA, 25 bp, Homo sapien
tatagtggcttattgctaatgatgc

SEQ ID NO: 4317422 - DNA, 25 bp, Homo sapien
catatcttggtatagtggcttattg

SEQ ID NO: 4317423 - DNA, 25 bp, Homo sapien
tgtgagtgtgcggatgaggagcaga

SEQ ID NO: 4317424 - DNA, 25 bp, Homo sapien
ctaatgatgcttgcaaataagtgga

SEQ ID NO: 4317425 - DNA, 25 bp, Homo sapien
ctctaagatgagaactatggtagcc

SEQ ID NO: 4317426 - DNA, 25 bp, Homo sapien
tggccacgggtttcagtacaaaata

SEQ ID NO: 4317427 - DNA, 25 bp, Homo sapien
tgaatactgtgaactggctgtgaga

SEQ ID NO: 4317428 - DNA, 25 bp, Homo sapien
cagtctatgcctgagatatgtccga

SEQ ID NO: 4317429 - DNA, 25 bp, Homo sapien
aatgacatgccattggtttcattac

SEQ ID NO: 4317430 - DNA, 25 bp, Homo sapien
cttcaaatgacatgccattggtttc

SEQ ID NO: 4317431 - DNA, 25 bp, Homo sapien
tgacatgccattggtttcattaccc

SEQ ID NO: 4317432 - DNA, 25 bp, Homo sapien
acatgccattggtttcattacccat

SEQ ID NO: 4317433 - DNA, 25 bp, Homo sapien
cttttctcagcagtgcaagtgctca

SEQ ID NO: 4317434 - DNA, 25 bp, Homo sapien
gctgccatgcccttgctattccttt

SEQ ID NO: 4317435 - DNA, 25 bp, Homo sapien
tcaccagctgtcgtgatataccgct

SEQ ID NO: 4317436 - DNA, 25 bp, Homo sapien
aaacatctgccgtataaaatcaaaa

SEQ ID NO: 4317437 - DNA, 25 bp, Homo sapien
gatgagtcaacatctgtacagaaag

SEQ ID NO: 4317438 - DNA, 25 bp, Homo sapien
tctgtacagaaaggatagcgaccat

SEQ ID NO: 4317439 - DNA, 25 bp, Homo sapien
gcgaccattcagcaaggatgctcct

SEQ ID NO: 4317440 - DNA, 25 bp, Homo sapien
gtgcattcactccagatgagtcaac

SEQ ID NO: 4317441 - DNA, 25 bp, Homo sapien
ttaaattcttgaggtgtcatggagc

SEQ ID NO: 4317442 - DNA, 25 bp, Homo sapien
ctttaaattcttgaggtgtcatgga

SEQ ID NO: 4317443 - DNA, 25 bp, Homo sapien
taaattcttgaggtgtcatggagca

SEQ ID NO: 4317444 - DNA, 25 bp, Homo sapien
tttaaattcttgaggtgtcatggag

SEQ ID NO: 4317445 - DNA, 25 bp, Homo sapien
taataagatgattcccaagggccac

SEQ ID NO: 4317446 - DNA, 25 bp, Homo sapien
cttttctccacaaaagtgtgtgcgt

SEQ ID NO: 4317447 - DNA, 25 bp, Homo sapien
ggctaaaggatttccaatgcattgc

SEQ ID NO: 4317448 - DNA, 25 bp, Homo sapien
aagtgtgtgcgtactggctaaagga

SEQ ID NO: 4317449 - DNA, 25 bp, Homo sapien
tgctactcccattaaatgatagatc

SEQ ID NO: 4317450 - DNA, 25 bp, Homo sapien
gctactcccattaaatgatagatcc

SEQ ID NO: 4317451 - DNA, 25 bp, Homo sapien
actgctactcccattaaatgataga

SEQ ID NO: 4317452 - DNA, 25 bp, Homo sapien
tactcccattaaatgatagatccat

SEQ ID NO: 4317453 - DNA, 25 bp, Homo sapien
aaggaggtatgctcccgtcctgcac

SEQ ID NO: 4317454 - DNA, 25 bp, Homo sapien
cgctccaagaagataggccacacct

SEQ ID NO: 4317455 - DNA, 25 bp, Homo sapien
gtgttttgggccaaacaggccgctc

SEQ ID NO: 4317456 - DNA, 25 bp, Homo sapien
tgcaccgtcccatgaacccatgcat

SEQ ID NO: 4317457 - DNA, 25 bp, Homo sapien
gacaatctgggaccttcaaatgact

SEQ ID NO: 4317458 - DNA, 25 bp, Homo sapien
aatcaatgatttgtcagtgtgtgac

SEQ ID NO: 4317459 - DNA, 25 bp, Homo sapien
gccagagtggccaatcaatgatttg

SEQ ID NO: 4317460 - DNA, 25 bp, Homo sapien
ttgtcagtgtgtgacaatctgggac

SEQ ID NO: 4317461 - DNA, 25 bp, Homo sapien
gttttcatccttgccagaaacaatg

SEQ ID NO: 4317462 - DNA, 25 bp, Homo sapien
tcatgatttctgcagaaacatagag

SEQ ID NO: 4317463 - DNA, 25 bp, Homo sapien
catgatttctgcagaaacatagagt

SEQ ID NO: 4317464 - DNA, 25 bp, Homo sapien
acatagagttttcatccttgccaga

SEQ ID NO: 4317465 - DNA, 25 bp, Homo sapien
catccagatagtctttgcactggta

SEQ ID NO: 4317466 - DNA, 25 bp, Homo sapien
ttttgatccatccagatagtctttg

SEQ ID NO: 4317467 - DNA, 25 bp, Homo sapien
gatagtctttgcactggtactctaa

SEQ ID NO: 4317468 - DNA, 25 bp, Homo sapien
tttgcactggtactctaaaaattcc

SEQ ID NO: 4317469 - DNA, 25 bp, Homo sapien
cttattcaataaaggccagtgagtg

SEQ ID NO: 4317470 - DNA, 25 bp, Homo sapien
gctcccttattcaataaaggccagt

SEQ ID NO: 4317471 - DNA, 25 bp, Homo sapien
tgtgagagctcccttattcaataaa

SEQ ID NO: 4317472 - DNA, 25 bp, Homo sapien
ttcaataaaggccagtgagtgacag

SEQ ID NO: 4317473 - DNA, 25 bp, Homo sapien
ttagttttcatccccacagacttta

SEQ ID NO: 4317474 - DNA, 25 bp, Homo sapien
caccacattccatcagcgtgtacat

SEQ ID NO: 4317475 - DNA, 25 bp, Homo sapien
tttcacaccacattccatcagcgtg

SEQ ID NO: 4317476 - DNA, 25 bp, Homo sapien
gattttcacaccacattccatcagc

SEQ ID NO: 4317477 - DNA, 25 bp, Homo sapien
ctgctgattttcacaccacattcca

SEQ ID NO: 4317478 - DNA, 25 bp, Homo sapien
tgactgtgtctagtgttgacttgag

SEQ ID NO: 4317479 - DNA, 25 bp, Homo sapien
ctaatacactaataggtcgctgttg

SEQ ID NO: 4317480 - DNA, 25 bp, Homo sapien
tgtaattgaggaatataaaaccaca

SEQ ID NO: 4317481 - DNA, 25 bp, Homo sapien
tttggagacgcacggtttttgactg

SEQ ID NO: 4317482 - DNA, 25 bp, Homo sapien
gatggatggcatttaggacggatcc

SEQ ID NO: 4317483 - DNA, 25 bp, Homo sapien
cttctgtgggcctctgtcttgagat

SEQ ID NO: 4317484 - DNA, 25 bp, Homo sapien
catttaggacggatccatcagtaac

SEQ ID NO: 4317485 - DNA, 25 bp, Homo sapien
ggtctctacagccatctccaggtac

SEQ ID NO: 4317486 - DNA, 25 bp, Homo sapien
tattacagcaaggtaatagtaccct

SEQ ID NO: 4317487 - DNA, 25 bp, Homo sapien
taatagtacccttacagcaagggta

SEQ ID NO: 4317488 - DNA, 25 bp, Homo sapien
tacagcaaggtaatagtacccttac

SEQ ID NO: 4317489 - DNA, 25 bp, Homo sapien
gcaaggtaatagtacccttacagca

SEQ ID NO: 4317490 - DNA, 25 bp, Homo sapien
atcaatggcatgtttctgtgcttcc

SEQ ID NO: 4317491 - DNA, 25 bp, Homo sapien
tgatgttgagtgccagagacagaat

SEQ ID NO: 4317492 - DNA, 25 bp, Homo sapien
gtgatgttgagtgccagagacagaa

SEQ ID NO: 4317493 - DNA, 25 bp, Homo sapien
taactggccgttgatattgtctctg

SEQ ID NO: 4317494 - DNA, 25 bp, Homo sapien
cgttgatattgtctctgtggcagcc

SEQ ID NO: 4317495 - DNA, 25 bp, Homo sapien
tggtaagactaactggccgttgata

SEQ ID NO: 4317496 - DNA, 25 bp, Homo sapien
tgctcttggtaagactaactggccg

SEQ ID NO: 4317497 - DNA, 25 bp, Homo sapien
ctgcactagaaaactaatgaacact

SEQ ID NO: 4317498 - DNA, 25 bp, Homo sapien
tagaaaactaatgaacactttcttc

SEQ ID NO: 4317499 - DNA, 25 bp, Homo sapien
gcactagaaaactaatgaacacttt

SEQ ID NO: 4317500 - DNA, 25 bp, Homo sapien
gaacactttcttcagtaactgccac

SEQ ID NO: 4317501 - DNA, 25 bp, Homo sapien
aagttgatttcccacatcggttctt

SEQ ID NO: 4317502 - DNA, 25 bp, Homo sapien
ttgatttcccacatcggttcttctc

SEQ ID NO: 4317503 - DNA, 25 bp, Homo sapien
ccgtacattgctctttaacgtaggg

SEQ ID NO: 4317504 - DNA, 25 bp, Homo sapien
agagactgcaatcctcccgtacatt

SEQ ID NO: 4317505 - DNA, 25 bp, Homo sapien
gaacattaccagcaatcgaaaggga

SEQ ID NO: 4317506 - DNA, 25 bp, Homo sapien
caggaacattaccagcaatcgaaag

SEQ ID NO: 4317507 - DNA, 25 bp, Homo sapien
taccagcaatcgaaagggataccat

SEQ ID NO: 4317508 - DNA, 25 bp, Homo sapien
ctgaatcaggaacattaccagcaat

SEQ ID NO: 4317509 - DNA, 25 bp, Homo sapien
aacacagtctgtcaatttgtaagcc

SEQ ID NO: 4317510 - DNA, 25 bp, Homo sapien
gtttcttgcagagttattatccagg

SEQ ID NO: 4317511 - DNA, 25 bp, Homo sapien
gatgaggaaggtccagactgatagt

SEQ ID NO: 4317512 - DNA, 25 bp, Homo sapien
gactgatagttgactgccagtaggc

SEQ ID NO: 4317513 - DNA, 25 bp, Homo sapien
aacactgtttaaggtatcagcactc

SEQ ID NO: 4317514 - DNA, 25 bp, Homo sapien
catgtagccaactcgagaagaaagc

SEQ ID NO: 4317515 - DNA, 25 bp, Homo sapien
tgaagacactagtcaccatgtagcc

SEQ ID NO: 4317516 - DNA, 25 bp, Homo sapien
tcctggcttccgtgattgactgtaa

SEQ ID NO: 4317517 - DNA, 25 bp, Homo sapien
catctcgtttagaaattcagtatca

SEQ ID NO: 4317518 - DNA, 25 bp, Homo sapien
gtacatctcgtttagaaattcagta

SEQ ID NO: 4317519 - DNA, 25 bp, Homo sapien
tacatctcgtttagaaattcagtat

SEQ ID NO: 4317520 - DNA, 25 bp, Homo sapien
tgtacatctcgtttagaaattcagt

SEQ ID NO: 4317521 - DNA, 25 bp, Homo sapien
aatctgggattatttttattccgct

SEQ ID NO: 4317522 - DNA, 25 bp, Homo sapien
tatgtgtctgtaatcttcatgggtc

SEQ ID NO: 4317523 - DNA, 25 bp, Homo sapien
gtttaattttaggagtgtatgtgtc

SEQ ID NO: 4317524 - DNA, 25 bp, Homo sapien
taatcttcatgggtcttatgctcat

SEQ ID NO: 4317525 - DNA, 25 bp, Homo sapien
ctgatgctaaaccgaaagcagatgt

SEQ ID NO: 4317526 - DNA, 25 bp, Homo sapien
gacttaggcgaagaacatggttcat

SEQ ID NO: 4317527 - DNA, 25 bp, Homo sapien
gctaaaccgaaagcagatgttccat

SEQ ID NO: 4317528 - DNA, 25 bp, Homo sapien
tccataaatgacttaggcgaagaac

SEQ ID NO: 4317529 - DNA, 25 bp, Homo sapien
cacacaggaaggtgtcctcatgcct

SEQ ID NO: 4317530 - DNA, 25 bp, Homo sapien
cactgaaaaatatgagaggttttgc

SEQ ID NO: 4317531 - DNA, 25 bp, Homo sapien
tgagaggttttgcacacacaggaag

SEQ ID NO: 4317532 - DNA, 25 bp, Homo sapien
aaaaatatgagaggttttgcacaca

SEQ ID NO: 4317533 - DNA, 25 bp, Homo sapien
tggaagtctatatacacttgtagag

SEQ ID NO: 4317534 - DNA, 25 bp, Homo sapien
tattctttggaagtctatatacact

SEQ ID NO: 4317535 - DNA, 25 bp, Homo sapien
actgacagacagactgaagtatttc

SEQ ID NO: 4317536 - DNA, 25 bp, Homo sapien
cagacagactgaagtatttcatatt

SEQ ID NO: 4317537 - DNA, 25 bp, Homo sapien
gaattgagaagtgagcaagtgtctt

SEQ ID NO: 4317538 - DNA, 25 bp, Homo sapien
tgagaagtgagcaagtgtcttattc

SEQ ID NO: 4317539 - DNA, 25 bp, Homo sapien
gagcaagtgtcttattcatatcaga

SEQ ID NO: 4317540 - DNA, 25 bp, Homo sapien
gaagtgagcaagtgtcttattcata

SEQ ID NO: 4317541 - DNA, 25 bp, Homo sapien
ggttttaaaccctctgatctgtgta

SEQ ID NO: 4317542 - DNA, 25 bp, Homo sapien
gatgcctactataagttggacctgc

SEQ ID NO: 4317543 - DNA, 25 bp, Homo sapien
ctgtgtatgatagccccttcctttt

SEQ ID NO: 4317544 - DNA, 25 bp, Homo sapien
tgtttgccataacgtcagcaatggt

SEQ ID NO: 4317545 - DNA, 25 bp, Homo sapien
gcatgacagtctcgagtagttgaac

SEQ ID NO: 4317546 - DNA, 25 bp, Homo sapien
cacaagtctgtctacatgcaaggag

SEQ ID NO: 4317547 - DNA, 25 bp, Homo sapien
tcagaagtcattgaaagcagccaca

SEQ ID NO: 4317548 - DNA, 25 bp, Homo sapien
taaagcttggcctctcatgagtgag

SEQ ID NO: 4317549 - DNA, 25 bp, Homo sapien
agtttcaacttagacgatatgttca

SEQ ID NO: 4317550 - DNA, 25 bp, Homo sapien
ggaaatgacagtaccagacaaacta

SEQ ID NO: 4317551 - DNA, 25 bp, Homo sapien
caaactattatatgtgtaccagaga

SEQ ID NO: 4317552 - DNA, 25 bp, Homo sapien
tctagacagattttgggaagtttca

SEQ ID NO: 4317553 - DNA, 25 bp, Homo sapien
atctcttgtgcaatatgggatgctg

SEQ ID NO: 4317554 - DNA, 25 bp, Homo sapien
tggtggtctctggagtgtcacgaca

SEQ ID NO: 4317555 - DNA, 25 bp, Homo sapien
aagttacatcaactggcggtgacca

SEQ ID NO: 4317556 - DNA, 25 bp, Homo sapien
ggagtgtcacgacaaaagttacatc

SEQ ID NO: 4317557 - DNA, 25 bp, Homo sapien
gtaaccatacggtctgagctctcca

SEQ ID NO: 4317558 - DNA, 25 bp, Homo sapien
tagtaaccatacggtctgagctctc

SEQ ID NO: 4317559 - DNA, 25 bp, Homo sapien
ctagtaaccatacggtctgagctct

SEQ ID NO: 4317560 - DNA, 25 bp, Homo sapien
agtaaccatacggtctgagctctcc

SEQ ID NO: 4317561 - DNA, 25 bp, Homo sapien
gccacatgggcctcagcaaaaatca

SEQ ID NO: 4317562 - DNA, 25 bp, Homo sapien
ggattagcactaccaaaggcatggg

SEQ ID NO: 4317563 - DNA, 25 bp, Homo sapien
gcatgagaggattagcactaccaaa

SEQ ID NO: 4317564 - DNA, 25 bp, Homo sapien
actaccaaaggcatgggccacatgg

SEQ ID NO: 4317565 - DNA, 25 bp, Homo sapien
ttcttcaagaatgtgcttgcagttt

SEQ ID NO: 4317566 - DNA, 25 bp, Homo sapien
tttcttcaagaatgtgcttgcagtt

SEQ ID NO: 4317567 - DNA, 25 bp, Homo sapien
tcttcaagaatgtgcttgcagtttt

SEQ ID NO: 4317568 - DNA, 25 bp, Homo sapien
cccgccccctcgcggtggcgattgg

SEQ ID NO: 4317569 - DNA, 25 bp, Homo sapien
cactccttgcagccctcgcccgcac

SEQ ID NO: 4317570 - DNA, 25 bp, Homo sapien
acccactccttgcagccctcgcccg

SEQ ID NO: 4317571 - DNA, 25 bp, Homo sapien
ctacccactccttgcagccctcgcc

SEQ ID NO: 4317572 - DNA, 25 bp, Homo sapien
ccactccttgcagccctcgcccgca

SEQ ID NO: 4317573 - DNA, 25 bp, Homo sapien
cattctgcgggtgctttgccgctgc

SEQ ID NO: 4317574 - DNA, 25 bp, Homo sapien
tatttcgcgataccccattctgcgg

SEQ ID NO: 4317575 - DNA, 25 bp, Homo sapien
aacccctgcctggaagacgggctgt

SEQ ID NO: 4317576 - DNA, 25 bp, Homo sapien
cgccgagaggaaggcaagctccaaa

SEQ ID NO: 4317577 - DNA, 25 bp, Homo sapien
tgccttctcattcacctgagcttcc

SEQ ID NO: 4317578 - DNA, 25 bp, Homo sapien
ccaagacgggcgagaacagcagcag

SEQ ID NO: 4317579 - DNA, 25 bp, Homo sapien
agcgagctaccaagacgggcgagaa

SEQ ID NO: 4317580 - DNA, 25 bp, Homo sapien
catatccgtgtgtctttaaaaagtg

SEQ ID NO: 4317581 - DNA, 25 bp, Homo sapien
agcctgggagcgagctaccaagacg

SEQ ID NO: 4317582 - DNA, 25 bp, Homo sapien
tctctgccgcttctttccgtaatta

SEQ ID NO: 4317583 - DNA, 25 bp, Homo sapien
taatattatcctttcacgtgaaatg

SEQ ID NO: 4317584 - DNA, 25 bp, Homo sapien
aatgtaagaacctctgcgaccgcag

SEQ ID NO: 4317585 - DNA, 25 bp, Homo sapien
gaaaccgcacaaaacgctgttatta

SEQ ID NO: 4317586 - DNA, 25 bp, Homo sapien
tacgttgggtgtaaatttcagatat

SEQ ID NO: 4317587 - DNA, 25 bp, Homo sapien
catgtgtgccagaatctccgtgaag

SEQ ID NO: 4317588 - DNA, 25 bp, Homo sapien
cttgtagagatcttgtgtagaaaat

SEQ ID NO: 4317589 - DNA, 25 bp, Homo sapien
attctccctgcgtacaccgccgagt

SEQ ID NO: 4317590 - DNA, 25 bp, Homo sapien
ttttctatagcttccactgagagga

SEQ ID NO: 4317591 - DNA, 25 bp, Homo sapien
tagtctccctttactcatgtgcagc

SEQ ID NO: 4317592 - DNA, 25 bp, Homo sapien
ccactgagaggatctaattagcatt

SEQ ID NO: 4317593 - DNA, 25 bp, Homo sapien
tctgtgtccaacttcaggattcaag

SEQ ID NO: 4317594 - DNA, 25 bp, Homo sapien
ggaatgaagtggaacacaagcagca

SEQ ID NO: 4317595 - DNA, 25 bp, Homo sapien
tcacctagccataccatgatggagt

SEQ ID NO: 4317596 - DNA, 25 bp, Homo sapien
gcagcagacatggtcaaattgtggt

SEQ ID NO: 4317597 - DNA, 25 bp, Homo sapien
tattttgtagtgagggttctttatg

SEQ ID NO: 4317598 - DNA, 25 bp, Homo sapien
taactcataatctttatatggcctt

SEQ ID NO: 4317599 - DNA, 25 bp, Homo sapien
cataatctttatatggccttttctt

SEQ ID NO: 4317600 - DNA, 25 bp, Homo sapien
ctcataatctttatatggccttttc

SEQ ID NO: 4317601 - DNA, 25 bp, Homo sapien
ttaactcataatctttatatggcct

SEQ ID NO: 4317602 - DNA, 25 bp, Homo sapien
tttcaacagctagtccccactgcct

SEQ ID NO: 4317603 - DNA, 25 bp, Homo sapien
aaccttgtttgaatccttgcagtct

SEQ ID NO: 4317604 - DNA, 25 bp, Homo sapien
ctctattgccataaccttgtttgaa

SEQ ID NO: 4317605 - DNA, 25 bp, Homo sapien
ttgtttgaatccttgcagtctttca

SEQ ID NO: 4317606 - DNA, 25 bp, Homo sapien
cccattagtgggatacaactctcct

SEQ ID NO: 4317607 - DNA, 25 bp, Homo sapien
gcgtttctgaaagcctctcaatgaa

SEQ ID NO: 4317608 - DNA, 25 bp, Homo sapien
tttggcatagccagttgctgctgag

SEQ ID NO: 4317609 - DNA, 25 bp, Homo sapien
aaagtggcccatggcttagctgacc

SEQ ID NO: 4317610 - DNA, 25 bp, Homo sapien
ttcagccagagccagattggatgct

SEQ ID NO: 4317611 - DNA, 25 bp, Homo sapien
tcagccagagccagattggatgctg

SEQ ID NO: 4317612 - DNA, 25 bp, Homo sapien
gttcaccctgcctgttttggagtgt

SEQ ID NO: 4317613 - DNA, 25 bp, Homo sapien
cattgtatgttaacttcccatggcc

SEQ ID NO: 4317614 - DNA, 25 bp, Homo sapien
tgagggcgctttagttaaaccataa

SEQ ID NO: 4317615 - DNA, 25 bp, Homo sapien
tacattgtatgttaacttcccatgg

SEQ ID NO: 4317616 - DNA, 25 bp, Homo sapien
ccatggcctggtgcaaattgtgagg

SEQ ID NO: 4317617 - DNA, 25 bp, Homo sapien
tatcttgggctggactccttcttga

SEQ ID NO: 4317618 - DNA, 25 bp, Homo sapien
tggccatatcttgggctggactcct

SEQ ID NO: 4317619 - DNA, 25 bp, Homo sapien
ttgggctggactccttcttgactcc

SEQ ID NO: 4317620 - DNA, 25 bp, Homo sapien
tccccactggccatatcttgggctg

SEQ ID NO: 4317621 - DNA, 25 bp, Homo sapien
aataatagatgatgattgctttcct

SEQ ID NO: 4317622 - DNA, 25 bp, Homo sapien
tctgctggctgattgaataatagat

SEQ ID NO: 4317623 - DNA, 25 bp, Homo sapien
taacaggcactgtgcacattttctc

SEQ ID NO: 4317624 - DNA, 25 bp, Homo sapien
tcttcaccagtgtgcctcatgagtt

SEQ ID NO: 4317625 - DNA, 25 bp, Homo sapien
tttgcaacctgaggtagcaacctgg

SEQ ID NO: 4317626 - DNA, 25 bp, Homo sapien
tcagtaataacctcacatttccggg

SEQ ID NO: 4317627 - DNA, 25 bp, Homo sapien
cagaaaatgggccttatagaagagg

SEQ ID NO: 4317628 - DNA, 25 bp, Homo sapien
cactaaatgtctgttgggaaaagaa

SEQ ID NO: 4317629 - DNA, 25 bp, Homo sapien
ttttggactgtgaacttgagaagga

SEQ ID NO: 4317630 - DNA, 25 bp, Homo sapien
cataaaccatgaacgcaaaataaac

SEQ ID NO: 4317631 - DNA, 25 bp, Homo sapien
tacccctttagataatgcataaacc

SEQ ID NO: 4317632 - DNA, 25 bp, Homo sapien
ggatgtactatcacatttccactct

SEQ ID NO: 4317633 - DNA, 25 bp, Homo sapien
taagctgcgtgatgtgaaaggcatc

SEQ ID NO: 4317634 - DNA, 25 bp, Homo sapien
gaaaggcatcgctccttctgtgact

SEQ ID NO: 4317635 - DNA, 25 bp, Homo sapien
tccttaggcttttctgtagttgtaa

SEQ ID NO: 4317636 - DNA, 25 bp, Homo sapien
caactcttgcgttgtcagttctcag

SEQ ID NO: 4317637 - DNA, 25 bp, Homo sapien
aggttttccagatagtcgttttgct

SEQ ID NO: 4317638 - DNA, 25 bp, Homo sapien
gttttccagatagtcgttttgcttg

SEQ ID NO: 4317639 - DNA, 25 bp, Homo sapien
acaggttttccagatagtcgttttg

SEQ ID NO: 4317640 - DNA, 25 bp, Homo sapien
tttccagatagtcgttttgcttggg

SEQ ID NO: 4317641 - DNA, 25 bp, Homo sapien
tcttgagtcataaactctatgctgc

SEQ ID NO: 4317642 - DNA, 25 bp, Homo sapien
aagtctctagggtttcttgagtcat

SEQ ID NO: 4317643 - DNA, 25 bp, Homo sapien
gatggatgctcgctgaaggactccc

SEQ ID NO: 4317644 - DNA, 25 bp, Homo sapien
cataaactctatgctgccactaaaa

SEQ ID NO: 4317645 - DNA, 25 bp, Homo sapien
gtccaataacataacatggcataag

SEQ ID NO: 4317646 - DNA, 25 bp, Homo sapien
actccatcagggtttgatcgcctac

SEQ ID NO: 4317647 - DNA, 25 bp, Homo sapien
tgatcgcctacatctggatatttct

SEQ ID NO: 4317648 - DNA, 25 bp, Homo sapien
aacatggcataagattgaaaactcc

SEQ ID NO: 4317649 - DNA, 25 bp, Homo sapien
cactggaaaccaatggccaatttaa

SEQ ID NO: 4317650 - DNA, 25 bp, Homo sapien
catagatccatatatccttctcatc

SEQ ID NO: 4317651 - DNA, 25 bp, Homo sapien
aatatcatagatccatatatccttc

SEQ ID NO: 4317652 - DNA, 25 bp, Homo sapien
cagcattccactggaaaccaatggc

SEQ ID NO: 4317653 - DNA, 25 bp, Homo sapien
atggtatatgattggctttgcccgt

SEQ ID NO: 4317654 - DNA, 25 bp, Homo sapien
tatgattggctttgcccgtttctga

SEQ ID NO: 4317655 - DNA, 25 bp, Homo sapien
ttggctttgcccgtttctgacaggg

SEQ ID NO: 4317656 - DNA, 25 bp, Homo sapien
tgcccgtttctgacagggactcagc

SEQ ID NO: 4317657 - DNA, 25 bp, Homo sapien
ttttaatttaggacaggtatcatcc

SEQ ID NO: 4317658 - DNA, 25 bp, Homo sapien
aggtatcatcctggcttctgtatac

SEQ ID NO: 4317659 - DNA, 25 bp, Homo sapien
gcttctgtatacctttaaggattga

SEQ ID NO: 4317660 - DNA, 25 bp, Homo sapien
ctttaaggattgatttaggtgatac

SEQ ID NO: 4317661 - DNA, 25 bp, Homo sapien
ctccaaatccaaagctaagtccgac

SEQ ID NO: 4317662 - DNA, 25 bp, Homo sapien
caacatgagttgattctctcagctg

SEQ ID NO: 4317663 - DNA, 25 bp, Homo sapien
agctaagtccgactcaatagcagag

SEQ ID NO: 4317664 - DNA, 25 bp, Homo sapien
cagctgtacgggcagctgagccctc

SEQ ID NO: 4317665 - DNA, 25 bp, Homo sapien
tgtgtcggtgctgactgagacgatt

SEQ ID NO: 4317666 - DNA, 25 bp, Homo sapien
gctgcatttgcttgaaacgcttcat

SEQ ID NO: 4317667 - DNA, 25 bp, Homo sapien
tgctgcatttgcttgaaacgcttca

SEQ ID NO: 4317668 - DNA, 25 bp, Homo sapien
ggtgctgactgagacgatttcattt

SEQ ID NO: 4317669 - DNA, 25 bp, Homo sapien
gaaatgccagccacattcagagaag

SEQ ID NO: 4317670 - DNA, 25 bp, Homo sapien
catcgtcaggatgttatgagctcac

SEQ ID NO: 4317671 - DNA, 25 bp, Homo sapien
gcatataacactagagttggcagga

SEQ ID NO: 4317672 - DNA, 25 bp, Homo sapien
gagagaaactaatcaccctgtccct

SEQ ID NO: 4317673 - DNA, 25 bp, Homo sapien
aaatgcacagattgagcttctcagg

SEQ ID NO: 4317674 - DNA, 25 bp, Homo sapien
taaatgcacagattgagcttctcag

SEQ ID NO: 4317675 - DNA, 25 bp, Homo sapien
aatgcacagattgagcttctcaggc

SEQ ID NO: 4317676 - DNA, 25 bp, Homo sapien
ctaaatgcacagattgagcttctca

SEQ ID NO: 4317677 - DNA, 25 bp, Homo sapien
gttgaaactcaccaaaaacagtgct

SEQ ID NO: 4317678 - DNA, 25 bp, Homo sapien
tggttgaaactcaccaaaaacagtg

SEQ ID NO: 4317679 - DNA, 25 bp, Homo sapien
acagtgcttttagctctaaagccat

SEQ ID NO: 4317680 - DNA, 25 bp, Homo sapien
aaacagtgcttttagctctaaagcc

SEQ ID NO: 4317681 - DNA, 25 bp, Homo sapien
cagccataactaatgtccactcaaa

SEQ ID NO: 4317682 - DNA, 25 bp, Homo sapien
tcaaaccaaggtgaatacataactg

SEQ ID NO: 4317683 - DNA, 25 bp, Homo sapien
gggtaccagagtgttcagccataac

SEQ ID NO: 4317684 - DNA, 25 bp, Homo sapien
tcttgaaagaggcagagtgctcatt

SEQ ID NO: 4317685 - DNA, 25 bp, Homo sapien
aaatacatcagatgccattctggtg

SEQ ID NO: 4317686 - DNA, 25 bp, Homo sapien
tctggtgtactcagtaaatcagctt

SEQ ID NO: 4317687 - DNA, 25 bp, Homo sapien
tgccattctggtgtactcagtaaat

SEQ ID NO: 4317688 - DNA, 25 bp, Homo sapien
ataaatacatcagatgccattctgg

SEQ ID NO: 4317689 - DNA, 25 bp, Homo sapien
tctttttataccaatgttgctgcca

SEQ ID NO: 4317690 - DNA, 25 bp, Homo sapien
cctctttttataccaatgttgctgc

SEQ ID NO: 4317691 - DNA, 25 bp, Homo sapien
ttttataccaatgttgctgccattc

SEQ ID NO: 4317692 - DNA, 25 bp, Homo sapien
taccaatgttgctgccattcatagt

SEQ ID NO: 4317693 - DNA, 25 bp, Homo sapien
taaaataaaacttccagatcagcag

SEQ ID NO: 4317694 - DNA, 25 bp, Homo sapien
tatttgcatgctggttgagtttcta

SEQ ID NO: 4317695 - DNA, 25 bp, Homo sapien
tgctccatagagatagacaatactc

SEQ ID NO: 4317696 - DNA, 25 bp, Homo sapien
aactcacagtcccaatatttgcatg

SEQ ID NO: 4317697 - DNA, 25 bp, Homo sapien
cagaaggaagccaagacgctatcca

SEQ ID NO: 4317698 - DNA, 25 bp, Homo sapien
aggaccatgcaggtatttttttggc

SEQ ID NO: 4317699 - DNA, 25 bp, Homo sapien
catgcaggtatttttttggcaattc

SEQ ID NO: 4317700 - DNA, 25 bp, Homo sapien
agaggaccatgcaggtatttttttg

SEQ ID NO: 4317701 - DNA, 25 bp, Homo sapien
tgcaggtatttttttggcaattcaa

SEQ ID NO: 4317702 - DNA, 25 bp, Homo sapien
aacacccaaacctatgctcatcatt

SEQ ID NO: 4317703 - DNA, 25 bp, Homo sapien
acacccaaacctatgctcatcattg

SEQ ID NO: 4317704 - DNA, 25 bp, Homo sapien
tcatcattgttccttgtcgaaacat

SEQ ID NO: 4317705 - DNA, 25 bp, Homo sapien
gctgattatgaggcaatgactgttg

SEQ ID NO: 4317706 - DNA, 25 bp, Homo sapien
ctgattatgaggcaatgactgttga

SEQ ID NO: 4317707 - DNA, 25 bp, Homo sapien
gaatagtattcgtgtttcccagtgc

SEQ ID NO: 4317708 - DNA, 25 bp, Homo sapien
ggagaccctctatgtagttcttccc

SEQ ID NO: 4317709 - DNA, 25 bp, Homo sapien
tcttgccaattgagaggagaccctc

SEQ ID NO: 4317710 - DNA, 25 bp, Homo sapien
gctgatgcagacatagcccttgcca

SEQ ID NO: 4317711 - DNA, 25 bp, Homo sapien
tgtgggaatgactgagtttccaaaa

SEQ ID NO: 4317712 - DNA, 25 bp, Homo sapien
tattgacttggtatctgtaggccat

SEQ ID NO: 4317713 - DNA, 25 bp, Homo sapien
tttcttcaggtatcacaggcattaa

SEQ ID NO: 4317714 - DNA, 25 bp, Homo sapien
taacctataggcattctcccaagtc

SEQ ID NO: 4317715 - DNA, 25 bp, Homo sapien
cagggagagacctctagctgtatca

SEQ ID NO: 4317716 - DNA, 25 bp, Homo sapien
gacctctagctgtatcatcaaatgg

SEQ ID NO: 4317717 - DNA, 25 bp, Homo sapien
catggccgtaggtggactcagacat

SEQ ID NO: 4317718 - DNA, 25 bp, Homo sapien
agaatcatggccgtaggtggactca

SEQ ID NO: 4317719 - DNA, 25 bp, Homo sapien
caatagattgggagtttctaaagga

SEQ ID NO: 4317720 - DNA, 25 bp, Homo sapien
tctaaaggatacattgggtctattg

SEQ ID NO: 4317721 - DNA, 25 bp, Homo sapien
gagtttgccagtcgtttacttcttc

SEQ ID NO: 4317722 - DNA, 25 bp, Homo sapien
tgtaattctagatcttaatgcattg

SEQ ID NO: 4317723 - DNA, 25 bp, Homo sapien
caatgattccttgccctatttagtg

SEQ ID NO: 4317724 - DNA, 25 bp, Homo sapien
ttcatcaacttgtacagctgaattc

SEQ ID NO: 4317725 - DNA, 25 bp, Homo sapien
taaaacacatctgaacaatgattcc

SEQ ID NO: 4317726 - DNA, 25 bp, Homo sapien
tagtgaattggaagcaaatacagtt

SEQ ID NO: 4317727 - DNA, 25 bp, Homo sapien
ttgctgaagctctaagaagggctca

SEQ ID NO: 4317728 - DNA, 25 bp, Homo sapien
gaagctctaagaagggctcagaatt

SEQ ID NO: 4317729 - DNA, 25 bp, Homo sapien
agcaggaataattgctgaagctcta

SEQ ID NO: 4317730 - DNA, 25 bp, Homo sapien
ctaagaagggctcagaattttctga

SEQ ID NO: 4317731 - DNA, 25 bp, Homo sapien
ttctcactggtaaaagtactggtgt

SEQ ID NO: 4317732 - DNA, 25 bp, Homo sapien
ggtaaaagtactggtgttgagtcac

SEQ ID NO: 4317733 - DNA, 25 bp, Homo sapien
tgcagcttgagccacagccccgttc

SEQ ID NO: 4317734 - DNA, 25 bp, Homo sapien
agccccgttcaggatccgtggactg

SEQ ID NO: 4317735 - DNA, 25 bp, Homo sapien
tttgcccgtttccccatcttctcca

SEQ ID NO: 4317736 - DNA, 25 bp, Homo sapien
gcccgtttccccatcttctccatca

SEQ ID NO: 4317737 - DNA, 25 bp, Homo sapien
cgtttccccatcttctccatcatgc

SEQ ID NO: 4317738 - DNA, 25 bp, Homo sapien
tttccccatcttctccatcatgcat

SEQ ID NO: 4317739 - DNA, 25 bp, Homo sapien
ttacaagttctataaggtatccagc

SEQ ID NO: 4317740 - DNA, 25 bp, Homo sapien
taagttttagttgaaatggtagcca

SEQ ID NO: 4317741 - DNA, 25 bp, Homo sapien
gttctataaggtatccagctttaaa

SEQ ID NO: 4317742 - DNA, 25 bp, Homo sapien
gttttagttgaaatggtagccacac

SEQ ID NO: 4317743 - DNA, 25 bp, Homo sapien
accggagcgggttgtcactgctgct

SEQ ID NO: 4317744 - DNA, 25 bp, Homo sapien
ttcacccagtagatacctcaccggg

SEQ ID NO: 4317745 - DNA, 25 bp, Homo sapien
gccggccggctgcttcgcgtgcggg

SEQ ID NO: 4317746 - DNA, 25 bp, Homo sapien
gagttagacaccaagcttctccatg

SEQ ID NO: 4317747 - DNA, 25 bp, Homo sapien
tccaatcttaaatgctatatccagc

SEQ ID NO: 4317748 - DNA, 25 bp, Homo sapien
aatcttaaatgctatatccagcatc

SEQ ID NO: 4317749 - DNA, 25 bp, Homo sapien
tcttaaatgctatatccagcatcca

SEQ ID NO: 4317750 - DNA, 25 bp, Homo sapien
tttccaatcttaaatgctatatcca

SEQ ID NO: 4317751 - DNA, 25 bp, Homo sapien
actgaagcatcatgtggagccccat

SEQ ID NO: 4317752 - DNA, 25 bp, Homo sapien
cagctgccaccactgaagcatcatg

SEQ ID NO: 4317753 - DNA, 25 bp, Homo sapien
gctgccaccactgaagcatcatgtg

SEQ ID NO: 4317754 - DNA, 25 bp, Homo sapien
caccactgaagcatcatgtggagcc

SEQ ID NO: 4317755 - DNA, 25 bp, Homo sapien
tatacccatgatctataaataaacg

SEQ ID NO: 4317756 - DNA, 25 bp, Homo sapien
tttgagtggctctaacatttgcaag

SEQ ID NO: 4317757 - DNA, 25 bp, Homo sapien
agtataaaggtataagccaaagagg

SEQ ID NO: 4317758 - DNA, 25 bp, Homo sapien
catttgcaagagtatgttcaccaac

SEQ ID NO: 4317759 - DNA, 25 bp, Homo sapien
gatatttggtgctgtgtgtctccct

SEQ ID NO: 4317760 - DNA, 25 bp, Homo sapien
cctgtgatatttggtgctgtgtgtc

SEQ ID NO: 4317761 - DNA, 25 bp, Homo sapien
tacccctgtgatatttggtgctgtg

SEQ ID NO: 4317762 - DNA, 25 bp, Homo sapien
gtgatatttggtgctgtgtgtctcc

SEQ ID NO: 4317763 - DNA, 25 bp, Homo sapien
aacccaagtttctggcagtagtcac

SEQ ID NO: 4317764 - DNA, 25 bp, Homo sapien
gatggtagtccaagcaaggtagcaa

SEQ ID NO: 4317765 - DNA, 25 bp, Homo sapien
cagtagtcactttgtgttaaaacca

SEQ ID NO: 4317766 - DNA, 25 bp, Homo sapien
tcactggtgccactgaacccaagtt

SEQ ID NO: 4317767 - DNA, 25 bp, Homo sapien
aaagcaattagctgggttatggtgt

SEQ ID NO: 4317768 - DNA, 25 bp, Homo sapien
aattagctgggttatggtgttctta

SEQ ID NO: 4317769 - DNA, 25 bp, Homo sapien
tgttcttaattgcagatggtatcat

SEQ ID NO: 4317770 - DNA, 25 bp, Homo sapien
ggtgttcttaattgcagatggtatc

SEQ ID NO: 4317771 - DNA, 25 bp, Homo sapien
tgagaactgccaatacgttaagcaa

SEQ ID NO: 4317772 - DNA, 25 bp, Homo sapien
taagcaatctgctgcaaaattgtct

SEQ ID NO: 4317773 - DNA, 25 bp, Homo sapien
aaagggaggaatgcaagcaagcagc

SEQ ID NO: 4317774 - DNA, 25 bp, Homo sapien
gcaataagagccagcagatctgcat

SEQ ID NO: 4317775 - DNA, 25 bp, Homo sapien
cattttgaaccataagggtcagcag

SEQ ID NO: 4317776 - DNA, 25 bp, Homo sapien
aagatgcagattgtaggagcccaaa

SEQ ID NO: 4317777 - DNA, 25 bp, Homo sapien
gggtcagcagcaatactagttagtt

SEQ ID NO: 4317778 - DNA, 25 bp, Homo sapien
taatgatggaggcaaacaacgtaag

SEQ ID NO: 4317779 - DNA, 25 bp, Homo sapien
ctccgatggtatttcgaagattgtt

SEQ ID NO: 4317780 - DNA, 25 bp, Homo sapien
ggtatttcgaagattgttgcacact

SEQ ID NO: 4317781 - DNA, 25 bp, Homo sapien
gattgttgcacactatagaaatttt

SEQ ID NO: 4317782 - DNA, 25 bp, Homo sapien
ttcgaagattgttgcacactataga

SEQ ID NO: 4317783 - DNA, 25 bp, Homo sapien
ggaagagatctataatccaaggaat

SEQ ID NO: 4317784 - DNA, 25 bp, Homo sapien
cagtgggcatctaattcaatatgat

SEQ ID NO: 4317785 - DNA, 25 bp, Homo sapien
gaagagatctataatccaaggaatg

SEQ ID NO: 4317786 - DNA, 25 bp, Homo sapien
aatcattcaaaagtacagtgggcat

SEQ ID NO: 4317787 - DNA, 25 bp, Homo sapien
cagagacatggcataccttgttcaa

SEQ ID NO: 4317788 - DNA, 25 bp, Homo sapien
tagtaaatgatgaggattgctgtcc

SEQ ID NO: 4317789 - DNA, 25 bp, Homo sapien
ccacatgctgggacatttaactaga

SEQ ID NO: 4317790 - DNA, 25 bp, Homo sapien
tcctaattataagttctgtgggcct

SEQ ID NO: 4317791 - DNA, 25 bp, Homo sapien
caagccgcagtctttagtttgtgat

SEQ ID NO: 4317792 - DNA, 25 bp, Homo sapien
gaatccacaaattaaccaaagccta

SEQ ID NO: 4317793 - DNA, 25 bp, Homo sapien
ggtattgcacctcaacaagccgcag

SEQ ID NO: 4317794 - DNA, 25 bp, Homo sapien
cccttgtgatgcaacagtgtaagca

SEQ ID NO: 4317795 - DNA, 25 bp, Homo sapien
ggtgcccattcctcttttactacat

SEQ ID NO: 4317796 - DNA, 25 bp, Homo sapien
acagctctccggaaatggaatcagg

SEQ ID NO: 4317797 - DNA, 25 bp, Homo sapien
tccggaaatggaatcaggtgcccat

SEQ ID NO: 4317798 - DNA, 25 bp, Homo sapien
aatcaggtgcccattcctcttttac

SEQ ID NO: 4317799 - DNA, 25 bp, Homo sapien
cgtagtatgatgtaatcgtctcacc

SEQ ID NO: 4317800 - DNA, 25 bp, Homo sapien
taatcgtctcaccttcactcagtag

SEQ ID NO: 4317801 - DNA, 25 bp, Homo sapien
ctgtagcgtagtatgatgtaatcgt

SEQ ID NO: 4317802 - DNA, 25 bp, Homo sapien
tatgatgtaatcgtctcaccttcac

SEQ ID NO: 4317803 - DNA, 25 bp, Homo sapien
tctgtatccaatttagtgccttcca

SEQ ID NO: 4317804 - DNA, 25 bp, Homo sapien
tttacttgtatactagcctgtaggg

SEQ ID NO: 4317805 - DNA, 25 bp, Homo sapien
taacacatagctttccgcatgctta

SEQ ID NO: 4317806 - DNA, 25 bp, Homo sapien
taatgcaagcatatttctgtatcca

SEQ ID NO: 4317807 - DNA, 25 bp, Homo sapien
ggaacataaatgacccagtcgagtt

SEQ ID NO: 4317808 - DNA, 25 bp, Homo sapien
tgttgcctgtcaagaggaacataaa

SEQ ID NO: 4317809 - DNA, 25 bp, Homo sapien
ttgcctgtcaagaggaacataaatg

SEQ ID NO: 4317810 - DNA, 25 bp, Homo sapien
ctattgttgcctgtcaagaggaaca

SEQ ID NO: 4317811 - DNA, 25 bp, Homo sapien
ctttctgttgcataactgtcccctt

SEQ ID NO: 4317812 - DNA, 25 bp, Homo sapien
tgtatagggatattgacatgcattt

SEQ ID NO: 4317813 - DNA, 25 bp, Homo sapien
catgcatttgctctatggattatct

SEQ ID NO: 4317814 - DNA, 25 bp, Homo sapien
ttactttctgttgcataactgtccc

SEQ ID NO: 4317815 - DNA, 25 bp, Homo sapien
taaaactgtgcaggataagacactc

SEQ ID NO: 4317816 - DNA, 25 bp, Homo sapien
gcaagatcagtcctaaccatagcat

SEQ ID NO: 4317817 - DNA, 25 bp, Homo sapien
cataaaacaagttggaccagcttta

SEQ ID NO: 4317818 - DNA, 25 bp, Homo sapien
tattaactggtcattaactgacttt

SEQ ID NO: 4317819 - DNA, 25 bp, Homo sapien
ctagttcttcccactcttgtcctca

SEQ ID NO: 4317820 - DNA, 25 bp, Homo sapien
cttcccactcttgtcctcaatcttt

SEQ ID NO: 4317821 - DNA, 25 bp, Homo sapien
gttcttcccactcttgtcctcaatc

SEQ ID NO: 4317822 - DNA, 25 bp, Homo sapien
tagttcttcccactcttgtcctcaa

SEQ ID NO: 4317823 - DNA, 25 bp, Homo sapien
caaaccactgatgagcactatttac

SEQ ID NO: 4317824 - DNA, 25 bp, Homo sapien
gcttaacagtcaactcaaaccactg

SEQ ID NO: 4317825 - DNA, 25 bp, Homo sapien
tggttaaatgaagtagcaaatgcac

SEQ ID NO: 4317826 - DNA, 25 bp, Homo sapien
tgaaacaaccagcataaccaaggat

SEQ ID NO: 4317827 - DNA, 25 bp, Homo sapien
tatcaaccctgccatatgagtccat

SEQ ID NO: 4317828 - DNA, 25 bp, Homo sapien
gacagtagaaacatctgctggattc

SEQ ID NO: 4317829 - DNA, 25 bp, Homo sapien
tagggagagttgacgcttatcaacc

SEQ ID NO: 4317830 - DNA, 25 bp, Homo sapien
tcccattggtccagacagtagaaac

SEQ ID NO: 4317831 - DNA, 25 bp, Homo sapien
gttttcccaacacatactatgggaa

SEQ ID NO: 4317832 - DNA, 25 bp, Homo sapien
tcatttctagctgttcacagttgtt

SEQ ID NO: 4317833 - DNA, 25 bp, Homo sapien
tcctgttctggtataaaacatacat

SEQ ID NO: 4317834 - DNA, 25 bp, Homo sapien
ttctagctgttcacagttgttttcc

SEQ ID NO: 4317835 - DNA, 25 bp, Homo sapien
gaacgctaggattcggtctacggga

SEQ ID NO: 4317836 - DNA, 25 bp, Homo sapien
ctctgatatcaggaggcgaaagccc

SEQ ID NO: 4317837 - DNA, 25 bp, Homo sapien
tgccaatctggcactgttacactct

SEQ ID NO: 4317838 - DNA, 25 bp, Homo sapien
tctacgggattgtaagggctgaagc

SEQ ID NO: 4317839 - DNA, 25 bp, Homo sapien
gctgcgggtcctagagaactaaaat

SEQ ID NO: 4317840 - DNA, 25 bp, Homo sapien
tcccaagggcatttaggattaggag

SEQ ID NO: 4317841 - DNA, 25 bp, Homo sapien
tgagattttcgcaagcatcactgct

SEQ ID NO: 4317842 - DNA, 25 bp, Homo sapien
taaatatctggcatgtagaggactc

SEQ ID NO: 4317843 - DNA, 25 bp, Homo sapien
cattctcttctataaagttaggtgg

SEQ ID NO: 4317844 - DNA, 25 bp, Homo sapien
tggatagaaaccatctgagttttag

SEQ ID NO: 4317845 - DNA, 25 bp, Homo sapien
gccacaaatagcctgtatttgcaca

SEQ ID NO: 4317846 - DNA, 25 bp, Homo sapien
ggaacagcgcttatcaagcatttta

SEQ ID NO: 4317847 - DNA, 25 bp, Homo sapien
ctccacctagtctgaacttcctgga

SEQ ID NO: 4317848 - DNA, 25 bp, Homo sapien
gatttttgtcgctgcagtgggctcc

SEQ ID NO: 4317849 - DNA, 25 bp, Homo sapien
tacgaagctcgagtatcccaggttg

SEQ ID NO: 4317850 - DNA, 25 bp, Homo sapien
ggcttcagccgtctttccattggag

SEQ ID NO: 4317851 - DNA, 25 bp, Homo sapien
gattcttacgccaatagttccagca

SEQ ID NO: 4317852 - DNA, 25 bp, Homo sapien
catctggccggggaatccctggtaa

SEQ ID NO: 4317853 - DNA, 25 bp, Homo sapien
ccctggtaataagattcttacgcca

SEQ ID NO: 4317854 - DNA, 25 bp, Homo sapien
cagcataacctcaagtggtgcttgt

SEQ ID NO: 4317855 - DNA, 25 bp, Homo sapien
cagtgacatctccaatcgtgaggtc

SEQ ID NO: 4317856 - DNA, 25 bp, Homo sapien
tcgtgaggtcaaatcctcaggcaca

SEQ ID NO: 4317857 - DNA, 25 bp, Homo sapien
cctgtgtttaatgaagcaatcttgc

SEQ ID NO: 4317858 - DNA, 25 bp, Homo sapien
catcccacaggtgtataatgacaat

SEQ ID NO: 4317859 - DNA, 25 bp, Homo sapien
ttttctcgtcctcactatctgttcc

SEQ ID NO: 4317860 - DNA, 25 bp, Homo sapien
caagagtggttcaatttctatgtga

SEQ ID NO: 4317861 - DNA, 25 bp, Homo sapien
tgtgatatcttagttgaagggattc

SEQ ID NO: 4317862 - DNA, 25 bp, Homo sapien
agttgaagggattcttggacagtaa

SEQ ID NO: 4317863 - DNA, 25 bp, Homo sapien
tgcccagttccagaagtggtgcata

SEQ ID NO: 4317864 - DNA, 25 bp, Homo sapien
aatgcccagttccagaagtggtgca

SEQ ID NO: 4317865 - DNA, 25 bp, Homo sapien
gcccagttccagaagtggtgcatat

SEQ ID NO: 4317866 - DNA, 25 bp, Homo sapien
ccagttccagaagtggtgcatatta

SEQ ID NO: 4317867 - DNA, 25 bp, Homo sapien
gaagtttccaccttatgcccacagg

SEQ ID NO: 4317868 - DNA, 25 bp, Homo sapien
tttttatcagacctcatcaaaggtc

SEQ ID NO: 4317869 - DNA, 25 bp, Homo sapien
gacaccccaagagattttcaactga

SEQ ID NO: 4317870 - DNA, 25 bp, Homo sapien
cactctccagaactacacagttttg

SEQ ID NO: 4317871 - DNA, 25 bp, Homo sapien
ggccggcaatgagcaagaaacaccc

SEQ ID NO: 4317872 - DNA, 25 bp, Homo sapien
caacaaacaaagtggccggcaatga

SEQ ID NO: 4317873 - DNA, 25 bp, Homo sapien
aaagtggccggcaatgagcaagaaa

SEQ ID NO: 4317874 - DNA, 25 bp, Homo sapien
ctgcccaacaaacaaagtggccggc

SEQ ID NO: 4317875 - DNA, 25 bp, Homo sapien
tgtagaaggtacaacttcgggatta

SEQ ID NO: 4317876 - DNA, 25 bp, Homo sapien
ttcctgtgttgtaaatgccaactga

SEQ ID NO: 4317877 - DNA, 25 bp, Homo sapien
tcctgtgttgtaaatgccaactgaa

SEQ ID NO: 4317878 - DNA, 25 bp, Homo sapien
aggctgtagaaggtacaacttcggg

SEQ ID NO: 4317879 - DNA, 25 bp, Homo sapien
tgcatttccataatagcatgacata

SEQ ID NO: 4317880 - DNA, 25 bp, Homo sapien
gcatttccataatagcatgacatat

SEQ ID NO: 4317881 - DNA, 25 bp, Homo sapien
caagctttgttgctcatgtagacac

SEQ ID NO: 4317882 - DNA, 25 bp, Homo sapien
cacatagatattatagactgctgga

SEQ ID NO: 4317883 - DNA, 25 bp, Homo sapien
cctgggtagtgattctccatttcag

SEQ ID NO: 4317884 - DNA, 25 bp, Homo sapien
tagacacatatcgttttcagagact

SEQ ID NO: 4317885 - DNA, 25 bp, Homo sapien
taggagagtacatcttctagctcgt

SEQ ID NO: 4317886 - DNA, 25 bp, Homo sapien
actaggagagtacatcttctagctc

SEQ ID NO: 4317887 - DNA, 25 bp, Homo sapien
gagtacatcttctagctcgtatggg

SEQ ID NO: 4317888 - DNA, 25 bp, Homo sapien
tacatcttctagctcgtatgggtgg

SEQ ID NO: 4317889 - DNA, 25 bp, Homo sapien
tgtactcgtaatgagcatttttcct

SEQ ID NO: 4317890 - DNA, 25 bp, Homo sapien
ctgtgtactcgtaatgagcattttt

SEQ ID NO: 4317891 - DNA, 25 bp, Homo sapien
ggtaagttaattctgtgtactcgta

SEQ ID NO: 4317892 - DNA, 25 bp, Homo sapien
cagttggtaagttaattctgtgtac

SEQ ID NO: 4317893 - DNA, 25 bp, Homo sapien
actttgcttcccactactatcatcc

SEQ ID NO: 4317894 - DNA, 25 bp, Homo sapien
ccactactatcatcccctcccttac

SEQ ID NO: 4317895 - DNA, 25 bp, Homo sapien
tgcttcccactactatcatcccctc

SEQ ID NO: 4317896 - DNA, 25 bp, Homo sapien
ttcccactactatcatcccctccct

SEQ ID NO: 4317897 - DNA, 25 bp, Homo sapien
cactgcaacagtcacaaccactgta

SEQ ID NO: 4317898 - DNA, 25 bp, Homo sapien
gtagccataacaaccagcccaacca

SEQ ID NO: 4317899 - DNA, 25 bp, Homo sapien
gtcacaaccactgtagccataacaa

SEQ ID NO: 4317900 - DNA, 25 bp, Homo sapien
caaccacatctgcaacaaccagcag

SEQ ID NO: 4317901 - DNA, 25 bp, Homo sapien
ggtacagtatgtttctttgttatag

SEQ ID NO: 4317902 - DNA, 25 bp, Homo sapien
gaggtacagtatgtttctttgttat

SEQ ID NO: 4317903 - DNA, 25 bp, Homo sapien
cagaggtacagtatgtttctttgtt

SEQ ID NO: 4317904 - DNA, 25 bp, Homo sapien
gtacagtatgtttctttgttatagc

SEQ ID NO: 4317905 - DNA, 25 bp, Homo sapien
tcacatcgtacatgcttttggagtg

SEQ ID NO: 4317906 - DNA, 25 bp, Homo sapien
ttaaggaacaagcaccatatatgtt

SEQ ID NO: 4317907 - DNA, 25 bp, Homo sapien
ctttcaaccttgctgcgagtatcac

SEQ ID NO: 4317908 - DNA, 25 bp, Homo sapien
acaagcaccatatatgttctatagg

SEQ ID NO: 4317909 - DNA, 25 bp, Homo sapien
cagtgtgcaatagcatcatgtccat

SEQ ID NO: 4317910 - DNA, 25 bp, Homo sapien
cagatcaccgcaataaagcacatat

SEQ ID NO: 4317911 - DNA, 25 bp, Homo sapien
gctttggagatatcatgggttcagt

SEQ ID NO: 4317912 - DNA, 25 bp, Homo sapien
taatgaccttcctctgaatatgaaa

SEQ ID NO: 4317913 - DNA, 25 bp, Homo sapien
tgctgctggagcatcttgctttgat

SEQ ID NO: 4317914 - DNA, 25 bp, Homo sapien
tgctggagcatcttgctttgatgtt

SEQ ID NO: 4317915 - DNA, 25 bp, Homo sapien
gctgctggagcatcttgctttgatg

SEQ ID NO: 4317916 - DNA, 25 bp, Homo sapien
ctgctggagcatcttgctttgatgt

SEQ ID NO: 4317917 - DNA, 25 bp, Homo sapien
taaagtcaatcctctgatacccttc

SEQ ID NO: 4317918 - DNA, 25 bp, Homo sapien
cagtgattcactcacatctttaggc

SEQ ID NO: 4317919 - DNA, 25 bp, Homo sapien
aaacattggtcactgtatcttcacc

SEQ ID NO: 4317920 - DNA, 25 bp, Homo sapien
gattatttcagcaatcttcacaggg

SEQ ID NO: 4317921 - DNA, 25 bp, Homo sapien
taatttacatgtccaccggagtagc

SEQ ID NO: 4317922 - DNA, 25 bp, Homo sapien
aagacgtgtagctttcagcctctcg

SEQ ID NO: 4317923 - DNA, 25 bp, Homo sapien
aatgtcaatgtctcaggaactaggg

SEQ ID NO: 4317924 - DNA, 25 bp, Homo sapien
tagatgtgctaacacccaggccttg

SEQ ID NO: 4317925 - DNA, 25 bp, Homo sapien
ctagtaactttctcttctatcccca

SEQ ID NO: 4317926 - DNA, 25 bp, Homo sapien
cagtctagtaactttctcttctatc

SEQ ID NO: 4317927 - DNA, 25 bp, Homo sapien
gtctagtaactttctcttctatccc

SEQ ID NO: 4317928 - DNA, 25 bp, Homo sapien
tagtaactttctcttctatccccat

SEQ ID NO: 4317929 - DNA, 25 bp, Homo sapien
cccgaatcagatcagtaagtatctg

SEQ ID NO: 4317930 - DNA, 25 bp, Homo sapien
gttttctcaggaacatcccgaatca

SEQ ID NO: 4317931 - DNA, 25 bp, Homo sapien
gatccaggatacaggtactctcttc

SEQ ID NO: 4317932 - DNA, 25 bp, Homo sapien
aagatccaggatacaggtactctct

SEQ ID NO: 4317933 - DNA, 25 bp, Homo sapien
tgctctcataggaggaatagtggct

SEQ ID NO: 4317934 - DNA, 25 bp, Homo sapien
gatcctaatgctttggctggccaga

SEQ ID NO: 4317935 - DNA, 25 bp, Homo sapien
gccagaatggccctgaccatgctct

SEQ ID NO: 4317936 - DNA, 25 bp, Homo sapien
tagttgtatttgtcacgctgtgttc

SEQ ID NO: 4317937 - DNA, 25 bp, Homo sapien
ttccatttttgggtgttctagatag

SEQ ID NO: 4317938 - DNA, 25 bp, Homo sapien
tccatttttgggtgttctagatagg

SEQ ID NO: 4317939 - DNA, 25 bp, Homo sapien
ttttgggtgttctagataggattat

SEQ ID NO: 4317940 - DNA, 25 bp, Homo sapien
ggtgttctagataggattattatca

SEQ ID NO: 4317941 - DNA, 25 bp, Homo sapien
tcttatggaactattataacagtgc

SEQ ID NO: 4317942 - DNA, 25 bp, Homo sapien
gcaacactttgcgatccaatctgat

SEQ ID NO: 4317943 - DNA, 25 bp, Homo sapien
taccaagtagtattatctgcacgag

SEQ ID NO: 4317944 - DNA, 25 bp, Homo sapien
tctgcacgagacaaatttaagtatt

SEQ ID NO: 4317945 - DNA, 25 bp, Homo sapien
tgattattttggagagaatgggccc

SEQ ID NO: 4317946 - DNA, 25 bp, Homo sapien
gggcccaaatgtgaaaaagatataa

SEQ ID NO: 4317947 - DNA, 25 bp, Homo sapien
tatatatgtcaagaaatgtatgatt

SEQ ID NO: 4317948 - DNA, 25 bp, Homo sapien
atatatataactcaagaaactcaag

SEQ ID NO: 4317949 - DNA, 25 bp, Homo sapien
ttcgtgtacatgatactagtagaca

SEQ ID NO: 4317950 - DNA, 25 bp, Homo sapien
catgatactagtagacacttttctc

SEQ ID NO: 4317951 - DNA, 25 bp, Homo sapien
tgctttttcgtgtacatgatactag

SEQ ID NO: 4317952 - DNA, 25 bp, Homo sapien
ttcagatgctttttcgtgtacatga

SEQ ID NO: 4317953 - DNA, 25 bp, Homo sapien
ttagaaaactgctatcactctctgg

SEQ ID NO: 4317954 - DNA, 25 bp, Homo sapien
tgggacagattggatttttcagcaa

SEQ ID NO: 4317955 - DNA, 25 bp, Homo sapien
acaacagcagtattttcagtcaaat

SEQ ID NO: 4317956 - DNA, 25 bp, Homo sapien
atgacaacagcagtattttcagtca

SEQ ID NO: 4317957 - DNA, 25 bp, Homo sapien
gggacagattggatttttcagcaat

SEQ ID NO: 4317958 - DNA, 25 bp, Homo sapien
tatcaaggctgtaggcagtaacaca

SEQ ID NO: 4317959 - DNA, 25 bp, Homo sapien
taaaatatgtatcagcagtcgccac

SEQ ID NO: 4317960 - DNA, 25 bp, Homo sapien
taatgtgattgcgtgacacaaagcc

SEQ ID NO: 4317961 - DNA, 25 bp, Homo sapien
tgaatggctggctcatcacgctgtt

SEQ ID NO: 4317962 - DNA, 25 bp, Homo sapien
agttccaccattttatagtctacat

SEQ ID NO: 4317963 - DNA, 25 bp, Homo sapien
tagaggttcctccaagtagtgatac

SEQ ID NO: 4317964 - DNA, 25 bp, Homo sapien
agaaatagttccaccattttatagt

SEQ ID NO: 4317965 - DNA, 25 bp, Homo sapien
tatagtctacattagaggttcctcc

SEQ ID NO: 4317966 - DNA, 25 bp, Homo sapien
tccctgttgcagtcacttctgagct

SEQ ID NO: 4317967 - DNA, 25 bp, Homo sapien
gggctgtggtgtcctcctgtggaca

SEQ ID NO: 4317968 - DNA, 25 bp, Homo sapien
gttacagccagcagtatccctgttg

SEQ ID NO: 4317969 - DNA, 25 bp, Homo sapien
ctttcccaaggaacagttacagcca

SEQ ID NO: 4317970 - DNA, 25 bp, Homo sapien
gtttcactccaatgcatgttccaca

SEQ ID NO: 4317971 - DNA, 25 bp, Homo sapien
tacagtcccaaacagtttcttcctg

SEQ ID NO: 4317972 - DNA, 25 bp, Homo sapien
cagtggtttcactccaatgcatgtt

SEQ ID NO: 4317973 - DNA, 25 bp, Homo sapien
gtggtttcactccaatgcatgttcc

SEQ ID NO: 4317974 - DNA, 25 bp, Homo sapien
aatgattcacaagtctcacctgctg

SEQ ID NO: 4317975 - DNA, 25 bp, Homo sapien
tgaatgattcacaagtctcacctgc

SEQ ID NO: 4317976 - DNA, 25 bp, Homo sapien
gattcacaagtctcacctgctggat

SEQ ID NO: 4317977 - DNA, 25 bp, Homo sapien
cacctgctggatcttccaacacaat

SEQ ID NO: 4317978 - DNA, 25 bp, Homo sapien
gcatctgcattcaaacaatgcttat

SEQ ID NO: 4317979 - DNA, 25 bp, Homo sapien
tatgatcatgatgaagataaggctt

SEQ ID NO: 4317980 - DNA, 25 bp, Homo sapien
tagaaatgactagaaagtatctttg

SEQ ID NO: 4317981 - DNA, 25 bp, Homo sapien
cttattgaagtggtttgactggtga

SEQ ID NO: 4317982 - DNA, 25 bp, Homo sapien
tgtgtgcgccatattgagaagcctt

SEQ ID NO: 4317983 - DNA, 25 bp, Homo sapien
ttgagaagccttctgcgagcaatgt

SEQ ID NO: 4317984 - DNA, 25 bp, Homo sapien
gaagccttctgcgagcaatgtcagt

SEQ ID NO: 4317985 - DNA, 25 bp, Homo sapien
tctgcgagcaatgtcagtgattgca

SEQ ID NO: 4317986 - DNA, 25 bp, Homo sapien
taatggaatgagacgtctgagaacc

SEQ ID NO: 4317987 - DNA, 25 bp, Homo sapien
ggtctgaatagtcacaggtcacagg

SEQ ID NO: 4317988 - DNA, 25 bp, Homo sapien
tcacaggttgagagacactgaacaa

SEQ ID NO: 4317989 - DNA, 25 bp, Homo sapien
ataaaaaatcgttagaggccagagg

SEQ ID NO: 4317990 - DNA, 25 bp, Homo sapien
cttggagcaagcacatccaggacta

SEQ ID NO: 4317991 - DNA, 25 bp, Homo sapien
ccaggactagcttcaaatctgactc

SEQ ID NO: 4317992 - DNA, 25 bp, Homo sapien
gcacatccaggactagcttcaaatc

SEQ ID NO: 4317993 - DNA, 25 bp, Homo sapien
ggagcaagcacatccaggactagct

SEQ ID NO: 4317994 - DNA, 25 bp, Homo sapien
tcttcggtcagatgggatggattca

SEQ ID NO: 4317995 - DNA, 25 bp, Homo sapien
tgaaactcttcggtcagatgggatg

SEQ ID NO: 4317996 - DNA, 25 bp, Homo sapien
acttgaaactcttcggtcagatggg

SEQ ID NO: 4317997 - DNA, 25 bp, Homo sapien
aactcttcggtcagatgggatggat

SEQ ID NO: 4317998 - DNA, 25 bp, Homo sapien
gcactggttgtattcttcacgctca

SEQ ID NO: 4317999 - DNA, 25 bp, Homo sapien
cttattagtgcataaggagcactgg

SEQ ID NO: 4318000 - DNA, 25 bp, Homo sapien
tattcttcacgctcagaagaaaaaa

SEQ ID NO: 4318001 - DNA, 25 bp, Homo sapien
taaggagcactggttgtattcttca

SEQ ID NO: 4318002 - DNA, 25 bp, Homo sapien
gagatgctttctacggtgtcttcaa

SEQ ID NO: 4318003 - DNA, 25 bp, Homo sapien
gccacagatctgctgcgtgtggaga

SEQ ID NO: 4318004 - DNA, 25 bp, Homo sapien
ggtctccgtgctcctcctaatccgg

SEQ ID NO: 4318005 - DNA, 25 bp, Homo sapien
gtgtcttcaaaacgaatgtctacca

SEQ ID NO: 4318006 - DNA, 25 bp, Homo sapien
aacatgacgtttatatcctcttaag

SEQ ID NO: 4318007 - DNA, 25 bp, Homo sapien
taatggccacaataacaagtgagtg

SEQ ID NO: 4318008 - DNA, 25 bp, Homo sapien
aaaatgcatcctgatgtaaacatag

SEQ ID NO: 4318009 - DNA, 25 bp, Homo sapien
tcctcttaagaatgtgagtttacag

SEQ ID NO: 4318010 - DNA, 25 bp, Homo sapien
caatgtatggcaacttgtagccact

SEQ ID NO: 4318011 - DNA, 25 bp, Homo sapien
gatggagctagaaaacttatgaaag

SEQ ID NO: 4318012 - DNA, 25 bp, Homo sapien
catcagacgacattatacattttcc

SEQ ID NO: 4318013 - DNA, 25 bp, Homo sapien
tcctctgagtggatagtaagctcca

SEQ ID NO: 4318014 - DNA, 25 bp, Homo sapien
gacatatcattcttgctgctcctac

SEQ ID NO: 4318015 - DNA, 25 bp, Homo sapien
ccatggcagatttaaaacactgtgg

SEQ ID NO: 4318016 - DNA, 25 bp, Homo sapien
tgctcctacatttacagcatcttga

SEQ ID NO: 4318017 - DNA, 25 bp, Homo sapien
ggcaaggtgccttcactttccatgg

SEQ ID NO: 4318018 - DNA, 25 bp, Homo sapien
cacatgtaaacgagttataggagaa

SEQ ID NO: 4318019 - DNA, 25 bp, Homo sapien
tgctggactggagctaaagctgaca

SEQ ID NO: 4318020 - DNA, 25 bp, Homo sapien
ttgcctttcacatgtaaacgagtta

SEQ ID NO: 4318021 - DNA, 25 bp, Homo sapien
taaagctgacacaacttgtcctggg

SEQ ID NO: 4318022 - DNA, 25 bp, Homo sapien
ggcgatgttcaagcctgctagctgc

SEQ ID NO: 4318023 - DNA, 25 bp, Homo sapien
gcacagagccaatctggaactctaa

SEQ ID NO: 4318024 - DNA, 25 bp, Homo sapien
tatcctgtttatctcaagcacagag

SEQ ID NO: 4318025 - DNA, 25 bp, Homo sapien
ggtattaatcacttctggcaggcga

SEQ ID NO: 4318026 - DNA, 25 bp, Homo sapien
aatacatgtttcgaatgaaatacca

SEQ ID NO: 4318027 - DNA, 25 bp, Homo sapien
tcatcagtgttatcatctctgaacg

SEQ ID NO: 4318028 - DNA, 25 bp, Homo sapien
tatcatctctgaacgtctgaatcaa

SEQ ID NO: 4318029 - DNA, 25 bp, Homo sapien
aattggagttgtgtgctgccagttc

SEQ ID NO: 4318030 - DNA, 25 bp, Homo sapien
agcaaatctttgacaagcaccattc

SEQ ID NO: 4318031 - DNA, 25 bp, Homo sapien
gacaagcaccattcattaatctttg

SEQ ID NO: 4318032 - DNA, 25 bp, Homo sapien
aatctttgacaagcaccattcatta

SEQ ID NO: 4318033 - DNA, 25 bp, Homo sapien
tctttgacaagcaccattcattaat

SEQ ID NO: 4318034 - DNA, 25 bp, Homo sapien
agtatgcacaccctgcttttctgtt

SEQ ID NO: 4318035 - DNA, 25 bp, Homo sapien
atgaagaggtcagcagaagatgttg

SEQ ID NO: 4318036 - DNA, 25 bp, Homo sapien
tcgtatctgcaggtaaattggtttt

SEQ ID NO: 4318037 - DNA, 25 bp, Homo sapien
tcagcagaagatgttggagcataca

SEQ ID NO: 4318038 - DNA, 25 bp, Homo sapien
ttgtgctagatagcactaagcattg

SEQ ID NO: 4318039 - DNA, 25 bp, Homo sapien
tgtattgagcaccatgactcttgaa

SEQ ID NO: 4318040 - DNA, 25 bp, Homo sapien
tgcatgtccttgtgctagatagcac

SEQ ID NO: 4318041 - DNA, 25 bp, Homo sapien
gactcttgaataatagagtagttca

SEQ ID NO: 4318042 - DNA, 25 bp, Homo sapien
cctggtttccagtgcctgaatctga

SEQ ID NO: 4318043 - DNA, 25 bp, Homo sapien
ggtttccagtgcctgaatctgatat

SEQ ID NO: 4318044 - DNA, 25 bp, Homo sapien
ttccagtgcctgaatctgatatcat

SEQ ID NO: 4318045 - DNA, 25 bp, Homo sapien
ctggtttccagtgcctgaatctgat

SEQ ID NO: 4318046 - DNA, 25 bp, Homo sapien
caaaaccaaccagactaaacttcat

SEQ ID NO: 4318047 - DNA, 25 bp, Homo sapien
tcaaaaccaaccagactaaacttca

SEQ ID NO: 4318048 - DNA, 25 bp, Homo sapien
ttaatataaatatcttaagttcagc

SEQ ID NO: 4318049 - DNA, 25 bp, Homo sapien
taatataaatatcttaagttcagcc

SEQ ID NO: 4318050 - DNA, 25 bp, Homo sapien
gacttgccatgaagacgcagtggcg

SEQ ID NO: 4318051 - DNA, 25 bp, Homo sapien
ttaaggaacatcaaggagtttatgc

SEQ ID NO: 4318052 - DNA, 25 bp, Homo sapien
aatttgagggaaggtatgacttgcc

SEQ ID NO: 4318053 - DNA, 25 bp, Homo sapien
ggtatgacttgccatgaagacgcag

SEQ ID NO: 4318054 - DNA, 25 bp, Homo sapien
tactctcactaggaagtcaaaagaa

SEQ ID NO: 4318055 - DNA, 25 bp, Homo sapien
taccattacaatagggactgtttct

SEQ ID NO: 4318056 - DNA, 25 bp, Homo sapien
ctcaacctgagggaattttgtctcc

SEQ ID NO: 4318057 - DNA, 25 bp, Homo sapien
taggaggcagtgtctagtacaatat

SEQ ID NO: 4318058 - DNA, 25 bp, Homo sapien
catttctatccagaggtccatggag

SEQ ID NO: 4318059 - DNA, 25 bp, Homo sapien
gattggagaatggtactgaacgcta

SEQ ID NO: 4318060 - DNA, 25 bp, Homo sapien
gaacgctatcacaagctctaagcat

SEQ ID NO: 4318061 - DNA, 25 bp, Homo sapien
tcaaaaccacactctcagattggag

SEQ ID NO: 4318062 - DNA, 25 bp, Homo sapien
tctgtgacctctctggtaagggcat

SEQ ID NO: 4318063 - DNA, 25 bp, Homo sapien
gatctctggtttgtaggtgggacct

SEQ ID NO: 4318064 - DNA, 25 bp, Homo sapien
tgtctgatgaagaccagatctctgg

SEQ ID NO: 4318065 - DNA, 25 bp, Homo sapien
gaccttctgacggtgttttcacatg

SEQ ID NO: 4318066 - DNA, 25 bp, Homo sapien
gaagaattgactatagattttgagt

SEQ ID NO: 4318067 - DNA, 25 bp, Homo sapien
atcctttcacaagtagcagaaacag

SEQ ID NO: 4318068 - DNA, 25 bp, Homo sapien
aacagaagaattgactatagatttt

SEQ ID NO: 4318069 - DNA, 25 bp, Homo sapien
tatcctttcacaagtagcagaaaca

SEQ ID NO: 4318070 - DNA, 25 bp, Homo sapien
tctaaacccataatatcatgacctt

SEQ ID NO: 4318071 - DNA, 25 bp, Homo sapien
aaacccataatatcatgacctttca

SEQ ID NO: 4318072 - DNA, 25 bp, Homo sapien
tccctctaaacccataatatcatga

SEQ ID NO: 4318073 - DNA, 25 bp, Homo sapien
ctgcaggctcatcttaagagctgct

SEQ ID NO: 4318074 - DNA, 25 bp, Homo sapien
gaacagagacttaacggcaagaaca

SEQ ID NO: 4318075 - DNA, 25 bp, Homo sapien
gtcttcgtccaaagtatccagaagg

SEQ ID NO: 4318076 - DNA, 25 bp, Homo sapien
tccagaaggaagattgttgaacaga

SEQ ID NO: 4318077 - DNA, 25 bp, Homo sapien
gaatacacaaggtgggcggtcttcg

SEQ ID NO: 4318078 - DNA, 25 bp, Homo sapien
gagcacctctggtgttcttatgcca

SEQ ID NO: 4318079 - DNA, 25 bp, Homo sapien
cattttgaggacgaggatgccaaga

SEQ ID NO: 4318080 - DNA, 25 bp, Homo sapien
tgcaggcaacgtcctaagagcacct

SEQ ID NO: 4318081 - DNA, 25 bp, Homo sapien
gtgtaggtgcgtatcattgcaggca

SEQ ID NO: 4318082 - DNA, 25 bp, Homo sapien
tactttggtcagatccctcgaagcc

SEQ ID NO: 4318083 - DNA, 25 bp, Homo sapien
ctacgagttccagtcagagtaaatg

SEQ ID NO: 4318084 - DNA, 25 bp, Homo sapien
cctcgaagcctaatgagcctgtgga

SEQ ID NO: 4318085 - DNA, 25 bp, Homo sapien
agctgagatactgggtcgagataaa

SEQ ID NO: 4318086 - DNA, 25 bp, Homo sapien
gaatacatcactttcaaattgcagc

SEQ ID NO: 4318087 - DNA, 25 bp, Homo sapien
ggctaacaatcatcaaggccacaaa

SEQ ID NO: 4318088 - DNA, 25 bp, Homo sapien
cttggcagtatcaggaacttcatag

SEQ ID NO: 4318089 - DNA, 25 bp, Homo sapien
cagtaattcaagtgtttggctaaca

SEQ ID NO: 4318090 - DNA, 25 bp, Homo sapien
ggaaagaattgaaggagtggccata

SEQ ID NO: 4318091 - DNA, 25 bp, Homo sapien
aggaaagaattgaaggagtggccat

SEQ ID NO: 4318092 - DNA, 25 bp, Homo sapien
gaaagaattgaaggagtggccatat

SEQ ID NO: 4318093 - DNA, 25 bp, Homo sapien
gtgagctttgttgagagtagatttt

SEQ ID NO: 4318094 - DNA, 25 bp, Homo sapien
ctttccggtttttgatgagtctcat

SEQ ID NO: 4318095 - DNA, 25 bp, Homo sapien
actttccggtttttgatgagtctca

SEQ ID NO: 4318096 - DNA, 25 bp, Homo sapien
tagggttgggctttgagctatcgat

SEQ ID NO: 4318097 - DNA, 25 bp, Homo sapien
tgatcatgattgtgtggttagggtt

SEQ ID NO: 4318098 - DNA, 25 bp, Homo sapien
tgggctttgagctatcgattgttac

SEQ ID NO: 4318099 - DNA, 25 bp, Homo sapien
tatcgattgttactgctagacccat

SEQ ID NO: 4318100 - DNA, 25 bp, Homo sapien
tcagatgtggttggcagctttgaag

SEQ ID NO: 4318101 - DNA, 25 bp, Homo sapien
agatgtggttggcagctttgaagaa

SEQ ID NO: 4318102 - DNA, 25 bp, Homo sapien
cagatgtggttggcagctttgaaga

SEQ ID NO: 4318103 - DNA, 25 bp, Homo sapien
caatgggagccaagcgaaggaggaa

SEQ ID NO: 4318104 - DNA, 25 bp, Homo sapien
cagtactcccttacatgtcagcaag

SEQ ID NO: 4318105 - DNA, 25 bp, Homo sapien
tgtcagcaagagacacaatgggagc

SEQ ID NO: 4318106 - DNA, 25 bp, Homo sapien
ttatctcaacctggtcccatcattg

SEQ ID NO: 4318107 - DNA, 25 bp, Homo sapien
ctagttaaaattcaagtgacatctt

SEQ ID NO: 4318108 - DNA, 25 bp, Homo sapien
ttgagccttgtgctgtatccctctg

SEQ ID NO: 4318109 - DNA, 25 bp, Homo sapien
agttttgcctgagactgtgatttca

SEQ ID NO: 4318110 - DNA, 25 bp, Homo sapien
ttttgataaagccagacttgagcct

SEQ ID NO: 4318111 - DNA, 25 bp, Homo sapien
tgatttaataggcttcaccttaact

SEQ ID NO: 4318112 - DNA, 25 bp, Homo sapien
aatgatttaataggcttcaccttaa

SEQ ID NO: 4318113 - DNA, 25 bp, Homo sapien
agcaaatgatttaataggcttcacc

SEQ ID NO: 4318114 - DNA, 25 bp, Homo sapien
taataggcttcaccttaactttcat

SEQ ID NO: 4318115 - DNA, 25 bp, Homo sapien
aaggccaatcactgttgccatttct

SEQ ID NO: 4318116 - DNA, 25 bp, Homo sapien
gaaggccaatcactgttgccatttc

SEQ ID NO: 4318117 - DNA, 25 bp, Homo sapien
caattacagctatgtagcgtttatg

SEQ ID NO: 4318118 - DNA, 25 bp, Homo sapien
gtagccaattacagctatgtagcgt

SEQ ID NO: 4318119 - DNA, 25 bp, Homo sapien
gccaattacagctatgtagcgttta

SEQ ID NO: 4318120 - DNA, 25 bp, Homo sapien
tcagtagccaattacagctatgtag

SEQ ID NO: 4318121 - DNA, 25 bp, Homo sapien
tctcttggcattaattcatgtttac

SEQ ID NO: 4318122 - DNA, 25 bp, Homo sapien
tgtttacacccactatgatcattcc

SEQ ID NO: 4318123 - DNA, 25 bp, Homo sapien
catgtttacacccactatgatcatt

SEQ ID NO: 4318124 - DNA, 25 bp, Homo sapien
tattcccattgctttttcgtctctt

SEQ ID NO: 4318125 - DNA, 25 bp, Homo sapien
ggtacacagacatcagcttgtgact

SEQ ID NO: 4318126 - DNA, 25 bp, Homo sapien
tcactgcttcttgagataaattgca

SEQ ID NO: 4318127 - DNA, 25 bp, Homo sapien
tgcaaaccgaggtaacaaatcagca

SEQ ID NO: 4318128 - DNA, 25 bp, Homo sapien
gagataaattgcaaaccgaggtaac

SEQ ID NO: 4318129 - DNA, 25 bp, Homo sapien
gcaagagttagccaagggtgaagaa

SEQ ID NO: 4318130 - DNA, 25 bp, Homo sapien
ctgcacataagcaagagttagccaa

SEQ ID NO: 4318131 - DNA, 25 bp, Homo sapien
cacataagcaagagttagccaaggg

SEQ ID NO: 4318132 - DNA, 25 bp, Homo sapien
taagcaagagttagccaagggtgaa

SEQ ID NO: 4318133 - DNA, 25 bp, Homo sapien
aagcaaactcaaaaggcaaattcac

SEQ ID NO: 4318134 - DNA, 25 bp, Homo sapien
cttcctgcttaaaagcaaactcaaa

SEQ ID NO: 4318135 - DNA, 25 bp, Homo sapien
tgttctcagtgtctgtaacttgctg

SEQ ID NO: 4318136 - DNA, 25 bp, Homo sapien
gcaaattcactttttcaactacaaa

SEQ ID NO: 4318137 - DNA, 25 bp, Homo sapien
tgtttcaaaggagacgtaggatgag

SEQ ID NO: 4318138 - DNA, 25 bp, Homo sapien
tcaaaggagacgtaggatgagggct

SEQ ID NO: 4318139 - DNA, 25 bp, Homo sapien
gagacgtaggatgagggcttttcat

SEQ ID NO: 4318140 - DNA, 25 bp, Homo sapien
aggagacgtaggatgagggcttttc

SEQ ID NO: 4318141 - DNA, 25 bp, Homo sapien
tgtggtggatatcctgtgactggca

SEQ ID NO: 4318142 - DNA, 25 bp, Homo sapien
gtgtcttgtggtggatatcctgtga

SEQ ID NO: 4318143 - DNA, 25 bp, Homo sapien
tcttgtggtggatatcctgtgactg

SEQ ID NO: 4318144 - DNA, 25 bp, Homo sapien
tctcaggggtgtcttgtggtggata

SEQ ID NO: 4318145 - DNA, 25 bp, Homo sapien
ctgtataaatatgatacatgtggga

SEQ ID NO: 4318146 - DNA, 25 bp, Homo sapien
catgaaagtgaagagtctggtaaga

SEQ ID NO: 4318147 - DNA, 25 bp, Homo sapien
taattcatcagagttcatagtggtg

SEQ ID NO: 4318148 - DNA, 25 bp, Homo sapien
tgtgggaagggtttctattggagtc

SEQ ID NO: 4318149 - DNA, 25 bp, Homo sapien
gagtcagactaacaaagactttccc

SEQ ID NO: 4318150 - DNA, 25 bp, Homo sapien
cttcccacacccgttgaaggagtca

SEQ ID NO: 4318151 - DNA, 25 bp, Homo sapien
gtcagaggaggtgttaggtagacac

SEQ ID NO: 4318152 - DNA, 25 bp, Homo sapien
cacccgttgaaggagtcagactaac

SEQ ID NO: 4318153 - DNA, 25 bp, Homo sapien
cttgctaagtgttgcgattataggc

SEQ ID NO: 4318154 - DNA, 25 bp, Homo sapien
taagtatttgctttgtggacataaa

SEQ ID NO: 4318155 - DNA, 25 bp, Homo sapien
taattcaatagtggtttagactgca

SEQ ID NO: 4318156 - DNA, 25 bp, Homo sapien
gctttctagagatgcattttaggac

SEQ ID NO: 4318157 - DNA, 25 bp, Homo sapien
tgcctctcccttgatctggttctca

SEQ ID NO: 4318158 - DNA, 25 bp, Homo sapien
ggttctcatggtctgtctctacata

SEQ ID NO: 4318159 - DNA, 25 bp, Homo sapien
taaaaagcattagaaggtcggcact

SEQ ID NO: 4318160 - DNA, 25 bp, Homo sapien
tcggcactgatcaggtgctgattgg

SEQ ID NO: 4318161 - DNA, 25 bp, Homo sapien
gaggaggaagttccaagatagagta

SEQ ID NO: 4318162 - DNA, 25 bp, Homo sapien
cttagagaggaggaagttccaagat

SEQ ID NO: 4318163 - DNA, 25 bp, Homo sapien
agagaggaggaagttccaagataga

SEQ ID NO: 4318164 - DNA, 25 bp, Homo sapien
tagagaggaggaagttccaagatag

SEQ ID NO: 4318165 - DNA, 25 bp, Homo sapien
ttaatttgatggtagctctgtcatg

SEQ ID NO: 4318166 - DNA, 25 bp, Homo sapien
tgtcatgtgtgttagataattaatg

SEQ ID NO: 4318167 - DNA, 25 bp, Homo sapien
ggctatcaagtcttttggaacgctg

SEQ ID NO: 4318168 - DNA, 25 bp, Homo sapien
catgtgtgttagataattaatgtta

SEQ ID NO: 4318169 - DNA, 25 bp, Homo sapien
cttgtactgcaagagattgggtcaa

SEQ ID NO: 4318170 - DNA, 25 bp, Homo sapien
gcattcaacctctgtttcatcagca

SEQ ID NO: 4318171 - DNA, 25 bp, Homo sapien
tggcttcgatattgcagttgcattc

SEQ ID NO: 4318172 - DNA, 25 bp, Homo sapien
tgttcatttctaattactgactggc

SEQ ID NO: 4318173 - DNA, 25 bp, Homo sapien
tcttgggaatactgcaaaatctcat

SEQ ID NO: 4318174 - DNA, 25 bp, Homo sapien
tatttataccataaggtagattttg

SEQ ID NO: 4318175 - DNA, 25 bp, Homo sapien
ctttcatatcttatattcagtcaga

SEQ ID NO: 4318176 - DNA, 25 bp, Homo sapien
tctgaaatacaagatcctttgggtg

SEQ ID NO: 4318177 - DNA, 25 bp, Homo sapien
tgtacaccaataaaccaaaagcatg

SEQ ID NO: 4318178 - DNA, 25 bp, Homo sapien
gagtcccttagcacattagtttcaa

SEQ ID NO: 4318179 - DNA, 25 bp, Homo sapien
taataactcccttgtctggtccgtg

SEQ ID NO: 4318180 - DNA, 25 bp, Homo sapien
gcatacgtgagtgcatgttaccaga

SEQ ID NO: 4318181 - DNA, 25 bp, Homo sapien
tacattattgtgttcaactgagagg

SEQ ID NO: 4318182 - DNA, 25 bp, Homo sapien
tgtaaaatataattgcagggacagc

SEQ ID NO: 4318183 - DNA, 25 bp, Homo sapien
ctgagaggagctgtgtagaattgta

SEQ ID NO: 4318184 - DNA, 25 bp, Homo sapien
gagctgtgtagaattgtatttgtaa

SEQ ID NO: 4318185 - DNA, 25 bp, Homo sapien
cacaataacacaggtagtacctacc

SEQ ID NO: 4318186 - DNA, 25 bp, Homo sapien
gagtcagttatctatgtctgggtcc

SEQ ID NO: 4318187 - DNA, 25 bp, Homo sapien
ctttaagtgaagagctaagattcct

SEQ ID NO: 4318188 - DNA, 25 bp, Homo sapien
cacatacccatgaaggacattgtga

SEQ ID NO: 4318189 - DNA, 25 bp, Homo sapien
tccccaagattctttaggcacacct

SEQ ID NO: 4318190 - DNA, 25 bp, Homo sapien
caagattctttaggcacacctggag

SEQ ID NO: 4318191 - DNA, 25 bp, Homo sapien
cccaagattctttaggcacacctgg

SEQ ID NO: 4318192 - DNA, 25 bp, Homo sapien
tgcaggatgcttaggggtctcttta

SEQ ID NO: 4318193 - DNA, 25 bp, Homo sapien
ggtttttgctgttctacaaattctc

SEQ ID NO: 4318194 - DNA, 25 bp, Homo sapien
tgcctctattgaagaatggcatttc

SEQ ID NO: 4318195 - DNA, 25 bp, Homo sapien
gctgttctacaaattctctcagtca

SEQ ID NO: 4318196 - DNA, 25 bp, Homo sapien
ttgaagaatggcatttcagtggttt

SEQ ID NO: 4318197 - DNA, 25 bp, Homo sapien
tcagtattcccactctggatttgac

SEQ ID NO: 4318198 - DNA, 25 bp, Homo sapien
gcctgaggatgataccaagcacttc

SEQ ID NO: 4318199 - DNA, 25 bp, Homo sapien
gtgcttatgaggctttaaagaaaag

SEQ ID NO: 4318200 - DNA, 25 bp, Homo sapien
cttcccatagtgcttatgaggcttt

SEQ ID NO: 4318201 - DNA, 25 bp, Homo sapien
tggcttctggaagtactgcgctaga

SEQ ID NO: 4318202 - DNA, 25 bp, Homo sapien
gatgttcttggacagccgtcaacat

SEQ ID NO: 4318203 - DNA, 25 bp, Homo sapien
ttgactttcagcaggtgctctgcaa

SEQ ID NO: 4318204 - DNA, 25 bp, Homo sapien
cagaaagtgaatggtacagttgata

SEQ ID NO: 4318205 - DNA, 25 bp, Homo sapien
tgcattgagctgtattcacttggag

SEQ ID NO: 4318206 - DNA, 25 bp, Homo sapien
atatggaagtgagtaaggcttctcc

SEQ ID NO: 4318207 - DNA, 25 bp, Homo sapien
tgacttaacgatattttcccagact

SEQ ID NO: 4318208 - DNA, 25 bp, Homo sapien
cattgatccttgattagtcctgaag

SEQ ID NO: 4318209 - DNA, 25 bp, Homo sapien
aatggcacatagcatgatatcatgt

SEQ ID NO: 4318210 - DNA, 25 bp, Homo sapien
gacttactgagttataattgacaca

SEQ ID NO: 4318211 - DNA, 25 bp, Homo sapien
cacaagaaaggatagagtgtcatgc

SEQ ID NO: 4318212 - DNA, 25 bp, Homo sapien
ggctctctgcaaatagtctcttgta

SEQ ID NO: 4318213 - DNA, 25 bp, Homo sapien
tgtttcgaacaaagtcttgcagctc

SEQ ID NO: 4318214 - DNA, 25 bp, Homo sapien
taagctttcaacagaaggaataggg

SEQ ID NO: 4318215 - DNA, 25 bp, Homo sapien
gatcagcagcattccagagtatgga

SEQ ID NO: 4318216 - DNA, 25 bp, Homo sapien
gttaaagctttaccacgtcaatgtg

SEQ ID NO: 4318217 - DNA, 25 bp, Homo sapien
tggagacttaggacatcgcaagatg

SEQ ID NO: 4318218 - DNA, 25 bp, Homo sapien
cacttcagctaggaagaatctgcac

SEQ ID NO: 4318219 - DNA, 25 bp, Homo sapien
tagtccttctcgattacaagagtga

SEQ ID NO: 4318220 - DNA, 25 bp, Homo sapien
gatggaagtccaatactaattgttg

SEQ ID NO: 4318221 - DNA, 25 bp, Homo sapien
gaagcactataataactacatgaaa

SEQ ID NO: 4318222 - DNA, 25 bp, Homo sapien
aaatgccaacgcaaacattatgact

SEQ ID NO: 4318223 - DNA, 25 bp, Homo sapien
gaaccattgaatatgttactgtaca

SEQ ID NO: 4318224 - DNA, 25 bp, Homo sapien
agaaccattgaatatgttactgtac

SEQ ID NO: 4318225 - DNA, 25 bp, Homo sapien
cagaaccattgaatatgttactgta

SEQ ID NO: 4318226 - DNA, 25 bp, Homo sapien
gccttgtgtggtagcacgcatctgt

SEQ ID NO: 4318227 - DNA, 25 bp, Homo sapien
tagccttgtgtggtagcacgcatct

SEQ ID NO: 4318228 - DNA, 25 bp, Homo sapien
aaatattagccttgtgtggtagcac

SEQ ID NO: 4318229 - DNA, 25 bp, Homo sapien
tattagccttgtgtggtagcacgca

SEQ ID NO: 4318230 - DNA, 25 bp, Homo sapien
tattgaacaaattgaagataatgac

SEQ ID NO: 4318231 - DNA, 25 bp, Homo sapien
agtcttccatcatcttatatcattg

SEQ ID NO: 4318232 - DNA, 25 bp, Homo sapien
caaattgaagataatgacatatgtt

SEQ ID NO: 4318233 - DNA, 25 bp, Homo sapien
cacatattatgagacctgcatttga

SEQ ID NO: 4318234 - DNA, 25 bp, Homo sapien
tagttaaaaatgacagcataactaa

SEQ ID NO: 4318235 - DNA, 25 bp, Homo sapien
attagttaaaaatgacagcataact

SEQ ID NO: 4318236 - DNA, 25 bp, Homo sapien
tattagttaaaaatgacagcataac

SEQ ID NO: 4318237 - DNA, 25 bp, Homo sapien
tttattagttaaaaatgacagcata

SEQ ID NO: 4318238 - DNA, 25 bp, Homo sapien
taaaagtgtacatggtgcaattccc

SEQ ID NO: 4318239 - DNA, 25 bp, Homo sapien
gcaattcccagagagcactacaaga

SEQ ID NO: 4318240 - DNA, 25 bp, Homo sapien
taggagcctctccattaaactggca

SEQ ID NO: 4318241 - DNA, 25 bp, Homo sapien
tattaacttttgctctagccacggc

SEQ ID NO: 4318242 - DNA, 25 bp, Homo sapien
gaactccttccgtcttcaataactg

SEQ ID NO: 4318243 - DNA, 25 bp, Homo sapien
tgcaatggctcaagtgaactccttc

SEQ ID NO: 4318244 - DNA, 25 bp, Homo sapien
gactgagatcgtaaatggttgtgtt

SEQ ID NO: 4318245 - DNA, 25 bp, Homo sapien
actgccatcaatacccctttgtaac

SEQ ID NO: 4318246 - DNA, 25 bp, Homo sapien
tagtagccctcaataaaacagttcg

SEQ ID NO: 4318247 - DNA, 25 bp, Homo sapien
gaaaactgaattggacctacatgcc

SEQ ID NO: 4318248 - DNA, 25 bp, Homo sapien
aaattgtggaggcagatagtagccc

SEQ ID NO: 4318249 - DNA, 25 bp, Homo sapien
ttagagaatggcctaacagccgagt

SEQ ID NO: 4318250 - DNA, 25 bp, Homo sapien
tctgcctcctataatactaggatta

SEQ ID NO: 4318251 - DNA, 25 bp, Homo sapien
agcctctgcctcctataatactagg

SEQ ID NO: 4318252 - DNA, 25 bp, Homo sapien
ccaggctcaaacgttcctccggact

SEQ ID NO: 4318253 - DNA, 25 bp, Homo sapien
ggctcaaacgttcctccggactcag

SEQ ID NO: 4318254 - DNA, 25 bp, Homo sapien
ctttcctgtgtacagcagaaaccag

SEQ ID NO: 4318255 - DNA, 25 bp, Homo sapien
accaggttcccaacatttctcagtt

SEQ ID NO: 4318256 - DNA, 25 bp, Homo sapien
gttcccaacatttctcagttcctca

SEQ ID NO: 4318257 - DNA, 25 bp, Homo sapien
caggttcccaacatttctcagttcc

SEQ ID NO: 4318258 - DNA, 25 bp, Homo sapien
caaagtgcggagtgatgagagtaca

SEQ ID NO: 4318259 - DNA, 25 bp, Homo sapien
tgaaaactcagaaggacacaaggca

SEQ ID NO: 4318260 - DNA, 25 bp, Homo sapien
gaggtaacctagaaagcacagacag

SEQ ID NO: 4318261 - DNA, 25 bp, Homo sapien
gaactctgcctagctgaacatgtca

SEQ ID NO: 4318262 - DNA, 25 bp, Homo sapien
gaaaggccgaaaaccagtcaactgc

SEQ ID NO: 4318263 - DNA, 25 bp, Homo sapien
cctttcctgacaaggtggttggcta

SEQ ID NO: 4318264 - DNA, 25 bp, Homo sapien
tatgcctttcgtgtcctattgctga

SEQ ID NO: 4318265 - DNA, 25 bp, Homo sapien
tgcacagttggcaaaggctcagatg

SEQ ID NO: 4318266 - DNA, 25 bp, Homo sapien
taccacggtgattccttactcttgt

SEQ ID NO: 4318267 - DNA, 25 bp, Homo sapien
ccacggtgattccttactcttgtct

SEQ ID NO: 4318268 - DNA, 25 bp, Homo sapien
tcagtaccacggtgattccttactc

SEQ ID NO: 4318269 - DNA, 25 bp, Homo sapien
gtaccacggtgattccttactcttg

SEQ ID NO: 4318270 - DNA, 25 bp, Homo sapien
ggtgcaaggatctcaagttgtctgc

SEQ ID NO: 4318271 - DNA, 25 bp, Homo sapien
tacaaaacggactacacaaagggca

SEQ ID NO: 4318272 - DNA, 25 bp, Homo sapien
gacattaaggcaatctacaaaacgg

SEQ ID NO: 4318273 - DNA, 25 bp, Homo sapien
gaaactgttgtaaacccaggatgga

SEQ ID NO: 4318274 - DNA, 25 bp, Homo sapien
tttgcctttagcgacatccacttcc

SEQ ID NO: 4318275 - DNA, 25 bp, Homo sapien
gcctttgcctttagcgacatccact

SEQ ID NO: 4318276 - DNA, 25 bp, Homo sapien
ctagcctttgcctttagcgacatcc

SEQ ID NO: 4318277 - DNA, 25 bp, Homo sapien
tagcctttgcctttagcgacatcca

SEQ ID NO: 4318278 - DNA, 25 bp, Homo sapien
ttcatgcagatctcacaggctggga

SEQ ID NO: 4318279 - DNA, 25 bp, Homo sapien
gtcattctggacacgtgccctacac

SEQ ID NO: 4318280 - DNA, 25 bp, Homo sapien
gaggcaaatccccatactttaggca

SEQ ID NO: 4318281 - DNA, 25 bp, Homo sapien
gatagctacatggatctcagagagc

SEQ ID NO: 4318282 - DNA, 25 bp, Homo sapien
tagcttggtcctactatgcagaaac

SEQ ID NO: 4318283 - DNA, 25 bp, Homo sapien
gctgctcagtagtcacccaatatcg

SEQ ID NO: 4318284 - DNA, 25 bp, Homo sapien
cccaatatcgatgctgagttttcag

SEQ ID NO: 4318285 - DNA, 25 bp, Homo sapien
gctgtatgttcaggccaatgtggca

SEQ ID NO: 4318286 - DNA, 25 bp, Homo sapien
tcgaatcccacgctgggcactatgt

SEQ ID NO: 4318287 - DNA, 25 bp, Homo sapien
ctgtatcgaatcccacgctgggcac

SEQ ID NO: 4318288 - DNA, 25 bp, Homo sapien
agcagaggtgactgtagttggttct

SEQ ID NO: 4318289 - DNA, 25 bp, Homo sapien
tatcgaatcccacgctgggcactat

SEQ ID NO: 4318290 - DNA, 25 bp, Homo sapien
gggagcaggaatcctggccgcatgc

SEQ ID NO: 4318291 - DNA, 25 bp, Homo sapien
ggagcaggaatcctggccgcatgca

SEQ ID NO: 4318292 - DNA, 25 bp, Homo sapien
tggggagcaggaatcctggccgcat

SEQ ID NO: 4318293 - DNA, 25 bp, Homo sapien
ctggggagcaggaatcctggccgca

SEQ ID NO: 4318294 - DNA, 25 bp, Homo sapien
ataggatggatccagggcagagcca

SEQ ID NO: 4318295 - DNA, 25 bp, Homo sapien
cagcagaggcccataggatggatcc

SEQ ID NO: 4318296 - DNA, 25 bp, Homo sapien
cagaggcccataggatggatccagg

SEQ ID NO: 4318297 - DNA, 25 bp, Homo sapien
cccataggatggatccagggcagag

SEQ ID NO: 4318298 - DNA, 25 bp, Homo sapien
ggtggtgccgcatgtacacgtcatg

SEQ ID NO: 4318299 - DNA, 25 bp, Homo sapien
catgcatatggctgtaggatgggct

SEQ ID NO: 4318300 - DNA, 25 bp, Homo sapien
catgtacacgtcatgcatatggctg

SEQ ID NO: 4318301 - DNA, 25 bp, Homo sapien
gcatatggctgtaggatgggctcac

SEQ ID NO: 4318302 - DNA, 25 bp, Homo sapien
ctgagatgtcaaaggataaggccag

SEQ ID NO: 4318303 - DNA, 25 bp, Homo sapien
gaaactattccgctggcttgagaga

SEQ ID NO: 4318304 - DNA, 25 bp, Homo sapien
tgacctggaagtcaggatgaactcc

SEQ ID NO: 4318305 - DNA, 25 bp, Homo sapien
tgcaggttgtgtcccggccaaggac

SEQ ID NO: 4318306 - DNA, 25 bp, Homo sapien
ctattatgaaaaccgttgagcccca

SEQ ID NO: 4318307 - DNA, 25 bp, Homo sapien
ctgggcaccagagctatgatcatga

SEQ ID NO: 4318308 - DNA, 25 bp, Homo sapien
ccaaccacaagtacgtgccagagat

SEQ ID NO: 4318309 - DNA, 25 bp, Homo sapien
taagatgtcaaaagtacggagagta

SEQ ID NO: 4318310 - DNA, 25 bp, Homo sapien
tcaagggatgatgtcagaggccgat

SEQ ID NO: 4318311 - DNA, 25 bp, Homo sapien
aagggatgatgtcagaggccgatac

SEQ ID NO: 4318312 - DNA, 25 bp, Homo sapien
caagggatgatgtcagaggccgata

SEQ ID NO: 4318313 - DNA, 25 bp, Homo sapien
gggatgatgtcagaggccgatactc

SEQ ID NO: 4318314 - DNA, 25 bp, Homo sapien
aaacttacctagcttcatgaaggag

SEQ ID NO: 4318315 - DNA, 25 bp, Homo sapien
gaccctttaatactcggtcagcagt

SEQ ID NO: 4318316 - DNA, 25 bp, Homo sapien
tagcatggtagcacttctgtggcac

SEQ ID NO: 4318317 - DNA, 25 bp, Homo sapien
tgccttacagctgaaaaacacctaa

SEQ ID NO: 4318318 - DNA, 25 bp, Homo sapien
caaaatgcctagagtgtatactata

SEQ ID NO: 4318319 - DNA, 25 bp, Homo sapien
tcaggataaagaagcctattcaaag

SEQ ID NO: 4318320 - DNA, 25 bp, Homo sapien
gaagcctattcaaagaacacagaca

SEQ ID NO: 4318321 - DNA, 25 bp, Homo sapien
gcctagagtgtatactataaagagt

SEQ ID NO: 4318322 - DNA, 25 bp, Homo sapien
gccctggagaacatctgcttttgaa

SEQ ID NO: 4318323 - DNA, 25 bp, Homo sapien
ctggagaacatctgcttttgaattc

SEQ ID NO: 4318324 - DNA, 25 bp, Homo sapien
gcagttgcgaaacaaagacagtgcc

SEQ ID NO: 4318325 - DNA, 25 bp, Homo sapien
ctggtacaggcagttgcgaaacaaa

SEQ ID NO: 4318326 - DNA, 25 bp, Homo sapien
gatggcttggcccaaagctcttgag

SEQ ID NO: 4318327 - DNA, 25 bp, Homo sapien
gggttagccccatcttgctttttga

SEQ ID NO: 4318328 - DNA, 25 bp, Homo sapien
gtgttcatccactactgacccaatg

SEQ ID NO: 4318329 - DNA, 25 bp, Homo sapien
ggcccaaagctcttgagaagtgttc

SEQ ID NO: 4318330 - DNA, 25 bp, Homo sapien
cacagcgagagttaaggtactccat

SEQ ID NO: 4318331 - DNA, 25 bp, Homo sapien
ggacacagcgagagttaaggtactc

SEQ ID NO: 4318332 - DNA, 25 bp, Homo sapien
ataagtgaaaaggacacagcgagag

SEQ ID NO: 4318333 - DNA, 25 bp, Homo sapien
gacacagcgagagttaaggtactcc

SEQ ID NO: 4318334 - DNA, 25 bp, Homo sapien
ttgtttgctgggaagggtgacttcc

SEQ ID NO: 4318335 - DNA, 25 bp, Homo sapien
cctgcatcttgctgaataccgctaa

SEQ ID NO: 4318336 - DNA, 25 bp, Homo sapien
tcttgctgaataccgctaacttctt

SEQ ID NO: 4318337 - DNA, 25 bp, Homo sapien
ggaagggtgacttccagagagtcct

SEQ ID NO: 4318338 - DNA, 25 bp, Homo sapien
tcacagtgctgcttcttcgggtgca

SEQ ID NO: 4318339 - DNA, 25 bp, Homo sapien
aagagcctggctacattaacaatcc

SEQ ID NO: 4318340 - DNA, 25 bp, Homo sapien
tattcgggcacattagaaagcagct

SEQ ID NO: 4318341 - DNA, 25 bp, Homo sapien
taaaacctatctacatggtggcatc

SEQ ID NO: 4318342 - DNA, 25 bp, Homo sapien
tagcctcacaatcaacagtactggt

SEQ ID NO: 4318343 - DNA, 25 bp, Homo sapien
tacccataggcaggacacaagaatg

SEQ ID NO: 4318344 - DNA, 25 bp, Homo sapien
tgataactcactaatgtgccaaggt

SEQ ID NO: 4318345 - DNA, 25 bp, Homo sapien
gaatgtctaccgttgccacttgcaa

SEQ ID NO: 4318346 - DNA, 25 bp, Homo sapien
gaagaaatcactatcccagggtaaa

SEQ ID NO: 4318347 - DNA, 25 bp, Homo sapien
gagaaagacttccatgtcaggagcc

SEQ ID NO: 4318348 - DNA, 25 bp, Homo sapien
tcatagaggacataaaagcagcaca

SEQ ID NO: 4318349 - DNA, 25 bp, Homo sapien
gagagttcgcttgggcagtacagac

SEQ ID NO: 4318350 - DNA, 25 bp, Homo sapien
cctgttgaatttaagtcattcttct

SEQ ID NO: 4318351 - DNA, 25 bp, Homo sapien
acctgttgaatttaagtcattcttc

SEQ ID NO: 4318352 - DNA, 25 bp, Homo sapien
ctgttgaatttaagtcattcttctt

SEQ ID NO: 4318353 - DNA, 25 bp, Homo sapien
ctggttgactgccagagataagagt

SEQ ID NO: 4318354 - DNA, 25 bp, Homo sapien
catcatcattgtaatctcgattctg

SEQ ID NO: 4318355 - DNA, 25 bp, Homo sapien
tctcgattctggttgactgccagag

SEQ ID NO: 4318356 - DNA, 25 bp, Homo sapien
ccagagataagagttcaattatttt

SEQ ID NO: 4318357 - DNA, 25 bp, Homo sapien
ctaattcccatagtctgaggtggac

SEQ ID NO: 4318358 - DNA, 25 bp, Homo sapien
gactgaacacgtacaaactctgtgc

SEQ ID NO: 4318359 - DNA, 25 bp, Homo sapien
cagagagtaatgtccaagggcgcct

SEQ ID NO: 4318360 - DNA, 25 bp, Homo sapien
ggaccgagtctcagggctattgcaa

SEQ ID NO: 4318361 - DNA, 25 bp, Homo sapien
cagagcatcctctgcgccacgcgtg

SEQ ID NO: 4318362 - DNA, 25 bp, Homo sapien
gggacgtcgccgagccccagaccga

SEQ ID NO: 4318363 - DNA, 25 bp, Homo sapien
atcctctgcgccacgcgtgccggcg

SEQ ID NO: 4318364 - DNA, 25 bp, Homo sapien
agaccgatactctcgatgcccttcg

SEQ ID NO: 4318365 - DNA, 25 bp, Homo sapien
tactgggacgctccataaggctggg

SEQ ID NO: 4318366 - DNA, 25 bp, Homo sapien
tgggcagatactgggacgctccata

SEQ ID NO: 4318367 - DNA, 25 bp, Homo sapien
gttgggcagatactgggacgctcca

SEQ ID NO: 4318368 - DNA, 25 bp, Homo sapien
cagatactgggacgctccataaggc

SEQ ID NO: 4318369 - DNA, 25 bp, Homo sapien
tactgcggcgaaggcgggtcctcgg

SEQ ID NO: 4318370 - DNA, 25 bp, Homo sapien
ggggcccatgcgcgggcaccttcat

SEQ ID NO: 4318371 - DNA, 25 bp, Homo sapien
gagggactggcaatcagcgggggcc

SEQ ID NO: 4318372 - DNA, 25 bp, Homo sapien
tccagctgctactgcggcgaaggcg

SEQ ID NO: 4318373 - DNA, 25 bp, Homo sapien
cgcgcttatatagcggctcagggac

SEQ ID NO: 4318374 - DNA, 25 bp, Homo sapien
tccggatgttccctgccgcgcttat

SEQ ID NO: 4318375 - DNA, 25 bp, Homo sapien
tccctgccgcgcttatatagcggct

SEQ ID NO: 4318376 - DNA, 25 bp, Homo sapien
ttatatagcggctcagggacgcagc

SEQ ID NO: 4318377 - DNA, 25 bp, Homo sapien
ctcccgcgagggctgcggcgcccac

SEQ ID NO: 4318378 - DNA, 25 bp, Homo sapien
agtttccatagctgccacttcccct

SEQ ID NO: 4318379 - DNA, 25 bp, Homo sapien
cagtttccatagctgccacttcccc

SEQ ID NO: 4318380 - DNA, 25 bp, Homo sapien
gaaatggtaatggttgttcttcact

SEQ ID NO: 4318381 - DNA, 25 bp, Homo sapien
aatggtaatggttgttcttcactga

SEQ ID NO: 4318382 - DNA, 25 bp, Homo sapien
tgaaatggtaatggttgttcttcac

SEQ ID NO: 4318383 - DNA, 25 bp, Homo sapien
aaatggtaatggttgttcttcactg

SEQ ID NO: 4318384 - DNA, 25 bp, Homo sapien
cacactggttgctgactgaattttc

SEQ ID NO: 4318385 - DNA, 25 bp, Homo sapien
caaaatatttgcaagggatctggtg

SEQ ID NO: 4318386 - DNA, 25 bp, Homo sapien
gactgaattttctggtactcctcga

SEQ ID NO: 4318387 - DNA, 25 bp, Homo sapien
taaatacatgctgagtaacaaatga

SEQ ID NO: 4318388 - DNA, 25 bp, Homo sapien
gagtatgtctcctctatctatgaaa

SEQ ID NO: 4318389 - DNA, 25 bp, Homo sapien
aagtgggcaggtgtctttatgtgtc

SEQ ID NO: 4318390 - DNA, 25 bp, Homo sapien
ttttgcacactgaaaaagcacgccg

SEQ ID NO: 4318391 - DNA, 25 bp, Homo sapien
taatattgagtattcctgggtagag

SEQ ID NO: 4318392 - DNA, 25 bp, Homo sapien
cacacttgggcattaatcgataact

SEQ ID NO: 4318393 - DNA, 25 bp, Homo sapien
cctgctcagttggtacatgtatggc

SEQ ID NO: 4318394 - DNA, 25 bp, Homo sapien
tatggcagcttggtctattggcaaa

SEQ ID NO: 4318395 - DNA, 25 bp, Homo sapien
taactcttacgtagctcctgcatag

SEQ ID NO: 4318396 - DNA, 25 bp, Homo sapien
agatataggaagttgtgtcattctg

SEQ ID NO: 4318397 - DNA, 25 bp, Homo sapien
tcaagatataggaagttgtgtcatt

SEQ ID NO: 4318398 - DNA, 25 bp, Homo sapien
gatataggaagttgtgtcattctga

SEQ ID NO: 4318399 - DNA, 25 bp, Homo sapien
caagatataggaagttgtgtcattc

SEQ ID NO: 4318400 - DNA, 25 bp, Homo sapien
taggacttgtactggtttatgaaac

SEQ ID NO: 4318401 - DNA, 25 bp, Homo sapien
tgttccacaataagaggatgattgt

SEQ ID NO: 4318402 - DNA, 25 bp, Homo sapien
aaatggattagaccccctctgcact

SEQ ID NO: 4318403 - DNA, 25 bp, Homo sapien
caccaggggcaccaaagtgttccac

SEQ ID NO: 4318404 - DNA, 25 bp, Homo sapien
gaagtacgaggggaagtagggtgca

SEQ ID NO: 4318405 - DNA, 25 bp, Homo sapien
gtgacctgtatgtcctgttctaggc

SEQ ID NO: 4318406 - DNA, 25 bp, Homo sapien
atcttagaagtacgaggggaagtag

SEQ ID NO: 4318407 - DNA, 25 bp, Homo sapien
acctgtatgtcctgttctaggcctt

SEQ ID NO: 4318408 - DNA, 25 bp, Homo sapien
ttatgttgctttaaattgggattca

SEQ ID NO: 4318409 - DNA, 25 bp, Homo sapien
aaatactggatttatgttgctttaa

SEQ ID NO: 4318410 - DNA, 25 bp, Homo sapien
agcacacacagataagtaaatactg

SEQ ID NO: 4318411 - DNA, 25 bp, Homo sapien
cacacacagataagtaaatactgga

SEQ ID NO: 4318412 - DNA, 25 bp, Homo sapien
gcagtttataatactctacgtatat

SEQ ID NO: 4318413 - DNA, 25 bp, Homo sapien
tgcagtttataatactctacgtata

SEQ ID NO: 4318414 - DNA, 25 bp, Homo sapien
tcttgcaaaccctttaaagcatgga

SEQ ID NO: 4318415 - DNA, 25 bp, Homo sapien
taactcacctgtcttgttggcatca

SEQ ID NO: 4318416 - DNA, 25 bp, Homo sapien
tctgaccaggttaaaaaggctagcc

SEQ ID NO: 4318417 - DNA, 25 bp, Homo sapien
aacagtaaatagatgaggtgtgacc

SEQ ID NO: 4318418 - DNA, 25 bp, Homo sapien
attttcttggatcataatatcgtgc

SEQ ID NO: 4318419 - DNA, 25 bp, Homo sapien
tgtacaatgaccactcttttcaaaa

SEQ ID NO: 4318420 - DNA, 25 bp, Homo sapien
gatcataatatcgtgctttttctct

SEQ ID NO: 4318421 - DNA, 25 bp, Homo sapien
ccagtccttctactgacagatacac

SEQ ID NO: 4318422 - DNA, 25 bp, Homo sapien
gatatttaattggtggtgaagctac

SEQ ID NO: 4318423 - DNA, 25 bp, Homo sapien
tctgcaaggtgatcaaattctggtt

SEQ ID NO: 4318424 - DNA, 25 bp, Homo sapien
ttctggtttattggcaatgagctct

SEQ ID NO: 4318425 - DNA, 25 bp, Homo sapien
cccatgaagcatggatatttaattg

SEQ ID NO: 4318426 - DNA, 25 bp, Homo sapien
gcaattttatgatagttgagatggt

SEQ ID NO: 4318427 - DNA, 25 bp, Homo sapien
gagcaattttatgatagttgagatg

SEQ ID NO: 4318428 - DNA, 25 bp, Homo sapien
tttgagcaattttatgatagttgag

SEQ ID NO: 4318429 - DNA, 25 bp, Homo sapien
caattttatgatagttgagatggta

SEQ ID NO: 4318430 - DNA, 25 bp, Homo sapien
atttttttgcaacaccaagttgtct

SEQ ID NO: 4318431 - DNA, 25 bp, Homo sapien
aagagcagcaggcgtagcagattct

SEQ ID NO: 4318432 - DNA, 25 bp, Homo sapien
agagcagcaggcgtagcagattctg

SEQ ID NO: 4318433 - DNA, 25 bp, Homo sapien
gctgctggccacgacggtattttat

SEQ ID NO: 4318434 - DNA, 25 bp, Homo sapien
ctggccacgacggtattttattgta

SEQ ID NO: 4318435 - DNA, 25 bp, Homo sapien
tgctggccacgacggtattttattg

SEQ ID NO: 4318436 - DNA, 25 bp, Homo sapien
tggccacgacggtattttattgtat

SEQ ID NO: 4318437 - DNA, 25 bp, Homo sapien
caagagttcggacattacgtctgga

SEQ ID NO: 4318438 - DNA, 25 bp, Homo sapien
gagttcggacattacgtctggatat

SEQ ID NO: 4318439 - DNA, 25 bp, Homo sapien
cggacattacgtctggatatttcca

SEQ ID NO: 4318440 - DNA, 25 bp, Homo sapien
taatatcaagagttcggacattacg

SEQ ID NO: 4318441 - DNA, 25 bp, Homo sapien
caatgcataagggacgatttccata

SEQ ID NO: 4318442 - DNA, 25 bp, Homo sapien
aatgcataagggacgatttccataa

SEQ ID NO: 4318443 - DNA, 25 bp, Homo sapien
catactgcgtaaataacgtctctgg

SEQ ID NO: 4318444 - DNA, 25 bp, Homo sapien
aaataacgtctctgggcattttaag

SEQ ID NO: 4318445 - DNA, 25 bp, Homo sapien
tactgcgtaaataacgtctctgggc

SEQ ID NO: 4318446 - DNA, 25 bp, Homo sapien
tgcgtaaataacgtctctgggcatt

SEQ ID NO: 4318447 - DNA, 25 bp, Homo sapien
aggaggggtatacgccagtaactgg

SEQ ID NO: 4318448 - DNA, 25 bp, Homo sapien
gaggaggggtatacgccagtaactg

SEQ ID NO: 4318449 - DNA, 25 bp, Homo sapien
tcctgaggaggggtatacgccagta

SEQ ID NO: 4318450 - DNA, 25 bp, Homo sapien
tcagaacttgtggacagatcaatac

SEQ ID NO: 4318451 - DNA, 25 bp, Homo sapien
atcagaacttgtggacagatcaata

SEQ ID NO: 4318452 - DNA, 25 bp, Homo sapien
tatcagaacttgtggacagatcaat

SEQ ID NO: 4318453 - DNA, 25 bp, Homo sapien
catgacgcagaagctttttccttaa

SEQ ID NO: 4318454 - DNA, 25 bp, Homo sapien
ccataaagtgtttcagcaacaaagg

SEQ ID NO: 4318455 - DNA, 25 bp, Homo sapien
tcccataaagtgtttcagcaacaaa

SEQ ID NO: 4318456 - DNA, 25 bp, Homo sapien
cataaagtgtttcagcaacaaaggg

SEQ ID NO: 4318457 - DNA, 25 bp, Homo sapien
cttcccataaagtgtttcagcaaca

SEQ ID NO: 4318458 - DNA, 25 bp, Homo sapien
gacaattttctagttcacattttcc

SEQ ID NO: 4318459 - DNA, 25 bp, Homo sapien
ctgacaattttctagttcacatttt

SEQ ID NO: 4318460 - DNA, 25 bp, Homo sapien
agttcacattttcctgtggtggcat

SEQ ID NO: 4318461 - DNA, 25 bp, Homo sapien
ttcacattttcctgtggtggcatac

SEQ ID NO: 4318462 - DNA, 25 bp, Homo sapien
ggcgctgaactcccgtcactagtca

SEQ ID NO: 4318463 - DNA, 25 bp, Homo sapien
actcccgtcactagtcagagtacca

SEQ ID NO: 4318464 - DNA, 25 bp, Homo sapien
tgaactcccgtcactagtcagagta

SEQ ID NO: 4318465 - DNA, 25 bp, Homo sapien
gctgaactcccgtcactagtcagag

SEQ ID NO: 4318466 - DNA, 25 bp, Homo sapien
ggcgctgcggcgtcccagagtgatc

SEQ ID NO: 4318467 - DNA, 25 bp, Homo sapien
cggcgctgcggcgtcccagagtgat

SEQ ID NO: 4318468 - DNA, 25 bp, Homo sapien
gcgctgcggcgtcccagagtgatca

SEQ ID NO: 4318469 - DNA, 25 bp, Homo sapien
tgccgctgcggccaaggtgtaagca

SEQ ID NO: 4318470 - DNA, 25 bp, Homo sapien
gaacacgccacattcctctcggatc

SEQ ID NO: 4318471 - DNA, 25 bp, Homo sapien
tgcggccaaggtgtaagcaccaacc

SEQ ID NO: 4318472 - DNA, 25 bp, Homo sapien
gccaaggtgtaagcaccaaccagct

SEQ ID NO: 4318473 - DNA, 25 bp, Homo sapien
tcctgggttccaaagcgcgagttga

SEQ ID NO: 4318474 - DNA, 25 bp, Homo sapien
tctccgcggcggaagtcattcttat

SEQ ID NO: 4318475 - DNA, 25 bp, Homo sapien
tagagggcagcaaccgacttgtgcg

SEQ ID NO: 4318476 - DNA, 25 bp, Homo sapien
agctgaaatgtgaccgcgtcccggt

SEQ ID NO: 4318477 - DNA, 25 bp, Homo sapien
gggcagaatcccattgacttggtta

SEQ ID NO: 4318478 - DNA, 25 bp, Homo sapien
aaactccatatatctgccttgtgtg

SEQ ID NO: 4318479 - DNA, 25 bp, Homo sapien
gtatcagtaagattacactcatagg

SEQ ID NO: 4318480 - DNA, 25 bp, Homo sapien
catgatgctgtatcagtaagattac

SEQ ID NO: 4318481 - DNA, 25 bp, Homo sapien
gagtcactaggatgtcttttgccca

SEQ ID NO: 4318482 - DNA, 25 bp, Homo sapien
ggcaaaccactagcgtaagtccaat

SEQ ID NO: 4318483 - DNA, 25 bp, Homo sapien
cacgagtattatgctagtgagtcac

SEQ ID NO: 4318484 - DNA, 25 bp, Homo sapien
cagaggctcgagaacccctggcaaa

SEQ ID NO: 4318485 - DNA, 25 bp, Homo sapien
tactcttaagtgcaaaaaatgagca

SEQ ID NO: 4318486 - DNA, 25 bp, Homo sapien
tagtctgcatgtagaacagacctga

SEQ ID NO: 4318487 - DNA, 25 bp, Homo sapien
tctttccaataattccggttgcacc

SEQ ID NO: 4318488 - DNA, 25 bp, Homo sapien
gctatagactattattcagggcaaa

SEQ ID NO: 4318489 - DNA, 25 bp, Homo sapien
tggccaaagtagaaaggtcctgaag

SEQ ID NO: 4318490 - DNA, 25 bp, Homo sapien
gccttgggcaacattcccggtgtac

SEQ ID NO: 4318491 - DNA, 25 bp, Homo sapien
tcctgaagtatacgggctaggccag

SEQ ID NO: 4318492 - DNA, 25 bp, Homo sapien
tgtaccttgactttggcttaggcca

SEQ ID NO: 4318493 - DNA, 25 bp, Homo sapien
gatatccgacttgtagaaatgtggg

SEQ ID NO: 4318494 - DNA, 25 bp, Homo sapien
tcagtctgacagatggatatccgac

SEQ ID NO: 4318495 - DNA, 25 bp, Homo sapien
taaaagaaacatgaccgccagcctt

SEQ ID NO: 4318496 - DNA, 25 bp, Homo sapien
gcccttgcagctcacactaaaagaa

SEQ ID NO: 4318497 - DNA, 25 bp, Homo sapien
tgctctggcagagtataagctcgta

SEQ ID NO: 4318498 - DNA, 25 bp, Homo sapien
taagctcgtaaaccatcagaataaa

SEQ ID NO: 4318499 - DNA, 25 bp, Homo sapien
ccgacttcatataagccacagctga

SEQ ID NO: 4318500 - DNA, 25 bp, Homo sapien
tcagaataaacccaaccgacttcat

SEQ ID NO: 4318501 - DNA, 25 bp, Homo sapien
ctgcagtttgcaatgaagataagac

SEQ ID NO: 4318502 - DNA, 25 bp, Homo sapien
aagataagactccaattcctgtgct

SEQ ID NO: 4318503 - DNA, 25 bp, Homo sapien
gtttgcaatgaagataagactccaa

SEQ ID NO: 4318504 - DNA, 25 bp, Homo sapien
gcaatgaagataagactccaattcc

SEQ ID NO: 4318505 - DNA, 25 bp, Homo sapien
gctctggaacttgtggccaatcttt

SEQ ID NO: 4318506 - DNA, 25 bp, Homo sapien
caaacagctctggaacttgtggcca

SEQ ID NO: 4318507 - DNA, 25 bp, Homo sapien
tctctagacctccaaacagctctgg

SEQ ID NO: 4318508 - DNA, 25 bp, Homo sapien
acttgtggccaatctttttgatttt

SEQ ID NO: 4318509 - DNA, 25 bp, Homo sapien
taaggtggcagaccttgccgttggt

SEQ ID NO: 4318510 - DNA, 25 bp, Homo sapien
agtggcataacccatatcgggctgg

SEQ ID NO: 4318511 - DNA, 25 bp, Homo sapien
tcgggctgggtatattgaaacaacc

SEQ ID NO: 4318512 - DNA, 25 bp, Homo sapien
caaatgtgcccttgtgataagtaaa

SEQ ID NO: 4318513 - DNA, 25 bp, Homo sapien
gagtcagtcagtgccgaaaggaccg

SEQ ID NO: 4318514 - DNA, 25 bp, Homo sapien
aactctagacactggatccccggag

SEQ ID NO: 4318515 - DNA, 25 bp, Homo sapien
caatcaccgggtacggaactcaacg

SEQ ID NO: 4318516 - DNA, 25 bp, Homo sapien
ccaaataaacggctgtgaggaattc

SEQ ID NO: 4318517 - DNA, 25 bp, Homo sapien
tccgggacaacccacacttagtcta

SEQ ID NO: 4318518 - DNA, 25 bp, Homo sapien
acacttagtctaggagcccggagat

SEQ ID NO: 4318519 - DNA, 25 bp, Homo sapien
gtgaagcgctaagcaaggctgatca

SEQ ID NO: 4318520 - DNA, 25 bp, Homo sapien
agcgctaagcaaggctgatcactgt

SEQ ID NO: 4318521 - DNA, 25 bp, Homo sapien
cttaggactagtatacatgtgacac

SEQ ID NO: 4318522 - DNA, 25 bp, Homo sapien
taaaatgaaggattgccagactagt

SEQ ID NO: 4318523 - DNA, 25 bp, Homo sapien
ctcttaacagtgatgggtgaaaaca

SEQ ID NO: 4318524 - DNA, 25 bp, Homo sapien
catgtgacacggattgctaggagga

SEQ ID NO: 4318525 - DNA, 25 bp, Homo sapien
gagagatcattctgatttggctaca

SEQ ID NO: 4318526 - DNA, 25 bp, Homo sapien
tttgaatgtataagtcccagtgact

SEQ ID NO: 4318527 - DNA, 25 bp, Homo sapien
catttcagtcaaacatggataccac

SEQ ID NO: 4318528 - DNA, 25 bp, Homo sapien
tctggtggtagttttcacaatcact

SEQ ID NO: 4318529 - DNA, 25 bp, Homo sapien
aattgtaatcaaataagaggttgct

SEQ ID NO: 4318530 - DNA, 25 bp, Homo sapien
tctaacttctttaggcacaaaaata

SEQ ID NO: 4318531 - DNA, 25 bp, Homo sapien
ttaacaattgtaatcaaataagagg

SEQ ID NO: 4318532 - DNA, 25 bp, Homo sapien
tgtaatcaaataagaggttgctgta

SEQ ID NO: 4318533 - DNA, 25 bp, Homo sapien
cttaaaatagacaatgtggcttctg

SEQ ID NO: 4318534 - DNA, 25 bp, Homo sapien
tatatttggcttaaaatagacaatg

SEQ ID NO: 4318535 - DNA, 25 bp, Homo sapien
tttggcttaaaatagacaatgtggc

SEQ ID NO: 4318536 - DNA, 25 bp, Homo sapien
ggcttaaaatagacaatgtggcttc

SEQ ID NO: 4318537 - DNA, 25 bp, Homo sapien
cagttcttcagccatcctcatgatc

SEQ ID NO: 4318538 - DNA, 25 bp, Homo sapien
tctgcctccggttgcaaaaccaaac

SEQ ID NO: 4318539 - DNA, 25 bp, Homo sapien
tgattcagacttgttttcacccgtt

SEQ ID NO: 4318540 - DNA, 25 bp, Homo sapien
gaaaataaactctgattcagacttg

SEQ ID NO: 4318541 - DNA, 25 bp, Homo sapien
gctcccactttttcattgtacaaag

SEQ ID NO: 4318542 - DNA, 25 bp, Homo sapien
tcctttcatttgctcccactttttc

SEQ ID NO: 4318543 - DNA, 25 bp, Homo sapien
ttgctcccactttttcattgtacaa

SEQ ID NO: 4318544 - DNA, 25 bp, Homo sapien
ctttcatttgctcccactttttcat

SEQ ID NO: 4318545 - DNA, 25 bp, Homo sapien
gattttcaaatcggcagattgttgt

SEQ ID NO: 4318546 - DNA, 25 bp, Homo sapien
atcggcagattgttgtttgactgaa

SEQ ID NO: 4318547 - DNA, 25 bp, Homo sapien
tttcaaatcggcagattgttgtttg

SEQ ID NO: 4318548 - DNA, 25 bp, Homo sapien
aaatcggcagattgttgtttgactg

SEQ ID NO: 4318549 - DNA, 25 bp, Homo sapien
tgagttcctgcttgaaatcagcagc

SEQ ID NO: 4318550 - DNA, 25 bp, Homo sapien
caccaatttacttttccgcctgagt

SEQ ID NO: 4318551 - DNA, 25 bp, Homo sapien
tccatgtctattggctcttccacca

SEQ ID NO: 4318552 - DNA, 25 bp, Homo sapien
ggctggtgtataggaggaaatccat

SEQ ID NO: 4318553 - DNA, 25 bp, Homo sapien
catctgagcctgcatttgggggagt

SEQ ID NO: 4318554 - DNA, 25 bp, Homo sapien
gagtgattgggatgatatgtatagc

SEQ ID NO: 4318555 - DNA, 25 bp, Homo sapien
ctgtttctagcatctgagcctgcat

SEQ ID NO: 4318556 - DNA, 25 bp, Homo sapien
tgtatagcaatatgtttttcaaatc

SEQ ID NO: 4318557 - DNA, 25 bp, Homo sapien
ggacatagtaaaatacgccaccctg

SEQ ID NO: 4318558 - DNA, 25 bp, Homo sapien
caaaagacctttcacgatgtggaag

SEQ ID NO: 4318559 - DNA, 25 bp, Homo sapien
taaatcctatccgtgtacaactggg

SEQ ID NO: 4318560 - DNA, 25 bp, Homo sapien
ttacaaccagaacaatttagggcca

SEQ ID NO: 4318561 - DNA, 25 bp, Homo sapien
tgccatcactccataggttgatggc

SEQ ID NO: 4318562 - DNA, 25 bp, Homo sapien
aatgacaggaaggaacagaataatg

SEQ ID NO: 4318563 - DNA, 25 bp, Homo sapien
tgacaggaaggaacagaataatgaa

SEQ ID NO: 4318564 - DNA, 25 bp, Homo sapien
tccataggttgatggctggtttcca

SEQ ID NO: 4318565 - DNA, 25 bp, Homo sapien
ttcccaacgttgtcaccgagaaatg

SEQ ID NO: 4318566 - DNA, 25 bp, Homo sapien
gcacaaacatttaggagtttggatc

SEQ ID NO: 4318567 - DNA, 25 bp, Homo sapien
gttgtcaccgagaaatgtgtgcaca

SEQ ID NO: 4318568 - DNA, 25 bp, Homo sapien
gagtttggatcaaagacaaaataga

SEQ ID NO: 4318569 - DNA, 25 bp, Homo sapien
gaaaatgtataaggattcaagacac

SEQ ID NO: 4318570 - DNA, 25 bp, Homo sapien
aaaatgtataaggattcaagacaca

SEQ ID NO: 4318571 - DNA, 25 bp, Homo sapien
aagaaaatgtataaggattcaagac

SEQ ID NO: 4318572 - DNA, 25 bp, Homo sapien
ggtaagaaaatgtataaggattcaa

SEQ ID NO: 4318573 - DNA, 25 bp, Homo sapien
catggttggagactggtagacactc

SEQ ID NO: 4318574 - DNA, 25 bp, Homo sapien
tatcagccgaagtaaaagcttggca

SEQ ID NO: 4318575 - DNA, 25 bp, Homo sapien
tagacactcggcagcactgtgatgc

SEQ ID NO: 4318576 - DNA, 25 bp, Homo sapien
tgcagaggcgtcagaattcagaggt

SEQ ID NO: 4318577 - DNA, 25 bp, Homo sapien
tatattactgtctcaaagggccgat

SEQ ID NO: 4318578 - DNA, 25 bp, Homo sapien
caccaggagggtgcgcgctagtatt

SEQ ID NO: 4318579 - DNA, 25 bp, Homo sapien
aaataaggagaaccgctgctcccca

SEQ ID NO: 4318580 - DNA, 25 bp, Homo sapien
gggccgattcaattctcactacctg

SEQ ID NO: 4318581 - DNA, 25 bp, Homo sapien
ctatgcccactatgtttgctttttc

SEQ ID NO: 4318582 - DNA, 25 bp, Homo sapien
tatgcccactatgtttgctttttcc

SEQ ID NO: 4318583 - DNA, 25 bp, Homo sapien
cctccattatactggcaatttcttt

SEQ ID NO: 4318584 - DNA, 25 bp, Homo sapien
gctttttcctccattatactggcaa

SEQ ID NO: 4318585 - DNA, 25 bp, Homo sapien
ctagagtccgtgaaatgcattgctc

SEQ ID NO: 4318586 - DNA, 25 bp, Homo sapien
taagactagccaaatgcagtagtga

SEQ ID NO: 4318587 - DNA, 25 bp, Homo sapien
aacaaggagttcaatcagtaactga

SEQ ID NO: 4318588 - DNA, 25 bp, Homo sapien
caaggagttcaatcagtaactgact

SEQ ID NO: 4318589 - DNA, 25 bp, Homo sapien
aggagttcaatcagtaactgactgt

SEQ ID NO: 4318590 - DNA, 25 bp, Homo sapien
taatagttacctagcttgctgaaag

SEQ ID NO: 4318591 - DNA, 25 bp, Homo sapien
tggtggtttttcctactgtgaggcc

SEQ ID NO: 4318592 - DNA, 25 bp, Homo sapien
tgtgaggcctgcatttgtcaactgg

SEQ ID NO: 4318593 - DNA, 25 bp, Homo sapien
ggctagactcagacattttaataac

SEQ ID NO: 4318594 - DNA, 25 bp, Homo sapien
tcttggaaatgcaaatggtgacagc

SEQ ID NO: 4318595 - DNA, 25 bp, Homo sapien
gattgaaaggagaagaccgaccatt

SEQ ID NO: 4318596 - DNA, 25 bp, Homo sapien
tttccaggttcagcgtaaacatagt

SEQ ID NO: 4318597 - DNA, 25 bp, Homo sapien
taactcgagacatgctaggttgacg

SEQ ID NO: 4318598 - DNA, 25 bp, Homo sapien
agccattggccccagaagacttggg

SEQ ID NO: 4318599 - DNA, 25 bp, Homo sapien
aggagcagagtaacacagaacatca

SEQ ID NO: 4318600 - DNA, 25 bp, Homo sapien
cccagaagacttgggtgggcttcat

SEQ ID NO: 4318601 - DNA, 25 bp, Homo sapien
acttgggtgggcttcatcaggtatc

SEQ ID NO: 4318602 - DNA, 25 bp, Homo sapien
aactcagtaggcattaccccctgac

SEQ ID NO: 4318603 - DNA, 25 bp, Homo sapien
ccacagagaactcagtaggcattac

SEQ ID NO: 4318604 - DNA, 25 bp, Homo sapien
cagagaactcagtaggcattacccc

SEQ ID NO: 4318605 - DNA, 25 bp, Homo sapien
gaactcagtaggcattaccccctga

SEQ ID NO: 4318606 - DNA, 25 bp, Homo sapien
tatttctttccataggctctctctt

SEQ ID NO: 4318607 - DNA, 25 bp, Homo sapien
tgccttttcctttggtctatatttc

SEQ ID NO: 4318608 - DNA, 25 bp, Homo sapien
taaaccaaaggcaagagtgctcttc

SEQ ID NO: 4318609 - DNA, 25 bp, Homo sapien
aaaggcaagagtgctcttcagcttc

SEQ ID NO: 4318610 - DNA, 25 bp, Homo sapien
tggagcagatacactttccattttc

SEQ ID NO: 4318611 - DNA, 25 bp, Homo sapien
ttatacttcaaggtttggagcagat

SEQ ID NO: 4318612 - DNA, 25 bp, Homo sapien
acttcaaggtttggagcagatacac

SEQ ID NO: 4318613 - DNA, 25 bp, Homo sapien
caaggtttggagcagatacactttc

SEQ ID NO: 4318614 - DNA, 25 bp, Homo sapien
atctctcttttcggtgagttgctgg

SEQ ID NO: 4318615 - DNA, 25 bp, Homo sapien
catctctcttttcggtgagttgctg

SEQ ID NO: 4318616 - DNA, 25 bp, Homo sapien
agtactggtgctgtggacgatgtca

SEQ ID NO: 4318617 - DNA, 25 bp, Homo sapien
ccttgaagtactggtgctgtggacg

SEQ ID NO: 4318618 - DNA, 25 bp, Homo sapien
tctggactcatcaatgctcaaatta

SEQ ID NO: 4318619 - DNA, 25 bp, Homo sapien
ttttgttggacgctctggactcatc

SEQ ID NO: 4318620 - DNA, 25 bp, Homo sapien
tttgttggacgctctggactcatca

SEQ ID NO: 4318621 - DNA, 25 bp, Homo sapien
aatgctcaaattagctgctcttccc

SEQ ID NO: 4318622 - DNA, 25 bp, Homo sapien
gaatgcaatttcgtcatttctgctt

SEQ ID NO: 4318623 - DNA, 25 bp, Homo sapien
gacagcattaacacaataaacactc

SEQ ID NO: 4318624 - DNA, 25 bp, Homo sapien
aaaccagaatgcaatttcgtcattt

SEQ ID NO: 4318625 - DNA, 25 bp, Homo sapien
tgcaatttcgtcatttctgcttttc

SEQ ID NO: 4318626 - DNA, 25 bp, Homo sapien
agtttagagccaaagtctgctctag

SEQ ID NO: 4318627 - DNA, 25 bp, Homo sapien
ctgagtttagagccaaagtctgctc

SEQ ID NO: 4318628 - DNA, 25 bp, Homo sapien
tttagagccaaagtctgctctagac

SEQ ID NO: 4318629 - DNA, 25 bp, Homo sapien
tagagccaaagtctgctctagacaa

SEQ ID NO: 4318630 - DNA, 25 bp, Homo sapien
ctgggaaaatggtcgcacttcacaa

SEQ ID NO: 4318631 - DNA, 25 bp, Homo sapien
gggaaaatggtcgcacttcacaaag

SEQ ID NO: 4318632 - DNA, 25 bp, Homo sapien
tgggaaaatggtcgcacttcacaaa

SEQ ID NO: 4318633 - DNA, 25 bp, Homo sapien
tcatctcctaccaccctgctgtcaa

SEQ ID NO: 4318634 - DNA, 25 bp, Homo sapien
cagagcaagacaagggcatgtgcat

SEQ ID NO: 4318635 - DNA, 25 bp, Homo sapien
ggcatgtgcataggagcagtttcaa

SEQ ID NO: 4318636 - DNA, 25 bp, Homo sapien
cttgcgagaaactcagactagcaga

SEQ ID NO: 4318637 - DNA, 25 bp, Homo sapien
cagtttcaattgtctgagttggcat

SEQ ID NO: 4318638 - DNA, 25 bp, Homo sapien
catactttctgaggcagacctggtg

SEQ ID NO: 4318639 - DNA, 25 bp, Homo sapien
agacctggtggaagcagaagcaggc

SEQ ID NO: 4318640 - DNA, 25 bp, Homo sapien
tcatactttctgaggcagacctggt

SEQ ID NO: 4318641 - DNA, 25 bp, Homo sapien
ggcagacctggtggaagcagaagca

SEQ ID NO: 4318642 - DNA, 25 bp, Homo sapien
tattggttttgctggcctttttgga

SEQ ID NO: 4318643 - DNA, 25 bp, Homo sapien
ggttagacagctatgaatatctcca

SEQ ID NO: 4318644 - DNA, 25 bp, Homo sapien
gatattttccaagacttggtgttat

SEQ ID NO: 4318645 - DNA, 25 bp, Homo sapien
gcaaagtttgggtcaatgagggtta

SEQ ID NO: 4318646 - DNA, 25 bp, Homo sapien
ctactttctcttaaggtcatcagat

SEQ ID NO: 4318647 - DNA, 25 bp, Homo sapien
actttctcttaaggtcatcagatca

SEQ ID NO: 4318648 - DNA, 25 bp, Homo sapien
tactttctcttaaggtcatcagatc

SEQ ID NO: 4318649 - DNA, 25 bp, Homo sapien
ctttctcttaaggtcatcagatcac

SEQ ID NO: 4318650 - DNA, 25 bp, Homo sapien
gttacatcactggccaaagtcgtgt

SEQ ID NO: 4318651 - DNA, 25 bp, Homo sapien
tggccgtaatcaagttgtccagggt

SEQ ID NO: 4318652 - DNA, 25 bp, Homo sapien
gccaaagtcgtgttgttcatgtgaa

SEQ ID NO: 4318653 - DNA, 25 bp, Homo sapien
aaagaggtcatctttggccgtaatc

SEQ ID NO: 4318654 - DNA, 25 bp, Homo sapien
tttaactggcattgaatgtgaggta

SEQ ID NO: 4318655 - DNA, 25 bp, Homo sapien
ctttcattctcactaatttcaataa

SEQ ID NO: 4318656 - DNA, 25 bp, Homo sapien
tccatgagaatagagtctttcattc

SEQ ID NO: 4318657 - DNA, 25 bp, Homo sapien
actggcattgaatgtgaggtatcac

SEQ ID NO: 4318658 - DNA, 25 bp, Homo sapien
ccctataattggtacaagaggttca

SEQ ID NO: 4318659 - DNA, 25 bp, Homo sapien
ttcctcccctataattggtacaaga

SEQ ID NO: 4318660 - DNA, 25 bp, Homo sapien
ctcccctataattggtacaagaggt

SEQ ID NO: 4318661 - DNA, 25 bp, Homo sapien
cctataattggtacaagaggttcat

SEQ ID NO: 4318662 - DNA, 25 bp, Homo sapien
cagtatgaatagatatagatgtgca

SEQ ID NO: 4318663 - DNA, 25 bp, Homo sapien
tgtgcagtttatttgggctttcata

SEQ ID NO: 4318664 - DNA, 25 bp, Homo sapien
tgctttcattcaagtggcagtatga

SEQ ID NO: 4318665 - DNA, 25 bp, Homo sapien
aacagcacatcagggcttcaagtcc

SEQ ID NO: 4318666 - DNA, 25 bp, Homo sapien
acctccactccatgagtttccagtt

SEQ ID NO: 4318667 - DNA, 25 bp, Homo sapien
ggtggcctaagagatgaggaaaagg

SEQ ID NO: 4318668 - DNA, 25 bp, Homo sapien
tttccagttggtggcctaagagatg

SEQ ID NO: 4318669 - DNA, 25 bp, Homo sapien
agtttccagttggtggcctaagaga

SEQ ID NO: 4318670 - DNA, 25 bp, Homo sapien
cattcgtgtctccatataggctagt

SEQ ID NO: 4318671 - DNA, 25 bp, Homo sapien
caatacaatctggatatttttggca

SEQ ID NO: 4318672 - DNA, 25 bp, Homo sapien
aacttgtcagatcaaccaatgccga

SEQ ID NO: 4318673 - DNA, 25 bp, Homo sapien
taggagcttccaattagtatttcac

SEQ ID NO: 4318674 - DNA, 25 bp, Homo sapien
ggagccatgttaatcttctcaatat

SEQ ID NO: 4318675 - DNA, 25 bp, Homo sapien
caggagccatgttaatcttctcaat

SEQ ID NO: 4318676 - DNA, 25 bp, Homo sapien
gttaatcttctcaatattgttccag

SEQ ID NO: 4318677 - DNA, 25 bp, Homo sapien
catgttaatcttctcaatattgttc

SEQ ID NO: 4318678 - DNA, 25 bp, Homo sapien
tagttgccgcaggtctgactcaagg

SEQ ID NO: 4318679 - DNA, 25 bp, Homo sapien
ggtcagagagagcttctacctcgcg

SEQ ID NO: 4318680 - DNA, 25 bp, Homo sapien
gccgtagatcggaaatcgcttgcag

SEQ ID NO: 4318681 - DNA, 25 bp, Homo sapien
tcttcgaatccatctctcggtggga

SEQ ID NO: 4318682 - DNA, 25 bp, Homo sapien
cccttccttagggatctctctgact

SEQ ID NO: 4318683 - DNA, 25 bp, Homo sapien
tcacactgtcctgagggacttaagg

SEQ ID NO: 4318684 - DNA, 25 bp, Homo sapien
ccttagggatctctctgactgcatt

SEQ ID NO: 4318685 - DNA, 25 bp, Homo sapien
cctgagggacttaaggagcttttca

SEQ ID NO: 4318686 - DNA, 25 bp, Homo sapien
cgtaaaagactaaatgtcatttccg

SEQ ID NO: 4318687 - DNA, 25 bp, Homo sapien
ctatcgtaaaagactaaatgtcatt

SEQ ID NO: 4318688 - DNA, 25 bp, Homo sapien
tcgtaaaagactaaatgtcatttcc

SEQ ID NO: 4318689 - DNA, 25 bp, Homo sapien
gtcatttccgtatttttgagaccaa

SEQ ID NO: 4318690 - DNA, 25 bp, Homo sapien
aatttttgcaatctatccatctgac

SEQ ID NO: 4318691 - DNA, 25 bp, Homo sapien
tatccagaatctacaaagaacttaa

SEQ ID NO: 4318692 - DNA, 25 bp, Homo sapien
aaagggctaatatccagaatctaca

SEQ ID NO: 4318693 - DNA, 25 bp, Homo sapien
aaatttttgcaatctatccatctga

SEQ ID NO: 4318694 - DNA, 25 bp, Homo sapien
tgcatgtcattgatgaagggtttgc

SEQ ID NO: 4318695 - DNA, 25 bp, Homo sapien
aagaaccgtgtcatccaaatccaca

SEQ ID NO: 4318696 - DNA, 25 bp, Homo sapien
ttaaagaaccgtgtcatccaaatcc

SEQ ID NO: 4318697 - DNA, 25 bp, Homo sapien
aaatccacaagctgcatgtcattga

SEQ ID NO: 4318698 - DNA, 25 bp, Homo sapien
ttgagctgccaactcaagacacatt

SEQ ID NO: 4318699 - DNA, 25 bp, Homo sapien
gttgagctgccaactcaagacacat

SEQ ID NO: 4318700 - DNA, 25 bp, Homo sapien
tccacatagtagtatcttctcttct

SEQ ID NO: 4318701 - DNA, 25 bp, Homo sapien
acattttcacccttccacatagtag

SEQ ID NO: 4318702 - DNA, 25 bp, Homo sapien
tacctgctcaatgcatacaccaata

SEQ ID NO: 4318703 - DNA, 25 bp, Homo sapien
gagctttacctgctcaatgcataca

SEQ ID NO: 4318704 - DNA, 25 bp, Homo sapien
tgaaaagagctttacctgctcaatg

SEQ ID NO: 4318705 - DNA, 25 bp, Homo sapien
gctcaatgcatacaccaatagtcat

SEQ ID NO: 4318706 - DNA, 25 bp, Homo sapien
caaattctttggcaccaattgcaac

SEQ ID NO: 4318707 - DNA, 25 bp, Homo sapien
ctttggcaccaattgcaacttgaaa

SEQ ID NO: 4318708 - DNA, 25 bp, Homo sapien
tctttggcaccaattgcaacttgaa

SEQ ID NO: 4318709 - DNA, 25 bp, Homo sapien
attctttggcaccaattgcaacttg

SEQ ID NO: 4318710 - DNA, 25 bp, Homo sapien
acttgcccacactcagagattccga

SEQ ID NO: 4318711 - DNA, 25 bp, Homo sapien
agaagacttgcccacactcagagat

SEQ ID NO: 4318712 - DNA, 25 bp, Homo sapien
aagacttgcccacactcagagattc

SEQ ID NO: 4318713 - DNA, 25 bp, Homo sapien
tcagaagacttgcccacactcagag

SEQ ID NO: 4318714 - DNA, 25 bp, Homo sapien
cattcatttgcacaatctatgtagc

SEQ ID NO: 4318715 - DNA, 25 bp, Homo sapien
acacattcatttgcacaatctatgt

SEQ ID NO: 4318716 - DNA, 25 bp, Homo sapien
catttgcacaatctatgtagcagac

SEQ ID NO: 4318717 - DNA, 25 bp, Homo sapien
gcacaatctatgtagcagacccaag

SEQ ID NO: 4318718 - DNA, 25 bp, Homo sapien
ttccaacagtccatatctatgactc

SEQ ID NO: 4318719 - DNA, 25 bp, Homo sapien
attccaacagtccatatctatgact

SEQ ID NO: 4318720 - DNA, 25 bp, Homo sapien
caaaatctaatgactggctagtgca

SEQ ID NO: 4318721 - DNA, 25 bp, Homo sapien
tattccctgatatcaaggcaaaatc

SEQ ID NO: 4318722 - DNA, 25 bp, Homo sapien
tatcaaggcaaaatctaatgactgg

SEQ ID NO: 4318723 - DNA, 25 bp, Homo sapien
ctagtgcagtcatgaaaccccagct

SEQ ID NO: 4318724 - DNA, 25 bp, Homo sapien
acaataattctcagcctagctacac

SEQ ID NO: 4318725 - DNA, 25 bp, Homo sapien
gtgaagtaagcacatatttaaacag

SEQ ID NO: 4318726 - DNA, 25 bp, Homo sapien
aattctcagcctagctacacattaa

SEQ ID NO: 4318727 - DNA, 25 bp, Homo sapien
tgaatcagtaacttaactagtgaag

SEQ ID NO: 4318728 - DNA, 25 bp, Homo sapien
tagaaagtttcatcagtatcctggc

SEQ ID NO: 4318729 - DNA, 25 bp, Homo sapien
gacaacttcactgtgtgacaaaaaa

SEQ ID NO: 4318730 - DNA, 25 bp, Homo sapien
gctgggcttcgtggctcacatttat

SEQ ID NO: 4318731 - DNA, 25 bp, Homo sapien
agtatctaatatctcacccagcgag

SEQ ID NO: 4318732 - DNA, 25 bp, Homo sapien
aatctggcatggaagttgtttacac

SEQ ID NO: 4318733 - DNA, 25 bp, Homo sapien
tatttgaaccagcaaggtcatagac

SEQ ID NO: 4318734 - DNA, 25 bp, Homo sapien
tcatagactacctttgggaagacct

SEQ ID NO: 4318735 - DNA, 25 bp, Homo sapien
gaggaaaaactgatcgcatcttgtt

SEQ ID NO: 4318736 - DNA, 25 bp, Homo sapien
cgcaacctggtgttctgcattgtgg

SEQ ID NO: 4318737 - DNA, 25 bp, Homo sapien
agagggcatttgacacgcaacctgg

SEQ ID NO: 4318738 - DNA, 25 bp, Homo sapien
gtaagtcatcgatggccttccgctc

SEQ ID NO: 4318739 - DNA, 25 bp, Homo sapien
cctgttgctgaatgtggagaagagc

SEQ ID NO: 4318740 - DNA, 25 bp, Homo sapien
taacagcatggaagtggtctcctgg

SEQ ID NO: 4318741 - DNA, 25 bp, Homo sapien
cattgataagcactcccatatggct

SEQ ID NO: 4318742 - DNA, 25 bp, Homo sapien
gcgtgcacacatacatcaaagctta

SEQ ID NO: 4318743 - DNA, 25 bp, Homo sapien
cgttcatcacgttcatggtctcatg

SEQ ID NO: 4318744 - DNA, 25 bp, Homo sapien
atttgtcattgactcacaaaacaaa

SEQ ID NO: 4318745 - DNA, 25 bp, Homo sapien
tgtcattgactcacaaaacaaaatg

SEQ ID NO: 4318746 - DNA, 25 bp, Homo sapien
aatatatttgtcattgactcacaaa

SEQ ID NO: 4318747 - DNA, 25 bp, Homo sapien
caggaaatatatttgtcattgactc

SEQ ID NO: 4318748 - DNA, 25 bp, Homo sapien
tttatactaagcatacatgcgtgag

SEQ ID NO: 4318749 - DNA, 25 bp, Homo sapien
tatttctaaaagtcagagacaaaac

SEQ ID NO: 4318750 - DNA, 25 bp, Homo sapien
aactttagaagtgacacatttatac

SEQ ID NO: 4318751 - DNA, 25 bp, Homo sapien
ctaagcatacatgcgtgagcaaaaa

SEQ ID NO: 4318752 - DNA, 25 bp, Homo sapien
tcctaacagaatggactatgcccct

SEQ ID NO: 4318753 - DNA, 25 bp, Homo sapien
tacatgtgcttcatcaacgagagca

SEQ ID NO: 4318754 - DNA, 25 bp, Homo sapien
gatttgtatcagttcgagcaggcta

SEQ ID NO: 4318755 - DNA, 25 bp, Homo sapien
aaagataactccaagtcacacaggg

SEQ ID NO: 4318756 - DNA, 25 bp, Homo sapien
acataactttaatactccacattta

SEQ ID NO: 4318757 - DNA, 25 bp, Homo sapien
taactttaatactccacatttatct

SEQ ID NO: 4318758 - DNA, 25 bp, Homo sapien
aacacataactttaatactccacat

SEQ ID NO: 4318759 - DNA, 25 bp, Homo sapien
caacacataactttaatactccaca

SEQ ID NO: 4318760 - DNA, 25 bp, Homo sapien
catggcgagataggaaagcacggac

SEQ ID NO: 4318761 - DNA, 25 bp, Homo sapien
gaagatatgccctccgtagctggtc

SEQ ID NO: 4318762 - DNA, 25 bp, Homo sapien
ttcagaaccacattgcaagaagtgc

SEQ ID NO: 4318763 - DNA, 25 bp, Homo sapien
ggcagacttgcgaacatgattcaga

SEQ ID NO: 4318764 - DNA, 25 bp, Homo sapien
taacacacttttatgagcactgcac

SEQ ID NO: 4318765 - DNA, 25 bp, Homo sapien
acaggtgggcctataaactgccata

SEQ ID NO: 4318766 - DNA, 25 bp, Homo sapien
aagttactaaccagtcgcaatcagg

SEQ ID NO: 4318767 - DNA, 25 bp, Homo sapien
gaaagaactcaaactatcccagatg

SEQ ID NO: 4318768 - DNA, 25 bp, Homo sapien
ggactttaaattgccaacgtatcag

SEQ ID NO: 4318769 - DNA, 25 bp, Homo sapien
agctgggtaacatgaactctctttc

SEQ ID NO: 4318770 - DNA, 25 bp, Homo sapien
tcagacagtcatggatccagaagat

SEQ ID NO: 4318771 - DNA, 25 bp, Homo sapien
tagagaatagctgggtaacatgaac

SEQ ID NO: 4318772 - DNA, 25 bp, Homo sapien
tgcagaggcaaatttccacccagta

SEQ ID NO: 4318773 - DNA, 25 bp, Homo sapien
tatttgtgccccgtaatgcgttaag

SEQ ID NO: 4318774 - DNA, 25 bp, Homo sapien
taggctacaggtttgcaacggcaga

SEQ ID NO: 4318775 - DNA, 25 bp, Homo sapien
gatgctcgagtttacatacccgaag

SEQ ID NO: 4318776 - DNA, 25 bp, Homo sapien
tgttcaaccccggagatgccttcaa

SEQ ID NO: 4318777 - DNA, 25 bp, Homo sapien
cagagacgcatcaaatcctggcact

SEQ ID NO: 4318778 - DNA, 25 bp, Homo sapien
gggcttgcacccgattttccctgtg

SEQ ID NO: 4318779 - DNA, 25 bp, Homo sapien
tgatacttagcagggaatggtctcc

SEQ ID NO: 4318780 - DNA, 25 bp, Homo sapien
gtggtccgcccgcttggcacctcct

SEQ ID NO: 4318781 - DNA, 25 bp, Homo sapien
ccacgcaggtgtttctaaaatcact

SEQ ID NO: 4318782 - DNA, 25 bp, Homo sapien
aaagatgaacaagaacgtcaacaac

SEQ ID NO: 4318783 - DNA, 25 bp, Homo sapien
aaggagggtgactgaaaagatgaac

SEQ ID NO: 4318784 - DNA, 25 bp, Homo sapien
aactcgacagccgacttggcggcag

SEQ ID NO: 4318785 - DNA, 25 bp, Homo sapien
aggcggccgctgtcaagcttcccgt

SEQ ID NO: 4318786 - DNA, 25 bp, Homo sapien
aaggccgagtcccaggtgccagctg

SEQ ID NO: 4318787 - DNA, 25 bp, Homo sapien
ttccagcttctggacggaaggcccc

SEQ ID NO: 4318788 - DNA, 25 bp, Homo sapien
cgtccgcctgcaccgcctatggcag

SEQ ID NO: 4318789 - DNA, 25 bp, Homo sapien
atcgaggccgccgttagggaaagtg

SEQ ID NO: 4318790 - DNA, 25 bp, Homo sapien
gggaggaggaggatccgtcgctgcc

SEQ ID NO: 4318791 - DNA, 25 bp, Homo sapien
gtcgccgccgttgcccgatcgagcc

SEQ ID NO: 4318792 - DNA, 25 bp, Homo sapien
cccacgggcttagggttgctgagaa

SEQ ID NO: 4318793 - DNA, 25 bp, Homo sapien
ggcggggagcaaggcgagggtgacc

SEQ ID NO: 4318794 - DNA, 25 bp, Homo sapien
ggggcggggagcaaggcgagggtga

SEQ ID NO: 4318795 - DNA, 25 bp, Homo sapien
gtgacccacgggcttagggttgctg

SEQ ID NO: 4318796 - DNA, 25 bp, Homo sapien
gaaggtcggctgtccggaaagctct

SEQ ID NO: 4318797 - DNA, 25 bp, Homo sapien
atgtttcctaccctggtctttctca

SEQ ID NO: 4318798 - DNA, 25 bp, Homo sapien
caaacagaccttcctgcccgagagt

SEQ ID NO: 4318799 - DNA, 25 bp, Homo sapien
gagagtcccgcctttcttatgtttc

SEQ ID NO: 4318800 - DNA, 25 bp, Homo sapien
ccctctccgccgattgccccccgtg

SEQ ID NO: 4318801 - DNA, 25 bp, Homo sapien
ttttttccgggatgggagacatgcc

SEQ ID NO: 4318802 - DNA, 25 bp, Homo sapien
tttttccgggatgggagacatgcca

SEQ ID NO: 4318803 - DNA, 25 bp, Homo sapien
tctccgccgattgccccccgtgttc

SEQ ID NO: 4318804 - DNA, 25 bp, Homo sapien
ccctagttgttttagatggaatcag

SEQ ID NO: 4318805 - DNA, 25 bp, Homo sapien
gatagggactatcttactgtctcac

SEQ ID NO: 4318806 - DNA, 25 bp, Homo sapien
gaatcagttggcctagtacaggaag

SEQ ID NO: 4318807 - DNA, 25 bp, Homo sapien
tccagaggctatcactggcaactct

SEQ ID NO: 4318808 - DNA, 25 bp, Homo sapien
gtcacctgtgttcatgccgatctaa

SEQ ID NO: 4318809 - DNA, 25 bp, Homo sapien
taaacagtatagaagatccctccct

SEQ ID NO: 4318810 - DNA, 25 bp, Homo sapien
cacaaaagctggatataggaggtaa

SEQ ID NO: 4318811 - DNA, 25 bp, Homo sapien
gttgttttacaacagccagtgcatc

SEQ ID NO: 4318812 - DNA, 25 bp, Homo sapien
gcagtttaggctatgatagttacca

SEQ ID NO: 4318813 - DNA, 25 bp, Homo sapien
ccttgggaagctctaatggtaagtc

SEQ ID NO: 4318814 - DNA, 25 bp, Homo sapien
tacagattcttctagttactacaag

SEQ ID NO: 4318815 - DNA, 25 bp, Homo sapien
taaatcaggtcagaaagaggttagg

SEQ ID NO: 4318816 - DNA, 25 bp, Homo sapien
gagagtatgtatgccagtttgttgc

SEQ ID NO: 4318817 - DNA, 25 bp, Homo sapien
atgagtatgaaatgtttagctcccc

SEQ ID NO: 4318818 - DNA, 25 bp, Homo sapien
ggtaagcatactaaccactagatag

SEQ ID NO: 4318819 - DNA, 25 bp, Homo sapien
tgaatggtcccataacccaggtggt

SEQ ID NO: 4318820 - DNA, 25 bp, Homo sapien
tcaaggcaagctattttatctagca

SEQ ID NO: 4318821 - DNA, 25 bp, Homo sapien
caggtcacgacctacatgagaagat

SEQ ID NO: 4318822 - DNA, 25 bp, Homo sapien
tcaggtgcctggagatattactagc

SEQ ID NO: 4318823 - DNA, 25 bp, Homo sapien
tgagaattttttgaccatgtaggta

SEQ ID NO: 4318824 - DNA, 25 bp, Homo sapien
tgtgtgtatgaagaaaaccgttaac

SEQ ID NO: 4318825 - DNA, 25 bp, Homo sapien
tcccctgtggataagtgggcactag

SEQ ID NO: 4318826 - DNA, 25 bp, Homo sapien
tgagtatgtcaacgttacccacaat

SEQ ID NO: 4318827 - DNA, 25 bp, Homo sapien
aaattgggttaggtgctatccgtgg

SEQ ID NO: 4318828 - DNA, 25 bp, Homo sapien
gatatcctgctagatagtctgacaa

SEQ ID NO: 4318829 - DNA, 25 bp, Homo sapien
caggtcctgtttctatacaccaaag

SEQ ID NO: 4318830 - DNA, 25 bp, Homo sapien
cattccctccaacaagattatcagg

SEQ ID NO: 4318831 - DNA, 25 bp, Homo sapien
gagtcagttgctttgttggatatcc

SEQ ID NO: 4318832 - DNA, 25 bp, Homo sapien
taacagcggtcctttgtaggccaaa

SEQ ID NO: 4318833 - DNA, 25 bp, Homo sapien
cttacacaggaaacttaatgagggc

SEQ ID NO: 4318834 - DNA, 25 bp, Homo sapien
gaattctagagcagtatttcccaaa

SEQ ID NO: 4318835 - DNA, 25 bp, Homo sapien
tgcatatcctatagctagcccagtg

SEQ ID NO: 4318836 - DNA, 25 bp, Homo sapien
gaggttttgccagtcatcacagagc

SEQ ID NO: 4318837 - DNA, 25 bp, Homo sapien
taagaaaacgtgaggctggcaaggt

SEQ ID NO: 4318838 - DNA, 25 bp, Homo sapien
taagatgggtcgacaatagattccc

SEQ ID NO: 4318839 - DNA, 25 bp, Homo sapien
ggtcacattgtaaggcatgcccagg

SEQ ID NO: 4318840 - DNA, 25 bp, Homo sapien
tcatcttgcacaaaagaaatgtcag

SEQ ID NO: 4318841 - DNA, 25 bp, Homo sapien
aagaaatgtcagacactctttggat

SEQ ID NO: 4318842 - DNA, 25 bp, Homo sapien
tgaggctcatcttgcacaaaagaaa

SEQ ID NO: 4318843 - DNA, 25 bp, Homo sapien
cagacactctttggatttgattcag

SEQ ID NO: 4318844 - DNA, 25 bp, Homo sapien
tcttccaggtagcatccatatttta

SEQ ID NO: 4318845 - DNA, 25 bp, Homo sapien
gatttccagatcatgatagatcaga

SEQ ID NO: 4318846 - DNA, 25 bp, Homo sapien
cagatctcctaatgtcccaatgtca

SEQ ID NO: 4318847 - DNA, 25 bp, Homo sapien
taatctcatcagaccctattagagc

SEQ ID NO: 4318848 - DNA, 25 bp, Homo sapien
gcggatagtctatgttctccatata

SEQ ID NO: 4318849 - DNA, 25 bp, Homo sapien
tgagatacgtgggacttcactccgt

SEQ ID NO: 4318850 - DNA, 25 bp, Homo sapien
tggaggagggacttctctttcggta

SEQ ID NO: 4318851 - DNA, 25 bp, Homo sapien
tcggtaaccagctcccttgcggata

SEQ ID NO: 4318852 - DNA, 25 bp, Homo sapien
cctttgctataatcatctagggaga

SEQ ID NO: 4318853 - DNA, 25 bp, Homo sapien
cctcttacgaggaatacgaattggt

SEQ ID NO: 4318854 - DNA, 25 bp, Homo sapien
tgagttacatggttgagttgccaaa

SEQ ID NO: 4318855 - DNA, 25 bp, Homo sapien
gataaatgctgttctcgaaatagac

SEQ ID NO: 4318856 - DNA, 25 bp, Homo sapien
tctatgtcctaatcactggaagtcc

SEQ ID NO: 4318857 - DNA, 25 bp, Homo sapien
gcactttgtttaccgtctgactact

SEQ ID NO: 4318858 - DNA, 25 bp, Homo sapien
agcttagtaacatgctgaaggtcac

SEQ ID NO: 4318859 - DNA, 25 bp, Homo sapien
tattttgcttcctcataagtgatgc

SEQ ID NO: 4318860 - DNA, 25 bp, Homo sapien
gaggcactggtacgaaaagtagctt

SEQ ID NO: 4318861 - DNA, 25 bp, Homo sapien
ttgggcgtttcaacaggaggcactg

SEQ ID NO: 4318862 - DNA, 25 bp, Homo sapien
gtagcttgttctagttcatatatca

SEQ ID NO: 4318863 - DNA, 25 bp, Homo sapien
tattgagcacttgtgttgggcgttt

SEQ ID NO: 4318864 - DNA, 25 bp, Homo sapien
tacacttagctcttggcattagatc

SEQ ID NO: 4318865 - DNA, 25 bp, Homo sapien
tgtgcagtgacctctttcatatgta

SEQ ID NO: 4318866 - DNA, 25 bp, Homo sapien
tgattagcaccacccttacacttag

SEQ ID NO: 4318867 - DNA, 25 bp, Homo sapien
gcattagatctggttttgtgcagtg

SEQ ID NO: 4318868 - DNA, 25 bp, Homo sapien
aaccttcttgctgcactagagaaac

SEQ ID NO: 4318869 - DNA, 25 bp, Homo sapien
tatcgagggatggaggatctcctcc

SEQ ID NO: 4318870 - DNA, 25 bp, Homo sapien
gatgctgtagtcaactctttcttct

SEQ ID NO: 4318871 - DNA, 25 bp, Homo sapien
agctccagagggaccatgtgaacct

SEQ ID NO: 4318872 - DNA, 25 bp, Homo sapien
taactgtggaggaacagatgttgag

SEQ ID NO: 4318873 - DNA, 25 bp, Homo sapien
cagccgtaactgtggaggaacagat

SEQ ID NO: 4318874 - DNA, 25 bp, Homo sapien
ctggctacaggtgagatctgggact

SEQ ID NO: 4318875 - DNA, 25 bp, Homo sapien
gaggaaaggattggcctcttttcat

SEQ ID NO: 4318876 - DNA, 25 bp, Homo sapien
gtgggggttgcgaggccacttgtga

SEQ ID NO: 4318877 - DNA, 25 bp, Homo sapien
tgggggttgcgaggccacttgtgac

SEQ ID NO: 4318878 - DNA, 25 bp, Homo sapien
ggtgggggttgcgaggccacttgtg

SEQ ID NO: 4318879 - DNA, 25 bp, Homo sapien
tctccaaggaatgcatggcaatggc

SEQ ID NO: 4318880 - DNA, 25 bp, Homo sapien
caaagcctggagtagtgttaacagc

SEQ ID NO: 4318881 - DNA, 25 bp, Homo sapien
tccattggcaattcacaggctgagt

SEQ ID NO: 4318882 - DNA, 25 bp, Homo sapien
cattttcaagtgacacaagggtcgt

SEQ ID NO: 4318883 - DNA, 25 bp, Homo sapien
ggaggttagattggtatcctcgtct

SEQ ID NO: 4318884 - DNA, 25 bp, Homo sapien
cgtggaaagatctgtggggaggtta

SEQ ID NO: 4318885 - DNA, 25 bp, Homo sapien
gagaaccattttaccccccacatgc

SEQ ID NO: 4318886 - DNA, 25 bp, Homo sapien
ctgtggggaggttagattggtatcc

SEQ ID NO: 4318887 - DNA, 25 bp, Homo sapien
tgtgatcgggagctatttgttcaat

SEQ ID NO: 4318888 - DNA, 25 bp, Homo sapien
tctaagatatcactggtgctgtgat

SEQ ID NO: 4318889 - DNA, 25 bp, Homo sapien
ccctgtcattgtgttcttctaagat

SEQ ID NO: 4318890 - DNA, 25 bp, Homo sapien
gaaactgcgtattctttagtaccaa

SEQ ID NO: 4318891 - DNA, 25 bp, Homo sapien
taattacaggttttatatggggaca

SEQ ID NO: 4318892 - DNA, 25 bp, Homo sapien
tacaaattgtcctttgaccatgtag

SEQ ID NO: 4318893 - DNA, 25 bp, Homo sapien
tatggggacagtactttaatctggg

SEQ ID NO: 4318894 - DNA, 25 bp, Homo sapien
tggggccttcgctttatttcatgct

SEQ ID NO: 4318895 - DNA, 25 bp, Homo sapien
gaaaggccagattctccatggtgct

SEQ ID NO: 4318896 - DNA, 25 bp, Homo sapien
cctttcttgaaaggccagattctcc

SEQ ID NO: 4318897 - DNA, 25 bp, Homo sapien
tttcttcagccaaggacattctggt

SEQ ID NO: 4318898 - DNA, 25 bp, Homo sapien
cattctggtaactgtccctttctca

SEQ ID NO: 4318899 - DNA, 25 bp, Homo sapien
gctggtttcagaataaacgccttgt

SEQ ID NO: 4318900 - DNA, 25 bp, Homo sapien
aaaagaagaattagattgtgacagc

SEQ ID NO: 4318901 - DNA, 25 bp, Homo sapien
tctttctaatggaactgcctgttcc

SEQ ID NO: 4318902 - DNA, 25 bp, Homo sapien
ttgaggcggtagatatactggacat

SEQ ID NO: 4318903 - DNA, 25 bp, Homo sapien
ttatcgatgagcttgagttaagatc

SEQ ID NO: 4318904 - DNA, 25 bp, Homo sapien
gaagctagtttcaaggtccggtata

SEQ ID NO: 4318905 - DNA, 25 bp, Homo sapien
gagcttgagttaagatctgctgtag

SEQ ID NO: 4318906 - DNA, 25 bp, Homo sapien
gtgacgttgtacaaacaatatttta

SEQ ID NO: 4318907 - DNA, 25 bp, Homo sapien
gctttctgttgctaaaaacagagca

SEQ ID NO: 4318908 - DNA, 25 bp, Homo sapien
ttggggacgttgtgctttctgttgc

SEQ ID NO: 4318909 - DNA, 25 bp, Homo sapien
gtgctttctgttgctaaaaacagag

SEQ ID NO: 4318910 - DNA, 25 bp, Homo sapien
tctcccttggggacgttgtgctttc

SEQ ID NO: 4318911 - DNA, 25 bp, Homo sapien
gatcttgattacttatagctgttgc

SEQ ID NO: 4318912 - DNA, 25 bp, Homo sapien
cactgctaggcttggatgctgatct

SEQ ID NO: 4318913 - DNA, 25 bp, Homo sapien
tgctgtctccactggactgggtact

SEQ ID NO: 4318914 - DNA, 25 bp, Homo sapien
ttgcctctgcccacagaaattgttg

SEQ ID NO: 4318915 - DNA, 25 bp, Homo sapien
cactccctgggttggaagttgaata

SEQ ID NO: 4318916 - DNA, 25 bp, Homo sapien
aggtgcctctggggatacctatttt

SEQ ID NO: 4318917 - DNA, 25 bp, Homo sapien
cctccactccctgggttggaagttg

SEQ ID NO: 4318918 - DNA, 25 bp, Homo sapien
ggatacctattttgtcctccactcc

SEQ ID NO: 4318919 - DNA, 25 bp, Homo sapien
cacgctcagtgggtgtagactgcag

SEQ ID NO: 4318920 - DNA, 25 bp, Homo sapien
gctcattgctcttcacaaagatgtc

SEQ ID NO: 4318921 - DNA, 25 bp, Homo sapien
catgaagacacgctcagtgggtgta

SEQ ID NO: 4318922 - DNA, 25 bp, Homo sapien
cagggccagctcattgctcttcaca

SEQ ID NO: 4318923 - DNA, 25 bp, Homo sapien
gcagaatagcagaggaattaatgca

SEQ ID NO: 4318924 - DNA, 25 bp, Homo sapien
ctgaaaacggttgttgcagaatagc

SEQ ID NO: 4318925 - DNA, 25 bp, Homo sapien
gaatagcagaggaattaatgcacat

SEQ ID NO: 4318926 - DNA, 25 bp, Homo sapien
aaacggttgttgcagaatagcagag

SEQ ID NO: 4318927 - DNA, 25 bp, Homo sapien
tacatttactgatttgcatatagtg

SEQ ID NO: 4318928 - DNA, 25 bp, Homo sapien
catttactgatttgcatatagtgaa

SEQ ID NO: 4318929 - DNA, 25 bp, Homo sapien
atttactgatttgcatatagtgaac

SEQ ID NO: 4318930 - DNA, 25 bp, Homo sapien
attacatttactgatttgcatatag

SEQ ID NO: 4318931 - DNA, 25 bp, Homo sapien
tgaatgggttttcttgttgctaaag

SEQ ID NO: 4318932 - DNA, 25 bp, Homo sapien
atgggttttcttgttgctaaagcaa

SEQ ID NO: 4318933 - DNA, 25 bp, Homo sapien
gaatgggttttcttgttgctaaagc

SEQ ID NO: 4318934 - DNA, 25 bp, Homo sapien
ctgagtgtaacatatggtctcagcc

SEQ ID NO: 4318935 - DNA, 25 bp, Homo sapien
gtttgccagtaacataatgtccaga

SEQ ID NO: 4318936 - DNA, 25 bp, Homo sapien
tccagactcctcaagaagacattca

SEQ ID NO: 4318937 - DNA, 25 bp, Homo sapien
gaacttgtgctgcttgcgacattcc

SEQ ID NO: 4318938 - DNA, 25 bp, Homo sapien
gaagacattcaagatcttgagaatc

SEQ ID NO: 4318939 - DNA, 25 bp, Homo sapien
tagagattttctagtgtcgtaagcc

SEQ ID NO: 4318940 - DNA, 25 bp, Homo sapien
ttttcatgttgagacatcgaacttc

SEQ ID NO: 4318941 - DNA, 25 bp, Homo sapien
gtgtcgtaagccagtttttcatgtt

SEQ ID NO: 4318942 - DNA, 25 bp, Homo sapien
tgagacatcgaacttcaaaagaatg

SEQ ID NO: 4318943 - DNA, 25 bp, Homo sapien
aaagccatgattgcaactttctcca

SEQ ID NO: 4318944 - DNA, 25 bp, Homo sapien
tgaggtaaccaaatcttgtcaccat

SEQ ID NO: 4318945 - DNA, 25 bp, Homo sapien
tccttgaggtaaccaaatcttgtca

SEQ ID NO: 4318946 - DNA, 25 bp, Homo sapien
tgcaaaagccatgattgcaactttc

SEQ ID NO: 4318947 - DNA, 25 bp, Homo sapien
gaaactgcatataatcagctgccat

SEQ ID NO: 4318948 - DNA, 25 bp, Homo sapien
atcaagcccagctatattaggccag

SEQ ID NO: 4318949 - DNA, 25 bp, Homo sapien
aattgtgagcactccagaaactgca

SEQ ID NO: 4318950 - DNA, 25 bp, Homo sapien
ttaggccagcggaattgtgagcact

SEQ ID NO: 4318951 - DNA, 25 bp, Homo sapien
ccacagctgcaccaattagtctccc

SEQ ID NO: 4318952 - DNA, 25 bp, Homo sapien
tgttctatttcatgcaaggcggctt

SEQ ID NO: 4318953 - DNA, 25 bp, Homo sapien
tcaattcataacacctgcaagtcct

SEQ ID NO: 4318954 - DNA, 25 bp, Homo sapien
cctgcaagtcctttagcatgttcta

SEQ ID NO: 4318955 - DNA, 25 bp, Homo sapien
taatgcataatggaaaacctgcgtg

SEQ ID NO: 4318956 - DNA, 25 bp, Homo sapien
cctgcgtgcattgtgcacagtagca

SEQ ID NO: 4318957 - DNA, 25 bp, Homo sapien
ccataactgtcattaggcttgcatt

SEQ ID NO: 4318958 - DNA, 25 bp, Homo sapien
aatacctgcacagtatccttcatgt

SEQ ID NO: 4318959 - DNA, 25 bp, Homo sapien
gggcacacagactcttcaaatggca

SEQ ID NO: 4318960 - DNA, 25 bp, Homo sapien
tttaccagtgacttgaattgggcac

SEQ ID NO: 4318961 - DNA, 25 bp, Homo sapien
tggctttaccagtgacttgaattgg

SEQ ID NO: 4318962 - DNA, 25 bp, Homo sapien
ccagtgacttgaattgggcacacag

SEQ ID NO: 4318963 - DNA, 25 bp, Homo sapien
ttattttcatggccacttagccatc

SEQ ID NO: 4318964 - DNA, 25 bp, Homo sapien
tattttcatggccacttagccatct

SEQ ID NO: 4318965 - DNA, 25 bp, Homo sapien
ttttcatggccacttagccatcttt

SEQ ID NO: 4318966 - DNA, 25 bp, Homo sapien
cttattttcatggccacttagccat

SEQ ID NO: 4318967 - DNA, 25 bp, Homo sapien
taatgccctgtggagaagactgcca

SEQ ID NO: 4318968 - DNA, 25 bp, Homo sapien
gaccgggatatacacctggtgcatt

SEQ ID NO: 4318969 - DNA, 25 bp, Homo sapien
cttggcatttgccaatgaccgggat

SEQ ID NO: 4318970 - DNA, 25 bp, Homo sapien
aatgtgccgggccaagagatttcac

SEQ ID NO: 4318971 - DNA, 25 bp, Homo sapien
ttggtaactgtagatctttctcctt

SEQ ID NO: 4318972 - DNA, 25 bp, Homo sapien
tcacctttggtaactgtagatcttt

SEQ ID NO: 4318973 - DNA, 25 bp, Homo sapien
ggtaactgtagatctttctccttac

SEQ ID NO: 4318974 - DNA, 25 bp, Homo sapien
tctctgtcacctttggtaactgtag

SEQ ID NO: 4318975 - DNA, 25 bp, Homo sapien
tttatctacagcttgacgcccaacc

SEQ ID NO: 4318976 - DNA, 25 bp, Homo sapien
tatctacagcttgacgcccaaccat

SEQ ID NO: 4318977 - DNA, 25 bp, Homo sapien
ttatctacagcttgacgcccaacca

SEQ ID NO: 4318978 - DNA, 25 bp, Homo sapien
atctacagcttgacgcccaaccatc

SEQ ID NO: 4318979 - DNA, 25 bp, Homo sapien
cttttccaaactatgaactcttgac

SEQ ID NO: 4318980 - DNA, 25 bp, Homo sapien
tcattttcaatacctgagcatcgga

SEQ ID NO: 4318981 - DNA, 25 bp, Homo sapien
caatacctgagcatcggagaattaa

SEQ ID NO: 4318982 - DNA, 25 bp, Homo sapien
ttttcaatacctgagcatcggagaa

SEQ ID NO: 4318983 - DNA, 25 bp, Homo sapien
cctgagcatcggagaattaaatgct

SEQ ID NO: 4318984 - DNA, 25 bp, Homo sapien
agtccttgcagttatggttcccgca

SEQ ID NO: 4318985 - DNA, 25 bp, Homo sapien
cagattgtgctctcttaggcctatc

SEQ ID NO: 4318986 - DNA, 25 bp, Homo sapien
tgcagttatggttcccgcagccaga

SEQ ID NO: 4318987 - DNA, 25 bp, Homo sapien
tccccataaatggactctagggagt

SEQ ID NO: 4318988 - DNA, 25 bp, Homo sapien
tccttagccactccgttactctgac

SEQ ID NO: 4318989 - DNA, 25 bp, Homo sapien
ctccttagccactccgttactctga

SEQ ID NO: 4318990 - DNA, 25 bp, Homo sapien
tctgcagcttttccaatggttccat

SEQ ID NO: 4318991 - DNA, 25 bp, Homo sapien
ttttcatctgcagcttttccaatgg

SEQ ID NO: 4318992 - DNA, 25 bp, Homo sapien
tcatctgcagcttttccaatggttc

SEQ ID NO: 4318993 - DNA, 25 bp, Homo sapien
atctgcagcttttccaatggttcca

SEQ ID NO: 4318994 - DNA, 25 bp, Homo sapien
aaacacatttatgttgtggcatttt

SEQ ID NO: 4318995 - DNA, 25 bp, Homo sapien
acatttatgttgtggcatttttcac

SEQ ID NO: 4318996 - DNA, 25 bp, Homo sapien
gctcctcctctgtcagcctttattt

SEQ ID NO: 4318997 - DNA, 25 bp, Homo sapien
tcctcctctgtcagcctttattttt

SEQ ID NO: 4318998 - DNA, 25 bp, Homo sapien
cactcttaacctccataaaagacat

SEQ ID NO: 4318999 - DNA, 25 bp, Homo sapien
agtcactcttaacctccataaaaga

SEQ ID NO: 4319000 - DNA, 25 bp, Homo sapien
ctcttaacctccataaaagacatcc

SEQ ID NO: 4319001 - DNA, 25 bp, Homo sapien
cacttgggggccaagtcactcttaa

SEQ ID NO: 4319002 - DNA, 25 bp, Homo sapien
tactgtggttgttgtatcatcaaag

SEQ ID NO: 4319003 - DNA, 25 bp, Homo sapien
ctgtggttgttgtatcatcaaagac

SEQ ID NO: 4319004 - DNA, 25 bp, Homo sapien
gatgtactgtggttgttgtatcatc

SEQ ID NO: 4319005 - DNA, 25 bp, Homo sapien
ctattgatgtactgtggttgttgta

SEQ ID NO: 4319006 - DNA, 25 bp, Homo sapien
ggtatgtgcgtgctaggacaatgtc

SEQ ID NO: 4319007 - DNA, 25 bp, Homo sapien
gaaggcatctgcttattttccgtat

SEQ ID NO: 4319008 - DNA, 25 bp, Homo sapien
ttattttccgtatgcctgcacagag

SEQ ID NO: 4319009 - DNA, 25 bp, Homo sapien
ctcttgtgctgctcatggtatgtgc

SEQ ID NO: 4319010 - DNA, 25 bp, Homo sapien
tgaccttgatccaaagaaacccatc

SEQ ID NO: 4319011 - DNA, 25 bp, Homo sapien
tgcccatgaccttgatccaaagaaa

SEQ ID NO: 4319012 - DNA, 25 bp, Homo sapien
catgaccttgatccaaagaaaccca

SEQ ID NO: 4319013 - DNA, 25 bp, Homo sapien
ttgctttgcccatgaccttgatcca

SEQ ID NO: 4319014 - DNA, 25 bp, Homo sapien
ttccccactttcgttcctcacactc

SEQ ID NO: 4319015 - DNA, 25 bp, Homo sapien
tccccactttcgttcctcacactca

SEQ ID NO: 4319016 - DNA, 25 bp, Homo sapien
ccccactttcgttcctcacactcat

SEQ ID NO: 4319017 - DNA, 25 bp, Homo sapien
cgttgatttcgtggaaccagcagag

SEQ ID NO: 4319018 - DNA, 25 bp, Homo sapien
gcccagggagacataaatgtaagag

SEQ ID NO: 4319019 - DNA, 25 bp, Homo sapien
cataaatgtaagaggatataggaca

SEQ ID NO: 4319020 - DNA, 25 bp, Homo sapien
tataggacagagtttgccgttgatt

SEQ ID NO: 4319021 - DNA, 25 bp, Homo sapien
ttgtatgtgtctccatgatatctac

SEQ ID NO: 4319022 - DNA, 25 bp, Homo sapien
gtatgtgtctccatgatatctacac

SEQ ID NO: 4319023 - DNA, 25 bp, Homo sapien
tgtatgtgtctccatgatatctaca

SEQ ID NO: 4319024 - DNA, 25 bp, Homo sapien
tagtgcccgtagcagtaacttgcat

SEQ ID NO: 4319025 - DNA, 25 bp, Homo sapien
tgcccgtagcagtaacttgcatttc

SEQ ID NO: 4319026 - DNA, 25 bp, Homo sapien
ctccatgatagtgcccgtagcagta

SEQ ID NO: 4319027 - DNA, 25 bp, Homo sapien
atgatagtgcccgtagcagtaactt

SEQ ID NO: 4319028 - DNA, 25 bp, Homo sapien
ccacagagagcagtatcatgggaaa

SEQ ID NO: 4319029 - DNA, 25 bp, Homo sapien
gcctttgccttgtcccacaccacag

SEQ ID NO: 4319030 - DNA, 25 bp, Homo sapien
gttcaggctctgtttgtgaaaggct

SEQ ID NO: 4319031 - DNA, 25 bp, Homo sapien
tgtctcaggagcacattgataccca

SEQ ID NO: 4319032 - DNA, 25 bp, Homo sapien
tcagtgtagtgataattattaatgt

SEQ ID NO: 4319033 - DNA, 25 bp, Homo sapien
tatatgtcgtaacatcagtgtagtg

SEQ ID NO: 4319034 - DNA, 25 bp, Homo sapien
tattaatgttagcaacccaatgcaa

SEQ ID NO: 4319035 - DNA, 25 bp, Homo sapien
atgaaggctttgctgatatatgtcg

SEQ ID NO: 4319036 - DNA, 25 bp, Homo sapien
caagcgttgtttatgccttcctgtc

SEQ ID NO: 4319037 - DNA, 25 bp, Homo sapien
tgatgctgatgccaagcgttgttta

SEQ ID NO: 4319038 - DNA, 25 bp, Homo sapien
cagatgatttgaactggtgatgtca

SEQ ID NO: 4319039 - DNA, 25 bp, Homo sapien
gggacacgtaaatccatcctgcatc

SEQ ID NO: 4319040 - DNA, 25 bp, Homo sapien
tcttgcctggattggaatgagccgg

SEQ ID NO: 4319041 - DNA, 25 bp, Homo sapien
gaaccctggtttatgtcttgcctgg

SEQ ID NO: 4319042 - DNA, 25 bp, Homo sapien
tgtcatgatcaacaccgctctcaga

SEQ ID NO: 4319043 - DNA, 25 bp, Homo sapien
ttgtatatcctttccgtcgttgcca

SEQ ID NO: 4319044 - DNA, 25 bp, Homo sapien
gttgatcttcttttctcttgacatt

SEQ ID NO: 4319045 - DNA, 25 bp, Homo sapien
agttgatcttcttttctcttgacat

SEQ ID NO: 4319046 - DNA, 25 bp, Homo sapien
cagttgatcttcttttctcttgaca

SEQ ID NO: 4319047 - DNA, 25 bp, Homo sapien
cagaattccattttgtgatagtatt

SEQ ID NO: 4319048 - DNA, 25 bp, Homo sapien
cagttttgccagatcaaaaagccat

SEQ ID NO: 4319049 - DNA, 25 bp, Homo sapien
tccattttgtgatagtatttcagaa

SEQ ID NO: 4319050 - DNA, 25 bp, Homo sapien
cagaaatgttaagtcttgtggcagt

SEQ ID NO: 4319051 - DNA, 25 bp, Homo sapien
ctcttggtcccccatcatgctgaga

SEQ ID NO: 4319052 - DNA, 25 bp, Homo sapien
caagaatcatagctttgcaggaaca

SEQ ID NO: 4319053 - DNA, 25 bp, Homo sapien
gtttaggggaattaatctgccaaga

SEQ ID NO: 4319054 - DNA, 25 bp, Homo sapien
tacttgtagtatggagaaactcctc

SEQ ID NO: 4319055 - DNA, 25 bp, Homo sapien
ccagatcccaagaccttagtcacaa

SEQ ID NO: 4319056 - DNA, 25 bp, Homo sapien
ccttagtcacaatattcttcaaaca

SEQ ID NO: 4319057 - DNA, 25 bp, Homo sapien
cccaagaccttagtcacaatattct

SEQ ID NO: 4319058 - DNA, 25 bp, Homo sapien
gaccttagtcacaatattcttcaaa

SEQ ID NO: 4319059 - DNA, 25 bp, Homo sapien
attagcatcaatgatggccacattt

SEQ ID NO: 4319060 - DNA, 25 bp, Homo sapien
ttagcatcaatgatggccacatttt

SEQ ID NO: 4319061 - DNA, 25 bp, Homo sapien
tgtcaaagtatgtacgtgggttctc

SEQ ID NO: 4319062 - DNA, 25 bp, Homo sapien
tttggtgaagaacccgaaatcagga

SEQ ID NO: 4319063 - DNA, 25 bp, Homo sapien
ggtgaagaacccgaaatcaggagta

SEQ ID NO: 4319064 - DNA, 25 bp, Homo sapien
atggtgggaagaacaccaagggtgt

SEQ ID NO: 4319065 - DNA, 25 bp, Homo sapien
gaaagtgtcattaatggtgacaata

SEQ ID NO: 4319066 - DNA, 25 bp, Homo sapien
ggtgggattcttgttgatgaccaac

SEQ ID NO: 4319067 - DNA, 25 bp, Homo sapien
tgacaatgccctgaaacttgccgtg

SEQ ID NO: 4319068 - DNA, 25 bp, Homo sapien
cacaggaacgtggaaatcatgtaac

SEQ ID NO: 4319069 - DNA, 25 bp, Homo sapien
tcatcccgtttgttttccatagatg

SEQ ID NO: 4319070 - DNA, 25 bp, Homo sapien
catcccgtttgttttccatagatga

SEQ ID NO: 4319071 - DNA, 25 bp, Homo sapien
tttccatagatgactgatgctaaac

SEQ ID NO: 4319072 - DNA, 25 bp, Homo sapien
catgtagagtactggagccttctcc

SEQ ID NO: 4319073 - DNA, 25 bp, Homo sapien
tcagttttgccctatccgggtccac

SEQ ID NO: 4319074 - DNA, 25 bp, Homo sapien
tatccgggtccaccctgagcatgta

SEQ ID NO: 4319075 - DNA, 25 bp, Homo sapien
caccctgagcatgtagagtactgga

SEQ ID NO: 4319076 - DNA, 25 bp, Homo sapien
tgccagatgtttgcccttccagctt

SEQ ID NO: 4319077 - DNA, 25 bp, Homo sapien
gaggcaaccatgtggccaaacttgt

SEQ ID NO: 4319078 - DNA, 25 bp, Homo sapien
tgtttttatatctgaataatgacct

SEQ ID NO: 4319079 - DNA, 25 bp, Homo sapien
taatgaccttgtttgaggcaaccat

SEQ ID NO: 4319080 - DNA, 25 bp, Homo sapien
tattgatgtgacataatagggatca

SEQ ID NO: 4319081 - DNA, 25 bp, Homo sapien
aaccactgtattgatgtgacataat

SEQ ID NO: 4319082 - DNA, 25 bp, Homo sapien
gacataatagggatcactgacccac

SEQ ID NO: 4319083 - DNA, 25 bp, Homo sapien
atttatcattatttaaccactgtat

SEQ ID NO: 4319084 - DNA, 25 bp, Homo sapien
tctgtgtttcctgtcccatgggcga

SEQ ID NO: 4319085 - DNA, 25 bp, Homo sapien
tgtttcctgtcccatgggcgacgcc

SEQ ID NO: 4319086 - DNA, 25 bp, Homo sapien
tgtgtttcctgtcccatgggcgacg

SEQ ID NO: 4319087 - DNA, 25 bp, Homo sapien
ttctgtgtttcctgtcccatgggcg

SEQ ID NO: 4319088 - DNA, 25 bp, Homo sapien
cctgcgagcggagcatggtaacttc

SEQ ID NO: 4319089 - DNA, 25 bp, Homo sapien
ttcagcgcacgctgaagacggcact

SEQ ID NO: 4319090 - DNA, 25 bp, Homo sapien
caaacttgacatcagcctgcgagcg

SEQ ID NO: 4319091 - DNA, 25 bp, Homo sapien
tcctccttatctccagtgtcaaact

SEQ ID NO: 4319092 - DNA, 25 bp, Homo sapien
gacaccatttcgagcaattaccttg

SEQ ID NO: 4319093 - DNA, 25 bp, Homo sapien
aagaaaatcctccagcgttgcaacc

SEQ ID NO: 4319094 - DNA, 25 bp, Homo sapien
gacaggttgttcctacttgggatca

SEQ ID NO: 4319095 - DNA, 25 bp, Homo sapien
tatgaccatgtggtactccgagaag

SEQ ID NO: 4319096 - DNA, 25 bp, Homo sapien
gggtctgggttcggtgctcttttca

SEQ ID NO: 4319097 - DNA, 25 bp, Homo sapien
tgggtctgggttcggtgctcttttc

SEQ ID NO: 4319098 - DNA, 25 bp, Homo sapien
ggtctgggttcggtgctcttttcat

SEQ ID NO: 4319099 - DNA, 25 bp, Homo sapien
ctcctctctgtggaggagtactggt

SEQ ID NO: 4319100 - DNA, 25 bp, Homo sapien
cctcctctctgtggaggagtactgg

SEQ ID NO: 4319101 - DNA, 25 bp, Homo sapien
tcctcctctctgtggaggagtactg

SEQ ID NO: 4319102 - DNA, 25 bp, Homo sapien
caattgcaatccattttgattttca

SEQ ID NO: 4319103 - DNA, 25 bp, Homo sapien
tacaattgcaatccattttgatttt

SEQ ID NO: 4319104 - DNA, 25 bp, Homo sapien
aattgcaatccattttgattttcat

SEQ ID NO: 4319105 - DNA, 25 bp, Homo sapien
cttacaattgcaatccattttgatt

SEQ ID NO: 4319106 - DNA, 25 bp, Homo sapien
ttgtgtgcccaaaccttgtcagagg

SEQ ID NO: 4319107 - DNA, 25 bp, Homo sapien
catgtcaggagctcattgtgtgccc

SEQ ID NO: 4319108 - DNA, 25 bp, Homo sapien
cattagcgggtcattgtgtaagcct

SEQ ID NO: 4319109 - DNA, 25 bp, Homo sapien
tcaggcctgcgttacaaaagaccca

SEQ ID NO: 4319110 - DNA, 25 bp, Homo sapien
ggattggaggaatgtgttttgttcc

SEQ ID NO: 4319111 - DNA, 25 bp, Homo sapien
ggttcacatattcgcatttacacaa

SEQ ID NO: 4319112 - DNA, 25 bp, Homo sapien
ttcacttgcatcctcacaatttcca

SEQ ID NO: 4319113 - DNA, 25 bp, Homo sapien
gcaaaaatgtgaagtaggtgggatt

SEQ ID NO: 4319114 - DNA, 25 bp, Homo sapien
tctcttcaaactcgttgtttgccag

SEQ ID NO: 4319115 - DNA, 25 bp, Homo sapien
ttcaaactcgttgtttgccaggtga

SEQ ID NO: 4319116 - DNA, 25 bp, Homo sapien
taactctcttcaaactcgttgtttg

SEQ ID NO: 4319117 - DNA, 25 bp, Homo sapien
caaactcgttgtttgccaggtgagt

SEQ ID NO: 4319118 - DNA, 25 bp, Homo sapien
caggatggtatacagcctgtgagaa

SEQ ID NO: 4319119 - DNA, 25 bp, Homo sapien
tccaggatggtatacagcctgtgag

SEQ ID NO: 4319120 - DNA, 25 bp, Homo sapien
ggatggtatacagcctgtgagaaaa

SEQ ID NO: 4319121 - DNA, 25 bp, Homo sapien
tatccaggatggtatacagcctgtg

SEQ ID NO: 4319122 - DNA, 25 bp, Homo sapien
ctgtcccttagataaccacagtaac

SEQ ID NO: 4319123 - DNA, 25 bp, Homo sapien
cccttagataaccacagtaactctc

SEQ ID NO: 4319124 - DNA, 25 bp, Homo sapien
gtcccttagataaccacagtaactc

SEQ ID NO: 4319125 - DNA, 25 bp, Homo sapien
tgtcccttagataaccacagtaact

SEQ ID NO: 4319126 - DNA, 25 bp, Homo sapien
ttcatgaataagcagtttccttttc

SEQ ID NO: 4319127 - DNA, 25 bp, Homo sapien
gccatctgatcctctggaatagcca

SEQ ID NO: 4319128 - DNA, 25 bp, Homo sapien
gatcctctggaatagccaacagctg

SEQ ID NO: 4319129 - DNA, 25 bp, Homo sapien
caactgagcacattcaagggtaagg

SEQ ID NO: 4319130 - DNA, 25 bp, Homo sapien
gagtttgtcatctaaccccagtggg

SEQ ID NO: 4319131 - DNA, 25 bp, Homo sapien
cacgactggtttggaccatatttaa

SEQ ID NO: 4319132 - DNA, 25 bp, Homo sapien
gccaaaaccaatgataattaatgtt

SEQ ID NO: 4319133 - DNA, 25 bp, Homo sapien
tcagagtaaatgtgattccatacac

SEQ ID NO: 4319134 - DNA, 25 bp, Homo sapien
cacttcttatactgcaaaccatttc

SEQ ID NO: 4319135 - DNA, 25 bp, Homo sapien
tctttgtccatgttcatactcataa

SEQ ID NO: 4319136 - DNA, 25 bp, Homo sapien
tttgtccatgttcatactcataacc

SEQ ID NO: 4319137 - DNA, 25 bp, Homo sapien
tgtccatgttcatactcataaccaa

SEQ ID NO: 4319138 - DNA, 25 bp, Homo sapien
ctctttgtccatgttcatactcata

SEQ ID NO: 4319139 - DNA, 25 bp, Homo sapien
cttgccacaagggtagctagaagca

SEQ ID NO: 4319140 - DNA, 25 bp, Homo sapien
agccagagaagcttggctcttccag

SEQ ID NO: 4319141 - DNA, 25 bp, Homo sapien
ctgaagccagagaagcttggctctt

SEQ ID NO: 4319142 - DNA, 25 bp, Homo sapien
ggtctctgccctgtaggtggctgaa

SEQ ID NO: 4319143 - DNA, 25 bp, Homo sapien
tttcatggggcgaatggaatgccat

SEQ ID NO: 4319144 - DNA, 25 bp, Homo sapien
aatgaaaacgtttgcaacacagggc

SEQ ID NO: 4319145 - DNA, 25 bp, Homo sapien
tctgccgttgctaaacaatccagtg

SEQ ID NO: 4319146 - DNA, 25 bp, Homo sapien
gccatgtgtactcccagcaggagga

SEQ ID NO: 4319147 - DNA, 25 bp, Homo sapien
tggtgacagtcctgctgttctcagc

SEQ ID NO: 4319148 - DNA, 25 bp, Homo sapien
gactgcctcatttccagagcctggt

SEQ ID NO: 4319149 - DNA, 25 bp, Homo sapien
agagcctggtgacagtcctgctgtt

SEQ ID NO: 4319150 - DNA, 25 bp, Homo sapien
atgactgcctcatttccagagcctg

SEQ ID NO: 4319151 - DNA, 25 bp, Homo sapien
atgccattttcttcttttactcctt

SEQ ID NO: 4319152 - DNA, 25 bp, Homo sapien
ttactcctttcttttctactataga

SEQ ID NO: 4319153 - DNA, 25 bp, Homo sapien
tcttttctactatagaacctaataa

SEQ ID NO: 4319154 - DNA, 25 bp, Homo sapien
tactcctttcttttctactatagaa

SEQ ID NO: 4319155 - DNA, 25 bp, Homo sapien
ctttgacttctcattaactgctaga

SEQ ID NO: 4319156 - DNA, 25 bp, Homo sapien
tttgacttctcattaactgctagaa

SEQ ID NO: 4319157 - DNA, 25 bp, Homo sapien
tgacttctcattaactgctagaaaa

SEQ ID NO: 4319158 - DNA, 25 bp, Homo sapien
gacttctcattaactgctagaaaaa

SEQ ID NO: 4319159 - DNA, 25 bp, Homo sapien
aactgttctctccaggtacatcgtt

SEQ ID NO: 4319160 - DNA, 25 bp, Homo sapien
tatgaactgttctctccaggtacat

SEQ ID NO: 4319161 - DNA, 25 bp, Homo sapien
tgaactgttctctccaggtacatcg

SEQ ID NO: 4319162 - DNA, 25 bp, Homo sapien
ctgtaggtatgaactgttctctcca

SEQ ID NO: 4319163 - DNA, 25 bp, Homo sapien
aataacatcttcataaataagactt

SEQ ID NO: 4319164 - DNA, 25 bp, Homo sapien
ccttcccacataatcgtctgctcat

SEQ ID NO: 4319165 - DNA, 25 bp, Homo sapien
tggcccttcccacataatcgtctgc

SEQ ID NO: 4319166 - DNA, 25 bp, Homo sapien
tctatcccattctcgctctggccct

SEQ ID NO: 4319167 - DNA, 25 bp, Homo sapien
catgaaggtagacatttttcagcgc

SEQ ID NO: 4319168 - DNA, 25 bp, Homo sapien
ggatctacatgaattctttcagaac

SEQ ID NO: 4319169 - DNA, 25 bp, Homo sapien
taaacaccaaaaggatctacatgaa

SEQ ID NO: 4319170 - DNA, 25 bp, Homo sapien
cagcgccaatgtagcgaatcggaaa

SEQ ID NO: 4319171 - DNA, 25 bp, Homo sapien
ggttgtgaagtgaattgggcaaagt

SEQ ID NO: 4319172 - DNA, 25 bp, Homo sapien
gggcaaagtgttaagaagttgctaa

SEQ ID NO: 4319173 - DNA, 25 bp, Homo sapien
tagaaatgaataaggaagtctcttt

SEQ ID NO: 4319174 - DNA, 25 bp, Homo sapien
gaaatgaataaggaagtctctttct

SEQ ID NO: 4319175 - DNA, 25 bp, Homo sapien
aggcatgtgccacaatgcccagcta

SEQ ID NO: 4319176 - DNA, 25 bp, Homo sapien
tgcccagctaattttggcattttta

SEQ ID NO: 4319177 - DNA, 25 bp, Homo sapien
caagcgattctatagctgggattac

SEQ ID NO: 4319178 - DNA, 25 bp, Homo sapien
gttcaagcgattctatagctgggat

SEQ ID NO: 4319179 - DNA, 25 bp, Homo sapien
ggttgggccacagaagaagatcatc

SEQ ID NO: 4319180 - DNA, 25 bp, Homo sapien
gaatggcccagttcccgtgtaaagc

SEQ ID NO: 4319181 - DNA, 25 bp, Homo sapien
gcattaaagctctagaaacgcaatc

SEQ ID NO: 4319182 - DNA, 25 bp, Homo sapien
catgaaaaaggttggtgtcaccgtg

SEQ ID NO: 4319183 - DNA, 25 bp, Homo sapien
gtggaagttccaagtccaataagac

SEQ ID NO: 4319184 - DNA, 25 bp, Homo sapien
tgcagacagacaataattctggaga

SEQ ID NO: 4319185 - DNA, 25 bp, Homo sapien
ctgcagacagacaataattctggag

SEQ ID NO: 4319186 - DNA, 25 bp, Homo sapien
caagtccaataagacactcaaatat

SEQ ID NO: 4319187 - DNA, 25 bp, Homo sapien
ccttcacaatgtggcggttggttcc

SEQ ID NO: 4319188 - DNA, 25 bp, Homo sapien
tgtggcggttggttccaagtacaga

SEQ ID NO: 4319189 - DNA, 25 bp, Homo sapien
acgtgccttcacaatgtggcggttg

SEQ ID NO: 4319190 - DNA, 25 bp, Homo sapien
cacaatgtggcggttggttccaagt

SEQ ID NO: 4319191 - DNA, 25 bp, Homo sapien
ttgtaatataagctgacacctgtga

SEQ ID NO: 4319192 - DNA, 25 bp, Homo sapien
ttatttggttgtagatcactgaaca

SEQ ID NO: 4319193 - DNA, 25 bp, Homo sapien
taaaagtcactattgtaatataagc

SEQ ID NO: 4319194 - DNA, 25 bp, Homo sapien
taagctgacacctgtgattggttta

SEQ ID NO: 4319195 - DNA, 25 bp, Homo sapien
tcttcagttgtgtaatagtcatgaa

SEQ ID NO: 4319196 - DNA, 25 bp, Homo sapien
ttcagttgtgtaatagtcatgaaat

SEQ ID NO: 4319197 - DNA, 25 bp, Homo sapien
cttcagttgtgtaatagtcatgaaa

SEQ ID NO: 4319198 - DNA, 25 bp, Homo sapien
tctccgttgcttcttcagttgtgta

SEQ ID NO: 4319199 - DNA, 25 bp, Homo sapien
gagtggcattctcggcagtgcgata

SEQ ID NO: 4319200 - DNA, 25 bp, Homo sapien
tccgttcatgaaaagagctagtcct

SEQ ID NO: 4319201 - DNA, 25 bp, Homo sapien
cattgacatcatggaaagacaaacg

SEQ ID NO: 4319202 - DNA, 25 bp, Homo sapien
aacggtaatgggaaacatagaggag

SEQ ID NO: 4319203 - DNA, 25 bp, Homo sapien
tttgtgaggaaagggagttgtacat

SEQ ID NO: 4319204 - DNA, 25 bp, Homo sapien
tgtttgtgaggaaagggagttgtac

SEQ ID NO: 4319205 - DNA, 25 bp, Homo sapien
gtttgtgaggaaagggagttgtaca

SEQ ID NO: 4319206 - DNA, 25 bp, Homo sapien
ctgtttgtgaggaaagggagttgta

SEQ ID NO: 4319207 - DNA, 25 bp, Homo sapien
actgcagggaaccaccataggttac

SEQ ID NO: 4319208 - DNA, 25 bp, Homo sapien
ggttcttgcagtggcagaaactgca

SEQ ID NO: 4319209 - DNA, 25 bp, Homo sapien
agaaactgcagggaaccaccatagg

SEQ ID NO: 4319210 - DNA, 25 bp, Homo sapien
tgttcctggttcttgcagtggcaga

SEQ ID NO: 4319211 - DNA, 25 bp, Homo sapien
catggatggtttcagagttgctgtg

SEQ ID NO: 4319212 - DNA, 25 bp, Homo sapien
cataagtaattgtgattccagcagc

SEQ ID NO: 4319213 - DNA, 25 bp, Homo sapien
aaggttattagggtgccttcagcag

SEQ ID NO: 4319214 - DNA, 25 bp, Homo sapien
ggacagcagaagtatcggtggttct

SEQ ID NO: 4319215 - DNA, 25 bp, Homo sapien
gccggctgctatgggacctctagaa

SEQ ID NO: 4319216 - DNA, 25 bp, Homo sapien
ggctgctatgggacctctagaagct

SEQ ID NO: 4319217 - DNA, 25 bp, Homo sapien
ccggctgctatgggacctctagaag

SEQ ID NO: 4319218 - DNA, 25 bp, Homo sapien
cggctgctatgggacctctagaagc

SEQ ID NO: 4319219 - DNA, 25 bp, Homo sapien
tctgcggttggcattatccttccat

SEQ ID NO: 4319220 - DNA, 25 bp, Homo sapien
ttctgcggttggcattatccttcca

SEQ ID NO: 4319221 - DNA, 25 bp, Homo sapien
tgcggttggcattatccttccatat

SEQ ID NO: 4319222 - DNA, 25 bp, Homo sapien
cttctgcggttggcattatccttcc

SEQ ID NO: 4319223 - DNA, 25 bp, Homo sapien
tcagcagggccacttcacgtttgcc

SEQ ID NO: 4319224 - DNA, 25 bp, Homo sapien
aaagttctttcagcagggccacttc

SEQ ID NO: 4319225 - DNA, 25 bp, Homo sapien
ctaaagttctttcagcagggccact

SEQ ID NO: 4319226 - DNA, 25 bp, Homo sapien
agcagggccacttcacgtttgccac

SEQ ID NO: 4319227 - DNA, 25 bp, Homo sapien
taacagcagacaaaagttaatagct

SEQ ID NO: 4319228 - DNA, 25 bp, Homo sapien
ttggcatatcttggcctcaacggtc

SEQ ID NO: 4319229 - DNA, 25 bp, Homo sapien
cattttgagaacgtggatttcgtcc

SEQ ID NO: 4319230 - DNA, 25 bp, Homo sapien
gggtgctgcaccaagctgattttca

SEQ ID NO: 4319231 - DNA, 25 bp, Homo sapien
gctgtgggcactcatgtctggacaa

SEQ ID NO: 4319232 - DNA, 25 bp, Homo sapien
catgtggctggatctgatgcactgc

SEQ ID NO: 4319233 - DNA, 25 bp, Homo sapien
gttatgggcccaaattcgacacctg

SEQ ID NO: 4319234 - DNA, 25 bp, Homo sapien
catgtgcaagtgagcgcagggtcca

SEQ ID NO: 4319235 - DNA, 25 bp, Homo sapien
tgctgaaggcttcaattcattcaca

SEQ ID NO: 4319236 - DNA, 25 bp, Homo sapien
tcattcacagcttgtaaatcagtag

SEQ ID NO: 4319237 - DNA, 25 bp, Homo sapien
gctatagggtttcccaatggcagag

SEQ ID NO: 4319238 - DNA, 25 bp, Homo sapien
gagttttcctgtaagcagtcaagca

SEQ ID NO: 4319239 - DNA, 25 bp, Homo sapien
ttcagcacagctataaacaggtatg

SEQ ID NO: 4319240 - DNA, 25 bp, Homo sapien
tcagcacagctataaacaggtatgc

SEQ ID NO: 4319241 - DNA, 25 bp, Homo sapien
cccattggtgatgaatacttcagca

SEQ ID NO: 4319242 - DNA, 25 bp, Homo sapien
ccattggtgatgaatacttcagcac

SEQ ID NO: 4319243 - DNA, 25 bp, Homo sapien
cagagaggtatagatcacctcagtc

SEQ ID NO: 4319244 - DNA, 25 bp, Homo sapien
agaggtatagatcacctcagtcttc

SEQ ID NO: 4319245 - DNA, 25 bp, Homo sapien
ctgcagagaggtatagatcacctca

SEQ ID NO: 4319246 - DNA, 25 bp, Homo sapien
ggtatagatcacctcagtcttcaac

SEQ ID NO: 4319247 - DNA, 25 bp, Homo sapien
tctaggaggtgaaattctcctgact

SEQ ID NO: 4319248 - DNA, 25 bp, Homo sapien
ctaggaggtgaaattctcctgactt

SEQ ID NO: 4319249 - DNA, 25 bp, Homo sapien
atcatttgctttgacggtaagagaa

SEQ ID NO: 4319250 - DNA, 25 bp, Homo sapien
ttctaggaggtgaaattctcctgac

SEQ ID NO: 4319251 - DNA, 25 bp, Homo sapien
ttaagacctacaggatttacctata

SEQ ID NO: 4319252 - DNA, 25 bp, Homo sapien
taagacctacaggatttacctataa

SEQ ID NO: 4319253 - DNA, 25 bp, Homo sapien
tagctagtacaatgcaggctagacc

SEQ ID NO: 4319254 - DNA, 25 bp, Homo sapien
cataatacgtatcatgtaagacagt

SEQ ID NO: 4319255 - DNA, 25 bp, Homo sapien
gacagtatcaagtgatgaattagct

SEQ ID NO: 4319256 - DNA, 25 bp, Homo sapien
taagacagtatcaagtgatgaatta

SEQ ID NO: 4319257 - DNA, 25 bp, Homo sapien
cacagtcaattaatagcacaataat

SEQ ID NO: 4319258 - DNA, 25 bp, Homo sapien
aaaaaagtagtgttgaggtcacagt

SEQ ID NO: 4319259 - DNA, 25 bp, Homo sapien
gcacaataatgtcggcagctatagg

SEQ ID NO: 4319260 - DNA, 25 bp, Homo sapien
ttaatagcacaataatgtcggcagc

SEQ ID NO: 4319261 - DNA, 25 bp, Homo sapien
aaaagtggtgtttgatatggctggg

SEQ ID NO: 4319262 - DNA, 25 bp, Homo sapien
tagaagaaacccctgcccagtggag

SEQ ID NO: 4319263 - DNA, 25 bp, Homo sapien
gactgatcagatgaaaagtggtgtt

SEQ ID NO: 4319264 - DNA, 25 bp, Homo sapien
tgttaatgactgtggtaataaagtt

SEQ ID NO: 4319265 - DNA, 25 bp, Homo sapien
cttcaggtttccggcataagatcat

SEQ ID NO: 4319266 - DNA, 25 bp, Homo sapien
gactccatagaacacaggcgttggt

SEQ ID NO: 4319267 - DNA, 25 bp, Homo sapien
caatatctaatctaaagtagactcc

SEQ ID NO: 4319268 - DNA, 25 bp, Homo sapien
cattgctcaatatctaatctaaagt

SEQ ID NO: 4319269 - DNA, 25 bp, Homo sapien
gctcaatatctaatctaaagtagac

SEQ ID NO: 4319270 - DNA, 25 bp, Homo sapien
tagttgtgtcatagaataaaatgtt

SEQ ID NO: 4319271 - DNA, 25 bp, Homo sapien
gttgtgtcatagaataaaatgtttt

SEQ ID NO: 4319272 - DNA, 25 bp, Homo sapien
tgtagttgtgtcatagaataaaatg

SEQ ID NO: 4319273 - DNA, 25 bp, Homo sapien
tcatgtagttgtgtcatagaataaa

SEQ ID NO: 4319274 - DNA, 25 bp, Homo sapien
ttctcaggccctccaacctgtgagt

SEQ ID NO: 4319275 - DNA, 25 bp, Homo sapien
cctctttttcccacaatcaagagaa

SEQ ID NO: 4319276 - DNA, 25 bp, Homo sapien
ttcccacaatcaagagaacttctca

SEQ ID NO: 4319277 - DNA, 25 bp, Homo sapien
gctgggtgtaaatccttttgactta

SEQ ID NO: 4319278 - DNA, 25 bp, Homo sapien
ggcttctgattgaggcttctgagct

SEQ ID NO: 4319279 - DNA, 25 bp, Homo sapien
gactgcagacactggtcaaagtcca

SEQ ID NO: 4319280 - DNA, 25 bp, Homo sapien
aactcgagcagtgtggaggttccag

SEQ ID NO: 4319281 - DNA, 25 bp, Homo sapien
cagagagtaaccaatggtggctcca

SEQ ID NO: 4319282 - DNA, 25 bp, Homo sapien
cagccaataactgctgtgcccagaa

SEQ ID NO: 4319283 - DNA, 25 bp, Homo sapien
ggaacagcagccaataactgctgtg

SEQ ID NO: 4319284 - DNA, 25 bp, Homo sapien
gcatcagtgacaattgtggaacagc

SEQ ID NO: 4319285 - DNA, 25 bp, Homo sapien
gccagtagcagcatcagtgacaatt

SEQ ID NO: 4319286 - DNA, 25 bp, Homo sapien
cgaactaggtctgtgactgctctct

SEQ ID NO: 4319287 - DNA, 25 bp, Homo sapien
gatttcccttcacgtggatttcatg

SEQ ID NO: 4319288 - DNA, 25 bp, Homo sapien
attatctccgatattattctcatgg

SEQ ID NO: 4319289 - DNA, 25 bp, Homo sapien
tcatgtaaccaattatctccgatat

SEQ ID NO: 4319290 - DNA, 25 bp, Homo sapien
tctacttctcgaattattcccttgc

SEQ ID NO: 4319291 - DNA, 25 bp, Homo sapien
ctacttctcgaattattcccttgca

SEQ ID NO: 4319292 - DNA, 25 bp, Homo sapien
ctctacttctcgaattattcccttg

SEQ ID NO: 4319293 - DNA, 25 bp, Homo sapien
gattggatgttgctcttgggtgtcc

SEQ ID NO: 4319294 - DNA, 25 bp, Homo sapien
ttgtgaccaccattcgatgtcatta

SEQ ID NO: 4319295 - DNA, 25 bp, Homo sapien
accattcgatgtcattagagtcttt

SEQ ID NO: 4319296 - DNA, 25 bp, Homo sapien
tgattggatgttgctcttgggtgtc

SEQ ID NO: 4319297 - DNA, 25 bp, Homo sapien
gaggaatgtcagtatagcttttagg

SEQ ID NO: 4319298 - DNA, 25 bp, Homo sapien
aggaatgtcagtatagcttttagga

SEQ ID NO: 4319299 - DNA, 25 bp, Homo sapien
tgaggaatgtcagtatagcttttag

SEQ ID NO: 4319300 - DNA, 25 bp, Homo sapien
atgaggaatgtcagtatagctttta

SEQ ID NO: 4319301 - DNA, 25 bp, Homo sapien
cagtgagcatgctatgtgtcacagc

SEQ ID NO: 4319302 - DNA, 25 bp, Homo sapien
tccttaaagagttgtgtgatgccaa

SEQ ID NO: 4319303 - DNA, 25 bp, Homo sapien
gagttaggaaatgcccacagtgagc

SEQ ID NO: 4319304 - DNA, 25 bp, Homo sapien
caagaaagccatcaaaactgcgttt

SEQ ID NO: 4319305 - DNA, 25 bp, Homo sapien
caaaatatctacaactctttgtcta

SEQ ID NO: 4319306 - DNA, 25 bp, Homo sapien
tttgccaaaatatctacaactcttt

SEQ ID NO: 4319307 - DNA, 25 bp, Homo sapien
tgccaaaatatctacaactctttgt

SEQ ID NO: 4319308 - DNA, 25 bp, Homo sapien
tatttgccaaaatatctacaactct

SEQ ID NO: 4319309 - DNA, 25 bp, Homo sapien
ctctgttgtgggcaatgtctttcct

SEQ ID NO: 4319310 - DNA, 25 bp, Homo sapien
tctgttgtgggcaatgtctttcctt

SEQ ID NO: 4319311 - DNA, 25 bp, Homo sapien
aatctctgttgtgggcaatgtcttt

SEQ ID NO: 4319312 - DNA, 25 bp, Homo sapien
gttgtgggcaatgtctttccttgtt

SEQ ID NO: 4319313 - DNA, 25 bp, Homo sapien
atgctgtctgtaagcagatatgtca

SEQ ID NO: 4319314 - DNA, 25 bp, Homo sapien
gctgtctgtaagcagatatgtcacc

SEQ ID NO: 4319315 - DNA, 25 bp, Homo sapien
gtctgtaagcagatatgtcaccatc

SEQ ID NO: 4319316 - DNA, 25 bp, Homo sapien
tgtaagcagatatgtcaccatcttt

SEQ ID NO: 4319317 - DNA, 25 bp, Homo sapien
tatatctaggatccctccactaaag

SEQ ID NO: 4319318 - DNA, 25 bp, Homo sapien
cagggactgggttcaccaaatggtg

SEQ ID NO: 4319319 - DNA, 25 bp, Homo sapien
gcagatggatcgtaaacctaaatga

SEQ ID NO: 4319320 - DNA, 25 bp, Homo sapien
gcaaagatatgttaggtaggacaca

SEQ ID NO: 4319321 - DNA, 25 bp, Homo sapien
caataaaacccctgcgttggcagac

SEQ ID NO: 4319322 - DNA, 25 bp, Homo sapien
ccagtgtctacacgggaatgattta

SEQ ID NO: 4319323 - DNA, 25 bp, Homo sapien
aatgatttagggatacaggttgcca

SEQ ID NO: 4319324 - DNA, 25 bp, Homo sapien
ttcacgaagacctcagcaaaacagg

SEQ ID NO: 4319325 - DNA, 25 bp, Homo sapien
cagatcacagcaatttaggcattag

SEQ ID NO: 4319326 - DNA, 25 bp, Homo sapien
aaatctgccagatcacaccagacat

SEQ ID NO: 4319327 - DNA, 25 bp, Homo sapien
taggcattagttctatgtggtccta

SEQ ID NO: 4319328 - DNA, 25 bp, Homo sapien
ctcaggtgctttgaagttgttatct

SEQ ID NO: 4319329 - DNA, 25 bp, Homo sapien
atgccgcagtcttgagtcctaaggc

SEQ ID NO: 4319330 - DNA, 25 bp, Homo sapien
tcttcctctttgaaggacttcggtc

SEQ ID NO: 4319331 - DNA, 25 bp, Homo sapien
ctgagatttggactcgctgtcaagt

SEQ ID NO: 4319332 - DNA, 25 bp, Homo sapien
cgctgtcaagtctaaaatctgcagg

SEQ ID NO: 4319333 - DNA, 25 bp, Homo sapien
tggctttctcaaattgcactgctct

SEQ ID NO: 4319334 - DNA, 25 bp, Homo sapien
ctgctctcacagtgcaacatgttct

SEQ ID NO: 4319335 - DNA, 25 bp, Homo sapien
ttaaaatatgtgagggatacaaaca

SEQ ID NO: 4319336 - DNA, 25 bp, Homo sapien
aaatatgtgagggatacaaacaaca

SEQ ID NO: 4319337 - DNA, 25 bp, Homo sapien
tgcatggtgaagatagacttccatg

SEQ ID NO: 4319338 - DNA, 25 bp, Homo sapien
gcatggtgaagatagacttccatgt

SEQ ID NO: 4319339 - DNA, 25 bp, Homo sapien
gaaattgaaagagctcctatatgtc

SEQ ID NO: 4319340 - DNA, 25 bp, Homo sapien
agtaagagatctcatgtgtattttc

SEQ ID NO: 4319341 - DNA, 25 bp, Homo sapien
gagctcctatatgtcagacactgtt

SEQ ID NO: 4319342 - DNA, 25 bp, Homo sapien
gttggtgaagtaagagatctcatgt

SEQ ID NO: 4319343 - DNA, 25 bp, Homo sapien
attcggccatcttggaacccccgtg

SEQ ID NO: 4319344 - DNA, 25 bp, Homo sapien
tcggccatcttggaacccccgtgta

SEQ ID NO: 4319345 - DNA, 25 bp, Homo sapien
ttctgtgtcactcatgctggaagct

SEQ ID NO: 4319346 - DNA, 25 bp, Homo sapien
atcttctgtgtcactcatgctggaa

SEQ ID NO: 4319347 - DNA, 25 bp, Homo sapien
tacaattcatttgatctaagctgga

SEQ ID NO: 4319348 - DNA, 25 bp, Homo sapien
catagcattgtctcaagatacattg

SEQ ID NO: 4319349 - DNA, 25 bp, Homo sapien
gctggaattcaaccactcattgtat

SEQ ID NO: 4319350 - DNA, 25 bp, Homo sapien
tattctgcaattgaaatgcttcttg

SEQ ID NO: 4319351 - DNA, 25 bp, Homo sapien
tgtgtcaagggcgggagcagatgga

SEQ ID NO: 4319352 - DNA, 25 bp, Homo sapien
ccatgtgtcaagggcgggagcagat

SEQ ID NO: 4319353 - DNA, 25 bp, Homo sapien
caagggcgggagcagatggagataa

SEQ ID NO: 4319354 - DNA, 25 bp, Homo sapien
ggcgggagcagatggagataatgga

SEQ ID NO: 4319355 - DNA, 25 bp, Homo sapien
tagattcaaacgtgataaaactgcc

SEQ ID NO: 4319356 - DNA, 25 bp, Homo sapien
aacatctgatacacatctggctatg

SEQ ID NO: 4319357 - DNA, 25 bp, Homo sapien
cacattttggcaacttactctggta

SEQ ID NO: 4319358 - DNA, 25 bp, Homo sapien
ctgccacttgaaatgcatcacagta

SEQ ID NO: 4319359 - DNA, 25 bp, Homo sapien
cccacacagccaaatttaagtaatg

SEQ ID NO: 4319360 - DNA, 25 bp, Homo sapien
aatggcttcatccagatccaactgt

SEQ ID NO: 4319361 - DNA, 25 bp, Homo sapien
tgatggacatgagtgagctctaata

SEQ ID NO: 4319362 - DNA, 25 bp, Homo sapien
tccagatccaactgtacaccattaa

SEQ ID NO: 4319363 - DNA, 25 bp, Homo sapien
attaatattcacttccatgcagcca

SEQ ID NO: 4319364 - DNA, 25 bp, Homo sapien
gaaggccacacaagtatgtgaccac

SEQ ID NO: 4319365 - DNA, 25 bp, Homo sapien
cacaagtatgtgaccacttttgctt

SEQ ID NO: 4319366 - DNA, 25 bp, Homo sapien
ctggaaggccacacaagtatgtgac

SEQ ID NO: 4319367 - DNA, 25 bp, Homo sapien
ggccacacaagtatgtgaccacttt

SEQ ID NO: 4319368 - DNA, 25 bp, Homo sapien
ttcatgggagatggtttctatttta

SEQ ID NO: 4319369 - DNA, 25 bp, Homo sapien
caactccagattgtttctgttgact

SEQ ID NO: 4319370 - DNA, 25 bp, Homo sapien
tatcaacaactccagattgtttctg

SEQ ID NO: 4319371 - DNA, 25 bp, Homo sapien
ttttaagtggtatcaacaactccag

SEQ ID NO: 4319372 - DNA, 25 bp, Homo sapien
agatgagattgttgatcagaacata

SEQ ID NO: 4319373 - DNA, 25 bp, Homo sapien
gattgttgatcagaacatagattta

SEQ ID NO: 4319374 - DNA, 25 bp, Homo sapien
tgagattgttgatcagaacatagat

SEQ ID NO: 4319375 - DNA, 25 bp, Homo sapien
gttgatcagaacatagatttagggc

SEQ ID NO: 4319376 - DNA, 25 bp, Homo sapien
tacagtattttcaacagataacaga

SEQ ID NO: 4319377 - DNA, 25 bp, Homo sapien
tatattacagtattttcaacagata

SEQ ID NO: 4319378 - DNA, 25 bp, Homo sapien
tattttcaacagataacagaatatc

SEQ ID NO: 4319379 - DNA, 25 bp, Homo sapien
ctatttccgatatattacagtattt

SEQ ID NO: 4319380 - DNA, 25 bp, Homo sapien
ttgtgttgtacatgtccgtatcctt

SEQ ID NO: 4319381 - DNA, 25 bp, Homo sapien
caatggtatctggaataatgttatg

SEQ ID NO: 4319382 - DNA, 25 bp, Homo sapien
catgtccgtatccttaaactcatta

SEQ ID NO: 4319383 - DNA, 25 bp, Homo sapien
aatgctccaaaatgatcaatggtat

SEQ ID NO: 4319384 - DNA, 25 bp, Homo sapien
cactgtgttgttaccagaaaccaag

SEQ ID NO: 4319385 - DNA, 25 bp, Homo sapien
aagggcactgtgttgttaccagaaa

SEQ ID NO: 4319386 - DNA, 25 bp, Homo sapien
ggcactgtgttgttaccagaaacca

SEQ ID NO: 4319387 - DNA, 25 bp, Homo sapien
tgtgttgttaccagaaaccaaggca

SEQ ID NO: 4319388 - DNA, 25 bp, Homo sapien
tgccaaccctcagcactggatacat

SEQ ID NO: 4319389 - DNA, 25 bp, Homo sapien
caaccctcagcactggatacattat

SEQ ID NO: 4319390 - DNA, 25 bp, Homo sapien
atgccaaccctcagcactggataca

SEQ ID NO: 4319391 - DNA, 25 bp, Homo sapien
gccaaccctcagcactggatacatt

SEQ ID NO: 4319392 - DNA, 25 bp, Homo sapien
caaaaccaggatagtaggagccctt

SEQ ID NO: 4319393 - DNA, 25 bp, Homo sapien
tataatctacgcgaaattgagcaat

SEQ ID NO: 4319394 - DNA, 25 bp, Homo sapien
tctacgcgaaattgagcaattccaa

SEQ ID NO: 4319395 - DNA, 25 bp, Homo sapien
gcaattccaaaaccaggatagtagg

SEQ ID NO: 4319396 - DNA, 25 bp, Homo sapien
cctttattccagaagctccttgctt

SEQ ID NO: 4319397 - DNA, 25 bp, Homo sapien
gaatgatacaagcttggataattac

SEQ ID NO: 4319398 - DNA, 25 bp, Homo sapien
catccatgatgaatgatacaagctt

SEQ ID NO: 4319399 - DNA, 25 bp, Homo sapien
tgatgaatgatacaagcttggataa

SEQ ID NO: 4319400 - DNA, 25 bp, Homo sapien
catgatgaatgatacaagcttggat

SEQ ID NO: 4319401 - DNA, 25 bp, Homo sapien
tgcaaagtatactttggtttccagc

SEQ ID NO: 4319402 - DNA, 25 bp, Homo sapien
tttaatgagttcactttccactttc

SEQ ID NO: 4319403 - DNA, 25 bp, Homo sapien
gggaatcctgcaaagtatactttgg

SEQ ID NO: 4319404 - DNA, 25 bp, Homo sapien
cggtttaatgagttcactttccact

SEQ ID NO: 4319405 - DNA, 25 bp, Homo sapien
tgctctgtcaagtaaagtaattcat

SEQ ID NO: 4319406 - DNA, 25 bp, Homo sapien
gtgtcaaggttcaagggaaggcaca

SEQ ID NO: 4319407 - DNA, 25 bp, Homo sapien
aacaacccctgaaaactgctctgtc

SEQ ID NO: 4319408 - DNA, 25 bp, Homo sapien
taattcatactgtgtgtcaaggttc

SEQ ID NO: 4319409 - DNA, 25 bp, Homo sapien
cctccagggtaattgacacaaagct

SEQ ID NO: 4319410 - DNA, 25 bp, Homo sapien
ctcacaactcttctgatcttgggca

SEQ ID NO: 4319411 - DNA, 25 bp, Homo sapien
tagcaagtgtaacctccagggtaat

SEQ ID NO: 4319412 - DNA, 25 bp, Homo sapien
tcacaactcttctgatcttgggcaa

SEQ ID NO: 4319413 - DNA, 25 bp, Homo sapien
agtaatgacaccaccatcattctac

SEQ ID NO: 4319414 - DNA, 25 bp, Homo sapien
atttcagggttcacacccaacctct

SEQ ID NO: 4319415 - DNA, 25 bp, Homo sapien
aacctctccaccatcagtaatgaca

SEQ ID NO: 4319416 - DNA, 25 bp, Homo sapien
catttcagggttcacacccaacctc

SEQ ID NO: 4319417 - DNA, 25 bp, Homo sapien
ttcacaagactttgatttgagatta

SEQ ID NO: 4319418 - DNA, 25 bp, Homo sapien
tcctgggatgttcttgcacacagct

SEQ ID NO: 4319419 - DNA, 25 bp, Homo sapien
tgatttgagattatatctgtagcct

SEQ ID NO: 4319420 - DNA, 25 bp, Homo sapien
tttacaggaacagtggtaacttcca

SEQ ID NO: 4319421 - DNA, 25 bp, Homo sapien
tacaggaacagtggtaacttccagg

SEQ ID NO: 4319422 - DNA, 25 bp, Homo sapien
ttacaggaacagtggtaacttccag

SEQ ID NO: 4319423 - DNA, 25 bp, Homo sapien
ttatcacaaatttgactgcaacctc

SEQ ID NO: 4319424 - DNA, 25 bp, Homo sapien
tatatccatctgcattgcatggcag

SEQ ID NO: 4319425 - DNA, 25 bp, Homo sapien
tccttctttgcaactcatatatcca

SEQ ID NO: 4319426 - DNA, 25 bp, Homo sapien
gcatggcagaggactacattggtct

SEQ ID NO: 4319427 - DNA, 25 bp, Homo sapien
tgccaacctggtttacaaatgcaag

SEQ ID NO: 4319428 - DNA, 25 bp, Homo sapien
agcttcttaggtcaggataagcatt

SEQ ID NO: 4319429 - DNA, 25 bp, Homo sapien
tcttaggtcaggataagcattagtt

SEQ ID NO: 4319430 - DNA, 25 bp, Homo sapien
cattgacacagcttcttaggtcagg

SEQ ID NO: 4319431 - DNA, 25 bp, Homo sapien
ttaggtcaggataagcattagttga

SEQ ID NO: 4319432 - DNA, 25 bp, Homo sapien
gaacttgcacgacacttcctaaaca

SEQ ID NO: 4319433 - DNA, 25 bp, Homo sapien
cttgcacgacacttcctaaacagga

SEQ ID NO: 4319434 - DNA, 25 bp, Homo sapien
aagaacttgcacgacacttcctaaa

SEQ ID NO: 4319435 - DNA, 25 bp, Homo sapien
acttgcacgacacttcctaaacagg

SEQ ID NO: 4319436 - DNA, 25 bp, Homo sapien
tcataggcatcccaactctcagacc

SEQ ID NO: 4319437 - DNA, 25 bp, Homo sapien
taggcatcccaactctcagacctgc

SEQ ID NO: 4319438 - DNA, 25 bp, Homo sapien
aggcatcccaactctcagacctgca

SEQ ID NO: 4319439 - DNA, 25 bp, Homo sapien
ataggcatcccaactctcagacctg

SEQ ID NO: 4319440 - DNA, 25 bp, Homo sapien
aggcctcaaagcaatccaaatatcc

SEQ ID NO: 4319441 - DNA, 25 bp, Homo sapien
acgaaggcctcaaagcaatccaaat

SEQ ID NO: 4319442 - DNA, 25 bp, Homo sapien
ctgctctatcaaaaggaaagttcaa

SEQ ID NO: 4319443 - DNA, 25 bp, Homo sapien
gctctatcaaaaggaaagttcaact

SEQ ID NO: 4319444 - DNA, 25 bp, Homo sapien
ctatcaaaaggaaagttcaactctg

SEQ ID NO: 4319445 - DNA, 25 bp, Homo sapien
tgctctatcaaaaggaaagttcaac

SEQ ID NO: 4319446 - DNA, 25 bp, Homo sapien
ctgagaatgcttctgtctagttttt

SEQ ID NO: 4319447 - DNA, 25 bp, Homo sapien
cacaaagaagtttctgagaatgctt

SEQ ID NO: 4319448 - DNA, 25 bp, Homo sapien
gagaatgcttctgtctagtttttat

SEQ ID NO: 4319449 - DNA, 25 bp, Homo sapien
gaatgcttctgtctagtttttatgt

SEQ ID NO: 4319450 - DNA, 25 bp, Homo sapien
gttgatataataaagatattcacat

SEQ ID NO: 4319451 - DNA, 25 bp, Homo sapien
attttgttttattcaaacagttgat

SEQ ID NO: 4319452 - DNA, 25 bp, Homo sapien
ttttgttttattcaaacagttgata

SEQ ID NO: 4319453 - DNA, 25 bp, Homo sapien
tgttttattcaaacagttgatataa

SEQ ID NO: 4319454 - DNA, 25 bp, Homo sapien
gttaaaaactgtcagtgaaacatct

SEQ ID NO: 4319455 - DNA, 25 bp, Homo sapien
ttgtgtgacccacacagcaaaattt

SEQ ID NO: 4319456 - DNA, 25 bp, Homo sapien
taatgtagaccttgtgtgacccaca

SEQ ID NO: 4319457 - DNA, 25 bp, Homo sapien
tttgtaatgtagaccttgtgtgacc

SEQ ID NO: 4319458 - DNA, 25 bp, Homo sapien
caaagactgcacattgtaaataaaa

SEQ ID NO: 4319459 - DNA, 25 bp, Homo sapien
aattgaaactgtcatttgtaggaaa

SEQ ID NO: 4319460 - DNA, 25 bp, Homo sapien
ggtatttagacactagttcatgatg

SEQ ID NO: 4319461 - DNA, 25 bp, Homo sapien
aaacccttcagctgttattgaaaca

SEQ ID NO: 4319462 - DNA, 25 bp, Homo sapien
tgatggacatgagtgagctctaata

SEQ ID NO: 4319463 - DNA, 25 bp, Homo sapien
attaatattcacttccatgcagcca

SEQ ID NO: 4319464 - DNA, 25 bp, Homo sapien
aatggcttcatccagatccaactgt

SEQ ID NO: 4319465 - DNA, 25 bp, Homo sapien
tccagatccaactgtacaccattaa

SEQ ID NO: 4319466 - DNA, 25 bp, Homo sapien
acccaggtatgtggccacttttgct

SEQ ID NO: 4319467 - DNA, 25 bp, Homo sapien
gccacccaggtatgtggccactttt

SEQ ID NO: 4319468 - DNA, 25 bp, Homo sapien
cacccaggtatgtggccacttttgc

SEQ ID NO: 4319469 - DNA, 25 bp, Homo sapien
cccaggtatgtggccacttttgctt

SEQ ID NO: 4319470 - DNA, 25 bp, Homo sapien
gacttagggcctgtatccgatatat

SEQ ID NO: 4319471 - DNA, 25 bp, Homo sapien
tcggaacatagacttagggcctgta

SEQ ID NO: 4319472 - DNA, 25 bp, Homo sapien
aacatagacttagggcctgtatccg

SEQ ID NO: 4319473 - DNA, 25 bp, Homo sapien
gatcggaacatagacttagggcctg

SEQ ID NO: 4319474 - DNA, 25 bp, Homo sapien
tgtgttgttaccagaaaccaaggca

SEQ ID NO: 4319475 - DNA, 25 bp, Homo sapien
aagggcactgtgttgttaccagaaa

SEQ ID NO: 4319476 - DNA, 25 bp, Homo sapien
caaccctcagcactggatacattat

SEQ ID NO: 4319477 - DNA, 25 bp, Homo sapien
atgccaaccctcagcactggataca

SEQ ID NO: 4319478 - DNA, 25 bp, Homo sapien
gagtggtcatatttccaagcacacg

SEQ ID NO: 4319479 - DNA, 25 bp, Homo sapien
tttgaaatcagaataggaacccttg

SEQ ID NO: 4319480 - DNA, 25 bp, Homo sapien
caaatggagtaccatcttcccgttc

SEQ ID NO: 4319481 - DNA, 25 bp, Homo sapien
tctgggtacagttgccatcatcact

SEQ ID NO: 4319482 - DNA, 25 bp, Homo sapien
tccagcttcgtatacatccatctag

SEQ ID NO: 4319483 - DNA, 25 bp, Homo sapien
tacatccatctagacgagggttaat

SEQ ID NO: 4319484 - DNA, 25 bp, Homo sapien
caaattccagcttcgtatacatcca

SEQ ID NO: 4319485 - DNA, 25 bp, Homo sapien
catcaaattccagcttcgtatacat

SEQ ID NO: 4319486 - DNA, 25 bp, Homo sapien
tgcaaagtatactttggtttccagc

SEQ ID NO: 4319487 - DNA, 25 bp, Homo sapien
tttaatgagttcactttccactttc

SEQ ID NO: 4319488 - DNA, 25 bp, Homo sapien
gggaatcctgcaaagtatactttgg

SEQ ID NO: 4319489 - DNA, 25 bp, Homo sapien
cggtttaatgagttcactttccact

SEQ ID NO: 4319490 - DNA, 25 bp, Homo sapien
tagattctgcgtacagtatcacgcc

SEQ ID NO: 4319491 - DNA, 25 bp, Homo sapien
gccacgctgagtgatcgatagattc

SEQ ID NO: 4319492 - DNA, 25 bp, Homo sapien
tcacgccttctgaatcatatgtccg

SEQ ID NO: 4319493 - DNA, 25 bp, Homo sapien
gaagtgcaatcaggagccacgctga

SEQ ID NO: 4319494 - DNA, 25 bp, Homo sapien
ccctgcaaactgctccgccaagtaa

SEQ ID NO: 4319495 - DNA, 25 bp, Homo sapien
gcaaactgctccgccaagtaaagta

SEQ ID NO: 4319496 - DNA, 25 bp, Homo sapien
cctgcaaactgctccgccaagtaaa

SEQ ID NO: 4319497 - DNA, 25 bp, Homo sapien
ctgcaaactgctccgccaagtaaag

SEQ ID NO: 4319498 - DNA, 25 bp, Homo sapien
cctccagggtaattgacacaaagct

SEQ ID NO: 4319499 - DNA, 25 bp, Homo sapien
ctcacaactcttctgatcttgggca

SEQ ID NO: 4319500 - DNA, 25 bp, Homo sapien
tcacaactcttctgatcttgggcaa

SEQ ID NO: 4319501 - DNA, 25 bp, Homo sapien
tagcaagtgtaacctccagggtaat

SEQ ID NO: 4319502 - DNA, 25 bp, Homo sapien
gcagtcacatgaagtaacagcacct

SEQ ID NO: 4319503 - DNA, 25 bp, Homo sapien
tgttgaagcttcctgatgcacacag

SEQ ID NO: 4319504 - DNA, 25 bp, Homo sapien
tgttgattagttccagccatggcag

SEQ ID NO: 4319505 - DNA, 25 bp, Homo sapien
gctgcataatggcatgaatgtaatt

SEQ ID NO: 4319506 - DNA, 25 bp, Homo sapien
ttcacaagactttgatttgagatta

SEQ ID NO: 4319507 - DNA, 25 bp, Homo sapien
tcctgggatgttcttgcacacagct

SEQ ID NO: 4319508 - DNA, 25 bp, Homo sapien
tgatttgagattatatctgtagcct

SEQ ID NO: 4319509 - DNA, 25 bp, Homo sapien
tacacctggtatgaatacttgaaga

SEQ ID NO: 4319510 - DNA, 25 bp, Homo sapien
tatattgtatccagtttctaaaggc

SEQ ID NO: 4319511 - DNA, 25 bp, Homo sapien
gatttagtcatagcattaacacagc

SEQ ID NO: 4319512 - DNA, 25 bp, Homo sapien
tactggaggagagaacttggatatt

SEQ ID NO: 4319513 - DNA, 25 bp, Homo sapien
tttacaggaacagtggtaacttcca

SEQ ID NO: 4319514 - DNA, 25 bp, Homo sapien
tacaggaacagtggtaacttccagg

SEQ ID NO: 4319515 - DNA, 25 bp, Homo sapien
ttacaggaacagtggtaacttccag

SEQ ID NO: 4319516 - DNA, 25 bp, Homo sapien
ttatcacaaatttgactgcaacctc

SEQ ID NO: 4319517 - DNA, 25 bp, Homo sapien
gccaacctggtttacaagtgcaagt

SEQ ID NO: 4319518 - DNA, 25 bp, Homo sapien
tcttcattgcatggcagaggactac

SEQ ID NO: 4319519 - DNA, 25 bp, Homo sapien
agaggactacactggtctggaatgg

SEQ ID NO: 4319520 - DNA, 25 bp, Homo sapien
gcagctcatatatccatcttcattg

SEQ ID NO: 4319521 - DNA, 25 bp, Homo sapien
tcttaggtcaggataagcattagtt

SEQ ID NO: 4319522 - DNA, 25 bp, Homo sapien
agcttcttaggtcaggataagcatt

SEQ ID NO: 4319523 - DNA, 25 bp, Homo sapien
cattgacacagcttcttaggtcagg

SEQ ID NO: 4319524 - DNA, 25 bp, Homo sapien
ttaggtcaggataagcattagttga

SEQ ID NO: 4319525 - DNA, 25 bp, Homo sapien
cgtgcagcagtgaataacccagttt

SEQ ID NO: 4319526 - DNA, 25 bp, Homo sapien
cagcagtgaataacccagtttgaaa

SEQ ID NO: 4319527 - DNA, 25 bp, Homo sapien
gacgtgcagcagtgaataacccagt

SEQ ID NO: 4319528 - DNA, 25 bp, Homo sapien
ctgacgtgcagcagtgaataaccca

SEQ ID NO: 4319529 - DNA, 25 bp, Homo sapien
tagtgtctcatgaaggccctcttgc

SEQ ID NO: 4319530 - DNA, 25 bp, Homo sapien
tctagaggtcatctgcattcctggg

SEQ ID NO: 4319531 - DNA, 25 bp, Homo sapien
gagcccctatctgagtccactttgt

SEQ ID NO: 4319532 - DNA, 25 bp, Homo sapien
caaaagggctagcagggatccattc

SEQ ID NO: 4319533 - DNA, 25 bp, Homo sapien
tctagaattcacctttacacttggt

SEQ ID NO: 4319534 - DNA, 25 bp, Homo sapien
cacttggtggtaattagaaacccat

SEQ ID NO: 4319535 - DNA, 25 bp, Homo sapien
ttatttgtctgctaatagctggcca

SEQ ID NO: 4319536 - DNA, 25 bp, Homo sapien
ggccattcttcgcaataccatcttt

SEQ ID NO: 4319537 - DNA, 25 bp, Homo sapien
tattaatcctgaactgaagtgtgaa

SEQ ID NO: 4319538 - DNA, 25 bp, Homo sapien
tgttctagctgacattaccttatgc

SEQ ID NO: 4319539 - DNA, 25 bp, Homo sapien
tggagtcaagattacataagcctct

SEQ ID NO: 4319540 - DNA, 25 bp, Homo sapien
taacacacttaagatcggactgaat

SEQ ID NO: 4319541 - DNA, 25 bp, Homo sapien
atttgcacgacgcttcctaaccagg

SEQ ID NO: 4319542 - DNA, 25 bp, Homo sapien
tttgcacgacgcttcctaaccagga

SEQ ID NO: 4319543 - DNA, 25 bp, Homo sapien
aagaatttgcacgacgcttcctaac

SEQ ID NO: 4319544 - DNA, 25 bp, Homo sapien
gaatttgcacgacgcttcctaacca

SEQ ID NO: 4319545 - DNA, 25 bp, Homo sapien
gcacggttgtatataaaatcatttc

SEQ ID NO: 4319546 - DNA, 25 bp, Homo sapien
aaaattgcatccagataagccgacc

SEQ ID NO: 4319547 - DNA, 25 bp, Homo sapien
cagaaatgcatgcacggttgtatat

SEQ ID NO: 4319548 - DNA, 25 bp, Homo sapien
gataagccgaccaatacagaaatgc

SEQ ID NO: 4319549 - DNA, 25 bp, Homo sapien
taacacagctttagcaggagggtgg

SEQ ID NO: 4319550 - DNA, 25 bp, Homo sapien
cgcctacaatgaaaggaagaaccct

SEQ ID NO: 4319551 - DNA, 25 bp, Homo sapien
acatgaagtaattgtcaggcctctg

SEQ ID NO: 4319552 - DNA, 25 bp, Homo sapien
cagatccaatatacacactcagagt

SEQ ID NO: 4319553 - DNA, 25 bp, Homo sapien
cttggcattgcccttgcacaatttt

SEQ ID NO: 4319554 - DNA, 25 bp, Homo sapien
ccttgcacaattttcacataggcac

SEQ ID NO: 4319555 - DNA, 25 bp, Homo sapien
cattgcccttgcacaattttcacat

SEQ ID NO: 4319556 - DNA, 25 bp, Homo sapien
ggcattgcccttgcacaattttcac

SEQ ID NO: 4319557 - DNA, 25 bp, Homo sapien
tattagagaatcactggcttacagc

SEQ ID NO: 4319558 - DNA, 25 bp, Homo sapien
tgttacattggtctctggtcagtgg

SEQ ID NO: 4319559 - DNA, 25 bp, Homo sapien
agttatacaatgagacccaaaggtc

SEQ ID NO: 4319560 - DNA, 25 bp, Homo sapien
tacagctagcagtgtaagccaggga

SEQ ID NO: 4319561 - DNA, 25 bp, Homo sapien
ctcacttgcatcttatgagactctt

SEQ ID NO: 4319562 - DNA, 25 bp, Homo sapien
tcacttgcatcttatgagactcttt

SEQ ID NO: 4319563 - DNA, 25 bp, Homo sapien
cctcacttgcatcttatgagactct

SEQ ID NO: 4319564 - DNA, 25 bp, Homo sapien
actatgggcagacatataagtggca

SEQ ID NO: 4319565 - DNA, 25 bp, Homo sapien
actggagaagcaaaaccctcactat

SEQ ID NO: 4319566 - DNA, 25 bp, Homo sapien
gaagcaaaaccctcactatgggcag

SEQ ID NO: 4319567 - DNA, 25 bp, Homo sapien
ggagaagcaaaaccctcactatggg

SEQ ID NO: 4319568 - DNA, 25 bp, Homo sapien
tctgtgcaattctagtgagctgtcg

SEQ ID NO: 4319569 - DNA, 25 bp, Homo sapien
gcaagtgtatttgttagacagccaa

SEQ ID NO: 4319570 - DNA, 25 bp, Homo sapien
caggctaagccaaaatgatcagggc

SEQ ID NO: 4319571 - DNA, 25 bp, Homo sapien
ggaactgttcttccggcactctgtg

SEQ ID NO: 4319572 - DNA, 25 bp, Homo sapien
cccagggtggcagtctagataaggc

SEQ ID NO: 4319573 - DNA, 25 bp, Homo sapien
tatgtatatagatcgctcaagctgc

SEQ ID NO: 4319574 - DNA, 25 bp, Homo sapien
tacaagtgtgtaccaacacatccgg

SEQ ID NO: 4319575 - DNA, 25 bp, Homo sapien
caaattagcacagccaaagggacat

SEQ ID NO: 4319576 - DNA, 25 bp, Homo sapien
tgcctctgagacgggaagcactagg

SEQ ID NO: 4319577 - DNA, 25 bp, Homo sapien
cctctgagacgggaagcactaggag

SEQ ID NO: 4319578 - DNA, 25 bp, Homo sapien
gggaagcactaggaggagacacgcc

SEQ ID NO: 4319579 - DNA, 25 bp, Homo sapien
gacgggaagcactaggaggagacac

SEQ ID NO: 4319580 - DNA, 25 bp, Homo sapien
gaccggagcgctaggcgccgcggag

SEQ ID NO: 4319581 - DNA, 25 bp, Homo sapien
gcgccggcagggacggtggcgcgtc

SEQ ID NO: 4319582 - DNA, 25 bp, Homo sapien
ggcagggacggtggcgcgtcgcggc

SEQ ID NO: 4319583 - DNA, 25 bp, Homo sapien
ctgtgcgcctcggtctgagccgtgc

SEQ ID NO: 4319584 - DNA, 25 bp, Homo sapien
ggctctagtgttggaggcctagtaa

SEQ ID NO: 4319585 - DNA, 25 bp, Homo sapien
gtgttggaggcctagtaaacactgc

SEQ ID NO: 4319586 - DNA, 25 bp, Homo sapien
gacccagcgagcctcggcggaacag

SEQ ID NO: 4319587 - DNA, 25 bp, Homo sapien
gtaaacactgctgagacatccttct

SEQ ID NO: 4319588 - DNA, 25 bp, Homo sapien
caccccttcggctgaactgaccttc

SEQ ID NO: 4319589 - DNA, 25 bp, Homo sapien
ttcgccaccccttcggctgaactga

SEQ ID NO: 4319590 - DNA, 25 bp, Homo sapien
ctcttgggctcttgcttcgccaccc

SEQ ID NO: 4319591 - DNA, 25 bp, Homo sapien
tcttgcttcgccaccccttcggctg

SEQ ID NO: 4319592 - DNA, 25 bp, Homo sapien
cacatttgatacaggcactacagag

SEQ ID NO: 4319593 - DNA, 25 bp, Homo sapien
ccacggagctgagagccttcgcgaa

SEQ ID NO: 4319594 - DNA, 25 bp, Homo sapien
gaagttctggtagaggagcctgtat

SEQ ID NO: 4319595 - DNA, 25 bp, Homo sapien
taaagaagcctactgtgtgcccaac

SEQ ID NO: 4319596 - DNA, 25 bp, Homo sapien
ggatttcaccgtgtcgtccaggcta

SEQ ID NO: 4319597 - DNA, 25 bp, Homo sapien
tgagctcgagtgatcggccctcctc

SEQ ID NO: 4319598 - DNA, 25 bp, Homo sapien
caccaggcctgacctggcttgtttt

SEQ ID NO: 4319599 - DNA, 25 bp, Homo sapien
caggcctgacctggcttgttttatt

SEQ ID NO: 4319600 - DNA, 25 bp, Homo sapien
gcttgctgtagaaacaccccttgtt

SEQ ID NO: 4319601 - DNA, 25 bp, Homo sapien
ttattttgagctacagcatggacag

SEQ ID NO: 4319602 - DNA, 25 bp, Homo sapien
tggcggaacattgcagcatgctgag

SEQ ID NO: 4319603 - DNA, 25 bp, Homo sapien
tgatacatgactgtctctagagagt

SEQ ID NO: 4319604 - DNA, 25 bp, Homo sapien
catctggctttagggccttggcact

SEQ ID NO: 4319605 - DNA, 25 bp, Homo sapien
tgagttaggatgttctttgtcaccc

SEQ ID NO: 4319606 - DNA, 25 bp, Homo sapien
tcctgtgcctaaaatcctcctttgg

SEQ ID NO: 4319607 - DNA, 25 bp, Homo sapien
catgtagtatgtgacgtttttcccc

SEQ ID NO: 4319608 - DNA, 25 bp, Homo sapien
caagaatgctctgagtgtcctgatc

SEQ ID NO: 4319609 - DNA, 25 bp, Homo sapien
gaaattcgtcagtagcctagcttca

SEQ ID NO: 4319610 - DNA, 25 bp, Homo sapien
ttgctgtggccacggactggtgacc

SEQ ID NO: 4319611 - DNA, 25 bp, Homo sapien
cagtgttatacatcatggcaatgcg

SEQ ID NO: 4319612 - DNA, 25 bp, Homo sapien
tcttatagggcacagactaatttct

SEQ ID NO: 4319613 - DNA, 25 bp, Homo sapien
aagttgtacgtttgctgttaatagc

SEQ ID NO: 4319614 - DNA, 25 bp, Homo sapien
tcacacctggagaatctggttctgc

SEQ ID NO: 4319615 - DNA, 25 bp, Homo sapien
acctgcggtgttggagtcctgcctt

SEQ ID NO: 4319616 - DNA, 25 bp, Homo sapien
tagcagatgtctgcgagattgtgta

SEQ ID NO: 4319617 - DNA, 25 bp, Homo sapien
cacaccagtcagaatttttagctgt

SEQ ID NO: 4319618 - DNA, 25 bp, Homo sapien
cgagattgtgtagcaaaaggaatgt

SEQ ID NO: 4319619 - DNA, 25 bp, Homo sapien
aaatgctcaatatgcctaatcagag

SEQ ID NO: 4319620 - DNA, 25 bp, Homo sapien
tgtaccgtactttgcttatctagtc

SEQ ID NO: 4319621 - DNA, 25 bp, Homo sapien
catgtaccgtactttgcttatctag

SEQ ID NO: 4319622 - DNA, 25 bp, Homo sapien
ggtagtccatcatatccatgtaccg

SEQ ID NO: 4319623 - DNA, 25 bp, Homo sapien
catcatatccatgtaccgtactttg

SEQ ID NO: 4319624 - DNA, 25 bp, Homo sapien
attttatgttacagataattcccat

SEQ ID NO: 4319625 - DNA, 25 bp, Homo sapien
tatgttacagataattcccatttag

SEQ ID NO: 4319626 - DNA, 25 bp, Homo sapien
agaaagtacattgcatagacacaca

SEQ ID NO: 4319627 - DNA, 25 bp, Homo sapien
cacacacggcaattttgaaatattg

SEQ ID NO: 4319628 - DNA, 25 bp, Homo sapien
agtttactgacttgacatcgtgatg

SEQ ID NO: 4319629 - DNA, 25 bp, Homo sapien
tacctagtctagaacttggtttcac

SEQ ID NO: 4319630 - DNA, 25 bp, Homo sapien
cagaaaagtttgtccttagactcca

SEQ ID NO: 4319631 - DNA, 25 bp, Homo sapien
caactcttagtgaacttgtgtacgt

SEQ ID NO: 4319632 - DNA, 25 bp, Homo sapien
ggtaacttgtactgacacaacagac

SEQ ID NO: 4319633 - DNA, 25 bp, Homo sapien
tggcatttagactaacttctagatg

SEQ ID NO: 4319634 - DNA, 25 bp, Homo sapien
cagacatgtgctagtatctgataac

SEQ ID NO: 4319635 - DNA, 25 bp, Homo sapien
tataccaccttgttaagattggtgc

SEQ ID NO: 4319636 - DNA, 25 bp, Homo sapien
ccttgcctgatagatagacactgtc

SEQ ID NO: 4319637 - DNA, 25 bp, Homo sapien
gagtttgtacagaccacattggagc

SEQ ID NO: 4319638 - DNA, 25 bp, Homo sapien
tgagaatctcacctgacgtttaagc

SEQ ID NO: 4319639 - DNA, 25 bp, Homo sapien
tacttcctagacacagtggattgtc

SEQ ID NO: 4319640 - DNA, 25 bp, Homo sapien
ctctaacagaaataaactatgattc

SEQ ID NO: 4319641 - DNA, 25 bp, Homo sapien
tgattcttattacagtcttaaaatt

SEQ ID NO: 4319642 - DNA, 25 bp, Homo sapien
ttccaagtataacacattgcctttc

SEQ ID NO: 4319643 - DNA, 25 bp, Homo sapien
ctctttccaagtataacacattgcc

SEQ ID NO: 4319644 - DNA, 25 bp, Homo sapien
catattgcccattgttgagaaaaac

SEQ ID NO: 4319645 - DNA, 25 bp, Homo sapien
gaaaaacagcgtatgatgctcttac

SEQ ID NO: 4319646 - DNA, 25 bp, Homo sapien
ggctaagcagtcagtcaccacatca

SEQ ID NO: 4319647 - DNA, 25 bp, Homo sapien
aattctctggagcaatgacttctaa

SEQ ID NO: 4319648 - DNA, 25 bp, Homo sapien
gaccaacatggaatgtccccaccaa

SEQ ID NO: 4319649 - DNA, 25 bp, Homo sapien
gatactatttgctggatccacgtca

SEQ ID NO: 4319650 - DNA, 25 bp, Homo sapien
tctccgatagcttcccaagaaaggg

SEQ ID NO: 4319651 - DNA, 25 bp, Homo sapien
tcagccccgtgagtagacgagacta

SEQ ID NO: 4319652 - DNA, 25 bp, Homo sapien
tcaccgttcccgtacattacagcag

SEQ ID NO: 4319653 - DNA, 25 bp, Homo sapien
ggttgttccattgcactccgcctgg

SEQ ID NO: 4319654 - DNA, 25 bp, Homo sapien
gagtaggtggagtacgttctgccca

SEQ ID NO: 4319655 - DNA, 25 bp, Homo sapien
tatggagctcgttaccattgagaac

SEQ ID NO: 4319656 - DNA, 25 bp, Homo sapien
ggcatcatccaaacttctggcaaga

SEQ ID NO: 4319657 - DNA, 25 bp, Homo sapien
tacttgatgtgtttcccctcctgga

SEQ ID NO: 4319658 - DNA, 25 bp, Homo sapien
gaacacctgggtattcaggcagaag

SEQ ID NO: 4319659 - DNA, 25 bp, Homo sapien
tctgtttaccctctactgaagaagt

SEQ ID NO: 4319660 - DNA, 25 bp, Homo sapien
tgggcaggtccccgttcttgccgat

SEQ ID NO: 4319661 - DNA, 25 bp, Homo sapien
attcattcctgagcggcggcctggg

SEQ ID NO: 4319662 - DNA, 25 bp, Homo sapien
gaattcattcctgagcggcggcctg

SEQ ID NO: 4319663 - DNA, 25 bp, Homo sapien
ctgaattcattcctgagcggcggcc

SEQ ID NO: 4319664 - DNA, 25 bp, Homo sapien
ttgggacacagcgacgatgcagttt

SEQ ID NO: 4319665 - DNA, 25 bp, Homo sapien
acgatgcagtttagcaaaagaaaca

SEQ ID NO: 4319666 - DNA, 25 bp, Homo sapien
acagcgacgatgcagtttagcaaaa

SEQ ID NO: 4319667 - DNA, 25 bp, Homo sapien
gttttgggacacagcgacgatgcag

SEQ ID NO: 4319668 - DNA, 25 bp, Homo sapien
gacagcagcggttaacacctccgaa

SEQ ID NO: 4319669 - DNA, 25 bp, Homo sapien
cagcagcggttaacacctccgaact

SEQ ID NO: 4319670 - DNA, 25 bp, Homo sapien
agcagcggttaacacctccgaactt

SEQ ID NO: 4319671 - DNA, 25 bp, Homo sapien
acagcagcggttaacacctccgaac

SEQ ID NO: 4319672 - DNA, 25 bp, Homo sapien
caggccaagaatgccgcgaaattcc

SEQ ID NO: 4319673 - DNA, 25 bp, Homo sapien
agccaggccaagaatgccgcgaaat

SEQ ID NO: 4319674 - DNA, 25 bp, Homo sapien
tgccgcgaaattcccttcttcaaat

SEQ ID NO: 4319675 - DNA, 25 bp, Homo sapien
caagaatgccgcgaaattcccttct

SEQ ID NO: 4319676 - DNA, 25 bp, Homo sapien
gtccggccgcccaaagctacgccga

SEQ ID NO: 4319677 - DNA, 25 bp, Homo sapien
tacgccgaccaatccaagtagcgaa

SEQ ID NO: 4319678 - DNA, 25 bp, Homo sapien
tgtgactttctaaggtccggccgcc

SEQ ID NO: 4319679 - DNA, 25 bp, Homo sapien
acaggcgcgcagatgtgtgactttc

SEQ ID NO: 4319680 - DNA, 25 bp, Homo sapien
aagtaactgcgcacgaaatctcccg

SEQ ID NO: 4319681 - DNA, 25 bp, Homo sapien
gcccggctgggtacctctatctgaa

SEQ ID NO: 4319682 - DNA, 25 bp, Homo sapien
gcgaatcccggaagtcagactgttt

SEQ ID NO: 4319683 - DNA, 25 bp, Homo sapien
tgaaagctctcagcgggacaatgct

SEQ ID NO: 4319684 - DNA, 25 bp, Homo sapien
gggtccagagttgcatccttccaaa

SEQ ID NO: 4319685 - DNA, 25 bp, Homo sapien
aagtccacgccttttcctataccat

SEQ ID NO: 4319686 - DNA, 25 bp, Homo sapien
tgaagggtccagagttgcatccttc

SEQ ID NO: 4319687 - DNA, 25 bp, Homo sapien
ccagagttgcatccttccaaatgta

SEQ ID NO: 4319688 - DNA, 25 bp, Homo sapien
ttttagccttttgatgttccaccag

SEQ ID NO: 4319689 - DNA, 25 bp, Homo sapien
tatgaaggactcttatgttcaggat

SEQ ID NO: 4319690 - DNA, 25 bp, Homo sapien
tgttccaccagaaacgcaaaggatt

SEQ ID NO: 4319691 - DNA, 25 bp, Homo sapien
tcagatcccgtagtatgaaggactc

SEQ ID NO: 4319692 - DNA, 25 bp, Homo sapien
aaatcacaagaagtaaagacgtatc

SEQ ID NO: 4319693 - DNA, 25 bp, Homo sapien
caagaagtaaagacgtatctaggac

SEQ ID NO: 4319694 - DNA, 25 bp, Homo sapien
tcacaagaagtaaagacgtatctag

SEQ ID NO: 4319695 - DNA, 25 bp, Homo sapien
taaaatcacaagaagtaaagacgta

SEQ ID NO: 4319696 - DNA, 25 bp, Homo sapien
ggatccatattccttcagggtcttc

SEQ ID NO: 4319697 - DNA, 25 bp, Homo sapien
cttcatcattataaatgttctctgc

SEQ ID NO: 4319698 - DNA, 25 bp, Homo sapien
aataaacaacaactctggtgacccg

SEQ ID NO: 4319699 - DNA, 25 bp, Homo sapien
cattgggattccaggagaaatcaga

SEQ ID NO: 4319700 - DNA, 25 bp, Homo sapien
tttcatccatgtgactcagaggaat

SEQ ID NO: 4319701 - DNA, 25 bp, Homo sapien
cactgtgaggtgactactgaacctg

SEQ ID NO: 4319702 - DNA, 25 bp, Homo sapien
catgtgactcagaggaatgcaacat

SEQ ID NO: 4319703 - DNA, 25 bp, Homo sapien
atccatgtgactcagaggaatgcaa

SEQ ID NO: 4319704 - DNA, 25 bp, Homo sapien
aaggcaacagtcttgtcagctgatc

SEQ ID NO: 4319705 - DNA, 25 bp, Homo sapien
tcagatcccacaaggcaacagtctt

SEQ ID NO: 4319706 - DNA, 25 bp, Homo sapien
agctgatcctgtggcaagaatgaac

SEQ ID NO: 4319707 - DNA, 25 bp, Homo sapien
ttgtcagctgatcctgtggcaagaa

SEQ ID NO: 4319708 - DNA, 25 bp, Homo sapien
aagtctgagttgcagtctccagaaa

SEQ ID NO: 4319709 - DNA, 25 bp, Homo sapien
cccacgggtagatggtgtgatcatc

SEQ ID NO: 4319710 - DNA, 25 bp, Homo sapien
cagaaagatctggtttaggatgttt

SEQ ID NO: 4319711 - DNA, 25 bp, Homo sapien
aagatggtctttgcatccaccacat

SEQ ID NO: 4319712 - DNA, 25 bp, Homo sapien
ttgttcatccaatgtgtgtgtgtac

SEQ ID NO: 4319713 - DNA, 25 bp, Homo sapien
ctataacaagatgtttttgttcatc

SEQ ID NO: 4319714 - DNA, 25 bp, Homo sapien
tttgttcatccaatgtgtgtgtgta

SEQ ID NO: 4319715 - DNA, 25 bp, Homo sapien
gtttttgttcatccaatgtgtgtgt

SEQ ID NO: 4319716 - DNA, 25 bp, Homo sapien
aagtcgatgaatgctgaaatctttc

SEQ ID NO: 4319717 - DNA, 25 bp, Homo sapien
caggacaagtcgatgaatgctgaaa

SEQ ID NO: 4319718 - DNA, 25 bp, Homo sapien
ccaggacaagtcgatgaatgctgaa

SEQ ID NO: 4319719 - DNA, 25 bp, Homo sapien
gacaagtcgatgaatgctgaaatct

SEQ ID NO: 4319720 - DNA, 25 bp, Homo sapien
cactgggcagttaggctgggccact

SEQ ID NO: 4319721 - DNA, 25 bp, Homo sapien
actgggcagttaggctgggccactc

SEQ ID NO: 4319722 - DNA, 25 bp, Homo sapien
gaagccactgggcagttaggctggg

SEQ ID NO: 4319723 - DNA, 25 bp, Homo sapien
gccactgggcagttaggctgggcca

SEQ ID NO: 4319724 - DNA, 25 bp, Homo sapien
gccgaatcccttcagaaagacacca

SEQ ID NO: 4319725 - DNA, 25 bp, Homo sapien
cgaatcccttcagaaagacaccaaa

SEQ ID NO: 4319726 - DNA, 25 bp, Homo sapien
ctccgggccgaatcccttcagaaag

SEQ ID NO: 4319727 - DNA, 25 bp, Homo sapien
cgggccgaatcccttcagaaagaca

SEQ ID NO: 4319728 - DNA, 25 bp, Homo sapien
gcttgtccaggtagtgtgctttcct

SEQ ID NO: 4319729 - DNA, 25 bp, Homo sapien
ggagggaaatcaatagctctgctgc

SEQ ID NO: 4319730 - DNA, 25 bp, Homo sapien
ctttattctgggccaagaggctcat

SEQ ID NO: 4319731 - DNA, 25 bp, Homo sapien
gtgatcttgggtcactgcagtctct

SEQ ID NO: 4319732 - DNA, 25 bp, Homo sapien
tagctgggattataggcacatgcca

SEQ ID NO: 4319733 - DNA, 25 bp, Homo sapien
aattctcatgcctcaacctcccgag

SEQ ID NO: 4319734 - DNA, 25 bp, Homo sapien
gcctccttggttcaagcaattctca

SEQ ID NO: 4319735 - DNA, 25 bp, Homo sapien
tatcatgtcattcgtttcctaggag

SEQ ID NO: 4319736 - DNA, 25 bp, Homo sapien
ggtgggaaagcactaactgaagaat

SEQ ID NO: 4319737 - DNA, 25 bp, Homo sapien
gcagttctatgaatggaatgccact

SEQ ID NO: 4319738 - DNA, 25 bp, Homo sapien
tgagccagtcattcctgttacatgc

SEQ ID NO: 4319739 - DNA, 25 bp, Homo sapien
catcattcatcaacacagtgaccaa

SEQ ID NO: 4319740 - DNA, 25 bp, Homo sapien
aatacctagttgactgtgcagcatg

SEQ ID NO: 4319741 - DNA, 25 bp, Homo sapien
ctgcttcagctatgtatatgttttc

SEQ ID NO: 4319742 - DNA, 25 bp, Homo sapien
cactggagctaagataaggaatacc

SEQ ID NO: 4319743 - DNA, 25 bp, Homo sapien
caggtccttgacaggtgtttccctt

SEQ ID NO: 4319744 - DNA, 25 bp, Homo sapien
ctcaggtccttgacaggtgtttccc

SEQ ID NO: 4319745 - DNA, 25 bp, Homo sapien
tctcaggtccttgacaggtgtttcc

SEQ ID NO: 4319746 - DNA, 25 bp, Homo sapien
ctctcaggtccttgacaggtgtttc

SEQ ID NO: 4319747 - DNA, 25 bp, Homo sapien
tttgctgacttatttcctgtgtcag

SEQ ID NO: 4319748 - DNA, 25 bp, Homo sapien
ttgctgacttatttcctgtgtcagt

SEQ ID NO: 4319749 - DNA, 25 bp, Homo sapien
ttttgctgacttatttcctgtgtca

SEQ ID NO: 4319750 - DNA, 25 bp, Homo sapien
caaactcatgggatttataacatta

SEQ ID NO: 4319751 - DNA, 25 bp, Homo sapien
tgttcggcctccactaacagatgcc

SEQ ID NO: 4319752 - DNA, 25 bp, Homo sapien
tataacattaagagtaagtgcaaaa

SEQ ID NO: 4319753 - DNA, 25 bp, Homo sapien
ctggcgctgggcacttcagccaaac

SEQ ID NO: 4319754 - DNA, 25 bp, Homo sapien
gatctgcttagattttccggttgtc

SEQ ID NO: 4319755 - DNA, 25 bp, Homo sapien
ttagattttccggttgtcctcttca

SEQ ID NO: 4319756 - DNA, 25 bp, Homo sapien
tctccataggtggagatacctagac

SEQ ID NO: 4319757 - DNA, 25 bp, Homo sapien
ccataggtggagatacctagacaca

SEQ ID NO: 4319758 - DNA, 25 bp, Homo sapien
gataacatatcccaagtgcaaaggg

SEQ ID NO: 4319759 - DNA, 25 bp, Homo sapien
ggccagccaagaggtgttgccacat

SEQ ID NO: 4319760 - DNA, 25 bp, Homo sapien
gaagaaacttcccacgagataacat

SEQ ID NO: 4319761 - DNA, 25 bp, Homo sapien
gctgagctttctgcccaagatggaa

SEQ ID NO: 4319762 - DNA, 25 bp, Homo sapien
gaatattcagggctaccgtgctttt

SEQ ID NO: 4319763 - DNA, 25 bp, Homo sapien
gacagcatgcctttaatagattcct

SEQ ID NO: 4319764 - DNA, 25 bp, Homo sapien
gaattaacatttgcacttcggtatg

SEQ ID NO: 4319765 - DNA, 25 bp, Homo sapien
tagaccagtttaacgcaagcaatgc

SEQ ID NO: 4319766 - DNA, 25 bp, Homo sapien
tgtctctcacatgttgctcttctaa

SEQ ID NO: 4319767 - DNA, 25 bp, Homo sapien
gctcttctaatgacagaattcttat

SEQ ID NO: 4319768 - DNA, 25 bp, Homo sapien
tcagagtctaatgaacgctgtctgc

SEQ ID NO: 4319769 - DNA, 25 bp, Homo sapien
tctgcccatgagagcttgggcgtct

SEQ ID NO: 4319770 - DNA, 25 bp, Homo sapien
catttgaggctttacatgaattcag

SEQ ID NO: 4319771 - DNA, 25 bp, Homo sapien
cattcgcaaagatgaaaaaccgttt

SEQ ID NO: 4319772 - DNA, 25 bp, Homo sapien
tgaaaaactcattgcattcgcaaag

SEQ ID NO: 4319773 - DNA, 25 bp, Homo sapien
aaccgtttctcctatgcagaacaca

SEQ ID NO: 4319774 - DNA, 25 bp, Homo sapien
tcattcaggtatagcatctttgata

SEQ ID NO: 4319775 - DNA, 25 bp, Homo sapien
catgttctcatggtagatgaggcag

SEQ ID NO: 4319776 - DNA, 25 bp, Homo sapien
tatggtcattgacaaagcatgttct

SEQ ID NO: 4319777 - DNA, 25 bp, Homo sapien
tgttctcatggtagatgaggcagtt

SEQ ID NO: 4319778 - DNA, 25 bp, Homo sapien
ctgtgggaagcagatgtagttgaaa

SEQ ID NO: 4319779 - DNA, 25 bp, Homo sapien
gaagcagatgtagttgaaagggagc

SEQ ID NO: 4319780 - DNA, 25 bp, Homo sapien
gtgggaagcagatgtagttgaaagg

SEQ ID NO: 4319781 - DNA, 25 bp, Homo sapien
gggaagcagatgtagttgaaaggga

SEQ ID NO: 4319782 - DNA, 25 bp, Homo sapien
taagtgtcctccagaagactggagc

SEQ ID NO: 4319783 - DNA, 25 bp, Homo sapien
ctgtaagtgtcctccagaagactgg

SEQ ID NO: 4319784 - DNA, 25 bp, Homo sapien
gtcctccagaagactggagcaccat

SEQ ID NO: 4319785 - DNA, 25 bp, Homo sapien
agtgtcctccagaagactggagcac

SEQ ID NO: 4319786 - DNA, 25 bp, Homo sapien
gaagcattcagctcagaatagaggc

SEQ ID NO: 4319787 - DNA, 25 bp, Homo sapien
tctttccccttatcttgtctgttag

SEQ ID NO: 4319788 - DNA, 25 bp, Homo sapien
ttaataagttagaagcattcagctc

SEQ ID NO: 4319789 - DNA, 25 bp, Homo sapien
gctcagaatagaggcttgattgcat

SEQ ID NO: 4319790 - DNA, 25 bp, Homo sapien
cacaggcggcatgattaccaagtga

SEQ ID NO: 4319791 - DNA, 25 bp, Homo sapien
catttggcagcttatcaaaagccac

SEQ ID NO: 4319792 - DNA, 25 bp, Homo sapien
tcttgacttctggtgcacaggcggc

SEQ ID NO: 4319793 - DNA, 25 bp, Homo sapien
tgtgccgataaatggattcccactg

SEQ ID NO: 4319794 - DNA, 25 bp, Homo sapien
tatggctgataatctaaagcatgaa

SEQ ID NO: 4319795 - DNA, 25 bp, Homo sapien
ggctgataatctaaagcatgaagac

SEQ ID NO: 4319796 - DNA, 25 bp, Homo sapien
atggctgataatctaaagcatgaag

SEQ ID NO: 4319797 - DNA, 25 bp, Homo sapien
tggctgataatctaaagcatgaaga

SEQ ID NO: 4319798 - DNA, 25 bp, Homo sapien
tatttttcccttgtacgcaatgatt

SEQ ID NO: 4319799 - DNA, 25 bp, Homo sapien
ccttgtacgcaatgattttggccca

SEQ ID NO: 4319800 - DNA, 25 bp, Homo sapien
ttaaaaggatgaattgcattgatgt

SEQ ID NO: 4319801 - DNA, 25 bp, Homo sapien
gaattgcattgatgtaggagttatt

SEQ ID NO: 4319802 - DNA, 25 bp, Homo sapien
ggccatggcggcaatgccttcatct

SEQ ID NO: 4319803 - DNA, 25 bp, Homo sapien
tcaggccatggcggcaatgccttca

SEQ ID NO: 4319804 - DNA, 25 bp, Homo sapien
cttccagagtccgggagttctttga

SEQ ID NO: 4319805 - DNA, 25 bp, Homo sapien
tccagagtccgggagttctttgatg

SEQ ID NO: 4319806 - DNA, 25 bp, Homo sapien
ccgactgtggtgttattagtgagac

SEQ ID NO: 4319807 - DNA, 25 bp, Homo sapien
tttaccgactgtggtgttattagtg

SEQ ID NO: 4319808 - DNA, 25 bp, Homo sapien
tggtgttattagtgagactgacagg

SEQ ID NO: 4319809 - DNA, 25 bp, Homo sapien
ctgtggtgttattagtgagactgac

SEQ ID NO: 4319810 - DNA, 25 bp, Homo sapien
ggaagaacaactttagaacctgctg

SEQ ID NO: 4319811 - DNA, 25 bp, Homo sapien
gcagtcgtcttctctgcttgctgtc

SEQ ID NO: 4319812 - DNA, 25 bp, Homo sapien
aggataactcctccaagaggcagtc

SEQ ID NO: 4319813 - DNA, 25 bp, Homo sapien
taactcctccaagaggcagtcgtct

SEQ ID NO: 4319814 - DNA, 25 bp, Homo sapien
ctgtttgctttgccatctgctccat

SEQ ID NO: 4319815 - DNA, 25 bp, Homo sapien
gaatcagggcctctaataaactggc

SEQ ID NO: 4319816 - DNA, 25 bp, Homo sapien
ggctcaagtccattaactgcaggga

SEQ ID NO: 4319817 - DNA, 25 bp, Homo sapien
taaactggcattaaagctgctgaca

SEQ ID NO: 4319818 - DNA, 25 bp, Homo sapien
caaggcggttggtagcagcccattc

SEQ ID NO: 4319819 - DNA, 25 bp, Homo sapien
gctgtcaaactaaatgatgcattta

SEQ ID NO: 4319820 - DNA, 25 bp, Homo sapien
aatttgctgtcaaactaaatgatgc

SEQ ID NO: 4319821 - DNA, 25 bp, Homo sapien
ggagagacccgtacaattgctgttg

SEQ ID NO: 4319822 - DNA, 25 bp, Homo sapien
taatgactgtaacaagggagagacc

SEQ ID NO: 4319823 - DNA, 25 bp, Homo sapien
aggactttcttctctgtcagtctgc

SEQ ID NO: 4319824 - DNA, 25 bp, Homo sapien
acaggactttcttctctgtcagtct

SEQ ID NO: 4319825 - DNA, 25 bp, Homo sapien
caaacaggactttcttctctgtcag

SEQ ID NO: 4319826 - DNA, 25 bp, Homo sapien
gactttcttctctgtcagtctgcat

SEQ ID NO: 4319827 - DNA, 25 bp, Homo sapien
ctactctggcaaacactctcaccat

SEQ ID NO: 4319828 - DNA, 25 bp, Homo sapien
cctttgtggacgtgattctgcagat

SEQ ID NO: 4319829 - DNA, 25 bp, Homo sapien
gattctgcagataatgggctgtttc

SEQ ID NO: 4319830 - DNA, 25 bp, Homo sapien
gcctttgtggacgtgattctgcaga

SEQ ID NO: 4319831 - DNA, 25 bp, Homo sapien
taatgggctgtttcagttctgcttg

SEQ ID NO: 4319832 - DNA, 25 bp, Homo sapien
tgctatctggtcctcatatgtgaac

SEQ ID NO: 4319833 - DNA, 25 bp, Homo sapien
ttgctatctggtcctcatatgtgaa

SEQ ID NO: 4319834 - DNA, 25 bp, Homo sapien
tgtcttatatcgttttattgctatc

SEQ ID NO: 4319835 - DNA, 25 bp, Homo sapien
atatcgttttattgctatctggtcc

SEQ ID NO: 4319836 - DNA, 25 bp, Homo sapien
ggtgcttgcaagttgttcccgctca

SEQ ID NO: 4319837 - DNA, 25 bp, Homo sapien
tgtggtgcttgcaagttgttcccgc

SEQ ID NO: 4319838 - DNA, 25 bp, Homo sapien
tggtgcttgcaagttgttcccgctc

SEQ ID NO: 4319839 - DNA, 25 bp, Homo sapien
cttgtggtgcttgcaagttgttccc

SEQ ID NO: 4319840 - DNA, 25 bp, Homo sapien
gaaaataaggcttcttaaggatgca

SEQ ID NO: 4319841 - DNA, 25 bp, Homo sapien
tcttaaggatgcagtttggcagact

SEQ ID NO: 4319842 - DNA, 25 bp, Homo sapien
agcactaattgcagagcacctgaac

SEQ ID NO: 4319843 - DNA, 25 bp, Homo sapien
gactgtagcaatgctgtgtctttgg

SEQ ID NO: 4319844 - DNA, 25 bp, Homo sapien
ctcagaaacaggtgccagtttctct

SEQ ID NO: 4319845 - DNA, 25 bp, Homo sapien
ccattttgaggcttcaatagagact

SEQ ID NO: 4319846 - DNA, 25 bp, Homo sapien
agactcagaaacaggtgccagtttc

SEQ ID NO: 4319847 - DNA, 25 bp, Homo sapien
ttgaggcttcaatagagactcagaa

SEQ ID NO: 4319848 - DNA, 25 bp, Homo sapien
attccatttgtgaggcttgatcatt

SEQ ID NO: 4319849 - DNA, 25 bp, Homo sapien
tccatttgtgaggcttgatcatttc

SEQ ID NO: 4319850 - DNA, 25 bp, Homo sapien
ttccatttgtgaggcttgatcattt

SEQ ID NO: 4319851 - DNA, 25 bp, Homo sapien
ccatttgtgaggcttgatcatttcc

SEQ ID NO: 4319852 - DNA, 25 bp, Homo sapien
gagtgccatcctcaacaacgttgaa

SEQ ID NO: 4319853 - DNA, 25 bp, Homo sapien
cagcaccaaatggtcctaaaatgtt

SEQ ID NO: 4319854 - DNA, 25 bp, Homo sapien
aggactttctgcagatgagtgccat

SEQ ID NO: 4319855 - DNA, 25 bp, Homo sapien
aaatggtcctaaaatgttcttgaag

SEQ ID NO: 4319856 - DNA, 25 bp, Homo sapien
tcgctagtatgtttcttatgatcct

SEQ ID NO: 4319857 - DNA, 25 bp, Homo sapien
tgcaaagggcatattcactgggatt

SEQ ID NO: 4319858 - DNA, 25 bp, Homo sapien
gattctggtgcctctttcgctagta

SEQ ID NO: 4319859 - DNA, 25 bp, Homo sapien
ttatgatccttgtgaggataagtcc

SEQ ID NO: 4319860 - DNA, 25 bp, Homo sapien
tgctggtacatatcagcagtccctg

SEQ ID NO: 4319861 - DNA, 25 bp, Homo sapien
ctgctggtacatatcagcagtccct

SEQ ID NO: 4319862 - DNA, 25 bp, Homo sapien
cacacacgggatcccatattctata

SEQ ID NO: 4319863 - DNA, 25 bp, Homo sapien
ccaggagtttgggtatcattctaga

SEQ ID NO: 4319864 - DNA, 25 bp, Homo sapien
tctttccacttaagcacattcagag

SEQ ID NO: 4319865 - DNA, 25 bp, Homo sapien
tgtgtacatagaaggcattccccac

SEQ ID NO: 4319866 - DNA, 25 bp, Homo sapien
tgagaaccacggcaagttatagctg

SEQ ID NO: 4319867 - DNA, 25 bp, Homo sapien
gaagaatctcctttgctacgtggct

SEQ ID NO: 4319868 - DNA, 25 bp, Homo sapien
ggttactgccacttcatgtagggaa

SEQ ID NO: 4319869 - DNA, 25 bp, Homo sapien
tagcgtaagtactcgaagaagaatc

SEQ ID NO: 4319870 - DNA, 25 bp, Homo sapien
tccagtaagtaacacctggaacagg

SEQ ID NO: 4319871 - DNA, 25 bp, Homo sapien
tttccagtaagtaacacctggaaca

SEQ ID NO: 4319872 - DNA, 25 bp, Homo sapien
ccagtaagtaacacctggaacaggt

SEQ ID NO: 4319873 - DNA, 25 bp, Homo sapien
ccatttccagtaagtaacacctgga

SEQ ID NO: 4319874 - DNA, 25 bp, Homo sapien
catgtgctggtggtcattggtaaca

SEQ ID NO: 4319875 - DNA, 25 bp, Homo sapien
tgaagcatgtgctggtggtcattgg

SEQ ID NO: 4319876 - DNA, 25 bp, Homo sapien
tgctggtggtcattggtaacagtca

SEQ ID NO: 4319877 - DNA, 25 bp, Homo sapien
ctggtggtcattggtaacagtcatg

SEQ ID NO: 4319878 - DNA, 25 bp, Homo sapien
tgcggacttcgaagagcgtatcccg

SEQ ID NO: 4319879 - DNA, 25 bp, Homo sapien
tgtttgcaacaattggaataccacc

SEQ ID NO: 4319880 - DNA, 25 bp, Homo sapien
ctgtaaatgcagtagcaggcgcccg

SEQ ID NO: 4319881 - DNA, 25 bp, Homo sapien
tgttacccaaagtaatcaaagctct

SEQ ID NO: 4319882 - DNA, 25 bp, Homo sapien
tactgccgctttgttggcagagtta

SEQ ID NO: 4319883 - DNA, 25 bp, Homo sapien
tgatagtgagtactgctgccaccac

SEQ ID NO: 4319884 - DNA, 25 bp, Homo sapien
tgcctggagtactgccgctttgttg

SEQ ID NO: 4319885 - DNA, 25 bp, Homo sapien
ttgtcctgaccctgttgccgcctct

SEQ ID NO: 4319886 - DNA, 25 bp, Homo sapien
tagcaatgggattcttctgccccat

SEQ ID NO: 4319887 - DNA, 25 bp, Homo sapien
atagcaatgggattcttctgcccca

SEQ ID NO: 4319888 - DNA, 25 bp, Homo sapien
cgagttgctccatagcaatgggatt

SEQ ID NO: 4319889 - DNA, 25 bp, Homo sapien
tgctccatagcaatgggattcttct

SEQ ID NO: 4319890 - DNA, 25 bp, Homo sapien
agacaggtcctacggatttgttttg

SEQ ID NO: 4319891 - DNA, 25 bp, Homo sapien
tattatatagacaggtcctacggat

SEQ ID NO: 4319892 - DNA, 25 bp, Homo sapien
tatagacaggtcctacggatttgtt

SEQ ID NO: 4319893 - DNA, 25 bp, Homo sapien
tatatagacaggtcctacggatttg

SEQ ID NO: 4319894 - DNA, 25 bp, Homo sapien
ctagagagcagctctggctcttccc

SEQ ID NO: 4319895 - DNA, 25 bp, Homo sapien
tagagagcagctctggctcttccca

SEQ ID NO: 4319896 - DNA, 25 bp, Homo sapien
agagagcagctctggctcttcccac

SEQ ID NO: 4319897 - DNA, 25 bp, Homo sapien
ggtgctgcaactttatccctaatta

SEQ ID NO: 4319898 - DNA, 25 bp, Homo sapien
ttccatgttaaaggatccttctcct

SEQ ID NO: 4319899 - DNA, 25 bp, Homo sapien
gtttcattagcatgacaggcctggg

SEQ ID NO: 4319900 - DNA, 25 bp, Homo sapien
gggtgttgagtgtttaactggtgct

SEQ ID NO: 4319901 - DNA, 25 bp, Homo sapien
gacctggacttctcccttgggcatg

SEQ ID NO: 4319902 - DNA, 25 bp, Homo sapien
gggcatgcacactctacagtatcca

SEQ ID NO: 4319903 - DNA, 25 bp, Homo sapien
cacatagattctgttggaactgagg

SEQ ID NO: 4319904 - DNA, 25 bp, Homo sapien
ctgctcaatagaaatccgaaacact

SEQ ID NO: 4319905 - DNA, 25 bp, Homo sapien
aggaacttctcattctgtctggtga

SEQ ID NO: 4319906 - DNA, 25 bp, Homo sapien
attctgtctggtgaaaaatatcgac

SEQ ID NO: 4319907 - DNA, 25 bp, Homo sapien
tggtgaaaaatatcgacgtcctcat

SEQ ID NO: 4319908 - DNA, 25 bp, Homo sapien
tgtctggtgaaaaatatcgacgtcc

SEQ ID NO: 4319909 - DNA, 25 bp, Homo sapien
cttgaatcttgtgatacagagaata

SEQ ID NO: 4319910 - DNA, 25 bp, Homo sapien
gctgaaaagtccgacctggctcttg

SEQ ID NO: 4319911 - DNA, 25 bp, Homo sapien
ccgacctggctcttgaatcttgtga

SEQ ID NO: 4319912 - DNA, 25 bp, Homo sapien
gcaatggagagtggttcatgctgaa

SEQ ID NO: 4319913 - DNA, 25 bp, Homo sapien
catcagtgggtttttgagtcttcat

SEQ ID NO: 4319914 - DNA, 25 bp, Homo sapien
tcatcagtgggtttttgagtcttca

SEQ ID NO: 4319915 - DNA, 25 bp, Homo sapien
tcaatacgtaacaattctctccttc

SEQ ID NO: 4319916 - DNA, 25 bp, Homo sapien
caattctctccttcatgactgagtt

SEQ ID NO: 4319917 - DNA, 25 bp, Homo sapien
taacaattctctccttcatgactga

SEQ ID NO: 4319918 - DNA, 25 bp, Homo sapien
caatacgtaacaattctctccttca

SEQ ID NO: 4319919 - DNA, 25 bp, Homo sapien
gtctcttctcaaactttgaattcat

SEQ ID NO: 4319920 - DNA, 25 bp, Homo sapien
taaactgtgatagagctcaaccttg

SEQ ID NO: 4319921 - DNA, 25 bp, Homo sapien
tttactggtataggtgggtgacaga

SEQ ID NO: 4319922 - DNA, 25 bp, Homo sapien
acttaatgactgagaagttggcatt

SEQ ID NO: 4319923 - DNA, 25 bp, Homo sapien
tgaaagtaatcctacaacaaacagc

SEQ ID NO: 4319924 - DNA, 25 bp, Homo sapien
tccttcttacttgacccttgtctac

SEQ ID NO: 4319925 - DNA, 25 bp, Homo sapien
ccttcttacttgacccttgtctaca

SEQ ID NO: 4319926 - DNA, 25 bp, Homo sapien
tgtgctttactttcattcagtggaa

SEQ ID NO: 4319927 - DNA, 25 bp, Homo sapien
aataatggcattttagatcttagct

SEQ ID NO: 4319928 - DNA, 25 bp, Homo sapien
tttcattcagtggaaataatggcat

SEQ ID NO: 4319929 - DNA, 25 bp, Homo sapien
cagtggaaataatggcattttagat

SEQ ID NO: 4319930 - DNA, 25 bp, Homo sapien
ttcacgtgaatcccatacacaacac

SEQ ID NO: 4319931 - DNA, 25 bp, Homo sapien
tcaggtgataacgagcttgcttctt

SEQ ID NO: 4319932 - DNA, 25 bp, Homo sapien
tgattcaggtgataacgagcttgct

SEQ ID NO: 4319933 - DNA, 25 bp, Homo sapien
cgagcttgcttcttagttaaaggat

SEQ ID NO: 4319934 - DNA, 25 bp, Homo sapien
aggaatttgattcaggtgataacga

SEQ ID NO: 4319935 - DNA, 25 bp, Homo sapien
ctcttttggctttcaatttgctcat

SEQ ID NO: 4319936 - DNA, 25 bp, Homo sapien
tctctcttttggctttcaatttgct

SEQ ID NO: 4319937 - DNA, 25 bp, Homo sapien
catcttccacttttctctcttttgg

SEQ ID NO: 4319938 - DNA, 25 bp, Homo sapien
tttctctcttttggctttcaatttg

SEQ ID NO: 4319939 - DNA, 25 bp, Homo sapien
tataacaccctatccctaaatgcca

SEQ ID NO: 4319940 - DNA, 25 bp, Homo sapien
ctttataacaccctatccctaaatg

SEQ ID NO: 4319941 - DNA, 25 bp, Homo sapien
aacacagggagtcatcccaagacct

SEQ ID NO: 4319942 - DNA, 25 bp, Homo sapien
cacagggagtcatcccaagaccttc

SEQ ID NO: 4319943 - DNA, 25 bp, Homo sapien
cagggtgagtcatcaatggtgggca

SEQ ID NO: 4319944 - DNA, 25 bp, Homo sapien
agggtgagtcatcaatggtgggcag

SEQ ID NO: 4319945 - DNA, 25 bp, Homo sapien
tcagggtgagtcatcaatggtgggc

SEQ ID NO: 4319946 - DNA, 25 bp, Homo sapien
agaagaccatgctggaacacgcact

SEQ ID NO: 4319947 - DNA, 25 bp, Homo sapien
gccatcgttgctgaatttaagtcct

SEQ ID NO: 4319948 - DNA, 25 bp, Homo sapien
gaaatgaagctgccgttggtggaaa

SEQ ID NO: 4319949 - DNA, 25 bp, Homo sapien
catcaatgagggaaatgaagctgcc

SEQ ID NO: 4319950 - DNA, 25 bp, Homo sapien
ggatgaccttgccatcgttgctgaa

SEQ ID NO: 4319951 - DNA, 25 bp, Homo sapien
cgtaaagtttgaccatctcagagtt

SEQ ID NO: 4319952 - DNA, 25 bp, Homo sapien
gttcgattacactgcatcctaaagg

SEQ ID NO: 4319953 - DNA, 25 bp, Homo sapien
tcgtcgttgctgcttgagatgaccg

SEQ ID NO: 4319954 - DNA, 25 bp, Homo sapien
cctgtagactcatgaggccctggca

SEQ ID NO: 4319955 - DNA, 25 bp, Homo sapien
aaacaccctggcgacgcggaagctc

SEQ ID NO: 4319956 - DNA, 25 bp, Homo sapien
gagttttcgcaaaacaccctggcga

SEQ ID NO: 4319957 - DNA, 25 bp, Homo sapien
cgagttttcgcaaaacaccctggcg

SEQ ID NO: 4319958 - DNA, 25 bp, Homo sapien
tttgatgttctctgatactctcatt

SEQ ID NO: 4319959 - DNA, 25 bp, Homo sapien
catatcttaattcaccaagtgcaat

SEQ ID NO: 4319960 - DNA, 25 bp, Homo sapien
tgttctgaagtaatagagacggtat

SEQ ID NO: 4319961 - DNA, 25 bp, Homo sapien
tcttaattcaccaagtgcaatcaat

SEQ ID NO: 4319962 - DNA, 25 bp, Homo sapien
ccttcatatcttaattcaccaagtg

SEQ ID NO: 4319963 - DNA, 25 bp, Homo sapien
gtttgtttcggatcataatgaccat

SEQ ID NO: 4319964 - DNA, 25 bp, Homo sapien
gctggtttgtttcggatcataatga

SEQ ID NO: 4319965 - DNA, 25 bp, Homo sapien
ttccttcactaatatctgcagctgg

SEQ ID NO: 4319966 - DNA, 25 bp, Homo sapien
cagctggtttgtttcggatcataat

SEQ ID NO: 4319967 - DNA, 25 bp, Homo sapien
tattaattcttcccaacaaacaaca

SEQ ID NO: 4319968 - DNA, 25 bp, Homo sapien
tttgagttgactttcatatatcgtg

SEQ ID NO: 4319969 - DNA, 25 bp, Homo sapien
aaagtaagtaagtgcaatgcctcca

SEQ ID NO: 4319970 - DNA, 25 bp, Homo sapien
cacttaaatagtacagatattttaa

SEQ ID NO: 4319971 - DNA, 25 bp, Homo sapien
ttaatgctccattacttctaaattt

SEQ ID NO: 4319972 - DNA, 25 bp, Homo sapien
ccaaaatggactgtaaagagatttt

SEQ ID NO: 4319973 - DNA, 25 bp, Homo sapien
tccaaaatggactgtaaagagattt

SEQ ID NO: 4319974 - DNA, 25 bp, Homo sapien
tccatccaaaatggactgtaaagag

SEQ ID NO: 4319975 - DNA, 25 bp, Homo sapien
catccaaaatggactgtaaagagat

SEQ ID NO: 4319976 - DNA, 25 bp, Homo sapien
tacctatcaagccctgaaacttctt

SEQ ID NO: 4319977 - DNA, 25 bp, Homo sapien
ttacctatcaagccctgaaacttct

SEQ ID NO: 4319978 - DNA, 25 bp, Homo sapien
acctatcaagccctgaaacttcttc

SEQ ID NO: 4319979 - DNA, 25 bp, Homo sapien
tcatgaggacgtaagagtacttgcc

SEQ ID NO: 4319980 - DNA, 25 bp, Homo sapien
tgaggacgtaagagtacttgccttt

SEQ ID NO: 4319981 - DNA, 25 bp, Homo sapien
cttcatgaggacgtaagagtacttg

SEQ ID NO: 4319982 - DNA, 25 bp, Homo sapien
cgtaagagtacttgccttttactgt

SEQ ID NO: 4319983 - DNA, 25 bp, Homo sapien
aatgtcccctgccacaaaatctttc

SEQ ID NO: 4319984 - DNA, 25 bp, Homo sapien
ctggtgttccactgacagcaatgag

SEQ ID NO: 4319985 - DNA, 25 bp, Homo sapien
ctttccaaaacgcaaggaaacatgt

SEQ ID NO: 4319986 - DNA, 25 bp, Homo sapien
catgtttggatttgggaactcctgg

SEQ ID NO: 4319987 - DNA, 25 bp, Homo sapien
gtcacacgtaaaatcttataagaag

SEQ ID NO: 4319988 - DNA, 25 bp, Homo sapien
atgtccaggcccatgactgaaccag

SEQ ID NO: 4319989 - DNA, 25 bp, Homo sapien
tactatcaaaattgtgctttggacc

SEQ ID NO: 4319990 - DNA, 25 bp, Homo sapien
aaataaagcatttgatatatgccca

SEQ ID NO: 4319991 - DNA, 25 bp, Homo sapien
catcaatggggggtggaaaacagcc

SEQ ID NO: 4319992 - DNA, 25 bp, Homo sapien
tctttaaggatgtaggtcaaaggta

SEQ ID NO: 4319993 - DNA, 25 bp, Homo sapien
ctgccatcactatctttaaggatgt

SEQ ID NO: 4319994 - DNA, 25 bp, Homo sapien
agcctctgccatcactatctttaag

SEQ ID NO: 4319995 - DNA, 25 bp, Homo sapien
gcagacattgacctcaccaagagga

SEQ ID NO: 4319996 - DNA, 25 bp, Homo sapien
ggaaagcagacattgacctcaccaa

SEQ ID NO: 4319997 - DNA, 25 bp, Homo sapien
ctcaccaagaggacaggagaattca

SEQ ID NO: 4319998 - DNA, 25 bp, Homo sapien
gacctcaccaagaggacaggagaat

SEQ ID NO: 4319999 - DNA, 25 bp, Homo sapien
ggaagaggtggaacgtgttatcacc

SEQ ID NO: 4320000 - DNA, 25 bp, Homo sapien
gaggaagaggtggaacgtgttatca

SEQ ID NO: 4320001 - DNA, 25 bp, Homo sapien
ctgaggaagaggtggaacgtgttat

SEQ ID NO: 4320002 - DNA, 25 bp, Homo sapien
gaagaggtggaacgtgttatcacca

SEQ ID NO: 4320003 - DNA, 25 bp, Homo sapien
tgccattgtcagtgttaatttgccc

SEQ ID NO: 4320004 - DNA, 25 bp, Homo sapien
taagcatcctttaaaacgtatgaac

SEQ ID NO: 4320005 - DNA, 25 bp, Homo sapien
tatatgtattcagtaagcatccttt

SEQ ID NO: 4320006 - DNA, 25 bp, Homo sapien
tgttaagccattccacaaatgtata

SEQ ID NO: 4320007 - DNA, 25 bp, Homo sapien
tcagtcaatgcttgcagtttgttcc

SEQ ID NO: 4320008 - DNA, 25 bp, Homo sapien
tgcatactatctgtctttttgccaa

SEQ ID NO: 4320009 - DNA, 25 bp, Homo sapien
gccctctttgcatactatctgtctt

SEQ ID NO: 4320010 - DNA, 25 bp, Homo sapien
gggctattgattggtgtttccagat

SEQ ID NO: 4320011 - DNA, 25 bp, Homo sapien
ctaatgtggggagtcatcaaagata

SEQ ID NO: 4320012 - DNA, 25 bp, Homo sapien
gtggggagtcatcaaagatattaat

SEQ ID NO: 4320013 - DNA, 25 bp, Homo sapien
tgtggggagtcatcaaagatattaa

SEQ ID NO: 4320014 - DNA, 25 bp, Homo sapien
aatgtggggagtcatcaaagatatt

SEQ ID NO: 4320015 - DNA, 25 bp, Homo sapien
ttttcattgtctttgtactctttag

SEQ ID NO: 4320016 - DNA, 25 bp, Homo sapien
tcattgtctttgtactctttagtca

SEQ ID NO: 4320017 - DNA, 25 bp, Homo sapien
gaactttttcattgtctttgtactc

SEQ ID NO: 4320018 - DNA, 25 bp, Homo sapien
tgaactttttcattgtctttgtact

SEQ ID NO: 4320019 - DNA, 25 bp, Homo sapien
tgttccatgaggtcagtcgtatatt

SEQ ID NO: 4320020 - DNA, 25 bp, Homo sapien
ttccatgaggtcagtcgtatattct

SEQ ID NO: 4320021 - DNA, 25 bp, Homo sapien
tccatgaggtcagtcgtatattctg

SEQ ID NO: 4320022 - DNA, 25 bp, Homo sapien
ccatgaggtcagtcgtatattctgt

SEQ ID NO: 4320023 - DNA, 25 bp, Homo sapien
cagccagtttttctagatatgaaca

SEQ ID NO: 4320024 - DNA, 25 bp, Homo sapien
cagcagccagtttttctagatatga

SEQ ID NO: 4320025 - DNA, 25 bp, Homo sapien
agcagcagccagtttttctagatat

SEQ ID NO: 4320026 - DNA, 25 bp, Homo sapien
gcagccagtttttctagatatgaac

SEQ ID NO: 4320027 - DNA, 25 bp, Homo sapien
ttgagcatcacaagcatacttaatt

SEQ ID NO: 4320028 - DNA, 25 bp, Homo sapien
ttaaacctgacattagaccatttta

SEQ ID NO: 4320029 - DNA, 25 bp, Homo sapien
tttagttaactatttgagcatcaca

SEQ ID NO: 4320030 - DNA, 25 bp, Homo sapien
taaacctgacattagaccattttat

SEQ ID NO: 4320031 - DNA, 25 bp, Homo sapien
taagaccaatcgtctgcctggagcc

SEQ ID NO: 4320032 - DNA, 25 bp, Homo sapien
ctgcagctaagaccaatcgtctgcc

SEQ ID NO: 4320033 - DNA, 25 bp, Homo sapien
agaccaatcgtctgcctggagccac

SEQ ID NO: 4320034 - DNA, 25 bp, Homo sapien
cagctaagaccaatcgtctgcctgg

SEQ ID NO: 4320035 - DNA, 25 bp, Homo sapien
catgttggttcctccttatgatcat

SEQ ID NO: 4320036 - DNA, 25 bp, Homo sapien
ttttgataacgctcgtcagctccca

SEQ ID NO: 4320037 - DNA, 25 bp, Homo sapien
gatcattttgataacgctcgtcagc

SEQ ID NO: 4320038 - DNA, 25 bp, Homo sapien
tatgatcattttgataacgctcgtc

SEQ ID NO: 4320039 - DNA, 25 bp, Homo sapien
ttctagcagtaaacatcgactgtga

SEQ ID NO: 4320040 - DNA, 25 bp, Homo sapien
tgtgaaccatatctaggttgtagtc

SEQ ID NO: 4320041 - DNA, 25 bp, Homo sapien
acatcgactgtgaaccatatctagg

SEQ ID NO: 4320042 - DNA, 25 bp, Homo sapien
tctagcagtaaacatcgactgtgaa

SEQ ID NO: 4320043 - DNA, 25 bp, Homo sapien
gcctgagagttgagctccatatttc

SEQ ID NO: 4320044 - DNA, 25 bp, Homo sapien
tactccagagcattgagccagcttg

SEQ ID NO: 4320045 - DNA, 25 bp, Homo sapien
gaaagtcttagctcatactccagag

SEQ ID NO: 4320046 - DNA, 25 bp, Homo sapien
aaggtaacctgttgacttgtcaaag

SEQ ID NO: 4320047 - DNA, 25 bp, Homo sapien
ggcaagccttgaagactcacaggaa

SEQ ID NO: 4320048 - DNA, 25 bp, Homo sapien
catactaatctaattaaaggtgaga

SEQ ID NO: 4320049 - DNA, 25 bp, Homo sapien
ccaccttccgatttccatatgctga

SEQ ID NO: 4320050 - DNA, 25 bp, Homo sapien
gaactagctgtagaagcaatgagca

SEQ ID NO: 4320051 - DNA, 25 bp, Homo sapien
cacaaggctaagatactagatctgc

SEQ ID NO: 4320052 - DNA, 25 bp, Homo sapien
agcaggtagtaagctctcatctagc

SEQ ID NO: 4320053 - DNA, 25 bp, Homo sapien
gccaagtgggtccagtttcctctcc

SEQ ID NO: 4320054 - DNA, 25 bp, Homo sapien
gctgctgaatacatgagcacacagc

SEQ ID NO: 4320055 - DNA, 25 bp, Homo sapien
tcatctagcaggaagctactggctg

SEQ ID NO: 4320056 - DNA, 25 bp, Homo sapien
gccaaccacagggaaatattgatgc

SEQ ID NO: 4320057 - DNA, 25 bp, Homo sapien
atatggggcaggccaaccacaggga

SEQ ID NO: 4320058 - DNA, 25 bp, Homo sapien
gcaggccaaccacagggaaatattg

SEQ ID NO: 4320059 - DNA, 25 bp, Homo sapien
aggccaaccacagggaaatattgat

SEQ ID NO: 4320060 - DNA, 25 bp, Homo sapien
gattcagctacaccctcctttactt

SEQ ID NO: 4320061 - DNA, 25 bp, Homo sapien
tgtacatcctcagctcgcgattcag

SEQ ID NO: 4320062 - DNA, 25 bp, Homo sapien
cttggtagtcaagtgagaaaaactt

SEQ ID NO: 4320063 - DNA, 25 bp, Homo sapien
caggtctggagtagtcttggtagtc

SEQ ID NO: 4320064 - DNA, 25 bp, Homo sapien
tccaagatgcagacttgagcaccat

SEQ ID NO: 4320065 - DNA, 25 bp, Homo sapien
tacagaaacaggaggcagaccaaga

SEQ ID NO: 4320066 - DNA, 25 bp, Homo sapien
ctacagaaacaggaggcagaccaag

SEQ ID NO: 4320067 - DNA, 25 bp, Homo sapien
tcttgatggcaggtaaactgtcctc

SEQ ID NO: 4320068 - DNA, 25 bp, Homo sapien
tatgagtgtctcctatgtaagacta

SEQ ID NO: 4320069 - DNA, 25 bp, Homo sapien
gtgctattataatggcatgaaggcc

SEQ ID NO: 4320070 - DNA, 25 bp, Homo sapien
ggtctaaggatagctaaatttagcc

SEQ ID NO: 4320071 - DNA, 25 bp, Homo sapien
aaaggtcccacggccataagaagat

SEQ ID NO: 4320072 - DNA, 25 bp, Homo sapien
aaggtcccacggccataagaagatg

SEQ ID NO: 4320073 - DNA, 25 bp, Homo sapien
gcctgaataactgttctatacccat

SEQ ID NO: 4320074 - DNA, 25 bp, Homo sapien
tctttacttccttcaatttgcttct

SEQ ID NO: 4320075 - DNA, 25 bp, Homo sapien
cttctttacttccttcaatttgctt

SEQ ID NO: 4320076 - DNA, 25 bp, Homo sapien
tttacttccttcaatttgcttctta

SEQ ID NO: 4320077 - DNA, 25 bp, Homo sapien
tacttccttcaatttgcttcttaaa

SEQ ID NO: 4320078 - DNA, 25 bp, Homo sapien
tttttccactacatatcgactaagt

SEQ ID NO: 4320079 - DNA, 25 bp, Homo sapien
ttctttttccactacatatcgacta

SEQ ID NO: 4320080 - DNA, 25 bp, Homo sapien
ccactacatatcgactaagttccat

SEQ ID NO: 4320081 - DNA, 25 bp, Homo sapien
tttccactacatatcgactaagttc

SEQ ID NO: 4320082 - DNA, 25 bp, Homo sapien
tgggaaacgcagtcctaatgaaggc

SEQ ID NO: 4320083 - DNA, 25 bp, Homo sapien
gaaggcaaatattcaaccgaggtgg

SEQ ID NO: 4320084 - DNA, 25 bp, Homo sapien
tacacgcccctgcatagtggaatgc

SEQ ID NO: 4320085 - DNA, 25 bp, Homo sapien
cattagcatcgccaccgtcatgagg

SEQ ID NO: 4320086 - DNA, 25 bp, Homo sapien
agaattcgtgcagcggatgttacaa

SEQ ID NO: 4320087 - DNA, 25 bp, Homo sapien
ccttgattatatctattgtgaacag

SEQ ID NO: 4320088 - DNA, 25 bp, Homo sapien
ctgctgttctttccttgattatatc

SEQ ID NO: 4320089 - DNA, 25 bp, Homo sapien
ttgtgaacaggtttagaattcgtgc

SEQ ID NO: 4320090 - DNA, 25 bp, Homo sapien
tctttgggagtatatccatgagata

SEQ ID NO: 4320091 - DNA, 25 bp, Homo sapien
ctgctctttgggagtatatccatga

SEQ ID NO: 4320092 - DNA, 25 bp, Homo sapien
ttgggagtatatccatgagatattc

SEQ ID NO: 4320093 - DNA, 25 bp, Homo sapien
gctctttgggagtatatccatgaga

SEQ ID NO: 4320094 - DNA, 25 bp, Homo sapien
ggcatcatctctgggacgttcatgc

SEQ ID NO: 4320095 - DNA, 25 bp, Homo sapien
ggtggcatcatctctgggacgttca

SEQ ID NO: 4320096 - DNA, 25 bp, Homo sapien
tcatctctgggacgttcatgcaccc

SEQ ID NO: 4320097 - DNA, 25 bp, Homo sapien
catcatctctgggacgttcatgcac

SEQ ID NO: 4320098 - DNA, 25 bp, Homo sapien
atgtgcagtgacattacaatgggca

SEQ ID NO: 4320099 - DNA, 25 bp, Homo sapien
ttggtccaaacactttcgtcctaca

SEQ ID NO: 4320100 - DNA, 25 bp, Homo sapien
atattggtccaaacactttcgtcct

SEQ ID NO: 4320101 - DNA, 25 bp, Homo sapien
tccaacaatttttgaccttccagtc

SEQ ID NO: 4320102 - DNA, 25 bp, Homo sapien
caaggtggccatctaattatctaat

SEQ ID NO: 4320103 - DNA, 25 bp, Homo sapien
cagaaattgaagctggtttcacaat

SEQ ID NO: 4320104 - DNA, 25 bp, Homo sapien
tcagtttatttattaacttcaacaa

SEQ ID NO: 4320105 - DNA, 25 bp, Homo sapien
taacttcaacaattcttcctcagaa

SEQ ID NO: 4320106 - DNA, 25 bp, Homo sapien
ttcttcctcagaaattgaagctggt

SEQ ID NO: 4320107 - DNA, 25 bp, Homo sapien
tgattccaaaatgccgtgctgtgga

SEQ ID NO: 4320108 - DNA, 25 bp, Homo sapien
tggtgattccaaaatgccgtgctgt

SEQ ID NO: 4320109 - DNA, 25 bp, Homo sapien
ttccaaaatgccgtgctgtggaagg

SEQ ID NO: 4320110 - DNA, 25 bp, Homo sapien
ccaaaatgccgtgctgtggaaggtg

SEQ ID NO: 4320111 - DNA, 25 bp, Homo sapien
caacgcagacatgagggaagccaca

SEQ ID NO: 4320112 - DNA, 25 bp, Homo sapien
agccaacgcagacatgagggaagcc

SEQ ID NO: 4320113 - DNA, 25 bp, Homo sapien
cagttgggcagccaacgcagacatg

SEQ ID NO: 4320114 - DNA, 25 bp, Homo sapien
gagcagttgggcagccaacgcagac

SEQ ID NO: 4320115 - DNA, 25 bp, Homo sapien
tgtcttctgcgtccctcatgctgag

SEQ ID NO: 4320116 - DNA, 25 bp, Homo sapien
cacctgtcttctgcgtccctcatgc

SEQ ID NO: 4320117 - DNA, 25 bp, Homo sapien
cctcatgctgagagctgtagaccgg

SEQ ID NO: 4320118 - DNA, 25 bp, Homo sapien
tccctcatgctgagagctgtagacc

SEQ ID NO: 4320119 - DNA, 25 bp, Homo sapien
tgatatttcctctttatcatcagca

SEQ ID NO: 4320120 - DNA, 25 bp, Homo sapien
ttacacgtattacttcagtttgctg

SEQ ID NO: 4320121 - DNA, 25 bp, Homo sapien
tgtcatactgtttcagtttatctga

SEQ ID NO: 4320122 - DNA, 25 bp, Homo sapien
ttcagtttgctgtttatatttgtca

SEQ ID NO: 4320123 - DNA, 25 bp, Homo sapien
ttttagcaggaacgtggtttcacca

SEQ ID NO: 4320124 - DNA, 25 bp, Homo sapien
ggattgtttcgatctcttgacatca

SEQ ID NO: 4320125 - DNA, 25 bp, Homo sapien
atcagaggctggagttacatttctt

SEQ ID NO: 4320126 - DNA, 25 bp, Homo sapien
tcatcagaggctggagttacatttc

SEQ ID NO: 4320127 - DNA, 25 bp, Homo sapien
cacaggattttactgggagtagggt

SEQ ID NO: 4320128 - DNA, 25 bp, Homo sapien
gctggactctcaatttgatgttatc

SEQ ID NO: 4320129 - DNA, 25 bp, Homo sapien
tagggttagcactgctttggtgtaa

SEQ ID NO: 4320130 - DNA, 25 bp, Homo sapien
aaagtcatgtcattcctagcatggc

SEQ ID NO: 4320131 - DNA, 25 bp, Homo sapien
ctctgtcaggccaggagcggtggct

SEQ ID NO: 4320132 - DNA, 25 bp, Homo sapien
gaggccgaggcaggtggatcatgag

SEQ ID NO: 4320133 - DNA, 25 bp, Homo sapien
gtcaggaaatcaagaccatcctggc

SEQ ID NO: 4320134 - DNA, 25 bp, Homo sapien
cacgcctgtaatcccagcactttgg

SEQ ID NO: 4320135 - DNA, 25 bp, Homo sapien
aggaaattggagttgttccaccaca

SEQ ID NO: 4320136 - DNA, 25 bp, Homo sapien
caattccatccaagtgagcttgctt

SEQ ID NO: 4320137 - DNA, 25 bp, Homo sapien
ttccatccaagtgagcttgcttcat

SEQ ID NO: 4320138 - DNA, 25 bp, Homo sapien
caggaaattggagttgttccaccac

SEQ ID NO: 4320139 - DNA, 25 bp, Homo sapien
tatgggttgagccaaaagcatcatc

SEQ ID NO: 4320140 - DNA, 25 bp, Homo sapien
tagcatttctggacacatgagtctc

SEQ ID NO: 4320141 - DNA, 25 bp, Homo sapien
gatagctgtaactttcatcgctgga

SEQ ID NO: 4320142 - DNA, 25 bp, Homo sapien
taaaacatggctactgaactcagag

SEQ ID NO: 4320143 - DNA, 25 bp, Homo sapien
ggctcatggccataagatttgacaa

SEQ ID NO: 4320144 - DNA, 25 bp, Homo sapien
cttcttgagatcaaactctatgtac

SEQ ID NO: 4320145 - DNA, 25 bp, Homo sapien
aatcagagccacgtctattgtcctg

SEQ ID NO: 4320146 - DNA, 25 bp, Homo sapien
aactctatgtactccctttggctca

SEQ ID NO: 4320147 - DNA, 25 bp, Homo sapien
tcttactaatgtgatcagagttagc

SEQ ID NO: 4320148 - DNA, 25 bp, Homo sapien
tattttacccacagaaattgcttta

SEQ ID NO: 4320149 - DNA, 25 bp, Homo sapien
aactgttgaagtgtactcttactaa

SEQ ID NO: 4320150 - DNA, 25 bp, Homo sapien
ccaagatatacaatgcatgcattgc

SEQ ID NO: 4320151 - DNA, 25 bp, Homo sapien
agtttttgcaggtttatgtgattta

SEQ ID NO: 4320152 - DNA, 25 bp, Homo sapien
tagtttttgcaggtttatgtgattt

SEQ ID NO: 4320153 - DNA, 25 bp, Homo sapien
aattcttctaaggcccttgttgaca

SEQ ID NO: 4320154 - DNA, 25 bp, Homo sapien
gttgacattgaaaagtttcctgctt

SEQ ID NO: 4320155 - DNA, 25 bp, Homo sapien
gaaaagtttcctgcttcgaagatta

SEQ ID NO: 4320156 - DNA, 25 bp, Homo sapien
ctgcttcgaagattaagatggcctt

SEQ ID NO: 4320157 - DNA, 25 bp, Homo sapien
cattcagaaacacgatggtctgtat

SEQ ID NO: 4320158 - DNA, 25 bp, Homo sapien
aacacgatggtctgtattttgcaac

SEQ ID NO: 4320159 - DNA, 25 bp, Homo sapien
cctggctaggatgctgttgctccat

SEQ ID NO: 4320160 - DNA, 25 bp, Homo sapien
gctccatccactttaaacaccacag

SEQ ID NO: 4320161 - DNA, 25 bp, Homo sapien
catcatgactagtctggccacatgg

SEQ ID NO: 4320162 - DNA, 25 bp, Homo sapien
tgatgaagcggtcagaatgaagtca

SEQ ID NO: 4320163 - DNA, 25 bp, Homo sapien
cagtactagttagcagagatttgac

SEQ ID NO: 4320164 - DNA, 25 bp, Homo sapien
tcattattatatggaggtgaacagt

SEQ ID NO: 4320165 - DNA, 25 bp, Homo sapien
caatagaaatagtgggctgccttgt

SEQ ID NO: 4320166 - DNA, 25 bp, Homo sapien
agcaatagaaatagtgggctgcctt

SEQ ID NO: 4320167 - DNA, 25 bp, Homo sapien
gcaatagaaatagtgggctgccttg

SEQ ID NO: 4320168 - DNA, 25 bp, Homo sapien
ccttacagtccagctctatagggag

SEQ ID NO: 4320169 - DNA, 25 bp, Homo sapien
gagtctcttgtaagcttgatccgta

SEQ ID NO: 4320170 - DNA, 25 bp, Homo sapien
tcattctatttcataccagagtctc

SEQ ID NO: 4320171 - DNA, 25 bp, Homo sapien
atgttctttactggccaccttacag

SEQ ID NO: 4320172 - DNA, 25 bp, Homo sapien
tttggatgataatatgtaggcccac

SEQ ID NO: 4320173 - DNA, 25 bp, Homo sapien
gatgtttggatgataatatgtaggc

SEQ ID NO: 4320174 - DNA, 25 bp, Homo sapien
ggatgataatatgtaggcccacata

SEQ ID NO: 4320175 - DNA, 25 bp, Homo sapien
agaaatagcagcagatgtttggatg

SEQ ID NO: 4320176 - DNA, 25 bp, Homo sapien
tgggttcagtcagagatctagggaa

SEQ ID NO: 4320177 - DNA, 25 bp, Homo sapien
ctgggttcagtcagagatctaggga

SEQ ID NO: 4320178 - DNA, 25 bp, Homo sapien
gttcagtcagagatctagggaatgt

SEQ ID NO: 4320179 - DNA, 25 bp, Homo sapien
ggttcagtcagagatctagggaatg

SEQ ID NO: 4320180 - DNA, 25 bp, Homo sapien
tgtccggaagacttttgacaatcat

SEQ ID NO: 4320181 - DNA, 25 bp, Homo sapien
tttgcacagtggcaacaatgtccgg

SEQ ID NO: 4320182 - DNA, 25 bp, Homo sapien
tggtctcatgatcaatttgcacagt

SEQ ID NO: 4320183 - DNA, 25 bp, Homo sapien
caacaatgtccggaagacttttgac

SEQ ID NO: 4320184 - DNA, 25 bp, Homo sapien
aatgctatgtgaatatacccagtgg

SEQ ID NO: 4320185 - DNA, 25 bp, Homo sapien
tggtgaagatacttaatgctatgtg

SEQ ID NO: 4320186 - DNA, 25 bp, Homo sapien
gctatgtgaatatacccagtggtca

SEQ ID NO: 4320187 - DNA, 25 bp, Homo sapien
gacagttggtgaagatacttaatgc

SEQ ID NO: 4320188 - DNA, 25 bp, Homo sapien
cctgtctaagattactgaagggtat

SEQ ID NO: 4320189 - DNA, 25 bp, Homo sapien
tgaagggtatagtggtttgacacat

SEQ ID NO: 4320190 - DNA, 25 bp, Homo sapien
ttactgaagggtatagtggtttgac

SEQ ID NO: 4320191 - DNA, 25 bp, Homo sapien
ctaagattactgaagggtatagtgg

SEQ ID NO: 4320192 - DNA, 25 bp, Homo sapien
gagcgaattgtgcttttctaatgcc

SEQ ID NO: 4320193 - DNA, 25 bp, Homo sapien
ttcacgtcgaggtcatgaccaggaa

SEQ ID NO: 4320194 - DNA, 25 bp, Homo sapien
ttctaatgccttcacgtcgaggtca

SEQ ID NO: 4320195 - DNA, 25 bp, Homo sapien
ttttctgactgttcagtgagcgaat

SEQ ID NO: 4320196 - DNA, 25 bp, Homo sapien
tatttgtctcctgtagcattcatgg

SEQ ID NO: 4320197 - DNA, 25 bp, Homo sapien
ttttatatccatagtggcactcaat

SEQ ID NO: 4320198 - DNA, 25 bp, Homo sapien
ggcactcaatagtcaaaaacatctt

SEQ ID NO: 4320199 - DNA, 25 bp, Homo sapien
tgtcataaatctaacaccttattgg

SEQ ID NO: 4320200 - DNA, 25 bp, Homo sapien
tgatgctgaatataatgtctacatg

SEQ ID NO: 4320201 - DNA, 25 bp, Homo sapien
taaaacactagaaattttgatgctg

SEQ ID NO: 4320202 - DNA, 25 bp, Homo sapien
aattattcagtgcacacatttcagg

SEQ ID NO: 4320203 - DNA, 25 bp, Homo sapien
tttcaggagctatgtaaaatgtgac

SEQ ID NO: 4320204 - DNA, 25 bp, Homo sapien
tggttttgacgaaaatcagcatccc

SEQ ID NO: 4320205 - DNA, 25 bp, Homo sapien
ggttgacttcttccaagtgcctaga

SEQ ID NO: 4320206 - DNA, 25 bp, Homo sapien
agtgcctagaccttcaaagatgttg

SEQ ID NO: 4320207 - DNA, 25 bp, Homo sapien
aatccctccaggatttagctgagta

SEQ ID NO: 4320208 - DNA, 25 bp, Homo sapien
cctccactcttgatatgggtatgca

SEQ ID NO: 4320209 - DNA, 25 bp, Homo sapien
cactcttgatatgggtatgcaactc

SEQ ID NO: 4320210 - DNA, 25 bp, Homo sapien
atgggacctccactcttgatatggg

SEQ ID NO: 4320211 - DNA, 25 bp, Homo sapien
ttccgttcatgggacctccactctt

SEQ ID NO: 4320212 - DNA, 25 bp, Homo sapien
gaaggttctggccacaagctttacc

SEQ ID NO: 4320213 - DNA, 25 bp, Homo sapien
aaggttctggccacaagctttacca

SEQ ID NO: 4320214 - DNA, 25 bp, Homo sapien
aggttctggccacaagctttaccac

SEQ ID NO: 4320215 - DNA, 25 bp, Homo sapien
cagaaggttctggccacaagcttta

SEQ ID NO: 4320216 - DNA, 25 bp, Homo sapien
cagggaatgtatccaacattgttga

SEQ ID NO: 4320217 - DNA, 25 bp, Homo sapien
cattgttgacactccacttcttaca

SEQ ID NO: 4320218 - DNA, 25 bp, Homo sapien
tccaacattgttgacactccacttc

SEQ ID NO: 4320219 - DNA, 25 bp, Homo sapien
ccacagggaatgtatccaacattgt

SEQ ID NO: 4320220 - DNA, 25 bp, Homo sapien
tgaagatctcttcttgatagaaaac

SEQ ID NO: 4320221 - DNA, 25 bp, Homo sapien
ccacaagtttgattcagggactagc

SEQ ID NO: 4320222 - DNA, 25 bp, Homo sapien
ggtctattccagttctacattcagg

SEQ ID NO: 4320223 - DNA, 25 bp, Homo sapien
ggatcagggaaatggccacaagttt

SEQ ID NO: 4320224 - DNA, 25 bp, Homo sapien
tatgaaggctgtgcaaactgccaac

SEQ ID NO: 4320225 - DNA, 25 bp, Homo sapien
gctggagacttagtcctggatccca

SEQ ID NO: 4320226 - DNA, 25 bp, Homo sapien
tggatcccagacaaacaaaccttgg

SEQ ID NO: 4320227 - DNA, 25 bp, Homo sapien
caatcactggaaggtacactgctca

SEQ ID NO: 4320228 - DNA, 25 bp, Homo sapien
ggccagaagccactaatcagatgat

SEQ ID NO: 4320229 - DNA, 25 bp, Homo sapien
tagtacatggagcaccttgatacat

SEQ ID NO: 4320230 - DNA, 25 bp, Homo sapien
taattaaatctgatggcagagcgac

SEQ ID NO: 4320231 - DNA, 25 bp, Homo sapien
ccatgaattggcaacatctgttcca

SEQ ID NO: 4320232 - DNA, 25 bp, Homo sapien
tactgaattagcaaggtgtaccaaa

SEQ ID NO: 4320233 - DNA, 25 bp, Homo sapien
taaatgggccaatagctgaatattg

SEQ ID NO: 4320234 - DNA, 25 bp, Homo sapien
tgttaaatgggccaatagctgaata

SEQ ID NO: 4320235 - DNA, 25 bp, Homo sapien
gttaaatgggccaatagctgaatat

SEQ ID NO: 4320236 - DNA, 25 bp, Homo sapien
aatgggccaatagctgaatattgtc

SEQ ID NO: 4320237 - DNA, 25 bp, Homo sapien
cagggagtgggacattcaaacttct

SEQ ID NO: 4320238 - DNA, 25 bp, Homo sapien
catagagcctctagaaactcctgaa

SEQ ID NO: 4320239 - DNA, 25 bp, Homo sapien
ccttcagtatccaaacagggagtgg

SEQ ID NO: 4320240 - DNA, 25 bp, Homo sapien
gcctttgacaatgcatgcacctcac

SEQ ID NO: 4320241 - DNA, 25 bp, Homo sapien
ctcatcagtccctaacttgtgggaa

SEQ ID NO: 4320242 - DNA, 25 bp, Homo sapien
agacataatggagtaaagtctgtga

SEQ ID NO: 4320243 - DNA, 25 bp, Homo sapien
tcatcagtccctaacttgtgggaag

SEQ ID NO: 4320244 - DNA, 25 bp, Homo sapien
tggagtaaagtctgtgatgaaggca

SEQ ID NO: 4320245 - DNA, 25 bp, Homo sapien
cctcaattccttgtaaatgggtcat

SEQ ID NO: 4320246 - DNA, 25 bp, Homo sapien
ctcatcaatgatgtgtttctgaata

SEQ ID NO: 4320247 - DNA, 25 bp, Homo sapien
gtagcattggttcattgttttgttg

SEQ ID NO: 4320248 - DNA, 25 bp, Homo sapien
gaaagatgtagcattggttcattgt

SEQ ID NO: 4320249 - DNA, 25 bp, Homo sapien
tctgagtcatcaagattataattgt

SEQ ID NO: 4320250 - DNA, 25 bp, Homo sapien
atgctctccatgctctagtgtccat

SEQ ID NO: 4320251 - DNA, 25 bp, Homo sapien
ccccttgatgtgtatgctctccatg

SEQ ID NO: 4320252 - DNA, 25 bp, Homo sapien
gtcctcgtcttgaccccttgatgtg

SEQ ID NO: 4320253 - DNA, 25 bp, Homo sapien
agtgtcctcgtcttgaccccttgat

SEQ ID NO: 4320254 - DNA, 25 bp, Homo sapien
taacaattagtgtagaatattgttc

SEQ ID NO: 4320255 - DNA, 25 bp, Homo sapien
caattagtgtagaatattgttcgga

SEQ ID NO: 4320256 - DNA, 25 bp, Homo sapien
tagaatattgttcggaaagtatcat

SEQ ID NO: 4320257 - DNA, 25 bp, Homo sapien
tagtgtagaatattgttcggaaagt

SEQ ID NO: 4320258 - DNA, 25 bp, Homo sapien
gcttttgcccgtaaatgttatgtgg

SEQ ID NO: 4320259 - DNA, 25 bp, Homo sapien
taacgtccagatgaaaactgtggcc

SEQ ID NO: 4320260 - DNA, 25 bp, Homo sapien
taaattgaatgtgagagacgcagtc

SEQ ID NO: 4320261 - DNA, 25 bp, Homo sapien
tggccaccggttcctacccagcatt

SEQ ID NO: 4320262 - DNA, 25 bp, Homo sapien
caatcatgtgtcaacaagggcaggg

SEQ ID NO: 4320263 - DNA, 25 bp, Homo sapien
tgtaccaatggcagtgtcacagcaa

SEQ ID NO: 4320264 - DNA, 25 bp, Homo sapien
gaagcacttctttggagtgatggca

SEQ ID NO: 4320265 - DNA, 25 bp, Homo sapien
gatggcagcaggatcagtgttcatt

SEQ ID NO: 4320266 - DNA, 25 bp, Homo sapien
tttccactgtcatagagtgtagtga

SEQ ID NO: 4320267 - DNA, 25 bp, Homo sapien
tacttaaactcttgacttgagttcc

SEQ ID NO: 4320268 - DNA, 25 bp, Homo sapien
tgtagtgatttgactgaacttagtc

SEQ ID NO: 4320269 - DNA, 25 bp, Homo sapien
tacaagcgttctctgattctcaggg

SEQ ID NO: 4320270 - DNA, 25 bp, Homo sapien
caacataccacatggatccctgctt

SEQ ID NO: 4320271 - DNA, 25 bp, Homo sapien
acatggatccctgcttaaccttttg

SEQ ID NO: 4320272 - DNA, 25 bp, Homo sapien
cataccacatggatccctgcttaac

SEQ ID NO: 4320273 - DNA, 25 bp, Homo sapien
taccacatggatccctgcttaacct

SEQ ID NO: 4320274 - DNA, 25 bp, Homo sapien
aagcgttctgtagcctagaaacata

SEQ ID NO: 4320275 - DNA, 25 bp, Homo sapien
gctttcttccaaagcgttctgtagc

SEQ ID NO: 4320276 - DNA, 25 bp, Homo sapien
tcttccaaagcgttctgtagcctag

SEQ ID NO: 4320277 - DNA, 25 bp, Homo sapien
tccaaagcgttctgtagcctagaaa

SEQ ID NO: 4320278 - DNA, 25 bp, Homo sapien
atgagctacagacaatcataatgcc

SEQ ID NO: 4320279 - DNA, 25 bp, Homo sapien
cataataatcatatgactgacgcat

SEQ ID NO: 4320280 - DNA, 25 bp, Homo sapien
gaatcttagctgagccataataatc

SEQ ID NO: 4320281 - DNA, 25 bp, Homo sapien
cataatgccaaagaggcctatggga

SEQ ID NO: 4320282 - DNA, 25 bp, Homo sapien
tttttagacgatgggtgttgagctt

SEQ ID NO: 4320283 - DNA, 25 bp, Homo sapien
ttttggtctgatgtaggcttatgcg

SEQ ID NO: 4320284 - DNA, 25 bp, Homo sapien
taaggagctcagttgtatgtttggg

SEQ ID NO: 4320285 - DNA, 25 bp, Homo sapien
attggtccaattgagtgtaaggagc

SEQ ID NO: 4320286 - DNA, 25 bp, Homo sapien
ctcctaagtgtaagttgggtgcttt

SEQ ID NO: 4320287 - DNA, 25 bp, Homo sapien
ttcacctctggacgtttgggaagca

SEQ ID NO: 4320288 - DNA, 25 bp, Homo sapien
tggtcccagtgttattatcacagga

SEQ ID NO: 4320289 - DNA, 25 bp, Homo sapien
tcagtggtcaatcaaagtctttaga

SEQ ID NO: 4320290 - DNA, 25 bp, Homo sapien
cagtaaagcaaagtgcctcctggaa

SEQ ID NO: 4320291 - DNA, 25 bp, Homo sapien
gaggaggaggggttgtcccactgaa

SEQ ID NO: 4320292 - DNA, 25 bp, Homo sapien
gaggaggggttgtcccactgaatac

SEQ ID NO: 4320293 - DNA, 25 bp, Homo sapien
aggaggaggggttgtcccactgaat

SEQ ID NO: 4320294 - DNA, 25 bp, Homo sapien
ggaggaggggttgtcccactgaata

SEQ ID NO: 4320295 - DNA, 25 bp, Homo sapien
gaagaatagcccttgttcactgtct

SEQ ID NO: 4320296 - DNA, 25 bp, Homo sapien
aagaatagcccttgttcactgtctt

SEQ ID NO: 4320297 - DNA, 25 bp, Homo sapien
ggaagaatagcccttgttcactgtc

SEQ ID NO: 4320298 - DNA, 25 bp, Homo sapien
gcttcttcaccttctacaccttcac

SEQ ID NO: 4320299 - DNA, 25 bp, Homo sapien
atactctggcttcttcaccttctac

SEQ ID NO: 4320300 - DNA, 25 bp, Homo sapien
cttcaccttctacaccttcacctag

SEQ ID NO: 4320301 - DNA, 25 bp, Homo sapien
tcatactctggcttcttcaccttct

SEQ ID NO: 4320302 - DNA, 25 bp, Homo sapien
ggagagagactcatatgggcacttg

SEQ ID NO: 4320303 - DNA, 25 bp, Homo sapien
gtttttaatcctctttcagtactga

SEQ ID NO: 4320304 - DNA, 25 bp, Homo sapien
tttttaatcctctttcagtactgac

SEQ ID NO: 4320305 - DNA, 25 bp, Homo sapien
ttgctttcggttgtcacactggttt

SEQ ID NO: 4320306 - DNA, 25 bp, Homo sapien
ctgtcgcctttttgctttcggttgt

SEQ ID NO: 4320307 - DNA, 25 bp, Homo sapien
tttgctttcaagattagatgtaatg

SEQ ID NO: 4320308 - DNA, 25 bp, Homo sapien
cattcctctgtaatagccagtgatc

SEQ ID NO: 4320309 - DNA, 25 bp, Homo sapien
gatcgtagtaagtttggtaagaaca

SEQ ID NO: 4320310 - DNA, 25 bp, Homo sapien
acacatatctgtggcgtttgctttc

SEQ ID NO: 4320311 - DNA, 25 bp, Homo sapien
tgaagttctgtatctcaggtgatgc

SEQ ID NO: 4320312 - DNA, 25 bp, Homo sapien
gaagttctgtatctcaggtgatgcc

SEQ ID NO: 4320313 - DNA, 25 bp, Homo sapien
agttctgtatctcaggtgatgccat

SEQ ID NO: 4320314 - DNA, 25 bp, Homo sapien
aagttctgtatctcaggtgatgcca

SEQ ID NO: 4320315 - DNA, 25 bp, Homo sapien
gccatggccgcgacagaggagcgga

SEQ ID NO: 4320316 - DNA, 25 bp, Homo sapien
gccgaggccatggccgcgacagagg

SEQ ID NO: 4320317 - DNA, 25 bp, Homo sapien
aggccatggccgcgacagaggagcg

SEQ ID NO: 4320318 - DNA, 25 bp, Homo sapien
catggccgcgacagaggagcggagc

SEQ ID NO: 4320319 - DNA, 25 bp, Homo sapien
ttgttgtcgactaaccccctctagc

SEQ ID NO: 4320320 - DNA, 25 bp, Homo sapien
tcctttcggttcctggcctgatgag

SEQ ID NO: 4320321 - DNA, 25 bp, Homo sapien
tagcgccgaactggcggcatccgag

SEQ ID NO: 4320322 - DNA, 25 bp, Homo sapien
tgcgagcggtgcaggcatttttgtt

SEQ ID NO: 4320323 - DNA, 25 bp, Homo sapien
ctgaatcccagcgtcaaggctgcga

SEQ ID NO: 4320324 - DNA, 25 bp, Homo sapien
gctgcgacgatgctcgtgacctcca

SEQ ID NO: 4320325 - DNA, 25 bp, Homo sapien
cagcgtcaaggctgcgacgatgctc

SEQ ID NO: 4320326 - DNA, 25 bp, Homo sapien
atgctcgtgacctccaccgcgaagt

SEQ ID NO: 4320327 - DNA, 25 bp, Homo sapien
aaggcgacgcaaggacctcggcgat

SEQ ID NO: 4320328 - DNA, 25 bp, Homo sapien
aaggcggctactgcgctgagccgct

SEQ ID NO: 4320329 - DNA, 25 bp, Homo sapien
ttttctacaactggaagccgcgaag

SEQ ID NO: 4320330 - DNA, 25 bp, Homo sapien
ttcctcccggcgctttgcttttcta

SEQ ID NO: 4320331 - DNA, 25 bp, Homo sapien
cctcttaaaacggtcggcgccgctg

SEQ ID NO: 4320332 - DNA, 25 bp, Homo sapien
aggcggtgtcgggaactgactcctc

SEQ ID NO: 4320333 - DNA, 25 bp, Homo sapien
gctaagtgcttgtgggactaagggc

SEQ ID NO: 4320334 - DNA, 25 bp, Homo sapien
gctgctctgaaatgggcggctaagt

SEQ ID NO: 4320335 - DNA, 25 bp, Homo sapien
gccagagtgcggcgcagacgcggca

SEQ ID NO: 4320336 - DNA, 25 bp, Homo sapien
cggccagagtgcggcgcagacgcgg

SEQ ID NO: 4320337 - DNA, 25 bp, Homo sapien
gcgcagacgcggcagagttggaggt

SEQ ID NO: 4320338 - DNA, 25 bp, Homo sapien
ggccagagtgcggcgcagacgcggc

SEQ ID NO: 4320339 - DNA, 25 bp, Homo sapien
ctaaatgtctttaaacggtagcgtg

SEQ ID NO: 4320340 - DNA, 25 bp, Homo sapien
aatgtctttaaacggtagcgtgagc

SEQ ID NO: 4320341 - DNA, 25 bp, Homo sapien
aacggtagcgtgagcatcagctgca

SEQ ID NO: 4320342 - DNA, 25 bp, Homo sapien
tctttaaacggtagcgtgagcatca

SEQ ID NO: 4320343 - DNA, 25 bp, Homo sapien
acttctggctctttggtggtcgctc

SEQ ID NO: 4320344 - DNA, 25 bp, Homo sapien
caggctccgtggcacagacttaatg

SEQ ID NO: 4320345 - DNA, 25 bp, Homo sapien
agggtgctcccgctgtaccccgtga

SEQ ID NO: 4320346 - DNA, 25 bp, Homo sapien
gtgaccagttatcagtctttcccca

SEQ ID NO: 4320347 - DNA, 25 bp, Homo sapien
ctggaaataaaccccggaatcagat

SEQ ID NO: 4320348 - DNA, 25 bp, Homo sapien
gaatggcttgtccacctgtcctttg

SEQ ID NO: 4320349 - DNA, 25 bp, Homo sapien
aaccccggaatcagatattcgacca

SEQ ID NO: 4320350 - DNA, 25 bp, Homo sapien
gtttttatgagtgcttaggaatggc

SEQ ID NO: 4320351 - DNA, 25 bp, Homo sapien
gcaagagtgatagcagcagttttag

SEQ ID NO: 4320352 - DNA, 25 bp, Homo sapien
gaccttgggcctgtagtcgtgagca

SEQ ID NO: 4320353 - DNA, 25 bp, Homo sapien
taaaatgccttcgttattctggacc

SEQ ID NO: 4320354 - DNA, 25 bp, Homo sapien
cctgtagtcgtgagcaagagtgata

SEQ ID NO: 4320355 - DNA, 25 bp, Homo sapien
tctaaaggttctcacacactgaata

SEQ ID NO: 4320356 - DNA, 25 bp, Homo sapien
tttctaaaggttctcacacactgaa

SEQ ID NO: 4320357 - DNA, 25 bp, Homo sapien
ctttctaaaggttctcacacactga

SEQ ID NO: 4320358 - DNA, 25 bp, Homo sapien
taaaggttctcacacactgaatata

SEQ ID NO: 4320359 - DNA, 25 bp, Homo sapien
tctttatcttcactagttttagttg

SEQ ID NO: 4320360 - DNA, 25 bp, Homo sapien
tatcttcactagttttagttgttaa

SEQ ID NO: 4320361 - DNA, 25 bp, Homo sapien
catctgttgagatatctttatcttc

SEQ ID NO: 4320362 - DNA, 25 bp, Homo sapien
tcatctgttgagatatctttatctt

SEQ ID NO: 4320363 - DNA, 25 bp, Homo sapien
tccttgtttacttgcactatttggc

SEQ ID NO: 4320364 - DNA, 25 bp, Homo sapien
tgcactatttggctaacctgcagtt

SEQ ID NO: 4320365 - DNA, 25 bp, Homo sapien
ctatttggctaacctgcagtttgtt

SEQ ID NO: 4320366 - DNA, 25 bp, Homo sapien
gtttacttgcactatttggctaacc

SEQ ID NO: 4320367 - DNA, 25 bp, Homo sapien
cctgagctttatgatccatggtgtt

SEQ ID NO: 4320368 - DNA, 25 bp, Homo sapien
cctttctcaaaggtagacacctgag

SEQ ID NO: 4320369 - DNA, 25 bp, Homo sapien
caaaggtagacacctgagctttatg

SEQ ID NO: 4320370 - DNA, 25 bp, Homo sapien
gagctttatgatccatggtgttatc

SEQ ID NO: 4320371 - DNA, 25 bp, Homo sapien
tgttgcttctcaggctgacacttac

SEQ ID NO: 4320372 - DNA, 25 bp, Homo sapien
ttgactcaatcagattgcagtcttc

SEQ ID NO: 4320373 - DNA, 25 bp, Homo sapien
ccttggttgttgcttctcaggctga

SEQ ID NO: 4320374 - DNA, 25 bp, Homo sapien
gactcaatcagattgcagtcttctt

SEQ ID NO: 4320375 - DNA, 25 bp, Homo sapien
tttaggatctgccagtctcttagaa

SEQ ID NO: 4320376 - DNA, 25 bp, Homo sapien
aggatctgccagtctcttagaagaa

SEQ ID NO: 4320377 - DNA, 25 bp, Homo sapien
ttatttaggatctgccagtctctta

SEQ ID NO: 4320378 - DNA, 25 bp, Homo sapien
taggatctgccagtctcttagaaga

SEQ ID NO: 4320379 - DNA, 25 bp, Homo sapien
tagacatgatgatctaaccaaaaag

SEQ ID NO: 4320380 - DNA, 25 bp, Homo sapien
gatttctgtactgcataagaagcca

SEQ ID NO: 4320381 - DNA, 25 bp, Homo sapien
accaaaaagacatggctgatgagaa

SEQ ID NO: 4320382 - DNA, 25 bp, Homo sapien
taaatttagcatgggagagtagaca

SEQ ID NO: 4320383 - DNA, 25 bp, Homo sapien
cctgagacatacttttgtgtttgat

SEQ ID NO: 4320384 - DNA, 25 bp, Homo sapien
ttcctgagacatacttttgtgtttg

SEQ ID NO: 4320385 - DNA, 25 bp, Homo sapien
aagacacagatttcctgagacatac

SEQ ID NO: 4320386 - DNA, 25 bp, Homo sapien
cacctgaagacacagatttcctgag

SEQ ID NO: 4320387 - DNA, 25 bp, Homo sapien
cactttggtgtacactcctactttc

SEQ ID NO: 4320388 - DNA, 25 bp, Homo sapien
cacttgtccacttggctgggtgcca

SEQ ID NO: 4320389 - DNA, 25 bp, Homo sapien
aacatattggactgcttcagattcc

SEQ ID NO: 4320390 - DNA, 25 bp, Homo sapien
tactttctggtggatccagttgaac

SEQ ID NO: 4320391 - DNA, 25 bp, Homo sapien
tcatttgagctaatctcagttgctt

SEQ ID NO: 4320392 - DNA, 25 bp, Homo sapien
gttgcttctatggtatcaacaatcg

SEQ ID NO: 4320393 - DNA, 25 bp, Homo sapien
aatcgttgtgcttgaggaagacatc

SEQ ID NO: 4320394 - DNA, 25 bp, Homo sapien
ccactctcatttgagctaatctcag

SEQ ID NO: 4320395 - DNA, 25 bp, Homo sapien
tctctggcttgttaacaattaaagc

SEQ ID NO: 4320396 - DNA, 25 bp, Homo sapien
ttcagacaatagtactcaaacgtgt

SEQ ID NO: 4320397 - DNA, 25 bp, Homo sapien
tatcagttaaattacaggttgctga

SEQ ID NO: 4320398 - DNA, 25 bp, Homo sapien
tctactaccatatgaatagatagga

SEQ ID NO: 4320399 - DNA, 25 bp, Homo sapien
cagaatccacaacatgcactggcag

SEQ ID NO: 4320400 - DNA, 25 bp, Homo sapien
taactccaggtgtaaggcttcagcc

SEQ ID NO: 4320401 - DNA, 25 bp, Homo sapien
gattctaatggccaggggattgtag

SEQ ID NO: 4320402 - DNA, 25 bp, Homo sapien
cacagcccaggaaagctaactccag

SEQ ID NO: 4320403 - DNA, 25 bp, Homo sapien
tacatttgttctcctttgtactctg

SEQ ID NO: 4320404 - DNA, 25 bp, Homo sapien
gtactctgcactaaggaatgatgga

SEQ ID NO: 4320405 - DNA, 25 bp, Homo sapien
tttgtactctgcactaaggaatgat

SEQ ID NO: 4320406 - DNA, 25 bp, Homo sapien
catttgttctcctttgtactctgca

SEQ ID NO: 4320407 - DNA, 25 bp, Homo sapien
ttcacgagaatggactgagaagggt

SEQ ID NO: 4320408 - DNA, 25 bp, Homo sapien
tctaatctcaaaccaaggaggaccc

SEQ ID NO: 4320409 - DNA, 25 bp, Homo sapien
ggctgagtgcccctccattcacgag

SEQ ID NO: 4320410 - DNA, 25 bp, Homo sapien
gaaaagatcatggtgtgggtccctg

SEQ ID NO: 4320411 - DNA, 25 bp, Homo sapien
cctcctctaatttctaatctcttta

SEQ ID NO: 4320412 - DNA, 25 bp, Homo sapien
tctttaattcttcataatatgccac

SEQ ID NO: 4320413 - DNA, 25 bp, Homo sapien
aatatgccactgtctggttattcat

SEQ ID NO: 4320414 - DNA, 25 bp, Homo sapien
taattcttcataatatgccactgtc

SEQ ID NO: 4320415 - DNA, 25 bp, Homo sapien
tgttcacttctgagccaaatctcat

SEQ ID NO: 4320416 - DNA, 25 bp, Homo sapien
tctaatgttcacttctgagccaaat

SEQ ID NO: 4320417 - DNA, 25 bp, Homo sapien
aatgttcacttctgagccaaatctc

SEQ ID NO: 4320418 - DNA, 25 bp, Homo sapien
taatgttcacttctgagccaaatct

SEQ ID NO: 4320419 - DNA, 25 bp, Homo sapien
ggactgtcactgtgcttttttgacc

SEQ ID NO: 4320420 - DNA, 25 bp, Homo sapien
gactgtcactgtgcttttttgacct

SEQ ID NO: 4320421 - DNA, 25 bp, Homo sapien
gggactgtcactgtgcttttttgac

SEQ ID NO: 4320422 - DNA, 25 bp, Homo sapien
ctgtcactgtgcttttttgaccttg

SEQ ID NO: 4320423 - DNA, 25 bp, Homo sapien
gaatcccatgtagatctcccttcta

SEQ ID NO: 4320424 - DNA, 25 bp, Homo sapien
tattccatgagctcagaatcccatg

SEQ ID NO: 4320425 - DNA, 25 bp, Homo sapien
cccttctagttggtaacagtgtatt

SEQ ID NO: 4320426 - DNA, 25 bp, Homo sapien
gaatcccatgctacagaatcccatg

SEQ ID NO: 4320427 - DNA, 25 bp, Homo sapien
ttagcccgagtactatagaagtccc

SEQ ID NO: 4320428 - DNA, 25 bp, Homo sapien
aggttagctccatattctgaagtgc

SEQ ID NO: 4320429 - DNA, 25 bp, Homo sapien
agaagtccctcccagttactacaga

SEQ ID NO: 4320430 - DNA, 25 bp, Homo sapien
tgtggcatacaagcactctggattg

SEQ ID NO: 4320431 - DNA, 25 bp, Homo sapien
caatgaaagcatgcagactcagcat

SEQ ID NO: 4320432 - DNA, 25 bp, Homo sapien
ctgtgttccctccagcaatgaaagc

SEQ ID NO: 4320433 - DNA, 25 bp, Homo sapien
gcaatgaaagcatgcagactcagca

SEQ ID NO: 4320434 - DNA, 25 bp, Homo sapien
tgttccctccagcaatgaaagcatg

SEQ ID NO: 4320435 - DNA, 25 bp, Homo sapien
gatttaggggtattggcctgcacac

SEQ ID NO: 4320436 - DNA, 25 bp, Homo sapien
cagcagaaggattttgactcagact

SEQ ID NO: 4320437 - DNA, 25 bp, Homo sapien
agagtgtatctgagggccgctgaca

SEQ ID NO: 4320438 - DNA, 25 bp, Homo sapien
catgggagctgagagtgtatctgag

SEQ ID NO: 4320439 - DNA, 25 bp, Homo sapien
ctgtgagtccgagtttgtgtctcca

SEQ ID NO: 4320440 - DNA, 25 bp, Homo sapien
gagtccgagtttgtgtctccactcc

SEQ ID NO: 4320441 - DNA, 25 bp, Homo sapien
tgtgagtccgagtttgtgtctccac

SEQ ID NO: 4320442 - DNA, 25 bp, Homo sapien
tccgagtttgtgtctccactcccat

SEQ ID NO: 4320443 - DNA, 25 bp, Homo sapien
aaatgtagtaggcagtggatcaacc

SEQ ID NO: 4320444 - DNA, 25 bp, Homo sapien
taggatagcaggctcgaagcatgac

SEQ ID NO: 4320445 - DNA, 25 bp, Homo sapien
gattcacctggcctatcaaagggac

SEQ ID NO: 4320446 - DNA, 25 bp, Homo sapien
gcactcgggcatatttggattcacc

SEQ ID NO: 4320447 - DNA, 25 bp, Homo sapien
tttttggccctcagttgtttcatct

SEQ ID NO: 4320448 - DNA, 25 bp, Homo sapien
aattagccagatatggtggcccaca

SEQ ID NO: 4320449 - DNA, 25 bp, Homo sapien
aatcccaactacttggaaggctgag

SEQ ID NO: 4320450 - DNA, 25 bp, Homo sapien
gccagatatggtggcccacatctgt

SEQ ID NO: 4320451 - DNA, 25 bp, Homo sapien
ttagccagatatggtggcccacatc

SEQ ID NO: 4320452 - DNA, 25 bp, Homo sapien
gaaggattcccgctaaatattgagt

SEQ ID NO: 4320453 - DNA, 25 bp, Homo sapien
taaatattgagttttccaatggtaa

SEQ ID NO: 4320454 - DNA, 25 bp, Homo sapien
cacaaccacccgtggttggaggcat

SEQ ID NO: 4320455 - DNA, 25 bp, Homo sapien
tcaaacaatgtagcatgaaggattc

SEQ ID NO: 4320456 - DNA, 25 bp, Homo sapien
ttagtagctatagctgcttgaaatc

SEQ ID NO: 4320457 - DNA, 25 bp, Homo sapien
agtagctatagctgcttgaaatctt

SEQ ID NO: 4320458 - DNA, 25 bp, Homo sapien
tagtagctatagctgcttgaaatct

SEQ ID NO: 4320459 - DNA, 25 bp, Homo sapien
gaccagtatgacctacttctcacga

SEQ ID NO: 4320460 - DNA, 25 bp, Homo sapien
cacgaattagatatgccagggtaac

SEQ ID NO: 4320461 - DNA, 25 bp, Homo sapien
ctgagaaacatggtggaactgctga

SEQ ID NO: 4320462 - DNA, 25 bp, Homo sapien
gaccataaaaggcactcacaccaag

SEQ ID NO: 4320463 - DNA, 25 bp, Homo sapien
aggaaatttcacaaatatagtggtc

SEQ ID NO: 4320464 - DNA, 25 bp, Homo sapien
cttgcagactccatttttaggaaat

SEQ ID NO: 4320465 - DNA, 25 bp, Homo sapien
ttttcttgcagactccatttttagg

SEQ ID NO: 4320466 - DNA, 25 bp, Homo sapien
atattttcttgcagactccattttt

SEQ ID NO: 4320467 - DNA, 25 bp, Homo sapien
ccccaacaggagcaccaaattgaac

SEQ ID NO: 4320468 - DNA, 25 bp, Homo sapien
ttcccccaacaggagcaccaaattg

SEQ ID NO: 4320469 - DNA, 25 bp, Homo sapien
tcccccaacaggagcaccaaattga

SEQ ID NO: 4320470 - DNA, 25 bp, Homo sapien
ccaacaggagcaccaaattgaacaa

SEQ ID NO: 4320471 - DNA, 25 bp, Homo sapien
tgtgacccagcgcattcccagtggt

SEQ ID NO: 4320472 - DNA, 25 bp, Homo sapien
cagcgcattcccagtggtggggcca

SEQ ID NO: 4320473 - DNA, 25 bp, Homo sapien
gtgacccagcgcattcccagtggtg

SEQ ID NO: 4320474 - DNA, 25 bp, Homo sapien
tgaaagttaacggattaatctcttc

SEQ ID NO: 4320475 - DNA, 25 bp, Homo sapien
aacggattaatctcttctttcagaa

SEQ ID NO: 4320476 - DNA, 25 bp, Homo sapien
gttaacggattaatctcttctttca

SEQ ID NO: 4320477 - DNA, 25 bp, Homo sapien
caacattgaaagttaacggattaat

SEQ ID NO: 4320478 - DNA, 25 bp, Homo sapien
ttctctcaggttgatttaggcttta

SEQ ID NO: 4320479 - DNA, 25 bp, Homo sapien
tctcaggttgatttaggctttaaac

SEQ ID NO: 4320480 - DNA, 25 bp, Homo sapien
gttgatttaggctttaaacagaaga

SEQ ID NO: 4320481 - DNA, 25 bp, Homo sapien
caggttgatttaggctttaaacaga

SEQ ID NO: 4320482 - DNA, 25 bp, Homo sapien
gacacaaagactacgtccattaagg

SEQ ID NO: 4320483 - DNA, 25 bp, Homo sapien
gactacgtccattaaggaagattca

SEQ ID NO: 4320484 - DNA, 25 bp, Homo sapien
caaagactacgtccattaaggaaga

SEQ ID NO: 4320485 - DNA, 25 bp, Homo sapien
tgtctgacacaaagactacgtccat

SEQ ID NO: 4320486 - DNA, 25 bp, Homo sapien
cctatgcttttgagacctattcata

SEQ ID NO: 4320487 - DNA, 25 bp, Homo sapien
aaaatgattgcctggactaatgtcc

SEQ ID NO: 4320488 - DNA, 25 bp, Homo sapien
ctatgacagaaccatgctgctttgg

SEQ ID NO: 4320489 - DNA, 25 bp, Homo sapien
tcctcaaaactgcttcagcgatttg

SEQ ID NO: 4320490 - DNA, 25 bp, Homo sapien
ctgtgattggtacatttaagtagat

SEQ ID NO: 4320491 - DNA, 25 bp, Homo sapien
tgtgattggtacatttaagtagatt

SEQ ID NO: 4320492 - DNA, 25 bp, Homo sapien
gtgattggtacatttaagtagattt

SEQ ID NO: 4320493 - DNA, 25 bp, Homo sapien
ccaataggctctccagtagagccca

SEQ ID NO: 4320494 - DNA, 25 bp, Homo sapien
tttctccaataggctctccagtaga

SEQ ID NO: 4320495 - DNA, 25 bp, Homo sapien
tctccaataggctctccagtagagc

SEQ ID NO: 4320496 - DNA, 25 bp, Homo sapien
tccaataggctctccagtagagccc

SEQ ID NO: 4320497 - DNA, 25 bp, Homo sapien
gatctcttaagggttccacctatta

SEQ ID NO: 4320498 - DNA, 25 bp, Homo sapien
gaaatgctattcctcacccaacaga

SEQ ID NO: 4320499 - DNA, 25 bp, Homo sapien
tttctctgcccaagcaaggcacact

SEQ ID NO: 4320500 - DNA, 25 bp, Homo sapien
caagagggtgtagccttcatggcct

SEQ ID NO: 4320501 - DNA, 25 bp, Homo sapien
aaatatattgacagcaacattgcag

SEQ ID NO: 4320502 - DNA, 25 bp, Homo sapien
gcttagtaagcccagggaggaccat

SEQ ID NO: 4320503 - DNA, 25 bp, Homo sapien
gcagcatctgtatggtataccctta

SEQ ID NO: 4320504 - DNA, 25 bp, Homo sapien
cagagattctcatggtagcaagact

SEQ ID NO: 4320505 - DNA, 25 bp, Homo sapien
tgctcagagggctggaattcttttg

SEQ ID NO: 4320506 - DNA, 25 bp, Homo sapien
tgctatatttcagtcaggcccaagt

SEQ ID NO: 4320507 - DNA, 25 bp, Homo sapien
ggctacataattaatcccacttctg

SEQ ID NO: 4320508 - DNA, 25 bp, Homo sapien
agtcccagcctgatcttgtgtacaa

SEQ ID NO: 4320509 - DNA, 25 bp, Homo sapien
tgatactctactgctactcccttca

SEQ ID NO: 4320510 - DNA, 25 bp, Homo sapien
cttctgatactctactgctactccc

SEQ ID NO: 4320511 - DNA, 25 bp, Homo sapien
tctgatactctactgctactccctt

SEQ ID NO: 4320512 - DNA, 25 bp, Homo sapien
gatactctactgctactcccttcaa

SEQ ID NO: 4320513 - DNA, 25 bp, Homo sapien
taacctaggtggctttgctcgaaaa

SEQ ID NO: 4320514 - DNA, 25 bp, Homo sapien
gctcgaaaaaggtaactcagagtcc

SEQ ID NO: 4320515 - DNA, 25 bp, Homo sapien
cagagtcctcttccattagggcagt

SEQ ID NO: 4320516 - DNA, 25 bp, Homo sapien
tgcagaacagaagggtcactctggg

SEQ ID NO: 4320517 - DNA, 25 bp, Homo sapien
ccctgggtgaggatgcgaatccaga

SEQ ID NO: 4320518 - DNA, 25 bp, Homo sapien
cagatcccctgcagtaccaaacata

SEQ ID NO: 4320519 - DNA, 25 bp, Homo sapien
gcagtaccaaacatatccgttccac

SEQ ID NO: 4320520 - DNA, 25 bp, Homo sapien
tgaggatgcgaatccagaagaagag

SEQ ID NO: 4320521 - DNA, 25 bp, Homo sapien
agaagaggcacgttgccccatgtcc

SEQ ID NO: 4320522 - DNA, 25 bp, Homo sapien
cagaagaggcacgttgccccatgtc

SEQ ID NO: 4320523 - DNA, 25 bp, Homo sapien
cacagaagaggcacgttgccccatg

SEQ ID NO: 4320524 - DNA, 25 bp, Homo sapien
aacacagaagaggcacgttgcccca

SEQ ID NO: 4320525 - DNA, 25 bp, Homo sapien
gacagttttggatgccagtcaacca

SEQ ID NO: 4320526 - DNA, 25 bp, Homo sapien
gaaactctagcaaccaaaagacagt

SEQ ID NO: 4320527 - DNA, 25 bp, Homo sapien
taattctgttggaaactctagcaac

SEQ ID NO: 4320528 - DNA, 25 bp, Homo sapien
cagcatttgctctctggtaatttca

SEQ ID NO: 4320529 - DNA, 25 bp, Homo sapien
tttaatgaatgcgagaaaagacaac

SEQ ID NO: 4320530 - DNA, 25 bp, Homo sapien
aatgaatgcgagaaaagacaacaac

SEQ ID NO: 4320531 - DNA, 25 bp, Homo sapien
cattttaatgaatgcgagaaaagac

SEQ ID NO: 4320532 - DNA, 25 bp, Homo sapien
gcattttaatgaatgcgagaaaaga

SEQ ID NO: 4320533 - DNA, 25 bp, Homo sapien
agagaggtctgctgtgtactgtgaa

SEQ ID NO: 4320534 - DNA, 25 bp, Homo sapien
tcatagacaaaagctaacttggttt

SEQ ID NO: 4320535 - DNA, 25 bp, Homo sapien
tactgtgaagaattcttgtgactgc

SEQ ID NO: 4320536 - DNA, 25 bp, Homo sapien
catagacaaaagctaacttggtttc

SEQ ID NO: 4320537 - DNA, 25 bp, Homo sapien
agagtatccgtcttggagggagatt

SEQ ID NO: 4320538 - DNA, 25 bp, Homo sapien
taaagagtatccgtcttggagggag

SEQ ID NO: 4320539 - DNA, 25 bp, Homo sapien
aaagagtatccgtcttggagggaga

SEQ ID NO: 4320540 - DNA, 25 bp, Homo sapien
ataaagagtatccgtcttggaggga

SEQ ID NO: 4320541 - DNA, 25 bp, Homo sapien
gttgtcaccaaaagtaagttactga

SEQ ID NO: 4320542 - DNA, 25 bp, Homo sapien
ggaaaagagagatcccagttgccat

SEQ ID NO: 4320543 - DNA, 25 bp, Homo sapien
tccaaacatcattcgcctagaaggg

SEQ ID NO: 4320544 - DNA, 25 bp, Homo sapien
cacatggatcggcaaagaagagatt

SEQ ID NO: 4320545 - DNA, 25 bp, Homo sapien
tctttaccaataacgttctccatgg

SEQ ID NO: 4320546 - DNA, 25 bp, Homo sapien
agatatatatagtgtgcccagttcc

SEQ ID NO: 4320547 - DNA, 25 bp, Homo sapien
tacacattgtaactttgctctttca

SEQ ID NO: 4320548 - DNA, 25 bp, Homo sapien
tctgacccaagttcaaagaagcctc

SEQ ID NO: 4320549 - DNA, 25 bp, Homo sapien
gctctgaatgctagcagtgatgata

SEQ ID NO: 4320550 - DNA, 25 bp, Homo sapien
gatatatttatactctgactgggct

SEQ ID NO: 4320551 - DNA, 25 bp, Homo sapien
gctgctcgtgcagtgtatactctca

SEQ ID NO: 4320552 - DNA, 25 bp, Homo sapien
caagttattatagagcaatgctgct

SEQ ID NO: 4320553 - DNA, 25 bp, Homo sapien
aattcccatttcagaacattccact

SEQ ID NO: 4320554 - DNA, 25 bp, Homo sapien
cagaacattccacttagaacttccc

SEQ ID NO: 4320555 - DNA, 25 bp, Homo sapien
gaacattccacttagaacttcccat

SEQ ID NO: 4320556 - DNA, 25 bp, Homo sapien
agaacattccacttagaacttccca

SEQ ID NO: 4320557 - DNA, 25 bp, Homo sapien
acatctttttcgagtgctttatata

SEQ ID NO: 4320558 - DNA, 25 bp, Homo sapien
tggcatgatagcctatcttcattct

SEQ ID NO: 4320559 - DNA, 25 bp, Homo sapien
tatattttagtctgccgtagatcct

SEQ ID NO: 4320560 - DNA, 25 bp, Homo sapien
aattacatctttttcgagtgcttta

SEQ ID NO: 4320561 - DNA, 25 bp, Homo sapien
ccactggtacttttagcaggtagca

SEQ ID NO: 4320562 - DNA, 25 bp, Homo sapien
actggtacttttagcaggtagcatg

SEQ ID NO: 4320563 - DNA, 25 bp, Homo sapien
cactggtacttttagcaggtagcat

SEQ ID NO: 4320564 - DNA, 25 bp, Homo sapien
tggtacttttagcaggtagcatgta

SEQ ID NO: 4320565 - DNA, 25 bp, Homo sapien
gaagaagggtacagacttccagctc

SEQ ID NO: 4320566 - DNA, 25 bp, Homo sapien
taacctcctctatactggtagcaca

SEQ ID NO: 4320567 - DNA, 25 bp, Homo sapien
tattttcctctcgtagggtgagcag

SEQ ID NO: 4320568 - DNA, 25 bp, Homo sapien
ttgagatgttccagctaagtcacac

SEQ ID NO: 4320569 - DNA, 25 bp, Homo sapien
ccctgtcaatgcattcacgattaga

SEQ ID NO: 4320570 - DNA, 25 bp, Homo sapien
ggtaaattgggctaagaccacacag

SEQ ID NO: 4320571 - DNA, 25 bp, Homo sapien
tagaagcacggagaagggtaaattg

SEQ ID NO: 4320572 - DNA, 25 bp, Homo sapien
tattttggccgcaagcacattagct

SEQ ID NO: 4320573 - DNA, 25 bp, Homo sapien
ggtgcctgccaaggcgcctgctcag

SEQ ID NO: 4320574 - DNA, 25 bp, Homo sapien
cggaagaagctcctgttgccaaggg

SEQ ID NO: 4320575 - DNA, 25 bp, Homo sapien
tcctgttgccaagggaacggtgcct

SEQ ID NO: 4320576 - DNA, 25 bp, Homo sapien
aacggtgcctgccaaggcgcctgct

SEQ ID NO: 4320577 - DNA, 25 bp, Homo sapien
tatatattctgggcgcactggcagc

SEQ ID NO: 4320578 - DNA, 25 bp, Homo sapien
agtggtattaactcacacagtcaca

SEQ ID NO: 4320579 - DNA, 25 bp, Homo sapien
gtttcttaagtggtattaactcaca

SEQ ID NO: 4320580 - DNA, 25 bp, Homo sapien
ggctccacaatagtctgtctgcagg

SEQ ID NO: 4320581 - DNA, 25 bp, Homo sapien
cctcacatggccaaaagaggacaag

SEQ ID NO: 4320582 - DNA, 25 bp, Homo sapien
agagccgtcttggttgcagactgcc

SEQ ID NO: 4320583 - DNA, 25 bp, Homo sapien
gatcagattaccagcatggttgggt

SEQ ID NO: 4320584 - DNA, 25 bp, Homo sapien
gttctggtgagagccgtcttggttg

SEQ ID NO: 4320585 - DNA, 25 bp, Homo sapien
ggatttctcatatatcacacaagtt

SEQ ID NO: 4320586 - DNA, 25 bp, Homo sapien
aacttcaggatttctcatatatcac

SEQ ID NO: 4320587 - DNA, 25 bp, Homo sapien
ggaatggcaattcagttacagtgtg

SEQ ID NO: 4320588 - DNA, 25 bp, Homo sapien
cacacaagttattgaattacagtat

SEQ ID NO: 4320589 - DNA, 25 bp, Homo sapien
cacaaaccttagttcataaacctct

SEQ ID NO: 4320590 - DNA, 25 bp, Homo sapien
ggtagctgtttcttagctcccagca

SEQ ID NO: 4320591 - DNA, 25 bp, Homo sapien
tggagctgtatttgcggtagctgtt

SEQ ID NO: 4320592 - DNA, 25 bp, Homo sapien
cgccccggtactgcagtttgccaag

SEQ ID NO: 4320593 - DNA, 25 bp, Homo sapien
gacgtgattgggttcccgttccaca

SEQ ID NO: 4320594 - DNA, 25 bp, Homo sapien
ttctcctgcccgagagagactgagc

SEQ ID NO: 4320595 - DNA, 25 bp, Homo sapien
ctctccaagttctgtggcaaaagcg

SEQ ID NO: 4320596 - DNA, 25 bp, Homo sapien
tattcgcgggatgaaggctcccggc

SEQ ID NO: 4320597 - DNA, 25 bp, Homo sapien
gccagatgtttgggctaaaatacat

SEQ ID NO: 4320598 - DNA, 25 bp, Homo sapien
gcattttgtcctcaaggtgctgtct

SEQ ID NO: 4320599 - DNA, 25 bp, Homo sapien
aagtgcattttgtcctcaaggtgct

SEQ ID NO: 4320600 - DNA, 25 bp, Homo sapien
tacatagttgtaaaatcagatccaa

SEQ ID NO: 4320601 - DNA, 25 bp, Homo sapien
cagatccaaaaacgttcattttgac

SEQ ID NO: 4320602 - DNA, 25 bp, Homo sapien
ttcatttacagtcttaggcagtatg

SEQ ID NO: 4320603 - DNA, 25 bp, Homo sapien
cagtcttaggcagtatgtttataga

SEQ ID NO: 4320604 - DNA, 25 bp, Homo sapien
catttacagtcttaggcagtatgtt

SEQ ID NO: 4320605 - DNA, 25 bp, Homo sapien
tacagtcttaggcagtatgtttata

SEQ ID NO: 4320606 - DNA, 25 bp, Homo sapien
aaattgtcattgtctttagtaaact

SEQ ID NO: 4320607 - DNA, 25 bp, Homo sapien
tgtcattgtctttagtaaacttata

SEQ ID NO: 4320608 - DNA, 25 bp, Homo sapien
cattgtctttagtaaacttataggg

SEQ ID NO: 4320609 - DNA, 25 bp, Homo sapien
attgtcattgtctttagtaaactta

SEQ ID NO: 4320610 - DNA, 25 bp, Homo sapien
gatgctgagcaagttggatattcct

SEQ ID NO: 4320611 - DNA, 25 bp, Homo sapien
tctcctgtgcccattgaaactggga

SEQ ID NO: 4320612 - DNA, 25 bp, Homo sapien
gatttaatgaatgagggttctcctg

SEQ ID NO: 4320613 - DNA, 25 bp, Homo sapien
caacattgttggtatttcctatcag

SEQ ID NO: 4320614 - DNA, 25 bp, Homo sapien
gaggactcaagcttccttaaagtac

SEQ ID NO: 4320615 - DNA, 25 bp, Homo sapien
tgaggactcaagcttccttaaagta

SEQ ID NO: 4320616 - DNA, 25 bp, Homo sapien
ctgaggactcaagcttccttaaagt

SEQ ID NO: 4320617 - DNA, 25 bp, Homo sapien
gaaacgtctgtctcaattgggacag

SEQ ID NO: 4320618 - DNA, 25 bp, Homo sapien
ttcccaactgctgcccaatttgaca

SEQ ID NO: 4320619 - DNA, 25 bp, Homo sapien
gatttatactgggaagatatccatt

SEQ ID NO: 4320620 - DNA, 25 bp, Homo sapien
cctactacctcttatttggaatttg

SEQ ID NO: 4320621 - DNA, 25 bp, Homo sapien
aaatatttccgtgttcaagacagcc

SEQ ID NO: 4320622 - DNA, 25 bp, Homo sapien
taccctgatgaccaggagagcgttg

SEQ ID NO: 4320623 - DNA, 25 bp, Homo sapien
cagcccaggcagattgagcccattt

SEQ ID NO: 4320624 - DNA, 25 bp, Homo sapien
gaaatgttcttatcagtggaggcca

SEQ ID NO: 4320625 - DNA, 25 bp, Homo sapien
attattgtctggatatctttagccc

SEQ ID NO: 4320626 - DNA, 25 bp, Homo sapien
agctcaacataatacgttttaagca

SEQ ID NO: 4320627 - DNA, 25 bp, Homo sapien
aaaccaagctcaacataatacgttt

SEQ ID NO: 4320628 - DNA, 25 bp, Homo sapien
tgtgttttattgtatcaccaatgga

SEQ ID NO: 4320629 - DNA, 25 bp, Homo sapien
ttgaattcagcaaggtcagggccaa

SEQ ID NO: 4320630 - DNA, 25 bp, Homo sapien
gaacatgggcaattcaggcagaagt

SEQ ID NO: 4320631 - DNA, 25 bp, Homo sapien
gatgatacccaatgttgtgtccctg

SEQ ID NO: 4320632 - DNA, 25 bp, Homo sapien
catgtcttgatgtgattggtggccg

SEQ ID NO: 4320633 - DNA, 25 bp, Homo sapien
ggcacgccacttatacaatcatgta

SEQ ID NO: 4320634 - DNA, 25 bp, Homo sapien
gaaattgctaagcacctgcctgaac

SEQ ID NO: 4320635 - DNA, 25 bp, Homo sapien
gacacattcatccaccgaaatggtg

SEQ ID NO: 4320636 - DNA, 25 bp, Homo sapien
atttgaggtgaataatggctaagcc

SEQ ID NO: 4320637 - DNA, 25 bp, Homo sapien
ggaaaggttctattcctgatctcca

SEQ ID NO: 4320638 - DNA, 25 bp, Homo sapien
ctagaaagatccctagaaagagcaa

SEQ ID NO: 4320639 - DNA, 25 bp, Homo sapien
gactatcgctcttaaccatggaaaa

SEQ ID NO: 4320640 - DNA, 25 bp, Homo sapien
tgagagaatcaacatccctagaaag

SEQ ID NO: 4320641 - DNA, 25 bp, Homo sapien
taaccaagacatccctttaggtgac

SEQ ID NO: 4320642 - DNA, 25 bp, Homo sapien
tcagctttgttaggaataaggcaca

SEQ ID NO: 4320643 - DNA, 25 bp, Homo sapien
taacctatggccaaacttgcactgt

SEQ ID NO: 4320644 - DNA, 25 bp, Homo sapien
tgcactgttacgtgttaaccaagac

SEQ ID NO: 4320645 - DNA, 25 bp, Homo sapien
acgtggagttgatttctctactaaa

SEQ ID NO: 4320646 - DNA, 25 bp, Homo sapien
agcatttgaaccttgaccttaccat

SEQ ID NO: 4320647 - DNA, 25 bp, Homo sapien
tctctttaagtaaacgtggagttga

SEQ ID NO: 4320648 - DNA, 25 bp, Homo sapien
taagtaaacgtggagttgatttctc

SEQ ID NO: 4320649 - DNA, 25 bp, Homo sapien
gtccataggtgttgcgtgcctctca

SEQ ID NO: 4320650 - DNA, 25 bp, Homo sapien
tccatcttttaagcagcctctgtaa

SEQ ID NO: 4320651 - DNA, 25 bp, Homo sapien
taaactcgaagacccactattttga

SEQ ID NO: 4320652 - DNA, 25 bp, Homo sapien
tagcttccagtagtcattaccacct

SEQ ID NO: 4320653 - DNA, 25 bp, Homo sapien
ggcatgggcttgtctatacacaaag

SEQ ID NO: 4320654 - DNA, 25 bp, Homo sapien
gggcttgtctatacacaaaggtatg

SEQ ID NO: 4320655 - DNA, 25 bp, Homo sapien
aatttatgttacaggataactttat

SEQ ID NO: 4320656 - DNA, 25 bp, Homo sapien
catgggcttgtctatacacaaaggt

SEQ ID NO: 4320657 - DNA, 25 bp, Homo sapien
ccacctgtaacagggaggtctcatg

SEQ ID NO: 4320658 - DNA, 25 bp, Homo sapien
catgtgcccgttagtacatttggcc

SEQ ID NO: 4320659 - DNA, 25 bp, Homo sapien
agtaggcatttgattctgcaaaggc

SEQ ID NO: 4320660 - DNA, 25 bp, Homo sapien
acaaagccaggttaatgacattcaa

SEQ ID NO: 4320661 - DNA, 25 bp, Homo sapien
ctagactacttgaattaaacattct

SEQ ID NO: 4320662 - DNA, 25 bp, Homo sapien
aacattctgtccagagggataatac

SEQ ID NO: 4320663 - DNA, 25 bp, Homo sapien
tacttgaattaaacattctgtccag

SEQ ID NO: 4320664 - DNA, 25 bp, Homo sapien
ttgaattaaacattctgtccagagg

SEQ ID NO: 4320665 - DNA, 25 bp, Homo sapien
taagtttcaggtccttgacagaaat

SEQ ID NO: 4320666 - DNA, 25 bp, Homo sapien
catccaaatgtgacaaagggaagcg

SEQ ID NO: 4320667 - DNA, 25 bp, Homo sapien
tcctcatctgtagtaagtttcaggt

SEQ ID NO: 4320668 - DNA, 25 bp, Homo sapien
aatagctggactattccaaatttgc

SEQ ID NO: 4320669 - DNA, 25 bp, Homo sapien
caggagctctgtgagtagtgcaaaa

SEQ ID NO: 4320670 - DNA, 25 bp, Homo sapien
tataaggctacaggtcccagctagt

SEQ ID NO: 4320671 - DNA, 25 bp, Homo sapien
tgacttaatcatccccatgcaggag

SEQ ID NO: 4320672 - DNA, 25 bp, Homo sapien
cacccaagtcacaggataggcattt

SEQ ID NO: 4320673 - DNA, 25 bp, Homo sapien
taaggaatgatagatgtacaccatc

SEQ ID NO: 4320674 - DNA, 25 bp, Homo sapien
gatagatgtacaccatcttttcttg

SEQ ID NO: 4320675 - DNA, 25 bp, Homo sapien
ctttaaggaatgatagatgtacacc

SEQ ID NO: 4320676 - DNA, 25 bp, Homo sapien
gatgtacaccatcttttcttgagct

SEQ ID NO: 4320677 - DNA, 25 bp, Homo sapien
gaattggaactgtgagatttggtca

SEQ ID NO: 4320678 - DNA, 25 bp, Homo sapien
ggaattggaactgtgagatttggtc

SEQ ID NO: 4320679 - DNA, 25 bp, Homo sapien
tactgtgaggacaatgtggtcttta

SEQ ID NO: 4320680 - DNA, 25 bp, Homo sapien
actacactgtccagcctcggtaact

SEQ ID NO: 4320681 - DNA, 25 bp, Homo sapien
actgtccagcctcggtaactttcca

SEQ ID NO: 4320682 - DNA, 25 bp, Homo sapien
gattgatcttgatccggcagtactg

SEQ ID NO: 4320683 - DNA, 25 bp, Homo sapien
tctgaccacccagaagaaaacagca

SEQ ID NO: 4320684 - DNA, 25 bp, Homo sapien
ccagaaaaaccgtaaacatcctgca

SEQ ID NO: 4320685 - DNA, 25 bp, Homo sapien
ccgtaaacatcctgcattagcctct

SEQ ID NO: 4320686 - DNA, 25 bp, Homo sapien
aaaaaccgtaaacatcctgcattag

SEQ ID NO: 4320687 - DNA, 25 bp, Homo sapien
taatcgtcttgtagcaacagttgtg

SEQ ID NO: 4320688 - DNA, 25 bp, Homo sapien
ccagccggtctgcaagtgtcctcag

SEQ ID NO: 4320689 - DNA, 25 bp, Homo sapien
ccatctcccgcagagtaagggggga

SEQ ID NO: 4320690 - DNA, 25 bp, Homo sapien
taaaatccttcttcatgtctgagga

SEQ ID NO: 4320691 - DNA, 25 bp, Homo sapien
gtatgccggtccgtaactccacgtc

SEQ ID NO: 4320692 - DNA, 25 bp, Homo sapien
tccacgtcttcctttgcagtatcaa

SEQ ID NO: 4320693 - DNA, 25 bp, Homo sapien
tttgcagtatcaaatacaagccccg

SEQ ID NO: 4320694 - DNA, 25 bp, Homo sapien
aagccccgagatggtatccaaaagg

SEQ ID NO: 4320695 - DNA, 25 bp, Homo sapien
taattggacattactcagcatggaa

SEQ ID NO: 4320696 - DNA, 25 bp, Homo sapien
ccaaaacagtgagtgcatacgaaat

SEQ ID NO: 4320697 - DNA, 25 bp, Homo sapien
ccctgtccaggcattttgagttcca

SEQ ID NO: 4320698 - DNA, 25 bp, Homo sapien
caaattggattatggcttccctgtc

SEQ ID NO: 4320699 - DNA, 25 bp, Homo sapien
tggaattggctcattcctaagtgcg

SEQ ID NO: 4320700 - DNA, 25 bp, Homo sapien
tctctggggtatctggaattggctc

SEQ ID NO: 4320701 - DNA, 25 bp, Homo sapien
cactctgtggggatgctctctttaa

SEQ ID NO: 4320702 - DNA, 25 bp, Homo sapien
tgcgtgccggtgtaagaaatgcact

SEQ ID NO: 4320703 - DNA, 25 bp, Homo sapien
tcatttctggggagcaatggccctc

SEQ ID NO: 4320704 - DNA, 25 bp, Homo sapien
tttctggggagcaatggccctcaag

SEQ ID NO: 4320705 - DNA, 25 bp, Homo sapien
atttctggggagcaatggccctcaa

SEQ ID NO: 4320706 - DNA, 25 bp, Homo sapien
catttctggggagcaatggccctca

SEQ ID NO: 4320707 - DNA, 25 bp, Homo sapien
ccacaatcctaagcaggcaacttct

SEQ ID NO: 4320708 - DNA, 25 bp, Homo sapien
agcctggacacattgatcatggtac

SEQ ID NO: 4320709 - DNA, 25 bp, Homo sapien
gacacattgatcatggtacccaccc

SEQ ID NO: 4320710 - DNA, 25 bp, Homo sapien
gcaacttctgtaacttaggaagctc

SEQ ID NO: 4320711 - DNA, 25 bp, Homo sapien
gatgtacccacagctagtctctttc

SEQ ID NO: 4320712 - DNA, 25 bp, Homo sapien
gaagcaagtccagagggaccagtca

SEQ ID NO: 4320713 - DNA, 25 bp, Homo sapien
cagagtcaggttcatgatgtcccca

SEQ ID NO: 4320714 - DNA, 25 bp, Homo sapien
gactgcctgtcctactttaacttca

SEQ ID NO: 4320715 - DNA, 25 bp, Homo sapien
tcacgtgagtagagtgggccagccc

SEQ ID NO: 4320716 - DNA, 25 bp, Homo sapien
cccgcaggagtgtccgcttgatgaa

SEQ ID NO: 4320717 - DNA, 25 bp, Homo sapien
tgttctggtaggtgctgatggtcac

SEQ ID NO: 4320718 - DNA, 25 bp, Homo sapien
tctgggaaagtacaacaaatcaccc

SEQ ID NO: 4320719 - DNA, 25 bp, Homo sapien
taggcgcagggtctgtatcttacca

SEQ ID NO: 4320720 - DNA, 25 bp, Homo sapien
caagtgggtggaccaaaacattctc

SEQ ID NO: 4320721 - DNA, 25 bp, Homo sapien
tgttaaccatgatccacgagaggct

SEQ ID NO: 4320722 - DNA, 25 bp, Homo sapien
aatttttgagtacttctaggcgcag

SEQ ID NO: 4320723 - DNA, 25 bp, Homo sapien
tctagaggagtcagtggttcactga

SEQ ID NO: 4320724 - DNA, 25 bp, Homo sapien
tagaggagtcagtggttcactgaat

SEQ ID NO: 4320725 - DNA, 25 bp, Homo sapien
gaggagtcagtggttcactgaattc

SEQ ID NO: 4320726 - DNA, 25 bp, Homo sapien
tcctctagaggagtcagtggttcac

SEQ ID NO: 4320727 - DNA, 25 bp, Homo sapien
gactccttcagaaattacatgtgct

SEQ ID NO: 4320728 - DNA, 25 bp, Homo sapien
gaaattacatgtgctggctgacagc

SEQ ID NO: 4320729 - DNA, 25 bp, Homo sapien
catgtgctggctgacagcaatgaga

SEQ ID NO: 4320730 - DNA, 25 bp, Homo sapien
accaccaagactccttcagaaatta

SEQ ID NO: 4320731 - DNA, 25 bp, Homo sapien
gagcctgaacttgtcttagcaatag

SEQ ID NO: 4320732 - DNA, 25 bp, Homo sapien
tggctctaacaatgaggtgcccaca

SEQ ID NO: 4320733 - DNA, 25 bp, Homo sapien
aggtgcccacaacggttatcacata

SEQ ID NO: 4320734 - DNA, 25 bp, Homo sapien
gggaccatcacacgaactctaaacc

SEQ ID NO: 4320735 - DNA, 25 bp, Homo sapien
tccacgctgtactctcgtgccaggg

SEQ ID NO: 4320736 - DNA, 25 bp, Homo sapien
cttcagcataaactcatgcaccggc

SEQ ID NO: 4320737 - DNA, 25 bp, Homo sapien
ggcctgccgatcctttcctcggcct

SEQ ID NO: 4320738 - DNA, 25 bp, Homo sapien
tcatgcaccggcctgccgatccttt

SEQ ID NO: 4320739 - DNA, 25 bp, Homo sapien
cctggcctaacagcatggggatgaa

SEQ ID NO: 4320740 - DNA, 25 bp, Homo sapien
ttggaaaatttggaggagatttgca

SEQ ID NO: 4320741 - DNA, 25 bp, Homo sapien
gggatgaaccgtgcaggtccgctta

SEQ ID NO: 4320742 - DNA, 25 bp, Homo sapien
gcaggtccgcttatatgctgatttt

SEQ ID NO: 4320743 - DNA, 25 bp, Homo sapien
cactgcacaagggtcaagtttccga

SEQ ID NO: 4320744 - DNA, 25 bp, Homo sapien
gatatctaggcaatggaaggctact

SEQ ID NO: 4320745 - DNA, 25 bp, Homo sapien
tactgctactgcaagtactcccgag

SEQ ID NO: 4320746 - DNA, 25 bp, Homo sapien
catttcagatggacgattcagcttg

SEQ ID NO: 4320747 - DNA, 25 bp, Homo sapien
ccctgagatcctgcgggagttatgt

SEQ ID NO: 4320748 - DNA, 25 bp, Homo sapien
ggagccaaagtaacattccagcttc

SEQ ID NO: 4320749 - DNA, 25 bp, Homo sapien
ggagttatgtacacattcgagccaa

SEQ ID NO: 4320750 - DNA, 25 bp, Homo sapien
gccaaccaaggagccaaagtaacat

SEQ ID NO: 4320751 - DNA, 25 bp, Homo sapien
tcccattgacacaccggcagacatt

SEQ ID NO: 4320752 - DNA, 25 bp, Homo sapien
tcttgatgggcgagattaaactttc

SEQ ID NO: 4320753 - DNA, 25 bp, Homo sapien
gacccatagtatgtggccagtgcag

SEQ ID NO: 4320754 - DNA, 25 bp, Homo sapien
tgttagcttgaacagggacccatag

SEQ ID NO: 4320755 - DNA, 25 bp, Homo sapien
ttcccactccctgtaggctttgctt

SEQ ID NO: 4320756 - DNA, 25 bp, Homo sapien
ttcatctgcttacagggagccggcc

SEQ ID NO: 4320757 - DNA, 25 bp, Homo sapien
tcccactccctgtaggctttgcttt

SEQ ID NO: 4320758 - DNA, 25 bp, Homo sapien
ctaacttcatctgcttacagggagc

SEQ ID NO: 4320759 - DNA, 25 bp, Homo sapien
gacaaagcagtaaggaaatgcaaac

SEQ ID NO: 4320760 - DNA, 25 bp, Homo sapien
catgaggttacaaagcttgatgtcc

SEQ ID NO: 4320761 - DNA, 25 bp, Homo sapien
cttgtaacaaggttgcccagactga

SEQ ID NO: 4320762 - DNA, 25 bp, Homo sapien
atgagcccagtgacatgaaacccga

SEQ ID NO: 4320763 - DNA, 25 bp, Homo sapien
cctaaaggagtgatcagcagttatc

SEQ ID NO: 4320764 - DNA, 25 bp, Homo sapien
tccttcctgaaaacagtgaataacc

SEQ ID NO: 4320765 - DNA, 25 bp, Homo sapien
tatccttcctgaaaacagtgaataa

SEQ ID NO: 4320766 - DNA, 25 bp, Homo sapien
atccttcctgaaaacagtgaataac

SEQ ID NO: 4320767 - DNA, 25 bp, Homo sapien
cccgacatgacgcccggcggcgcag

SEQ ID NO: 4320768 - DNA, 25 bp, Homo sapien
agcccacgtggaagccgtgctcgca

SEQ ID NO: 4320769 - DNA, 25 bp, Homo sapien
cgcagcccacgtggaagccgtgctc

SEQ ID NO: 4320770 - DNA, 25 bp, Homo sapien
ttaggcccgacatgacgcccggcgg

SEQ ID NO: 4320771 - DNA, 25 bp, Homo sapien
ttgctaagcctccaaactttccgtg

SEQ ID NO: 4320772 - DNA, 25 bp, Homo sapien
ccattagcaggccacgtgtgcgact

SEQ ID NO: 4320773 - DNA, 25 bp, Homo sapien
tgtgcgactctctgtaaccaaggct

SEQ ID NO: 4320774 - DNA, 25 bp, Homo sapien
tttccgtgcgctcgtcaccggtgtc

SEQ ID NO: 4320775 - DNA, 25 bp, Homo sapien
cgcgccccgcgggatcgggcactac

SEQ ID NO: 4320776 - DNA, 25 bp, Homo sapien
gggatcgggcactacccggcctgcc

SEQ ID NO: 4320777 - DNA, 25 bp, Homo sapien
cgcgggatcgggcactacccggcct

SEQ ID NO: 4320778 - DNA, 25 bp, Homo sapien
gcgccccgcgggatcgggcactacc

SEQ ID NO: 4320779 - DNA, 25 bp, Homo sapien
cggccgcgagcccactgcgttgcgg

SEQ ID NO: 4320780 - DNA, 25 bp, Homo sapien
ccggcacggcctgttgctcgcggcc

SEQ ID NO: 4320781 - DNA, 25 bp, Homo sapien
cgagcccactgcgttgcggcgcagc

SEQ ID NO: 4320782 - DNA, 25 bp, Homo sapien
acggcctgttgctcgcggccgcgag

SEQ ID NO: 4320783 - DNA, 25 bp, Homo sapien
ttgactggagaaggagattggagat

SEQ ID NO: 4320784 - DNA, 25 bp, Homo sapien
actggagaaggagattggagatcct

SEQ ID NO: 4320785 - DNA, 25 bp, Homo sapien
gactggagaaggagattggagatcc

SEQ ID NO: 4320786 - DNA, 25 bp, Homo sapien
tgactggagaaggagattggagatc

SEQ ID NO: 4320787 - DNA, 25 bp, Homo sapien
cctctatgtggatgttcttgcctag

SEQ ID NO: 4320788 - DNA, 25 bp, Homo sapien
tctggtagataaccaggcacttggc

SEQ ID NO: 4320789 - DNA, 25 bp, Homo sapien
tcttgcctaggacggttgagctctg

SEQ ID NO: 4320790 - DNA, 25 bp, Homo sapien
gtgtggatgataccacctctatgtg

SEQ ID NO: 4320791 - DNA, 25 bp, Homo sapien
actctttcttagatgtaaatcagac

SEQ ID NO: 4320792 - DNA, 25 bp, Homo sapien
cagttccatctaggactatccaact

SEQ ID NO: 4320793 - DNA, 25 bp, Homo sapien
taggactatccaactcatattcaag

SEQ ID NO: 4320794 - DNA, 25 bp, Homo sapien
gatgtaaatcagacagctttcaaat

SEQ ID NO: 4320795 - DNA, 25 bp, Homo sapien
ctggtccatgtcaatctcgctgtca

SEQ ID NO: 4320796 - DNA, 25 bp, Homo sapien
caaaggccatagcttgaactgcatc

SEQ ID NO: 4320797 - DNA, 25 bp, Homo sapien
tctttatccgagatgaatcggtgct

SEQ ID NO: 4320798 - DNA, 25 bp, Homo sapien
gaatgattctaccaacatgtcctcc

SEQ ID NO: 4320799 - DNA, 25 bp, Homo sapien
tggggcttgaagtagcttcaagtgc

SEQ ID NO: 4320800 - DNA, 25 bp, Homo sapien
gggcttgaagtagcttcaagtgccc

SEQ ID NO: 4320801 - DNA, 25 bp, Homo sapien
gcttgaagtagcttcaagtgccctg

SEQ ID NO: 4320802 - DNA, 25 bp, Homo sapien
cagttccagcccggatggggcttga

SEQ ID NO: 4320803 - DNA, 25 bp, Homo sapien
tcatcctttggccactctactgtag

SEQ ID NO: 4320804 - DNA, 25 bp, Homo sapien
gtgtccgcattggtgtccaggtctt

SEQ ID NO: 4320805 - DNA, 25 bp, Homo sapien
gaaactggcacgtttagctctgtcc

SEQ ID NO: 4320806 - DNA, 25 bp, Homo sapien
tttgagtcctccatttggtgtccgc

SEQ ID NO: 4320807 - DNA, 25 bp, Homo sapien
aatgaagtaaagagatactgtcctt

SEQ ID NO: 4320808 - DNA, 25 bp, Homo sapien
ccttccagggataggcctgaacatt

SEQ ID NO: 4320809 - DNA, 25 bp, Homo sapien
gaaatgaagtaaagagatactgtcc

SEQ ID NO: 4320810 - DNA, 25 bp, Homo sapien
atactgtccttccagggataggcct

SEQ ID NO: 4320811 - DNA, 25 bp, Homo sapien
ttgccagtgaccaagacagtgagta

SEQ ID NO: 4320812 - DNA, 25 bp, Homo sapien
cagtgaccaagacagtgagtacatt

SEQ ID NO: 4320813 - DNA, 25 bp, Homo sapien
tgttttgccagtgaccaagacagtg

SEQ ID NO: 4320814 - DNA, 25 bp, Homo sapien
ttttgccagtgaccaagacagtgag

SEQ ID NO: 4320815 - DNA, 25 bp, Homo sapien
tcttccactgtggtgaggtagttca

SEQ ID NO: 4320816 - DNA, 25 bp, Homo sapien
gctgcatactcaatgactgacagga

SEQ ID NO: 4320817 - DNA, 25 bp, Homo sapien
acaggtacacatccacagccttgag

SEQ ID NO: 4320818 - DNA, 25 bp, Homo sapien
tcttgaattgtttccgctcttccac

SEQ ID NO: 4320819 - DNA, 25 bp, Homo sapien
aggcgctcacagcagtgatgattgt

SEQ ID NO: 4320820 - DNA, 25 bp, Homo sapien
cgctcacagcagtgatgattgtgga

SEQ ID NO: 4320821 - DNA, 25 bp, Homo sapien
ctcacagcagtgatgattgtggaca

SEQ ID NO: 4320822 - DNA, 25 bp, Homo sapien
tcacagcagtgatgattgtggacat

SEQ ID NO: 4320823 - DNA, 25 bp, Homo sapien
ctgaaacatggcaaatgtgggaggg

SEQ ID NO: 4320824 - DNA, 25 bp, Homo sapien
aaacatggcaaatgtgggagggtct

SEQ ID NO: 4320825 - DNA, 25 bp, Homo sapien
gcaaatgtgggagggtcttcaccag

SEQ ID NO: 4320826 - DNA, 25 bp, Homo sapien
catggcaaatgtgggagggtcttca

SEQ ID NO: 4320827 - DNA, 25 bp, Homo sapien
cagtgataggttataggcaattgca

SEQ ID NO: 4320828 - DNA, 25 bp, Homo sapien
tgaagatagtgcatagtaactggcc

SEQ ID NO: 4320829 - DNA, 25 bp, Homo sapien
gtgtaatgtgaagggaggctatcca

SEQ ID NO: 4320830 - DNA, 25 bp, Homo sapien
cactatggtgggtcattgtgggcac

SEQ ID NO: 4320831 - DNA, 25 bp, Homo sapien
ttttccgtgatgtaagggtttgtca

SEQ ID NO: 4320832 - DNA, 25 bp, Homo sapien
gtttgtcacgaaaagctaaatgagc

SEQ ID NO: 4320833 - DNA, 25 bp, Homo sapien
gcttgggtaatgcatgggagtgtac

SEQ ID NO: 4320834 - DNA, 25 bp, Homo sapien
gatgtaagggtttgtcacgaaaagc

SEQ ID NO: 4320835 - DNA, 25 bp, Homo sapien
cagtactgaggttagggcacatgct

SEQ ID NO: 4320836 - DNA, 25 bp, Homo sapien
taagagcagagcagtcaacttcaga

SEQ ID NO: 4320837 - DNA, 25 bp, Homo sapien
cataaacgtttatagactgagtgct

SEQ ID NO: 4320838 - DNA, 25 bp, Homo sapien
tctatgctgccacactgcagtactg

SEQ ID NO: 4320839 - DNA, 25 bp, Homo sapien
acattttataaagatggggaaagat

SEQ ID NO: 4320840 - DNA, 25 bp, Homo sapien
cattttataaagatggggaaagatt

SEQ ID NO: 4320841 - DNA, 25 bp, Homo sapien
caccatcaatatggctgggaaatag

SEQ ID NO: 4320842 - DNA, 25 bp, Homo sapien
cagctcttcggtcaatccaaaatga

SEQ ID NO: 4320843 - DNA, 25 bp, Homo sapien
aactcttgcaggaacagctcttcgg

SEQ ID NO: 4320844 - DNA, 25 bp, Homo sapien
catgcctccttagcacaaagttgat

SEQ ID NO: 4320845 - DNA, 25 bp, Homo sapien
tagaaagctaatccactagatgcac

SEQ ID NO: 4320846 - DNA, 25 bp, Homo sapien
tccagtatagcattaggtcatcctc

SEQ ID NO: 4320847 - DNA, 25 bp, Homo sapien
cattaggtcatcctcattgtaggct

SEQ ID NO: 4320848 - DNA, 25 bp, Homo sapien
gaaagggacatatgttcttcagtat

SEQ ID NO: 4320849 - DNA, 25 bp, Homo sapien
actccaggctgttagtccccatttg

SEQ ID NO: 4320850 - DNA, 25 bp, Homo sapien
ctgactccaggctgttagtccccat

SEQ ID NO: 4320851 - DNA, 25 bp, Homo sapien
gactccaggctgttagtccccattt

SEQ ID NO: 4320852 - DNA, 25 bp, Homo sapien
ccaggctgttagtccccatttgttt

SEQ ID NO: 4320853 - DNA, 25 bp, Homo sapien
agagaacaattttgagtgtcaagag

SEQ ID NO: 4320854 - DNA, 25 bp, Homo sapien
gaacaattttgagtgtcaagaggaa

SEQ ID NO: 4320855 - DNA, 25 bp, Homo sapien
cctgctgaaatccataaagcacatg

SEQ ID NO: 4320856 - DNA, 25 bp, Homo sapien
cataaagcacatggccgaaaccgtt

SEQ ID NO: 4320857 - DNA, 25 bp, Homo sapien
tagtgagtgaaaagcctggagcatt

SEQ ID NO: 4320858 - DNA, 25 bp, Homo sapien
ccagtagtgagtgaaaagcctggag

SEQ ID NO: 4320859 - DNA, 25 bp, Homo sapien
tgagtgaaaagcctggagcattctt

SEQ ID NO: 4320860 - DNA, 25 bp, Homo sapien
gaaaagcctggagcattcttagtta

SEQ ID NO: 4320861 - DNA, 25 bp, Homo sapien
agacttaggaggacgtttccatcag

SEQ ID NO: 4320862 - DNA, 25 bp, Homo sapien
ggaggacgtttccatcagggtgtac

SEQ ID NO: 4320863 - DNA, 25 bp, Homo sapien
acgtttccatcagggtgtacgcgca

SEQ ID NO: 4320864 - DNA, 25 bp, Homo sapien
tttccatcagggtgtacgcgcagca

SEQ ID NO: 4320865 - DNA, 25 bp, Homo sapien
gagtggacaaaaaagatatcaggca

SEQ ID NO: 4320866 - DNA, 25 bp, Homo sapien
tctggtcaatctatgatcaaatgtc

SEQ ID NO: 4320867 - DNA, 25 bp, Homo sapien
ggcacccagatctttctggtcaatc

SEQ ID NO: 4320868 - DNA, 25 bp, Homo sapien
tcatgcttttgtttgctgtgctagg

SEQ ID NO: 4320869 - DNA, 25 bp, Homo sapien
tctgaaatgctgtcaatgctttcaa

SEQ ID NO: 4320870 - DNA, 25 bp, Homo sapien
tctatacctactggcactggagacc

SEQ ID NO: 4320871 - DNA, 25 bp, Homo sapien
gtcaatgctttcaacatggacatct

SEQ ID NO: 4320872 - DNA, 25 bp, Homo sapien
aatgctgtcaatgctttcaacatgg

SEQ ID NO: 4320873 - DNA, 25 bp, Homo sapien
ttcttcctttcgtcctccagattta

SEQ ID NO: 4320874 - DNA, 25 bp, Homo sapien
ccagatttatactggttctggtggg

SEQ ID NO: 4320875 - DNA, 25 bp, Homo sapien
aatgtatgcccttgggtgccgtctg

SEQ ID NO: 4320876 - DNA, 25 bp, Homo sapien
aaaatgtatgcccttgggtgccgtc

SEQ ID NO: 4320877 - DNA, 25 bp, Homo sapien
ctgttatactgccagaggatctttc

SEQ ID NO: 4320878 - DNA, 25 bp, Homo sapien
cagaaggctgtatctgttatactgc

SEQ ID NO: 4320879 - DNA, 25 bp, Homo sapien
atgagaagagtatcccccgccctga

SEQ ID NO: 4320880 - DNA, 25 bp, Homo sapien
gaacacttgcggtattcgttattca

SEQ ID NO: 4320881 - DNA, 25 bp, Homo sapien
ggaagtggaaggctccatcaatgaa

SEQ ID NO: 4320882 - DNA, 25 bp, Homo sapien
tctcaaaagttgtcagttcaggaat

SEQ ID NO: 4320883 - DNA, 25 bp, Homo sapien
gaaggctccatcaatgaaagaagaa

SEQ ID NO: 4320884 - DNA, 25 bp, Homo sapien
cagttcaggaattgtggaagtggaa

SEQ ID NO: 4320885 - DNA, 25 bp, Homo sapien
aatccaggtctcattgcgaaatcgt

SEQ ID NO: 4320886 - DNA, 25 bp, Homo sapien
cctctatatggagaagttgctcata

SEQ ID NO: 4320887 - DNA, 25 bp, Homo sapien
tcatatttctgaggccgcgctttgg

SEQ ID NO: 4320888 - DNA, 25 bp, Homo sapien
gaggccgcgctttggtactgtcatc

SEQ ID NO: 4320889 - DNA, 25 bp, Homo sapien
atagtgaactatgattggaccaccg

SEQ ID NO: 4320890 - DNA, 25 bp, Homo sapien
tagtgaactatgattggaccaccgc

SEQ ID NO: 4320891 - DNA, 25 bp, Homo sapien
catggccgaaatcctggcgtttcct

SEQ ID NO: 4320892 - DNA, 25 bp, Homo sapien
catttaggaatatagaagtgacaac

SEQ ID NO: 4320893 - DNA, 25 bp, Homo sapien
agtgacaacaaatatgattggcccc

SEQ ID NO: 4320894 - DNA, 25 bp, Homo sapien
ggaagtctgcttttgcataggctct

SEQ ID NO: 4320895 - DNA, 25 bp, Homo sapien
tttgtttcattgaagaggagcaccg

SEQ ID NO: 4320896 - DNA, 25 bp, Homo sapien
ggtttgtttcattgaagaggagcac

SEQ ID NO: 4320897 - DNA, 25 bp, Homo sapien
gtttgtttcattgaagaggagcacc

SEQ ID NO: 4320898 - DNA, 25 bp, Homo sapien
caggtttgtttcattgaagaggagc

SEQ ID NO: 4320899 - DNA, 25 bp, Homo sapien
tgttagaagcagcacaaacatttgg

SEQ ID NO: 4320900 - DNA, 25 bp, Homo sapien
tttcaatatgatccagatgtaggtg

SEQ ID NO: 4320901 - DNA, 25 bp, Homo sapien
ttggtttcaatatgatccagatgta

SEQ ID NO: 4320902 - DNA, 25 bp, Homo sapien
atgttagaagcagcacaaacatttg

SEQ ID NO: 4320903 - DNA, 25 bp, Homo sapien
gcaggtgaacgcaaccaatactgtg

SEQ ID NO: 4320904 - DNA, 25 bp, Homo sapien
acagaaaggatgcaggtgaacgcaa

SEQ ID NO: 4320905 - DNA, 25 bp, Homo sapien
tgttttagcagattaaattgactca

SEQ ID NO: 4320906 - DNA, 25 bp, Homo sapien
ttaaattgactcacagcacttacag

SEQ ID NO: 4320907 - DNA, 25 bp, Homo sapien
attctcccaaaatagtactcctcca

SEQ ID NO: 4320908 - DNA, 25 bp, Homo sapien
ttctcccaaaatagtactcctccat

SEQ ID NO: 4320909 - DNA, 25 bp, Homo sapien
tctttggcagcgacataaagagaaa

SEQ ID NO: 4320910 - DNA, 25 bp, Homo sapien
ccaatcttggggtatgtagccatta

SEQ ID NO: 4320911 - DNA, 25 bp, Homo sapien
ttatttctttggcagcgacataaag

SEQ ID NO: 4320912 - DNA, 25 bp, Homo sapien
gaaaggatggctgtgtcgccaatct

SEQ ID NO: 4320913 - DNA, 25 bp, Homo sapien
tcagctgtgatacgagtgaggacac

SEQ ID NO: 4320914 - DNA, 25 bp, Homo sapien
ccacgacccttgtttcagtctctta

SEQ ID NO: 4320915 - DNA, 25 bp, Homo sapien
tttcatacccagtagaccatcgtcc

SEQ ID NO: 4320916 - DNA, 25 bp, Homo sapien
gtgaggacacctgaagaatcttgct

SEQ ID NO: 4320917 - DNA, 25 bp, Homo sapien
ggccctggtaccattgagaaatatg

SEQ ID NO: 4320918 - DNA, 25 bp, Homo sapien
gccctggtaccattgagaaatatgc

SEQ ID NO: 4320919 - DNA, 25 bp, Homo sapien
tgggccctggtaccattgagaaata

SEQ ID NO: 4320920 - DNA, 25 bp, Homo sapien
gggccctggtaccattgagaaatat

SEQ ID NO: 4320921 - DNA, 25 bp, Homo sapien
tcttatgtttgttagtcatttgtat

SEQ ID NO: 4320922 - DNA, 25 bp, Homo sapien
ttcttatgtttgttagtcatttgta

SEQ ID NO: 4320923 - DNA, 25 bp, Homo sapien
cagtactgcactgttttggtggcta

SEQ ID NO: 4320924 - DNA, 25 bp, Homo sapien
tctgtttaggctgctgattttttct

SEQ ID NO: 4320925 - DNA, 25 bp, Homo sapien
tagtcttttgttggatgcaaatttg

SEQ ID NO: 4320926 - DNA, 25 bp, Homo sapien
tgaagatcaatggactgtaagtatt

SEQ ID NO: 4320927 - DNA, 25 bp, Homo sapien
ccaacatgttttgtcctttcccatt

SEQ ID NO: 4320928 - DNA, 25 bp, Homo sapien
tataagtattaatgcaaattatgtt

SEQ ID NO: 4320929 - DNA, 25 bp, Homo sapien
aaaaagagaatatatgtgttgtgta

SEQ ID NO: 4320930 - DNA, 25 bp, Homo sapien
gtattaatgcaaattatgttacaga

SEQ ID NO: 4320931 - DNA, 25 bp, Homo sapien
ccagacaggtgatggttttcttgaa

SEQ ID NO: 4320932 - DNA, 25 bp, Homo sapien
ggtctgagcagtagtgacatcagca

SEQ ID NO: 4320933 - DNA, 25 bp, Homo sapien
caaatgtagagattagcaggaggac

SEQ ID NO: 4320934 - DNA, 25 bp, Homo sapien
ccttataagagtcattcgaagctgt

SEQ ID NO: 4320935 - DNA, 25 bp, Homo sapien
gtagggtcctggtaattctgccttg

SEQ ID NO: 4320936 - DNA, 25 bp, Homo sapien
ttaagtagggtcctggtaattctgc

SEQ ID NO: 4320937 - DNA, 25 bp, Homo sapien
tagggtcctggtaattctgccttgg

SEQ ID NO: 4320938 - DNA, 25 bp, Homo sapien
aagtagggtcctggtaattctgcct

SEQ ID NO: 4320939 - DNA, 25 bp, Homo sapien
tatatatcacttcgtcacacttcat

SEQ ID NO: 4320940 - DNA, 25 bp, Homo sapien
cacttcgtcacacttcatgttttcc

SEQ ID NO: 4320941 - DNA, 25 bp, Homo sapien
cagctttttagttccctctgacttc

SEQ ID NO: 4320942 - DNA, 25 bp, Homo sapien
attttcccctatatatcacttcgtc

SEQ ID NO: 4320943 - DNA, 25 bp, Homo sapien
aaggctctctgataatctaggtctt

SEQ ID NO: 4320944 - DNA, 25 bp, Homo sapien
cacttttcataccagccacatttac

SEQ ID NO: 4320945 - DNA, 25 bp, Homo sapien
gctctctgataatctaggtcttccc

SEQ ID NO: 4320946 - DNA, 25 bp, Homo sapien
ggctctctgataatctaggtcttcc

SEQ ID NO: 4320947 - DNA, 25 bp, Homo sapien
tatatctcatcaccatcatggggaa

SEQ ID NO: 4320948 - DNA, 25 bp, Homo sapien
cattcttggtaatatatctcatcac

SEQ ID NO: 4320949 - DNA, 25 bp, Homo sapien
tcatggggaatcttggtctgattgc

SEQ ID NO: 4320950 - DNA, 25 bp, Homo sapien
tgttcttggcattcttggtaatata

SEQ ID NO: 4320951 - DNA, 25 bp, Homo sapien
tcagtgatatggctctgatgagttg

SEQ ID NO: 4320952 - DNA, 25 bp, Homo sapien
ttgtctctcgttgaattggaaaaaa

SEQ ID NO: 4320953 - DNA, 25 bp, Homo sapien
gatctccactttatccacgtggaat

SEQ ID NO: 4320954 - DNA, 25 bp, Homo sapien
caccagggttgtttgtctctcgttg

SEQ ID NO: 4320955 - DNA, 25 bp, Homo sapien
tcctgggggtgatctaaggtccttg

SEQ ID NO: 4320956 - DNA, 25 bp, Homo sapien
tgtccttgtgttgtttagtttgcag

SEQ ID NO: 4320957 - DNA, 25 bp, Homo sapien
gttttgggtgatgactgtttctggc

SEQ ID NO: 4320958 - DNA, 25 bp, Homo sapien
tgtggaaatatcaccctaattgctg

SEQ ID NO: 4320959 - DNA, 25 bp, Homo sapien
gcatttaccatctatgatgtgatta

SEQ ID NO: 4320960 - DNA, 25 bp, Homo sapien
gtctttctcgcatttaccatctatg

SEQ ID NO: 4320961 - DNA, 25 bp, Homo sapien
actgacttgtctttctcgcatttac

SEQ ID NO: 4320962 - DNA, 25 bp, Homo sapien
tttcctttcacttgtcaatctttac

SEQ ID NO: 4320963 - DNA, 25 bp, Homo sapien
ctgttcagtacccttttctactatc

SEQ ID NO: 4320964 - DNA, 25 bp, Homo sapien
cagtacccttttctactatctcttt

SEQ ID NO: 4320965 - DNA, 25 bp, Homo sapien
tcagtacccttttctactatctctt

SEQ ID NO: 4320966 - DNA, 25 bp, Homo sapien
gttcagtacccttttctactatctc

SEQ ID NO: 4320967 - DNA, 25 bp, Homo sapien
tatatccaactgtatgtagtgtggc

SEQ ID NO: 4320968 - DNA, 25 bp, Homo sapien
gacacagctcatactttcaatggca

SEQ ID NO: 4320969 - DNA, 25 bp, Homo sapien
gaacttcatgagtggctgtttccgc

SEQ ID NO: 4320970 - DNA, 25 bp, Homo sapien
tgtctgccaccaaaacgcatgtggt

SEQ ID NO: 4320971 - DNA, 25 bp, Homo sapien
cagcgtgtttcattggccatcctag

SEQ ID NO: 4320972 - DNA, 25 bp, Homo sapien
gtacacaggctgcttttgaaaccaa

SEQ ID NO: 4320973 - DNA, 25 bp, Homo sapien
ccatattccgaatgtaggatcagcg

SEQ ID NO: 4320974 - DNA, 25 bp, Homo sapien
tggccatcctagatcaggtcccttc

SEQ ID NO: 4320975 - DNA, 25 bp, Homo sapien
gggcccctcgccttcatgtatgtgg

SEQ ID NO: 4320976 - DNA, 25 bp, Homo sapien
tatgtgggctctgcatcccaacggg

SEQ ID NO: 4320977 - DNA, 25 bp, Homo sapien
tcccaacgggctgatgaccaagata

SEQ ID NO: 4320978 - DNA, 25 bp, Homo sapien
tatctttatactatgggcccctcgc

SEQ ID NO: 4320979 - DNA, 25 bp, Homo sapien
gagggtaggaagtcaagatcaagat

SEQ ID NO: 4320980 - DNA, 25 bp, Homo sapien
agggtaggaagtcaagatcaagatg

SEQ ID NO: 4320981 - DNA, 25 bp, Homo sapien
ggagggtaggaagtcaagatcaaga

SEQ ID NO: 4320982 - DNA, 25 bp, Homo sapien
cccatgctggcctccctgaacacac

SEQ ID NO: 4320983 - DNA, 25 bp, Homo sapien
cacacccatgctggcctccctgaac

SEQ ID NO: 4320984 - DNA, 25 bp, Homo sapien
acccatgctggcctccctgaacaca

SEQ ID NO: 4320985 - DNA, 25 bp, Homo sapien
ctgttgaggtcacacccatgctggc

SEQ ID NO: 4320986 - DNA, 25 bp, Homo sapien
aaggctctctgataatctagatctt

SEQ ID NO: 4320987 - DNA, 25 bp, Homo sapien
gttgtccagatgatgctcactcaaa

SEQ ID NO: 4320988 - DNA, 25 bp, Homo sapien
ctagttgtccagatgatgctcactc

SEQ ID NO: 4320989 - DNA, 25 bp, Homo sapien
tagttgtccagatgatgctcactca

SEQ ID NO: 4320990 - DNA, 25 bp, Homo sapien
ttgtccagatgatgctcactcaaaa

SEQ ID NO: 4320991 - DNA, 25 bp, Homo sapien
tctaaactctgcagtaccctgtagg

SEQ ID NO: 4320992 - DNA, 25 bp, Homo sapien
aactctgcagtaccctgtaggataa

SEQ ID NO: 4320993 - DNA, 25 bp, Homo sapien
gcagtaccctgtaggataatctgta

SEQ ID NO: 4320994 - DNA, 25 bp, Homo sapien
taccctgtaggataatctgtatttc

SEQ ID NO: 4320995 - DNA, 25 bp, Homo sapien
ctccatgatcaagtatctctgataa

SEQ ID NO: 4320996 - DNA, 25 bp, Homo sapien
tctccatgatcaagtatctctgata

SEQ ID NO: 4320997 - DNA, 25 bp, Homo sapien
ttctccatgatcaagtatctctgat

SEQ ID NO: 4320998 - DNA, 25 bp, Homo sapien
tcctacagggaatcctaaggtgctc

SEQ ID NO: 4320999 - DNA, 25 bp, Homo sapien
catagtacactgtaggatgatctgc

SEQ ID NO: 4321000 - DNA, 25 bp, Homo sapien
tccacaatgcccagttgcagatctt

SEQ ID NO: 4321001 - DNA, 25 bp, Homo sapien
tagggatgctccagttctctacacc

SEQ ID NO: 4321002 - DNA, 25 bp, Homo sapien
gacaacttgtggcaaactaggacat

SEQ ID NO: 4321003 - DNA, 25 bp, Homo sapien
gccatggctgagtttacaactaaaa

SEQ ID NO: 4321004 - DNA, 25 bp, Homo sapien
gtaggatcagtgtgtttcattgcca

SEQ ID NO: 4321005 - DNA, 25 bp, Homo sapien
cacttctggatataatctgacaact

SEQ ID NO: 4321006 - DNA, 25 bp, Homo sapien
gtgatgctcacaccaaaaacttgtc

SEQ ID NO: 4321007 - DNA, 25 bp, Homo sapien
cagcaattcgagttttcatccccaa

SEQ ID NO: 4321008 - DNA, 25 bp, Homo sapien
aacttgtcagcaattcgagttttca

SEQ ID NO: 4321009 - DNA, 25 bp, Homo sapien
ccaaaaacttgtcagcaattcgagt

SEQ ID NO: 4321010 - DNA, 25 bp, Homo sapien
tcaaggttctctgataatccaggtc

SEQ ID NO: 4321011 - DNA, 25 bp, Homo sapien
tcatgctggactccctgaacaaatc

SEQ ID NO: 4321012 - DNA, 25 bp, Homo sapien
ttctctctttgcatacccaccacat

SEQ ID NO: 4321013 - DNA, 25 bp, Homo sapien
gaacaaatctggtcgtcccctgctt

SEQ ID NO: 4321014 - DNA, 25 bp, Homo sapien
tggcaaatgtccatggacattactt

SEQ ID NO: 4321015 - DNA, 25 bp, Homo sapien
gatggcaaatgtccatggacattac

SEQ ID NO: 4321016 - DNA, 25 bp, Homo sapien
ggcaaatgtccatggacattacttt

SEQ ID NO: 4321017 - DNA, 25 bp, Homo sapien
gcaaatgtccatggacattactttt

SEQ ID NO: 4321018 - DNA, 25 bp, Homo sapien
tactggcttatctctatattttagc

SEQ ID NO: 4321019 - DNA, 25 bp, Homo sapien
ttttagattgggtacacaagctgtc

SEQ ID NO: 4321020 - DNA, 25 bp, Homo sapien
aaattcgatagctattactggctta

SEQ ID NO: 4321021 - DNA, 25 bp, Homo sapien
aatagccaggttgaaattcgatagc

SEQ ID NO: 4321022 - DNA, 25 bp, Homo sapien
tcttcaatgaaaaggtggacatcaa

SEQ ID NO: 4321023 - DNA, 25 bp, Homo sapien
caacgtgtgtagcaggttaagtcat

SEQ ID NO: 4321024 - DNA, 25 bp, Homo sapien
tagtctacacgtacttgttctctgg

SEQ ID NO: 4321025 - DNA, 25 bp, Homo sapien
catcaagctttgagcatgtggcaac

SEQ ID NO: 4321026 - DNA, 25 bp, Homo sapien
cgttccaacactagctgatgagggc

SEQ ID NO: 4321027 - DNA, 25 bp, Homo sapien
gccacgttccaacactagctgatga

SEQ ID NO: 4321028 - DNA, 25 bp, Homo sapien
acactagctgatgagggctgttctt

SEQ ID NO: 4321029 - DNA, 25 bp, Homo sapien
taaagccacgttccaacactagctg

SEQ ID NO: 4321030 - DNA, 25 bp, Homo sapien
tccaattgctaggtcttccataatg

SEQ ID NO: 4321031 - DNA, 25 bp, Homo sapien
tccactttgtgtactctccaattgc

SEQ ID NO: 4321032 - DNA, 25 bp, Homo sapien
ttccttccactttgtgtactctcca

SEQ ID NO: 4321033 - DNA, 25 bp, Homo sapien
tgtgtactctccaattgctaggtct

SEQ ID NO: 4321034 - DNA, 25 bp, Homo sapien
taaacaatagctcccagtagacccc

SEQ ID NO: 4321035 - DNA, 25 bp, Homo sapien
tattgttgtggaatgatcaccatca

SEQ ID NO: 4321036 - DNA, 25 bp, Homo sapien
tctctgtaagttcgactactctagc

SEQ ID NO: 4321037 - DNA, 25 bp, Homo sapien
tcaatcagccttatgtcctcaaggt

SEQ ID NO: 4321038 - DNA, 25 bp, Homo sapien
cctgagtccagctaggtcaatttta

SEQ ID NO: 4321039 - DNA, 25 bp, Homo sapien
cattaagtatgcaaggtaggattca

SEQ ID NO: 4321040 - DNA, 25 bp, Homo sapien
catctgttggttgcatcgtccatga

SEQ ID NO: 4321041 - DNA, 25 bp, Homo sapien
taggattcaactactatcaggagga

SEQ ID NO: 4321042 - DNA, 25 bp, Homo sapien
gcagcggcacgagagacagagtctg

SEQ ID NO: 4321043 - DNA, 25 bp, Homo sapien
cagcggcacgagagacagagtctgt

SEQ ID NO: 4321044 - DNA, 25 bp, Homo sapien
aaaatgtgtattatggataaccaac

SEQ ID NO: 4321045 - DNA, 25 bp, Homo sapien
tatgagtatgactatgtacttttac

SEQ ID NO: 4321046 - DNA, 25 bp, Homo sapien
aatgtaataattatgagtatgacta

SEQ ID NO: 4321047 - DNA, 25 bp, Homo sapien
aatgtgtattatggataaccaacta

SEQ ID NO: 4321048 - DNA, 25 bp, Homo sapien
taccagttccataggttgattgggc

SEQ ID NO: 4321049 - DNA, 25 bp, Homo sapien
tgggagcttagcttgggatttcagc

SEQ ID NO: 4321050 - DNA, 25 bp, Homo sapien
caggatggctcccacacatggctgg

SEQ ID NO: 4321051 - DNA, 25 bp, Homo sapien
gaaggcttgttaaggctggacatcc

SEQ ID NO: 4321052 - DNA, 25 bp, Homo sapien
gaatgttctaagactgagtgttcca

SEQ ID NO: 4321053 - DNA, 25 bp, Homo sapien
catttcaggcacactctattggtca

SEQ ID NO: 4321054 - DNA, 25 bp, Homo sapien
tccaagagaactggtttaaggacac

SEQ ID NO: 4321055 - DNA, 25 bp, Homo sapien
taaggacacatgatctttaggacct

SEQ ID NO: 4321056 - DNA, 25 bp, Homo sapien
aataatgttgatacacaccaggaag

SEQ ID NO: 4321057 - DNA, 25 bp, Homo sapien
ggatttaggcaaggaaaggcacatc

SEQ ID NO: 4321058 - DNA, 25 bp, Homo sapien
cagctctggagggtcattatggtga

SEQ ID NO: 4321059 - DNA, 25 bp, Homo sapien
catagttggaggttaatggacagcc

SEQ ID NO: 4321060 - DNA, 25 bp, Homo sapien
taataaccctggtatgtgaagagga

SEQ ID NO: 4321061 - DNA, 25 bp, Homo sapien
gatggcatcgcttaaagtaaaccac

SEQ ID NO: 4321062 - DNA, 25 bp, Homo sapien
agttttgacgatgagaggtttccca

SEQ ID NO: 4321063 - DNA, 25 bp, Homo sapien
aataatactaatcctcgcccggctg

SEQ ID NO: 4321064 - DNA, 25 bp, Homo sapien
catgccacacgatatgccttcatta

SEQ ID NO: 4321065 - DNA, 25 bp, Homo sapien
tctttccggttggtgtgagcagccc

SEQ ID NO: 4321066 - DNA, 25 bp, Homo sapien
tgaactgtaagggagcagagacaca

SEQ ID NO: 4321067 - DNA, 25 bp, Homo sapien
gaaggaccatccaaattcaccggat

SEQ ID NO: 4321068 - DNA, 25 bp, Homo sapien
tggagtagttcaattccagcaacat

SEQ ID NO: 4321069 - DNA, 25 bp, Homo sapien
aattccagcaacataacaacttact

SEQ ID NO: 4321070 - DNA, 25 bp, Homo sapien
tggtggagtagttcaattccagcaa

SEQ ID NO: 4321071 - DNA, 25 bp, Homo sapien
acataacaacttactgagcccagtg

SEQ ID NO: 4321072 - DNA, 25 bp, Homo sapien
aatgtgacagggcagttaatacgtg

SEQ ID NO: 4321073 - DNA, 25 bp, Homo sapien
ctctttggtccctaaagagacagga

SEQ ID NO: 4321074 - DNA, 25 bp, Homo sapien
cagtaaagagcttttcaggcaatgt

SEQ ID NO: 4321075 - DNA, 25 bp, Homo sapien
aacatggctggataaaagcacagta

SEQ ID NO: 4321076 - DNA, 25 bp, Homo sapien
caaatgcaagcacaaagtccgatca

SEQ ID NO: 4321077 - DNA, 25 bp, Homo sapien
ggagatggagaatgcccgtggcaat

SEQ ID NO: 4321078 - DNA, 25 bp, Homo sapien
caatggtgggatataagcttcggca

SEQ ID NO: 4321079 - DNA, 25 bp, Homo sapien
aaagtccgatcaaagccccaaagca

SEQ ID NO: 4321080 - DNA, 25 bp, Homo sapien
aaaaggaactggcaacgccaaagat

SEQ ID NO: 4321081 - DNA, 25 bp, Homo sapien
taaaaggaactggcaacgccaaaga

SEQ ID NO: 4321082 - DNA, 25 bp, Homo sapien
tttgacaggcctgacaactcactga

SEQ ID NO: 4321083 - DNA, 25 bp, Homo sapien
tccgcagattcaactaaccaagggt

SEQ ID NO: 4321084 - DNA, 25 bp, Homo sapien
tagaaagtaggtacagtcagccctc

SEQ ID NO: 4321085 - DNA, 25 bp, Homo sapien
actgagggttcactatgttccatgc

SEQ ID NO: 4321086 - DNA, 25 bp, Homo sapien
cgctattgtggtttccgggatcaac

SEQ ID NO: 4321087 - DNA, 25 bp, Homo sapien
actgctcagttagtgtgaaactcac

SEQ ID NO: 4321088 - DNA, 25 bp, Homo sapien
cacattttgtgaccacatcaaatga

SEQ ID NO: 4321089 - DNA, 25 bp, Homo sapien
ggtcctaaggagatcaatcccgcta

SEQ ID NO: 4321090 - DNA, 25 bp, Homo sapien
gcactgtatctggagtcaacaccaa

SEQ ID NO: 4321091 - DNA, 25 bp, Homo sapien
gaatatttcaggcatgctcccgcca

SEQ ID NO: 4321092 - DNA, 25 bp, Homo sapien
tatcaaccatattcccatctcaggg

SEQ ID NO: 4321093 - DNA, 25 bp, Homo sapien
tcaagtgctcctgtaacctcataag

SEQ ID NO: 4321094 - DNA, 25 bp, Homo sapien
ctgtgccattgtatcgaaaaagtgc

SEQ ID NO: 4321095 - DNA, 25 bp, Homo sapien
tggtgatacaccgtctccacaatcc

SEQ ID NO: 4321096 - DNA, 25 bp, Homo sapien
tctggtgggctataccaatgcatgt

SEQ ID NO: 4321097 - DNA, 25 bp, Homo sapien
gaactggacttcgatattcatacca

SEQ ID NO: 4321098 - DNA, 25 bp, Homo sapien
caagcaattacaaatgctgtagcaa

SEQ ID NO: 4321099 - DNA, 25 bp, Homo sapien
acaagcaattacaaatgctgtagca

SEQ ID NO: 4321100 - DNA, 25 bp, Homo sapien
atgctgtagcaaaacggttatccat

SEQ ID NO: 4321101 - DNA, 25 bp, Homo sapien
aaatgctgtagcaaaacggttatcc

SEQ ID NO: 4321102 - DNA, 25 bp, Homo sapien
cagaggtcttgttctctagtctatc

SEQ ID NO: 4321103 - DNA, 25 bp, Homo sapien
catggtcagcagtgtaccgtgcaca

SEQ ID NO: 4321104 - DNA, 25 bp, Homo sapien
taaatggccgcggtaaaatgactca

SEQ ID NO: 4321105 - DNA, 25 bp, Homo sapien
tggacagggctcaacggcagtagta

SEQ ID NO: 4321106 - DNA, 25 bp, Homo sapien
aatgactcaaggcagatcgcgctga

SEQ ID NO: 4321107 - DNA, 25 bp, Homo sapien
cgggaacatggaaccgcgacgcgac

SEQ ID NO: 4321108 - DNA, 25 bp, Homo sapien
gcggttcgtccaagccggacgcctg

SEQ ID NO: 4321109 - DNA, 25 bp, Homo sapien
tcccagcactgggaacggcggttcg

SEQ ID NO: 4321110 - DNA, 25 bp, Homo sapien
cctgggacaaatccgccgctcggaa

SEQ ID NO: 4321111 - DNA, 25 bp, Homo sapien
gctcagaccacagcaccctactctc

SEQ ID NO: 4321112 - DNA, 25 bp, Homo sapien
cagcttcaccctctagctcagacca

SEQ ID NO: 4321113 - DNA, 25 bp, Homo sapien
cccgcgcctcctctgacgcacttcc

SEQ ID NO: 4321114 - DNA, 25 bp, Homo sapien
gcgcctcctctgacgcacttccctg

SEQ ID NO: 4321115 - DNA, 25 bp, Homo sapien
cactaccaaactaggaggcagggac

SEQ ID NO: 4321116 - DNA, 25 bp, Homo sapien
tcaactccttcactaccaaactagg

SEQ ID NO: 4321117 - DNA, 25 bp, Homo sapien
tccttcactaccaaactaggaggca

SEQ ID NO: 4321118 - DNA, 25 bp, Homo sapien
ttcaactccttcactaccaaactag

SEQ ID NO: 4321119 - DNA, 25 bp, Homo sapien
tggcgacaaggcacgcagggagcag

SEQ ID NO: 4321120 - DNA, 25 bp, Homo sapien
ccgggacagcgtgcggcgaccggga

SEQ ID NO: 4321121 - DNA, 25 bp, Homo sapien
ttttcggaggcatggcgacaaggca

SEQ ID NO: 4321122 - DNA, 25 bp, Homo sapien
gagcaggcgcggaccgggacagcgt

SEQ ID NO: 4321123 - DNA, 25 bp, Homo sapien
gaagctctggactaaccaccaaatg

SEQ ID NO: 4321124 - DNA, 25 bp, Homo sapien
caggcctgggatcgtatcatacaca

SEQ ID NO: 4321125 - DNA, 25 bp, Homo sapien
actgaccaacctagtgtgaacctgg

SEQ ID NO: 4321126 - DNA, 25 bp, Homo sapien
tgtttctgggaagacctgcaaagga

SEQ ID NO: 4321127 - DNA, 25 bp, Homo sapien
taaagaagcatctctaggactgtgg

SEQ ID NO: 4321128 - DNA, 25 bp, Homo sapien
acttgcatgagtgttgaccgctacc

SEQ ID NO: 4321129 - DNA, 25 bp, Homo sapien
cattgtgtggccagtcgtatccagg

SEQ ID NO: 4321130 - DNA, 25 bp, Homo sapien
ggattattactatgctacgagccca

SEQ ID NO: 4321131 - DNA, 25 bp, Homo sapien
tgtgtgcccattaccagcaatcagg

SEQ ID NO: 4321132 - DNA, 25 bp, Homo sapien
tgagcattgtgacctgctactgttg

SEQ ID NO: 4321133 - DNA, 25 bp, Homo sapien
tactgttgcattgcaaggaagctgt

SEQ ID NO: 4321134 - DNA, 25 bp, Homo sapien
ggcaactccaattaaactcatatgg

SEQ ID NO: 4321135 - DNA, 25 bp, Homo sapien
taactttacatgaaccttgcccagc

SEQ ID NO: 4321136 - DNA, 25 bp, Homo sapien
agatgccctttcatttggccttgag

SEQ ID NO: 4321137 - DNA, 25 bp, Homo sapien
cacagtgatttaatgagatgccctt

SEQ ID NO: 4321138 - DNA, 25 bp, Homo sapien
tggccttgagttagagcaaaagcaa

SEQ ID NO: 4321139 - DNA, 25 bp, Homo sapien
gcatcctgcatagtgactcatctgg

SEQ ID NO: 4321140 - DNA, 25 bp, Homo sapien
tgtttctttctaggatgacccgctg

SEQ ID NO: 4321141 - DNA, 25 bp, Homo sapien
taatccctacattggccttgagacc

SEQ ID NO: 4321142 - DNA, 25 bp, Homo sapien
catgcaggcaggacctttattctcc

SEQ ID NO: 4321143 - DNA, 25 bp, Homo sapien
ggggaagagaagaagccacatcttc

SEQ ID NO: 4321144 - DNA, 25 bp, Homo sapien
ggaagagaagaagccacatcttcat

SEQ ID NO: 4321145 - DNA, 25 bp, Homo sapien
aagagaagaagccacatcttcattt

SEQ ID NO: 4321146 - DNA, 25 bp, Homo sapien
atgggggaagagaagaagccacatc

SEQ ID NO: 4321147 - DNA, 25 bp, Homo sapien
ctggccaacggcagctgccggaaat

SEQ ID NO: 4321148 - DNA, 25 bp, Homo sapien
ccaacggcagctgccggaaatgaat

SEQ ID NO: 4321149 - DNA, 25 bp, Homo sapien
agccactgaaccatccttaggcgaa

SEQ ID NO: 4321150 - DNA, 25 bp, Homo sapien
ccttaggcgaatgaatggcttccat

SEQ ID NO: 4321151 - DNA, 25 bp, Homo sapien
gctagttgaagtactttccaaagca

SEQ ID NO: 4321152 - DNA, 25 bp, Homo sapien
cccgtgaagccagtaaaagacattt

SEQ ID NO: 4321153 - DNA, 25 bp, Homo sapien
acagttcgttgaaagtgtatcctca

SEQ ID NO: 4321154 - DNA, 25 bp, Homo sapien
agtgccaaaataagtacccgtgaag

SEQ ID NO: 4321155 - DNA, 25 bp, Homo sapien
aaggggaagatcacaggttactaca

SEQ ID NO: 4321156 - DNA, 25 bp, Homo sapien
gaagatcacaggttactacatcact

SEQ ID NO: 4321157 - DNA, 25 bp, Homo sapien
gatcacaggttactacatcactgct

SEQ ID NO: 4321158 - DNA, 25 bp, Homo sapien
gggaagatcacaggttactacatca

SEQ ID NO: 4321159 - DNA, 25 bp, Homo sapien
tctgaagccatagggtccatcagag

SEQ ID NO: 4321160 - DNA, 25 bp, Homo sapien
gaagccatagggtccatcagagaat

SEQ ID NO: 4321161 - DNA, 25 bp, Homo sapien
ctattctgaagccatagggtccatc

SEQ ID NO: 4321162 - DNA, 25 bp, Homo sapien
catagggtccatcagagaatcagga

SEQ ID NO: 4321163 - DNA, 25 bp, Homo sapien
caacaggtgggaagtcaatgctgaa

SEQ ID NO: 4321164 - DNA, 25 bp, Homo sapien
taaagtgctgaacagtcatttgccc

SEQ ID NO: 4321165 - DNA, 25 bp, Homo sapien
gaaaggcaatttactgccacatcta

SEQ ID NO: 4321166 - DNA, 25 bp, Homo sapien
ttttgactagagaaagtgaaaggca

SEQ ID NO: 4321167 - DNA, 25 bp, Homo sapien
tcctaccgtaaagtcctttagcaga

SEQ ID NO: 4321168 - DNA, 25 bp, Homo sapien
aaaacgtggcctaatgtagcaaagg

SEQ ID NO: 4321169 - DNA, 25 bp, Homo sapien
ttagcagaaatggttcacgatgggc

SEQ ID NO: 4321170 - DNA, 25 bp, Homo sapien
aaacgtggcctaatgtagcaaaggt

SEQ ID NO: 4321171 - DNA, 25 bp, Homo sapien
gaacagcggtaatgtaatggcaaca

SEQ ID NO: 4321172 - DNA, 25 bp, Homo sapien
cagaaaagacatttgggcaccatgt

SEQ ID NO: 4321173 - DNA, 25 bp, Homo sapien
tagaagcctgcctatctgtggtctc

SEQ ID NO: 4321174 - DNA, 25 bp, Homo sapien
caaatatctgatgaccctggctatc

SEQ ID NO: 4321175 - DNA, 25 bp, Homo sapien
tctcccaatcataaagtgagacatg

SEQ ID NO: 4321176 - DNA, 25 bp, Homo sapien
tcaggcaactcgcagttcagagatg

SEQ ID NO: 4321177 - DNA, 25 bp, Homo sapien
gcatttagacattcaacattactgg

SEQ ID NO: 4321178 - DNA, 25 bp, Homo sapien
taactccggccagaggtaagaagcc

SEQ ID NO: 4321179 - DNA, 25 bp, Homo sapien
acctcatcccgtgttcatttctctg

SEQ ID NO: 4321180 - DNA, 25 bp, Homo sapien
cactgcatgcacttccttgggtggc

SEQ ID NO: 4321181 - DNA, 25 bp, Homo sapien
tgttcagatagctgcttctagctgt

SEQ ID NO: 4321182 - DNA, 25 bp, Homo sapien
gagaagaccttgataatgtataaac

SEQ ID NO: 4321183 - DNA, 25 bp, Homo sapien
catccatgacagagtcagtgttgca

SEQ ID NO: 4321184 - DNA, 25 bp, Homo sapien
taagaggcattcagccagtacagct

SEQ ID NO: 4321185 - DNA, 25 bp, Homo sapien
tgatcggaagaggaaatgcagttca

SEQ ID NO: 4321186 - DNA, 25 bp, Homo sapien
tagagctggctacactgatcggaag

SEQ ID NO: 4321187 - DNA, 25 bp, Homo sapien
tacaaatgtctaagcgtcactaact

SEQ ID NO: 4321188 - DNA, 25 bp, Homo sapien
tacataattcatacttgtggcaggg

SEQ ID NO: 4321189 - DNA, 25 bp, Homo sapien
caatacaagggaatttagtcaagcc

SEQ ID NO: 4321190 - DNA, 25 bp, Homo sapien
tgggcttttagagatactgggaact

SEQ ID NO: 4321191 - DNA, 25 bp, Homo sapien
gttccacgataatgatatgtatgag

SEQ ID NO: 4321192 - DNA, 25 bp, Homo sapien
caaacattcaacgtgttccacgata

SEQ ID NO: 4321193 - DNA, 25 bp, Homo sapien
tagcagatctcttgtaagacagttg

SEQ ID NO: 4321194 - DNA, 25 bp, Homo sapien
gaatcacaaacattcaacgtgttcc

SEQ ID NO: 4321195 - DNA, 25 bp, Homo sapien
cctgttgtgatttgctcttaagagc

SEQ ID NO: 4321196 - DNA, 25 bp, Homo sapien
aagaaatcatacattaagaatcctg

SEQ ID NO: 4321197 - DNA, 25 bp, Homo sapien
gaggacattttcaatgtgtccattt

SEQ ID NO: 4321198 - DNA, 25 bp, Homo sapien
gagctgcagaatctctaatataaaa

SEQ ID NO: 4321199 - DNA, 25 bp, Homo sapien
cacattcaaaagtgcagagaatccc

SEQ ID NO: 4321200 - DNA, 25 bp, Homo sapien
cacacagtggcaaagtgccgaccag

SEQ ID NO: 4321201 - DNA, 25 bp, Homo sapien
tatcatctgcccacgaggtagggtg

SEQ ID NO: 4321202 - DNA, 25 bp, Homo sapien
taaggcacgggtaactgccacacag

SEQ ID NO: 4321203 - DNA, 25 bp, Homo sapien
ccagtcccttggatggcgtagaact

SEQ ID NO: 4321204 - DNA, 25 bp, Homo sapien
tggatggcgtagaacttccagaatt

SEQ ID NO: 4321205 - DNA, 25 bp, Homo sapien
ccttggatggcgtagaacttccaga

SEQ ID NO: 4321206 - DNA, 25 bp, Homo sapien
agtcccttggatggcgtagaacttc

SEQ ID NO: 4321207 - DNA, 25 bp, Homo sapien
gcaaaaaacgtcataaaaaatgaca

SEQ ID NO: 4321208 - DNA, 25 bp, Homo sapien
tttgtctctactgtgcctgatgtgc

SEQ ID NO: 4321209 - DNA, 25 bp, Homo sapien
ttgtctctactgtgcctgatgtgcc

SEQ ID NO: 4321210 - DNA, 25 bp, Homo sapien
actttgtgccccgatcatacagcag

SEQ ID NO: 4321211 - DNA, 25 bp, Homo sapien
cgggcagttagaggtaaagacatca

SEQ ID NO: 4321212 - DNA, 25 bp, Homo sapien
tgccccgatcatacagcagattaaa

SEQ ID NO: 4321213 - DNA, 25 bp, Homo sapien
agaggccaaactttgtgccccgatc

SEQ ID NO: 4321214 - DNA, 25 bp, Homo sapien
tagattctgccccaacatagagcag

SEQ ID NO: 4321215 - DNA, 25 bp, Homo sapien
tcccatcagctggaactggcacaga

SEQ ID NO: 4321216 - DNA, 25 bp, Homo sapien
catagagcagtcacaatacaaggtt

SEQ ID NO: 4321217 - DNA, 25 bp, Homo sapien
caaataacattaagggccagctcaa

SEQ ID NO: 4321218 - DNA, 25 bp, Homo sapien
ccttttgtatgtggaacttgtcaaa

SEQ ID NO: 4321219 - DNA, 25 bp, Homo sapien
aataccttcttatgtctgtttcaaa

SEQ ID NO: 4321220 - DNA, 25 bp, Homo sapien
caccttttgtatgtggaacttgtca

SEQ ID NO: 4321221 - DNA, 25 bp, Homo sapien
aataatttcatcttttggctacctt

SEQ ID NO: 4321222 - DNA, 25 bp, Homo sapien
aaagacagtgttgatagccccagag

SEQ ID NO: 4321223 - DNA, 25 bp, Homo sapien
tcttaggccccagagtttattgcca

SEQ ID NO: 4321224 - DNA, 25 bp, Homo sapien
ttaaggaccagagataagggaggca

SEQ ID NO: 4321225 - DNA, 25 bp, Homo sapien
accgggtagccaagatagtgcctca

SEQ ID NO: 4321226 - DNA, 25 bp, Homo sapien
tgtaagaaggaactacagccctggc

SEQ ID NO: 4321227 - DNA, 25 bp, Homo sapien
ccttggacggagagtcaagatcatc

SEQ ID NO: 4321228 - DNA, 25 bp, Homo sapien
tgtacaaagcgaaacacctcctcct

SEQ ID NO: 4321229 - DNA, 25 bp, Homo sapien
gggtgaatgagtcatcacagtgctt

SEQ ID NO: 4321230 - DNA, 25 bp, Homo sapien
gatggtgtccttacttgctgtccaa

SEQ ID NO: 4321231 - DNA, 25 bp, Homo sapien
agcggcgccaaaccagggatcaaat

SEQ ID NO: 4321232 - DNA, 25 bp, Homo sapien
tcctcaactaatgtcaggatggtgt

SEQ ID NO: 4321233 - DNA, 25 bp, Homo sapien
tgagcctttcaggttacagcactat

SEQ ID NO: 4321234 - DNA, 25 bp, Homo sapien
ggacaggaatcttccactaacaatg

SEQ ID NO: 4321235 - DNA, 25 bp, Homo sapien
ggtactataaacaatctctcaggtc

SEQ ID NO: 4321236 - DNA, 25 bp, Homo sapien
caaccatggtgcaaatccaagctct

SEQ ID NO: 4321237 - DNA, 25 bp, Homo sapien
gaataagctgctgccttcggaagca

SEQ ID NO: 4321238 - DNA, 25 bp, Homo sapien
tcccctctatgactactagaacagg

SEQ ID NO: 4321239 - DNA, 25 bp, Homo sapien
gacatatgaaagtttaccctgtgag

SEQ ID NO: 4321240 - DNA, 25 bp, Homo sapien
caggtttcctaagaagccatttcct

SEQ ID NO: 4321241 - DNA, 25 bp, Homo sapien
gaggcagcacataaaactattaatc

SEQ ID NO: 4321242 - DNA, 25 bp, Homo sapien
aagtagttcttttgataatctctgc

SEQ ID NO: 4321243 - DNA, 25 bp, Homo sapien
agatgcaaatccctagaactgacgc

SEQ ID NO: 4321244 - DNA, 25 bp, Homo sapien
aatcgtgacttgttggccttcttta

SEQ ID NO: 4321245 - DNA, 25 bp, Homo sapien
gaactgacgcataggtagaattcac

SEQ ID NO: 4321246 - DNA, 25 bp, Homo sapien
ctagctaccatcctagatattttat

SEQ ID NO: 4321247 - DNA, 25 bp, Homo sapien
tttaactagctaccatcctagatat

SEQ ID NO: 4321248 - DNA, 25 bp, Homo sapien
taactagctaccatcctagatattt

SEQ ID NO: 4321249 - DNA, 25 bp, Homo sapien
tttttaactagctaccatcctagat

SEQ ID NO: 4321250 - DNA, 25 bp, Homo sapien
ctaacactgcttaaagtcatctcag

SEQ ID NO: 4321251 - DNA, 25 bp, Homo sapien
aacactgcttaaagtcatctcagta

SEQ ID NO: 4321252 - DNA, 25 bp, Homo sapien
ctgcttaaagtcatctcagtaatag

SEQ ID NO: 4321253 - DNA, 25 bp, Homo sapien
cactgcttaaagtcatctcagtaat

SEQ ID NO: 4321254 - DNA, 25 bp, Homo sapien
cctgacgattttaaagctgaactcc

SEQ ID NO: 4321255 - DNA, 25 bp, Homo sapien
tactctattagtcctcctggaagga

SEQ ID NO: 4321256 - DNA, 25 bp, Homo sapien
gaaggatgctaagttctgagagaga

SEQ ID NO: 4321257 - DNA, 25 bp, Homo sapien
ccatactcttgcataaatattaaca

SEQ ID NO: 4321258 - DNA, 25 bp, Homo sapien
tttggggtagagatctggaccatgc

SEQ ID NO: 4321259 - DNA, 25 bp, Homo sapien
ttctgtgaaaatggacagcgtcttc

SEQ ID NO: 4321260 - DNA, 25 bp, Homo sapien
tctggaccatgctggtcacaagcct

SEQ ID NO: 4321261 - DNA, 25 bp, Homo sapien
aggtcacatccaccaccaaaccacc

SEQ ID NO: 4321262 - DNA, 25 bp, Homo sapien
catgggattctaatgtggacttttg

SEQ ID NO: 4321263 - DNA, 25 bp, Homo sapien
attaggacacttaatttagcagctt

SEQ ID NO: 4321264 - DNA, 25 bp, Homo sapien
gaagaccagtaaggcctaggcagaa

SEQ ID NO: 4321265 - DNA, 25 bp, Homo sapien
ttgagattcagcattactggctata

SEQ ID NO: 4321266 - DNA, 25 bp, Homo sapien
gctggaactatgtgcacaggaggca

SEQ ID NO: 4321267 - DNA, 25 bp, Homo sapien
caggtccatgagttgtcaataccag

SEQ ID NO: 4321268 - DNA, 25 bp, Homo sapien
ccaataagaataggtgtggcactgc

SEQ ID NO: 4321269 - DNA, 25 bp, Homo sapien
gtggcactgcacatgtactctgaca

SEQ ID NO: 4321270 - DNA, 25 bp, Homo sapien
tctcgcttttagatgttatgccctc

SEQ ID NO: 4321271 - DNA, 25 bp, Homo sapien
tgccctcttatctgttttaaaatgc

SEQ ID NO: 4321272 - DNA, 25 bp, Homo sapien
cattcttacttgtcatgtctcaggc

SEQ ID NO: 4321273 - DNA, 25 bp, Homo sapien
gcataatccattgcacttgccaaga

SEQ ID NO: 4321274 - DNA, 25 bp, Homo sapien
cttctacttcaaagtatctgtagtt

SEQ ID NO: 4321275 - DNA, 25 bp, Homo sapien
gagctcacgcccatagcacaaaatg

SEQ ID NO: 4321276 - DNA, 25 bp, Homo sapien
tgtagttgaaatggatagtaggagc

SEQ ID NO: 4321277 - DNA, 25 bp, Homo sapien
ttggggtggataacagagctcacgc

SEQ ID NO: 4321278 - DNA, 25 bp, Homo sapien
aaacacacccatcttgaagtacaca

SEQ ID NO: 4321279 - DNA, 25 bp, Homo sapien
cttgaagtacacagctgatgccgcc

SEQ ID NO: 4321280 - DNA, 25 bp, Homo sapien
agatttccatgaacaacagaaatgc

SEQ ID NO: 4321281 - DNA, 25 bp, Homo sapien
acacacccatcttgaagtacacagc

SEQ ID NO: 4321282 - DNA, 25 bp, Homo sapien
gctcgcccaggtcggtcacaggcgg

SEQ ID NO: 4321283 - DNA, 25 bp, Homo sapien
catcttggtcttcatgtcgcccggc

SEQ ID NO: 4321284 - DNA, 25 bp, Homo sapien
ctcccaccggtccacagaaaagttg

SEQ ID NO: 4321285 - DNA, 25 bp, Homo sapien
ctccccagcgaagtggcccgcgtcc

SEQ ID NO: 4321286 - DNA, 25 bp, Homo sapien
ctgcacatgcccgaaggcggcggtg

SEQ ID NO: 4321287 - DNA, 25 bp, Homo sapien
tgcacatgcccgaaggcggcggtgg

SEQ ID NO: 4321288 - DNA, 25 bp, Homo sapien
gctgcacatgcccgaaggcggcggt

SEQ ID NO: 4321289 - DNA, 25 bp, Homo sapien
cgctgcgctgggaccaggctcggag

SEQ ID NO: 4321290 - DNA, 25 bp, Homo sapien
gggccggcagacgcgtccggctgcg

SEQ ID NO: 4321291 - DNA, 25 bp, Homo sapien
ctctcgacgtcgagccgtgccccag

SEQ ID NO: 4321292 - DNA, 25 bp, Homo sapien
gggccgcctctcgacgtcgagccgt

SEQ ID NO: 4321293 - DNA, 25 bp, Homo sapien
gcgagctgcacaggcggaaagaacc

SEQ ID NO: 4321294 - DNA, 25 bp, Homo sapien
gcactatcacctggagcagtgcctg

SEQ ID NO: 4321295 - DNA, 25 bp, Homo sapien
gacccccggagtattgagccggcga

SEQ ID NO: 4321296 - DNA, 25 bp, Homo sapien
aacctttcgagaagagccgctgcag

SEQ ID NO: 4321297 - DNA, 25 bp, Homo sapien
agcagatccagaagctgacaaaaga

SEQ ID NO: 4321298 - DNA, 25 bp, Homo sapien
ctgacaaaagatggcctgaacacca

SEQ ID NO: 4321299 - DNA, 25 bp, Homo sapien
ctgaacaccagcaagcctgtgactg

SEQ ID NO: 4321300 - DNA, 25 bp, Homo sapien
aaaccagtgcccatcagcagatcca

SEQ ID NO: 4321301 - DNA, 25 bp, Homo sapien
gacctttgctggtgacctgcagttc

SEQ ID NO: 4321302 - DNA, 25 bp, Homo sapien
tacctgtgacctttgctggtgacct

SEQ ID NO: 4321303 - DNA, 25 bp, Homo sapien
ctgtgacctttgctggtgacctgca

SEQ ID NO: 4321304 - DNA, 25 bp, Homo sapien
ctacctgtgacctttgctggtgacc

SEQ ID NO: 4321305 - DNA, 25 bp, Homo sapien
caggtgtcatgaggaaatttgtgca

SEQ ID NO: 4321306 - DNA, 25 bp, Homo sapien
tatacacctttgtaaaacagcggca

SEQ ID NO: 4321307 - DNA, 25 bp, Homo sapien
tggctgattaaacgacaggtgtcat

SEQ ID NO: 4321308 - DNA, 25 bp, Homo sapien
aacaatctgattgtgtagcagctac

SEQ ID NO: 4321309 - DNA, 25 bp, Homo sapien
ctcctccttggttgtctgtgcgtgt

SEQ ID NO: 4321310 - DNA, 25 bp, Homo sapien
tgcatcaacagtgccaccgccactc

SEQ ID NO: 4321311 - DNA, 25 bp, Homo sapien
tgtctgtgcgtgtccacagagctgt

SEQ ID NO: 4321312 - DNA, 25 bp, Homo sapien
gttgtctgtgcgtgtccacagagct

SEQ ID NO: 4321313 - DNA, 25 bp, Homo sapien
gtgtgtgtgtactctagtggcatct

SEQ ID NO: 4321314 - DNA, 25 bp, Homo sapien
gtgtactctagtggcatctggaatg

SEQ ID NO: 4321315 - DNA, 25 bp, Homo sapien
cctttcactcacctgaaaggtgagc

SEQ ID NO: 4321316 - DNA, 25 bp, Homo sapien
ggaatgccagcaagatagcaccttt

SEQ ID NO: 4321317 - DNA, 25 bp, Homo sapien
ccagttgtggtgacataaagcttcc

SEQ ID NO: 4321318 - DNA, 25 bp, Homo sapien
aacatcggaagtctagttggaccac

SEQ ID NO: 4321319 - DNA, 25 bp, Homo sapien
tcaattctggtgacgtaaagcccag

SEQ ID NO: 4321320 - DNA, 25 bp, Homo sapien
gaaactgaggtagccataaaagcca

SEQ ID NO: 4321321 - DNA, 25 bp, Homo sapien
cctaacagtacttggagagtgtgca

SEQ ID NO: 4321322 - DNA, 25 bp, Homo sapien
tgaattgctctgcatagcaggtcca

SEQ ID NO: 4321323 - DNA, 25 bp, Homo sapien
cgggaaaaatggttacagggcagag

SEQ ID NO: 4321324 - DNA, 25 bp, Homo sapien
gagtgtgcatgagccattccctccg

SEQ ID NO: 4321325 - DNA, 25 bp, Homo sapien
tgagaagagctatccctccccagtt

SEQ ID NO: 4321326 - DNA, 25 bp, Homo sapien
tcctagaaacacgaggtaagccacg

SEQ ID NO: 4321327 - DNA, 25 bp, Homo sapien
taaggtcaaggtagggcaagcagct

SEQ ID NO: 4321328 - DNA, 25 bp, Homo sapien
cctggccccaagatgattagagcag

SEQ ID NO: 4321329 - DNA, 25 bp, Homo sapien
gggcctggacaggaacacctcttct

SEQ ID NO: 4321330 - DNA, 25 bp, Homo sapien
cataaagtttaacttgatattcttc

SEQ ID NO: 4321331 - DNA, 25 bp, Homo sapien
tacaggtgcagacttctggaaacca

SEQ ID NO: 4321332 - DNA, 25 bp, Homo sapien
ttataggtaattgaaatacaggtgc

SEQ ID NO: 4321333 - DNA, 25 bp, Homo sapien
tctcaataaatttgggcaaggatgt

SEQ ID NO: 4321334 - DNA, 25 bp, Homo sapien
tatcatctctgaatagctgtccctt

SEQ ID NO: 4321335 - DNA, 25 bp, Homo sapien
gagaacagctctcttttccataaaa

SEQ ID NO: 4321336 - DNA, 25 bp, Homo sapien
tctgaactaggccatcaaactgtat

SEQ ID NO: 4321337 - DNA, 25 bp, Homo sapien
aattttgtctaatagggtctctcac

SEQ ID NO: 4321338 - DNA, 25 bp, Homo sapien
tgaatccaaaattttgtctaatagg

SEQ ID NO: 4321339 - DNA, 25 bp, Homo sapien
atgaatccaaaattttgtctaatag

SEQ ID NO: 4321340 - DNA, 25 bp, Homo sapien
caaaattttgtctaatagggtctct

SEQ ID NO: 4321341 - DNA, 25 bp, Homo sapien
gatttctgatgagaggtttgtcagg

SEQ ID NO: 4321342 - DNA, 25 bp, Homo sapien
tctgtgctgccagttgtgtatgcaa

SEQ ID NO: 4321343 - DNA, 25 bp, Homo sapien
ttttggtaagagcataaagagtctg

SEQ ID NO: 4321344 - DNA, 25 bp, Homo sapien
tcataattagttctcaaagccagca

SEQ ID NO: 4321345 - DNA, 25 bp, Homo sapien
tgactgtttcaaggtagatgccaca

SEQ ID NO: 4321346 - DNA, 25 bp, Homo sapien
tcttcaggcatcacatcctcgccca

SEQ ID NO: 4321347 - DNA, 25 bp, Homo sapien
catcctcgcccaccgatatctcaca

SEQ ID NO: 4321348 - DNA, 25 bp, Homo sapien
ctcatgatgtatccagatcctttct

SEQ ID NO: 4321349 - DNA, 25 bp, Homo sapien
ccatgctcggcaccctcaagagttt

SEQ ID NO: 4321350 - DNA, 25 bp, Homo sapien
caccatgctcggcaccctcaagagt

SEQ ID NO: 4321351 - DNA, 25 bp, Homo sapien
tgctcggcaccctcaagagtttttt

SEQ ID NO: 4321352 - DNA, 25 bp, Homo sapien
cctccacccacaaagatgtctacat

SEQ ID NO: 4321353 - DNA, 25 bp, Homo sapien
gaatcttgagatgggaagatgatcc

SEQ ID NO: 4321354 - DNA, 25 bp, Homo sapien
ggatgatctggatgggcccaatgta

SEQ ID NO: 4321355 - DNA, 25 bp, Homo sapien
tgggaagatgatcctggatgatctg

SEQ ID NO: 4321356 - DNA, 25 bp, Homo sapien
cagatgtgattaagtgaagaatctt

SEQ ID NO: 4321357 - DNA, 25 bp, Homo sapien
ggcatcagagagctggttggcccct

SEQ ID NO: 4321358 - DNA, 25 bp, Homo sapien
tgaacctagctcaatgcatgacaag

SEQ ID NO: 4321359 - DNA, 25 bp, Homo sapien
catcatcaagatagggaacctgtct

SEQ ID NO: 4321360 - DNA, 25 bp, Homo sapien
tcatctatgagaaagcaagccttct

SEQ ID NO: 4321361 - DNA, 25 bp, Homo sapien
cgaaaggtaggggttcggctgtgct

SEQ ID NO: 4321362 - DNA, 25 bp, Homo sapien
cctcgtccctcccttcgcggtgatt

SEQ ID NO: 4321363 - DNA, 25 bp, Homo sapien
gcctcccaccactttgcaccttcct

SEQ ID NO: 4321364 - DNA, 25 bp, Homo sapien
ctcaccctccgggagacccgcagcc

SEQ ID NO: 4321365 - DNA, 25 bp, Homo sapien
ccactggcagtattagacagataat

SEQ ID NO: 4321366 - DNA, 25 bp, Homo sapien
cccagattcacaaggtaagacctat

SEQ ID NO: 4321367 - DNA, 25 bp, Homo sapien
gacagataatcaaggccaaaaacta

SEQ ID NO: 4321368 - DNA, 25 bp, Homo sapien
cttgacagaatgtacctaatagaca

SEQ ID NO: 4321369 - DNA, 25 bp, Homo sapien
tgtagccacgcaggtctcctagtgc

SEQ ID NO: 4321370 - DNA, 25 bp, Homo sapien
tgtcctgtttgacgctgtagccacg

SEQ ID NO: 4321371 - DNA, 25 bp, Homo sapien
taacttatcactgcatgactccgaa

SEQ ID NO: 4321372 - DNA, 25 bp, Homo sapien
tgactccgaacaaatagcctaactt

SEQ ID NO: 4321373 - DNA, 25 bp, Homo sapien
tgttaaacattgctagagtcaccat

SEQ ID NO: 4321374 - DNA, 25 bp, Homo sapien
cttgttaaacattgctagagtcacc

SEQ ID NO: 4321375 - DNA, 25 bp, Homo sapien
ttgttaaacattgctagagtcacca

SEQ ID NO: 4321376 - DNA, 25 bp, Homo sapien
atggtagcgataagtttgatttgcc

SEQ ID NO: 4321377 - DNA, 25 bp, Homo sapien
ttctgtgtgcggctgattttagaaa

SEQ ID NO: 4321378 - DNA, 25 bp, Homo sapien
agtttcacccttttctgtgtgcggc

SEQ ID NO: 4321379 - DNA, 25 bp, Homo sapien
tgcttccttgtatggtagcgataag

SEQ ID NO: 4321380 - DNA, 25 bp, Homo sapien
gggagagaagtagagtgtagctggt

SEQ ID NO: 4321381 - DNA, 25 bp, Homo sapien
ctggtgaggagggattgaaaatcat

SEQ ID NO: 4321382 - DNA, 25 bp, Homo sapien
gagaagtagagtgtagctggtgagg

SEQ ID NO: 4321383 - DNA, 25 bp, Homo sapien
aagtagagtgtagctggtgaggagg

SEQ ID NO: 4321384 - DNA, 25 bp, Homo sapien
cctgacttcctagtaattttgaggg

SEQ ID NO: 4321385 - DNA, 25 bp, Homo sapien
tagacactcagatatatccaacatt

SEQ ID NO: 4321386 - DNA, 25 bp, Homo sapien
ctggaagtggaatgctcaagtcaaa

SEQ ID NO: 4321387 - DNA, 25 bp, Homo sapien
gatttctgtaggatggacttctgga

SEQ ID NO: 4321388 - DNA, 25 bp, Homo sapien
caagaatgaggtaccccaacagact

SEQ ID NO: 4321389 - DNA, 25 bp, Homo sapien
gaatcaccccactatataagctgag

SEQ ID NO: 4321390 - DNA, 25 bp, Homo sapien
gcctggctaaggatttgtaatttac

SEQ ID NO: 4321391 - DNA, 25 bp, Homo sapien
gatatatctcatgaaatcagtcccc

SEQ ID NO: 4321392 - DNA, 25 bp, Homo sapien
gagaatctgatccaatgcaagccag

SEQ ID NO: 4321393 - DNA, 25 bp, Homo sapien
aatgtaaccaaaggccatctggagg

SEQ ID NO: 4321394 - DNA, 25 bp, Homo sapien
tacctagggtgcaccagagaatctg

SEQ ID NO: 4321395 - DNA, 25 bp, Homo sapien
tcttcagatggaaagcttgcctggc

SEQ ID NO: 4321396 - DNA, 25 bp, Homo sapien
ccaaataatctgagcaagacatata

SEQ ID NO: 4321397 - DNA, 25 bp, Homo sapien
atatacaaatactgagtgactacag

SEQ ID NO: 4321398 - DNA, 25 bp, Homo sapien
tgactacagtacatgccgaggtaag

SEQ ID NO: 4321399 - DNA, 25 bp, Homo sapien
ggtaagataagtacattctgggaga

SEQ ID NO: 4321400 - DNA, 25 bp, Homo sapien
gattacattagaattggtgccacag

SEQ ID NO: 4321401 - DNA, 25 bp, Homo sapien
tgcagtttagggacttcaagttcag

SEQ ID NO: 4321402 - DNA, 25 bp, Homo sapien
caagttcagaaccaaaaagcagaga

SEQ ID NO: 4321403 - DNA, 25 bp, Homo sapien
gtgccacagttgactttaaaagcat

SEQ ID NO: 4321404 - DNA, 25 bp, Homo sapien
atttagataagctcggactctgctc

SEQ ID NO: 4321405 - DNA, 25 bp, Homo sapien
ttgtggccacattcatatttagata

SEQ ID NO: 4321406 - DNA, 25 bp, Homo sapien
tgtggccacattcatatttagataa

SEQ ID NO: 4321407 - DNA, 25 bp, Homo sapien
tcatatttagataagctcggactct

SEQ ID NO: 4321408 - DNA, 25 bp, Homo sapien
agtgtgtatgtgttgtcatacttac

SEQ ID NO: 4321409 - DNA, 25 bp, Homo sapien
gggagaggcaagtgtgtatgtgttg

SEQ ID NO: 4321410 - DNA, 25 bp, Homo sapien
caagtgtgtatgtgttgtcatactt

SEQ ID NO: 4321411 - DNA, 25 bp, Homo sapien
agaggcaagtgtgtatgtgttgtca

SEQ ID NO: 4321412 - DNA, 25 bp, Homo sapien
cactcgaaccgtttacatcagcgaa

SEQ ID NO: 4321413 - DNA, 25 bp, Homo sapien
ttcactcgaaccgtttacatcagcg

SEQ ID NO: 4321414 - DNA, 25 bp, Homo sapien
cgaaccgtttacatcagcgaataaa

SEQ ID NO: 4321415 - DNA, 25 bp, Homo sapien
ccgtttacatcagcgaataaaccca

SEQ ID NO: 4321416 - DNA, 25 bp, Homo sapien
tgcaaacagtgaaacatgaacttaa

SEQ ID NO: 4321417 - DNA, 25 bp, Homo sapien
taaactggactagacccatcacatc

SEQ ID NO: 4321418 - DNA, 25 bp, Homo sapien
aatgcaaagtgcaaacagtgaaaca

SEQ ID NO: 4321419 - DNA, 25 bp, Homo sapien
aactggactagacccatcacatcca

SEQ ID NO: 4321420 - DNA, 25 bp, Homo sapien
taagatcaagtaacagccaagtcag

SEQ ID NO: 4321421 - DNA, 25 bp, Homo sapien
caggaagcctgcagaaataaacagt

SEQ ID NO: 4321422 - DNA, 25 bp, Homo sapien
tccaaagccgtatatgtatcagaca

SEQ ID NO: 4321423 - DNA, 25 bp, Homo sapien
aactgtgctgtttcctaagatcaag

SEQ ID NO: 4321424 - DNA, 25 bp, Homo sapien
aaagtgcacgatcacgcagtcctga

SEQ ID NO: 4321425 - DNA, 25 bp, Homo sapien
aacaagtggtgacatggaagctgcc

SEQ ID NO: 4321426 - DNA, 25 bp, Homo sapien
taccgtgcgttattgccagtcaggc

SEQ ID NO: 4321427 - DNA, 25 bp, Homo sapien
ggaacacgcaaggatgagaccaggc

SEQ ID NO: 4321428 - DNA, 25 bp, Homo sapien
ggttgcatactcaggccccgtaatt

SEQ ID NO: 4321429 - DNA, 25 bp, Homo sapien
cccgtaattgggagtggttcagcat

SEQ ID NO: 4321430 - DNA, 25 bp, Homo sapien
catgataaacttcctgccctggtga

SEQ ID NO: 4321431 - DNA, 25 bp, Homo sapien
tgtattgtaagttcccactagtggg

SEQ ID NO: 4321432 - DNA, 25 bp, Homo sapien
ctgtggtgacttctcttggactcag

SEQ ID NO: 4321433 - DNA, 25 bp, Homo sapien
gtggtgacttctcttggactcaggt

SEQ ID NO: 4321434 - DNA, 25 bp, Homo sapien
cttctcttggactcaggtgattaac

SEQ ID NO: 4321435 - DNA, 25 bp, Homo sapien
gacttctcttggactcaggtgatta

SEQ ID NO: 4321436 - DNA, 25 bp, Homo sapien
tccactgcttttgcaggaagaaact

SEQ ID NO: 4321437 - DNA, 25 bp, Homo sapien
tagcgaactggggtttcctcatggt

SEQ ID NO: 4321438 - DNA, 25 bp, Homo sapien
tcatggtccactgcttttgcaggaa

SEQ ID NO: 4321439 - DNA, 25 bp, Homo sapien
ttcgctgctgctatagcgaactggg

SEQ ID NO: 4321440 - DNA, 25 bp, Homo sapien
cttcattgtgacggcaagccaaaga

SEQ ID NO: 4321441 - DNA, 25 bp, Homo sapien
gacggcaagccaaagagaccattaa

SEQ ID NO: 4321442 - DNA, 25 bp, Homo sapien
ttgtgacggcaagccaaagagacca

SEQ ID NO: 4321443 - DNA, 25 bp, Homo sapien
cattgtgacggcaagccaaagagac

SEQ ID NO: 4321444 - DNA, 25 bp, Homo sapien
tgacaactcatcatgggagacctcc

SEQ ID NO: 4321445 - DNA, 25 bp, Homo sapien
gctcctaagagctgatccagtagtg

SEQ ID NO: 4321446 - DNA, 25 bp, Homo sapien
gacctcccgattcctaaactgctgg

SEQ ID NO: 4321447 - DNA, 25 bp, Homo sapien
gaataaccatggcagaggacaaaca

SEQ ID NO: 4321448 - DNA, 25 bp, Homo sapien
aatgccattgttctaacagtgtcgg

SEQ ID NO: 4321449 - DNA, 25 bp, Homo sapien
gagactttgcagaagggtaaaaatg

SEQ ID NO: 4321450 - DNA, 25 bp, Homo sapien
ggtgagaactgaagagtaatgccat

SEQ ID NO: 4321451 - DNA, 25 bp, Homo sapien
acttaggaattacaagagactttgc

SEQ ID NO: 4321452 - DNA, 25 bp, Homo sapien
ggagcgacatccctctgatagaaat

SEQ ID NO: 4321453 - DNA, 25 bp, Homo sapien
ctgtaggggagcgacatccctctga

SEQ ID NO: 4321454 - DNA, 25 bp, Homo sapien
cctctgatagaaatgagatgcaaag

SEQ ID NO: 4321455 - DNA, 25 bp, Homo sapien
gacatccctctgatagaaatgagat

SEQ ID NO: 4321456 - DNA, 25 bp, Homo sapien
tgcccggtcccagtaaggtaagtca

SEQ ID NO: 4321457 - DNA, 25 bp, Homo sapien
cggtcccagtaaggtaagtcatagg

SEQ ID NO: 4321458 - DNA, 25 bp, Homo sapien
ccggtcccagtaaggtaagtcatag

SEQ ID NO: 4321459 - DNA, 25 bp, Homo sapien
ggccttggtatgtgatattcccctt

SEQ ID NO: 4321460 - DNA, 25 bp, Homo sapien
tcttaattcaatctatcattcatgg

SEQ ID NO: 4321461 - DNA, 25 bp, Homo sapien
taattcaatctatcattcatggaca

SEQ ID NO: 4321462 - DNA, 25 bp, Homo sapien
aggccttggtatgtgatattcccct

SEQ ID NO: 4321463 - DNA, 25 bp, Homo sapien
gacatgaagtccatgtctgtgtcct

SEQ ID NO: 4321464 - DNA, 25 bp, Homo sapien
acatgaagtccatgtctgtgtcctg

SEQ ID NO: 4321465 - DNA, 25 bp, Homo sapien
catgaagtccatgtctgtgtcctga

SEQ ID NO: 4321466 - DNA, 25 bp, Homo sapien
agacatgaagtccatgtctgtgtcc

SEQ ID NO: 4321467 - DNA, 25 bp, Homo sapien
tgacttctgcagcttttcaatgtgt

SEQ ID NO: 4321468 - DNA, 25 bp, Homo sapien
ttatttcttgacttctgcagctttt

SEQ ID NO: 4321469 - DNA, 25 bp, Homo sapien
tcttgacttctgcagcttttcaatg

SEQ ID NO: 4321470 - DNA, 25 bp, Homo sapien
atttcttgacttctgcagcttttca

SEQ ID NO: 4321471 - DNA, 25 bp, Homo sapien
gtatatgtgctgccgaagtgagcac

SEQ ID NO: 4321472 - DNA, 25 bp, Homo sapien
tctctgtgtcgttccaatgttagta

SEQ ID NO: 4321473 - DNA, 25 bp, Homo sapien
tcttctctgtgtcgttccaatgtta

SEQ ID NO: 4321474 - DNA, 25 bp, Homo sapien
ctctgtgtcgttccaatgttagtat

SEQ ID NO: 4321475 - DNA, 25 bp, Homo sapien
tagatgccctatattgctaggacaa

SEQ ID NO: 4321476 - DNA, 25 bp, Homo sapien
gctaggacaacaaatttatggcatc

SEQ ID NO: 4321477 - DNA, 25 bp, Homo sapien
gctctggattcaataagctgcagct

SEQ ID NO: 4321478 - DNA, 25 bp, Homo sapien
gcatcaatattagccataggttgta

SEQ ID NO: 4321479 - DNA, 25 bp, Homo sapien
tgcgggcctcatcactactatcact

SEQ ID NO: 4321480 - DNA, 25 bp, Homo sapien
caagactgggcatgtggtggtaact

SEQ ID NO: 4321481 - DNA, 25 bp, Homo sapien
cctgttcatgaagctgggatccact

SEQ ID NO: 4321482 - DNA, 25 bp, Homo sapien
cgtagaggtgcatgttgtcaagact

SEQ ID NO: 4321483 - DNA, 25 bp, Homo sapien
cttcacatttggtagttttggactc

SEQ ID NO: 4321484 - DNA, 25 bp, Homo sapien
taattaccttaactctcactctcaa

SEQ ID NO: 4321485 - DNA, 25 bp, Homo sapien
ttggactcaggtgaactagttatgt

SEQ ID NO: 4321486 - DNA, 25 bp, Homo sapien
taactctcactctcaaacaggtaaa

SEQ ID NO: 4321487 - DNA, 25 bp, Homo sapien
gagagtagtgaggaccatgaccagc

SEQ ID NO: 4321488 - DNA, 25 bp, Homo sapien
gcacacactaatatgagaatgagag

SEQ ID NO: 4321489 - DNA, 25 bp, Homo sapien
agtgccaagcacacactaatatgag

SEQ ID NO: 4321490 - DNA, 25 bp, Homo sapien
gcacagggacaagaactgcagccag

SEQ ID NO: 4321491 - DNA, 25 bp, Homo sapien
ctaagcctgagagtcaacatgttta

SEQ ID NO: 4321492 - DNA, 25 bp, Homo sapien
taagcctgagagtcaacatgtttag

SEQ ID NO: 4321493 - DNA, 25 bp, Homo sapien
tctgatatcaggactggcagttgtt

SEQ ID NO: 4321494 - DNA, 25 bp, Homo sapien
gaaattcattgctactgcgaggttg

SEQ ID NO: 4321495 - DNA, 25 bp, Homo sapien
catttggagttacggtagtatttct

SEQ ID NO: 4321496 - DNA, 25 bp, Homo sapien
cgaggttgtagtggttgcgtaaatt

SEQ ID NO: 4321497 - DNA, 25 bp, Homo sapien
cattgctgttccgaggaggtggagg

SEQ ID NO: 4321498 - DNA, 25 bp, Homo sapien
ttttgaggtcattgctgttccgagg

SEQ ID NO: 4321499 - DNA, 25 bp, Homo sapien
agtgtttttgaggtcattgctgttc

SEQ ID NO: 4321500 - DNA, 25 bp, Homo sapien
ttgaggtcattgctgttccgaggag

SEQ ID NO: 4321501 - DNA, 25 bp, Homo sapien
gctgccattgggtaggattcactct

SEQ ID NO: 4321502 - DNA, 25 bp, Homo sapien
aaactgacatccgagcagctccatt

SEQ ID NO: 4321503 - DNA, 25 bp, Homo sapien
cgagcagctccattttcatggcaat

SEQ ID NO: 4321504 - DNA, 25 bp, Homo sapien
aggaataaactgacatccgagcagc

SEQ ID NO: 4321505 - DNA, 25 bp, Homo sapien
aataaaacgtgcaataattggtggc

SEQ ID NO: 4321506 - DNA, 25 bp, Homo sapien
aaagttattacgcacatcctggtga

SEQ ID NO: 4321507 - DNA, 25 bp, Homo sapien
catcctggtgataatctttgtttcc

SEQ ID NO: 4321508 - DNA, 25 bp, Homo sapien
ttggtggcaaaaagttattacgcac

SEQ ID NO: 4321509 - DNA, 25 bp, Homo sapien
gccctatacgtacctgagaaactgg

SEQ ID NO: 4321510 - DNA, 25 bp, Homo sapien
tgcacatgtgcaggctcagaaaagg

SEQ ID NO: 4321511 - DNA, 25 bp, Homo sapien
tgggaattccttacactgccaagag

SEQ ID NO: 4321512 - DNA, 25 bp, Homo sapien
gcaggacaagtctcacagctccgta

SEQ ID NO: 4321513 - DNA, 25 bp, Homo sapien
aagatgaagttcatgtgacgccaag

SEQ ID NO: 4321514 - DNA, 25 bp, Homo sapien
tgacgccaagtagaagagaagaaag

SEQ ID NO: 4321515 - DNA, 25 bp, Homo sapien
tgaaagataatgagcccctggaggt

SEQ ID NO: 4321516 - DNA, 25 bp, Homo sapien
gcccagccccatagttttggtactg

SEQ ID NO: 4321517 - DNA, 25 bp, Homo sapien
tcatcactgtacaggattctgtagg

SEQ ID NO: 4321518 - DNA, 25 bp, Homo sapien
tacaggattctgtaggcagacacat

SEQ ID NO: 4321519 - DNA, 25 bp, Homo sapien
caccaggctctctgtacacagtcca

SEQ ID NO: 4321520 - DNA, 25 bp, Homo sapien
cactgtacaggattctgtaggcaga

SEQ ID NO: 4321521 - DNA, 25 bp, Homo sapien
tgatgctgttatttgaggatccgcg

SEQ ID NO: 4321522 - DNA, 25 bp, Homo sapien
ggtttccaactgttctcttgccctg

SEQ ID NO: 4321523 - DNA, 25 bp, Homo sapien
aaagcagcccaaggcggtccaggtt

SEQ ID NO: 4321524 - DNA, 25 bp, Homo sapien
cctgtgtggtcagtccactccagca

SEQ ID NO: 4321525 - DNA, 25 bp, Homo sapien
ccaggtataatttcaaaatgcatgt

SEQ ID NO: 4321526 - DNA, 25 bp, Homo sapien
gtttccaggtataatttcaaaatgc

SEQ ID NO: 4321527 - DNA, 25 bp, Homo sapien
ggtataatttcaaaatgcatgtaga

SEQ ID NO: 4321528 - DNA, 25 bp, Homo sapien
gtataatttcaaaatgcatgtagac

SEQ ID NO: 4321529 - DNA, 25 bp, Homo sapien
taaaaagacttgtagataagtgtcc

SEQ ID NO: 4321530 - DNA, 25 bp, Homo sapien
tcttaaatgtaaaaagacttgtaga

SEQ ID NO: 4321531 - DNA, 25 bp, Homo sapien
cttaaatgtaaaaagacttgtagat

SEQ ID NO: 4321532 - DNA, 25 bp, Homo sapien
atgtaaaaagacttgtagataagtg

SEQ ID NO: 4321533 - DNA, 25 bp, Homo sapien
tgacactactcctgcatgcacacca

SEQ ID NO: 4321534 - DNA, 25 bp, Homo sapien
caccagccatgcacaatggcgagga

SEQ ID NO: 4321535 - DNA, 25 bp, Homo sapien
accacagatgtgacgttgttagcca

SEQ ID NO: 4321536 - DNA, 25 bp, Homo sapien
gatttggccgcccaacgtgtttgac

SEQ ID NO: 4321537 - DNA, 25 bp, Homo sapien
ccagatatctcagcaaaaggaagca

SEQ ID NO: 4321538 - DNA, 25 bp, Homo sapien
gaattgttccagatatctcagcaaa

SEQ ID NO: 4321539 - DNA, 25 bp, Homo sapien
ttgttccagatatctcagcaaaagg

SEQ ID NO: 4321540 - DNA, 25 bp, Homo sapien
atgaggaattgttccagatatctca

SEQ ID NO: 4321541 - DNA, 25 bp, Homo sapien
tggatgcagtgtccaaacaagtaat

SEQ ID NO: 4321542 - DNA, 25 bp, Homo sapien
ttggatgcagtgtccaaacaagtaa

SEQ ID NO: 4321543 - DNA, 25 bp, Homo sapien
aaattggatgcagtgtccaaacaag

SEQ ID NO: 4321544 - DNA, 25 bp, Homo sapien
gatgcagtgtccaaacaagtaatta

SEQ ID NO: 4321545 - DNA, 25 bp, Homo sapien
tgacagaatgctattgcctacattg

SEQ ID NO: 4321546 - DNA, 25 bp, Homo sapien
aaatctttgacagttcctatgacag

SEQ ID NO: 4321547 - DNA, 25 bp, Homo sapien
tattaaataggcagtcctttctaca

SEQ ID NO: 4321548 - DNA, 25 bp, Homo sapien
gacagttcctatgacagaatgctat

SEQ ID NO: 4321549 - DNA, 25 bp, Homo sapien
tatacatattctgctagctttaagg

SEQ ID NO: 4321550 - DNA, 25 bp, Homo sapien
gaatgtttttctgcgtctcactgtc

SEQ ID NO: 4321551 - DNA, 25 bp, Homo sapien
tgtcagccaggctcattaccaactc

SEQ ID NO: 4321552 - DNA, 25 bp, Homo sapien
tctcttgtaacaatgccttagctgc

SEQ ID NO: 4321553 - DNA, 25 bp, Homo sapien
gaactagtgcaatcgttaggaggac

SEQ ID NO: 4321554 - DNA, 25 bp, Homo sapien
tctggccctgtgtcgttcctgagtg

SEQ ID NO: 4321555 - DNA, 25 bp, Homo sapien
gatctacatggagaaccgtctgacc

SEQ ID NO: 4321556 - DNA, 25 bp, Homo sapien
tggctccaaagtcccagtgaaggga

SEQ ID NO: 4321557 - DNA, 25 bp, Homo sapien
gcttatttcacaacacagtgacttc

SEQ ID NO: 4321558 - DNA, 25 bp, Homo sapien
tatttgcttatccatgcttggctta

SEQ ID NO: 4321559 - DNA, 25 bp, Homo sapien
tgagatttacgtttttagctcccaa

SEQ ID NO: 4321560 - DNA, 25 bp, Homo sapien
cagtaaccaccagtctattctctaa

SEQ ID NO: 4321561 - DNA, 25 bp, Homo sapien
ttctgattgtttacagtggcagagg

SEQ ID NO: 4321562 - DNA, 25 bp, Homo sapien
taaatagccacttgcatcttaagga

SEQ ID NO: 4321563 - DNA, 25 bp, Homo sapien
gttgtcccttgcctgaaaatggttg

SEQ ID NO: 4321564 - DNA, 25 bp, Homo sapien
ggtaccagttagtaattgccagagg

SEQ ID NO: 4321565 - DNA, 25 bp, Homo sapien
aatgcagtcgagttgttttcttgat

SEQ ID NO: 4321566 - DNA, 25 bp, Homo sapien
ggaatgcagtcgagttgttttcttg

SEQ ID NO: 4321567 - DNA, 25 bp, Homo sapien
ctggaatgcagtcgagttgttttct

SEQ ID NO: 4321568 - DNA, 25 bp, Homo sapien
gctggaatgcagtcgagttgttttc

SEQ ID NO: 4321569 - DNA, 25 bp, Homo sapien
ccagatgtcattctaggcaccagag

SEQ ID NO: 4321570 - DNA, 25 bp, Homo sapien
ttccttcgtatagggagtatacctc

SEQ ID NO: 4321571 - DNA, 25 bp, Homo sapien
tcagatcaggcatcactgtgaagat

SEQ ID NO: 4321572 - DNA, 25 bp, Homo sapien
agcatgtgttatgaccagatgtcat

SEQ ID NO: 4321573 - DNA, 25 bp, Homo sapien
caaactgtaggaaccattgcaaaag

SEQ ID NO: 4321574 - DNA, 25 bp, Homo sapien
attacaaactgtaggaaccattgca

SEQ ID NO: 4321575 - DNA, 25 bp, Homo sapien
gaaccattgcaaaaggtgaaaatta

SEQ ID NO: 4321576 - DNA, 25 bp, Homo sapien
tgtaggaaccattgcaaaaggtgaa

SEQ ID NO: 4321577 - DNA, 25 bp, Homo sapien
cactcatgaacagcaatgtgatttc

SEQ ID NO: 4321578 - DNA, 25 bp, Homo sapien
gagtatgaggccaaaaatccgcgtc

SEQ ID NO: 4321579 - DNA, 25 bp, Homo sapien
ttgcaaccccagaccacagtatttg

SEQ ID NO: 4321580 - DNA, 25 bp, Homo sapien
gaaacatggattccactcatgaaca

SEQ ID NO: 4321581 - DNA, 25 bp, Homo sapien
aacataatgtacagcatatatacaa

SEQ ID NO: 4321582 - DNA, 25 bp, Homo sapien
atgtatacacatatgaaaacataat

SEQ ID NO: 4321583 - DNA, 25 bp, Homo sapien
cataatgtacagcatatatacaatt

SEQ ID NO: 4321584 - DNA, 25 bp, Homo sapien
tgaaaacataatgtacagcatatat

SEQ ID NO: 4321585 - DNA, 25 bp, Homo sapien
taggattgacttggcaatgccagct

SEQ ID NO: 4321586 - DNA, 25 bp, Homo sapien
attgacttggcaatgccagctcttt

SEQ ID NO: 4321587 - DNA, 25 bp, Homo sapien
tctttgtagattctcaatattagcc

SEQ ID NO: 4321588 - DNA, 25 bp, Homo sapien
ttctttgtagattctcaatattagc

SEQ ID NO: 4321589 - DNA, 25 bp, Homo sapien
gcctgactgttctagctagaacttc

SEQ ID NO: 4321590 - DNA, 25 bp, Homo sapien
tctcttttctaacttagatgccctt

SEQ ID NO: 4321591 - DNA, 25 bp, Homo sapien
tagcagtagtactgatgtgtgtatg

SEQ ID NO: 4321592 - DNA, 25 bp, Homo sapien
gattctgcttggtcattattggtat

SEQ ID NO: 4321593 - DNA, 25 bp, Homo sapien
cagttcttctttccatgtctggtaa

SEQ ID NO: 4321594 - DNA, 25 bp, Homo sapien
acccacttgatgctgaattatcttg

SEQ ID NO: 4321595 - DNA, 25 bp, Homo sapien
cttgttgatatactgctgaatctgg

SEQ ID NO: 4321596 - DNA, 25 bp, Homo sapien
gataccgggttcatagaaagaatta

SEQ ID NO: 4321597 - DNA, 25 bp, Homo sapien
tacagaagtgatctctgaaagtata

SEQ ID NO: 4321598 - DNA, 25 bp, Homo sapien
ttctaataataaactacagaagtga

SEQ ID NO: 4321599 - DNA, 25 bp, Homo sapien
aataaactacagaagtgatctctga

SEQ ID NO: 4321600 - DNA, 25 bp, Homo sapien
cagagaaactttctaataataaact

SEQ ID NO: 4321601 - DNA, 25 bp, Homo sapien
ccagtttcctccatgagttgaagca

SEQ ID NO: 4321602 - DNA, 25 bp, Homo sapien
gagttctcactctaacaggactgga

SEQ ID NO: 4321603 - DNA, 25 bp, Homo sapien
aaattgattaatgccatctcacggg

SEQ ID NO: 4321604 - DNA, 25 bp, Homo sapien
tataaagcaagtcagcctcctcggt

SEQ ID NO: 4321605 - DNA, 25 bp, Homo sapien
tcagttctgctgactccaattccat

SEQ ID NO: 4321606 - DNA, 25 bp, Homo sapien
caaatttgatgcgaactctctctcc

SEQ ID NO: 4321607 - DNA, 25 bp, Homo sapien
gcctagtacagtgtgtccacatcca

SEQ ID NO: 4321608 - DNA, 25 bp, Homo sapien
gatgtaagggttccactctcagggc

SEQ ID NO: 4321609 - DNA, 25 bp, Homo sapien
ccatcagcactatcactgacaggtt

SEQ ID NO: 4321610 - DNA, 25 bp, Homo sapien
gcactatcactgacaggttctcttt

SEQ ID NO: 4321611 - DNA, 25 bp, Homo sapien
cctcctcgacatgttctccaccaga

SEQ ID NO: 4321612 - DNA, 25 bp, Homo sapien
caaactccatcagcactatcactga

SEQ ID NO: 4321613 - DNA, 25 bp, Homo sapien
tagtctgggcctcacgtccaataca

SEQ ID NO: 4321614 - DNA, 25 bp, Homo sapien
tgatatcttcgctttctagccactg

SEQ ID NO: 4321615 - DNA, 25 bp, Homo sapien
tacaggctaattaaaggttctcagg

SEQ ID NO: 4321616 - DNA, 25 bp, Homo sapien
gatgggcactcaaagcctctcagtt

SEQ ID NO: 4321617 - DNA, 25 bp, Homo sapien
gctgtcagaattctagcctccataa

SEQ ID NO: 4321618 - DNA, 25 bp, Homo sapien
cctttcctggaccttgtacaatagg

SEQ ID NO: 4321619 - DNA, 25 bp, Homo sapien
tggaccttgtacaatagggaaaata

SEQ ID NO: 4321620 - DNA, 25 bp, Homo sapien
tcctggaccttgtacaatagggaaa

SEQ ID NO: 4321621 - DNA, 25 bp, Homo sapien
tttcctggaccttgtacaataggga

SEQ ID NO: 4321622 - DNA, 25 bp, Homo sapien
aaccgtaagccttcgggattgccag

SEQ ID NO: 4321623 - DNA, 25 bp, Homo sapien
accgtaagccttcgggattgccagc

SEQ ID NO: 4321624 - DNA, 25 bp, Homo sapien
gccttcgggattgccagcagccatg

SEQ ID NO: 4321625 - DNA, 25 bp, Homo sapien
aggaaaatgccccagcatgtggtac

SEQ ID NO: 4321626 - DNA, 25 bp, Homo sapien
aaatgccccagcatgtggtaccatg

SEQ ID NO: 4321627 - DNA, 25 bp, Homo sapien
aagtcattaacacagctccaagagg

SEQ ID NO: 4321628 - DNA, 25 bp, Homo sapien
gaaaatgccccagcatgtggtacca

SEQ ID NO: 4321629 - DNA, 25 bp, Homo sapien
gattctatactgttccaagattttt

SEQ ID NO: 4321630 - DNA, 25 bp, Homo sapien
catgtaactgattctatactgttcc

SEQ ID NO: 4321631 - DNA, 25 bp, Homo sapien
cgcgcccggtagactggccttttct

SEQ ID NO: 4321632 - DNA, 25 bp, Homo sapien
gaaggtagacatgtaactgattcta

SEQ ID NO: 4321633 - DNA, 25 bp, Homo sapien
ctccagcgtcctcgagcagcaggag

SEQ ID NO: 4321634 - DNA, 25 bp, Homo sapien
aggagcaggacaagtaagagcagga

SEQ ID NO: 4321635 - DNA, 25 bp, Homo sapien
gctccagcgtcctcgagcagcagga

SEQ ID NO: 4321636 - DNA, 25 bp, Homo sapien
gcaggagcaggacaagtaagagcag

SEQ ID NO: 4321637 - DNA, 25 bp, Homo sapien
cgcggcccggacttggggacactgc

SEQ ID NO: 4321638 - DNA, 25 bp, Homo sapien
ccgcggcccggacttggggacactg

SEQ ID NO: 4321639 - DNA, 25 bp, Homo sapien
cggctccggctagctggcaggcagg

SEQ ID NO: 4321640 - DNA, 25 bp, Homo sapien
ctcgagccgcggaggacggccgcgg

SEQ ID NO: 4321641 - DNA, 25 bp, Homo sapien
cggcggagctaaggaacgtgcctcc

SEQ ID NO: 4321642 - DNA, 25 bp, Homo sapien
ctgcctgcatagtgcgggtgcctcg

SEQ ID NO: 4321643 - DNA, 25 bp, Homo sapien
gctaaatgtctgaattccgctgaag

SEQ ID NO: 4321644 - DNA, 25 bp, Homo sapien
ctttgtcctgttgactgtttgggaa

SEQ ID NO: 4321645 - DNA, 25 bp, Homo sapien
gccaactttgctgctaaatgtctga

SEQ ID NO: 4321646 - DNA, 25 bp, Homo sapien
gtttacagccaactttgctgctaaa

SEQ ID NO: 4321647 - DNA, 25 bp, Homo sapien
ttggtgacccagatgaggtgttctc

SEQ ID NO: 4321648 - DNA, 25 bp, Homo sapien
gggtcacctccaatgctcagcaacc

SEQ ID NO: 4321649 - DNA, 25 bp, Homo sapien
agaaagctgttggtgacccagatga

SEQ ID NO: 4321650 - DNA, 25 bp, Homo sapien
tgaagaatcatatactctaatactg

SEQ ID NO: 4321651 - DNA, 25 bp, Homo sapien
tcttgtggaagatggtaggagactt

SEQ ID NO: 4321652 - DNA, 25 bp, Homo sapien
ttttgtgaatctactgtctctgctc

SEQ ID NO: 4321653 - DNA, 25 bp, Homo sapien
tgagtatggagttacagtacgactg

SEQ ID NO: 4321654 - DNA, 25 bp, Homo sapien
tggaagcacacaactgcccttctgg

SEQ ID NO: 4321655 - DNA, 25 bp, Homo sapien
tcaaaaagagacttgtggcaatttc

SEQ ID NO: 4321656 - DNA, 25 bp, Homo sapien
caaaaagagacttgtggcaatttct

SEQ ID NO: 4321657 - DNA, 25 bp, Homo sapien
aaaagagacttgtggcaatttctgg

SEQ ID NO: 4321658 - DNA, 25 bp, Homo sapien
aagagacttgtggcaatttctggac

SEQ ID NO: 4321659 - DNA, 25 bp, Homo sapien
tgcattccgcattcctcaatccatt

SEQ ID NO: 4321660 - DNA, 25 bp, Homo sapien
aatgcattccgcattcctcaatcca

SEQ ID NO: 4321661 - DNA, 25 bp, Homo sapien
agtacaatgcattccgcattcctca

SEQ ID NO: 4321662 - DNA, 25 bp, Homo sapien
ccttttagtacaatgcattccgcat

SEQ ID NO: 4321663 - DNA, 25 bp, Homo sapien
tcaaataatgagctacaagattcag

SEQ ID NO: 4321664 - DNA, 25 bp, Homo sapien
ggaggacatgccatttccggtggct

SEQ ID NO: 4321665 - DNA, 25 bp, Homo sapien
catgagattttagttgtgccttgag

SEQ ID NO: 4321666 - DNA, 25 bp, Homo sapien
tgccttgaggttggattggatttaa

SEQ ID NO: 4321667 - DNA, 25 bp, Homo sapien
tgtgtgacccgagcttgaccaatca

SEQ ID NO: 4321668 - DNA, 25 bp, Homo sapien
caaaaggaccgaatgagctatgatc

SEQ ID NO: 4321669 - DNA, 25 bp, Homo sapien
aatcccagaggttctttcccaggag

SEQ ID NO: 4321670 - DNA, 25 bp, Homo sapien
caaataagatctgcaaatggttaac

SEQ ID NO: 4321671 - DNA, 25 bp, Homo sapien
caagtctgagcatttgcactgaaca

SEQ ID NO: 4321672 - DNA, 25 bp, Homo sapien
ccaagtctgagcatttgcactgaac

SEQ ID NO: 4321673 - DNA, 25 bp, Homo sapien
aagtctgagcatttgcactgaacac

SEQ ID NO: 4321674 - DNA, 25 bp, Homo sapien
agtctgagcatttgcactgaacaca

SEQ ID NO: 4321675 - DNA, 25 bp, Homo sapien
tccaccaataccacaaaatcgtctt

SEQ ID NO: 4321676 - DNA, 25 bp, Homo sapien
ccaataccacaaaatcgtctttctg

SEQ ID NO: 4321677 - DNA, 25 bp, Homo sapien
caataccacaaaatcgtctttctgt

SEQ ID NO: 4321678 - DNA, 25 bp, Homo sapien
caccaataccacaaaatcgtctttc

SEQ ID NO: 4321679 - DNA, 25 bp, Homo sapien
ttggccactttcaacaggtgtggtc

SEQ ID NO: 4321680 - DNA, 25 bp, Homo sapien
tgacacatgggcagtgaagaaaact

SEQ ID NO: 4321681 - DNA, 25 bp, Homo sapien
gaagaaaactgctcccaaggcacct

SEQ ID NO: 4321682 - DNA, 25 bp, Homo sapien
ttcctttggccactttcaacaggtg

SEQ ID NO: 4321683 - DNA, 25 bp, Homo sapien
gtgtccatggtagccagagtgatgt

SEQ ID NO: 4321684 - DNA, 25 bp, Homo sapien
tctctccttgaaaggcactccaatg

SEQ ID NO: 4321685 - DNA, 25 bp, Homo sapien
ccttgaaaggcactccaatgaccat

SEQ ID NO: 4321686 - DNA, 25 bp, Homo sapien
gtagccagagtgatgtctctccttg

SEQ ID NO: 4321687 - DNA, 25 bp, Homo sapien
catgtccttttaccactgtcattct

SEQ ID NO: 4321688 - DNA, 25 bp, Homo sapien
tcctgttgtcctgtgcacatctccc

SEQ ID NO: 4321689 - DNA, 25 bp, Homo sapien
ctgaaagatctatacccactctcat

SEQ ID NO: 4321690 - DNA, 25 bp, Homo sapien
cactgaaagatctatacccactctc

SEQ ID NO: 4321691 - DNA, 25 bp, Homo sapien
actgaaagatctatacccactctca

SEQ ID NO: 4321692 - DNA, 25 bp, Homo sapien
gcctcatcgtagtcaattgtagcaa

SEQ ID NO: 4321693 - DNA, 25 bp, Homo sapien
aatgaggacaaagcccaagcagctt

SEQ ID NO: 4321694 - DNA, 25 bp, Homo sapien
tacatgggaagtaaaactgcctcat

SEQ ID NO: 4321695 - DNA, 25 bp, Homo sapien
ttgtagcaattacgacagcaaatga

SEQ ID NO: 4321696 - DNA, 25 bp, Homo sapien
ctgtcacaagcagttgcaggtgtca

SEQ ID NO: 4321697 - DNA, 25 bp, Homo sapien
caggactgctgtcacaagcagttgc

SEQ ID NO: 4321698 - DNA, 25 bp, Homo sapien
ccttctctttttgaccatgtctgaa

SEQ ID NO: 4321699 - DNA, 25 bp, Homo sapien
cagtcagtattctttgaacatcagg

SEQ ID NO: 4321700 - DNA, 25 bp, Homo sapien
gattagccttgaaacactgaaataa

SEQ ID NO: 4321701 - DNA, 25 bp, Homo sapien
ttagatggtgactgattagccttga

SEQ ID NO: 4321702 - DNA, 25 bp, Homo sapien
gactgattagccttgaaacactgaa

SEQ ID NO: 4321703 - DNA, 25 bp, Homo sapien
atggcacttgcaattagatggtgac

SEQ ID NO: 4321704 - DNA, 25 bp, Homo sapien
cttttaaccactccctggcgagttg

SEQ ID NO: 4321705 - DNA, 25 bp, Homo sapien
ccttcacagcagttgctgtctgcca

SEQ ID NO: 4321706 - DNA, 25 bp, Homo sapien
tatagacttctgagctcttcgtgcc

SEQ ID NO: 4321707 - DNA, 25 bp, Homo sapien
cactgcattgcacaggaaagaactt

SEQ ID NO: 4321708 - DNA, 25 bp, Homo sapien
tcagggtacactttgttgtgttcaa

SEQ ID NO: 4321709 - DNA, 25 bp, Homo sapien
gagctgaagctcagggtacactttg

SEQ ID NO: 4321710 - DNA, 25 bp, Homo sapien
ttagagctgaagctcagggtacact

SEQ ID NO: 4321711 - DNA, 25 bp, Homo sapien
gaagctcagggtacactttgttgtg

SEQ ID NO: 4321712 - DNA, 25 bp, Homo sapien
attggccagaagtagatcctgcatt

SEQ ID NO: 4321713 - DNA, 25 bp, Homo sapien
gatgctgtattgggagtccaggtgg

SEQ ID NO: 4321714 - DNA, 25 bp, Homo sapien
atgctgtattgggagtccaggtggt

SEQ ID NO: 4321715 - DNA, 25 bp, Homo sapien
ctattggccagaagtagatcctgca

SEQ ID NO: 4321716 - DNA, 25 bp, Homo sapien
tccacttctcaaagattcaggaggg

SEQ ID NO: 4321717 - DNA, 25 bp, Homo sapien
cacttctcaaagattcaggaggggc

SEQ ID NO: 4321718 - DNA, 25 bp, Homo sapien
cttctcaaagattcaggaggggcta

SEQ ID NO: 4321719 - DNA, 25 bp, Homo sapien
ttccacttctcaaagattcaggagg

SEQ ID NO: 4321720 - DNA, 25 bp, Homo sapien
gggaagaaatctggttgaaagtaga

SEQ ID NO: 4321721 - DNA, 25 bp, Homo sapien
gaagaaatctggttgaaagtagaac

SEQ ID NO: 4321722 - DNA, 25 bp, Homo sapien
aatctggttgaaagtagaaccatga

SEQ ID NO: 4321723 - DNA, 25 bp, Homo sapien
agaagggaagaaatctggttgaaag

SEQ ID NO: 4321724 - DNA, 25 bp, Homo sapien
aaggaatgagggaactatttctact

SEQ ID NO: 4321725 - DNA, 25 bp, Homo sapien
ccaagacagtttaaaggaatgaggg

SEQ ID NO: 4321726 - DNA, 25 bp, Homo sapien
ttctacttcgtaagaaagtaaatgc

SEQ ID NO: 4321727 - DNA, 25 bp, Homo sapien
catgaaagccatttaggcaatgtcc

SEQ ID NO: 4321728 - DNA, 25 bp, Homo sapien
gagtaggactctgacggacacacat

SEQ ID NO: 4321729 - DNA, 25 bp, Homo sapien
gaattcttgagtaggactctgacgg

SEQ ID NO: 4321730 - DNA, 25 bp, Homo sapien
ctgatgacatgaattcttgagtagg

SEQ ID NO: 4321731 - DNA, 25 bp, Homo sapien
gacatgaattcttgagtaggactct

SEQ ID NO: 4321732 - DNA, 25 bp, Homo sapien
caaaggtttactcccacactttgct

SEQ ID NO: 4321733 - DNA, 25 bp, Homo sapien
cacactttgcttcagaggactgtcg

SEQ ID NO: 4321734 - DNA, 25 bp, Homo sapien
gatcctctcagaatccctttgtggt

SEQ ID NO: 4321735 - DNA, 25 bp, Homo sapien
agaggactgtcgatgagcaactgga

SEQ ID NO: 4321736 - DNA, 25 bp, Homo sapien
ttatttattaggcaccagctttagc

SEQ ID NO: 4321737 - DNA, 25 bp, Homo sapien
tatttattaggcaccagctttagct

SEQ ID NO: 4321738 - DNA, 25 bp, Homo sapien
gcaccagctttagcttgtagcttct

SEQ ID NO: 4321739 - DNA, 25 bp, Homo sapien
ccagctttagcttgtagcttctcac

SEQ ID NO: 4321740 - DNA, 25 bp, Homo sapien
tgctagaaatgtcagttgtacagca

SEQ ID NO: 4321741 - DNA, 25 bp, Homo sapien
taaaatgcagctaggttccaaaaga

SEQ ID NO: 4321742 - DNA, 25 bp, Homo sapien
gaaatgtcagttgtacagcaggcca

SEQ ID NO: 4321743 - DNA, 25 bp, Homo sapien
agttgtacagcaggccaacagagcc

SEQ ID NO: 4321744 - DNA, 25 bp, Homo sapien
aactgtggttgcaacatctctgtcc

SEQ ID NO: 4321745 - DNA, 25 bp, Homo sapien
ctgtggttgcaacatctctgtccag

SEQ ID NO: 4321746 - DNA, 25 bp, Homo sapien
tcaactgtggttgcaacatctctgt

SEQ ID NO: 4321747 - DNA, 25 bp, Homo sapien
ccttcaactgtggttgcaacatctc

SEQ ID NO: 4321748 - DNA, 25 bp, Homo sapien
aactccactcaataacataatggaa

SEQ ID NO: 4321749 - DNA, 25 bp, Homo sapien
tccactcaataacataatggaatga

SEQ ID NO: 4321750 - DNA, 25 bp, Homo sapien
agactgggcaagaaccacaagaagt

SEQ ID NO: 4321751 - DNA, 25 bp, Homo sapien
ctccactcaataacataatggaatg

SEQ ID NO: 4321752 - DNA, 25 bp, Homo sapien
cgggacacagatttgaggctccaag

SEQ ID NO: 4321753 - DNA, 25 bp, Homo sapien
gatagattctgtgcggaatacaaca

SEQ ID NO: 4321754 - DNA, 25 bp, Homo sapien
tcagttcttctgacgcattcagcaa

SEQ ID NO: 4321755 - DNA, 25 bp, Homo sapien
gaatacaacaatacacgggacacag

SEQ ID NO: 4321756 - DNA, 25 bp, Homo sapien
gaaataaaactttggatcatctgca

SEQ ID NO: 4321757 - DNA, 25 bp, Homo sapien
cgaaataaaactttggatcatctgc

SEQ ID NO: 4321758 - DNA, 25 bp, Homo sapien
aaataaaactttggatcatctgcat

SEQ ID NO: 4321759 - DNA, 25 bp, Homo sapien
taagccagatagtactctgcctgac

SEQ ID NO: 4321760 - DNA, 25 bp, Homo sapien
agaggcagaataagccagatagtac

SEQ ID NO: 4321761 - DNA, 25 bp, Homo sapien
agatagtactctgcctgacaatttt

SEQ ID NO: 4321762 - DNA, 25 bp, Homo sapien
gaataagccagatagtactctgcct

SEQ ID NO: 4321763 - DNA, 25 bp, Homo sapien
tttccgcaaacctcagctttaccat

SEQ ID NO: 4321764 - DNA, 25 bp, Homo sapien
caaagtctcagggactcatcctgct

SEQ ID NO: 4321765 - DNA, 25 bp, Homo sapien
caaacctcagctttaccatttctta

SEQ ID NO: 4321766 - DNA, 25 bp, Homo sapien
ctcttctctgcgtggctgcttcttc

SEQ ID NO: 4321767 - DNA, 25 bp, Homo sapien
gggatttatgactatttctgataca

SEQ ID NO: 4321768 - DNA, 25 bp, Homo sapien
gagaaagcattgtctttcaatcagc

SEQ ID NO: 4321769 - DNA, 25 bp, Homo sapien
gcaagatgtgtaacagcctgaaata

SEQ ID NO: 4321770 - DNA, 25 bp, Homo sapien
agcttcaaacctttctacactaagg

SEQ ID NO: 4321771 - DNA, 25 bp, Homo sapien
tggttactctgacaacatgtgaaat

SEQ ID NO: 4321772 - DNA, 25 bp, Homo sapien
ctgtactggttactctgacaacatg

SEQ ID NO: 4321773 - DNA, 25 bp, Homo sapien
ggcatttttaacgatgctttctctc

SEQ ID NO: 4321774 - DNA, 25 bp, Homo sapien
gagaacatacatctagtcttggctc

SEQ ID NO: 4321775 - DNA, 25 bp, Homo sapien
aatgccacagtcagcactgtagtgt

SEQ ID NO: 4321776 - DNA, 25 bp, Homo sapien
tcagcactgtagtgtagccatcctt

SEQ ID NO: 4321777 - DNA, 25 bp, Homo sapien
atgccacagtcagcactgtagtgta

SEQ ID NO: 4321778 - DNA, 25 bp, Homo sapien
cagtcagcactgtagtgtagccatc

SEQ ID NO: 4321779 - DNA, 25 bp, Homo sapien
ttttttccctgccaagctccaagaa

SEQ ID NO: 4321780 - DNA, 25 bp, Homo sapien
tttccgaagggctgtgtcacattga

SEQ ID NO: 4321781 - DNA, 25 bp, Homo sapien
aaggggcaatggctctcaaggaaga

SEQ ID NO: 4321782 - DNA, 25 bp, Homo sapien
caagctccaagaacaaggagcctgt

SEQ ID NO: 4321783 - DNA, 25 bp, Homo sapien
agaagtaggatttttgcatcccaga

SEQ ID NO: 4321784 - DNA, 25 bp, Homo sapien
ccttttagagcagaagtaggatttt

SEQ ID NO: 4321785 - DNA, 25 bp, Homo sapien
tctccttgcaaatcacattttctcc

SEQ ID NO: 4321786 - DNA, 25 bp, Homo sapien
attttctccttttagagcagaagta

SEQ ID NO: 4321787 - DNA, 25 bp, Homo sapien
atttctgctccagaacagaggctgc

SEQ ID NO: 4321788 - DNA, 25 bp, Homo sapien
ctgtagaagaaaagggcctgaggct

SEQ ID NO: 4321789 - DNA, 25 bp, Homo sapien
caggaagcactaaagtcccaggaat

SEQ ID NO: 4321790 - DNA, 25 bp, Homo sapien
gctgcaggaagcactaaagtcccag

SEQ ID NO: 4321791 - DNA, 25 bp, Homo sapien
tgacacccttgggagaggcctccct

SEQ ID NO: 4321792 - DNA, 25 bp, Homo sapien
agtcagcaagtcctatgaatttcat

SEQ ID NO: 4321793 - DNA, 25 bp, Homo sapien
ttgaagctataatttgattccatta

SEQ ID NO: 4321794 - DNA, 25 bp, Homo sapien
ctcttttcatacagtcagcaagtcc

SEQ ID NO: 4321795 - DNA, 25 bp, Homo sapien
tcttttcatacagtcagcaagtcct

SEQ ID NO: 4321796 - DNA, 25 bp, Homo sapien
gaatgacagcctctacactactgct

SEQ ID NO: 4321797 - DNA, 25 bp, Homo sapien
caagatttcggtagagctctcttcc

SEQ ID NO: 4321798 - DNA, 25 bp, Homo sapien
tctccaggttgcaaatggtacttct

SEQ ID NO: 4321799 - DNA, 25 bp, Homo sapien
ttaccttcggctagcacctgtcctg

SEQ ID NO: 4321800 - DNA, 25 bp, Homo sapien
cacagagaaggagcacctaatataa

SEQ ID NO: 4321801 - DNA, 25 bp, Homo sapien
acagagaaggagcacctaatataat

SEQ ID NO: 4321802 - DNA, 25 bp, Homo sapien
atatccagatattgtttcccttgaa

SEQ ID NO: 4321803 - DNA, 25 bp, Homo sapien
gaagtgttatcacccatcttagagc

SEQ ID NO: 4321804 - DNA, 25 bp, Homo sapien
tggaagtgttatcacccatcttaga

SEQ ID NO: 4321805 - DNA, 25 bp, Homo sapien
gtgttatcacccatcttagagcctt

SEQ ID NO: 4321806 - DNA, 25 bp, Homo sapien
gttatcacccatcttagagccttca

SEQ ID NO: 4321807 - DNA, 25 bp, Homo sapien
tctgggtgctatggtacgaaataat

SEQ ID NO: 4321808 - DNA, 25 bp, Homo sapien
gatgatggcagttgatatgggttct

SEQ ID NO: 4321809 - DNA, 25 bp, Homo sapien
tcactcactgagtttcttagggtct

SEQ ID NO: 4321810 - DNA, 25 bp, Homo sapien
cactcactgagtttcttagggtctt

SEQ ID NO: 4321811 - DNA, 25 bp, Homo sapien
taagctttgctgctacactgaagct

SEQ ID NO: 4321812 - DNA, 25 bp, Homo sapien
aagctttgctgctacactgaagcta

SEQ ID NO: 4321813 - DNA, 25 bp, Homo sapien
cactgactgggactcattagccaag

SEQ ID NO: 4321814 - DNA, 25 bp, Homo sapien
gaagcgagctgatggtctgctgcct

SEQ ID NO: 4321815 - DNA, 25 bp, Homo sapien
cagcctgcggcatgggattttcatt

SEQ ID NO: 4321816 - DNA, 25 bp, Homo sapien
gatattccaccgcaaaccaagtaag

SEQ ID NO: 4321817 - DNA, 25 bp, Homo sapien
tgttttgctttatccaagtggaatg

SEQ ID NO: 4321818 - DNA, 25 bp, Homo sapien
gagcacagcgtatcttggacctggg

SEQ ID NO: 4321819 - DNA, 25 bp, Homo sapien
gcatttctctaggagcacagcgtat

SEQ ID NO: 4321820 - DNA, 25 bp, Homo sapien
tgtctgctagtagaataggtggctg

SEQ ID NO: 4321821 - DNA, 25 bp, Homo sapien
ttctacctctgcatcctgcgccttc

SEQ ID NO: 4321822 - DNA, 25 bp, Homo sapien
cctctgcatcctgcgccttccacag

SEQ ID NO: 4321823 - DNA, 25 bp, Homo sapien
tctacctctgcatcctgcgccttcc

SEQ ID NO: 4321824 - DNA, 25 bp, Homo sapien
tacctctgcatcctgcgccttccac

SEQ ID NO: 4321825 - DNA, 25 bp, Homo sapien
gagcttccaagttctttggcaaatg

SEQ ID NO: 4321826 - DNA, 25 bp, Homo sapien
tcatggagcttccaagttctttggc

SEQ ID NO: 4321827 - DNA, 25 bp, Homo sapien
catggagcttccaagttctttggca

SEQ ID NO: 4321828 - DNA, 25 bp, Homo sapien
tccaagttctttggcaaatgctcat

SEQ ID NO: 4321829 - DNA, 25 bp, Homo sapien
catggccagttggatttctcttaaa

SEQ ID NO: 4321830 - DNA, 25 bp, Homo sapien
tctgcagaaggcatgagcatttctc

SEQ ID NO: 4321831 - DNA, 25 bp, Homo sapien
tccaacactctcttgaatagccagt

SEQ ID NO: 4321832 - DNA, 25 bp, Homo sapien
ctgggctccgaagaatctctgcttg

SEQ ID NO: 4321833 - DNA, 25 bp, Homo sapien
tcagcgcttcactttccacctgggc

SEQ ID NO: 4321834 - DNA, 25 bp, Homo sapien
ttccggaggggtctctatgagctga

SEQ ID NO: 4321835 - DNA, 25 bp, Homo sapien
gaggggtctctatgagctgagattt

SEQ ID NO: 4321836 - DNA, 25 bp, Homo sapien
atgtgaagaacttccggaggggtct

SEQ ID NO: 4321837 - DNA, 25 bp, Homo sapien
agaacttccggaggggtctctatga

SEQ ID NO: 4321838 - DNA, 25 bp, Homo sapien
gtagtgaaacaagaggaatagagca

SEQ ID NO: 4321839 - DNA, 25 bp, Homo sapien
aaaatatgttttcggcagagggtgg

SEQ ID NO: 4321840 - DNA, 25 bp, Homo sapien
tccagtttgagcattactgaacatg

SEQ ID NO: 4321841 - DNA, 25 bp, Homo sapien
tgccacattcagtgttcatgccatt

SEQ ID NO: 4321842 - DNA, 25 bp, Homo sapien
ccccacttgcgaggaagcccattta

SEQ ID NO: 4321843 - DNA, 25 bp, Homo sapien
cccatttagtaaatggtatgagttg

SEQ ID NO: 4321844 - DNA, 25 bp, Homo sapien
cagacatgtcaaatgcagactgaga

SEQ ID NO: 4321845 - DNA, 25 bp, Homo sapien
caaaacggtcttctaaagcctcaga

SEQ ID NO: 4321846 - DNA, 25 bp, Homo sapien
tcagcagcactccacagcagtgcta

SEQ ID NO: 4321847 - DNA, 25 bp, Homo sapien
actgagctcagtgggccaacttcca

SEQ ID NO: 4321848 - DNA, 25 bp, Homo sapien
cagtgggccaacttccaaagtccaa

SEQ ID NO: 4321849 - DNA, 25 bp, Homo sapien
gcaagggtagaatagccactgagct

SEQ ID NO: 4321850 - DNA, 25 bp, Homo sapien
ttccaaagttcgttgagattattgc

SEQ ID NO: 4321851 - DNA, 25 bp, Homo sapien
tatgcaagcttagacccgatttcca

SEQ ID NO: 4321852 - DNA, 25 bp, Homo sapien
ctggatttgcagcaacattattagc

SEQ ID NO: 4321853 - DNA, 25 bp, Homo sapien
cattattagctttgcagacagtctg

SEQ ID NO: 4321854 - DNA, 25 bp, Homo sapien
gctcccttattggagcttgcacacg

SEQ ID NO: 4321855 - DNA, 25 bp, Homo sapien
gcttgcacacgatttgattctcttc

SEQ ID NO: 4321856 - DNA, 25 bp, Homo sapien
tattggagcttgcacacgatttgat

SEQ ID NO: 4321857 - DNA, 25 bp, Homo sapien
gacagcaagctgctcccttattgga

SEQ ID NO: 4321858 - DNA, 25 bp, Homo sapien
gtaaccctgcagcattcaggttcat

SEQ ID NO: 4321859 - DNA, 25 bp, Homo sapien
aaagcccttgcctacacctagtgga

SEQ ID NO: 4321860 - DNA, 25 bp, Homo sapien
cctagtggacactgtaaccctgcag

SEQ ID NO: 4321861 - DNA, 25 bp, Homo sapien
tgaccaccaaagttgaggagagcat

SEQ ID NO: 4321862 - DNA, 25 bp, Homo sapien
cactcagcagcgaaaggagcttgtt

SEQ ID NO: 4321863 - DNA, 25 bp, Homo sapien
taccgaaaataaccagagggcagag

SEQ ID NO: 4321864 - DNA, 25 bp, Homo sapien
tgtggcaccaagacgttttccgatt

SEQ ID NO: 4321865 - DNA, 25 bp, Homo sapien
gcaaaaatcaggcttgggctaggaa

SEQ ID NO: 4321866 - DNA, 25 bp, Homo sapien
aaggggcctctggatgctcagagga

SEQ ID NO: 4321867 - DNA, 25 bp, Homo sapien
tttaatgctgccgaagtctcaaaag

SEQ ID NO: 4321868 - DNA, 25 bp, Homo sapien
ttactttaatgctgccgaagtctca

SEQ ID NO: 4321869 - DNA, 25 bp, Homo sapien
taatgctgccgaagtctcaaaaggg

SEQ ID NO: 4321870 - DNA, 25 bp, Homo sapien
cataaaagccaagtgcatgttacca

SEQ ID NO: 4321871 - DNA, 25 bp, Homo sapien
catgttaccagcagcggatcacagc

SEQ ID NO: 4321872 - DNA, 25 bp, Homo sapien
gatcctctccgtgggagccagcgag

SEQ ID NO: 4321873 - DNA, 25 bp, Homo sapien
tctccctgatcttacgtgctcaagg

SEQ ID NO: 4321874 - DNA, 25 bp, Homo sapien
acagattgagacacaccgtatttcc

SEQ ID NO: 4321875 - DNA, 25 bp, Homo sapien
tgagacacaccgtatttcctaaaac

SEQ ID NO: 4321876 - DNA, 25 bp, Homo sapien
tggtatggaaacttgcagacagatt

SEQ ID NO: 4321877 - DNA, 25 bp, Homo sapien
gtatggaaacttgcagacagattga

SEQ ID NO: 4321878 - DNA, 25 bp, Homo sapien
tgtgttctgcagtggacaacctgaa

SEQ ID NO: 4321879 - DNA, 25 bp, Homo sapien
cgaagaaggctaagctctccgccag

SEQ ID NO: 4321880 - DNA, 25 bp, Homo sapien
caggtcagcggaggtagcatgtctt

SEQ ID NO: 4321881 - DNA, 25 bp, Homo sapien
atttgacaatgatgtgcccctggca

SEQ ID NO: 4321882 - DNA, 25 bp, Homo sapien
actctttactatgccagagtcctgc

SEQ ID NO: 4321883 - DNA, 25 bp, Homo sapien
gtgttgcaaataagggcactaagaa

SEQ ID NO: 4321884 - DNA, 25 bp, Homo sapien
gtagctcatttaatgaactctttac

SEQ ID NO: 4321885 - DNA, 25 bp, Homo sapien
gcaaataagggcactaagaatctct

SEQ ID NO: 4321886 - DNA, 25 bp, Homo sapien
tacaacactctccttgaggctgcca

SEQ ID NO: 4321887 - DNA, 25 bp, Homo sapien
tgtgctgctgtgctctacaacactc

SEQ ID NO: 4321888 - DNA, 25 bp, Homo sapien
tcatcccgtgagtttctggagtttt

SEQ ID NO: 4321889 - DNA, 25 bp, Homo sapien
gtgctctacaacactctccttgagg

SEQ ID NO: 4321890 - DNA, 25 bp, Homo sapien
aaatgcaggtgtaaaaggatttcgg

SEQ ID NO: 4321891 - DNA, 25 bp, Homo sapien
actcccggtagatgactccactctg

SEQ ID NO: 4321892 - DNA, 25 bp, Homo sapien
aaaaggatttcggatatttgatcac

SEQ ID NO: 4321893 - DNA, 25 bp, Homo sapien
gatttcggatatttgatcacaagtc

SEQ ID NO: 4321894 - DNA, 25 bp, Homo sapien
ccaggacataagtgggagttctttg

SEQ ID NO: 4321895 - DNA, 25 bp, Homo sapien
ggacataagtgggagttctttggag

SEQ ID NO: 4321896 - DNA, 25 bp, Homo sapien
acataagtgggagttctttggagaa

SEQ ID NO: 4321897 - DNA, 25 bp, Homo sapien
caggacataagtgggagttctttgg

SEQ ID NO: 4321898 - DNA, 25 bp, Homo sapien
tgtgagcttctccatgctccctcat

SEQ ID NO: 4321899 - DNA, 25 bp, Homo sapien
tcctgggaatttcagtccagctacc

SEQ ID NO: 4321900 - DNA, 25 bp, Homo sapien
gatgtgagcttctccatgctccctc

SEQ ID NO: 4321901 - DNA, 25 bp, Homo sapien
tgggaatttcagtccagctaccatc

SEQ ID NO: 4321902 - DNA, 25 bp, Homo sapien
ggtagagttgtatgtttactttata

SEQ ID NO: 4321903 - DNA, 25 bp, Homo sapien
tggctccttgtagagtaattttctg

SEQ ID NO: 4321904 - DNA, 25 bp, Homo sapien
tttctgaacgggaattgtgcttcca

SEQ ID NO: 4321905 - DNA, 25 bp, Homo sapien
cattacctaattgcaaaaagttgcc

SEQ ID NO: 4321906 - DNA, 25 bp, Homo sapien
attctcaagattagcaggatttaga

SEQ ID NO: 4321907 - DNA, 25 bp, Homo sapien
gattagcaggatttagagcttctcc

SEQ ID NO: 4321908 - DNA, 25 bp, Homo sapien
tgctaggggcccctaccaggagaag

SEQ ID NO: 4321909 - DNA, 25 bp, Homo sapien
gcaggaaggatctgctaggggcccc

SEQ ID NO: 4321910 - DNA, 25 bp, Homo sapien
ggccccacttggtacgtgaagtcac

SEQ ID NO: 4321911 - DNA, 25 bp, Homo sapien
caccgcatagagacatgcaccctca

SEQ ID NO: 4321912 - DNA, 25 bp, Homo sapien
gagcagcaagtttctcaccaccttc

SEQ ID NO: 4321913 - DNA, 25 bp, Homo sapien
cgtgaagtcaccttttagatgagca

SEQ ID NO: 4321914 - DNA, 25 bp, Homo sapien
gagaggagagaagtcttcatgtatc

SEQ ID NO: 4321915 - DNA, 25 bp, Homo sapien
ctgtgagaggagagaagtcttcatg

SEQ ID NO: 4321916 - DNA, 25 bp, Homo sapien
gaggagagaagtcttcatgtatcat

SEQ ID NO: 4321917 - DNA, 25 bp, Homo sapien
tgtgagaggagagaagtcttcatgt

SEQ ID NO: 4321918 - DNA, 25 bp, Homo sapien
ttgtctcagtgggcttaacctccaa

SEQ ID NO: 4321919 - DNA, 25 bp, Homo sapien
aaactcctaattctgccaaacccat

SEQ ID NO: 4321920 - DNA, 25 bp, Homo sapien
gtctcagtgggcttaacctccaaac

SEQ ID NO: 4321921 - DNA, 25 bp, Homo sapien
tgtctcagtgggcttaacctccaaa

SEQ ID NO: 4321922 - DNA, 25 bp, Homo sapien
acttcctccgcccttctttgatctc

SEQ ID NO: 4321923 - DNA, 25 bp, Homo sapien
tgatgataaaaccttccacccgagg

SEQ ID NO: 4321924 - DNA, 25 bp, Homo sapien
ttctgatgataaaaccttccacccg

SEQ ID NO: 4321925 - DNA, 25 bp, Homo sapien
ccacttcctccgcccttctttgatc

SEQ ID NO: 4321926 - DNA, 25 bp, Homo sapien
cacttttccctcagtgctttgttga

SEQ ID NO: 4321927 - DNA, 25 bp, Homo sapien
ctgatggagagcattctccaagcca

SEQ ID NO: 4321928 - DNA, 25 bp, Homo sapien
tgtggcgagtagaaacggagaatgg

SEQ ID NO: 4321929 - DNA, 25 bp, Homo sapien
atttcagtgtggcgagtagaaacgg

SEQ ID NO: 4321930 - DNA, 25 bp, Homo sapien
ttcacagagtccacacaaattctct

SEQ ID NO: 4321931 - DNA, 25 bp, Homo sapien
cacagagtccacacaaattctcttc

SEQ ID NO: 4321932 - DNA, 25 bp, Homo sapien
cagagtccacacaaattctcttcat

SEQ ID NO: 4321933 - DNA, 25 bp, Homo sapien
cttcacagagtccacacaaattctc

SEQ ID NO: 4321934 - DNA, 25 bp, Homo sapien
ctacaacagtcccaagactgtgatg

SEQ ID NO: 4321935 - DNA, 25 bp, Homo sapien
caccctacaacagtcccaagactgt

SEQ ID NO: 4321936 - DNA, 25 bp, Homo sapien
ccctacaacagtcccaagactgtga

SEQ ID NO: 4321937 - DNA, 25 bp, Homo sapien
cccaccctacaacagtcccaagact

SEQ ID NO: 4321938 - DNA, 25 bp, Homo sapien
tgacatgtacataacagtgatcttc

SEQ ID NO: 4321939 - DNA, 25 bp, Homo sapien
tagtctcagggttgaaaaacggcaa

SEQ ID NO: 4321940 - DNA, 25 bp, Homo sapien
tcatcagctaccaaggtgtgggtct

SEQ ID NO: 4321941 - DNA, 25 bp, Homo sapien
tctgggaaagttgttcaaagagagt

SEQ ID NO: 4321942 - DNA, 25 bp, Homo sapien
agattccccagatttttcttgttct

SEQ ID NO: 4321943 - DNA, 25 bp, Homo sapien
tgttctttttgggacagggtggaca

SEQ ID NO: 4321944 - DNA, 25 bp, Homo sapien
ctaagattccccagatttttcttgt

SEQ ID NO: 4321945 - DNA, 25 bp, Homo sapien
tcatactctttgctggggagcactg

SEQ ID NO: 4321946 - DNA, 25 bp, Homo sapien
atcattttatctgccgtagctattg

SEQ ID NO: 4321947 - DNA, 25 bp, Homo sapien
tttatctgccgtagctattgagtac

SEQ ID NO: 4321948 - DNA, 25 bp, Homo sapien
ttttatctgccgtagctattgagta

SEQ ID NO: 4321949 - DNA, 25 bp, Homo sapien
cattttatctgccgtagctattgag

SEQ ID NO: 4321950 - DNA, 25 bp, Homo sapien
tctagtgaaactgtcctgttattgg

SEQ ID NO: 4321951 - DNA, 25 bp, Homo sapien
tcttctagtgaaactgtcctgttat

SEQ ID NO: 4321952 - DNA, 25 bp, Homo sapien
cttctagtgaaactgtcctgttatt

SEQ ID NO: 4321953 - DNA, 25 bp, Homo sapien
ttctagtgaaactgtcctgttattg

SEQ ID NO: 4321954 - DNA, 25 bp, Homo sapien
ggagaccgggtgttcctccagatgc

SEQ ID NO: 4321955 - DNA, 25 bp, Homo sapien
tattcaagaacaacgagcccgtgat

SEQ ID NO: 4321956 - DNA, 25 bp, Homo sapien
cctggaccaggcatctgggagtgca

SEQ ID NO: 4321957 - DNA, 25 bp, Homo sapien
tgtacacgtacgacgagtacaaaaa

SEQ ID NO: 4321958 - DNA, 25 bp, Homo sapien
cacactgattcaacggatgggctcc

SEQ ID NO: 4321959 - DNA, 25 bp, Homo sapien
tcctcagcaaagatgatggtgtcct

SEQ ID NO: 4321960 - DNA, 25 bp, Homo sapien
tatctttaacggagagttgcacaga

SEQ ID NO: 4321961 - DNA, 25 bp, Homo sapien
gaaaagctgatggaacactgacgac

SEQ ID NO: 4321962 - DNA, 25 bp, Homo sapien
gtctgaactgctccccggaaaatgg

SEQ ID NO: 4321963 - DNA, 25 bp, Homo sapien
atgtgccttccttttagctatacaa

SEQ ID NO: 4321964 - DNA, 25 bp, Homo sapien
cctgcacagggtagtcaggctctaa

SEQ ID NO: 4321965 - DNA, 25 bp, Homo sapien
accaaggcttatggtttgcaccttc

SEQ ID NO: 4321966 - DNA, 25 bp, Homo sapien
catcttcaacacattggtgcttaga

SEQ ID NO: 4321967 - DNA, 25 bp, Homo sapien
gtttaacaagtctctgagaatttcc

SEQ ID NO: 4321968 - DNA, 25 bp, Homo sapien
gatctcattaccctggacctcattg

SEQ ID NO: 4321969 - DNA, 25 bp, Homo sapien
tgagatctcattaccctggacctca

SEQ ID NO: 4321970 - DNA, 25 bp, Homo sapien
tctgaaacactgacgcacaagcgaa

SEQ ID NO: 4321971 - DNA, 25 bp, Homo sapien
tccttgcgcatgttttctaagagca

SEQ ID NO: 4321972 - DNA, 25 bp, Homo sapien
cacaaaggcccgacattcatggtca

SEQ ID NO: 4321973 - DNA, 25 bp, Homo sapien
attcatggtcatggatccttgcgca

SEQ ID NO: 4321974 - DNA, 25 bp, Homo sapien
gcctgtcggcgcctgtgtggaaact

SEQ ID NO: 4321975 - DNA, 25 bp, Homo sapien
ttctgcctgtcggcgcctgtgtgga

SEQ ID NO: 4321976 - DNA, 25 bp, Homo sapien
tcggcgcctgtgtggaaactgcgac

SEQ ID NO: 4321977 - DNA, 25 bp, Homo sapien
ctgtcggcgcctgtgtggaaactgc

SEQ ID NO: 4321978 - DNA, 25 bp, Homo sapien
tccattcaaatcacgactccagtat

SEQ ID NO: 4321979 - DNA, 25 bp, Homo sapien
gaagagaggcaactttgtatgatgg

SEQ ID NO: 4321980 - DNA, 25 bp, Homo sapien
tggttaagggtgacccatgaactgc

SEQ ID NO: 4321981 - DNA, 25 bp, Homo sapien
catgaactgctttcaattcagactg

SEQ ID NO: 4321982 - DNA, 25 bp, Homo sapien
ttggttggtttttatcactcctcaa

SEQ ID NO: 4321983 - DNA, 25 bp, Homo sapien
ttggtttttatcactcctcaaggtc

SEQ ID NO: 4321984 - DNA, 25 bp, Homo sapien
ggtttttatcactcctcaaggtctg

SEQ ID NO: 4321985 - DNA, 25 bp, Homo sapien
tggttggtttttatcactcctcaag

SEQ ID NO: 4321986 - DNA, 25 bp, Homo sapien
ggccaccaggtcttctactatttac

SEQ ID NO: 4321987 - DNA, 25 bp, Homo sapien
ctggtggccaccaggtcttctacta

SEQ ID NO: 4321988 - DNA, 25 bp, Homo sapien
gtcttctactatttactcccctata

SEQ ID NO: 4321989 - DNA, 25 bp, Homo sapien
caccaggtcttctactatttactcc

SEQ ID NO: 4321990 - DNA, 25 bp, Homo sapien
tcagctatgtattagaccagtcaca

SEQ ID NO: 4321991 - DNA, 25 bp, Homo sapien
aaacgctgccccaaactcaaagtca

SEQ ID NO: 4321992 - DNA, 25 bp, Homo sapien
tgtgaaccgcagtttgcaaacgctg

SEQ ID NO: 4321993 - DNA, 25 bp, Homo sapien
gaaacagttcatcaggtgaaatcac

SEQ ID NO: 4321994 - DNA, 25 bp, Homo sapien
tcatttttcttcagaggccacactt

SEQ ID NO: 4321995 - DNA, 25 bp, Homo sapien
cagttgtgttacatataggtcagac

SEQ ID NO: 4321996 - DNA, 25 bp, Homo sapien
tacatattgcttgaaacaagcatgg

SEQ ID NO: 4321997 - DNA, 25 bp, Homo sapien
taggtcagacattactgttttgaac

SEQ ID NO: 4321998 - DNA, 25 bp, Homo sapien
cggaaacaacatgcccaggaggaaa

SEQ ID NO: 4321999 - DNA, 25 bp, Homo sapien
tcaaacagtcctcttgcctcttcct

SEQ ID NO: 4322000 - DNA, 25 bp, Homo sapien
gcctcttcctcctaattagctagga

SEQ ID NO: 4322001 - DNA, 25 bp, Homo sapien
ttgcctcttcctcctaattagctag

SEQ ID NO: 4322002 - DNA, 25 bp, Homo sapien
ctcttcctcctaattagctaggact

SEQ ID NO: 4322003 - DNA, 25 bp, Homo sapien
cttcaccttcttttgtagtccatcc

SEQ ID NO: 4322004 - DNA, 25 bp, Homo sapien
ctttcacttcgacttttccatttca

SEQ ID NO: 4322005 - DNA, 25 bp, Homo sapien
taattcacttgacctccccctactg

SEQ ID NO: 4322006 - DNA, 25 bp, Homo sapien
gtagtccatccccttctactattct

SEQ ID NO: 4322007 - DNA, 25 bp, Homo sapien
caatgctgcccatcatccctttcaa

SEQ ID NO: 4322008 - DNA, 25 bp, Homo sapien
gctgcccaggcctctagctccttct

SEQ ID NO: 4322009 - DNA, 25 bp, Homo sapien
ttctcctccttgaaattgcaggggc

SEQ ID NO: 4322010 - DNA, 25 bp, Homo sapien
atcatccctttcaatgctgcccagg

SEQ ID NO: 4322011 - DNA, 25 bp, Homo sapien
tgtacagtggcattagtgcaatgag

SEQ ID NO: 4322012 - DNA, 25 bp, Homo sapien
ctgggggtgtttgtacagtggcatt

SEQ ID NO: 4322013 - DNA, 25 bp, Homo sapien
agtggcattagtgcaatgaggtgga

SEQ ID NO: 4322014 - DNA, 25 bp, Homo sapien
ggtgtttgtacagtggcattagtgc

SEQ ID NO: 4322015 - DNA, 25 bp, Homo sapien
taggcttatccataggcactgtggg

SEQ ID NO: 4322016 - DNA, 25 bp, Homo sapien
gtgtagcttcccacagccattttgg

SEQ ID NO: 4322017 - DNA, 25 bp, Homo sapien
aaggtgttggaggtgacagttctca

SEQ ID NO: 4322018 - DNA, 25 bp, Homo sapien
tagatttcggtttagggatccgtgc

SEQ ID NO: 4322019 - DNA, 25 bp, Homo sapien
tgcttaacccagttcaacatgaaga

SEQ ID NO: 4322020 - DNA, 25 bp, Homo sapien
ggatgttgagttcaatgaggcagaa

SEQ ID NO: 4322021 - DNA, 25 bp, Homo sapien
gatttggaatgccttaaaagtctga

SEQ ID NO: 4322022 - DNA, 25 bp, Homo sapien
taataaatgcttaacccagttcaac

SEQ ID NO: 4322023 - DNA, 25 bp, Homo sapien
gggttatgtatgtggtttagctctg

SEQ ID NO: 4322024 - DNA, 25 bp, Homo sapien
ccagggtataggaaaaagctagagt

SEQ ID NO: 4322025 - DNA, 25 bp, Homo sapien
tcaaccagtaaagaccatagaatcc

SEQ ID NO: 4322026 - DNA, 25 bp, Homo sapien
tatcccttctatgaccatctcacag

SEQ ID NO: 4322027 - DNA, 25 bp, Homo sapien
agtatggattatccccagggactcc

SEQ ID NO: 4322028 - DNA, 25 bp, Homo sapien
tcagaagtatggattatccccaggg

SEQ ID NO: 4322029 - DNA, 25 bp, Homo sapien
gaggattcggctgagttattctcat

SEQ ID NO: 4322030 - DNA, 25 bp, Homo sapien
cccatgaggcagatatcagaatttc

SEQ ID NO: 4322031 - DNA, 25 bp, Homo sapien
ctctggtagaaatacagtcaactct

SEQ ID NO: 4322032 - DNA, 25 bp, Homo sapien
tagacatacatgttctatgggaggt

SEQ ID NO: 4322033 - DNA, 25 bp, Homo sapien
tttatgtcacagtggctggttccag

SEQ ID NO: 4322034 - DNA, 25 bp, Homo sapien
tctggcttcctatcacatgtcagag

SEQ ID NO: 4322035 - DNA, 25 bp, Homo sapien
cacactcgatatgactatgcaggca

SEQ ID NO: 4322036 - DNA, 25 bp, Homo sapien
tgcaggcaacagttagtttcagata

SEQ ID NO: 4322037 - DNA, 25 bp, Homo sapien
tcccaaagtacgagttcagtcagtc

SEQ ID NO: 4322038 - DNA, 25 bp, Homo sapien
gaccataaatgggacataggtcctg

SEQ ID NO: 4322039 - DNA, 25 bp, Homo sapien
aagccttgagttcggttatcctgca

SEQ ID NO: 4322040 - DNA, 25 bp, Homo sapien
actgccatgatgactgccggtctgg

SEQ ID NO: 4322041 - DNA, 25 bp, Homo sapien
agtgccccgttaattaagccttgag

SEQ ID NO: 4322042 - DNA, 25 bp, Homo sapien
gactctgaatatcgcatgcttggca

SEQ ID NO: 4322043 - DNA, 25 bp, Homo sapien
ttccattgagactaggcctgaggct

SEQ ID NO: 4322044 - DNA, 25 bp, Homo sapien
gaccattgatgactgcacgttccag

SEQ ID NO: 4322045 - DNA, 25 bp, Homo sapien
gatctccaggttgcacaaagttggc

SEQ ID NO: 4322046 - DNA, 25 bp, Homo sapien
cattctgaagatggccctccttgga

SEQ ID NO: 4322047 - DNA, 25 bp, Homo sapien
tatagggacctggatacttccgaca

SEQ ID NO: 4322048 - DNA, 25 bp, Homo sapien
tgtcggaagtatccaggtccctata

SEQ ID NO: 4322049 - DNA, 25 bp, Homo sapien
caggactgagtgatctccctggagg

SEQ ID NO: 4322050 - DNA, 25 bp, Homo sapien
tacatcggttttggacttgagcgcc

SEQ ID NO: 4322051 - DNA, 25 bp, Homo sapien
tgagaggtgccctgacttagcttct

SEQ ID NO: 4322052 - DNA, 25 bp, Homo sapien
tgtctcgttcattagcataccttcg

SEQ ID NO: 4322053 - DNA, 25 bp, Homo sapien
cttccatatctagcacacgtttcct

SEQ ID NO: 4322054 - DNA, 25 bp, Homo sapien
ccatatctagcacacgtttcctgag

SEQ ID NO: 4322055 - DNA, 25 bp, Homo sapien
tttcccttccatatctagcacacgt

SEQ ID NO: 4322056 - DNA, 25 bp, Homo sapien
tcccttccatatctagcacacgttt

SEQ ID NO: 4322057 - DNA, 25 bp, Homo sapien
tgaagctggcgattttgactgtcct

SEQ ID NO: 4322058 - DNA, 25 bp, Homo sapien
cacttcagccatgataccagcgttt

SEQ ID NO: 4322059 - DNA, 25 bp, Homo sapien
tcaatctgccggctgagtgctgcca

SEQ ID NO: 4322060 - DNA, 25 bp, Homo sapien
tcttctgcttttcgtaaagacctgt

SEQ ID NO: 4322061 - DNA, 25 bp, Homo sapien
tcttggtcttggtgaaactttgtgg

SEQ ID NO: 4322062 - DNA, 25 bp, Homo sapien
aaactttgtggtctgcgtttgcagt

SEQ ID NO: 4322063 - DNA, 25 bp, Homo sapien
agttccttctctagtctggttgcct

SEQ ID NO: 4322064 - DNA, 25 bp, Homo sapien
cttcgccataattgtgtcttggtct

SEQ ID NO: 4322065 - DNA, 25 bp, Homo sapien
agggctagtttggtatgtgtttcct

SEQ ID NO: 4322066 - DNA, 25 bp, Homo sapien
ctgtctttgaagggtgagctgtgcc

SEQ ID NO: 4322067 - DNA, 25 bp, Homo sapien
tgtgccgtcagcctttgctgttcat

SEQ ID NO: 4322068 - DNA, 25 bp, Homo sapien
tctggcttcagcaagggctagtttg

SEQ ID NO: 4322069 - DNA, 25 bp, Homo sapien
aagcaaaagacttcagcttggtcag

SEQ ID NO: 4322070 - DNA, 25 bp, Homo sapien
aagacttcagcttggtcagctcctc

SEQ ID NO: 4322071 - DNA, 25 bp, Homo sapien
tcagcttggtcagctcctctttcag

SEQ ID NO: 4322072 - DNA, 25 bp, Homo sapien
tggtcagctcctctttcagggtggt

SEQ ID NO: 4322073 - DNA, 25 bp, Homo sapien
cttgatttcttgatcaattagcttc

SEQ ID NO: 4322074 - DNA, 25 bp, Homo sapien
acttgatttcttgatcaattagctt

SEQ ID NO: 4322075 - DNA, 25 bp, Homo sapien
tttgagaacttaacaggaggctggc

SEQ ID NO: 4322076 - DNA, 25 bp, Homo sapien
aattcagaagatgctaggcaggatg

SEQ ID NO: 4322077 - DNA, 25 bp, Homo sapien
tgatgatctcatccaaggtcttggc

SEQ ID NO: 4322078 - DNA, 25 bp, Homo sapien
ataattgtataagaattctgcatct

SEQ ID NO: 4322079 - DNA, 25 bp, Homo sapien
agcacttatatgtagagggaaccac

SEQ ID NO: 4322080 - DNA, 25 bp, Homo sapien
taatatatgtcagcacagatgtgtg

SEQ ID NO: 4322081 - DNA, 25 bp, Homo sapien
tctgtgtcctacagtgtctaccaca

SEQ ID NO: 4322082 - DNA, 25 bp, Homo sapien
taaaatacagacttcttgagaacag

SEQ ID NO: 4322083 - DNA, 25 bp, Homo sapien
cagctgtatcctcagatctgtttca

SEQ ID NO: 4322084 - DNA, 25 bp, Homo sapien
ttacaaaattatttagtgagaagag

SEQ ID NO: 4322085 - DNA, 25 bp, Homo sapien
ggaaaactccatatacacttctgag

SEQ ID NO: 4322086 - DNA, 25 bp, Homo sapien
actttaagaaccattactccagagg

SEQ ID NO: 4322087 - DNA, 25 bp, Homo sapien
aaattgagtctggttgagaagtcac

SEQ ID NO: 4322088 - DNA, 25 bp, Homo sapien
taaatgccaggagcaacacagtacc

SEQ ID NO: 4322089 - DNA, 25 bp, Homo sapien
tagggcataatttttgggtagactg

SEQ ID NO: 4322090 - DNA, 25 bp, Homo sapien
cagctatgcacatggttagtcataa

SEQ ID NO: 4322091 - DNA, 25 bp, Homo sapien
gatgttactttaagctgccttcctt

SEQ ID NO: 4322092 - DNA, 25 bp, Homo sapien
gcttcatcacgtttaagcttcaggt

SEQ ID NO: 4322093 - DNA, 25 bp, Homo sapien
gtgccaactgcttcatcacgtttaa

SEQ ID NO: 4322094 - DNA, 25 bp, Homo sapien
tcaggttaagaagtgatgttacttt

SEQ ID NO: 4322095 - DNA, 25 bp, Homo sapien
gacttctgaagaataagtctgccat

SEQ ID NO: 4322096 - DNA, 25 bp, Homo sapien
tctgaagaataagtctgccatcttt

SEQ ID NO: 4322097 - DNA, 25 bp, Homo sapien
gtttgggtgctctgatcttggcaca

SEQ ID NO: 4322098 - DNA, 25 bp, Homo sapien
aagaataagtctgccatcttttttg

SEQ ID NO: 4322099 - DNA, 25 bp, Homo sapien
ctggtgggccatgagacacaataaa

SEQ ID NO: 4322100 - DNA, 25 bp, Homo sapien
aataaatctggcagatttgcttctg

SEQ ID NO: 4322101 - DNA, 25 bp, Homo sapien
gactggtgggccatgagacacaata

SEQ ID NO: 4322102 - DNA, 25 bp, Homo sapien
cacaataaatctggcagatttgctt

SEQ ID NO: 4322103 - DNA, 25 bp, Homo sapien
tgttcttccatattttgcttgaagg

SEQ ID NO: 4322104 - DNA, 25 bp, Homo sapien
ggagtccacccttcattaaccactg

SEQ ID NO: 4322105 - DNA, 25 bp, Homo sapien
tcttccatattttgcttgaaggcca

SEQ ID NO: 4322106 - DNA, 25 bp, Homo sapien
cttcattaaccactgcactgtgttc

SEQ ID NO: 4322107 - DNA, 25 bp, Homo sapien
cagagacgatgttagtgcagatgaa

SEQ ID NO: 4322108 - DNA, 25 bp, Homo sapien
taatctgctaggaattagtgtacct

SEQ ID NO: 4322109 - DNA, 25 bp, Homo sapien
tgcagatgaaggtcaaggagaatct

SEQ ID NO: 4322110 - DNA, 25 bp, Homo sapien
gaccagccataggaggttctaaaag

SEQ ID NO: 4322111 - DNA, 25 bp, Homo sapien
gcccagtgtgagatagggtatccat

SEQ ID NO: 4322112 - DNA, 25 bp, Homo sapien
gttggccccgctcttctcattatgg

SEQ ID NO: 4322113 - DNA, 25 bp, Homo sapien
tgtcccaaggactaagaaattgctc

SEQ ID NO: 4322114 - DNA, 25 bp, Homo sapien
ccacagtgacatgggtgttggcccc

SEQ ID NO: 4322115 - DNA, 25 bp, Homo sapien
catactgtaagagttcattggtagc

SEQ ID NO: 4322116 - DNA, 25 bp, Homo sapien
catatgcttttacgacaaaatagcg

SEQ ID NO: 4322117 - DNA, 25 bp, Homo sapien
tattactctagaaatgatagctgta

SEQ ID NO: 4322118 - DNA, 25 bp, Homo sapien
gatttttctgccaagtgttcagtta

SEQ ID NO: 4322119 - DNA, 25 bp, Homo sapien
gggttgctgcagtacaatatagtct

SEQ ID NO: 4322120 - DNA, 25 bp, Homo sapien
gaattcattggatgcgctttgcgaa

SEQ ID NO: 4322121 - DNA, 25 bp, Homo sapien
gagcgaagttgctctcccgggctta

SEQ ID NO: 4322122 - DNA, 25 bp, Homo sapien
aagacaagcgagtttgagtccggag

SEQ ID NO: 4322123 - DNA, 25 bp, Homo sapien
tacgtcactgttctgccttataagg

SEQ ID NO: 4322124 - DNA, 25 bp, Homo sapien
tgtagtgccgcgctgcgagccgact

SEQ ID NO: 4322125 - DNA, 25 bp, Homo sapien
cttataaggcgctccgcgtgtgcgg

SEQ ID NO: 4322126 - DNA, 25 bp, Homo sapien
gagagtcgcccgaacaatgcgagcg

SEQ ID NO: 4322127 - DNA, 25 bp, Homo sapien
tgatgtaactaccaaacaattcttc

SEQ ID NO: 4322128 - DNA, 25 bp, Homo sapien
cctgatgatgtaactaccaaacaat

SEQ ID NO: 4322129 - DNA, 25 bp, Homo sapien
caaacaattcttcaagtgatgatgg

SEQ ID NO: 4322130 - DNA, 25 bp, Homo sapien
ttatttcctgatgatgtaactacca

SEQ ID NO: 4322131 - DNA, 25 bp, Homo sapien
ccactgagcactggataaccttgcc

SEQ ID NO: 4322132 - DNA, 25 bp, Homo sapien
taaccttgccatggatccgatcctg

SEQ ID NO: 4322133 - DNA, 25 bp, Homo sapien
gctgctacacaacttaggacgaagg

SEQ ID NO: 4322134 - DNA, 25 bp, Homo sapien
gatccgatcctgtgcttctactctc

SEQ ID NO: 4322135 - DNA, 25 bp, Homo sapien
cccactttatgggattctgtaggag

SEQ ID NO: 4322136 - DNA, 25 bp, Homo sapien
ttatgggattctgtaggaggaccag

SEQ ID NO: 4322137 - DNA, 25 bp, Homo sapien
ctttatgggattctgtaggaggacc

SEQ ID NO: 4322138 - DNA, 25 bp, Homo sapien
tccttcccactttatgggattctgt

SEQ ID NO: 4322139 - DNA, 25 bp, Homo sapien
tgcacaaagtgagcattctgcaaac

SEQ ID NO: 4322140 - DNA, 25 bp, Homo sapien
ctgcacaaagtgagcattctgcaaa

SEQ ID NO: 4322141 - DNA, 25 bp, Homo sapien
cctgcacaaagtgagcattctgcaa

SEQ ID NO: 4322142 - DNA, 25 bp, Homo sapien
atctggaattatgacatgcacccac

SEQ ID NO: 4322143 - DNA, 25 bp, Homo sapien
tatatgtgcaagtcaagcgcgttgg

SEQ ID NO: 4322144 - DNA, 25 bp, Homo sapien
tgtcttgattcataagcccaacttc

SEQ ID NO: 4322145 - DNA, 25 bp, Homo sapien
taaatagaaacctggaaagatcagc

SEQ ID NO: 4322146 - DNA, 25 bp, Homo sapien
agggcccacagcaattgctggtcta

SEQ ID NO: 4322147 - DNA, 25 bp, Homo sapien
ttgtatgtcttgcatctttagaaca

SEQ ID NO: 4322148 - DNA, 25 bp, Homo sapien
tcttgcatctttagaacatgtaaca

SEQ ID NO: 4322149 - DNA, 25 bp, Homo sapien
attgctggtctagtctttgtatgtc

SEQ ID NO: 4322150 - DNA, 25 bp, Homo sapien
gctaaagtgtcataatttaggagct

SEQ ID NO: 4322151 - DNA, 25 bp, Homo sapien
taagaaccaaatgttctagtgcagc

SEQ ID NO: 4322152 - DNA, 25 bp, Homo sapien
gaaccaaatgttctagtgcagcatt

SEQ ID NO: 4322153 - DNA, 25 bp, Homo sapien
catttcttgaacaagtagatggcta

SEQ ID NO: 4322154 - DNA, 25 bp, Homo sapien
tttctttggtgccagatttcttgtg

SEQ ID NO: 4322155 - DNA, 25 bp, Homo sapien
tgtaatgtctgagtcaaatgtttct

SEQ ID NO: 4322156 - DNA, 25 bp, Homo sapien
ttggtgccagatttcttgtgctcct

SEQ ID NO: 4322157 - DNA, 25 bp, Homo sapien
tatattgtaatgtctgagtcaaatg

SEQ ID NO: 4322158 - DNA, 25 bp, Homo sapien
tctagtaggcatatgaattcatcac

SEQ ID NO: 4322159 - DNA, 25 bp, Homo sapien
gtttgcctacgggatttttctgcca

SEQ ID NO: 4322160 - DNA, 25 bp, Homo sapien
tccaactccaatatggtttgcctac

SEQ ID NO: 4322161 - DNA, 25 bp, Homo sapien
aagctgtcccaggattcgtctgtaa

SEQ ID NO: 4322162 - DNA, 25 bp, Homo sapien
gtggatgctaagccacagcagcagg

SEQ ID NO: 4322163 - DNA, 25 bp, Homo sapien
cagcagcaggacaggactccatagc

SEQ ID NO: 4322164 - DNA, 25 bp, Homo sapien
gatgctaagccacagcagcaggaca

SEQ ID NO: 4322165 - DNA, 25 bp, Homo sapien
cacagcagcaggacaggactccata

SEQ ID NO: 4322166 - DNA, 25 bp, Homo sapien
tccactctcctgttcggggccaaaa

SEQ ID NO: 4322167 - DNA, 25 bp, Homo sapien
cactctcctgttcggggccaaaagg

SEQ ID NO: 4322168 - DNA, 25 bp, Homo sapien
tcttcactccatatcttcccaccga

SEQ ID NO: 4322169 - DNA, 25 bp, Homo sapien
ttggccccatcttcactccatatct

SEQ ID NO: 4322170 - DNA, 25 bp, Homo sapien
aggaaaaggatagacaactgggttg

SEQ ID NO: 4322171 - DNA, 25 bp, Homo sapien
ctgggttgtgtacgtggagttattt

SEQ ID NO: 4322172 - DNA, 25 bp, Homo sapien
gcttcgaggaattgcataaactgat

SEQ ID NO: 4322173 - DNA, 25 bp, Homo sapien
gttattttggcttcgaggaattgca

SEQ ID NO: 4322174 - DNA, 25 bp, Homo sapien
gagagcctctaacaccttttttgga

SEQ ID NO: 4322175 - DNA, 25 bp, Homo sapien
agtgacaaacccatactgagcttcc

SEQ ID NO: 4322176 - DNA, 25 bp, Homo sapien
aaaatgcctatgacctcatctcgag

SEQ ID NO: 4322177 - DNA, 25 bp, Homo sapien
ttgaaaagcatctctctggagagcc

SEQ ID NO: 4322178 - DNA, 25 bp, Homo sapien
gctgaggagaaataacaggtcatct

SEQ ID NO: 4322179 - DNA, 25 bp, Homo sapien
tgctgaggagaaataacaggtcatc

SEQ ID NO: 4322180 - DNA, 25 bp, Homo sapien
ctgaggagaaataacaggtcatctc

SEQ ID NO: 4322181 - DNA, 25 bp, Homo sapien
gaggagaaataacaggtcatctctt

SEQ ID NO: 4322182 - DNA, 25 bp, Homo sapien
ggacacggaagtattacatccgact

SEQ ID NO: 4322183 - DNA, 25 bp, Homo sapien
ccttgggacacggaagtattacatc

SEQ ID NO: 4322184 - DNA, 25 bp, Homo sapien
gaagtattacatccgactcactggg

SEQ ID NO: 4322185 - DNA, 25 bp, Homo sapien
cacggaagtattacatccgactcac

SEQ ID NO: 4322186 - DNA, 25 bp, Homo sapien
ttggaaactgtggcctttagtatgt

SEQ ID NO: 4322187 - DNA, 25 bp, Homo sapien
atttcttttgggctgagccctcggt

SEQ ID NO: 4322188 - DNA, 25 bp, Homo sapien
gggctgagccctcggtatcactgcc

SEQ ID NO: 4322189 - DNA, 25 bp, Homo sapien
gcctttagtatgtcttggaaatttc

SEQ ID NO: 4322190 - DNA, 25 bp, Homo sapien
gcagccaagagtgcgtgttgactaa

SEQ ID NO: 4322191 - DNA, 25 bp, Homo sapien
ccaagagtgcgtgttgactaaggag

SEQ ID NO: 4322192 - DNA, 25 bp, Homo sapien
cgtgttgactaaggagggtggctgc

SEQ ID NO: 4322193 - DNA, 25 bp, Homo sapien
acccagggcagccaagagtgcgtgt

SEQ ID NO: 4322194 - DNA, 25 bp, Homo sapien
ccctatggatccagaagggacccag

SEQ ID NO: 4322195 - DNA, 25 bp, Homo sapien
cttagtggccttttccctatggatc

SEQ ID NO: 4322196 - DNA, 25 bp, Homo sapien
ccttgactttgtctggacttcacaa

SEQ ID NO: 4322197 - DNA, 25 bp, Homo sapien
cacaaaactggcaggagtccatgag

SEQ ID NO: 4322198 - DNA, 25 bp, Homo sapien
ctcttggtttccgattctgtcccct

SEQ ID NO: 4322199 - DNA, 25 bp, Homo sapien
aacagaagggatgaagataaataag

SEQ ID NO: 4322200 - DNA, 25 bp, Homo sapien
catgtggtggatatatgcaggtaag

SEQ ID NO: 4322201 - DNA, 25 bp, Homo sapien
tatatgcaggtaagtgcttcttggg

SEQ ID NO: 4322202 - DNA, 25 bp, Homo sapien
tgaagtcatgatccgtggagcctgt

SEQ ID NO: 4322203 - DNA, 25 bp, Homo sapien
tcaagaatgaaaggttggcctgtgt

SEQ ID NO: 4322204 - DNA, 25 bp, Homo sapien
tttatcaagaatgaaaggttggcct

SEQ ID NO: 4322205 - DNA, 25 bp, Homo sapien
gaatgaaaggttggcctgtgttctt

SEQ ID NO: 4322206 - DNA, 25 bp, Homo sapien
tatcaagaatgaaaggttggcctgt

SEQ ID NO: 4322207 - DNA, 25 bp, Homo sapien
gcatgttcttcaaggtcatgactga

SEQ ID NO: 4322208 - DNA, 25 bp, Homo sapien
gctgcttctggcgtagtgtactctg

SEQ ID NO: 4322209 - DNA, 25 bp, Homo sapien
ggtgctatggcatgtgctgcttctg

SEQ ID NO: 4322210 - DNA, 25 bp, Homo sapien
ccagtcaggtgctatggcatgtgct

SEQ ID NO: 4322211 - DNA, 25 bp, Homo sapien
aactcctcttaagcatgtaataact

SEQ ID NO: 4322212 - DNA, 25 bp, Homo sapien
gtgaggtggatgagaccaaactcct

SEQ ID NO: 4322213 - DNA, 25 bp, Homo sapien
gaccaaactcctcttaagcatgtaa

SEQ ID NO: 4322214 - DNA, 25 bp, Homo sapien
ggatgagaccaaactcctcttaagc

SEQ ID NO: 4322215 - DNA, 25 bp, Homo sapien
tcatcaggacctcacactgtggact

SEQ ID NO: 4322216 - DNA, 25 bp, Homo sapien
taccagagtatagggacagagacct

SEQ ID NO: 4322217 - DNA, 25 bp, Homo sapien
ttttgtcttgtagccactccctgat

SEQ ID NO: 4322218 - DNA, 25 bp, Homo sapien
cactccctgatctaagttggtacca

SEQ ID NO: 4322219 - DNA, 25 bp, Homo sapien
ttccatgggctgtcgcgagagcttt

SEQ ID NO: 4322220 - DNA, 25 bp, Homo sapien
cgcgagagctttctgtgcttatgaa

SEQ ID NO: 4322221 - DNA, 25 bp, Homo sapien
tcatgtttccatgggctgtcgcgag

SEQ ID NO: 4322222 - DNA, 25 bp, Homo sapien
ttctgtgcttatgaaatgagcccat

SEQ ID NO: 4322223 - DNA, 25 bp, Homo sapien
gcaacctggcatgtactgtacacag

SEQ ID NO: 4322224 - DNA, 25 bp, Homo sapien
cagttcccttgtaagaggcataagg

SEQ ID NO: 4322225 - DNA, 25 bp, Homo sapien
tagaacagcacgaacattgtcatgg

SEQ ID NO: 4322226 - DNA, 25 bp, Homo sapien
tcatggagggatgaagcaacctggc

SEQ ID NO: 4322227 - DNA, 25 bp, Homo sapien
tggaggaacagacaggcagcacagc

SEQ ID NO: 4322228 - DNA, 25 bp, Homo sapien
ctggaggaacagacaggcagcacag

SEQ ID NO: 4322229 - DNA, 25 bp, Homo sapien
ctcctctctggccaattactttggc

SEQ ID NO: 4322230 - DNA, 25 bp, Homo sapien
cacctttgccaaatctaccaagcct

SEQ ID NO: 4322231 - DNA, 25 bp, Homo sapien
ttgccaaatctaccaagcctcctct

SEQ ID NO: 4322232 - DNA, 25 bp, Homo sapien
caaatctaccaagcctcctctctgg

SEQ ID NO: 4322233 - DNA, 25 bp, Homo sapien
cacaaatctgctggtgatgcgtgtg

SEQ ID NO: 4322234 - DNA, 25 bp, Homo sapien
tctccagtgggcttgtccatatccc

SEQ ID NO: 4322235 - DNA, 25 bp, Homo sapien
tgtcgcctatgagggaagcacaatg

SEQ ID NO: 4322236 - DNA, 25 bp, Homo sapien
tctgaagctttgttggaaatgcccc

SEQ ID NO: 4322237 - DNA, 25 bp, Homo sapien
cttgatgtctgtgtgactcacatac

SEQ ID NO: 4322238 - DNA, 25 bp, Homo sapien
tctctagctgtgtactgcttgatgt

SEQ ID NO: 4322239 - DNA, 25 bp, Homo sapien
cgaattatctctagctgtgtactgc

SEQ ID NO: 4322240 - DNA, 25 bp, Homo sapien
ctgcgaattatctctagctgtgtac

SEQ ID NO: 4322241 - DNA, 25 bp, Homo sapien
tacccataggctccacttcacaggt

SEQ ID NO: 4322242 - DNA, 25 bp, Homo sapien
aattcttgaatattggatgaagcag

SEQ ID NO: 4322243 - DNA, 25 bp, Homo sapien
ccttcttgaatagaagactgtccca

SEQ ID NO: 4322244 - DNA, 25 bp, Homo sapien
gaagcagtggataggatgtcattga

SEQ ID NO: 4322245 - DNA, 25 bp, Homo sapien
caagtgtgatgatccttgcaggccg

SEQ ID NO: 4322246 - DNA, 25 bp, Homo sapien
tgtgagggtgccttgctgaaacttc

SEQ ID NO: 4322247 - DNA, 25 bp, Homo sapien
tacaaattgctgtgggtgctatgga

SEQ ID NO: 4322248 - DNA, 25 bp, Homo sapien
tctgatggtccttgaaaccgaatgc

SEQ ID NO: 4322249 - DNA, 25 bp, Homo sapien
gcattaagcaagacactttgggaga

SEQ ID NO: 4322250 - DNA, 25 bp, Homo sapien
tctagtgacaccctatagagctctc

SEQ ID NO: 4322251 - DNA, 25 bp, Homo sapien
tgtacttttcaaggccggtcaattg

SEQ ID NO: 4322252 - DNA, 25 bp, Homo sapien
ttgcctaagacctcaaatcctgacg

SEQ ID NO: 4322253 - DNA, 25 bp, Homo sapien
aataccaacctatgattctcagtag

SEQ ID NO: 4322254 - DNA, 25 bp, Homo sapien
tgtcatggtcgcctatttcatctgg

SEQ ID NO: 4322255 - DNA, 25 bp, Homo sapien
cagactggcaaggatatgccagact

SEQ ID NO: 4322256 - DNA, 25 bp, Homo sapien
tatcaagagtagtgtctgtgtgtcc

SEQ ID NO: 4322257 - DNA, 25 bp, Homo sapien
cacgatctcagtccatgtcctacat

SEQ ID NO: 4322258 - DNA, 25 bp, Homo sapien
tagggagcggaaacaggcaatacta

SEQ ID NO: 4322259 - DNA, 25 bp, Homo sapien
actatgcttccataacaaaaactgg

SEQ ID NO: 4322260 - DNA, 25 bp, Homo sapien
cttatagagaattcgagtagggagc

SEQ ID NO: 4322261 - DNA, 25 bp, Homo sapien
ggttgacaatacacacataagccag

SEQ ID NO: 4322262 - DNA, 25 bp, Homo sapien
tctgacagcctttaggacggtcttg

SEQ ID NO: 4322263 - DNA, 25 bp, Homo sapien
tgaatgactattacaggctgaacag

SEQ ID NO: 4322264 - DNA, 25 bp, Homo sapien
gaacaggatgtcctatgccaagagg

SEQ ID NO: 4322265 - DNA, 25 bp, Homo sapien
ttttctcaggttgtaggatcattag

SEQ ID NO: 4322266 - DNA, 25 bp, Homo sapien
cattttctcaggttgtaggatcatt

SEQ ID NO: 4322267 - DNA, 25 bp, Homo sapien
attttctcaggttgtaggatcatta

SEQ ID NO: 4322268 - DNA, 25 bp, Homo sapien
cagaagggtgactgccaaagtttta

SEQ ID NO: 4322269 - DNA, 25 bp, Homo sapien
ccttagacagttggatgtgatcaca

SEQ ID NO: 4322270 - DNA, 25 bp, Homo sapien
gggtagatgtcccttgagcctggat

SEQ ID NO: 4322271 - DNA, 25 bp, Homo sapien
ctttgccttagggaagagagtctca

SEQ ID NO: 4322272 - DNA, 25 bp, Homo sapien
catgatttactgcgtctttgttcct

SEQ ID NO: 4322273 - DNA, 25 bp, Homo sapien
acatgatttactgcgtctttgttcc

SEQ ID NO: 4322274 - DNA, 25 bp, Homo sapien
cacatgatttactgcgtctttgttc

SEQ ID NO: 4322275 - DNA, 25 bp, Homo sapien
tctgttatccccaacatcactggca

SEQ ID NO: 4322276 - DNA, 25 bp, Homo sapien
catccaggcgatagaaaatcaaggt

SEQ ID NO: 4322277 - DNA, 25 bp, Homo sapien
tactgaacacctcttagttctgtta

SEQ ID NO: 4322278 - DNA, 25 bp, Homo sapien
aaatcaaggtgactgtatgatccac

SEQ ID NO: 4322279 - DNA, 25 bp, Homo sapien
tcaaacctcggacctctagaagcag

SEQ ID NO: 4322280 - DNA, 25 bp, Homo sapien
caaacccattggtgccagtactgaa

SEQ ID NO: 4322281 - DNA, 25 bp, Homo sapien
aaaagttgcttctagttctcctctc

SEQ ID NO: 4322282 - DNA, 25 bp, Homo sapien
ctgaatgttcacacttaaggttgga

SEQ ID NO: 4322283 - DNA, 25 bp, Homo sapien
ttgtattcagaagggcaagcgtgga

SEQ ID NO: 4322284 - DNA, 25 bp, Homo sapien
gagattcctcagtcaagtgtgcttt

SEQ ID NO: 4322285 - DNA, 25 bp, Homo sapien
ggttaactgtcacagggccactgag

SEQ ID NO: 4322286 - DNA, 25 bp, Homo sapien
caggcgtggctttgcttcttaaacc

SEQ ID NO: 4322287 - DNA, 25 bp, Homo sapien
caccctggtgaaggttgtatatata

SEQ ID NO: 4322288 - DNA, 25 bp, Homo sapien
tgtatatataagaaaggtggaggct

SEQ ID NO: 4322289 - DNA, 25 bp, Homo sapien
gaatccctggctccaattattccca

SEQ ID NO: 4322290 - DNA, 25 bp, Homo sapien
agcaggtaactaagcaccctggtga

SEQ ID NO: 4322291 - DNA, 25 bp, Homo sapien
cagaaagaggccgtggatttggaca

SEQ ID NO: 4322292 - DNA, 25 bp, Homo sapien
tacagccagagcatgattctgaact

SEQ ID NO: 4322293 - DNA, 25 bp, Homo sapien
aataaagacttcatatcatcgtggg

SEQ ID NO: 4322294 - DNA, 25 bp, Homo sapien
taaaccttgtgccaatttaagtgga

SEQ ID NO: 4322295 - DNA, 25 bp, Homo sapien
tcctgtttcctttcggtgtggccat

SEQ ID NO: 4322296 - DNA, 25 bp, Homo sapien
cattttgcacgccatggttctcctt

SEQ ID NO: 4322297 - DNA, 25 bp, Homo sapien
cttctactgttaactgcgggaaaag

SEQ ID NO: 4322298 - DNA, 25 bp, Homo sapien
aaagcaagtcgtcttctactgttaa

SEQ ID NO: 4322299 - DNA, 25 bp, Homo sapien
tgtatgctgtaacctcaaaaagagc

SEQ ID NO: 4322300 - DNA, 25 bp, Homo sapien
tcattaaagaagaatcccaagctgt

SEQ ID NO: 4322301 - DNA, 25 bp, Homo sapien
tatcctgcagtggagtccgagagct

SEQ ID NO: 4322302 - DNA, 25 bp, Homo sapien
cctcaaaaagagctgatacgctgtt

SEQ ID NO: 4322303 - DNA, 25 bp, Homo sapien
ggtttccgttgctgaatccctacac

SEQ ID NO: 4322304 - DNA, 25 bp, Homo sapien
caaggcaaaggtttccgttgctgaa

SEQ ID NO: 4322305 - DNA, 25 bp, Homo sapien
aaatgcaaggcaaaggtttccgttg

SEQ ID NO: 4322306 - DNA, 25 bp, Homo sapien
caaaggtttccgttgctgaatccct

SEQ ID NO: 4322307 - DNA, 25 bp, Homo sapien
ttttacttcatatcccaatctttgt

SEQ ID NO: 4322308 - DNA, 25 bp, Homo sapien
caaagctttattcgaagcttcgggt

SEQ ID NO: 4322309 - DNA, 25 bp, Homo sapien
tgctttttacttcatatcccaatct

SEQ ID NO: 4322310 - DNA, 25 bp, Homo sapien
cttcaaagctttattcgaagcttcg

SEQ ID NO: 4322311 - DNA, 25 bp, Homo sapien
acccactgatggcagactctgtttt

SEQ ID NO: 4322312 - DNA, 25 bp, Homo sapien
cctatacccactgatggcagactct

SEQ ID NO: 4322313 - DNA, 25 bp, Homo sapien
tatacccactgatggcagactctgt

SEQ ID NO: 4322314 - DNA, 25 bp, Homo sapien
atacccactgatggcagactctgtt

SEQ ID NO: 4322315 - DNA, 25 bp, Homo sapien
cagggatccatgaatattgtttgac

SEQ ID NO: 4322316 - DNA, 25 bp, Homo sapien
gggatccatgaatattgtttgactt

SEQ ID NO: 4322317 - DNA, 25 bp, Homo sapien
agggatccatgaatattgtttgact

SEQ ID NO: 4322318 - DNA, 25 bp, Homo sapien
tccagagaaaacgtagaactttgcc

SEQ ID NO: 4322319 - DNA, 25 bp, Homo sapien
taaaacaccctctagaaatgcaccc

SEQ ID NO: 4322320 - DNA, 25 bp, Homo sapien
ggacacccagtttcacttactcaga

SEQ ID NO: 4322321 - DNA, 25 bp, Homo sapien
agtcgtttaacagccagctaaaaca

SEQ ID NO: 4322322 - DNA, 25 bp, Homo sapien
caatcatggtttacactctccagag

SEQ ID NO: 4322323 - DNA, 25 bp, Homo sapien
tctggctgtatttgccctacaggaa

SEQ ID NO: 4322324 - DNA, 25 bp, Homo sapien
gaaataaggacattacccacctctg

SEQ ID NO: 4322325 - DNA, 25 bp, Homo sapien
taaggcaccagtattagaaggcatc

SEQ ID NO: 4322326 - DNA, 25 bp, Homo sapien
cttacattgagtgaaaaggtagtat

SEQ ID NO: 4322327 - DNA, 25 bp, Homo sapien
ctaagcatttcccattatggttctt

SEQ ID NO: 4322328 - DNA, 25 bp, Homo sapien
tatttgataactgaatcactttact

SEQ ID NO: 4322329 - DNA, 25 bp, Homo sapien
cactttactgatgtcttacattgag

SEQ ID NO: 4322330 - DNA, 25 bp, Homo sapien
tctcctgataggagtgcgtggagcc

SEQ ID NO: 4322331 - DNA, 25 bp, Homo sapien
caagtcttgtcttccgtttcctagg

SEQ ID NO: 4322332 - DNA, 25 bp, Homo sapien
taggaacaactggattctagtctcc

SEQ ID NO: 4322333 - DNA, 25 bp, Homo sapien
gacacccgtggctaattgaggaaga

SEQ ID NO: 4322334 - DNA, 25 bp, Homo sapien
catgggtccattgtgcagctgtttg

SEQ ID NO: 4322335 - DNA, 25 bp, Homo sapien
taaactatgaagcactctatgaatg

SEQ ID NO: 4322336 - DNA, 25 bp, Homo sapien
tgtccacatgggtccattgtgcagc

SEQ ID NO: 4322337 - DNA, 25 bp, Homo sapien
atgccccttctagtaaggccccagg

SEQ ID NO: 4322338 - DNA, 25 bp, Homo sapien
ttcaaatttaactgtcccgatcttc

SEQ ID NO: 4322339 - DNA, 25 bp, Homo sapien
aaatttaactgtcccgatcttctga

SEQ ID NO: 4322340 - DNA, 25 bp, Homo sapien
tcaagattcaaatttaactgtcccg

SEQ ID NO: 4322341 - DNA, 25 bp, Homo sapien
atttaactgtcccgatcttctgagt

SEQ ID NO: 4322342 - DNA, 25 bp, Homo sapien
gagacctcgcaaggttagtatcgcc

SEQ ID NO: 4322343 - DNA, 25 bp, Homo sapien
tagctgagaataccaagatgatgag

SEQ ID NO: 4322344 - DNA, 25 bp, Homo sapien
catattctggtgaagtgctgtggag

SEQ ID NO: 4322345 - DNA, 25 bp, Homo sapien
tatctggtggagtgtgagacctcgc

SEQ ID NO: 4322346 - DNA, 25 bp, Homo sapien
ccttcaaactgttggcaaccatttt

SEQ ID NO: 4322347 - DNA, 25 bp, Homo sapien
tttcttgttcgaagaagaaagatta

SEQ ID NO: 4322348 - DNA, 25 bp, Homo sapien
tgttcgaagaagaaagattaggaga

SEQ ID NO: 4322349 - DNA, 25 bp, Homo sapien
cgaagaagaaagattaggagatgtc

SEQ ID NO: 4322350 - DNA, 25 bp, Homo sapien
taagctcttaatcatactacgttcc

SEQ ID NO: 4322351 - DNA, 25 bp, Homo sapien
caagatcctacttttggagagtggt

SEQ ID NO: 4322352 - DNA, 25 bp, Homo sapien
gtgttggccgctcctagctggtgaa

SEQ ID NO: 4322353 - DNA, 25 bp, Homo sapien
tacgttcccttgcataatattcaca

SEQ ID NO: 4322354 - DNA, 25 bp, Homo sapien
acttacgtagatgtagtcggttcct

SEQ ID NO: 4322355 - DNA, 25 bp, Homo sapien
aggaaccgactacatctacgtaagt

SEQ ID NO: 4322356 - DNA, 25 bp, Homo sapien
tgttttgtaggcttgaaagccaccg

SEQ ID NO: 4322357 - DNA, 25 bp, Homo sapien
caacagtggaatccaggaccaacaa

SEQ ID NO: 4322358 - DNA, 25 bp, Homo sapien
ggtaccgtgcaggtgttgatcacac

SEQ ID NO: 4322359 - DNA, 25 bp, Homo sapien
caacaacaacgttttcttcttctct

SEQ ID NO: 4322360 - DNA, 25 bp, Homo sapien
caggcagccttaccaaaactcttac

SEQ ID NO: 4322361 - DNA, 25 bp, Homo sapien
tggggagcccaacaacaagtaggcc

SEQ ID NO: 4322362 - DNA, 25 bp, Homo sapien
ctgaagacaggcagccttaccaaaa

SEQ ID NO: 4322363 - DNA, 25 bp, Homo sapien
caaacactaaatattgccctcttcc

SEQ ID NO: 4322364 - DNA, 25 bp, Homo sapien
tgttgctaccccagatatattgtga

SEQ ID NO: 4322365 - DNA, 25 bp, Homo sapien
aaggttctaactggactgggctgca

SEQ ID NO: 4322366 - DNA, 25 bp, Homo sapien
aaagccaggaaccatctgcgcagag

SEQ ID NO: 4322367 - DNA, 25 bp, Homo sapien
gattagaagacaccactctttggcc

SEQ ID NO: 4322368 - DNA, 25 bp, Homo sapien
gccatgagctgatgtaagccttgtt

SEQ ID NO: 4322369 - DNA, 25 bp, Homo sapien
gagctgatgtaagccttgtttgtga

SEQ ID NO: 4322370 - DNA, 25 bp, Homo sapien
gatgtaagccttgtttgtgatttaa

SEQ ID NO: 4322371 - DNA, 25 bp, Homo sapien
cctgcagccatgagctgatgtaagc

SEQ ID NO: 4322372 - DNA, 25 bp, Homo sapien
tcaggtggtccagtaaggtaggtcc

SEQ ID NO: 4322373 - DNA, 25 bp, Homo sapien
tgtacaatgtcctagatctgctatc

SEQ ID NO: 4322374 - DNA, 25 bp, Homo sapien
ccggccctaacgctttgtacaatgt

SEQ ID NO: 4322375 - DNA, 25 bp, Homo sapien
cagaagtgctgtctttcaggtggtc

SEQ ID NO: 4322376 - DNA, 25 bp, Homo sapien
cccagcaccaatagccttgcttgaa

SEQ ID NO: 4322377 - DNA, 25 bp, Homo sapien
gtgattaggagcctgcagcaaacca

SEQ ID NO: 4322378 - DNA, 25 bp, Homo sapien
cagcagcctcatgtgattaggagcc

SEQ ID NO: 4322379 - DNA, 25 bp, Homo sapien
cagcaaaccagtcacggggtaggtc

SEQ ID NO: 4322380 - DNA, 25 bp, Homo sapien
aatatctccattcggcaattgccat

SEQ ID NO: 4322381 - DNA, 25 bp, Homo sapien
caggcactgcttgacgcttcccttt

SEQ ID NO: 4322382 - DNA, 25 bp, Homo sapien
gttcacagtacttgcattattccaa

SEQ ID NO: 4322383 - DNA, 25 bp, Homo sapien
gacgcttccctttgagtaagggctg

SEQ ID NO: 4322384 - DNA, 25 bp, Homo sapien
gatgagtcaggtggccccagactct

SEQ ID NO: 4322385 - DNA, 25 bp, Homo sapien
tctctctcttttagctagattgcat

SEQ ID NO: 4322386 - DNA, 25 bp, Homo sapien
tgtcctgttgatgagtcaggtggcc

SEQ ID NO: 4322387 - DNA, 25 bp, Homo sapien
tgttgatgagtcaggtggccccaga

SEQ ID NO: 4322388 - DNA, 25 bp, Homo sapien
cacgaccagccagcatgtaacattt

SEQ ID NO: 4322389 - DNA, 25 bp, Homo sapien
accacgaccagccagcatgtaacat

SEQ ID NO: 4322390 - DNA, 25 bp, Homo sapien
ctaccacgaccagccagcatgtaac

SEQ ID NO: 4322391 - DNA, 25 bp, Homo sapien
ccacgaccagccagcatgtaacatt

SEQ ID NO: 4322392 - DNA, 25 bp, Homo sapien
gtccttgaaacacctttgtatagca

SEQ ID NO: 4322393 - DNA, 25 bp, Homo sapien
aatcttgtttacagaaagcacactg

SEQ ID NO: 4322394 - DNA, 25 bp, Homo sapien
taaaatcctatactgaactattgta

SEQ ID NO: 4322395 - DNA, 25 bp, Homo sapien
tgtcattctcagcagttatcctaag

SEQ ID NO: 4322396 - DNA, 25 bp, Homo sapien
tagtgatgccacaatacaacagctg

SEQ ID NO: 4322397 - DNA, 25 bp, Homo sapien
tgttgtattggtatcaatctagaac

SEQ ID NO: 4322398 - DNA, 25 bp, Homo sapien
aaatttctagtgatgccacaataca

SEQ ID NO: 4322399 - DNA, 25 bp, Homo sapien
tattggtatcaatctagaacagtga

SEQ ID NO: 4322400 - DNA, 25 bp, Homo sapien
atatttcacggccaggagagtcctc

SEQ ID NO: 4322401 - DNA, 25 bp, Homo sapien
tctgcctttgtatgggcatcatcct

SEQ ID NO: 4322402 - DNA, 25 bp, Homo sapien
ttttcgcaacaggaatattctgcct

SEQ ID NO: 4322403 - DNA, 25 bp, Homo sapien
ggccaggagagtcctctttgtcttt

SEQ ID NO: 4322404 - DNA, 25 bp, Homo sapien
tattgagagaagtccccactcatgg

SEQ ID NO: 4322405 - DNA, 25 bp, Homo sapien
ggagagctctgacccttagaaagca

SEQ ID NO: 4322406 - DNA, 25 bp, Homo sapien
tcatgttagtcaagtcctctgagaa

SEQ ID NO: 4322407 - DNA, 25 bp, Homo sapien
gaagtaagttggctaaggtcacata

SEQ ID NO: 4322408 - DNA, 25 bp, Homo sapien
tctctcatgacagcaaggctcctca

SEQ ID NO: 4322409 - DNA, 25 bp, Homo sapien
atggcagcatacatgaaagacatat

SEQ ID NO: 4322410 - DNA, 25 bp, Homo sapien
catgaaagacatatctctcatgaca

SEQ ID NO: 4322411 - DNA, 25 bp, Homo sapien
tatctctcatgacagcaaggctcct

SEQ ID NO: 4322412 - DNA, 25 bp, Homo sapien
ctgtgagttgaattcggaagccaca

SEQ ID NO: 4322413 - DNA, 25 bp, Homo sapien
tccctagcaatgtcagacaccagga

SEQ ID NO: 4322414 - DNA, 25 bp, Homo sapien
ttcggaagccacattgagcagaact

SEQ ID NO: 4322415 - DNA, 25 bp, Homo sapien
gaatctgagtgagaataaacctccc

SEQ ID NO: 4322416 - DNA, 25 bp, Homo sapien
aagctcagtgctggacttccgaaga

SEQ ID NO: 4322417 - DNA, 25 bp, Homo sapien
gagtctcggagttggtctcagcgcc

SEQ ID NO: 4322418 - DNA, 25 bp, Homo sapien
cgtggacgtcaacagcaatggcgga

SEQ ID NO: 4322419 - DNA, 25 bp, Homo sapien
ttttcggcaaagtgacgtggacgtc

SEQ ID NO: 4322420 - DNA, 25 bp, Homo sapien
ggagaggccggtcctaggcgaagtc

SEQ ID NO: 4322421 - DNA, 25 bp, Homo sapien
tctggcgtcggcatggaacggagag

SEQ ID NO: 4322422 - DNA, 25 bp, Homo sapien
aggcgaagtccggtgccctgcccta

SEQ ID NO: 4322423 - DNA, 25 bp, Homo sapien
ccgaggagccgtctggcgtcggcat

SEQ ID NO: 4322424 - DNA, 25 bp, Homo sapien
catttcagccatgggacatttttca

SEQ ID NO: 4322425 - DNA, 25 bp, Homo sapien
tgatataactctcccctaaaactgt

SEQ ID NO: 4322426 - DNA, 25 bp, Homo sapien
ggaagttgcaatacccacaatctga

SEQ ID NO: 4322427 - DNA, 25 bp, Homo sapien
tatttagatgtaccctgttaacagc

SEQ ID NO: 4322428 - DNA, 25 bp, Homo sapien
tagtcttttcaacatacactgttgg

SEQ ID NO: 4322429 - DNA, 25 bp, Homo sapien
tgttggaacaactagatacccatat

SEQ ID NO: 4322430 - DNA, 25 bp, Homo sapien
aacaactagatacccatatacaaag

SEQ ID NO: 4322431 - DNA, 25 bp, Homo sapien
caacatacactgttggaacaactag

SEQ ID NO: 4322432 - DNA, 25 bp, Homo sapien
ggcgcactcccgggattccaggctt

SEQ ID NO: 4322433 - DNA, 25 bp, Homo sapien
cagaggctgatggacgtgtatttct

SEQ ID NO: 4322434 - DNA, 25 bp, Homo sapien
ggcacccgccgcgtcctgcttgaca

SEQ ID NO: 4322435 - DNA, 25 bp, Homo sapien
cgtccgcgtgggtccgggatcgcgt

SEQ ID NO: 4322436 - DNA, 25 bp, Homo sapien
agtagcatctccttagtcacgacag

SEQ ID NO: 4322437 - DNA, 25 bp, Homo sapien
tgtggcctctacctgctcgatgtca

SEQ ID NO: 4322438 - DNA, 25 bp, Homo sapien
caaggtgtattgctctcataaggcc

SEQ ID NO: 4322439 - DNA, 25 bp, Homo sapien
tcacgacagtcaggaagatctctag

SEQ ID NO: 4322440 - DNA, 25 bp, Homo sapien
taagttgcctccaagcagtttgtga

SEQ ID NO: 4322441 - DNA, 25 bp, Homo sapien
gaacgcaaggtgatacatctttggt

SEQ ID NO: 4322442 - DNA, 25 bp, Homo sapien
tcatgagtagctatagaacgcaagg

SEQ ID NO: 4322443 - DNA, 25 bp, Homo sapien
tgaacctcttatcccgttgctggag

SEQ ID NO: 4322444 - DNA, 25 bp, Homo sapien
tttgagttcagccagagaccctatc

SEQ ID NO: 4322445 - DNA, 25 bp, Homo sapien
caatgggtttttgcttacatgggcc

SEQ ID NO: 4322446 - DNA, 25 bp, Homo sapien
tattaaggtgatggacacggtgtcc

SEQ ID NO: 4322447 - DNA, 25 bp, Homo sapien
taaaaattagggactgagccaggcg

SEQ ID NO: 4322448 - DNA, 25 bp, Homo sapien
ccaaggagtagattgtgacatcgac

SEQ ID NO: 4322449 - DNA, 25 bp, Homo sapien
tgaattcctcacagggatgacgacc

SEQ ID NO: 4322450 - DNA, 25 bp, Homo sapien
ggtctgtgcaaagtacaccaagtgg

SEQ ID NO: 4322451 - DNA, 25 bp, Homo sapien
catcgactgggtatttagggaagga

SEQ ID NO: 4322452 - DNA, 25 bp, Homo sapien
tatatcccgttgtgctaactaggct

SEQ ID NO: 4322453 - DNA, 25 bp, Homo sapien
caaagagcacgccatcctgtaaagt

SEQ ID NO: 4322454 - DNA, 25 bp, Homo sapien
taaagaccgatttgtagacctgtcc

SEQ ID NO: 4322455 - DNA, 25 bp, Homo sapien
aacagaacatggtgggcagggtcca

SEQ ID NO: 4322456 - DNA, 25 bp, Homo sapien
cagtttttgagctcctctatgttca

SEQ ID NO: 4322457 - DNA, 25 bp, Homo sapien
gtttattccttaatgcttagcacaa

SEQ ID NO: 4322458 - DNA, 25 bp, Homo sapien
ttcctctgaagcatatgacaggttc

SEQ ID NO: 4322459 - DNA, 25 bp, Homo sapien
atttactatccagcccaccaaaact

SEQ ID NO: 4322460 - DNA, 25 bp, Homo sapien
caaaatgcagcggtctcaaacttcc

SEQ ID NO: 4322461 - DNA, 25 bp, Homo sapien
ctgtcagtacccctagtgaagacct

SEQ ID NO: 4322462 - DNA, 25 bp, Homo sapien
ttcacaacaggcaatagtccatgag

SEQ ID NO: 4322463 - DNA, 25 bp, Homo sapien
cctgggtagttagtccttagagatc

SEQ ID NO: 4322464 - DNA, 25 bp, Homo sapien
cacatatatagacggaatcatccag

SEQ ID NO: 4322465 - DNA, 25 bp, Homo sapien
tcatggcacattacagcctcgagct

SEQ ID NO: 4322466 - DNA, 25 bp, Homo sapien
catgctgacaatggtttaaagggtc

SEQ ID NO: 4322467 - DNA, 25 bp, Homo sapien
ccaagaggattaataagtgccacca

SEQ ID NO: 4322468 - DNA, 25 bp, Homo sapien
ccattcaacacagttcatgacagtg

SEQ ID NO: 4322469 - DNA, 25 bp, Homo sapien
gttctaatcttttgttgcacaggga

SEQ ID NO: 4322470 - DNA, 25 bp, Homo sapien
gggaataaaagctgcaagactgcaa

SEQ ID NO: 4322471 - DNA, 25 bp, Homo sapien
catgacagtgtctttagggttcagt

SEQ ID NO: 4322472 - DNA, 25 bp, Homo sapien
gggccatctccatttccgatttggc

SEQ ID NO: 4322473 - DNA, 25 bp, Homo sapien
caaagtgaatacagatgggccatct

SEQ ID NO: 4322474 - DNA, 25 bp, Homo sapien
gccaggttaatagctttgttgaaca

SEQ ID NO: 4322475 - DNA, 25 bp, Homo sapien
tctttgcaacttctgtctgggcatg

SEQ ID NO: 4322476 - DNA, 25 bp, Homo sapien
gcaactctggataaacacttacaca

SEQ ID NO: 4322477 - DNA, 25 bp, Homo sapien
cacaaaataagaggttaaggacaga

SEQ ID NO: 4322478 - DNA, 25 bp, Homo sapien
tggtggatcttaagagcaactctgg

SEQ ID NO: 4322479 - DNA, 25 bp, Homo sapien
ttggctaccaatccttatgtcactg

SEQ ID NO: 4322480 - DNA, 25 bp, Homo sapien
ctttgtacttcaatagttcccatgg

SEQ ID NO: 4322481 - DNA, 25 bp, Homo sapien
aatttcaatagccttgctgataagt

SEQ ID NO: 4322482 - DNA, 25 bp, Homo sapien
cttgctgataagttccaaacctcta

SEQ ID NO: 4322483 - DNA, 25 bp, Homo sapien
taagttccaaacctctatccagatc

SEQ ID NO: 4322484 - DNA, 25 bp, Homo sapien
tttcatcagctttaccaaactgttg

SEQ ID NO: 4322485 - DNA, 25 bp, Homo sapien
gctttaccaaactgttgttgatctg

SEQ ID NO: 4322486 - DNA, 25 bp, Homo sapien
caaactgttgttgatctgttaatgc

SEQ ID NO: 4322487 - DNA, 25 bp, Homo sapien
catcagctttaccaaactgttgttg

SEQ ID NO: 4322488 - DNA, 25 bp, Homo sapien
ctagcccatattcagttaaccccgg

SEQ ID NO: 4322489 - DNA, 25 bp, Homo sapien
tggccagggaattatcttaagggca

SEQ ID NO: 4322490 - DNA, 25 bp, Homo sapien
agctgtatggctcttagtcttttca

SEQ ID NO: 4322491 - DNA, 25 bp, Homo sapien
catcattgtgagcatggatgccttc

SEQ ID NO: 4322492 - DNA, 25 bp, Homo sapien
tgtatgaccgtcactacaagaagct

SEQ ID NO: 4322493 - DNA, 25 bp, Homo sapien
cctcttctgaggtgattcgggacca

SEQ ID NO: 4322494 - DNA, 25 bp, Homo sapien
gagggaaattctcgccttaagcttc

SEQ ID NO: 4322495 - DNA, 25 bp, Homo sapien
gaagctgcaaccatgatagcactgt

SEQ ID NO: 4322496 - DNA, 25 bp, Homo sapien
atagccttcggcacaccttggaaat

SEQ ID NO: 4322497 - DNA, 25 bp, Homo sapien
tcaaaacctttcatagctgcttgga

SEQ ID NO: 4322498 - DNA, 25 bp, Homo sapien
ctgggcgtatagtgcatagccttcg

SEQ ID NO: 4322499 - DNA, 25 bp, Homo sapien
gtgaagagttgtttcccgtatatgc

SEQ ID NO: 4322500 - DNA, 25 bp, Homo sapien
ggtcttaacctaatacattcatcaa

SEQ ID NO: 4322501 - DNA, 25 bp, Homo sapien
tcttcaacttgatcaaggagtattt

SEQ ID NO: 4322502 - DNA, 25 bp, Homo sapien
cagagcagactcaggtcttaaccta

SEQ ID NO: 4322503 - DNA, 25 bp, Homo sapien
ctgtgcttgtgccagagcagactca

SEQ ID NO: 4322504 - DNA, 25 bp, Homo sapien
tagtccagttaagtatgttcagtgt

SEQ ID NO: 4322505 - DNA, 25 bp, Homo sapien
aaatgtaattcaactagtccagtta

SEQ ID NO: 4322506 - DNA, 25 bp, Homo sapien
tgtaattcaactagtccagttaagt

SEQ ID NO: 4322507 - DNA, 25 bp, Homo sapien
tcaactagtccagttaagtatgttc

SEQ ID NO: 4322508 - DNA, 25 bp, Homo sapien
tgtcctcggtggtgataaacatctg

SEQ ID NO: 4322509 - DNA, 25 bp, Homo sapien
catgttaaaatcttgagtggacagc

SEQ ID NO: 4322510 - DNA, 25 bp, Homo sapien
catgctgcctcttttgatgagagca

SEQ ID NO: 4322511 - DNA, 25 bp, Homo sapien
gatcgatgtcagcagccatgttaaa

SEQ ID NO: 4322512 - DNA, 25 bp, Homo sapien
cccggctaattttcaggcatgagcc

SEQ ID NO: 4322513 - DNA, 25 bp, Homo sapien
tatggtaggcatcattactacttgc

SEQ ID NO: 4322514 - DNA, 25 bp, Homo sapien
gcacagaagtctgatcacgtccaat

SEQ ID NO: 4322515 - DNA, 25 bp, Homo sapien
actacttgccactaaaagtcatgtg

SEQ ID NO: 4322516 - DNA, 25 bp, Homo sapien
tccaatatggtaggcagtggctaca

SEQ ID NO: 4322517 - DNA, 25 bp, Homo sapien
tgaaaggctgttccaactgtacaac

SEQ ID NO: 4322518 - DNA, 25 bp, Homo sapien
gagacgatgaaactaccggatgcta

SEQ ID NO: 4322519 - DNA, 25 bp, Homo sapien
aatgtaacaattcaacagatgcccc

SEQ ID NO: 4322520 - DNA, 25 bp, Homo sapien
gcttctttcaaactgatgactttat

SEQ ID NO: 4322521 - DNA, 25 bp, Homo sapien
agctcgtagtagcaatgcttctgcc

SEQ ID NO: 4322522 - DNA, 25 bp, Homo sapien
ctttatctaaatctggtttggctgc

SEQ ID NO: 4322523 - DNA, 25 bp, Homo sapien
ccaataagcaggtagaaggtagctc

SEQ ID NO: 4322524 - DNA, 25 bp, Homo sapien
attcaatgttaaaacatgccacatt

SEQ ID NO: 4322525 - DNA, 25 bp, Homo sapien
tgatatcatccgtgaaagaactgaa

SEQ ID NO: 4322526 - DNA, 25 bp, Homo sapien
cacttctaaagcctccccttccttg

SEQ ID NO: 4322527 - DNA, 25 bp, Homo sapien
catgggctgggaaatgatatcatcc

SEQ ID NO: 4322528 - DNA, 25 bp, Homo sapien
aagaactgaagtaagatttgataaa

SEQ ID NO: 4322529 - DNA, 25 bp, Homo sapien
gagatggcatcagaggttcacgatt

SEQ ID NO: 4322530 - DNA, 25 bp, Homo sapien
aacagcatgctttgttgattttgga

SEQ ID NO: 4322531 - DNA, 25 bp, Homo sapien
tttaagaactttatcggctaacagc

SEQ ID NO: 4322532 - DNA, 25 bp, Homo sapien
tgttgattttggaacccttctaata

SEQ ID NO: 4322533 - DNA, 25 bp, Homo sapien
gaacccttctaatatacacacagca

SEQ ID NO: 4322534 - DNA, 25 bp, Homo sapien
tcttattgtctagcttctcatgggc

SEQ ID NO: 4322535 - DNA, 25 bp, Homo sapien
tctaaagagagctttcacatatttg

SEQ ID NO: 4322536 - DNA, 25 bp, Homo sapien
tctcatgggcttttgcacgtctaaa

SEQ ID NO: 4322537 - DNA, 25 bp, Homo sapien
caacagcttttgtacagtcttgtgc

SEQ ID NO: 4322538 - DNA, 25 bp, Homo sapien
gtatatctgtagtcagcaaaactat

SEQ ID NO: 4322539 - DNA, 25 bp, Homo sapien
aactgttgaggagaatagggtcacc

SEQ ID NO: 4322540 - DNA, 25 bp, Homo sapien
taactttggagtatatctgtagtca

SEQ ID NO: 4322541 - DNA, 25 bp, Homo sapien
ccagaaactttctatactatctaat

SEQ ID NO: 4322542 - DNA, 25 bp, Homo sapien
ctctgtagggcacaagctaatagcc

SEQ ID NO: 4322543 - DNA, 25 bp, Homo sapien
actgaatagcttgttcatattttcc

SEQ ID NO: 4322544 - DNA, 25 bp, Homo sapien
tagcctcagtatagcactgaatagc

SEQ ID NO: 4322545 - DNA, 25 bp, Homo sapien
tggctgcttgggctctatcaagaga

SEQ ID NO: 4322546 - DNA, 25 bp, Homo sapien
acaattatcaaacactaatcaacat

SEQ ID NO: 4322547 - DNA, 25 bp, Homo sapien
taaataactctggaacacttactgt

SEQ ID NO: 4322548 - DNA, 25 bp, Homo sapien
tcaatacttattgaccaattgttac

SEQ ID NO: 4322549 - DNA, 25 bp, Homo sapien
cttactgtatgagaaacaatgtttc

SEQ ID NO: 4322550 - DNA, 25 bp, Homo sapien
aggggggcacgatgtccactcactg

SEQ ID NO: 4322551 - DNA, 25 bp, Homo sapien
tttcatgtgggctaaactcatttca

SEQ ID NO: 4322552 - DNA, 25 bp, Homo sapien
gaaatactgccaaggattaagattg

SEQ ID NO: 4322553 - DNA, 25 bp, Homo sapien
caacagtttatgcagtcctcgaccc

SEQ ID NO: 4322554 - DNA, 25 bp, Homo sapien
cctactgtagtaggctggcttagat

SEQ ID NO: 4322555 - DNA, 25 bp, Homo sapien
tccaccgaggatgccaatttagagg

SEQ ID NO: 4322556 - DNA, 25 bp, Homo sapien
tgtacagcagtttatccaaccacag

SEQ ID NO: 4322557 - DNA, 25 bp, Homo sapien
caaatgcttctggttgcgaaatcca

SEQ ID NO: 4322558 - DNA, 25 bp, Homo sapien
gacagttagggcatcaggattctgc

SEQ ID NO: 4322559 - DNA, 25 bp, Homo sapien
cagacatccaaaattgatgtaagac

SEQ ID NO: 4322560 - DNA, 25 bp, Homo sapien
tttacctactattcttccatgatta

SEQ ID NO: 4322561 - DNA, 25 bp, Homo sapien
gagaatttcagacatccaaaattga

SEQ ID NO: 4322562 - DNA, 25 bp, Homo sapien
ttattttacctactattcttccatg

SEQ ID NO: 4322563 - DNA, 25 bp, Homo sapien
gctgtgtgcaaccaagcctggtgag

SEQ ID NO: 4322564 - DNA, 25 bp, Homo sapien
tccggagtgcaaaaggacaccttgg

SEQ ID NO: 4322565 - DNA, 25 bp, Homo sapien
tacgggcgctgagtgcttgcagcca

SEQ ID NO: 4322566 - DNA, 25 bp, Homo sapien
tgtggccgctactcttgtgcagcaa

SEQ ID NO: 4322567 - DNA, 25 bp, Homo sapien
tgctgccgactccacaggtatatgg

SEQ ID NO: 4322568 - DNA, 25 bp, Homo sapien
cctccacaggtttagaggcggccat

SEQ ID NO: 4322569 - DNA, 25 bp, Homo sapien
cggggtcttccgttcgctgttgcgc

SEQ ID NO: 4322570 - DNA, 25 bp, Homo sapien
actcccggagctcggtacagcggct

SEQ ID NO: 4322571 - DNA, 25 bp, Homo sapien
agtgtcctctgccaccgcctccctg

SEQ ID NO: 4322572 - DNA, 25 bp, Homo sapien
caagtgtcctctgccaccgcctccc

SEQ ID NO: 4322573 - DNA, 25 bp, Homo sapien
gtgtcctctgccaccgcctccctgt

SEQ ID NO: 4322574 - DNA, 25 bp, Homo sapien
gacaagtgtcctctgccaccgcctc

SEQ ID NO: 4322575 - DNA, 25 bp, Homo sapien
aagcccagggcatgccgggccagac

SEQ ID NO: 4322576 - DNA, 25 bp, Homo sapien
tgtcgcgagcgccacaatcaccaaa

SEQ ID NO: 4322577 - DNA, 25 bp, Homo sapien
aaacagcgtgcgaaggaagaccgag

SEQ ID NO: 4322578 - DNA, 25 bp, Homo sapien
aggaaagcaatgagcgagcgagcac

SEQ ID NO: 4322579 - DNA, 25 bp, Homo sapien
gacttctggagtccccgtcgtagct

SEQ ID NO: 4322580 - DNA, 25 bp, Homo sapien
ccagtatcaaccgaagagggagagg

SEQ ID NO: 4322581 - DNA, 25 bp, Homo sapien
taagggcgctcaagagatccgagtg

SEQ ID NO: 4322582 - DNA, 25 bp, Homo sapien
tgtgagtaggagtcttcggaaaccc

SEQ ID NO: 4322583 - DNA, 25 bp, Homo sapien
ctattggctagcaagggtggtgggc

SEQ ID NO: 4322584 - DNA, 25 bp, Homo sapien
agctacccagtttactggtcgattt

SEQ ID NO: 4322585 - DNA, 25 bp, Homo sapien
gaaggctattggctagcaagggtgg

SEQ ID NO: 4322586 - DNA, 25 bp, Homo sapien
tactggtcgatttcggatccagttt

SEQ ID NO: 4322587 - DNA, 25 bp, Homo sapien
agtttggacgaatttgaggttatag

SEQ ID NO: 4322588 - DNA, 25 bp, Homo sapien
ctaacatagcgagattttagtttgg

SEQ ID NO: 4322589 - DNA, 25 bp, Homo sapien
ataggggagatagcgatggcagaag

SEQ ID NO: 4322590 - DNA, 25 bp, Homo sapien
catagcgagattttagtttggacga

SEQ ID NO: 4322591 - DNA, 25 bp, Homo sapien
gtcagggttcccgccggcttcgagc

SEQ ID NO: 4322592 - DNA, 25 bp, Homo sapien
tgagttggtagaaatgcgaagcgtc

SEQ ID NO: 4322593 - DNA, 25 bp, Homo sapien
cgccggcttcgagcctttcttggcg

SEQ ID NO: 4322594 - DNA, 25 bp, Homo sapien
gagctgatttctgcgtcagcccaca

SEQ ID NO: 4322595 - DNA, 25 bp, Homo sapien
ttaacagtctggtaccaccattgct

SEQ ID NO: 4322596 - DNA, 25 bp, Homo sapien
attgttgtcaatattaacagtctgg

SEQ ID NO: 4322597 - DNA, 25 bp, Homo sapien
tatggtcaatgcgaaataaaaagtt

SEQ ID NO: 4322598 - DNA, 25 bp, Homo sapien
tgaacaagtttctaactgatattgt

SEQ ID NO: 4322599 - DNA, 25 bp, Homo sapien
tgtcagccgggacaccaattgctcc

SEQ ID NO: 4322600 - DNA, 25 bp, Homo sapien
cactggtgtcagccgggacaccaat

SEQ ID NO: 4322601 - DNA, 25 bp, Homo sapien
ggtgtcagccgggacaccaattgct

SEQ ID NO: 4322602 - DNA, 25 bp, Homo sapien
ctggtgtcagccgggacaccaattg

SEQ ID NO: 4322603 - DNA, 25 bp, Homo sapien
tagtgccactttacttgctgagcag

SEQ ID NO: 4322604 - DNA, 25 bp, Homo sapien
ccttgactgccagaaggattggagt

SEQ ID NO: 4322605 - DNA, 25 bp, Homo sapien
tatcagcccactgttgagcggcttc

SEQ ID NO: 4322606 - DNA, 25 bp, Homo sapien
gacacattactttcaagggctacat

SEQ ID NO: 4322607 - DNA, 25 bp, Homo sapien
ttacacagaagaggtgtttctggaa

SEQ ID NO: 4322608 - DNA, 25 bp, Homo sapien
tacacagaagaggtgtttctggaat

SEQ ID NO: 4322609 - DNA, 25 bp, Homo sapien
tgctccactgcttctataacctcca

SEQ ID NO: 4322610 - DNA, 25 bp, Homo sapien
ggtgctctagcctctgtatcctgaa

SEQ ID NO: 4322611 - DNA, 25 bp, Homo sapien
ttatctgtggtaaaggaccatttcc

SEQ ID NO: 4322612 - DNA, 25 bp, Homo sapien
tattggttgccacttttcagagaat

SEQ ID NO: 4322613 - DNA, 25 bp, Homo sapien
gcaaagacctctcaaattatctgtg

SEQ ID NO: 4322614 - DNA, 25 bp, Homo sapien
ccagaaaatgggtctgtcgtgggtc

SEQ ID NO: 4322615 - DNA, 25 bp, Homo sapien
ttcctgagattggagaacaaaaggt

SEQ ID NO: 4322616 - DNA, 25 bp, Homo sapien
ggttgaccgtgtggttgttgtcaca

SEQ ID NO: 4322617 - DNA, 25 bp, Homo sapien
gatggaggggtcattccaaatgttc

SEQ ID NO: 4322618 - DNA, 25 bp, Homo sapien
ggtactgaaccacttactgtatgcc

SEQ ID NO: 4322619 - DNA, 25 bp, Homo sapien
caggaatctggcagctgaagcgtta

SEQ ID NO: 4322620 - DNA, 25 bp, Homo sapien
tatgccagacacagttctaacagct

SEQ ID NO: 4322621 - DNA, 25 bp, Homo sapien
ttatccactcaacacttaggtactg

SEQ ID NO: 4322622 - DNA, 25 bp, Homo sapien
tttccaccccacatcattctgtgcc

SEQ ID NO: 4322623 - DNA, 25 bp, Homo sapien
cagctgcagcacgtacgcacacacc

SEQ ID NO: 4322624 - DNA, 25 bp, Homo sapien
ttccaccccacatcattctgtgcca

SEQ ID NO: 4322625 - DNA, 25 bp, Homo sapien
ctgcagcacgtacgcacacaccctg

SEQ ID NO: 4322626 - DNA, 25 bp, Homo sapien
ctaggctggccccagtacggctctg

SEQ ID NO: 4322627 - DNA, 25 bp, Homo sapien
atgtctgatcaagtggccagagcct

SEQ ID NO: 4322628 - DNA, 25 bp, Homo sapien
gttctgatgtctgatcaagtggcca

SEQ ID NO: 4322629 - DNA, 25 bp, Homo sapien
taggctggccccagtacggctctgg

SEQ ID NO: 4322630 - DNA, 25 bp, Homo sapien
caatctcaaggtgcaacaaagtgtc

SEQ ID NO: 4322631 - DNA, 25 bp, Homo sapien
ggcacacaggtatgctacagctaag

SEQ ID NO: 4322632 - DNA, 25 bp, Homo sapien
gaagttctggcccaagacctagcat

SEQ ID NO: 4322633 - DNA, 25 bp, Homo sapien
aagttcctgtggttgcgcccattgc

SEQ ID NO: 4322634 - DNA, 25 bp, Homo sapien
gcctctttagcttgaggaactctta

SEQ ID NO: 4322635 - DNA, 25 bp, Homo sapien
tccttctatgggcaatgacaccgtt

SEQ ID NO: 4322636 - DNA, 25 bp, Homo sapien
gaggaactcttaaagtctcatcttc

SEQ ID NO: 4322637 - DNA, 25 bp, Homo sapien
cagagaagcatgttctactgccagc

SEQ ID NO: 4322638 - DNA, 25 bp, Homo sapien
ggagatagccaaacgttcacacagg

SEQ ID NO: 4322639 - DNA, 25 bp, Homo sapien
ctcagaacccaaaatacgctccagt

SEQ ID NO: 4322640 - DNA, 25 bp, Homo sapien
ccagtgtcctcctgagaattggttg

SEQ ID NO: 4322641 - DNA, 25 bp, Homo sapien
gaggccataagaacagggccacagg

SEQ ID NO: 4322642 - DNA, 25 bp, Homo sapien
gactgcgctgaaccaaagagaaact

SEQ ID NO: 4322643 - DNA, 25 bp, Homo sapien
gaaacagctttctcgtctgggttgg

SEQ ID NO: 4322644 - DNA, 25 bp, Homo sapien
cagctttctcgtctgggttgggagc

SEQ ID NO: 4322645 - DNA, 25 bp, Homo sapien
tgggtgcctgtgactgcgctgaacc

SEQ ID NO: 4322646 - DNA, 25 bp, Homo sapien
tatttgtaactccttgaccatggaa

SEQ ID NO: 4322647 - DNA, 25 bp, Homo sapien
tagatatgctcaaggttactgggct

SEQ ID NO: 4322648 - DNA, 25 bp, Homo sapien
cagattatctaaagttggatgccca

SEQ ID NO: 4322649 - DNA, 25 bp, Homo sapien
tggatgcccacactatgaaagaaat

SEQ ID NO: 4322650 - DNA, 25 bp, Homo sapien
tcttgagataccaagataactcggg

SEQ ID NO: 4322651 - DNA, 25 bp, Homo sapien
taggtattggctctacaagtcagat

SEQ ID NO: 4322652 - DNA, 25 bp, Homo sapien
cagccaagctttggtatactaacca

SEQ ID NO: 4322653 - DNA, 25 bp, Homo sapien
gttagagagaaatacatacgctcca

SEQ ID NO: 4322654 - DNA, 25 bp, Homo sapien
cctgaatgaatactgggtaaataat

SEQ ID NO: 4322655 - DNA, 25 bp, Homo sapien
gaatactgggtaaataatgaaatga

SEQ ID NO: 4322656 - DNA, 25 bp, Homo sapien
tgaatgaatactgggtaaataatga

SEQ ID NO: 4322657 - DNA, 25 bp, Homo sapien
aagaacaaagacacaacacaccaga

SEQ ID NO: 4322658 - DNA, 25 bp, Homo sapien
aaaccacagcttaagaaattgtgcc

SEQ ID NO: 4322659 - DNA, 25 bp, Homo sapien
ccacagcttaagaaattgtgccagt

SEQ ID NO: 4322660 - DNA, 25 bp, Homo sapien
cagcttaagaaattgtgccagttgt

SEQ ID NO: 4322661 - DNA, 25 bp, Homo sapien
cttaagaaattgtgccagttgttgg

SEQ ID NO: 4322662 - DNA, 25 bp, Homo sapien
tactgaagtgtaaaagtcttagact

SEQ ID NO: 4322663 - DNA, 25 bp, Homo sapien
gactaagatgctattttccataagg

SEQ ID NO: 4322664 - DNA, 25 bp, Homo sapien
tgttcacaggacattaagcggtgct

SEQ ID NO: 4322665 - DNA, 25 bp, Homo sapien
cctagacgcaaaactgtttagaaat

SEQ ID NO: 4322666 - DNA, 25 bp, Homo sapien
gcacggaggatatggaactctccca

SEQ ID NO: 4322667 - DNA, 25 bp, Homo sapien
ctcacataaccattcttcagtcagt

SEQ ID NO: 4322668 - DNA, 25 bp, Homo sapien
cagttcttccgtatttcttatttca

SEQ ID NO: 4322669 - DNA, 25 bp, Homo sapien
aaagcacggaggatatggaactctc

SEQ ID NO: 4322670 - DNA, 25 bp, Homo sapien
ccagtaccaccaggcgtttatcctt

SEQ ID NO: 4322671 - DNA, 25 bp, Homo sapien
ctcatccagtaccaccaggcgttta

SEQ ID NO: 4322672 - DNA, 25 bp, Homo sapien
catccagtaccaccaggcgtttatc

SEQ ID NO: 4322673 - DNA, 25 bp, Homo sapien
ctcctcatccagtaccaccaggcgt

SEQ ID NO: 4322674 - DNA, 25 bp, Homo sapien
gagctgattcttggcaagggacata

SEQ ID NO: 4322675 - DNA, 25 bp, Homo sapien
gaggaatgtacacgctttcctttgt

SEQ ID NO: 4322676 - DNA, 25 bp, Homo sapien
taacttctcgttggaaattctcatc

SEQ ID NO: 4322677 - DNA, 25 bp, Homo sapien
tccaaggaggaatgtacacgctttc

SEQ ID NO: 4322678 - DNA, 25 bp, Homo sapien
aaattacaacataaagagcctcaag

SEQ ID NO: 4322679 - DNA, 25 bp, Homo sapien
aagactttactgatggcttcgggat

SEQ ID NO: 4322680 - DNA, 25 bp, Homo sapien
gatgaagcatgagggaaattacaac

SEQ ID NO: 4322681 - DNA, 25 bp, Homo sapien
agttgctttcggagtccatgagctc

SEQ ID NO: 4322682 - DNA, 25 bp, Homo sapien
ctttgccatatggttgtggttttac

SEQ ID NO: 4322683 - DNA, 25 bp, Homo sapien
ttgccatatggttgtggttttaccc

SEQ ID NO: 4322684 - DNA, 25 bp, Homo sapien
gccatatggttgtggttttacccca

SEQ ID NO: 4322685 - DNA, 25 bp, Homo sapien
catatggttgtggttttaccccatc

SEQ ID NO: 4322686 - DNA, 25 bp, Homo sapien
aggtgcggcggtcgcgaagggcaac

SEQ ID NO: 4322687 - DNA, 25 bp, Homo sapien
ccaagttctcgctaggcttgttggg

SEQ ID NO: 4322688 - DNA, 25 bp, Homo sapien
ctcgcgtccgcccattcagcggaga

SEQ ID NO: 4322689 - DNA, 25 bp, Homo sapien
cttgttgggtcagcgcgattggccg

SEQ ID NO: 4322690 - DNA, 25 bp, Homo sapien
gatattcggcgaattcctattcata

SEQ ID NO: 4322691 - DNA, 25 bp, Homo sapien
tatatatagaacatcctggagtcca

SEQ ID NO: 4322692 - DNA, 25 bp, Homo sapien
tctaagtgggaagctaatcatcaaa

SEQ ID NO: 4322693 - DNA, 25 bp, Homo sapien
cagaggaaaacttctgagtaatgat

SEQ ID NO: 4322694 - DNA, 25 bp, Homo sapien
ggttaaactgcttcctagatattta

SEQ ID NO: 4322695 - DNA, 25 bp, Homo sapien
atcttcttggttaaactgcttccta

SEQ ID NO: 4322696 - DNA, 25 bp, Homo sapien
ttgtagctgtggttaatgggattgc

SEQ ID NO: 4322697 - DNA, 25 bp, Homo sapien
tttgtagctgtggttaatgggattg

SEQ ID NO: 4322698 - DNA, 25 bp, Homo sapien
ttcacagacctataacaacacaggg

SEQ ID NO: 4322699 - DNA, 25 bp, Homo sapien
caacacagggattttgtccgttggt

SEQ ID NO: 4322700 - DNA, 25 bp, Homo sapien
tcatggacccttagcttgaggtgtc

SEQ ID NO: 4322701 - DNA, 25 bp, Homo sapien
tttgtccgttggtcacagttcatgg

SEQ ID NO: 4322702 - DNA, 25 bp, Homo sapien
attcagtgcagtaggatactgaaac

SEQ ID NO: 4322703 - DNA, 25 bp, Homo sapien
aaaagctatagaccctcagattcag

SEQ ID NO: 4322704 - DNA, 25 bp, Homo sapien
tagccagagagaataagactgatca

SEQ ID NO: 4322705 - DNA, 25 bp, Homo sapien
cagagagattaccttaaaagtagcc

SEQ ID NO: 4322706 - DNA, 25 bp, Homo sapien
ctattcagagtttcaagaaggagag

SEQ ID NO: 4322707 - DNA, 25 bp, Homo sapien
cgtcgagaactgatagaacttcgaa

SEQ ID NO: 4322708 - DNA, 25 bp, Homo sapien
cgaaataaagtgaatcgtttattgg

SEQ ID NO: 4322709 - DNA, 25 bp, Homo sapien
agaacttcgaaataaagtgaatcgt

SEQ ID NO: 4322710 - DNA, 25 bp, Homo sapien
ctccgtcgagaactgatagaacttc

SEQ ID NO: 4322711 - DNA, 25 bp, Homo sapien
gatactgtctcatgggtcattaagg

SEQ ID NO: 4322712 - DNA, 25 bp, Homo sapien
aatatgctgtggaacctttctagtg

SEQ ID NO: 4322713 - DNA, 25 bp, Homo sapien
cacatacattggagagcttgatact

SEQ ID NO: 4322714 - DNA, 25 bp, Homo sapien
aacacttggacccatttggagtcag

SEQ ID NO: 4322715 - DNA, 25 bp, Homo sapien
ccttggatatgcagtttagtctctc

SEQ ID NO: 4322716 - DNA, 25 bp, Homo sapien
tgcctcattgaaaaccttggagttc

SEQ ID NO: 4322717 - DNA, 25 bp, Homo sapien
ctctagggtgccttccagataatga

SEQ ID NO: 4322718 - DNA, 25 bp, Homo sapien
aagggcaacagacttcacacagcag

SEQ ID NO: 4322719 - DNA, 25 bp, Homo sapien
gcctaatccttatgcgcgtaaccgt

SEQ ID NO: 4322720 - DNA, 25 bp, Homo sapien
tctagcttcccttgtccggaggata

SEQ ID NO: 4322721 - DNA, 25 bp, Homo sapien
ctggttatcgataaggaggctcctc

SEQ ID NO: 4322722 - DNA, 25 bp, Homo sapien
tagctgctagctattggcctcccaa

SEQ ID NO: 4322723 - DNA, 25 bp, Homo sapien
gttaacatactgatgaaccattcag

SEQ ID NO: 4322724 - DNA, 25 bp, Homo sapien
tccttctcgataaaaggtatagtta

SEQ ID NO: 4322725 - DNA, 25 bp, Homo sapien
ctttattacttcataggatgaaagg

SEQ ID NO: 4322726 - DNA, 25 bp, Homo sapien
tcataggatgaaaggttaatttagg

SEQ ID NO: 4322727 - DNA, 25 bp, Homo sapien
tgtgtaactattaaactcctccgca

SEQ ID NO: 4322728 - DNA, 25 bp, Homo sapien
tcatcaataggaagagtacacatca

SEQ ID NO: 4322729 - DNA, 25 bp, Homo sapien
aaatggtaggcaatctcatcgtgca

SEQ ID NO: 4322730 - DNA, 25 bp, Homo sapien
ataccatgaatagggagccagcttc

SEQ ID NO: 4322731 - DNA, 25 bp, Homo sapien
cccacattcataccactgaacataa

SEQ ID NO: 4322732 - DNA, 25 bp, Homo sapien
ggttcctggcgaactgctctgaaat

SEQ ID NO: 4322733 - DNA, 25 bp, Homo sapien
cattttccaggaattgtagtcccac

SEQ ID NO: 4322734 - DNA, 25 bp, Homo sapien
gaacataattgatttgggtgtgacc

SEQ ID NO: 4322735 - DNA, 25 bp, Homo sapien
atggcccctctgatcacctatgtta

SEQ ID NO: 4322736 - DNA, 25 bp, Homo sapien
ggtcagaagtgagttgctgcccagt

SEQ ID NO: 4322737 - DNA, 25 bp, Homo sapien
agtgcgtccatctaaaaatgaatcc

SEQ ID NO: 4322738 - DNA, 25 bp, Homo sapien
ggcccctctgatcacctatgttata

SEQ ID NO: 4322739 - DNA, 25 bp, Homo sapien
cattccagtttgtcatgatggcact

SEQ ID NO: 4322740 - DNA, 25 bp, Homo sapien
gtttccgtaacattttgctcagagg

SEQ ID NO: 4322741 - DNA, 25 bp, Homo sapien
ccattcgtgcctgaaactcttaaga

SEQ ID NO: 4322742 - DNA, 25 bp, Homo sapien
ttgtgtttacagcacccattcgtgc

SEQ ID NO: 4322743 - DNA, 25 bp, Homo sapien
cttttgacatattgtttgcccttac

SEQ ID NO: 4322744 - DNA, 25 bp, Homo sapien
tatctgagagagttgcacagctgca

SEQ ID NO: 4322745 - DNA, 25 bp, Homo sapien
ccttacactctgagtaagagtctga

SEQ ID NO: 4322746 - DNA, 25 bp, Homo sapien
gagggagtcgctcaagtaaatcttg

SEQ ID NO: 4322747 - DNA, 25 bp, Homo sapien
actggctcactcactcttgggtccg

SEQ ID NO: 4322748 - DNA, 25 bp, Homo sapien
gaaactggctcactcactcttgggt

SEQ ID NO: 4322749 - DNA, 25 bp, Homo sapien
aaactggctcactcactcttgggtc

SEQ ID NO: 4322750 - DNA, 25 bp, Homo sapien
cagaaactggctcactcactcttgg

SEQ ID NO: 4322751 - DNA, 25 bp, Homo sapien
tactgaatgccactgtgttgctgac

SEQ ID NO: 4322752 - DNA, 25 bp, Homo sapien
ctgaccgggccttcaccaagcgggt

SEQ ID NO: 4322753 - DNA, 25 bp, Homo sapien
actgtgttgctgaccgggccttcac

SEQ ID NO: 4322754 - DNA, 25 bp, Homo sapien
tgaatgccactgtgttgctgaccgg

SEQ ID NO: 4322755 - DNA, 25 bp, Homo sapien
tgttttggcctgattaaaccctata

SEQ ID NO: 4322756 - DNA, 25 bp, Homo sapien
tcataggtctaagagaaatgtctca

SEQ ID NO: 4322757 - DNA, 25 bp, Homo sapien
tatggtacccaactagtaggaattg

SEQ ID NO: 4322758 - DNA, 25 bp, Homo sapien
ctagaacaaaaagtcaaagagatga

SEQ ID NO: 4322759 - DNA, 25 bp, Homo sapien
cccgttttgatcctttctataatct

SEQ ID NO: 4322760 - DNA, 25 bp, Homo sapien
ctgtaggcttctagcctgagactga

SEQ ID NO: 4322761 - DNA, 25 bp, Homo sapien
cttcagatctggatggagcagatgc

SEQ ID NO: 4322762 - DNA, 25 bp, Homo sapien
ttctttagtggaagaggtaatatcc

SEQ ID NO: 4322763 - DNA, 25 bp, Homo sapien
tcccactgaatgacccattttctct

SEQ ID NO: 4322764 - DNA, 25 bp, Homo sapien
ttcccactgaatgacccattttctc

SEQ ID NO: 4322765 - DNA, 25 bp, Homo sapien
cttcccactgaatgacccattttct

SEQ ID NO: 4322766 - DNA, 25 bp, Homo sapien
catattgatcttacacattggcaat

SEQ ID NO: 4322767 - DNA, 25 bp, Homo sapien
gaagacccatgccacgcctgtggtt

SEQ ID NO: 4322768 - DNA, 25 bp, Homo sapien
gaagacctggtaactggtgaagacc

SEQ ID NO: 4322769 - DNA, 25 bp, Homo sapien
tcagcagatgaaggctccagaagca

SEQ ID NO: 4322770 - DNA, 25 bp, Homo sapien
tccaagatgacaaatgaggggcacc

SEQ ID NO: 4322771 - DNA, 25 bp, Homo sapien
ttttggatgtatcgcacatgaggtc

SEQ ID NO: 4322772 - DNA, 25 bp, Homo sapien
agtgacagtgtcatttagtggcttt

SEQ ID NO: 4322773 - DNA, 25 bp, Homo sapien
ttgacagagtcagtaatggagcagg

SEQ ID NO: 4322774 - DNA, 25 bp, Homo sapien
tctcttgttgggcttgagctaaagt

SEQ ID NO: 4322775 - DNA, 25 bp, Homo sapien
aagaggatcagtttctcttgttggg

SEQ ID NO: 4322776 - DNA, 25 bp, Homo sapien
tcttgttgggcttgagctaaagtca

SEQ ID NO: 4322777 - DNA, 25 bp, Homo sapien
ggcttcccaagaggatcagtttctc

SEQ ID NO: 4322778 - DNA, 25 bp, Homo sapien
caagggagttccagtaggcctgggt

SEQ ID NO: 4322779 - DNA, 25 bp, Homo sapien
tgacctcaggggtggtgtagttatt

SEQ ID NO: 4322780 - DNA, 25 bp, Homo sapien
tgttggttgctttatatctgtctct

SEQ ID NO: 4322781 - DNA, 25 bp, Homo sapien
cagaggcaggaactgttggttgctt

SEQ ID NO: 4322782 - DNA, 25 bp, Homo sapien
ttcttcgtgggtgtgtaggtctggg

SEQ ID NO: 4322783 - DNA, 25 bp, Homo sapien
cttcgtgggtgtgtaggtctgggtg

SEQ ID NO: 4322784 - DNA, 25 bp, Homo sapien
ttttcttcgtgggtgtgtaggtctg

SEQ ID NO: 4322785 - DNA, 25 bp, Homo sapien
ttcctggctttccagtgacattatt

SEQ ID NO: 4322786 - DNA, 25 bp, Homo sapien
ttctatcagcacctgatggcctggg

SEQ ID NO: 4322787 - DNA, 25 bp, Homo sapien
atacatttctatcagcacctgatgg

SEQ ID NO: 4322788 - DNA, 25 bp, Homo sapien
gatggcctgggtgcttgcttgaccc

SEQ ID NO: 4322789 - DNA, 25 bp, Homo sapien
ctatcagcacctgatggcctgggtg

SEQ ID NO: 4322790 - DNA, 25 bp, Homo sapien
aggtcttgtagttgtcctattcaga

SEQ ID NO: 4322791 - DNA, 25 bp, Homo sapien
tcccactgggcatcccactgggttt

SEQ ID NO: 4322792 - DNA, 25 bp, Homo sapien
catcccactgggtttgggcctagta

SEQ ID NO: 4322793 - DNA, 25 bp, Homo sapien
gggcctagtaggtcttgtagttgtc

SEQ ID NO: 4322794 - DNA, 25 bp, Homo sapien
ttgtcagatgttctgggcctcacag

SEQ ID NO: 4322795 - DNA, 25 bp, Homo sapien
tgtggcttgtcagatgttctgggcc

SEQ ID NO: 4322796 - DNA, 25 bp, Homo sapien
gatgtgtggcttgtcagatgttctg

SEQ ID NO: 4322797 - DNA, 25 bp, Homo sapien
caggtctgatgtgtggcttgtcaga

SEQ ID NO: 4322798 - DNA, 25 bp, Homo sapien
caaaacgaggaaagaacaggcctgt

SEQ ID NO: 4322799 - DNA, 25 bp, Homo sapien
gaggaactgccctttactatagtct

SEQ ID NO: 4322800 - DNA, 25 bp, Homo sapien
catacagaaatcagggtggaatagg

SEQ ID NO: 4322801 - DNA, 25 bp, Homo sapien
gaatagggatgtatcacaacggaac

SEQ ID NO: 4322802 - DNA, 25 bp, Homo sapien
tcttgggtggattggtctgtttctt

SEQ ID NO: 4322803 - DNA, 25 bp, Homo sapien
gtctttgctagttcagttgttcgtg

SEQ ID NO: 4322804 - DNA, 25 bp, Homo sapien
ttgttcgtggaatcttagttgtgaa

SEQ ID NO: 4322805 - DNA, 25 bp, Homo sapien
gttcttgggtggattggtctgtttc

SEQ ID NO: 4322806 - DNA, 25 bp, Homo sapien
agagtggtctgtagttcctcttgac

SEQ ID NO: 4322807 - DNA, 25 bp, Homo sapien
tataaaagggatgcctcgtgtctct

SEQ ID NO: 4322808 - DNA, 25 bp, Homo sapien
gggtataaaagggatgcctcgtgtc

SEQ ID NO: 4322809 - DNA, 25 bp, Homo sapien
agggatgcctcgtgtctctagagga

SEQ ID NO: 4322810 - DNA, 25 bp, Homo sapien
aaagggatgcctcgtgtctctagag

SEQ ID NO: 4322811 - DNA, 25 bp, Homo sapien
attgttgtctttggtggctcaaatc

SEQ ID NO: 4322812 - DNA, 25 bp, Homo sapien
aatctaaaggtaacaggctgcagaa

SEQ ID NO: 4322813 - DNA, 25 bp, Homo sapien
ctattgttgtctttggtggctcaaa

SEQ ID NO: 4322814 - DNA, 25 bp, Homo sapien
ttgttgtctttggtggctcaaatct

SEQ ID NO: 4322815 - DNA, 25 bp, Homo sapien
tgaggaaggagcacatcttttggag

SEQ ID NO: 4322816 - DNA, 25 bp, Homo sapien
gagacctcagggtatggtttatgag

SEQ ID NO: 4322817 - DNA, 25 bp, Homo sapien
cctcagggtatggtttatgaggaag

SEQ ID NO: 4322818 - DNA, 25 bp, Homo sapien
tctgagagacctcagggtatggttt

SEQ ID NO: 4322819 - DNA, 25 bp, Homo sapien
ggagtgagcttaacccacagatata

SEQ ID NO: 4322820 - DNA, 25 bp, Homo sapien
tggaaaaatgttaccgtgcagggaa

SEQ ID NO: 4322821 - DNA, 25 bp, Homo sapien
tctaaataacccaactggagtgagc

SEQ ID NO: 4322822 - DNA, 25 bp, Homo sapien
tctggtggcagtgaaacagaaacga

SEQ ID NO: 4322823 - DNA, 25 bp, Homo sapien
gtggtccagcctccactcatttcct

SEQ ID NO: 4322824 - DNA, 25 bp, Homo sapien
tcatttcctgcaacagtgccttcat

SEQ ID NO: 4322825 - DNA, 25 bp, Homo sapien
cttttagatgtattttcttcatcca

SEQ ID NO: 4322826 - DNA, 25 bp, Homo sapien
ttcttcatccactgtggtccagcct

SEQ ID NO: 4322827 - DNA, 25 bp, Homo sapien
ccaggaatgtagtcattctgagtca

SEQ ID NO: 4322828 - DNA, 25 bp, Homo sapien
aacccattaattactgagatttgcc

SEQ ID NO: 4322829 - DNA, 25 bp, Homo sapien
tagctacttgcctattaaaatctat

SEQ ID NO: 4322830 - DNA, 25 bp, Homo sapien
tcagctatatggagcacggagtctc

SEQ ID NO: 4322831 - DNA, 25 bp, Homo sapien
gcagtaacacgctggggcaccttag

SEQ ID NO: 4322832 - DNA, 25 bp, Homo sapien
tttggttttgcagtaacacgctggg

SEQ ID NO: 4322833 - DNA, 25 bp, Homo sapien
gacacttctggacttggtgacgttt

SEQ ID NO: 4322834 - DNA, 25 bp, Homo sapien
cttggtgacgtttttggttttgcag

SEQ ID NO: 4322835 - DNA, 25 bp, Homo sapien
aaagagagaactcatattgtaagtc

SEQ ID NO: 4322836 - DNA, 25 bp, Homo sapien
aagagagaactcatattgtaagtca

SEQ ID NO: 4322837 - DNA, 25 bp, Homo sapien
agagagaactcatattgtaagtcat

SEQ ID NO: 4322838 - DNA, 25 bp, Homo sapien
ctactttccgcaagagatgctgatg

SEQ ID NO: 4322839 - DNA, 25 bp, Homo sapien
gaagtatctggtttgcagctacttt

SEQ ID NO: 4322840 - DNA, 25 bp, Homo sapien
ttgcagctactttccgcaagagatg

SEQ ID NO: 4322841 - DNA, 25 bp, Homo sapien
agctactttccgcaagagatgctga

SEQ ID NO: 4322842 - DNA, 25 bp, Homo sapien
ctatgctttatactcaaatccaaag

SEQ ID NO: 4322843 - DNA, 25 bp, Homo sapien
ttagtatgttaatgtttcaaatgta

SEQ ID NO: 4322844 - DNA, 25 bp, Homo sapien
accatgattcatgcccaagtctctt

SEQ ID NO: 4322845 - DNA, 25 bp, Homo sapien
tctacttttgttctatgctttatac

SEQ ID NO: 4322846 - DNA, 25 bp, Homo sapien
ttgtgtttgtgggattcttgggcgt

SEQ ID NO: 4322847 - DNA, 25 bp, Homo sapien
tttgtgggattcttgggcgtggtga

SEQ ID NO: 4322848 - DNA, 25 bp, Homo sapien
ttggcttaggaggagcacgtggtgt

SEQ ID NO: 4322849 - DNA, 25 bp, Homo sapien
ggaggagcacgtggtgtctgcttgg

SEQ ID NO: 4322850 - DNA, 25 bp, Homo sapien
gggctgggtagggttatagattgag

SEQ ID NO: 4322851 - DNA, 25 bp, Homo sapien
ggctgggtagggttatagattgaga

SEQ ID NO: 4322852 - DNA, 25 bp, Homo sapien
agatacatatgtaatagattccaca

SEQ ID NO: 4322853 - DNA, 25 bp, Homo sapien
ctcaggtggttcagatacatatgta

SEQ ID NO: 4322854 - DNA, 25 bp, Homo sapien
gatacatatgtaatagattccacaa

SEQ ID NO: 4322855 - DNA, 25 bp, Homo sapien
cagatacatatgtaatagattccac

SEQ ID NO: 4322856 - DNA, 25 bp, Homo sapien
gccagagtggtgctttggcagtggg

SEQ ID NO: 4322857 - DNA, 25 bp, Homo sapien
gctttggcagtgggatatacatagt

SEQ ID NO: 4322858 - DNA, 25 bp, Homo sapien
gctcctctggccagagtggtgcttt

SEQ ID NO: 4322859 - DNA, 25 bp, Homo sapien
tttggcagtgggatatacatagtct

SEQ ID NO: 4322860 - DNA, 25 bp, Homo sapien
gacccactggatgagcacagacaag

SEQ ID NO: 4322861 - DNA, 25 bp, Homo sapien
cacatagaatgagtacttggagagc

SEQ ID NO: 4322862 - DNA, 25 bp, Homo sapien
tacaatgacattcaagacccactgg

SEQ ID NO: 4322863 - DNA, 25 bp, Homo sapien
agagcaaaagcacgggatgaatcct

SEQ ID NO: 4322864 - DNA, 25 bp, Homo sapien
gtgtaaccgattccagaacatcaga

SEQ ID NO: 4322865 - DNA, 25 bp, Homo sapien
ttggtgactcagtactaagtgtaac

SEQ ID NO: 4322866 - DNA, 25 bp, Homo sapien
cagtactaagtgtaaccgattccag

SEQ ID NO: 4322867 - DNA, 25 bp, Homo sapien
tactaagtgtaaccgattccagaac

SEQ ID NO: 4322868 - DNA, 25 bp, Homo sapien
ttctaggcttggtgatgtcactggt

SEQ ID NO: 4322869 - DNA, 25 bp, Homo sapien
ggttgactttctgtcatttctaggc

SEQ ID NO: 4322870 - DNA, 25 bp, Homo sapien
aataagagtttgcagttcagtcaga

SEQ ID NO: 4322871 - DNA, 25 bp, Homo sapien
tctgtcatttctaggcttggtgatg

SEQ ID NO: 4322872 - DNA, 25 bp, Homo sapien
cagttcctacaagagctaagagctg

SEQ ID NO: 4322873 - DNA, 25 bp, Homo sapien
ggttgccttcaagctaaaacagcag

SEQ ID NO: 4322874 - DNA, 25 bp, Homo sapien
ccttagccaccattgacaagtattg

SEQ ID NO: 4322875 - DNA, 25 bp, Homo sapien
gaactctcataggaggaaattgctc

SEQ ID NO: 4322876 - DNA, 25 bp, Homo sapien
gttcctggagcatcagtactatgaa

SEQ ID NO: 4322877 - DNA, 25 bp, Homo sapien
catcagtactatgaacaacaggttc

SEQ ID NO: 4322878 - DNA, 25 bp, Homo sapien
gagcatcagtactatgaacaacagg

SEQ ID NO: 4322879 - DNA, 25 bp, Homo sapien
ctggagcatcagtactatgaacaac

SEQ ID NO: 4322880 - DNA, 25 bp, Homo sapien
taaagagggaccaagaacgtcatcc

SEQ ID NO: 4322881 - DNA, 25 bp, Homo sapien
gctctgtacgagaagcagttgctac

SEQ ID NO: 4322882 - DNA, 25 bp, Homo sapien
gatttggccacactagctagaacaa

SEQ ID NO: 4322883 - DNA, 25 bp, Homo sapien
caagtcatttaggagatcaggcaca

SEQ ID NO: 4322884 - DNA, 25 bp, Homo sapien
tgttctgaggtacttcaggacttga

SEQ ID NO: 4322885 - DNA, 25 bp, Homo sapien
cgacgtgtccgttgtgttttaggag

SEQ ID NO: 4322886 - DNA, 25 bp, Homo sapien
cttgatgtagttttgggtctgggac

SEQ ID NO: 4322887 - DNA, 25 bp, Homo sapien
cttcaggacttgatgtagttttggg

SEQ ID NO: 4322888 - DNA, 25 bp, Homo sapien
tcaggttcaaggactgtagtaacaa

SEQ ID NO: 4322889 - DNA, 25 bp, Homo sapien
tctaaaagtgtcaggttcaaggact

SEQ ID NO: 4322890 - DNA, 25 bp, Homo sapien
aaagtgtcaggttcaaggactgtag

SEQ ID NO: 4322891 - DNA, 25 bp, Homo sapien
gttctaaaagtgtcaggttcaagga

SEQ ID NO: 4322892 - DNA, 25 bp, Homo sapien
gttctgagagtaccaggttcaagat

SEQ ID NO: 4322893 - DNA, 25 bp, Homo sapien
agttctgagagtaccaggttcaaga

SEQ ID NO: 4322894 - DNA, 25 bp, Homo sapien
ttctgagagtaccaggttcaagatc

SEQ ID NO: 4322895 - DNA, 25 bp, Homo sapien
caacagggggagcagtagcacatct

SEQ ID NO: 4322896 - DNA, 25 bp, Homo sapien
actcaacagggggagcagtagcaca

SEQ ID NO: 4322897 - DNA, 25 bp, Homo sapien
ggggagcagtagcacatcttttgtg

SEQ ID NO: 4322898 - DNA, 25 bp, Homo sapien
cagggggagcagtagcacatctttt

SEQ ID NO: 4322899 - DNA, 25 bp, Homo sapien
taggatgagctactttaaccagaaa

SEQ ID NO: 4322900 - DNA, 25 bp, Homo sapien
gcagctaggatgagctactttaacc

SEQ ID NO: 4322901 - DNA, 25 bp, Homo sapien
gctaggatgagctactttaaccaga

SEQ ID NO: 4322902 - DNA, 25 bp, Homo sapien
aggatgagctactttaaccagaaac

SEQ ID NO: 4322903 - DNA, 25 bp, Homo sapien
ggacgtggacgacgagttcgttgtg

SEQ ID NO: 4322904 - DNA, 25 bp, Homo sapien
ctcagttctgagtgtaacaggtttg

SEQ ID NO: 4322905 - DNA, 25 bp, Homo sapien
aacaggtttgagctccgcagtagga

SEQ ID NO: 4322906 - DNA, 25 bp, Homo sapien
cttgtgttgtcacccaagtctcagt

SEQ ID NO: 4322907 - DNA, 25 bp, Homo sapien
ccaagtctcagttctgagtgtaaca

SEQ ID NO: 4322908 - DNA, 25 bp, Homo sapien
tgcttcaggacgtggtgtggttttt

SEQ ID NO: 4322909 - DNA, 25 bp, Homo sapien
gattcaggtgcttcaggacgtggtg

SEQ ID NO: 4322910 - DNA, 25 bp, Homo sapien
ttctgagacgtggacgacgtgtccg

SEQ ID NO: 4322911 - DNA, 25 bp, Homo sapien
gacgtgtccgttgtgatgttttgga

SEQ ID NO: 4322912 - DNA, 25 bp, Homo sapien
gacaggttctaggactgtagcagga

SEQ ID NO: 4322913 - DNA, 25 bp, Homo sapien
acaggttctaggactgtagcaggaa

SEQ ID NO: 4322914 - DNA, 25 bp, Homo sapien
cttaaaccaaggaatcacagattta

SEQ ID NO: 4322915 - DNA, 25 bp, Homo sapien
ccttaaaccaaggaatcacagattt

SEQ ID NO: 4322916 - DNA, 25 bp, Homo sapien
ttaaaccaaggaatcacagatttac

SEQ ID NO: 4322917 - DNA, 25 bp, Homo sapien
ggtgcctgagggctcggtgtagttt

SEQ ID NO: 4322918 - DNA, 25 bp, Homo sapien
tgcctgagggctcggtgtagtttta

SEQ ID NO: 4322919 - DNA, 25 bp, Homo sapien
ctgagggctcggtgtagttttaggt

SEQ ID NO: 4322920 - DNA, 25 bp, Homo sapien
aggtttggtctcaggtgcctgaggg

SEQ ID NO: 4322921 - DNA, 25 bp, Homo sapien
ctaaggttgttgcagggatctcagt

SEQ ID NO: 4322922 - DNA, 25 bp, Homo sapien
aaactggttcaaagattgtagcagg

SEQ ID NO: 4322923 - DNA, 25 bp, Homo sapien
ggagcctcttttataggagaaactg

SEQ ID NO: 4322924 - DNA, 25 bp, Homo sapien
tataggagaaactggttcaaagatt

SEQ ID NO: 4322925 - DNA, 25 bp, Homo sapien
tcttttataggagaaactggttcaa

SEQ ID NO: 4322926 - DNA, 25 bp, Homo sapien
tcagtctgaagctcttcgggactca

SEQ ID NO: 4322927 - DNA, 25 bp, Homo sapien
ttttaggtttgggatgtggacgatg

SEQ ID NO: 4322928 - DNA, 25 bp, Homo sapien
tggacgatgagttcgttgaggcact

SEQ ID NO: 4322929 - DNA, 25 bp, Homo sapien
cttcgggactcagtgtggttttagg

SEQ ID NO: 4322930 - DNA, 25 bp, Homo sapien
cagttctaagaactggttcgaggat

SEQ ID NO: 4322931 - DNA, 25 bp, Homo sapien
gcctcagttctaagaactggttcga

SEQ ID NO: 4322932 - DNA, 25 bp, Homo sapien
cctgaagcctcagttctaagaactg

SEQ ID NO: 4322933 - DNA, 25 bp, Homo sapien
aagaactggttcgaggattgtggca

SEQ ID NO: 4322934 - DNA, 25 bp, Homo sapien
caatagtaagatcttcttgttggtt

SEQ ID NO: 4322935 - DNA, 25 bp, Homo sapien
tagtaagatcttcttgttggttaac

SEQ ID NO: 4322936 - DNA, 25 bp, Homo sapien
taagatcttcttgttggttaaccat

SEQ ID NO: 4322937 - DNA, 25 bp, Homo sapien
gtcaatagtaagatcttcttgttgg

SEQ ID NO: 4322938 - DNA, 25 bp, Homo sapien
aggtacttctggatggggcgtggtt

SEQ ID NO: 4322939 - DNA, 25 bp, Homo sapien
ccagtttagtttgaggtacttctgg

SEQ ID NO: 4322940 - DNA, 25 bp, Homo sapien
cagtttagtttgaggtacttctgga

SEQ ID NO: 4322941 - DNA, 25 bp, Homo sapien
cttctggatggggcgtggttttagg

SEQ ID NO: 4322942 - DNA, 25 bp, Homo sapien
tgtcccaggagtaataggtccaaag

SEQ ID NO: 4322943 - DNA, 25 bp, Homo sapien
ctgaagatgtcccaggagtaatagg

SEQ ID NO: 4322944 - DNA, 25 bp, Homo sapien
gatgtcccaggagtaataggtccaa

SEQ ID NO: 4322945 - DNA, 25 bp, Homo sapien
aagatgtcccaggagtaataggtcc

SEQ ID NO: 4322946 - DNA, 25 bp, Homo sapien
gtggacgacgtgttcttgttcgttg

SEQ ID NO: 4322947 - DNA, 25 bp, Homo sapien
cttgttcgttgcgatgtttttggag

SEQ ID NO: 4322948 - DNA, 25 bp, Homo sapien
ttatgtttgggacgtggacgacgtg

SEQ ID NO: 4322949 - DNA, 25 bp, Homo sapien
tgtctctgggcgtggcgtggtttta

SEQ ID NO: 4322950 - DNA, 25 bp, Homo sapien
ctcacagttacaggctcaatgtctg

SEQ ID NO: 4322951 - DNA, 25 bp, Homo sapien
cactgtagcctcagttctcacagtt

SEQ ID NO: 4322952 - DNA, 25 bp, Homo sapien
agttctcacagttacaggctcaatg

SEQ ID NO: 4322953 - DNA, 25 bp, Homo sapien
cagttacaggctcaatgtctgtggt

SEQ ID NO: 4322954 - DNA, 25 bp, Homo sapien
tgagggagcttcagtttcaaatgga

SEQ ID NO: 4322955 - DNA, 25 bp, Homo sapien
ctatggtcattgagggagcttcagt

SEQ ID NO: 4322956 - DNA, 25 bp, Homo sapien
tcattgagggagcttcagtttcaaa

SEQ ID NO: 4322957 - DNA, 25 bp, Homo sapien
agggagcttcagtttcaaatggaac

SEQ ID NO: 4322958 - DNA, 25 bp, Homo sapien
cggatttagttggtggcatgtctgg

SEQ ID NO: 4322959 - DNA, 25 bp, Homo sapien
ctgtgtgtggttttaggtctctcag

SEQ ID NO: 4322960 - DNA, 25 bp, Homo sapien
gttttaggtctctcagatggttttg

SEQ ID NO: 4322961 - DNA, 25 bp, Homo sapien
tgtggttttaggtctctcagatggt

SEQ ID NO: 4322962 - DNA, 25 bp, Homo sapien
tgtgtggttttaggtctctcagatg

SEQ ID NO: 4322963 - DNA, 25 bp, Homo sapien
caagggctccggttgtatcgtggca

SEQ ID NO: 4322964 - DNA, 25 bp, Homo sapien
cggttgtatcgtggcaggttccaga

SEQ ID NO: 4322965 - DNA, 25 bp, Homo sapien
gctccggttgtatcgtggcaggttc

SEQ ID NO: 4322966 - DNA, 25 bp, Homo sapien
caccaagggctccggttgtatcgtg

SEQ ID NO: 4322967 - DNA, 25 bp, Homo sapien
cgggtttggacttgggcacttctgg

SEQ ID NO: 4322968 - DNA, 25 bp, Homo sapien
cgacctggtcttttggtctttcgtg

SEQ ID NO: 4322969 - DNA, 25 bp, Homo sapien
cctggtcttttggtctttcgtggtg

SEQ ID NO: 4322970 - DNA, 25 bp, Homo sapien
tacagcttagagaagatagtcactc

SEQ ID NO: 4322971 - DNA, 25 bp, Homo sapien
cactaattatgtcaggacaggcaac

SEQ ID NO: 4322972 - DNA, 25 bp, Homo sapien
tgaaggcatatgttcaacaggaaca

SEQ ID NO: 4322973 - DNA, 25 bp, Homo sapien
tccaagagatctgtctgttcttcca

SEQ ID NO: 4322974 - DNA, 25 bp, Homo sapien
atgttgttgaaggtttggttcctgg

SEQ ID NO: 4322975 - DNA, 25 bp, Homo sapien
aatgttgttgaaggtttggttcctg

SEQ ID NO: 4322976 - DNA, 25 bp, Homo sapien
tgaaggtttggttcctggtgtttca

SEQ ID NO: 4322977 - DNA, 25 bp, Homo sapien
tgtgatggcagtagagtctgaggtt

SEQ ID NO: 4322978 - DNA, 25 bp, Homo sapien
tgactgtgatggcagtagagtctga

SEQ ID NO: 4322979 - DNA, 25 bp, Homo sapien
actgtgatggcagtagagtctgagg

SEQ ID NO: 4322980 - DNA, 25 bp, Homo sapien
gactgtgatggcagtagagtctgag

SEQ ID NO: 4322981 - DNA, 25 bp, Homo sapien
caaaagcagtagtgatgtgtcagac

SEQ ID NO: 4322982 - DNA, 25 bp, Homo sapien
tgtaacagatgaacggcaaaagcag

SEQ ID NO: 4322983 - DNA, 25 bp, Homo sapien
taaaagccccgaattctgatttctc

SEQ ID NO: 4322984 - DNA, 25 bp, Homo sapien
caaattaggtgcaaaagaagcaggt

SEQ ID NO: 4322985 - DNA, 25 bp, Homo sapien
gagagggattttaggtttcagagaa

SEQ ID NO: 4322986 - DNA, 25 bp, Homo sapien
cacttctgggctgagagggatttta

SEQ ID NO: 4322987 - DNA, 25 bp, Homo sapien
gggctgagagggattttaggtttca

SEQ ID NO: 4322988 - DNA, 25 bp, Homo sapien
acttctgggctgagagggattttag

SEQ ID NO: 4322989 - DNA, 25 bp, Homo sapien
tttcagtgtctaaaaacacagaagg

SEQ ID NO: 4322990 - DNA, 25 bp, Homo sapien
taataaacaaatcaatatttaggca

SEQ ID NO: 4322991 - DNA, 25 bp, Homo sapien
tttaggcatttcagtgtctaaaaac

SEQ ID NO: 4322992 - DNA, 25 bp, Homo sapien
aaatcaatatttaggcatttcagtg

SEQ ID NO: 4322993 - DNA, 25 bp, Homo sapien
gtccatgtaggttcagggcttttag

SEQ ID NO: 4322994 - DNA, 25 bp, Homo sapien
ccatgtaggttcagggcttttagaa

SEQ ID NO: 4322995 - DNA, 25 bp, Homo sapien
ttaggtgtaattgttccggcacttg

SEQ ID NO: 4322996 - DNA, 25 bp, Homo sapien
taattgttccggcacttgtggttct

SEQ ID NO: 4322997 - DNA, 25 bp, Homo sapien
ggtgtagaagggatagatgtagttt

SEQ ID NO: 4322998 - DNA, 25 bp, Homo sapien
tcgtttaggtgtagaagggatagat

SEQ ID NO: 4322999 - DNA, 25 bp, Homo sapien
gcgtcgtttaggtgtagaagggata

SEQ ID NO: 4323000 - DNA, 25 bp, Homo sapien
gtgtagaagggatagatgtagtttg

SEQ ID NO: 4323001 - DNA, 25 bp, Homo sapien
atttccagtttttgaggaacaaatg

SEQ ID NO: 4323002 - DNA, 25 bp, Homo sapien
gtgtcgtaggctgcatttctggact

SEQ ID NO: 4323003 - DNA, 25 bp, Homo sapien
cagtttttgaggaacaaatggtgtt

SEQ ID NO: 4323004 - DNA, 25 bp, Homo sapien
aggtgtcgtaggctgcatttctgga

SEQ ID NO: 4323005 - DNA, 25 bp, Homo sapien
cagtagatgacttcaggcagacttg

SEQ ID NO: 4323006 - DNA, 25 bp, Homo sapien
ggtataaagcacatgccacgagtac

SEQ ID NO: 4323007 - DNA, 25 bp, Homo sapien
tgacacaggccacaaacatgtgaag

SEQ ID NO: 4323008 - DNA, 25 bp, Homo sapien
taaatggaacgtaaaagatgactgc

SEQ ID NO: 4323009 - DNA, 25 bp, Homo sapien
ttgcccttggctgttcaagagttct

SEQ ID NO: 4323010 - DNA, 25 bp, Homo sapien
gttgcccttggctgttcaagagttc

SEQ ID NO: 4323011 - DNA, 25 bp, Homo sapien
tgttgcccttggctgttcaagagtt

SEQ ID NO: 4323012 - DNA, 25 bp, Homo sapien
tctgatatctcaggctcatctgatg

SEQ ID NO: 4323013 - DNA, 25 bp, Homo sapien
gatgttgtagggcttgagaaaacat

SEQ ID NO: 4323014 - DNA, 25 bp, Homo sapien
gtaggaatctgatatctcaggctca

SEQ ID NO: 4323015 - DNA, 25 bp, Homo sapien
atgttgtagggcttgagaaaacatc

SEQ ID NO: 4323016 - DNA, 25 bp, Homo sapien
gatactcagcagaattaatctgcaa

SEQ ID NO: 4323017 - DNA, 25 bp, Homo sapien
tggtggatactcagcagaattaatc

SEQ ID NO: 4323018 - DNA, 25 bp, Homo sapien
gtggatactcagcagaattaatctg

SEQ ID NO: 4323019 - DNA, 25 bp, Homo sapien
atggtggatactcagcagaattaat

SEQ ID NO: 4323020 - DNA, 25 bp, Homo sapien
gggcagcacaacctctgagtaatac

SEQ ID NO: 4323021 - DNA, 25 bp, Homo sapien
gcacaacctctgagtaatactgcat

SEQ ID NO: 4323022 - DNA, 25 bp, Homo sapien
aataggacattaggctattcccagg

SEQ ID NO: 4323023 - DNA, 25 bp, Homo sapien
cttgctgtaggggtaataggacatt

SEQ ID NO: 4323024 - DNA, 25 bp, Homo sapien
ggctgcagaactttggaatcttcag

SEQ ID NO: 4323025 - DNA, 25 bp, Homo sapien
gctgcagaactttggaatcttcaga

SEQ ID NO: 4323026 - DNA, 25 bp, Homo sapien
ttagctgtaggcacaatccatggct

SEQ ID NO: 4323027 - DNA, 25 bp, Homo sapien
tagctgtaggcacaatccatggctt

SEQ ID NO: 4323028 - DNA, 25 bp, Homo sapien
gaagcctgcagtataccaatacaat

SEQ ID NO: 4323029 - DNA, 25 bp, Homo sapien
gaaatcagtatgtatccatccagag

SEQ ID NO: 4323030 - DNA, 25 bp, Homo sapien
accagagtttggtgtcagactgtca

SEQ ID NO: 4323031 - DNA, 25 bp, Homo sapien
aactatcagttcatgaggtttccag

SEQ ID NO: 4323032 - DNA, 25 bp, Homo sapien
ccaatgtgcccctaggtttctcaaa

SEQ ID NO: 4323033 - DNA, 25 bp, Homo sapien
atgtgcccctaggtttctcaaaagg

SEQ ID NO: 4323034 - DNA, 25 bp, Homo sapien
caatgtgcccctaggtttctcaaaa

SEQ ID NO: 4323035 - DNA, 25 bp, Homo sapien
aatgtgcccctaggtttctcaaaag

SEQ ID NO: 4323036 - DNA, 25 bp, Homo sapien
gaagactgtgtcacctttaagggat

SEQ ID NO: 4323037 - DNA, 25 bp, Homo sapien
gaagcagtctgcagaaatatcataa

SEQ ID NO: 4323038 - DNA, 25 bp, Homo sapien
tacgacctgaggtgaaagtaacagg

SEQ ID NO: 4323039 - DNA, 25 bp, Homo sapien
catagggagagcctctttgggatcc

SEQ ID NO: 4323040 - DNA, 25 bp, Homo sapien
tagaatagtttgcaatgtttccggg

SEQ ID NO: 4323041 - DNA, 25 bp, Homo sapien
gaggtattagaatagtttgcaatgt

SEQ ID NO: 4323042 - DNA, 25 bp, Homo sapien
ctagagtgctcagtggcaattcaaa

SEQ ID NO: 4323043 - DNA, 25 bp, Homo sapien
tgtttccggggtccttttgctgaga

SEQ ID NO: 4323044 - DNA, 25 bp, Homo sapien
tctgtctgtataacccagagactgg

SEQ ID NO: 4323045 - DNA, 25 bp, Homo sapien
cagaaagcacagagtcaagacttcc

SEQ ID NO: 4323046 - DNA, 25 bp, Homo sapien
gcagttagcaactcctggacttggg

SEQ ID NO: 4323047 - DNA, 25 bp, Homo sapien
gaaggtgtacattcaaagggcagtg

SEQ ID NO: 4323048 - DNA, 25 bp, Homo sapien
catgtggttaactcttcagtggaat

SEQ ID NO: 4323049 - DNA, 25 bp, Homo sapien
tttgcccagaagttcagtcaccagg

SEQ ID NO: 4323050 - DNA, 25 bp, Homo sapien
ggatcagccatgtggttaactcttc

SEQ ID NO: 4323051 - DNA, 25 bp, Homo sapien
gttcagtcaccaggatcagccatgt

SEQ ID NO: 4323052 - DNA, 25 bp, Homo sapien
gagggagagagaagttaaggcacca

SEQ ID NO: 4323053 - DNA, 25 bp, Homo sapien
tgagtcctgggagttatttcgttgt

SEQ ID NO: 4323054 - DNA, 25 bp, Homo sapien
ttctgtgagtcctgggagttatttc

SEQ ID NO: 4323055 - DNA, 25 bp, Homo sapien
aaggcaccaggtttcttttctgtga

SEQ ID NO: 4323056 - DNA, 25 bp, Homo sapien
tagacgtagtgggtttagtgcttct

SEQ ID NO: 4323057 - DNA, 25 bp, Homo sapien
tttctgaaacatctaatgcactaga

SEQ ID NO: 4323058 - DNA, 25 bp, Homo sapien
tagtgcttcttggaactgtttcagg

SEQ ID NO: 4323059 - DNA, 25 bp, Homo sapien
catctaatgcactagacgtagtggg

SEQ ID NO: 4323060 - DNA, 25 bp, Homo sapien
ctcaaggtcaacaacatagcgatct

SEQ ID NO: 4323061 - DNA, 25 bp, Homo sapien
aaggtcaacaacatagcgatctcat

SEQ ID NO: 4323062 - DNA, 25 bp, Homo sapien
ggtcaacaacatagcgatctcatta

SEQ ID NO: 4323063 - DNA, 25 bp, Homo sapien
tcaaggtcaacaacatagcgatctc

SEQ ID NO: 4323064 - DNA, 25 bp, Homo sapien
ctgttgtgggtcgtgctgagatttt

SEQ ID NO: 4323065 - DNA, 25 bp, Homo sapien
tagattcggcaggtaatgccaaggt

SEQ ID NO: 4323066 - DNA, 25 bp, Homo sapien
tggtgttttagattcggcaggtaat

SEQ ID NO: 4323067 - DNA, 25 bp, Homo sapien
gctgagattttttcaacctctggtg

SEQ ID NO: 4323068 - DNA, 25 bp, Homo sapien
taacattagggaccaaatcaatgag

SEQ ID NO: 4323069 - DNA, 25 bp, Homo sapien
cttccaaacaagttctaggcatggg

SEQ ID NO: 4323070 - DNA, 25 bp, Homo sapien
tgctttctgcagttttgatggtaac

SEQ ID NO: 4323071 - DNA, 25 bp, Homo sapien
tcagtccccttcacaaacactgctt

SEQ ID NO: 4323072 - DNA, 25 bp, Homo sapien
gggatgcaggaagttttacagtagt

SEQ ID NO: 4323073 - DNA, 25 bp, Homo sapien
aatctcaaacattagggatgcagga

SEQ ID NO: 4323074 - DNA, 25 bp, Homo sapien
tacagtagtttcattaagacctgga

SEQ ID NO: 4323075 - DNA, 25 bp, Homo sapien
ctaattgtgtcttgagtgcatctga

SEQ ID NO: 4323076 - DNA, 25 bp, Homo sapien
ctagtatcactcctcccagtggagc

SEQ ID NO: 4323077 - DNA, 25 bp, Homo sapien
tcctcccagtggagctttttctggg

SEQ ID NO: 4323078 - DNA, 25 bp, Homo sapien
gctttttctggggatttagctgaat

SEQ ID NO: 4323079 - DNA, 25 bp, Homo sapien
tggggatttagctgaatccttgtga

SEQ ID NO: 4323080 - DNA, 25 bp, Homo sapien
attagtttccttgggacatatgctg

SEQ ID NO: 4323081 - DNA, 25 bp, Homo sapien
tattgggattagtttccttgggaca

SEQ ID NO: 4323082 - DNA, 25 bp, Homo sapien
cttgcttgatgattgttattgggat

SEQ ID NO: 4323083 - DNA, 25 bp, Homo sapien
tgcttgatgattgttattgggatta

SEQ ID NO: 4323084 - DNA, 25 bp, Homo sapien
ttactacagataccacaactaccat

SEQ ID NO: 4323085 - DNA, 25 bp, Homo sapien
gctgttactacagataccacaacta

SEQ ID NO: 4323086 - DNA, 25 bp, Homo sapien
gctgctgttactacagataccacaa

SEQ ID NO: 4323087 - DNA, 25 bp, Homo sapien
tgttactacagataccacaactacc

SEQ ID NO: 4323088 - DNA, 25 bp, Homo sapien
ctgtgtggtcttggtcataggtact

SEQ ID NO: 4323089 - DNA, 25 bp, Homo sapien
actgtgtggtcttggtcataggtac

SEQ ID NO: 4323090 - DNA, 25 bp, Homo sapien
gtcataggtactttggattttccca

SEQ ID NO: 4323091 - DNA, 25 bp, Homo sapien
cacaattgtttcagtggctggacag

SEQ ID NO: 4323092 - DNA, 25 bp, Homo sapien
ccttttctcgatagcgaattgtata

SEQ ID NO: 4323093 - DNA, 25 bp, Homo sapien
tggacagatttgaaaaatccacttc

SEQ ID NO: 4323094 - DNA, 25 bp, Homo sapien
gattgaaaatcttactccaaattcc

SEQ ID NO: 4323095 - DNA, 25 bp, Homo sapien
ccaggacaggaagaccgagctcggt

SEQ ID NO: 4323096 - DNA, 25 bp, Homo sapien
acagtgacttggcaatgtccagtca

SEQ ID NO: 4323097 - DNA, 25 bp, Homo sapien
gagctcggtgtcagagtgccaacca

SEQ ID NO: 4323098 - DNA, 25 bp, Homo sapien
cagaggtttgcgagaacgagtttta

SEQ ID NO: 4323099 - DNA, 25 bp, Homo sapien
tcttttgacttggaggtggagcagg

SEQ ID NO: 4323100 - DNA, 25 bp, Homo sapien
gcaggtcgcacaactatcagatatt

SEQ ID NO: 4323101 - DNA, 25 bp, Homo sapien
cttcttttgacttggaggtggagca

SEQ ID NO: 4323102 - DNA, 25 bp, Homo sapien
actatcagatatttcggctctgcat

SEQ ID NO: 4323103 - DNA, 25 bp, Homo sapien
tgagaggacccaataatccgaaaag

SEQ ID NO: 4323104 - DNA, 25 bp, Homo sapien
ggagtgagaggacccaataatccga

SEQ ID NO: 4323105 - DNA, 25 bp, Homo sapien
agtgagaggacccaataatccgaaa

SEQ ID NO: 4323106 - DNA, 25 bp, Homo sapien
cagggagtgagaggacccaataatc

SEQ ID NO: 4323107 - DNA, 25 bp, Homo sapien
tactactatcagtatctgttttaca

SEQ ID NO: 4323108 - DNA, 25 bp, Homo sapien
ttttacatggtttgtcttatgtctc

SEQ ID NO: 4323109 - DNA, 25 bp, Homo sapien
gtctctaactgctgtgatttcttga

SEQ ID NO: 4323110 - DNA, 25 bp, Homo sapien
gtcttatgtctctaactgctgtgat

SEQ ID NO: 4323111 - DNA, 25 bp, Homo sapien
tggctactacatcgaggtggaggtt

SEQ ID NO: 4323112 - DNA, 25 bp, Homo sapien
ggtcagtttggctactacatcgagg

SEQ ID NO: 4323113 - DNA, 25 bp, Homo sapien
tttggctactacatcgaggtggagg

SEQ ID NO: 4323114 - DNA, 25 bp, Homo sapien
agtttggctactacatcgaggtgga

SEQ ID NO: 4323115 - DNA, 25 bp, Homo sapien
aaggtccataatgcttgaccaggaa

SEQ ID NO: 4323116 - DNA, 25 bp, Homo sapien
tccataatgcttgaccaggaaaaat

SEQ ID NO: 4323117 - DNA, 25 bp, Homo sapien
cataatgcttgaccaggaaaaatgt

SEQ ID NO: 4323118 - DNA, 25 bp, Homo sapien
ggtccataatgcttgaccaggaaaa

SEQ ID NO: 4323119 - DNA, 25 bp, Homo sapien
atgaagcattacatattttatctta

SEQ ID NO: 4323120 - DNA, 25 bp, Homo sapien
gcattacatattttatcttatgtac

SEQ ID NO: 4323121 - DNA, 25 bp, Homo sapien
ttaattcctcttgtaatgaagcatt

SEQ ID NO: 4323122 - DNA, 25 bp, Homo sapien
gaagcattacatattttatcttatg

SEQ ID NO: 4323123 - DNA, 25 bp, Homo sapien
cagtggatgtagaggaacctgatac

SEQ ID NO: 4323124 - DNA, 25 bp, Homo sapien
aggcatgtttcagtcgatgagtagc

SEQ ID NO: 4323125 - DNA, 25 bp, Homo sapien
gctaaaaccagtggatgtagaggaa

SEQ ID NO: 4323126 - DNA, 25 bp, Homo sapien
tcagtcgatgagtagcgtagctttc

SEQ ID NO: 4323127 - DNA, 25 bp, Homo sapien
aacaccttccgtgtcccagacagtg

SEQ ID NO: 4323128 - DNA, 25 bp, Homo sapien
agaacaccttccgtgtcccagacag

SEQ ID NO: 4323129 - DNA, 25 bp, Homo sapien
agaagaacaccttccgtgtcccaga

SEQ ID NO: 4323130 - DNA, 25 bp, Homo sapien
ggggttgtgtaaggcaagctggtca

SEQ ID NO: 4323131 - DNA, 25 bp, Homo sapien
acagctcctgtaccgcatttcatca

SEQ ID NO: 4323132 - DNA, 25 bp, Homo sapien
cacatttagctatattcagacctga

SEQ ID NO: 4323133 - DNA, 25 bp, Homo sapien
ttaagcatcctctagctcttgacat

SEQ ID NO: 4323134 - DNA, 25 bp, Homo sapien
agacctgagcgggtataatctaaat

SEQ ID NO: 4323135 - DNA, 25 bp, Homo sapien
ctcctaagtgtggccatggaacagg

SEQ ID NO: 4323136 - DNA, 25 bp, Homo sapien
taagtgtggccatggaacaggtata

SEQ ID NO: 4323137 - DNA, 25 bp, Homo sapien
ccatggaacaggtatataaacagct

SEQ ID NO: 4323138 - DNA, 25 bp, Homo sapien
tggccatggaacaggtatataaaca

SEQ ID NO: 4323139 - DNA, 25 bp, Homo sapien
agcgccctgggctctgtgactctgt

SEQ ID NO: 4323140 - DNA, 25 bp, Homo sapien
tctgctgtagatgggtcccctgtgg

SEQ ID NO: 4323141 - DNA, 25 bp, Homo sapien
tagctatcagctgcctttgcctctg

SEQ ID NO: 4323142 - DNA, 25 bp, Homo sapien
tttgcctctgctgtagatgggtccc

SEQ ID NO: 4323143 - DNA, 25 bp, Homo sapien
aattatatcagaacagcaggtgtca

SEQ ID NO: 4323144 - DNA, 25 bp, Homo sapien
actagggtactgttgaaagggagca

SEQ ID NO: 4323145 - DNA, 25 bp, Homo sapien
tcaactaaactagggtactgttgaa

SEQ ID NO: 4323146 - DNA, 25 bp, Homo sapien
gttgaaagggagcacaattaattat

SEQ ID NO: 4323147 - DNA, 25 bp, Homo sapien
tccttcccagcccgatacccaaaca

SEQ ID NO: 4323148 - DNA, 25 bp, Homo sapien
tgaatttcccttcagcgggaagagg

SEQ ID NO: 4323149 - DNA, 25 bp, Homo sapien
cacttgtggtattgatgtggacttt

SEQ ID NO: 4323150 - DNA, 25 bp, Homo sapien
ggtgatacattgctgccatatccca

SEQ ID NO: 4323151 - DNA, 25 bp, Homo sapien
aagctttacatttggacttggacgc

SEQ ID NO: 4323152 - DNA, 25 bp, Homo sapien
ccttgaccactttggtgcaggtcat

SEQ ID NO: 4323153 - DNA, 25 bp, Homo sapien
ggagcagtggttctcttctgaaagg

SEQ ID NO: 4323154 - DNA, 25 bp, Homo sapien
tctccttgaccactttggtgcaggt

SEQ ID NO: 4323155 - DNA, 25 bp, Homo sapien
gagcagtggttctcttctgaaaggc

SEQ ID NO: 4323156 - DNA, 25 bp, Homo sapien
atcaatttaaggcttattttcacgt

SEQ ID NO: 4323157 - DNA, 25 bp, Homo sapien
ggctcactatcagtcacgaaatccc

SEQ ID NO: 4323158 - DNA, 25 bp, Homo sapien
tatcagtcacgaaatcccttctaat

SEQ ID NO: 4323159 - DNA, 25 bp, Homo sapien
aatcccttctaatcaatttaaggct

SEQ ID NO: 4323160 - DNA, 25 bp, Homo sapien
gatatgggagacttattggcagacc

SEQ ID NO: 4323161 - DNA, 25 bp, Homo sapien
aggcttgaactgtataccctctggg

SEQ ID NO: 4323162 - DNA, 25 bp, Homo sapien
gcagtgtaatcatggttaattgact

SEQ ID NO: 4323163 - DNA, 25 bp, Homo sapien
cctatcaattccaagtgacagctca

SEQ ID NO: 4323164 - DNA, 25 bp, Homo sapien
cttgttttgtcaaagtgaggttgga

SEQ ID NO: 4323165 - DNA, 25 bp, Homo sapien
tcttggagaagtggactgagctgtt

SEQ ID NO: 4323166 - DNA, 25 bp, Homo sapien
tgagctgttggagtgacacattctt

SEQ ID NO: 4323167 - DNA, 25 bp, Homo sapien
ccacctcttggagaagtggactgag

SEQ ID NO: 4323168 - DNA, 25 bp, Homo sapien
gagaagtagacaccccaaactggag

SEQ ID NO: 4323169 - DNA, 25 bp, Homo sapien
agggctagtgtaatacttccacaga

SEQ ID NO: 4323170 - DNA, 25 bp, Homo sapien
catttcccagggctagtgtaatact

SEQ ID NO: 4323171 - DNA, 25 bp, Homo sapien
agcatgttgcatttgccacctcgca

SEQ ID NO: 4323172 - DNA, 25 bp, Homo sapien
ctggtgggtgcctcgcaaccctgga

SEQ ID NO: 4323173 - DNA, 25 bp, Homo sapien
ccctggagctgcatttaagtggact

SEQ ID NO: 4323174 - DNA, 25 bp, Homo sapien
tgcctcgcaaccctggagctgcatt

SEQ ID NO: 4323175 - DNA, 25 bp, Homo sapien
ggagctgcatttaagtggactgtct

SEQ ID NO: 4323176 - DNA, 25 bp, Homo sapien
tcctttgttctgcagcactagagga

SEQ ID NO: 4323177 - DNA, 25 bp, Homo sapien
tttgttctgcagcactagaggagtg

SEQ ID NO: 4323178 - DNA, 25 bp, Homo sapien
tctgcagcactagaggagtgcatgt

SEQ ID NO: 4323179 - DNA, 25 bp, Homo sapien
tgtggccaacggccctgtgttggct

SEQ ID NO: 4323180 - DNA, 25 bp, Homo sapien
ggctcatacatagccatacaggctg

SEQ ID NO: 4323181 - DNA, 25 bp, Homo sapien
aaacgtccactgaatgctccagaaa

SEQ ID NO: 4323182 - DNA, 25 bp, Homo sapien
tataccatgaagtggtgaacccacc

SEQ ID NO: 4323183 - DNA, 25 bp, Homo sapien
tacttaaagcagaacatgtgggtca

SEQ ID NO: 4323184 - DNA, 25 bp, Homo sapien
taggaagacctacaatgactatgag

SEQ ID NO: 4323185 - DNA, 25 bp, Homo sapien
tatatggtcaacagtctatgcccag

SEQ ID NO: 4323186 - DNA, 25 bp, Homo sapien
ttcttctgactccatcaagcaaacc

SEQ ID NO: 4323187 - DNA, 25 bp, Homo sapien
caagcaaaccatagtgtatatggtc

SEQ ID NO: 4323188 - DNA, 25 bp, Homo sapien
cctctttatacttggtcaggatgag

SEQ ID NO: 4323189 - DNA, 25 bp, Homo sapien
ctcctctttatacttggtcaggatg

SEQ ID NO: 4323190 - DNA, 25 bp, Homo sapien
tcttcaaagtgcagattttccttct

SEQ ID NO: 4323191 - DNA, 25 bp, Homo sapien
ttcttcaaagtgcagattttccttc

SEQ ID NO: 4323192 - DNA, 25 bp, Homo sapien
gacggcatcagttagctgttcaggg

SEQ ID NO: 4323193 - DNA, 25 bp, Homo sapien
cagacggcatcagttagctgttcag

SEQ ID NO: 4323194 - DNA, 25 bp, Homo sapien
cacacagacggcatcagttagctgt

SEQ ID NO: 4323195 - DNA, 25 bp, Homo sapien
gcatcagttagctgttcagggttag

SEQ ID NO: 4323196 - DNA, 25 bp, Homo sapien
ccagctgatgaagtggttcagtcca

SEQ ID NO: 4323197 - DNA, 25 bp, Homo sapien
tcctgatccccaacatgtgaagtct

SEQ ID NO: 4323198 - DNA, 25 bp, Homo sapien
gacatttggaccgattcctgatccc

SEQ ID NO: 4323199 - DNA, 25 bp, Homo sapien
cagttgatgcacatactctctgctg

SEQ ID NO: 4323200 - DNA, 25 bp, Homo sapien
cagccagccgttcacctgacagata

SEQ ID NO: 4323201 - DNA, 25 bp, Homo sapien
caccgaaatgatgtcaagaattttc

SEQ ID NO: 4323202 - DNA, 25 bp, Homo sapien
gctctttacagtcaccgaaatgatg

SEQ ID NO: 4323203 - DNA, 25 bp, Homo sapien
tcagagaggtatgctctttacagtc

SEQ ID NO: 4323204 - DNA, 25 bp, Homo sapien
tttgttgctctatcaaactgtcttt

SEQ ID NO: 4323205 - DNA, 25 bp, Homo sapien
ctctttaaagtatcagctcctcctg

SEQ ID NO: 4323206 - DNA, 25 bp, Homo sapien
tctttactgctctttaaagtatcag

SEQ ID NO: 4323207 - DNA, 25 bp, Homo sapien
tcctggctccaaatgcttcaactca

SEQ ID NO: 4323208 - DNA, 25 bp, Homo sapien
tcttgccattcctttggaccccaaa

SEQ ID NO: 4323209 - DNA, 25 bp, Homo sapien
tctagaaatgtgtcatatgaggtca

SEQ ID NO: 4323210 - DNA, 25 bp, Homo sapien
atctagaaatgtgtcatatgaggtc

SEQ ID NO: 4323211 - DNA, 25 bp, Homo sapien
taaagcctagatacaagtcctgggt

SEQ ID NO: 4323212 - DNA, 25 bp, Homo sapien
tcttggacatgggacaagagctcgg

SEQ ID NO: 4323213 - DNA, 25 bp, Homo sapien
agctcgggaaccacccaacattggg

SEQ ID NO: 4323214 - DNA, 25 bp, Homo sapien
taaatccacagaccggattgagaag

SEQ ID NO: 4323215 - DNA, 25 bp, Homo sapien
ggaatcatttaacctaggctgtagc

SEQ ID NO: 4323216 - DNA, 25 bp, Homo sapien
tacacaattgggagaataagctagg

SEQ ID NO: 4323217 - DNA, 25 bp, Homo sapien
ttaaccagtcttactatcctgaggg

SEQ ID NO: 4323218 - DNA, 25 bp, Homo sapien
gaaagatgtcaaagtacccattgct

SEQ ID NO: 4323219 - DNA, 25 bp, Homo sapien
taggataagggagccaccttggcgc

SEQ ID NO: 4323220 - DNA, 25 bp, Homo sapien
tgggcccagtggaaagtgtctaatt

SEQ ID NO: 4323221 - DNA, 25 bp, Homo sapien
tgcatggtgacctgccctagaggga

SEQ ID NO: 4323222 - DNA, 25 bp, Homo sapien
caacagtggttcagctatagcaaag

SEQ ID NO: 4323223 - DNA, 25 bp, Homo sapien
tatccatacatactttgcaaaatac

SEQ ID NO: 4323224 - DNA, 25 bp, Homo sapien
gttatccatacatactttgcaaaat

SEQ ID NO: 4323225 - DNA, 25 bp, Homo sapien
tgttatccatacatactttgcaaaa

SEQ ID NO: 4323226 - DNA, 25 bp, Homo sapien
ctgttatccatacatactttgcaaa

SEQ ID NO: 4323227 - DNA, 25 bp, Homo sapien
tagctttactgtggcatgcactgag

SEQ ID NO: 4323228 - DNA, 25 bp, Homo sapien
ggctttcactagctttactgtggca

SEQ ID NO: 4323229 - DNA, 25 bp, Homo sapien
tcttcaaggctttcactagctttac

SEQ ID NO: 4323230 - DNA, 25 bp, Homo sapien
ttcactagctttactgtggcatgca

SEQ ID NO: 4323231 - DNA, 25 bp, Homo sapien
gggaacctcagtccagcaatcaaga

SEQ ID NO: 4323232 - DNA, 25 bp, Homo sapien
ttttggcaagcatgaagacatctag

SEQ ID NO: 4323233 - DNA, 25 bp, Homo sapien
gacaggaggtattacacaaaggaga

SEQ ID NO: 4323234 - DNA, 25 bp, Homo sapien
agacatctagcataaagtatctgca

SEQ ID NO: 4323235 - DNA, 25 bp, Homo sapien
tgaatgcctgattataaactatcca

SEQ ID NO: 4323236 - DNA, 25 bp, Homo sapien
tgcagccctaaatcctaggtccagc

SEQ ID NO: 4323237 - DNA, 25 bp, Homo sapien
aaacccgaggcacagttcttaggag

SEQ ID NO: 4323238 - DNA, 25 bp, Homo sapien
tctatcctgcagcaaaaaagtttgc

SEQ ID NO: 4323239 - DNA, 25 bp, Homo sapien
tcggctacctgatagatgaaaactc

SEQ ID NO: 4323240 - DNA, 25 bp, Homo sapien
tgctgtttggattacatgcctgaca

SEQ ID NO: 4323241 - DNA, 25 bp, Homo sapien
ttttaatgttagacagtgcaccaga

SEQ ID NO: 4323242 - DNA, 25 bp, Homo sapien
tattccttctgtgaacctcctaagg

SEQ ID NO: 4323243 - DNA, 25 bp, Homo sapien
ttgttgctctctcacaaaagctgca

SEQ ID NO: 4323244 - DNA, 25 bp, Homo sapien
tgctctctcacaaaagctgcaaact

SEQ ID NO: 4323245 - DNA, 25 bp, Homo sapien
tctctcacaaaagctgcaaactcag

SEQ ID NO: 4323246 - DNA, 25 bp, Homo sapien
acttgttgctctctcacaaaagctg

SEQ ID NO: 4323247 - DNA, 25 bp, Homo sapien
gcagtagctgcgacagcaacataaa

SEQ ID NO: 4323248 - DNA, 25 bp, Homo sapien
cagtagctgcgacagcaacataaat

SEQ ID NO: 4323249 - DNA, 25 bp, Homo sapien
gggttgtacttcacagcattctcaa

SEQ ID NO: 4323250 - DNA, 25 bp, Homo sapien
cagccctgtgactttcatacacggg

SEQ ID NO: 4323251 - DNA, 25 bp, Homo sapien
gatagggtccctcatacttctcaca

SEQ ID NO: 4323252 - DNA, 25 bp, Homo sapien
cgtctccgctagcagagctgtagaa

SEQ ID NO: 4323253 - DNA, 25 bp, Homo sapien
tgaagaagtagatgatagcagaaaa

SEQ ID NO: 4323254 - DNA, 25 bp, Homo sapien
tctctttcactcctgtcatggtgtg

SEQ ID NO: 4323255 - DNA, 25 bp, Homo sapien
catggtgtgcttggagagtcctgat

SEQ ID NO: 4323256 - DNA, 25 bp, Homo sapien
actcctgtcatggtgtgcttggaga

SEQ ID NO: 4323257 - DNA, 25 bp, Homo sapien
gatgcctatgatcacgggctcagac

SEQ ID NO: 4323258 - DNA, 25 bp, Homo sapien
cttgcctcggtaccaccagttctca

SEQ ID NO: 4323259 - DNA, 25 bp, Homo sapien
cacggaggcaatagtgatgcctatg

SEQ ID NO: 4323260 - DNA, 25 bp, Homo sapien
gacacaaattcctcacagtgcttgc

SEQ ID NO: 4323261 - DNA, 25 bp, Homo sapien
tcaccaagtccgatatctgaatcac

SEQ ID NO: 4323262 - DNA, 25 bp, Homo sapien
tcactctgctcacactgacaattaa

SEQ ID NO: 4323263 - DNA, 25 bp, Homo sapien
acagtcaccaagtccgatatctgaa

SEQ ID NO: 4323264 - DNA, 25 bp, Homo sapien
ctctgctcacactgacaattaacag

SEQ ID NO: 4323265 - DNA, 25 bp, Homo sapien
cacatgacagttagatggctcccat

SEQ ID NO: 4323266 - DNA, 25 bp, Homo sapien
gaaattcaggcctgttaaacaactc

SEQ ID NO: 4323267 - DNA, 25 bp, Homo sapien
tcctaaaattataggtgcaggcccc

SEQ ID NO: 4323268 - DNA, 25 bp, Homo sapien
tatagcctctaaagtcaaaatctgt

SEQ ID NO: 4323269 - DNA, 25 bp, Homo sapien
ggctgtaggtcacagagactctgac

SEQ ID NO: 4323270 - DNA, 25 bp, Homo sapien
cacactttccatcattcaagcagaa

SEQ ID NO: 4323271 - DNA, 25 bp, Homo sapien
gcccaggcataatgtcacactttcc

SEQ ID NO: 4323272 - DNA, 25 bp, Homo sapien
agaagtcaggctgtaggtcacagag

SEQ ID NO: 4323273 - DNA, 25 bp, Homo sapien
cactccaggggttgaccagacactc

SEQ ID NO: 4323274 - DNA, 25 bp, Homo sapien
ttccacactcaggtatccagggaag

SEQ ID NO: 4323275 - DNA, 25 bp, Homo sapien
gaaaattcattacaggcctgaaact

SEQ ID NO: 4323276 - DNA, 25 bp, Homo sapien
aacttgcaagggttggcttcatcac

SEQ ID NO: 4323277 - DNA, 25 bp, Homo sapien
caccgcattgttgacgttaggaggg

SEQ ID NO: 4323278 - DNA, 25 bp, Homo sapien
tctaagttctggaaccccgtgagat

SEQ ID NO: 4323279 - DNA, 25 bp, Homo sapien
gactgttcaccacaatgctgccatt

SEQ ID NO: 4323280 - DNA, 25 bp, Homo sapien
ttccagaatcatgtacaccgcattg

SEQ ID NO: 4323281 - DNA, 25 bp, Homo sapien
agtaatctgtgcctatccggtccag

SEQ ID NO: 4323282 - DNA, 25 bp, Homo sapien
tgctccagggctttatactccaagg

SEQ ID NO: 4323283 - DNA, 25 bp, Homo sapien
catcatgttagtcactcggaggctg

SEQ ID NO: 4323284 - DNA, 25 bp, Homo sapien
tgtgtcacagataaccagagcctgt

SEQ ID NO: 4323285 - DNA, 25 bp, Homo sapien
cctctggaaagtgtgtggatctgtc

SEQ ID NO: 4323286 - DNA, 25 bp, Homo sapien
tgagtaatcatcaacaccaggtact

SEQ ID NO: 4323287 - DNA, 25 bp, Homo sapien
cagtatctgcgaagatgggcacagc

SEQ ID NO: 4323288 - DNA, 25 bp, Homo sapien
gagggttagagacgcagattcagct

SEQ ID NO: 4323289 - DNA, 25 bp, Homo sapien
gatctaccttttgcccagaccctga

SEQ ID NO: 4323290 - DNA, 25 bp, Homo sapien
ctgaacctaaaccaccgtcaaatat

SEQ ID NO: 4323291 - DNA, 25 bp, Homo sapien
gaagtctcactccatggccaagtaa

SEQ ID NO: 4323292 - DNA, 25 bp, Homo sapien
cacggcttggacagtggttcagcgc

SEQ ID NO: 4323293 - DNA, 25 bp, Homo sapien
cagatatggtgaagatgttaaggac

SEQ ID NO: 4323294 - DNA, 25 bp, Homo sapien
tctgactcttcaacattggctaatc

SEQ ID NO: 4323295 - DNA, 25 bp, Homo sapien
tcttttggcacaggttgagtgaatg

SEQ ID NO: 4323296 - DNA, 25 bp, Homo sapien
aaggtatagaagaggtcagatatgg

SEQ ID NO: 4323297 - DNA, 25 bp, Homo sapien
tgaggcccatcttcgagggaaaggc

SEQ ID NO: 4323298 - DNA, 25 bp, Homo sapien
gactttctgaccagagttccctgcc

SEQ ID NO: 4323299 - DNA, 25 bp, Homo sapien
tctaccaagtgagatccagaagtcc

SEQ ID NO: 4323300 - DNA, 25 bp, Homo sapien
gcaagccagtctgaagcactgccgg

SEQ ID NO: 4323301 - DNA, 25 bp, Homo sapien
ggaccagagctgaaatcaagtggtg

SEQ ID NO: 4323302 - DNA, 25 bp, Homo sapien
gtgatggattcatctgctgagggcc

SEQ ID NO: 4323303 - DNA, 25 bp, Homo sapien
aaatcaagtggtggaatactgctgg

SEQ ID NO: 4323304 - DNA, 25 bp, Homo sapien
gagggccatgcagcttgaaaggtat

SEQ ID NO: 4323305 - DNA, 25 bp, Homo sapien
gaagaatacagaaacacaatccttg

SEQ ID NO: 4323306 - DNA, 25 bp, Homo sapien
gatctaagtacattgcccacagcag

SEQ ID NO: 4323307 - DNA, 25 bp, Homo sapien
caaaatgtagtctggttacctcaaa

SEQ ID NO: 4323308 - DNA, 25 bp, Homo sapien
gaaggccctctagtttggtcagaaa

SEQ ID NO: 4323309 - DNA, 25 bp, Homo sapien
cagaatagatgacggcgttgcctga

SEQ ID NO: 4323310 - DNA, 25 bp, Homo sapien
tgaactttgggtgttccaaactaga

SEQ ID NO: 4323311 - DNA, 25 bp, Homo sapien
gtttggtgacgcaaaactcctctca

SEQ ID NO: 4323312 - DNA, 25 bp, Homo sapien
tccaaactagatcttcagtttggtg

SEQ ID NO: 4323313 - DNA, 25 bp, Homo sapien
ccaggtggtattgctgatggcctca

SEQ ID NO: 4323314 - DNA, 25 bp, Homo sapien
gggtttatcatccagttccacaagg

SEQ ID NO: 4323315 - DNA, 25 bp, Homo sapien
gcctcaccattgaaggtaactgcat

SEQ ID NO: 4323316 - DNA, 25 bp, Homo sapien
taactgcatagtaaacatctacgcc

SEQ ID NO: 4323317 - DNA, 25 bp, Homo sapien
attcaagtacacgaatttccttgta

SEQ ID NO: 4323318 - DNA, 25 bp, Homo sapien
ctaaattcaagtacacgaatttcct

SEQ ID NO: 4323319 - DNA, 25 bp, Homo sapien
ttccttgtagcctggtaacccagta

SEQ ID NO: 4323320 - DNA, 25 bp, Homo sapien
atttccttgtagcctggtaacccag

SEQ ID NO: 4323321 - DNA, 25 bp, Homo sapien
ccaaaaggtggatactgaattctgc

SEQ ID NO: 4323322 - DNA, 25 bp, Homo sapien
cccaaaaggtggatactgaattctg

SEQ ID NO: 4323323 - DNA, 25 bp, Homo sapien
caaaaggtggatactgaattctgca

SEQ ID NO: 4323324 - DNA, 25 bp, Homo sapien
ctgaggcaccttcataggcgtccac

SEQ ID NO: 4323325 - DNA, 25 bp, Homo sapien
cgtccacctctggatgtggaacact

SEQ ID NO: 4323326 - DNA, 25 bp, Homo sapien
ccttcataggcgtccacctctggat

SEQ ID NO: 4323327 - DNA, 25 bp, Homo sapien
tctggcctttccaagctgctctctg

SEQ ID NO: 4323328 - DNA, 25 bp, Homo sapien
atgttgaagtatcaccaacaggaac

SEQ ID NO: 4323329 - DNA, 25 bp, Homo sapien
aggaactggagaagacagttcagag

SEQ ID NO: 4323330 - DNA, 25 bp, Homo sapien
ctcccaatgttgaagtatcaccaac

SEQ ID NO: 4323331 - DNA, 25 bp, Homo sapien
ccaatgttgaagtatcaccaacagg

SEQ ID NO: 4323332 - DNA, 25 bp, Homo sapien
tctgagagatcattgaaatcataaa

SEQ ID NO: 4323333 - DNA, 25 bp, Homo sapien
gatctcatctgagagatcattgaaa

SEQ ID NO: 4323334 - DNA, 25 bp, Homo sapien
ctcatctgagagatcattgaaatca

SEQ ID NO: 4323335 - DNA, 25 bp, Homo sapien
tgagagatcattgaaatcataaaac

SEQ ID NO: 4323336 - DNA, 25 bp, Homo sapien
taaagaaagtcaagcttagagaaat

SEQ ID NO: 4323337 - DNA, 25 bp, Homo sapien
atttatataaagaaagtcaagctta

SEQ ID NO: 4323338 - DNA, 25 bp, Homo sapien
tataaagaaagtcaagcttagagaa

SEQ ID NO: 4323339 - DNA, 25 bp, Homo sapien
tatataaagaaagtcaagcttagag

SEQ ID NO: 4323340 - DNA, 25 bp, Homo sapien
agataatctaagaaagcctctcctc

SEQ ID NO: 4323341 - DNA, 25 bp, Homo sapien
cactctgcaattgcaagcaaagata

SEQ ID NO: 4323342 - DNA, 25 bp, Homo sapien
atcagaagataatctaagaaagcct

SEQ ID NO: 4323343 - DNA, 25 bp, Homo sapien
gaagataatctaagaaagcctctcc

SEQ ID NO: 4323344 - DNA, 25 bp, Homo sapien
ctcctcatttcatccagcacattat

SEQ ID NO: 4323345 - DNA, 25 bp, Homo sapien
tcctcatttcatccagcacattatt

SEQ ID NO: 4323346 - DNA, 25 bp, Homo sapien
ctcatttcatccagcacattattca

SEQ ID NO: 4323347 - DNA, 25 bp, Homo sapien
cctcatttcatccagcacattattc

SEQ ID NO: 4323348 - DNA, 25 bp, Homo sapien
tcgtatagtgttacaactttctgtc

SEQ ID NO: 4323349 - DNA, 25 bp, Homo sapien
cctcgtatagtgttacaactttctg

SEQ ID NO: 4323350 - DNA, 25 bp, Homo sapien
ccttcttcacataactctccttcca

SEQ ID NO: 4323351 - DNA, 25 bp, Homo sapien
atagtgttacaactttctgtccttc

SEQ ID NO: 4323352 - DNA, 25 bp, Homo sapien
tcataagaggtcagggagtaacacc

SEQ ID NO: 4323353 - DNA, 25 bp, Homo sapien
tatccattcctctactggtccatct

SEQ ID NO: 4323354 - DNA, 25 bp, Homo sapien
ttgccccaagagtactgccagtgtg

SEQ ID NO: 4323355 - DNA, 25 bp, Homo sapien
caaaaggataatgctgcgctaggcc

SEQ ID NO: 4323356 - DNA, 25 bp, Homo sapien
ggatattgttcatggcactccacaa

SEQ ID NO: 4323357 - DNA, 25 bp, Homo sapien
caattaagcttgttgtcttacatgg

SEQ ID NO: 4323358 - DNA, 25 bp, Homo sapien
gacacagggttgtcataaacctttg

SEQ ID NO: 4323359 - DNA, 25 bp, Homo sapien
gaatggtactaacagacttgcttga

SEQ ID NO: 4323360 - DNA, 25 bp, Homo sapien
ttaggccttagctgtgtaaatgctc

SEQ ID NO: 4323361 - DNA, 25 bp, Homo sapien
aaagactaggccacaccctagggca

SEQ ID NO: 4323362 - DNA, 25 bp, Homo sapien
gaatcccttcctttgttgtgacact

SEQ ID NO: 4323363 - DNA, 25 bp, Homo sapien
cctagggcagcttactcagatagcc

SEQ ID NO: 4323364 - DNA, 25 bp, Homo sapien
tgattaagcttctatgttccacaga

SEQ ID NO: 4323365 - DNA, 25 bp, Homo sapien
cctcacacaaattcatccagtaatg

SEQ ID NO: 4323366 - DNA, 25 bp, Homo sapien
agtaatgatattcctcacgcccagg

SEQ ID NO: 4323367 - DNA, 25 bp, Homo sapien
agtcgatcccaaaaagtcctgaagg

SEQ ID NO: 4323368 - DNA, 25 bp, Homo sapien
tattaagaacttctgaccatacagc

SEQ ID NO: 4323369 - DNA, 25 bp, Homo sapien
catacagcatacagcgggcactgac

SEQ ID NO: 4323370 - DNA, 25 bp, Homo sapien
gagctgaactatttgtagatcattg

SEQ ID NO: 4323371 - DNA, 25 bp, Homo sapien
ttctgaccatacagcatacagcggg

SEQ ID NO: 4323372 - DNA, 25 bp, Homo sapien
aacagaatagatctccgccttctga

SEQ ID NO: 4323373 - DNA, 25 bp, Homo sapien
tagatctccgccttctgattaacca

SEQ ID NO: 4323374 - DNA, 25 bp, Homo sapien
tacttcacatgatttgccacagcct

SEQ ID NO: 4323375 - DNA, 25 bp, Homo sapien
cgccttctgattaaccactgtcttt

SEQ ID NO: 4323376 - DNA, 25 bp, Homo sapien
aaactgcactcttgggttcttggat

SEQ ID NO: 4323377 - DNA, 25 bp, Homo sapien
actgcactcttgggttcttggatct

SEQ ID NO: 4323378 - DNA, 25 bp, Homo sapien
aactgcactcttgggttcttggatc

SEQ ID NO: 4323379 - DNA, 25 bp, Homo sapien
gaaactgcactcttgggttcttgga

SEQ ID NO: 4323380 - DNA, 25 bp, Homo sapien
gaaagtctccttctatcaggacaaa

SEQ ID NO: 4323381 - DNA, 25 bp, Homo sapien
gttaatgatggaaagtctccttcta

SEQ ID NO: 4323382 - DNA, 25 bp, Homo sapien
tccttctatcaggacaaatatcaaa

SEQ ID NO: 4323383 - DNA, 25 bp, Homo sapien
gatggaaagtctccttctatcagga

SEQ ID NO: 4323384 - DNA, 25 bp, Homo sapien
aagagttataggaaagacctaacat

SEQ ID NO: 4323385 - DNA, 25 bp, Homo sapien
cagaatccttaattgagtgtccaaa

SEQ ID NO: 4323386 - DNA, 25 bp, Homo sapien
aaatggttgtcctttcaaagtagct

SEQ ID NO: 4323387 - DNA, 25 bp, Homo sapien
tgtttgagaatgaacaaccacttca

SEQ ID NO: 4323388 - DNA, 25 bp, Homo sapien
aacagtagctcatgtttcttaagga

SEQ ID NO: 4323389 - DNA, 25 bp, Homo sapien
ttatttctaacagtagctcatgttt

SEQ ID NO: 4323390 - DNA, 25 bp, Homo sapien
tacaactggaaatttatttctaaca

SEQ ID NO: 4323391 - DNA, 25 bp, Homo sapien
ggaaatttatttctaacagtagctc

SEQ ID NO: 4323392 - DNA, 25 bp, Homo sapien
tacaatatgatgtgacctgtcagca

SEQ ID NO: 4323393 - DNA, 25 bp, Homo sapien
cccagtcacgtggaagtacagatca

SEQ ID NO: 4323394 - DNA, 25 bp, Homo sapien
tatatagcagtacctcaagttgagc

SEQ ID NO: 4323395 - DNA, 25 bp, Homo sapien
tacagaagggatgccgtaaatggca

SEQ ID NO: 4323396 - DNA, 25 bp, Homo sapien
tgaattggaagttcaaagttaacaa

SEQ ID NO: 4323397 - DNA, 25 bp, Homo sapien
cccgtttggtctttattacatgacg

SEQ ID NO: 4323398 - DNA, 25 bp, Homo sapien
gagctctcgaatatcttcccgtttg

SEQ ID NO: 4323399 - DNA, 25 bp, Homo sapien
cgaggaaaccacttctccaaatgaa

SEQ ID NO: 4323400 - DNA, 25 bp, Homo sapien
gaacctgacaccctatgatgaagtt

SEQ ID NO: 4323401 - DNA, 25 bp, Homo sapien
tctctgtgagctagaaaataacacc

SEQ ID NO: 4323402 - DNA, 25 bp, Homo sapien
tctctgggctatagctggagttcac

SEQ ID NO: 4323403 - DNA, 25 bp, Homo sapien
caaagtaccgttaagcattctccaa

SEQ ID NO: 4323404 - DNA, 25 bp, Homo sapien
tagggcatagatccaccatgtttgt

SEQ ID NO: 4323405 - DNA, 25 bp, Homo sapien
cctgtttaggaactttagggcatag

SEQ ID NO: 4323406 - DNA, 25 bp, Homo sapien
gctttccacatactgcaataaatat

SEQ ID NO: 4323407 - DNA, 25 bp, Homo sapien
aatcactgctattgtcctgtttagg

SEQ ID NO: 4323408 - DNA, 25 bp, Homo sapien
gcagctttcaaggagtctagtataa

SEQ ID NO: 4323409 - DNA, 25 bp, Homo sapien
cagctttcaaggagtctagtataag

SEQ ID NO: 4323410 - DNA, 25 bp, Homo sapien
gctttcaaggagtctagtataagaa

SEQ ID NO: 4323411 - DNA, 25 bp, Homo sapien
ttcaaggagtctagtataagaatac

SEQ ID NO: 4323412 - DNA, 25 bp, Homo sapien
tttggtactgacatattcgactcgg

SEQ ID NO: 4323413 - DNA, 25 bp, Homo sapien
ggtactgacatattcgactcggtac

SEQ ID NO: 4323414 - DNA, 25 bp, Homo sapien
tctttggtactgacatattcgactc

SEQ ID NO: 4323415 - DNA, 25 bp, Homo sapien
ttttctttggtactgacatattcga

SEQ ID NO: 4323416 - DNA, 25 bp, Homo sapien
tcaaagacagtgtcgaagtagtacg

SEQ ID NO: 4323417 - DNA, 25 bp, Homo sapien
cagtgtcgaagtagtacgtagatca

SEQ ID NO: 4323418 - DNA, 25 bp, Homo sapien
gtcgaagtagtacgtagatcattat

SEQ ID NO: 4323419 - DNA, 25 bp, Homo sapien
tcctctgcactcaaagacagtgtcg

SEQ ID NO: 4323420 - DNA, 25 bp, Homo sapien
gaaataattaagcagttatgagtgt

SEQ ID NO: 4323421 - DNA, 25 bp, Homo sapien
aaataattaagcagttatgagtgtt

SEQ ID NO: 4323422 - DNA, 25 bp, Homo sapien
caggtaaaccccagagccatgattg

SEQ ID NO: 4323423 - DNA, 25 bp, Homo sapien
aatcagcttactgcttaggctacag

SEQ ID NO: 4323424 - DNA, 25 bp, Homo sapien
ccatgattggaaataccagttagct

SEQ ID NO: 4323425 - DNA, 25 bp, Homo sapien
tttggcttgtaagaaaactcgtgga

SEQ ID NO: 4323426 - DNA, 25 bp, Homo sapien
ataactatactaccgttaacttcat

SEQ ID NO: 4323427 - DNA, 25 bp, Homo sapien
tattcatcctgttaaagtaggttta

SEQ ID NO: 4323428 - DNA, 25 bp, Homo sapien
tgatagtaaataactatactaccgt

SEQ ID NO: 4323429 - DNA, 25 bp, Homo sapien
taatgatagtaaataactatactac

SEQ ID NO: 4323430 - DNA, 25 bp, Homo sapien
gaaaacaaatgactgcgagatacca

SEQ ID NO: 4323431 - DNA, 25 bp, Homo sapien
tgggactgctgggatacagtttgtg

SEQ ID NO: 4323432 - DNA, 25 bp, Homo sapien
aatgactgcgagataccagtgagac

SEQ ID NO: 4323433 - DNA, 25 bp, Homo sapien
cacagcttcttctaaccatggaaaa

SEQ ID NO: 4323434 - DNA, 25 bp, Homo sapien
gaattcattgccttagctactttta

SEQ ID NO: 4323435 - DNA, 25 bp, Homo sapien
caaaatccaagataaggaattcatt

SEQ ID NO: 4323436 - DNA, 25 bp, Homo sapien
ggaattcattgccttagctactttt

SEQ ID NO: 4323437 - DNA, 25 bp, Homo sapien
atccaagataaggaattcattgcct

SEQ ID NO: 4323438 - DNA, 25 bp, Homo sapien
tatgtgacgagtccatgttcttact

SEQ ID NO: 4323439 - DNA, 25 bp, Homo sapien
aaaatgtttatgtgacgagtccatg

SEQ ID NO: 4323440 - DNA, 25 bp, Homo sapien
aaaaatgtttatgtgacgagtccat

SEQ ID NO: 4323441 - DNA, 25 bp, Homo sapien
tgtttatgtgacgagtccatgttct

SEQ ID NO: 4323442 - DNA, 25 bp, Homo sapien
tgaaagacagatttgatatataaaa

SEQ ID NO: 4323443 - DNA, 25 bp, Homo sapien
tatatctccttatagtaacccctgg

SEQ ID NO: 4323444 - DNA, 25 bp, Homo sapien
actggctgtgcaacttagtataaac

SEQ ID NO: 4323445 - DNA, 25 bp, Homo sapien
ccaactgttatatctgtcattaggg

SEQ ID NO: 4323446 - DNA, 25 bp, Homo sapien
ttaagatagggacttcaagagccat

SEQ ID NO: 4323447 - DNA, 25 bp, Homo sapien
tgaaagtcacctacactgccctaga

SEQ ID NO: 4323448 - DNA, 25 bp, Homo sapien
ggatggaactcttattgcaggaaaa

SEQ ID NO: 4323449 - DNA, 25 bp, Homo sapien
gaacagggttggcttgcatacacac

SEQ ID NO: 4323450 - DNA, 25 bp, Homo sapien
tgagacagccaccttgaacagggtt

SEQ ID NO: 4323451 - DNA, 25 bp, Homo sapien
aaaggacccaaccattataatcagt

SEQ ID NO: 4323452 - DNA, 25 bp, Homo sapien
tatattagacatagaatgaggcaag

SEQ ID NO: 4323453 - DNA, 25 bp, Homo sapien
gattacagatcacgctgtgaaacaa

SEQ ID NO: 4323454 - DNA, 25 bp, Homo sapien
taatatgttccaagcaccgagcaag

SEQ ID NO: 4323455 - DNA, 25 bp, Homo sapien
gaaaagccctggtatacgcactcgt

SEQ ID NO: 4323456 - DNA, 25 bp, Homo sapien
tcaccgtcttagttcctagcaggca

SEQ ID NO: 4323457 - DNA, 25 bp, Homo sapien
gacagcctcctattattctcacaag

SEQ ID NO: 4323458 - DNA, 25 bp, Homo sapien
tcttaccctagaggatgccactcac

SEQ ID NO: 4323459 - DNA, 25 bp, Homo sapien
cccagggacatgcaattggaaatgc

SEQ ID NO: 4323460 - DNA, 25 bp, Homo sapien
gaagccactttactaggagcatcaa

SEQ ID NO: 4323461 - DNA, 25 bp, Homo sapien
gactcacagaggaaatacagccact

SEQ ID NO: 4323462 - DNA, 25 bp, Homo sapien
gacctgaacaaatggtagtactgcc

SEQ ID NO: 4323463 - DNA, 25 bp, Homo sapien
aatgtgacttcgttcaacaagttca

SEQ ID NO: 4323464 - DNA, 25 bp, Homo sapien
tgtgacttcgttcaacaagttcatc

SEQ ID NO: 4323465 - DNA, 25 bp, Homo sapien
aaagatttggattatcttctgttaa

SEQ ID NO: 4323466 - DNA, 25 bp, Homo sapien
aaatgtgacttcgttcaacaagttc

SEQ ID NO: 4323467 - DNA, 25 bp, Homo sapien
tccttcttctaaacactccagatct

SEQ ID NO: 4323468 - DNA, 25 bp, Homo sapien
tacatcattaagaaactctccttct

SEQ ID NO: 4323469 - DNA, 25 bp, Homo sapien
tcttcattagttactcctaatcccc

SEQ ID NO: 4323470 - DNA, 25 bp, Homo sapien
taaacactccagatcttcattagtt

SEQ ID NO: 4323471 - DNA, 25 bp, Homo sapien
catttgaccaggcataaataatgat

SEQ ID NO: 4323472 - DNA, 25 bp, Homo sapien
caagctactaatggtactccgattg

SEQ ID NO: 4323473 - DNA, 25 bp, Homo sapien
tctgtaactcaaatctgtagggtaa

SEQ ID NO: 4323474 - DNA, 25 bp, Homo sapien
tatatgaaacaataactgggcagtg

SEQ ID NO: 4323475 - DNA, 25 bp, Homo sapien
tctcgccattcttcatctggattag

SEQ ID NO: 4323476 - DNA, 25 bp, Homo sapien
ttctgaacaagtccagtgtgcctga

SEQ ID NO: 4323477 - DNA, 25 bp, Homo sapien
gtaatagaaagggagtagcaaccgc

SEQ ID NO: 4323478 - DNA, 25 bp, Homo sapien
gcaaccgctactttgcttctgcagg

SEQ ID NO: 4323479 - DNA, 25 bp, Homo sapien
tatttccgtcataatatctttcagc

SEQ ID NO: 4323480 - DNA, 25 bp, Homo sapien
caccagcagggaaagaacaagttga

SEQ ID NO: 4323481 - DNA, 25 bp, Homo sapien
aatgcctgaacccaagacaacgggt

SEQ ID NO: 4323482 - DNA, 25 bp, Homo sapien
cgggtaagaaagctctaattctcca

SEQ ID NO: 4323483 - DNA, 25 bp, Homo sapien
gtgcactaatatctcacaaattacc

SEQ ID NO: 4323484 - DNA, 25 bp, Homo sapien
gaaagaaggatagaaattgccaggt

SEQ ID NO: 4323485 - DNA, 25 bp, Homo sapien
tatgtaatcaaataccaccggtttc

SEQ ID NO: 4323486 - DNA, 25 bp, Homo sapien
ctgctcgggttatgggtgcactaat

SEQ ID NO: 4323487 - DNA, 25 bp, Homo sapien
ctataaggagaaattatgtgaatta

SEQ ID NO: 4323488 - DNA, 25 bp, Homo sapien
atgtgaattaaataatctatcctaa

SEQ ID NO: 4323489 - DNA, 25 bp, Homo sapien
aattggttgaatacaactataagga

SEQ ID NO: 4323490 - DNA, 25 bp, Homo sapien
taaataatctatcctaaaattaaga

SEQ ID NO: 4323491 - DNA, 25 bp, Homo sapien
tcttgaagataatctgaagagaccc

SEQ ID NO: 4323492 - DNA, 25 bp, Homo sapien
gctggcttaatacagagtgttctaa

SEQ ID NO: 4323493 - DNA, 25 bp, Homo sapien
agtgttctaattgggtctgaatctc

SEQ ID NO: 4323494 - DNA, 25 bp, Homo sapien
ggtatccactagcaatgaaatctca

SEQ ID NO: 4323495 - DNA, 25 bp, Homo sapien
ggatcttaatatatttttttgtgat

SEQ ID NO: 4323496 - DNA, 25 bp, Homo sapien
tgggatcttaatatatttttttgtg

SEQ ID NO: 4323497 - DNA, 25 bp, Homo sapien
gggatcttaatatatttttttgtga

SEQ ID NO: 4323498 - DNA, 25 bp, Homo sapien
tactaggcataatactggaaatgtt

SEQ ID NO: 4323499 - DNA, 25 bp, Homo sapien
ccatgacaggattatatgggcataa

SEQ ID NO: 4323500 - DNA, 25 bp, Homo sapien
tataaaatccagttgtagatccatc

SEQ ID NO: 4323501 - DNA, 25 bp, Homo sapien
tgtagatccatctcattactaggca

SEQ ID NO: 4323502 - DNA, 25 bp, Homo sapien
gaaaaggagtaattccaagtagcca

SEQ ID NO: 4323503 - DNA, 25 bp, Homo sapien
gaagaggcagaggacttaccaaact

SEQ ID NO: 4323504 - DNA, 25 bp, Homo sapien
tctgcactggtggtcaatgatcttt

SEQ ID NO: 4323505 - DNA, 25 bp, Homo sapien
tagccataatactccaagaccagac

SEQ ID NO: 4323506 - DNA, 25 bp, Homo sapien
ttaaccaatagtgtacatttcattg

SEQ ID NO: 4323507 - DNA, 25 bp, Homo sapien
taaccaatagtgtacatttcattgt

SEQ ID NO: 4323508 - DNA, 25 bp, Homo sapien
ctatgagaagacagaaataaattac

SEQ ID NO: 4323509 - DNA, 25 bp, Homo sapien
gattcacatgtaatcaatggtagtt

SEQ ID NO: 4323510 - DNA, 25 bp, Homo sapien
caatggtagttctaacaatgctgat

SEQ ID NO: 4323511 - DNA, 25 bp, Homo sapien
gtctcacggtcttgcttagattgta

SEQ ID NO: 4323512 - DNA, 25 bp, Homo sapien
caatgctgattcagaagtactctca

SEQ ID NO: 4323513 - DNA, 25 bp, Homo sapien
ttagagttctcaacggtttcagtgg

SEQ ID NO: 4323514 - DNA, 25 bp, Homo sapien
gaagaaatccccacaatatcaatgg

SEQ ID NO: 4323515 - DNA, 25 bp, Homo sapien
ggtggcattactcaaagtcaactcc

SEQ ID NO: 4323516 - DNA, 25 bp, Homo sapien
gagatcagtgattggttcccttcat

SEQ ID NO: 4323517 - DNA, 25 bp, Homo sapien
gagtgagttccacttttgaatcaga

SEQ ID NO: 4323518 - DNA, 25 bp, Homo sapien
tcctgttcgagatgatcacaacctc

SEQ ID NO: 4323519 - DNA, 25 bp, Homo sapien
acaacctctacttccactgttaagg

SEQ ID NO: 4323520 - DNA, 25 bp, Homo sapien
tctgttgacttatccaaagaagtac

SEQ ID NO: 4323521 - DNA, 25 bp, Homo sapien
atttgctaatagtggcttgtttggc

SEQ ID NO: 4323522 - DNA, 25 bp, Homo sapien
tggcttgtttggcatcctcctgaag

SEQ ID NO: 4323523 - DNA, 25 bp, Homo sapien
aatagtggcttgtttggcatcctcc

SEQ ID NO: 4323524 - DNA, 25 bp, Homo sapien
cttcaaatttgctaatagtggcttg

SEQ ID NO: 4323525 - DNA, 25 bp, Homo sapien
attttatttgtgttgccaaataatc

SEQ ID NO: 4323526 - DNA, 25 bp, Homo sapien
ctccctttactttcacatatccttt

SEQ ID NO: 4323527 - DNA, 25 bp, Homo sapien
ttatttgtgttgccaaataatctcc

SEQ ID NO: 4323528 - DNA, 25 bp, Homo sapien
tccaacagttttctaaggttcacaa

SEQ ID NO: 4323529 - DNA, 25 bp, Homo sapien
atctactgtcttacttcgttgtgag

SEQ ID NO: 4323530 - DNA, 25 bp, Homo sapien
tgccatcatcctttcttcgtttttc

SEQ ID NO: 4323531 - DNA, 25 bp, Homo sapien
tttttctttattgtgcgcagtctgc

SEQ ID NO: 4323532 - DNA, 25 bp, Homo sapien
gaattgtcatctactgtcttacttc

SEQ ID NO: 4323533 - DNA, 25 bp, Homo sapien
aagaaagggttattgctgctattac

SEQ ID NO: 4323534 - DNA, 25 bp, Homo sapien
taaagaaagggttattgctgctatt

SEQ ID NO: 4323535 - DNA, 25 bp, Homo sapien
cagtgtagtgtcatagttaaagaaa

SEQ ID NO: 4323536 - DNA, 25 bp, Homo sapien
aaagaaagggttattgctgctatta

SEQ ID NO: 4323537 - DNA, 25 bp, Homo sapien
tggggaacataattcattatggggt

SEQ ID NO: 4323538 - DNA, 25 bp, Homo sapien
ttcaaggtggcagctacaattgtgc

SEQ ID NO: 4323539 - DNA, 25 bp, Homo sapien
taaccgccattctagctaaggtaag

SEQ ID NO: 4323540 - DNA, 25 bp, Homo sapien
tgtcacttgcacactttttagtggg

SEQ ID NO: 4323541 - DNA, 25 bp, Homo sapien
tttcccttacacttagcaatgctgg

SEQ ID NO: 4323542 - DNA, 25 bp, Homo sapien
tgggcactgttcacatacctgtttg

SEQ ID NO: 4323543 - DNA, 25 bp, Homo sapien
gacgataagtggactcaggaacaca

SEQ ID NO: 4323544 - DNA, 25 bp, Homo sapien
tgatatcagcaccaataagagagac

SEQ ID NO: 4323545 - DNA, 25 bp, Homo sapien
catgttggcaccctcattgtagaag

SEQ ID NO: 4323546 - DNA, 25 bp, Homo sapien
tatctgcacactaacccaataaggt

SEQ ID NO: 4323547 - DNA, 25 bp, Homo sapien
gattttcattaagtgtctgtatcca

SEQ ID NO: 4323548 - DNA, 25 bp, Homo sapien
caaaatacaagtatggtggccagtg

SEQ ID NO: 4323549 - DNA, 25 bp, Homo sapien
cacattattagccatggactgttgg

SEQ ID NO: 4323550 - DNA, 25 bp, Homo sapien
tattagccatggactgttggttcca

SEQ ID NO: 4323551 - DNA, 25 bp, Homo sapien
caaacttccctcagttacaggtggg

SEQ ID NO: 4323552 - DNA, 25 bp, Homo sapien
taacagctcttgtgagggtttagat

SEQ ID NO: 4323553 - DNA, 25 bp, Homo sapien
ggacattcgtcaatataactctggg

SEQ ID NO: 4323554 - DNA, 25 bp, Homo sapien
gataagattctaggctgccatcaga

SEQ ID NO: 4323555 - DNA, 25 bp, Homo sapien
aaattagcatcgtttctaggtaggg

SEQ ID NO: 4323556 - DNA, 25 bp, Homo sapien
gattgcaccttgttggcatcacata

SEQ ID NO: 4323557 - DNA, 25 bp, Homo sapien
taaggctttggcgaagaggttctaa

SEQ ID NO: 4323558 - DNA, 25 bp, Homo sapien
caacagatgtcgaaggcaatgagtc

SEQ ID NO: 4323559 - DNA, 25 bp, Homo sapien
taactagctaacatccccaactcat

SEQ ID NO: 4323560 - DNA, 25 bp, Homo sapien
taccacacgacctgccttggaagag

SEQ ID NO: 4323561 - DNA, 25 bp, Homo sapien
aacaatgttaccagccactacagaa

SEQ ID NO: 4323562 - DNA, 25 bp, Homo sapien
accagtgacaccataaagcaactac

SEQ ID NO: 4323563 - DNA, 25 bp, Homo sapien
tactgtgcctaaagacagggctgcc

SEQ ID NO: 4323564 - DNA, 25 bp, Homo sapien
cattgtttcctgtcacctacctcgg

SEQ ID NO: 4323565 - DNA, 25 bp, Homo sapien
tggcaccaaacatgctgaccaggga

SEQ ID NO: 4323566 - DNA, 25 bp, Homo sapien
tggctcatccctaccatgactggtg

SEQ ID NO: 4323567 - DNA, 25 bp, Homo sapien
ctaagccgtacttgaactcctgcac

SEQ ID NO: 4323568 - DNA, 25 bp, Homo sapien
ccatgttgcctaagccgtacttgaa

SEQ ID NO: 4323569 - DNA, 25 bp, Homo sapien
tgcgcctggccttaatgatataagc

SEQ ID NO: 4323570 - DNA, 25 bp, Homo sapien
gttgcctaagccgtacttgaactcc

SEQ ID NO: 4323571 - DNA, 25 bp, Homo sapien
agtttattctcaggcttcttcggct

SEQ ID NO: 4323572 - DNA, 25 bp, Homo sapien
aaagtttattctcaggcttcttcgg

SEQ ID NO: 4323573 - DNA, 25 bp, Homo sapien
tcaaagtttattctcaggcttcttc

SEQ ID NO: 4323574 - DNA, 25 bp, Homo sapien
ctttgtttcaaagtttattctcagg

SEQ ID NO: 4323575 - DNA, 25 bp, Homo sapien
atccatggattgtttgggcaaagct

SEQ ID NO: 4323576 - DNA, 25 bp, Homo sapien
tcagccagtctgcttaaactgttca

SEQ ID NO: 4323577 - DNA, 25 bp, Homo sapien
tctgcttaaactgttcagactgtct

SEQ ID NO: 4323578 - DNA, 25 bp, Homo sapien
ttaaactgttcagactgtctacacc

SEQ ID NO: 4323579 - DNA, 25 bp, Homo sapien
cagagcagataaggggccatgcaga

SEQ ID NO: 4323580 - DNA, 25 bp, Homo sapien
cctatcagagcagataaggggccat

SEQ ID NO: 4323581 - DNA, 25 bp, Homo sapien
tcagagcagataaggggccatgcag

SEQ ID NO: 4323582 - DNA, 25 bp, Homo sapien
tatcagagcagataaggggccatgc

SEQ ID NO: 4323583 - DNA, 25 bp, Homo sapien
tagggttggtgctaagagggtcctg

SEQ ID NO: 4323584 - DNA, 25 bp, Homo sapien
gagattaggcgcacacatgcggaga

SEQ ID NO: 4323585 - DNA, 25 bp, Homo sapien
tggaccagctgagattaggcgcaca

SEQ ID NO: 4323586 - DNA, 25 bp, Homo sapien
ctagggttggtgctaagagggtcct

SEQ ID NO: 4323587 - DNA, 25 bp, Homo sapien
tgacttggaagtaacaggacaccct

SEQ ID NO: 4323588 - DNA, 25 bp, Homo sapien
tatggtctagagagatgactttatt

SEQ ID NO: 4323589 - DNA, 25 bp, Homo sapien
tatttttatggtctagagagatgac

SEQ ID NO: 4323590 - DNA, 25 bp, Homo sapien
ttggaagtaacaggacaccctcgga

SEQ ID NO: 4323591 - DNA, 25 bp, Homo sapien
agaaggaactcccatcaggctagca

SEQ ID NO: 4323592 - DNA, 25 bp, Homo sapien
gggaatttgcttcaactacaccagc

SEQ ID NO: 4323593 - DNA, 25 bp, Homo sapien
aagaatttcatatcctaccagccca

SEQ ID NO: 4323594 - DNA, 25 bp, Homo sapien
caccagccttacaagaaagaggtcc

SEQ ID NO: 4323595 - DNA, 25 bp, Homo sapien
ggaggttcacctaagcaacacagca

SEQ ID NO: 4323596 - DNA, 25 bp, Homo sapien
attttagaaactagctaagcatggt

SEQ ID NO: 4323597 - DNA, 25 bp, Homo sapien
aggttcacctaagcaacacagcaaa

SEQ ID NO: 4323598 - DNA, 25 bp, Homo sapien
ttttagaaactagctaagcatggtg

SEQ ID NO: 4323599 - DNA, 25 bp, Homo sapien
aatttggacagtggtgattgaacat

SEQ ID NO: 4323600 - DNA, 25 bp, Homo sapien
tggacagtggtgattgaacatggac

SEQ ID NO: 4323601 - DNA, 25 bp, Homo sapien
tggtgattgaacatggacatcctct

SEQ ID NO: 4323602 - DNA, 25 bp, Homo sapien
ctgcaaagggagagtccagcgttct

SEQ ID NO: 4323603 - DNA, 25 bp, Homo sapien
gagaaaccacaccatgcaaatctta

SEQ ID NO: 4323604 - DNA, 25 bp, Homo sapien
ttcctttttccttctgtgatgattt

SEQ ID NO: 4323605 - DNA, 25 bp, Homo sapien
ctccgataaatcagaagatgacttt

SEQ ID NO: 4323606 - DNA, 25 bp, Homo sapien
ctttttcctttttccttctgtgatg

SEQ ID NO: 4323607 - DNA, 25 bp, Homo sapien
tccgataaatcagaagatgactttt

SEQ ID NO: 4323608 - DNA, 25 bp, Homo sapien
gaagatggccgtcgcccgagctttc

SEQ ID NO: 4323609 - DNA, 25 bp, Homo sapien
atgaagatggccgtcgcccgagctt

SEQ ID NO: 4323610 - DNA, 25 bp, Homo sapien
gtcgcccgagctttctcttgtccat

SEQ ID NO: 4323611 - DNA, 25 bp, Homo sapien
tggccgtcgcccgagctttctcttg

SEQ ID NO: 4323612 - DNA, 25 bp, Homo sapien
aatttcagttgcaggcgctgtcacc

SEQ ID NO: 4323613 - DNA, 25 bp, Homo sapien
ttgcaggcgctgtcacctcaggacc

SEQ ID NO: 4323614 - DNA, 25 bp, Homo sapien
gaaatttcagttgcaggcgctgtca

SEQ ID NO: 4323615 - DNA, 25 bp, Homo sapien
cttctcccgctgctgaaatttcagt

SEQ ID NO: 4323616 - DNA, 25 bp, Homo sapien
cctgggacttttcactgtgggctgc

SEQ ID NO: 4323617 - DNA, 25 bp, Homo sapien
aacaggaactcctccggttcactgg

SEQ ID NO: 4323618 - DNA, 25 bp, Homo sapien
aaccacctgggtgctcgattttagc

SEQ ID NO: 4323619 - DNA, 25 bp, Homo sapien
tgttgactttgaagattagattgac

SEQ ID NO: 4323620 - DNA, 25 bp, Homo sapien
gacgccggagacgttccaagatgca

SEQ ID NO: 4323621 - DNA, 25 bp, Homo sapien
tgtgacgtaaaaagcagcgccggaa

SEQ ID NO: 4323622 - DNA, 25 bp, Homo sapien
ttctttgcgccagcgggaaccacta

SEQ ID NO: 4323623 - DNA, 25 bp, Homo sapien
aaagcgttctttgcgtgctgtgacg

SEQ ID NO: 4323624 - DNA, 25 bp, Homo sapien
ctgttgccattctcagtacctttca

SEQ ID NO: 4323625 - DNA, 25 bp, Homo sapien
tgttgccattctcagtacctttcat

SEQ ID NO: 4323626 - DNA, 25 bp, Homo sapien
ttgcagagatacatgtcttccaaaa

SEQ ID NO: 4323627 - DNA, 25 bp, Homo sapien
gccatttacccttcataggaagaga

SEQ ID NO: 4323628 - DNA, 25 bp, Homo sapien
cctttcaccaggtttttggtgccat

SEQ ID NO: 4323629 - DNA, 25 bp, Homo sapien
tatcctaaaaatgagagtacacccc

SEQ ID NO: 4323630 - DNA, 25 bp, Homo sapien
gcaaaacggctgaacctggcaactg

SEQ ID NO: 4323631 - DNA, 25 bp, Homo sapien
caagaggctctgcaattcgttccca

SEQ ID NO: 4323632 - DNA, 25 bp, Homo sapien
tcaagctgctagaaaccactgagga

SEQ ID NO: 4323633 - DNA, 25 bp, Homo sapien
tgttgataagagtatgcagccaggc

SEQ ID NO: 4323634 - DNA, 25 bp, Homo sapien
ttcttggacacacccacggtgcggc

SEQ ID NO: 4323635 - DNA, 25 bp, Homo sapien
cttcttggacacacccacggtgcgg

SEQ ID NO: 4323636 - DNA, 25 bp, Homo sapien
ttcttcttggacacacccacggtgc

SEQ ID NO: 4323637 - DNA, 25 bp, Homo sapien
atttcttcttggacacacccacggt

SEQ ID NO: 4323638 - DNA, 25 bp, Homo sapien
acggcggccagtggtcttggtgtgc

SEQ ID NO: 4323639 - DNA, 25 bp, Homo sapien
cacggcggccagtggtcttggtgtg

SEQ ID NO: 4323640 - DNA, 25 bp, Homo sapien
cagtggtcttggtgtgctggcctcg

SEQ ID NO: 4323641 - DNA, 25 bp, Homo sapien
tggtcttggtgtgctggcctcggac

SEQ ID NO: 4323642 - DNA, 25 bp, Homo sapien
aaggccccagaagtgacgcagccct

SEQ ID NO: 4323643 - DNA, 25 bp, Homo sapien
ccagaagtgacgcagccctctatgg

SEQ ID NO: 4323644 - DNA, 25 bp, Homo sapien
ccccagaagtgacgcagccctctat

SEQ ID NO: 4323645 - DNA, 25 bp, Homo sapien
agaagtgacgcagccctctatgggc

SEQ ID NO: 4323646 - DNA, 25 bp, Homo sapien
ttgttgtccagaccattggctagga

SEQ ID NO: 4323647 - DNA, 25 bp, Homo sapien
agtcgctccaggtcttcacggagct

SEQ ID NO: 4323648 - DNA, 25 bp, Homo sapien
ttcagtcgctccaggtcttcacgga

SEQ ID NO: 4323649 - DNA, 25 bp, Homo sapien
tcttcagtcgctccaggtcttcacg

SEQ ID NO: 4323650 - DNA, 25 bp, Homo sapien
tgcataacggtgatcacacgttcca

SEQ ID NO: 4323651 - DNA, 25 bp, Homo sapien
ctgcataacggtgatcacacgttcc

SEQ ID NO: 4323652 - DNA, 25 bp, Homo sapien
gcataacggtgatcacacgttccac

SEQ ID NO: 4323653 - DNA, 25 bp, Homo sapien
gcaaaggctattttccgctgcccat

SEQ ID NO: 4323654 - DNA, 25 bp, Homo sapien
aaaggctattttccgctgcccatcg

SEQ ID NO: 4323655 - DNA, 25 bp, Homo sapien
gctattttccgctgcccatcgatgt

SEQ ID NO: 4323656 - DNA, 25 bp, Homo sapien
cgccctcttggtgaggtcagtgtct

SEQ ID NO: 4323657 - DNA, 25 bp, Homo sapien
gcacaagcggcggcgtgtaggcctc

SEQ ID NO: 4323658 - DNA, 25 bp, Homo sapien
ggcagcacaagcggcggcgtgtagg

SEQ ID NO: 4323659 - DNA, 25 bp, Homo sapien
cagcacaagcggcggcgtgtaggcc

SEQ ID NO: 4323660 - DNA, 25 bp, Homo sapien
ggcggcagcacaagcggcggcgtgt

SEQ ID NO: 4323661 - DNA, 25 bp, Homo sapien
ggtacctttgtgctctaaggctcac

SEQ ID NO: 4323662 - DNA, 25 bp, Homo sapien
tttgtgctctaaggctcacccctct

SEQ ID NO: 4323663 - DNA, 25 bp, Homo sapien
ctgtgcccagcttactaggtaattt

SEQ ID NO: 4323664 - DNA, 25 bp, Homo sapien
aatgctagtaccatgtgtattttga

SEQ ID NO: 4323665 - DNA, 25 bp, Homo sapien
gtgtagcataatacattccatatgg

SEQ ID NO: 4323666 - DNA, 25 bp, Homo sapien
aactcttgatccagtgtagcataat

SEQ ID NO: 4323667 - DNA, 25 bp, Homo sapien
gtcctgctttcttaactgttaatca

SEQ ID NO: 4323668 - DNA, 25 bp, Homo sapien
gctttcttaactgttaatcaaggcc

SEQ ID NO: 4323669 - DNA, 25 bp, Homo sapien
cagaggaaatgcctccagaagcaaa

SEQ ID NO: 4323670 - DNA, 25 bp, Homo sapien
caggaattgaataagtttgtatgca

SEQ ID NO: 4323671 - DNA, 25 bp, Homo sapien
gtagtgaaaatgctaaaagacttag

SEQ ID NO: 4323672 - DNA, 25 bp, Homo sapien
aaatttagcgtattagtaatcagga

SEQ ID NO: 4323673 - DNA, 25 bp, Homo sapien
tgggttttctgataaccagaagctg

SEQ ID NO: 4323674 - DNA, 25 bp, Homo sapien
catgaccaagacaattaaatgatgt

SEQ ID NO: 4323675 - DNA, 25 bp, Homo sapien
gctgtgggagcgaaatataaaatct

SEQ ID NO: 4323676 - DNA, 25 bp, Homo sapien
gtccatgaccaagacaattaaatga

SEQ ID NO: 4323677 - DNA, 25 bp, Homo sapien
tagaataagcccaagtaagacaatg

SEQ ID NO: 4323678 - DNA, 25 bp, Homo sapien
ttgaggcaaatcgtaaggaagctgt

SEQ ID NO: 4323679 - DNA, 25 bp, Homo sapien
tgcgtacatattgaccaatggcctc

SEQ ID NO: 4323680 - DNA, 25 bp, Homo sapien
tagttcctgtaagcatttccaccag

SEQ ID NO: 4323681 - DNA, 25 bp, Homo sapien
ccacccatgcttggctataatgtat

SEQ ID NO: 4323682 - DNA, 25 bp, Homo sapien
gctgcttaacaggtcaggtcctagt

SEQ ID NO: 4323683 - DNA, 25 bp, Homo sapien
gtattttcttaacttatacagtgct

SEQ ID NO: 4323684 - DNA, 25 bp, Homo sapien
tgggcccaagttgtccacccgcctc

SEQ ID NO: 4323685 - DNA, 25 bp, Homo sapien
tgtgagtgatagcagcacagtaaga

SEQ ID NO: 4323686 - DNA, 25 bp, Homo sapien
ggattggtgactgatggcccgctgg

SEQ ID NO: 4323687 - DNA, 25 bp, Homo sapien
gctccctgacgttgtagatcaggaa

SEQ ID NO: 4323688 - DNA, 25 bp, Homo sapien
gttgtacagcctcgcattgggattg

SEQ ID NO: 4323689 - DNA, 25 bp, Homo sapien
atgaaccctgttgttagtacctccg

SEQ ID NO: 4323690 - DNA, 25 bp, Homo sapien
cgggtttccgccagttatgattaat

SEQ ID NO: 4323691 - DNA, 25 bp, Homo sapien
ctatgaaccctgttgttagtacctc

SEQ ID NO: 4323692 - DNA, 25 bp, Homo sapien
ttctatgaaccctgttgttagtacc

SEQ ID NO: 4323693 - DNA, 25 bp, Homo sapien
tgtgtgacgttccccgtcctgagtc

SEQ ID NO: 4323694 - DNA, 25 bp, Homo sapien
gtgacgttccccgtcctgagtccat

SEQ ID NO: 4323695 - DNA, 25 bp, Homo sapien
cgttccccgtcctgagtccatgtgt

SEQ ID NO: 4323696 - DNA, 25 bp, Homo sapien
cttcatccatgcccttgctaaggac

SEQ ID NO: 4323697 - DNA, 25 bp, Homo sapien
gcaatcacagctcgcttctgccttg

SEQ ID NO: 4323698 - DNA, 25 bp, Homo sapien
agttgcagggcctacaggtgcatgc

SEQ ID NO: 4323699 - DNA, 25 bp, Homo sapien
tgagttgcagggcctacaggtgcat

SEQ ID NO: 4323700 - DNA, 25 bp, Homo sapien
gctcgcttctgccttgacttcctgg

SEQ ID NO: 4323701 - DNA, 25 bp, Homo sapien
tgtagtccacagaatgcctacttca

SEQ ID NO: 4323702 - DNA, 25 bp, Homo sapien
acttcattgtttcatgcctaatgga

SEQ ID NO: 4323703 - DNA, 25 bp, Homo sapien
gaatgcctacttcattgtttcatgc

SEQ ID NO: 4323704 - DNA, 25 bp, Homo sapien
gaaactcactgtagtccacagaatg

SEQ ID NO: 4323705 - DNA, 25 bp, Homo sapien
taacagtgacgagtttgtataccag

SEQ ID NO: 4323706 - DNA, 25 bp, Homo sapien
tttgtataccagttttagtggcact

SEQ ID NO: 4323707 - DNA, 25 bp, Homo sapien
aaatttaacagtgacgagtttgtat

SEQ ID NO: 4323708 - DNA, 25 bp, Homo sapien
tgacgagtttgtataccagttttag

SEQ ID NO: 4323709 - DNA, 25 bp, Homo sapien
tgagggctgcactgaataattttca

SEQ ID NO: 4323710 - DNA, 25 bp, Homo sapien
ggtatatcatgataaaccactgcca

SEQ ID NO: 4323711 - DNA, 25 bp, Homo sapien
tgagtggtagtttcccagagagaaa

SEQ ID NO: 4323712 - DNA, 25 bp, Homo sapien
gggctgtatgtcaattcacgtctta

SEQ ID NO: 4323713 - DNA, 25 bp, Homo sapien
catatgtttacggagtgttcgagca

SEQ ID NO: 4323714 - DNA, 25 bp, Homo sapien
taggcttcgctacatacaggacaga

SEQ ID NO: 4323715 - DNA, 25 bp, Homo sapien
cgttttagagatcgggcatcagccc

SEQ ID NO: 4323716 - DNA, 25 bp, Homo sapien
ggccgttcaccagtatgtgttctga

SEQ ID NO: 4323717 - DNA, 25 bp, Homo sapien
taagcctttctatctggactgtggc

SEQ ID NO: 4323718 - DNA, 25 bp, Homo sapien
aaaagtacagtagctcataagcctt

SEQ ID NO: 4323719 - DNA, 25 bp, Homo sapien
aaaaaagcatgtgtagtgaggtgca

SEQ ID NO: 4323720 - DNA, 25 bp, Homo sapien
ggtgcaagcaccaaaatatacttaa

SEQ ID NO: 4323721 - DNA, 25 bp, Homo sapien
cttcatggttgttcatgtgtctcct

SEQ ID NO: 4323722 - DNA, 25 bp, Homo sapien
acatttttcacacacccgttccagg

SEQ ID NO: 4323723 - DNA, 25 bp, Homo sapien
tctcttagctgagtgaattttcttc

SEQ ID NO: 4323724 - DNA, 25 bp, Homo sapien
gccttctgaacaaagctttttcata

SEQ ID NO: 4323725 - DNA, 25 bp, Homo sapien
gagacttcacatgggaataccaatc

SEQ ID NO: 4323726 - DNA, 25 bp, Homo sapien
tttcttccaactatagcacttatca

SEQ ID NO: 4323727 - DNA, 25 bp, Homo sapien
aattggcactggaatggcttcacac

SEQ ID NO: 4323728 - DNA, 25 bp, Homo sapien
tttgttcatgtgctggcgaagatct

SEQ ID NO: 4323729 - DNA, 25 bp, Homo sapien
taaagttcagttacccaattggata

SEQ ID NO: 4323730 - DNA, 25 bp, Homo sapien
gttacccaattggataatcttattc

SEQ ID NO: 4323731 - DNA, 25 bp, Homo sapien
gttcagttacccaattggataatct

SEQ ID NO: 4323732 - DNA, 25 bp, Homo sapien
ctgcaataaagttcagttacccaat

SEQ ID NO: 4323733 - DNA, 25 bp, Homo sapien
aagaatcgtgcatagttcccaaagg

SEQ ID NO: 4323734 - DNA, 25 bp, Homo sapien
tgaccctagggatagagcaaatgac

SEQ ID NO: 4323735 - DNA, 25 bp, Homo sapien
caaagcattcccttggccatagtga

SEQ ID NO: 4323736 - DNA, 25 bp, Homo sapien
tccatatggtgcctcagagaaaaca

SEQ ID NO: 4323737 - DNA, 25 bp, Homo sapien
gatagcctcgaacctcaggctttgg

SEQ ID NO: 4323738 - DNA, 25 bp, Homo sapien
caggctttggttggtgtttcttgaa

SEQ ID NO: 4323739 - DNA, 25 bp, Homo sapien
gctgagtccagagcccctatgaaaa

SEQ ID NO: 4323740 - DNA, 25 bp, Homo sapien
tttccacaaactgagcaaaggtact

SEQ ID NO: 4323741 - DNA, 25 bp, Homo sapien
ttaaaatactgtctcaatacaaaat

SEQ ID NO: 4323742 - DNA, 25 bp, Homo sapien
caatacaaaattgagcacacacgac

SEQ ID NO: 4323743 - DNA, 25 bp, Homo sapien
cacacacgactatcagtttatcaat

SEQ ID NO: 4323744 - DNA, 25 bp, Homo sapien
aaaattgagcacacacgactatcag

SEQ ID NO: 4323745 - DNA, 25 bp, Homo sapien
tagaccatgcttatagataaaagtc

SEQ ID NO: 4323746 - DNA, 25 bp, Homo sapien
gactctgatgtaattttagaccatg

SEQ ID NO: 4323747 - DNA, 25 bp, Homo sapien
gaagactccgtttggtaacaaatga

SEQ ID NO: 4323748 - DNA, 25 bp, Homo sapien
caaatgacttaacacacagttcaca

SEQ ID NO: 4323749 - DNA, 25 bp, Homo sapien
cattagacgtggaattggacgagga

SEQ ID NO: 4323750 - DNA, 25 bp, Homo sapien
gatgttcccgatgcttcattagacg

SEQ ID NO: 4323751 - DNA, 25 bp, Homo sapien
ggtgcatcttttctggtatgacgaa

SEQ ID NO: 4323752 - DNA, 25 bp, Homo sapien
gatgtgctcgcaaagaggcactgta

SEQ ID NO: 4323753 - DNA, 25 bp, Homo sapien
tgagataactaacttcgggccagcc

SEQ ID NO: 4323754 - DNA, 25 bp, Homo sapien
tcaattgagataactaacttcgggc

SEQ ID NO: 4323755 - DNA, 25 bp, Homo sapien
attgagataactaacttcgggccag

SEQ ID NO: 4323756 - DNA, 25 bp, Homo sapien
caattgagataactaacttcgggcc

SEQ ID NO: 4323757 - DNA, 25 bp, Homo sapien
tgtgcattataagggcgtatcgtct

SEQ ID NO: 4323758 - DNA, 25 bp, Homo sapien
gcgtatcgtctctgaaaaaccattc

SEQ ID NO: 4323759 - DNA, 25 bp, Homo sapien
taagggcgtatcgtctctgaaaaac

SEQ ID NO: 4323760 - DNA, 25 bp, Homo sapien
ttcagtttgtgcattataagggcgt

SEQ ID NO: 4323761 - DNA, 25 bp, Homo sapien
catcatcagggccaaagtctgtctt

SEQ ID NO: 4323762 - DNA, 25 bp, Homo sapien
taacagaacgttgtcgaagcctgct

SEQ ID NO: 4323763 - DNA, 25 bp, Homo sapien
tatatgccccttcattaacagaacg

SEQ ID NO: 4323764 - DNA, 25 bp, Homo sapien
ccttgtgtagtcgaatatatgcccc

SEQ ID NO: 4323765 - DNA, 25 bp, Homo sapien
ttaaatcaacagactccatttcagg

SEQ ID NO: 4323766 - DNA, 25 bp, Homo sapien
ttgatgcaactagattttcctgatc

SEQ ID NO: 4323767 - DNA, 25 bp, Homo sapien
tcctctggcgagctactaattacat

SEQ ID NO: 4323768 - DNA, 25 bp, Homo sapien
tcttcggcacaaatatcctcagctg

SEQ ID NO: 4323769 - DNA, 25 bp, Homo sapien
cattctgtactcgtaagtcctgggt

SEQ ID NO: 4323770 - DNA, 25 bp, Homo sapien
tgaaaagatgacgagctaagatggc

SEQ ID NO: 4323771 - DNA, 25 bp, Homo sapien
gctagcaacaggaggtgctgtacct

SEQ ID NO: 4323772 - DNA, 25 bp, Homo sapien
tcctgggtggatgcaactgtttgta

SEQ ID NO: 4323773 - DNA, 25 bp, Homo sapien
gataccgtaaatgacacacttatga

SEQ ID NO: 4323774 - DNA, 25 bp, Homo sapien
aaatccaggggtacggcagactaag

SEQ ID NO: 4323775 - DNA, 25 bp, Homo sapien
ggcagactaagataccgtaaatgac

SEQ ID NO: 4323776 - DNA, 25 bp, Homo sapien
ccgtaaatgacacacttatgataaa

SEQ ID NO: 4323777 - DNA, 25 bp, Homo sapien
taaagtccgtgtgtggaagacatac

SEQ ID NO: 4323778 - DNA, 25 bp, Homo sapien
gaaccttttcagtacagcttagtct

SEQ ID NO: 4323779 - DNA, 25 bp, Homo sapien
ttatattgccccgtctggagagcag

SEQ ID NO: 4323780 - DNA, 25 bp, Homo sapien
tcacaggtacaatgacacaccacag

SEQ ID NO: 4323781 - DNA, 25 bp, Homo sapien
tactcgctatttgctgacaaaacag

SEQ ID NO: 4323782 - DNA, 25 bp, Homo sapien
ggaaagtctctgttcgttcagctgt

SEQ ID NO: 4323783 - DNA, 25 bp, Homo sapien
tctcaataaaaagatctcgaaaata

SEQ ID NO: 4323784 - DNA, 25 bp, Homo sapien
gacagcctgacaatgttttggagaa

SEQ ID NO: 4323785 - DNA, 25 bp, Homo sapien
agacctggccagattaattttacct

SEQ ID NO: 4323786 - DNA, 25 bp, Homo sapien
gaggcagttcagcttatataacaca

SEQ ID NO: 4323787 - DNA, 25 bp, Homo sapien
tatgaaactgatgcaggtgaaaaac

SEQ ID NO: 4323788 - DNA, 25 bp, Homo sapien
tgtcctatcctattttctgccatgt

SEQ ID NO: 4323789 - DNA, 25 bp, Homo sapien
ctagtacactagttacaaatcttaa

SEQ ID NO: 4323790 - DNA, 25 bp, Homo sapien
caaggctgcaaatactagtacacta

SEQ ID NO: 4323791 - DNA, 25 bp, Homo sapien
aagctgactggagagtaccacttac

SEQ ID NO: 4323792 - DNA, 25 bp, Homo sapien
cttaaagctgactggagagtaccac

SEQ ID NO: 4323793 - DNA, 25 bp, Homo sapien
cagattcaaggtctagtcccaattc

SEQ ID NO: 4323794 - DNA, 25 bp, Homo sapien
tggacgggatcgatctagtttctcc

SEQ ID NO: 4323795 - DNA, 25 bp, Homo sapien
tctgaaacatctgatattggacggg

SEQ ID NO: 4323796 - DNA, 25 bp, Homo sapien
cacaagttcatgtttggatactggc

SEQ ID NO: 4323797 - DNA, 25 bp, Homo sapien
tctaatcataagatgactatatagc

SEQ ID NO: 4323798 - DNA, 25 bp, Homo sapien
gaatatattatttagtctgtgcaca

SEQ ID NO: 4323799 - DNA, 25 bp, Homo sapien
gatgactatatagctccacccattt

SEQ ID NO: 4323800 - DNA, 25 bp, Homo sapien
ccacccattttcatgtgagttgcaa

SEQ ID NO: 4323801 - DNA, 25 bp, Homo sapien
caagtagtgccaggtctgatgccgg

SEQ ID NO: 4323802 - DNA, 25 bp, Homo sapien
gattttacgcttgacattgccctcg

SEQ ID NO: 4323803 - DNA, 25 bp, Homo sapien
ttcgtcaggtaacgcaggatggccc

SEQ ID NO: 4323804 - DNA, 25 bp, Homo sapien
caggcggcagcttttcggattttac

SEQ ID NO: 4323805 - DNA, 25 bp, Homo sapien
gcggaccgcggctccctgagggcgc

SEQ ID NO: 4323806 - DNA, 25 bp, Homo sapien
cgcggaccgcggctccctgagggcg

SEQ ID NO: 4323807 - DNA, 25 bp, Homo sapien
gacaggtgaggaaaacggcccgcta

SEQ ID NO: 4323808 - DNA, 25 bp, Homo sapien
aaacggctgcgcctttggcgagcgc

SEQ ID NO: 4323809 - DNA, 25 bp, Homo sapien
aggagcggcggcaccgtagggagaa

SEQ ID NO: 4323810 - DNA, 25 bp, Homo sapien
ctttggcgagcgctcttcgacggct

SEQ ID NO: 4323811 - DNA, 25 bp, Homo sapien
caccgtagggagaaacggctgcgcc

SEQ ID NO: 4323812 - DNA, 25 bp, Homo sapien
tccgctggcgactgacaaaatggct

SEQ ID NO: 4323813 - DNA, 25 bp, Homo sapien
gactgagccctgattggagcgcact

SEQ ID NO: 4323814 - DNA, 25 bp, Homo sapien
ttttctggcttgatggagccgatcc

SEQ ID NO: 4323815 - DNA, 25 bp, Homo sapien
atccagtgacgtcaggaatgcgggt

SEQ ID NO: 4323816 - DNA, 25 bp, Homo sapien
tgcagacacggcctagtacacttct

SEQ ID NO: 4323817 - DNA, 25 bp, Homo sapien
tatttagctggtaatcccggagcag

SEQ ID NO: 4323818 - DNA, 25 bp, Homo sapien
cttgagctgcgtctcccagtgcgtg

SEQ ID NO: 4323819 - DNA, 25 bp, Homo sapien
cgtgctgaggatgctaatacaggta

SEQ ID NO: 4323820 - DNA, 25 bp, Homo sapien
gacaggtgaatacagtaggctcgaa

SEQ ID NO: 4323821 - DNA, 25 bp, Homo sapien
gaatacagtaggctcgaaaacagaa

SEQ ID NO: 4323822 - DNA, 25 bp, Homo sapien
caggtgaatacagtaggctcgaaaa

SEQ ID NO: 4323823 - DNA, 25 bp, Homo sapien
cagtaggctcgaaaacagaatcata

SEQ ID NO: 4323824 - DNA, 25 bp, Homo sapien
cacacgcagtaattcccggatggcc

SEQ ID NO: 4323825 - DNA, 25 bp, Homo sapien
cttgaaagattccaggtgcggggac

SEQ ID NO: 4323826 - DNA, 25 bp, Homo sapien
tgtgtgcacacgcagtaattcccgg

SEQ ID NO: 4323827 - DNA, 25 bp, Homo sapien
cggatggcccggacatccttgaaag

SEQ ID NO: 4323828 - DNA, 25 bp, Homo sapien
cacgcattatcctttgggccaatag

SEQ ID NO: 4323829 - DNA, 25 bp, Homo sapien
tacctaagacccaagggtaatgaca

SEQ ID NO: 4323830 - DNA, 25 bp, Homo sapien
tgagaagcctactgatgcacgcatt

SEQ ID NO: 4323831 - DNA, 25 bp, Homo sapien
tcctgagtaaagctaaacttgctgt

SEQ ID NO: 4323832 - DNA, 25 bp, Homo sapien
tggcatgcccccagctcaacaaact

SEQ ID NO: 4323833 - DNA, 25 bp, Homo sapien
ccccagctcaacaaactactccggg

SEQ ID NO: 4323834 - DNA, 25 bp, Homo sapien
ccagctcaacaaactactccgggaa

SEQ ID NO: 4323835 - DNA, 25 bp, Homo sapien
agctcaacaaactactccgggaatt

SEQ ID NO: 4323836 - DNA, 25 bp, Homo sapien
gcaccttcaactcagctattagcaa

SEQ ID NO: 4323837 - DNA, 25 bp, Homo sapien
gctaaggatactctttattcaagca

SEQ ID NO: 4323838 - DNA, 25 bp, Homo sapien
taaactacatttgcctatcatggga

SEQ ID NO: 4323839 - DNA, 25 bp, Homo sapien
cccagctgggactatatacactctc

SEQ ID NO: 4323840 - DNA, 25 bp, Homo sapien
ggcagattagatttttaaataaaga

SEQ ID NO: 4323841 - DNA, 25 bp, Homo sapien
ctggcagattagatttttaaataaa

SEQ ID NO: 4323842 - DNA, 25 bp, Homo sapien
tggcagattagatttttaaataaag

SEQ ID NO: 4323843 - DNA, 25 bp, Homo sapien
actggcagattagatttttaaataa

SEQ ID NO: 4323844 - DNA, 25 bp, Homo sapien
tctttatttaaaaatctaatctgcc

SEQ ID NO: 4323845 - DNA, 25 bp, Homo sapien
tttatttaaaaatctaatctgccag

SEQ ID NO: 4323846 - DNA, 25 bp, Homo sapien
ttatttaaaaatctaatctgccagt

SEQ ID NO: 4323847 - DNA, 25 bp, Homo sapien
ctttatttaaaaatctaatctgcca

SEQ ID NO: 4323848 - DNA, 25 bp, Homo sapien
cacctaagcaaaagattgtgaagcc

SEQ ID NO: 4323849 - DNA, 25 bp, Homo sapien
gcagcacctaagcaaaagattgtga

SEQ ID NO: 4323850 - DNA, 25 bp, Homo sapien
ctaagcaaaagattgtgaagcctgt

SEQ ID NO: 4323851 - DNA, 25 bp, Homo sapien
gattgtgaagcctgtgaaagtttca

SEQ ID NO: 4323852 - DNA, 25 bp, Homo sapien
gtgaaagtttcagctccccgagttg

SEQ ID NO: 4323853 - DNA, 25 bp, Homo sapien
acctaagcaaaagattgtgaagcct

SEQ ID NO: 4323854 - DNA, 25 bp, Homo sapien
ggcttcacaatcttttgcttaggtg

SEQ ID NO: 4323855 - DNA, 25 bp, Homo sapien
tgaaactttcacaggcttcacaatc

SEQ ID NO: 4323856 - DNA, 25 bp, Homo sapien
gctgaaactttcacaggcttcacaa

SEQ ID NO: 4323857 - DNA, 25 bp, Homo sapien
acaggcttcacaatcttttgcttag

SEQ ID NO: 4323858 - DNA, 25 bp, Homo sapien
tcacaatcttttgcttaggtgctgc

SEQ ID NO: 4323859 - DNA, 25 bp, Homo sapien
caactcggggagctgaaactttcac

SEQ ID NO: 4323860 - DNA, 25 bp, Homo sapien
ggatcctacactgcacttggttgtg

SEQ ID NO: 4323861 - DNA, 25 bp, Homo sapien
catccagtctgtgagggtatcttag

SEQ ID NO: 4323862 - DNA, 25 bp, Homo sapien
taaacactgtactgttactgagatc

SEQ ID NO: 4323863 - DNA, 25 bp, Homo sapien
acctgctttagcaccccgaagtgtt

SEQ ID NO: 4323864 - DNA, 25 bp, Homo sapien
cattgagaaaagctgagtaaacact

SEQ ID NO: 4323865 - DNA, 25 bp, Homo sapien
ggatgcatttcaggatcctacactg

SEQ ID NO: 4323866 - DNA, 25 bp, Homo sapien
tcaactaaaatacctattagctggg

SEQ ID NO: 4323867 - DNA, 25 bp, Homo sapien
cagtgtaggatcctgaaatgcatcc

SEQ ID NO: 4323868 - DNA, 25 bp, Homo sapien
ggatgaaatgagacacaaccaagtg

SEQ ID NO: 4323869 - DNA, 25 bp, Homo sapien
aaagatctcagtaacagtacagtgt

SEQ ID NO: 4323870 - DNA, 25 bp, Homo sapien
cacaaccaagtgcagtgtaggatcc

SEQ ID NO: 4323871 - DNA, 25 bp, Homo sapien
gactaagataccctcacagactgga

SEQ ID NO: 4323872 - DNA, 25 bp, Homo sapien
tttaaggtattgaatgcaaggctca

SEQ ID NO: 4323873 - DNA, 25 bp, Homo sapien
tccataagccaaagcatgtgttact

SEQ ID NO: 4323874 - DNA, 25 bp, Homo sapien
tgtaaccaattacttggccaatggt

SEQ ID NO: 4323875 - DNA, 25 bp, Homo sapien
ttactttcttgaacaatacaacagg

SEQ ID NO: 4323876 - DNA, 25 bp, Homo sapien
gaggtggtcctctccataagccaaa

SEQ ID NO: 4323877 - DNA, 25 bp, Homo sapien
tggccaatggttcaggtctccagag

SEQ ID NO: 4323878 - DNA, 25 bp, Homo sapien
tctggagacctgaaccattggccaa

SEQ ID NO: 4323879 - DNA, 25 bp, Homo sapien
ccattggccaagtaattggttacaa

SEQ ID NO: 4323880 - DNA, 25 bp, Homo sapien
taacacatgctttggcttatggaga

SEQ ID NO: 4323881 - DNA, 25 bp, Homo sapien
tgagccttgcattcaataccttaaa

SEQ ID NO: 4323882 - DNA, 25 bp, Homo sapien
tttggcttatggagaggaccacctc

SEQ ID NO: 4323883 - DNA, 25 bp, Homo sapien
ccagttcctaacagtaacacatgct

SEQ ID NO: 4323884 - DNA, 25 bp, Homo sapien
taagcaagcatctaaaaagactgca

SEQ ID NO: 4323885 - DNA, 25 bp, Homo sapien
gctaagcaagcatctaaaaagactg

SEQ ID NO: 4323886 - DNA, 25 bp, Homo sapien
aagcaagcatctaaaaagactgcaa

SEQ ID NO: 4323887 - DNA, 25 bp, Homo sapien
ggctaagcaagcatctaaaaagact

SEQ ID NO: 4323888 - DNA, 25 bp, Homo sapien
ctaagcaagcatctaaaaagactgc

SEQ ID NO: 4323889 - DNA, 25 bp, Homo sapien
ttgcagtctttttagatgcttgctt

SEQ ID NO: 4323890 - DNA, 25 bp, Homo sapien
cagtctttttagatgcttgcttagc

SEQ ID NO: 4323891 - DNA, 25 bp, Homo sapien
gcagtctttttagatgcttgcttag

SEQ ID NO: 4323892 - DNA, 25 bp, Homo sapien
tgcagtctttttagatgcttgctta

SEQ ID NO: 4323893 - DNA, 25 bp, Homo sapien
agtctttttagatgcttgcttagcc

SEQ ID NO: 4323894 - DNA, 25 bp, Homo sapien
gttgtaccactaaggagtaaagtgc

SEQ ID NO: 4323895 - DNA, 25 bp, Homo sapien
tacttgtccagtacagtctaactct

SEQ ID NO: 4323896 - DNA, 25 bp, Homo sapien
tgagcattttacctattcggatgga

SEQ ID NO: 4323897 - DNA, 25 bp, Homo sapien
aataataagttgtaccactaaggag

SEQ ID NO: 4323898 - DNA, 25 bp, Homo sapien
gatggattttaggtttgggtcttca

SEQ ID NO: 4323899 - DNA, 25 bp, Homo sapien
tggtcattgtacttgtccagtacag

SEQ ID NO: 4323900 - DNA, 25 bp, Homo sapien
gcactttactccttagtggtacaac

SEQ ID NO: 4323901 - DNA, 25 bp, Homo sapien
agagttagactgtactggacaagta

SEQ ID NO: 4323902 - DNA, 25 bp, Homo sapien
ccttagtggtacaacttattattag

SEQ ID NO: 4323903 - DNA, 25 bp, Homo sapien
tgaagacccaaacctaaaatccatc

SEQ ID NO: 4323904 - DNA, 25 bp, Homo sapien
tccatccgaataggtaaaatgctca

SEQ ID NO: 4323905 - DNA, 25 bp, Homo sapien
tgtactggacaagtacaatgaccat

SEQ ID NO: 4323906 - DNA, 25 bp, Homo sapien
cagagggccattactggtgcatctc

SEQ ID NO: 4323907 - DNA, 25 bp, Homo sapien
aacctgaagttagaaaggctcaacg

SEQ ID NO: 4323908 - DNA, 25 bp, Homo sapien
gtcaaattccagagggccattactg

SEQ ID NO: 4323909 - DNA, 25 bp, Homo sapien
aggctcaacgagaacaagctatcag

SEQ ID NO: 4323910 - DNA, 25 bp, Homo sapien
agaacccgccgagcagtcaaattcc

SEQ ID NO: 4323911 - DNA, 25 bp, Homo sapien
tggtgcatctcttgctgatataatg

SEQ ID NO: 4323912 - DNA, 25 bp, Homo sapien
cattatatcagcaagagatgcacca

SEQ ID NO: 4323913 - DNA, 25 bp, Homo sapien
ctgatagcttgttctcgttgagcct

SEQ ID NO: 4323914 - DNA, 25 bp, Homo sapien
cagtaatggccctctggaatttgac

SEQ ID NO: 4323915 - DNA, 25 bp, Homo sapien
caagagatgcaccagtaatggccct

SEQ ID NO: 4323916 - DNA, 25 bp, Homo sapien
tcgttgagcctttctaacttcaggt

SEQ ID NO: 4323917 - DNA, 25 bp, Homo sapien
ggaatttgactgctcggcgggttct

SEQ ID NO: 4323918 - DNA, 25 bp, Homo sapien
gttagattccacaataccttctcag

SEQ ID NO: 4323919 - DNA, 25 bp, Homo sapien
ggaaggttcctaagtgtgcccctca

SEQ ID NO: 4323920 - DNA, 25 bp, Homo sapien
ggtggctctcctgtcaaataattgt

SEQ ID NO: 4323921 - DNA, 25 bp, Homo sapien
caaatcctacctaacatttggtggc

SEQ ID NO: 4323922 - DNA, 25 bp, Homo sapien
tactatgcagttcatggaataacca

SEQ ID NO: 4323923 - DNA, 25 bp, Homo sapien
tatttctcctagtgacagtcctttg

SEQ ID NO: 4323924 - DNA, 25 bp, Homo sapien
gagagccaccaaatgttaggtagga

SEQ ID NO: 4323925 - DNA, 25 bp, Homo sapien
ggttattccatgaactgcatagtag

SEQ ID NO: 4323926 - DNA, 25 bp, Homo sapien
caaaggactgtcactaggagaaata

SEQ ID NO: 4323927 - DNA, 25 bp, Homo sapien
gacaattatttgacaggagagccac

SEQ ID NO: 4323928 - DNA, 25 bp, Homo sapien
taagccctctattacaaatcctagc

SEQ ID NO: 4323929 - DNA, 25 bp, Homo sapien
gggcacacttaggaaccttccttca

SEQ ID NO: 4323930 - DNA, 25 bp, Homo sapien
aagttaaaatgaggctgggcatggt

SEQ ID NO: 4323931 - DNA, 25 bp, Homo sapien
ccaaaacgagtggatcaccaggtca

SEQ ID NO: 4323932 - DNA, 25 bp, Homo sapien
agttcaagaacagcctggcccacag

SEQ ID NO: 4323933 - DNA, 25 bp, Homo sapien
taaaatgggcctagtgcagtgcctc

SEQ ID NO: 4323934 - DNA, 25 bp, Homo sapien
gacagggtgaggctccatttaaaaa

SEQ ID NO: 4323935 - DNA, 25 bp, Homo sapien
tggcccacagagtgaaaccctgtct

SEQ ID NO: 4323936 - DNA, 25 bp, Homo sapien
tttaaatggagcctcaccctgtcac

SEQ ID NO: 4323937 - DNA, 25 bp, Homo sapien
ctgtgggccaggctgttcttgaact

SEQ ID NO: 4323938 - DNA, 25 bp, Homo sapien
accatgcccagcctcattttaactt

SEQ ID NO: 4323939 - DNA, 25 bp, Homo sapien
tgacctggtgatccactcgttttgg

SEQ ID NO: 4323940 - DNA, 25 bp, Homo sapien
gaggcactgcactaggcccatttta

SEQ ID NO: 4323941 - DNA, 25 bp, Homo sapien
gacagggtttcactctgtgggccag

SEQ ID NO: 4323942 - DNA, 25 bp, Homo sapien
taggctagtagcaataccgagttga

SEQ ID NO: 4323943 - DNA, 25 bp, Homo sapien
gactagtattcaggaggcttgggaa

SEQ ID NO: 4323944 - DNA, 25 bp, Homo sapien
catagccagtggaccatgaaccagt

SEQ ID NO: 4323945 - DNA, 25 bp, Homo sapien
aagcacctttgcgttatagggcagg

SEQ ID NO: 4323946 - DNA, 25 bp, Homo sapien
caggattagtcctaacatagccagt

SEQ ID NO: 4323947 - DNA, 25 bp, Homo sapien
aaaagtttgagtgccatggtaggac

SEQ ID NO: 4323948 - DNA, 25 bp, Homo sapien
taaaagtggatatgacacacctatt

SEQ ID NO: 4323949 - DNA, 25 bp, Homo sapien
gatatgacacacctattagggtgac

SEQ ID NO: 4323950 - DNA, 25 bp, Homo sapien
tggatatgacacacctattagggtg

SEQ ID NO: 4323951 - DNA, 25 bp, Homo sapien
agtggatatgacacacctattaggg

SEQ ID NO: 4323952 - DNA, 25 bp, Homo sapien
tatgacacacctattagggtgacta

SEQ ID NO: 4323953 - DNA, 25 bp, Homo sapien
aaatatgttgaaagttcagaggaag

SEQ ID NO: 4323954 - DNA, 25 bp, Homo sapien
tagtcaccctaataggtgtgtcata

SEQ ID NO: 4323955 - DNA, 25 bp, Homo sapien
aataggtgtgtcatatccactttta

SEQ ID NO: 4323956 - DNA, 25 bp, Homo sapien
ccctaataggtgtgtcatatccact

SEQ ID NO: 4323957 - DNA, 25 bp, Homo sapien
cttcctctgaactttcaacatattt

SEQ ID NO: 4323958 - DNA, 25 bp, Homo sapien
accctaataggtgtgtcatatccac

SEQ ID NO: 4323959 - DNA, 25 bp, Homo sapien
tcaccctaataggtgtgtcatatcc

SEQ ID NO: 4323960 - DNA, 25 bp, Homo sapien
gcagaaaaccaacgttcagagagct

SEQ ID NO: 4323961 - DNA, 25 bp, Homo sapien
gactggttcatggtccactggctat

SEQ ID NO: 4323962 - DNA, 25 bp, Homo sapien
cactggctatgttaggactaatcct

SEQ ID NO: 4323963 - DNA, 25 bp, Homo sapien
tgaatactagtcctaccatggcact

SEQ ID NO: 4323964 - DNA, 25 bp, Homo sapien
cctgccctataacgcaaaggtgctt

SEQ ID NO: 4323965 - DNA, 25 bp, Homo sapien
caactcggtattgctactagcctaa

SEQ ID NO: 4323966 - DNA, 25 bp, Homo sapien
aatgcgaaatgcgagtcggctttcc

SEQ ID NO: 4323967 - DNA, 25 bp, Homo sapien
tcttaatgcgaaatgcgagtcggct

SEQ ID NO: 4323968 - DNA, 25 bp, Homo sapien
cgaaatgcgagtcggctttcctttc

SEQ ID NO: 4323969 - DNA, 25 bp, Homo sapien
ttaatgcgaaatgcgagtcggcttt

SEQ ID NO: 4323970 - DNA, 25 bp, Homo sapien
cgagtcggctttcctttccaagagg

SEQ ID NO: 4323971 - DNA, 25 bp, Homo sapien
tgcgaaatgcgagtcggctttcctt

SEQ ID NO: 4323972 - DNA, 25 bp, Homo sapien
gaaaggaaagccgactcgcatttcg

SEQ ID NO: 4323973 - DNA, 25 bp, Homo sapien
aaggaaagccgactcgcatttcgca

SEQ ID NO: 4323974 - DNA, 25 bp, Homo sapien
cctcttggaaaggaaagccgactcg

SEQ ID NO: 4323975 - DNA, 25 bp, Homo sapien
aaagccgactcgcatttcgcattaa

SEQ ID NO: 4323976 - DNA, 25 bp, Homo sapien
agccgactcgcatttcgcattaaga

SEQ ID NO: 4323977 - DNA, 25 bp, Homo sapien
ggaaagccgactcgcatttcgcatt

SEQ ID NO: 4323978 - DNA, 25 bp, Homo sapien
gctgtgcagttttagcgggtacaag

SEQ ID NO: 4323979 - DNA, 25 bp, Homo sapien
atctaccccggacacgggaggcgct

SEQ ID NO: 4323980 - DNA, 25 bp, Homo sapien
tcgagctgtgcagttttagcgggta

SEQ ID NO: 4323981 - DNA, 25 bp, Homo sapien
tagcgggtacaagatctaccccgga

SEQ ID NO: 4323982 - DNA, 25 bp, Homo sapien
gagctgtgcagttttagcgggtaca

SEQ ID NO: 4323983 - DNA, 25 bp, Homo sapien
agctgtgcagttttagcgggtacaa

SEQ ID NO: 4323984 - DNA, 25 bp, Homo sapien
ttgtacccgctaaaactgcacagct

SEQ ID NO: 4323985 - DNA, 25 bp, Homo sapien
tgtacccgctaaaactgcacagctc

SEQ ID NO: 4323986 - DNA, 25 bp, Homo sapien
gtacccgctaaaactgcacagctcg

SEQ ID NO: 4323987 - DNA, 25 bp, Homo sapien
cttgtacccgctaaaactgcacagc

SEQ ID NO: 4323988 - DNA, 25 bp, Homo sapien
tccggggtagatcttgtacccgcta

SEQ ID NO: 4323989 - DNA, 25 bp, Homo sapien
tacccgctaaaactgcacagctcga

SEQ ID NO: 4323990 - DNA, 25 bp, Homo sapien
atcctcgggcagaactcctctctgt

SEQ ID NO: 4323991 - DNA, 25 bp, Homo sapien
tccgcttacatcctcgggcagaact

SEQ ID NO: 4323992 - DNA, 25 bp, Homo sapien
actcctctctgtcgtccctggcatg

SEQ ID NO: 4323993 - DNA, 25 bp, Homo sapien
tcgggcagaactcctctctgtcgtc

SEQ ID NO: 4323994 - DNA, 25 bp, Homo sapien
gtggttcccaatccgcttacatcct

SEQ ID NO: 4323995 - DNA, 25 bp, Homo sapien
caatccgcttacatcctcgggcaga

SEQ ID NO: 4323996 - DNA, 25 bp, Homo sapien
aggatgtaagcggattgggaaccac

SEQ ID NO: 4323997 - DNA, 25 bp, Homo sapien
gacgacagagaggagttctgcccga

SEQ ID NO: 4323998 - DNA, 25 bp, Homo sapien
acagagaggagttctgcccgaggat

SEQ ID NO: 4323999 - DNA, 25 bp, Homo sapien
agttctgcccgaggatgtaagcgga

SEQ ID NO: 4324000 - DNA, 25 bp, Homo sapien
tgccagggacgacagagaggagttc

SEQ ID NO: 4324001 - DNA, 25 bp, Homo sapien
tctgcccgaggatgtaagcggattg

SEQ ID NO: 4324002 - DNA, 25 bp, Homo sapien
tcttttgtctttccgtggagctgtc

SEQ ID NO: 4324003 - DNA, 25 bp, Homo sapien
cgccatcttttgtctttccgtggag

SEQ ID NO: 4324004 - DNA, 25 bp, Homo sapien
tttcgccatcttttgtctttccgtg

SEQ ID NO: 4324005 - DNA, 25 bp, Homo sapien
ttttgtctttccgtggagctgtcgc

SEQ ID NO: 4324006 - DNA, 25 bp, Homo sapien
catcttttgtctttccgtggagctg

SEQ ID NO: 4324007 - DNA, 25 bp, Homo sapien
tttgtctttccgtggagctgtcgcc

SEQ ID NO: 4324008 - DNA, 25 bp, Homo sapien
cacggaaagacaaaagatggcgaaa

SEQ ID NO: 4324009 - DNA, 25 bp, Homo sapien
ggcgacagctccacggaaagacaaa

SEQ ID NO: 4324010 - DNA, 25 bp, Homo sapien
tccacggaaagacaaaagatggcga

SEQ ID NO: 4324011 - DNA, 25 bp, Homo sapien
cagctccacggaaagacaaaagatg

SEQ ID NO: 4324012 - DNA, 25 bp, Homo sapien
gacagctccacggaaagacaaaaga

SEQ ID NO: 4324013 - DNA, 25 bp, Homo sapien
gcgacagctccacggaaagacaaaa

SEQ ID NO: 4324014 - DNA, 25 bp, Homo sapien
cagcgaccttataaggtctcttccc

SEQ ID NO: 4324015 - DNA, 25 bp, Homo sapien
taaggtctcttcccatgattctctc

SEQ ID NO: 4324016 - DNA, 25 bp, Homo sapien
catccccgcagcgaccttataaggt

SEQ ID NO: 4324017 - DNA, 25 bp, Homo sapien
tccccgcagcgaccttataaggtct

SEQ ID NO: 4324018 - DNA, 25 bp, Homo sapien
gcagcgaccttataaggtctcttcc

SEQ ID NO: 4324019 - DNA, 25 bp, Homo sapien
cccgcagcgaccttataaggtctct

SEQ ID NO: 4324020 - DNA, 25 bp, Homo sapien
ggaagagaccttataaggtcgctgc

SEQ ID NO: 4324021 - DNA, 25 bp, Homo sapien
aagagaccttataaggtcgctgcgg

SEQ ID NO: 4324022 - DNA, 25 bp, Homo sapien
agagaccttataaggtcgctgcggg

SEQ ID NO: 4324023 - DNA, 25 bp, Homo sapien
gagagaatcatgggaagagacctta

SEQ ID NO: 4324024 - DNA, 25 bp, Homo sapien
gggaagagaccttataaggtcgctg

SEQ ID NO: 4324025 - DNA, 25 bp, Homo sapien
gaagagaccttataaggtcgctgcg

SEQ ID NO: 4324026 - DNA, 25 bp, Homo sapien
taggcccaactaaacctcagtcagg

SEQ ID NO: 4324027 - DNA, 25 bp, Homo sapien
tacagatcaagtcttgtgaagggaa

SEQ ID NO: 4324028 - DNA, 25 bp, Homo sapien
taacgtcacctactgtcacaagctg

SEQ ID NO: 4324029 - DNA, 25 bp, Homo sapien
tgaactggactcaagcgagcagccc

SEQ ID NO: 4324030 - DNA, 25 bp, Homo sapien
gaaaaaatccggcagatggcgtatg

SEQ ID NO: 4324031 - DNA, 25 bp, Homo sapien
tgaccgttacacatttctcagacag

SEQ ID NO: 4324032 - DNA, 25 bp, Homo sapien
tcagacagaggttgccaacgcggga

SEQ ID NO: 4324033 - DNA, 25 bp, Homo sapien
tgtcagactttcatagctcaagctc

SEQ ID NO: 4324034 - DNA, 25 bp, Homo sapien
tcggtcagcacaagtaaataggatc

SEQ ID NO: 4324035 - DNA, 25 bp, Homo sapien
ggtactgcacattctctaacagcca

SEQ ID NO: 4324036 - DNA, 25 bp, Homo sapien
cacagatcttgtggattggtccttc

SEQ ID NO: 4324037 - DNA, 25 bp, Homo sapien
gcaacaagttagacaagcctttatc

SEQ ID NO: 4324038 - DNA, 25 bp, Homo sapien
aaaaaccccataatagactgatgga

SEQ ID NO: 4324039 - DNA, 25 bp, Homo sapien
aaaccccataatagactgatggatg

SEQ ID NO: 4324040 - DNA, 25 bp, Homo sapien
aaaaaaaccccataatagactgatg

SEQ ID NO: 4324041 - DNA, 25 bp, Homo sapien
gatggatagagggatacaaaaatta

SEQ ID NO: 4324042 - DNA, 25 bp, Homo sapien
tatgatttggtatggaatgattgct

SEQ ID NO: 4324043 - DNA, 25 bp, Homo sapien
gatttggtatggaatgattgcttat

SEQ ID NO: 4324044 - DNA, 25 bp, Homo sapien
aatatgatttggtatggaatgattg

SEQ ID NO: 4324045 - DNA, 25 bp, Homo sapien
tctcctgtgcccaagctgaaaatct

SEQ ID NO: 4324046 - DNA, 25 bp, Homo sapien
tgaacgtaccctcatggccaaggtg

SEQ ID NO: 4324047 - DNA, 25 bp, Homo sapien
tcctgatcataacaggacaggaggg

SEQ ID NO: 4324048 - DNA, 25 bp, Homo sapien
gacacaacaaccgaccagcattgat

SEQ ID NO: 4324049 - DNA, 25 bp, Homo sapien
tgactttattaggatgcatcatcaa

SEQ ID NO: 4324050 - DNA, 25 bp, Homo sapien
caagatcggtcattcctatagcgga

SEQ ID NO: 4324051 - DNA, 25 bp, Homo sapien
tcaaataagcgagtgggccagggtc

SEQ ID NO: 4324052 - DNA, 25 bp, Homo sapien
tcaaatttcgcaaacgcctggacaa

SEQ ID NO: 4324053 - DNA, 25 bp, Homo sapien
taagcagccaattgggccgtctggg

SEQ ID NO: 4324054 - DNA, 25 bp, Homo sapien
tgcccagccgagacttcattgttta

SEQ ID NO: 4324055 - DNA, 25 bp, Homo sapien
aggtgtgcaaccacaaggctcggct

SEQ ID NO: 4324056 - DNA, 25 bp, Homo sapien
ccagctcgaatcagagtatattttt

SEQ ID NO: 4324057 - DNA, 25 bp, Homo sapien
gtgcaaccacaaggctcggctaatt

SEQ ID NO: 4324058 - DNA, 25 bp, Homo sapien
ttttggactgtatttagatttctct

SEQ ID NO: 4324059 - DNA, 25 bp, Homo sapien
tgttttatgaaggcttactatttta

SEQ ID NO: 4324060 - DNA, 25 bp, Homo sapien
tgctgtagaaatagtaaatgattta

SEQ ID NO: 4324061 - DNA, 25 bp, Homo sapien
ctttaattttgctgtagaaatagta

SEQ ID NO: 4324062 - DNA, 25 bp, Homo sapien
tgtaggcctccgtgaaaacatctga

SEQ ID NO: 4324063 - DNA, 25 bp, Homo sapien
tggaccaacgcagtagtgacatcaa

SEQ ID NO: 4324064 - DNA, 25 bp, Homo sapien
ctgaatgaggaactgacttgggctc

SEQ ID NO: 4324065 - DNA, 25 bp, Homo sapien
gctcaggagtatgcatgtaggcctc

SEQ ID NO: 4324066 - DNA, 25 bp, Homo sapien
gccctactagagtcaactgcggttg

SEQ ID NO: 4324067 - DNA, 25 bp, Homo sapien
tggatgctcccaggaaactcagacg

SEQ ID NO: 4324068 - DNA, 25 bp, Homo sapien
cggttgtgggcactttcgctgacaa

SEQ ID NO: 4324069 - DNA, 25 bp, Homo sapien
tcagacgtccgaagttcacgaggag

SEQ ID NO: 4324070 - DNA, 25 bp, Homo sapien
tgccagcgcgctcctagactgcgaa

SEQ ID NO: 4324071 - DNA, 25 bp, Homo sapien
ggtctgtgtgcggacgtcgggaggg

SEQ ID NO: 4324072 - DNA, 25 bp, Homo sapien
ggcgggtcccggaggtgagtgctgg

SEQ ID NO: 4324073 - DNA, 25 bp, Homo sapien
gcggagcgacccattgcccggctct

SEQ ID NO: 4324074 - DNA, 25 bp, Homo sapien
ggttaaaaagtaccatgctggccaa

SEQ ID NO: 4324075 - DNA, 25 bp, Homo sapien
tttgttaaggatatctgggcaccct

SEQ ID NO: 4324076 - DNA, 25 bp, Homo sapien
tttaaacattccttggtagagagaa

SEQ ID NO: 4324077 - DNA, 25 bp, Homo sapien
ttatgtccactcattaccgtatggg

SEQ ID NO: 4324078 - DNA, 25 bp, Homo sapien
aggagatgctgtgtgttttgcttac

SEQ ID NO: 4324079 - DNA, 25 bp, Homo sapien
gacagtacctggcttaagaagctta

SEQ ID NO: 4324080 - DNA, 25 bp, Homo sapien
gattatgctgtaatgtggccaggcc

SEQ ID NO: 4324081 - DNA, 25 bp, Homo sapien
ttttgcttactgtagtagccctgga

SEQ ID NO: 4324082 - DNA, 25 bp, Homo sapien
gaagaagctgctattcctactggct

SEQ ID NO: 4324083 - DNA, 25 bp, Homo sapien
ggcataaaaggcacacccattctct

SEQ ID NO: 4324084 - DNA, 25 bp, Homo sapien
cctactggctatctaagaagaatgg

SEQ ID NO: 4324085 - DNA, 25 bp, Homo sapien
taagttgctcctaagtagacagatg

SEQ ID NO: 4324086 - DNA, 25 bp, Homo sapien
tctgtaatcccagcagggattatag

SEQ ID NO: 4324087 - DNA, 25 bp, Homo sapien
ctgtaatcccagcagggattatagt

SEQ ID NO: 4324088 - DNA, 25 bp, Homo sapien
ttggtgacacagcttcttgagtcac

SEQ ID NO: 4324089 - DNA, 25 bp, Homo sapien
ggcattgctcctccagtggtttgga

SEQ ID NO: 4324090 - DNA, 25 bp, Homo sapien
tttcttgtcgtgaaagaacttgaca

SEQ ID NO: 4324091 - DNA, 25 bp, Homo sapien
aaagaaagcgggcattgctcctcca

SEQ ID NO: 4324092 - DNA, 25 bp, Homo sapien
taacatcatcctgctgaggccaaag

SEQ ID NO: 4324093 - DNA, 25 bp, Homo sapien
ctgagaggagttagcacatgacatc

SEQ ID NO: 4324094 - DNA, 25 bp, Homo sapien
cagatgacggaaacatttggcagca

SEQ ID NO: 4324095 - DNA, 25 bp, Homo sapien
cctcagaatacggtgtatggtccac

SEQ ID NO: 4324096 - DNA, 25 bp, Homo sapien
gctgccactgtgatcgtgtttttat

SEQ ID NO: 4324097 - DNA, 25 bp, Homo sapien
atctgctgtccattgtttgcaggca

SEQ ID NO: 4324098 - DNA, 25 bp, Homo sapien
ccagacttgactctgtggtcctcct

SEQ ID NO: 4324099 - DNA, 25 bp, Homo sapien
caagttgggccgatggtccaaagag

SEQ ID NO: 4324100 - DNA, 25 bp, Homo sapien
tgagttgactgataggacattgcct

SEQ ID NO: 4324101 - DNA, 25 bp, Homo sapien
cccctggtgtggaggaattcttaga

SEQ ID NO: 4324102 - DNA, 25 bp, Homo sapien
cattccattggtatgccgatggcag

SEQ ID NO: 4324103 - DNA, 25 bp, Homo sapien
taaaggcctgtcttggatagtggaa

SEQ ID NO: 4324104 - DNA, 25 bp, Homo sapien
tgtagatagaaaccgccactcagtg

SEQ ID NO: 4324105 - DNA, 25 bp, Homo sapien
gccacacttgttggactagtgagca

SEQ ID NO: 4324106 - DNA, 25 bp, Homo sapien
cactcagtgatagctagtatgtcaa

SEQ ID NO: 4324107 - DNA, 25 bp, Homo sapien
caccacacagttagggaaatcactt

SEQ ID NO: 4324108 - DNA, 25 bp, Homo sapien
ttgatcttaatctgtcctgatgtct

SEQ ID NO: 4324109 - DNA, 25 bp, Homo sapien
gtagattgatcttaatctgtcctga

SEQ ID NO: 4324110 - DNA, 25 bp, Homo sapien
aaactgtgagttggtttgtagattg

SEQ ID NO: 4324111 - DNA, 25 bp, Homo sapien
cagaaacagttagatcatgattagg

SEQ ID NO: 4324112 - DNA, 25 bp, Homo sapien
catttggttcccgatggccctgtgg

SEQ ID NO: 4324113 - DNA, 25 bp, Homo sapien
tactcggaacttggagaacgaacag

SEQ ID NO: 4324114 - DNA, 25 bp, Homo sapien
gggagcagacccaagtactcggaac

SEQ ID NO: 4324115 - DNA, 25 bp, Homo sapien
gccagcttgcagtatcggttgacac

SEQ ID NO: 4324116 - DNA, 25 bp, Homo sapien
catactgtggtcgtgtgtttccttc

SEQ ID NO: 4324117 - DNA, 25 bp, Homo sapien
aatgaatcactctgaatgagccggg

SEQ ID NO: 4324118 - DNA, 25 bp, Homo sapien
taatacttggatatcatgacagctg

SEQ ID NO: 4324119 - DNA, 25 bp, Homo sapien
tctagcagctatcagttgtatcccc

SEQ ID NO: 4324120 - DNA, 25 bp, Homo sapien
tcattggactagatgaaaggtgtcc

SEQ ID NO: 4324121 - DNA, 25 bp, Homo sapien
ccaggtatctgggatctagacatct

SEQ ID NO: 4324122 - DNA, 25 bp, Homo sapien
tgaggcttcatttggccttagtccc

SEQ ID NO: 4324123 - DNA, 25 bp, Homo sapien
tagtccctgggagttactggcgttg

SEQ ID NO: 4324124 - DNA, 25 bp, Homo sapien
ttcctttactggctgaaagatatat

SEQ ID NO: 4324125 - DNA, 25 bp, Homo sapien
cagatggggagttacggagttgttc

SEQ ID NO: 4324126 - DNA, 25 bp, Homo sapien
gttgttcctttactggctgaaagat

SEQ ID NO: 4324127 - DNA, 25 bp, Homo sapien
agcagatggggagttacggagttgt

SEQ ID NO: 4324128 - DNA, 25 bp, Homo sapien
aaagataccctttggattgatcaca

SEQ ID NO: 4324129 - DNA, 25 bp, Homo sapien
tgacccagtatgtcttgtagacacg

SEQ ID NO: 4324130 - DNA, 25 bp, Homo sapien
aacattattttgcttgccgctggca

SEQ ID NO: 4324131 - DNA, 25 bp, Homo sapien
tagtgaacttatctttgcagctgag

SEQ ID NO: 4324132 - DNA, 25 bp, Homo sapien
tttcttatctcctggcaacatgaga

SEQ ID NO: 4324133 - DNA, 25 bp, Homo sapien
ctttgctgagaagaacctagtggat

SEQ ID NO: 4324134 - DNA, 25 bp, Homo sapien
ccctttgttataaggtgacttagca

SEQ ID NO: 4324135 - DNA, 25 bp, Homo sapien
tcctgagcttcggattaaggcctga

SEQ ID NO: 4324136 - DNA, 25 bp, Homo sapien
atgcattcgcctgcctcctgcagac

SEQ ID NO: 4324137 - DNA, 25 bp, Homo sapien
tccccagctatccaggtttgtcctt

SEQ ID NO: 4324138 - DNA, 25 bp, Homo sapien
gggtctccctcgatgctttcctgtc

SEQ ID NO: 4324139 - DNA, 25 bp, Homo sapien
attccccagctatccaggtttgtcc

SEQ ID NO: 4324140 - DNA, 25 bp, Homo sapien
attcaccttagtgcctgctttccct

SEQ ID NO: 4324141 - DNA, 25 bp, Homo sapien
tcttcccaaagtatgtcccccatac

SEQ ID NO: 4324142 - DNA, 25 bp, Homo sapien
ttttctctgtatccatgtatcccac

SEQ ID NO: 4324143 - DNA, 25 bp, Homo sapien
ttcttcccaaagtatgtcccccata

SEQ ID NO: 4324144 - DNA, 25 bp, Homo sapien
cttcccgcccctgttttctctgtat

SEQ ID NO: 4324145 - DNA, 25 bp, Homo sapien
cagtatgtgcttcctcagtagacct

SEQ ID NO: 4324146 - DNA, 25 bp, Homo sapien
tggcctggtccagtctcttggagca

SEQ ID NO: 4324147 - DNA, 25 bp, Homo sapien
gactcatgcataggaggagattcca

SEQ ID NO: 4324148 - DNA, 25 bp, Homo sapien
tctgtatgctttgtggcctggtcca

SEQ ID NO: 4324149 - DNA, 25 bp, Homo sapien
acacatttcctgttcactcagagat

SEQ ID NO: 4324150 - DNA, 25 bp, Homo sapien
cgagtttattctgggtggcttccac

SEQ ID NO: 4324151 - DNA, 25 bp, Homo sapien
cagagatacagcagcgagtttattc

SEQ ID NO: 4324152 - DNA, 25 bp, Homo sapien
tcctgttcactcagagatacagcag

SEQ ID NO: 4324153 - DNA, 25 bp, Homo sapien
gggcagcattcactgcagtcacgtg

SEQ ID NO: 4324154 - DNA, 25 bp, Homo sapien
gaacagcctatgattgccttctgct

SEQ ID NO: 4324155 - DNA, 25 bp, Homo sapien
aacagcctatgattgccttctgctg

SEQ ID NO: 4324156 - DNA, 25 bp, Homo sapien
agaacagcctatgattgccttctgc

SEQ ID NO: 4324157 - DNA, 25 bp, Homo sapien
acagcctatgattgccttctgctga

SEQ ID NO: 4324158 - DNA, 25 bp, Homo sapien
cactggtttcaagtttgctcatcaa

SEQ ID NO: 4324159 - DNA, 25 bp, Homo sapien
tgctccataactgtcacatctgtcg

SEQ ID NO: 4324160 - DNA, 25 bp, Homo sapien
catctgtcgccgatttcagattttt

SEQ ID NO: 4324161 - DNA, 25 bp, Homo sapien
tgtgggaaaacttaggaactgctcc

SEQ ID NO: 4324162 - DNA, 25 bp, Homo sapien
tctgactgcttctactctgttaata

SEQ ID NO: 4324163 - DNA, 25 bp, Homo sapien
tcccaaccaagcgtctacctttgat

SEQ ID NO: 4324164 - DNA, 25 bp, Homo sapien
gtctacctttgataagtcctcattg

SEQ ID NO: 4324165 - DNA, 25 bp, Homo sapien
taaatataggctcagcagcagtttt

SEQ ID NO: 4324166 - DNA, 25 bp, Homo sapien
taatataaatataggctcagcagca

SEQ ID NO: 4324167 - DNA, 25 bp, Homo sapien
gtccagtgttgtagagctgtctcat

SEQ ID NO: 4324168 - DNA, 25 bp, Homo sapien
ctgtctagcgccagtagggcatctt

SEQ ID NO: 4324169 - DNA, 25 bp, Homo sapien
ggcatctttgaagagagtcccaagt

SEQ ID NO: 4324170 - DNA, 25 bp, Homo sapien
caagtccagtgttgtagagctgtct

SEQ ID NO: 4324171 - DNA, 25 bp, Homo sapien
taggaagacctagacaagactcctg

SEQ ID NO: 4324172 - DNA, 25 bp, Homo sapien
tgccaattgcttaacattgattaag

SEQ ID NO: 4324173 - DNA, 25 bp, Homo sapien
gatctagttgtcagacaccagtgaa

SEQ ID NO: 4324174 - DNA, 25 bp, Homo sapien
gggcttgagcaatttctgccaattg

SEQ ID NO: 4324175 - DNA, 25 bp, Homo sapien
tctcttttccaacgctggagaactt

SEQ ID NO: 4324176 - DNA, 25 bp, Homo sapien
ctttgtgttgaatctccctcaccat

SEQ ID NO: 4324177 - DNA, 25 bp, Homo sapien
ctgcgtcctttgtgttgaatctccc

SEQ ID NO: 4324178 - DNA, 25 bp, Homo sapien
tcttttgcaccttgtggtgcttctc

SEQ ID NO: 4324179 - DNA, 25 bp, Homo sapien
caattttcacctgcgttcaaacact

SEQ ID NO: 4324180 - DNA, 25 bp, Homo sapien
cttctctgtagataatgcttgcctc

SEQ ID NO: 4324181 - DNA, 25 bp, Homo sapien
ttactgtcacctttaaaacctcaca

SEQ ID NO: 4324182 - DNA, 25 bp, Homo sapien
ttcagaaatcattgtgtccaagcct

SEQ ID NO: 4324183 - DNA, 25 bp, Homo sapien
caaacattatttctactatgaaacc

SEQ ID NO: 4324184 - DNA, 25 bp, Homo sapien
ttcctactgctagatagagactctc

SEQ ID NO: 4324185 - DNA, 25 bp, Homo sapien
ctgctagatagagactctccaaaca

SEQ ID NO: 4324186 - DNA, 25 bp, Homo sapien
tccaaacattatttctactatgaaa

SEQ ID NO: 4324187 - DNA, 25 bp, Homo sapien
ctaaaggggagaccatggatcctga

SEQ ID NO: 4324188 - DNA, 25 bp, Homo sapien
taaaggggagaccatggatcctgag

SEQ ID NO: 4324189 - DNA, 25 bp, Homo sapien
ctacagagaggtaggctcgataaga

SEQ ID NO: 4324190 - DNA, 25 bp, Homo sapien
aagaaggagatggagcgtgttataa

SEQ ID NO: 4324191 - DNA, 25 bp, Homo sapien
gcgtgttataaaggcgtctgtcacc

SEQ ID NO: 4324192 - DNA, 25 bp, Homo sapien
tacagagaggtaggctcgataagaa

SEQ ID NO: 4324193 - DNA, 25 bp, Homo sapien
cagtgttatactcccacaggtgttg

SEQ ID NO: 4324194 - DNA, 25 bp, Homo sapien
ccattctgtccttgaggtggagctt

SEQ ID NO: 4324195 - DNA, 25 bp, Homo sapien
ttaaaagcccctcgatgaatacagt

SEQ ID NO: 4324196 - DNA, 25 bp, Homo sapien
cacatctgcggtctactgtcactca

SEQ ID NO: 4324197 - DNA, 25 bp, Homo sapien
tcttcctgagggcttgtgtgactta

SEQ ID NO: 4324198 - DNA, 25 bp, Homo sapien
tactaagtgctaaagtaggaggaag

SEQ ID NO: 4324199 - DNA, 25 bp, Homo sapien
tgagctagacacaagcagaacttgc

SEQ ID NO: 4324200 - DNA, 25 bp, Homo sapien
aacagtccttctctgtactaagtgc

SEQ ID NO: 4324201 - DNA, 25 bp, Homo sapien
gggcataagtcagctccctgagcta

SEQ ID NO: 4324202 - DNA, 25 bp, Homo sapien
tgctgtcatggtacatcacagaggc

SEQ ID NO: 4324203 - DNA, 25 bp, Homo sapien
cctttttcattgctgtcatggtaca

SEQ ID NO: 4324204 - DNA, 25 bp, Homo sapien
agtctggtttctttggctaacctct

SEQ ID NO: 4324205 - DNA, 25 bp, Homo sapien
gtctggtttctttggctaacctctg

SEQ ID NO: 4324206 - DNA, 25 bp, Homo sapien
tcacattacttctaggttcctggcc

SEQ ID NO: 4324207 - DNA, 25 bp, Homo sapien
gattctttacgggatcatggtagct

SEQ ID NO: 4324208 - DNA, 25 bp, Homo sapien
ggccatctagccaaaccataggtca

SEQ ID NO: 4324209 - DNA, 25 bp, Homo sapien
tctttgagtaccgaacatgcatcag

SEQ ID NO: 4324210 - DNA, 25 bp, Homo sapien
ttgaggccagatgtttgagtccagt

SEQ ID NO: 4324211 - DNA, 25 bp, Homo sapien
ttacaggaattaaagaagtatgtct

SEQ ID NO: 4324212 - DNA, 25 bp, Homo sapien
ctgagtgcggtgattcatgtctgta

SEQ ID NO: 4324213 - DNA, 25 bp, Homo sapien
caggtatcaaagcataaaataatgt

SEQ ID NO: 4324214 - DNA, 25 bp, Homo sapien
ctgaagtcacttctctcaagagcaa

SEQ ID NO: 4324215 - DNA, 25 bp, Homo sapien
cactgcgggaaatgcctcagctgaa

SEQ ID NO: 4324216 - DNA, 25 bp, Homo sapien
tcagctttcagtccacactgcggga

SEQ ID NO: 4324217 - DNA, 25 bp, Homo sapien
caagttctgggagtactgccagcaa

SEQ ID NO: 4324218 - DNA, 25 bp, Homo sapien
aactacatttcgaatcacaaaaccg

SEQ ID NO: 4324219 - DNA, 25 bp, Homo sapien
taaatgtaatttccgggtattgaca

SEQ ID NO: 4324220 - DNA, 25 bp, Homo sapien
tcaactacatttcgaatcacaaaac

SEQ ID NO: 4324221 - DNA, 25 bp, Homo sapien
tttcaactacatttcgaatcacaaa

SEQ ID NO: 4324222 - DNA, 25 bp, Homo sapien
ttgctgacatacaccagctcgaatc

SEQ ID NO: 4324223 - DNA, 25 bp, Homo sapien
gagctctacccattgctgacataca

SEQ ID NO: 4324224 - DNA, 25 bp, Homo sapien
ccagctcgaatcaggactctgtaag

SEQ ID NO: 4324225 - DNA, 25 bp, Homo sapien
accagctcgaatcaggactctgtaa

SEQ ID NO: 4324226 - DNA, 25 bp, Homo sapien
cagagtgtagccttgtgcctgggtc

SEQ ID NO: 4324227 - DNA, 25 bp, Homo sapien
gaagaagtcggcaccatttcaagtc

SEQ ID NO: 4324228 - DNA, 25 bp, Homo sapien
tcattgagtaggcaggtctgatacc

SEQ ID NO: 4324229 - DNA, 25 bp, Homo sapien
tgaggcccatgaactagcttgctgc

SEQ ID NO: 4324230 - DNA, 25 bp, Homo sapien
gccttttcgcctcctccttacatct

SEQ ID NO: 4324231 - DNA, 25 bp, Homo sapien
ttttcgcctcctccttacatctttg

SEQ ID NO: 4324232 - DNA, 25 bp, Homo sapien
ccttttcgcctcctccttacatctt

SEQ ID NO: 4324233 - DNA, 25 bp, Homo sapien
tttcgcctcctccttacatctttgt

SEQ ID NO: 4324234 - DNA, 25 bp, Homo sapien
atgagattgaattcctgatttggct

SEQ ID NO: 4324235 - DNA, 25 bp, Homo sapien
taggaatgttagtaatttttataca

SEQ ID NO: 4324236 - DNA, 25 bp, Homo sapien
agagatcttttacctccccagttag

SEQ ID NO: 4324237 - DNA, 25 bp, Homo sapien
ttacctccccagttagctgtattcc

SEQ ID NO: 4324238 - DNA, 25 bp, Homo sapien
ccagattctagtctgaaggcgtgct

SEQ ID NO: 4324239 - DNA, 25 bp, Homo sapien
gctgcccagattctagtctgaaggc

SEQ ID NO: 4324240 - DNA, 25 bp, Homo sapien
cagctgcccagattctagtctgaag

SEQ ID NO: 4324241 - DNA, 25 bp, Homo sapien
tgcccagattctagtctgaaggcgt

SEQ ID NO: 4324242 - DNA, 25 bp, Homo sapien
atgatcgagggagtgacagccattc

SEQ ID NO: 4324243 - DNA, 25 bp, Homo sapien
tatgacaaggtgctctaacagcatg

SEQ ID NO: 4324244 - DNA, 25 bp, Homo sapien
aacagcatgatcaaatagtaatggg

SEQ ID NO: 4324245 - DNA, 25 bp, Homo sapien
atcgagggagtgacagccattcttc

SEQ ID NO: 4324246 - DNA, 25 bp, Homo sapien
cccagagggccactgatagtactac

SEQ ID NO: 4324247 - DNA, 25 bp, Homo sapien
cacggttctgtttaacttggccttg

SEQ ID NO: 4324248 - DNA, 25 bp, Homo sapien
caggctgtctactgtgatgaatgcc

SEQ ID NO: 4324249 - DNA, 25 bp, Homo sapien
ggaaatcctgagcactccagatcca

SEQ ID NO: 4324250 - DNA, 25 bp, Homo sapien
tctgcattatggaagaagagaagac

SEQ ID NO: 4324251 - DNA, 25 bp, Homo sapien
ttctgcattatggaagaagagaaga

SEQ ID NO: 4324252 - DNA, 25 bp, Homo sapien
ctcaaattctgcattatggaagaag

SEQ ID NO: 4324253 - DNA, 25 bp, Homo sapien
tcaaattctgcattatggaagaaga

SEQ ID NO: 4324254 - DNA, 25 bp, Homo sapien
aacatggtcccgatagtctaattgc

SEQ ID NO: 4324255 - DNA, 25 bp, Homo sapien
tggattgaaagaagatggacgatga

SEQ ID NO: 4324256 - DNA, 25 bp, Homo sapien
cccgatagtctaattgcagtttctt

SEQ ID NO: 4324257 - DNA, 25 bp, Homo sapien
gaagatggacgatgataacatggtc

SEQ ID NO: 4324258 - DNA, 25 bp, Homo sapien
gctgacaagagatgaaagcctcata

SEQ ID NO: 4324259 - DNA, 25 bp, Homo sapien
ttttcctgctgacaagagatgaaag

SEQ ID NO: 4324260 - DNA, 25 bp, Homo sapien
gtttgcctttatgttgtgatgtacc

SEQ ID NO: 4324261 - DNA, 25 bp, Homo sapien
ggaattagattagcatcttgatctg

SEQ ID NO: 4324262 - DNA, 25 bp, Homo sapien
cttggtgcctgatgttcggtgatga

SEQ ID NO: 4324263 - DNA, 25 bp, Homo sapien
gtcttaggttgctcttgctcacaca

SEQ ID NO: 4324264 - DNA, 25 bp, Homo sapien
tcttatcaagcccaagaagagccat

SEQ ID NO: 4324265 - DNA, 25 bp, Homo sapien
aattgttaagcctaatgatggttgc

SEQ ID NO: 4324266 - DNA, 25 bp, Homo sapien
gtcctcactcatctgtagactggag

SEQ ID NO: 4324267 - DNA, 25 bp, Homo sapien
gacagttattatgatcaacagggct

SEQ ID NO: 4324268 - DNA, 25 bp, Homo sapien
tcatctgtagactggaggtctctcc

SEQ ID NO: 4324269 - DNA, 25 bp, Homo sapien
actgcctggccgtcctcattcccat

SEQ ID NO: 4324270 - DNA, 25 bp, Homo sapien
ctggggtgagtcattatctctggtc

SEQ ID NO: 4324271 - DNA, 25 bp, Homo sapien
atcaaggagttcaagaaggtttttg

SEQ ID NO: 4324272 - DNA, 25 bp, Homo sapien
tgtatcaaggagttcaagaaggttt

SEQ ID NO: 4324273 - DNA, 25 bp, Homo sapien
ctttgtatcaaggagttcaagaagg

SEQ ID NO: 4324274 - DNA, 25 bp, Homo sapien
ctactttgtatcaaggagttcaaga

SEQ ID NO: 4324275 - DNA, 25 bp, Homo sapien
tgtgcccttctgtgaatgctttagg

SEQ ID NO: 4324276 - DNA, 25 bp, Homo sapien
ccttctgtgaatgctttaggttaca

SEQ ID NO: 4324277 - DNA, 25 bp, Homo sapien
gcccttctgtgaatgctttaggtta

SEQ ID NO: 4324278 - DNA, 25 bp, Homo sapien
tgtgtgcccttctgtgaatgcttta

SEQ ID NO: 4324279 - DNA, 25 bp, Homo sapien
gcctctctgctagtgcggagaattt

SEQ ID NO: 4324280 - DNA, 25 bp, Homo sapien
aaatcttgcacaatgggatgctgcc

SEQ ID NO: 4324281 - DNA, 25 bp, Homo sapien
cctgtttctcttggtccctccagaa

SEQ ID NO: 4324282 - DNA, 25 bp, Homo sapien
tcccagtccatgttgcagaggtgcc

SEQ ID NO: 4324283 - DNA, 25 bp, Homo sapien
gcttcgcatttgttagagctcctca

SEQ ID NO: 4324284 - DNA, 25 bp, Homo sapien
taagccccaggttgagtgcttcgca

SEQ ID NO: 4324285 - DNA, 25 bp, Homo sapien
ccaggaaagctgttctctgagtaga

SEQ ID NO: 4324286 - DNA, 25 bp, Homo sapien
tttgttctcatgttaccagcaagag

SEQ ID NO: 4324287 - DNA, 25 bp, Homo sapien
tgccttccaagagattgtctgttgg

SEQ ID NO: 4324288 - DNA, 25 bp, Homo sapien
ctcagaggctttctgtagagggtac

SEQ ID NO: 4324289 - DNA, 25 bp, Homo sapien
tagagggtacagcaacctagctaat

SEQ ID NO: 4324290 - DNA, 25 bp, Homo sapien
tgtatacagctaagccagattcagt

SEQ ID NO: 4324291 - DNA, 25 bp, Homo sapien
taaaactaaatcgagctatccagga

SEQ ID NO: 4324292 - DNA, 25 bp, Homo sapien
gagcttagatgtagtggaatggcac

SEQ ID NO: 4324293 - DNA, 25 bp, Homo sapien
taacaacaatttcatccatacacag

SEQ ID NO: 4324294 - DNA, 25 bp, Homo sapien
cagaccaccatgtatacaccataca

SEQ ID NO: 4324295 - DNA, 25 bp, Homo sapien
atttcctaacaaggatgtttcatat

SEQ ID NO: 4324296 - DNA, 25 bp, Homo sapien
tcatatagcctttgtaaattagtgc

SEQ ID NO: 4324297 - DNA, 25 bp, Homo sapien
agtgctcttgatcatcctgtggtac

SEQ ID NO: 4324298 - DNA, 25 bp, Homo sapien
cctaacaaggatgtttcatatagcc

SEQ ID NO: 4324299 - DNA, 25 bp, Homo sapien
tcttgtgggaaagcttctatgcgtg

SEQ ID NO: 4324300 - DNA, 25 bp, Homo sapien
cttcttgtgggaaagcttctatgcg

SEQ ID NO: 4324301 - DNA, 25 bp, Homo sapien
ttcttgtgggaaagcttctatgcgt

SEQ ID NO: 4324302 - DNA, 25 bp, Homo sapien
ggcttcttgtgggaaagcttctatg

SEQ ID NO: 4324303 - DNA, 25 bp, Homo sapien
gaccagtcaagtctgtggagtgcct

SEQ ID NO: 4324304 - DNA, 25 bp, Homo sapien
tcaagtctcacagggattgctgaca

SEQ ID NO: 4324305 - DNA, 25 bp, Homo sapien
gtccctagtgctcgctcaagtctca

SEQ ID NO: 4324306 - DNA, 25 bp, Homo sapien
tgctgacattgccattgctgacacc

SEQ ID NO: 4324307 - DNA, 25 bp, Homo sapien
ttctttggtaatgccccattctagg

SEQ ID NO: 4324308 - DNA, 25 bp, Homo sapien
tctttggtaatgccccattctaggc

SEQ ID NO: 4324309 - DNA, 25 bp, Homo sapien
tctttctttggtaatgccccattct

SEQ ID NO: 4324310 - DNA, 25 bp, Homo sapien
tttctttggtaatgccccattctag

SEQ ID NO: 4324311 - DNA, 25 bp, Homo sapien
tcagttcagtgaattcgggactcag

SEQ ID NO: 4324312 - DNA, 25 bp, Homo sapien
cactgctagcaaataaagggaatct

SEQ ID NO: 4324313 - DNA, 25 bp, Homo sapien
tgaagaacatatgaccagctgatgc

SEQ ID NO: 4324314 - DNA, 25 bp, Homo sapien
ttggtccaatgccaacgctccgtca

SEQ ID NO: 4324315 - DNA, 25 bp, Homo sapien
ttttgtagtaccatggcagcatgtt

SEQ ID NO: 4324316 - DNA, 25 bp, Homo sapien
ttgtagtaccatggcagcatgtttc

SEQ ID NO: 4324317 - DNA, 25 bp, Homo sapien
gtagtaccatggcagcatgtttcat

SEQ ID NO: 4324318 - DNA, 25 bp, Homo sapien
attttgtagtaccatggcagcatgt

SEQ ID NO: 4324319 - DNA, 25 bp, Homo sapien
tgccactgaatgttgcttggagaag

SEQ ID NO: 4324320 - DNA, 25 bp, Homo sapien
tgatgggagactcttcaatcaacaa

SEQ ID NO: 4324321 - DNA, 25 bp, Homo sapien
tagacttagtaaagccccatctttg

SEQ ID NO: 4324322 - DNA, 25 bp, Homo sapien
gacagactgtgagcaatggtcctgt

SEQ ID NO: 4324323 - DNA, 25 bp, Homo sapien
tagtctaggccgctgccttcactaa

SEQ ID NO: 4324324 - DNA, 25 bp, Homo sapien
tgttctcatagtctaggccgctgcc

SEQ ID NO: 4324325 - DNA, 25 bp, Homo sapien
tgtgctttgttctcatagtctaggc

SEQ ID NO: 4324326 - DNA, 25 bp, Homo sapien
ctaggccgctgccttcactaatcat

SEQ ID NO: 4324327 - DNA, 25 bp, Homo sapien
tttactgagtataatacttccttga

SEQ ID NO: 4324328 - DNA, 25 bp, Homo sapien
ctgagtataatacttccttgaggta

SEQ ID NO: 4324329 - DNA, 25 bp, Homo sapien
tactgagtataatacttccttgagg

SEQ ID NO: 4324330 - DNA, 25 bp, Homo sapien
gagtataatacttccttgaggtatt

SEQ ID NO: 4324331 - DNA, 25 bp, Homo sapien
ccaggcttctctatggggataagcc

SEQ ID NO: 4324332 - DNA, 25 bp, Homo sapien
tctccatgctcagaagggctagcac

SEQ ID NO: 4324333 - DNA, 25 bp, Homo sapien
tcctgctacgcacattggaaagtct

SEQ ID NO: 4324334 - DNA, 25 bp, Homo sapien
ggaaagtctgagctgtgtttttccc

SEQ ID NO: 4324335 - DNA, 25 bp, Homo sapien
caacattgttcttgcgagtgttgtc

SEQ ID NO: 4324336 - DNA, 25 bp, Homo sapien
ttcctcttgtttgctacttctgcga

SEQ ID NO: 4324337 - DNA, 25 bp, Homo sapien
tttgctacttctgcgaacccaatca

SEQ ID NO: 4324338 - DNA, 25 bp, Homo sapien
gttgtcttggaatgccaatttcctc

SEQ ID NO: 4324339 - DNA, 25 bp, Homo sapien
tacggtttaaagacgtgaatcttgc

SEQ ID NO: 4324340 - DNA, 25 bp, Homo sapien
aagacgtgaatcttgcatctaacat

SEQ ID NO: 4324341 - DNA, 25 bp, Homo sapien
ggtttaaagacgtgaatcttgcatc

SEQ ID NO: 4324342 - DNA, 25 bp, Homo sapien
taaagacgtgaatcttgcatctaac

SEQ ID NO: 4324343 - DNA, 25 bp, Homo sapien
agattccttgactatttatcccttt

SEQ ID NO: 4324344 - DNA, 25 bp, Homo sapien
gattccttgactatttatcccttta

SEQ ID NO: 4324345 - DNA, 25 bp, Homo sapien
tccttgactatttatccctttacta

SEQ ID NO: 4324346 - DNA, 25 bp, Homo sapien
cagattccttgactatttatccctt

SEQ ID NO: 4324347 - DNA, 25 bp, Homo sapien
cagttattcctgtattatggctctt

SEQ ID NO: 4324348 - DNA, 25 bp, Homo sapien
ttcctgtattatggctcttgtttac

SEQ ID NO: 4324349 - DNA, 25 bp, Homo sapien
gttattcctgtattatggctcttgt

SEQ ID NO: 4324350 - DNA, 25 bp, Homo sapien
ttagcagttattcctgtattatggc

SEQ ID NO: 4324351 - DNA, 25 bp, Homo sapien
aatgaaagacttgcctggaacctcc

SEQ ID NO: 4324352 - DNA, 25 bp, Homo sapien
tgcacatgtgcaactcatcccttaa

SEQ ID NO: 4324353 - DNA, 25 bp, Homo sapien
cctgatgctctgaagatcctactaa

SEQ ID NO: 4324354 - DNA, 25 bp, Homo sapien
gatgagatctcagcttgcacatgtg

SEQ ID NO: 4324355 - DNA, 25 bp, Homo sapien
caaatctgccttgcatagttgcctt

SEQ ID NO: 4324356 - DNA, 25 bp, Homo sapien
tcttttggcggacaacctttgagaa

SEQ ID NO: 4324357 - DNA, 25 bp, Homo sapien
tgaatcagttatgaacaggatcttc

SEQ ID NO: 4324358 - DNA, 25 bp, Homo sapien
gaataggcttcagtttaaacctgga

SEQ ID NO: 4324359 - DNA, 25 bp, Homo sapien
gggcatccggccacacttcaattct

SEQ ID NO: 4324360 - DNA, 25 bp, Homo sapien
ttctctgtatagcacaaggccacat

SEQ ID NO: 4324361 - DNA, 25 bp, Homo sapien
cacttcaattctctgtatagcacaa

SEQ ID NO: 4324362 - DNA, 25 bp, Homo sapien
ggccacacttcaattctctgtatag

SEQ ID NO: 4324363 - DNA, 25 bp, Homo sapien
tgtcctctggacatagagttgctac

SEQ ID NO: 4324364 - DNA, 25 bp, Homo sapien
tttctggattcttatacctgctatg

SEQ ID NO: 4324365 - DNA, 25 bp, Homo sapien
tctggacatagagttgctacaacct

SEQ ID NO: 4324366 - DNA, 25 bp, Homo sapien
gattcttatacctgctatggctggg

SEQ ID NO: 4324367 - DNA, 25 bp, Homo sapien
tatgactagtaatttagaggagaaa

SEQ ID NO: 4324368 - DNA, 25 bp, Homo sapien
gagatagcctctgtattccaaattt

SEQ ID NO: 4324369 - DNA, 25 bp, Homo sapien
atttatgactagtaatttagaggag

SEQ ID NO: 4324370 - DNA, 25 bp, Homo sapien
tcagagatagcctctgtattccaaa

SEQ ID NO: 4324371 - DNA, 25 bp, Homo sapien
cccaaaggcaagtcatgaaggcaaa

SEQ ID NO: 4324372 - DNA, 25 bp, Homo sapien
gggtgtggccatgatccccaatgac

SEQ ID NO: 4324373 - DNA, 25 bp, Homo sapien
gagtccatgtagtgatcctcggtgg

SEQ ID NO: 4324374 - DNA, 25 bp, Homo sapien
tgaccataggaaccatcgaagactt

SEQ ID NO: 4324375 - DNA, 25 bp, Homo sapien
atccaggataattgcaatttttact

SEQ ID NO: 4324376 - DNA, 25 bp, Homo sapien
agccatccaggataattgcaatttt

SEQ ID NO: 4324377 - DNA, 25 bp, Homo sapien
catccaggataattgcaatttttac

SEQ ID NO: 4324378 - DNA, 25 bp, Homo sapien
gccatccaggataattgcaattttt

SEQ ID NO: 4324379 - DNA, 25 bp, Homo sapien
ttgatttcttgtcctcaacaaatac

SEQ ID NO: 4324380 - DNA, 25 bp, Homo sapien
attgatttcttgtcctcaacaaata

SEQ ID NO: 4324381 - DNA, 25 bp, Homo sapien
cttagcaggtgtggttactggtttc

SEQ ID NO: 4324382 - DNA, 25 bp, Homo sapien
tggttactggtttcttacacaccat

SEQ ID NO: 4324383 - DNA, 25 bp, Homo sapien
gtttcttacacaccatttctgctgg

SEQ ID NO: 4324384 - DNA, 25 bp, Homo sapien
ttacacaccatttctgctggacttc

SEQ ID NO: 4324385 - DNA, 25 bp, Homo sapien
tttgccttcttactagatgagctat

SEQ ID NO: 4324386 - DNA, 25 bp, Homo sapien
gccttcttactagatgagctatttg

SEQ ID NO: 4324387 - DNA, 25 bp, Homo sapien
ttactagatgagctatttgccatcc

SEQ ID NO: 4324388 - DNA, 25 bp, Homo sapien
tcttactagatgagctatttgccat

SEQ ID NO: 4324389 - DNA, 25 bp, Homo sapien
ttgtccctgaaaagcttacgtattg

SEQ ID NO: 4324390 - DNA, 25 bp, Homo sapien
ggccttggctactgcagagtctgga

SEQ ID NO: 4324391 - DNA, 25 bp, Homo sapien
cacttgcagtattgcttcaggctct

SEQ ID NO: 4324392 - DNA, 25 bp, Homo sapien
tgatggtactttctcagggactgga

SEQ ID NO: 4324393 - DNA, 25 bp, Homo sapien
ggttcctttactgtgttcctgtgcc

SEQ ID NO: 4324394 - DNA, 25 bp, Homo sapien
tcctccctcaagaccagatcaactt

SEQ ID NO: 4324395 - DNA, 25 bp, Homo sapien
ctccctcaagaccagatcaacttgt

SEQ ID NO: 4324396 - DNA, 25 bp, Homo sapien
cctcagataggttcctttactgtgt

SEQ ID NO: 4324397 - DNA, 25 bp, Homo sapien
tctttctcttcgcaggtttcagctt

SEQ ID NO: 4324398 - DNA, 25 bp, Homo sapien
ctttctcttcgcaggtttcagcttg

SEQ ID NO: 4324399 - DNA, 25 bp, Homo sapien
ctggatatcaggcaccagggcacaa

SEQ ID NO: 4324400 - DNA, 25 bp, Homo sapien
tgaagaagtcgtgcggtgctccaca

SEQ ID NO: 4324401 - DNA, 25 bp, Homo sapien
tgctccacacgtttgtcacagaggg

SEQ ID NO: 4324402 - DNA, 25 bp, Homo sapien
aactgattttctaggctgccggagc

SEQ ID NO: 4324403 - DNA, 25 bp, Homo sapien
taatgctttgtgaatttgcctgtca

SEQ ID NO: 4324404 - DNA, 25 bp, Homo sapien
tatatgtaatgctttgtgaatttgc

SEQ ID NO: 4324405 - DNA, 25 bp, Homo sapien
ttttagtatatctgctgccaaatga

SEQ ID NO: 4324406 - DNA, 25 bp, Homo sapien
agtatatctgctgccaaatgaagca

SEQ ID NO: 4324407 - DNA, 25 bp, Homo sapien
attcattttcggacatgtgagttgc

SEQ ID NO: 4324408 - DNA, 25 bp, Homo sapien
ttattcattttcggacatgtgagtt

SEQ ID NO: 4324409 - DNA, 25 bp, Homo sapien
ttcattttcggacatgtgagttgct

SEQ ID NO: 4324410 - DNA, 25 bp, Homo sapien
tcattttcggacatgtgagttgctt

SEQ ID NO: 4324411 - DNA, 25 bp, Homo sapien
gattctgtgagtaagcttttgtgtg

SEQ ID NO: 4324412 - DNA, 25 bp, Homo sapien
taaaccattggtagttattctgata

SEQ ID NO: 4324413 - DNA, 25 bp, Homo sapien
gacaatacatgacctacgatctgca

SEQ ID NO: 4324414 - DNA, 25 bp, Homo sapien
gatatgctgcctttgacaatacatg

SEQ ID NO: 4324415 - DNA, 25 bp, Homo sapien
ggctcctgtcagattaatgtgtgca

SEQ ID NO: 4324416 - DNA, 25 bp, Homo sapien
ttaactctgacttggcgaagaagct

SEQ ID NO: 4324417 - DNA, 25 bp, Homo sapien
ggattgggacacgaagtatcactta

SEQ ID NO: 4324418 - DNA, 25 bp, Homo sapien
aattgcggtgctattttctggagag

SEQ ID NO: 4324419 - DNA, 25 bp, Homo sapien
catgctataatatagagcttctttt

SEQ ID NO: 4324420 - DNA, 25 bp, Homo sapien
tctgatgggttaccaacataacatg

SEQ ID NO: 4324421 - DNA, 25 bp, Homo sapien
agtaccatggcttctgatgggttac

SEQ ID NO: 4324422 - DNA, 25 bp, Homo sapien
ttaattcctgtattactttggtgat

SEQ ID NO: 4324423 - DNA, 25 bp, Homo sapien
gctttctccaatttctaaatatctc

SEQ ID NO: 4324424 - DNA, 25 bp, Homo sapien
aagctttctccaatttctaaatatc

SEQ ID NO: 4324425 - DNA, 25 bp, Homo sapien
caagctttctccaatttctaaatat

SEQ ID NO: 4324426 - DNA, 25 bp, Homo sapien
tttctccaatttctaaatatctcat

SEQ ID NO: 4324427 - DNA, 25 bp, Homo sapien
tattacacgagcatgttaaagccaa

SEQ ID NO: 4324428 - DNA, 25 bp, Homo sapien
ttggtaacgtgcgtcagatcccata

SEQ ID NO: 4324429 - DNA, 25 bp, Homo sapien
attgcatttacttgattattacacg

SEQ ID NO: 4324430 - DNA, 25 bp, Homo sapien
tcattggtaacgtgcgtcagatccc

SEQ ID NO: 4324431 - DNA, 25 bp, Homo sapien
gaaggaaacgttcactggcagcttc

SEQ ID NO: 4324432 - DNA, 25 bp, Homo sapien
cacaggttttttgaggacacattct

SEQ ID NO: 4324433 - DNA, 25 bp, Homo sapien
cgggagataaggtaagaaactgcca

SEQ ID NO: 4324434 - DNA, 25 bp, Homo sapien
caatgagttttccagagttgtgcca

SEQ ID NO: 4324435 - DNA, 25 bp, Homo sapien
gaaactgcgcagaactttttgaaga

SEQ ID NO: 4324436 - DNA, 25 bp, Homo sapien
ttcttcacgggatcatattttctct

SEQ ID NO: 4324437 - DNA, 25 bp, Homo sapien
tctttcttcacgggatcatattttc

SEQ ID NO: 4324438 - DNA, 25 bp, Homo sapien
gtctttcttcacgggatcatatttt

SEQ ID NO: 4324439 - DNA, 25 bp, Homo sapien
gtagtagggtgtctcttctgttcaa

SEQ ID NO: 4324440 - DNA, 25 bp, Homo sapien
gcctgtggtcactgggtcttgtgta

SEQ ID NO: 4324441 - DNA, 25 bp, Homo sapien
gaagtacaggtagtagggtgtctct

SEQ ID NO: 4324442 - DNA, 25 bp, Homo sapien
cctgtggtcactgggtcttgtgtag

SEQ ID NO: 4324443 - DNA, 25 bp, Homo sapien
tatccgatgatattccaagcttcca

SEQ ID NO: 4324444 - DNA, 25 bp, Homo sapien
cactctatccgatgatattccaagc

SEQ ID NO: 4324445 - DNA, 25 bp, Homo sapien
atggtgccactctatccgatgatat

SEQ ID NO: 4324446 - DNA, 25 bp, Homo sapien
ggtgccactctatccgatgatattc

SEQ ID NO: 4324447 - DNA, 25 bp, Homo sapien
tgctttggccaaggatttgacatcc

SEQ ID NO: 4324448 - DNA, 25 bp, Homo sapien
tagtaatccaatcagtaaagctttt

SEQ ID NO: 4324449 - DNA, 25 bp, Homo sapien
tgctcttggcatccagtaaagaatg

SEQ ID NO: 4324450 - DNA, 25 bp, Homo sapien
agaatgactgaacagcatgctcggg

SEQ ID NO: 4324451 - DNA, 25 bp, Homo sapien
gttactgtgatggccgttagttctg

SEQ ID NO: 4324452 - DNA, 25 bp, Homo sapien
gcaaaacttcttgatcgtttcaaga

SEQ ID NO: 4324453 - DNA, 25 bp, Homo sapien
tgtgatggccgttagttctgtttga

SEQ ID NO: 4324454 - DNA, 25 bp, Homo sapien
tgcaaaacttcttgatcgtttcaag

SEQ ID NO: 4324455 - DNA, 25 bp, Homo sapien
aatatgattttgttcctgttctcac

SEQ ID NO: 4324456 - DNA, 25 bp, Homo sapien
ccaatatgattttgttcctgttctc

SEQ ID NO: 4324457 - DNA, 25 bp, Homo sapien
ttgtaaccaatatgattttgttcct

SEQ ID NO: 4324458 - DNA, 25 bp, Homo sapien
aaccaatatgattttgttcctgttc

SEQ ID NO: 4324459 - DNA, 25 bp, Homo sapien
aattgagcagttcctctttgtgccc

SEQ ID NO: 4324460 - DNA, 25 bp, Homo sapien
tcacaacagaggtaaaattgagcag

SEQ ID NO: 4324461 - DNA, 25 bp, Homo sapien
cagaggtaaaattgagcagttcctc

SEQ ID NO: 4324462 - DNA, 25 bp, Homo sapien
atcattgacaatcttcacaacagag

SEQ ID NO: 4324463 - DNA, 25 bp, Homo sapien
atggaagaatctctttggacatggg

SEQ ID NO: 4324464 - DNA, 25 bp, Homo sapien
tatggaagaatctctttggacatgg

SEQ ID NO: 4324465 - DNA, 25 bp, Homo sapien
tttatagtaatgatcctggtcccag

SEQ ID NO: 4324466 - DNA, 25 bp, Homo sapien
cctgcaatcaaagggctggcgaggg

SEQ ID NO: 4324467 - DNA, 25 bp, Homo sapien
ccaactgtcacaaagtttatagtaa

SEQ ID NO: 4324468 - DNA, 25 bp, Homo sapien
ggctggcgagggtgaaatccttaac

SEQ ID NO: 4324469 - DNA, 25 bp, Homo sapien
ctttccggtacttctgccttggtgc

SEQ ID NO: 4324470 - DNA, 25 bp, Homo sapien
gaggtagtccaatatctttgaagta

SEQ ID NO: 4324471 - DNA, 25 bp, Homo sapien
tgtgtgtggttgctagagtgtctaa

SEQ ID NO: 4324472 - DNA, 25 bp, Homo sapien
catgttttgtaaatccatggagagg

SEQ ID NO: 4324473 - DNA, 25 bp, Homo sapien
ggttgctagagtgtctaaataaagt

SEQ ID NO: 4324474 - DNA, 25 bp, Homo sapien
ttactgatgtaactgcctgttttaa

SEQ ID NO: 4324475 - DNA, 25 bp, Homo sapien
taatagacatgtctatggtttgcag

SEQ ID NO: 4324476 - DNA, 25 bp, Homo sapien
catgtctatggtttgcagaactgtg

SEQ ID NO: 4324477 - DNA, 25 bp, Homo sapien
ccctttactgatgtaactgcctgtt

SEQ ID NO: 4324478 - DNA, 25 bp, Homo sapien
taatattcttatccaaagctatccg

SEQ ID NO: 4324479 - DNA, 25 bp, Homo sapien
cagctactaatattcttatccaaag

SEQ ID NO: 4324480 - DNA, 25 bp, Homo sapien
tattcttatccaaagctatccgcct

SEQ ID NO: 4324481 - DNA, 25 bp, Homo sapien
ttatccaaagctatccgccttccat

SEQ ID NO: 4324482 - DNA, 25 bp, Homo sapien
taggttgacctgtgatccatagatt

SEQ ID NO: 4324483 - DNA, 25 bp, Homo sapien
tgttaccaatctaatgggtcagccc

SEQ ID NO: 4324484 - DNA, 25 bp, Homo sapien
tagtcctatattgattaacagcagg

SEQ ID NO: 4324485 - DNA, 25 bp, Homo sapien
tcaaacctagctggtatggcctact

SEQ ID NO: 4324486 - DNA, 25 bp, Homo sapien
taactccacagtcacgaatttctat

SEQ ID NO: 4324487 - DNA, 25 bp, Homo sapien
tgtgtgcactccgaatctgggttta

SEQ ID NO: 4324488 - DNA, 25 bp, Homo sapien
ctttccagctgtgtgcactccgaat

SEQ ID NO: 4324489 - DNA, 25 bp, Homo sapien
tccagctgtgtgcactccgaatctg

SEQ ID NO: 4324490 - DNA, 25 bp, Homo sapien
tggttcccaagatgaagcatataat

SEQ ID NO: 4324491 - DNA, 25 bp, Homo sapien
gttcccaagatgaagcatataatct

SEQ ID NO: 4324492 - DNA, 25 bp, Homo sapien
ggttcccaagatgaagcatataatc

SEQ ID NO: 4324493 - DNA, 25 bp, Homo sapien
tcagggataatggcagcatcctgtt

SEQ ID NO: 4324494 - DNA, 25 bp, Homo sapien
cagggataatggcagcatcctgttt

SEQ ID NO: 4324495 - DNA, 25 bp, Homo sapien
ccaggggcagctgtgaacataatgt

SEQ ID NO: 4324496 - DNA, 25 bp, Homo sapien
ggcagctgtgaacataatgtgagtt

SEQ ID NO: 4324497 - DNA, 25 bp, Homo sapien
tccccgattctcctggtaggataaa

SEQ ID NO: 4324498 - DNA, 25 bp, Homo sapien
gataaatagtattggcagactgtgc

SEQ ID NO: 4324499 - DNA, 25 bp, Homo sapien
gcaggattaggtggttccccgattc

SEQ ID NO: 4324500 - DNA, 25 bp, Homo sapien
aggtgatgtccatccaatgctggca

SEQ ID NO: 4324501 - DNA, 25 bp, Homo sapien
ttaacaaagtggagaatgcaaggct

SEQ ID NO: 4324502 - DNA, 25 bp, Homo sapien
aacaaagtggagaatgcaaggctga

SEQ ID NO: 4324503 - DNA, 25 bp, Homo sapien
cttaacaaagtggagaatgcaaggc

SEQ ID NO: 4324504 - DNA, 25 bp, Homo sapien
cagggggctgatcttccatttcttg

SEQ ID NO: 4324505 - DNA, 25 bp, Homo sapien
cctgttgatggttcatgaatttcaa

SEQ ID NO: 4324506 - DNA, 25 bp, Homo sapien
ttgttttcctcccatagggcaatga

SEQ ID NO: 4324507 - DNA, 25 bp, Homo sapien
tagggcaatgaagataagctcctgt

SEQ ID NO: 4324508 - DNA, 25 bp, Homo sapien
taagctcctgttgatggttcatgaa

SEQ ID NO: 4324509 - DNA, 25 bp, Homo sapien
acgatactgctcagtgcacagttgg

SEQ ID NO: 4324510 - DNA, 25 bp, Homo sapien
caatcattggagacatgtttattaa

SEQ ID NO: 4324511 - DNA, 25 bp, Homo sapien
ttaaaacactgacgatactgctcag

SEQ ID NO: 4324512 - DNA, 25 bp, Homo sapien
aaaactccgtaacaatcattggaga

SEQ ID NO: 4324513 - DNA, 25 bp, Homo sapien
cactcaccgctacatctactcccat

SEQ ID NO: 4324514 - DNA, 25 bp, Homo sapien
actgaccactcaccgctacatctac

SEQ ID NO: 4324515 - DNA, 25 bp, Homo sapien
cgttatccactgaccactcaccgct

SEQ ID NO: 4324516 - DNA, 25 bp, Homo sapien
atccactgaccactcaccgctacat

SEQ ID NO: 4324517 - DNA, 25 bp, Homo sapien
ggctcatccttacaagcaaacttta

SEQ ID NO: 4324518 - DNA, 25 bp, Homo sapien
attcattatgattacgtctatgtac

SEQ ID NO: 4324519 - DNA, 25 bp, Homo sapien
gcatacaccgcttattacgcaacaa

SEQ ID NO: 4324520 - DNA, 25 bp, Homo sapien
tattacgcaacaactttttaggctc

SEQ ID NO: 4324521 - DNA, 25 bp, Homo sapien
gtgatctatatagcctcacattctg

SEQ ID NO: 4324522 - DNA, 25 bp, Homo sapien
caccagctgagttttgtgccgtatc

SEQ ID NO: 4324523 - DNA, 25 bp, Homo sapien
gctgagttttgtgccgtatctgtga

SEQ ID NO: 4324524 - DNA, 25 bp, Homo sapien
tctgtgatctatatagcctcacatt

SEQ ID NO: 4324525 - DNA, 25 bp, Homo sapien
gcgctgtaggaccttggttgtaata

SEQ ID NO: 4324526 - DNA, 25 bp, Homo sapien
ttcacgtagaaaatcaggcatggtt

SEQ ID NO: 4324527 - DNA, 25 bp, Homo sapien
aaatcaggcatggttgtagcatgaa

SEQ ID NO: 4324528 - DNA, 25 bp, Homo sapien
tagcatgaagatgcgctgtaggacc

SEQ ID NO: 4324529 - DNA, 25 bp, Homo sapien
ttttcttgggatattctcaacatgt

SEQ ID NO: 4324530 - DNA, 25 bp, Homo sapien
taacagattaaatgttgtaatgcag

SEQ ID NO: 4324531 - DNA, 25 bp, Homo sapien
ttcttgggatattctcaacatgtct

SEQ ID NO: 4324532 - DNA, 25 bp, Homo sapien
tgctttaacagattaaatgttgtaa

SEQ ID NO: 4324533 - DNA, 25 bp, Homo sapien
cctctctcttcacgtacgtttttat

SEQ ID NO: 4324534 - DNA, 25 bp, Homo sapien
catcactgtgtcatttgaagggtca

SEQ ID NO: 4324535 - DNA, 25 bp, Homo sapien
tcatcactgtgtcatttgaagggtc

SEQ ID NO: 4324536 - DNA, 25 bp, Homo sapien
cttcgcacaatgtcactagtcatca

SEQ ID NO: 4324537 - DNA, 25 bp, Homo sapien
tcccaaagctagtgactgtttcaga

SEQ ID NO: 4324538 - DNA, 25 bp, Homo sapien
ttcagaggtactcccacactgattt

SEQ ID NO: 4324539 - DNA, 25 bp, Homo sapien
tgactgtttcagaggtactcccaca

SEQ ID NO: 4324540 - DNA, 25 bp, Homo sapien
tagtgactgtttcagaggtactccc

SEQ ID NO: 4324541 - DNA, 25 bp, Homo sapien
ttttagacttggagacaaagagagt

SEQ ID NO: 4324542 - DNA, 25 bp, Homo sapien
gagcacactgtaataggtacttgtc

SEQ ID NO: 4324543 - DNA, 25 bp, Homo sapien
tgtgctggctcctagagacaggtca

SEQ ID NO: 4324544 - DNA, 25 bp, Homo sapien
cagtcagttgtcattcatgcagccc

SEQ ID NO: 4324545 - DNA, 25 bp, Homo sapien
tctcgtaacaccaacatagcccttg

SEQ ID NO: 4324546 - DNA, 25 bp, Homo sapien
ttttcgaattctcgtaacaccaaca

SEQ ID NO: 4324547 - DNA, 25 bp, Homo sapien
tagcccttgtcttcacaccatttaa

SEQ ID NO: 4324548 - DNA, 25 bp, Homo sapien
aacatagcccttgtcttcacaccat

SEQ ID NO: 4324549 - DNA, 25 bp, Homo sapien
agtaaagctttcatagatgtaccat

SEQ ID NO: 4324550 - DNA, 25 bp, Homo sapien
aagtaaagctttcatagatgtacca

SEQ ID NO: 4324551 - DNA, 25 bp, Homo sapien
tggtcctctgaaatttaagatgagc

SEQ ID NO: 4324552 - DNA, 25 bp, Homo sapien
aaaactctgtgctcagtaactgaac

SEQ ID NO: 4324553 - DNA, 25 bp, Homo sapien
taagatgagcctgaaaaactttgga

SEQ ID NO: 4324554 - DNA, 25 bp, Homo sapien
cctgataggagaagaatggtcctct

SEQ ID NO: 4324555 - DNA, 25 bp, Homo sapien
catgtttgggtggaagatcaagtgt

SEQ ID NO: 4324556 - DNA, 25 bp, Homo sapien
atgcttgtgctttattgtagctgaa

SEQ ID NO: 4324557 - DNA, 25 bp, Homo sapien
agggtgggatcacataaaataatgc

SEQ ID NO: 4324558 - DNA, 25 bp, Homo sapien
aggaacatgtttgggtggaagatca

SEQ ID NO: 4324559 - DNA, 25 bp, Homo sapien
caagttctaagtctataaggcaggc

SEQ ID NO: 4324560 - DNA, 25 bp, Homo sapien
taaggtccactcagattatcatgaa

SEQ ID NO: 4324561 - DNA, 25 bp, Homo sapien
taccgtgcttaaatttgatccccag

SEQ ID NO: 4324562 - DNA, 25 bp, Homo sapien
ttcaatgaattcaagtaaggtccac

SEQ ID NO: 4324563 - DNA, 25 bp, Homo sapien
ttttgaagatagctgccagaggaag

SEQ ID NO: 4324564 - DNA, 25 bp, Homo sapien
tctccagggagatgccattttgaat

SEQ ID NO: 4324565 - DNA, 25 bp, Homo sapien
gctgccagaggaagattccagcttt

SEQ ID NO: 4324566 - DNA, 25 bp, Homo sapien
attccagcttttgatctgtctccag

SEQ ID NO: 4324567 - DNA, 25 bp, Homo sapien
tgcctgcagcaatatttttgaatac

SEQ ID NO: 4324568 - DNA, 25 bp, Homo sapien
gatccacttttaatgacatcctcat

SEQ ID NO: 4324569 - DNA, 25 bp, Homo sapien
cctcatttttgatgttctttgacac

SEQ ID NO: 4324570 - DNA, 25 bp, Homo sapien
tttgacacctctcccatagacagct

SEQ ID NO: 4324571 - DNA, 25 bp, Homo sapien
gacaggatagcaatgtcaggtagaa

SEQ ID NO: 4324572 - DNA, 25 bp, Homo sapien
tgccgtcaggtagaaagcataggat

SEQ ID NO: 4324573 - DNA, 25 bp, Homo sapien
atagtgccgtcaggtagaaagcata

SEQ ID NO: 4324574 - DNA, 25 bp, Homo sapien
cccttgacaggatagcaatgtcagg

SEQ ID NO: 4324575 - DNA, 25 bp, Homo sapien
aaatcttcatcattaaattttctaa

SEQ ID NO: 4324576 - DNA, 25 bp, Homo sapien
aatcttcatcattaaattttctaag

SEQ ID NO: 4324577 - DNA, 25 bp, Homo sapien
tcatcattaaattttctaagtgtac

SEQ ID NO: 4324578 - DNA, 25 bp, Homo sapien
tcttcatcattaaattttctaagtg

SEQ ID NO: 4324579 - DNA, 25 bp, Homo sapien
acgtggctaccaagtttttctccat

SEQ ID NO: 4324580 - DNA, 25 bp, Homo sapien
cgtggctaccaagtttttctccatg

SEQ ID NO: 4324581 - DNA, 25 bp, Homo sapien
gtggctaccaagtttttctccatga

SEQ ID NO: 4324582 - DNA, 25 bp, Homo sapien
aagttcccagatactgtctctgctc

SEQ ID NO: 4324583 - DNA, 25 bp, Homo sapien
aaagttcccagatactgtctctgct

SEQ ID NO: 4324584 - DNA, 25 bp, Homo sapien
agttcccagatactgtctctgctca

SEQ ID NO: 4324585 - DNA, 25 bp, Homo sapien
gttcccagatactgtctctgctcat

SEQ ID NO: 4324586 - DNA, 25 bp, Homo sapien
tgaggagaaagaagaaaaaacatat

SEQ ID NO: 4324587 - DNA, 25 bp, Homo sapien
gaggagaaagaagaaaaaacatatc

SEQ ID NO: 4324588 - DNA, 25 bp, Homo sapien
ttgaggagaaagaagaaaaaacata

SEQ ID NO: 4324589 - DNA, 25 bp, Homo sapien
gcctctttttccatcagctctcccc

SEQ ID NO: 4324590 - DNA, 25 bp, Homo sapien
ctttttccatcagctctccccacat

SEQ ID NO: 4324591 - DNA, 25 bp, Homo sapien
ctctttttccatcagctctccccac

SEQ ID NO: 4324592 - DNA, 25 bp, Homo sapien
ttttccagaggcctctttttccatc

SEQ ID NO: 4324593 - DNA, 25 bp, Homo sapien
ctttctagccctataggcaactgca

SEQ ID NO: 4324594 - DNA, 25 bp, Homo sapien
tgtgcaattgcgtagaaccaggtat

SEQ ID NO: 4324595 - DNA, 25 bp, Homo sapien
gcattgattatttcctgttgtgcaa

SEQ ID NO: 4324596 - DNA, 25 bp, Homo sapien
tcctaagtagccacattcagcagag

SEQ ID NO: 4324597 - DNA, 25 bp, Homo sapien
cctattagtggcaagggcaagcaca

SEQ ID NO: 4324598 - DNA, 25 bp, Homo sapien
tagccctattagtggcaagggcaag

SEQ ID NO: 4324599 - DNA, 25 bp, Homo sapien
tatagccctattagtggcaagggca

SEQ ID NO: 4324600 - DNA, 25 bp, Homo sapien
agtcgtatagccctattagtggcaa

SEQ ID NO: 4324601 - DNA, 25 bp, Homo sapien
tactgggcttggttgtggattccct

SEQ ID NO: 4324602 - DNA, 25 bp, Homo sapien
catttgtgacaactactgggcttgg

SEQ ID NO: 4324603 - DNA, 25 bp, Homo sapien
tgctttcggcatttgtgacaactac

SEQ ID NO: 4324604 - DNA, 25 bp, Homo sapien
tttgataaagttgtgctttcggcat

SEQ ID NO: 4324605 - DNA, 25 bp, Homo sapien
tcaagtggtcaaattcgataaaggc

SEQ ID NO: 4324606 - DNA, 25 bp, Homo sapien
ttatagcctgagcaatgataatcat

SEQ ID NO: 4324607 - DNA, 25 bp, Homo sapien
tacagcatgcgagcaacagagcatc

SEQ ID NO: 4324608 - DNA, 25 bp, Homo sapien
tctcatcaattgtcttcaagtggtc

SEQ ID NO: 4324609 - DNA, 25 bp, Homo sapien
cttttcccatcatcccatgtttctg

SEQ ID NO: 4324610 - DNA, 25 bp, Homo sapien
gatccacggtagattgatatctttc

SEQ ID NO: 4324611 - DNA, 25 bp, Homo sapien
tgcctcgggtcatgccagtgtgatc

SEQ ID NO: 4324612 - DNA, 25 bp, Homo sapien
ccagtgtgatccacggtagattgat

SEQ ID NO: 4324613 - DNA, 25 bp, Homo sapien
catgccagtgtgatccacggtagat

SEQ ID NO: 4324614 - DNA, 25 bp, Homo sapien
tggagagaagctattgagggaaacc

SEQ ID NO: 4324615 - DNA, 25 bp, Homo sapien
tcaaggtttagcaacaatgggaaca

SEQ ID NO: 4324616 - DNA, 25 bp, Homo sapien
gagggaaaccgagtgaatgcattca

SEQ ID NO: 4324617 - DNA, 25 bp, Homo sapien
gggaacagaatacactcccaggtct

SEQ ID NO: 4324618 - DNA, 25 bp, Homo sapien
ttgggccaggttccgcattgcagca

SEQ ID NO: 4324619 - DNA, 25 bp, Homo sapien
tggaacttgggccaggttccgcatt

SEQ ID NO: 4324620 - DNA, 25 bp, Homo sapien
ggttccgcattgcagcatgtttgcc

SEQ ID NO: 4324621 - DNA, 25 bp, Homo sapien
ggccaggttccgcattgcagcatgt

SEQ ID NO: 4324622 - DNA, 25 bp, Homo sapien
gaagggcttgatgtttcggcacata

SEQ ID NO: 4324623 - DNA, 25 bp, Homo sapien
caggccttgcactatccccaaattt

SEQ ID NO: 4324624 - DNA, 25 bp, Homo sapien
tgtttcggcacatattctgcattcc

SEQ ID NO: 4324625 - DNA, 25 bp, Homo sapien
tcaggccttgcactatccccaaatt

SEQ ID NO: 4324626 - DNA, 25 bp, Homo sapien
gccaccttcttgtctgttaactatc

SEQ ID NO: 4324627 - DNA, 25 bp, Homo sapien
gcttgccagtggatcatggccacct

SEQ ID NO: 4324628 - DNA, 25 bp, Homo sapien
tgtctgttaactatcttggctgcca

SEQ ID NO: 4324629 - DNA, 25 bp, Homo sapien
ccttcttgtctgttaactatcttgg

SEQ ID NO: 4324630 - DNA, 25 bp, Homo sapien
ctatctgtagcccaagttctttttc

SEQ ID NO: 4324631 - DNA, 25 bp, Homo sapien
aactgagactccttttgccaccacc

SEQ ID NO: 4324632 - DNA, 25 bp, Homo sapien
tgcagccccaagctatctgtagccc

SEQ ID NO: 4324633 - DNA, 25 bp, Homo sapien
cttttgccaccacccagtggagatt

SEQ ID NO: 4324634 - DNA, 25 bp, Homo sapien
ctttgcgcgtggccacgtgacatgc

SEQ ID NO: 4324635 - DNA, 25 bp, Homo sapien
tttgcgcgtggccacgtgacatgcc

SEQ ID NO: 4324636 - DNA, 25 bp, Homo sapien
gtgtccaggataagaagtagacatc

SEQ ID NO: 4324637 - DNA, 25 bp, Homo sapien
catgtgtccaggataagaagtagac

SEQ ID NO: 4324638 - DNA, 25 bp, Homo sapien
tgaattactctaacaagaagactac

SEQ ID NO: 4324639 - DNA, 25 bp, Homo sapien
ttctctgggtcaaatatgctattcc

SEQ ID NO: 4324640 - DNA, 25 bp, Homo sapien
gcaatggcttcaacaaagtagaggt

SEQ ID NO: 4324641 - DNA, 25 bp, Homo sapien
ggctatttgggctactctggcattc

SEQ ID NO: 4324642 - DNA, 25 bp, Homo sapien
ttcattgagtgtaatgtccactatg

SEQ ID NO: 4324643 - DNA, 25 bp, Homo sapien
gagtgtaatgtccactatgcaaaac

SEQ ID NO: 4324644 - DNA, 25 bp, Homo sapien
atgtccactatgcaaaactgaggag

SEQ ID NO: 4324645 - DNA, 25 bp, Homo sapien
tgtaatgtccactatgcaaaactga

SEQ ID NO: 4324646 - DNA, 25 bp, Homo sapien
tctaccaagattctgtcccaaggaa

SEQ ID NO: 4324647 - DNA, 25 bp, Homo sapien
ccaaggaagtcgttctttctctcat

SEQ ID NO: 4324648 - DNA, 25 bp, Homo sapien
ggcactggagagagctctaccaaga

SEQ ID NO: 4324649 - DNA, 25 bp, Homo sapien
cctttaattattctggcagccacaa

SEQ ID NO: 4324650 - DNA, 25 bp, Homo sapien
ggacattgactagcacaatatacag

SEQ ID NO: 4324651 - DNA, 25 bp, Homo sapien
gcctagccaggttttggacattgac

SEQ ID NO: 4324652 - DNA, 25 bp, Homo sapien
actactctcatgcttttcctattgg

SEQ ID NO: 4324653 - DNA, 25 bp, Homo sapien
acacaggacagatcataatacatag

SEQ ID NO: 4324654 - DNA, 25 bp, Homo sapien
agacatccactttcctatgctttgc

SEQ ID NO: 4324655 - DNA, 25 bp, Homo sapien
gcacacattctccataggcatactt

SEQ ID NO: 4324656 - DNA, 25 bp, Homo sapien
ttgctttgaaacacgcacacattct

SEQ ID NO: 4324657 - DNA, 25 bp, Homo sapien
tatgctttgctatagtattgattga

SEQ ID NO: 4324658 - DNA, 25 bp, Homo sapien
ggccagccaggaaaggtcattaaat

SEQ ID NO: 4324659 - DNA, 25 bp, Homo sapien
tcttcagcctttacccactcttgaa

SEQ ID NO: 4324660 - DNA, 25 bp, Homo sapien
tctttcaaagataaatcttcagcct

SEQ ID NO: 4324661 - DNA, 25 bp, Homo sapien
cacaatttccgcaagctttcttctt

SEQ ID NO: 4324662 - DNA, 25 bp, Homo sapien
cagagtctattagtcattaaacagg

SEQ ID NO: 4324663 - DNA, 25 bp, Homo sapien
ccagaaatctaaccttgtgaaaaca

SEQ ID NO: 4324664 - DNA, 25 bp, Homo sapien
gatacaaggtaagatacagagtcta

SEQ ID NO: 4324665 - DNA, 25 bp, Homo sapien
tatttaggatacaaggtaagataca

SEQ ID NO: 4324666 - DNA, 25 bp, Homo sapien
ttagacctcaatttctacagctttg

SEQ ID NO: 4324667 - DNA, 25 bp, Homo sapien
tatcctctgcttctagtagagccat

SEQ ID NO: 4324668 - DNA, 25 bp, Homo sapien
cttatcctctgcttctagtagagcc

SEQ ID NO: 4324669 - DNA, 25 bp, Homo sapien
ttatcctctgcttctagtagagcca

SEQ ID NO: 4324670 - DNA, 25 bp, Homo sapien
tgatcaaagtttagctttagccttt

SEQ ID NO: 4324671 - DNA, 25 bp, Homo sapien
tttgatcaaagtttagctttagcct

SEQ ID NO: 4324672 - DNA, 25 bp, Homo sapien
ttttgatcaaagtttagctttagcc

SEQ ID NO: 4324673 - DNA, 25 bp, Homo sapien
tagctttagccttttaatttgtgtc

SEQ ID NO: 4324674 - DNA, 25 bp, Homo sapien
tgtctctggaaaaggagtagaagca

SEQ ID NO: 4324675 - DNA, 25 bp, Homo sapien
gaaaaggagtagaagcaaaaaggca

SEQ ID NO: 4324676 - DNA, 25 bp, Homo sapien
aaaaggcaatgctactggaggaggc

SEQ ID NO: 4324677 - DNA, 25 bp, Homo sapien
gaggcccagaaaagcgcttcctgca

SEQ ID NO: 4324678 - DNA, 25 bp, Homo sapien
ttctcttggtatccaaaagtctgca

SEQ ID NO: 4324679 - DNA, 25 bp, Homo sapien
tgccaatacgtagtcccacattctc

SEQ ID NO: 4324680 - DNA, 25 bp, Homo sapien
gaactctgaaattacacgggtcttc

SEQ ID NO: 4324681 - DNA, 25 bp, Homo sapien
aaagtctgcataaactctgttttga

SEQ ID NO: 4324682 - DNA, 25 bp, Homo sapien
ttgatatgcggtatgcacactctcc

SEQ ID NO: 4324683 - DNA, 25 bp, Homo sapien
ttcaaaattgctcccataaatcaca

SEQ ID NO: 4324684 - DNA, 25 bp, Homo sapien
cctctccccagatcaaattgatatg

SEQ ID NO: 4324685 - DNA, 25 bp, Homo sapien
aaattgctcccataaatcacagatg

SEQ ID NO: 4324686 - DNA, 25 bp, Homo sapien
tctggaaacaccgtcttccttcctc

SEQ ID NO: 4324687 - DNA, 25 bp, Homo sapien
tgaattctggaaacaccgtcttcct

SEQ ID NO: 4324688 - DNA, 25 bp, Homo sapien
taagtccactctggactaaagactt

SEQ ID NO: 4324689 - DNA, 25 bp, Homo sapien
tctatggggcccattcacccaaatg

SEQ ID NO: 4324690 - DNA, 25 bp, Homo sapien
ggactaaagacttatctgagtctga

SEQ ID NO: 4324691 - DNA, 25 bp, Homo sapien
caaatggtgataagtccactctgga

SEQ ID NO: 4324692 - DNA, 25 bp, Homo sapien
agagccaagtgagtaaaccagccag

SEQ ID NO: 4324693 - DNA, 25 bp, Homo sapien
gagccaagtgagtaaaccagccaga

SEQ ID NO: 4324694 - DNA, 25 bp, Homo sapien
gaaatgcactgattgtgatacaata

SEQ ID NO: 4324695 - DNA, 25 bp, Homo sapien
agaaatgcactgattgtgatacaat

SEQ ID NO: 4324696 - DNA, 25 bp, Homo sapien
tgattgtgatacaataatcaaaagg

SEQ ID NO: 4324697 - DNA, 25 bp, Homo sapien
tgcactgattgtgatacaataatca

SEQ ID NO: 4324698 - DNA, 25 bp, Homo sapien
ttttcttttgtactctgtcttgtca

SEQ ID NO: 4324699 - DNA, 25 bp, Homo sapien
tttcttttgtactctgtcttgtcat

SEQ ID NO: 4324700 - DNA, 25 bp, Homo sapien
tatacttgtttgatcccatgaccat

SEQ ID NO: 4324701 - DNA, 25 bp, Homo sapien
ttaaaactcttgagtaagtcgtcat

SEQ ID NO: 4324702 - DNA, 25 bp, Homo sapien
tcccatgaccatgacattttcttct

SEQ ID NO: 4324703 - DNA, 25 bp, Homo sapien
gtcgtcatatacttgtttgatccca

SEQ ID NO: 4324704 - DNA, 25 bp, Homo sapien
attgaacccgggtcgtggcggtgag

SEQ ID NO: 4324705 - DNA, 25 bp, Homo sapien
tgaacccgggtcgtggcggtgagag

SEQ ID NO: 4324706 - DNA, 25 bp, Homo sapien
ttgaacccgggtcgtggcggtgaga

SEQ ID NO: 4324707 - DNA, 25 bp, Homo sapien
cacgacattatcaactgcatctttt

SEQ ID NO: 4324708 - DNA, 25 bp, Homo sapien
tcactatagttcacttgccctgtgc

SEQ ID NO: 4324709 - DNA, 25 bp, Homo sapien
tactgaatcactatagttcacttgc

SEQ ID NO: 4324710 - DNA, 25 bp, Homo sapien
ttcttctggcaacacgacattatca

SEQ ID NO: 4324711 - DNA, 25 bp, Homo sapien
agttaacgacatcacatttgacttg

SEQ ID NO: 4324712 - DNA, 25 bp, Homo sapien
atttgacttgtttcctctttaggat

SEQ ID NO: 4324713 - DNA, 25 bp, Homo sapien
tcaaagttgtgattggaatataagc

SEQ ID NO: 4324714 - DNA, 25 bp, Homo sapien
taattcaacaggacacatatgtaga

SEQ ID NO: 4324715 - DNA, 25 bp, Homo sapien
cctctttaatcaggcagaggtactc

SEQ ID NO: 4324716 - DNA, 25 bp, Homo sapien
tcctctttaatcaggcagaggtact

SEQ ID NO: 4324717 - DNA, 25 bp, Homo sapien
ctcagtaagtggtctattgtctgaa

SEQ ID NO: 4324718 - DNA, 25 bp, Homo sapien
ctgtttcatctattgagctgtactc

SEQ ID NO: 4324719 - DNA, 25 bp, Homo sapien
gaatgtggacttccttcaaaaccta

SEQ ID NO: 4324720 - DNA, 25 bp, Homo sapien
catctattgagctgtactcagtaag

SEQ ID NO: 4324721 - DNA, 25 bp, Homo sapien
agacttcttgcaggctgtgatcata

SEQ ID NO: 4324722 - DNA, 25 bp, Homo sapien
taggccatttaacgtaatcccagac

SEQ ID NO: 4324723 - DNA, 25 bp, Homo sapien
gcttcctgtatacggatgtctaggt

SEQ ID NO: 4324724 - DNA, 25 bp, Homo sapien
gattggattaattcgcaaaccttgt

SEQ ID NO: 4324725 - DNA, 25 bp, Homo sapien
tcttcaagtatctgtgaggtgggtg

SEQ ID NO: 4324726 - DNA, 25 bp, Homo sapien
gctcctggacttgttagaaggtgat

SEQ ID NO: 4324727 - DNA, 25 bp, Homo sapien
acaagatatgaggtcagttctctcc

SEQ ID NO: 4324728 - DNA, 25 bp, Homo sapien
tctttactgaacagggactaagaac

SEQ ID NO: 4324729 - DNA, 25 bp, Homo sapien
gagaacctgaagtcaagcctgatga

SEQ ID NO: 4324730 - DNA, 25 bp, Homo sapien
tagacctttaacagagatcactcag

SEQ ID NO: 4324731 - DNA, 25 bp, Homo sapien
tcagttttaccacttaatcaaaggc

SEQ ID NO: 4324732 - DNA, 25 bp, Homo sapien
cattttgataagatgcaagtcagtt

SEQ ID NO: 4324733 - DNA, 25 bp, Homo sapien
gcaccttggcctattctgcaatgca

SEQ ID NO: 4324734 - DNA, 25 bp, Homo sapien
agcaccttggcctattctgcaatgc

SEQ ID NO: 4324735 - DNA, 25 bp, Homo sapien
cagcaccttggcctattctgcaatg

SEQ ID NO: 4324736 - DNA, 25 bp, Homo sapien
acagcaccttggcctattctgcaat

SEQ ID NO: 4324737 - DNA, 25 bp, Homo sapien
tttttactgcaggaattataaattc

SEQ ID NO: 4324738 - DNA, 25 bp, Homo sapien
gatagtataactgtcacaaggccag

SEQ ID NO: 4324739 - DNA, 25 bp, Homo sapien
ggatggttgcttcctattagttgga

SEQ ID NO: 4324740 - DNA, 25 bp, Homo sapien
actgacactctggtactgtagtaga

SEQ ID NO: 4324741 - DNA, 25 bp, Homo sapien
gcccacatgggagaactacagttat

SEQ ID NO: 4324742 - DNA, 25 bp, Homo sapien
ggcaagcaaatcttgctggtctgtg

SEQ ID NO: 4324743 - DNA, 25 bp, Homo sapien
gagatggtggagtgtctaactgcac

SEQ ID NO: 4324744 - DNA, 25 bp, Homo sapien
gagtgtctaactgcactgctcaggc

SEQ ID NO: 4324745 - DNA, 25 bp, Homo sapien
tcacctatctggagtgacacccagg

SEQ ID NO: 4324746 - DNA, 25 bp, Homo sapien
tctggagtgacacccaggcaagagt

SEQ ID NO: 4324747 - DNA, 25 bp, Homo sapien
agaggggcatgcaccattaatgagg

SEQ ID NO: 4324748 - DNA, 25 bp, Homo sapien
caaagccaccatgaagtttggactg

SEQ ID NO: 4324749 - DNA, 25 bp, Homo sapien
gcatctccagttgggggcttataga

SEQ ID NO: 4324750 - DNA, 25 bp, Homo sapien
ccattaatgaggttttcccctcaca

SEQ ID NO: 4324751 - DNA, 25 bp, Homo sapien
gccacatctcctgtacaatagcact

SEQ ID NO: 4324752 - DNA, 25 bp, Homo sapien
cagaagatgggtcaggaaatcaaat

SEQ ID NO: 4324753 - DNA, 25 bp, Homo sapien
caagcctgtgtcgtcccagagaaac

SEQ ID NO: 4324754 - DNA, 25 bp, Homo sapien
tcaacagtattgaaatctgccacat

SEQ ID NO: 4324755 - DNA, 25 bp, Homo sapien
tcatcacttagctagacattctgga

SEQ ID NO: 4324756 - DNA, 25 bp, Homo sapien
acttgttctgtgcagaagtccttgc

SEQ ID NO: 4324757 - DNA, 25 bp, Homo sapien
gctttgtagaattggagttaaggcc

SEQ ID NO: 4324758 - DNA, 25 bp, Homo sapien
gctttgaagtcaggcccattgacat

SEQ ID NO: 4324759 - DNA, 25 bp, Homo sapien
tcacagatcaccaatgctcatagat

SEQ ID NO: 4324760 - DNA, 25 bp, Homo sapien
ggaggcctgacaacaggaagagaaa

SEQ ID NO: 4324761 - DNA, 25 bp, Homo sapien
caatagcgatgtcaatgatcactga

SEQ ID NO: 4324762 - DNA, 25 bp, Homo sapien
agaaattgtcattggtgaagcagtc

SEQ ID NO: 4324763 - DNA, 25 bp, Homo sapien
ggattcgagaaccttcacagtgtaa

SEQ ID NO: 4324764 - DNA, 25 bp, Homo sapien
tttcccaagtaagtaagactgcagg

SEQ ID NO: 4324765 - DNA, 25 bp, Homo sapien
ttgagattatatgcaggagagtgac

SEQ ID NO: 4324766 - DNA, 25 bp, Homo sapien
gagtgactataatttccttcaagca

SEQ ID NO: 4324767 - DNA, 25 bp, Homo sapien
aggaagtccaagtgtatcatgaatg

SEQ ID NO: 4324768 - DNA, 25 bp, Homo sapien
taatcaagttgttgataattaaagg

SEQ ID NO: 4324769 - DNA, 25 bp, Homo sapien
gtctgtgtaacaataagaggcttta

SEQ ID NO: 4324770 - DNA, 25 bp, Homo sapien
ataatgatctttctagagattgagg

SEQ ID NO: 4324771 - DNA, 25 bp, Homo sapien
gattagaattgcttcagcacatgga

SEQ ID NO: 4324772 - DNA, 25 bp, Homo sapien
taggcagtagattaagtttacatga

SEQ ID NO: 4324773 - DNA, 25 bp, Homo sapien
ccaatacacctataatgatactgag

SEQ ID NO: 4324774 - DNA, 25 bp, Homo sapien
cttactaacttgcagaggatggcat

SEQ ID NO: 4324775 - DNA, 25 bp, Homo sapien
taccagaccgtgaaagaatgctaca

SEQ ID NO: 4324776 - DNA, 25 bp, Homo sapien
taggctactgatatggacaccaaga

SEQ ID NO: 4324777 - DNA, 25 bp, Homo sapien
aaaagttgtcatgctgcccaaacca

SEQ ID NO: 4324778 - DNA, 25 bp, Homo sapien
gaaaacgaagtctgttgagccacca

SEQ ID NO: 4324779 - DNA, 25 bp, Homo sapien
aaacattggatcatcacccataacc

SEQ ID NO: 4324780 - DNA, 25 bp, Homo sapien
gctattacatcaagaggaaaggaag

SEQ ID NO: 4324781 - DNA, 25 bp, Homo sapien
cccataacccctgattgatctgcta

SEQ ID NO: 4324782 - DNA, 25 bp, Homo sapien
cggatgctcagcaaacattggatca

SEQ ID NO: 4324783 - DNA, 25 bp, Homo sapien
gaagtagtccaaattcctggtcacc

SEQ ID NO: 4324784 - DNA, 25 bp, Homo sapien
gagtaacccagagtcttgtcctgaa

SEQ ID NO: 4324785 - DNA, 25 bp, Homo sapien
ctgctagagtaacccagagtcttgt

SEQ ID NO: 4324786 - DNA, 25 bp, Homo sapien
taacccagagtcttgtcctgaagta

SEQ ID NO: 4324787 - DNA, 25 bp, Homo sapien
gcagctgcatttaatctgttcgcca

SEQ ID NO: 4324788 - DNA, 25 bp, Homo sapien
cagctgcatttaatctgttcgccat

SEQ ID NO: 4324789 - DNA, 25 bp, Homo sapien
tggcagctgcatttaatctgttcgc

SEQ ID NO: 4324790 - DNA, 25 bp, Homo sapien
gtggcagctgcatttaatctgttcg

SEQ ID NO: 4324791 - DNA, 25 bp, Homo sapien
tgggctgtactaggtataaggaact

SEQ ID NO: 4324792 - DNA, 25 bp, Homo sapien
gaacttgtaaccatcggaagtccac

SEQ ID NO: 4324793 - DNA, 25 bp, Homo sapien
tctgggctgtactaggtataaggaa

SEQ ID NO: 4324794 - DNA, 25 bp, Homo sapien
cactggtatcctgtaagaccactta

SEQ ID NO: 4324795 - DNA, 25 bp, Homo sapien
gacattgttacagtggagaactcaa

SEQ ID NO: 4324796 - DNA, 25 bp, Homo sapien
gtttcctagagccatatagtccttg

SEQ ID NO: 4324797 - DNA, 25 bp, Homo sapien
gtatcttgaaatctgcacctattct

SEQ ID NO: 4324798 - DNA, 25 bp, Homo sapien
agggttgctctacaagcagtggtga

SEQ ID NO: 4324799 - DNA, 25 bp, Homo sapien
aaagggatgtgacctaactgactca

SEQ ID NO: 4324800 - DNA, 25 bp, Homo sapien
agagaggcccttgcttgttaaatgc

SEQ ID NO: 4324801 - DNA, 25 bp, Homo sapien
tgtgcagattaggtacccagttccg

SEQ ID NO: 4324802 - DNA, 25 bp, Homo sapien
cacagagcccaatgcttagagaggc

SEQ ID NO: 4324803 - DNA, 25 bp, Homo sapien
gaaacagggctacaactataagcat

SEQ ID NO: 4324804 - DNA, 25 bp, Homo sapien
cacagatcatagtacaatttaatgg

SEQ ID NO: 4324805 - DNA, 25 bp, Homo sapien
taagtttctggccatacatgacatc

SEQ ID NO: 4324806 - DNA, 25 bp, Homo sapien
acaactataagcattagggtgatac

SEQ ID NO: 4324807 - DNA, 25 bp, Homo sapien
atgacattcatcaatctaattatca

SEQ ID NO: 4324808 - DNA, 25 bp, Homo sapien
cacaaagtggtagtgagatagcagg

SEQ ID NO: 4324809 - DNA, 25 bp, Homo sapien
acttagtctttagagaaggctagtc

SEQ ID NO: 4324810 - DNA, 25 bp, Homo sapien
aaggctagtctaagtcagtgtatca

SEQ ID NO: 4324811 - DNA, 25 bp, Homo sapien
ttttaagagaccatttgagtgtgat

SEQ ID NO: 4324812 - DNA, 25 bp, Homo sapien
tagcatttggatgcgctgctcagag

SEQ ID NO: 4324813 - DNA, 25 bp, Homo sapien
taggcccaagcctcaaagaactcca

SEQ ID NO: 4324814 - DNA, 25 bp, Homo sapien
gaggaggcatctggtctggaaatat

SEQ ID NO: 4324815 - DNA, 25 bp, Homo sapien
cagaataagaagtaggactaggccc

SEQ ID NO: 4324816 - DNA, 25 bp, Homo sapien
gcagatccacccaacatgagctgat

SEQ ID NO: 4324817 - DNA, 25 bp, Homo sapien
cactaggaagcgcataaagaccacc

SEQ ID NO: 4324818 - DNA, 25 bp, Homo sapien
gatactgccaatcccaatttgcctg

SEQ ID NO: 4324819 - DNA, 25 bp, Homo sapien
ttagccaaacaagctgcccactagg

SEQ ID NO: 4324820 - DNA, 25 bp, Homo sapien
tcactaacatgtgcataaccagaag

SEQ ID NO: 4324821 - DNA, 25 bp, Homo sapien
ttcccacagtatcactaacatgtgc

SEQ ID NO: 4324822 - DNA, 25 bp, Homo sapien
catgtgcataaccagaagggcttag

SEQ ID NO: 4324823 - DNA, 25 bp, Homo sapien
tagaatcagttcatcacattggtac

SEQ ID NO: 4324824 - DNA, 25 bp, Homo sapien
ggaaccctttcagatccataagttg

SEQ ID NO: 4324825 - DNA, 25 bp, Homo sapien
tctgaagtgcgtaaatcaagtgtgc

SEQ ID NO: 4324826 - DNA, 25 bp, Homo sapien
tgctgaaacaatgaatggaaccctt

SEQ ID NO: 4324827 - DNA, 25 bp, Homo sapien
gatccataagttgtaatcactatta

SEQ ID NO: 4324828 - DNA, 25 bp, Homo sapien
agggaatatcctttgggtgaggcaa

SEQ ID NO: 4324829 - DNA, 25 bp, Homo sapien
gcaagttcaccgtttgaagcttaaa

SEQ ID NO: 4324830 - DNA, 25 bp, Homo sapien
gaggctttccggtttatgggcagca

SEQ ID NO: 4324831 - DNA, 25 bp, Homo sapien
aaatgactccaaggaggctttccgg

SEQ ID NO: 4324832 - DNA, 25 bp, Homo sapien
cttcataacattcatcagattatca

SEQ ID NO: 4324833 - DNA, 25 bp, Homo sapien
tgaagctgatggcataggtcctgtc

SEQ ID NO: 4324834 - DNA, 25 bp, Homo sapien
agctgatggcataggtcctgtcagg

SEQ ID NO: 4324835 - DNA, 25 bp, Homo sapien
ttcataacattcatcagattatcaa

SEQ ID NO: 4324836 - DNA, 25 bp, Homo sapien
caatcctatcaggttttctatccat

SEQ ID NO: 4324837 - DNA, 25 bp, Homo sapien
tcaatcctatcaggttttctatcca

SEQ ID NO: 4324838 - DNA, 25 bp, Homo sapien
aacatcaatcctatcaggttttcta

SEQ ID NO: 4324839 - DNA, 25 bp, Homo sapien
gacattggagttcaccaggagaaga

SEQ ID NO: 4324840 - DNA, 25 bp, Homo sapien
caggagaagataatgagcattgcaa

SEQ ID NO: 4324841 - DNA, 25 bp, Homo sapien
tcaagaataacagcgtctagaggcg

SEQ ID NO: 4324842 - DNA, 25 bp, Homo sapien
tctagaggcgattgaggtaactgat

SEQ ID NO: 4324843 - DNA, 25 bp, Homo sapien
gcctagccagttacaccagctgaat

SEQ ID NO: 4324844 - DNA, 25 bp, Homo sapien
aaaaatcaatgtggcttgtttggag

SEQ ID NO: 4324845 - DNA, 25 bp, Homo sapien
agaaagtcatcctactccactgagc

SEQ ID NO: 4324846 - DNA, 25 bp, Homo sapien
ccttggcaatcagtggagtaataga

SEQ ID NO: 4324847 - DNA, 25 bp, Homo sapien
ggtcatggtcacattgagcttagaa

SEQ ID NO: 4324848 - DNA, 25 bp, Homo sapien
ggagcatttctaacactatcattat

SEQ ID NO: 4324849 - DNA, 25 bp, Homo sapien
taagggctactaagggagctctaaa

SEQ ID NO: 4324850 - DNA, 25 bp, Homo sapien
tatgccgtatgaaggcagtgtcagg

SEQ ID NO: 4324851 - DNA, 25 bp, Homo sapien
ggtgtttcacaaatgggttgattct

SEQ ID NO: 4324852 - DNA, 25 bp, Homo sapien
agatactgctcttattaatgtggtg

SEQ ID NO: 4324853 - DNA, 25 bp, Homo sapien
gattctaagggaagttcgtaacagc

SEQ ID NO: 4324854 - DNA, 25 bp, Homo sapien
tagggagccagtgggcatccttggt

SEQ ID NO: 4324855 - DNA, 25 bp, Homo sapien
tcatacagacggcagttataccgct

SEQ ID NO: 4324856 - DNA, 25 bp, Homo sapien
tagctcatacagacggcagttatac

SEQ ID NO: 4324857 - DNA, 25 bp, Homo sapien
ctatagctcatacagacggcagtta

SEQ ID NO: 4324858 - DNA, 25 bp, Homo sapien
gacggcagttataccgctctccttg

SEQ ID NO: 4324859 - DNA, 25 bp, Homo sapien
tatgatgatgacgataacaaaaaca

SEQ ID NO: 4324860 - DNA, 25 bp, Homo sapien
tgatgatgacgataacaaaaacatt

SEQ ID NO: 4324861 - DNA, 25 bp, Homo sapien
acccaaagaagattatgatgatgac

SEQ ID NO: 4324862 - DNA, 25 bp, Homo sapien
gaagattatgatgatgacgataaca

SEQ ID NO: 4324863 - DNA, 25 bp, Homo sapien
tccaagtgactgctgatatgctttc

SEQ ID NO: 4324864 - DNA, 25 bp, Homo sapien
catttcgcataacatttttgaggcc

SEQ ID NO: 4324865 - DNA, 25 bp, Homo sapien
gcccggcccattcactttaagtgta

SEQ ID NO: 4324866 - DNA, 25 bp, Homo sapien
tgaggcctgtctatgctgtagtata

SEQ ID NO: 4324867 - DNA, 25 bp, Homo sapien
ctctcaattgggattcatcccccat

SEQ ID NO: 4324868 - DNA, 25 bp, Homo sapien
ctcccctctcaattgggattcatcc

SEQ ID NO: 4324869 - DNA, 25 bp, Homo sapien
cctctcaattgggattcatccccca

SEQ ID NO: 4324870 - DNA, 25 bp, Homo sapien
cccctctcaattgggattcatcccc

SEQ ID NO: 4324871 - DNA, 25 bp, Homo sapien
tatgcagtcaccacatccgactcac

SEQ ID NO: 4324872 - DNA, 25 bp, Homo sapien
ttatgcagtcaccacatccgactca

SEQ ID NO: 4324873 - DNA, 25 bp, Homo sapien
taaccagtgggtaaggaagtcatta

SEQ ID NO: 4324874 - DNA, 25 bp, Homo sapien
gtacatatgcgcatcaaggttctga

SEQ ID NO: 4324875 - DNA, 25 bp, Homo sapien
aggaaccattcatcccaccgcagtg

SEQ ID NO: 4324876 - DNA, 25 bp, Homo sapien
tacagctactaggagtcaacaggaa

SEQ ID NO: 4324877 - DNA, 25 bp, Homo sapien
tttttagtgtctccaaacctctaca

SEQ ID NO: 4324878 - DNA, 25 bp, Homo sapien
acaatttctcaatcaactctgttgt

SEQ ID NO: 4324879 - DNA, 25 bp, Homo sapien
tacaatttctcaatcaactctgttg

SEQ ID NO: 4324880 - DNA, 25 bp, Homo sapien
ctacaatttctcaatcaactctgtt

SEQ ID NO: 4324881 - DNA, 25 bp, Homo sapien
tgacagccagtgctctagggtattt

SEQ ID NO: 4324882 - DNA, 25 bp, Homo sapien
tgtccccaagaaaatgagctctgtg

SEQ ID NO: 4324883 - DNA, 25 bp, Homo sapien
cagtgctctagggtatttgtcccca

SEQ ID NO: 4324884 - DNA, 25 bp, Homo sapien
ggtatttgtccccaagaaaatgagc

SEQ ID NO: 4324885 - DNA, 25 bp, Homo sapien
tcatctttgtacactatgatatgaa

SEQ ID NO: 4324886 - DNA, 25 bp, Homo sapien
ctgctactgaatcatctttgtacac

SEQ ID NO: 4324887 - DNA, 25 bp, Homo sapien
ctttgtacactatgatatgaacata

SEQ ID NO: 4324888 - DNA, 25 bp, Homo sapien
tactgaatcatctttgtacactatg

SEQ ID NO: 4324889 - DNA, 25 bp, Homo sapien
ggagactaccgcttcagtgagttga

SEQ ID NO: 4324890 - DNA, 25 bp, Homo sapien
tggagactaccgcttcagtgagttg

SEQ ID NO: 4324891 - DNA, 25 bp, Homo sapien
ttggagactaccgcttcagtgagtt

SEQ ID NO: 4324892 - DNA, 25 bp, Homo sapien
gagactaccgcttcagtgagttgat

SEQ ID NO: 4324893 - DNA, 25 bp, Homo sapien
cacctgccagtagattagatttgta

SEQ ID NO: 4324894 - DNA, 25 bp, Homo sapien
gaatcctgcactgatacaggcacag

SEQ ID NO: 4324895 - DNA, 25 bp, Homo sapien
ccagtacttgccctgaaccgggcaa

SEQ ID NO: 4324896 - DNA, 25 bp, Homo sapien
caggatgctgaaacatactcagaat

SEQ ID NO: 4324897 - DNA, 25 bp, Homo sapien
ttttatacaaagatatgtgcagtta

SEQ ID NO: 4324898 - DNA, 25 bp, Homo sapien
tatgtgcagttataagataaccatt

SEQ ID NO: 4324899 - DNA, 25 bp, Homo sapien
ttataagataaccattctaaccaca

SEQ ID NO: 4324900 - DNA, 25 bp, Homo sapien
taatatttaagagatatttgtatct

SEQ ID NO: 4324901 - DNA, 25 bp, Homo sapien
aatactagcctgttttttgatgcca

SEQ ID NO: 4324902 - DNA, 25 bp, Homo sapien
ggcaaataggtcttgatatctccag

SEQ ID NO: 4324903 - DNA, 25 bp, Homo sapien
caatccttgacccagggcgtatgtt

SEQ ID NO: 4324904 - DNA, 25 bp, Homo sapien
ttccagcaatgaccttaaaaggagg

SEQ ID NO: 4324905 - DNA, 25 bp, Homo sapien
tggctatgcaaacagcaacactggt

SEQ ID NO: 4324906 - DNA, 25 bp, Homo sapien
caacactggttgatgataatttgga

SEQ ID NO: 4324907 - DNA, 25 bp, Homo sapien
cactgttagtgatctttgcaaacac

SEQ ID NO: 4324908 - DNA, 25 bp, Homo sapien
tagaaagtccactggctatgcaaac

SEQ ID NO: 4324909 - DNA, 25 bp, Homo sapien
aggtggatacagattggggtttaag

SEQ ID NO: 4324910 - DNA, 25 bp, Homo sapien
gaggtggatacagattggggtttaa

SEQ ID NO: 4324911 - DNA, 25 bp, Homo sapien
tggatacagattggggtttaagttc

SEQ ID NO: 4324912 - DNA, 25 bp, Homo sapien
tgaggtggatacagattggggttta

SEQ ID NO: 4324913 - DNA, 25 bp, Homo sapien
gagtttgagataaagggcactcctc

SEQ ID NO: 4324914 - DNA, 25 bp, Homo sapien
gtgagtttgagataaagggcactcc

SEQ ID NO: 4324915 - DNA, 25 bp, Homo sapien
gtttgagataaagggcactcctcat

SEQ ID NO: 4324916 - DNA, 25 bp, Homo sapien
tcagtgagtttgagataaagggcac

SEQ ID NO: 4324917 - DNA, 25 bp, Homo sapien
tgaccttgcttcatagttcactgag

SEQ ID NO: 4324918 - DNA, 25 bp, Homo sapien
cttgcttcatagttcactgagaaac

SEQ ID NO: 4324919 - DNA, 25 bp, Homo sapien
ctgatgaccttgcttcatagttcac

SEQ ID NO: 4324920 - DNA, 25 bp, Homo sapien
tcactttcagctgatgaccttgctt

SEQ ID NO: 4324921 - DNA, 25 bp, Homo sapien
accactaactagaactgaagcagag

SEQ ID NO: 4324922 - DNA, 25 bp, Homo sapien
tgatgacactgttaggatgacaaca

SEQ ID NO: 4324923 - DNA, 25 bp, Homo sapien
ctggccagaccactaactagaactg

SEQ ID NO: 4324924 - DNA, 25 bp, Homo sapien
caaggatctaagaagatgtccagag

SEQ ID NO: 4324925 - DNA, 25 bp, Homo sapien
tcccacacacgtacagtgcttttta

SEQ ID NO: 4324926 - DNA, 25 bp, Homo sapien
cccacacacgtacagtgctttttat

SEQ ID NO: 4324927 - DNA, 25 bp, Homo sapien
ggcccagccggtcagacagtcttga

SEQ ID NO: 4324928 - DNA, 25 bp, Homo sapien
caggcccagccggtcagacagtctt

SEQ ID NO: 4324929 - DNA, 25 bp, Homo sapien
aggcccagccggtcagacagtcttg

SEQ ID NO: 4324930 - DNA, 25 bp, Homo sapien
gcccagccggtcagacagtcttgat

SEQ ID NO: 4324931 - DNA, 25 bp, Homo sapien
atagatgctaactggttctgagaca

SEQ ID NO: 4324932 - DNA, 25 bp, Homo sapien
actgcatgctaaaatcgcctcttct

SEQ ID NO: 4324933 - DNA, 25 bp, Homo sapien
gctgttataccagagtaatgatgca

SEQ ID NO: 4324934 - DNA, 25 bp, Homo sapien
tctgaagacccataacaatagatgc

SEQ ID NO: 4324935 - DNA, 25 bp, Homo sapien
ccactataagagaggttgcaggata

SEQ ID NO: 4324936 - DNA, 25 bp, Homo sapien
caacatggtataaatattggaagag

SEQ ID NO: 4324937 - DNA, 25 bp, Homo sapien
gaccataagcaatagcatttctggg

SEQ ID NO: 4324938 - DNA, 25 bp, Homo sapien
tattctgtcagccaacagacaacca

SEQ ID NO: 4324939 - DNA, 25 bp, Homo sapien
tctccaggaaatagttacacggaaa

SEQ ID NO: 4324940 - DNA, 25 bp, Homo sapien
tgaaacctgcagcttatcatgctca

SEQ ID NO: 4324941 - DNA, 25 bp, Homo sapien
aatggctacatggtaaactctccag

SEQ ID NO: 4324942 - DNA, 25 bp, Homo sapien
tgtttttgtcaaccaatagcacaaa

SEQ ID NO: 4324943 - DNA, 25 bp, Homo sapien
aaactgccattaatgttccagaggg

SEQ ID NO: 4324944 - DNA, 25 bp, Homo sapien
aaaaactgccattaatgttccagag

SEQ ID NO: 4324945 - DNA, 25 bp, Homo sapien
acaaaaactgccattaatgttccag

SEQ ID NO: 4324946 - DNA, 25 bp, Homo sapien
agtggaacaaaaactgccattaatg

SEQ ID NO: 4324947 - DNA, 25 bp, Homo sapien
caactataatcaggacagtcggctg

SEQ ID NO: 4324948 - DNA, 25 bp, Homo sapien
ccagagtttggagagagtccccgga

SEQ ID NO: 4324949 - DNA, 25 bp, Homo sapien
tgggaccattggtctaaccagagtt

SEQ ID NO: 4324950 - DNA, 25 bp, Homo sapien
cagtcggctgggtgcttcttatcaa

SEQ ID NO: 4324951 - DNA, 25 bp, Homo sapien
tgaatgtacaataactgcccaatat

SEQ ID NO: 4324952 - DNA, 25 bp, Homo sapien
tgtctttcctgtcaactgaatgtac

SEQ ID NO: 4324953 - DNA, 25 bp, Homo sapien
ctgaatgtacaataactgcccaata

SEQ ID NO: 4324954 - DNA, 25 bp, Homo sapien
tttcctgtcaactgaatgtacaata

SEQ ID NO: 4324955 - DNA, 25 bp, Homo sapien
gtagttatatgtgttcttcaaaagg

SEQ ID NO: 4324956 - DNA, 25 bp, Homo sapien
tattctttgtagttatatgtgttct

SEQ ID NO: 4324957 - DNA, 25 bp, Homo sapien
tggtgtttggaaatattctttgtag

SEQ ID NO: 4324958 - DNA, 25 bp, Homo sapien
tatgtgttcttcaaaaggtctgaat

SEQ ID NO: 4324959 - DNA, 25 bp, Homo sapien
ccattggtcagattcattgacggca

SEQ ID NO: 4324960 - DNA, 25 bp, Homo sapien
taaggactgtgattattttcaactc

SEQ ID NO: 4324961 - DNA, 25 bp, Homo sapien
tgacggcagtatgaaggacaagatt

SEQ ID NO: 4324962 - DNA, 25 bp, Homo sapien
ccaattctggaattgggccaaacaa

SEQ ID NO: 4324963 - DNA, 25 bp, Homo sapien
gggagccctcattcttacaagggca

SEQ ID NO: 4324964 - DNA, 25 bp, Homo sapien
agccctcattcttacaagggcaagg

SEQ ID NO: 4324965 - DNA, 25 bp, Homo sapien
ttgggagccctcattcttacaaggg

SEQ ID NO: 4324966 - DNA, 25 bp, Homo sapien
caagggcaaggctttgtggctgctt

SEQ ID NO: 4324967 - DNA, 25 bp, Homo sapien
tgtattcgttatcacttatctcaag

SEQ ID NO: 4324968 - DNA, 25 bp, Homo sapien
tgcattgtggttgaagaacacttga

SEQ ID NO: 4324969 - DNA, 25 bp, Homo sapien
tgcattcttagaacagcctttgcta

SEQ ID NO: 4324970 - DNA, 25 bp, Homo sapien
cagttcttcagaagaatgttgttta

SEQ ID NO: 4324971 - DNA, 25 bp, Homo sapien
tctgtgagctgcatgatccaggctt

SEQ ID NO: 4324972 - DNA, 25 bp, Homo sapien
caagcccagtccaagcagaatgtag

SEQ ID NO: 4324973 - DNA, 25 bp, Homo sapien
tgtcttttcagaggtagtatgtcct

SEQ ID NO: 4324974 - DNA, 25 bp, Homo sapien
tgtcctttagcttcaccggtcatgc

SEQ ID NO: 4324975 - DNA, 25 bp, Homo sapien
ggctacacaggaagcatcgcagcat

SEQ ID NO: 4324976 - DNA, 25 bp, Homo sapien
aggctacacaggaagcatcgcagca

SEQ ID NO: 4324977 - DNA, 25 bp, Homo sapien
gacgatctgcgggaaccacaacctc

SEQ ID NO: 4324978 - DNA, 25 bp, Homo sapien
aatcccaggacgatctgcgggaacc

SEQ ID NO: 4324979 - DNA, 25 bp, Homo sapien
ccaggacgatctgcgggaaccacaa

SEQ ID NO: 4324980 - DNA, 25 bp, Homo sapien
acgatctgcgggaaccacaacctca

SEQ ID NO: 4324981 - DNA, 25 bp, Homo sapien
tcactctccgctcataaagacacgg

SEQ ID NO: 4324982 - DNA, 25 bp, Homo sapien
gatgcaggacaagggtcctcggcca

SEQ ID NO: 4324983 - DNA, 25 bp, Homo sapien
aagtgcccactgagaagagcagcgg

SEQ ID NO: 4324984 - DNA, 25 bp, Homo sapien
agaagtatcaatggcccttgctccg

SEQ ID NO: 4324985 - DNA, 25 bp, Homo sapien
catacatttgtccaaccatcgtttg

SEQ ID NO: 4324986 - DNA, 25 bp, Homo sapien
aactattgcagatcataatgggtaa

SEQ ID NO: 4324987 - DNA, 25 bp, Homo sapien
attagagataactctgggaaacttc

SEQ ID NO: 4324988 - DNA, 25 bp, Homo sapien
tactttcctgtgaacttaactatct

SEQ ID NO: 4324989 - DNA, 25 bp, Homo sapien
tcttcaggccaggtgagcaagggcc

SEQ ID NO: 4324990 - DNA, 25 bp, Homo sapien
gaagataccagcgaaaagaaccgct

SEQ ID NO: 4324991 - DNA, 25 bp, Homo sapien
tggagcagtttcctaggtccccgtc

SEQ ID NO: 4324992 - DNA, 25 bp, Homo sapien
gaattactcaagtgtctcctggaaa

SEQ ID NO: 4324993 - DNA, 25 bp, Homo sapien
ttttatccgtgcacatcccttcagc

SEQ ID NO: 4324994 - DNA, 25 bp, Homo sapien
gattacaagtgtttgcgagctgctg

SEQ ID NO: 4324995 - DNA, 25 bp, Homo sapien
cagctgtcggcaagctcaggtcaca

SEQ ID NO: 4324996 - DNA, 25 bp, Homo sapien
cccttcagctgtcggcaagctcagg

SEQ ID NO: 4324997 - DNA, 25 bp, Homo sapien
gaaagctctacagtcctctgtgttt

SEQ ID NO: 4324998 - DNA, 25 bp, Homo sapien
gagaaagctctacagtcctctgtgt

SEQ ID NO: 4324999 - DNA, 25 bp, Homo sapien
agaaagctctacagtcctctgtgtt

SEQ ID NO: 4325000 - DNA, 25 bp, Homo sapien
gacgccacttcttttcattgctgca

SEQ ID NO: 4325001 - DNA, 25 bp, Homo sapien
tctgagtcacgttcagattgacgcc

SEQ ID NO: 4325002 - DNA, 25 bp, Homo sapien
catttgagaaaatagtgtagaaaca

SEQ ID NO: 4325003 - DNA, 25 bp, Homo sapien
ttaaatagacgacttgatttctgag

SEQ ID NO: 4325004 - DNA, 25 bp, Homo sapien
ggtagaggtgatacgccaaactgca

SEQ ID NO: 4325005 - DNA, 25 bp, Homo sapien
gacagctggtagaggtgatacgcca

SEQ ID NO: 4325006 - DNA, 25 bp, Homo sapien
tgatacgccaaactgcattgcagag

SEQ ID NO: 4325007 - DNA, 25 bp, Homo sapien
gaggtgatacgccaaactgcattgc

SEQ ID NO: 4325008 - DNA, 25 bp, Homo sapien
ctccaggactctgtttgtttcttta

SEQ ID NO: 4325009 - DNA, 25 bp, Homo sapien
tgtaacgcaacacttgcaaatattt

SEQ ID NO: 4325010 - DNA, 25 bp, Homo sapien
ctttgagtttgtaacgcaacacttg

SEQ ID NO: 4325011 - DNA, 25 bp, Homo sapien
gagtttgtaacgcaacacttgcaaa

SEQ ID NO: 4325012 - DNA, 25 bp, Homo sapien
caaaggagactcctgcattgggcat

SEQ ID NO: 4325013 - DNA, 25 bp, Homo sapien
gtggaacctctcagtctttcaaagg

SEQ ID NO: 4325014 - DNA, 25 bp, Homo sapien
tcctcattgtccagagtggaacctc

SEQ ID NO: 4325015 - DNA, 25 bp, Homo sapien
tctgatcccggagaaacgattttca

SEQ ID NO: 4325016 - DNA, 25 bp, Homo sapien
gaaggactgatgtgagttactctgg

SEQ ID NO: 4325017 - DNA, 25 bp, Homo sapien
catgggataaccaaacaaatttctt

SEQ ID NO: 4325018 - DNA, 25 bp, Homo sapien
tgtttaggctatctctgatcttctg

SEQ ID NO: 4325019 - DNA, 25 bp, Homo sapien
ttagggtcttggtgaatctgcttgg

SEQ ID NO: 4325020 - DNA, 25 bp, Homo sapien
gatttcgtgcccttcccccatgaag

SEQ ID NO: 4325021 - DNA, 25 bp, Homo sapien
ttatctctgagatttcgtgcccttc

SEQ ID NO: 4325022 - DNA, 25 bp, Homo sapien
agctgccagggttcagatgctgaca

SEQ ID NO: 4325023 - DNA, 25 bp, Homo sapien
tgaagctatgctcctccagtctggc

SEQ ID NO: 4325024 - DNA, 25 bp, Homo sapien
gatgatgagcatccacaggcacagg

SEQ ID NO: 4325025 - DNA, 25 bp, Homo sapien
atcttttgatgatgagcatccacag

SEQ ID NO: 4325026 - DNA, 25 bp, Homo sapien
tcttttgatgatgagcatccacagg

SEQ ID NO: 4325027 - DNA, 25 bp, Homo sapien
tttgatgatgagcatccacaggcac

SEQ ID NO: 4325028 - DNA, 25 bp, Homo sapien
caagagttgtaacactgccagagct

SEQ ID NO: 4325029 - DNA, 25 bp, Homo sapien
gaacagttgcggactaagctccact

SEQ ID NO: 4325030 - DNA, 25 bp, Homo sapien
gtaaatgtgattgcagacctgccct

SEQ ID NO: 4325031 - DNA, 25 bp, Homo sapien
gctgttaacactgctgcctcgatac

SEQ ID NO: 4325032 - DNA, 25 bp, Homo sapien
caggtagtagctaaattttgtagca

SEQ ID NO: 4325033 - DNA, 25 bp, Homo sapien
tgggtctatcactaccacaggtagt

SEQ ID NO: 4325034 - DNA, 25 bp, Homo sapien
agtgcctgtgggtctatcactacca

SEQ ID NO: 4325035 - DNA, 25 bp, Homo sapien
ctgtggttccatcagtgcctgtggg

SEQ ID NO: 4325036 - DNA, 25 bp, Homo sapien
tctttggtgctgaaagcccttgaaa

SEQ ID NO: 4325037 - DNA, 25 bp, Homo sapien
gggctgctgatatctcagattctct

SEQ ID NO: 4325038 - DNA, 25 bp, Homo sapien
gcaggaccttttagtgtgatgagca

SEQ ID NO: 4325039 - DNA, 25 bp, Homo sapien
ctcagattctctataagtaggaaac

SEQ ID NO: 4325040 - DNA, 25 bp, Homo sapien
cttagcttctttagttacaggatga

SEQ ID NO: 4325041 - DNA, 25 bp, Homo sapien
ggatgagtgactgcaataaattatc

SEQ ID NO: 4325042 - DNA, 25 bp, Homo sapien
caaatgtacatcttggaatcactaa

SEQ ID NO: 4325043 - DNA, 25 bp, Homo sapien
agagtcacaagagtcatttccttaa

SEQ ID NO: 4325044 - DNA, 25 bp, Homo sapien
ctcttgcaaggagtttccttcatcc

SEQ ID NO: 4325045 - DNA, 25 bp, Homo sapien
ccttctttccacttgaagaaattct

SEQ ID NO: 4325046 - DNA, 25 bp, Homo sapien
ttgctccagcctttctcttgcaagg

SEQ ID NO: 4325047 - DNA, 25 bp, Homo sapien
ttcttatctgtgatgattcagtata

SEQ ID NO: 4325048 - DNA, 25 bp, Homo sapien
taacagtcgaaagatggtatcctcc

SEQ ID NO: 4325049 - DNA, 25 bp, Homo sapien
gaagtaaacctcatgtctcaagtag

SEQ ID NO: 4325050 - DNA, 25 bp, Homo sapien
catggtgattgatagataacagtcg

SEQ ID NO: 4325051 - DNA, 25 bp, Homo sapien
tttatgtgttgcagattgccgtcgc

SEQ ID NO: 4325052 - DNA, 25 bp, Homo sapien
aataaaactatagcagatgacaacc

SEQ ID NO: 4325053 - DNA, 25 bp, Homo sapien
aaaactatagcagatgacaaccttc

SEQ ID NO: 4325054 - DNA, 25 bp, Homo sapien
tgacaaccttcatcgacatgcatct

SEQ ID NO: 4325055 - DNA, 25 bp, Homo sapien
catcgacatgcatcttgaagttatt

SEQ ID NO: 4325056 - DNA, 25 bp, Homo sapien
gcagagttccagaataaatcagtgg

SEQ ID NO: 4325057 - DNA, 25 bp, Homo sapien
tataggacagacctcagtggaggat

SEQ ID NO: 4325058 - DNA, 25 bp, Homo sapien
caagcttgattctggcatttagcct

SEQ ID NO: 4325059 - DNA, 25 bp, Homo sapien
gagccttagacagtctttcggaatt

SEQ ID NO: 4325060 - DNA, 25 bp, Homo sapien
tataggacattagcccctgtttcac

SEQ ID NO: 4325061 - DNA, 25 bp, Homo sapien
tattcaaaggaattacaagcactga

SEQ ID NO: 4325062 - DNA, 25 bp, Homo sapien
taatgtcttcagttaatgagctgga

SEQ ID NO: 4325063 - DNA, 25 bp, Homo sapien
ccccaaatccagattgtataacgaa

SEQ ID NO: 4325064 - DNA, 25 bp, Homo sapien
ttctgggagttgctgttaatctgat

SEQ ID NO: 4325065 - DNA, 25 bp, Homo sapien
ctgggagttgctgttaatctgatgt

SEQ ID NO: 4325066 - DNA, 25 bp, Homo sapien
tctgggagttgctgttaatctgatg

SEQ ID NO: 4325067 - DNA, 25 bp, Homo sapien
tctgattgctatcagcaatgcccca

SEQ ID NO: 4325068 - DNA, 25 bp, Homo sapien
caattgtttatatggataatctgag

SEQ ID NO: 4325069 - DNA, 25 bp, Homo sapien
tgattctgattgctatcagcaatgc

SEQ ID NO: 4325070 - DNA, 25 bp, Homo sapien
taatctgagcaggtacatttctgat

SEQ ID NO: 4325071 - DNA, 25 bp, Homo sapien
tgatagacaccataggagccgactc

SEQ ID NO: 4325072 - DNA, 25 bp, Homo sapien
gaggccgagagtcagactgatagac

SEQ ID NO: 4325073 - DNA, 25 bp, Homo sapien
gagccgactctttgatatgccacca

SEQ ID NO: 4325074 - DNA, 25 bp, Homo sapien
tatgccaccagcgaactctcagaaa

SEQ ID NO: 4325075 - DNA, 25 bp, Homo sapien
cagaacctcgagagcagaacatgag

SEQ ID NO: 4325076 - DNA, 25 bp, Homo sapien
ccagatatgggctacttgtgactag

SEQ ID NO: 4325077 - DNA, 25 bp, Homo sapien
taaatcctttgggttatccactgcc

SEQ ID NO: 4325078 - DNA, 25 bp, Homo sapien
gcttacttgtttaatggcagccaca

SEQ ID NO: 4325079 - DNA, 25 bp, Homo sapien
cattctattcagattgtcatttgga

SEQ ID NO: 4325080 - DNA, 25 bp, Homo sapien
gttcacttctgccaataacattcta

SEQ ID NO: 4325081 - DNA, 25 bp, Homo sapien
gggtgtcccatgtaactctcctagg

SEQ ID NO: 4325082 - DNA, 25 bp, Homo sapien
tcctaggaccttaattacgagaaca

SEQ ID NO: 4325083 - DNA, 25 bp, Homo sapien
tccaccatatcctggatgaagcaac

SEQ ID NO: 4325084 - DNA, 25 bp, Homo sapien
agcaacagtaacaacgatgagaggg

SEQ ID NO: 4325085 - DNA, 25 bp, Homo sapien
gggagacaggcgtactttgttctta

SEQ ID NO: 4325086 - DNA, 25 bp, Homo sapien
ttgctgcaagctttcggattctgac

SEQ ID NO: 4325087 - DNA, 25 bp, Homo sapien
gaaatccaaggaactcattttgtgg

SEQ ID NO: 4325088 - DNA, 25 bp, Homo sapien
cattttgtggctccacaatctctct

SEQ ID NO: 4325089 - DNA, 25 bp, Homo sapien
tgattgattgagaaactttcagatt

SEQ ID NO: 4325090 - DNA, 25 bp, Homo sapien
ttgtgctgatgtcgcctaccaagga

SEQ ID NO: 4325091 - DNA, 25 bp, Homo sapien
tccctgaggactgccttaataccag

SEQ ID NO: 4325092 - DNA, 25 bp, Homo sapien
catgaacactattgcacctgtgcag

SEQ ID NO: 4325093 - DNA, 25 bp, Homo sapien
tagaagcactacaaatttccctgag

SEQ ID NO: 4325094 - DNA, 25 bp, Homo sapien
tgtacacgctcttgaaaccatagat

SEQ ID NO: 4325095 - DNA, 25 bp, Homo sapien
tgggtgatacctcctgcaatatgtg

SEQ ID NO: 4325096 - DNA, 25 bp, Homo sapien
aacatgtacttatctttctgggtga

SEQ ID NO: 4325097 - DNA, 25 bp, Homo sapien
tatcacgagaacatgagggttaact

SEQ ID NO: 4325098 - DNA, 25 bp, Homo sapien
gcaggaggtgaaagtcacatactta

SEQ ID NO: 4325099 - DNA, 25 bp, Homo sapien
aactgggtgagattgggccctgcac

SEQ ID NO: 4325100 - DNA, 25 bp, Homo sapien
gatgtcctagggaagttgctgccag

SEQ ID NO: 4325101 - DNA, 25 bp, Homo sapien
tctttagggaaatgtacagctcctt

SEQ ID NO: 4325102 - DNA, 25 bp, Homo sapien
tagtttgaggacagtcactgatgtc

SEQ ID NO: 4325103 - DNA, 25 bp, Homo sapien
tccagacatcaacgagcagtcgctt

SEQ ID NO: 4325104 - DNA, 25 bp, Homo sapien
tctcccagggtcaacttagtctacg

SEQ ID NO: 4325105 - DNA, 25 bp, Homo sapien
aatgctgagttaagaaatgggaccc

SEQ ID NO: 4325106 - DNA, 25 bp, Homo sapien
gaatgtattaactcctctcccaggg

SEQ ID NO: 4325107 - DNA, 25 bp, Homo sapien
ttttacagttgtgacacccctggga

SEQ ID NO: 4325108 - DNA, 25 bp, Homo sapien
aaatgttacagcagacctgaccacg

SEQ ID NO: 4325109 - DNA, 25 bp, Homo sapien
gggaagctcctctatgttatgtgaa

SEQ ID NO: 4325110 - DNA, 25 bp, Homo sapien
tgctacacgaggaggagacacttct

SEQ ID NO: 4325111 - DNA, 25 bp, Homo sapien
gacattttccaatgccgcctcaggc

SEQ ID NO: 4325112 - DNA, 25 bp, Homo sapien
aaggcaaattctcggaggatgctcc

SEQ ID NO: 4325113 - DNA, 25 bp, Homo sapien
tgaatttctggtgcagtcctgcgcg

SEQ ID NO: 4325114 - DNA, 25 bp, Homo sapien
ggatgctccgggcaacttcgacatt

SEQ ID NO: 4325115 - DNA, 25 bp, Homo sapien
tcctggttatgtatagcactttatc

SEQ ID NO: 4325116 - DNA, 25 bp, Homo sapien
tacacacactatacgtatacatgag

SEQ ID NO: 4325117 - DNA, 25 bp, Homo sapien
tcatgggctagctaacttgacaggg

SEQ ID NO: 4325118 - DNA, 25 bp, Homo sapien
cagggcactttcatcatgtatttcc

SEQ ID NO: 4325119 - DNA, 25 bp, Homo sapien
catacataaaacaaagcctctagga

SEQ ID NO: 4325120 - DNA, 25 bp, Homo sapien
tgccaaacaataaattcaaggacag

SEQ ID NO: 4325121 - DNA, 25 bp, Homo sapien
aaacgtctcatgcttaatgttccca

SEQ ID NO: 4325122 - DNA, 25 bp, Homo sapien
tgtgaggttaaaagccaaacgtctc

SEQ ID NO: 4325123 - DNA, 25 bp, Homo sapien
aagtgtccaaaaggcccgtaggcag

SEQ ID NO: 4325124 - DNA, 25 bp, Homo sapien
caaagagccatggtacatagagata

SEQ ID NO: 4325125 - DNA, 25 bp, Homo sapien
cctggattgcatgggaattagccta

SEQ ID NO: 4325126 - DNA, 25 bp, Homo sapien
gcctaacatggttggaataataccc

SEQ ID NO: 4325127 - DNA, 25 bp, Homo sapien
tatattttactgcataactatataa

SEQ ID NO: 4325128 - DNA, 25 bp, Homo sapien
ttttactgcataactatataaatac

SEQ ID NO: 4325129 - DNA, 25 bp, Homo sapien
tactgcataactatataaatacaat

SEQ ID NO: 4325130 - DNA, 25 bp, Homo sapien
tattttactgcataactatataaat

SEQ ID NO: 4325131 - DNA, 25 bp, Homo sapien
aacatgaaggaagctgatcatagtc

SEQ ID NO: 4325132 - DNA, 25 bp, Homo sapien
ggaacttggccacttgctagatcaa

SEQ ID NO: 4325133 - DNA, 25 bp, Homo sapien
agctgatcatagtcctgtgatgttc

SEQ ID NO: 4325134 - DNA, 25 bp, Homo sapien
aacttggccacttgctagatcaaca

SEQ ID NO: 4325135 - DNA, 25 bp, Homo sapien
cttttttgagaataccccagcccag

SEQ ID NO: 4325136 - DNA, 25 bp, Homo sapien
gaaagtaccgtcaattcttctgagg

SEQ ID NO: 4325137 - DNA, 25 bp, Homo sapien
taatttaccaccttggcagtcagag

SEQ ID NO: 4325138 - DNA, 25 bp, Homo sapien
tttgtcagccatagggtaaactggg

SEQ ID NO: 4325139 - DNA, 25 bp, Homo sapien
tactgaggcacttttgcagagacat

SEQ ID NO: 4325140 - DNA, 25 bp, Homo sapien
aaggaggaaagctaatacacacggt

SEQ ID NO: 4325141 - DNA, 25 bp, Homo sapien
cagactgaacaacgaaaacaacggt

SEQ ID NO: 4325142 - DNA, 25 bp, Homo sapien
ccttgatcctacaacagtactgagg

SEQ ID NO: 4325143 - DNA, 25 bp, Homo sapien
gctagcctgacactctaagttaagg

SEQ ID NO: 4325144 - DNA, 25 bp, Homo sapien
gcttgaaaaacattgccctgactcc

SEQ ID NO: 4325145 - DNA, 25 bp, Homo sapien
gagaattagaatatgtccatctatt

SEQ ID NO: 4325146 - DNA, 25 bp, Homo sapien
tccatctattaatgaaagtcaagag

SEQ ID NO: 4325147 - DNA, 25 bp, Homo sapien
caatgagactatgccttgcaggagg

SEQ ID NO: 4325148 - DNA, 25 bp, Homo sapien
gagccaggaggttttgaatgttcaa

SEQ ID NO: 4325149 - DNA, 25 bp, Homo sapien
gagggagggcatcaaaagcatcttc

SEQ ID NO: 4325150 - DNA, 25 bp, Homo sapien
gaatgttcaatgagactatgccttg

SEQ ID NO: 4325151 - DNA, 25 bp, Homo sapien
tggagaacccattcaaatttcaggc

SEQ ID NO: 4325152 - DNA, 25 bp, Homo sapien
tcgtatttctggtggcctaacagcc

SEQ ID NO: 4325153 - DNA, 25 bp, Homo sapien
gaactggtgctcatgctgcaagaaa

SEQ ID NO: 4325154 - DNA, 25 bp, Homo sapien
tcatctacatggagtaatggtctcg

SEQ ID NO: 4325155 - DNA, 25 bp, Homo sapien
agggcgtcctgttgagtgaagaacc

SEQ ID NO: 4325156 - DNA, 25 bp, Homo sapien
gaagatcataatcagagggcgtcct

SEQ ID NO: 4325157 - DNA, 25 bp, Homo sapien
gaaccatgctttggattgtcccgag

SEQ ID NO: 4325158 - DNA, 25 bp, Homo sapien
gcacgggatcagaggctgaatcaaa

SEQ ID NO: 4325159 - DNA, 25 bp, Homo sapien
gaccattaagatgtacatcacaaag

SEQ ID NO: 4325160 - DNA, 25 bp, Homo sapien
ctgaccattaagatgtacatcacaa

SEQ ID NO: 4325161 - DNA, 25 bp, Homo sapien
cattaagatgtacatcacaaaggaa

SEQ ID NO: 4325162 - DNA, 25 bp, Homo sapien
ccattaagatgtacatcacaaagga

SEQ ID NO: 4325163 - DNA, 25 bp, Homo sapien
ttccattcagcatacagtgaccatt

SEQ ID NO: 4325164 - DNA, 25 bp, Homo sapien
aatatatgcttaagtcagggatgtt

SEQ ID NO: 4325165 - DNA, 25 bp, Homo sapien
ggaccatgtgttccattcagcatac

SEQ ID NO: 4325166 - DNA, 25 bp, Homo sapien
ttcttctctgaagatggaccatgtg

SEQ ID NO: 4325167 - DNA, 25 bp, Homo sapien
caaaaattgttgatatcctaaacac

SEQ ID NO: 4325168 - DNA, 25 bp, Homo sapien
taaaggacagttcagagtaaaatta

SEQ ID NO: 4325169 - DNA, 25 bp, Homo sapien
gaggtagagggaactagtattcctg

SEQ ID NO: 4325170 - DNA, 25 bp, Homo sapien
ctataaccaagaattacaagggcca

SEQ ID NO: 4325171 - DNA, 25 bp, Homo sapien
ttcaagatttgggagctctgccaca

SEQ ID NO: 4325172 - DNA, 25 bp, Homo sapien
tcacttctcctgatgttccaaaggg

SEQ ID NO: 4325173 - DNA, 25 bp, Homo sapien
gatacttcatccatcagctttcaag

SEQ ID NO: 4325174 - DNA, 25 bp, Homo sapien
tactgcacatttgtaagagccaaag

SEQ ID NO: 4325175 - DNA, 25 bp, Homo sapien
tatgcagatgtaagtggcaaaaatc

SEQ ID NO: 4325176 - DNA, 25 bp, Homo sapien
cttatgcagatgtaagtggcaaaaa

SEQ ID NO: 4325177 - DNA, 25 bp, Homo sapien
aggatttttaattagacgtgaatca

SEQ ID NO: 4325178 - DNA, 25 bp, Homo sapien
ttagacgtgaatcaattgtttaaaa

SEQ ID NO: 4325179 - DNA, 25 bp, Homo sapien
ggaggttttacattatgacaatgag

SEQ ID NO: 4325180 - DNA, 25 bp, Homo sapien
gatggttgtgaattcagggaaacag

SEQ ID NO: 4325181 - DNA, 25 bp, Homo sapien
tctgaaagagaatttgctaacggac

SEQ ID NO: 4325182 - DNA, 25 bp, Homo sapien
gagaatttgctaacggaccagtaca

SEQ ID NO: 4325183 - DNA, 25 bp, Homo sapien
tctctaccatataatctaaataagg

SEQ ID NO: 4325184 - DNA, 25 bp, Homo sapien
cggagtcaggtgtggtacacagtct

SEQ ID NO: 4325185 - DNA, 25 bp, Homo sapien
gacaaatacttaatggcggagtcag

SEQ ID NO: 4325186 - DNA, 25 bp, Homo sapien
tgtggtacacagtctgattttattc

SEQ ID NO: 4325187 - DNA, 25 bp, Homo sapien
gccggggaggaacatcatattcttc

SEQ ID NO: 4325188 - DNA, 25 bp, Homo sapien
acttccaaggtgaccattggaaaag

SEQ ID NO: 4325189 - DNA, 25 bp, Homo sapien
ttatgctagggaggagggtggtaac

SEQ ID NO: 4325190 - DNA, 25 bp, Homo sapien
gaaagccggggaggaacatcatatt

SEQ ID NO: 4325191 - DNA, 25 bp, Homo sapien
ctgatgattcaccactgcccaaagg

SEQ ID NO: 4325192 - DNA, 25 bp, Homo sapien
ggaccatccaaagccagtgttcaat

SEQ ID NO: 4325193 - DNA, 25 bp, Homo sapien
tgaaggaccttaaagccatagctgc

SEQ ID NO: 4325194 - DNA, 25 bp, Homo sapien
tctaacttgctcatatgggaccatc

SEQ ID NO: 4325195 - DNA, 25 bp, Homo sapien
tcagcattctaggttgtggaaaaac

SEQ ID NO: 4325196 - DNA, 25 bp, Homo sapien
tcttcccaagacaagtgtgatcaca

SEQ ID NO: 4325197 - DNA, 25 bp, Homo sapien
catgttatctaaaagaaccccgaga

SEQ ID NO: 4325198 - DNA, 25 bp, Homo sapien
cagttttctagagcttaggagggca

SEQ ID NO: 4325199 - DNA, 25 bp, Homo sapien
tctgtgtttccgcataagcactggg

SEQ ID NO: 4325200 - DNA, 25 bp, Homo sapien
tactgtgccttccattgacatttga

SEQ ID NO: 4325201 - DNA, 25 bp, Homo sapien
tgggtcagagcccactctactgtgc

SEQ ID NO: 4325202 - DNA, 25 bp, Homo sapien
taaaggcaaatcatggcgtctgtgt

SEQ ID NO: 4325203 - DNA, 25 bp, Homo sapien
cctcccctaggagtcgacatcccac

SEQ ID NO: 4325204 - DNA, 25 bp, Homo sapien
gccctcccctaggagtcgacatccc

SEQ ID NO: 4325205 - DNA, 25 bp, Homo sapien
agagccctcccctaggagtcgacat

SEQ ID NO: 4325206 - DNA, 25 bp, Homo sapien
gagccctcccctaggagtcgacatc

SEQ ID NO: 4325207 - DNA, 25 bp, Homo sapien
catgatggatgtgtctactcagtct

SEQ ID NO: 4325208 - DNA, 25 bp, Homo sapien
cagtctattgtctggtgggattggt

SEQ ID NO: 4325209 - DNA, 25 bp, Homo sapien
aacacatcccgagggcaccatgctt

SEQ ID NO: 4325210 - DNA, 25 bp, Homo sapien
gcttcaagaggcattggcgggtctc

SEQ ID NO: 4325211 - DNA, 25 bp, Homo sapien
ggaggtggtgctgggagtggtttat

SEQ ID NO: 4325212 - DNA, 25 bp, Homo sapien
ggtggtgctgggagtggtttatctt

SEQ ID NO: 4325213 - DNA, 25 bp, Homo sapien
tggtgctgggagtggtttatcttgt

SEQ ID NO: 4325214 - DNA, 25 bp, Homo sapien
gtgctgggagtggtttatcttgttt

SEQ ID NO: 4325215 - DNA, 25 bp, Homo sapien
caaatatactcccatcacatttttc

SEQ ID NO: 4325216 - DNA, 25 bp, Homo sapien
aaatatactcccatcacatttttct

SEQ ID NO: 4325217 - DNA, 25 bp, Homo sapien
tgcaaatatactcccatcacatttt

SEQ ID NO: 4325218 - DNA, 25 bp, Homo sapien
tgccacagggagatctaactatgcc

SEQ ID NO: 4325219 - DNA, 25 bp, Homo sapien
ggaggcacgggtggcaggcttagat

SEQ ID NO: 4325220 - DNA, 25 bp, Homo sapien
gaggatcctggtgatgtgactggtg

SEQ ID NO: 4325221 - DNA, 25 bp, Homo sapien
ctgaattagatccaggcgaggaggc

SEQ ID NO: 4325222 - DNA, 25 bp, Homo sapien
ggtccacgattatgggctcagttcc

SEQ ID NO: 4325223 - DNA, 25 bp, Homo sapien
tttcacaacgacagaaagggcagcc

SEQ ID NO: 4325224 - DNA, 25 bp, Homo sapien
gatcatcatcgtcgtccaagtctag

SEQ ID NO: 4325225 - DNA, 25 bp, Homo sapien
caagtctagcatcggcatgccaaag

SEQ ID NO: 4325226 - DNA, 25 bp, Homo sapien
gtttgttgttgtcaggtttatcaaa

SEQ ID NO: 4325227 - DNA, 25 bp, Homo sapien
cattgtttgttgttgtcaggtttat

SEQ ID NO: 4325228 - DNA, 25 bp, Homo sapien
gtcagatggataaactgtaaaaatt

SEQ ID NO: 4325229 - DNA, 25 bp, Homo sapien
actgtaaaaattttccctcattctg

SEQ ID NO: 4325230 - DNA, 25 bp, Homo sapien
gacacagctactgcgcatttcttaa

SEQ ID NO: 4325231 - DNA, 25 bp, Homo sapien
agagtaaccacttgcagcctataac

SEQ ID NO: 4325232 - DNA, 25 bp, Homo sapien
tcttcagaggcatgactaatgggcc

SEQ ID NO: 4325233 - DNA, 25 bp, Homo sapien
tagtattctgtgcaaactctgcttg

SEQ ID NO: 4325234 - DNA, 25 bp, Homo sapien
tacagatacgagaccttcagcatat

SEQ ID NO: 4325235 - DNA, 25 bp, Homo sapien
gtaagatcccactgagatacagaga

SEQ ID NO: 4325236 - DNA, 25 bp, Homo sapien
aaagctgccaaaacagatacgctag

SEQ ID NO: 4325237 - DNA, 25 bp, Homo sapien
gatacgctagttggcaggaagcact

SEQ ID NO: 4325238 - DNA, 25 bp, Homo sapien
tcttcatataaggtcattaggccaa

SEQ ID NO: 4325239 - DNA, 25 bp, Homo sapien
gggaaatgttcctatgccttttgca

SEQ ID NO: 4325240 - DNA, 25 bp, Homo sapien
gcaacaagcaagaggaactacacca

SEQ ID NO: 4325241 - DNA, 25 bp, Homo sapien
ggagaatgcacagtaacacatagac

SEQ ID NO: 4325242 - DNA, 25 bp, Homo sapien
tcaggtacaccaatcctaagtagtc

SEQ ID NO: 4325243 - DNA, 25 bp, Homo sapien
tcttcagggagaaatgcaaggcttt

SEQ ID NO: 4325244 - DNA, 25 bp, Homo sapien
caaatttcgccaacatcatgaaggg

SEQ ID NO: 4325245 - DNA, 25 bp, Homo sapien
tactgaggtagcaaagatctctggg

SEQ ID NO: 4325246 - DNA, 25 bp, Homo sapien
tgccatgccgtaaggcaagaggtgc

SEQ ID NO: 4325247 - DNA, 25 bp, Homo sapien
aagtggagcccatttcacaatataa

SEQ ID NO: 4325248 - DNA, 25 bp, Homo sapien
atcaaatgcccacaaggctcaatct

SEQ ID NO: 4325249 - DNA, 25 bp, Homo sapien
acaaatcttacagagctgaaaagtg

SEQ ID NO: 4325250 - DNA, 25 bp, Homo sapien
gttcacataatccagttaaatcagg

SEQ ID NO: 4325251 - DNA, 25 bp, Homo sapien
caggattataactcctcccatcagg

SEQ ID NO: 4325252 - DNA, 25 bp, Homo sapien
atgaggtgtaggttcacataatcca

SEQ ID NO: 4325253 - DNA, 25 bp, Homo sapien
gtgtaacttttatatggtcatgagg

SEQ ID NO: 4325254 - DNA, 25 bp, Homo sapien
gagtgcaacttaaccggaaaatata

SEQ ID NO: 4325255 - DNA, 25 bp, Homo sapien
taagggcttgttatgaggtatggtc

SEQ ID NO: 4325256 - DNA, 25 bp, Homo sapien
aatggcccactgtcccaatcgagtg

SEQ ID NO: 4325257 - DNA, 25 bp, Homo sapien
cagtcacatagccaatggcccactg

SEQ ID NO: 4325258 - DNA, 25 bp, Homo sapien
cttcatcatatgtgagaaatgccat

SEQ ID NO: 4325259 - DNA, 25 bp, Homo sapien
atatttctgtagtcgtgctttaact

SEQ ID NO: 4325260 - DNA, 25 bp, Homo sapien
gctttaacttcatcatatgtgagaa

SEQ ID NO: 4325261 - DNA, 25 bp, Homo sapien
tccgggtttggtgctatatttctgt

SEQ ID NO: 4325262 - DNA, 25 bp, Homo sapien
ctaagaaattccaattccgcaaaat

SEQ ID NO: 4325263 - DNA, 25 bp, Homo sapien
agaaattccaattccgcaaaataga

SEQ ID NO: 4325264 - DNA, 25 bp, Homo sapien
aaatgtaatcattgcaagttaaatc

SEQ ID NO: 4325265 - DNA, 25 bp, Homo sapien
gagccattgcttccaggccagagct

SEQ ID NO: 4325266 - DNA, 25 bp, Homo sapien
caattgttgattttagagccattgc

SEQ ID NO: 4325267 - DNA, 25 bp, Homo sapien
cagagctaatctggtggacctcatg

SEQ ID NO: 4325268 - DNA, 25 bp, Homo sapien
tgtttaagtgcacggcacctcccct

SEQ ID NO: 4325269 - DNA, 25 bp, Homo sapien
tccttggtgccatcctgacgacaat

SEQ ID NO: 4325270 - DNA, 25 bp, Homo sapien
atcggatcatgggagcatatttcca

SEQ ID NO: 4325271 - DNA, 25 bp, Homo sapien
tcctcaattttggaggtagagccca

SEQ ID NO: 4325272 - DNA, 25 bp, Homo sapien
gagagagggcgtcttccaagatgca

SEQ ID NO: 4325273 - DNA, 25 bp, Homo sapien
ctgctacatgcaagtaaagagttga

SEQ ID NO: 4325274 - DNA, 25 bp, Homo sapien
tgcgactttctgacgcgctgagaga

SEQ ID NO: 4325275 - DNA, 25 bp, Homo sapien
gatggcatgtatcagaactactggg

SEQ ID NO: 4325276 - DNA, 25 bp, Homo sapien
ttcaagaagaagcggagcattaaag

SEQ ID NO: 4325277 - DNA, 25 bp, Homo sapien
ttggaacttatgtttcaagaagaag

SEQ ID NO: 4325278 - DNA, 25 bp, Homo sapien
tggaattggaacttatgtttcaaga

SEQ ID NO: 4325279 - DNA, 25 bp, Homo sapien
aagaagaagcggagcattaaagttc

SEQ ID NO: 4325280 - DNA, 25 bp, Homo sapien
agtaaccctaaaatgacctcaagtg

SEQ ID NO: 4325281 - DNA, 25 bp, Homo sapien
tgctcaagtgaaaggaatagtcaca

SEQ ID NO: 4325282 - DNA, 25 bp, Homo sapien
ggcactatgaaccatgcccatgtaa

SEQ ID NO: 4325283 - DNA, 25 bp, Homo sapien
tctgacataggacaaaagtgaggcc

SEQ ID NO: 4325284 - DNA, 25 bp, Homo sapien
tgcagtcagaacctgtccagggaca

SEQ ID NO: 4325285 - DNA, 25 bp, Homo sapien
catgccaaaccctaagtatgctgtc

SEQ ID NO: 4325286 - DNA, 25 bp, Homo sapien
taagccgtcataacaaccattgatg

SEQ ID NO: 4325287 - DNA, 25 bp, Homo sapien
cagggacagataatctggctgcaga

SEQ ID NO: 4325288 - DNA, 25 bp, Homo sapien
tatgaactgaacttaaagaaaggtg

SEQ ID NO: 4325289 - DNA, 25 bp, Homo sapien
gaactgaacttaaagaaaggtgtca

SEQ ID NO: 4325290 - DNA, 25 bp, Homo sapien
atgaactgaacttaaagaaaggtgt

SEQ ID NO: 4325291 - DNA, 25 bp, Homo sapien
tgaactgaacttaaagaaaggtgtc

SEQ ID NO: 4325292 - DNA, 25 bp, Homo sapien
gcaggacttcccaatctccagcatg

SEQ ID NO: 4325293 - DNA, 25 bp, Homo sapien
tcctaagtcctcagagtgcgagagg

SEQ ID NO: 4325294 - DNA, 25 bp, Homo sapien
tatagcctactacgtgagacaggtg

SEQ ID NO: 4325295 - DNA, 25 bp, Homo sapien
ataaaaaagtaggagccgcagcagg

SEQ ID NO: 4325296 - DNA, 25 bp, Homo sapien
ccccttgggccacaaggcaggcagt

SEQ ID NO: 4325297 - DNA, 25 bp, Homo sapien
tgttccccttgggccacaaggcagg

SEQ ID NO: 4325298 - DNA, 25 bp, Homo sapien
ttccccttgggccacaaggcaggca

SEQ ID NO: 4325299 - DNA, 25 bp, Homo sapien
tactgttccccttgggccacaaggc

SEQ ID NO: 4325300 - DNA, 25 bp, Homo sapien
cttttgtgatacgaaagttatctcc

SEQ ID NO: 4325301 - DNA, 25 bp, Homo sapien
taagggacagttttgtgagatttcg

SEQ ID NO: 4325302 - DNA, 25 bp, Homo sapien
tatctccctggaattgaccattggg

SEQ ID NO: 4325303 - DNA, 25 bp, Homo sapien
gaaagattgctttgatttctgccag

SEQ ID NO: 4325304 - DNA, 25 bp, Homo sapien
ggtgatctaaccatctcaacctcct

SEQ ID NO: 4325305 - DNA, 25 bp, Homo sapien
gtagtatgtgctttctttattcccc

SEQ ID NO: 4325306 - DNA, 25 bp, Homo sapien
ttagccaatcttccctaagcccatg

SEQ ID NO: 4325307 - DNA, 25 bp, Homo sapien
tgggatttcccatcattgtaagacc

SEQ ID NO: 4325308 - DNA, 25 bp, Homo sapien
caaaaagtagttgtcaacactggcc

SEQ ID NO: 4325309 - DNA, 25 bp, Homo sapien
taagcaacaaggtacctcttcatcc

SEQ ID NO: 4325310 - DNA, 25 bp, Homo sapien
gaatccacaacgtcatcatctaagc

SEQ ID NO: 4325311 - DNA, 25 bp, Homo sapien
gagggagaagagctacattaaaaag

SEQ ID NO: 4325312 - DNA, 25 bp, Homo sapien
gcagtgcgcctaggaacaacctaaa

SEQ ID NO: 4325313 - DNA, 25 bp, Homo sapien
caggcaggacaatttttcaacttgc

SEQ ID NO: 4325314 - DNA, 25 bp, Homo sapien
tctacccaaagtcataagagaagtc

SEQ ID NO: 4325315 - DNA, 25 bp, Homo sapien
tctaaggagagtacacaacagacat

SEQ ID NO: 4325316 - DNA, 25 bp, Homo sapien
cctttgagaagcttccacaagatat

SEQ ID NO: 4325317 - DNA, 25 bp, Homo sapien
aataacatgccagcctatgatgctc

SEQ ID NO: 4325318 - DNA, 25 bp, Homo sapien
gccagcctatgatgctcaatgtaat

SEQ ID NO: 4325319 - DNA, 25 bp, Homo sapien
taaggatgctcttcacaggacaaat

SEQ ID NO: 4325320 - DNA, 25 bp, Homo sapien
aagtttgttagtactggcttaatat

SEQ ID NO: 4325321 - DNA, 25 bp, Homo sapien
tgttagtactggcttaatatcctta

SEQ ID NO: 4325322 - DNA, 25 bp, Homo sapien
atattgacgagtttggtccttaagt

SEQ ID NO: 4325323 - DNA, 25 bp, Homo sapien
ttagtactggcttaatatccttagc

SEQ ID NO: 4325324 - DNA, 25 bp, Homo sapien
tctggccaaaatgcagctagtcctg

SEQ ID NO: 4325325 - DNA, 25 bp, Homo sapien
tcctggaattgtaacagcagtatgc

SEQ ID NO: 4325326 - DNA, 25 bp, Homo sapien
tccagggtgatgcagttctggccaa

SEQ ID NO: 4325327 - DNA, 25 bp, Homo sapien
tagtcctgcaactggtagctacagc

SEQ ID NO: 4325328 - DNA, 25 bp, Homo sapien
gcttatgtcgtgcaatactaacaga

SEQ ID NO: 4325329 - DNA, 25 bp, Homo sapien
tactttctgaggaagcataacatag

SEQ ID NO: 4325330 - DNA, 25 bp, Homo sapien
tcacactaattgttccctgacagtt

SEQ ID NO: 4325331 - DNA, 25 bp, Homo sapien
aattaatgctatatccctcatgtgc

SEQ ID NO: 4325332 - DNA, 25 bp, Homo sapien
ctggcaaccacgctgcttcggcttt

SEQ ID NO: 4325333 - DNA, 25 bp, Homo sapien
tctccggtactctgaaaggctccac

SEQ ID NO: 4325334 - DNA, 25 bp, Homo sapien
ttcggctttcaaacggagaaggcat

SEQ ID NO: 4325335 - DNA, 25 bp, Homo sapien
gcaatgtctccggtactctgaaagg

SEQ ID NO: 4325336 - DNA, 25 bp, Homo sapien
gacagaccaggtttctagacacaac

SEQ ID NO: 4325337 - DNA, 25 bp, Homo sapien
ttctgaatacaatgacgactaagca

SEQ ID NO: 4325338 - DNA, 25 bp, Homo sapien
tttaaagcattgagactatgccagg

SEQ ID NO: 4325339 - DNA, 25 bp, Homo sapien
tagatgtcaatggtctcacagaaaa

SEQ ID NO: 4325340 - DNA, 25 bp, Homo sapien
tacccaagacttgcaggacttaatc

SEQ ID NO: 4325341 - DNA, 25 bp, Homo sapien
ggcatccagctgtacctgacctttc

SEQ ID NO: 4325342 - DNA, 25 bp, Homo sapien
tagcgtaattctttcggcatccagc

SEQ ID NO: 4325343 - DNA, 25 bp, Homo sapien
tattcaatagatgcactgctatacc

SEQ ID NO: 4325344 - DNA, 25 bp, Homo sapien
gaacacatcatagataggaccctgc

SEQ ID NO: 4325345 - DNA, 25 bp, Homo sapien
catgctgctcaggaattcagaggtc

SEQ ID NO: 4325346 - DNA, 25 bp, Homo sapien
caactaaggtcattcaaggtgcttc

SEQ ID NO: 4325347 - DNA, 25 bp, Homo sapien
gcaaatgcagaagaacgtgccaggc

SEQ ID NO: 4325348 - DNA, 25 bp, Homo sapien
tctgtggtgggatgttgaatgcaac

SEQ ID NO: 4325349 - DNA, 25 bp, Homo sapien
gcagaatcctacaggaaatgccgct

SEQ ID NO: 4325350 - DNA, 25 bp, Homo sapien
caggaaatgccgctacattctggta

SEQ ID NO: 4325351 - DNA, 25 bp, Homo sapien
atgcaacatcacagaacaaggccag

SEQ ID NO: 4325352 - DNA, 25 bp, Homo sapien
gcaaactacatatgtggcaaaagtc

SEQ ID NO: 4325353 - DNA, 25 bp, Homo sapien
aacaggtgctgggaagggaatctta

SEQ ID NO: 4325354 - DNA, 25 bp, Homo sapien
caaaagtgtggatgataacctagga

SEQ ID NO: 4325355 - DNA, 25 bp, Homo sapien
gctaggcaaactggctagcatgcag

SEQ ID NO: 4325356 - DNA, 25 bp, Homo sapien
gagaagtggaagctctatccttttg

SEQ ID NO: 4325357 - DNA, 25 bp, Homo sapien
tgcttttcatgggtgtgaatttctc

SEQ ID NO: 4325358 - DNA, 25 bp, Homo sapien
tttacccattacaacggtagaagca

SEQ ID NO: 4325359 - DNA, 25 bp, Homo sapien
tatccttttgattaacctgctcaag

SEQ ID NO: 4325360 - DNA, 25 bp, Homo sapien
ccagtcactgagctgtgctcaggag

SEQ ID NO: 4325361 - DNA, 25 bp, Homo sapien
tcactgagctgtgctcaggagccat

SEQ ID NO: 4325362 - DNA, 25 bp, Homo sapien
ctgcaagggccagtcactgagctgt

SEQ ID NO: 4325363 - DNA, 25 bp, Homo sapien
tgcaagggccagtcactgagctgtg

SEQ ID NO: 4325364 - DNA, 25 bp, Homo sapien
tctatgcacaactggaaaacacccg

SEQ ID NO: 4325365 - DNA, 25 bp, Homo sapien
catgaagtgtgtttcagtgcctttc

SEQ ID NO: 4325366 - DNA, 25 bp, Homo sapien
cattagagcatggaaaagctacttt

SEQ ID NO: 4325367 - DNA, 25 bp, Homo sapien
gaggcaacagttgcatcatgaagtg

SEQ ID NO: 4325368 - DNA, 25 bp, Homo sapien
aaactgtaacataccaaagctcata

SEQ ID NO: 4325369 - DNA, 25 bp, Homo sapien
tgtaacataccaaagctcatatcta

SEQ ID NO: 4325370 - DNA, 25 bp, Homo sapien
actgtaacataccaaagctcatatc

SEQ ID NO: 4325371 - DNA, 25 bp, Homo sapien
tgaaaactgtaacataccaaagctc

SEQ ID NO: 4325372 - DNA, 25 bp, Homo sapien
gatggcaagcttgaacttcactgaa

SEQ ID NO: 4325373 - DNA, 25 bp, Homo sapien
aaaatagatggcaagcttgaacttc

SEQ ID NO: 4325374 - DNA, 25 bp, Homo sapien
taaaatgcaaacattgtctctgaca

SEQ ID NO: 4325375 - DNA, 25 bp, Homo sapien
agcttgaacttcactgaaacagctg

SEQ ID NO: 4325376 - DNA, 25 bp, Homo sapien
cagaagcttctagggaacctctata

SEQ ID NO: 4325377 - DNA, 25 bp, Homo sapien
ttaaccacagtggaacagaagcttc

SEQ ID NO: 4325378 - DNA, 25 bp, Homo sapien
ccctgagtccagaaaggtcaaagga

SEQ ID NO: 4325379 - DNA, 25 bp, Homo sapien
tgtcctcccatgtaatgaatgctga

SEQ ID NO: 4325380 - DNA, 25 bp, Homo sapien
gaagcgttggtaacccggatacaga

SEQ ID NO: 4325381 - DNA, 25 bp, Homo sapien
tcttctgttacaggaagcgttggta

SEQ ID NO: 4325382 - DNA, 25 bp, Homo sapien
tgtatgtaataatttcccctgactc

SEQ ID NO: 4325383 - DNA, 25 bp, Homo sapien
cagcactataaggatctgaatgttt

SEQ ID NO: 4325384 - DNA, 25 bp, Homo sapien
tcatgttatcacaacgctgacaagg

SEQ ID NO: 4325385 - DNA, 25 bp, Homo sapien
gatcatccatgggacactttattgg

SEQ ID NO: 4325386 - DNA, 25 bp, Homo sapien
ggacagtctgcctttcacatatcac

SEQ ID NO: 4325387 - DNA, 25 bp, Homo sapien
cattttgcaactacaggacagtctg

SEQ ID NO: 4325388 - DNA, 25 bp, Homo sapien
ggactattcatgtcgaaagcataga

SEQ ID NO: 4325389 - DNA, 25 bp, Homo sapien
caaatgaaactggactattcatgtc

SEQ ID NO: 4325390 - DNA, 25 bp, Homo sapien
aaactggactattcatgtcgaaagc

SEQ ID NO: 4325391 - DNA, 25 bp, Homo sapien
catgtcgaaagcatagatttttgga

SEQ ID NO: 4325392 - DNA, 25 bp, Homo sapien
gacacattttagctagaatgatcag

SEQ ID NO: 4325393 - DNA, 25 bp, Homo sapien
gacaatatatcattaactgccacat

SEQ ID NO: 4325394 - DNA, 25 bp, Homo sapien
ctgccacatgaaaggccttgataaa

SEQ ID NO: 4325395 - DNA, 25 bp, Homo sapien
tgataaatgctatggtcagaaggaa

SEQ ID NO: 4325396 - DNA, 25 bp, Homo sapien
cccctcttctaagtgactcgagact

SEQ ID NO: 4325397 - DNA, 25 bp, Homo sapien
caatagtccttgataagattataca

SEQ ID NO: 4325398 - DNA, 25 bp, Homo sapien
ctggaagtggattcctctggtagta

SEQ ID NO: 4325399 - DNA, 25 bp, Homo sapien
agtataaaggaagcttagtaaaatg

SEQ ID NO: 4325400 - DNA, 25 bp, Homo sapien
acaaagaactgctggcagagatagg

SEQ ID NO: 4325401 - DNA, 25 bp, Homo sapien
tcagtcattgactacctaccatttt

SEQ ID NO: 4325402 - DNA, 25 bp, Homo sapien
agtttcataggtctatagctatcag

SEQ ID NO: 4325403 - DNA, 25 bp, Homo sapien
tagaagatcacaatggtaattcaca

SEQ ID NO: 4325404 - DNA, 25 bp, Homo sapien
aagacagacacgtgtggagttgccc

SEQ ID NO: 4325405 - DNA, 25 bp, Homo sapien
ggtactgggacagctttgcaattca

SEQ ID NO: 4325406 - DNA, 25 bp, Homo sapien
ttggtgacctggcacaagtgatgac

SEQ ID NO: 4325407 - DNA, 25 bp, Homo sapien
agtgatgaccccttgcctaatgctg

SEQ ID NO: 4325408 - DNA, 25 bp, Homo sapien
catcagagcatgagatttcctggct

SEQ ID NO: 4325409 - DNA, 25 bp, Homo sapien
catgcccattaaactgtgaggtcca

SEQ ID NO: 4325410 - DNA, 25 bp, Homo sapien
tatggtaaactgaaaacctgtgagg

SEQ ID NO: 4325411 - DNA, 25 bp, Homo sapien
cagactgaggtagcaacagtagcat

SEQ ID NO: 4325412 - DNA, 25 bp, Homo sapien
tatttctgccggatgctcctgaagc

SEQ ID NO: 4325413 - DNA, 25 bp, Homo sapien
gtatccttcggccatcatctgagtg

SEQ ID NO: 4325414 - DNA, 25 bp, Homo sapien
cacagtctatcaaaggcagagctat

SEQ ID NO: 4325415 - DNA, 25 bp, Homo sapien
aaatgggttgtagcaccctggctca

SEQ ID NO: 4325416 - DNA, 25 bp, Homo sapien
tagaagtgaatgtgtccaaatatat

SEQ ID NO: 4325417 - DNA, 25 bp, Homo sapien
ctagaagtgaatgtgtccaaatata

SEQ ID NO: 4325418 - DNA, 25 bp, Homo sapien
taaagagtcttattgcccgttttga

SEQ ID NO: 4325419 - DNA, 25 bp, Homo sapien
tactcaatataagtcgtaaatgctg

SEQ ID NO: 4325420 - DNA, 25 bp, Homo sapien
tatcaagtatatatggtgggctatt

SEQ ID NO: 4325421 - DNA, 25 bp, Homo sapien
tctcactgagttgggcaagtttctg

SEQ ID NO: 4325422 - DNA, 25 bp, Homo sapien
taataatccaaaggtataggcttag

SEQ ID NO: 4325423 - DNA, 25 bp, Homo sapien
gatacgttagtataatcagagttca

SEQ ID NO: 4325424 - DNA, 25 bp, Homo sapien
tatagtgaaaatggctgacagagct

SEQ ID NO: 4325425 - DNA, 25 bp, Homo sapien
tgccctaaagattaagtcccaaata

SEQ ID NO: 4325426 - DNA, 25 bp, Homo sapien
gtccatgagcttccaagtcttctcc

SEQ ID NO: 4325427 - DNA, 25 bp, Homo sapien
agcttccaagtcttctccacggtcc

SEQ ID NO: 4325428 - DNA, 25 bp, Homo sapien
cactttgtccatgagcttccaagtc

SEQ ID NO: 4325429 - DNA, 25 bp, Homo sapien
tgagcttccaagtcttctccacggt

SEQ ID NO: 4325430 - DNA, 25 bp, Homo sapien
atcaataatacccaaaattcgacct

SEQ ID NO: 4325431 - DNA, 25 bp, Homo sapien
cttagggggtccaactgcatcctga

SEQ ID NO: 4325432 - DNA, 25 bp, Homo sapien
cgatctgcggcagcttgcttagggg

SEQ ID NO: 4325433 - DNA, 25 bp, Homo sapien
ggcagcttgcttagggggtccaact

SEQ ID NO: 4325434 - DNA, 25 bp, Homo sapien
agacacgcgtgtgcgcgggtcccac

SEQ ID NO: 4325435 - DNA, 25 bp, Homo sapien
agtgggatcgctgagaacagctcgc

SEQ ID NO: 4325436 - DNA, 25 bp, Homo sapien
ccgtagctgtccagagacacgcgtg

SEQ ID NO: 4325437 - DNA, 25 bp, Homo sapien
tcgctcccgaagaaggagcaaccca

SEQ ID NO: 4325438 - DNA, 25 bp, Homo sapien
gaggaggagaccgctcgctggacac

SEQ ID NO: 4325439 - DNA, 25 bp, Homo sapien
aagacaaatccacacccgctctccc

SEQ ID NO: 4325440 - DNA, 25 bp, Homo sapien
cgtcaagacaaatccacacccgctc

SEQ ID NO: 4325441 - DNA, 25 bp, Homo sapien
aggaggagaccgctcgctggacacc

SEQ ID NO: 4325442 - DNA, 25 bp, Homo sapien
ttcccagacaattgattcccaaatc

SEQ ID NO: 4325443 - DNA, 25 bp, Homo sapien
tgtactcagattgtgttatgttttt

SEQ ID NO: 4325444 - DNA, 25 bp, Homo sapien
actgtacacattgtactcagattgt

SEQ ID NO: 4325445 - DNA, 25 bp, Homo sapien
ccacactgtacacattgtactcaga

SEQ ID NO: 4325446 - DNA, 25 bp, Homo sapien
cacactgtacacattgtactcagat

SEQ ID NO: 4325447 - DNA, 25 bp, Homo sapien
tgtggataactcgtcctctgcctct

SEQ ID NO: 4325448 - DNA, 25 bp, Homo sapien
aaattccttgtggataactcgtcct

SEQ ID NO: 4325449 - DNA, 25 bp, Homo sapien
ccttgtggataactcgtcctctgcc

SEQ ID NO: 4325450 - DNA, 25 bp, Homo sapien
ttccttgtggataactcgtcctctg

SEQ ID NO: 4325451 - DNA, 25 bp, Homo sapien
ctgatggaagcattttctttcatag

SEQ ID NO: 4325452 - DNA, 25 bp, Homo sapien
agcattttctttcataggtgaatgc

SEQ ID NO: 4325453 - DNA, 25 bp, Homo sapien
attttctttcataggtgaatgcttc

SEQ ID NO: 4325454 - DNA, 25 bp, Homo sapien
gatggaagcattttctttcataggt

SEQ ID NO: 4325455 - DNA, 25 bp, Homo sapien
tccaaattcacagagaattgccaca

SEQ ID NO: 4325456 - DNA, 25 bp, Homo sapien
ccaaattcacagagaattgccacat

SEQ ID NO: 4325457 - DNA, 25 bp, Homo sapien
ttccaaattcacagagaattgccac

SEQ ID NO: 4325458 - DNA, 25 bp, Homo sapien
ctttccaaattcacagagaattgcc

SEQ ID NO: 4325459 - DNA, 25 bp, Homo sapien
aaggatctcttcactagaatcaaag

SEQ ID NO: 4325460 - DNA, 25 bp, Homo sapien
cttaaaggatctcttcactagaatc

SEQ ID NO: 4325461 - DNA, 25 bp, Homo sapien
gatctcttcactagaatcaaaggaa

SEQ ID NO: 4325462 - DNA, 25 bp, Homo sapien
taaaggatctcttcactagaatcaa

SEQ ID NO: 4325463 - DNA, 25 bp, Homo sapien
catgacctctgttttagaaggcctt

SEQ ID NO: 4325464 - DNA, 25 bp, Homo sapien
tagcagcatacacatgacctctgtt

SEQ ID NO: 4325465 - DNA, 25 bp, Homo sapien
gtcttcttctatttgactccctctg

SEQ ID NO: 4325466 - DNA, 25 bp, Homo sapien
tgctgccgtcttcttctatttgact

SEQ ID NO: 4325467 - DNA, 25 bp, Homo sapien
ggtatcacccctgattgtttgccag

SEQ ID NO: 4325468 - DNA, 25 bp, Homo sapien
tccagttctgatagcattagcatca

SEQ ID NO: 4325469 - DNA, 25 bp, Homo sapien
ttctgcctctagagcatatcgtcct

SEQ ID NO: 4325470 - DNA, 25 bp, Homo sapien
tttgccaggtgccatggattctgcc

SEQ ID NO: 4325471 - DNA, 25 bp, Homo sapien
cctggtgcagggaggtgctccccat

SEQ ID NO: 4325472 - DNA, 25 bp, Homo sapien
tactgctcttccctggtgcagggag

SEQ ID NO: 4325473 - DNA, 25 bp, Homo sapien
cttccctggtgcagggaggtgctcc

SEQ ID NO: 4325474 - DNA, 25 bp, Homo sapien
ttccctggtgcagggaggtgctccc

SEQ ID NO: 4325475 - DNA, 25 bp, Homo sapien
actggtctgatagtgggagactgac

SEQ ID NO: 4325476 - DNA, 25 bp, Homo sapien
cagttcatggtataaattcgggtaa

SEQ ID NO: 4325477 - DNA, 25 bp, Homo sapien
actgaccttcttacgattataaggg

SEQ ID NO: 4325478 - DNA, 25 bp, Homo sapien
ggagactgacttacattgatttaca

SEQ ID NO: 4325479 - DNA, 25 bp, Homo sapien
tggcataaggcaggttttagttcct

SEQ ID NO: 4325480 - DNA, 25 bp, Homo sapien
tatgtcctactagatcgtggaattt

SEQ ID NO: 4325481 - DNA, 25 bp, Homo sapien
gggtatggcataatgcaggaatgca

SEQ ID NO: 4325482 - DNA, 25 bp, Homo sapien
cctcttctcgcaagtcacgttacaa

SEQ ID NO: 4325483 - DNA, 25 bp, Homo sapien
caagtagttcctggtgcgtacaata

SEQ ID NO: 4325484 - DNA, 25 bp, Homo sapien
ccagcaagtagttcctggtgcgtac

SEQ ID NO: 4325485 - DNA, 25 bp, Homo sapien
gtagttcctggtgcgtacaatatgt

SEQ ID NO: 4325486 - DNA, 25 bp, Homo sapien
ttcctggtgcgtacaatatgtttca

SEQ ID NO: 4325487 - DNA, 25 bp, Homo sapien
ccataggaagactgttggatgtctt

SEQ ID NO: 4325488 - DNA, 25 bp, Homo sapien
tttccatgattttccactgaggttt

SEQ ID NO: 4325489 - DNA, 25 bp, Homo sapien
agaattaaatctccaaagtgccgaa

SEQ ID NO: 4325490 - DNA, 25 bp, Homo sapien
tctgacctttatccaacacaagaat

SEQ ID NO: 4325491 - DNA, 25 bp, Homo sapien
caaagtgccgaaatttttcctctcg

SEQ ID NO: 4325492 - DNA, 25 bp, Homo sapien
ccaaatcaaatgcttgtcccaaatg

SEQ ID NO: 4325493 - DNA, 25 bp, Homo sapien
aaatcaaatgcttgtcccaaatggc

SEQ ID NO: 4325494 - DNA, 25 bp, Homo sapien
aatcaaatgcttgtcccaaatggcc

SEQ ID NO: 4325495 - DNA, 25 bp, Homo sapien
tcaaatgcttgtcccaaatggccca

SEQ ID NO: 4325496 - DNA, 25 bp, Homo sapien
attttctggcccctgtacatttgga

SEQ ID NO: 4325497 - DNA, 25 bp, Homo sapien
tctggcccctgtacatttggattaa

SEQ ID NO: 4325498 - DNA, 25 bp, Homo sapien
ggcccctgtacatttggattaactc

SEQ ID NO: 4325499 - DNA, 25 bp, Homo sapien
tgaattttctggcccctgtacattt

SEQ ID NO: 4325500 - DNA, 25 bp, Homo sapien
taaattttgactcatcaggcttatc

SEQ ID NO: 4325501 - DNA, 25 bp, Homo sapien
cgtttaaattttgactcatcaggct

SEQ ID NO: 4325502 - DNA, 25 bp, Homo sapien
gaactgccgtttaaattttgactca

SEQ ID NO: 4325503 - DNA, 25 bp, Homo sapien
ttgactcatcaggcttatcgctcat

SEQ ID NO: 4325504 - DNA, 25 bp, Homo sapien
cccaaatgataactgatatgagaag

SEQ ID NO: 4325505 - DNA, 25 bp, Homo sapien
ggaaagagttgccaaaacacaatct

SEQ ID NO: 4325506 - DNA, 25 bp, Homo sapien
tgtaagccgattaaaacaacagttc

SEQ ID NO: 4325507 - DNA, 25 bp, Homo sapien
cacaatctgtaagccgattaaaaca

SEQ ID NO: 4325508 - DNA, 25 bp, Homo sapien
ttgaagtcaaatgcttttgtaggct

SEQ ID NO: 4325509 - DNA, 25 bp, Homo sapien
gtttgtctttttcgtcattactaga

SEQ ID NO: 4325510 - DNA, 25 bp, Homo sapien
tctgaggtacattccacttgctctt

SEQ ID NO: 4325511 - DNA, 25 bp, Homo sapien
gcttacaatttatctgaggtacatt

SEQ ID NO: 4325512 - DNA, 25 bp, Homo sapien
gagatgactgagccttgttgctgtc

SEQ ID NO: 4325513 - DNA, 25 bp, Homo sapien
gatgactgagccttgttgctgtcaa

SEQ ID NO: 4325514 - DNA, 25 bp, Homo sapien
agatgactgagccttgttgctgtca

SEQ ID NO: 4325515 - DNA, 25 bp, Homo sapien
ttttgagagtcatgggatttctgaa

SEQ ID NO: 4325516 - DNA, 25 bp, Homo sapien
gcttttacaaagatggattagaggt

SEQ ID NO: 4325517 - DNA, 25 bp, Homo sapien
aaatgggtttcagcatggagccatt

SEQ ID NO: 4325518 - DNA, 25 bp, Homo sapien
ttagaggtatattaagccagaggct

SEQ ID NO: 4325519 - DNA, 25 bp, Homo sapien
gaagtttctaaatcaagggagtgac

SEQ ID NO: 4325520 - DNA, 25 bp, Homo sapien
cagatcattgttcctgcagtgactt

SEQ ID NO: 4325521 - DNA, 25 bp, Homo sapien
gatcattgttcctgcagtgacttcc

SEQ ID NO: 4325522 - DNA, 25 bp, Homo sapien
cattgatattagtgtcctctgtccc

SEQ ID NO: 4325523 - DNA, 25 bp, Homo sapien
agtgacttccttggcattgatatta

SEQ ID NO: 4325524 - DNA, 25 bp, Homo sapien
ctcttccatgatcaacagttaaaca

SEQ ID NO: 4325525 - DNA, 25 bp, Homo sapien
gtgcactctgacaaatgaacttgtg

SEQ ID NO: 4325526 - DNA, 25 bp, Homo sapien
ctccatttactcttccatgatcaac

SEQ ID NO: 4325527 - DNA, 25 bp, Homo sapien
ctctgacaaatgaacttgtggttct

SEQ ID NO: 4325528 - DNA, 25 bp, Homo sapien
gctcctatttgggtatagcatcctt

SEQ ID NO: 4325529 - DNA, 25 bp, Homo sapien
cggctgctcctatttgggtatagca

SEQ ID NO: 4325530 - DNA, 25 bp, Homo sapien
tcctatttgggtatagcatcctttt

SEQ ID NO: 4325531 - DNA, 25 bp, Homo sapien
ctgctcctatttgggtatagcatcc

SEQ ID NO: 4325532 - DNA, 25 bp, Homo sapien
gttgtcccacggtagatggcctgct

SEQ ID NO: 4325533 - DNA, 25 bp, Homo sapien
tgactgtatgctctaccactcctct

SEQ ID NO: 4325534 - DNA, 25 bp, Homo sapien
ggcatctgttggtgtctgactgtat

SEQ ID NO: 4325535 - DNA, 25 bp, Homo sapien
tggctgcccctaaccggcttcctcg

SEQ ID NO: 4325536 - DNA, 25 bp, Homo sapien
tttccagaagtaaagctgctttgta

SEQ ID NO: 4325537 - DNA, 25 bp, Homo sapien
tgatagggtgacacagaacctcttt

SEQ ID NO: 4325538 - DNA, 25 bp, Homo sapien
ctgacagagtattcaaaggctttac

SEQ ID NO: 4325539 - DNA, 25 bp, Homo sapien
tctgactgaagtatcccacactgtc

SEQ ID NO: 4325540 - DNA, 25 bp, Homo sapien
ttttggttaaactgatgatatctgc

SEQ ID NO: 4325541 - DNA, 25 bp, Homo sapien
tatctgccgcatgctttatatcacc

SEQ ID NO: 4325542 - DNA, 25 bp, Homo sapien
taaactgatgatatctgccgcatgc

SEQ ID NO: 4325543 - DNA, 25 bp, Homo sapien
gcatgctttatatcaccatgtgaca

SEQ ID NO: 4325544 - DNA, 25 bp, Homo sapien
gtcatgagatccaagtgtcactgag

SEQ ID NO: 4325545 - DNA, 25 bp, Homo sapien
accctgagagtttgagtcacccaag

SEQ ID NO: 4325546 - DNA, 25 bp, Homo sapien
gatccaagtgtcactgaggagttac

SEQ ID NO: 4325547 - DNA, 25 bp, Homo sapien
caagtgtcactgaggagttacccat

SEQ ID NO: 4325548 - DNA, 25 bp, Homo sapien
tcaagctaagaggtttaggaattcc

SEQ ID NO: 4325549 - DNA, 25 bp, Homo sapien
caagctaagaggtttaggaattcca

SEQ ID NO: 4325550 - DNA, 25 bp, Homo sapien
agatttctcagtatagctatcacat

SEQ ID NO: 4325551 - DNA, 25 bp, Homo sapien
ttcatatctctctgagtattcatca

SEQ ID NO: 4325552 - DNA, 25 bp, Homo sapien
cacatcggtagtagggtagtaaaga

SEQ ID NO: 4325553 - DNA, 25 bp, Homo sapien
tatagctatcacatcggtagtaggg

SEQ ID NO: 4325554 - DNA, 25 bp, Homo sapien
gcagtcctaggcagctgatgaccac

SEQ ID NO: 4325555 - DNA, 25 bp, Homo sapien
tctctagggccgaacctatgttgtg

SEQ ID NO: 4325556 - DNA, 25 bp, Homo sapien
tgaccacaggggaacttgagccctt

SEQ ID NO: 4325557 - DNA, 25 bp, Homo sapien
tcctcacagattaccctggcagtcc

SEQ ID NO: 4325558 - DNA, 25 bp, Homo sapien
tgtggttgttgaaacctgtattacc

SEQ ID NO: 4325559 - DNA, 25 bp, Homo sapien
aatgcatactctgtggaagctaggt

SEQ ID NO: 4325560 - DNA, 25 bp, Homo sapien
gggatgactgaagaagcaatcatat

SEQ ID NO: 4325561 - DNA, 25 bp, Homo sapien
aatttcaatcccctgttctgcaaaa

SEQ ID NO: 4325562 - DNA, 25 bp, Homo sapien
cagtgcagatattactgggaaggca

SEQ ID NO: 4325563 - DNA, 25 bp, Homo sapien
gatgccgtatcacctttaaatgacc

SEQ ID NO: 4325564 - DNA, 25 bp, Homo sapien
tgtttcctctaagtggtgactcaga

SEQ ID NO: 4325565 - DNA, 25 bp, Homo sapien
tgcccacagattaatccagtgcaga

SEQ ID NO: 4325566 - DNA, 25 bp, Homo sapien
ggattaaaagatggcttgctcacat

SEQ ID NO: 4325567 - DNA, 25 bp, Homo sapien
ttggctatgactgcacccatctggg

SEQ ID NO: 4325568 - DNA, 25 bp, Homo sapien
gacatggcagccgtcttcttccaaa

SEQ ID NO: 4325569 - DNA, 25 bp, Homo sapien
ctgggaacttaatttgggctagagg

SEQ ID NO: 4325570 - DNA, 25 bp, Homo sapien
tattctttctctagccggcatcaaa

SEQ ID NO: 4325571 - DNA, 25 bp, Homo sapien
ctcgtattctttctctagccggcat

SEQ ID NO: 4325572 - DNA, 25 bp, Homo sapien
tctagccggcatcaaatcaaactcc

SEQ ID NO: 4325573 - DNA, 25 bp, Homo sapien
ttctctagccggcatcaaatcaaac

SEQ ID NO: 4325574 - DNA, 25 bp, Homo sapien
tgtcaccttcaattataagcaaggg

SEQ ID NO: 4325575 - DNA, 25 bp, Homo sapien
tcaaaatgccggaaaatatctcctc

SEQ ID NO: 4325576 - DNA, 25 bp, Homo sapien
gcagttttactacttgtacctgaat

SEQ ID NO: 4325577 - DNA, 25 bp, Homo sapien
tgtacctgaatctcattgtcacctt

SEQ ID NO: 4325578 - DNA, 25 bp, Homo sapien
gtatctctaaaaaggggcacactat

SEQ ID NO: 4325579 - DNA, 25 bp, Homo sapien
tgtaccatcatcattaccagtattc

SEQ ID NO: 4325580 - DNA, 25 bp, Homo sapien
ctttagagtgacacactgatgtgta

SEQ ID NO: 4325581 - DNA, 25 bp, Homo sapien
ggggcacactatagagaattctact

SEQ ID NO: 4325582 - DNA, 25 bp, Homo sapien
gagtttgagtagaacatttgcatga

SEQ ID NO: 4325583 - DNA, 25 bp, Homo sapien
cacagctcctcctcggttgaggggt

SEQ ID NO: 4325584 - DNA, 25 bp, Homo sapien
tccagtttgccacaagctgtccaca

SEQ ID NO: 4325585 - DNA, 25 bp, Homo sapien
ggagtctcatttaggaggagtttga

SEQ ID NO: 4325586 - DNA, 25 bp, Homo sapien
tccccatttttttccagcatctcca

SEQ ID NO: 4325587 - DNA, 25 bp, Homo sapien
cttctgctccccatttttttccagc

SEQ ID NO: 4325588 - DNA, 25 bp, Homo sapien
ccccatttttttccagcatctccat

SEQ ID NO: 4325589 - DNA, 25 bp, Homo sapien
tgctccccatttttttccagcatct

SEQ ID NO: 4325590 - DNA, 25 bp, Homo sapien
cagtcaaggccttctattaaaaggt

SEQ ID NO: 4325591 - DNA, 25 bp, Homo sapien
caaggccttctattaaaaggtctgg

SEQ ID NO: 4325592 - DNA, 25 bp, Homo sapien
attaaaaggtctggaagggccagct

SEQ ID NO: 4325593 - DNA, 25 bp, Homo sapien
tccagtcaaggccttctattaaaag

SEQ ID NO: 4325594 - DNA, 25 bp, Homo sapien
ggataaagctatgtttgtgactgcc

SEQ ID NO: 4325595 - DNA, 25 bp, Homo sapien
tgcctggagatgtacagtgcctcct

SEQ ID NO: 4325596 - DNA, 25 bp, Homo sapien
tcaagactgttgacatgcagaagca

SEQ ID NO: 4325597 - DNA, 25 bp, Homo sapien
taatatcagcgtgtggcaaatttca

SEQ ID NO: 4325598 - DNA, 25 bp, Homo sapien
caaccatggtgacgttttgcctggc

SEQ ID NO: 4325599 - DNA, 25 bp, Homo sapien
ggagctgagccatttcgatcacaat

SEQ ID NO: 4325600 - DNA, 25 bp, Homo sapien
gaaactcttttaatgcagtccgaag

SEQ ID NO: 4325601 - DNA, 25 bp, Homo sapien
tactatgtactgaacaggaagctct

SEQ ID NO: 4325602 - DNA, 25 bp, Homo sapien
gggtcttgcctcattctagctaagc

SEQ ID NO: 4325603 - DNA, 25 bp, Homo sapien
aaggcagttcgacaaggtgtagaca

SEQ ID NO: 4325604 - DNA, 25 bp, Homo sapien
gatgggatgacttttcagagcctct

SEQ ID NO: 4325605 - DNA, 25 bp, Homo sapien
ggcacatgggtctttaactctaaca

SEQ ID NO: 4325606 - DNA, 25 bp, Homo sapien
gaggcagcagttgattgcatcccat

SEQ ID NO: 4325607 - DNA, 25 bp, Homo sapien
cagttgattgcatcccattgttctg

SEQ ID NO: 4325608 - DNA, 25 bp, Homo sapien
ggcagcagttgattgcatcccattg

SEQ ID NO: 4325609 - DNA, 25 bp, Homo sapien
attgttctgttggatcgaaggttgc

SEQ ID NO: 4325610 - DNA, 25 bp, Homo sapien
tgttgtctgcggcatcaacgaggag

SEQ ID NO: 4325611 - DNA, 25 bp, Homo sapien
tgagtttaaacagagacatgtcctg

SEQ ID NO: 4325612 - DNA, 25 bp, Homo sapien
gcaagaatgcctcgcctgtggtctg

SEQ ID NO: 4325613 - DNA, 25 bp, Homo sapien
tcagagttccaacagggaatgttcc

SEQ ID NO: 4325614 - DNA, 25 bp, Homo sapien
aaattcttgacgctaaaaatcacag

SEQ ID NO: 4325615 - DNA, 25 bp, Homo sapien
aatgattgtgtttcaagtggctgcc

SEQ ID NO: 4325616 - DNA, 25 bp, Homo sapien
cttggataaaaggtcaaaacatcgt

SEQ ID NO: 4325617 - DNA, 25 bp, Homo sapien
cattctatagggctgacttggataa

SEQ ID NO: 4325618 - DNA, 25 bp, Homo sapien
catctggaaggaacttcagcttctg

SEQ ID NO: 4325619 - DNA, 25 bp, Homo sapien
ggcatctggaaggaacttcagcttc

SEQ ID NO: 4325620 - DNA, 25 bp, Homo sapien
ctgggcatctggaaggaacttcagc

SEQ ID NO: 4325621 - DNA, 25 bp, Homo sapien
tgggcatctggaaggaacttcagct

SEQ ID NO: 4325622 - DNA, 25 bp, Homo sapien
aatgcgggacacagttcctcggagg

SEQ ID NO: 4325623 - DNA, 25 bp, Homo sapien
actgtgttgaggaaaggagacgaaa

SEQ ID NO: 4325624 - DNA, 25 bp, Homo sapien
aaggaatgccaatgcgggacacagt

SEQ ID NO: 4325625 - DNA, 25 bp, Homo sapien
tcctcggaggtggtgactaaactgt

SEQ ID NO: 4325626 - DNA, 25 bp, Homo sapien
aaaacagccaattgacagaatctca

SEQ ID NO: 4325627 - DNA, 25 bp, Homo sapien
taagtttcaaattagagtaatccca

SEQ ID NO: 4325628 - DNA, 25 bp, Homo sapien
aggaaaacagccaattgacagaatc

SEQ ID NO: 4325629 - DNA, 25 bp, Homo sapien
gccaattgacagaatctcaaacagg

SEQ ID NO: 4325630 - DNA, 25 bp, Homo sapien
ctcgatttgcagtctcaactagatt

SEQ ID NO: 4325631 - DNA, 25 bp, Homo sapien
tagacttcctcttgttaatgcacag

SEQ ID NO: 4325632 - DNA, 25 bp, Homo sapien
cttggtttccatggctctagacttc

SEQ ID NO: 4325633 - DNA, 25 bp, Homo sapien
tgcagtggacctaataataagagag

SEQ ID NO: 4325634 - DNA, 25 bp, Homo sapien
gaggtcgatctatagttccattcag

SEQ ID NO: 4325635 - DNA, 25 bp, Homo sapien
ccctctcatttatgtgaggtcgatc

SEQ ID NO: 4325636 - DNA, 25 bp, Homo sapien
tccacataatgaagcacccaatgct

SEQ ID NO: 4325637 - DNA, 25 bp, Homo sapien
gattggatgagactcctccacataa

SEQ ID NO: 4325638 - DNA, 25 bp, Homo sapien
taagttgaaagcactaacattcact

SEQ ID NO: 4325639 - DNA, 25 bp, Homo sapien
tatacaagtatttatcagtccatcc

SEQ ID NO: 4325640 - DNA, 25 bp, Homo sapien
catttgactccaaactgtctgcacc

SEQ ID NO: 4325641 - DNA, 25 bp, Homo sapien
tttccagatactttttggacaattc

SEQ ID NO: 4325642 - DNA, 25 bp, Homo sapien
tgcgctggatagtagttaattatgc

SEQ ID NO: 4325643 - DNA, 25 bp, Homo sapien
ggcaacagcaatgcgctggatagta

SEQ ID NO: 4325644 - DNA, 25 bp, Homo sapien
tgatggcaacagcaatgcgctggat

SEQ ID NO: 4325645 - DNA, 25 bp, Homo sapien
cagcaatgcgctggatagtagttaa

SEQ ID NO: 4325646 - DNA, 25 bp, Homo sapien
tcaccagagtcctcaataaagcatt

SEQ ID NO: 4325647 - DNA, 25 bp, Homo sapien
ttcaccagagtcctcaataaagcat

SEQ ID NO: 4325648 - DNA, 25 bp, Homo sapien
gacgatttcggcaatttctacttta

SEQ ID NO: 4325649 - DNA, 25 bp, Homo sapien
cctttgacagcagcgcagcgctcat

SEQ ID NO: 4325650 - DNA, 25 bp, Homo sapien
taacttcttctaggcacagattctg

SEQ ID NO: 4325651 - DNA, 25 bp, Homo sapien
tcatcattgcttcggcagggaggaa

SEQ ID NO: 4325652 - DNA, 25 bp, Homo sapien
gctcattgagagcaaaaatttttct

SEQ ID NO: 4325653 - DNA, 25 bp, Homo sapien
tttctcatggctatacatcaacagt

SEQ ID NO: 4325654 - DNA, 25 bp, Homo sapien
tatacatcaacagtctatagaggat

SEQ ID NO: 4325655 - DNA, 25 bp, Homo sapien
gatgcttaaatgcaagctcattgag

SEQ ID NO: 4325656 - DNA, 25 bp, Homo sapien
tttagtgcaataccagaaacctgga

SEQ ID NO: 4325657 - DNA, 25 bp, Homo sapien
tgggaccagtatgaaatgccactgg

SEQ ID NO: 4325658 - DNA, 25 bp, Homo sapien
gagttccagcgttgtgagtatccac

SEQ ID NO: 4325659 - DNA, 25 bp, Homo sapien
taaaacaccacgtgacactagtcat

SEQ ID NO: 4325660 - DNA, 25 bp, Homo sapien
caaaaatagtctgccttgagcctgg

SEQ ID NO: 4325661 - DNA, 25 bp, Homo sapien
taaggtgggcacgtactgttgataa

SEQ ID NO: 4325662 - DNA, 25 bp, Homo sapien
ctgatgagcaagctatgccctgtga

SEQ ID NO: 4325663 - DNA, 25 bp, Homo sapien
cctggccttatttatcagaatgggc

SEQ ID NO: 4325664 - DNA, 25 bp, Homo sapien
tgattatggtctcctggtatattcc

SEQ ID NO: 4325665 - DNA, 25 bp, Homo sapien
cattgtatttggcagctgttaccca

SEQ ID NO: 4325666 - DNA, 25 bp, Homo sapien
tgttacccacactcccgcaaataaa

SEQ ID NO: 4325667 - DNA, 25 bp, Homo sapien
tactctcagagaaactccccgtcat

SEQ ID NO: 4325668 - DNA, 25 bp, Homo sapien
taaatctctgccattactctcagag

SEQ ID NO: 4325669 - DNA, 25 bp, Homo sapien
taaaattgctgttaagttattttca

SEQ ID NO: 4325670 - DNA, 25 bp, Homo sapien
actaagaaccagttgttacccatat

SEQ ID NO: 4325671 - DNA, 25 bp, Homo sapien
gctctgggggatgtgaatttataaa

SEQ ID NO: 4325672 - DNA, 25 bp, Homo sapien
agttgttacccatatgcagtatttc

SEQ ID NO: 4325673 - DNA, 25 bp, Homo sapien
gtcctccagctatttgttcatattt

SEQ ID NO: 4325674 - DNA, 25 bp, Homo sapien
gtaaagcatttcaaagacctgtaga

SEQ ID NO: 4325675 - DNA, 25 bp, Homo sapien
taaagcatttcaaagacctgtagaa

SEQ ID NO: 4325676 - DNA, 25 bp, Homo sapien
atttcaaagacctgtagaatttcat

SEQ ID NO: 4325677 - DNA, 25 bp, Homo sapien
caaatgaaatgggtgccaataaatc

SEQ ID NO: 4325678 - DNA, 25 bp, Homo sapien
gacaaatgaaatgggtgccaataaa

SEQ ID NO: 4325679 - DNA, 25 bp, Homo sapien
tgaaatgggtgccaataaatcctca

SEQ ID NO: 4325680 - DNA, 25 bp, Homo sapien
aatgggtgccaataaatcctcaagg

SEQ ID NO: 4325681 - DNA, 25 bp, Homo sapien
tacaaattgcatattccactcggca

SEQ ID NO: 4325682 - DNA, 25 bp, Homo sapien
atacaaattgcatattccactcggc

SEQ ID NO: 4325683 - DNA, 25 bp, Homo sapien
catacaaattgcatattccactcgg

SEQ ID NO: 4325684 - DNA, 25 bp, Homo sapien
acaaattgcatattccactcggcat

SEQ ID NO: 4325685 - DNA, 25 bp, Homo sapien
caccttggttaagctcttaataact

SEQ ID NO: 4325686 - DNA, 25 bp, Homo sapien
gccaccttggttaagctcttaataa

SEQ ID NO: 4325687 - DNA, 25 bp, Homo sapien
tagccaccttggttaagctcttaat

SEQ ID NO: 4325688 - DNA, 25 bp, Homo sapien
accttggttaagctcttaataactg

SEQ ID NO: 4325689 - DNA, 25 bp, Homo sapien
tttcagtaaaggcattgtcagatat

SEQ ID NO: 4325690 - DNA, 25 bp, Homo sapien
ttcagtaaaggcattgtcagatatt

SEQ ID NO: 4325691 - DNA, 25 bp, Homo sapien
tttgacgtggaccataatggaaatc

SEQ ID NO: 4325692 - DNA, 25 bp, Homo sapien
aatgccagtttgacgtggaccataa

SEQ ID NO: 4325693 - DNA, 25 bp, Homo sapien
tccccgaaactatgaagtctctgct

SEQ ID NO: 4325694 - DNA, 25 bp, Homo sapien
aggctgctccccgaaactatgaagt

SEQ ID NO: 4325695 - DNA, 25 bp, Homo sapien
gagagtcctatctgttatgtgctgg

SEQ ID NO: 4325696 - DNA, 25 bp, Homo sapien
tgtgctgggcctgtatgacattaca

SEQ ID NO: 4325697 - DNA, 25 bp, Homo sapien
tattcagggcatttcccttgagagt

SEQ ID NO: 4325698 - DNA, 25 bp, Homo sapien
tgaaagttattcagggcatttccct

SEQ ID NO: 4325699 - DNA, 25 bp, Homo sapien
gttttcttctgttgagctgatctga

SEQ ID NO: 4325700 - DNA, 25 bp, Homo sapien
ttcttctgttgagctgatctgaaac

SEQ ID NO: 4325701 - DNA, 25 bp, Homo sapien
tggttttcttctgttgagctgatct

SEQ ID NO: 4325702 - DNA, 25 bp, Homo sapien
ctgtcacagagttggttttcttctg

SEQ ID NO: 4325703 - DNA, 25 bp, Homo sapien
gattgacagtaggcaaaacacccat

SEQ ID NO: 4325704 - DNA, 25 bp, Homo sapien
ccagagattgacagtaggcaaaaca

SEQ ID NO: 4325705 - DNA, 25 bp, Homo sapien
cagagattgacagtaggcaaaacac

SEQ ID NO: 4325706 - DNA, 25 bp, Homo sapien
gagattgacagtaggcaaaacaccc

SEQ ID NO: 4325707 - DNA, 25 bp, Homo sapien
aatatttcacttgaactgccggggg

SEQ ID NO: 4325708 - DNA, 25 bp, Homo sapien
atgcaaatcgtgcttggtcatcaca

SEQ ID NO: 4325709 - DNA, 25 bp, Homo sapien
ccgggggttgttcatctaccaggca

SEQ ID NO: 4325710 - DNA, 25 bp, Homo sapien
tactactccctgcttagttactaaa

SEQ ID NO: 4325711 - DNA, 25 bp, Homo sapien
tgtacctgtggcctctcaaactttg

SEQ ID NO: 4325712 - DNA, 25 bp, Homo sapien
cctgtggcctctcaaactttgcttc

SEQ ID NO: 4325713 - DNA, 25 bp, Homo sapien
tacctgtggcctctcaaactttgct

SEQ ID NO: 4325714 - DNA, 25 bp, Homo sapien
tggcctctcaaactttgcttctctg

SEQ ID NO: 4325715 - DNA, 25 bp, Homo sapien
ttctaaaatcaaccgcaaaattgga

SEQ ID NO: 4325716 - DNA, 25 bp, Homo sapien
caaaccgcacagctatgtggaaact

SEQ ID NO: 4325717 - DNA, 25 bp, Homo sapien
ccatatcagaaagctggaaagacct

SEQ ID NO: 4325718 - DNA, 25 bp, Homo sapien
caaacattctcagcccacagtgtaa

SEQ ID NO: 4325719 - DNA, 25 bp, Homo sapien
atagcatttctccgtaacttgtcca

SEQ ID NO: 4325720 - DNA, 25 bp, Homo sapien
tagcatttctccgtaacttgtccat

SEQ ID NO: 4325721 - DNA, 25 bp, Homo sapien
catagcatttctccgtaacttgtcc

SEQ ID NO: 4325722 - DNA, 25 bp, Homo sapien
cagtaccaagaagctccataagagc

SEQ ID NO: 4325723 - DNA, 25 bp, Homo sapien
gtgccagtaccaagaagctccataa

SEQ ID NO: 4325724 - DNA, 25 bp, Homo sapien
tctaggctccatctgaataagcaca

SEQ ID NO: 4325725 - DNA, 25 bp, Homo sapien
gtgttcacaaactgtctaggctcca

SEQ ID NO: 4325726 - DNA, 25 bp, Homo sapien
caaagattcgccacgaggtccacaa

SEQ ID NO: 4325727 - DNA, 25 bp, Homo sapien
tcaaagattcgccacgaggtccaca

SEQ ID NO: 4325728 - DNA, 25 bp, Homo sapien
agggccactaacacggcccatgttt

SEQ ID NO: 4325729 - DNA, 25 bp, Homo sapien
gtcctgcacacttgtaatgtgagga

SEQ ID NO: 4325730 - DNA, 25 bp, Homo sapien
aacacggcccatgttttgtacagca

SEQ ID NO: 4325731 - DNA, 25 bp, Homo sapien
actaacacggcccatgttttgtaca

SEQ ID NO: 4325732 - DNA, 25 bp, Homo sapien
tacactttaaaggacatacatcatc

SEQ ID NO: 4325733 - DNA, 25 bp, Homo sapien
cagccaaacagcttctatatgacag

SEQ ID NO: 4325734 - DNA, 25 bp, Homo sapien
tatatacccatagattcttggtgac

SEQ ID NO: 4325735 - DNA, 25 bp, Homo sapien
gcttcagtcaaaagtagttgcagca

SEQ ID NO: 4325736 - DNA, 25 bp, Homo sapien
gtttcttgacgcataagcgttatca

SEQ ID NO: 4325737 - DNA, 25 bp, Homo sapien
tttgagctgaaggtttcttgacgca

SEQ ID NO: 4325738 - DNA, 25 bp, Homo sapien
taccatgatgactgctattgcttcc

SEQ ID NO: 4325739 - DNA, 25 bp, Homo sapien
cttgtaccatgatgactgctattgc

SEQ ID NO: 4325740 - DNA, 25 bp, Homo sapien
ttgccaatgcaatggaaacttctct

SEQ ID NO: 4325741 - DNA, 25 bp, Homo sapien
tctctactgatgttaccccaatgat

SEQ ID NO: 4325742 - DNA, 25 bp, Homo sapien
tgtttatctctctataagaaggcct

SEQ ID NO: 4325743 - DNA, 25 bp, Homo sapien
tctatttttggatcaccaatgcagt

SEQ ID NO: 4325744 - DNA, 25 bp, Homo sapien
caagtggtcattgcttactagagga

SEQ ID NO: 4325745 - DNA, 25 bp, Homo sapien
gataactaatttggcatctacaaac

SEQ ID NO: 4325746 - DNA, 25 bp, Homo sapien
tactcccaacgaaaattgcagattc

SEQ ID NO: 4325747 - DNA, 25 bp, Homo sapien
tacaaactaaaatacctggtgagaa

SEQ ID NO: 4325748 - DNA, 25 bp, Homo sapien
tacttgcagttaggagcttcaccat

SEQ ID NO: 4325749 - DNA, 25 bp, Homo sapien
acttgcagttaggagcttcaccatc

SEQ ID NO: 4325750 - DNA, 25 bp, Homo sapien
ctacttgcagttaggagcttcacca

SEQ ID NO: 4325751 - DNA, 25 bp, Homo sapien
gaccgatcacagaagtagtagtaca

SEQ ID NO: 4325752 - DNA, 25 bp, Homo sapien
cgacacagaagaccgatcacagaag

SEQ ID NO: 4325753 - DNA, 25 bp, Homo sapien
cattcgacacagaagaccgatcaca

SEQ ID NO: 4325754 - DNA, 25 bp, Homo sapien
cagaagaccgatcacagaagtagta

SEQ ID NO: 4325755 - DNA, 25 bp, Homo sapien
agtcatccacaatcctgttatcttt

SEQ ID NO: 4325756 - DNA, 25 bp, Homo sapien
cataggaggtatgggtgccaaacct

SEQ ID NO: 4325757 - DNA, 25 bp, Homo sapien
cgtcaagtatttgagagcgcctcct

SEQ ID NO: 4325758 - DNA, 25 bp, Homo sapien
gatcaatgagggaaagcttaaagac

SEQ ID NO: 4325759 - DNA, 25 bp, Homo sapien
tactattgcccaaaagccttacaga

SEQ ID NO: 4325760 - DNA, 25 bp, Homo sapien
taagaaacgtattaaaatgtatcag

SEQ ID NO: 4325761 - DNA, 25 bp, Homo sapien
aacaatctgacaggtttggtcacca

SEQ ID NO: 4325762 - DNA, 25 bp, Homo sapien
aaaacaatctgacaggtttggtcac

SEQ ID NO: 4325763 - DNA, 25 bp, Homo sapien
aaacaatctgacaggtttggtcacc

SEQ ID NO: 4325764 - DNA, 25 bp, Homo sapien
caatgaattcgtctcatgaattacc

SEQ ID NO: 4325765 - DNA, 25 bp, Homo sapien
agaaagcccttagcccttcattgta

SEQ ID NO: 4325766 - DNA, 25 bp, Homo sapien
ttaagaaccatgactctttgacctc

SEQ ID NO: 4325767 - DNA, 25 bp, Homo sapien
ttcaactgatgttaatgataccaca

SEQ ID NO: 4325768 - DNA, 25 bp, Homo sapien
tcaagaactctgatcacatcatttc

SEQ ID NO: 4325769 - DNA, 25 bp, Homo sapien
taattgccctctcaggacacttagg

SEQ ID NO: 4325770 - DNA, 25 bp, Homo sapien
catagaggacttgtggtattgagca

SEQ ID NO: 4325771 - DNA, 25 bp, Homo sapien
gagtattcaaaaagcctgatcctga

SEQ ID NO: 4325772 - DNA, 25 bp, Homo sapien
gataattatccccataagggttgtc

SEQ ID NO: 4325773 - DNA, 25 bp, Homo sapien
gatcagcatccagaagggatcctct

SEQ ID NO: 4325774 - DNA, 25 bp, Homo sapien
tgtggatccatgcactctgggcctg

SEQ ID NO: 4325775 - DNA, 25 bp, Homo sapien
gggaacaggccatcagtaaccaggg

SEQ ID NO: 4325776 - DNA, 25 bp, Homo sapien
cagtacaatgtagccttccagagtg

SEQ ID NO: 4325777 - DNA, 25 bp, Homo sapien
ctagagagcagtggcataatgtcag

SEQ ID NO: 4325778 - DNA, 25 bp, Homo sapien
gcctaaattttcacattttacaagc

SEQ ID NO: 4325779 - DNA, 25 bp, Homo sapien
cgtgcccggcctaaattttcacatt

SEQ ID NO: 4325780 - DNA, 25 bp, Homo sapien
acccccaccttccaggtgcaagcaa

SEQ ID NO: 4325781 - DNA, 25 bp, Homo sapien
ttattattaggctggtgcaaaagga

SEQ ID NO: 4325782 - DNA, 25 bp, Homo sapien
ttaggctggtgcaaaaggaactaag

SEQ ID NO: 4325783 - DNA, 25 bp, Homo sapien
ggttttattattaggctggtgcaaa

SEQ ID NO: 4325784 - DNA, 25 bp, Homo sapien
aggctggtgcaaaaggaactaaggt

SEQ ID NO: 4325785 - DNA, 25 bp, Homo sapien
gataaggtcagccagataatcttcc

SEQ ID NO: 4325786 - DNA, 25 bp, Homo sapien
ccagcccaaggcataccagatgtgt

SEQ ID NO: 4325787 - DNA, 25 bp, Homo sapien
gatctaccaagaactagctgtgcaa

SEQ ID NO: 4325788 - DNA, 25 bp, Homo sapien
tacaatgacccagctgaatgcacca

SEQ ID NO: 4325789 - DNA, 25 bp, Homo sapien
tacttgggttcacaaatcacagaag

SEQ ID NO: 4325790 - DNA, 25 bp, Homo sapien
tgctatccgctttccaatgccagaa

SEQ ID NO: 4325791 - DNA, 25 bp, Homo sapien
aagctattagttgcgaatgtgccag

SEQ ID NO: 4325792 - DNA, 25 bp, Homo sapien
tgtcagtcttgatcttgtggccaga

SEQ ID NO: 4325793 - DNA, 25 bp, Homo sapien
caagggctaaccatacctgagggac

SEQ ID NO: 4325794 - DNA, 25 bp, Homo sapien
caagaaggaagctacatggagtacc

SEQ ID NO: 4325795 - DNA, 25 bp, Homo sapien
gtagatgacacttgagcctcctggc

SEQ ID NO: 4325796 - DNA, 25 bp, Homo sapien
ggagtaccaatcttcatcgcacaca

SEQ ID NO: 4325797 - DNA, 25 bp, Homo sapien
tcagcaaatggcttggtcccaaagt

SEQ ID NO: 4325798 - DNA, 25 bp, Homo sapien
gaaagtgcgagactcacatccattg

SEQ ID NO: 4325799 - DNA, 25 bp, Homo sapien
ggtgtataaactgaaagtgcgagac

SEQ ID NO: 4325800 - DNA, 25 bp, Homo sapien
tgtcatctcagcaaatggcttggtc

SEQ ID NO: 4325801 - DNA, 25 bp, Homo sapien
aagagcatcacagtactaatcaggc

SEQ ID NO: 4325802 - DNA, 25 bp, Homo sapien
tgtagcaatgaacaagccccaagag

SEQ ID NO: 4325803 - DNA, 25 bp, Homo sapien
gtgggctgcactctgggatcaaacc

SEQ ID NO: 4325804 - DNA, 25 bp, Homo sapien
gcactacaatgcaaagacatcgcga

SEQ ID NO: 4325805 - DNA, 25 bp, Homo sapien
gcaggtccaatgaaagtcccaggta

SEQ ID NO: 4325806 - DNA, 25 bp, Homo sapien
ttttagggtcaaagcagcatagggc

SEQ ID NO: 4325807 - DNA, 25 bp, Homo sapien
tcaggaccgtgttgccattcagagc

SEQ ID NO: 4325808 - DNA, 25 bp, Homo sapien
tggccaaaatggtcaggtagctgct

SEQ ID NO: 4325809 - DNA, 25 bp, Homo sapien
atttccaggtgtcaaagagctctcc

SEQ ID NO: 4325810 - DNA, 25 bp, Homo sapien
accaaccgacaaataagattttctg

SEQ ID NO: 4325811 - DNA, 25 bp, Homo sapien
gaaggtcagtgtattcttgaacaaa

SEQ ID NO: 4325812 - DNA, 25 bp, Homo sapien
tctaacccaacagaataggtctcca

SEQ ID NO: 4325813 - DNA, 25 bp, Homo sapien
acaaatcagagcagcatactggcag

SEQ ID NO: 4325814 - DNA, 25 bp, Homo sapien
tgacaaatcagagcagcatactggc

SEQ ID NO: 4325815 - DNA, 25 bp, Homo sapien
ggaaaatcacccatgcatgatgact

SEQ ID NO: 4325816 - DNA, 25 bp, Homo sapien
tactctggtggaaaatcacccatgc

SEQ ID NO: 4325817 - DNA, 25 bp, Homo sapien
tgctctgtaaagattgtcttagcgt

SEQ ID NO: 4325818 - DNA, 25 bp, Homo sapien
taaagattgtcttagcgtgggaaga

SEQ ID NO: 4325819 - DNA, 25 bp, Homo sapien
ttgtcttagcgtgggaagaagttct

SEQ ID NO: 4325820 - DNA, 25 bp, Homo sapien
agtcttgctctgtaaagattgtctt

SEQ ID NO: 4325821 - DNA, 25 bp, Homo sapien
gagtttggagctcaacgtctctcat

SEQ ID NO: 4325822 - DNA, 25 bp, Homo sapien
gcatatttcttatagtttcttagtc

SEQ ID NO: 4325823 - DNA, 25 bp, Homo sapien
cagcttcttcattgaagcatatttc

SEQ ID NO: 4325824 - DNA, 25 bp, Homo sapien
tcttagtctgagtttggagctcaac

SEQ ID NO: 4325825 - DNA, 25 bp, Homo sapien
tgttaaggatccaatattagaatga

SEQ ID NO: 4325826 - DNA, 25 bp, Homo sapien
cacatcctgtttgacaccaacttta

SEQ ID NO: 4325827 - DNA, 25 bp, Homo sapien
caaactggacttagtgtagtcaatg

SEQ ID NO: 4325828 - DNA, 25 bp, Homo sapien
cagaagtatggagcagctgtaagga

SEQ ID NO: 4325829 - DNA, 25 bp, Homo sapien
tgaatgtacttaattcaaaaatggt

SEQ ID NO: 4325830 - DNA, 25 bp, Homo sapien
caatgaatgtacttaattcaaaaat

SEQ ID NO: 4325831 - DNA, 25 bp, Homo sapien
atgaatgtacttaattcaaaaatgg

SEQ ID NO: 4325832 - DNA, 25 bp, Homo sapien
attcaaaaatggtttctaccaacat

SEQ ID NO: 4325833 - DNA, 25 bp, Homo sapien
tgtcctctatttgcgttctcccact

SEQ ID NO: 4325834 - DNA, 25 bp, Homo sapien
cagagaaagcttctcgtggaggctt

SEQ ID NO: 4325835 - DNA, 25 bp, Homo sapien
tcgtggaggcttcgtccacgtgctg

SEQ ID NO: 4325836 - DNA, 25 bp, Homo sapien
cacgtgctgtcctctatttgcgttc

SEQ ID NO: 4325837 - DNA, 25 bp, Homo sapien
tctctgtcgtttaagcatgatggaa

SEQ ID NO: 4325838 - DNA, 25 bp, Homo sapien
gaagcattgctatcctggcccagaa

SEQ ID NO: 4325839 - DNA, 25 bp, Homo sapien
catagttgagagcactaatctcttt

SEQ ID NO: 4325840 - DNA, 25 bp, Homo sapien
aatttaggtgacatcgttatcagtc

SEQ ID NO: 4325841 - DNA, 25 bp, Homo sapien
tcaccagattaaagctagaatatgt

SEQ ID NO: 4325842 - DNA, 25 bp, Homo sapien
gccactagaagtaagaagaagagga

SEQ ID NO: 4325843 - DNA, 25 bp, Homo sapien
gcaaatcgatcaattaagaagcagt

SEQ ID NO: 4325844 - DNA, 25 bp, Homo sapien
gttcatggtacccaaagagagacca

SEQ ID NO: 4325845 - DNA, 25 bp, Homo sapien
ttcctaagatcaatagataactcct

SEQ ID NO: 4325846 - DNA, 25 bp, Homo sapien
taagatcaatagataactcctatcc

SEQ ID NO: 4325847 - DNA, 25 bp, Homo sapien
tcctaagatcaatagataactccta

SEQ ID NO: 4325848 - DNA, 25 bp, Homo sapien
gatcaatagataactcctatccttt

SEQ ID NO: 4325849 - DNA, 25 bp, Homo sapien
gagttagcagttcttgcatactttc

SEQ ID NO: 4325850 - DNA, 25 bp, Homo sapien
tgagaaagccatattgttaaatatg

SEQ ID NO: 4325851 - DNA, 25 bp, Homo sapien
agaaagccatattgttaaatatggg

SEQ ID NO: 4325852 - DNA, 25 bp, Homo sapien
taaatatgggggcatgagttagcag

SEQ ID NO: 4325853 - DNA, 25 bp, Homo sapien
ggtaggtaagaagctgtagacttct

SEQ ID NO: 4325854 - DNA, 25 bp, Homo sapien
gtagacttctattattagatccaca

SEQ ID NO: 4325855 - DNA, 25 bp, Homo sapien
tggtaggtaagaagctgtagacttc

SEQ ID NO: 4325856 - DNA, 25 bp, Homo sapien
gatccacaatctaatgtttaattaa

SEQ ID NO: 4325857 - DNA, 25 bp, Homo sapien
tatgatatatcataatctaaagaat

SEQ ID NO: 4325858 - DNA, 25 bp, Homo sapien
tgatatatcataatctaaagaatcg

SEQ ID NO: 4325859 - DNA, 25 bp, Homo sapien
atatcataatctaaagaatcgaaat

SEQ ID NO: 4325860 - DNA, 25 bp, Homo sapien
gatatatcataatctaaagaatcga

SEQ ID NO: 4325861 - DNA, 25 bp, Homo sapien
cgtgaagcccgtgaaaacctgtggc

SEQ ID NO: 4325862 - DNA, 25 bp, Homo sapien
tctatcaagctttggtgagcccaag

SEQ ID NO: 4325863 - DNA, 25 bp, Homo sapien
ccaagtaattgaaaccccggatgca

SEQ ID NO: 4325864 - DNA, 25 bp, Homo sapien
gcaattgtgatacacagtgcctgaa

SEQ ID NO: 4325865 - DNA, 25 bp, Homo sapien
tactatagcagcctttcgggcaatc

SEQ ID NO: 4325866 - DNA, 25 bp, Homo sapien
tcagctgatgatatggccgaacaga

SEQ ID NO: 4325867 - DNA, 25 bp, Homo sapien
tgagaagccgtatggtttatatctt

SEQ ID NO: 4325868 - DNA, 25 bp, Homo sapien
tccaactttttatcgggtgagaagc

SEQ ID NO: 4325869 - DNA, 25 bp, Homo sapien
gacactggctttggtttagcaatag

SEQ ID NO: 4325870 - DNA, 25 bp, Homo sapien
ggctttggtttagcaatagcatgag

SEQ ID NO: 4325871 - DNA, 25 bp, Homo sapien
cggtgacactggctttggtttagca

SEQ ID NO: 4325872 - DNA, 25 bp, Homo sapien
tggtttagcaatagcatgagtcctc

SEQ ID NO: 4325873 - DNA, 25 bp, Homo sapien
caaatgtgtcagcagtgacgataac

SEQ ID NO: 4325874 - DNA, 25 bp, Homo sapien
tgctcgaattaggagacttagggcc

SEQ ID NO: 4325875 - DNA, 25 bp, Homo sapien
cctgtttgacccagttctgctcgaa

SEQ ID NO: 4325876 - DNA, 25 bp, Homo sapien
tgataatgtcctggtagagttcctg

SEQ ID NO: 4325877 - DNA, 25 bp, Homo sapien
ttctctgtgctacctaatacaccac

SEQ ID NO: 4325878 - DNA, 25 bp, Homo sapien
ctctgtgctacctaatacaccacat

SEQ ID NO: 4325879 - DNA, 25 bp, Homo sapien
gtagaattataggaatcgaacctac

SEQ ID NO: 4325880 - DNA, 25 bp, Homo sapien
aattctctgtgctacctaatacacc

SEQ ID NO: 4325881 - DNA, 25 bp, Homo sapien
gccgggtgctttaagttaagctaca

SEQ ID NO: 4325882 - DNA, 25 bp, Homo sapien
aaagtggtcaggtgatatgaaatct

SEQ ID NO: 4325883 - DNA, 25 bp, Homo sapien
ggtcaggtgatatgaaatcttccgg

SEQ ID NO: 4325884 - DNA, 25 bp, Homo sapien
ctcaaagtggtcaggtgatatgaaa

SEQ ID NO: 4325885 - DNA, 25 bp, Homo sapien
attttctccagggtatcccatgggc

SEQ ID NO: 4325886 - DNA, 25 bp, Homo sapien
ttttctccagggtatcccatgggca

SEQ ID NO: 4325887 - DNA, 25 bp, Homo sapien
ttgattttctccagggtatcccatg

SEQ ID NO: 4325888 - DNA, 25 bp, Homo sapien
tgattttctccagggtatcccatgg

SEQ ID NO: 4325889 - DNA, 25 bp, Homo sapien
gacctgctgaacagcgggagtgaaa

SEQ ID NO: 4325890 - DNA, 25 bp, Homo sapien
gctgtaacactttcctggctgactc

SEQ ID NO: 4325891 - DNA, 25 bp, Homo sapien
tcctggatgcgggatgagaactcgg

SEQ ID NO: 4325892 - DNA, 25 bp, Homo sapien
ctgactcaccgagctgcgggcagtg

SEQ ID NO: 4325893 - DNA, 25 bp, Homo sapien
tgtgtatccaatcccaacgctaatg

SEQ ID NO: 4325894 - DNA, 25 bp, Homo sapien
taataacaggtagggacacataatc

SEQ ID NO: 4325895 - DNA, 25 bp, Homo sapien
ggacagagagagtgtaagtcaaata

SEQ ID NO: 4325896 - DNA, 25 bp, Homo sapien
cacgaggaatactctcagggacaga

SEQ ID NO: 4325897 - DNA, 25 bp, Homo sapien
gaaaagtggtagtccaatctaccag

SEQ ID NO: 4325898 - DNA, 25 bp, Homo sapien
gtccaatctaccagatgaactcttc

SEQ ID NO: 4325899 - DNA, 25 bp, Homo sapien
taacatattttatgcggtgagaaaa

SEQ ID NO: 4325900 - DNA, 25 bp, Homo sapien
gaaatagatggactactctataaca

SEQ ID NO: 4325901 - DNA, 25 bp, Homo sapien
gtttgccagattagatgaaggattt

SEQ ID NO: 4325902 - DNA, 25 bp, Homo sapien
ctgccacatgtgtttgccagattag

SEQ ID NO: 4325903 - DNA, 25 bp, Homo sapien
ggttgataaggcatagatcctgaac

SEQ ID NO: 4325904 - DNA, 25 bp, Homo sapien
tgggatattggcattcagtggggta

SEQ ID NO: 4325905 - DNA, 25 bp, Homo sapien
aatctttttaaagcgtgctgcggga

SEQ ID NO: 4325906 - DNA, 25 bp, Homo sapien
ctgcgggatgggatattggcattca

SEQ ID NO: 4325907 - DNA, 25 bp, Homo sapien
gatctcctaagggaggtccgccgat

SEQ ID NO: 4325908 - DNA, 25 bp, Homo sapien
cctaagggaggtccgccgatccgag

SEQ ID NO: 4325909 - DNA, 25 bp, Homo sapien
ttgatctcctaagggaggtccgccg

SEQ ID NO: 4325910 - DNA, 25 bp, Homo sapien
tctcctaagggaggtccgccgatcc

SEQ ID NO: 4325911 - DNA, 25 bp, Homo sapien
ccagagagtcagtatgtgttgccaa

SEQ ID NO: 4325912 - DNA, 25 bp, Homo sapien
cccagagagtcagtatgtgttgcca

SEQ ID NO: 4325913 - DNA, 25 bp, Homo sapien
ttagtaatgattatattccccatac

SEQ ID NO: 4325914 - DNA, 25 bp, Homo sapien
cactcctgcaaacttaagccaaagg

SEQ ID NO: 4325915 - DNA, 25 bp, Homo sapien
aatgattatattccccatacttccc

SEQ ID NO: 4325916 - DNA, 25 bp, Homo sapien
ctgcaaacttaagccaaaggaaggc

SEQ ID NO: 4325917 - DNA, 25 bp, Homo sapien
tttacttcaggtagtgtcacacctc

SEQ ID NO: 4325918 - DNA, 25 bp, Homo sapien
tagattacaccacattctacttgca

SEQ ID NO: 4325919 - DNA, 25 bp, Homo sapien
gaaaatatattgtacttgcccatgt

SEQ ID NO: 4325920 - DNA, 25 bp, Homo sapien
taggactaattctgagctggtgaca

SEQ ID NO: 4325921 - DNA, 25 bp, Homo sapien
ttttagccttcggatttaatacaga

SEQ ID NO: 4325922 - DNA, 25 bp, Homo sapien
gttgtacagagcaatgtgcgtgtga

SEQ ID NO: 4325923 - DNA, 25 bp, Homo sapien
gcaatgtgcgtgtgagaggttgtga

SEQ ID NO: 4325924 - DNA, 25 bp, Homo sapien
tagccttcggatttaatacagatag

SEQ ID NO: 4325925 - DNA, 25 bp, Homo sapien
tattgcagtgtttattagcccagag

SEQ ID NO: 4325926 - DNA, 25 bp, Homo sapien
gaaaaaggctctcgtggttaggagc

SEQ ID NO: 4325927 - DNA, 25 bp, Homo sapien
tacaaattatgacctcttgggcact

SEQ ID NO: 4325928 - DNA, 25 bp, Homo sapien
aaataggcagcgagcactcattcca

SEQ ID NO: 4325929 - DNA, 25 bp, Homo sapien
caactgattcaaagaacgcaactag

SEQ ID NO: 4325930 - DNA, 25 bp, Homo sapien
gaacgcaactagaatctcttgggat

SEQ ID NO: 4325931 - DNA, 25 bp, Homo sapien
tcttgggattatgtagagtttgaca

SEQ ID NO: 4325932 - DNA, 25 bp, Homo sapien
gaatctcttgggattatgtagagtt

SEQ ID NO: 4325933 - DNA, 25 bp, Homo sapien
cagctttgttgtcagtccacatgag

SEQ ID NO: 4325934 - DNA, 25 bp, Homo sapien
aaggttccctttcacataatagccg

SEQ ID NO: 4325935 - DNA, 25 bp, Homo sapien
gcatcttgccaaattcacccaaggt

SEQ ID NO: 4325936 - DNA, 25 bp, Homo sapien
tattctcactcgatttcaccctgca

SEQ ID NO: 4325937 - DNA, 25 bp, Homo sapien
gaggtattggatctctattgtctct

SEQ ID NO: 4325938 - DNA, 25 bp, Homo sapien
aggcaacaggctccactaggctttt

SEQ ID NO: 4325939 - DNA, 25 bp, Homo sapien
tatatgaaccccagattggtgactg

SEQ ID NO: 4325940 - DNA, 25 bp, Homo sapien
gaatgttcctcagatccatgaggta

SEQ ID NO: 4325941 - DNA, 25 bp, Homo sapien
catcttttattggatcctgattatt

SEQ ID NO: 4325942 - DNA, 25 bp, Homo sapien
ccaacatcttttattggatcctgat

SEQ ID NO: 4325943 - DNA, 25 bp, Homo sapien
atcttttattggatcctgattatta

SEQ ID NO: 4325944 - DNA, 25 bp, Homo sapien
aacatcttttattggatcctgatta

SEQ ID NO: 4325945 - DNA, 25 bp, Homo sapien
tccagtcatgaagcaatctactgac

SEQ ID NO: 4325946 - DNA, 25 bp, Homo sapien
tcattgacccctgaaaatgcagaca

SEQ ID NO: 4325947 - DNA, 25 bp, Homo sapien
gactcaagatgcagtggaataaaaa

SEQ ID NO: 4325948 - DNA, 25 bp, Homo sapien
tagataacagtggactgagagtcac

SEQ ID NO: 4325949 - DNA, 25 bp, Homo sapien
caaggagtgataccaaaggccaaac

SEQ ID NO: 4325950 - DNA, 25 bp, Homo sapien
tggtccctagaagcacgcagaactt

SEQ ID NO: 4325951 - DNA, 25 bp, Homo sapien
ctgaaagggagtccttgaagcgtcc

SEQ ID NO: 4325952 - DNA, 25 bp, Homo sapien
tggtaacactgacatctccgatgat

SEQ ID NO: 4325953 - DNA, 25 bp, Homo sapien
tgtactgagtacaacagtaaggatt

SEQ ID NO: 4325954 - DNA, 25 bp, Homo sapien
actgagtacaacagtaaggattcat

SEQ ID NO: 4325955 - DNA, 25 bp, Homo sapien
tactgagtacaacagtaaggattca

SEQ ID NO: 4325956 - DNA, 25 bp, Homo sapien
tttgtactgagtacaacagtaagga

SEQ ID NO: 4325957 - DNA, 25 bp, Homo sapien
aaccctttcacaatcttctgggagg

SEQ ID NO: 4325958 - DNA, 25 bp, Homo sapien
tccctcaaaccctttcacaatcttc

SEQ ID NO: 4325959 - DNA, 25 bp, Homo sapien
tcaaaccctttcacaatcttctggg

SEQ ID NO: 4325960 - DNA, 25 bp, Homo sapien
ctttcacaatcttctgggaggttct

SEQ ID NO: 4325961 - DNA, 25 bp, Homo sapien
acatgaactcatgaacgactctacc

SEQ ID NO: 4325962 - DNA, 25 bp, Homo sapien
ttcacatgaactcatgaacgactct

SEQ ID NO: 4325963 - DNA, 25 bp, Homo sapien
cacatgaactcatgaacgactctac

SEQ ID NO: 4325964 - DNA, 25 bp, Homo sapien
catgaactcatgaacgactctacca

SEQ ID NO: 4325965 - DNA, 25 bp, Homo sapien
agccctggcttacatctgacattca

SEQ ID NO: 4325966 - DNA, 25 bp, Homo sapien
ggcttacatctgacattcactggaa

SEQ ID NO: 4325967 - DNA, 25 bp, Homo sapien
tccagccctggcttacatctgacat

SEQ ID NO: 4325968 - DNA, 25 bp, Homo sapien
catctgacattcactggaagccatt

SEQ ID NO: 4325969 - DNA, 25 bp, Homo sapien
aggtagtcaaccacaacacaagcct

SEQ ID NO: 4325970 - DNA, 25 bp, Homo sapien
gcatcaggcccacgttttcatagac

SEQ ID NO: 4325971 - DNA, 25 bp, Homo sapien
ttttcatagactctggcactctctt

SEQ ID NO: 4325972 - DNA, 25 bp, Homo sapien
tgctgttgcatcaggcccacgtttt

SEQ ID NO: 4325973 - DNA, 25 bp, Homo sapien
atcttaaatgtttctgctgttgcat

SEQ ID NO: 4325974 - DNA, 25 bp, Homo sapien
ttgacgttcctaacatgcacgatgc

SEQ ID NO: 4325975 - DNA, 25 bp, Homo sapien
gtttcaatatgatgctggaccaccg

SEQ ID NO: 4325976 - DNA, 25 bp, Homo sapien
tatgatgctggaccaccgtatagat

SEQ ID NO: 4325977 - DNA, 25 bp, Homo sapien
gcttatagtcatgagtggtgctttc

SEQ ID NO: 4325978 - DNA, 25 bp, Homo sapien
aacactatccgccaaaagtcattca

SEQ ID NO: 4325979 - DNA, 25 bp, Homo sapien
tatccgccaaaagtcattcacagtg

SEQ ID NO: 4325980 - DNA, 25 bp, Homo sapien
ttggaacactatccgccaaaagtca

SEQ ID NO: 4325981 - DNA, 25 bp, Homo sapien
ttcttggaacactatccgccaaaag

SEQ ID NO: 4325982 - DNA, 25 bp, Homo sapien
actcctgttgttgcagtgtctcaaa

SEQ ID NO: 4325983 - DNA, 25 bp, Homo sapien
agagaagtttgcactcctgttgttg

SEQ ID NO: 4325984 - DNA, 25 bp, Homo sapien
gagaagtttgcactcctgttgttgc

SEQ ID NO: 4325985 - DNA, 25 bp, Homo sapien
gttgttgcagtgtctcaaattcttc

SEQ ID NO: 4325986 - DNA, 25 bp, Homo sapien
gccttgtctgactttatctgtggtc

SEQ ID NO: 4325987 - DNA, 25 bp, Homo sapien
tgtctgactttatctgtggtctcag

SEQ ID NO: 4325988 - DNA, 25 bp, Homo sapien
aagccttgtctgactttatctgtgg

SEQ ID NO: 4325989 - DNA, 25 bp, Homo sapien
ccaaaagccttgtctgactttatct

SEQ ID NO: 4325990 - DNA, 25 bp, Homo sapien
gcatttgtacaagtcgtgttaaggg

SEQ ID NO: 4325991 - DNA, 25 bp, Homo sapien
gcagcatttgtacaagtcgtgttaa

SEQ ID NO: 4325992 - DNA, 25 bp, Homo sapien
tttcagcagcatttgtacaagtcgt

SEQ ID NO: 4325993 - DNA, 25 bp, Homo sapien
cagcagcatttgtacaagtcgtgtt

SEQ ID NO: 4325994 - DNA, 25 bp, Homo sapien
ccagtgtttccaccataggattctt

SEQ ID NO: 4325995 - DNA, 25 bp, Homo sapien
aaagcatcaaaccgttctcctccac

SEQ ID NO: 4325996 - DNA, 25 bp, Homo sapien
gttccaaagatctgtcaaagcatca

SEQ ID NO: 4325997 - DNA, 25 bp, Homo sapien
cttctaatgttccaaagatctgtca

SEQ ID NO: 4325998 - DNA, 25 bp, Homo sapien
tcaaagcatcaaaccgttctcctcc

SEQ ID NO: 4325999 - DNA, 25 bp, Homo sapien
caccggtgcacacggagagaacaaa

SEQ ID NO: 4326000 - DNA, 25 bp, Homo sapien
tctcgtacaagaaagctactatgct

SEQ ID NO: 4326001 - DNA, 25 bp, Homo sapien
ttgtcatcaccggtgcacacggaga

SEQ ID NO: 4326002 - DNA, 25 bp, Homo sapien
tctctcctttgtcatcaccggtgca

SEQ ID NO: 4326003 - DNA, 25 bp, Homo sapien
ttgggtgaaaccatttccatgatgt

SEQ ID NO: 4326004 - DNA, 25 bp, Homo sapien
tagacatgtcggaacagtagtaaca

SEQ ID NO: 4326005 - DNA, 25 bp, Homo sapien
taacatattctactcatctgcccag

SEQ ID NO: 4326006 - DNA, 25 bp, Homo sapien
gagttttcctgccaaaacagtgtga

SEQ ID NO: 4326007 - DNA, 25 bp, Homo sapien
cagctaagcacaagcctgtttggag

SEQ ID NO: 4326008 - DNA, 25 bp, Homo sapien
tgtccagtctgatcacaccagcatt

SEQ ID NO: 4326009 - DNA, 25 bp, Homo sapien
caggctgtagaacacgttgtttcag

SEQ ID NO: 4326010 - DNA, 25 bp, Homo sapien
taagtcaaggtagatattttcaggc

SEQ ID NO: 4326011 - DNA, 25 bp, Homo sapien
ggtcatttctgcataagatggcagg

SEQ ID NO: 4326012 - DNA, 25 bp, Homo sapien
cttaggctccaaacatttcaggttc

SEQ ID NO: 4326013 - DNA, 25 bp, Homo sapien
tcttcaggagaggatgtcctctttg

SEQ ID NO: 4326014 - DNA, 25 bp, Homo sapien
ctgttcttcaggagaggatgtcctc

SEQ ID NO: 4326015 - DNA, 25 bp, Homo sapien
gctccaaacatttcaggttcttctg

SEQ ID NO: 4326016 - DNA, 25 bp, Homo sapien
tttaaagtctacctaataatccata

SEQ ID NO: 4326017 - DNA, 25 bp, Homo sapien
tagggaaaatggcatagccctttaa

SEQ ID NO: 4326018 - DNA, 25 bp, Homo sapien
ttaaagtctacctaataatccataa

SEQ ID NO: 4326019 - DNA, 25 bp, Homo sapien
taaagtctacctaataatccataaa

SEQ ID NO: 4326020 - DNA, 25 bp, Homo sapien
tctaaaaaccaaacattgctgaaga

SEQ ID NO: 4326021 - DNA, 25 bp, Homo sapien
aatgcaaatggatgtaacatattct

SEQ ID NO: 4326022 - DNA, 25 bp, Homo sapien
tgcaaatggatgtaacatattcttt

SEQ ID NO: 4326023 - DNA, 25 bp, Homo sapien
tatatttaacttgtaagattttcta

SEQ ID NO: 4326024 - DNA, 25 bp, Homo sapien
gaaagggtcaggtcaagatagcatt

SEQ ID NO: 4326025 - DNA, 25 bp, Homo sapien
tctgtctggcatcctagacgatgag

SEQ ID NO: 4326026 - DNA, 25 bp, Homo sapien
taaagtccgcagttgcaagcctgtg

SEQ ID NO: 4326027 - DNA, 25 bp, Homo sapien
tcagcaagcaggctctagaatccat

SEQ ID NO: 4326028 - DNA, 25 bp, Homo sapien
gaaatttgtgatcctatctgccatg

SEQ ID NO: 4326029 - DNA, 25 bp, Homo sapien
tgtgatcctatctgccatgtgacat

SEQ ID NO: 4326030 - DNA, 25 bp, Homo sapien
ccagatacaacagaaatttgtgatc

SEQ ID NO: 4326031 - DNA, 25 bp, Homo sapien
tacaacagaaatttgtgatcctatc

SEQ ID NO: 4326032 - DNA, 25 bp, Homo sapien
cttgaacttctagtaaagacgcctt

SEQ ID NO: 4326033 - DNA, 25 bp, Homo sapien
tgaacttctagtaaagacgccttta

SEQ ID NO: 4326034 - DNA, 25 bp, Homo sapien
gaagtggaagatcagggtgctcagc

SEQ ID NO: 4326035 - DNA, 25 bp, Homo sapien
ggtgctcagcaggttcagcatctgg

SEQ ID NO: 4326036 - DNA, 25 bp, Homo sapien
tgagggcacagtctctgcttccaag

SEQ ID NO: 4326037 - DNA, 25 bp, Homo sapien
tccaagatagaaccttgaatgctgc

SEQ ID NO: 4326038 - DNA, 25 bp, Homo sapien
tgggaccatatgtgagtgtgactag

SEQ ID NO: 4326039 - DNA, 25 bp, Homo sapien
gactgagtgtgactaggtatgcata

SEQ ID NO: 4326040 - DNA, 25 bp, Homo sapien
tgtgaaaccaggtgtattggaacgg

SEQ ID NO: 4326041 - DNA, 25 bp, Homo sapien
tatgcataggactgtgtgaggctag

SEQ ID NO: 4326042 - DNA, 25 bp, Homo sapien
tgaagggaacgaccaggagtgtgag

SEQ ID NO: 4326043 - DNA, 25 bp, Homo sapien
ctaagtgagtgcacagtcctaggca

SEQ ID NO: 4326044 - DNA, 25 bp, Homo sapien
gctgagtaaatggaggacactgagt

SEQ ID NO: 4326045 - DNA, 25 bp, Homo sapien
tgagtgaatggaacaagtgtgtacg

SEQ ID NO: 4326046 - DNA, 25 bp, Homo sapien
cataggcacgtttagagcgactgtc

SEQ ID NO: 4326047 - DNA, 25 bp, Homo sapien
catcacatgcactaaggaagggcag

SEQ ID NO: 4326048 - DNA, 25 bp, Homo sapien
gcggaaagctgtccatcacatgcac

SEQ ID NO: 4326049 - DNA, 25 bp, Homo sapien
gggacacgtcaaaaacataggcacg

SEQ ID NO: 4326050 - DNA, 25 bp, Homo sapien
gaggctgaaccaagctcagatgtga

SEQ ID NO: 4326051 - DNA, 25 bp, Homo sapien
cacagatgtatggttttggcttaaa

SEQ ID NO: 4326052 - DNA, 25 bp, Homo sapien
ttttgattcctagctggccacatgg

SEQ ID NO: 4326053 - DNA, 25 bp, Homo sapien
cagggatggatcaaactctgggaag

SEQ ID NO: 4326054 - DNA, 25 bp, Homo sapien
tggctgcaaatccacatatcacctt

SEQ ID NO: 4326055 - DNA, 25 bp, Homo sapien
cacatatcaccttgttgccagacat

SEQ ID NO: 4326056 - DNA, 25 bp, Homo sapien
ggctgcaaatccacatatcaccttg

SEQ ID NO: 4326057 - DNA, 25 bp, Homo sapien
gcttagctggcttgactgctgcaga

SEQ ID NO: 4326058 - DNA, 25 bp, Homo sapien
gacccgggttaacacaggtgcacag

SEQ ID NO: 4326059 - DNA, 25 bp, Homo sapien
tagtttgttgtaacaggtggcctga

SEQ ID NO: 4326060 - DNA, 25 bp, Homo sapien
cagaaacctaactgagcctggaccc

SEQ ID NO: 4326061 - DNA, 25 bp, Homo sapien
gctctaggtaacaccaggtctgctg

SEQ ID NO: 4326062 - DNA, 25 bp, Homo sapien
agactgtcaactacacagcacttca

SEQ ID NO: 4326063 - DNA, 25 bp, Homo sapien
cacactgagtagaagactgtcaact

SEQ ID NO: 4326064 - DNA, 25 bp, Homo sapien
gtctgctgttttgggaggacacact

SEQ ID NO: 4326065 - DNA, 25 bp, Homo sapien
atgcaagactggttcaatatacgaa

SEQ ID NO: 4326066 - DNA, 25 bp, Homo sapien
aagactggttcaatatacgaaaatc

SEQ ID NO: 4326067 - DNA, 25 bp, Homo sapien
gactggttcaatatacgaaaatcaa

SEQ ID NO: 4326068 - DNA, 25 bp, Homo sapien
gcaagactggttcaatatacgaaaa

SEQ ID NO: 4326069 - DNA, 25 bp, Homo sapien
cttctccctgcctcctagtagcaat

SEQ ID NO: 4326070 - DNA, 25 bp, Homo sapien
ttctccctgcctcctagtagcaatt

SEQ ID NO: 4326071 - DNA, 25 bp, Homo sapien
aacaccaaggttttgcctccactgt

SEQ ID NO: 4326072 - DNA, 25 bp, Homo sapien
tggaaacaccaaggttttgcctcca

SEQ ID NO: 4326073 - DNA, 25 bp, Homo sapien
acaccaaggttttgcctccactgtc

SEQ ID NO: 4326074 - DNA, 25 bp, Homo sapien
gagctggaaacaccaaggttttgcc

SEQ ID NO: 4326075 - DNA, 25 bp, Homo sapien
tataacctttacacaactaactaga

SEQ ID NO: 4326076 - DNA, 25 bp, Homo sapien
agagaatactataacctttacacaa

SEQ ID NO: 4326077 - DNA, 25 bp, Homo sapien
gactgttagctaggctaataagaaa

SEQ ID NO: 4326078 - DNA, 25 bp, Homo sapien
cacaactaactagaaaatctacaag

SEQ ID NO: 4326079 - DNA, 25 bp, Homo sapien
tatttagacgcattatagcatcaga

SEQ ID NO: 4326080 - DNA, 25 bp, Homo sapien
gggtcattcaatattcacggctgtg

SEQ ID NO: 4326081 - DNA, 25 bp, Homo sapien
cactggctaatgacactccaacttg

SEQ ID NO: 4326082 - DNA, 25 bp, Homo sapien
ttatacatctcaaggagctaggtct

SEQ ID NO: 4326083 - DNA, 25 bp, Homo sapien
aaagctgaaacttgagcacgagaaa

SEQ ID NO: 4326084 - DNA, 25 bp, Homo sapien
aagtagacaataagatcaatgcggg

SEQ ID NO: 4326085 - DNA, 25 bp, Homo sapien
gcaatgatgcagtctagccctacca

SEQ ID NO: 4326086 - DNA, 25 bp, Homo sapien
aaatattgcaaatcgctggtcaggg

SEQ ID NO: 4326087 - DNA, 25 bp, Homo sapien
gacgaaaggttatgacgttcacaac

SEQ ID NO: 4326088 - DNA, 25 bp, Homo sapien
tatcggcaatatttaaggacgaaag

SEQ ID NO: 4326089 - DNA, 25 bp, Homo sapien
tatgacgttcacaacaaactctcaa

SEQ ID NO: 4326090 - DNA, 25 bp, Homo sapien
catgacattgtctcttgcgtaggtc

SEQ ID NO: 4326091 - DNA, 25 bp, Homo sapien
cacgcgccggtcggctggccgcacc

SEQ ID NO: 4326092 - DNA, 25 bp, Homo sapien
acgcgccggtcggctggccgcaccc

SEQ ID NO: 4326093 - DNA, 25 bp, Homo sapien
cgcgccggtcggctggccgcaccca

SEQ ID NO: 4326094 - DNA, 25 bp, Homo sapien
ctgctcctttgcgatccgccgaggg

SEQ ID NO: 4326095 - DNA, 25 bp, Homo sapien
tctccacgagtgacaaccatgtttt

SEQ ID NO: 4326096 - DNA, 25 bp, Homo sapien
catgttttcccagatagaagaccgg

SEQ ID NO: 4326097 - DNA, 25 bp, Homo sapien
gagagcatcctcatccatttgggca

SEQ ID NO: 4326098 - DNA, 25 bp, Homo sapien
ccaggcattcgctaaagatcccaga

SEQ ID NO: 4326099 - DNA, 25 bp, Homo sapien
catacgtagggctaaactatcctga

SEQ ID NO: 4326100 - DNA, 25 bp, Homo sapien
tccagaaatctatgtagagacccca

SEQ ID NO: 4326101 - DNA, 25 bp, Homo sapien
gagaccccattgtgtacattgcgga

SEQ ID NO: 4326102 - DNA, 25 bp, Homo sapien
tcagccctggtctaaagagtaaagc

SEQ ID NO: 4326103 - DNA, 25 bp, Homo sapien
tcagaccttcggacagcagacttgg

SEQ ID NO: 4326104 - DNA, 25 bp, Homo sapien
taattaagcactagtcctccagagc

SEQ ID NO: 4326105 - DNA, 25 bp, Homo sapien
cagtagtatgatgtgcagcccagat

SEQ ID NO: 4326106 - DNA, 25 bp, Homo sapien
ggcaacactgttgagtaggctggca

SEQ ID NO: 4326107 - DNA, 25 bp, Homo sapien
cactgtctatggctcacaagggtcc

SEQ ID NO: 4326108 - DNA, 25 bp, Homo sapien
cataagatgagatgcatgcagcctc

SEQ ID NO: 4326109 - DNA, 25 bp, Homo sapien
tgatgtctagccaccaactggcagc

SEQ ID NO: 4326110 - DNA, 25 bp, Homo sapien
tgtacctgtgtggttttaccttcca

SEQ ID NO: 4326111 - DNA, 25 bp, Homo sapien
tacaatcagtgtatcctagggatga

SEQ ID NO: 4326112 - DNA, 25 bp, Homo sapien
ggtagcacagttaggaatattctca

SEQ ID NO: 4326113 - DNA, 25 bp, Homo sapien
gataaaaccgatgattctgcagtca

SEQ ID NO: 4326114 - DNA, 25 bp, Homo sapien
tcagtgattcaggttccttctattg

SEQ ID NO: 4326115 - DNA, 25 bp, Homo sapien
tcttccaagtgatgattcagtgatt

SEQ ID NO: 4326116 - DNA, 25 bp, Homo sapien
agttgggtaactagtctgggctgct

SEQ ID NO: 4326117 - DNA, 25 bp, Homo sapien
tattgtgtcactccatcatcttcac

SEQ ID NO: 4326118 - DNA, 25 bp, Homo sapien
gacatagaggtttagtgctgtgaat

SEQ ID NO: 4326119 - DNA, 25 bp, Homo sapien
ttgacatagaggtttagtgctgtga

SEQ ID NO: 4326120 - DNA, 25 bp, Homo sapien
tcttttaacactaccttggctgtgt

SEQ ID NO: 4326121 - DNA, 25 bp, Homo sapien
tttaacactaccttggctgtgttcc

SEQ ID NO: 4326122 - DNA, 25 bp, Homo sapien
ccacaagtttggattgttattacta

SEQ ID NO: 4326123 - DNA, 25 bp, Homo sapien
ggtttgaactgcaacaccatgttcc

SEQ ID NO: 4326124 - DNA, 25 bp, Homo sapien
tcaaaacttcagaactctattcagc

SEQ ID NO: 4326125 - DNA, 25 bp, Homo sapien
aactggtttgaactgcaacaccatg

SEQ ID NO: 4326126 - DNA, 25 bp, Homo sapien
ccccaaacaggaccgcgtagcaatg

SEQ ID NO: 4326127 - DNA, 25 bp, Homo sapien
ccaatgcctgtgatgccccaaacag

SEQ ID NO: 4326128 - DNA, 25 bp, Homo sapien
tacacccaatgcctgtgatgcccca

SEQ ID NO: 4326129 - DNA, 25 bp, Homo sapien
caggaccgcgtagcaatgtatctct

SEQ ID NO: 4326130 - DNA, 25 bp, Homo sapien
gtacccaccatgtgcgtctacattg

SEQ ID NO: 4326131 - DNA, 25 bp, Homo sapien
ctatagtacccaccatgtgcgtcta

SEQ ID NO: 4326132 - DNA, 25 bp, Homo sapien
tatagtacccaccatgtgcgtctac

SEQ ID NO: 4326133 - DNA, 25 bp, Homo sapien
tagtacccaccatgtgcgtctacat

SEQ ID NO: 4326134 - DNA, 25 bp, Homo sapien
agcctggaacaacccatctcgagtt

SEQ ID NO: 4326135 - DNA, 25 bp, Homo sapien
gaacaacccatctcgagttcagtgt

SEQ ID NO: 4326136 - DNA, 25 bp, Homo sapien
cctggaacaacccatctcgagttca

SEQ ID NO: 4326137 - DNA, 25 bp, Homo sapien
tggaacaacccatctcgagttcagt

SEQ ID NO: 4326138 - DNA, 25 bp, Homo sapien
gccagtccatgtagaggaactgcca

SEQ ID NO: 4326139 - DNA, 25 bp, Homo sapien
tgcctggcatgagcacttatattgc

SEQ ID NO: 4326140 - DNA, 25 bp, Homo sapien
cctggcatgagcacttatattgctg

SEQ ID NO: 4326141 - DNA, 25 bp, Homo sapien
aagggtctgaaagggtactgcctgc

SEQ ID NO: 4326142 - DNA, 25 bp, Homo sapien
tggcatgagcacttatattgctgtg

SEQ ID NO: 4326143 - DNA, 25 bp, Homo sapien
ctacaggtgcatgagctcagtgaac

SEQ ID NO: 4326144 - DNA, 25 bp, Homo sapien
gaactgagcatcagtatagcctaac

SEQ ID NO: 4326145 - DNA, 25 bp, Homo sapien
gctcagtgaactgagcatcagtata

SEQ ID NO: 4326146 - DNA, 25 bp, Homo sapien
gcatgagctcagtgaactgagcatc

SEQ ID NO: 4326147 - DNA, 25 bp, Homo sapien
tttctgcaatacaaggtagctttgt

SEQ ID NO: 4326148 - DNA, 25 bp, Homo sapien
ggaccagtccagcttagagtcagtg

SEQ ID NO: 4326149 - DNA, 25 bp, Homo sapien
gattttggtagaccttttctgcaat

SEQ ID NO: 4326150 - DNA, 25 bp, Homo sapien
gcttagagtcagtgaccccaatacc

SEQ ID NO: 4326151 - DNA, 25 bp, Homo sapien
tcgggcaaagttgtttagggctgcc

SEQ ID NO: 4326152 - DNA, 25 bp, Homo sapien
tgctcgggcaaagttgtttagggct

SEQ ID NO: 4326153 - DNA, 25 bp, Homo sapien
caccctctggatatgctcgggcaaa

SEQ ID NO: 4326154 - DNA, 25 bp, Homo sapien
gcaccctctggatatgctcgggcaa

SEQ ID NO: 4326155 - DNA, 25 bp, Homo sapien
tgaagcctcggaaacagataacctc

SEQ ID NO: 4326156 - DNA, 25 bp, Homo sapien
cattatgtctgcagtgatttggccc

SEQ ID NO: 4326157 - DNA, 25 bp, Homo sapien
tggcagccacttgggtaaaaccatg

SEQ ID NO: 4326158 - DNA, 25 bp, Homo sapien
ttggtattcagggatactgaagcct

SEQ ID NO: 4326159 - DNA, 25 bp, Homo sapien
cattcttttgtgttactacatgtca

SEQ ID NO: 4326160 - DNA, 25 bp, Homo sapien
ccagaagggtgaccacattcttttg

SEQ ID NO: 4326161 - DNA, 25 bp, Homo sapien
tattccagaagggtgaccacattct

SEQ ID NO: 4326162 - DNA, 25 bp, Homo sapien
gggtgaccacattcttttgtgttac

SEQ ID NO: 4326163 - DNA, 25 bp, Homo sapien
taaaaaatttgtttgctaaggcata

SEQ ID NO: 4326164 - DNA, 25 bp, Homo sapien
gctaaggcatagtcaaatgaactgt

SEQ ID NO: 4326165 - DNA, 25 bp, Homo sapien
gggtgagctacatgttttgattcca

SEQ ID NO: 4326166 - DNA, 25 bp, Homo sapien
taatatgacaggaagggtgagctac

SEQ ID NO: 4326167 - DNA, 25 bp, Homo sapien
tctgaagatctcaaaacatccaaca

SEQ ID NO: 4326168 - DNA, 25 bp, Homo sapien
tttcatctgaagatctcaaaacatc

SEQ ID NO: 4326169 - DNA, 25 bp, Homo sapien
tcatctgaagatctcaaaacatcca

SEQ ID NO: 4326170 - DNA, 25 bp, Homo sapien
ctgaagatctcaaaacatccaacat

SEQ ID NO: 4326171 - DNA, 25 bp, Homo sapien
ggaacaactgatactggtgcctact

SEQ ID NO: 4326172 - DNA, 25 bp, Homo sapien
tattcctggcaaatgtactacactt

SEQ ID NO: 4326173 - DNA, 25 bp, Homo sapien
tatgtcaaaatgcagggaatcaacc

SEQ ID NO: 4326174 - DNA, 25 bp, Homo sapien
ttcgtctgacgccaatctgggagta

SEQ ID NO: 4326175 - DNA, 25 bp, Homo sapien
gcaatctctatgtatttacttacca

SEQ ID NO: 4326176 - DNA, 25 bp, Homo sapien
cagtaccttaggtgtgatgctcaca

SEQ ID NO: 4326177 - DNA, 25 bp, Homo sapien
gacacaggcaaatgacatcacaaat

SEQ ID NO: 4326178 - DNA, 25 bp, Homo sapien
gatgtccgtaaggaacagccagaac

SEQ ID NO: 4326179 - DNA, 25 bp, Homo sapien
gatacttcattttcgtgatcccaaa

SEQ ID NO: 4326180 - DNA, 25 bp, Homo sapien
catggttcatgggagcatgtcttcc

SEQ ID NO: 4326181 - DNA, 25 bp, Homo sapien
gaattcctaatctagcctctcctgg

SEQ ID NO: 4326182 - DNA, 25 bp, Homo sapien
tcttccagaatggtgctttctcatc

SEQ ID NO: 4326183 - DNA, 25 bp, Homo sapien
ctcatgacttgcaaatttatgcagg

SEQ ID NO: 4326184 - DNA, 25 bp, Homo sapien
actcatgacttgcaaatttatgcag

SEQ ID NO: 4326185 - DNA, 25 bp, Homo sapien
acttaatgaagtttctgatcagagg

SEQ ID NO: 4326186 - DNA, 25 bp, Homo sapien
aagaagacaaatcagagctgactta

SEQ ID NO: 4326187 - DNA, 25 bp, Homo sapien
tgaacttcgaatttccagaaggatt

SEQ ID NO: 4326188 - DNA, 25 bp, Homo sapien
cttgttgaaacaggacgaacttctc

SEQ ID NO: 4326189 - DNA, 25 bp, Homo sapien
gatgctgagtataaagtagcctgat

SEQ ID NO: 4326190 - DNA, 25 bp, Homo sapien
ttcttgttgaaacaggacgaacttc

SEQ ID NO: 4326191 - DNA, 25 bp, Homo sapien
ctaagaagcggattgattggttgat

SEQ ID NO: 4326192 - DNA, 25 bp, Homo sapien
tgatttcagagcctagggtggtgct

SEQ ID NO: 4326193 - DNA, 25 bp, Homo sapien
atttcagagcctagggtggtgctga

SEQ ID NO: 4326194 - DNA, 25 bp, Homo sapien
caagttctaagaagcggattgattg

SEQ ID NO: 4326195 - DNA, 25 bp, Homo sapien
gagctgcccccacttctgcatgtgt

SEQ ID NO: 4326196 - DNA, 25 bp, Homo sapien
tgtgcccaccgccaacccctgcagc

SEQ ID NO: 4326197 - DNA, 25 bp, Homo sapien
cagagctgcccccacttctgcatgt

SEQ ID NO: 4326198 - DNA, 25 bp, Homo sapien
acttctgcatgtgtgcccaccgcca

SEQ ID NO: 4326199 - DNA, 25 bp, Homo sapien
cccagcctccaaagcttcgcatgca

SEQ ID NO: 4326200 - DNA, 25 bp, Homo sapien
gcctccaaagcttcgcatgcacatg

SEQ ID NO: 4326201 - DNA, 25 bp, Homo sapien
tccaaagcttcgcatgcacatgcat

SEQ ID NO: 4326202 - DNA, 25 bp, Homo sapien
gcttcgcatgcacatgcatctggcc

SEQ ID NO: 4326203 - DNA, 25 bp, Homo sapien
catgtatttgcctgcagccagcccc

SEQ ID NO: 4326204 - DNA, 25 bp, Homo sapien
atgtatttgcctgcagccagcccct

SEQ ID NO: 4326205 - DNA, 25 bp, Homo sapien
ctgcagccagcccctgccaccagtg

SEQ ID NO: 4326206 - DNA, 25 bp, Homo sapien
cagccagcccctgccaccagtgcat

SEQ ID NO: 4326207 - DNA, 25 bp, Homo sapien
aagctgttggtgcatactactggtc

SEQ ID NO: 4326208 - DNA, 25 bp, Homo sapien
taactttgaagtggaatacctagac

SEQ ID NO: 4326209 - DNA, 25 bp, Homo sapien
gaatgccaacaatcagagctgtctc

SEQ ID NO: 4326210 - DNA, 25 bp, Homo sapien
agccaaaattgggaaaatagcatgc

SEQ ID NO: 4326211 - DNA, 25 bp, Homo sapien
cgttcagtgtagtcggattcccggg

SEQ ID NO: 4326212 - DNA, 25 bp, Homo sapien
gcacagatggtttcgcccacccttt

SEQ ID NO: 4326213 - DNA, 25 bp, Homo sapien
aatattccaggactacgcagtagcc

SEQ ID NO: 4326214 - DNA, 25 bp, Homo sapien
ccctatcggtggtgagaacaataac

SEQ ID NO: 4326215 - DNA, 25 bp, Homo sapien
accttgaggagagtccagtgacctc

SEQ ID NO: 4326216 - DNA, 25 bp, Homo sapien
ctctgctgcagaggcgacaaaggct

SEQ ID NO: 4326217 - DNA, 25 bp, Homo sapien
ggctttcaaacagcgtgtactcctg

SEQ ID NO: 4326218 - DNA, 25 bp, Homo sapien
taccccgttacctctgaagcctgta

SEQ ID NO: 4326219 - DNA, 25 bp, Homo sapien
gatattgcagtatagagttcttagc

SEQ ID NO: 4326220 - DNA, 25 bp, Homo sapien
tcctactctaagactctgtgattcc

SEQ ID NO: 4326221 - DNA, 25 bp, Homo sapien
gtctaaatgactttcgaagtctggg

SEQ ID NO: 4326222 - DNA, 25 bp, Homo sapien
gcagtgcaggtgattgacagtaatt

SEQ ID NO: 4326223 - DNA, 25 bp, Homo sapien
cgagtattgcccacgctaaatgaag

SEQ ID NO: 4326224 - DNA, 25 bp, Homo sapien
gtgatcacagacagcaccaaaaggg

SEQ ID NO: 4326225 - DNA, 25 bp, Homo sapien
taagtagcctgctatgagagcacag

SEQ ID NO: 4326226 - DNA, 25 bp, Homo sapien
gttgaacgcctacttcgagtaagag

SEQ ID NO: 4326227 - DNA, 25 bp, Homo sapien
taccaggtgcaagaggaatgtcctc

SEQ ID NO: 4326228 - DNA, 25 bp, Homo sapien
gctggaaacctaactatgttcctgg

SEQ ID NO: 4326229 - DNA, 25 bp, Homo sapien
gccacacaaagatggaggtagtgat

SEQ ID NO: 4326230 - DNA, 25 bp, Homo sapien
ggcaggatgctcattgtatctccca

SEQ ID NO: 4326231 - DNA, 25 bp, Homo sapien
aaggtacgaggagccagccttcggt

SEQ ID NO: 4326232 - DNA, 25 bp, Homo sapien
tcgtctgcgttggtgaccgggaaca

SEQ ID NO: 4326233 - DNA, 25 bp, Homo sapien
tctcggcgaaagtacgtggagccct

SEQ ID NO: 4326234 - DNA, 25 bp, Homo sapien
gagccccaaacttcatctcggcgaa

SEQ ID NO: 4326235 - DNA, 25 bp, Homo sapien
taatgacacgtccagttctcttctc

SEQ ID NO: 4326236 - DNA, 25 bp, Homo sapien
ctaatgacacgtccagttctcttct

SEQ ID NO: 4326237 - DNA, 25 bp, Homo sapien
gctgccgttcccggggtggctgact

SEQ ID NO: 4326238 - DNA, 25 bp, Homo sapien
tgccgttcccggggtggctgactgg

SEQ ID NO: 4326239 - DNA, 25 bp, Homo sapien
tttccctggtcggttcctatctcca

SEQ ID NO: 4326240 - DNA, 25 bp, Homo sapien
tccaatctggggattgtgacccggg

SEQ ID NO: 4326241 - DNA, 25 bp, Homo sapien
tgcacttgccgctgtgggctttggc

SEQ ID NO: 4326242 - DNA, 25 bp, Homo sapien
gtgggctttggcgaatgtgttttcc

SEQ ID NO: 4326243 - DNA, 25 bp, Homo sapien
gatccctatgatttggttactggtg

SEQ ID NO: 4326244 - DNA, 25 bp, Homo sapien
ggctgcctatcgatccctatgattt

SEQ ID NO: 4326245 - DNA, 25 bp, Homo sapien
gcctatcgatccctatgatttggtt

SEQ ID NO: 4326246 - DNA, 25 bp, Homo sapien
ggctcgggctgcctatcgatcccta

SEQ ID NO: 4326247 - DNA, 25 bp, Homo sapien
tttttgcttctccatttccaagtgt

SEQ ID NO: 4326248 - DNA, 25 bp, Homo sapien
tgcttctccatttccaagtgtttcc

SEQ ID NO: 4326249 - DNA, 25 bp, Homo sapien
agacgtttttgcttctccatttcca

SEQ ID NO: 4326250 - DNA, 25 bp, Homo sapien
ttttgcttctccatttccaagtgtt

SEQ ID NO: 4326251 - DNA, 25 bp, Homo sapien
agatttaaccttaagcaggtgctta

SEQ ID NO: 4326252 - DNA, 25 bp, Homo sapien
accttaagcaggtgcttaacttaag

SEQ ID NO: 4326253 - DNA, 25 bp, Homo sapien
gatttaaccttaagcaggtgcttaa

SEQ ID NO: 4326254 - DNA, 25 bp, Homo sapien
taaccttaagcaggtgcttaactta

SEQ ID NO: 4326255 - DNA, 25 bp, Homo sapien
tgttcatgccctgtgagctacaaaa

SEQ ID NO: 4326256 - DNA, 25 bp, Homo sapien
cagtggtgaagaaaatccggtgcta

SEQ ID NO: 4326257 - DNA, 25 bp, Homo sapien
gaaagactgtccatttgacttaact

SEQ ID NO: 4326258 - DNA, 25 bp, Homo sapien
tacaaaatatcagttaaggcccatg

SEQ ID NO: 4326259 - DNA, 25 bp, Homo sapien
taggtgtgtgcaaagatagcgaaca

SEQ ID NO: 4326260 - DNA, 25 bp, Homo sapien
tgcaagtccaggataggtgtgtgca

SEQ ID NO: 4326261 - DNA, 25 bp, Homo sapien
caggataggtgtgtgcaaagatagc

SEQ ID NO: 4326262 - DNA, 25 bp, Homo sapien
caaagatagcgaacagtgtgctgac

SEQ ID NO: 4326263 - DNA, 25 bp, Homo sapien
gatgcctggtactctggatggcttt

SEQ ID NO: 4326264 - DNA, 25 bp, Homo sapien
catttttagagtagctctggcagac

SEQ ID NO: 4326265 - DNA, 25 bp, Homo sapien
gacatgcacgtctttttctgcacca

SEQ ID NO: 4326266 - DNA, 25 bp, Homo sapien
acctggtggcagacttttgggaatc

SEQ ID NO: 4326267 - DNA, 25 bp, Homo sapien
tgatgacctattcccggctttcatt

SEQ ID NO: 4326268 - DNA, 25 bp, Homo sapien
tgcagcagctcttagtgtttgtacc

SEQ ID NO: 4326269 - DNA, 25 bp, Homo sapien
ccaggaactccactgatgacctatt

SEQ ID NO: 4326270 - DNA, 25 bp, Homo sapien
agcagctcttagtgtttgtaccttc

SEQ ID NO: 4326271 - DNA, 25 bp, Homo sapien
aatttgttattcctagccttcatag

SEQ ID NO: 4326272 - DNA, 25 bp, Homo sapien
gggtcctgagtacatatattcgtat

SEQ ID NO: 4326273 - DNA, 25 bp, Homo sapien
catttgcctgctgtatggtttcaca

SEQ ID NO: 4326274 - DNA, 25 bp, Homo sapien
tgtctattgtgatactgctatacct

SEQ ID NO: 4326275 - DNA, 25 bp, Homo sapien
tatttctgagcagaaccactgtgtg

SEQ ID NO: 4326276 - DNA, 25 bp, Homo sapien
tctgagcagaaccactgtgtgctgg

SEQ ID NO: 4326277 - DNA, 25 bp, Homo sapien
gctggtgaccacatcggacactcat

SEQ ID NO: 4326278 - DNA, 25 bp, Homo sapien
tctttaaggtgcttaggatggtaca

SEQ ID NO: 4326279 - DNA, 25 bp, Homo sapien
ttatggcttcattttcctgtctttc

SEQ ID NO: 4326280 - DNA, 25 bp, Homo sapien
ctgcctaaagagcagaggggctcgt

SEQ ID NO: 4326281 - DNA, 25 bp, Homo sapien
tcctgtctttctgcctaaagagcag

SEQ ID NO: 4326282 - DNA, 25 bp, Homo sapien
gctcgtggccctgaaacaggctcct

SEQ ID NO: 4326283 - DNA, 25 bp, Homo sapien
ccagtttgcatactcgggttttagt

SEQ ID NO: 4326284 - DNA, 25 bp, Homo sapien
tagttggatatcgagctgcctcttt

SEQ ID NO: 4326285 - DNA, 25 bp, Homo sapien
tcttccccagtttgcatactcgggt

SEQ ID NO: 4326286 - DNA, 25 bp, Homo sapien
catactcgggttttagttggatatc

SEQ ID NO: 4326287 - DNA, 25 bp, Homo sapien
atgattgtagttggcactgtttgaa

SEQ ID NO: 4326288 - DNA, 25 bp, Homo sapien
tgattgtagttggcactgtttgaag

SEQ ID NO: 4326289 - DNA, 25 bp, Homo sapien
catgattgtagttggcactgtttga

SEQ ID NO: 4326290 - DNA, 25 bp, Homo sapien
ttaagtgatcacatgattgtagttg

SEQ ID NO: 4326291 - DNA, 25 bp, Homo sapien
ctaagagtaaaatgggtcaaaagca

SEQ ID NO: 4326292 - DNA, 25 bp, Homo sapien
taagagtaaaatgggtcaaaagcat

SEQ ID NO: 4326293 - DNA, 25 bp, Homo sapien
gtgttctgctagatctgttaacacc

SEQ ID NO: 4326294 - DNA, 25 bp, Homo sapien
tggtgttctgctagatctgttaaca

SEQ ID NO: 4326295 - DNA, 25 bp, Homo sapien
ctgctagatctgttaacaccctcgt

SEQ ID NO: 4326296 - DNA, 25 bp, Homo sapien
ttgggagttcaaggattgtctgcat

SEQ ID NO: 4326297 - DNA, 25 bp, Homo sapien
tgccccacaataggacccagctagg

SEQ ID NO: 4326298 - DNA, 25 bp, Homo sapien
cccacaataggacccagctaggcaa

SEQ ID NO: 4326299 - DNA, 25 bp, Homo sapien
aataggacccagctaggcaagcctg

SEQ ID NO: 4326300 - DNA, 25 bp, Homo sapien
ctttctgccccacaataggacccag

SEQ ID NO: 4326301 - DNA, 25 bp, Homo sapien
aagtgtagctgcgtattggaacccc

SEQ ID NO: 4326302 - DNA, 25 bp, Homo sapien
gttgcattgcctgaacattcctagt

SEQ ID NO: 4326303 - DNA, 25 bp, Homo sapien
caaggattgcctgtctttaccgtgg

SEQ ID NO: 4326304 - DNA, 25 bp, Homo sapien
aacccatagtatctccaaggattgc

SEQ ID NO: 4326305 - DNA, 25 bp, Homo sapien
tacctttcttgtccccaagctttgc

SEQ ID NO: 4326306 - DNA, 25 bp, Homo sapien
cttcagtactattttcttgtcccca

SEQ ID NO: 4326307 - DNA, 25 bp, Homo sapien
gctgagcagctttcttcagtactat

SEQ ID NO: 4326308 - DNA, 25 bp, Homo sapien
tttcttgtccccaagctttgctgtt

SEQ ID NO: 4326309 - DNA, 25 bp, Homo sapien
ttacaggtatctctcaggctgcttc

SEQ ID NO: 4326310 - DNA, 25 bp, Homo sapien
tatagcactgatttctgtgggttgc

SEQ ID NO: 4326311 - DNA, 25 bp, Homo sapien
tgcccccggagttgtatagcactga

SEQ ID NO: 4326312 - DNA, 25 bp, Homo sapien
ttgtagtacttataattggtgcccc

SEQ ID NO: 4326313 - DNA, 25 bp, Homo sapien
attgtaatctggtctggagcttcct

SEQ ID NO: 4326314 - DNA, 25 bp, Homo sapien
ggaagagtagggatgcattgtaatc

SEQ ID NO: 4326315 - DNA, 25 bp, Homo sapien
gatgacaaactgcagatcaaacgga

SEQ ID NO: 4326316 - DNA, 25 bp, Homo sapien
acttttccaactgaacgcttctgta

SEQ ID NO: 4326317 - DNA, 25 bp, Homo sapien
gcctggcggcagcagtaccaaatct

SEQ ID NO: 4326318 - DNA, 25 bp, Homo sapien
cattcatcactaagaatttgttctt

SEQ ID NO: 4326319 - DNA, 25 bp, Homo sapien
tgttctttgtagtaggtatgcttct

SEQ ID NO: 4326320 - DNA, 25 bp, Homo sapien
tatgcttctattaagtgtggaagac

SEQ ID NO: 4326321 - DNA, 25 bp, Homo sapien
tctaagacagttcactcgttcattc

SEQ ID NO: 4326322 - DNA, 25 bp, Homo sapien
gacaggttcttgttcgtggaatcag

SEQ ID NO: 4326323 - DNA, 25 bp, Homo sapien
agtatccatgagagtagacactgat

SEQ ID NO: 4326324 - DNA, 25 bp, Homo sapien
agacactgatttgtcagtttgacag

SEQ ID NO: 4326325 - DNA, 25 bp, Homo sapien
ggaagcccatctgataggagacagt

SEQ ID NO: 4326326 - DNA, 25 bp, Homo sapien
agtcacacttgaatagccttaacca

SEQ ID NO: 4326327 - DNA, 25 bp, Homo sapien
cttgatccactttaacttgagggtg

SEQ ID NO: 4326328 - DNA, 25 bp, Homo sapien
cattaggctatttgcaaagtcacac

SEQ ID NO: 4326329 - DNA, 25 bp, Homo sapien
taatcaggtgtttggtataacgaat

SEQ ID NO: 4326330 - DNA, 25 bp, Homo sapien
cacacgaatggttggattgatgtga

SEQ ID NO: 4326331 - DNA, 25 bp, Homo sapien
tggttggattgatgtgaggaggccc

SEQ ID NO: 4326332 - DNA, 25 bp, Homo sapien
ctgagcacacgaatggttggattga

SEQ ID NO: 4326333 - DNA, 25 bp, Homo sapien
ttccctgagcacacgaatggttgga

SEQ ID NO: 4326334 - DNA, 25 bp, Homo sapien
tacagtggtaataacaggccttcat

SEQ ID NO: 4326335 - DNA, 25 bp, Homo sapien
gaaggcccgcatagctgatatattg

SEQ ID NO: 4326336 - DNA, 25 bp, Homo sapien
ggaatggagaacttatagacagaga

SEQ ID NO: 4326337 - DNA, 25 bp, Homo sapien
ggtcatctagcccaactttttgatg

SEQ ID NO: 4326338 - DNA, 25 bp, Homo sapien
gactaagcatgtccctactgagacc

SEQ ID NO: 4326339 - DNA, 25 bp, Homo sapien
cattgagcacgaaagacataaagga

SEQ ID NO: 4326340 - DNA, 25 bp, Homo sapien
gcagggagctacaacggagatgaca

SEQ ID NO: 4326341 - DNA, 25 bp, Homo sapien
taagtaccagacaaaaataggcggc

SEQ ID NO: 4326342 - DNA, 25 bp, Homo sapien
tgtgccttacgcttcttactgtgtt

SEQ ID NO: 4326343 - DNA, 25 bp, Homo sapien
ccaatatactgacccttgggacttg

SEQ ID NO: 4326344 - DNA, 25 bp, Homo sapien
catttgcaatcaacccttttgcagc

SEQ ID NO: 4326345 - DNA, 25 bp, Homo sapien
cttggtctgcagtctgattcactcc

SEQ ID NO: 4326346 - DNA, 25 bp, Homo sapien
tattgtccaagaaccccagtccttg

SEQ ID NO: 4326347 - DNA, 25 bp, Homo sapien
gtcaactccgctcacccatgatgga

SEQ ID NO: 4326348 - DNA, 25 bp, Homo sapien
aagagttgccccaaatctgttggta

SEQ ID NO: 4326349 - DNA, 25 bp, Homo sapien
gaactttcccttcaggcaagtcaag

SEQ ID NO: 4326350 - DNA, 25 bp, Homo sapien
tatacctacatttatattgtagaat

SEQ ID NO: 4326351 - DNA, 25 bp, Homo sapien
tgtatgctcggcctcgtggtccata

SEQ ID NO: 4326352 - DNA, 25 bp, Homo sapien
ggtccatatattctgcacttttata

SEQ ID NO: 4326353 - DNA, 25 bp, Homo sapien
cattgttagtggtgtatgctcggcc

SEQ ID NO: 4326354 - DNA, 25 bp, Homo sapien
ggcctcgtggtccatatattctgca

SEQ ID NO: 4326355 - DNA, 25 bp, Homo sapien
agtgaccttagtattacttcactat

SEQ ID NO: 4326356 - DNA, 25 bp, Homo sapien
tcactattctaaacacattgaagac

SEQ ID NO: 4326357 - DNA, 25 bp, Homo sapien
ttacttcactattctaaacacattg

SEQ ID NO: 4326358 - DNA, 25 bp, Homo sapien
gaccttagtattacttcactattct

SEQ ID NO: 4326359 - DNA, 25 bp, Homo sapien
taagcagcgccaagtggattaactg

SEQ ID NO: 4326360 - DNA, 25 bp, Homo sapien
caatgatgagggaggtatgcctgac

SEQ ID NO: 4326361 - DNA, 25 bp, Homo sapien
tatgcctgaccagagtgggactctc

SEQ ID NO: 4326362 - DNA, 25 bp, Homo sapien
cacagattggctggacgggttgcaa

SEQ ID NO: 4326363 - DNA, 25 bp, Homo sapien
ttcacagtgtcttgtttcctagcaa

SEQ ID NO: 4326364 - DNA, 25 bp, Homo sapien
tcacagtgtcttgtttcctagcaac

SEQ ID NO: 4326365 - DNA, 25 bp, Homo sapien
cactgagagtagcagaaatcctgca

SEQ ID NO: 4326366 - DNA, 25 bp, Homo sapien
cagaccaatattagtgctctccacc

SEQ ID NO: 4326367 - DNA, 25 bp, Homo sapien
ttttaagcggttaggcactgagagt

SEQ ID NO: 4326368 - DNA, 25 bp, Homo sapien
tagttccttagactcaccttgtcga

SEQ ID NO: 4326369 - DNA, 25 bp, Homo sapien
ttgtcccacagcatcctcaagagaa

SEQ ID NO: 4326370 - DNA, 25 bp, Homo sapien
tagaagattgcgtctcagatggaga

SEQ ID NO: 4326371 - DNA, 25 bp, Homo sapien
gatgagctttctaccgatgccatgt

SEQ ID NO: 4326372 - DNA, 25 bp, Homo sapien
aaaggagcatctgaactggtctggt

SEQ ID NO: 4326373 - DNA, 25 bp, Homo sapien
gatggactgctttactttcgtttgg

SEQ ID NO: 4326374 - DNA, 25 bp, Homo sapien
catcttaccagatgtgtctggcgaa

SEQ ID NO: 4326375 - DNA, 25 bp, Homo sapien
gagtgactgctaggtagaaattaaa

SEQ ID NO: 4326376 - DNA, 25 bp, Homo sapien
cctataaagtattcagagtgactgc

SEQ ID NO: 4326377 - DNA, 25 bp, Homo sapien
ggtcaaaactgatcatgtgcttaaa

SEQ ID NO: 4326378 - DNA, 25 bp, Homo sapien
gatttcctgataacttgggccagag

SEQ ID NO: 4326379 - DNA, 25 bp, Homo sapien
tactgagtaacaaggatctaattca

SEQ ID NO: 4326380 - DNA, 25 bp, Homo sapien
catactgttaaattgagagaggaaa

SEQ ID NO: 4326381 - DNA, 25 bp, Homo sapien
tgacttcgaaaggacaatgctctca

SEQ ID NO: 4326382 - DNA, 25 bp, Homo sapien
gacaatgctctcattgcatacttga

SEQ ID NO: 4326383 - DNA, 25 bp, Homo sapien
ttgagaaaaattgccggctgcacag

SEQ ID NO: 4326384 - DNA, 25 bp, Homo sapien
gctctcattgcatacttgagaaaaa

SEQ ID NO: 4326385 - DNA, 25 bp, Homo sapien
tcactgttggcggtagagtagctcg

SEQ ID NO: 4326386 - DNA, 25 bp, Homo sapien
aggaatcaggtttatcacaggccac

SEQ ID NO: 4326387 - DNA, 25 bp, Homo sapien
gagtagctcgtttatcttctgcagg

SEQ ID NO: 4326388 - DNA, 25 bp, Homo sapien
tcacaggccaccaaggaatcaggtt

SEQ ID NO: 4326389 - DNA, 25 bp, Homo sapien
tggcccctaattcagaaactatgtt

SEQ ID NO: 4326390 - DNA, 25 bp, Homo sapien
cttcacacacttgagcccacttgcc

SEQ ID NO: 4326391 - DNA, 25 bp, Homo sapien
cacttgcctctgcttaacctggccc

SEQ ID NO: 4326392 - DNA, 25 bp, Homo sapien
ttcacacacttgagcccacttgcct

SEQ ID NO: 4326393 - DNA, 25 bp, Homo sapien
cgtcaacagtcgacccctctgcctt

SEQ ID NO: 4326394 - DNA, 25 bp, Homo sapien
gtcaacagtcgacccctctgccttc

SEQ ID NO: 4326395 - DNA, 25 bp, Homo sapien
ccgtcaacagtcgacccctctgcct

SEQ ID NO: 4326396 - DNA, 25 bp, Homo sapien
aatctgtgttcttgaatggagaggc

SEQ ID NO: 4326397 - DNA, 25 bp, Homo sapien
taagtggtgcttagaagaagatgcc

SEQ ID NO: 4326398 - DNA, 25 bp, Homo sapien
catattctccttgtgggcgatccct

SEQ ID NO: 4326399 - DNA, 25 bp, Homo sapien
ggcgatcccttgagcattctcctta

SEQ ID NO: 4326400 - DNA, 25 bp, Homo sapien
gtcctccaaaggtagcaggtgtggc

SEQ ID NO: 4326401 - DNA, 25 bp, Homo sapien
aggtcctccaaaggtagcaggtgtg

SEQ ID NO: 4326402 - DNA, 25 bp, Homo sapien
caggcaggtcctccaaaggtagcag

SEQ ID NO: 4326403 - DNA, 25 bp, Homo sapien
cctccaaaggtagcaggtgtggcag

SEQ ID NO: 4326404 - DNA, 25 bp, Homo sapien
cctttgcctccataaaccgtctgag

SEQ ID NO: 4326405 - DNA, 25 bp, Homo sapien
ggatccttgggcatgaagatttcac

SEQ ID NO: 4326406 - DNA, 25 bp, Homo sapien
tggtctggcagaggacacgaactca

SEQ ID NO: 4326407 - DNA, 25 bp, Homo sapien
accgtctgagccaagtggttgttgc

SEQ ID NO: 4326408 - DNA, 25 bp, Homo sapien
agttatgtttgagcctgagccgccc

SEQ ID NO: 4326409 - DNA, 25 bp, Homo sapien
ttaatcatgcttaagttatgtttga

SEQ ID NO: 4326410 - DNA, 25 bp, Homo sapien
ctgagccgcccggaggattgaatcc

SEQ ID NO: 4326411 - DNA, 25 bp, Homo sapien
gaggattgaatccaagcaatgaaga

SEQ ID NO: 4326412 - DNA, 25 bp, Homo sapien
taatcaaatctccttgtggtcattc

SEQ ID NO: 4326413 - DNA, 25 bp, Homo sapien
tcagatttgaagatgagcctcactc

SEQ ID NO: 4326414 - DNA, 25 bp, Homo sapien
gatttgaagatgagcctcactcaga

SEQ ID NO: 4326415 - DNA, 25 bp, Homo sapien
caaatctccttgtggtcattcagat

SEQ ID NO: 4326416 - DNA, 25 bp, Homo sapien
gatgacatcttttctgtagcctcca

SEQ ID NO: 4326417 - DNA, 25 bp, Homo sapien
gcctccaatcaggcagatgattcaa

SEQ ID NO: 4326418 - DNA, 25 bp, Homo sapien
cagatgattcaacagaacagttgaa

SEQ ID NO: 4326419 - DNA, 25 bp, Homo sapien
ttattatactagaaagcttcaacat

SEQ ID NO: 4326420 - DNA, 25 bp, Homo sapien
gtgtgtcagccacgctaattccatg

SEQ ID NO: 4326421 - DNA, 25 bp, Homo sapien
catttgtacatccagtgcaaggcta

SEQ ID NO: 4326422 - DNA, 25 bp, Homo sapien
gctagcagtctatttgaaggcgtaa

SEQ ID NO: 4326423 - DNA, 25 bp, Homo sapien
cagatgtaccgcaggttatgaaaca

SEQ ID NO: 4326424 - DNA, 25 bp, Homo sapien
gagatggactgtttcaagctcagct

SEQ ID NO: 4326425 - DNA, 25 bp, Homo sapien
tattgttggtagcagtaatgggatt

SEQ ID NO: 4326426 - DNA, 25 bp, Homo sapien
ttgtgtgctcattatctcaggaagg

SEQ ID NO: 4326427 - DNA, 25 bp, Homo sapien
tccagatctatttctatgcatccat

SEQ ID NO: 4326428 - DNA, 25 bp, Homo sapien
aggctattatccttacaagcgagat

SEQ ID NO: 4326429 - DNA, 25 bp, Homo sapien
ttatccttacaagcgagatgaggat

SEQ ID NO: 4326430 - DNA, 25 bp, Homo sapien
ggatgttagaattatgaaacctatc

SEQ ID NO: 4326431 - DNA, 25 bp, Homo sapien
tgatctcctccaaaagtgtgtgagg

SEQ ID NO: 4326432 - DNA, 25 bp, Homo sapien
cagagactttggagatcacctgcta

SEQ ID NO: 4326433 - DNA, 25 bp, Homo sapien
ggagatcacctgctacagtcccctt

SEQ ID NO: 4326434 - DNA, 25 bp, Homo sapien
gactttggagatcacctgctacagt

SEQ ID NO: 4326435 - DNA, 25 bp, Homo sapien
tttggagatcacctgctacagtccc

SEQ ID NO: 4326436 - DNA, 25 bp, Homo sapien
ggatgtaagaagataccaaaatgaa

SEQ ID NO: 4326437 - DNA, 25 bp, Homo sapien
gaggagcctcagatgaacttggaaa

SEQ ID NO: 4326438 - DNA, 25 bp, Homo sapien
actcaaatgttaattgtactttgca

SEQ ID NO: 4326439 - DNA, 25 bp, Homo sapien
gattagtctctcaggatgtaagaag

SEQ ID NO: 4326440 - DNA, 25 bp, Homo sapien
taaaactgacaccagctatcccaaa

SEQ ID NO: 4326441 - DNA, 25 bp, Homo sapien
tgataaaactgacaccagctatccc

SEQ ID NO: 4326442 - DNA, 25 bp, Homo sapien
accacacagaggaaccttgttccct

SEQ ID NO: 4326443 - DNA, 25 bp, Homo sapien
aaactgacaccagctatcccaaagc

SEQ ID NO: 4326444 - DNA, 25 bp, Homo sapien
ctcttctctggttcgtgggcaccca

SEQ ID NO: 4326445 - DNA, 25 bp, Homo sapien
tcttctctggttcgtgggcacccac

SEQ ID NO: 4326446 - DNA, 25 bp, Homo sapien
cactcttctctggttcgtgggcacc

SEQ ID NO: 4326447 - DNA, 25 bp, Homo sapien
tcactcttctctggttcgtgggcac

SEQ ID NO: 4326448 - DNA, 25 bp, Homo sapien
gctgaccatctccatggagagcatc

SEQ ID NO: 4326449 - DNA, 25 bp, Homo sapien
tccatggagagcatcagcaggattg

SEQ ID NO: 4326450 - DNA, 25 bp, Homo sapien
tctccatggagagcatcagcaggat

SEQ ID NO: 4326451 - DNA, 25 bp, Homo sapien
atggagagcatcagcaggattgaac

SEQ ID NO: 4326452 - DNA, 25 bp, Homo sapien
tggtcccctcattcccagtcttgaa

SEQ ID NO: 4326453 - DNA, 25 bp, Homo sapien
tgaatccaaagcacgcactctccat

SEQ ID NO: 4326454 - DNA, 25 bp, Homo sapien
agccacagaataggtttctggtccc

SEQ ID NO: 4326455 - DNA, 25 bp, Homo sapien
aacagccacagaataggtttctggt

SEQ ID NO: 4326456 - DNA, 25 bp, Homo sapien
tggataaacgaataagccctaatgc

SEQ ID NO: 4326457 - DNA, 25 bp, Homo sapien
gggcaaccctctaatttcagtaaga

SEQ ID NO: 4326458 - DNA, 25 bp, Homo sapien
aatgctcttcgtggagggcaaccct

SEQ ID NO: 4326459 - DNA, 25 bp, Homo sapien
gacaggcttcagatacctcaagagc

SEQ ID NO: 4326460 - DNA, 25 bp, Homo sapien
gaaggcctccattcaaacacaacca

SEQ ID NO: 4326461 - DNA, 25 bp, Homo sapien
agaaggcctccattcaaacacaacc

SEQ ID NO: 4326462 - DNA, 25 bp, Homo sapien
aaggcctccattcaaacacaaccat

SEQ ID NO: 4326463 - DNA, 25 bp, Homo sapien
caatgtatgagatggagcaagtgat

SEQ ID NO: 4326464 - DNA, 25 bp, Homo sapien
atcatcaatgtatgagatggagcaa

SEQ ID NO: 4326465 - DNA, 25 bp, Homo sapien
tatgagatggagcaagtgattctgt

SEQ ID NO: 4326466 - DNA, 25 bp, Homo sapien
gagatggagcaagtgattctgtgtc

SEQ ID NO: 4326467 - DNA, 25 bp, Homo sapien
gccactccactccaccacagcactc

SEQ ID NO: 4326468 - DNA, 25 bp, Homo sapien
accacagcactccagacaacatagt

SEQ ID NO: 4326469 - DNA, 25 bp, Homo sapien
gaatagccactccactccaccacag

SEQ ID NO: 4326470 - DNA, 25 bp, Homo sapien
cacagcactccagacaacatagtga

SEQ ID NO: 4326471 - DNA, 25 bp, Homo sapien
aatattatagccacttcagaagaca

SEQ ID NO: 4326472 - DNA, 25 bp, Homo sapien
atattatagccacttcagaagacag

SEQ ID NO: 4326473 - DNA, 25 bp, Homo sapien
aaatattatagccacttcagaagac

SEQ ID NO: 4326474 - DNA, 25 bp, Homo sapien
gaatggtaatacagcttcagccagg

SEQ ID NO: 4326475 - DNA, 25 bp, Homo sapien
taggaaacgagcctttggagccctg

SEQ ID NO: 4326476 - DNA, 25 bp, Homo sapien
tgatgctttgagacttcggaggctg

SEQ ID NO: 4326477 - DNA, 25 bp, Homo sapien
gagccctgggccatccgtaagatgt

SEQ ID NO: 4326478 - DNA, 25 bp, Homo sapien
gccaattaggtctagagagccttcc

SEQ ID NO: 4326479 - DNA, 25 bp, Homo sapien
taggtctagagagccttcctaatag

SEQ ID NO: 4326480 - DNA, 25 bp, Homo sapien
ctagagagccttcctaatagactca

SEQ ID NO: 4326481 - DNA, 25 bp, Homo sapien
atttccgtttgccaattaggtctag

SEQ ID NO: 4326482 - DNA, 25 bp, Homo sapien
ttcaaacacgtttaattcagggtca

SEQ ID NO: 4326483 - DNA, 25 bp, Homo sapien
accatttcaaacacgtttaattcag

SEQ ID NO: 4326484 - DNA, 25 bp, Homo sapien
catttcaaacacgtttaattcaggg

SEQ ID NO: 4326485 - DNA, 25 bp, Homo sapien
tcaaacacgtttaattcagggtcat

SEQ ID NO: 4326486 - DNA, 25 bp, Homo sapien
gagcactacagattgtcttcttggc

SEQ ID NO: 4326487 - DNA, 25 bp, Homo sapien
tcatggagtccacgggcttctgttc

SEQ ID NO: 4326488 - DNA, 25 bp, Homo sapien
agggtcatggagtccacgggcttct

SEQ ID NO: 4326489 - DNA, 25 bp, Homo sapien
gccttgttggggtgagcactacaga

SEQ ID NO: 4326490 - DNA, 25 bp, Homo sapien
acactgttggtcatccgaggagaag

SEQ ID NO: 4326491 - DNA, 25 bp, Homo sapien
tgagactagtggaccttgaggcaaa

SEQ ID NO: 4326492 - DNA, 25 bp, Homo sapien
ggcaaaacgacacccacaattgtag

SEQ ID NO: 4326493 - DNA, 25 bp, Homo sapien
tcttcaagtgtctcacagccattcg

SEQ ID NO: 4326494 - DNA, 25 bp, Homo sapien
cagaaagtaagggagctgtttgaca

SEQ ID NO: 4326495 - DNA, 25 bp, Homo sapien
cagtgaaggttcctgctccatgcaa

SEQ ID NO: 4326496 - DNA, 25 bp, Homo sapien
aaggcttgatggcataatgtatgcc

SEQ ID NO: 4326497 - DNA, 25 bp, Homo sapien
tgacatgcatctctttgacagtgaa

SEQ ID NO: 4326498 - DNA, 25 bp, Homo sapien
tatgtttcactgaatcccagaggaa

SEQ ID NO: 4326499 - DNA, 25 bp, Homo sapien
ggcggcaagcaaaactatgatagac

SEQ ID NO: 4326500 - DNA, 25 bp, Homo sapien
caagtgcctgataaacattgactcc

SEQ ID NO: 4326501 - DNA, 25 bp, Homo sapien
ttgttcacgtgctgagttctagggc

SEQ ID NO: 4326502 - DNA, 25 bp, Homo sapien
cacttcccggcttcggcaaggtggt

SEQ ID NO: 4326503 - DNA, 25 bp, Homo sapien
tttcaaacccaataaaggccagcat

SEQ ID NO: 4326504 - DNA, 25 bp, Homo sapien
tgcaagctttattttcccggctgcc

SEQ ID NO: 4326505 - DNA, 25 bp, Homo sapien
taaaatgagaagcacatcccgagta

SEQ ID NO: 4326506 - DNA, 25 bp, Homo sapien
caccaagccgcgacagggaggcggg

SEQ ID NO: 4326507 - DNA, 25 bp, Homo sapien
gcgtgccccgcgctccaccaagccg

SEQ ID NO: 4326508 - DNA, 25 bp, Homo sapien
aggcggggagggtgcgtgcgaacat

SEQ ID NO: 4326509 - DNA, 25 bp, Homo sapien
ctggcggccgcgagagacagcgtgc

SEQ ID NO: 4326510 - DNA, 25 bp, Homo sapien
tcttcctcttttaggacgcagagat

SEQ ID NO: 4326511 - DNA, 25 bp, Homo sapien
tatcttcctcttttaggacgcagag

SEQ ID NO: 4326512 - DNA, 25 bp, Homo sapien
tcctcttttaggacgcagagatcca

SEQ ID NO: 4326513 - DNA, 25 bp, Homo sapien
ttcctcttttaggacgcagagatcc

SEQ ID NO: 4326514 - DNA, 25 bp, Homo sapien
aagtccttctctttggccgaaatct

SEQ ID NO: 4326515 - DNA, 25 bp, Homo sapien
agtccttctctttggccgaaatctc

SEQ ID NO: 4326516 - DNA, 25 bp, Homo sapien
ttctctttggccgaaatctcatctt

SEQ ID NO: 4326517 - DNA, 25 bp, Homo sapien
tcctttctgttctactcagccaatc

SEQ ID NO: 4326518 - DNA, 25 bp, Homo sapien
ctttctgttctactcagccaatcac

SEQ ID NO: 4326519 - DNA, 25 bp, Homo sapien
aaacaactccattcctcctttctgt

SEQ ID NO: 4326520 - DNA, 25 bp, Homo sapien
ctaaacaactccattcctcctttct

SEQ ID NO: 4326521 - DNA, 25 bp, Homo sapien
gtccacagtggtcaagttgtgttgc

SEQ ID NO: 4326522 - DNA, 25 bp, Homo sapien
tggccagccatactgcaatcttcac

SEQ ID NO: 4326523 - DNA, 25 bp, Homo sapien
tcttccataggagatgtagatatcc

SEQ ID NO: 4326524 - DNA, 25 bp, Homo sapien
aagtgcgccactcagatccaacaag

SEQ ID NO: 4326525 - DNA, 25 bp, Homo sapien
ctgactgaatgatggactgcctgac

SEQ ID NO: 4326526 - DNA, 25 bp, Homo sapien
tgagcaggacttgtccactatcaga

SEQ ID NO: 4326527 - DNA, 25 bp, Homo sapien
aggacttgtccactatcagattctg

SEQ ID NO: 4326528 - DNA, 25 bp, Homo sapien
tcctccgctgttttggtgatgggca

SEQ ID NO: 4326529 - DNA, 25 bp, Homo sapien
attctgctggtccttgtggctcctc

SEQ ID NO: 4326530 - DNA, 25 bp, Homo sapien
tctgccatattaaggctgtgaagag

SEQ ID NO: 4326531 - DNA, 25 bp, Homo sapien
tacatggcactgtgactctgtctgc

SEQ ID NO: 4326532 - DNA, 25 bp, Homo sapien
gcactgtgactctgtctgctcagaa

SEQ ID NO: 4326533 - DNA, 25 bp, Homo sapien
tctctcctctattagcattctctgc

SEQ ID NO: 4326534 - DNA, 25 bp, Homo sapien
tggctgccagtttgctagaactttt

SEQ ID NO: 4326535 - DNA, 25 bp, Homo sapien
aacttttgactagccttgagtctgg

SEQ ID NO: 4326536 - DNA, 25 bp, Homo sapien
ctggttttatcgttccaatcctcat

SEQ ID NO: 4326537 - DNA, 25 bp, Homo sapien
caaccttaatgcagaagttggctgc

SEQ ID NO: 4326538 - DNA, 25 bp, Homo sapien
tggacactttagagcccagtctttg

SEQ ID NO: 4326539 - DNA, 25 bp, Homo sapien
gagaaacagattgtcctcacaggat

SEQ ID NO: 4326540 - DNA, 25 bp, Homo sapien
acaacaccggtgatgctagcacgtc

SEQ ID NO: 4326541 - DNA, 25 bp, Homo sapien
tagccttagtgttgccaggagaaac

SEQ ID NO: 4326542 - DNA, 25 bp, Homo sapien
taacaagctccctgtgatgcagaag

SEQ ID NO: 4326543 - DNA, 25 bp, Homo sapien
cagggagtgttgactagactgcagc

SEQ ID NO: 4326544 - DNA, 25 bp, Homo sapien
gagtgggaatgctctagccctcaca

SEQ ID NO: 4326545 - DNA, 25 bp, Homo sapien
catgtactgcgtgccaactatgaga

SEQ ID NO: 4326546 - DNA, 25 bp, Homo sapien
gactccaaaggccataaggcctgtg

SEQ ID NO: 4326547 - DNA, 25 bp, Homo sapien
ccatctctgggcttgtagttccaca

SEQ ID NO: 4326548 - DNA, 25 bp, Homo sapien
ttactgatgagaattcaggctgtcc

SEQ ID NO: 4326549 - DNA, 25 bp, Homo sapien
aattaggtacctgaagtatttactg

SEQ ID NO: 4326550 - DNA, 25 bp, Homo sapien
aataatacgttagagctgcatgagc

SEQ ID NO: 4326551 - DNA, 25 bp, Homo sapien
tctaccgaggaagacagaactatct

SEQ ID NO: 4326552 - DNA, 25 bp, Homo sapien
catgagctgttaggcagaggtctct

SEQ ID NO: 4326553 - DNA, 25 bp, Homo sapien
gaactatctgtgatgagcacactca

SEQ ID NO: 4326554 - DNA, 25 bp, Homo sapien
gaagattccagacttgcctttatgg

SEQ ID NO: 4326555 - DNA, 25 bp, Homo sapien
tgttctgatgaccacctccgtattt

SEQ ID NO: 4326556 - DNA, 25 bp, Homo sapien
gcctgcactgtgcatgagatagtga

SEQ ID NO: 4326557 - DNA, 25 bp, Homo sapien
gatgaaatttactctaacttcccag

SEQ ID NO: 4326558 - DNA, 25 bp, Homo sapien
cattgccaaaggctaagcgtgcttc

SEQ ID NO: 4326559 - DNA, 25 bp, Homo sapien
gacagggtctgatttcatcgaggta

SEQ ID NO: 4326560 - DNA, 25 bp, Homo sapien
tctcccggaaaccaagcgtaaggca

SEQ ID NO: 4326561 - DNA, 25 bp, Homo sapien
cagaaatccagggaccattgtgttc

SEQ ID NO: 4326562 - DNA, 25 bp, Homo sapien
ggccttgtttgactcccacaaagcc

SEQ ID NO: 4326563 - DNA, 25 bp, Homo sapien
tgtttgactcccacaaagcccttca

SEQ ID NO: 4326564 - DNA, 25 bp, Homo sapien
aaagcccttcaggattgattcatta

SEQ ID NO: 4326565 - DNA, 25 bp, Homo sapien
ccttgtttgactcccacaaagccct

SEQ ID NO: 4326566 - DNA, 25 bp, Homo sapien
caaaaatgctggcatgaaactatgc

SEQ ID NO: 4326567 - DNA, 25 bp, Homo sapien
tccgtgtctcatcacacttagcctg

SEQ ID NO: 4326568 - DNA, 25 bp, Homo sapien
gaaactatgcctgaccacttcaggg

SEQ ID NO: 4326569 - DNA, 25 bp, Homo sapien
caagccttcccagtatgttgcagtc

SEQ ID NO: 4326570 - DNA, 25 bp, Homo sapien
tcatcctgaggcacttgaatctgtg

SEQ ID NO: 4326571 - DNA, 25 bp, Homo sapien
ttgtacacaaagccagggatatagg

SEQ ID NO: 4326572 - DNA, 25 bp, Homo sapien
gaaatatcctcctcaacacactgca

SEQ ID NO: 4326573 - DNA, 25 bp, Homo sapien
gtacacaaagccagggatataggga

SEQ ID NO: 4326574 - DNA, 25 bp, Homo sapien
aggaaatatcctcctcaacacactg

SEQ ID NO: 4326575 - DNA, 25 bp, Homo sapien
tctctggaatgttggttattcctgc

SEQ ID NO: 4326576 - DNA, 25 bp, Homo sapien
aatgttggttattcctgccgggcaa

SEQ ID NO: 4326577 - DNA, 25 bp, Homo sapien
ttggttattcctgccgggcaacata

SEQ ID NO: 4326578 - DNA, 25 bp, Homo sapien
ggaatgttggttattcctgccgggc

SEQ ID NO: 4326579 - DNA, 25 bp, Homo sapien
tggctcattgctcgctgacacggcc

SEQ ID NO: 4326580 - DNA, 25 bp, Homo sapien
tgcttcccaggcctttggccaactt

SEQ ID NO: 4326581 - DNA, 25 bp, Homo sapien
gctccaaatggcctgtctcctctta

SEQ ID NO: 4326582 - DNA, 25 bp, Homo sapien
aaatgattccaacctgcttcccagg

SEQ ID NO: 4326583 - DNA, 25 bp, Homo sapien
actgccagtttcattaccaagtctc

SEQ ID NO: 4326584 - DNA, 25 bp, Homo sapien
gtttcattaccaagtctctcccagt

SEQ ID NO: 4326585 - DNA, 25 bp, Homo sapien
actgccacagaagtgccttgcagag

SEQ ID NO: 4326586 - DNA, 25 bp, Homo sapien
cactgccacagaagtgccttgcaga

SEQ ID NO: 4326587 - DNA, 25 bp, Homo sapien
ctgctggggctaccggctccctgaa

SEQ ID NO: 4326588 - DNA, 25 bp, Homo sapien
tccactaggaatacggtaataatta

SEQ ID NO: 4326589 - DNA, 25 bp, Homo sapien
tttgcacactgctggggctaccggc

SEQ ID NO: 4326590 - DNA, 25 bp, Homo sapien
acactgctggggctaccggctccct

SEQ ID NO: 4326591 - DNA, 25 bp, Homo sapien
taattacgacctttattatggtatc

SEQ ID NO: 4326592 - DNA, 25 bp, Homo sapien
cctttattatggtatcgaacacttt

SEQ ID NO: 4326593 - DNA, 25 bp, Homo sapien
tacgacctttattatggtatcgaac

SEQ ID NO: 4326594 - DNA, 25 bp, Homo sapien
tattatggtatcgaacactttaaat

SEQ ID NO: 4326595 - DNA, 25 bp, Homo sapien
actggaaaggcttgaaattagctgg

SEQ ID NO: 4326596 - DNA, 25 bp, Homo sapien
ctggaaaggcttgaaattagctgga

SEQ ID NO: 4326597 - DNA, 25 bp, Homo sapien
aaactggaaaggcttgaaattagct

SEQ ID NO: 4326598 - DNA, 25 bp, Homo sapien
aactggaaaggcttgaaattagctg

SEQ ID NO: 4326599 - DNA, 25 bp, Homo sapien
tttgggtgcagtgagccgctcttac

SEQ ID NO: 4326600 - DNA, 25 bp, Homo sapien
tgaaatgtctactagggaagctcct

SEQ ID NO: 4326601 - DNA, 25 bp, Homo sapien
tccttgcccagtggattcgcatgga

SEQ ID NO: 4326602 - DNA, 25 bp, Homo sapien
caggccgcctctaacaggtatatat

SEQ ID NO: 4326603 - DNA, 25 bp, Homo sapien
aactgttggatttgatttatcagga

SEQ ID NO: 4326604 - DNA, 25 bp, Homo sapien
tgttggatttgatttatcaggagac

SEQ ID NO: 4326605 - DNA, 25 bp, Homo sapien
ctgttggatttgatttatcaggaga

SEQ ID NO: 4326606 - DNA, 25 bp, Homo sapien
actgttggatttgatttatcaggag

SEQ ID NO: 4326607 - DNA, 25 bp, Homo sapien
gctgagaatccaatgtgggcatccg

SEQ ID NO: 4326608 - DNA, 25 bp, Homo sapien
tgtgggcatccgatccagcctgtgt

SEQ ID NO: 4326609 - DNA, 25 bp, Homo sapien
atccaatgtgggcatccgatccagc

SEQ ID NO: 4326610 - DNA, 25 bp, Homo sapien
tgggcatccgatccagcctgtgtcc

SEQ ID NO: 4326611 - DNA, 25 bp, Homo sapien
gaagctgctccaatggaatggctcc

SEQ ID NO: 4326612 - DNA, 25 bp, Homo sapien
agctgctccaatggaatggctccaa

SEQ ID NO: 4326613 - DNA, 25 bp, Homo sapien
tccaatggaatggctccaagcctgc

SEQ ID NO: 4326614 - DNA, 25 bp, Homo sapien
cagagaagctgctccaatggaatgg

SEQ ID NO: 4326615 - DNA, 25 bp, Homo sapien
cacagaatcctgcatggggcatgac

SEQ ID NO: 4326616 - DNA, 25 bp, Homo sapien
tcaagttcaaaatcacacagggcat

SEQ ID NO: 4326617 - DNA, 25 bp, Homo sapien
gggcatgactggtaggtctggagac

SEQ ID NO: 4326618 - DNA, 25 bp, Homo sapien
cacagggcattggtagccattgaag

SEQ ID NO: 4326619 - DNA, 25 bp, Homo sapien
agactggcacggcacctgagaagat

SEQ ID NO: 4326620 - DNA, 25 bp, Homo sapien
ggcaggcgcaattgtaggagtctct

SEQ ID NO: 4326621 - DNA, 25 bp, Homo sapien
tgaaaaatataggagtgagtcctct

SEQ ID NO: 4326622 - DNA, 25 bp, Homo sapien
tccactcttggccagactggcacgg

SEQ ID NO: 4326623 - DNA, 25 bp, Homo sapien
atttctaccacctagaatatcctcc

SEQ ID NO: 4326624 - DNA, 25 bp, Homo sapien
gattctgcttagggtatttctacca

SEQ ID NO: 4326625 - DNA, 25 bp, Homo sapien
tctgcttagggtatttctaccacct

SEQ ID NO: 4326626 - DNA, 25 bp, Homo sapien
ttctctcagccccctgtttaagcat

SEQ ID NO: 4326627 - DNA, 25 bp, Homo sapien
gctttatggttttagggaatgctga

SEQ ID NO: 4326628 - DNA, 25 bp, Homo sapien
caaatctgcctgtaaccaggtaaaa

SEQ ID NO: 4326629 - DNA, 25 bp, Homo sapien
acagggtagctttggccattgtgta

SEQ ID NO: 4326630 - DNA, 25 bp, Homo sapien
tatcatggattgtcagtaacagctt

SEQ ID NO: 4326631 - DNA, 25 bp, Homo sapien
aataaatttagtaggccacaaccag

SEQ ID NO: 4326632 - DNA, 25 bp, Homo sapien
gttctaccttcactataggatgtgg

SEQ ID NO: 4326633 - DNA, 25 bp, Homo sapien
gatgaaagttacgacccaccaatgg

SEQ ID NO: 4326634 - DNA, 25 bp, Homo sapien
ggaatcagtctagttcccaagaact

SEQ ID NO: 4326635 - DNA, 25 bp, Homo sapien
cagctctaagtaccaatgccaagga

SEQ ID NO: 4326636 - DNA, 25 bp, Homo sapien
catgggacagtcacatcaaaggtgc

SEQ ID NO: 4326637 - DNA, 25 bp, Homo sapien
tacacaaattagcattccggccaga

SEQ ID NO: 4326638 - DNA, 25 bp, Homo sapien
ccattaaccaaagccaacatgtggg

SEQ ID NO: 4326639 - DNA, 25 bp, Homo sapien
gaaaccatgtttgcggctgctttaa

SEQ ID NO: 4326640 - DNA, 25 bp, Homo sapien
tgatcttatcaccagcagacgcatc

SEQ ID NO: 4326641 - DNA, 25 bp, Homo sapien
tgctgttacaagaagtaactctggg

SEQ ID NO: 4326642 - DNA, 25 bp, Homo sapien
tctgggtatgcgcttcaggaatgca

SEQ ID NO: 4326643 - DNA, 25 bp, Homo sapien
cagaggaattgggttgaaacctgcc

SEQ ID NO: 4326644 - DNA, 25 bp, Homo sapien
tatatctgatgaaacctgctgttgc

SEQ ID NO: 4326645 - DNA, 25 bp, Homo sapien
ccaaaaaggtatcttcggcacagtc

SEQ ID NO: 4326646 - DNA, 25 bp, Homo sapien
ttccttggcacagccgtggagaaca

SEQ ID NO: 4326647 - DNA, 25 bp, Homo sapien
gaagccttgggactttctcaggact

SEQ ID NO: 4326648 - DNA, 25 bp, Homo sapien
tagcccatgctaggtgctcatcgaa

SEQ ID NO: 4326649 - DNA, 25 bp, Homo sapien
tgtggatcacgtgaccttagccagg

SEQ ID NO: 4326650 - DNA, 25 bp, Homo sapien
gaaactgtgtgttggtctaggtacc

SEQ ID NO: 4326651 - DNA, 25 bp, Homo sapien
gatcagcctcaattggcagtggcca

SEQ ID NO: 4326652 - DNA, 25 bp, Homo sapien
ggcagcaagcacaagtggacttctc

SEQ ID NO: 4326653 - DNA, 25 bp, Homo sapien
ccacatctgctagatgagggtgacc

SEQ ID NO: 4326654 - DNA, 25 bp, Homo sapien
cactcttcatgatcagcctcaattg

SEQ ID NO: 4326655 - DNA, 25 bp, Homo sapien
taaaactttgtgcacacgaaataaa

SEQ ID NO: 4326656 - DNA, 25 bp, Homo sapien
tttaaaactttgtgcacacgaaata

SEQ ID NO: 4326657 - DNA, 25 bp, Homo sapien
tttgtgcacacgaaataaaacccac

SEQ ID NO: 4326658 - DNA, 25 bp, Homo sapien
ctttgtgcacacgaaataaaaccca

SEQ ID NO: 4326659 - DNA, 25 bp, Homo sapien
ctcctggtggcctgtctgcctctta

SEQ ID NO: 4326660 - DNA, 25 bp, Homo sapien
tcctggtggcctgtctgcctcttac

SEQ ID NO: 4326661 - DNA, 25 bp, Homo sapien
gggtcttcatatcgccctgaggcag

SEQ ID NO: 4326662 - DNA, 25 bp, Homo sapien
agggttctcgctgaattgctccaaa

SEQ ID NO: 4326663 - DNA, 25 bp, Homo sapien
gacattctgggtaaccctcctcatg

SEQ ID NO: 4326664 - DNA, 25 bp, Homo sapien
cttgtgtcttcagggcatgccaagg

SEQ ID NO: 4326665 - DNA, 25 bp, Homo sapien
actggtccgttgcttgatattcaaa

SEQ ID NO: 4326666 - DNA, 25 bp, Homo sapien
tgagcacctttctcactgccagtga

SEQ ID NO: 4326667 - DNA, 25 bp, Homo sapien
ttcactggtccgttgcttgatattc

SEQ ID NO: 4326668 - DNA, 25 bp, Homo sapien
caattttcactggtccgttgcttga

SEQ ID NO: 4326669 - DNA, 25 bp, Homo sapien
caatgggaagtttgcatgagactcc

SEQ ID NO: 4326670 - DNA, 25 bp, Homo sapien
catcttgaaagcttgtgtgagacac

SEQ ID NO: 4326671 - DNA, 25 bp, Homo sapien
ggagatctatagacctgtccactgc

SEQ ID NO: 4326672 - DNA, 25 bp, Homo sapien
gaagatttctgtactccaactggag

SEQ ID NO: 4326673 - DNA, 25 bp, Homo sapien
gaggcgaggtttcgcagagcgcatt

SEQ ID NO: 4326674 - DNA, 25 bp, Homo sapien
ctctgtggcaggttgctttgagcaa

SEQ ID NO: 4326675 - DNA, 25 bp, Homo sapien
ctttgagcaaggcagttagaggcga

SEQ ID NO: 4326676 - DNA, 25 bp, Homo sapien
aggtttcgcagagcgcattttaccc

SEQ ID NO: 4326677 - DNA, 25 bp, Homo sapien
catgccgatgggcgagtgcactcac

SEQ ID NO: 4326678 - DNA, 25 bp, Homo sapien
tctcctcggatgcccatgccgatgg

SEQ ID NO: 4326679 - DNA, 25 bp, Homo sapien
cccatgccgatgggcgagtgcactc

SEQ ID NO: 4326680 - DNA, 25 bp, Homo sapien
ctcctcggatgcccatgccgatggg

SEQ ID NO: 4326681 - DNA, 25 bp, Homo sapien
ctggctgtgaccgtggaacgccgct

SEQ ID NO: 4326682 - DNA, 25 bp, Homo sapien
tgtgaccgtggaacgccgcttttct

SEQ ID NO: 4326683 - DNA, 25 bp, Homo sapien
aacgccgcttttctcagtgtgaaga

SEQ ID NO: 4326684 - DNA, 25 bp, Homo sapien
cgtggaacgccgcttttctcagtgt

SEQ ID NO: 4326685 - DNA, 25 bp, Homo sapien
ggtctacgatcacacatataatgca

SEQ ID NO: 4326686 - DNA, 25 bp, Homo sapien
gaaaagttctcgtaagtgcataaaa

SEQ ID NO: 4326687 - DNA, 25 bp, Homo sapien
agaacgagacggtattttgctgcca

SEQ ID NO: 4326688 - DNA, 25 bp, Homo sapien
tttgctgccaaatattattgtctgt

SEQ ID NO: 4326689 - DNA, 25 bp, Homo sapien
gctgtagcagcaatagaaatagccc

SEQ ID NO: 4326690 - DNA, 25 bp, Homo sapien
tggtctgctgtagcagcaatagaaa

SEQ ID NO: 4326691 - DNA, 25 bp, Homo sapien
ttcagaaatgtgcttgtggtctgct

SEQ ID NO: 4326692 - DNA, 25 bp, Homo sapien
gggtattatactcaaaaaattcata

SEQ ID NO: 4326693 - DNA, 25 bp, Homo sapien
gatcttgcacatagcaacactggag

SEQ ID NO: 4326694 - DNA, 25 bp, Homo sapien
aaaactgcctggtcactcactgctc

SEQ ID NO: 4326695 - DNA, 25 bp, Homo sapien
tatttccaattacgggatagccctg

SEQ ID NO: 4326696 - DNA, 25 bp, Homo sapien
tgggatctaattctcaacaatggct

SEQ ID NO: 4326697 - DNA, 25 bp, Homo sapien
tggatgagatccaagagcgaacccc

SEQ ID NO: 4326698 - DNA, 25 bp, Homo sapien
tatctctggtggcattgtctagggc

SEQ ID NO: 4326699 - DNA, 25 bp, Homo sapien
cataaaagaggcacacgggaacatc

SEQ ID NO: 4326700 - DNA, 25 bp, Homo sapien
tggttacctagaggccagaggccct

SEQ ID NO: 4326701 - DNA, 25 bp, Homo sapien
taagggtctcataggtgacaaccag

SEQ ID NO: 4326702 - DNA, 25 bp, Homo sapien
caaggccatggtgcttaaacacaag

SEQ ID NO: 4326703 - DNA, 25 bp, Homo sapien
cgtcttactactctccaaatcggag

SEQ ID NO: 4326704 - DNA, 25 bp, Homo sapien
tctccccaacagtgaatcatcaagg

SEQ ID NO: 4326705 - DNA, 25 bp, Homo sapien
gagtctgattcgtgacaccctacag

SEQ ID NO: 4326706 - DNA, 25 bp, Homo sapien
ttaaagttacagtcaccagacacgg

SEQ ID NO: 4326707 - DNA, 25 bp, Homo sapien
tctgatccctaggaagcaccctgaa

SEQ ID NO: 4326708 - DNA, 25 bp, Homo sapien
gcaaactatttacatgaccgaggag

SEQ ID NO: 4326709 - DNA, 25 bp, Homo sapien
ttagtaacaagccaagcaggcagtt

SEQ ID NO: 4326710 - DNA, 25 bp, Homo sapien
cacttggttaaggtaagcagctact

SEQ ID NO: 4326711 - DNA, 25 bp, Homo sapien
gggtgccatgcttcgtctcaaccag

SEQ ID NO: 4326712 - DNA, 25 bp, Homo sapien
tctcaaccagtagcaaaaggcaacg

SEQ ID NO: 4326713 - DNA, 25 bp, Homo sapien
tatgatctggtaaaggattaagagt

SEQ ID NO: 4326714 - DNA, 25 bp, Homo sapien
gcatagacagggcattctaactgtt

SEQ ID NO: 4326715 - DNA, 25 bp, Homo sapien
ttgcgggccagatcaaattatgatc

SEQ ID NO: 4326716 - DNA, 25 bp, Homo sapien
aacctagattcttcctaaggcatag

SEQ ID NO: 4326717 - DNA, 25 bp, Homo sapien
cattaaggggttcctctacagcttt

SEQ ID NO: 4326718 - DNA, 25 bp, Homo sapien
tttatagtaaaacttatatatgcta

SEQ ID NO: 4326719 - DNA, 25 bp, Homo sapien
attttatagtaaaacttatatatgc

SEQ ID NO: 4326720 - DNA, 25 bp, Homo sapien
ttttatagtaaaacttatatatgct

SEQ ID NO: 4326721 - DNA, 25 bp, Homo sapien
gaagcatatgtgacctctacctccg

SEQ ID NO: 4326722 - DNA, 25 bp, Homo sapien
tcttgtgaccaacatagctatggca

SEQ ID NO: 4326723 - DNA, 25 bp, Homo sapien
catccaatgaatccaacaggtgagg

SEQ ID NO: 4326724 - DNA, 25 bp, Homo sapien
tctttctagaatatacccctgtggt

SEQ ID NO: 4326725 - DNA, 25 bp, Homo sapien
taggaggttgtatagtcttctgatt

SEQ ID NO: 4326726 - DNA, 25 bp, Homo sapien
gaggttgtatagtcttctgattgga

SEQ ID NO: 4326727 - DNA, 25 bp, Homo sapien
ggaggttgtatagtcttctgattgg

SEQ ID NO: 4326728 - DNA, 25 bp, Homo sapien
cctaggaggttgtatagtcttctga

SEQ ID NO: 4326729 - DNA, 25 bp, Homo sapien
tagttctaaatctccgatccaaggg

SEQ ID NO: 4326730 - DNA, 25 bp, Homo sapien
catgggcggctttaaataggcctcc

SEQ ID NO: 4326731 - DNA, 25 bp, Homo sapien
cctgccactggactctaagaagaaa

SEQ ID NO: 4326732 - DNA, 25 bp, Homo sapien
aaacaaatgagaaggctggccgtgg

SEQ ID NO: 4326733 - DNA, 25 bp, Homo sapien
caagcccaactttagtgagtttggt

SEQ ID NO: 4326734 - DNA, 25 bp, Homo sapien
tgaaaggcctactctttaaaatagc

SEQ ID NO: 4326735 - DNA, 25 bp, Homo sapien
cagaacacgtgcaatgagtaaaaat

SEQ ID NO: 4326736 - DNA, 25 bp, Homo sapien
tagcgacattaacttcttcttgaag

SEQ ID NO: 4326737 - DNA, 25 bp, Homo sapien
cctttcaactgactgtaggtgtccc

SEQ ID NO: 4326738 - DNA, 25 bp, Homo sapien
gcctttcaactgactgtaggtgtcc

SEQ ID NO: 4326739 - DNA, 25 bp, Homo sapien
tttcaactgactgtaggtgtccctc

SEQ ID NO: 4326740 - DNA, 25 bp, Homo sapien
ttgcctttcaactgactgtaggtgt

SEQ ID NO: 4326741 - DNA, 25 bp, Homo sapien
gcaaagtttacctaaagcaaagcag

SEQ ID NO: 4326742 - DNA, 25 bp, Homo sapien
aagataacattagtttcaggcacaa

SEQ ID NO: 4326743 - DNA, 25 bp, Homo sapien
gggaacatcttgagcttaggtaaga

SEQ ID NO: 4326744 - DNA, 25 bp, Homo sapien
tcaggcacaattgaaaatatctctc

SEQ ID NO: 4326745 - DNA, 25 bp, Homo sapien
ttaattcctgtctggggtgtctatg

SEQ ID NO: 4326746 - DNA, 25 bp, Homo sapien
taattcctgtctggggtgtctatgt

SEQ ID NO: 4326747 - DNA, 25 bp, Homo sapien
ctagtccaagtaattgtgctagagc

SEQ ID NO: 4326748 - DNA, 25 bp, Homo sapien
aaatttcatataaactagtccaagt

SEQ ID NO: 4326749 - DNA, 25 bp, Homo sapien
agtaattgtgctagagctaagatac

SEQ ID NO: 4326750 - DNA, 25 bp, Homo sapien
tccaagtaattgtgctagagctaag

SEQ ID NO: 4326751 - DNA, 25 bp, Homo sapien
gaagagggccatgcattggtataca

SEQ ID NO: 4326752 - DNA, 25 bp, Homo sapien
agagggccatgcattggtatacacg

SEQ ID NO: 4326753 - DNA, 25 bp, Homo sapien
gaaatcagaagagggccatgcattg

SEQ ID NO: 4326754 - DNA, 25 bp, Homo sapien
tcagaagagggccatgcattggtat

SEQ ID NO: 4326755 - DNA, 25 bp, Homo sapien
actcagtccaaccacagcgaggata

SEQ ID NO: 4326756 - DNA, 25 bp, Homo sapien
atgacgaaggaggttaatccaatcg

SEQ ID NO: 4326757 - DNA, 25 bp, Homo sapien
gatataggctatcacctgaataacc

SEQ ID NO: 4326758 - DNA, 25 bp, Homo sapien
caatatggcaatgacgaaggaggtt

SEQ ID NO: 4326759 - DNA, 25 bp, Homo sapien
taatattaatatccctgtagaagtc

SEQ ID NO: 4326760 - DNA, 25 bp, Homo sapien
ctgtactaaacacatagtagtgaag

SEQ ID NO: 4326761 - DNA, 25 bp, Homo sapien
cacatagtagtgaagtaatattaat

SEQ ID NO: 4326762 - DNA, 25 bp, Homo sapien
tagaagtcacaattaaaccaaggcc

SEQ ID NO: 4326763 - DNA, 25 bp, Homo sapien
ctgggacgaaaagaatggctccaac

SEQ ID NO: 4326764 - DNA, 25 bp, Homo sapien
cataccaccggatctatatttaagt

SEQ ID NO: 4326765 - DNA, 25 bp, Homo sapien
gacagtgatcactagtccagcaaca

SEQ ID NO: 4326766 - DNA, 25 bp, Homo sapien
gaatggctccaacaatgacaatgac

SEQ ID NO: 4326767 - DNA, 25 bp, Homo sapien
aaatgtataaccttagtgctcagcc

SEQ ID NO: 4326768 - DNA, 25 bp, Homo sapien
tgcatgctcttaaggattaccctca

SEQ ID NO: 4326769 - DNA, 25 bp, Homo sapien
taattagtaaccaaaagcaggctac

SEQ ID NO: 4326770 - DNA, 25 bp, Homo sapien
ggtgaaggcctactctactctaaga

SEQ ID NO: 4326771 - DNA, 25 bp, Homo sapien
taatgtcaccaatgataacgtctgg

SEQ ID NO: 4326772 - DNA, 25 bp, Homo sapien
taggtcttaatgctacaccagtcct

SEQ ID NO: 4326773 - DNA, 25 bp, Homo sapien
taacgtctggatcagcaaacatcca

SEQ ID NO: 4326774 - DNA, 25 bp, Homo sapien
tatcattgatgccagaataggtctt

SEQ ID NO: 4326775 - DNA, 25 bp, Homo sapien
ggctgcttctttagaggctgcagaa

SEQ ID NO: 4326776 - DNA, 25 bp, Homo sapien
ggtggctgcttctttagaggctgca

SEQ ID NO: 4326777 - DNA, 25 bp, Homo sapien
ctggtggctgcttctttagaggctg

SEQ ID NO: 4326778 - DNA, 25 bp, Homo sapien
ctctggtggctgcttctttagaggc

SEQ ID NO: 4326779 - DNA, 25 bp, Homo sapien
caatgtctcgtagaaataactatat

SEQ ID NO: 4326780 - DNA, 25 bp, Homo sapien
ttcgctgacaatgtctcgtagaaat

SEQ ID NO: 4326781 - DNA, 25 bp, Homo sapien
taactatatcatcactgaaacataa

SEQ ID NO: 4326782 - DNA, 25 bp, Homo sapien
ctgacaatgtctcgtagaaataact

SEQ ID NO: 4326783 - DNA, 25 bp, Homo sapien
tccccagaacaggagtatagcaaaa

SEQ ID NO: 4326784 - DNA, 25 bp, Homo sapien
tgtccccagaacaggagtatagcaa

SEQ ID NO: 4326785 - DNA, 25 bp, Homo sapien
ctgtccccagaacaggagtatagca

SEQ ID NO: 4326786 - DNA, 25 bp, Homo sapien
ccagaacaggagtatagcaaaaatt

SEQ ID NO: 4326787 - DNA, 25 bp, Homo sapien
tgtcatcccttggtcaaagtgtaag

SEQ ID NO: 4326788 - DNA, 25 bp, Homo sapien
gacttgtcatcccttggtcaaagtg

SEQ ID NO: 4326789 - DNA, 25 bp, Homo sapien
ttgtcatcccttggtcaaagtgtaa

SEQ ID NO: 4326790 - DNA, 25 bp, Homo sapien
cttgtcatcccttggtcaaagtgta

SEQ ID NO: 4326791 - DNA, 25 bp, Homo sapien
caacacgatattttagctcgatgat

SEQ ID NO: 4326792 - DNA, 25 bp, Homo sapien
tctctggttaattctgttacttcac

SEQ ID NO: 4326793 - DNA, 25 bp, Homo sapien
gatattttagctcgatgatcgtttc

SEQ ID NO: 4326794 - DNA, 25 bp, Homo sapien
cgatgatcgtttcaccttctctggt

SEQ ID NO: 4326795 - DNA, 25 bp, Homo sapien
acttcagtagtgttttgtgcctcca

SEQ ID NO: 4326796 - DNA, 25 bp, Homo sapien
gaggcatctccttttagtaattgtg

SEQ ID NO: 4326797 - DNA, 25 bp, Homo sapien
catcaaaggtgtaaatatctcttcc

SEQ ID NO: 4326798 - DNA, 25 bp, Homo sapien
aaagcatggaatgacgacagtgtca

SEQ ID NO: 4326799 - DNA, 25 bp, Homo sapien
cactaacactgtagagggtgccagg

SEQ ID NO: 4326800 - DNA, 25 bp, Homo sapien
taactacctatgtgctgagacatct

SEQ ID NO: 4326801 - DNA, 25 bp, Homo sapien
tccagtttgcctgtaattgcatgaa

SEQ ID NO: 4326802 - DNA, 25 bp, Homo sapien
tgcataccattaaggtgccttccag

SEQ ID NO: 4326803 - DNA, 25 bp, Homo sapien
gattcacagtcccaacatccaggat

SEQ ID NO: 4326804 - DNA, 25 bp, Homo sapien
caagcctttaggaacggcacaccga

SEQ ID NO: 4326805 - DNA, 25 bp, Homo sapien
gatgactctagggattcgaacacat

SEQ ID NO: 4326806 - DNA, 25 bp, Homo sapien
caaccatttagataacggagacctg

SEQ ID NO: 4326807 - DNA, 25 bp, Homo sapien
gatcgcgccctttcttgctagttaa

SEQ ID NO: 4326808 - DNA, 25 bp, Homo sapien
aaatgcgcacttccatcgcaagagg

SEQ ID NO: 4326809 - DNA, 25 bp, Homo sapien
tagttaatttttgcgcgaggtgcgc

SEQ ID NO: 4326810 - DNA, 25 bp, Homo sapien
cagcaaaaattacacggccggaaga

SEQ ID NO: 4326811 - DNA, 25 bp, Homo sapien
cgcgggggcgaagcgacagcagccg

SEQ ID NO: 4326812 - DNA, 25 bp, Homo sapien
gctcagggcccgagtgttctgcgcc

SEQ ID NO: 4326813 - DNA, 25 bp, Homo sapien
cacttcgggcgctcagggcccgagt

SEQ ID NO: 4326814 - DNA, 25 bp, Homo sapien
ggccctcccacgtctgcacttcggg

SEQ ID NO: 4326815 - DNA, 25 bp, Homo sapien
acagcgccgctaccaggggccacat

SEQ ID NO: 4326816 - DNA, 25 bp, Homo sapien
agcccagcaacagcgccgctaccag

SEQ ID NO: 4326817 - DNA, 25 bp, Homo sapien
gagcccagcaacagcgccgctacca

SEQ ID NO: 4326818 - DNA, 25 bp, Homo sapien
gcaacagcgccgctaccaggggcca

SEQ ID NO: 4326819 - DNA, 25 bp, Homo sapien
tccgcgcccgccgcggggtcgccgc

SEQ ID NO: 4326820 - DNA, 25 bp, Homo sapien
cgcgcccgccgcggggtcgccgccg

SEQ ID NO: 4326821 - DNA, 25 bp, Homo sapien
gcgcccgccgcggggtcgccgccgc

SEQ ID NO: 4326822 - DNA, 25 bp, Homo sapien
ctccgcgcccgccgcggggtcgccg

SEQ ID NO: 4326823 - DNA, 25 bp, Homo sapien
ccgccgccgccgttacaggcaggac

SEQ ID NO: 4326824 - DNA, 25 bp, Homo sapien
aggctgcacggccgcgcgcacgcgc

SEQ ID NO: 4326825 - DNA, 25 bp, Homo sapien
ttacaggcaggaccgaccgccgccg

SEQ ID NO: 4326826 - DNA, 25 bp, Homo sapien
cgccgccgcgcgtcacaggcaggac

SEQ ID NO: 4326827 - DNA, 25 bp, Homo sapien
tcccgccccagcccgcgtctctccc

SEQ ID NO: 4326828 - DNA, 25 bp, Homo sapien
tcactcccaccctcgcgcttcaggg

SEQ ID NO: 4326829 - DNA, 25 bp, Homo sapien
gctttcactcccaccctcgcgcttc

SEQ ID NO: 4326830 - DNA, 25 bp, Homo sapien
ttcactcccaccctcgcgcttcagg

SEQ ID NO: 4326831 - DNA, 25 bp, Homo sapien
gttcggctcgtctactcgctctgct

SEQ ID NO: 4326832 - DNA, 25 bp, Homo sapien
gtggtcgggtacctgcccgcaggga

SEQ ID NO: 4326833 - DNA, 25 bp, Homo sapien
gtctagcgccgaagcggtccctgag

SEQ ID NO: 4326834 - DNA, 25 bp, Homo sapien
tctgctcttccctatgcggttctct

SEQ ID NO: 4326835 - DNA, 25 bp, Homo sapien
caagttccattcacggtggtaaaca

SEQ ID NO: 4326836 - DNA, 25 bp, Homo sapien
cctctgatcagggttaatcaaacaa

SEQ ID NO: 4326837 - DNA, 25 bp, Homo sapien
ttccattcacggtggtaaacattgt

SEQ ID NO: 4326838 - DNA, 25 bp, Homo sapien
ctgatcagggttaatcaaacaagtt

SEQ ID NO: 4326839 - DNA, 25 bp, Homo sapien
acaccgccaccaccgggactagcga

SEQ ID NO: 4326840 - DNA, 25 bp, Homo sapien
tgtgcagccctctgcgctgcgcttg

SEQ ID NO: 4326841 - DNA, 25 bp, Homo sapien
tggccgcaagccacaatagggacaa

SEQ ID NO: 4326842 - DNA, 25 bp, Homo sapien
tgcgctgcgcttgggtttaacatgc

SEQ ID NO: 4326843 - DNA, 25 bp, Homo sapien
tgaaaaatgggttcgaaatgtggcc

SEQ ID NO: 4326844 - DNA, 25 bp, Homo sapien
cattgtaggtagtctctgcacaccc

SEQ ID NO: 4326845 - DNA, 25 bp, Homo sapien
ttccaggttaatccaggtagtcggc

SEQ ID NO: 4326846 - DNA, 25 bp, Homo sapien
catctcccttggtatttagaggcct

SEQ ID NO: 4326847 - DNA, 25 bp, Homo sapien
ggtcagaagtccagtaggcgcagct

SEQ ID NO: 4326848 - DNA, 25 bp, Homo sapien
gctgcaggagctgcaacttccctca

SEQ ID NO: 4326849 - DNA, 25 bp, Homo sapien
taatccatcttgaacagcccctggg

SEQ ID NO: 4326850 - DNA, 25 bp, Homo sapien
ggagctgcaacttccctcatctctt

SEQ ID NO: 4326851 - DNA, 25 bp, Homo sapien
tgggtttgaccgctcccacacgcta

SEQ ID NO: 4326852 - DNA, 25 bp, Homo sapien
cttgcataagtgctgcattgggctc

SEQ ID NO: 4326853 - DNA, 25 bp, Homo sapien
cctcgaaagtagcattctctacata

SEQ ID NO: 4326854 - DNA, 25 bp, Homo sapien
cctgtcctcgaaagtagcattctct

SEQ ID NO: 4326855 - DNA, 25 bp, Homo sapien
aggcttgcataagtgctgcattggg

SEQ ID NO: 4326856 - DNA, 25 bp, Homo sapien
agaccttccacactgcgttactcca

SEQ ID NO: 4326857 - DNA, 25 bp, Homo sapien
ttggctagagataagttgctggaag

SEQ ID NO: 4326858 - DNA, 25 bp, Homo sapien
tgcgttactccatccttcccaaatg

SEQ ID NO: 4326859 - DNA, 25 bp, Homo sapien
cccaaatgcaattggtgattatgtt

SEQ ID NO: 4326860 - DNA, 25 bp, Homo sapien
caggacacagccatggtttttgtca

SEQ ID NO: 4326861 - DNA, 25 bp, Homo sapien
tcactagcttccacaggcaatttcc

SEQ ID NO: 4326862 - DNA, 25 bp, Homo sapien
ggcctctatatgtctgcaggacaca

SEQ ID NO: 4326863 - DNA, 25 bp, Homo sapien
tggagccccacatggattccgatgg

SEQ ID NO: 4326864 - DNA, 25 bp, Homo sapien
tatgtcttctgtctgcccaaattct

SEQ ID NO: 4326865 - DNA, 25 bp, Homo sapien
cactgggagatatgtcttctgtctg

SEQ ID NO: 4326866 - DNA, 25 bp, Homo sapien
ctttccacccaaaatgtggctgtgt

SEQ ID NO: 4326867 - DNA, 25 bp, Homo sapien
gagatatgtcttctgtctgcccaaa

SEQ ID NO: 4326868 - DNA, 25 bp, Homo sapien
tggaacgccccttctattaaagcag

SEQ ID NO: 4326869 - DNA, 25 bp, Homo sapien
gctgggaccctaatgcatgactttc

SEQ ID NO: 4326870 - DNA, 25 bp, Homo sapien
tcatggaggcggaccaaggaatcac

SEQ ID NO: 4326871 - DNA, 25 bp, Homo sapien
tgctttagggccaggatgcttcaga

SEQ ID NO: 4326872 - DNA, 25 bp, Homo sapien
tagctttgacaggttgtgagtcagt

SEQ ID NO: 4326873 - DNA, 25 bp, Homo sapien
gggctcagatatcccaattcatagc

SEQ ID NO: 4326874 - DNA, 25 bp, Homo sapien
gaggagagacagctccttgctggcc

SEQ ID NO: 4326875 - DNA, 25 bp, Homo sapien
gttaagaaactgaccgagagaggag

SEQ ID NO: 4326876 - DNA, 25 bp, Homo sapien
tttccagtagctgtaaataaaagtc

SEQ ID NO: 4326877 - DNA, 25 bp, Homo sapien
tcaggacagctttccagtagctgta

SEQ ID NO: 4326878 - DNA, 25 bp, Homo sapien
agtcttattgtttggttcttggtct

SEQ ID NO: 4326879 - DNA, 25 bp, Homo sapien
cttcaggacagctttccagtagctg

SEQ ID NO: 4326880 - DNA, 25 bp, Homo sapien
tacctggaaccagttcagacaacca

SEQ ID NO: 4326881 - DNA, 25 bp, Homo sapien
atcatctttctacatgcgatggaga

SEQ ID NO: 4326882 - DNA, 25 bp, Homo sapien
cagttcagacaaccatcatctttct

SEQ ID NO: 4326883 - DNA, 25 bp, Homo sapien
catctttctacatgcgatggagaaa

SEQ ID NO: 4326884 - DNA, 25 bp, Homo sapien
gctgataccacgctttgatcctctg

SEQ ID NO: 4326885 - DNA, 25 bp, Homo sapien
ctttaccactgctaaagctgatacc

SEQ ID NO: 4326886 - DNA, 25 bp, Homo sapien
cgtgtagtgttatccaatccagctt

SEQ ID NO: 4326887 - DNA, 25 bp, Homo sapien
tcttaactgcgtggaactggaaggt

SEQ ID NO: 4326888 - DNA, 25 bp, Homo sapien
tggctttgtagtctcctacttcata

SEQ ID NO: 4326889 - DNA, 25 bp, Homo sapien
ttccctcctggctacacatacacat

SEQ ID NO: 4326890 - DNA, 25 bp, Homo sapien
tcccttcaagaacacttggctcctt

SEQ ID NO: 4326891 - DNA, 25 bp, Homo sapien
ctttgggatcccttcaagaacactt

SEQ ID NO: 4326892 - DNA, 25 bp, Homo sapien
tgtataacaacagacaccttgccta

SEQ ID NO: 4326893 - DNA, 25 bp, Homo sapien
tttggaacccaaagcaagactggag

SEQ ID NO: 4326894 - DNA, 25 bp, Homo sapien
aactcaaagagctctaggtaaggga

SEQ ID NO: 4326895 - DNA, 25 bp, Homo sapien
tgtgcccttatttgaaaacacggtc

SEQ ID NO: 4326896 - DNA, 25 bp, Homo sapien
gctaattctggcactctaatgctgc

SEQ ID NO: 4326897 - DNA, 25 bp, Homo sapien
caaaatggttccctagtatagccga

SEQ ID NO: 4326898 - DNA, 25 bp, Homo sapien
tactagaggctgatcttcatgcgac

SEQ ID NO: 4326899 - DNA, 25 bp, Homo sapien
gaacccaagctgagttaactggaat

SEQ ID NO: 4326900 - DNA, 25 bp, Homo sapien
taggtaaccataaagctgaggcaaa

SEQ ID NO: 4326901 - DNA, 25 bp, Homo sapien
ccaggtgggagctttaacataggta

SEQ ID NO: 4326902 - DNA, 25 bp, Homo sapien
cagcatctgcagaaaacgcaggtca

SEQ ID NO: 4326903 - DNA, 25 bp, Homo sapien
tcactgcagaggtggagcaaggtaa

SEQ ID NO: 4326904 - DNA, 25 bp, Homo sapien
tcagtgtaaaggctttaaccatcat

SEQ ID NO: 4326905 - DNA, 25 bp, Homo sapien
aaaggctttaaccatcataatcacc

SEQ ID NO: 4326906 - DNA, 25 bp, Homo sapien
caccatgatataatatgtgagtatg

SEQ ID NO: 4326907 - DNA, 25 bp, Homo sapien
tgaaatatagtttgatataaaaaac

SEQ ID NO: 4326908 - DNA, 25 bp, Homo sapien
aatgtccatctctacagtttcttgc

SEQ ID NO: 4326909 - DNA, 25 bp, Homo sapien
tgtggcatgcatgttcctagtcatg

SEQ ID NO: 4326910 - DNA, 25 bp, Homo sapien
tccttcagctttgattggagtagtg

SEQ ID NO: 4326911 - DNA, 25 bp, Homo sapien
tcctagtcatgttggacttctcctt

SEQ ID NO: 4326912 - DNA, 25 bp, Homo sapien
taagcacctgagattttttaggatg

SEQ ID NO: 4326913 - DNA, 25 bp, Homo sapien
aaaatgttcatttggagtatcagtg

SEQ ID NO: 4326914 - DNA, 25 bp, Homo sapien
tttgagatgtagataatgggcccac

SEQ ID NO: 4326915 - DNA, 25 bp, Homo sapien
gacattcacacagttttgctgtggc

SEQ ID NO: 4326916 - DNA, 25 bp, Homo sapien
aaaaagcctacccttctcagctgat

SEQ ID NO: 4326917 - DNA, 25 bp, Homo sapien
tatcaaagtaacctgctcacaatgg

SEQ ID NO: 4326918 - DNA, 25 bp, Homo sapien
aactacgggttatcacatcactgcc

SEQ ID NO: 4326919 - DNA, 25 bp, Homo sapien
ggcaatcactactggcccatatcaa

SEQ ID NO: 4326920 - DNA, 25 bp, Homo sapien
catcagtcatgctgctgcccttttc

SEQ ID NO: 4326921 - DNA, 25 bp, Homo sapien
accatcagtcatgctgctgcccttt

SEQ ID NO: 4326922 - DNA, 25 bp, Homo sapien
ccatcagtcatgctgctgccctttt

SEQ ID NO: 4326923 - DNA, 25 bp, Homo sapien
tcagtcatgctgctgcccttttctt

SEQ ID NO: 4326924 - DNA, 25 bp, Homo sapien
aaatcatgaactccgaactccaagg

SEQ ID NO: 4326925 - DNA, 25 bp, Homo sapien
ttcctatctgcactctatctggcga

SEQ ID NO: 4326926 - DNA, 25 bp, Homo sapien
tagtcactagacactcaaacctcgc

SEQ ID NO: 4326927 - DNA, 25 bp, Homo sapien
caaggaggcatactttgctgtcaca

SEQ ID NO: 4326928 - DNA, 25 bp, Homo sapien
agaagcagggcaagagcatcagtgt

SEQ ID NO: 4326929 - DNA, 25 bp, Homo sapien
aagcagggcaagagcatcagtgtgt

SEQ ID NO: 4326930 - DNA, 25 bp, Homo sapien
tgagaagcagggcaagagcatcagt

SEQ ID NO: 4326931 - DNA, 25 bp, Homo sapien
ggtgagaagcagggcaagagcatca

SEQ ID NO: 4326932 - DNA, 25 bp, Homo sapien
agtctggttctttccgtcactcctc

SEQ ID NO: 4326933 - DNA, 25 bp, Homo sapien
tctttccgtcactcctccatttccc

SEQ ID NO: 4326934 - DNA, 25 bp, Homo sapien
atttccctgctggtatcgctccttt

SEQ ID NO: 4326935 - DNA, 25 bp, Homo sapien
catttccctgctggtatcgctcctt

SEQ ID NO: 4326936 - DNA, 25 bp, Homo sapien
cttatagaagcaaaaccaggtgtcc

SEQ ID NO: 4326937 - DNA, 25 bp, Homo sapien
tgtaagccagaatggcaaggactgt

SEQ ID NO: 4326938 - DNA, 25 bp, Homo sapien
aagcttttagatccctactgctggg

SEQ ID NO: 4326939 - DNA, 25 bp, Homo sapien
gaaataagttcactcggctctcttg

SEQ ID NO: 4326940 - DNA, 25 bp, Homo sapien
caaattctcaagctgattgttgatg

SEQ ID NO: 4326941 - DNA, 25 bp, Homo sapien
caagctgattgttgatgtacttttc

SEQ ID NO: 4326942 - DNA, 25 bp, Homo sapien
tctcggctgctgatcttttccaaag

SEQ ID NO: 4326943 - DNA, 25 bp, Homo sapien
gagctgcacgatattcttgaaccaa

SEQ ID NO: 4326944 - DNA, 25 bp, Homo sapien
cattatggagtttgtccaaaaatcc

SEQ ID NO: 4326945 - DNA, 25 bp, Homo sapien
tcattatggagtttgtccaaaaatc

SEQ ID NO: 4326946 - DNA, 25 bp, Homo sapien
tagtaatttcattatggagtttgtc

SEQ ID NO: 4326947 - DNA, 25 bp, Homo sapien
aatttcattatggagtttgtccaaa

SEQ ID NO: 4326948 - DNA, 25 bp, Homo sapien
gatagaagaactcacaaacatattt

SEQ ID NO: 4326949 - DNA, 25 bp, Homo sapien
gggttacatctcaatccattctaca

SEQ ID NO: 4326950 - DNA, 25 bp, Homo sapien
atcaactacatgtgcaaaagaagac

SEQ ID NO: 4326951 - DNA, 25 bp, Homo sapien
aaaatgggttacatctcaatccatt

SEQ ID NO: 4326952 - DNA, 25 bp, Homo sapien
cctttagagcagattcaattccact

SEQ ID NO: 4326953 - DNA, 25 bp, Homo sapien
tcctttagagcagattcaattccac

SEQ ID NO: 4326954 - DNA, 25 bp, Homo sapien
ctcctttagagcagattcaattcca

SEQ ID NO: 4326955 - DNA, 25 bp, Homo sapien
gaggtctattcgcactttttgcttc

SEQ ID NO: 4326956 - DNA, 25 bp, Homo sapien
catggaggtctattcgcactttttg

SEQ ID NO: 4326957 - DNA, 25 bp, Homo sapien
gttcatggaggtctattcgcacttt

SEQ ID NO: 4326958 - DNA, 25 bp, Homo sapien
acaactgactgtagcagttcatgga

SEQ ID NO: 4326959 - DNA, 25 bp, Homo sapien
gcatttttctcaggccattgtttca

SEQ ID NO: 4326960 - DNA, 25 bp, Homo sapien
tcaggccattgtttcaacacagaat

SEQ ID NO: 4326961 - DNA, 25 bp, Homo sapien
tttctcaggccattgtttcaacaca

SEQ ID NO: 4326962 - DNA, 25 bp, Homo sapien
ggccattgtttcaacacagaattca

SEQ ID NO: 4326963 - DNA, 25 bp, Homo sapien
aggaagagataatcaccagctgcca

SEQ ID NO: 4326964 - DNA, 25 bp, Homo sapien
gaaaagggcctagacactgagaacc

SEQ ID NO: 4326965 - DNA, 25 bp, Homo sapien
tcgatgctttatccctgaagtctgg

SEQ ID NO: 4326966 - DNA, 25 bp, Homo sapien
ttttgatatcggaccatgcccctgg

SEQ ID NO: 4326967 - DNA, 25 bp, Homo sapien
tagtacacgttccacttctaggctc

SEQ ID NO: 4326968 - DNA, 25 bp, Homo sapien
taggctccattctgcagcatctgtt

SEQ ID NO: 4326969 - DNA, 25 bp, Homo sapien
tcttgtttggcagtctcgttcatat

SEQ ID NO: 4326970 - DNA, 25 bp, Homo sapien
taatcgtgactttcagttgcggtag

SEQ ID NO: 4326971 - DNA, 25 bp, Homo sapien
aagacaagggcgcacacccgtccat

SEQ ID NO: 4326972 - DNA, 25 bp, Homo sapien
tcaagttgtgaataacatactcaaa

SEQ ID NO: 4326973 - DNA, 25 bp, Homo sapien
tcttcaggcctggatgtaggattgt

SEQ ID NO: 4326974 - DNA, 25 bp, Homo sapien
ccgtccatactaccactttcttcag

SEQ ID NO: 4326975 - DNA, 25 bp, Homo sapien
tgggcctttaaaacgttgagatcaa

SEQ ID NO: 4326976 - DNA, 25 bp, Homo sapien
tctgggcctttaaaacgttgagatc

SEQ ID NO: 4326977 - DNA, 25 bp, Homo sapien
aacgttgagatcaataaagttttct

SEQ ID NO: 4326978 - DNA, 25 bp, Homo sapien
gcctttaaaacgttgagatcaataa

SEQ ID NO: 4326979 - DNA, 25 bp, Homo sapien
gataaaataatggttaccagtactg

SEQ ID NO: 4326980 - DNA, 25 bp, Homo sapien
tactggttggtccatggtacttaaa

SEQ ID NO: 4326981 - DNA, 25 bp, Homo sapien
ttctctgaccaatcacattgataca

SEQ ID NO: 4326982 - DNA, 25 bp, Homo sapien
taggtggatgccgagctaatcctta

SEQ ID NO: 4326983 - DNA, 25 bp, Homo sapien
tagaaagtgaccctttgagagccaa

SEQ ID NO: 4326984 - DNA, 25 bp, Homo sapien
tgcagaccaattggatgtagagggc

SEQ ID NO: 4326985 - DNA, 25 bp, Homo sapien
gagcaggttctatgagcatgtagga

SEQ ID NO: 4326986 - DNA, 25 bp, Homo sapien
gtaaatatggagtctgagcaggttc

SEQ ID NO: 4326987 - DNA, 25 bp, Homo sapien
tatttcaaccttaaggacacgataa

SEQ ID NO: 4326988 - DNA, 25 bp, Homo sapien
caaccttaaggacacgataataaag

SEQ ID NO: 4326989 - DNA, 25 bp, Homo sapien
gatatttcaaccttaaggacacgat

SEQ ID NO: 4326990 - DNA, 25 bp, Homo sapien
tttcaaccttaaggacacgataata

SEQ ID NO: 4326991 - DNA, 25 bp, Homo sapien
gcatatagtataagttacattccca

SEQ ID NO: 4326992 - DNA, 25 bp, Homo sapien
tcatccataattctcctacccataa

SEQ ID NO: 4326993 - DNA, 25 bp, Homo sapien
aatttggaatcatctcagttaattt

SEQ ID NO: 4326994 - DNA, 25 bp, Homo sapien
tctcctacccataattaatgctaat

SEQ ID NO: 4326995 - DNA, 25 bp, Homo sapien
ctttataacttacccagcgcctcaa

SEQ ID NO: 4326996 - DNA, 25 bp, Homo sapien
tatactatactaacctcaatgccaa

SEQ ID NO: 4326997 - DNA, 25 bp, Homo sapien
cccactttgtcttaccatgattgta

SEQ ID NO: 4326998 - DNA, 25 bp, Homo sapien
ccttaggctactcaatatgaagaca

SEQ ID NO: 4326999 - DNA, 25 bp, Homo sapien
ctgcaacgctttcttcttctaattc

SEQ ID NO: 4327000 - DNA, 25 bp, Homo sapien
aaggcaggtggactgtctgagacca

SEQ ID NO: 4327001 - DNA, 25 bp, Homo sapien
aaaacttgtacctggctgggtgtga

SEQ ID NO: 4327002 - DNA, 25 bp, Homo sapien
gctagagagaaaacttgtattaaaa

SEQ ID NO: 4327003 - DNA, 25 bp, Homo sapien
gcaggcagaggttcactccagcctg

SEQ ID NO: 4327004 - DNA, 25 bp, Homo sapien
tcagaggcaaatgctatgcccataa

SEQ ID NO: 4327005 - DNA, 25 bp, Homo sapien
aattgaacagctctgtaccctcaga

SEQ ID NO: 4327006 - DNA, 25 bp, Homo sapien
tatcatcagggtgggtaatttttac

SEQ ID NO: 4327007 - DNA, 25 bp, Homo sapien
tcttttatgttcaattgaacagctc

SEQ ID NO: 4327008 - DNA, 25 bp, Homo sapien
caagaacatagcatacatgttctcc

SEQ ID NO: 4327009 - DNA, 25 bp, Homo sapien
tcaatgcttcttcagcgaagcaatc

SEQ ID NO: 4327010 - DNA, 25 bp, Homo sapien
tttccaggtgaaaccaatatatttc

SEQ ID NO: 4327011 - DNA, 25 bp, Homo sapien
catgttctccataacctgactttaa

SEQ ID NO: 4327012 - DNA, 25 bp, Homo sapien
cgaagctcggatagtatgttagata

SEQ ID NO: 4327013 - DNA, 25 bp, Homo sapien
aaatgaccgaagctcggatagtatg

SEQ ID NO: 4327014 - DNA, 25 bp, Homo sapien
tattgttgcattagggtcatcatat

SEQ ID NO: 4327015 - DNA, 25 bp, Homo sapien
gaccgaagctcggatagtatgttag

SEQ ID NO: 4327016 - DNA, 25 bp, Homo sapien
ttgaggctgctcaaagggacgtccc

SEQ ID NO: 4327017 - DNA, 25 bp, Homo sapien
caaaacatgtagaactgttcgccag

SEQ ID NO: 4327018 - DNA, 25 bp, Homo sapien
tattaatcaaccaagcagcaagagt

SEQ ID NO: 4327019 - DNA, 25 bp, Homo sapien
ccagggttggtaggcagtgcaaaat

SEQ ID NO: 4327020 - DNA, 25 bp, Homo sapien
caggcacccgggcgctcggggacgc

SEQ ID NO: 4327021 - DNA, 25 bp, Homo sapien
tctcacgaaactggttcccagcagg

SEQ ID NO: 4327022 - DNA, 25 bp, Homo sapien
ccgctctcacgaaactggttcccag

SEQ ID NO: 4327023 - DNA, 25 bp, Homo sapien
gctctcacgaaactggttcccagca

SEQ ID NO: 4327024 - DNA, 25 bp, Homo sapien
ccacgaacatgtggtaggccgcgcc

SEQ ID NO: 4327025 - DNA, 25 bp, Homo sapien
tcttccaaacccgacgtcgtgacga

SEQ ID NO: 4327026 - DNA, 25 bp, Homo sapien
ccttcaggttgctcttccggaggaa

SEQ ID NO: 4327027 - DNA, 25 bp, Homo sapien
tcctcgtagcggagcagcttcagct

SEQ ID NO: 4327028 - DNA, 25 bp, Homo sapien
agcgtgggctcaggcccacagacct

SEQ ID NO: 4327029 - DNA, 25 bp, Homo sapien
cagagtccagcgtgggctcaggccc

SEQ ID NO: 4327030 - DNA, 25 bp, Homo sapien
cgcagaacggacagagtccagcgtg

SEQ ID NO: 4327031 - DNA, 25 bp, Homo sapien
aacggacagagtccagcgtgggctc

SEQ ID NO: 4327032 - DNA, 25 bp, Homo sapien
agtacagccacgaccggttaccagg

SEQ ID NO: 4327033 - DNA, 25 bp, Homo sapien
cagggaaactagactccgcctcctt

SEQ ID NO: 4327034 - DNA, 25 bp, Homo sapien
gggcggctttcctgaatgacgtcac

SEQ ID NO: 4327035 - DNA, 25 bp, Homo sapien
cggacaatccgtcaccagggaaact

SEQ ID NO: 4327036 - DNA, 25 bp, Homo sapien
ccatagcctatggtacttcctctct

SEQ ID NO: 4327037 - DNA, 25 bp, Homo sapien
cccatagcctatggtacttcctctc

SEQ ID NO: 4327038 - DNA, 25 bp, Homo sapien
ccccatagcctatggtacttcctct

SEQ ID NO: 4327039 - DNA, 25 bp, Homo sapien
gatcgctgggaccttttgtttgaca

SEQ ID NO: 4327040 - DNA, 25 bp, Homo sapien
gggcagtaagtgaactttgccctgt

SEQ ID NO: 4327041 - DNA, 25 bp, Homo sapien
tggattgtcgcttggacctaccctg

SEQ ID NO: 4327042 - DNA, 25 bp, Homo sapien
ggctgactagaaaggtaattctctg

SEQ ID NO: 4327043 - DNA, 25 bp, Homo sapien
acatcccttggtaaccagagaaata

SEQ ID NO: 4327044 - DNA, 25 bp, Homo sapien
cacatcccttggtaaccagagaaat

SEQ ID NO: 4327045 - DNA, 25 bp, Homo sapien
taatagtataggaggaacttgcaaa

SEQ ID NO: 4327046 - DNA, 25 bp, Homo sapien
gcaaaatcaccaatcccaagcggga

SEQ ID NO: 4327047 - DNA, 25 bp, Homo sapien
ctttgctagggaaatcacatttgcc

SEQ ID NO: 4327048 - DNA, 25 bp, Homo sapien
gggcctaaagactcactgtaaaatc

SEQ ID NO: 4327049 - DNA, 25 bp, Homo sapien
ctccttccgcagagaaatgacccta

SEQ ID NO: 4327050 - DNA, 25 bp, Homo sapien
aaatgaccctatctcacagacccag

SEQ ID NO: 4327051 - DNA, 25 bp, Homo sapien
ttcttgtggttcattacttctggac

SEQ ID NO: 4327052 - DNA, 25 bp, Homo sapien
tagcagtgatgggtcaaaatgtagc

SEQ ID NO: 4327053 - DNA, 25 bp, Homo sapien
gcttgaacaatctctgcataacagg

SEQ ID NO: 4327054 - DNA, 25 bp, Homo sapien
cttcagcttgaacaatctctgcata

SEQ ID NO: 4327055 - DNA, 25 bp, Homo sapien
caggtatgtttgtatgcatacggca

SEQ ID NO: 4327056 - DNA, 25 bp, Homo sapien
acaggtatgtttgtatgcatacggc

SEQ ID NO: 4327057 - DNA, 25 bp, Homo sapien
taaccacgtgatcagtgggagtggc

SEQ ID NO: 4327058 - DNA, 25 bp, Homo sapien
tgttccagctcgcagaagtcagtga

SEQ ID NO: 4327059 - DNA, 25 bp, Homo sapien
taccctgggtttcttgctgctaagc

SEQ ID NO: 4327060 - DNA, 25 bp, Homo sapien
ccacagttgatttaggcagcaggac

SEQ ID NO: 4327061 - DNA, 25 bp, Homo sapien
tcacatctctagaactactttgacc

SEQ ID NO: 4327062 - DNA, 25 bp, Homo sapien
tccattatagccgtgcccgcagcca

SEQ ID NO: 4327063 - DNA, 25 bp, Homo sapien
atatctacgatcaccacggctgcca

SEQ ID NO: 4327064 - DNA, 25 bp, Homo sapien
ttatttcatgattgtggccattcac

SEQ ID NO: 4327065 - DNA, 25 bp, Homo sapien
agttatttcaaagatcaaccatgtg

SEQ ID NO: 4327066 - DNA, 25 bp, Homo sapien
tctcccgtattgctatggaagaggg

SEQ ID NO: 4327067 - DNA, 25 bp, Homo sapien
actgctgatcttgcatcatcaacca

SEQ ID NO: 4327068 - DNA, 25 bp, Homo sapien
tcatcaaccactctcgatgtctgcc

SEQ ID NO: 4327069 - DNA, 25 bp, Homo sapien
tctttgtgggcgtgttaacttctgc

SEQ ID NO: 4327070 - DNA, 25 bp, Homo sapien
ctgacggtatgaatgcgtattcatg

SEQ ID NO: 4327071 - DNA, 25 bp, Homo sapien
cggtatgaatgcgtattcatgtgat

SEQ ID NO: 4327072 - DNA, 25 bp, Homo sapien
tgacagctgctgcttcggactttct

SEQ ID NO: 4327073 - DNA, 25 bp, Homo sapien
gctgcttcggactttctgatgagca

SEQ ID NO: 4327074 - DNA, 25 bp, Homo sapien
gactaagacagtatctttaagattg

SEQ ID NO: 4327075 - DNA, 25 bp, Homo sapien
gattgctagggaaaagggccctatg

SEQ ID NO: 4327076 - DNA, 25 bp, Homo sapien
ggatgaatcttagggcaccaaagac

SEQ ID NO: 4327077 - DNA, 25 bp, Homo sapien
tcagggtaaccaactcgatttggga

SEQ ID NO: 4327078 - DNA, 25 bp, Homo sapien
caccatgcttgggtctgtacactga

SEQ ID NO: 4327079 - DNA, 25 bp, Homo sapien
gctgagccaaatcggtactgcacaa

SEQ ID NO: 4327080 - DNA, 25 bp, Homo sapien
gaattccgggacatgttcctccagc

SEQ ID NO: 4327081 - DNA, 25 bp, Homo sapien
catgaagcgtgactggtctaaggac

SEQ ID NO: 4327082 - DNA, 25 bp, Homo sapien
aagtttttggccatgaaacagcacc

SEQ ID NO: 4327083 - DNA, 25 bp, Homo sapien
taagtttttggccatgaaacagcac

SEQ ID NO: 4327084 - DNA, 25 bp, Homo sapien
acttctccagctgttgtcctttcaa

SEQ ID NO: 4327085 - DNA, 25 bp, Homo sapien
tgtacttctccagctgttgtccttt

SEQ ID NO: 4327086 - DNA, 25 bp, Homo sapien
tgtcttgccaatgaaggcagcgccc

SEQ ID NO: 4327087 - DNA, 25 bp, Homo sapien
ccagaggtaagcaggccttagccaa

SEQ ID NO: 4327088 - DNA, 25 bp, Homo sapien
gaacacatgtccagaaccaagctga

SEQ ID NO: 4327089 - DNA, 25 bp, Homo sapien
taattcaccccaagggcatgctcgg

SEQ ID NO: 4327090 - DNA, 25 bp, Homo sapien
caaactctcttgctttaattttgag

SEQ ID NO: 4327091 - DNA, 25 bp, Homo sapien
ttttgagtttattgacttgagattc

SEQ ID NO: 4327092 - DNA, 25 bp, Homo sapien
tcattcaactcatgttgctgtttct

SEQ ID NO: 4327093 - DNA, 25 bp, Homo sapien
tgacttgagattctgccacctctgc

SEQ ID NO: 4327094 - DNA, 25 bp, Homo sapien
cttggaaaggtattgattggcttgt

SEQ ID NO: 4327095 - DNA, 25 bp, Homo sapien
aaaggtattgattggcttgtgtttc

SEQ ID NO: 4327096 - DNA, 25 bp, Homo sapien
ggaaaggtattgattggcttgtgtt

SEQ ID NO: 4327097 - DNA, 25 bp, Homo sapien
tggaaaggtattgattggcttgtgt

SEQ ID NO: 4327098 - DNA, 25 bp, Homo sapien
gtgcaaccacaaaggtaaaggagag

SEQ ID NO: 4327099 - DNA, 25 bp, Homo sapien
ccacctcgacttgctgcttgtaatt

SEQ ID NO: 4327100 - DNA, 25 bp, Homo sapien
cgccacctcgacttgctgcttgtaa

SEQ ID NO: 4327101 - DNA, 25 bp, Homo sapien
cacctcgacttgctgcttgtaattt

SEQ ID NO: 4327102 - DNA, 25 bp, Homo sapien
gccacctcgacttgctgcttgtaat

SEQ ID NO: 4327103 - DNA, 25 bp, Homo sapien
gataggtcagctctttgatgcatcg

SEQ ID NO: 4327104 - DNA, 25 bp, Homo sapien
tctgggcctctgcactgcgacggat

SEQ ID NO: 4327105 - DNA, 25 bp, Homo sapien
tgcatcgctcaagtctgcgggctcc

SEQ ID NO: 4327106 - DNA, 25 bp, Homo sapien
gcgacggatttcaccctccagttca

SEQ ID NO: 4327107 - DNA, 25 bp, Homo sapien
ttttctgtaagtctgtaattgtctg

SEQ ID NO: 4327108 - DNA, 25 bp, Homo sapien
tgtaagtctgtaattgtctgctcca

SEQ ID NO: 4327109 - DNA, 25 bp, Homo sapien
ttctagtttctggatttgctttcta

SEQ ID NO: 4327110 - DNA, 25 bp, Homo sapien
tttgctttctactccccatcagggc

SEQ ID NO: 4327111 - DNA, 25 bp, Homo sapien
gaaggtgcgccaaagctggcagcca

SEQ ID NO: 4327112 - DNA, 25 bp, Homo sapien
ccctatgaaggtgcgccaaagctgg

SEQ ID NO: 4327113 - DNA, 25 bp, Homo sapien
tatgaaggtgcgccaaagctggcag

SEQ ID NO: 4327114 - DNA, 25 bp, Homo sapien
tccctatgaaggtgcgccaaagctg

SEQ ID NO: 4327115 - DNA, 25 bp, Homo sapien
ccccttggccactgcgccagtgaac

SEQ ID NO: 4327116 - DNA, 25 bp, Homo sapien
tgtatgggaaatcaatggaatactt

SEQ ID NO: 4327117 - DNA, 25 bp, Homo sapien
cccttggccactgcgccagtgaact

SEQ ID NO: 4327118 - DNA, 25 bp, Homo sapien
tctgcattttgacactcctgcacca

SEQ ID NO: 4327119 - DNA, 25 bp, Homo sapien
gcttctttctgcatccgggcaacat

SEQ ID NO: 4327120 - DNA, 25 bp, Homo sapien
catccgggcaacatcagcctccagt

SEQ ID NO: 4327121 - DNA, 25 bp, Homo sapien
ttctttctgcatccgggcaacatca

SEQ ID NO: 4327122 - DNA, 25 bp, Homo sapien
tgaagaagagagttgcgccgctcag

SEQ ID NO: 4327123 - DNA, 25 bp, Homo sapien
tcttgcagggaccttagatcctcta

SEQ ID NO: 4327124 - DNA, 25 bp, Homo sapien
agttgtgtgctgtcatccagctgca

SEQ ID NO: 4327125 - DNA, 25 bp, Homo sapien
tgctccttcagatcactgttcagtt

SEQ ID NO: 4327126 - DNA, 25 bp, Homo sapien
cagggatttggttgcttctgacacc

SEQ ID NO: 4327127 - DNA, 25 bp, Homo sapien
gacacctgccggttggcacagctaa

SEQ ID NO: 4327128 - DNA, 25 bp, Homo sapien
cagggagtcaatggtacactgctgc

SEQ ID NO: 4327129 - DNA, 25 bp, Homo sapien
cagaatccagactagactgcaggga

SEQ ID NO: 4327130 - DNA, 25 bp, Homo sapien
tatagatagctagtaagctcaccac

SEQ ID NO: 4327131 - DNA, 25 bp, Homo sapien
tatttggtgttgtcttgagtctcac

SEQ ID NO: 4327132 - DNA, 25 bp, Homo sapien
gtctcacatgacagtagaagctcct

SEQ ID NO: 4327133 - DNA, 25 bp, Homo sapien
gccagacataatgagctctgtttag

SEQ ID NO: 4327134 - DNA, 25 bp, Homo sapien
tgctttcattacgttccagggctcc

SEQ ID NO: 4327135 - DNA, 25 bp, Homo sapien
cttgctttcattacgttccagggct

SEQ ID NO: 4327136 - DNA, 25 bp, Homo sapien
tcttgctttcattacgttccagggc

SEQ ID NO: 4327137 - DNA, 25 bp, Homo sapien
aatcttgctttcattacgttccagg

SEQ ID NO: 4327138 - DNA, 25 bp, Homo sapien
gaatgcagatcttctgccttgtcac

SEQ ID NO: 4327139 - DNA, 25 bp, Homo sapien
gctgttattgctgaatgcagatctt

SEQ ID NO: 4327140 - DNA, 25 bp, Homo sapien
gccttgtcacagtgaaaactttctt

SEQ ID NO: 4327141 - DNA, 25 bp, Homo sapien
ccttttgttggtgctgctgttattg

SEQ ID NO: 4327142 - DNA, 25 bp, Homo sapien
taacctggtttgtcagattagaaat

SEQ ID NO: 4327143 - DNA, 25 bp, Homo sapien
acctggtttgtcagattagaaatct

SEQ ID NO: 4327144 - DNA, 25 bp, Homo sapien
aacctggtttgtcagattagaaatc

SEQ ID NO: 4327145 - DNA, 25 bp, Homo sapien
tctgtactgagagcctgaacttcct

SEQ ID NO: 4327146 - DNA, 25 bp, Homo sapien
tctgagaggcatccagcaacgcctg

SEQ ID NO: 4327147 - DNA, 25 bp, Homo sapien
tcggctgcctcctgcaatctaattg

SEQ ID NO: 4327148 - DNA, 25 bp, Homo sapien
tgcagagcggaccttcccgaggtca

SEQ ID NO: 4327149 - DNA, 25 bp, Homo sapien
gagtgagtgaggcaataactctcag

SEQ ID NO: 4327150 - DNA, 25 bp, Homo sapien
tctcagagagctcatcaagtctgcc

SEQ ID NO: 4327151 - DNA, 25 bp, Homo sapien
agagtgagtgaggcaataactctca

SEQ ID NO: 4327152 - DNA, 25 bp, Homo sapien
gtgagtgaggcaataactctcagag

SEQ ID NO: 4327153 - DNA, 25 bp, Homo sapien
ctttggataaggtccggtgcagctc

SEQ ID NO: 4327154 - DNA, 25 bp, Homo sapien
ccattgcaccatttcagcattgact

SEQ ID NO: 4327155 - DNA, 25 bp, Homo sapien
tcctcatactgctctcgtagaaggt

SEQ ID NO: 4327156 - DNA, 25 bp, Homo sapien
gtcacgctgagccttctgcagggca

SEQ ID NO: 4327157 - DNA, 25 bp, Homo sapien
ctcttcaagcctccgtaggaactcg

SEQ ID NO: 4327158 - DNA, 25 bp, Homo sapien
tgccgagtgaagttgctcttttccc

SEQ ID NO: 4327159 - DNA, 25 bp, Homo sapien
tcaggtcttcaatctgccgagtgaa

SEQ ID NO: 4327160 - DNA, 25 bp, Homo sapien
gaaagttggtttatcagagcctcct

SEQ ID NO: 4327161 - DNA, 25 bp, Homo sapien
tgtcttttgtgctgccaggtcattt

SEQ ID NO: 4327162 - DNA, 25 bp, Homo sapien
catttgccaactgagtcaccttatc

SEQ ID NO: 4327163 - DNA, 25 bp, Homo sapien
gagtcaccttatctagctttgcagt

SEQ ID NO: 4327164 - DNA, 25 bp, Homo sapien
caggtcatttgccaactgagtcacc

SEQ ID NO: 4327165 - DNA, 25 bp, Homo sapien
cttcatatagagtacagagtttctc

SEQ ID NO: 4327166 - DNA, 25 bp, Homo sapien
tatagagtacagagtttctcagcat

SEQ ID NO: 4327167 - DNA, 25 bp, Homo sapien
tagagtacagagtttctcagcattt

SEQ ID NO: 4327168 - DNA, 25 bp, Homo sapien
gagtacagagtttctcagcatttgc

SEQ ID NO: 4327169 - DNA, 25 bp, Homo sapien
gagacttagaacgtgagttataaaa

SEQ ID NO: 4327170 - DNA, 25 bp, Homo sapien
aaagaagtggttgagacttagaacg

SEQ ID NO: 4327171 - DNA, 25 bp, Homo sapien
gaaaccaggtgccagtgacagagat

SEQ ID NO: 4327172 - DNA, 25 bp, Homo sapien
tggttgagacttagaacgtgagtta

SEQ ID NO: 4327173 - DNA, 25 bp, Homo sapien
catgttcagaagaccacgaggatgg

SEQ ID NO: 4327174 - DNA, 25 bp, Homo sapien
tcagaagaccacgaggatggcatgg

SEQ ID NO: 4327175 - DNA, 25 bp, Homo sapien
cacgaggatggcatgggagtatcta

SEQ ID NO: 4327176 - DNA, 25 bp, Homo sapien
ccacgaggatggcatgggagtatct

SEQ ID NO: 4327177 - DNA, 25 bp, Homo sapien
tgtcatctgctcaacacgggtcagg

SEQ ID NO: 4327178 - DNA, 25 bp, Homo sapien
catcttggctcgagtggtcctttca

SEQ ID NO: 4327179 - DNA, 25 bp, Homo sapien
cagaagttgtctcaaagtgcagagt

SEQ ID NO: 4327180 - DNA, 25 bp, Homo sapien
caggtcttgggtgaggtcagctctc

SEQ ID NO: 4327181 - DNA, 25 bp, Homo sapien
gctctttaaccgtcttctgaagctg

SEQ ID NO: 4327182 - DNA, 25 bp, Homo sapien
tttgaattcatctgactcaattcta

SEQ ID NO: 4327183 - DNA, 25 bp, Homo sapien
gctgagctaccaggcctttctcatt

SEQ ID NO: 4327184 - DNA, 25 bp, Homo sapien
ttcatctgactcaattctaattctt

SEQ ID NO: 4327185 - DNA, 25 bp, Homo sapien
gccaggtgtcgctggctgctttcca

SEQ ID NO: 4327186 - DNA, 25 bp, Homo sapien
tgctttccaggttctccatactttc

SEQ ID NO: 4327187 - DNA, 25 bp, Homo sapien
ttcccgattcagctttaaattgccc

SEQ ID NO: 4327188 - DNA, 25 bp, Homo sapien
gtttgtgcagttccctttcacagtt

SEQ ID NO: 4327189 - DNA, 25 bp, Homo sapien
gcttcagatttgctttgctcaggct

SEQ ID NO: 4327190 - DNA, 25 bp, Homo sapien
cagcttcagatttgctttgctcagg

SEQ ID NO: 4327191 - DNA, 25 bp, Homo sapien
gtttgctgatatcctcatttagaaa

SEQ ID NO: 4327192 - DNA, 25 bp, Homo sapien
ccttggctgctctgttaagtttgct

SEQ ID NO: 4327193 - DNA, 25 bp, Homo sapien
cttgtgctctgtagtacgcttctcc

SEQ ID NO: 4327194 - DNA, 25 bp, Homo sapien
tcttcaacatttgccagtgtctctt

SEQ ID NO: 4327195 - DNA, 25 bp, Homo sapien
aacattcatcttcgagtttccgccc

SEQ ID NO: 4327196 - DNA, 25 bp, Homo sapien
ttggatttaatcagccactcgcact

SEQ ID NO: 4327197 - DNA, 25 bp, Homo sapien
catgatgaggagaaaattgttgcca

SEQ ID NO: 4327198 - DNA, 25 bp, Homo sapien
ctgccatgatgaggagaaaattgtt

SEQ ID NO: 4327199 - DNA, 25 bp, Homo sapien
gatgaggagaaaattgttgccaaca

SEQ ID NO: 4327200 - DNA, 25 bp, Homo sapien
gccatgatgaggagaaaattgttgc

SEQ ID NO: 4327201 - DNA, 25 bp, Homo sapien
aagaacaaatggtggggctactcac

SEQ ID NO: 4327202 - DNA, 25 bp, Homo sapien
cagccatgaaagctcttatgttcca

SEQ ID NO: 4327203 - DNA, 25 bp, Homo sapien
tgttccattggatcaaaataagtgc

SEQ ID NO: 4327204 - DNA, 25 bp, Homo sapien
gcctgaagctgaagaatcaggtcat

SEQ ID NO: 4327205 - DNA, 25 bp, Homo sapien
tcatccagggccagttcttcacagc

SEQ ID NO: 4327206 - DNA, 25 bp, Homo sapien
ttctggaatttgattcgcatcagtt

SEQ ID NO: 4327207 - DNA, 25 bp, Homo sapien
gactttagatagtctctcatctctt

SEQ ID NO: 4327208 - DNA, 25 bp, Homo sapien
ttccagttggcccagaaacccagct

SEQ ID NO: 4327209 - DNA, 25 bp, Homo sapien
tgattcgcatcagtttgccctgtgc

SEQ ID NO: 4327210 - DNA, 25 bp, Homo sapien
tagtgattccaaatcggtactgggt

SEQ ID NO: 4327211 - DNA, 25 bp, Homo sapien
gattccaaatcggtactgggtatgg

SEQ ID NO: 4327212 - DNA, 25 bp, Homo sapien
gtgattccaaatcggtactgggtat

SEQ ID NO: 4327213 - DNA, 25 bp, Homo sapien
ttagtgattccaaatcggtactggg

SEQ ID NO: 4327214 - DNA, 25 bp, Homo sapien
agacaccattacagcgcaactgctg

SEQ ID NO: 4327215 - DNA, 25 bp, Homo sapien
gtttggaaaaccttcacggcatatc

SEQ ID NO: 4327216 - DNA, 25 bp, Homo sapien
cggcatatcctagtcccttccaaga

SEQ ID NO: 4327217 - DNA, 25 bp, Homo sapien
cagcatactgcagtcggtttggaaa

SEQ ID NO: 4327218 - DNA, 25 bp, Homo sapien
aaaaagagtcatggtggatctgtgc

SEQ ID NO: 4327219 - DNA, 25 bp, Homo sapien
catggtggatctgtgcctgaaaaaa

SEQ ID NO: 4327220 - DNA, 25 bp, Homo sapien
attattgggacagattttgaaccaa

SEQ ID NO: 4327221 - DNA, 25 bp, Homo sapien
tgggacagattttgaaccaattgct

SEQ ID NO: 4327222 - DNA, 25 bp, Homo sapien
agctgcaacgtccaatagaagcctt

SEQ ID NO: 4327223 - DNA, 25 bp, Homo sapien
caatagaagcctttgaaaaaccatc

SEQ ID NO: 4327224 - DNA, 25 bp, Homo sapien
tgtcagctgcaacgtccaatagaag

SEQ ID NO: 4327225 - DNA, 25 bp, Homo sapien
agctgtcagctgcaacgtccaatag

SEQ ID NO: 4327226 - DNA, 25 bp, Homo sapien
tgttcacattgggatttatgcatct

SEQ ID NO: 4327227 - DNA, 25 bp, Homo sapien
agattagtcatcaatttattcaggt

SEQ ID NO: 4327228 - DNA, 25 bp, Homo sapien
ctcacaaaatgaggtgctgttgatt

SEQ ID NO: 4327229 - DNA, 25 bp, Homo sapien
cacattgggatttatgcatctcaca

SEQ ID NO: 4327230 - DNA, 25 bp, Homo sapien
ccgtttggaatgaagctcctttctt

SEQ ID NO: 4327231 - DNA, 25 bp, Homo sapien
gcaaccgtttggaatgaagctcctt

SEQ ID NO: 4327232 - DNA, 25 bp, Homo sapien
atgcagagatgcaaccgtttggaat

SEQ ID NO: 4327233 - DNA, 25 bp, Homo sapien
gagatgcaaccgtttggaatgaagc

SEQ ID NO: 4327234 - DNA, 25 bp, Homo sapien
tcaggcatgttccagaattatgtca

SEQ ID NO: 4327235 - DNA, 25 bp, Homo sapien
gattagccgggtccagtcacaatag

SEQ ID NO: 4327236 - DNA, 25 bp, Homo sapien
tgaagccagaaagtgctaaattttc

SEQ ID NO: 4327237 - DNA, 25 bp, Homo sapien
tccctatgtcagtcgagagaaccaa

SEQ ID NO: 4327238 - DNA, 25 bp, Homo sapien
ttttcaaaaaggctcgccaggagtc

SEQ ID NO: 4327239 - DNA, 25 bp, Homo sapien
gccaaccactgatattataaggtac

SEQ ID NO: 4327240 - DNA, 25 bp, Homo sapien
aaggctcgccaggagtctgttggaa

SEQ ID NO: 4327241 - DNA, 25 bp, Homo sapien
cactgtcagtactcatgtaattttc

SEQ ID NO: 4327242 - DNA, 25 bp, Homo sapien
cactcctgcataatggacaagttca

SEQ ID NO: 4327243 - DNA, 25 bp, Homo sapien
aagtcaggtctgtagccttaggaaa

SEQ ID NO: 4327244 - DNA, 25 bp, Homo sapien
gagatgaaccgactttccaaaatgg

SEQ ID NO: 4327245 - DNA, 25 bp, Homo sapien
gtcaaagagtttggtcttgaaagtc

SEQ ID NO: 4327246 - DNA, 25 bp, Homo sapien
ctgttgaagagacataagagcagca

SEQ ID NO: 4327247 - DNA, 25 bp, Homo sapien
tgagatctatgcaagcttgcaaatc

SEQ ID NO: 4327248 - DNA, 25 bp, Homo sapien
gcaagcttgcaaatccagaccaaag

SEQ ID NO: 4327249 - DNA, 25 bp, Homo sapien
aaattaatgcaaagttgctcaaggc

SEQ ID NO: 4327250 - DNA, 25 bp, Homo sapien
gctccagaacaaacatgtgccaatt

SEQ ID NO: 4327251 - DNA, 25 bp, Homo sapien
atgaataggtaagaagaagagataa

SEQ ID NO: 4327252 - DNA, 25 bp, Homo sapien
tcaaggatatgaataggtaagaaga

SEQ ID NO: 4327253 - DNA, 25 bp, Homo sapien
atatgaataggtaagaagaagagat

SEQ ID NO: 4327254 - DNA, 25 bp, Homo sapien
cttcaaggatatgaataggtaagaa

SEQ ID NO: 4327255 - DNA, 25 bp, Homo sapien
agggccctgttgatccgtgccacta

SEQ ID NO: 4327256 - DNA, 25 bp, Homo sapien
ttgatccgtgccactagccacttaa

SEQ ID NO: 4327257 - DNA, 25 bp, Homo sapien
ggccctgttgatccgtgccactagc

SEQ ID NO: 4327258 - DNA, 25 bp, Homo sapien
ctgttgatccgtgccactagccact

SEQ ID NO: 4327259 - DNA, 25 bp, Homo sapien
gcaggtttctgacatactccaagga

SEQ ID NO: 4327260 - DNA, 25 bp, Homo sapien
ggaagggagaattttagctggccat

SEQ ID NO: 4327261 - DNA, 25 bp, Homo sapien
ctttgtgcctggatgatgctctaca

SEQ ID NO: 4327262 - DNA, 25 bp, Homo sapien
ttccataactccaatagcgctgctg

SEQ ID NO: 4327263 - DNA, 25 bp, Homo sapien
tgcccatgaggaaagcagctttgtc

SEQ ID NO: 4327264 - DNA, 25 bp, Homo sapien
attcgttaccaactttgattctagg

SEQ ID NO: 4327265 - DNA, 25 bp, Homo sapien
ggatcaagcactttaccaactcaga

SEQ ID NO: 4327266 - DNA, 25 bp, Homo sapien
tgttctatagtttgacctctggtaa

SEQ ID NO: 4327267 - DNA, 25 bp, Homo sapien
tccagtgagtttatagcatccatac

SEQ ID NO: 4327268 - DNA, 25 bp, Homo sapien
gctccagtgagtttatagcatccat

SEQ ID NO: 4327269 - DNA, 25 bp, Homo sapien
tggctccagtgagtttatagcatcc

SEQ ID NO: 4327270 - DNA, 25 bp, Homo sapien
gtgagtttatagcatccatacttct

SEQ ID NO: 4327271 - DNA, 25 bp, Homo sapien
tcatccaagctctccacagtaactg

SEQ ID NO: 4327272 - DNA, 25 bp, Homo sapien
tgagggatttgcagataccaggagc

SEQ ID NO: 4327273 - DNA, 25 bp, Homo sapien
gtggccagcaattcttcagcatcat

SEQ ID NO: 4327274 - DNA, 25 bp, Homo sapien
ccacaggagcaaaagtggaagtctg

SEQ ID NO: 4327275 - DNA, 25 bp, Homo sapien
tcgttaaacagcttaaagaaatctg

SEQ ID NO: 4327276 - DNA, 25 bp, Homo sapien
taaacagcttaaagaaatctgcaag

SEQ ID NO: 4327277 - DNA, 25 bp, Homo sapien
gttaaacagcttaaagaaatctgca

SEQ ID NO: 4327278 - DNA, 25 bp, Homo sapien
aacagcttaaagaaatctgcaaggc

SEQ ID NO: 4327279 - DNA, 25 bp, Homo sapien
gtccagatagaatttgatagaatat

SEQ ID NO: 4327280 - DNA, 25 bp, Homo sapien
ccagatagaatttgatagaatatgt

SEQ ID NO: 4327281 - DNA, 25 bp, Homo sapien
agatagaatttgatagaatatgtgg

SEQ ID NO: 4327282 - DNA, 25 bp, Homo sapien
aagctctttttgtccagatagaatt

SEQ ID NO: 4327283 - DNA, 25 bp, Homo sapien
tctggcaccaaagtgcatcctgatg

SEQ ID NO: 4327284 - DNA, 25 bp, Homo sapien
ctggcaccaaagtgcatcctgatga

SEQ ID NO: 4327285 - DNA, 25 bp, Homo sapien
ctctggcaccaaagtgcatcctgat

SEQ ID NO: 4327286 - DNA, 25 bp, Homo sapien
tgcttccaagatagtattcgcttgc

SEQ ID NO: 4327287 - DNA, 25 bp, Homo sapien
gcatgatttgatcttctaacgcccc

SEQ ID NO: 4327288 - DNA, 25 bp, Homo sapien
tagtattcgcttgcatgatttgatc

SEQ ID NO: 4327289 - DNA, 25 bp, Homo sapien
aaatactggataatatgtttgctgt

SEQ ID NO: 4327290 - DNA, 25 bp, Homo sapien
ctggataatatgtttgctgttcaca

SEQ ID NO: 4327291 - DNA, 25 bp, Homo sapien
ggattcaatcatggctgctatggtg

SEQ ID NO: 4327292 - DNA, 25 bp, Homo sapien
tggattcaatcatggctgctatggt

SEQ ID NO: 4327293 - DNA, 25 bp, Homo sapien
tgaagagtatagactgattttctcg

SEQ ID NO: 4327294 - DNA, 25 bp, Homo sapien
aagagtatagactgattttctcgat

SEQ ID NO: 4327295 - DNA, 25 bp, Homo sapien
gaagagtatagactgattttctcga

SEQ ID NO: 4327296 - DNA, 25 bp, Homo sapien
tgtgaagcatgtcctgaaaggcgtt

SEQ ID NO: 4327297 - DNA, 25 bp, Homo sapien
gaaaggcgttattggcaacagcaaa

SEQ ID NO: 4327298 - DNA, 25 bp, Homo sapien
gcctcttccctttgtaggcggccat

SEQ ID NO: 4327299 - DNA, 25 bp, Homo sapien
tctgatacacgggaagccatttgta

SEQ ID NO: 4327300 - DNA, 25 bp, Homo sapien
ccatagcgccgcttcagggtatgca

SEQ ID NO: 4327301 - DNA, 25 bp, Homo sapien
tagatcatccactggccatagcgcc

SEQ ID NO: 4327302 - DNA, 25 bp, Homo sapien
tgcagcacggatgcctcattgaggt

SEQ ID NO: 4327303 - DNA, 25 bp, Homo sapien
tcagggtatgcagcacggatgcctc

SEQ ID NO: 4327304 - DNA, 25 bp, Homo sapien
ctgctggattttgtcctcctttatg

SEQ ID NO: 4327305 - DNA, 25 bp, Homo sapien
tggattttgtcctcctttatgctca

SEQ ID NO: 4327306 - DNA, 25 bp, Homo sapien
gattttgtcctcctttatgctcaga

SEQ ID NO: 4327307 - DNA, 25 bp, Homo sapien
ttttgtcctcctttatgctcagact

SEQ ID NO: 4327308 - DNA, 25 bp, Homo sapien
gatataagcattctcaccatcagga

SEQ ID NO: 4327309 - DNA, 25 bp, Homo sapien
ccatcaggaatccagcatttcttct

SEQ ID NO: 4327310 - DNA, 25 bp, Homo sapien
ccatctgctgtctcaacaattactg

SEQ ID NO: 4327311 - DNA, 25 bp, Homo sapien
tcccttttacctcagcctcgatata

SEQ ID NO: 4327312 - DNA, 25 bp, Homo sapien
caagcagcagcttgggggcaccata

SEQ ID NO: 4327313 - DNA, 25 bp, Homo sapien
gcagcttgggggcaccatagaccat

SEQ ID NO: 4327314 - DNA, 25 bp, Homo sapien
tggcactacaggaacaagaaacatc

SEQ ID NO: 4327315 - DNA, 25 bp, Homo sapien
ataatggcactacaggaacaagaaa

SEQ ID NO: 4327316 - DNA, 25 bp, Homo sapien
ggctttcgaatggtgttttgtccta

SEQ ID NO: 4327317 - DNA, 25 bp, Homo sapien
tgttttgtcctagctctacaaccac

SEQ ID NO: 4327318 - DNA, 25 bp, Homo sapien
ccttctcgggtatcataataatgca

SEQ ID NO: 4327319 - DNA, 25 bp, Homo sapien
tgtcacccaggaattctagttttcc

SEQ ID NO: 4327320 - DNA, 25 bp, Homo sapien
agaagaccgctagaggcaaggctcc

SEQ ID NO: 4327321 - DNA, 25 bp, Homo sapien
ctagaggcaaggctccaacatcaaa

SEQ ID NO: 4327322 - DNA, 25 bp, Homo sapien
accgctagaggcaaggctccaacat

SEQ ID NO: 4327323 - DNA, 25 bp, Homo sapien
aagaccgctagaggcaaggctccaa

SEQ ID NO: 4327324 - DNA, 25 bp, Homo sapien
gaggaaggctgcggcttctccaagg

SEQ ID NO: 4327325 - DNA, 25 bp, Homo sapien
ctgaggaaggctgcggcttctccaa

SEQ ID NO: 4327326 - DNA, 25 bp, Homo sapien
ggctgtggcctgtagtagaagcagc

SEQ ID NO: 4327327 - DNA, 25 bp, Homo sapien
tctgaggaaggctgcggcttctcca

SEQ ID NO: 4327328 - DNA, 25 bp, Homo sapien
aaggccctaaacgtgagtaggcaag

SEQ ID NO: 4327329 - DNA, 25 bp, Homo sapien
tctttttggtaagatgaggtaaata

SEQ ID NO: 4327330 - DNA, 25 bp, Homo sapien
ttaaaatgatcatatgaagtagaaa

SEQ ID NO: 4327331 - DNA, 25 bp, Homo sapien
taaaatgatcatatgaagtagaaat

SEQ ID NO: 4327332 - DNA, 25 bp, Homo sapien
aaaatgatcatatgaagtagaaatg

SEQ ID NO: 4327333 - DNA, 25 bp, Homo sapien
agcatctggtgagttctcacgggca

SEQ ID NO: 4327334 - DNA, 25 bp, Homo sapien
gttgtaaagtgtcatggttcctgca

SEQ ID NO: 4327335 - DNA, 25 bp, Homo sapien
ttctcacgggcacttgaaactctgg

SEQ ID NO: 4327336 - DNA, 25 bp, Homo sapien
ggtgtaaatcgcctgctgggccata

SEQ ID NO: 4327337 - DNA, 25 bp, Homo sapien
tatagacagtttcctggctgtaccc

SEQ ID NO: 4327338 - DNA, 25 bp, Homo sapien
agcccattcctagattgtttcacag

SEQ ID NO: 4327339 - DNA, 25 bp, Homo sapien
gctagaataataccaagccctgaca

SEQ ID NO: 4327340 - DNA, 25 bp, Homo sapien
gcaggtgaaacaataccgccgtgtt

SEQ ID NO: 4327341 - DNA, 25 bp, Homo sapien
ctcttggattcttcaggtaaattca

SEQ ID NO: 4327342 - DNA, 25 bp, Homo sapien
ttacagatgacagaacgggtttatt

SEQ ID NO: 4327343 - DNA, 25 bp, Homo sapien
taaattcactattggtttgggtaca

SEQ ID NO: 4327344 - DNA, 25 bp, Homo sapien
caaataaagcattattgagggtcat

SEQ ID NO: 4327345 - DNA, 25 bp, Homo sapien
caccataatggttgaaaaacttgga

SEQ ID NO: 4327346 - DNA, 25 bp, Homo sapien
gcaatttttatcaaggacaagtgaa

SEQ ID NO: 4327347 - DNA, 25 bp, Homo sapien
ggaaacaaatatcgctagtgggtta

SEQ ID NO: 4327348 - DNA, 25 bp, Homo sapien
aaaagatgaataacccacaggagaa

SEQ ID NO: 4327349 - DNA, 25 bp, Homo sapien
actgatatgcacattactggtcctg

SEQ ID NO: 4327350 - DNA, 25 bp, Homo sapien
ttgaagacactgatatgcacattac

SEQ ID NO: 4327351 - DNA, 25 bp, Homo sapien
tatgcacattactggtcctgtcagc

SEQ ID NO: 4327352 - DNA, 25 bp, Homo sapien
gacactgatatgcacattactggtc

SEQ ID NO: 4327353 - DNA, 25 bp, Homo sapien
cattttactttctcaattggccaaa

SEQ ID NO: 4327354 - DNA, 25 bp, Homo sapien
tgactgtaccttatactgattaacc

SEQ ID NO: 4327355 - DNA, 25 bp, Homo sapien
aatttcattatgcagaggttaccac

SEQ ID NO: 4327356 - DNA, 25 bp, Homo sapien
tcaaatctagatgcggttaccaaac

SEQ ID NO: 4327357 - DNA, 25 bp, Homo sapien
acactgcagcccgagggacatgtca

SEQ ID NO: 4327358 - DNA, 25 bp, Homo sapien
gtataaaccaaacgggactcacaga

SEQ ID NO: 4327359 - DNA, 25 bp, Homo sapien
gggatacttgtagctcaatgtgcaa

SEQ ID NO: 4327360 - DNA, 25 bp, Homo sapien
tgcaaaatgcttaactcagtgagac

SEQ ID NO: 4327361 - DNA, 25 bp, Homo sapien
gagagccaaggtaaagtgatgatcc

SEQ ID NO: 4327362 - DNA, 25 bp, Homo sapien
atttattggtaatcactgagagcca

SEQ ID NO: 4327363 - DNA, 25 bp, Homo sapien
aatactttattatgggtaatactca

SEQ ID NO: 4327364 - DNA, 25 bp, Homo sapien
aaaatcaatatgcttaacatgccta

SEQ ID NO: 4327365 - DNA, 25 bp, Homo sapien
gctacataagcagaggtaatgcaca

SEQ ID NO: 4327366 - DNA, 25 bp, Homo sapien
ggaagagaaacagcctatatgcagt

SEQ ID NO: 4327367 - DNA, 25 bp, Homo sapien
tactgatgttgacagccagagtctt

SEQ ID NO: 4327368 - DNA, 25 bp, Homo sapien
tattggtgcatgcaaagaggtgaac

SEQ ID NO: 4327369 - DNA, 25 bp, Homo sapien
cagtgctaactcatgacagaatctc

SEQ ID NO: 4327370 - DNA, 25 bp, Homo sapien
taggaaatggacatgcatacacaca

SEQ ID NO: 4327371 - DNA, 25 bp, Homo sapien
gacacatggctggtacgatggtata

SEQ ID NO: 4327372 - DNA, 25 bp, Homo sapien
caaaggattaagtcacaaacaggac

SEQ ID NO: 4327373 - DNA, 25 bp, Homo sapien
gtaactgatatagtaaaggcactca

SEQ ID NO: 4327374 - DNA, 25 bp, Homo sapien
tttttaatatgaggtacacagtcca

SEQ ID NO: 4327375 - DNA, 25 bp, Homo sapien
tatgaaaggtgttacaagagacaga

SEQ ID NO: 4327376 - DNA, 25 bp, Homo sapien
gatgaaggatgatgattagtactca

SEQ ID NO: 4327377 - DNA, 25 bp, Homo sapien
tcaaagctgcagtacggactttctt

SEQ ID NO: 4327378 - DNA, 25 bp, Homo sapien
tcttcaaagctgcagtacggacttt

SEQ ID NO: 4327379 - DNA, 25 bp, Homo sapien
cttcttcaaagctgcagtacggact

SEQ ID NO: 4327380 - DNA, 25 bp, Homo sapien
ttcaaagctgcagtacggactttct

SEQ ID NO: 4327381 - DNA, 25 bp, Homo sapien
gctgtctcaagatgtctaaattgga

SEQ ID NO: 4327382 - DNA, 25 bp, Homo sapien
tttcagttgcaaaggccaaatttca

SEQ ID NO: 4327383 - DNA, 25 bp, Homo sapien
tgggactggacatcatagaacactg

SEQ ID NO: 4327384 - DNA, 25 bp, Homo sapien
tatagggtagcactaggctaggctg

SEQ ID NO: 4327385 - DNA, 25 bp, Homo sapien
gaatatgcagcaagagtagaatcca

SEQ ID NO: 4327386 - DNA, 25 bp, Homo sapien
cgtttcttacagagtagttagagga

SEQ ID NO: 4327387 - DNA, 25 bp, Homo sapien
gaaacagaatgtatctcctctatag

SEQ ID NO: 4327388 - DNA, 25 bp, Homo sapien
aaaaacatgcaacagatcagggtct

SEQ ID NO: 4327389 - DNA, 25 bp, Homo sapien
tgtggatcattgctatcatgtggga

SEQ ID NO: 4327390 - DNA, 25 bp, Homo sapien
tccaaacgaccttctaattgtgcct

SEQ ID NO: 4327391 - DNA, 25 bp, Homo sapien
aattgtgccttttgaacctctaggg

SEQ ID NO: 4327392 - DNA, 25 bp, Homo sapien
tcttgctgaagtttcaccaaggact

SEQ ID NO: 4327393 - DNA, 25 bp, Homo sapien
aattcttttctaaggatatcaatgg

SEQ ID NO: 4327394 - DNA, 25 bp, Homo sapien
ttcttttctaaggatatcaatggtt

SEQ ID NO: 4327395 - DNA, 25 bp, Homo sapien
tgtacttttgttttttgatgcaaat

SEQ ID NO: 4327396 - DNA, 25 bp, Homo sapien
cttgtacttttgttttttgatgcaa

SEQ ID NO: 4327397 - DNA, 25 bp, Homo sapien
tcttgtacttttgttttttgatgca

SEQ ID NO: 4327398 - DNA, 25 bp, Homo sapien
cttcttgtacttttgttttttgatg

SEQ ID NO: 4327399 - DNA, 25 bp, Homo sapien
tggccaatttcttatagctcctaaa

SEQ ID NO: 4327400 - DNA, 25 bp, Homo sapien
acaaaaccactcatgcttccaaaat

SEQ ID NO: 4327401 - DNA, 25 bp, Homo sapien
agcaatctacccatctccaactccc

SEQ ID NO: 4327402 - DNA, 25 bp, Homo sapien
gattaaaccgaactgcttttgtgaa

SEQ ID NO: 4327403 - DNA, 25 bp, Homo sapien
tactagctgattctgtacttctttt

SEQ ID NO: 4327404 - DNA, 25 bp, Homo sapien
ttgctagcttatgttctctgtctac

SEQ ID NO: 4327405 - DNA, 25 bp, Homo sapien
gctagcttatgttctctgtctacta

SEQ ID NO: 4327406 - DNA, 25 bp, Homo sapien
ctgtctactagctgattctgtactt

SEQ ID NO: 4327407 - DNA, 25 bp, Homo sapien
tagaagaaaacattaatgaaccata

SEQ ID NO: 4327408 - DNA, 25 bp, Homo sapien
atagaagaaaacattaatgaaccat

SEQ ID NO: 4327409 - DNA, 25 bp, Homo sapien
agaagaaaacattaatgaaccatat

SEQ ID NO: 4327410 - DNA, 25 bp, Homo sapien
aatagaagaaaacattaatgaacca

SEQ ID NO: 4327411 - DNA, 25 bp, Homo sapien
atttgtttattcagagaatcacatg

SEQ ID NO: 4327412 - DNA, 25 bp, Homo sapien
gttccttgagtgactcattcaactt

SEQ ID NO: 4327413 - DNA, 25 bp, Homo sapien
tgagtgactcattcaactttttcac

SEQ ID NO: 4327414 - DNA, 25 bp, Homo sapien
gaatcacatgtgatctgtaaatctt

SEQ ID NO: 4327415 - DNA, 25 bp, Homo sapien
tgcgccttcagcaacacactaagct

SEQ ID NO: 4327416 - DNA, 25 bp, Homo sapien
gaagttccatgtaggattttgtcag

SEQ ID NO: 4327417 - DNA, 25 bp, Homo sapien
cactctgcgctctttctgattcaac

SEQ ID NO: 4327418 - DNA, 25 bp, Homo sapien
tcaacatactagcaagtgtccgtgc

SEQ ID NO: 4327419 - DNA, 25 bp, Homo sapien
caagggctagagcttttgtttccaa

SEQ ID NO: 4327420 - DNA, 25 bp, Homo sapien
ccaaaagatcttgtagcctgctttc

SEQ ID NO: 4327421 - DNA, 25 bp, Homo sapien
aatcagtctatcagcctgtgcaagg

SEQ ID NO: 4327422 - DNA, 25 bp, Homo sapien
cttgagttctttgacagcgatgctg

SEQ ID NO: 4327423 - DNA, 25 bp, Homo sapien
tcacatcacaaatctgatcctttac

SEQ ID NO: 4327424 - DNA, 25 bp, Homo sapien
atgtggatagtttcatttcatatac

SEQ ID NO: 4327425 - DNA, 25 bp, Homo sapien
ttcatatacatccattatgtcagat

SEQ ID NO: 4327426 - DNA, 25 bp, Homo sapien
gtcagatattctcacatcacaaatc

SEQ ID NO: 4327427 - DNA, 25 bp, Homo sapien
caccattccagactgaagtttctct

SEQ ID NO: 4327428 - DNA, 25 bp, Homo sapien
attgtttgctgctatactttctcca

SEQ ID NO: 4327429 - DNA, 25 bp, Homo sapien
ttcaatattcaatccaggaacacca

SEQ ID NO: 4327430 - DNA, 25 bp, Homo sapien
ctttcaaatgaggagttaaacactt

SEQ ID NO: 4327431 - DNA, 25 bp, Homo sapien
agtggagcagcctccaataatattc

SEQ ID NO: 4327432 - DNA, 25 bp, Homo sapien
tctattatctgacgttaaagcaaaa

SEQ ID NO: 4327433 - DNA, 25 bp, Homo sapien
tctctattatctgacgttaaagcaa

SEQ ID NO: 4327434 - DNA, 25 bp, Homo sapien
ttctcagtccagactgtacttgttc

SEQ ID NO: 4327435 - DNA, 25 bp, Homo sapien
taagtttgttaatcaaatcaagagt

SEQ ID NO: 4327436 - DNA, 25 bp, Homo sapien
cataccaggaaccaatggtttaagt

SEQ ID NO: 4327437 - DNA, 25 bp, Homo sapien
tagaagcttacttccataccaggaa

SEQ ID NO: 4327438 - DNA, 25 bp, Homo sapien
gtattttgtagaagcttacttccat

SEQ ID NO: 4327439 - DNA, 25 bp, Homo sapien
ttgttgttctataagagtggtacac

SEQ ID NO: 4327440 - DNA, 25 bp, Homo sapien
gagtggtacacttgacagttgtcaa

SEQ ID NO: 4327441 - DNA, 25 bp, Homo sapien
cagaatctgcaacctttgttccaaa

SEQ ID NO: 4327442 - DNA, 25 bp, Homo sapien
ggtcaatcttgccatatgtaaattg

SEQ ID NO: 4327443 - DNA, 25 bp, Homo sapien
ttcaatggccttggcaatcctttca

SEQ ID NO: 4327444 - DNA, 25 bp, Homo sapien
tcaatggccttggcaatcctttcac

SEQ ID NO: 4327445 - DNA, 25 bp, Homo sapien
aaagcctcatctagattttgttctg

SEQ ID NO: 4327446 - DNA, 25 bp, Homo sapien
tgatcaaggattgtaggcagcagaa

SEQ ID NO: 4327447 - DNA, 25 bp, Homo sapien
gatcagccgaggaacagttagcagc

SEQ ID NO: 4327448 - DNA, 25 bp, Homo sapien
gaagggtcacaaaacgatcagccga

SEQ ID NO: 4327449 - DNA, 25 bp, Homo sapien
aagtcatcactgaattgtaacactc

SEQ ID NO: 4327450 - DNA, 25 bp, Homo sapien
tttccttcaatatgccattgaccta

SEQ ID NO: 4327451 - DNA, 25 bp, Homo sapien
tctaaccagttttgagggctatggc

SEQ ID NO: 4327452 - DNA, 25 bp, Homo sapien
gacctaagtctcctgtgaatattta

SEQ ID NO: 4327453 - DNA, 25 bp, Homo sapien
tcatctgagtgagcatatggcgcag

SEQ ID NO: 4327454 - DNA, 25 bp, Homo sapien
ttaaccagcgcagtagagccacagt

SEQ ID NO: 4327455 - DNA, 25 bp, Homo sapien
gaacagttttctgatccgtccaaag

SEQ ID NO: 4327456 - DNA, 25 bp, Homo sapien
ccaggtggagactgttcaaacatca

SEQ ID NO: 4327457 - DNA, 25 bp, Homo sapien
gctatcaaggttatactggccttat

SEQ ID NO: 4327458 - DNA, 25 bp, Homo sapien
taaacctcatttggtaataagacat

SEQ ID NO: 4327459 - DNA, 25 bp, Homo sapien
caaagacactatacgctattacata

SEQ ID NO: 4327460 - DNA, 25 bp, Homo sapien
atcttccccaccaagatgtattttg

SEQ ID NO: 4327461 - DNA, 25 bp, Homo sapien
aaggagcatgcaactaaggccccat

SEQ ID NO: 4327462 - DNA, 25 bp, Homo sapien
gcactacattcgtgagggtgttcac

SEQ ID NO: 4327463 - DNA, 25 bp, Homo sapien
cccggacaagtggtgagcactacat

SEQ ID NO: 4327464 - DNA, 25 bp, Homo sapien
ccaaagacccacatctcaaagtggg

SEQ ID NO: 4327465 - DNA, 25 bp, Homo sapien
cctaatacttggtgaagacatgaag

SEQ ID NO: 4327466 - DNA, 25 bp, Homo sapien
attaagaagacctaatacttggtga

SEQ ID NO: 4327467 - DNA, 25 bp, Homo sapien
gacctaatacttggtgaagacatga

SEQ ID NO: 4327468 - DNA, 25 bp, Homo sapien
agacctaatacttggtgaagacatg

SEQ ID NO: 4327469 - DNA, 25 bp, Homo sapien
tctgtttataaccaacacatcttgg

SEQ ID NO: 4327470 - DNA, 25 bp, Homo sapien
aattctgtttataaccaacacatct

SEQ ID NO: 4327471 - DNA, 25 bp, Homo sapien
tgtttataaccaacacatcttggtt

SEQ ID NO: 4327472 - DNA, 25 bp, Homo sapien
tataaccaacacatcttggtttaaa

SEQ ID NO: 4327473 - DNA, 25 bp, Homo sapien
agtctgatgaatgtttcgagcatgg

SEQ ID NO: 4327474 - DNA, 25 bp, Homo sapien
ctgaatactttctagttagagtgcc

SEQ ID NO: 4327475 - DNA, 25 bp, Homo sapien
gatgaatgtttcgagcatggaatag

SEQ ID NO: 4327476 - DNA, 25 bp, Homo sapien
gccatcaccgtttatgagaatatta

SEQ ID NO: 4327477 - DNA, 25 bp, Homo sapien
tgtcaaactggataatattgaaagt

SEQ ID NO: 4327478 - DNA, 25 bp, Homo sapien
aagtgcaaacacaaccacagttaaa

SEQ ID NO: 4327479 - DNA, 25 bp, Homo sapien
gaaagtgcaaacacaaccacagtta

SEQ ID NO: 4327480 - DNA, 25 bp, Homo sapien
tcatttaatgtcaaactggataata

SEQ ID NO: 4327481 - DNA, 25 bp, Homo sapien
ccaacaaggtgataagagttcgata

SEQ ID NO: 4327482 - DNA, 25 bp, Homo sapien
ctatgggccaacaaggtgataagag

SEQ ID NO: 4327483 - DNA, 25 bp, Homo sapien
taagagttcgataaaaagatttcac

SEQ ID NO: 4327484 - DNA, 25 bp, Homo sapien
caaggtgataagagttcgataaaaa

SEQ ID NO: 4327485 - DNA, 25 bp, Homo sapien
tttgaacagaaagattgtgccgaca

SEQ ID NO: 4327486 - DNA, 25 bp, Homo sapien
caatgtctttatgtgcgtttgaaca

SEQ ID NO: 4327487 - DNA, 25 bp, Homo sapien
gattgtgccgacaaagatttgccaa

SEQ ID NO: 4327488 - DNA, 25 bp, Homo sapien
gatttgccaataatcctagacaagg

SEQ ID NO: 4327489 - DNA, 25 bp, Homo sapien
taattcatctatattggcaccagaa

SEQ ID NO: 4327490 - DNA, 25 bp, Homo sapien
gaaaattttgacattatatgttaac

SEQ ID NO: 4327491 - DNA, 25 bp, Homo sapien
attatatgttaacttctgtagaagt

SEQ ID NO: 4327492 - DNA, 25 bp, Homo sapien
tgtgatctatcaggaacgtaattaa

SEQ ID NO: 4327493 - DNA, 25 bp, Homo sapien
tcccgccagcacactattcagatta

SEQ ID NO: 4327494 - DNA, 25 bp, Homo sapien
tatatgtattctgaagacaatctct

SEQ ID NO: 4327495 - DNA, 25 bp, Homo sapien
agtgtggctgctccgacaaaccact

SEQ ID NO: 4327496 - DNA, 25 bp, Homo sapien
aacaccgaatcagtgtggctgctcc

SEQ ID NO: 4327497 - DNA, 25 bp, Homo sapien
acttaagatcagtgaagcacttatg

SEQ ID NO: 4327498 - DNA, 25 bp, Homo sapien
agatcagtgaagcacttatgttggg

SEQ ID NO: 4327499 - DNA, 25 bp, Homo sapien
gcaaaccgataatacttaagatcag

SEQ ID NO: 4327500 - DNA, 25 bp, Homo sapien
ctagttgagacagcaaaccgataat

SEQ ID NO: 4327501 - DNA, 25 bp, Homo sapien
tctgatttgatgtaaatagtcgtgt

SEQ ID NO: 4327502 - DNA, 25 bp, Homo sapien
atatctgatttgatgtaaatagtcg

SEQ ID NO: 4327503 - DNA, 25 bp, Homo sapien
gatttgatgtaaatagtcgtgtgag

SEQ ID NO: 4327504 - DNA, 25 bp, Homo sapien
gatgtaaatagtcgtgtgagtttct

SEQ ID NO: 4327505 - DNA, 25 bp, Homo sapien
cttcttcccaaagacaataggtgag

SEQ ID NO: 4327506 - DNA, 25 bp, Homo sapien
cccagagggtagttatgggattatt

SEQ ID NO: 4327507 - DNA, 25 bp, Homo sapien
aaaatgaagcccagagggtagttat

SEQ ID NO: 4327508 - DNA, 25 bp, Homo sapien
aagcccagagggtagttatgggatt

SEQ ID NO: 4327509 - DNA, 25 bp, Homo sapien
gtgagcgctcttgcctctcgctgcg

SEQ ID NO: 4327510 - DNA, 25 bp, Homo sapien
tcctagagccttcagtgagcgctct

SEQ ID NO: 4327511 - DNA, 25 bp, Homo sapien
cagcggaaccccgacactcactagc

SEQ ID NO: 4327512 - DNA, 25 bp, Homo sapien
gccccactcccgcttttcctagagc

SEQ ID NO: 4327513 - DNA, 25 bp, Homo sapien
tgactgacagtcaggagcaaggact

SEQ ID NO: 4327514 - DNA, 25 bp, Homo sapien
gcctctgacttcacggctttgtact

SEQ ID NO: 4327515 - DNA, 25 bp, Homo sapien
caaaagctgagtggcgttcgcctct

SEQ ID NO: 4327516 - DNA, 25 bp, Homo sapien
tccaagtgccgcaaaagctgagtgg

SEQ ID NO: 4327517 - DNA, 25 bp, Homo sapien
cctgagatcccgtgaaggcgagaaa

SEQ ID NO: 4327518 - DNA, 25 bp, Homo sapien
gtcgggctccggaagtccctaggca

SEQ ID NO: 4327519 - DNA, 25 bp, Homo sapien
agaagcttccggatccggtcgggct

SEQ ID NO: 4327520 - DNA, 25 bp, Homo sapien
gccgcgaggtttcggcctgagatcc

SEQ ID NO: 4327521 - DNA, 25 bp, Homo sapien
tactcgttagcgtcagtttttgtaa

SEQ ID NO: 4327522 - DNA, 25 bp, Homo sapien
cggagggtgttactcgttagcgtca

SEQ ID NO: 4327523 - DNA, 25 bp, Homo sapien
ttttgtaagtgaaggtgtctgtttc

SEQ ID NO: 4327524 - DNA, 25 bp, Homo sapien
ccaggtattgctccggagggtgtta

SEQ ID NO: 4327525 - DNA, 25 bp, Homo sapien
tgatgtgtcagcatcgtccccattc

SEQ ID NO: 4327526 - DNA, 25 bp, Homo sapien
caaagctgcgtgctatcagtgccat

SEQ ID NO: 4327527 - DNA, 25 bp, Homo sapien
gaggcccagggtaatgcgcaaagct

SEQ ID NO: 4327528 - DNA, 25 bp, Homo sapien
atcgtccccattcagaggcccaggg

SEQ ID NO: 4327529 - DNA, 25 bp, Homo sapien
caaccagtaccagcaactgcaaaaa

SEQ ID NO: 4327530 - DNA, 25 bp, Homo sapien
ggctaggaagaaactgcatcaacta

SEQ ID NO: 4327531 - DNA, 25 bp, Homo sapien
aaggaacaaccagtaccagcaactg

SEQ ID NO: 4327532 - DNA, 25 bp, Homo sapien
catgccaaattgtaaagaccatcga

SEQ ID NO: 4327533 - DNA, 25 bp, Homo sapien
tacttgaaggtggagactgtacggt

SEQ ID NO: 4327534 - DNA, 25 bp, Homo sapien
cccttaaataggtacccatgaagag

SEQ ID NO: 4327535 - DNA, 25 bp, Homo sapien
gcataccactggaccttgtctaaaa

SEQ ID NO: 4327536 - DNA, 25 bp, Homo sapien
gaaatgctataagtgaagacctacc

SEQ ID NO: 4327537 - DNA, 25 bp, Homo sapien
gtgacaaagtgaatacccactgggc

SEQ ID NO: 4327538 - DNA, 25 bp, Homo sapien
catatctaaagcttgtcactaagaa

SEQ ID NO: 4327539 - DNA, 25 bp, Homo sapien
aagtttcatatctaaagcttgtcac

SEQ ID NO: 4327540 - DNA, 25 bp, Homo sapien
tacccactgggctaagtttcatatc

SEQ ID NO: 4327541 - DNA, 25 bp, Homo sapien
taagacttcaacctaggtcagtgtg

SEQ ID NO: 4327542 - DNA, 25 bp, Homo sapien
tcatggtgcaaggtaggagttatct

SEQ ID NO: 4327543 - DNA, 25 bp, Homo sapien
taccagttttgctgagaccagattg

SEQ ID NO: 4327544 - DNA, 25 bp, Homo sapien
tgaattatgtccctgtgataccagt

SEQ ID NO: 4327545 - DNA, 25 bp, Homo sapien
gtgagttggagggagatccacaaca

SEQ ID NO: 4327546 - DNA, 25 bp, Homo sapien
tggagggagatccacaacattctct

SEQ ID NO: 4327547 - DNA, 25 bp, Homo sapien
cttcataggctaactgagatattat

SEQ ID NO: 4327548 - DNA, 25 bp, Homo sapien
tcataggctaactgagatattatac

SEQ ID NO: 4327549 - DNA, 25 bp, Homo sapien
ccccactagtggcttcactggaggg

SEQ ID NO: 4327550 - DNA, 25 bp, Homo sapien
agttctgtagatgctgagtgtgtgt

SEQ ID NO: 4327551 - DNA, 25 bp, Homo sapien
tctccctttttcctatgtgtagatt

SEQ ID NO: 4327552 - DNA, 25 bp, Homo sapien
tcatttatttagctggttctccctt

SEQ ID NO: 4327553 - DNA, 25 bp, Homo sapien
gaatgttgaattctcagcacgttct

SEQ ID NO: 4327554 - DNA, 25 bp, Homo sapien
ctcagaatgttgaattctcagcacg

SEQ ID NO: 4327555 - DNA, 25 bp, Homo sapien
ctcagcacgttctacgattattctt

SEQ ID NO: 4327556 - DNA, 25 bp, Homo sapien
gcacgttctacgattattcttgaga

SEQ ID NO: 4327557 - DNA, 25 bp, Homo sapien
caagcatgaccagtgacagggtacc

SEQ ID NO: 4327558 - DNA, 25 bp, Homo sapien
agccgcaagcatgaccagtgacagg

SEQ ID NO: 4327559 - DNA, 25 bp, Homo sapien
agccatagccgcaagcatgaccagt

SEQ ID NO: 4327560 - DNA, 25 bp, Homo sapien
aggcagtgaccccatccaaaacaac

SEQ ID NO: 4327561 - DNA, 25 bp, Homo sapien
tcacttagtgaggaataatctgcta

SEQ ID NO: 4327562 - DNA, 25 bp, Homo sapien
ggaataatctgctacgacttccgat

SEQ ID NO: 4327563 - DNA, 25 bp, Homo sapien
tcaggcgatgtattcctcacttagt

SEQ ID NO: 4327564 - DNA, 25 bp, Homo sapien
gaataatctgctacgacttccgatg

SEQ ID NO: 4327565 - DNA, 25 bp, Homo sapien
cagctcaagggggtgaaaatgaata

SEQ ID NO: 4327566 - DNA, 25 bp, Homo sapien
atgggaatcctttgttgcctctatc

SEQ ID NO: 4327567 - DNA, 25 bp, Homo sapien
aaatgaataacagtagaaacagctt

SEQ ID NO: 4327568 - DNA, 25 bp, Homo sapien
tgggcctcccctggaaccaccagct

SEQ ID NO: 4327569 - DNA, 25 bp, Homo sapien
aggcagcctagtcttcttctcttct

SEQ ID NO: 4327570 - DNA, 25 bp, Homo sapien
ctcttcaggcagcctagtcttcttc

SEQ ID NO: 4327571 - DNA, 25 bp, Homo sapien
ggcagcctagtcttcttctcttctg

SEQ ID NO: 4327572 - DNA, 25 bp, Homo sapien
ttcaggcagcctagtcttcttctct

SEQ ID NO: 4327573 - DNA, 25 bp, Homo sapien
ccaggtataatcagatgctccaggt

SEQ ID NO: 4327574 - DNA, 25 bp, Homo sapien
tccaggtggagtaaagtcatcttct

SEQ ID NO: 4327575 - DNA, 25 bp, Homo sapien
ttaacatgtactgcaaagagcccag

SEQ ID NO: 4327576 - DNA, 25 bp, Homo sapien
gagttgcttgtatgccatgggcagc

SEQ ID NO: 4327577 - DNA, 25 bp, Homo sapien
cttatgacatcattagaggatccgg

SEQ ID NO: 4327578 - DNA, 25 bp, Homo sapien
tcattagaggatccggttccagatt

SEQ ID NO: 4327579 - DNA, 25 bp, Homo sapien
catgattcctaggtgaatacagctc

SEQ ID NO: 4327580 - DNA, 25 bp, Homo sapien
tacagctcaggtcttatgacatcat

SEQ ID NO: 4327581 - DNA, 25 bp, Homo sapien
ccgccttctcttggaatctgtgagt

SEQ ID NO: 4327582 - DNA, 25 bp, Homo sapien
tacctgtgctactcaccgtagggcc

SEQ ID NO: 4327583 - DNA, 25 bp, Homo sapien
taagggcagcccctaggtctcagag

SEQ ID NO: 4327584 - DNA, 25 bp, Homo sapien
caggtgtcagacaactaagggcagc

SEQ ID NO: 4327585 - DNA, 25 bp, Homo sapien
cttggctcgtggttttccccagaca

SEQ ID NO: 4327586 - DNA, 25 bp, Homo sapien
gattgtaatggccttggctcgtggt

SEQ ID NO: 4327587 - DNA, 25 bp, Homo sapien
tgagtcacaggcatggccagaggaa

SEQ ID NO: 4327588 - DNA, 25 bp, Homo sapien
cagcggttgactctaggggattgta

SEQ ID NO: 4327589 - DNA, 25 bp, Homo sapien
gcaggaggacaggttgctttcatta

SEQ ID NO: 4327590 - DNA, 25 bp, Homo sapien
tttgggcagcctgagggattgcatt

SEQ ID NO: 4327591 - DNA, 25 bp, Homo sapien
ttcaggagagatgttttgggcagcc

SEQ ID NO: 4327592 - DNA, 25 bp, Homo sapien
cattagtgatgttggttcaggagag

SEQ ID NO: 4327593 - DNA, 25 bp, Homo sapien
tggttctaagagtcccaaaaggcat

SEQ ID NO: 4327594 - DNA, 25 bp, Homo sapien
taagagtcccaaaaggcatagagag

SEQ ID NO: 4327595 - DNA, 25 bp, Homo sapien
gtcccaaaaggcatagagagggcag

SEQ ID NO: 4327596 - DNA, 25 bp, Homo sapien
tctaagagtcccaaaaggcatagag

SEQ ID NO: 4327597 - DNA, 25 bp, Homo sapien
agaaggaggtggaaagaggtcttcg

SEQ ID NO: 4327598 - DNA, 25 bp, Homo sapien
gctaactgtaaggagcactgggcat

SEQ ID NO: 4327599 - DNA, 25 bp, Homo sapien
caattactcagtttgctgagagcaa

SEQ ID NO: 4327600 - DNA, 25 bp, Homo sapien
tcttatccttttgttaacagctaac

SEQ ID NO: 4327601 - DNA, 25 bp, Homo sapien
cccaaactgagatgtcaccactggg

SEQ ID NO: 4327602 - DNA, 25 bp, Homo sapien
ttctggataggggagccccaagctg

SEQ ID NO: 4327603 - DNA, 25 bp, Homo sapien
cattttctggataggggagccccaa

SEQ ID NO: 4327604 - DNA, 25 bp, Homo sapien
caagctggggacaataacagagatg

SEQ ID NO: 4327605 - DNA, 25 bp, Homo sapien
gaacaaatgaagtgggacgtttgag

SEQ ID NO: 4327606 - DNA, 25 bp, Homo sapien
gtcatggtcacaaaactgagttctc

SEQ ID NO: 4327607 - DNA, 25 bp, Homo sapien
gggaccctggtttcattactgtcat

SEQ ID NO: 4327608 - DNA, 25 bp, Homo sapien
tttattacccaagaatcaggaatgg

SEQ ID NO: 4327609 - DNA, 25 bp, Homo sapien
gtccaccacactgcactggcagtgg

SEQ ID NO: 4327610 - DNA, 25 bp, Homo sapien
gtttccagctgaacatcccacgaac

SEQ ID NO: 4327611 - DNA, 25 bp, Homo sapien
gaacatcccacgaaccacagccata

SEQ ID NO: 4327612 - DNA, 25 bp, Homo sapien
tggtttccagctgaacatcccacga

SEQ ID NO: 4327613 - DNA, 25 bp, Homo sapien
tacagggcatcgtagtcgccattcc

SEQ ID NO: 4327614 - DNA, 25 bp, Homo sapien
gggcatcgtagtcgccattccctct

SEQ ID NO: 4327615 - DNA, 25 bp, Homo sapien
gaggatacagggcatcgtagtcgcc

SEQ ID NO: 4327616 - DNA, 25 bp, Homo sapien
gacatgggggaagacgtaggtgcag

SEQ ID NO: 4327617 - DNA, 25 bp, Homo sapien
ttggcttttgacactagcacacgag

SEQ ID NO: 4327618 - DNA, 25 bp, Homo sapien
ttttgacactagcacacgagagctt

SEQ ID NO: 4327619 - DNA, 25 bp, Homo sapien
gacactagcacacgagagcttcttg

SEQ ID NO: 4327620 - DNA, 25 bp, Homo sapien
caggaggacggtctgccttggcttt

SEQ ID NO: 4327621 - DNA, 25 bp, Homo sapien
gaacactgagtactccccgggttga

SEQ ID NO: 4327622 - DNA, 25 bp, Homo sapien
ttgatcttcttatccataacggagt

SEQ ID NO: 4327623 - DNA, 25 bp, Homo sapien
tatccataacggagtctaaggaaca

SEQ ID NO: 4327624 - DNA, 25 bp, Homo sapien
taacggagtctaaggaacactgagt

SEQ ID NO: 4327625 - DNA, 25 bp, Homo sapien
gaagggggattaggatgagaaggag

SEQ ID NO: 4327626 - DNA, 25 bp, Homo sapien
aagggggattaggatgagaaggagg

SEQ ID NO: 4327627 - DNA, 25 bp, Homo sapien
agatggaaagcagcttagatctctg

SEQ ID NO: 4327628 - DNA, 25 bp, Homo sapien
aagatggaaagcagcttagatctct

SEQ ID NO: 4327629 - DNA, 25 bp, Homo sapien
tctctttaggcagtttggagaagca

SEQ ID NO: 4327630 - DNA, 25 bp, Homo sapien
caggcaagggcgttttaatacacct

SEQ ID NO: 4327631 - DNA, 25 bp, Homo sapien
gaaggtctacaaggactagccaggc

SEQ ID NO: 4327632 - DNA, 25 bp, Homo sapien
taacctgggcacctttaacatacaa

SEQ ID NO: 4327633 - DNA, 25 bp, Homo sapien
aacaggtgactgtgataaactttgg

SEQ ID NO: 4327634 - DNA, 25 bp, Homo sapien
aaactttggagtgttcatgagaagc

SEQ ID NO: 4327635 - DNA, 25 bp, Homo sapien
tgccagctagggtaacaggtgactg

SEQ ID NO: 4327636 - DNA, 25 bp, Homo sapien
ctgtgccagctagggtaacaggtga

SEQ ID NO: 4327637 - DNA, 25 bp, Homo sapien
taatgagttgccaaagactccctcc

SEQ ID NO: 4327638 - DNA, 25 bp, Homo sapien
ccagataagggtctctttgaagcca

SEQ ID NO: 4327639 - DNA, 25 bp, Homo sapien
tcagtgccaataacgcaagagcttt

SEQ ID NO: 4327640 - DNA, 25 bp, Homo sapien
aagtagagtctctcgtgctgccaaa

SEQ ID NO: 4327641 - DNA, 25 bp, Homo sapien
tagcattaactccattctgttccta

SEQ ID NO: 4327642 - DNA, 25 bp, Homo sapien
taagaaatcgtctggggtcaggtgc

SEQ ID NO: 4327643 - DNA, 25 bp, Homo sapien
tctgacactatggagaatcataaaa

SEQ ID NO: 4327644 - DNA, 25 bp, Homo sapien
tgagcacctctgacaatcatggaac

SEQ ID NO: 4327645 - DNA, 25 bp, Homo sapien
tcagtgttcaaatacatggcagctc

SEQ ID NO: 4327646 - DNA, 25 bp, Homo sapien
ttcttttggacattaactaattcag

SEQ ID NO: 4327647 - DNA, 25 bp, Homo sapien
tttcttttggacattaactaattca

SEQ ID NO: 4327648 - DNA, 25 bp, Homo sapien
tatccaaggccaacatcaccaagct

SEQ ID NO: 4327649 - DNA, 25 bp, Homo sapien
cccagtgattgtattgtctaaagcc

SEQ ID NO: 4327650 - DNA, 25 bp, Homo sapien
cagatgatatgttgtctaactccac

SEQ ID NO: 4327651 - DNA, 25 bp, Homo sapien
cattgcagagctatatccaaggcca

SEQ ID NO: 4327652 - DNA, 25 bp, Homo sapien
tttctggaattgcactttatggatc

SEQ ID NO: 4327653 - DNA, 25 bp, Homo sapien
gagatacttctgagcaaaccacaga

SEQ ID NO: 4327654 - DNA, 25 bp, Homo sapien
ctgttgggctgctctgagagatact

SEQ ID NO: 4327655 - DNA, 25 bp, Homo sapien
cactttatggatcagctgggatgaa

SEQ ID NO: 4327656 - DNA, 25 bp, Homo sapien
gagatagttccccaagcctcagaaa

SEQ ID NO: 4327657 - DNA, 25 bp, Homo sapien
cccaagggaggatataggatagcaa

SEQ ID NO: 4327658 - DNA, 25 bp, Homo sapien
gaataggagtctgagcgcttcagcc

SEQ ID NO: 4327659 - DNA, 25 bp, Homo sapien
gaataaaacctaggctgttccagct

SEQ ID NO: 4327660 - DNA, 25 bp, Homo sapien
gctgctaggcgagttggtgttttat

SEQ ID NO: 4327661 - DNA, 25 bp, Homo sapien
gctacattgttctcggatgctggct

SEQ ID NO: 4327662 - DNA, 25 bp, Homo sapien
gatgctggctgctaggcgagttggt

SEQ ID NO: 4327663 - DNA, 25 bp, Homo sapien
ggttggcagagctacattgttctcg

SEQ ID NO: 4327664 - DNA, 25 bp, Homo sapien
cagacgaagcagttgtgagggaaat

SEQ ID NO: 4327665 - DNA, 25 bp, Homo sapien
taagctatctggtgaagccatgagt

SEQ ID NO: 4327666 - DNA, 25 bp, Homo sapien
atgagtgcagacgaagcagttgtga

SEQ ID NO: 4327667 - DNA, 25 bp, Homo sapien
taattttgacgaagctggtctctac

SEQ ID NO: 4327668 - DNA, 25 bp, Homo sapien
ctgatgttctggctcttataatgat

SEQ ID NO: 4327669 - DNA, 25 bp, Homo sapien
tctggctcttataatgatgtttccc

SEQ ID NO: 4327670 - DNA, 25 bp, Homo sapien
gctcagagtccaaagagtaacccac

SEQ ID NO: 4327671 - DNA, 25 bp, Homo sapien
acttctaggaggctcagagtccaaa

SEQ ID NO: 4327672 - DNA, 25 bp, Homo sapien
acctccaactggcataataattaca

SEQ ID NO: 4327673 - DNA, 25 bp, Homo sapien
tgatacatcgcattttcatgcacaa

SEQ ID NO: 4327674 - DNA, 25 bp, Homo sapien
taattacagatgatacatcgcattt

SEQ ID NO: 4327675 - DNA, 25 bp, Homo sapien
ctccaactggcataataattacaga

SEQ ID NO: 4327676 - DNA, 25 bp, Homo sapien
tagattaagtgcacaaggaaacaca

SEQ ID NO: 4327677 - DNA, 25 bp, Homo sapien
gaacagataggtatggagacaatcc

SEQ ID NO: 4327678 - DNA, 25 bp, Homo sapien
tgttgtgctcattgatagctgggac

SEQ ID NO: 4327679 - DNA, 25 bp, Homo sapien
aagaatgctaaactgtggagacact

SEQ ID NO: 4327680 - DNA, 25 bp, Homo sapien
taaacaatctccaggagatcctgat

SEQ ID NO: 4327681 - DNA, 25 bp, Homo sapien
tggctgcttcccattacagattact

SEQ ID NO: 4327682 - DNA, 25 bp, Homo sapien
gagaagtcgaagctcttgtaaacaa

SEQ ID NO: 4327683 - DNA, 25 bp, Homo sapien
cagccttgtcaggagatttggagga

SEQ ID NO: 4327684 - DNA, 25 bp, Homo sapien
taataagaggctttgtctataccac

SEQ ID NO: 4327685 - DNA, 25 bp, Homo sapien
tatcgccttatatccatgtgtcctg

SEQ ID NO: 4327686 - DNA, 25 bp, Homo sapien
tacaccttaggtctgtgctggccag

SEQ ID NO: 4327687 - DNA, 25 bp, Homo sapien
ggtaatgccccagatgaaataagag

SEQ ID NO: 4327688 - DNA, 25 bp, Homo sapien
ggtcagtatcactggtggccctttc

SEQ ID NO: 4327689 - DNA, 25 bp, Homo sapien
taatagaatagctacccaggaatgt

SEQ ID NO: 4327690 - DNA, 25 bp, Homo sapien
gctacccaggaatgtttaattagtc

SEQ ID NO: 4327691 - DNA, 25 bp, Homo sapien
tcatcactcactaccaatttcagga

SEQ ID NO: 4327692 - DNA, 25 bp, Homo sapien
ctgttgatattcctaaatcgtgcat

SEQ ID NO: 4327693 - DNA, 25 bp, Homo sapien
cacaactagggttctcttgaatggt

SEQ ID NO: 4327694 - DNA, 25 bp, Homo sapien
ttgtctaaataacactccccactac

SEQ ID NO: 4327695 - DNA, 25 bp, Homo sapien
gcctaagtcacaactagggttctct

SEQ ID NO: 4327696 - DNA, 25 bp, Homo sapien
cattatgaagcctaagtcacaacta

SEQ ID NO: 4327697 - DNA, 25 bp, Homo sapien
gatccagtagagagtagctccatta

SEQ ID NO: 4327698 - DNA, 25 bp, Homo sapien
atccagtagagagtagctccattac

SEQ ID NO: 4327699 - DNA, 25 bp, Homo sapien
aagtgatccagtagagagtagctcc

SEQ ID NO: 4327700 - DNA, 25 bp, Homo sapien
gtgatccagtagagagtagctccat

SEQ ID NO: 4327701 - DNA, 25 bp, Homo sapien
cattgtttatatcgatcttatggaa

SEQ ID NO: 4327702 - DNA, 25 bp, Homo sapien
catcattgtttatatcgatcttatg

SEQ ID NO: 4327703 - DNA, 25 bp, Homo sapien
gtttatatcgatcttatggaacacc

SEQ ID NO: 4327704 - DNA, 25 bp, Homo sapien
tatcgatcttatggaacaccaagtt

SEQ ID NO: 4327705 - DNA, 25 bp, Homo sapien
ttcttgcatgattagatttacagca

SEQ ID NO: 4327706 - DNA, 25 bp, Homo sapien
gattagatttacagcagcaataaac

SEQ ID NO: 4327707 - DNA, 25 bp, Homo sapien
tgtccagtagttcatttttgtcaat

SEQ ID NO: 4327708 - DNA, 25 bp, Homo sapien
tgtcaatagaaccatttccatcagc

SEQ ID NO: 4327709 - DNA, 25 bp, Homo sapien
ttcacccacactctcggccaggaat

SEQ ID NO: 4327710 - DNA, 25 bp, Homo sapien
atcttcacccacactctcggccagg

SEQ ID NO: 4327711 - DNA, 25 bp, Homo sapien
tcttcacccacactctcggccagga

SEQ ID NO: 4327712 - DNA, 25 bp, Homo sapien
taatcttcacccacactctcggcca

SEQ ID NO: 4327713 - DNA, 25 bp, Homo sapien
ccatattaccaggtttaaaagcagc

SEQ ID NO: 4327714 - DNA, 25 bp, Homo sapien
aggggacccttcaccatattaccag

SEQ ID NO: 4327715 - DNA, 25 bp, Homo sapien
taggggacccttcaccatattacca

SEQ ID NO: 4327716 - DNA, 25 bp, Homo sapien
tcaccatattaccaggtttaaaagc

SEQ ID NO: 4327717 - DNA, 25 bp, Homo sapien
gctccttgaagatcgccttttgctt

SEQ ID NO: 4327718 - DNA, 25 bp, Homo sapien
atagtatctggaacacacttccagg

SEQ ID NO: 4327719 - DNA, 25 bp, Homo sapien
gaagatcgccttttgcttgcattga

SEQ ID NO: 4327720 - DNA, 25 bp, Homo sapien
ttaataacaaaagcggaatctgtca

SEQ ID NO: 4327721 - DNA, 25 bp, Homo sapien
ataaatgttctgtaccacacatggg

SEQ ID NO: 4327722 - DNA, 25 bp, Homo sapien
gattcagaccttgcagacccaaaag

SEQ ID NO: 4327723 - DNA, 25 bp, Homo sapien
ccagctatagatttgccattcccca

SEQ ID NO: 4327724 - DNA, 25 bp, Homo sapien
attcatgtagtgtttgcaggccgga

SEQ ID NO: 4327725 - DNA, 25 bp, Homo sapien
cttgactcacagtctacagcttttc

SEQ ID NO: 4327726 - DNA, 25 bp, Homo sapien
tgactcacagtctacagcttttcct

SEQ ID NO: 4327727 - DNA, 25 bp, Homo sapien
tactcctcactaaaactgaaggcta

SEQ ID NO: 4327728 - DNA, 25 bp, Homo sapien
ttttgctggatttagtcccttactc

SEQ ID NO: 4327729 - DNA, 25 bp, Homo sapien
taacgagaggttatctcattagctc

SEQ ID NO: 4327730 - DNA, 25 bp, Homo sapien
catttcccatgttccaggcttttgc

SEQ ID NO: 4327731 - DNA, 25 bp, Homo sapien
tacgaggaactggtaaaaacatgcc

SEQ ID NO: 4327732 - DNA, 25 bp, Homo sapien
catgcctcttgagaagagtacctaa

SEQ ID NO: 4327733 - DNA, 25 bp, Homo sapien
tatagtggagaaagggcataatgtc

SEQ ID NO: 4327734 - DNA, 25 bp, Homo sapien
tcagtagctcacatgaaaattagag

SEQ ID NO: 4327735 - DNA, 25 bp, Homo sapien
cggtctccatttctagagtacacaa

SEQ ID NO: 4327736 - DNA, 25 bp, Homo sapien
ggaggtgattctgtagtccttcaca

SEQ ID NO: 4327737 - DNA, 25 bp, Homo sapien
aaagggagtctatgtcttgcatcta

SEQ ID NO: 4327738 - DNA, 25 bp, Homo sapien
ctaaagggagtctatgtcttgcatc

SEQ ID NO: 4327739 - DNA, 25 bp, Homo sapien
gggagtctatgtcttgcatctatag

SEQ ID NO: 4327740 - DNA, 25 bp, Homo sapien
ttttctaaagggagtctatgtcttg

SEQ ID NO: 4327741 - DNA, 25 bp, Homo sapien
tctaaataagtgtcagtctgctcca

SEQ ID NO: 4327742 - DNA, 25 bp, Homo sapien
cttctaaataagtgtcagtctgctc

SEQ ID NO: 4327743 - DNA, 25 bp, Homo sapien
ataagtgtcagtctgctccaggtca

SEQ ID NO: 4327744 - DNA, 25 bp, Homo sapien
taaataagtgtcagtctgctccagg

SEQ ID NO: 4327745 - DNA, 25 bp, Homo sapien
tcatagataatggactgcaatttcc

SEQ ID NO: 4327746 - DNA, 25 bp, Homo sapien
caatagtgccagttttatacgaaga

SEQ ID NO: 4327747 - DNA, 25 bp, Homo sapien
tatttgaatcatagataatggactg

SEQ ID NO: 4327748 - DNA, 25 bp, Homo sapien
tcttcagcttatcctcagagatttt

SEQ ID NO: 4327749 - DNA, 25 bp, Homo sapien
gcattcgctgacctcacgagtttcc

SEQ ID NO: 4327750 - DNA, 25 bp, Homo sapien
cactacgttgactatgtgcagaccc

SEQ ID NO: 4327751 - DNA, 25 bp, Homo sapien
tcctttagcattcgctgacctcacg

SEQ ID NO: 4327752 - DNA, 25 bp, Homo sapien
cagaccctccactacgttgactatg

SEQ ID NO: 4327753 - DNA, 25 bp, Homo sapien
gaaaggctcagaggtagaccagtgt

SEQ ID NO: 4327754 - DNA, 25 bp, Homo sapien
cagtgtaagtaagttggaataactc

SEQ ID NO: 4327755 - DNA, 25 bp, Homo sapien
tcaagaggcccactgtgtattggga

SEQ ID NO: 4327756 - DNA, 25 bp, Homo sapien
ttgggagagtcgataggagtatttt

SEQ ID NO: 4327757 - DNA, 25 bp, Homo sapien
agagctacaggaagatccaggagcc

SEQ ID NO: 4327758 - DNA, 25 bp, Homo sapien
gagagctacaggaagatccaggagc

SEQ ID NO: 4327759 - DNA, 25 bp, Homo sapien
cacagactttcggttgggacaatga

SEQ ID NO: 4327760 - DNA, 25 bp, Homo sapien
aatgaattcctggtgggccaatacg

SEQ ID NO: 4327761 - DNA, 25 bp, Homo sapien
ctggtgggccaatacgccaacccat

SEQ ID NO: 4327762 - DNA, 25 bp, Homo sapien
gactgccacagactttcggttggga

SEQ ID NO: 4327763 - DNA, 25 bp, Homo sapien
ctggttgaaacacattttcagcttt

SEQ ID NO: 4327764 - DNA, 25 bp, Homo sapien
tttgttcatctgctctgggcactgc

SEQ ID NO: 4327765 - DNA, 25 bp, Homo sapien
gctttttgttcatctgctctgggca

SEQ ID NO: 4327766 - DNA, 25 bp, Homo sapien
ttcagctttttgttcatctgctctg

SEQ ID NO: 4327767 - DNA, 25 bp, Homo sapien
tccaattctgatggtagctgatgct

SEQ ID NO: 4327768 - DNA, 25 bp, Homo sapien
ttaatgcaggttcttccaattctga

SEQ ID NO: 4327769 - DNA, 25 bp, Homo sapien
ctgatggtagctgatgctcaggaaa

SEQ ID NO: 4327770 - DNA, 25 bp, Homo sapien
ctcacaacttaatgcaggttcttcc

SEQ ID NO: 4327771 - DNA, 25 bp, Homo sapien
cacatcttccatcggcacattgagc

SEQ ID NO: 4327772 - DNA, 25 bp, Homo sapien
tctcactgtttccttgacaggtgtg

SEQ ID NO: 4327773 - DNA, 25 bp, Homo sapien
tgtgctttgagaagacgctggcgaa

SEQ ID NO: 4327774 - DNA, 25 bp, Homo sapien
gctggcgaagaagcaactttacaac

SEQ ID NO: 4327775 - DNA, 25 bp, Homo sapien
agtgaagtgatgaggtttgagtgct

SEQ ID NO: 4327776 - DNA, 25 bp, Homo sapien
tagtaggggctgaaaaggctttgga

SEQ ID NO: 4327777 - DNA, 25 bp, Homo sapien
aggtttgagtgctggattgactcac

SEQ ID NO: 4327778 - DNA, 25 bp, Homo sapien
ttgagtgctggattgactcactacc

SEQ ID NO: 4327779 - DNA, 25 bp, Homo sapien
cttttccagctaggtaatgaagagc

SEQ ID NO: 4327780 - DNA, 25 bp, Homo sapien
ccagctaggtaatgaagagcttctt

SEQ ID NO: 4327781 - DNA, 25 bp, Homo sapien
tttcattgctagaacatcattgcac

SEQ ID NO: 4327782 - DNA, 25 bp, Homo sapien
agagcttcttttcattgctagaaca

SEQ ID NO: 4327783 - DNA, 25 bp, Homo sapien
ttcttgtttcaatgaaacatcagtg

SEQ ID NO: 4327784 - DNA, 25 bp, Homo sapien
catcagtgttgcttttatctgaaac

SEQ ID NO: 4327785 - DNA, 25 bp, Homo sapien
ttttcttgtttcaatgaaacatcag

SEQ ID NO: 4327786 - DNA, 25 bp, Homo sapien
gaaacatcagtgttgcttttatctg

SEQ ID NO: 4327787 - DNA, 25 bp, Homo sapien
aggaagcttagggtacctctggttg

SEQ ID NO: 4327788 - DNA, 25 bp, Homo sapien
tgagcctctatcgttttgaggaagc

SEQ ID NO: 4327789 - DNA, 25 bp, Homo sapien
tctatcgttttgaggaagcttaggg

SEQ ID NO: 4327790 - DNA, 25 bp, Homo sapien
accagcaacaaccattgagcctcta

SEQ ID NO: 4327791 - DNA, 25 bp, Homo sapien
atcatgtagtactgatgccaaacac

SEQ ID NO: 4327792 - DNA, 25 bp, Homo sapien
cagtctcattgttatgattcgctat

SEQ ID NO: 4327793 - DNA, 25 bp, Homo sapien
tgttttggccaccataaaacataaa

SEQ ID NO: 4327794 - DNA, 25 bp, Homo sapien
gacacggtagcaactcatcagctca

SEQ ID NO: 4327795 - DNA, 25 bp, Homo sapien
catgaaggccctggtaatgatctta

SEQ ID NO: 4327796 - DNA, 25 bp, Homo sapien
caaagagctgaccaggtacaactgg

SEQ ID NO: 4327797 - DNA, 25 bp, Homo sapien
gatcttagggattcagagtgcactg

SEQ ID NO: 4327798 - DNA, 25 bp, Homo sapien
gtacaactggtaaatgacttggctc

SEQ ID NO: 4327799 - DNA, 25 bp, Homo sapien
gacaccagaggatacatgtttcata

SEQ ID NO: 4327800 - DNA, 25 bp, Homo sapien
ccagaggatacatgtttcataataa

SEQ ID NO: 4327801 - DNA, 25 bp, Homo sapien
caccagaggatacatgtttcataat

SEQ ID NO: 4327802 - DNA, 25 bp, Homo sapien
ctagacaccagaggatacatgtttc

SEQ ID NO: 4327803 - DNA, 25 bp, Homo sapien
gctgtttacttctttgataggatgt

SEQ ID NO: 4327804 - DNA, 25 bp, Homo sapien
ttctttgataggatgtaagattatc

SEQ ID NO: 4327805 - DNA, 25 bp, Homo sapien
ctttgataggatgtaagattatcta

SEQ ID NO: 4327806 - DNA, 25 bp, Homo sapien
tacttctttgataggatgtaagatt

SEQ ID NO: 4327807 - DNA, 25 bp, Homo sapien
tcagaatggagttattgtcccgaaa

SEQ ID NO: 4327808 - DNA, 25 bp, Homo sapien
agaatggagttattgtcccgaaagc

SEQ ID NO: 4327809 - DNA, 25 bp, Homo sapien
cagaatggagttattgtcccgaaag

SEQ ID NO: 4327810 - DNA, 25 bp, Homo sapien
ctgaatcactcgtgttctcatcttc

SEQ ID NO: 4327811 - DNA, 25 bp, Homo sapien
atcactcgtgttctcatcttcagtc

SEQ ID NO: 4327812 - DNA, 25 bp, Homo sapien
gaatcactcgtgttctcatcttcag

SEQ ID NO: 4327813 - DNA, 25 bp, Homo sapien
caggattatatctgaatcactcgtg

SEQ ID NO: 4327814 - DNA, 25 bp, Homo sapien
ttcctctacaaagttcagactctgc

SEQ ID NO: 4327815 - DNA, 25 bp, Homo sapien
attcctctacaaagttcagactctg

SEQ ID NO: 4327816 - DNA, 25 bp, Homo sapien
cctctacaaagttcagactctgctt

SEQ ID NO: 4327817 - DNA, 25 bp, Homo sapien
tcctctacaaagttcagactctgct

SEQ ID NO: 4327818 - DNA, 25 bp, Homo sapien
gctctccagacagtggtaatattag

SEQ ID NO: 4327819 - DNA, 25 bp, Homo sapien
tcttcaggcacccttcagttggttg

SEQ ID NO: 4327820 - DNA, 25 bp, Homo sapien
tcaggcacccttcagttggttgagc

SEQ ID NO: 4327821 - DNA, 25 bp, Homo sapien
ttcaggcacccttcagttggttgag

SEQ ID NO: 4327822 - DNA, 25 bp, Homo sapien
tacggctcgctgaaagctcaaagga

SEQ ID NO: 4327823 - DNA, 25 bp, Homo sapien
cattttctggcagagctactggaat

SEQ ID NO: 4327824 - DNA, 25 bp, Homo sapien
caagtcatcgcccaaaagcctgatt

SEQ ID NO: 4327825 - DNA, 25 bp, Homo sapien
aagagattcatgcttcaagtcatcg

SEQ ID NO: 4327826 - DNA, 25 bp, Homo sapien
tttcgtccactggtataaattgagg

SEQ ID NO: 4327827 - DNA, 25 bp, Homo sapien
tggaagtgacagtgatttcgtccac

SEQ ID NO: 4327828 - DNA, 25 bp, Homo sapien
tgatttcgtccactggtataaattg

SEQ ID NO: 4327829 - DNA, 25 bp, Homo sapien
tgtgctgaagttaggcaggtggaag

SEQ ID NO: 4327830 - DNA, 25 bp, Homo sapien
cagtgaagcaacaccggttccatgc

SEQ ID NO: 4327831 - DNA, 25 bp, Homo sapien
tcctcgtggtttcctgtgccctaaa

SEQ ID NO: 4327832 - DNA, 25 bp, Homo sapien
accaagagcaaatgaacggccagtt

SEQ ID NO: 4327833 - DNA, 25 bp, Homo sapien
tagaaatgacctatagacatgatcc

SEQ ID NO: 4327834 - DNA, 25 bp, Homo sapien
ttttttgatggtgatattgtgctca

SEQ ID NO: 4327835 - DNA, 25 bp, Homo sapien
tatgaccgactctctaagttgcttc

SEQ ID NO: 4327836 - DNA, 25 bp, Homo sapien
tttgatactttatgaccgactctct

SEQ ID NO: 4327837 - DNA, 25 bp, Homo sapien
tcattttttgatggtgatattgtgc

SEQ ID NO: 4327838 - DNA, 25 bp, Homo sapien
agtgggatggaaggtagacattcta

SEQ ID NO: 4327839 - DNA, 25 bp, Homo sapien
gtgggatggaaggtagacattctac

SEQ ID NO: 4327840 - DNA, 25 bp, Homo sapien
caaagcatatggtttggaaggtttg

SEQ ID NO: 4327841 - DNA, 25 bp, Homo sapien
tcaaagcatatggtttggaaggttt

SEQ ID NO: 4327842 - DNA, 25 bp, Homo sapien
catatggtttggaaggtttgaggcc

SEQ ID NO: 4327843 - DNA, 25 bp, Homo sapien
aagcatatggtttggaaggtttgag

SEQ ID NO: 4327844 - DNA, 25 bp, Homo sapien
ggaacacgcagtagtgtcgtaagac

SEQ ID NO: 4327845 - DNA, 25 bp, Homo sapien
catagctttgattcagggcatggag

SEQ ID NO: 4327846 - DNA, 25 bp, Homo sapien
ggaactgagtcagccaaactgctga

SEQ ID NO: 4327847 - DNA, 25 bp, Homo sapien
tgttcacttcggtatcaaggcttga

SEQ ID NO: 4327848 - DNA, 25 bp, Homo sapien
tctattattgattaggggtagggag

SEQ ID NO: 4327849 - DNA, 25 bp, Homo sapien
ttctattattgattaggggtaggga

SEQ ID NO: 4327850 - DNA, 25 bp, Homo sapien
ctattattgattaggggtagggagg

SEQ ID NO: 4327851 - DNA, 25 bp, Homo sapien
tgggattattagcacaaatccaaat

SEQ ID NO: 4327852 - DNA, 25 bp, Homo sapien
tttccaagcggttgggattattagc

SEQ ID NO: 4327853 - DNA, 25 bp, Homo sapien
tcctgataattagtagaggaaggca

SEQ ID NO: 4327854 - DNA, 25 bp, Homo sapien
ggcaagactctccatttaagacaaa

SEQ ID NO: 4327855 - DNA, 25 bp, Homo sapien
gatgaatgggatacccatggcttgt

SEQ ID NO: 4327856 - DNA, 25 bp, Homo sapien
gaatgggatacccatggcttgtctt

SEQ ID NO: 4327857 - DNA, 25 bp, Homo sapien
tgtatgatgaatgggatacccatgg

SEQ ID NO: 4327858 - DNA, 25 bp, Homo sapien
acattgtatgatgaatgggataccc

SEQ ID NO: 4327859 - DNA, 25 bp, Homo sapien
tggtatccaaattcattgcaaaaca

SEQ ID NO: 4327860 - DNA, 25 bp, Homo sapien
catcgatgtcattctggtatccaaa

SEQ ID NO: 4327861 - DNA, 25 bp, Homo sapien
ggtttctccacatcgatgtcattct

SEQ ID NO: 4327862 - DNA, 25 bp, Homo sapien
gaatttaaaggtttctccacatcga

SEQ ID NO: 4327863 - DNA, 25 bp, Homo sapien
gggcattttggctcccagttgggaa

SEQ ID NO: 4327864 - DNA, 25 bp, Homo sapien
catggactccctggtatactctgag

SEQ ID NO: 4327865 - DNA, 25 bp, Homo sapien
tatttgtagacttaggaattcatgg

SEQ ID NO: 4327866 - DNA, 25 bp, Homo sapien
gtatactctgagattccctagggca

SEQ ID NO: 4327867 - DNA, 25 bp, Homo sapien
taatatttgcttcatcactcgacgt

SEQ ID NO: 4327868 - DNA, 25 bp, Homo sapien
tcattttcctggtagtccctttctg

SEQ ID NO: 4327869 - DNA, 25 bp, Homo sapien
tttcctggtagtccctttctgagat

SEQ ID NO: 4327870 - DNA, 25 bp, Homo sapien
actcgacgtgtatccttagcaaagc

SEQ ID NO: 4327871 - DNA, 25 bp, Homo sapien
ctttctgaagacttaattctttctt

SEQ ID NO: 4327872 - DNA, 25 bp, Homo sapien
ctctttctgaagacttaattctttc

SEQ ID NO: 4327873 - DNA, 25 bp, Homo sapien
tctttctgaagacttaattctttct

SEQ ID NO: 4327874 - DNA, 25 bp, Homo sapien
caagtactgtcccatgacttttagt

SEQ ID NO: 4327875 - DNA, 25 bp, Homo sapien
gatgccggtgtccttacagtactgg

SEQ ID NO: 4327876 - DNA, 25 bp, Homo sapien
attaacaattccaaccacgcctgcg

SEQ ID NO: 4327877 - DNA, 25 bp, Homo sapien
ttatgggatggttccatgacctcca

SEQ ID NO: 4327878 - DNA, 25 bp, Homo sapien
cggttttctacgttcactccataga

SEQ ID NO: 4327879 - DNA, 25 bp, Homo sapien
gatcaaacggttattactgtaaatg

SEQ ID NO: 4327880 - DNA, 25 bp, Homo sapien
aacattccagcttggcttcggtttt

SEQ ID NO: 4327881 - DNA, 25 bp, Homo sapien
cagggagagcgttcttgctgttttt

SEQ ID NO: 4327882 - DNA, 25 bp, Homo sapien
tctctttaagattcttttgctttgc

SEQ ID NO: 4327883 - DNA, 25 bp, Homo sapien
tttgctttgcttctacatcttccaa

SEQ ID NO: 4327884 - DNA, 25 bp, Homo sapien
ttctacatcttccaaagctctctgt

SEQ ID NO: 4327885 - DNA, 25 bp, Homo sapien
cttccaaagctctctgtaatacatc

SEQ ID NO: 4327886 - DNA, 25 bp, Homo sapien
ttggttgggagagaacataatgcca

SEQ ID NO: 4327887 - DNA, 25 bp, Homo sapien
ctggagaaatgcattggttgggaga

SEQ ID NO: 4327888 - DNA, 25 bp, Homo sapien
gaaatgcattggttgggagagaaca

SEQ ID NO: 4327889 - DNA, 25 bp, Homo sapien
tgcattggttgggagagaacataat

SEQ ID NO: 4327890 - DNA, 25 bp, Homo sapien
aagaggttctgtcacactggtttac

SEQ ID NO: 4327891 - DNA, 25 bp, Homo sapien
gataaagaggttctgtcacactggt

SEQ ID NO: 4327892 - DNA, 25 bp, Homo sapien
ggttctgtcacactggtttactttg

SEQ ID NO: 4327893 - DNA, 25 bp, Homo sapien
gaagataaagaggttctgtcacact

SEQ ID NO: 4327894 - DNA, 25 bp, Homo sapien
ttcttctgcctttttaacttcatct

SEQ ID NO: 4327895 - DNA, 25 bp, Homo sapien
agaagatgtgacataaagatacttt

SEQ ID NO: 4327896 - DNA, 25 bp, Homo sapien
tcctttaaaagaagatgtgacataa

SEQ ID NO: 4327897 - DNA, 25 bp, Homo sapien
gctcctttaaaagaagatgtgacat

SEQ ID NO: 4327898 - DNA, 25 bp, Homo sapien
ttagttttaactctcttggcttgaa

SEQ ID NO: 4327899 - DNA, 25 bp, Homo sapien
gtgtaggctctgaatgaccacctcg

SEQ ID NO: 4327900 - DNA, 25 bp, Homo sapien
ccatgggttaaaatacagaacagat

SEQ ID NO: 4327901 - DNA, 25 bp, Homo sapien
ctgggtctgtagaggcaatagcaaa

SEQ ID NO: 4327902 - DNA, 25 bp, Homo sapien
aatctgtccacagtattctgctgct

SEQ ID NO: 4327903 - DNA, 25 bp, Homo sapien
tgctgctgttttaaatgctgctcca

SEQ ID NO: 4327904 - DNA, 25 bp, Homo sapien
caatctgtccacagtattctgctgc

SEQ ID NO: 4327905 - DNA, 25 bp, Homo sapien
tccattaagcagaagcttcaagtta

SEQ ID NO: 4327906 - DNA, 25 bp, Homo sapien
gcagaagcttcaagttataaataac

SEQ ID NO: 4327907 - DNA, 25 bp, Homo sapien
acatccaactctggttctccattaa

SEQ ID NO: 4327908 - DNA, 25 bp, Homo sapien
taagcagaagcttcaagttataaat

SEQ ID NO: 4327909 - DNA, 25 bp, Homo sapien
tagatcacatcaaactgctgcatca

SEQ ID NO: 4327910 - DNA, 25 bp, Homo sapien
tcttattaaccatgagggcattgga

SEQ ID NO: 4327911 - DNA, 25 bp, Homo sapien
accatgagggcattggaactacaac

SEQ ID NO: 4327912 - DNA, 25 bp, Homo sapien
aaattatagataattccattgcaaa

SEQ ID NO: 4327913 - DNA, 25 bp, Homo sapien
tgaggccattaatctccagtaccag

SEQ ID NO: 4327914 - DNA, 25 bp, Homo sapien
aactccatatgcatctccaggtctg

SEQ ID NO: 4327915 - DNA, 25 bp, Homo sapien
taaaaccctcattgggcactcgagg

SEQ ID NO: 4327916 - DNA, 25 bp, Homo sapien
gcttttccggctgcaagttgtactc

SEQ ID NO: 4327917 - DNA, 25 bp, Homo sapien
ttcttcacagaatgtctgagaaaaa

SEQ ID NO: 4327918 - DNA, 25 bp, Homo sapien
tatgaacttcaaggttgacagccgt

SEQ ID NO: 4327919 - DNA, 25 bp, Homo sapien
gaccattgccgtattgccctatgaa

SEQ ID NO: 4327920 - DNA, 25 bp, Homo sapien
tccaaagtaaatgatgtctgaagct

SEQ ID NO: 4327921 - DNA, 25 bp, Homo sapien
gacagccgttttttggatcgtccaa

SEQ ID NO: 4327922 - DNA, 25 bp, Homo sapien
gccacatccatcatccaggaaacac

SEQ ID NO: 4327923 - DNA, 25 bp, Homo sapien
catccatcatccaggaaacacaaca

SEQ ID NO: 4327924 - DNA, 25 bp, Homo sapien
cacatccatcatccaggaaacacaa

SEQ ID NO: 4327925 - DNA, 25 bp, Homo sapien
atccatcatccaggaaacacaacat

SEQ ID NO: 4327926 - DNA, 25 bp, Homo sapien
atcccccctgcagtttttcattatc

SEQ ID NO: 4327927 - DNA, 25 bp, Homo sapien
gaatcccccctgcagtttttcatta

SEQ ID NO: 4327928 - DNA, 25 bp, Homo sapien
cccccctgcagtttttcattatcca

SEQ ID NO: 4327929 - DNA, 25 bp, Homo sapien
aatcccccctgcagtttttcattat

SEQ ID NO: 4327930 - DNA, 25 bp, Homo sapien
acatcaagtctttcagcccctgcat

SEQ ID NO: 4327931 - DNA, 25 bp, Homo sapien
agacatcaagtctttcagcccctgc

SEQ ID NO: 4327932 - DNA, 25 bp, Homo sapien
tgaaaagacatcaagtctttcagcc

SEQ ID NO: 4327933 - DNA, 25 bp, Homo sapien
aaagacatcaagtctttcagcccct

SEQ ID NO: 4327934 - DNA, 25 bp, Homo sapien
cattgtccagcaattcagccagtgc

SEQ ID NO: 4327935 - DNA, 25 bp, Homo sapien
tgtccagcaattcagccagtgctcc

SEQ ID NO: 4327936 - DNA, 25 bp, Homo sapien
tgcattgtccagcaattcagccagt

SEQ ID NO: 4327937 - DNA, 25 bp, Homo sapien
cttgcattgtccagcaattcagcca

SEQ ID NO: 4327938 - DNA, 25 bp, Homo sapien
tgggcccgctgaagcgcagggtacc

SEQ ID NO: 4327939 - DNA, 25 bp, Homo sapien
gaagcgcagggtacctgtcgtccat

SEQ ID NO: 4327940 - DNA, 25 bp, Homo sapien
cccgctgaagcgcagggtacctgtc

SEQ ID NO: 4327941 - DNA, 25 bp, Homo sapien
cgctgaagcgcagggtacctgtcgt

SEQ ID NO: 4327942 - DNA, 25 bp, Homo sapien
tgaccggcagccgttcgcctgcgcc

SEQ ID NO: 4327943 - DNA, 25 bp, Homo sapien
gccctcgaacacgacccgcgcaact

SEQ ID NO: 4327944 - DNA, 25 bp, Homo sapien
cgacccgcgcaactcaaggggacaa

SEQ ID NO: 4327945 - DNA, 25 bp, Homo sapien
acacctgaccggcagccgttcgcct

SEQ ID NO: 4327946 - DNA, 25 bp, Homo sapien
tcttcttcagtgcttgtcgcattct

SEQ ID NO: 4327947 - DNA, 25 bp, Homo sapien
cgcattcttaagtcagtcgatttta

SEQ ID NO: 4327948 - DNA, 25 bp, Homo sapien
acgtttttcatcaaaggtgtactgc

SEQ ID NO: 4327949 - DNA, 25 bp, Homo sapien
taattcaaagaaggacagggagctc

SEQ ID NO: 4327950 - DNA, 25 bp, Homo sapien
gctggcccctgttctagaatgtcgg

SEQ ID NO: 4327951 - DNA, 25 bp, Homo sapien
cacacggtggctcttgagtaacaag

SEQ ID NO: 4327952 - DNA, 25 bp, Homo sapien
gagtaacaagctaaccagcccacag

SEQ ID NO: 4327953 - DNA, 25 bp, Homo sapien
tataggagcatggactccacacggt

SEQ ID NO: 4327954 - DNA, 25 bp, Homo sapien
cagagttccggtgttattgagcagc

SEQ ID NO: 4327955 - DNA, 25 bp, Homo sapien
cattgattataacacacagctgagg

SEQ ID NO: 4327956 - DNA, 25 bp, Homo sapien
gctgaggtctcgatcacactagatg

SEQ ID NO: 4327957 - DNA, 25 bp, Homo sapien
caacatggtgctaagtaatgagacc

SEQ ID NO: 4327958 - DNA, 25 bp, Homo sapien
ttaaatataaatggactaaattctg

SEQ ID NO: 4327959 - DNA, 25 bp, Homo sapien
taaatataaatggactaaattctgc

SEQ ID NO: 4327960 - DNA, 25 bp, Homo sapien
tataaatggactaaattctgcaatt

SEQ ID NO: 4327961 - DNA, 25 bp, Homo sapien
aatataaatggactaaattctgcaa

SEQ ID NO: 4327962 - DNA, 25 bp, Homo sapien
aaagtaatcatgacacacacccgga

SEQ ID NO: 4327963 - DNA, 25 bp, Homo sapien
gacacacacccggataggacgggaa

SEQ ID NO: 4327964 - DNA, 25 bp, Homo sapien
ctgaatagaagcagcgggaatcgga

SEQ ID NO: 4327965 - DNA, 25 bp, Homo sapien
aaacagcatgcggattctgcacctg

SEQ ID NO: 4327966 - DNA, 25 bp, Homo sapien
aaaccgacctaagtaagcctgctga

SEQ ID NO: 4327967 - DNA, 25 bp, Homo sapien
cagatcggaagatcccactcgggag

SEQ ID NO: 4327968 - DNA, 25 bp, Homo sapien
gcttaagtctccacagacgagcaga

SEQ ID NO: 4327969 - DNA, 25 bp, Homo sapien
aatgggtaagcacgctagcctgcct

SEQ ID NO: 4327970 - DNA, 25 bp, Homo sapien
tatttgaccacatgccaagattacc

SEQ ID NO: 4327971 - DNA, 25 bp, Homo sapien
cacatgccaagattacccatatgct

SEQ ID NO: 4327972 - DNA, 25 bp, Homo sapien
catgatatttgaccacatgccaaga

SEQ ID NO: 4327973 - DNA, 25 bp, Homo sapien
caagattacccatatgctgtataaa

SEQ ID NO: 4327974 - DNA, 25 bp, Homo sapien
ctagatgtgaatgagaacaagttca

SEQ ID NO: 4327975 - DNA, 25 bp, Homo sapien
ctccttctttcactgttagtcatat

SEQ ID NO: 4327976 - DNA, 25 bp, Homo sapien
gctcagcttcatgatacctccttct

SEQ ID NO: 4327977 - DNA, 25 bp, Homo sapien
tcattgctcagcttcatgatacctc

SEQ ID NO: 4327978 - DNA, 25 bp, Homo sapien
cagcttcatgatacctccttctttc

SEQ ID NO: 4327979 - DNA, 25 bp, Homo sapien
gggacccaattgtggtcaaacagac

SEQ ID NO: 4327980 - DNA, 25 bp, Homo sapien
tgaggacaaagacatagccgtcact

SEQ ID NO: 4327981 - DNA, 25 bp, Homo sapien
ctcctttggtctctgcacaatggaa

SEQ ID NO: 4327982 - DNA, 25 bp, Homo sapien
caatggaagactgtgaagaggagta

SEQ ID NO: 4327983 - DNA, 25 bp, Homo sapien
tgaggattcattcaaattgtctcct

SEQ ID NO: 4327984 - DNA, 25 bp, Homo sapien
gggctgtgtcactagtcaaccatct

SEQ ID NO: 4327985 - DNA, 25 bp, Homo sapien
cactgtggagtcctagtcactatga

SEQ ID NO: 4327986 - DNA, 25 bp, Homo sapien
ccttcgtaataggttacatgatctg

SEQ ID NO: 4327987 - DNA, 25 bp, Homo sapien
ctacttctctactgtcattaatctt

SEQ ID NO: 4327988 - DNA, 25 bp, Homo sapien
acttctctactgtcattaatctttt

SEQ ID NO: 4327989 - DNA, 25 bp, Homo sapien
ctctactgtcattaatcttttcatc

SEQ ID NO: 4327990 - DNA, 25 bp, Homo sapien
ttctctactgtcattaatcttttca

SEQ ID NO: 4327991 - DNA, 25 bp, Homo sapien
gatgggaaaatgcaggcaggtaaca

SEQ ID NO: 4327992 - DNA, 25 bp, Homo sapien
taacatattatcttctatgcctggg

SEQ ID NO: 4327993 - DNA, 25 bp, Homo sapien
tagcacagtcggggcataacatatt

SEQ ID NO: 4327994 - DNA, 25 bp, Homo sapien
tcctgtgagtggtaggcacccaggc

SEQ ID NO: 4327995 - DNA, 25 bp, Homo sapien
cgagagaagtctgccatggaccaca

SEQ ID NO: 4327996 - DNA, 25 bp, Homo sapien
tgccgagagaagtctgccatggacc

SEQ ID NO: 4327997 - DNA, 25 bp, Homo sapien
ccctttgtgtctgccgagagaagtc

SEQ ID NO: 4327998 - DNA, 25 bp, Homo sapien
ccaaccctttgtgtctgccgagaga

SEQ ID NO: 4327999 - DNA, 25 bp, Homo sapien
gccttgcgtttcctcgaacatcgct

SEQ ID NO: 4328000 - DNA, 25 bp, Homo sapien
atgccaacatggctcccggtgctga

SEQ ID NO: 4328001 - DNA, 25 bp, Homo sapien
ggctcccggtgctgaagttatcact

SEQ ID NO: 4328002 - DNA, 25 bp, Homo sapien
ttcaaagccttaggctgaacagctc

SEQ ID NO: 4328003 - DNA, 25 bp, Homo sapien
acaccatcaacacactcattactca

SEQ ID NO: 4328004 - DNA, 25 bp, Homo sapien
cttcacaccatcaacacactcatta

SEQ ID NO: 4328005 - DNA, 25 bp, Homo sapien
caccatcaacacactcattactcac

SEQ ID NO: 4328006 - DNA, 25 bp, Homo sapien
tcacaccatcaacacactcattact

SEQ ID NO: 4328007 - DNA, 25 bp, Homo sapien
gcatgcctatgaagcctcagataaa

SEQ ID NO: 4328008 - DNA, 25 bp, Homo sapien
catgcctatgaagcctcagataaac

SEQ ID NO: 4328009 - DNA, 25 bp, Homo sapien
gaggcaaaatggtcggcaagggaag

SEQ ID NO: 4328010 - DNA, 25 bp, Homo sapien
gcaaagtgtcccgacacaccttatt

SEQ ID NO: 4328011 - DNA, 25 bp, Homo sapien
ccgacacaccttattaatgggaggc

SEQ ID NO: 4328012 - DNA, 25 bp, Homo sapien
atgggaggcaaaatggtcggcaagg

SEQ ID NO: 4328013 - DNA, 25 bp, Homo sapien
ccagagttgtaggagtaactaactg

SEQ ID NO: 4328014 - DNA, 25 bp, Homo sapien
tgtaggagtaactaactgagcaatc

SEQ ID NO: 4328015 - DNA, 25 bp, Homo sapien
gagtaactaactgagcaatccctgt

SEQ ID NO: 4328016 - DNA, 25 bp, Homo sapien
taactaactgagcaatccctgtcct

SEQ ID NO: 4328017 - DNA, 25 bp, Homo sapien
ctggattgtatttcttaggcttctc

SEQ ID NO: 4328018 - DNA, 25 bp, Homo sapien
ggattgtatttcttaggcttctcca

SEQ ID NO: 4328019 - DNA, 25 bp, Homo sapien
tcttgctgctatccaaatttgcatc

SEQ ID NO: 4328020 - DNA, 25 bp, Homo sapien
tgctatccaaatttgcatctgacat

SEQ ID NO: 4328021 - DNA, 25 bp, Homo sapien
tgctgctatccaaatttgcatctga

SEQ ID NO: 4328022 - DNA, 25 bp, Homo sapien
cttcttgctgctatccaaatttgca

SEQ ID NO: 4328023 - DNA, 25 bp, Homo sapien
taagcaaatgtttccttctacttcc

SEQ ID NO: 4328024 - DNA, 25 bp, Homo sapien
acagcaatgttaaggatatggtagt

SEQ ID NO: 4328025 - DNA, 25 bp, Homo sapien
tggtagtttacttctcttaacctgc

SEQ ID NO: 4328026 - DNA, 25 bp, Homo sapien
ctacttcctgttacccagatgagct

SEQ ID NO: 4328027 - DNA, 25 bp, Homo sapien
gccttagctagatcaggccataaac

SEQ ID NO: 4328028 - DNA, 25 bp, Homo sapien
aagtctagaagccttagctagatca

SEQ ID NO: 4328029 - DNA, 25 bp, Homo sapien
cctccggacgattcttaagctcctg

SEQ ID NO: 4328030 - DNA, 25 bp, Homo sapien
cagccctccggacgattcttaagct

SEQ ID NO: 4328031 - DNA, 25 bp, Homo sapien
aacagaacagaaacttgacccatcc

SEQ ID NO: 4328032 - DNA, 25 bp, Homo sapien
gaatcgtaaagccaaggacatttcc

SEQ ID NO: 4328033 - DNA, 25 bp, Homo sapien
tctacaagcagaatcgtaaagccaa

SEQ ID NO: 4328034 - DNA, 25 bp, Homo sapien
gaagcaggggaagtatctacaagca

SEQ ID NO: 4328035 - DNA, 25 bp, Homo sapien
tcccagactcgcaggactataagtt

SEQ ID NO: 4328036 - DNA, 25 bp, Homo sapien
caccaactaataaagaacaaacgag

SEQ ID NO: 4328037 - DNA, 25 bp, Homo sapien
tatggttctctaaatacaacagatg

SEQ ID NO: 4328038 - DNA, 25 bp, Homo sapien
tactcctacttgagttaagaacact

SEQ ID NO: 4328039 - DNA, 25 bp, Homo sapien
tatgagcgggaagcaaccttaaaca

SEQ ID NO: 4328040 - DNA, 25 bp, Homo sapien
ttgcaattggaatgaagcagctcct

SEQ ID NO: 4328041 - DNA, 25 bp, Homo sapien
catggcccataaacaggtgcagagg

SEQ ID NO: 4328042 - DNA, 25 bp, Homo sapien
cacaatgcttagctgaagaactcac

SEQ ID NO: 4328043 - DNA, 25 bp, Homo sapien
aattaccatagatgtggcctttttc

SEQ ID NO: 4328044 - DNA, 25 bp, Homo sapien
catagatgtggcctttttcctgata

SEQ ID NO: 4328045 - DNA, 25 bp, Homo sapien
tagatgtggcctttttcctgatatt

SEQ ID NO: 4328046 - DNA, 25 bp, Homo sapien
ttaattaccatagatgtggcctttt

SEQ ID NO: 4328047 - DNA, 25 bp, Homo sapien
tattcccattggaggctttttatta

SEQ ID NO: 4328048 - DNA, 25 bp, Homo sapien
ctattcccattggaggctttttatt

SEQ ID NO: 4328049 - DNA, 25 bp, Homo sapien
cattggaggctttttattaagacct

SEQ ID NO: 4328050 - DNA, 25 bp, Homo sapien
tcccattggaggctttttattaaga

SEQ ID NO: 4328051 - DNA, 25 bp, Homo sapien
caggaagcaagaagagtgcactcac

SEQ ID NO: 4328052 - DNA, 25 bp, Homo sapien
catattgtcttcaaggtgcgggggt

SEQ ID NO: 4328053 - DNA, 25 bp, Homo sapien
tgtgaacacatttggggcacaacat

SEQ ID NO: 4328054 - DNA, 25 bp, Homo sapien
ggcacaacatattgtcttcaaggtg

SEQ ID NO: 4328055 - DNA, 25 bp, Homo sapien
tttctggaacccaggcttgaccagc

SEQ ID NO: 4328056 - DNA, 25 bp, Homo sapien
agggagacttttcccatggaccaca

SEQ ID NO: 4328057 - DNA, 25 bp, Homo sapien
gcttgaccagcatgaaactgcaggt

SEQ ID NO: 4328058 - DNA, 25 bp, Homo sapien
actgcaggtgaacccaaccatctgt

SEQ ID NO: 4328059 - DNA, 25 bp, Homo sapien
ggtacccgcacaccaggatgacata

SEQ ID NO: 4328060 - DNA, 25 bp, Homo sapien
tgatgtaagactgcattatggccca

SEQ ID NO: 4328061 - DNA, 25 bp, Homo sapien
tcaccggccctcaaagggattttga

SEQ ID NO: 4328062 - DNA, 25 bp, Homo sapien
agcatccttagtactgcctgggaaa

SEQ ID NO: 4328063 - DNA, 25 bp, Homo sapien
cctcaaggagagcagtggaattttc

SEQ ID NO: 4328064 - DNA, 25 bp, Homo sapien
ttgcaatgatttccggattttggcc

SEQ ID NO: 4328065 - DNA, 25 bp, Homo sapien
tcaaggagagcagtggaattttcca

SEQ ID NO: 4328066 - DNA, 25 bp, Homo sapien
tcaggaggatgtgtctcagaacttt

SEQ ID NO: 4328067 - DNA, 25 bp, Homo sapien
aacaaggtgaggctaagacagttcc

SEQ ID NO: 4328068 - DNA, 25 bp, Homo sapien
tacaataggtaattaggataagcat

SEQ ID NO: 4328069 - DNA, 25 bp, Homo sapien
tcacttttgaggctacaataggtaa

SEQ ID NO: 4328070 - DNA, 25 bp, Homo sapien
tgaaaattgctcagttggccaccca

SEQ ID NO: 4328071 - DNA, 25 bp, Homo sapien
cacaggcgcttatatgcatccaatt

SEQ ID NO: 4328072 - DNA, 25 bp, Homo sapien
caaaggcacacaggcgcttatatgc

SEQ ID NO: 4328073 - DNA, 25 bp, Homo sapien
gcaaaggcacacaggcgcttatatg

SEQ ID NO: 4328074 - DNA, 25 bp, Homo sapien
ggcacacaggcgcttatatgcatcc

SEQ ID NO: 4328075 - DNA, 25 bp, Homo sapien
taacaggtggcagtttagaaggtaa

SEQ ID NO: 4328076 - DNA, 25 bp, Homo sapien
ggcagtttagaaggtaatggaggga

SEQ ID NO: 4328077 - DNA, 25 bp, Homo sapien
tcccggtgaatcagattaacaggtg

SEQ ID NO: 4328078 - DNA, 25 bp, Homo sapien
ttggcaccaggcccgcagaatgtcc

SEQ ID NO: 4328079 - DNA, 25 bp, Homo sapien
cttcttctgaggtctggggttgtca

SEQ ID NO: 4328080 - DNA, 25 bp, Homo sapien
tctgcctttttcttagggcagagca

SEQ ID NO: 4328081 - DNA, 25 bp, Homo sapien
gggttgtcagtgtgctctgcctttt

SEQ ID NO: 4328082 - DNA, 25 bp, Homo sapien
tctggggttgtcagtgtgctctgcc

SEQ ID NO: 4328083 - DNA, 25 bp, Homo sapien
tactgcctttgatagacattttttc

SEQ ID NO: 4328084 - DNA, 25 bp, Homo sapien
tcttccctcgacttctctgtggagg

SEQ ID NO: 4328085 - DNA, 25 bp, Homo sapien
gttcctggcaaagcaattgaatttg

SEQ ID NO: 4328086 - DNA, 25 bp, Homo sapien
tgaatttggttgattagaagcctgc

SEQ ID NO: 4328087 - DNA, 25 bp, Homo sapien
aaggcaccaacgcagttactggact

SEQ ID NO: 4328088 - DNA, 25 bp, Homo sapien
acgcagttactggactccactggca

SEQ ID NO: 4328089 - DNA, 25 bp, Homo sapien
ttctaaggcaccaacgcagttactg

SEQ ID NO: 4328090 - DNA, 25 bp, Homo sapien
gcaccaacgcagttactggactcca

SEQ ID NO: 4328091 - DNA, 25 bp, Homo sapien
ggctttgatatgctcctcactttca

SEQ ID NO: 4328092 - DNA, 25 bp, Homo sapien
tgagcctctgtctcatactaggcat

SEQ ID NO: 4328093 - DNA, 25 bp, Homo sapien
gaaaagttgtttaatccagagacag

SEQ ID NO: 4328094 - DNA, 25 bp, Homo sapien
gacagtaacatatattgagcctctg

SEQ ID NO: 4328095 - DNA, 25 bp, Homo sapien
tatggccgttcagtgcctgtgcaac

SEQ ID NO: 4328096 - DNA, 25 bp, Homo sapien
tgtctgcattgttcccaatgtctgg

SEQ ID NO: 4328097 - DNA, 25 bp, Homo sapien
tcaagaggacctgagagcgctcgga

SEQ ID NO: 4328098 - DNA, 25 bp, Homo sapien
gtctggcttctgattactcctaggt

SEQ ID NO: 4328099 - DNA, 25 bp, Homo sapien
tccaatataccaggctgcaatcata

SEQ ID NO: 4328100 - DNA, 25 bp, Homo sapien
gcaatcatattcttgggccttactc

SEQ ID NO: 4328101 - DNA, 25 bp, Homo sapien
aggagaaaattcgaaggcacattct

SEQ ID NO: 4328102 - DNA, 25 bp, Homo sapien
cctcatttcttacttgtctgctcac

SEQ ID NO: 4328103 - DNA, 25 bp, Homo sapien
ccaaaatggcccctgccccaagatt

SEQ ID NO: 4328104 - DNA, 25 bp, Homo sapien
gcctcgcaacatgcttccaaaatgg

SEQ ID NO: 4328105 - DNA, 25 bp, Homo sapien
acttgtagaagaagcggagcctcgc

SEQ ID NO: 4328106 - DNA, 25 bp, Homo sapien
agcggagcctcgcaacatgcttcca

SEQ ID NO: 4328107 - DNA, 25 bp, Homo sapien
gcaactgtgagtgaagtcacagggc

SEQ ID NO: 4328108 - DNA, 25 bp, Homo sapien
agggcttggcaaatggctcctgagc

SEQ ID NO: 4328109 - DNA, 25 bp, Homo sapien
tctgtacaaccataggggcagccct

SEQ ID NO: 4328110 - DNA, 25 bp, Homo sapien
caattcttgtccgttctcaggtccc

SEQ ID NO: 4328111 - DNA, 25 bp, Homo sapien
gagggcccgtttggtgcttggagtc

SEQ ID NO: 4328112 - DNA, 25 bp, Homo sapien
tttcctcatagcagccagactgggt

SEQ ID NO: 4328113 - DNA, 25 bp, Homo sapien
tccatggcatgcagctcgtaagggt

SEQ ID NO: 4328114 - DNA, 25 bp, Homo sapien
tcttgacatggacgtgtgttcccac

SEQ ID NO: 4328115 - DNA, 25 bp, Homo sapien
caggtactgcaagagcaccgaaccc

SEQ ID NO: 4328116 - DNA, 25 bp, Homo sapien
tcaccatcttgttgagcattcccca

SEQ ID NO: 4328117 - DNA, 25 bp, Homo sapien
gcaccgaacccctcccttgattcta

SEQ ID NO: 4328118 - DNA, 25 bp, Homo sapien
ctcttcaccatcttgttgagcattc

SEQ ID NO: 4328119 - DNA, 25 bp, Homo sapien
ctgctgggccgaccacgaggcgcct

SEQ ID NO: 4328120 - DNA, 25 bp, Homo sapien
acaaacgcgctctcctctagcaccg

SEQ ID NO: 4328121 - DNA, 25 bp, Homo sapien
tgggctccgtgtagcggaaaatgcc

SEQ ID NO: 4328122 - DNA, 25 bp, Homo sapien
tcagggctttcttcccgcgtgtgct

SEQ ID NO: 4328123 - DNA, 25 bp, Homo sapien
gagaccagtcattggcttatggacc

SEQ ID NO: 4328124 - DNA, 25 bp, Homo sapien
caaacacggttacattctgagattc

SEQ ID NO: 4328125 - DNA, 25 bp, Homo sapien
cagtctaagcctcctgataggtggg

SEQ ID NO: 4328126 - DNA, 25 bp, Homo sapien
gactgggtggacactattgaaccca

SEQ ID NO: 4328127 - DNA, 25 bp, Homo sapien
gatttcttttggcataatagttagc

SEQ ID NO: 4328128 - DNA, 25 bp, Homo sapien
ggatttcttttggcataatagttag

SEQ ID NO: 4328129 - DNA, 25 bp, Homo sapien
gcataatagttagccgtttggcatg

SEQ ID NO: 4328130 - DNA, 25 bp, Homo sapien
aatagttagccgtttggcatggata

SEQ ID NO: 4328131 - DNA, 25 bp, Homo sapien
tcctggctgctttacggtcgatttg

SEQ ID NO: 4328132 - DNA, 25 bp, Homo sapien
gagtgatggcggcatggcggtgcgg

SEQ ID NO: 4328133 - DNA, 25 bp, Homo sapien
ctggcgttggagagtgatggcggca

SEQ ID NO: 4328134 - DNA, 25 bp, Homo sapien
tgatggcggcatggcggtgcggcgg

SEQ ID NO: 4328135 - DNA, 25 bp, Homo sapien
ttggagagtgatggcggcatggcgg

SEQ ID NO: 4328136 - DNA, 25 bp, Homo sapien
aaggccagagaagcctctcttcatc

SEQ ID NO: 4328137 - DNA, 25 bp, Homo sapien
gcaagaataatgaaaggaactctta

SEQ ID NO: 4328138 - DNA, 25 bp, Homo sapien
tactggctctttctcaaggccagag

SEQ ID NO: 4328139 - DNA, 25 bp, Homo sapien
tctttggcttaagaatcttcatgtt

SEQ ID NO: 4328140 - DNA, 25 bp, Homo sapien
ttcatagtgttccccttctgattcc

SEQ ID NO: 4328141 - DNA, 25 bp, Homo sapien
agtgttccccttctgattccacagc

SEQ ID NO: 4328142 - DNA, 25 bp, Homo sapien
gttccccttctgattccacagccat

SEQ ID NO: 4328143 - DNA, 25 bp, Homo sapien
catagtgttccccttctgattccac

SEQ ID NO: 4328144 - DNA, 25 bp, Homo sapien
gagttgtccacagtctgcaatagtg

SEQ ID NO: 4328145 - DNA, 25 bp, Homo sapien
ttagagttgtccacagtctgcaata

SEQ ID NO: 4328146 - DNA, 25 bp, Homo sapien
ccacaatattcttgccttcttttac

SEQ ID NO: 4328147 - DNA, 25 bp, Homo sapien
gttgtccacagtctgcaatagtgat

SEQ ID NO: 4328148 - DNA, 25 bp, Homo sapien
tggtgttgggtccaccagtttccat

SEQ ID NO: 4328149 - DNA, 25 bp, Homo sapien
attatggcgtgtgaacttgccacac

SEQ ID NO: 4328150 - DNA, 25 bp, Homo sapien
gaacttgccacactgacacataaac

SEQ ID NO: 4328151 - DNA, 25 bp, Homo sapien
cattggtgttgggtccaccagtttc

SEQ ID NO: 4328152 - DNA, 25 bp, Homo sapien
ctctccagtgcacaaaggttttctg

SEQ ID NO: 4328153 - DNA, 25 bp, Homo sapien
tccagtgcacaaaggttttctgctg

SEQ ID NO: 4328154 - DNA, 25 bp, Homo sapien
ctccagtgcacaaaggttttctgct

SEQ ID NO: 4328155 - DNA, 25 bp, Homo sapien
tctccagtgcacaaaggttttctgc

SEQ ID NO: 4328156 - DNA, 25 bp, Homo sapien
attccaaaggagacgtgacccaagg

SEQ ID NO: 4328157 - DNA, 25 bp, Homo sapien
caagattccaaaggagacgtgaccc

SEQ ID NO: 4328158 - DNA, 25 bp, Homo sapien
gattccaaaggagacgtgacccaag

SEQ ID NO: 4328159 - DNA, 25 bp, Homo sapien
gacaagattccaaaggagacgtgac

SEQ ID NO: 4328160 - DNA, 25 bp, Homo sapien
caacagcgatgtcaaagaacatggt

SEQ ID NO: 4328161 - DNA, 25 bp, Homo sapien
tagtatggggctcccagtggtggtg

SEQ ID NO: 4328162 - DNA, 25 bp, Homo sapien
ggtggtggcgtctgcaaagcctgca

SEQ ID NO: 4328163 - DNA, 25 bp, Homo sapien
ctgatagtatggggctcccagtggt

SEQ ID NO: 4328164 - DNA, 25 bp, Homo sapien
ctgatccctgctccttccagagccc

SEQ ID NO: 4328165 - DNA, 25 bp, Homo sapien
cctgctccttccagagcccattcct

SEQ ID NO: 4328166 - DNA, 25 bp, Homo sapien
agagcccattcctgtgcaccagtca

SEQ ID NO: 4328167 - DNA, 25 bp, Homo sapien
ttccagagcccattcctgtgcacca

SEQ ID NO: 4328168 - DNA, 25 bp, Homo sapien
gcttctcttccttgtttggattcat

SEQ ID NO: 4328169 - DNA, 25 bp, Homo sapien
ttgcttctcttccttgtttggattc

SEQ ID NO: 4328170 - DNA, 25 bp, Homo sapien
tgcttctcttccttgtttggattca

SEQ ID NO: 4328171 - DNA, 25 bp, Homo sapien
gtgcccggccaatggctttaggatt

SEQ ID NO: 4328172 - DNA, 25 bp, Homo sapien
tttgaaagcgggcattgactgcttc

SEQ ID NO: 4328173 - DNA, 25 bp, Homo sapien
tgactgcttcattctaaccatgaaa

SEQ ID NO: 4328174 - DNA, 25 bp, Homo sapien
ccatgaaagtcctaaatggtgtttt

SEQ ID NO: 4328175 - DNA, 25 bp, Homo sapien
ggaacatcattccaatgggtcttct

SEQ ID NO: 4328176 - DNA, 25 bp, Homo sapien
ttctggaacatcattccaatgggtc

SEQ ID NO: 4328177 - DNA, 25 bp, Homo sapien
gctgttaaagctggtcccttagttc

SEQ ID NO: 4328178 - DNA, 25 bp, Homo sapien
gaaggagtgctgttaaagctggtcc

SEQ ID NO: 4328179 - DNA, 25 bp, Homo sapien
tagattggcaagagaagggggataa

SEQ ID NO: 4328180 - DNA, 25 bp, Homo sapien
ttagattggcaagagaagggggata

SEQ ID NO: 4328181 - DNA, 25 bp, Homo sapien
ggcaagagaagggggataatagtct

SEQ ID NO: 4328182 - DNA, 25 bp, Homo sapien
aagagaagggggataatagtctcac

SEQ ID NO: 4328183 - DNA, 25 bp, Homo sapien
tttagtctgctgcacaatactttgc

SEQ ID NO: 4328184 - DNA, 25 bp, Homo sapien
gtttagtctgctgcacaatactttg

SEQ ID NO: 4328185 - DNA, 25 bp, Homo sapien
agtttagtctgctgcacaatacttt

SEQ ID NO: 4328186 - DNA, 25 bp, Homo sapien
ttctggtagagttgtactgggccat

SEQ ID NO: 4328187 - DNA, 25 bp, Homo sapien
ttttctggtagagttgtactgggcc

SEQ ID NO: 4328188 - DNA, 25 bp, Homo sapien
tttttctggtagagttgtactgggc

SEQ ID NO: 4328189 - DNA, 25 bp, Homo sapien
tttctggtagagttgtactgggcca

SEQ ID NO: 4328190 - DNA, 25 bp, Homo sapien
cagttgtaagtgtgctaactatgtc

SEQ ID NO: 4328191 - DNA, 25 bp, Homo sapien
tgtaagtgtgctaactatgtcagtt

SEQ ID NO: 4328192 - DNA, 25 bp, Homo sapien
ttgttcccaagtataggcagttgta

SEQ ID NO: 4328193 - DNA, 25 bp, Homo sapien
gttcccaagtataggcagttgtaag

SEQ ID NO: 4328194 - DNA, 25 bp, Homo sapien
ttattgagatcagtgcatatttcac

SEQ ID NO: 4328195 - DNA, 25 bp, Homo sapien
gtaaccgccagcaaccctgattttg

SEQ ID NO: 4328196 - DNA, 25 bp, Homo sapien
cataaaatgcatcattaatttgtcc

SEQ ID NO: 4328197 - DNA, 25 bp, Homo sapien
aatttgtccactctgatagaagtta

SEQ ID NO: 4328198 - DNA, 25 bp, Homo sapien
atctccacactcttcagggttggaa

SEQ ID NO: 4328199 - DNA, 25 bp, Homo sapien
cttcagggttggaagatgagaccaa

SEQ ID NO: 4328200 - DNA, 25 bp, Homo sapien
cagggttggaagatgagaccaagga

SEQ ID NO: 4328201 - DNA, 25 bp, Homo sapien
acatctccacactcttcagggttgg

SEQ ID NO: 4328202 - DNA, 25 bp, Homo sapien
ccttgttcactgttgtccattgatt

SEQ ID NO: 4328203 - DNA, 25 bp, Homo sapien
ccattgattcagttttgtcttccat

SEQ ID NO: 4328204 - DNA, 25 bp, Homo sapien
tgtccttgttcactgttgtccattg

SEQ ID NO: 4328205 - DNA, 25 bp, Homo sapien
ttgttcactgttgtccattgattca

SEQ ID NO: 4328206 - DNA, 25 bp, Homo sapien
atcatggtaattgggaatcaattca

SEQ ID NO: 4328207 - DNA, 25 bp, Homo sapien
tcactcctcccaagaggcactaccc

SEQ ID NO: 4328208 - DNA, 25 bp, Homo sapien
ctacccctgggtttatgttctgtga

SEQ ID NO: 4328209 - DNA, 25 bp, Homo sapien
cagatacagagggaacagatttgaa

SEQ ID NO: 4328210 - DNA, 25 bp, Homo sapien
tctgattaggctctctttcccactc

SEQ ID NO: 4328211 - DNA, 25 bp, Homo sapien
ttctgattaggctctctttcccact

SEQ ID NO: 4328212 - DNA, 25 bp, Homo sapien
tttctgattaggctctctttcccac

SEQ ID NO: 4328213 - DNA, 25 bp, Homo sapien
tgctgctttctgattaggctctctt

SEQ ID NO: 4328214 - DNA, 25 bp, Homo sapien
actgcctacgatgtgggcaatactg

SEQ ID NO: 4328215 - DNA, 25 bp, Homo sapien
cttggtgttaactgcctacgatgtg

SEQ ID NO: 4328216 - DNA, 25 bp, Homo sapien
caatactgcataggccgaggctgca

SEQ ID NO: 4328217 - DNA, 25 bp, Homo sapien
tgggcaatactgcataggccgaggc

SEQ ID NO: 4328218 - DNA, 25 bp, Homo sapien
agttacattaagcaatgtaattccc

SEQ ID NO: 4328219 - DNA, 25 bp, Homo sapien
cttagagttacattaagcaatgtaa

SEQ ID NO: 4328220 - DNA, 25 bp, Homo sapien
ttacattaagcaatgtaattcccat

SEQ ID NO: 4328221 - DNA, 25 bp, Homo sapien
tagagttacattaagcaatgtaatt

SEQ ID NO: 4328222 - DNA, 25 bp, Homo sapien
aggaagaagttgaattgatgagtag

SEQ ID NO: 4328223 - DNA, 25 bp, Homo sapien
gaagttgaattgatgagtagaccaa

SEQ ID NO: 4328224 - DNA, 25 bp, Homo sapien
tgaattgatgagtagaccaataaca

SEQ ID NO: 4328225 - DNA, 25 bp, Homo sapien
aagaagttgaattgatgagtagacc

SEQ ID NO: 4328226 - DNA, 25 bp, Homo sapien
tttgctagaggcaagtagcccagtt

SEQ ID NO: 4328227 - DNA, 25 bp, Homo sapien
catctatttccagggtcggctgctg

SEQ ID NO: 4328228 - DNA, 25 bp, Homo sapien
tcggctgctggagggtgaataattc

SEQ ID NO: 4328229 - DNA, 25 bp, Homo sapien
ggacccttctccaatgcatctattt

SEQ ID NO: 4328230 - DNA, 25 bp, Homo sapien
gggttaatatttgacccatcagtga

SEQ ID NO: 4328231 - DNA, 25 bp, Homo sapien
taatatttgacccatcagtgagcct

SEQ ID NO: 4328232 - DNA, 25 bp, Homo sapien
tttgacccatcagtgagcctccaag

SEQ ID NO: 4328233 - DNA, 25 bp, Homo sapien
tgagtgggttaatatttgacccatc

SEQ ID NO: 4328234 - DNA, 25 bp, Homo sapien
tgctcattcagggactgatctttca

SEQ ID NO: 4328235 - DNA, 25 bp, Homo sapien
agacagttggacagaacaatagagc

SEQ ID NO: 4328236 - DNA, 25 bp, Homo sapien
ctaggccaaagacagttggacagaa

SEQ ID NO: 4328237 - DNA, 25 bp, Homo sapien
gagctgctcattcagggactgatct

SEQ ID NO: 4328238 - DNA, 25 bp, Homo sapien
ccttcctttggagattgaagtattt

SEQ ID NO: 4328239 - DNA, 25 bp, Homo sapien
tttgaccttcctttggagattgaag

SEQ ID NO: 4328240 - DNA, 25 bp, Homo sapien
gaccttcctttggagattgaagtat

SEQ ID NO: 4328241 - DNA, 25 bp, Homo sapien
gatttgaccttcctttggagattga

SEQ ID NO: 4328242 - DNA, 25 bp, Homo sapien
tttgcattagacgtcgtttctgtct

SEQ ID NO: 4328243 - DNA, 25 bp, Homo sapien
ttgcattagacgtcgtttctgtctc

SEQ ID NO: 4328244 - DNA, 25 bp, Homo sapien
ggtgggggtctgtctttgcattaga

SEQ ID NO: 4328245 - DNA, 25 bp, Homo sapien
aaccatatgtcatcatcgccatggc

SEQ ID NO: 4328246 - DNA, 25 bp, Homo sapien
atcaatcaaccatatgtcatcatcg

SEQ ID NO: 4328247 - DNA, 25 bp, Homo sapien
tccatcaatcaaccatatgtcatca

SEQ ID NO: 4328248 - DNA, 25 bp, Homo sapien
aatcaaccatatgtcatcatcgcca

SEQ ID NO: 4328249 - DNA, 25 bp, Homo sapien
ttcccgttaagtgcctagccaaatc

SEQ ID NO: 4328250 - DNA, 25 bp, Homo sapien
aactgtatatttttgatgcactccc

SEQ ID NO: 4328251 - DNA, 25 bp, Homo sapien
taagtgcctagccaaatctttcaca

SEQ ID NO: 4328252 - DNA, 25 bp, Homo sapien
ctgtttcccgttaagtgcctagcca

SEQ ID NO: 4328253 - DNA, 25 bp, Homo sapien
ttctcactgtaactccaagcccgca

SEQ ID NO: 4328254 - DNA, 25 bp, Homo sapien
tttttctcactgtaactccaagccc

SEQ ID NO: 4328255 - DNA, 25 bp, Homo sapien
ttttctcactgtaactccaagcccg

SEQ ID NO: 4328256 - DNA, 25 bp, Homo sapien
tttctcactgtaactccaagcccgc

SEQ ID NO: 4328257 - DNA, 25 bp, Homo sapien
gagagactgcgcattgacactcaaa

SEQ ID NO: 4328258 - DNA, 25 bp, Homo sapien
ttaaccacagagagactgcgcattg

SEQ ID NO: 4328259 - DNA, 25 bp, Homo sapien
gagactgcgcattgacactcaaacc

SEQ ID NO: 4328260 - DNA, 25 bp, Homo sapien
cacagagagactgcgcattgacact

SEQ ID NO: 4328261 - DNA, 25 bp, Homo sapien
gccgaggtgagtcacgttgcttact

SEQ ID NO: 4328262 - DNA, 25 bp, Homo sapien
ggtgagtcacgttgcttactctgaa

SEQ ID NO: 4328263 - DNA, 25 bp, Homo sapien
aaaaaggccgaggtgagtcacgttg

SEQ ID NO: 4328264 - DNA, 25 bp, Homo sapien
cacgttgcttactctgaatctgcat

SEQ ID NO: 4328265 - DNA, 25 bp, Homo sapien
ataccaaacatgctcttcagagata

SEQ ID NO: 4328266 - DNA, 25 bp, Homo sapien
cagagatacctctatatagtgaaga

SEQ ID NO: 4328267 - DNA, 25 bp, Homo sapien
tatatagtgaagacatgacggtaat

SEQ ID NO: 4328268 - DNA, 25 bp, Homo sapien
gacatgacggtaattccaaggcaat

SEQ ID NO: 4328269 - DNA, 25 bp, Homo sapien
tatttcctggatacattaccgcctg

SEQ ID NO: 4328270 - DNA, 25 bp, Homo sapien
tttacatatttcctggatacattac

SEQ ID NO: 4328271 - DNA, 25 bp, Homo sapien
tcctggatacattaccgcctgctat

SEQ ID NO: 4328272 - DNA, 25 bp, Homo sapien
catatttcctggatacattaccgcc

SEQ ID NO: 4328273 - DNA, 25 bp, Homo sapien
gcccagctgcttacttgagttacaa

SEQ ID NO: 4328274 - DNA, 25 bp, Homo sapien
tacaatgcattcgagagtcatacag

SEQ ID NO: 4328275 - DNA, 25 bp, Homo sapien
caatatacaatgcattcgagagtca

SEQ ID NO: 4328276 - DNA, 25 bp, Homo sapien
cattcgagagtcatacagaccaaca

SEQ ID NO: 4328277 - DNA, 25 bp, Homo sapien
ttctcaagtcagaattaacacctca

SEQ ID NO: 4328278 - DNA, 25 bp, Homo sapien
tcatgtaaactgaatttgttgaaca

SEQ ID NO: 4328279 - DNA, 25 bp, Homo sapien
ctgttgtgtaaaccataacattttg

SEQ ID NO: 4328280 - DNA, 25 bp, Homo sapien
taaaccataacattttgttgctgac

SEQ ID NO: 4328281 - DNA, 25 bp, Homo sapien
ccagaaatctgttgtgtaaaccata

SEQ ID NO: 4328282 - DNA, 25 bp, Homo sapien
gaaatctgttgtgtaaaccataaca

SEQ ID NO: 4328283 - DNA, 25 bp, Homo sapien
agaggttccacgtaactgtctaggc

SEQ ID NO: 4328284 - DNA, 25 bp, Homo sapien
agaatgtcttctccattgattgttt

SEQ ID NO: 4328285 - DNA, 25 bp, Homo sapien
tgtttctcttgatggcacctttcac

SEQ ID NO: 4328286 - DNA, 25 bp, Homo sapien
tttctgtttctcttgatggcacctt

SEQ ID NO: 4328287 - DNA, 25 bp, Homo sapien
aatgtcttctccattgattgttttc

SEQ ID NO: 4328288 - DNA, 25 bp, Homo sapien
gcttcagatgttataaagctgatga

SEQ ID NO: 4328289 - DNA, 25 bp, Homo sapien
cagatgttataaagctgatgagctc

SEQ ID NO: 4328290 - DNA, 25 bp, Homo sapien
ttgcttcagatgttataaagctgat

SEQ ID NO: 4328291 - DNA, 25 bp, Homo sapien
gatgttataaagctgatgagctcac

SEQ ID NO: 4328292 - DNA, 25 bp, Homo sapien
gcaatctttcctgtttgaggtatgg

SEQ ID NO: 4328293 - DNA, 25 bp, Homo sapien
gtctgcacaggttcctagttgagag

SEQ ID NO: 4328294 - DNA, 25 bp, Homo sapien
caggttcctagttgagaggcatctg

SEQ ID NO: 4328295 - DNA, 25 bp, Homo sapien
aatctttcctgtttgaggtatggca

SEQ ID NO: 4328296 - DNA, 25 bp, Homo sapien
tcttggaaatctactgtgttagtcc

SEQ ID NO: 4328297 - DNA, 25 bp, Homo sapien
tacttttcggatggttactttgatg

SEQ ID NO: 4328298 - DNA, 25 bp, Homo sapien
tactgtgttagtccttatatagaca

SEQ ID NO: 4328299 - DNA, 25 bp, Homo sapien
ttagaggtcatccctttctgaatca

SEQ ID NO: 4328300 - DNA, 25 bp, Homo sapien
tgtattgttcgctaccccaaattca

SEQ ID NO: 4328301 - DNA, 25 bp, Homo sapien
catcagtcaggattagggtaaagga

SEQ ID NO: 4328302 - DNA, 25 bp, Homo sapien
cccaaattcatagataggctcttgg

SEQ ID NO: 4328303 - DNA, 25 bp, Homo sapien
gaaatgctgtgtcccatagttaacg

SEQ ID NO: 4328304 - DNA, 25 bp, Homo sapien
ttcacggatgcaacatgttcttgtt

SEQ ID NO: 4328305 - DNA, 25 bp, Homo sapien
ttgttttcacggatgcaacatgttc

SEQ ID NO: 4328306 - DNA, 25 bp, Homo sapien
gttcttgttttcacggatgcaacat

SEQ ID NO: 4328307 - DNA, 25 bp, Homo sapien
ttttcacggatgcaacatgttcttg

SEQ ID NO: 4328308 - DNA, 25 bp, Homo sapien
gttcttaggtatcatattggctttt

SEQ ID NO: 4328309 - DNA, 25 bp, Homo sapien
ttcttaggtatcatattggctttta

SEQ ID NO: 4328310 - DNA, 25 bp, Homo sapien
tagaattaggacagtcactacttct

SEQ ID NO: 4328311 - DNA, 25 bp, Homo sapien
agaattaggacagtcactacttctt

SEQ ID NO: 4328312 - DNA, 25 bp, Homo sapien
gaattaggacagtcactacttcttt

SEQ ID NO: 4328313 - DNA, 25 bp, Homo sapien
gtagaattaggacagtcactacttc

SEQ ID NO: 4328314 - DNA, 25 bp, Homo sapien
gaggtagctaaggtagtagagttca

SEQ ID NO: 4328315 - DNA, 25 bp, Homo sapien
aaaagagactgaagattggctacac

SEQ ID NO: 4328316 - DNA, 25 bp, Homo sapien
cctggaagggagatttgtacgacca

SEQ ID NO: 4328317 - DNA, 25 bp, Homo sapien
tggtggttgccagcgaagttttctg

SEQ ID NO: 4328318 - DNA, 25 bp, Homo sapien
cagcagttgctgtgacactaggcac

SEQ ID NO: 4328319 - DNA, 25 bp, Homo sapien
agttgctgtgacactaggcacatgc

SEQ ID NO: 4328320 - DNA, 25 bp, Homo sapien
tacagcagttgctgtgacactaggc

SEQ ID NO: 4328321 - DNA, 25 bp, Homo sapien
gaatacagcagttgctgtgacacta

SEQ ID NO: 4328322 - DNA, 25 bp, Homo sapien
ctgttttgagcacaggtatgtaaaa

SEQ ID NO: 4328323 - DNA, 25 bp, Homo sapien
ccctgttttgagcacaggtatgtaa

SEQ ID NO: 4328324 - DNA, 25 bp, Homo sapien
cctgttttgagcacaggtatgtaaa

SEQ ID NO: 4328325 - DNA, 25 bp, Homo sapien
tctaccaagatgaaaccttgattct

SEQ ID NO: 4328326 - DNA, 25 bp, Homo sapien
cagagccccactcaatattattatt

SEQ ID NO: 4328327 - DNA, 25 bp, Homo sapien
aattctaccaagatgaaaccttgat

SEQ ID NO: 4328328 - DNA, 25 bp, Homo sapien
tcacatcacagagccccactcaata

SEQ ID NO: 4328329 - DNA, 25 bp, Homo sapien
aagcatacaccaagaagttagcaat

SEQ ID NO: 4328330 - DNA, 25 bp, Homo sapien
tgaagcatacaccaagaagttagca

SEQ ID NO: 4328331 - DNA, 25 bp, Homo sapien
agcatacaccaagaagttagcaata

SEQ ID NO: 4328332 - DNA, 25 bp, Homo sapien
gaagcatacaccaagaagttagcaa

SEQ ID NO: 4328333 - DNA, 25 bp, Homo sapien
aggaccttgctgcttagtcccttca

SEQ ID NO: 4328334 - DNA, 25 bp, Homo sapien
aattgtgagtccaaggaccttgctg

SEQ ID NO: 4328335 - DNA, 25 bp, Homo sapien
aaggaccttgctgcttagtcccttc

SEQ ID NO: 4328336 - DNA, 25 bp, Homo sapien
tccatcaattgtgagtccaaggacc

SEQ ID NO: 4328337 - DNA, 25 bp, Homo sapien
cagagcccttgagatcaggggatcc

SEQ ID NO: 4328338 - DNA, 25 bp, Homo sapien
catatttcatacttgaaaggctcct

SEQ ID NO: 4328339 - DNA, 25 bp, Homo sapien
tgagcccagttgtttaagttatctt

SEQ ID NO: 4328340 - DNA, 25 bp, Homo sapien
caggggatccttctgagcccagttg

SEQ ID NO: 4328341 - DNA, 25 bp, Homo sapien
caaaatgaagtggttcatgaagcat

SEQ ID NO: 4328342 - DNA, 25 bp, Homo sapien
tctttacagcggacctccaatttca

SEQ ID NO: 4328343 - DNA, 25 bp, Homo sapien
tttcaaaatgaagtggttcatgaag

SEQ ID NO: 4328344 - DNA, 25 bp, Homo sapien
ttgtttctttacagcggacctccaa

SEQ ID NO: 4328345 - DNA, 25 bp, Homo sapien
tgttttctctgaactccaactctgg

SEQ ID NO: 4328346 - DNA, 25 bp, Homo sapien
gtctgttttctctgaactccaactc

SEQ ID NO: 4328347 - DNA, 25 bp, Homo sapien
ctggctgtgtcgttaaggtatccat

SEQ ID NO: 4328348 - DNA, 25 bp, Homo sapien
ccaactctggctgtgtcgttaaggt

SEQ ID NO: 4328349 - DNA, 25 bp, Homo sapien
cacttcgaaggctaatggccctgct

SEQ ID NO: 4328350 - DNA, 25 bp, Homo sapien
tcagtgtgtatgcacactgatcttt

SEQ ID NO: 4328351 - DNA, 25 bp, Homo sapien
cagtgtgtatgcacactgatctttt

SEQ ID NO: 4328352 - DNA, 25 bp, Homo sapien
atcacttcgaaggctaatggccctg

SEQ ID NO: 4328353 - DNA, 25 bp, Homo sapien
tccagagttaatgcctccttcagtg

SEQ ID NO: 4328354 - DNA, 25 bp, Homo sapien
tttctattgccgctcctttcttcca

SEQ ID NO: 4328355 - DNA, 25 bp, Homo sapien
catccagagttaatgcctccttcag

SEQ ID NO: 4328356 - DNA, 25 bp, Homo sapien
tctattgccgctcctttcttccatc

SEQ ID NO: 4328357 - DNA, 25 bp, Homo sapien
tccaatgggtatctttgatcagttt

SEQ ID NO: 4328358 - DNA, 25 bp, Homo sapien
cagtttggtgttccacgtggcactc

SEQ ID NO: 4328359 - DNA, 25 bp, Homo sapien
agtttggtgttccacgtggcactca

SEQ ID NO: 4328360 - DNA, 25 bp, Homo sapien
tatttccttccaatgggtatctttg

SEQ ID NO: 4328361 - DNA, 25 bp, Homo sapien
tcataaagttatgcaggtcaattcc

SEQ ID NO: 4328362 - DNA, 25 bp, Homo sapien
tccacataacatctgacaaatagct

SEQ ID NO: 4328363 - DNA, 25 bp, Homo sapien
tatgcaggtcaattccacataacat

SEQ ID NO: 4328364 - DNA, 25 bp, Homo sapien
ggtcaattccacataacatctgaca

SEQ ID NO: 4328365 - DNA, 25 bp, Homo sapien
gaaacacattgacatcgtatagtgc

SEQ ID NO: 4328366 - DNA, 25 bp, Homo sapien
tgaggggccaaagttcaggagaaac

SEQ ID NO: 4328367 - DNA, 25 bp, Homo sapien
tttcctttcaagacatttgaagatt

SEQ ID NO: 4328368 - DNA, 25 bp, Homo sapien
acagccagatttgaggggccaaagt

SEQ ID NO: 4328369 - DNA, 25 bp, Homo sapien
tcctaaagtatgttccactgctgac

SEQ ID NO: 4328370 - DNA, 25 bp, Homo sapien
catgcaggatgctgttattggagca

SEQ ID NO: 4328371 - DNA, 25 bp, Homo sapien
cactgctgacagataatcaagaagg

SEQ ID NO: 4328372 - DNA, 25 bp, Homo sapien
ttggtcatcacagcacttttagaga

SEQ ID NO: 4328373 - DNA, 25 bp, Homo sapien
tttgttcagttgctgtaatttccac

SEQ ID NO: 4328374 - DNA, 25 bp, Homo sapien
tcatgttttttgttcagttgctgta

SEQ ID NO: 4328375 - DNA, 25 bp, Homo sapien
ttttttgttcagttgctgtaatttc

SEQ ID NO: 4328376 - DNA, 25 bp, Homo sapien
tgttcagttgctgtaatttccacaa

SEQ ID NO: 4328377 - DNA, 25 bp, Homo sapien
ctccatcttagtgacaaacattttg

SEQ ID NO: 4328378 - DNA, 25 bp, Homo sapien
tttctccatcttagtgacaaacatt

SEQ ID NO: 4328379 - DNA, 25 bp, Homo sapien
tctccatcttagtgacaaacatttt

SEQ ID NO: 4328380 - DNA, 25 bp, Homo sapien
tgcttttcgtctgctgtatcaggga

SEQ ID NO: 4328381 - DNA, 25 bp, Homo sapien
ctacatggatctgccacttgaaata

SEQ ID NO: 4328382 - DNA, 25 bp, Homo sapien
tgccacttgaaatactgaggaagac

SEQ ID NO: 4328383 - DNA, 25 bp, Homo sapien
ggatctgccacttgaaatactgagg

SEQ ID NO: 4328384 - DNA, 25 bp, Homo sapien
acatggatctgccacttgaaatact

SEQ ID NO: 4328385 - DNA, 25 bp, Homo sapien
tttgttgagggtagcgacactgcct

SEQ ID NO: 4328386 - DNA, 25 bp, Homo sapien
tgcctcgtttgttgagggtagcgac

SEQ ID NO: 4328387 - DNA, 25 bp, Homo sapien
tcaggcagttgcaaggaatgcctcg

SEQ ID NO: 4328388 - DNA, 25 bp, Homo sapien
cttcgacctttcagagtcaggcagt

SEQ ID NO: 4328389 - DNA, 25 bp, Homo sapien
gaacaactgtaccaatagggcactg

SEQ ID NO: 4328390 - DNA, 25 bp, Homo sapien
gctgtagagttgcatagaagctcca

SEQ ID NO: 4328391 - DNA, 25 bp, Homo sapien
cactgtgaagctctggttattaacc

SEQ ID NO: 4328392 - DNA, 25 bp, Homo sapien
gaggacaccacatgtgaagttcaga

SEQ ID NO: 4328393 - DNA, 25 bp, Homo sapien
ttgttcagttagaagataccctggc

SEQ ID NO: 4328394 - DNA, 25 bp, Homo sapien
attgttcagttagaagataccctgg

SEQ ID NO: 4328395 - DNA, 25 bp, Homo sapien
aattgttcagttagaagataccctg

SEQ ID NO: 4328396 - DNA, 25 bp, Homo sapien
gttgctcccatgtacttctgtgatt

SEQ ID NO: 4328397 - DNA, 25 bp, Homo sapien
tgtgttgctcccatgtacttctgtg

SEQ ID NO: 4328398 - DNA, 25 bp, Homo sapien
cactgtgttgctcccatgtacttct

SEQ ID NO: 4328399 - DNA, 25 bp, Homo sapien
ttggccactgtgttgctcccatgta

SEQ ID NO: 4328400 - DNA, 25 bp, Homo sapien
tgtctctcttctgttaaccagaagc

SEQ ID NO: 4328401 - DNA, 25 bp, Homo sapien
gtctctcttctgttaaccagaagct

SEQ ID NO: 4328402 - DNA, 25 bp, Homo sapien
tatctttcgtaaaagaattattgtc

SEQ ID NO: 4328403 - DNA, 25 bp, Homo sapien
tgtaataggctattagataaaagat

SEQ ID NO: 4328404 - DNA, 25 bp, Homo sapien
attctggaggaacaggtccattgac

SEQ ID NO: 4328405 - DNA, 25 bp, Homo sapien
aaaagatagtaatgcattctggagg

SEQ ID NO: 4328406 - DNA, 25 bp, Homo sapien
tctggaccatagaatttccagtttg

SEQ ID NO: 4328407 - DNA, 25 bp, Homo sapien
ctctggaccatagaatttccagttt

SEQ ID NO: 4328408 - DNA, 25 bp, Homo sapien
ttctctggaccatagaatttccagt

SEQ ID NO: 4328409 - DNA, 25 bp, Homo sapien
tctctggaccatagaatttccagtt

SEQ ID NO: 4328410 - DNA, 25 bp, Homo sapien
taaatgcctgaatcatcacactggc

SEQ ID NO: 4328411 - DNA, 25 bp, Homo sapien
aattccgctgtccttgtagacattg

SEQ ID NO: 4328412 - DNA, 25 bp, Homo sapien
tcagtacaacttagtaataaatagc

SEQ ID NO: 4328413 - DNA, 25 bp, Homo sapien
tagtaataaatagccaattccgctg

SEQ ID NO: 4328414 - DNA, 25 bp, Homo sapien
atcttttccactggtgaaatcttca

SEQ ID NO: 4328415 - DNA, 25 bp, Homo sapien
tcctttactgagacatcttttccac

SEQ ID NO: 4328416 - DNA, 25 bp, Homo sapien
tccactggtgaaatcttcagcaact

SEQ ID NO: 4328417 - DNA, 25 bp, Homo sapien
aatcttcagcaactggactatcctc

SEQ ID NO: 4328418 - DNA, 25 bp, Homo sapien
cagtaggccctagaggttacacaga

SEQ ID NO: 4328419 - DNA, 25 bp, Homo sapien
taaatcatggacctcaccgaaggca

SEQ ID NO: 4328420 - DNA, 25 bp, Homo sapien
gatattacagctggcctaacaggtg

SEQ ID NO: 4328421 - DNA, 25 bp, Homo sapien
ggccaactgaattaccacatgctga

SEQ ID NO: 4328422 - DNA, 25 bp, Homo sapien
ttttcccagttctacaatatctcca

SEQ ID NO: 4328423 - DNA, 25 bp, Homo sapien
gaggctttagcttgcctcactgttc

SEQ ID NO: 4328424 - DNA, 25 bp, Homo sapien
catgccatttggtgaggaaagaggc

SEQ ID NO: 4328425 - DNA, 25 bp, Homo sapien
ccagcatgccatttggtgaggaaag

SEQ ID NO: 4328426 - DNA, 25 bp, Homo sapien
tccacacacgcacaggctgtagaat

SEQ ID NO: 4328427 - DNA, 25 bp, Homo sapien
taagtcaaggattccacacacgcac

SEQ ID NO: 4328428 - DNA, 25 bp, Homo sapien
gctctaagtcaaggattccacacac

SEQ ID NO: 4328429 - DNA, 25 bp, Homo sapien
ggctgtagaatcttccctgggcata

SEQ ID NO: 4328430 - DNA, 25 bp, Homo sapien
acgtactgcagattccaaagtcctg

SEQ ID NO: 4328431 - DNA, 25 bp, Homo sapien
gagtgtggcctaataggaccctccc

SEQ ID NO: 4328432 - DNA, 25 bp, Homo sapien
cttgcaaggttctcacaggtacatg

SEQ ID NO: 4328433 - DNA, 25 bp, Homo sapien
cccagcatggcttctagctccttta

SEQ ID NO: 4328434 - DNA, 25 bp, Homo sapien
cccacaactcctacagcttttatag

SEQ ID NO: 4328435 - DNA, 25 bp, Homo sapien
tcctacagcttttatagcactgatc

SEQ ID NO: 4328436 - DNA, 25 bp, Homo sapien
ctacagcttttatagcactgatcac

SEQ ID NO: 4328437 - DNA, 25 bp, Homo sapien
aactcctacagcttttatagcactg

SEQ ID NO: 4328438 - DNA, 25 bp, Homo sapien
gaatggggtgtcacttccaagatta

SEQ ID NO: 4328439 - DNA, 25 bp, Homo sapien
aggagtacatgatgaaaaggtctac

SEQ ID NO: 4328440 - DNA, 25 bp, Homo sapien
gaaggcagctgccatgttaggagta

SEQ ID NO: 4328441 - DNA, 25 bp, Homo sapien
gagaagataatgcagcagagggaat

SEQ ID NO: 4328442 - DNA, 25 bp, Homo sapien
taagctgggccagtattcctgatcc

SEQ ID NO: 4328443 - DNA, 25 bp, Homo sapien
gggccatctgttacactataagaga

SEQ ID NO: 4328444 - DNA, 25 bp, Homo sapien
gatcatgtcgtagtaagcttccaaa

SEQ ID NO: 4328445 - DNA, 25 bp, Homo sapien
aaattacacagtgttgtgccatgag

SEQ ID NO: 4328446 - DNA, 25 bp, Homo sapien
caaattcttaacaattccagattgt

SEQ ID NO: 4328447 - DNA, 25 bp, Homo sapien
tcccaaattcttaacaattccagat

SEQ ID NO: 4328448 - DNA, 25 bp, Homo sapien
ccaaattcttaacaattccagattg

SEQ ID NO: 4328449 - DNA, 25 bp, Homo sapien
aattcttaacaattccagattgttt

SEQ ID NO: 4328450 - DNA, 25 bp, Homo sapien
gaactaatacccttataacaactgc

SEQ ID NO: 4328451 - DNA, 25 bp, Homo sapien
tctcctgagaattggatgctgccat

SEQ ID NO: 4328452 - DNA, 25 bp, Homo sapien
caccagagcagttcccatgggagct

SEQ ID NO: 4328453 - DNA, 25 bp, Homo sapien
ctgactgctaaagaaaggaactaat

SEQ ID NO: 4328454 - DNA, 25 bp, Homo sapien
gaaaagagactgatattgtgtactg

SEQ ID NO: 4328455 - DNA, 25 bp, Homo sapien
gttaattccgaacttctttcacaga

SEQ ID NO: 4328456 - DNA, 25 bp, Homo sapien
ttttcggagagccatgctgactgtg

SEQ ID NO: 4328457 - DNA, 25 bp, Homo sapien
taataccagaataattgactcctgg

SEQ ID NO: 4328458 - DNA, 25 bp, Homo sapien
tccagagagtaaagtgacaagtgaa

SEQ ID NO: 4328459 - DNA, 25 bp, Homo sapien
gaagcacgcaactcttccagagagt

SEQ ID NO: 4328460 - DNA, 25 bp, Homo sapien
tctgcaatggacagtataacagata

SEQ ID NO: 4328461 - DNA, 25 bp, Homo sapien
aatttctcagcgtctgcaatggaca

SEQ ID NO: 4328462 - DNA, 25 bp, Homo sapien
gtggcaatgccttaatagttgtcag

SEQ ID NO: 4328463 - DNA, 25 bp, Homo sapien
cacagctggactaacattggccttc

SEQ ID NO: 4328464 - DNA, 25 bp, Homo sapien
tctgatccgtggaaaatgccccttt

SEQ ID NO: 4328465 - DNA, 25 bp, Homo sapien
attggccttctctgatccgtggaaa

SEQ ID NO: 4328466 - DNA, 25 bp, Homo sapien
taccgcgtaacagaaagcagatatg

SEQ ID NO: 4328467 - DNA, 25 bp, Homo sapien
aaatctgagtacttccacaggggtg

SEQ ID NO: 4328468 - DNA, 25 bp, Homo sapien
aatctgagtacttccacaggggtga

SEQ ID NO: 4328469 - DNA, 25 bp, Homo sapien
tgagtacttccacaggggtgaagcc

SEQ ID NO: 4328470 - DNA, 25 bp, Homo sapien
tctgagtacttccacaggggtgaag

SEQ ID NO: 4328471 - DNA, 25 bp, Homo sapien
gattaaagactttatggaaccagat

SEQ ID NO: 4328472 - DNA, 25 bp, Homo sapien
tctccaaattgtagagcaattgatg

SEQ ID NO: 4328473 - DNA, 25 bp, Homo sapien
gcattttccctctgttcgtctgata

SEQ ID NO: 4328474 - DNA, 25 bp, Homo sapien
gggcagctttagaccactgactgca

SEQ ID NO: 4328475 - DNA, 25 bp, Homo sapien
gttgcttaagagcccatgcaagaac

SEQ ID NO: 4328476 - DNA, 25 bp, Homo sapien
gcttaagagcccatgcaagaacagc

SEQ ID NO: 4328477 - DNA, 25 bp, Homo sapien
tttccatgttgcttaagagcccatg

SEQ ID NO: 4328478 - DNA, 25 bp, Homo sapien
catcaaccatttttccatgttgctt

SEQ ID NO: 4328479 - DNA, 25 bp, Homo sapien
taagaccattcagtggtttctccta

SEQ ID NO: 4328480 - DNA, 25 bp, Homo sapien
aagaccattcagtggtttctcctac

SEQ ID NO: 4328481 - DNA, 25 bp, Homo sapien
ttaagaccattcagtggtttctcct

SEQ ID NO: 4328482 - DNA, 25 bp, Homo sapien
ctttgtagaagtagagatcaggcac

SEQ ID NO: 4328483 - DNA, 25 bp, Homo sapien
gtcttccgtggcaggctgagcactc

SEQ ID NO: 4328484 - DNA, 25 bp, Homo sapien
agagggcacctgcacaccttcagac

SEQ ID NO: 4328485 - DNA, 25 bp, Homo sapien
gagcactccagtcttcagtagggaa

SEQ ID NO: 4328486 - DNA, 25 bp, Homo sapien
catgggtgttcatgggaaatggtgc

SEQ ID NO: 4328487 - DNA, 25 bp, Homo sapien
ctcccatgggtgttcatgggaaatg

SEQ ID NO: 4328488 - DNA, 25 bp, Homo sapien
gttcatgggaaatggtgccacgcat

SEQ ID NO: 4328489 - DNA, 25 bp, Homo sapien
gtgttcatgggaaatggtgccacgc

SEQ ID NO: 4328490 - DNA, 25 bp, Homo sapien
aaccacaagaagctgtggatctggt

SEQ ID NO: 4328491 - DNA, 25 bp, Homo sapien
ccacaagaagctgtggatctggtta

SEQ ID NO: 4328492 - DNA, 25 bp, Homo sapien
gtaaccacaagaagctgtggatctg

SEQ ID NO: 4328493 - DNA, 25 bp, Homo sapien
cacaagaagctgtggatctggttag

SEQ ID NO: 4328494 - DNA, 25 bp, Homo sapien
ggcacgagctgccaacagaagcttc

SEQ ID NO: 4328495 - DNA, 25 bp, Homo sapien
gcaacaatggcacgagctgccaaca

SEQ ID NO: 4328496 - DNA, 25 bp, Homo sapien
aggatataacactgacaacagcagg

SEQ ID NO: 4328497 - DNA, 25 bp, Homo sapien
acaatggcacgagctgccaacagaa

SEQ ID NO: 4328498 - DNA, 25 bp, Homo sapien
ttgcaggacatcaagggctccggac

SEQ ID NO: 4328499 - DNA, 25 bp, Homo sapien
ctcctccttcatttgcaggacatca

SEQ ID NO: 4328500 - DNA, 25 bp, Homo sapien
taaatgggttcctgctgtaaggaac

SEQ ID NO: 4328501 - DNA, 25 bp, Homo sapien
tgtaaggaacttaaggacatcctcc

SEQ ID NO: 4328502 - DNA, 25 bp, Homo sapien
aaggaaacctgctatggtcagcaga

SEQ ID NO: 4328503 - DNA, 25 bp, Homo sapien
aaacctgctatggtcagcagactca

SEQ ID NO: 4328504 - DNA, 25 bp, Homo sapien
taaggaaacctgctatggtcagcag

SEQ ID NO: 4328505 - DNA, 25 bp, Homo sapien
ggaaacctgctatggtcagcagact

SEQ ID NO: 4328506 - DNA, 25 bp, Homo sapien
caaataactgcaatttagaacagcc

SEQ ID NO: 4328507 - DNA, 25 bp, Homo sapien
caagtggttgtcatggaatttccct

SEQ ID NO: 4328508 - DNA, 25 bp, Homo sapien
caatttagaacagcctgtttgcgca

SEQ ID NO: 4328509 - DNA, 25 bp, Homo sapien
aatatcagcccctacactgaccaag

SEQ ID NO: 4328510 - DNA, 25 bp, Homo sapien
caccatctgatataaagtggactct

SEQ ID NO: 4328511 - DNA, 25 bp, Homo sapien
taaagtggactctggtaaaatgctt

SEQ ID NO: 4328512 - DNA, 25 bp, Homo sapien
cacaaaagccaccatctgatataaa

SEQ ID NO: 4328513 - DNA, 25 bp, Homo sapien
tctggtaaaatgcttattggtgcta

SEQ ID NO: 4328514 - DNA, 25 bp, Homo sapien
tcatccactagtggtttggttgtta

SEQ ID NO: 4328515 - DNA, 25 bp, Homo sapien
gcagctggtgacaccctttgttttt

SEQ ID NO: 4328516 - DNA, 25 bp, Homo sapien
tggtcattaaatcatccactagtgg

SEQ ID NO: 4328517 - DNA, 25 bp, Homo sapien
cagctggtgacaccctttgtttttc

SEQ ID NO: 4328518 - DNA, 25 bp, Homo sapien
ccagggcagtattggtactggtgcc

SEQ ID NO: 4328519 - DNA, 25 bp, Homo sapien
ccttgtctgatgagtggcccctatg

SEQ ID NO: 4328520 - DNA, 25 bp, Homo sapien
gcccctatgaagaggccatgaagtt

SEQ ID NO: 4328521 - DNA, 25 bp, Homo sapien
tactggtgcctaggttgcagacacc

SEQ ID NO: 4328522 - DNA, 25 bp, Homo sapien
taggcagatccagtgtaaccacaga

SEQ ID NO: 4328523 - DNA, 25 bp, Homo sapien
taaccacagagttcaggtctggatg

SEQ ID NO: 4328524 - DNA, 25 bp, Homo sapien
caaagctctgttggtgctcactggg

SEQ ID NO: 4328525 - DNA, 25 bp, Homo sapien
actgggcccatgctgggttcggaaa

SEQ ID NO: 4328526 - DNA, 25 bp, Homo sapien
ggtgctatatcacgttaacagaatg

SEQ ID NO: 4328527 - DNA, 25 bp, Homo sapien
gctaacattaatgccagacaaagat

SEQ ID NO: 4328528 - DNA, 25 bp, Homo sapien
tataagccaataaccctcctgaaaa

SEQ ID NO: 4328529 - DNA, 25 bp, Homo sapien
aaatcaataaaggtgctatatcacg

SEQ ID NO: 4328530 - DNA, 25 bp, Homo sapien
ttcctgtccagtcattgcttatcac

SEQ ID NO: 4328531 - DNA, 25 bp, Homo sapien
tcttcctgtccagtcattgcttatc

SEQ ID NO: 4328532 - DNA, 25 bp, Homo sapien
tcactgtcactgcatggtcaaataa

SEQ ID NO: 4328533 - DNA, 25 bp, Homo sapien
cttcctgtccagtcattgcttatca

SEQ ID NO: 4328534 - DNA, 25 bp, Homo sapien
caaaggcccttaggcaagatcatgg

SEQ ID NO: 4328535 - DNA, 25 bp, Homo sapien
aagtggaagtacatgagcagttagc

SEQ ID NO: 4328536 - DNA, 25 bp, Homo sapien
taataggttaatcaaggtaagtctc

SEQ ID NO: 4328537 - DNA, 25 bp, Homo sapien
aagtctccttgggtggttgagcaaa

SEQ ID NO: 4328538 - DNA, 25 bp, Homo sapien
tctcctcaggatttgccgcagcatg

SEQ ID NO: 4328539 - DNA, 25 bp, Homo sapien
tctttttactggcattctgaagggc

SEQ ID NO: 4328540 - DNA, 25 bp, Homo sapien
taaggctgggcaattttacaggacc

SEQ ID NO: 4328541 - DNA, 25 bp, Homo sapien
aaccctacagtgtttgctgctgcga

SEQ ID NO: 4328542 - DNA, 25 bp, Homo sapien
ggacccaatactgagtactttcaca

SEQ ID NO: 4328543 - DNA, 25 bp, Homo sapien
cagaagagttaccatcataaggacc

SEQ ID NO: 4328544 - DNA, 25 bp, Homo sapien
tctattgtgtcatccaccagaagag

SEQ ID NO: 4328545 - DNA, 25 bp, Homo sapien
tctgtgaatggatctattgtgtcat

SEQ ID NO: 4328546 - DNA, 25 bp, Homo sapien
tactttgaaacagctatactatttt

SEQ ID NO: 4328547 - DNA, 25 bp, Homo sapien
tgtttttactttgaaacagctatac

SEQ ID NO: 4328548 - DNA, 25 bp, Homo sapien
ttactttgaaacagctatactattt

SEQ ID NO: 4328549 - DNA, 25 bp, Homo sapien
tttttactttgaaacagctatacta

SEQ ID NO: 4328550 - DNA, 25 bp, Homo sapien
gatgccttacctgggagtgtgcttc

SEQ ID NO: 4328551 - DNA, 25 bp, Homo sapien
taataacaggctcgatgactcagga

SEQ ID NO: 4328552 - DNA, 25 bp, Homo sapien
tcacggtcaattagctcaagaaaac

SEQ ID NO: 4328553 - DNA, 25 bp, Homo sapien
tgaagatatggctaactaggctccc

SEQ ID NO: 4328554 - DNA, 25 bp, Homo sapien
caaatgtggttgtaacctgttacct

SEQ ID NO: 4328555 - DNA, 25 bp, Homo sapien
cagcaatataaactttgaaacctgg

SEQ ID NO: 4328556 - DNA, 25 bp, Homo sapien
catccttgaggatatttgccaccac

SEQ ID NO: 4328557 - DNA, 25 bp, Homo sapien
gataatatcccgcacctgggttgga

SEQ ID NO: 4328558 - DNA, 25 bp, Homo sapien
actaagtgcttgtgtagatctttcc

SEQ ID NO: 4328559 - DNA, 25 bp, Homo sapien
tatgagtaaggggtcaagacacatg

SEQ ID NO: 4328560 - DNA, 25 bp, Homo sapien
cacatgggagcagaaaagtttcaaa

SEQ ID NO: 4328561 - DNA, 25 bp, Homo sapien
aaagtttcaaaactaagtgcttgtg

SEQ ID NO: 4328562 - DNA, 25 bp, Homo sapien
tccaacagtacaaagccttgttcca

SEQ ID NO: 4328563 - DNA, 25 bp, Homo sapien
tatctgaaacctgtattcttccaac

SEQ ID NO: 4328564 - DNA, 25 bp, Homo sapien
actggtcacatttccagtgattcca

SEQ ID NO: 4328565 - DNA, 25 bp, Homo sapien
atactggtcacatttccagtgattc

SEQ ID NO: 4328566 - DNA, 25 bp, Homo sapien
ttctttcttatgcagatactctgca

SEQ ID NO: 4328567 - DNA, 25 bp, Homo sapien
tcttatgcagatactctgcacattt

SEQ ID NO: 4328568 - DNA, 25 bp, Homo sapien
tttcttatgcagatactctgcacat

SEQ ID NO: 4328569 - DNA, 25 bp, Homo sapien
tatgcagatactctgcacatttatt

SEQ ID NO: 4328570 - DNA, 25 bp, Homo sapien
cagctctctatctctttgacaggca

SEQ ID NO: 4328571 - DNA, 25 bp, Homo sapien
agctctctatctctttgacaggcaa

SEQ ID NO: 4328572 - DNA, 25 bp, Homo sapien
gctctctatctctttgacaggcaaa

SEQ ID NO: 4328573 - DNA, 25 bp, Homo sapien
gaaagctctatcgatttcaagtggc

SEQ ID NO: 4328574 - DNA, 25 bp, Homo sapien
tcaagtggctacacgttttgctgag

SEQ ID NO: 4328575 - DNA, 25 bp, Homo sapien
tctggttttgccgggccaggtctca

SEQ ID NO: 4328576 - DNA, 25 bp, Homo sapien
aggaacaatgacatacagagagaac

SEQ ID NO: 4328577 - DNA, 25 bp, Homo sapien
cctttcttctgggaggcttctgctt

SEQ ID NO: 4328578 - DNA, 25 bp, Homo sapien
tcttctgggaggcttctgcttccta

SEQ ID NO: 4328579 - DNA, 25 bp, Homo sapien
tctgggaggcttctgcttcctagac

SEQ ID NO: 4328580 - DNA, 25 bp, Homo sapien
ctttcttctgggaggcttctgcttc

SEQ ID NO: 4328581 - DNA, 25 bp, Homo sapien
cagcttaggaaactgccaaagcaga

SEQ ID NO: 4328582 - DNA, 25 bp, Homo sapien
atgccaaggatgtcactgcaggaga

SEQ ID NO: 4328583 - DNA, 25 bp, Homo sapien
ttaggaaactgccaaagcagagtgg

SEQ ID NO: 4328584 - DNA, 25 bp, Homo sapien
caaggatgtcactgcaggagaagag

SEQ ID NO: 4328585 - DNA, 25 bp, Homo sapien
acattcctgatgcatcacaccggaa

SEQ ID NO: 4328586 - DNA, 25 bp, Homo sapien
cctgatgcatcacaccggaaccctc

SEQ ID NO: 4328587 - DNA, 25 bp, Homo sapien
attcctgatgcatcacaccggaacc

SEQ ID NO: 4328588 - DNA, 25 bp, Homo sapien
tgatgcatcacaccggaaccctctt

SEQ ID NO: 4328589 - DNA, 25 bp, Homo sapien
tgtggccttcttatgatgcctatac

SEQ ID NO: 4328590 - DNA, 25 bp, Homo sapien
cttatgatgcctatactttttgagg

SEQ ID NO: 4328591 - DNA, 25 bp, Homo sapien
ctcatggagaaggtcaggagtatct

SEQ ID NO: 4328592 - DNA, 25 bp, Homo sapien
tgaggagtgggtctagctttctcct

SEQ ID NO: 4328593 - DNA, 25 bp, Homo sapien
tcagagggtctttttcccgtagatg

SEQ ID NO: 4328594 - DNA, 25 bp, Homo sapien
cagagggtctttttcccgtagatga

SEQ ID NO: 4328595 - DNA, 25 bp, Homo sapien
tgtgaaacctcagccacacgactct

SEQ ID NO: 4328596 - DNA, 25 bp, Homo sapien
ggcgggatcatgtgaaacctcagcc

SEQ ID NO: 4328597 - DNA, 25 bp, Homo sapien
cttgggatagagattggagattccc

SEQ ID NO: 4328598 - DNA, 25 bp, Homo sapien
tacctccagaaagagagtcctcagg

SEQ ID NO: 4328599 - DNA, 25 bp, Homo sapien
tttgacccactatggtgaccccagc

SEQ ID NO: 4328600 - DNA, 25 bp, Homo sapien
aagtcatcgagaacatgtcttggga

SEQ ID NO: 4328601 - DNA, 25 bp, Homo sapien
aatatagccaaaggcaatatgcctg

SEQ ID NO: 4328602 - DNA, 25 bp, Homo sapien
agagaatatagccaaaggcaatatg

SEQ ID NO: 4328603 - DNA, 25 bp, Homo sapien
gaatatagccaaaggcaatatgcct

SEQ ID NO: 4328604 - DNA, 25 bp, Homo sapien
ggcaatatgcctgaaatgtgggtac

SEQ ID NO: 4328605 - DNA, 25 bp, Homo sapien
tttgccaacaggtcttttctccatg

SEQ ID NO: 4328606 - DNA, 25 bp, Homo sapien
tccagttagggttctctttgccaag

SEQ ID NO: 4328607 - DNA, 25 bp, Homo sapien
gagacatgggcaatgttagccctaa

SEQ ID NO: 4328608 - DNA, 25 bp, Homo sapien
taaatcacccacctattgagatgca

SEQ ID NO: 4328609 - DNA, 25 bp, Homo sapien
cactttgtgagctagtattaggcct

SEQ ID NO: 4328610 - DNA, 25 bp, Homo sapien
ccaatgtaggtttctgatatgttcc

SEQ ID NO: 4328611 - DNA, 25 bp, Homo sapien
tgggttgactgaaacttaatagcct

SEQ ID NO: 4328612 - DNA, 25 bp, Homo sapien
gggtatataattcttcaggcaaggg

SEQ ID NO: 4328613 - DNA, 25 bp, Homo sapien
caggcaagggtctgtcaatagacag

SEQ ID NO: 4328614 - DNA, 25 bp, Homo sapien
gcagctcttgtctggatccaactgg

SEQ ID NO: 4328615 - DNA, 25 bp, Homo sapien
ttcatccaaatccagaccattccta

SEQ ID NO: 4328616 - DNA, 25 bp, Homo sapien
agctggaggtccagatggctcattc

SEQ ID NO: 4328617 - DNA, 25 bp, Homo sapien
ggtccagatggctcattcctcattc

SEQ ID NO: 4328618 - DNA, 25 bp, Homo sapien
gagtccttatgggttcaatacctga

SEQ ID NO: 4328619 - DNA, 25 bp, Homo sapien
ggtatacaacttctcagtttgcgag

SEQ ID NO: 4328620 - DNA, 25 bp, Homo sapien
gacagactggctaatctgcttgagt

SEQ ID NO: 4328621 - DNA, 25 bp, Homo sapien
aagtagacgctgctgggcaaataaa

SEQ ID NO: 4328622 - DNA, 25 bp, Homo sapien
aactctctaccactagaggagaggc

SEQ ID NO: 4328623 - DNA, 25 bp, Homo sapien
ggaacaagtactgggcccagatcat

SEQ ID NO: 4328624 - DNA, 25 bp, Homo sapien
caactgtgaagatactaagaaaacc

SEQ ID NO: 4328625 - DNA, 25 bp, Homo sapien
tctctcctggaatcaaaggccttaa

SEQ ID NO: 4328626 - DNA, 25 bp, Homo sapien
cctgagtagtccaaaggatgtagtc

SEQ ID NO: 4328627 - DNA, 25 bp, Homo sapien
caaccttgctcctgagtagtccaaa

SEQ ID NO: 4328628 - DNA, 25 bp, Homo sapien
tagtccaaaggatgtagtcccatct

SEQ ID NO: 4328629 - DNA, 25 bp, Homo sapien
ttagaagtccaaccttgctcctgag

SEQ ID NO: 4328630 - DNA, 25 bp, Homo sapien
tctgagaaccgtagttaagacctcc

SEQ ID NO: 4328631 - DNA, 25 bp, Homo sapien
ccatttggaaaggagatagcttcga

SEQ ID NO: 4328632 - DNA, 25 bp, Homo sapien
tcaggcgaccgattggaggcacttc

SEQ ID NO: 4328633 - DNA, 25 bp, Homo sapien
ggcacttcggtgtaatcaacttgaa

SEQ ID NO: 4328634 - DNA, 25 bp, Homo sapien
ggaactagtgctcggtgttgcaaaa

SEQ ID NO: 4328635 - DNA, 25 bp, Homo sapien
aagtatattcctcacaccaggtagg

SEQ ID NO: 4328636 - DNA, 25 bp, Homo sapien
tgttattccccatacgggccaccaa

SEQ ID NO: 4328637 - DNA, 25 bp, Homo sapien
ttggcccacgcacggagtcacctgg

SEQ ID NO: 4328638 - DNA, 25 bp, Homo sapien
ctttactactattgaaagctccagt

SEQ ID NO: 4328639 - DNA, 25 bp, Homo sapien
tttactactattgaaagctccagta

SEQ ID NO: 4328640 - DNA, 25 bp, Homo sapien
ttgtgggcaatatgtccaaggagat

SEQ ID NO: 4328641 - DNA, 25 bp, Homo sapien
ctgtaaaggaagatgacacgttatg

SEQ ID NO: 4328642 - DNA, 25 bp, Homo sapien
agtctcctctagacaagagaaattc

SEQ ID NO: 4328643 - DNA, 25 bp, Homo sapien
tatggattccatataaccttgtggg

SEQ ID NO: 4328644 - DNA, 25 bp, Homo sapien
gcccggccaggactctttcaaagta

SEQ ID NO: 4328645 - DNA, 25 bp, Homo sapien
gccaggactctttcaaagtaaggaa

SEQ ID NO: 4328646 - DNA, 25 bp, Homo sapien
caggactctttcaaagtaaggaagg

SEQ ID NO: 4328647 - DNA, 25 bp, Homo sapien
ccggccaggactctttcaaagtaag

SEQ ID NO: 4328648 - DNA, 25 bp, Homo sapien
caacagaacatttgtgggaaacaga

SEQ ID NO: 4328649 - DNA, 25 bp, Homo sapien
agagcaagataccaacagaacattt

SEQ ID NO: 4328650 - DNA, 25 bp, Homo sapien
ccttcctgtagcctcgtagacaaca

SEQ ID NO: 4328651 - DNA, 25 bp, Homo sapien
tcgtagacaacaaatccctcaggat

SEQ ID NO: 4328652 - DNA, 25 bp, Homo sapien
catgaagtccaagggatcagaacct

SEQ ID NO: 4328653 - DNA, 25 bp, Homo sapien
gaaatacagtctacctcaaaggagg

SEQ ID NO: 4328654 - DNA, 25 bp, Homo sapien
gacaaccctaatcgtgagtcagagg

SEQ ID NO: 4328655 - DNA, 25 bp, Homo sapien
gagtctgtgcctcaggattccggag

SEQ ID NO: 4328656 - DNA, 25 bp, Homo sapien
tgtgggtcctagtcaacgtaatggg

SEQ ID NO: 4328657 - DNA, 25 bp, Homo sapien
gtttactatttacatgattacataa

SEQ ID NO: 4328658 - DNA, 25 bp, Homo sapien
tgggtcctagtcaacgtaatgggac

SEQ ID NO: 4328659 - DNA, 25 bp, Homo sapien
caagtgtgggtcctagtcaacgtaa

SEQ ID NO: 4328660 - DNA, 25 bp, Homo sapien
atatgttggaggcactgtgcctatt

SEQ ID NO: 4328661 - DNA, 25 bp, Homo sapien
gaaattaatatgaaatgtgtttacc

SEQ ID NO: 4328662 - DNA, 25 bp, Homo sapien
tgaaatgtgtttaccaaagacttaa

SEQ ID NO: 4328663 - DNA, 25 bp, Homo sapien
gaggcactgtgcctatttctgctgc

SEQ ID NO: 4328664 - DNA, 25 bp, Homo sapien
tttaagattgggcacttttattata

SEQ ID NO: 4328665 - DNA, 25 bp, Homo sapien
tagtaattgctaccttccgtgggaa

SEQ ID NO: 4328666 - DNA, 25 bp, Homo sapien
cactggctggtagtatttgcagagc

SEQ ID NO: 4328667 - DNA, 25 bp, Homo sapien
tgtgcctaggttcttgtagctgtca

SEQ ID NO: 4328668 - DNA, 25 bp, Homo sapien
tggcaggaaaaccaccactggctgg

SEQ ID NO: 4328669 - DNA, 25 bp, Homo sapien
gataattagctagtggctgcgcagt

SEQ ID NO: 4328670 - DNA, 25 bp, Homo sapien
caacaacgtgttaaagtgctatcta

SEQ ID NO: 4328671 - DNA, 25 bp, Homo sapien
agtgctatctaaacagataattagc

SEQ ID NO: 4328672 - DNA, 25 bp, Homo sapien
catttaactgagtctcaacaacgtg

SEQ ID NO: 4328673 - DNA, 25 bp, Homo sapien
gagcggggaataagtgggctgggaa

SEQ ID NO: 4328674 - DNA, 25 bp, Homo sapien
cttggcgagcggggaataagtgggc

SEQ ID NO: 4328675 - DNA, 25 bp, Homo sapien
gaagggaaggattcggagagcacag

SEQ ID NO: 4328676 - DNA, 25 bp, Homo sapien
agaagggaaggattcggagagcaca

SEQ ID NO: 4328677 - DNA, 25 bp, Homo sapien
gagacagggcttgcgcccggggatc

SEQ ID NO: 4328678 - DNA, 25 bp, Homo sapien
cccgttatcaaagtggatgaaaaga

SEQ ID NO: 4328679 - DNA, 25 bp, Homo sapien
agaaaccccgttatcaaagtggatg

SEQ ID NO: 4328680 - DNA, 25 bp, Homo sapien
gctgtgggagaaaccccgttatcaa

SEQ ID NO: 4328681 - DNA, 25 bp, Homo sapien
tctctcctcggagccgggctcctgc

SEQ ID NO: 4328682 - DNA, 25 bp, Homo sapien
tggaggcggcaaagcacaactttcc

SEQ ID NO: 4328683 - DNA, 25 bp, Homo sapien
tcctggaggcggcaaagcacaactt

SEQ ID NO: 4328684 - DNA, 25 bp, Homo sapien
gaccctgcggccgtccccgctgtgt

SEQ ID NO: 4328685 - DNA, 25 bp, Homo sapien
gagcccgatggaatgaagcctccgg

SEQ ID NO: 4328686 - DNA, 25 bp, Homo sapien
taaggtgccgggatgcacgtttgcc

SEQ ID NO: 4328687 - DNA, 25 bp, Homo sapien
tcccggtgaaacttgagctgtgagc

SEQ ID NO: 4328688 - DNA, 25 bp, Homo sapien
tgtgagcccagaaaccctagggacc

SEQ ID NO: 4328689 - DNA, 25 bp, Homo sapien
tgttgctttgctgccctctacagtc

SEQ ID NO: 4328690 - DNA, 25 bp, Homo sapien
ttgctttgctgccctctacagtcat

SEQ ID NO: 4328691 - DNA, 25 bp, Homo sapien
actgttgctttgctgccctctacag

SEQ ID NO: 4328692 - DNA, 25 bp, Homo sapien
tactgttgctttgctgccctctaca

SEQ ID NO: 4328693 - DNA, 25 bp, Homo sapien
tccagtaaggtttcacatgcatttg

SEQ ID NO: 4328694 - DNA, 25 bp, Homo sapien
gattgaggtatttgcattgaatgag

SEQ ID NO: 4328695 - DNA, 25 bp, Homo sapien
taggttgtgaaactgggaattatca

SEQ ID NO: 4328696 - DNA, 25 bp, Homo sapien
tgtggtgtacttttgagctgtagct

SEQ ID NO: 4328697 - DNA, 25 bp, Homo sapien
tctcctggacgctggatgatatagc

SEQ ID NO: 4328698 - DNA, 25 bp, Homo sapien
ctgctgtctcctggacgctggatga

SEQ ID NO: 4328699 - DNA, 25 bp, Homo sapien
gacgctggatgatatagccttgtct

SEQ ID NO: 4328700 - DNA, 25 bp, Homo sapien
gatatagccttgtctctgatactgg

SEQ ID NO: 4328701 - DNA, 25 bp, Homo sapien
aagtttatttcaattagcgtttgca

SEQ ID NO: 4328702 - DNA, 25 bp, Homo sapien
tatcttttttgcaacctttactctc

SEQ ID NO: 4328703 - DNA, 25 bp, Homo sapien
aatggccctgtatctctagcattac

SEQ ID NO: 4328704 - DNA, 25 bp, Homo sapien
gaatggtattttcctgggacgtggc

SEQ ID NO: 4328705 - DNA, 25 bp, Homo sapien
ggaaatgcccagtcctctacaactg

SEQ ID NO: 4328706 - DNA, 25 bp, Homo sapien
tgcagttcaccatccccaatatgga

SEQ ID NO: 4328707 - DNA, 25 bp, Homo sapien
tagctggaccaattattgtggagcc

SEQ ID NO: 4328708 - DNA, 25 bp, Homo sapien
cacagatttcatgggagaagataca

SEQ ID NO: 4328709 - DNA, 25 bp, Homo sapien
gaaaacccgttgcacatattgactg

SEQ ID NO: 4328710 - DNA, 25 bp, Homo sapien
caaccagatttgctagaggaaggcg

SEQ ID NO: 4328711 - DNA, 25 bp, Homo sapien
cactgtgagcctgataaaagggcca

SEQ ID NO: 4328712 - DNA, 25 bp, Homo sapien
tgaaacggcaacgattatcagccag

SEQ ID NO: 4328713 - DNA, 25 bp, Homo sapien
atgctcctgaagtttcggtaacagg

SEQ ID NO: 4328714 - DNA, 25 bp, Homo sapien
gtttcggtaacaggatatgatggaa

SEQ ID NO: 4328715 - DNA, 25 bp, Homo sapien
gatggaaattggtttgtaggaagaa

SEQ ID NO: 4328716 - DNA, 25 bp, Homo sapien
taatgctgatgcaaatccaccaccc

SEQ ID NO: 4328717 - DNA, 25 bp, Homo sapien
tgaccaattcccttggtcaaagaag

SEQ ID NO: 4328718 - DNA, 25 bp, Homo sapien
tatatctgtaaagtgaccaattccc

SEQ ID NO: 4328719 - DNA, 25 bp, Homo sapien
gaagtgaccaaaaagtcatctacat

SEQ ID NO: 4328720 - DNA, 25 bp, Homo sapien
aatggcctgatggtttattggcttc

SEQ ID NO: 4328721 - DNA, 25 bp, Homo sapien
tgacatcgaggatctagcaacagaa

SEQ ID NO: 4328722 - DNA, 25 bp, Homo sapien
gctataggagaagacggacgtttcg

SEQ ID NO: 4328723 - DNA, 25 bp, Homo sapien
tagatggttccgtaatttccaggag

SEQ ID NO: 4328724 - DNA, 25 bp, Homo sapien
gacgtttcgtggagactactttgcc

SEQ ID NO: 4328725 - DNA, 25 bp, Homo sapien
ggattttggtacattagcagtagcc

SEQ ID NO: 4328726 - DNA, 25 bp, Homo sapien
gagactttcagccaacaatctatag

SEQ ID NO: 4328727 - DNA, 25 bp, Homo sapien
aaaagacgcagagagagcatttcgg

SEQ ID NO: 4328728 - DNA, 25 bp, Homo sapien
tagtcggtaacacttgctaatggac

SEQ ID NO: 4328729 - DNA, 25 bp, Homo sapien
tctaatagccatatacaggaaagtt

SEQ ID NO: 4328730 - DNA, 25 bp, Homo sapien
gataacccacggctaaatattttgc

SEQ ID NO: 4328731 - DNA, 25 bp, Homo sapien
tacattgaaactaaagtaggctcgg

SEQ ID NO: 4328732 - DNA, 25 bp, Homo sapien
tagtattttaccacgtgcctagtag

SEQ ID NO: 4328733 - DNA, 25 bp, Homo sapien
taatacacagttagactgggttgtt

SEQ ID NO: 4328734 - DNA, 25 bp, Homo sapien
tactactttttgtgagctactttga

SEQ ID NO: 4328735 - DNA, 25 bp, Homo sapien
gctactttgattagaaatgccattg

SEQ ID NO: 4328736 - DNA, 25 bp, Homo sapien
tgtagccctagctgttaaaacccat

SEQ ID NO: 4328737 - DNA, 25 bp, Homo sapien
gatatttgtcccattcctttcttaa

SEQ ID NO: 4328738 - DNA, 25 bp, Homo sapien
aggagatatttgtcccattcctttc

SEQ ID NO: 4328739 - DNA, 25 bp, Homo sapien
ctcttaggagatatttgtcccattc

SEQ ID NO: 4328740 - DNA, 25 bp, Homo sapien
tatgtttcctcttaggagatatttg

SEQ ID NO: 4328741 - DNA, 25 bp, Homo sapien
acacccagctgtctgagcagtaatt

SEQ ID NO: 4328742 - DNA, 25 bp, Homo sapien
agcagtaatttccaattgacacccc

SEQ ID NO: 4328743 - DNA, 25 bp, Homo sapien
atttccaattgacaccccaccacca

SEQ ID NO: 4328744 - DNA, 25 bp, Homo sapien
gtaatttccaattgacaccccacca

SEQ ID NO: 4328745 - DNA, 25 bp, Homo sapien
tcatccactttatatctgcaaccat

SEQ ID NO: 4328746 - DNA, 25 bp, Homo sapien
agctctcatccactttatatctgca

SEQ ID NO: 4328747 - DNA, 25 bp, Homo sapien
tctcatccactttatatctgcaacc

SEQ ID NO: 4328748 - DNA, 25 bp, Homo sapien
ttcagctctcatccactttatatct

SEQ ID NO: 4328749 - DNA, 25 bp, Homo sapien
taaactcggggaaggatatatgtgg

SEQ ID NO: 4328750 - DNA, 25 bp, Homo sapien
tcattagaggtatttgggctgcctc

SEQ ID NO: 4328751 - DNA, 25 bp, Homo sapien
tcatatatcctccaagttctttggg

SEQ ID NO: 4328752 - DNA, 25 bp, Homo sapien
cctcgctgagggtaatcctgggcac

SEQ ID NO: 4328753 - DNA, 25 bp, Homo sapien
gctgcttcatggtcctgggaatggc

SEQ ID NO: 4328754 - DNA, 25 bp, Homo sapien
tgttgcttgttcatcaccatttgta

SEQ ID NO: 4328755 - DNA, 25 bp, Homo sapien
gcttcatggtcctgggaatggccac

SEQ ID NO: 4328756 - DNA, 25 bp, Homo sapien
ctgtgttgcttgttcatcaccattt

SEQ ID NO: 4328757 - DNA, 25 bp, Homo sapien
ttggacactattgaccaccttttct

SEQ ID NO: 4328758 - DNA, 25 bp, Homo sapien
aacccttgacattgcattgttctgg

SEQ ID NO: 4328759 - DNA, 25 bp, Homo sapien
cttggacactattgaccaccttttc

SEQ ID NO: 4328760 - DNA, 25 bp, Homo sapien
cttttcaaaacccttgacattgcat

SEQ ID NO: 4328761 - DNA, 25 bp, Homo sapien
ggatagccccaccagacaaccacag

SEQ ID NO: 4328762 - DNA, 25 bp, Homo sapien
tcaggagcgacagccaagaatattc

SEQ ID NO: 4328763 - DNA, 25 bp, Homo sapien
gaatattcggcactagcccctcttc

SEQ ID NO: 4328764 - DNA, 25 bp, Homo sapien
acaaccacagggtgacagctggcat

SEQ ID NO: 4328765 - DNA, 25 bp, Homo sapien
gacagacatcaaaatactggctctt

SEQ ID NO: 4328766 - DNA, 25 bp, Homo sapien
agacagacatcaaaatactggctct

SEQ ID NO: 4328767 - DNA, 25 bp, Homo sapien
tgcactaagctctccttgtgaccac

SEQ ID NO: 4328768 - DNA, 25 bp, Homo sapien
tctgcactaagctctccttgtgacc

SEQ ID NO: 4328769 - DNA, 25 bp, Homo sapien
actaagctctccttgtgaccactca

SEQ ID NO: 4328770 - DNA, 25 bp, Homo sapien
gcactaagctctccttgtgaccact

SEQ ID NO: 4328771 - DNA, 25 bp, Homo sapien
cattggtagcttcaaacacagctag

SEQ ID NO: 4328772 - DNA, 25 bp, Homo sapien
cttcattggtagcttcaaacacagc

SEQ ID NO: 4328773 - DNA, 25 bp, Homo sapien
ttcattggtagcttcaaacacagct

SEQ ID NO: 4328774 - DNA, 25 bp, Homo sapien
tcattggtagcttcaaacacagcta

SEQ ID NO: 4328775 - DNA, 25 bp, Homo sapien
aaaggctcccatccccgtgtgccat

SEQ ID NO: 4328776 - DNA, 25 bp, Homo sapien
taacaagtaacttataactgagagg

SEQ ID NO: 4328777 - DNA, 25 bp, Homo sapien
cagaatagtctataattgggataaa

SEQ ID NO: 4328778 - DNA, 25 bp, Homo sapien
aactgagaggatttggaaccaagtc

SEQ ID NO: 4328779 - DNA, 25 bp, Homo sapien
tcaagataagaatgggatgttacag

SEQ ID NO: 4328780 - DNA, 25 bp, Homo sapien
gggacacccggaagtctgctactga

SEQ ID NO: 4328781 - DNA, 25 bp, Homo sapien
ccttggtcaagataagaatgggatg

SEQ ID NO: 4328782 - DNA, 25 bp, Homo sapien
gagaggctctgtgcttatctccggg

SEQ ID NO: 4328783 - DNA, 25 bp, Homo sapien
ttgagctgtgaagctctatgcctct

SEQ ID NO: 4328784 - DNA, 25 bp, Homo sapien
tgttgagctgtgaagctctatgcct

SEQ ID NO: 4328785 - DNA, 25 bp, Homo sapien
gctgttgagctgtgaagctctatgc

SEQ ID NO: 4328786 - DNA, 25 bp, Homo sapien
gttgagctgtgaagctctatgcctc

SEQ ID NO: 4328787 - DNA, 25 bp, Homo sapien
acaggatgactgtgaaaataagctc

SEQ ID NO: 4328788 - DNA, 25 bp, Homo sapien
tcagggttacacagacaccttcacc

SEQ ID NO: 4328789 - DNA, 25 bp, Homo sapien
caatgttgttgtgatggaaagctct

SEQ ID NO: 4328790 - DNA, 25 bp, Homo sapien
gacagatgcttttccacctgactga

SEQ ID NO: 4328791 - DNA, 25 bp, Homo sapien
caggcagtgtggctgcaggaaactg

SEQ ID NO: 4328792 - DNA, 25 bp, Homo sapien
cagtgtggctgcaggaaactgtctt

SEQ ID NO: 4328793 - DNA, 25 bp, Homo sapien
ggcagtgtggctgcaggaaactgtc

SEQ ID NO: 4328794 - DNA, 25 bp, Homo sapien
ttaaccctcaggcagtgtggctgca

SEQ ID NO: 4328795 - DNA, 25 bp, Homo sapien
gtcaccagcaggttgctgtggtccc

SEQ ID NO: 4328796 - DNA, 25 bp, Homo sapien
taatggggactggatttcatggtgc

SEQ ID NO: 4328797 - DNA, 25 bp, Homo sapien
agctgccttagcaccaccttctaat

SEQ ID NO: 4328798 - DNA, 25 bp, Homo sapien
tgccttagcaccaccttctaatggg

SEQ ID NO: 4328799 - DNA, 25 bp, Homo sapien
gaattgtagttgctgtgtttttcct

SEQ ID NO: 4328800 - DNA, 25 bp, Homo sapien
cctgtgtttcttcccgtatttctat

SEQ ID NO: 4328801 - DNA, 25 bp, Homo sapien
cttctgaattgtagttgctgtgttt

SEQ ID NO: 4328802 - DNA, 25 bp, Homo sapien
ttacttctgaattgtagttgctgtg

SEQ ID NO: 4328803 - DNA, 25 bp, Homo sapien
ggcagccggctgtgccatcatcttc

SEQ ID NO: 4328804 - DNA, 25 bp, Homo sapien
catcatcttcgtagggggtgccagt

SEQ ID NO: 4328805 - DNA, 25 bp, Homo sapien
ccagtgtgcggggcatcgcctagca

SEQ ID NO: 4328806 - DNA, 25 bp, Homo sapien
tgtgcggggcatcgcctagcagccc

SEQ ID NO: 4328807 - DNA, 25 bp, Homo sapien
agagtcctttgtgatacagtcagtt

SEQ ID NO: 4328808 - DNA, 25 bp, Homo sapien
gagtcctttgtgatacagtcagtta

SEQ ID NO: 4328809 - DNA, 25 bp, Homo sapien
cctttgtgatacagtcagttacagc

SEQ ID NO: 4328810 - DNA, 25 bp, Homo sapien
gtcctttgtgatacagtcagttaca

SEQ ID NO: 4328811 - DNA, 25 bp, Homo sapien
atctgtatttgtttgacagccactg

SEQ ID NO: 4328812 - DNA, 25 bp, Homo sapien
gaagccatttggatggcccaggggc

SEQ ID NO: 4328813 - DNA, 25 bp, Homo sapien
aagccatttggatggcccaggggcc

SEQ ID NO: 4328814 - DNA, 25 bp, Homo sapien
tgtatttgtttgacagccactggct

SEQ ID NO: 4328815 - DNA, 25 bp, Homo sapien
ttgaagtccaaacagagatgatgcc

SEQ ID NO: 4328816 - DNA, 25 bp, Homo sapien
gtttttagtgatgtaagattctccc

SEQ ID NO: 4328817 - DNA, 25 bp, Homo sapien
gactgagtctaccagttctctggaa

SEQ ID NO: 4328818 - DNA, 25 bp, Homo sapien
tcttttgcttgaagtccaaacagag

SEQ ID NO: 4328819 - DNA, 25 bp, Homo sapien
tggtcccatccatcatgtctagact

SEQ ID NO: 4328820 - DNA, 25 bp, Homo sapien
catccatcatgtctagactctcatt

SEQ ID NO: 4328821 - DNA, 25 bp, Homo sapien
tgtctatttttggtcccatccatca

SEQ ID NO: 4328822 - DNA, 25 bp, Homo sapien
tctcatttgtcaccatcgggtagaa

SEQ ID NO: 4328823 - DNA, 25 bp, Homo sapien
tcacaataatttatctacctcagcg

SEQ ID NO: 4328824 - DNA, 25 bp, Homo sapien
atttatctacctcagcgtcagacac

SEQ ID NO: 4328825 - DNA, 25 bp, Homo sapien
taatttatctacctcagcgtcagac

SEQ ID NO: 4328826 - DNA, 25 bp, Homo sapien
caataatttatctacctcagcgtca

SEQ ID NO: 4328827 - DNA, 25 bp, Homo sapien
tgagcaaagggtgtcaggagaggaa

SEQ ID NO: 4328828 - DNA, 25 bp, Homo sapien
aagccccactttctgagcaaagggt

SEQ ID NO: 4328829 - DNA, 25 bp, Homo sapien
gaaagagctaacctccattccagcc

SEQ ID NO: 4328830 - DNA, 25 bp, Homo sapien
aagccagaccaaggtccacagaagc

SEQ ID NO: 4328831 - DNA, 25 bp, Homo sapien
tgaagaccagtgcagcaggtgtgag

SEQ ID NO: 4328832 - DNA, 25 bp, Homo sapien
acagagaggtgaagaccagtgcagc

SEQ ID NO: 4328833 - DNA, 25 bp, Homo sapien
gtgaggctggcctttgtcctgcaag

SEQ ID NO: 4328834 - DNA, 25 bp, Homo sapien
aggctggcctttgtcctgcaagaca

SEQ ID NO: 4328835 - DNA, 25 bp, Homo sapien
acagccaacacccaaatttcgacct

SEQ ID NO: 4328836 - DNA, 25 bp, Homo sapien
tagtaacactcatgatctgattaat

SEQ ID NO: 4328837 - DNA, 25 bp, Homo sapien
aaatttcgacctcattttgtggact

SEQ ID NO: 4328838 - DNA, 25 bp, Homo sapien
tattcatgatcatgtaagtagtaac

SEQ ID NO: 4328839 - DNA, 25 bp, Homo sapien
atagccgtgccagtctgcggagtgt

SEQ ID NO: 4328840 - DNA, 25 bp, Homo sapien
ctgggatagccgtgccagtctgcgg

SEQ ID NO: 4328841 - DNA, 25 bp, Homo sapien
gtctgcggagtgttgctgccacctg

SEQ ID NO: 4328842 - DNA, 25 bp, Homo sapien
tgccagtctgcggagtgttgctgcc

SEQ ID NO: 4328843 - DNA, 25 bp, Homo sapien
ctataaaggactttgagttcccagg

SEQ ID NO: 4328844 - DNA, 25 bp, Homo sapien
tataaaggactttgagttcccaggc

SEQ ID NO: 4328845 - DNA, 25 bp, Homo sapien
tctataaaggactttgagttcccag

SEQ ID NO: 4328846 - DNA, 25 bp, Homo sapien
gactaggcaagcagtaactacatct

SEQ ID NO: 4328847 - DNA, 25 bp, Homo sapien
tctggacgtccaggaagacagtcgc

SEQ ID NO: 4328848 - DNA, 25 bp, Homo sapien
tattcaccacgagtccttgcatagg

SEQ ID NO: 4328849 - DNA, 25 bp, Homo sapien
cagtgacctgaaactcatgggaagt

SEQ ID NO: 4328850 - DNA, 25 bp, Homo sapien
tatgttaccatacttgatactgtcc

SEQ ID NO: 4328851 - DNA, 25 bp, Homo sapien
ttcagccatctcaaatttgctattg

SEQ ID NO: 4328852 - DNA, 25 bp, Homo sapien
gatactgtcctatatggctctgaag

SEQ ID NO: 4328853 - DNA, 25 bp, Homo sapien
tattagtctgctgaatgggatgagc

SEQ ID NO: 4328854 - DNA, 25 bp, Homo sapien
ctggtgatttggtgcccgcaaactc

SEQ ID NO: 4328855 - DNA, 25 bp, Homo sapien
agtggacctgtcctgtcttattgga

SEQ ID NO: 4328856 - DNA, 25 bp, Homo sapien
cttattggattctatgtccagcagt

SEQ ID NO: 4328857 - DNA, 25 bp, Homo sapien
ctgctccagcactgacaaccttttt

SEQ ID NO: 4328858 - DNA, 25 bp, Homo sapien
taggtcctattccactgggcaaggg

SEQ ID NO: 4328859 - DNA, 25 bp, Homo sapien
tgtatgaggctcaccctgtctgacc

SEQ ID NO: 4328860 - DNA, 25 bp, Homo sapien
cttctgcttacaggagggtgctggg

SEQ ID NO: 4328861 - DNA, 25 bp, Homo sapien
aatgtagtttacaaaacagtatcaa

SEQ ID NO: 4328862 - DNA, 25 bp, Homo sapien
acaaatgggacgcatgtgtgttaac

SEQ ID NO: 4328863 - DNA, 25 bp, Homo sapien
caaatgggacgcatgtgtgttaact

SEQ ID NO: 4328864 - DNA, 25 bp, Homo sapien
aatcacaaatgggacgcatgtgtgt

SEQ ID NO: 4328865 - DNA, 25 bp, Homo sapien
tcacaaatgggacgcatgtgtgtta

SEQ ID NO: 4328866 - DNA, 25 bp, Homo sapien
catttgccctggtaggaatcagagg

SEQ ID NO: 4328867 - DNA, 25 bp, Homo sapien
tggcccgggacatgacaaagcattt

SEQ ID NO: 4328868 - DNA, 25 bp, Homo sapien
tgtaggacagagcatcatagatggg

SEQ ID NO: 4328869 - DNA, 25 bp, Homo sapien
cagggaaacgtcttccaaagcaggt

SEQ ID NO: 4328870 - DNA, 25 bp, Homo sapien
ccaggcttgtggctccagggtgcaa

SEQ ID NO: 4328871 - DNA, 25 bp, Homo sapien
gtggctccagggtgcaagggtcctg

SEQ ID NO: 4328872 - DNA, 25 bp, Homo sapien
aggcttgtggctccagggtgcaagg

SEQ ID NO: 4328873 - DNA, 25 bp, Homo sapien
cttgtggctccagggtgcaagggtc

SEQ ID NO: 4328874 - DNA, 25 bp, Homo sapien
tcgaggcatttcctgctcagtgcat

SEQ ID NO: 4328875 - DNA, 25 bp, Homo sapien
atcgaggcatttcctgctcagtgca

SEQ ID NO: 4328876 - DNA, 25 bp, Homo sapien
cgaggcatttcctgctcagtgcatg

SEQ ID NO: 4328877 - DNA, 25 bp, Homo sapien
tggggtcagcggcttgtaggaggga

SEQ ID NO: 4328878 - DNA, 25 bp, Homo sapien
gtgctctgaggccaccagagtgaaa

SEQ ID NO: 4328879 - DNA, 25 bp, Homo sapien
gagtgaaaagctgggagggcatctc

SEQ ID NO: 4328880 - DNA, 25 bp, Homo sapien
ccagcttctcttttggggtcagcgg

SEQ ID NO: 4328881 - DNA, 25 bp, Homo sapien
caatcaacttgttgttcatggccat

SEQ ID NO: 4328882 - DNA, 25 bp, Homo sapien
cagtattttccaatcaacttgttgt

SEQ ID NO: 4328883 - DNA, 25 bp, Homo sapien
tttccaatcaacttgttgttcatgg

SEQ ID NO: 4328884 - DNA, 25 bp, Homo sapien
gaacagtattttccaatcaacttgt

SEQ ID NO: 4328885 - DNA, 25 bp, Homo sapien
aacttcagcatgtaactgctctttt

SEQ ID NO: 4328886 - DNA, 25 bp, Homo sapien
gcagcacggattcttgggtccttct

SEQ ID NO: 4328887 - DNA, 25 bp, Homo sapien
tctgtaatacagtctttctcccttc

SEQ ID NO: 4328888 - DNA, 25 bp, Homo sapien
ctcctgtccccacccaatacttaga

SEQ ID NO: 4328889 - DNA, 25 bp, Homo sapien
gaaaacagcagcacggattcttggg

SEQ ID NO: 4328890 - DNA, 25 bp, Homo sapien
tccaaatcttcgatgatgggcggaa

SEQ ID NO: 4328891 - DNA, 25 bp, Homo sapien
tccttgaagaggaagcaccctatta

SEQ ID NO: 4328892 - DNA, 25 bp, Homo sapien
gagtcggtcctaacaaaatcttgag

SEQ ID NO: 4328893 - DNA, 25 bp, Homo sapien
ggcttttgttctacagactcactgg

SEQ ID NO: 4328894 - DNA, 25 bp, Homo sapien
tgtcttagtgcaaacatgaaactgc

SEQ ID NO: 4328895 - DNA, 25 bp, Homo sapien
ctgcttcatctggtctattgtcaaa

SEQ ID NO: 4328896 - DNA, 25 bp, Homo sapien
aggctgtgactgtcttagtgcaaac

SEQ ID NO: 4328897 - DNA, 25 bp, Homo sapien
gtgcaaacatgaaactgcttcatct

SEQ ID NO: 4328898 - DNA, 25 bp, Homo sapien
gcaacataataaggttctgagtcca

SEQ ID NO: 4328899 - DNA, 25 bp, Homo sapien
gtcacttgcactggtgagcacctga

SEQ ID NO: 4328900 - DNA, 25 bp, Homo sapien
acctgagcttgcaccacaggtagag

SEQ ID NO: 4328901 - DNA, 25 bp, Homo sapien
aaatgtccagccgtcgtcacttgca

SEQ ID NO: 4328902 - DNA, 25 bp, Homo sapien
taaacaacgctgactggctggtaca

SEQ ID NO: 4328903 - DNA, 25 bp, Homo sapien
gaagattaagctctgcttccggcag

SEQ ID NO: 4328904 - DNA, 25 bp, Homo sapien
tcgtcagctccaccaaaaccgagtg

SEQ ID NO: 4328905 - DNA, 25 bp, Homo sapien
tggaaactccaccagtacatgtgct

SEQ ID NO: 4328906 - DNA, 25 bp, Homo sapien
cagctctttctcccgctggcatgcc

SEQ ID NO: 4328907 - DNA, 25 bp, Homo sapien
cgctggcatgcctccttctcagccc

SEQ ID NO: 4328908 - DNA, 25 bp, Homo sapien
tcccgctggcatgcctccttctcag

SEQ ID NO: 4328909 - DNA, 25 bp, Homo sapien
ctctttctcccgctggcatgcctcc

SEQ ID NO: 4328910 - DNA, 25 bp, Homo sapien
tgggcatagcactcacaaaagggcc

SEQ ID NO: 4328911 - DNA, 25 bp, Homo sapien
tcagagaaccgggtgcccttgttgt

SEQ ID NO: 4328912 - DNA, 25 bp, Homo sapien
tggaaatattcccatgcctcagaga

SEQ ID NO: 4328913 - DNA, 25 bp, Homo sapien
catactggttgggatggtgcccagc

SEQ ID NO: 4328914 - DNA, 25 bp, Homo sapien
ttttcaggaccaacagagctagggc

SEQ ID NO: 4328915 - DNA, 25 bp, Homo sapien
taataaagttcccaatgcaaggtca

SEQ ID NO: 4328916 - DNA, 25 bp, Homo sapien
gggcctcactgggtcttgctcaaag

SEQ ID NO: 4328917 - DNA, 25 bp, Homo sapien
tacaagcaaaacagcccaagagtgc

SEQ ID NO: 4328918 - DNA, 25 bp, Homo sapien
caggcaaggctctggacttctctct

SEQ ID NO: 4328919 - DNA, 25 bp, Homo sapien
ggcaaggctctggacttctctctga

SEQ ID NO: 4328920 - DNA, 25 bp, Homo sapien
gcaggcaaggctctggacttctctc

SEQ ID NO: 4328921 - DNA, 25 bp, Homo sapien
aagcaggcaaggctctggacttctc

SEQ ID NO: 4328922 - DNA, 25 bp, Homo sapien
tggccagaaacatgaaaaaaaagct

SEQ ID NO: 4328923 - DNA, 25 bp, Homo sapien
gtcagaatgtctattactaaatagt

SEQ ID NO: 4328924 - DNA, 25 bp, Homo sapien
ccagtcagaatgtctattactaaat

SEQ ID NO: 4328925 - DNA, 25 bp, Homo sapien
gtggccagaaacatgaaaaaaaagc

SEQ ID NO: 4328926 - DNA, 25 bp, Homo sapien
accacatgttctcgaattttctcca

SEQ ID NO: 4328927 - DNA, 25 bp, Homo sapien
tcactgaggtggcacttttagttgc

SEQ ID NO: 4328928 - DNA, 25 bp, Homo sapien
gatgcagaaatatcattcgacccag

SEQ ID NO: 4328929 - DNA, 25 bp, Homo sapien
gacctagatgcagaaatatcattcg

SEQ ID NO: 4328930 - DNA, 25 bp, Homo sapien
ctctaggcaatatccctcgaccaaa

SEQ ID NO: 4328931 - DNA, 25 bp, Homo sapien
ccctcgaccaaatacatgtctgtgt

SEQ ID NO: 4328932 - DNA, 25 bp, Homo sapien
tcatataacctcactctcctctagg

SEQ ID NO: 4328933 - DNA, 25 bp, Homo sapien
gcaatatccctcgaccaaatacatg

SEQ ID NO: 4328934 - DNA, 25 bp, Homo sapien
ttccgtcacggagaagtaccatttg

SEQ ID NO: 4328935 - DNA, 25 bp, Homo sapien
agagacctcgtagttttccgtcacg

SEQ ID NO: 4328936 - DNA, 25 bp, Homo sapien
gatttgtctgtttgccacggtgtcc

SEQ ID NO: 4328937 - DNA, 25 bp, Homo sapien
agaagtaccatttgaaggagtaggg

SEQ ID NO: 4328938 - DNA, 25 bp, Homo sapien
cgcggtgaacatctgagtgctgact

SEQ ID NO: 4328939 - DNA, 25 bp, Homo sapien
gcttctgtggtttacggaaattgta

SEQ ID NO: 4328940 - DNA, 25 bp, Homo sapien
aaggaaggaaacatttgcggtcgcg

SEQ ID NO: 4328941 - DNA, 25 bp, Homo sapien
tgcgcgcgtgtctgaaagaaggaag

SEQ ID NO: 4328942 - DNA, 25 bp, Homo sapien
aatgcagtcgctgccgcggcgtctg

SEQ ID NO: 4328943 - DNA, 25 bp, Homo sapien
cgactggccgaagcctgcaagtttc

SEQ ID NO: 4328944 - DNA, 25 bp, Homo sapien
tccacaaatgcagtcgctgccgcgg

SEQ ID NO: 4328945 - DNA, 25 bp, Homo sapien
tatctgaggaccgactggccgaagc

SEQ ID NO: 4328946 - DNA, 25 bp, Homo sapien
tggaaggcaagagtaacggagggag

SEQ ID NO: 4328947 - DNA, 25 bp, Homo sapien
cagggaaggcgtgggagcgggacag

SEQ ID NO: 4328948 - DNA, 25 bp, Homo sapien
tggtgccgccggctgcacttctgtg

SEQ ID NO: 4328949 - DNA, 25 bp, Homo sapien
agcgctggccaatcggagcgcgctc

SEQ ID NO: 4328950 - DNA, 25 bp, Homo sapien
gacctcatgcaactcccgatctttg

SEQ ID NO: 4328951 - DNA, 25 bp, Homo sapien
caagtattccctagacccgtctggg

SEQ ID NO: 4328952 - DNA, 25 bp, Homo sapien
cataggccccggttgcttttgagca

SEQ ID NO: 4328953 - DNA, 25 bp, Homo sapien
ccatgtttaattggcgcctgtggag

SEQ ID NO: 4328954 - DNA, 25 bp, Homo sapien
gctggcagtcaagtcaagttctacc

SEQ ID NO: 4328955 - DNA, 25 bp, Homo sapien
taaaagctggcagtcaagtcaagtt

SEQ ID NO: 4328956 - DNA, 25 bp, Homo sapien
aaaagctggcagtcaagtcaagttc

SEQ ID NO: 4328957 - DNA, 25 bp, Homo sapien
aagctggcagtcaagtcaagttcta

SEQ ID NO: 4328958 - DNA, 25 bp, Homo sapien
ttcccagatgattctctgatctcat

SEQ ID NO: 4328959 - DNA, 25 bp, Homo sapien
attcccagatgattctctgatctca

SEQ ID NO: 4328960 - DNA, 25 bp, Homo sapien
tcttcattgacccagataactcaag

SEQ ID NO: 4328961 - DNA, 25 bp, Homo sapien
tctgacacattcctcttcattgacc

SEQ ID NO: 4328962 - DNA, 25 bp, Homo sapien
tcatcctttctggttaattttgtcc

SEQ ID NO: 4328963 - DNA, 25 bp, Homo sapien
tctggttaattttgtcctctatgtt

SEQ ID NO: 4328964 - DNA, 25 bp, Homo sapien
gctttgcctcgccaattacagttca

SEQ ID NO: 4328965 - DNA, 25 bp, Homo sapien
tttgcctcgccaattacagttcagt

SEQ ID NO: 4328966 - DNA, 25 bp, Homo sapien
tcgctttgcctcgccaattacagtt

SEQ ID NO: 4328967 - DNA, 25 bp, Homo sapien
cttcgctttgcctcgccaattacag

SEQ ID NO: 4328968 - DNA, 25 bp, Homo sapien
tgccaggtgaactttcaaaggttcc

SEQ ID NO: 4328969 - DNA, 25 bp, Homo sapien
caataacgtgcaaatgggaaagagg

SEQ ID NO: 4328970 - DNA, 25 bp, Homo sapien
cagtaaatcaagtccttttgccagg

SEQ ID NO: 4328971 - DNA, 25 bp, Homo sapien
gctatctcagctaaagtgttcagca

SEQ ID NO: 4328972 - DNA, 25 bp, Homo sapien
ctaggccggtgctctctgaagggcc

SEQ ID NO: 4328973 - DNA, 25 bp, Homo sapien
actgtcaaagtctgagagtggacat

SEQ ID NO: 4328974 - DNA, 25 bp, Homo sapien
taggccggtgctctctgaagggcca

SEQ ID NO: 4328975 - DNA, 25 bp, Homo sapien
atcactgtcaaagtctgagagtgga

SEQ ID NO: 4328976 - DNA, 25 bp, Homo sapien
taactcttgtctcaatcttccctcc

SEQ ID NO: 4328977 - DNA, 25 bp, Homo sapien
aactcttgtctcaatcttccctcca

SEQ ID NO: 4328978 - DNA, 25 bp, Homo sapien
cctccatggctacaagtgtggtcat

SEQ ID NO: 4328979 - DNA, 25 bp, Homo sapien
ggcaccatagcgttgtcacttacaa

SEQ ID NO: 4328980 - DNA, 25 bp, Homo sapien
ctccctggtgtttggcaccatagcg

SEQ ID NO: 4328981 - DNA, 25 bp, Homo sapien
ttccaggatatcttggccctctgcc

SEQ ID NO: 4328982 - DNA, 25 bp, Homo sapien
gctgctccctggtgtttggcaccat

SEQ ID NO: 4328983 - DNA, 25 bp, Homo sapien
cttgatcctcactgggcatttgcac

SEQ ID NO: 4328984 - DNA, 25 bp, Homo sapien
tctaggacctccatgaagtataagg

SEQ ID NO: 4328985 - DNA, 25 bp, Homo sapien
ccaacaacttgtgagtgtagaacta

SEQ ID NO: 4328986 - DNA, 25 bp, Homo sapien
ctggaagaaaacattaggctgcctt

SEQ ID NO: 4328987 - DNA, 25 bp, Homo sapien
gcaggactagcagtctgtcctggtg

SEQ ID NO: 4328988 - DNA, 25 bp, Homo sapien
tagcagtctgtcctggtgtgtaatg

SEQ ID NO: 4328989 - DNA, 25 bp, Homo sapien
ggtgtgtaatgattggctagaccag

SEQ ID NO: 4328990 - DNA, 25 bp, Homo sapien
taatgattggctagaccaggcggct

SEQ ID NO: 4328991 - DNA, 25 bp, Homo sapien
ctggctgcaagcaagttgctgcctg

SEQ ID NO: 4328992 - DNA, 25 bp, Homo sapien
ctgcaagcaagttgctgcctgtgac

SEQ ID NO: 4328993 - DNA, 25 bp, Homo sapien
gcaagttgctgcctgtgaccacagt

SEQ ID NO: 4328994 - DNA, 25 bp, Homo sapien
caagcaagttgctgcctgtgaccac

SEQ ID NO: 4328995 - DNA, 25 bp, Homo sapien
tgttaatgtgtcttcccaacatccc

SEQ ID NO: 4328996 - DNA, 25 bp, Homo sapien
tgtgttaatgtgtcttcccaacatc

SEQ ID NO: 4328997 - DNA, 25 bp, Homo sapien
ttaatgtgtcttcccaacatcccac

SEQ ID NO: 4328998 - DNA, 25 bp, Homo sapien
cactctcttcagcaatcgctggaac

SEQ ID NO: 4328999 - DNA, 25 bp, Homo sapien
cctctgtagcaaaggcatgggcaac

SEQ ID NO: 4329000 - DNA, 25 bp, Homo sapien
cactctatgtacaaagcttgtggct

SEQ ID NO: 4329001 - DNA, 25 bp, Homo sapien
caaacctgatgataccaatgccact

SEQ ID NO: 4329002 - DNA, 25 bp, Homo sapien
gaaatgctcctctgaagctatagtc

SEQ ID NO: 4329003 - DNA, 25 bp, Homo sapien
gccatcattttcattaaccaaaacg

SEQ ID NO: 4329004 - DNA, 25 bp, Homo sapien
atgccatcattttcattaaccaaaa

SEQ ID NO: 4329005 - DNA, 25 bp, Homo sapien
tgccatcattttcattaaccaaaac

SEQ ID NO: 4329006 - DNA, 25 bp, Homo sapien
cctaatgctaaccaccaagtaccag

SEQ ID NO: 4329007 - DNA, 25 bp, Homo sapien
caccaagtaccagctggcaccttta

SEQ ID NO: 4329008 - DNA, 25 bp, Homo sapien
atagtcctaatgctaaccaccaagt

SEQ ID NO: 4329009 - DNA, 25 bp, Homo sapien
gctaaccaccaagtaccagctggca

SEQ ID NO: 4329010 - DNA, 25 bp, Homo sapien
tccaaacctctgctgagagcacgaa

SEQ ID NO: 4329011 - DNA, 25 bp, Homo sapien
caaacctctgctgagagcacgaaga

SEQ ID NO: 4329012 - DNA, 25 bp, Homo sapien
aaacctctgctgagagcacgaagaa

SEQ ID NO: 4329013 - DNA, 25 bp, Homo sapien
cctctgctgagagcacgaagaagca

SEQ ID NO: 4329014 - DNA, 25 bp, Homo sapien
tcttgcttctgcgatgtgtatacag

SEQ ID NO: 4329015 - DNA, 25 bp, Homo sapien
ttagttcattcatagcactgcttgg

SEQ ID NO: 4329016 - DNA, 25 bp, Homo sapien
tttgtgttggactgcgggactcatc

SEQ ID NO: 4329017 - DNA, 25 bp, Homo sapien
cctttagaactaagtcggccaggtg

SEQ ID NO: 4329018 - DNA, 25 bp, Homo sapien
gatgggacgtgaacaaatccttcat

SEQ ID NO: 4329019 - DNA, 25 bp, Homo sapien
ggaactgacactgttgatgaaattt

SEQ ID NO: 4329020 - DNA, 25 bp, Homo sapien
tatacacggcattgattcagaaagg

SEQ ID NO: 4329021 - DNA, 25 bp, Homo sapien
tatcacacaagatgggacgtgaaca

SEQ ID NO: 4329022 - DNA, 25 bp, Homo sapien
caagaatccttgcatgtctcccagc

SEQ ID NO: 4329023 - DNA, 25 bp, Homo sapien
tgcaagaatccttgcatgtctccca

SEQ ID NO: 4329024 - DNA, 25 bp, Homo sapien
gcaagaatccttgcatgtctcccag

SEQ ID NO: 4329025 - DNA, 25 bp, Homo sapien
ctgcaagaatccttgcatgtctccc

SEQ ID NO: 4329026 - DNA, 25 bp, Homo sapien
tgaagattttgccaggatatgccgt

SEQ ID NO: 4329027 - DNA, 25 bp, Homo sapien
cccagagggctggtcaaggatctga

SEQ ID NO: 4329028 - DNA, 25 bp, Homo sapien
ggatctgaccacctgcagagaagaa

SEQ ID NO: 4329029 - DNA, 25 bp, Homo sapien
actaaacagtgattggtacgaagcc

SEQ ID NO: 4329030 - DNA, 25 bp, Homo sapien
aagctgccgtaacagcaggtaccag

SEQ ID NO: 4329031 - DNA, 25 bp, Homo sapien
gggaaagctgccgtaacagcaggta

SEQ ID NO: 4329032 - DNA, 25 bp, Homo sapien
gaaagctgccgtaacagcaggtacc

SEQ ID NO: 4329033 - DNA, 25 bp, Homo sapien
gctgccgtaacagcaggtaccagga

SEQ ID NO: 4329034 - DNA, 25 bp, Homo sapien
tatttgcaacttgttgtttgatgcc

SEQ ID NO: 4329035 - DNA, 25 bp, Homo sapien
tgtggtaaccccatatgcatcatat

SEQ ID NO: 4329036 - DNA, 25 bp, Homo sapien
accccatatgcatcatatttgcaac

SEQ ID NO: 4329037 - DNA, 25 bp, Homo sapien
tttgcaacttgttgtttgatgccat

SEQ ID NO: 4329038 - DNA, 25 bp, Homo sapien
tcaaagaggacacatgggagatagg

SEQ ID NO: 4329039 - DNA, 25 bp, Homo sapien
acagccacggccaagaagaaaggac

SEQ ID NO: 4329040 - DNA, 25 bp, Homo sapien
ggcagcgtacccaatctattctggg

SEQ ID NO: 4329041 - DNA, 25 bp, Homo sapien
gggtgaatccaacctgattgcatgt

SEQ ID NO: 4329042 - DNA, 25 bp, Homo sapien
catacatcttgaagtcttgggaaat

SEQ ID NO: 4329043 - DNA, 25 bp, Homo sapien
ttccatacatcttgaagtcttggga

SEQ ID NO: 4329044 - DNA, 25 bp, Homo sapien
tacatcttgaagtcttgggaaatcc

SEQ ID NO: 4329045 - DNA, 25 bp, Homo sapien
ccatacatcttgaagtcttgggaaa

SEQ ID NO: 4329046 - DNA, 25 bp, Homo sapien
gcagcagtgccattagcagcacata

SEQ ID NO: 4329047 - DNA, 25 bp, Homo sapien
gagtactcaaccaggacagcttcca
